United States Patent Application Publication US 2014/0004565 A1 - sequence listing, part 6

SEQ ID NO: 9911 - RNA, 19 nt, Artificial Sequence
  Description of Artificial Sequence: Synthetic oligonucleotide
cuuuuggugaucgaggguc

SEQ ID NO: 9912 - RNA, 19 nt, Artificial Sequence
  Description of Artificial Sequence: Synthetic oligonucleotide
uaggaauacgcaaccugcc

SEQ ID NO: 9913 - RNA, 19 nt, Artificial Sequence
  Description of Artificial Sequence: Synthetic oligonucleotide
uguaaguguauugaggauu

SEQ ID NO: 9914 - RNA, 19 nt, Artificial Sequence
  Description of Artificial Sequence: Synthetic oligonucleotide
auacuuuaugcgccauuac

SEQ ID NO: 9915 - RNA, 19 nt, Artificial Sequence
  Description of Artificial Sequence: Synthetic oligonucleotide
gaaguaugugagauuuggg

SEQ ID NO: 9916 - RNA, 19 nt, Artificial Sequence
  Description of Artificial Sequence: Synthetic oligonucleotide
ccaacuagccacaagguag

SEQ ID NO: 9917 - RNA, 19 nt, Artificial Sequence
  Description of Artificial Sequence: Synthetic oligonucleotide
caauagaguaaucaugcca

SEQ ID NO: 9918 - RNA, 19 nt, Artificial Sequence
  Description of Artificial Sequence: Synthetic oligonucleotide
uggcucaaaagaauuaguu

SEQ ID NO: 9919 - RNA, 19 nt, Artificial Sequence
  Description of Artificial Sequence: Synthetic oligonucleotide
agaacgagcgaagaguuca

SEQ ID NO: 9920 - RNA, 19 nt, Artificial Sequence
  Description of Artificial Sequence: Synthetic oligonucleotide
ucaaacgaucaaagcaaga

SEQ ID NO: 9921 - RNA, 19 nt, Artificial Sequence
  Description of Artificial Sequence: Synthetic oligonucleotide
aauacucgaaccauucgaa

SEQ ID NO: 9922 - RNA, 19 nt, Artificial Sequence
  Description of Artificial Sequence: Synthetic oligonucleotide
aggauuaccauugauugaa

SEQ ID NO: 9923 - RNA, 19 nt, Artificial Sequence
  Description of Artificial Sequence: Synthetic oligonucleotide
gagacaggugaucuugccc

SEQ ID NO: 9924 - RNA, 19 nt, Artificial Sequence
  Description of Artificial Sequence: Synthetic oligonucleotide
uauuuaauuggaggaccag

SEQ ID NO: 9925 - RNA, 19 nt, Artificial Sequence
  Description of Artificial Sequence: Synthetic oligonucleotide
uggagaacgagcgaagagu

SEQ ID NO: 9926 - RNA, 19 nt, Artificial Sequence
  Description of Artificial Sequence: Synthetic oligonucleotide
caugcgauugugcaugaac

SEQ ID NO: 9927 - RNA, 19 nt, Artificial Sequence
  Description of Artificial Sequence: Synthetic oligonucleotide
uggcauacaaucucaugcu

SEQ ID NO: 9928 - RNA, 19 nt, Artificial Sequence
  Description of Artificial Sequence: Synthetic oligonucleotide
ugagauuguuagcccaucu

SEQ ID NO: 9929 - RNA, 19 nt, Artificial Sequence
  Description of Artificial Sequence: Synthetic oligonucleotide
gagaauacaucgucgaacu

SEQ ID NO: 9930 - RNA, 19 nt, Artificial Sequence
  Description of Artificial Sequence: Synthetic oligonucleotide
ucgacaauucacagcuuug

SEQ ID NO: 9931 - RNA, 19 nt, Artificial Sequence
  Description of Artificial Sequence: Synthetic oligonucleotide
aauacaucgucgaacugaa

SEQ ID NO: 9932 - RNA, 19 nt, Artificial Sequence
  Description of Artificial Sequence: Synthetic oligonucleotide
uuaagaaggaaagcuccga

SEQ ID NO: 9933 - RNA, 19 nt, Artificial Sequence
  Description of Artificial Sequence: Synthetic oligonucleotide
aaagauagucuaauccuau

SEQ ID NO: 9934 - RNA, 19 nt, Artificial Sequence
  Description of Artificial Sequence: Synthetic oligonucleotide
gcauauuggagcuuauuug

SEQ ID NO: 9935 - RNA, 19 nt, Artificial Sequence
  Description of Artificial Sequence: Synthetic oligonucleotide
aaguuaagccguucuugga

SEQ ID NO: 9936 - RNA, 19 nt, Artificial Sequence
  Description of Artificial Sequence: Synthetic oligonucleotide
cuauaaagcgaucuaucca

SEQ ID NO: 9937 - RNA, 19 nt, Artificial Sequence
  Description of Artificial Sequence: Synthetic oligonucleotide
ucacuaugggcuagauucc

SEQ ID NO: 9938 - RNA, 19 nt, Artificial Sequence
  Description of Artificial Sequence: Synthetic oligonucleotide
aauacgcaaccugccaaag

SEQ ID NO: 9939 - RNA, 19 nt, Artificial Sequence
  Description of Artificial Sequence: Synthetic oligonucleotide
aguuugugggucauaaucu

SEQ ID NO: 9940 - RNA, 19 nt, Artificial Sequence
  Description of Artificial Sequence: Synthetic oligonucleotide
aucuauagcuucaaaguga

SEQ ID NO: 9941 - RNA, 19 nt, Artificial Sequence
  Description of Artificial Sequence: Synthetic oligonucleotide
accaaaaccgaacauucuu

SEQ ID NO: 9942 - RNA, 19 nt, Artificial Sequence
  Description of Artificial Sequence: Synthetic oligonucleotide
uuggcuacacuaacuugug

SEQ ID NO: 9943 - RNA, 19 nt, Artificial Sequence
  Description of Artificial Sequence: Synthetic oligonucleotide
uggguauaguaugacacac

SEQ ID NO: 9944 - RNA, 19 nt, Artificial Sequence
  Description of Artificial Sequence: Synthetic oligonucleotide
cuguauauggcuguccaug

SEQ ID NO: 9945 - RNA, 19 nt, Artificial Sequence
  Description of Artificial Sequence: Synthetic oligonucleotide
cacuuaguaagcucuacca

SEQ ID NO: 9946 - RNA, 19 nt, Artificial Sequence
  Description of Artificial Sequence: Synthetic oligonucleotide
acuuaguaagcucuaccaa

SEQ ID NO: 9947 - RNA, 19 nt, Artificial Sequence
  Description of Artificial Sequence: Synthetic oligonucleotide
cuuaaguugucauaagccu

SEQ ID NO: 9948 - RNA, 19 nt, Artificial Sequence
  Description of Artificial Sequence: Synthetic oligonucleotide
ugccgauggguauaguaug

SEQ ID NO: 9949 - RNA, 19 nt, Artificial Sequence
  Description of Artificial Sequence: Synthetic oligonucleotide
cuaggguuuaagaaggaaa

SEQ ID NO: 9950 - RNA, 19 nt, Artificial Sequence
  Description of Artificial Sequence: Synthetic oligonucleotide
ucaccgaaaggauuuggaa

SEQ ID NO: 9951 - RNA, 19 nt, Artificial Sequence
  Description of Artificial Sequence: Synthetic oligonucleotide
ugcaagugucauucuagca

SEQ ID NO: 9952 - RNA, 19 nt, Artificial Sequence
  Description of Artificial Sequence: Synthetic oligonucleotide
acgagcgaagaguucaucu

SEQ ID NO: 9953 - RNA, 19 nt, Artificial Sequence
  Description of Artificial Sequence: Synthetic oligonucleotide
cugaguuugacucaaauuu

SEQ ID NO: 9954 - RNA, 19 nt, Artificial Sequence
  Description of Artificial Sequence: Synthetic oligonucleotide
gcuuuaaugcgauugagaa

SEQ ID NO: 9955 - RNA, 19 nt, Artificial Sequence
  Description of Artificial Sequence: Synthetic oligonucleotide
cuuaguaagugaucacuca

SEQ ID NO: 9956 - RNA, 19 nt, Artificial Sequence
  Description of Artificial Sequence: Synthetic oligonucleotide
aucuaguauuuugauauga

SEQ ID NO: 9957 - RNA, 19 nt, Artificial Sequence
  Description of Artificial Sequence: Synthetic oligonucleotide
uugagaauacaucgucgaa

SEQ ID NO: 9958 - RNA, 19 nt, Artificial Sequence
  Description of Artificial Sequence: Synthetic oligonucleotide
ugacuauaucuacuuccca

SEQ ID NO: 9959 - RNA, 19 nt, Artificial Sequence
  Description of Artificial Sequence: Synthetic oligonucleotide
agauaagacagugaauaaa

SEQ ID NO: 9960 - RNA, 19 nt, Artificial Sequence
  Description of Artificial Sequence: Synthetic oligonucleotide
ucugccgugagccacucuu

SEQ ID NO: 9961 - RNA, 19 nt, Artificial Sequence
  Description of Artificial Sequence: Synthetic oligonucleotide
uccucguaccuucaaacua

SEQ ID NO: 9962 - RNA, 19 nt, Artificial Sequence
  Description of Artificial Sequence: Synthetic oligonucleotide
aauacuaaucauagugauu

SEQ ID NO: 9963 - RNA, 19 nt, Artificial Sequence
  Description of Artificial Sequence: Synthetic oligonucleotide
agcuuauuuguguaaguuu

SEQ ID NO: 9964 - RNA, 19 nt, Artificial Sequence
  Description of Artificial Sequence: Synthetic oligonucleotide
gccauuugauguuucauug

SEQ ID NO: 9965 - RNA, 19 nt, Artificial Sequence
  Description of Artificial Sequence: Synthetic oligonucleotide
ucucccggaucaaucagcu

SEQ ID NO: 9966 - RNA, 19 nt, Artificial Sequence
  Description of Artificial Sequence: Synthetic oligonucleotide
ucuaccacauuuuguugaa

SEQ ID NO: 9967 - RNA, 19 nt, Artificial Sequence
  Description of Artificial Sequence: Synthetic oligonucleotide
accauuacacguaagcagu

SEQ ID NO: 9968 - RNA, 19 nt, Artificial Sequence
  Description of Artificial Sequence: Synthetic oligonucleotide
acagcggauuagcugugac

SEQ ID NO: 9969 - RNA, 19 nt, Artificial Sequence
  Description of Artificial Sequence: Synthetic oligonucleotide
acacgaaacuauuggugug

SEQ ID NO: 9970 - RNA, 19 nt, Artificial Sequence
  Description of Artificial Sequence: Synthetic oligonucleotide
gcaacuauaaucuaguauu

SEQ ID NO: 9971 - RNA, 19 nt, Artificial Sequence
  Description of Artificial Sequence: Synthetic oligonucleotide
augaggauuaaagacuuaa

SEQ ID NO: 9972 - RNA, 19 nt, Artificial Sequence
  Description of Artificial Sequence: Synthetic oligonucleotide
uagaacgcuggauuguguc

SEQ ID NO: 9973 - RNA, 19 nt, Artificial Sequence
  Description of Artificial Sequence: Synthetic oligonucleotide
gagauuguuagcccaucuc

SEQ ID NO: 9974 - RNA, 19 nt, Artificial Sequence
  Description of Artificial Sequence: Synthetic oligonucleotide
ugguuuggaaaucgaacua

SEQ ID NO: 9975 - RNA, 19 nt, Artificial Sequence
  Description of Artificial Sequence: Synthetic oligonucleotide
ugugcgaaguucuucuaua

SEQ ID NO: 9976 - RNA, 19 nt, Artificial Sequence
  Description of Artificial Sequence: Synthetic oligonucleotide
cuuccgaacacuucucuca

SEQ ID NO: 9977 - RNA, 19 nt, Artificial Sequence
  Description of Artificial Sequence: Synthetic oligonucleotide
auauuuaauuggaggacca

SEQ ID NO: 9978 - RNA, 19 nt, Artificial Sequence
  Description of Artificial Sequence: Synthetic oligonucleotide
augugcuagaucuuacgaa

SEQ ID NO: 9979 - RNA, 19 nt, Artificial Sequence
  Description of Artificial Sequence: Synthetic oligonucleotide
uuuaccacggaaagcucuu

SEQ ID NO: 9980 - RNA, 19 nt, Artificial Sequence
  Description of Artificial Sequence: Synthetic oligonucleotide
gaucaccgaaaggauuugg

SEQ ID NO: 9981 - RNA, 19 nt, Artificial Sequence
  Description of Artificial Sequence: Synthetic oligonucleotide
uuuauuccacccagagauc

SEQ ID NO: 9982 - RNA, 19 nt, Artificial Sequence
  Description of Artificial Sequence: Synthetic oligonucleotide
cauaaagguagcagguaca

SEQ ID NO: 9983 - RNA, 19 nt, Artificial Sequence
  Description of Artificial Sequence: Synthetic oligonucleotide
gagcgaagaguucaucuuc

SEQ ID NO: 9984 - RNA, 19 nt, Artificial Sequence
  Description of Artificial Sequence: Synthetic oligonucleotide
ucgaaccauucgaacagcu

SEQ ID NO: 9985 - RNA, 19 nt, Artificial Sequence
  Description of Artificial Sequence: Synthetic oligonucleotide
aaugagauuguuagcccau

SEQ ID NO: 9986 - RNA, 19 nt, Artificial Sequence
  Description of Artificial Sequence: Synthetic oligonucleotide
ucggcagcaaguucuaaua

SEQ ID NO: 9987 - RNA, 19 nt, Artificial Sequence
  Description of Artificial Sequence: Synthetic oligonucleotide
uucguggaucaccaccuga

SEQ ID NO: 9988 - RNA, 19 nt, Artificial Sequence
  Description of Artificial Sequence: Synthetic oligonucleotide
cuuauguuaacagauucua

SEQ ID NO: 9989 - RNA, 19 nt, Artificial Sequence
  Description of Artificial Sequence: Synthetic oligonucleotide
uuagaacgcuggauugugu

SEQ ID NO: 9990 - RNA, 19 nt, Artificial Sequence
  Description of Artificial Sequence: Synthetic oligonucleotide
aaugacguccaugcucuga

SEQ ID NO: 9991 - RNA, 19 nt, Artificial Sequence
  Description of Artificial Sequence: Synthetic oligonucleotide
uuaaugcgauugagaauac

SEQ ID NO: 9992 - RNA, 19 nt, Artificial Sequence
  Description of Artificial Sequence: Synthetic oligonucleotide
acuaucucuuaaaacuaug

SEQ ID NO: 9993 - RNA, 19 nt, Artificial Sequence
  Description of Artificial Sequence: Synthetic oligonucleotide
ucgaaucguuuucacucca

SEQ ID NO: 9994 - RNA, 19 nt, Artificial Sequence
  Description of Artificial Sequence: Synthetic oligonucleotide
ugacucauaagcccucauu

SEQ ID NO: 9995 - RNA, 19 nt, Artificial Sequence
  Description of Artificial Sequence: Synthetic oligonucleotide
ugugauaaauuaggaucac

SEQ ID NO: 9996 - RNA, 19 nt, Artificial Sequence
  Description of Artificial Sequence: Synthetic oligonucleotide
guauaguaugacacacuag

SEQ ID NO: 9997 - RNA, 19 nt, Artificial Sequence
  Description of Artificial Sequence: Synthetic oligonucleotide
aagugaucacucaagcuua

SEQ ID NO: 9998 - RNA, 19 nt, Artificial Sequence
  Description of Artificial Sequence: Synthetic oligonucleotide
ggcggguuuaaguaaacac

SEQ ID NO: 9999 - RNA, 19 nt, Artificial Sequence
  Description of Artificial Sequence: Synthetic oligonucleotide
uaaaacgaucaugcaauau

SEQ ID NO: 10000 - RNA, 19 nt, Artificial Sequence
  Description of Artificial Sequence: Synthetic oligonucleotide
gugauuaaccuaacaucag

SEQ ID NO: 10001 - RNA, 19 nt, Artificial Sequence
  Description of Artificial Sequence: Synthetic oligonucleotide
gugauaaauuaggaucacc

SEQ ID NO: 10002 - RNA, 19 nt, Artificial Sequence
  Description of Artificial Sequence: Synthetic oligonucleotide
agcaauuugacggucucau

SEQ ID NO: 10003 - RNA, 19 nt, Artificial Sequence
  Description of Artificial Sequence: Synthetic oligonucleotide
gguauaguaugacacacua

SEQ ID NO: 10004 - RNA, 19 nt, Artificial Sequence
  Description of Artificial Sequence: Synthetic oligonucleotide
ugcaaaugacguccaugcu

SEQ ID NO: 10005 - RNA, 19 nt, Artificial Sequence
  Description of Artificial Sequence: Synthetic oligonucleotide
aucgagggucuggagaacg

SEQ ID NO: 10006 - RNA, 19 nt, Artificial Sequence
  Description of Artificial Sequence: Synthetic oligonucleotide
aauagggacgaaguucaua

SEQ ID NO: 10007 - RNA, 19 nt, Artificial Sequence
  Description of Artificial Sequence: Synthetic oligonucleotide
cauucgaacagcuuccugu

SEQ ID NO: 10008 - RNA, 19 nt, Artificial Sequence
  Description of Artificial Sequence: Synthetic oligonucleotide
agaauacaucgucgaacug

SEQ ID NO: 10009 - RNA, 19 nt, Artificial Sequence
  Description of Artificial Sequence: Synthetic oligonucleotide
gaauacgcaaccugccaaa

SEQ ID NO: 10010 - RNA, 19 nt, Artificial Sequence
  Description of Artificial Sequence: Synthetic oligonucleotide
augcgauugugcaugaacu

SEQ ID NO: 10011 - RNA, 19 nt, Artificial Sequence
  Description of Artificial Sequence: Synthetic oligonucleotide
ggcacuuuaagacuugaaa

SEQ ID NO: 10012 - RNA, 19 nt, Artificial Sequence
  Description of Artificial Sequence: Synthetic oligonucleotide
guuagcccaucucugaaaa

SEQ ID NO: 10013 - RNA, 19 nt, Artificial Sequence
  Description of Artificial Sequence: Synthetic oligonucleotide
ucacaacacagaccggcuc

SEQ ID NO: 10014 - RNA, 19 nt, Artificial Sequence
  Description of Artificial Sequence: Synthetic oligonucleotide
auuucguuaaggagcagaa

SEQ ID NO: 10015 - RNA, 19 nt, Artificial Sequence
  Description of Artificial Sequence: Synthetic oligonucleotide
aacccuccaaagauagucu

SEQ ID NO: 10016 - RNA, 19 nt, Artificial Sequence
  Description of Artificial Sequence: Synthetic oligonucleotide
ccaaaaccgaacauucuug

SEQ ID NO: 10017 - RNA, 19 nt, Artificial Sequence
  Description of Artificial Sequence: Synthetic oligonucleotide
uuuagaaacgugggaguuu

SEQ ID NO: 10018 - RNA, 19 nt, Artificial Sequence
  Description of Artificial Sequence: Synthetic oligonucleotide
uuuauagucuaggguuuaa

SEQ ID NO: 10019 - RNA, 19 nt, Artificial Sequence
  Description of Artificial Sequence: Synthetic oligonucleotide
accauugauugaagacugc

SEQ ID NO: 10020 - RNA, 19 nt, Artificial Sequence
  Description of Artificial Sequence: Synthetic oligonucleotide
guuggcuacacuaacuugu

SEQ ID NO: 10021 - RNA, 19 nt, Artificial Sequence
  Description of Artificial Sequence: Synthetic oligonucleotide
gggagcaacuauaaucuag

SEQ ID NO: 10022 - RNA, 19 nt, Artificial Sequence
  Description of Artificial Sequence: Synthetic oligonucleotide
ccucguaccuucaaacuag

SEQ ID NO: 10023 - RNA, 19 nt, Artificial Sequence
  Description of Artificial Sequence: Synthetic oligonucleotide
aggcgaugaguauuguuaa

SEQ ID NO: 10024 - RNA, 19 nt, Artificial Sequence
  Description of Artificial Sequence: Synthetic oligonucleotide
uaugcgccauuacaccauc

SEQ ID NO: 10025 - RNA, 19 nt, Artificial Sequence
  Description of Artificial Sequence: Synthetic oligonucleotide
agagcuaucaggacuugaa

SEQ ID NO: 10026 - RNA, 19 nt, Artificial Sequence
  Description of Artificial Sequence: Synthetic oligonucleotide
ugcgccauuacaccaucuu

SEQ ID NO: 10027 - RNA, 19 nt, Artificial Sequence
  Description of Artificial Sequence: Synthetic oligonucleotide
auacgcaaccugccaaaga

SEQ ID NO: 10028 - RNA, 19 nt, Artificial Sequence
  Description of Artificial Sequence: Synthetic oligonucleotide
acgaaacuauugguguguc

SEQ ID NO: 10029 - RNA, 19 nt, Artificial Sequence
  Description of Artificial Sequence: Synthetic oligonucleotide
aaccaauaugaggauuaaa

SEQ ID NO: 10030 - RNA, 19 nt, Artificial Sequence
  Description of Artificial Sequence: Synthetic oligonucleotide
uggaggcggguuuaaguaa

SEQ ID NO: 10031 - RNA, 19 nt, Artificial Sequence
  Description of Artificial Sequence: Synthetic oligonucleotide
acguuuaaugcugauccau

SEQ ID NO: 10032 - RNA, 19 nt, Artificial Sequence
  Description of Artificial Sequence: Synthetic oligonucleotide
uaugaggauuaaagacuua

SEQ ID NO: 10033 - RNA, 19 nt, Artificial Sequence
  Description of Artificial Sequence: Synthetic oligonucleotide
aaaugacguccaugcucug

SEQ ID NO: 10034 - RNA, 19 nt, Artificial Sequence
  Description of Artificial Sequence: Synthetic oligonucleotide
gcuacacuaacuuguguga

SEQ ID NO: 10035 - RNA, 19 nt, Artificial Sequence
  Description of Artificial Sequence: Synthetic oligonucleotide
uaaagguagcagguacacu

SEQ ID NO: 10036 - RNA, 19 nt, Artificial Sequence
  Description of Artificial Sequence: Synthetic oligonucleotide
acguguaccauuguagaua

SEQ ID NO: 10037 - RNA, 19 nt, Artificial Sequence
  Description of Artificial Sequence: Synthetic oligonucleotide
gccaugcuaaauguuacag

SEQ ID NO: 10038 - RNA, 19 nt, Artificial Sequence
  Description of Artificial Sequence: Synthetic oligonucleotide
aaucgguuugaaacauuaa

SEQ ID NO: 10039 - RNA, 19 nt, Artificial Sequence
  Description of Artificial Sequence: Synthetic oligonucleotide
auggacguguaccauugua

SEQ ID NO: 10040 - RNA, 19 nt, Artificial Sequence
  Description of Artificial Sequence: Synthetic oligonucleotide
uucgcugaguuugacucaa

SEQ ID NO: 10041 - RNA, 19 nt, Artificial Sequence
  Description of Artificial Sequence: Synthetic oligonucleotide
uuauaccagcgauucuuuu

SEQ ID NO: 10042 - RNA, 19 nt, Artificial Sequence
  Description of Artificial Sequence: Synthetic oligonucleotide
auugccaguguauggucuu

SEQ ID NO: 10043 - RNA, 19 nt, Artificial Sequence
  Description of Artificial Sequence: Synthetic oligonucleotide
uugcuaagggcugcaauua

SEQ ID NO: 10044 - RNA, 19 nt, Artificial Sequence
  Description of Artificial Sequence: Synthetic oligonucleotide
uccuuaguuugaggugggg

SEQ ID NO: 10045 - RNA, 19 nt, Artificial Sequence
  Description of Artificial Sequence: Synthetic oligonucleotide
gaggacgguagaugagaac

SEQ ID NO: 10046 - RNA, 19 nt, Artificial Sequence
  Description of Artificial Sequence: Synthetic oligonucleotide
guauaugugcuagaucuua

SEQ ID NO: 10047 - RNA, 19 nt, Artificial Sequence
  Description of Artificial Sequence: Synthetic oligonucleotide
guuaagccguucuuggacu

SEQ ID NO: 10048 - RNA, 19 nt, Artificial Sequence
  Description of Artificial Sequence: Synthetic oligonucleotide
aucaccgaaaggauuugga

SEQ ID NO: 10049 - RNA, 19 nt, Artificial Sequence
  Description of Artificial Sequence: Synthetic oligonucleotide
acuagugauucugcaacaa

SEQ ID NO: 10050 - RNA, 19 nt, Artificial Sequence
  Description of Artificial Sequence: Synthetic oligonucleotide
guuccaugucuaacucucg

SEQ ID NO: 10051 - RNA, 19 nt, Artificial Sequence
  Description of Artificial Sequence: Synthetic oligonucleotide
uucagacuguuacguuccu

SEQ ID NO: 10052 - RNA, 19 nt, Artificial Sequence
  Description of Artificial Sequence: Synthetic oligonucleotide
ggcgcuucaccaaacaaac

SEQ ID NO: 10053 - RNA, 19 nt, Artificial Sequence
  Description of Artificial Sequence: Synthetic oligonucleotide
agucauaaucgaaucguuu

SEQ ID NO: 10054 - RNA, 19 nt, Artificial Sequence
  Description of Artificial Sequence: Synthetic oligonucleotide
cugugacgaaggagaauac

SEQ ID NO: 10055 - RNA, 19 nt, Artificial Sequence
  Description of Artificial Sequence: Synthetic oligonucleotide
caugccgauggguauagua

SEQ ID NO: 10056 - RNA, 19 nt, Artificial Sequence
  Description of Artificial Sequence: Synthetic oligonucleotide
ugaguauaauuugccuaau

SEQ ID NO: 10057 - RNA, 19 nt, Artificial Sequence
  Description of Artificial Sequence: Synthetic oligonucleotide
gguguuuaccacggaaagc

SEQ ID NO: 10058 - RNA, 19 nt, Artificial Sequence
  Description of Artificial Sequence: Synthetic oligonucleotide
cauaagcccucauuaggaa

SEQ ID NO: 10059 - RNA, 19 nt, Artificial Sequence
  Description of Artificial Sequence: Synthetic oligonucleotide
guagcagguacacucaguu

SEQ ID NO: 10060 - RNA, 19 nt, Artificial Sequence
  Description of Artificial Sequence: Synthetic oligonucleotide
ggcauuauagguugugaua

SEQ ID NO: 10061 - RNA, 19 nt, Artificial Sequence
  Description of Artificial Sequence: Synthetic oligonucleotide
auauggcucaaaagaauua

SEQ ID NO: 10062 - RNA, 19 nt, Artificial Sequence
  Description of Artificial Sequence: Synthetic oligonucleotide
augccgauggguauaguau

SEQ ID NO: 10063 - RNA, 19 nt, Artificial Sequence
  Description of Artificial Sequence: Synthetic oligonucleotide
ggaagacuagugauucugc

SEQ ID NO: 10064 - RNA, 19 nt, Artificial Sequence
  Description of Artificial Sequence: Synthetic oligonucleotide
guaugagcuacauuagcuu

SEQ ID NO: 10065 - RNA, 19 nt, Artificial Sequence
  Description of Artificial Sequence: Synthetic oligonucleotide
acugaggacgguagaugag

SEQ ID NO: 10066 - RNA, 19 nt, Artificial Sequence
  Description of Artificial Sequence: Synthetic oligonucleotide
gacuuaaguuguuauuguu

SEQ ID NO: 10067 - RNA, 19 nt, Artificial Sequence
  Description of Artificial Sequence: Synthetic oligonucleotide
ggaauacgcaaccugccaa

SEQ ID NO: 10068 - RNA, 19 nt, Artificial Sequence
  Description of Artificial Sequence: Synthetic oligonucleotide
uuaccacggaaagcucuug

SEQ ID NO: 10069 - RNA, 19 nt, Artificial Sequence
  Description of Artificial Sequence: Synthetic oligonucleotide
uggugggcuuauacacuca

SEQ ID NO: 10070 - RNA, 19 nt, Artificial Sequence
  Description of Artificial Sequence: Synthetic oligonucleotide
guaccauuguagauaugga

SEQ ID NO: 10071 - RNA, 19 nt, Artificial Sequence
  Description of Artificial Sequence: Synthetic oligonucleotide
cugaggacgguagaugaga

SEQ ID NO: 10072 - RNA, 19 nt, Artificial Sequence
  Description of Artificial Sequence: Synthetic oligonucleotide
gcugugacgaaggagaaua

SEQ ID NO: 10073 - RNA, 19 nt, Artificial Sequence
  Description of Artificial Sequence: Synthetic oligonucleotide
uaauuucguuaaggagcag

SEQ ID NO: 10074 - RNA, 19 nt, Artificial Sequence
  Description of Artificial Sequence: Synthetic oligonucleotide
gccaaccuuuuggugaucg

SEQ ID NO: 10075 - RNA, 19 nt, Artificial Sequence
  Description of Artificial Sequence: Synthetic oligonucleotide
gccauuuagaaacguggga

SEQ ID NO: 10076 - RNA, 19 nt, Artificial Sequence
  Description of Artificial Sequence: Synthetic oligonucleotide
gagcaacuauaaucuagua

SEQ ID NO: 10077 - RNA, 19 nt, Artificial Sequence
  Description of Artificial Sequence: Synthetic oligonucleotide
aggcgcuucaccaaacaaa

SEQ ID NO: 10078 - RNA, 19 nt, Artificial Sequence
  Description of Artificial Sequence: Synthetic oligonucleotide
ugacacuacugaguauaau

SEQ ID NO: 10079 - RNA, 19 nt, Artificial Sequence
  Description of Artificial Sequence: Synthetic oligonucleotide
acaaaacgaaggaucuuuu

SEQ ID NO: 10080 - RNA, 19 nt, Artificial Sequence
  Description of Artificial Sequence: Synthetic oligonucleotide
aagcucuaccaaagaacaa

SEQ ID NO: 10081 - RNA, 19 nt, Artificial Sequence
  Description of Artificial Sequence: Synthetic oligonucleotide
uuccgguggaggugacuca

SEQ ID NO: 10082 - RNA, 19 nt, Artificial Sequence
  Description of Artificial Sequence: Synthetic oligonucleotide
ugggagcaacuauaaucua

SEQ ID NO: 10083 - RNA, 19 nt, Artificial Sequence
  Description of Artificial Sequence: Synthetic oligonucleotide
cggguuuaaguaaacacca

SEQ ID NO: 10084 - RNA, 19 nt, Artificial Sequence
  Description of Artificial Sequence: Synthetic oligonucleotide
gacguguaccauuguagau

SEQ ID NO: 10085 - RNA, 19 nt, Artificial Sequence
  Description of Artificial Sequence: Synthetic oligonucleotide
uaccagcgauucuuuucac

SEQ ID NO: 10086 - RNA, 19 nt, Artificial Sequence
  Description of Artificial Sequence: Synthetic oligonucleotide
cagcggauuagcugugaca

SEQ ID NO: 10087 - RNA, 19 nt, Artificial Sequence
  Description of Artificial Sequence: Synthetic oligonucleotide
acuccuaaauuggcauaca

SEQ ID NO: 10088 - RNA, 19 nt, Artificial Sequence
  Description of Artificial Sequence: Synthetic oligonucleotide
auacaucgucgaacugaac

SEQ ID NO: 10089 - RNA, 19 nt, Artificial Sequence
  Description of Artificial Sequence: Synthetic oligonucleotide
aaauagggacgaaguucau

SEQ ID NO: 10090 - RNA, 19 nt, Artificial Sequence
  Description of Artificial Sequence: Synthetic oligonucleotide
gcucuuaguaagugaucac

SEQ ID NO: 10091 - RNA, 19 nt, Artificial Sequence
  Description of Artificial Sequence: Synthetic oligonucleotide
cucguaccuucaaacuaga

SEQ ID NO: 10092 - RNA, 19 nt, Artificial Sequence
  Description of Artificial Sequence: Synthetic oligonucleotide
cuacacuaacuugugugaa

SEQ ID NO: 10093 - RNA, 19 nt, Artificial Sequence
  Description of Artificial Sequence: Synthetic oligonucleotide
agcuaagcacuuccauauu

SEQ ID NO: 10094 - RNA, 19 nt, Artificial Sequence
  Description of Artificial Sequence: Synthetic oligonucleotide
ggauugccaguguaugguc

SEQ ID NO: 10095 - RNA, 19 nt, Artificial Sequence
  Description of Artificial Sequence: Synthetic oligonucleotide
uccgguggaggugacucau

SEQ ID NO: 10096 - RNA, 19 nt, Artificial Sequence
  Description of Artificial Sequence: Synthetic oligonucleotide
aggcggguuuaaguaaaca

SEQ ID NO: 10097 - RNA, 19 nt, Artificial Sequence
  Description of Artificial Sequence: Synthetic oligonucleotide
gcgaucuauccacuggauc

SEQ ID NO: 10098 - RNA, 19 nt, Artificial Sequence
  Description of Artificial Sequence: Synthetic oligonucleotide
ucagacuguuacguuccuu

SEQ ID NO: 10099 - RNA, 19 nt, Artificial Sequence
  Description of Artificial Sequence: Synthetic oligonucleotide
cucguuggcuacacuaacu

SEQ ID NO: 10100 - RNA, 19 nt, Artificial Sequence
  Description of Artificial Sequence: Synthetic oligonucleotide
uugggccaacuuagccaca

SEQ ID NO: 10101 - RNA, 19 nt, Artificial Sequence
  Description of Artificial Sequence: Synthetic oligonucleotide
ccucaagagauucaguacu

SEQ ID NO: 10102 - RNA, 19 nt, Artificial Sequence
  Description of Artificial Sequence: Synthetic oligonucleotide
gaggcggguuuaaguaaac

SEQ ID NO: 10103 - RNA, 19 nt, Artificial Sequence
  Description of Artificial Sequence: Synthetic oligonucleotide
cugccgugagccacucuuc

SEQ ID NO: 10104 - RNA, 19 nt, Artificial Sequence
  Description of Artificial Sequence: Synthetic oligonucleotide
ggugggcuuauacacucaa

SEQ ID NO: 10105 - RNA, 19 nt, Artificial Sequence
  Description of Artificial Sequence: Synthetic oligonucleotide
gcgaugaguauuguuaaua

SEQ ID NO: 10106 - RNA, 19 nt, Artificial Sequence
  Description of Artificial Sequence: Synthetic oligonucleotide
cacuaugggcuagauucca

SEQ ID NO: 10107 - RNA, 19 nt, Artificial Sequence
  Description of Artificial Sequence: Synthetic oligonucleotide
cgucgaacugaaccaauug

SEQ ID NO: 10108 - RNA, 19 nt, Artificial Sequence
  Description of Artificial Sequence: Synthetic oligonucleotide
ccauugauugaagacugca

SEQ ID NO: 10109 - RNA, 19 nt, Artificial Sequence
  Description of Artificial Sequence: Synthetic oligonucleotide
cacgaaacuauuggugugu

SEQ ID NO: 10110 - RNA, 19 nt, Artificial Sequence
  Description of Artificial Sequence: Synthetic oligonucleotide
cuccuaaauuggcauacau

SEQ ID NO: 10111 - RNA, 19 nt, Artificial Sequence
  Description of Artificial Sequence: Synthetic oligonucleotide
ggagcuuauuuguguaagu

SEQ ID NO: 10112 - RNA, 19 nt, Artificial Sequence
  Description of Artificial Sequence: Synthetic oligonucleotide
agcgaucuauccacuggau

SEQ ID NO: 10113 - RNA, 19 nt, Artificial Sequence
  Description of Artificial Sequence: Synthetic oligonucleotide
ccucguuggcuacacuaac

SEQ ID NO: 10114 - RNA, 19 nt, Artificial Sequence
  Description of Artificial Sequence: Synthetic oligonucleotide
cugugcugcccagauauua

SEQ ID NO: 10115 - RNA, 19 nt, Artificial Sequence
  Description of Artificial Sequence: Synthetic oligonucleotide
aggcauauuggagcuuauu

SEQ ID NO: 10116 - RNA, 19 nt, Artificial Sequence
  Description of Artificial Sequence: Synthetic oligonucleotide
gcuagauuccacagaaggu

SEQ ID NO: 10117 - RNA, 19 nt, Artificial Sequence
  Description of Artificial Sequence: Synthetic oligonucleotide
cccggaucaaucagcucac

SEQ ID NO: 10118 - RNA, 19 nt, Artificial Sequence
  Description of Artificial Sequence: Synthetic oligonucleotide
agauccaaauagggacgaa

SEQ ID NO: 10119 - RNA, 19 nt, Artificial Sequence
  Description of Artificial Sequence: Synthetic oligonucleotide
acgugccauuuguuuuaga

SEQ ID NO: 10120 - RNA, 19 nt, Artificial Sequence
  Description of Artificial Sequence: Synthetic oligonucleotide
ucgcugaguuugacucaaa

SEQ ID NO: 10121 - RNA, 19 nt, Artificial Sequence
  Description of Artificial Sequence: Synthetic oligonucleotide
uccccucaaccuguauuuu

SEQ ID NO: 10122 - RNA, 19 nt, Artificial Sequence
  Description of Artificial Sequence: Synthetic oligonucleotide
cuauagcucggcuggcaau

SEQ ID NO: 10123 - RNA, 19 nt, Artificial Sequence
  Description of Artificial Sequence: Synthetic oligonucleotide
gccgauggguauaguauga

SEQ ID NO: 10124 - RNA, 19 nt, Artificial Sequence
  Description of Artificial Sequence: Synthetic oligonucleotide
agccaaccuuuuggugauc

SEQ ID NO: 10125 - RNA, 19 nt, Artificial Sequence
  Description of Artificial Sequence: Synthetic oligonucleotide
cgauggguauaguaugaca

SEQ ID NO: 10126 - RNA, 19 nt, Artificial Sequence
  Description of Artificial Sequence: Synthetic oligonucleotide
gggcuagauuccacagaag

SEQ ID NO: 10127 - RNA, 19 nt, Artificial Sequence
  Description of Artificial Sequence: Synthetic oligonucleotide
accaggcgaugaguauugu

SEQ ID NO: 10128 - RNA, 19 nt, Artificial Sequence
  Description of Artificial Sequence: Synthetic oligonucleotide
cugaacguuuaaugcugau

SEQ ID NO: 10129 - RNA, 19 nt, Artificial Sequence
  Description of Artificial Sequence: Synthetic oligonucleotide
cugcaauuaucugaacguu

SEQ ID NO: 10130 - RNA, 19 nt, Artificial Sequence
  Description of Artificial Sequence: Synthetic oligonucleotide
guguaccauuguagauaug

SEQ ID NO: 10131 - RNA, 19 nt, Artificial Sequence
  Description of Artificial Sequence: Synthetic oligonucleotide
cgaacacgaaacuauuggu

SEQ ID NO: 10132 - RNA, 19 nt, Artificial Sequence
  Description of Artificial Sequence: Synthetic oligonucleotide
ggaucuaagucugguucgu

SEQ ID NO: 10133 - RNA, 19 nt, Artificial Sequence
  Description of Artificial Sequence: Synthetic oligonucleotide
cgaacugaaccaauuguau

SEQ ID NO: 10134 - RNA, 19 nt, Artificial Sequence
  Description of Artificial Sequence: Synthetic oligonucleotide
ggguauaguaugacacacu

SEQ ID NO: 10135 - RNA, 19 nt, Artificial Sequence
  Description of Artificial Sequence: Synthetic oligonucleotide
cugaaccaauuguaucauu

SEQ ID NO: 10136 - RNA, 19 nt, Artificial Sequence
  Description of Artificial Sequence: Synthetic oligonucleotide
cccucaaccuguauuuuau

SEQ ID NO: 10137 - RNA, 19 nt, Artificial Sequence
  Description of Artificial Sequence: Synthetic oligonucleotide
gcccucauuaggaacuggu

SEQ ID NO: 10138 - RNA, 19 nt, Artificial Sequence
  Description of Artificial Sequence: Synthetic oligonucleotide
cauggacguguaccauugu

SEQ ID NO: 10139 - RNA, 19 nt, Artificial Sequence
  Description of Artificial Sequence: Synthetic oligonucleotide
gagcuacauuagcuuuaau

SEQ ID NO: 10140 - RNA, 19 nt, Artificial Sequence
  Description of Artificial Sequence: Synthetic oligonucleotide
gcgccauuacaccaucuuu

SEQ ID NO: 10141 - RNA, 19 nt, Artificial Sequence
  Description of Artificial Sequence: Synthetic oligonucleotide
gcggauuagcugugacacu

SEQ ID NO: 10142 - RNA, 19 nt, Artificial Sequence
  Description of Artificial Sequence: Synthetic oligonucleotide
ccauuacacguaagcaguu

SEQ ID NO: 10143 - RNA, 19 nt, Artificial Sequence
  Description of Artificial Sequence: Synthetic oligonucleotide
ccugaauauucagacuguu

SEQ ID NO: 10144 - RNA, 19 nt, Artificial Sequence
  Description of Artificial Sequence: Synthetic oligonucleotide
cgagcgaagaguucaucuu

SEQ ID NO: 10145 - RNA, 19 nt, Artificial Sequence
  Description of Artificial Sequence: Synthetic oligonucleotide
ccaggcgaugaguauuguu

SEQ ID NO: 10146 - RNA, 19 nt, Artificial Sequence
  Description of Artificial Sequence: Synthetic oligonucleotide
gggcaaagccccaguucau

SEQ ID NO: 10147 - RNA, 19 nt, Artificial Sequence
  Description of Artificial Sequence: Synthetic oligonucleotide
ccaugccgauggguauagu

SEQ ID NO: 10148 - RNA, 19 nt, Artificial Sequence
  Description of Artificial Sequence: Synthetic oligonucleotide
aaaaucaugacuauguacg

SEQ ID NO: 10149 - RNA, 19 nt, Artificial Sequence
  Description of Artificial Sequence: Synthetic oligonucleotide
acuauaaguaugcugaacc

SEQ ID NO: 10150 - RNA, 19 nt, Artificial Sequence
  Description of Artificial Sequence: Synthetic oligonucleotide
uuauauacgaacuauaagu

SEQ ID NO: 10151 - RNA, 19 nt, Artificial Sequence
  Description of Artificial Sequence: Synthetic oligonucleotide
uuuaaaacgaccauaaguc

SEQ ID NO: 10152 - RNA, 19 nt, Artificial Sequence
  Description of Artificial Sequence: Synthetic oligonucleotide
uguacaauaagccuuacca

SEQ ID NO: 10153 - RNA, 19 nt, Artificial Sequence
  Description of Artificial Sequence: Synthetic oligonucleotide
uuagaguuaaguuuaaaag

SEQ ID NO: 10154 - RNA, 19 nt, Artificial Sequence
  Description of Artificial Sequence: Synthetic oligonucleotide
uuuauauacuaaaggaagg

SEQ ID NO: 10155 - RNA, 19 nt, Artificial Sequence
  Description of Artificial Sequence: Synthetic oligonucleotide
  modified_base (2)..(2): a, c, u, g, unknown or other
anacaagaggcacguaugc

SEQ ID NO: 10156 - RNA, 19 nt, Artificial Sequence
  Description of Artificial Sequence: Synthetic oligonucleotide
ucugauaugcauucaauag

SEQ ID NO: 10157 - RNA, 19 nt, Artificial Sequence
  Description of Artificial Sequence: Synthetic oligonucleotide
aaacccggcagccaaauac

SEQ ID NO: 10158 - RNA, 19 nt, Artificial Sequence
  Description of Artificial Sequence: Synthetic oligonucleotide
agaaccauguuacuaaaac

SEQ ID NO: 10159 - RNA, 19 nt, Artificial Sequence
  Description of Artificial Sequence: Synthetic oligonucleotide
auagagaccaaccaaacug

SEQ ID NO: 10160 - RNA, 19 nt, Artificial Sequence
  Description of Artificial Sequence: Synthetic oligonucleotide
aauacuaugacaucccaau

SEQ ID NO: 10161 - RNA, 19 nt, Artificial Sequence
  Description of Artificial Sequence: Synthetic oligonucleotide
uuuacaaauagguuggaac

SEQ ID NO: 10162 - RNA, 19 nt, Artificial Sequence
  Description of Artificial Sequence: Synthetic oligonucleotide
ugggcuaugugauauaagg

SEQ ID NO: 10163 - RNA, 19 nt, Artificial Sequence
  Description of Artificial Sequence: Synthetic oligonucleotide
auucgguaaaagcagaaac

SEQ ID NO: 10164 - RNA, 19 nt, Artificial Sequence
  Description of Artificial Sequence: Synthetic oligonucleotide
agaaaugggaucaaugugc

SEQ ID NO: 10165 - RNA, 19 nt, Artificial Sequence
  Description of Artificial Sequence: Synthetic oligonucleotide
agaacuuacuauuagcaag

SEQ ID NO: 10166 - RNA, 19 nt, Artificial Sequence
  Description of Artificial Sequence: Synthetic oligonucleotide
uguuacuggagauagagac

SEQ ID NO: 10167 - RNA, 19 nt, Artificial Sequence
  Description of Artificial Sequence: Synthetic oligonucleotide
aguaucaugccuucuuucc

SEQ ID NO: 10168 - RNA, 19 nt, Artificial Sequence
  Description of Artificial Sequence: Synthetic oligonucleotide
auggcaauaccccaggggc

SEQ ID NO: 10169 - RNA, 19 nt, Artificial Sequence
  Description of Artificial Sequence: Synthetic oligonucleotide
ucauugacgaaccucaaug

SEQ ID NO: 10170 - RNA, 19 nt, Artificial Sequence
  Description of Artificial Sequence: Synthetic oligonucleotide
ucugccuuaagaucuaggg

SEQ ID NO: 10171 - RNA, 19 nt, Artificial Sequence
  Description of Artificial Sequence: Synthetic oligonucleotide
uuauauacuaaaggaaggg

SEQ ID NO: 10172 - RNA, 19 nt, Artificial Sequence
  Description of Artificial Sequence: Synthetic oligonucleotide
uacguauucuuucugugcg

SEQ ID NO: 10173 - RNA, 19 nt, Artificial Sequence
  Description of Artificial Sequence: Synthetic oligonucleotide
aacuugccucauuauaacc

SEQ ID NO: 10174 - RNA, 19 nt, Artificial Sequence
  Description of Artificial Sequence: Synthetic oligonucleotide
uguuacuaaaaccuagucu

SEQ ID NO: 10175 - RNA, 19 nt, Artificial Sequence
  Description of Artificial Sequence: Synthetic oligonucleotide
ucauuaaugcgcauuaggu

SEQ ID NO: 10176 - RNA, 19 nt, Artificial Sequence
  Description of Artificial Sequence: Synthetic oligonucleotide
aauuacuaaauucugccuu

SEQ ID NO: 10177 - RNA, 19 nt, Artificial Sequence
  Description of Artificial Sequence: Synthetic oligonucleotide
uguuaaaaguguuaggauc

SEQ ID NO: 10178 - RNA, 19 nt, Artificial Sequence
  Description of Artificial Sequence: Synthetic oligonucleotide
aacauaacggaauucugga

SEQ ID NO: 10179 - RNA, 19 nt, Artificial Sequence
  Description of Artificial Sequence: Synthetic oligonucleotide
uaaugcuaugaucauacug

SEQ ID NO: 10180 - RNA, 19 nt, Artificial Sequence
  Description of Artificial Sequence: Synthetic oligonucleotide
uucgguaaaagcagaaacc

SEQ ID NO: 10181 - RNA, 19 nt, Artificial Sequence
  Description of Artificial Sequence: Synthetic oligonucleotide
gauccaacuguuuaugacc

SEQ ID NO: 10182 - RNA, 19 nt, Artificial Sequence
  Description of Artificial Sequence: Synthetic oligonucleotide
uguuaugauaaucucuugu

SEQ ID NO: 10183 - RNA, 19 nt, Artificial Sequence
  Description of Artificial Sequence: Synthetic oligonucleotide
uguaagacaugugugaccc

SEQ ID NO: 10184 - RNA, 19 nt, Artificial Sequence
  Description of Artificial Sequence: Synthetic oligonucleotide
auaagaucuauuaacacug

SEQ ID NO: 10185 - RNA, 19 nt, Artificial Sequence
  Description of Artificial Sequence: Synthetic oligonucleotide
uaucaguuagcugauaacc

SEQ ID NO: 10186 - RNA, 19 nt, Artificial Sequence
  Description of Artificial Sequence: Synthetic oligonucleotide
ugugauauaaggcacucau

SEQ ID NO: 10187 - RNA, 19 nt, Artificial Sequence
  Description of Artificial Sequence: Synthetic oligonucleotide
cuaaaaccuagucucaugc

SEQ ID NO: 10188 - RNA, 19 nt, Artificial Sequence
  Description of Artificial Sequence: Synthetic oligonucleotide
uauauacgaacuauaagua

SEQ ID NO: 10189 - RNA, 19 nt, Artificial Sequence
  Description of Artificial Sequence: Synthetic oligonucleotide
acuaugacaucccaauuag

SEQ ID NO: 10190 - RNA, 19 nt, Artificial Sequence
  Description of Artificial Sequence: Synthetic oligonucleotide
gagguuaguagaaagacug

SEQ ID NO: 10191 - RNA, 19 nt, Artificial Sequence
  Description of Artificial Sequence: Synthetic oligonucleotide
uaaaacgaccauaaguccu

SEQ ID NO: 10192 - RNA, 19 nt, Artificial Sequence
  Description of Artificial Sequence: Synthetic oligonucleotide
gaaaugaguaaaaggacag

SEQ ID NO: 10193 - RNA, 19 nt, Artificial Sequence
  Description of Artificial Sequence: Synthetic oligonucleotide
ugacuauguacgaaguucc

SEQ ID NO: 10194 - RNA, 19 nt, Artificial Sequence
  Description of Artificial Sequence: Synthetic oligonucleotide
aauaguauugagguggcga

SEQ ID NO: 10195 - RNA, 19 nt, Artificial Sequence
  Description of Artificial Sequence: Synthetic oligonucleotide
gaagcgacgacauucuagc

SEQ ID NO: 10196 - RNA, 19 nt, Artificial Sequence
  Description of Artificial Sequence: Synthetic oligonucleotide
agugggauaacuuauguua

SEQ ID NO: 10197 - RNA, 19 nt, Artificial Sequence
  Description of Artificial Sequence: Synthetic oligonucleotide
aauagguuggaacagccua

SEQ ID NO: 10198 - RNA, 19 nt, Artificial Sequence
  Description of Artificial Sequence: Synthetic oligonucleotide
uuaaaacgaccauaagucc

SEQ ID NO: 10199 - RNA, 19 nt, Artificial Sequence
  Description of Artificial Sequence: Synthetic oligonucleotide
auuaaugcgcauuagguuu

SEQ ID NO: 10200 - RNA, 19 nt, Artificial Sequence
  Description of Artificial Sequence: Synthetic oligonucleotide
acaauucccauuuaaugug

SEQ ID NO: 10201 - RNA, 19 nt, Artificial Sequence
  Description of Artificial Sequence: Synthetic oligonucleotide
aaugauaagguuacagucu

SEQ ID NO: 10202 - RNA, 19 nt, Artificial Sequence
  Description of Artificial Sequence: Synthetic oligonucleotide
aaaccaaucuggguuauag

SEQ ID NO: 10203 - RNA, 19 nt, Artificial Sequence
  Description of Artificial Sequence: Synthetic oligonucleotide
ugacgugcaagaaaggaca

SEQ ID NO: 10204 - RNA, 19 nt, Artificial Sequence
  Description of Artificial Sequence: Synthetic oligonucleotide
agaaugacgugcaagaaag

SEQ ID NO: 10205 - RNA, 19 nt, Artificial Sequence
  Description of Artificial Sequence: Synthetic oligonucleotide
ugacgaaccucaaugauaa

SEQ ID NO: 10206 - RNA, 19 nt, Artificial Sequence
  Description of Artificial Sequence: Synthetic oligonucleotide
aaacgcagagcuugugugg

SEQ ID NO: 10207 - RNA, 19 nt, Artificial Sequence
  Description of Artificial Sequence: Synthetic oligonucleotide
aauaggaaugccauggccu

SEQ ID NO: 10208 - RNA, 19 nt, Artificial Sequence
  Description of Artificial Sequence: Synthetic oligonucleotide
cuaguuauggaaaugagua

SEQ ID NO: 10209 - RNA, 19 nt, Artificial Sequence
  Description of Artificial Sequence: Synthetic oligonucleotide
uuacuauuagcaagcaaga

SEQ ID NO: 10210 - RNA, 19 nt, Artificial Sequence
  Description of Artificial Sequence: Synthetic oligonucleotide
uucaauuacuauguguaag

SEQ ID NO: 10211 - RNA, 19 nt, Artificial Sequence
  Description of Artificial Sequence: Synthetic oligonucleotide
aguuaugucgcccaaguaa

SEQ ID NO: 10212 - RNA, 19 nt, Artificial Sequence
  Description of Artificial Sequence: Synthetic oligonucleotide
auacgaacuauaaguaugc

SEQ ID NO: 10213 - RNA, 19 nt, Artificial Sequence
  Description of Artificial Sequence: Synthetic oligonucleotide
ugaagcgacgacauucuag

SEQ ID NO: 10214 - RNA, 19 nt, Artificial Sequence
  Description of Artificial Sequence: Synthetic oligonucleotide
aaaguuuguagguaacuua

SEQ ID NO: 10215 - RNA, 19 nt, Artificial Sequence
  Description of Artificial Sequence: Synthetic oligonucleotide
agccuuaccaguuagugcu

SEQ ID NO: 10216 - RNA, 19 nt, Artificial Sequence
  Description of Artificial Sequence: Synthetic oligonucleotide
uuugagagaaugacgugca

SEQ ID NO: 10217 - RNA, 19 nt, Artificial Sequence
  Description of Artificial Sequence: Synthetic oligonucleotide
caauguauucuauauguuc

SEQ ID NO: 10218 - RNA, 19 nt, Artificial Sequence
  Description of Artificial Sequence: Synthetic oligonucleotide
uaaagugaugauucaggcc

SEQ ID NO: 10219 - RNA, 19 nt, Artificial Sequence
  Description of Artificial Sequence: Synthetic oligonucleotide
auaacugaaacagacugug

SEQ ID NO: 10220 - RNA, 19 nt, Artificial Sequence
  Description of Artificial Sequence: Synthetic oligonucleotide
ugauaacccucauuuauca

SEQ ID NO: 10221 - RNA, 19 nt, Artificial Sequence
  Description of Artificial Sequence: Synthetic oligonucleotide
uagagaccaaccaaacugc

SEQ ID NO: 10222 - RNA, 19 nt, Artificial Sequence
  Description of Artificial Sequence: Synthetic oligonucleotide
uuacuggagauagagacca

SEQ ID NO: 10223 - RNA, 19 nt, Artificial Sequence
  Description of Artificial Sequence: Synthetic oligonucleotide
gaacuuacuauuagcaagc

SEQ ID NO: 10224 - RNA, 19 nt, Artificial Sequence
  Description of Artificial Sequence: Synthetic oligonucleotide
augauaaucucuuguccuc

SEQ ID NO: 10225 - RNA, 19 nt, Artificial Sequence
  Description of Artificial Sequence: Synthetic oligonucleotide
ucacaauuuaggguuagag

SEQ ID NO: 10226 - RNA, 19 nt, Artificial Sequence
  Description of Artificial Sequence: Synthetic oligonucleotide
aaaucaugacuauguacga

SEQ ID NO: 10227 - RNA, 19 nt, Artificial Sequence
  Description of Artificial Sequence: Synthetic oligonucleotide
uucgcuuauuguauucuag

SEQ ID NO: 10228 - RNA, 19 nt, Artificial Sequence
  Description of Artificial Sequence: Synthetic oligonucleotide
accaacuagaagcuccugg

SEQ ID NO: 10229 - RNA, 19 nt, Artificial Sequence
  Description of Artificial Sequence: Synthetic oligonucleotide
uguguuggacuaaaucuca

SEQ ID NO: 10230 - RNA, 19 nt, Artificial Sequence
  Description of Artificial Sequence: Synthetic oligonucleotide
ucccaaaccauaguuauca

SEQ ID NO: 10231 - RNA, 19 nt, Artificial Sequence
  Description of Artificial Sequence: Synthetic oligonucleotide
aguauugagguggcgaaac

SEQ ID NO: 10232 - RNA, 19 nt, Artificial Sequence
  Description of Artificial Sequence: Synthetic oligonucleotide
augugguaaaaguuuguag

SEQ ID NO: 10233 - RNA, 19 nt, Artificial Sequence
  Description of Artificial Sequence: Synthetic oligonucleotide
cucgacuugagacuaagug

SEQ ID NO: 10234 - RNA, 19 nt, Artificial Sequence
  Description of Artificial Sequence: Synthetic oligonucleotide
auugcggacucccauacug

SEQ ID NO: 10235 - RNA, 19 nt, Artificial Sequence
  Description of Artificial Sequence: Synthetic oligonucleotide
cuuugucuaaucuguagac

SEQ ID NO: 10236 - RNA, 19 nt, Artificial Sequence
  Description of Artificial Sequence: Synthetic oligonucleotide
gucguaguagcauagcaug

SEQ ID NO: 10237 - RNA, 19 nt, Artificial Sequence
  Description of Artificial Sequence: Synthetic oligonucleotide
aaccuuguggugugccacc

SEQ ID NO: 10238 - RNA, 19 nt, Artificial Sequence
  Description of Artificial Sequence: Synthetic oligonucleotide
aacccuaggcauuugcaca

SEQ ID NO: 10239 - RNA, 19 nt, Artificial Sequence
  Description of Artificial Sequence: Synthetic oligonucleotide
uuucgaaaauaaucagacc

SEQ ID NO: 10240 - RNA, 19 nt, Artificial Sequence
  Description of Artificial Sequence: Synthetic oligonucleotide
cugucuagucuaaaauugg

SEQ ID NO: 10241 - RNA, 19 nt, Artificial Sequence
  Description of Artificial Sequence: Synthetic oligonucleotide
auaaucucuuguccucccc

SEQ ID NO: 10242 - RNA, 19 nt, Artificial Sequence
  Description of Artificial Sequence: Synthetic oligonucleotide
gaugucacaauuuaggguu

SEQ ID NO: 10243 - RNA, 19 nt, Artificial Sequence
  Description of Artificial Sequence: Synthetic oligonucleotide
uuggauauuugugaaguga

SEQ ID NO: 10244 - RNA, 19 nt, Artificial Sequence
  Description of Artificial Sequence: Synthetic oligonucleotide
ugauguagggcgaucuuga

SEQ ID NO: 10245 - RNA, 19 nt, Artificial Sequence
  Description of Artificial Sequence: Synthetic oligonucleotide
acgaacuauaaguaugcug

SEQ ID NO: 10246 - RNA, 19 nt, Artificial Sequence
  Description of Artificial Sequence: Synthetic oligonucleotide
auucuagcgucgaagaagg

SEQ ID NO: 10247 - RNA, 19 nt, Artificial Sequence
  Description of Artificial Sequence: Synthetic oligonucleotide
aaguaugcugaaccagaag

SEQ ID NO: 10248 - RNA, 19 nt, Artificial Sequence
  Description of Artificial Sequence: Synthetic oligonucleotide
uaguagcauagcauguucc

SEQ ID NO: 10249 - RNA, 19 nt, Artificial Sequence
  Description of Artificial Sequence: Synthetic oligonucleotide
uaacauugguaucucauuu

SEQ ID NO: 10250 - RNA, 19 nt, Artificial Sequence
  Description of Artificial Sequence: Synthetic oligonucleotide
ucgcuuauuguauucuagc

SEQ ID NO: 10251 - RNA, 19 nt, Artificial Sequence
  Description of Artificial Sequence: Synthetic oligonucleotide
uuacuaaaaccuagucuca

SEQ ID NO: 10252 - RNA, 19 nt, Artificial Sequence
  Description of Artificial Sequence: Synthetic oligonucleotide
auaacggaauucuggaagu

SEQ ID NO: 10253 - RNA, 19 nt, Artificial Sequence
  Description of Artificial Sequence: Synthetic oligonucleotide
uauaaccugcacuauuuaa

SEQ ID NO: 10254 - RNA, 19 nt, Artificial Sequence
  Description of Artificial Sequence: Synthetic oligonucleotide
aacgaauaaaauauaccau

SEQ ID NO: 10255 - RNA, 19 nt, Artificial Sequence
  Description of Artificial Sequence: Synthetic oligonucleotide
  modified_base (3)..(3): a, c, u, g, unknown or other
canacaagaggcacguaug

SEQ ID NO: 10256 - RNA, 19 nt, Artificial Sequence
  Description of Artificial Sequence: Synthetic oligonucleotide
ucaaagcuaacuugccuca

SEQ ID NO: 10257 - RNA, 19 nt, Artificial Sequence
  Description of Artificial Sequence: Synthetic oligonucleotide
ugccauggccuuaagaggu

SEQ ID NO: 10258 - RNA, 19 nt, Artificial Sequence
  Description of Artificial Sequence: Synthetic oligonucleotide
gaaccuauucuaaacuagc

SEQ ID NO: 10259 - RNA, 19 nt, Artificial Sequence
  Description of Artificial Sequence: Synthetic oligonucleotide
uuaccaguuagugcugugg

SEQ ID NO: 10260 - RNA, 19 nt, Artificial Sequence
  Description of Artificial Sequence: Synthetic oligonucleotide
gauaacauaucaguuagcu

SEQ ID NO: 10261 - RNA, 19 nt, Artificial Sequence
  Description of Artificial Sequence: Synthetic oligonucleotide
cuacguauucuuucugugc

SEQ ID NO: 10262 - RNA, 19 nt, Artificial Sequence
  Description of Artificial Sequence: Synthetic oligonucleotide
uaaauaacgucuagaugau

SEQ ID NO: 10263 - RNA, 19 nt, Artificial Sequence
  Description of Artificial Sequence: Synthetic oligonucleotide
auauacgaacuauaaguau

SEQ ID NO: 10264 - RNA, 19 nt, Artificial Sequence
  Description of Artificial Sequence: Synthetic oligonucleotide
ucucguucaggacuauuca

SEQ ID NO: 10265 - RNA, 19 nt, Artificial Sequence
  Description of Artificial Sequence: Synthetic oligonucleotide
uccgcuaauucaauacaug

SEQ ID NO: 10266 - RNA, 19 nt, Artificial Sequence
  Description of Artificial Sequence: Synthetic oligonucleotide
auaaaaggccaacccuagg

SEQ ID NO: 10267 - RNA, 19 nt, Artificial Sequence
  Description of Artificial Sequence: Synthetic oligonucleotide
uguugucgaacuuccauaa

SEQ ID NO: 10268 - RNA, 19 nt, Artificial Sequence
  Description of Artificial Sequence: Synthetic oligonucleotide
uacuggauaggccucgacu

SEQ ID NO: 10269 - RNA, 19 nt, Artificial Sequence
  Description of Artificial Sequence: Synthetic oligonucleotide
ugucgaacuuccauaacau

SEQ ID NO: 10270 - RNA, 19 nt, Artificial Sequence
  Description of Artificial Sequence: Synthetic oligonucleotide
aaacgcgcaagaaggacuc

SEQ ID NO: 10271 - RNA, 19 nt, Artificial Sequence
  Description of Artificial Sequence: Synthetic oligonucleotide
uguccggccaacaccauga

SEQ ID NO: 10272 - RNA, 19 nt, Artificial Sequence
  Description of Artificial Sequence: Synthetic oligonucleotide
guggcucuaauauaccuug

SEQ ID NO: 10273 - RNA, 19 nt, Artificial Sequence
  Description of Artificial Sequence: Synthetic oligonucleotide
aaaggcgaugcuaaaccag

SEQ ID NO: 10274 - RNA, 19 nt, Artificial Sequence
  Description of Artificial Sequence: Synthetic oligonucleotide
acuaaaaccuagucucaug

SEQ ID NO: 10275 - RNA, 19 nt, Artificial Sequence
  Description of Artificial Sequence: Synthetic oligonucleotide
agacuaagugugugucucc

SEQ ID NO: 10276 - RNA, 19 nt, Artificial Sequence
  Description of Artificial Sequence: Synthetic oligonucleotide
uugacgaaccucaaugaua

SEQ ID NO: 10277 - RNA, 19 nt, Artificial Sequence
  Description of Artificial Sequence: Synthetic oligonucleotide
uccuaauaggcucuucuau

SEQ ID NO: 10278 - RNA, 19 nt, Artificial Sequence
  Description of Artificial Sequence: Synthetic oligonucleotide
aggguuauacauucaagau

SEQ ID NO: 10279 - RNA, 19 nt, Artificial Sequence
  Description of Artificial Sequence: Synthetic oligonucleotide
caacgcaucuucugaauag

SEQ ID NO: 10280 - RNA, 19 nt, Artificial Sequence
  Description of Artificial Sequence: Synthetic oligonucleotide
ugucguaguagcauagcau

SEQ ID NO: 10281 - RNA, 19 nt, Artificial Sequence
  Description of Artificial Sequence: Synthetic oligonucleotide
uguuacgcugaguuucaag

SEQ ID NO: 10282 - RNA, 19 nt, Artificial Sequence
  Description of Artificial Sequence: Synthetic oligonucleotide
uaacgucuagaugauucgg

SEQ ID NO: 10283 - RNA, 19 nt, Artificial Sequence
  Description of Artificial Sequence: Synthetic oligonucleotide
agaaccuauucuaaacuag

SEQ ID NO: 10284 - RNA, 19 nt, Artificial Sequence
  Description of Artificial Sequence: Synthetic oligonucleotide
caaacgcagagcuugugug

SEQ ID NO: 10285 - RNA, 19 nt, Artificial Sequence
  Description of Artificial Sequence: Synthetic oligonucleotide
uaaguaugcugaaccagaa

SEQ ID NO: 10286 - RNA, 19 nt, Artificial Sequence
  Description of Artificial Sequence: Synthetic oligonucleotide
agacaugugugacccauug

SEQ ID NO: 10287 - RNA, 19 nt, Artificial Sequence
  Description of Artificial Sequence: Synthetic oligonucleotide
aagcuaacuugccucauua

SEQ ID NO: 10288 - RNA, 19 nt, Artificial Sequence
  Description of Artificial Sequence: Synthetic oligonucleotide
guaacuuacuggccaagug

SEQ ID NO: 10289 - RNA, 19 nt, Artificial Sequence
  Description of Artificial Sequence: Synthetic oligonucleotide
uaacuugccucauuauaac

SEQ ID NO: 10290 - RNA, 19 nt, Artificial Sequence
  Description of Artificial Sequence: Synthetic oligonucleotide
acgaccauaaguccuuugu

SEQ ID NO: 10291 - RNA, 19 nt, Artificial Sequence
  Description of Artificial Sequence: Synthetic oligonucleotide
caacacuauucacuguucc

SEQ ID NO: 10292 - RNA, 19 nt, Artificial Sequence
  Description of Artificial Sequence: Synthetic oligonucleotide
ucgaagaagguuagcuucu

SEQ ID NO: 10293 - RNA, 19 nt, Artificial Sequence
  Description of Artificial Sequence: Synthetic oligonucleotide
aaaguguuaggauccuguu

SEQ ID NO: 10294 - RNA, 19 nt, Artificial Sequence
  Description of Artificial Sequence: Synthetic oligonucleotide
ugauaaucucuuguccucc

SEQ ID NO: 10295 - RNA, 19 nt, Artificial Sequence
  Description of Artificial Sequence: Synthetic oligonucleotide
gguuauagaaggguuauac

SEQ ID NO: 10296 - RNA, 19 nt, Artificial Sequence
  Description of Artificial Sequence: Synthetic oligonucleotide
ggaaaaugcacaccugcag

SEQ ID NO: 10297 - RNA, 19 nt, Artificial Sequence
  Description of Artificial Sequence: Synthetic oligonucleotide
uuuaaaaggcgaugcuaaa

SEQ ID NO: 10298 - RNA, 19 nt, Artificial Sequence
  Description of Artificial Sequence: Synthetic oligonucleotide
auaaguaugcugaaccaga

SEQ ID NO: 10299 - RNA, 19 nt, Artificial Sequence
  Description of Artificial Sequence: Synthetic oligonucleotide
gauacuaagccaagccaug

SEQ ID NO: 10300 - RNA, 19 nt, Artificial Sequence
  Description of Artificial Sequence: Synthetic oligonucleotide
acugcuaccucgagggacc

SEQ ID NO: 10301 - RNA, 19 nt, Artificial Sequence
  Description of Artificial Sequence: Synthetic oligonucleotide
acuaaaucucagcuugagu

SEQ ID NO: 10302 - RNA, 19 nt, Artificial Sequence
  Description of Artificial Sequence: Synthetic oligonucleotide
uacgaaguuccacuuuacu

SEQ ID NO: 10303 - RNA, 19 nt, Artificial Sequence
  Description of Artificial Sequence: Synthetic oligonucleotide
ggauaacuuauguuaaaac

SEQ ID NO: 10304 - RNA, 19 nt, Artificial Sequence
  Description of Artificial Sequence: Synthetic oligonucleotide
guuaugucgcccaaguaac

SEQ ID NO: 10305 - RNA, 19 nt, Artificial Sequence
  Description of Artificial Sequence: Synthetic oligonucleotide
uccgaggguaggaauuucc

SEQ ID NO: 10306 - RNA, 19 nt, Artificial Sequence
  Description of Artificial Sequence: Synthetic oligonucleotide
guaucaugccuucuuuccc

SEQ ID NO: 10307 - RNA, 19 nt, Artificial Sequence
  Description of Artificial Sequence: Synthetic oligonucleotide
aagcgacgacauucuagcg

SEQ ID NO: 10308 - RNA, 19 nt, Artificial Sequence
  Description of Artificial Sequence: Synthetic oligonucleotide
cauccuuuaaggaauccga

SEQ ID NO: 10309 - RNA, 19 nt, Artificial Sequence
  Description of Artificial Sequence: Synthetic oligonucleotide
guaggggauucauuuuggg

SEQ ID NO: 10310 - RNA, 19 nt, Artificial Sequence
  Description of Artificial Sequence: Synthetic oligonucleotide
acuggauaggccucgacuu

SEQ ID NO: 10311 - RNA, 19 nt, Artificial Sequence
  Description of Artificial Sequence: Synthetic oligonucleotide
ugauagacauacugggaau

SEQ ID NO: 10312 - RNA, 19 nt, Artificial Sequence
  Description of Artificial Sequence: Synthetic oligonucleotide
ugauucgguaaaagcagaa

SEQ ID NO: 10313 - RNA, 19 nt, Artificial Sequence
  Description of Artificial Sequence: Synthetic oligonucleotide
uuuaaguagaggggcaauc

SEQ ID NO: 10314 - RNA, 19 nt, Artificial Sequence
  Description of Artificial Sequence: Synthetic oligonucleotide
uuccuaauggaaaccccac

SEQ ID NO: 10315 - RNA, 19 nt, Artificial Sequence
  Description of Artificial Sequence: Synthetic oligonucleotide
acggaauucuggaaguagg

SEQ ID NO: 10316 - RNA, 19 nt, Artificial Sequence
  Description of Artificial Sequence: Synthetic oligonucleotide
agcgacgacauucuagcgu

SEQ ID NO: 10317 - RNA, 19 nt, Artificial Sequence
  Description of Artificial Sequence: Synthetic oligonucleotide
ugccucauuauaaccugca

SEQ ID NO: 10318 - RNA, 19 nt, Artificial Sequence
  Description of Artificial Sequence: Synthetic oligonucleotide
aaauacuaugacaucccaa

SEQ ID NO: 10319 - RNA, 19 nt, Artificial Sequence
  Description of Artificial Sequence: Synthetic oligonucleotide
cagcaaaauuguuacgcug

SEQ ID NO: 10320 - RNA, 19 nt, Artificial Sequence
  Description of Artificial Sequence: Synthetic oligonucleotide
uugggcuaugugauauaag

SEQ ID NO: 10321 - RNA, 19 nt, Artificial Sequence
  Description of Artificial Sequence: Synthetic oligonucleotide
cuauguguaagacaugugu

SEQ ID NO: 10322 - RNA, 19 nt, Artificial Sequence
  Description of Artificial Sequence: Synthetic oligonucleotide
uggcucuaauauaccuugg

SEQ ID NO: 10323 - RNA, 19 nt, Artificial Sequence
  Description of Artificial Sequence: Synthetic oligonucleotide
gaggcacguaugcugagug

SEQ ID NO: 10324 - RNA, 19 nt, Artificial Sequence
  Description of Artificial Sequence: Synthetic oligonucleotide
uggacauccuaaagugaug

SEQ ID NO: 10325 - RNA, 19 nt, Artificial Sequence
  Description of Artificial Sequence: Synthetic oligonucleotide
acuugccucauuauaaccu

SEQ ID NO: 10326 - RNA, 19 nt, Artificial Sequence
  Description of Artificial Sequence: Synthetic oligonucleotide
aaagcuaacuugccucauu

SEQ ID NO: 10327 - RNA, 19 nt, Artificial Sequence
  Description of Artificial Sequence: Synthetic oligonucleotide
auaaacacgcuuucagcua

SEQ ID NO: 10328 - RNA, 19 nt, Artificial Sequence
  Description of Artificial Sequence: Synthetic oligonucleotide
gagaaccuauucuaaacua

SEQ ID NO: 10329 - RNA, 19 nt, Artificial Sequence
  Description of Artificial Sequence: Synthetic oligonucleotide
uauguacgaaguuccacuu

SEQ ID NO: 10330 - RNA, 19 nt, Artificial Sequence
  Description of Artificial Sequence: Synthetic oligonucleotide
auuuugggcuaugugauau

SEQ ID NO: 10331 - RNA, 19 nt, Artificial Sequence
  Description of Artificial Sequence: Synthetic oligonucleotide
uucgccuuaguucccguuc

SEQ ID NO: 10332 - RNA, 19 nt, Artificial Sequence
  Description of Artificial Sequence: Synthetic oligonucleotide
uuaugucgcccaaguaaca

SEQ ID NO: 10333 - RNA, 19 nt, Artificial Sequence
  Description of Artificial Sequence: Synthetic oligonucleotide
uuaaugcgcauuagguuuu

SEQ ID NO: 10334 - RNA, 19 nt, Artificial Sequence
  Description of Artificial Sequence: Synthetic oligonucleotide
aacgucuagaugauucggu

SEQ ID NO: 10335 - RNA, 19 nt, Artificial Sequence
  Description of Artificial Sequence: Synthetic oligonucleotide
uuugggcuaugugauauaa

SEQ ID NO: 10336 - RNA, 19 nt, Artificial Sequence
  Description of Artificial Sequence: Synthetic oligonucleotide
uuacuauguguaagacaug

SEQ ID NO: 10337 - RNA, 19 nt, Artificial Sequence
  Description of Artificial Sequence: Synthetic oligonucleotide
aaaacgaccauaaguccuu

SEQ ID NO: 10338 - RNA, 19 nt, Artificial Sequence
  Description of Artificial Sequence: Synthetic oligonucleotide
uagguuggaacagccuagg

SEQ ID NO: 10339 - RNA, 19 nt, Artificial Sequence
  Description of Artificial Sequence: Synthetic oligonucleotide
uaugcugaaccagaagaau

SEQ ID NO: 10340 - RNA, 19 nt, Artificial Sequence
  Description of Artificial Sequence: Synthetic oligonucleotide
aacgaccauaaguccuuug

SEQ ID NO: 10341 - RNA, 19 nt, Artificial Sequence
  Description of Artificial Sequence: Synthetic oligonucleotide
ccaaauacuaugacauccc

SEQ ID NO: 10342 - RNA, 19 nt, Artificial Sequence
  Description of Artificial Sequence: Synthetic oligonucleotide
  modified_base (6)..(6): a, c, u, g, unknown or other
uugcanacaagaggcacgu

SEQ ID NO: 10343 - RNA, 19 nt, Artificial Sequence
  Description of Artificial Sequence: Synthetic oligonucleotide
acgguaguacccaagugag

SEQ ID NO: 10344 - RNA, 19 nt, Artificial Sequence
  Description of Artificial Sequence: Synthetic oligonucleotide
ccccaaacgcgcaagaagg

SEQ ID NO: 10345 - RNA, 19 nt, Artificial Sequence
  Description of Artificial Sequence: Synthetic oligonucleotide
aguuaucaccugcauaauu

SEQ ID NO: 10346 - RNA, 19 nt, Artificial Sequence
  Description of Artificial Sequence: Synthetic oligonucleotide
uuacgcugaguuucaagau

SEQ ID NO: 10347 - RNA, 19 nt, Artificial Sequence
  Description of Artificial Sequence: Synthetic oligonucleotide
ucccauacugcuaccucga

SEQ ID NO: 10348 - RNA, 19 nt, Artificial Sequence
  Description of Artificial Sequence: Synthetic oligonucleotide
cauugacgaaccucaauga

SEQ ID NO: 10349 - RNA, 19 nt, Artificial Sequence
  Description of Artificial Sequence: Synthetic oligonucleotide
gaaugacgugcaagaaagg

SEQ ID NO: 10350 - RNA, 19 nt, Artificial Sequence
  Description of Artificial Sequence: Synthetic oligonucleotide
gaauaguauugagguggcg

SEQ ID NO: 10351 - RNA, 19 nt, Artificial Sequence
  Description of Artificial Sequence: Synthetic oligonucleotide
aacgcagagcuugugugga

SEQ ID NO: 10352 - RNA, 19 nt, Artificial Sequence
  Description of Artificial Sequence: Synthetic oligonucleotide
accucauuaaugcgcauua

SEQ ID NO: 10353 - RNA, 19 nt, Artificial Sequence
  Description of Artificial Sequence: Synthetic oligonucleotide
gucuagaugauucgguaaa

SEQ ID NO: 10354 - RNA, 19 nt, Artificial Sequence
  Description of Artificial Sequence: Synthetic oligonucleotide
aacuuacuauuagcaagca

SEQ ID NO: 10355 - RNA, 19 nt, Artificial Sequence
  Description of Artificial Sequence: Synthetic oligonucleotide
uggucuacucagaaaugau

SEQ ID NO: 10356 - RNA, 19 nt, Artificial Sequence
  Description of Artificial Sequence: Synthetic oligonucleotide
ucacaacgcaucuucugaa

SEQ ID NO: 10357 - RNA, 19 nt, Artificial Sequence
  Description of Artificial Sequence: Synthetic oligonucleotide
ucuagcgucgaagaagguu

SEQ ID NO: 10358 - RNA, 19 nt, Artificial Sequence
  Description of Artificial Sequence: Synthetic oligonucleotide
gccuagggaaguuaugugc

SEQ ID NO: 10359 - RNA, 19 nt, Artificial Sequence
  Description of Artificial Sequence: Synthetic oligonucleotide
guucccuucgcuuauugua

SEQ ID NO: 10360 - RNA, 19 nt, Artificial Sequence
  Description of Artificial Sequence: Synthetic oligonucleotide
augugugacccauuggaua

SEQ ID NO: 10361 - RNA, 19 nt, Artificial Sequence
  Description of Artificial Sequence: Synthetic oligonucleotide
cucacaacgcaucuucuga

SEQ ID NO: 10362 - RNA, 19 nt, Artificial Sequence
  Description of Artificial Sequence: Synthetic oligonucleotide
gucuaaucuguagacggug

SEQ ID NO: 10363 - RNA, 19 nt, Artificial Sequence
  Description of Artificial Sequence: Synthetic oligonucleotide
uggcuugacgcucgagcag

SEQ ID NO: 10364 - RNA, 19 nt, Artificial Sequence
  Description of Artificial Sequence: Synthetic oligonucleotide
guuuucgccuuaguucccg

SEQ ID NO: 10365 - RNA, 19 nt, Artificial Sequence
  Description of Artificial Sequence: Synthetic oligonucleotide
cccaguaggauugugagac

SEQ ID NO: 10366 - RNA, 19 nt, Artificial Sequence
  Description of Artificial Sequence: Synthetic oligonucleotide
uaagcugauccaacuguuu

SEQ ID NO: 10367 - RNA, 19 nt, Artificial Sequence
  Description of Artificial Sequence: Synthetic oligonucleotide
  modified_base (9)..(9): a, c, u, g, unknown or other
uccuugcanacaagaggca

SEQ ID NO: 10368 - RNA, 19 nt, Artificial Sequence
  Description of Artificial Sequence: Synthetic oligonucleotide
uugacgcucgagcaggcua

SEQ ID NO: 10369 - RNA, 19 nt, Artificial Sequence
  Description of Artificial Sequence: Synthetic oligonucleotide
gcucuaaguaagaagugag

SEQ ID NO: 10370 - RNA, 19 nt, Artificial Sequence
  Description of Artificial Sequence: Synthetic oligonucleotide
acuaagugugugucuccug

SEQ ID NO: 10371 - RNA, 19 nt, Artificial Sequence
  Description of Artificial Sequence: Synthetic oligonucleotide
ugcauuggcccugagggau

SEQ ID NO: 10372 - RNA, 19 nt, Artificial Sequence
  Description of Artificial Sequence: Synthetic oligonucleotide
ucuagaugauucgguaaaa

SEQ ID NO: 10373 - RNA, 19 nt, Artificial Sequence
  Description of Artificial Sequence: Synthetic oligonucleotide
gugacacucgugcuucugc

SEQ ID NO: 10374 - RNA, 19 nt, Artificial Sequence
  Description of Artificial Sequence: Synthetic oligonucleotide
aacgcgcaagaaggacucc

SEQ ID NO: 10375 - RNA, 19 nt, Artificial Sequence
  Description of Artificial Sequence: Synthetic oligonucleotide
gcuuaguauagcuuaaaua

SEQ ID NO: 10376 - RNA, 19 nt, Artificial Sequence
  Description of Artificial Sequence: Synthetic oligonucleotide
gguuauauacgaacuauaa

SEQ ID NO: 10377 - RNA, 19 nt, Artificial Sequence
  Description of Artificial Sequence: Synthetic oligonucleotide
aaccucauuaaugcgcauu

SEQ ID NO: 10378 - RNA, 19 nt, Artificial Sequence
  Description of Artificial Sequence: Synthetic oligonucleotide
auuuuacucuauggaacca

SEQ ID NO: 10379 - RNA, 19 nt, Artificial Sequence
  Description of Artificial Sequence: Synthetic oligonucleotide
gcuacguauucuuucugug

SEQ ID NO: 10380 - RNA, 19 nt, Artificial Sequence
  Description of Artificial Sequence: Synthetic oligonucleotide
guauuuaaguagaggggca

SEQ ID NO: 10381 - RNA, 19 nt, Artificial Sequence
  Description of Artificial Sequence: Synthetic oligonucleotide
ugggugugacuucucguuc

SEQ ID NO: 10382 - RNA, 19 nt, Artificial Sequence
  Description of Artificial Sequence: Synthetic oligonucleotide
uagggaaguuaugugcacu

SEQ ID NO: 10383 - RNA, 19 nt, Artificial Sequence
  Description of Artificial Sequence: Synthetic oligonucleotide
auacuaugacaucccaauu

SEQ ID NO: 10384 - RNA, 19 nt, Artificial Sequence
  Description of Artificial Sequence: Synthetic oligonucleotide
gguaagccuccacuguggg

SEQ ID NO: 10385 - RNA, 19 nt, Artificial Sequence
  Description of Artificial Sequence: Synthetic oligonucleotide
cauggauucaugcugucgu

SEQ ID NO: 10386 - RNA, 19 nt, Artificial Sequence
  Description of Artificial Sequence: Synthetic oligonucleotide
aacccggcagccaaauacu

SEQ ID NO: 10387 - RNA, 19 nt, Artificial Sequence
  Description of Artificial Sequence: Synthetic oligonucleotide
acgucuagaugauucggua

SEQ ID NO: 10388 - RNA, 19 nt, Artificial Sequence
  Description of Artificial Sequence: Synthetic oligonucleotide
uggccaaguggacuuggaa

SEQ ID NO: 10389 - RNA, 19 nt, Artificial Sequence
  Description of Artificial Sequence: Synthetic oligonucleotide
uuacuggauaggccucgac

SEQ ID NO: 10390 - RNA, 19 nt, Artificial Sequence
  Description of Artificial Sequence: Synthetic oligonucleotide
ucugauguagggcgaucuu

SEQ ID NO: 10391 - RNA, 19 nt, Artificial Sequence
  Description of Artificial Sequence: Synthetic oligonucleotide
aucagaggaagggagguua

SEQ ID NO: 10392 - RNA, 19 nt, Artificial Sequence
  Description of Artificial Sequence: Synthetic oligonucleotide
acuuacuggccaaguggac

SEQ ID NO: 10393 - RNA, 19 nt, Artificial Sequence
  Description of Artificial Sequence: Synthetic oligonucleotide
uugagagaaugacgugcaa

SEQ ID NO: 10394 - RNA, 19 nt, Artificial Sequence
  Description of Artificial Sequence: Synthetic oligonucleotide
cugucguaguagcauagca

SEQ ID NO: 10395 - RNA, 19 nt, Artificial Sequence
  Description of Artificial Sequence: Synthetic oligonucleotide
cuggcuugacgcucgagca

SEQ ID NO: 10396 - RNA, 19 nt, Artificial Sequence
  Description of Artificial Sequence: Synthetic oligonucleotide
cuugaguaguaguggcuca

SEQ ID NO: 10397 - RNA, 19 nt, Artificial Sequence
  Description of Artificial Sequence: Synthetic oligonucleotide
cugacuugugggaauaacu

SEQ ID NO: 10398 - RNA, 19 nt, Artificial Sequence
  Description of Artificial Sequence: Synthetic oligonucleotide
uauugcggacucccauacu

SEQ ID NO: 10399 - RNA, 19 nt, Artificial Sequence
  Description of Artificial Sequence: Synthetic oligonucleotide
uacgaacuauaaguaugcu

SEQ ID NO: 10400 - RNA, 19 nt, Artificial Sequence
  Description of Artificial Sequence: Synthetic oligonucleotide
acguauucuuucugugcgu

SEQ ID NO: 10401 - RNA, 19 nt, Artificial Sequence
  Description of Artificial Sequence: Synthetic oligonucleotide
caggacuauucaugucuag

SEQ ID NO: 10402 - RNA, 19 nt, Artificial Sequence
  Description of Artificial Sequence: Synthetic oligonucleotide
gggaacuagaaauguacaa

SEQ ID NO: 10403 - RNA, 19 nt, Artificial Sequence
  Description of Artificial Sequence: Synthetic oligonucleotide
acuauguguaagacaugug

SEQ ID NO: 10404 - RNA, 19 nt, Artificial Sequence
  Description of Artificial Sequence: Synthetic oligonucleotide
auuuaaguagaggggcaau

SEQ ID NO: 10405 - RNA, 19 nt, Artificial Sequence
  Description of Artificial Sequence: Synthetic oligonucleotide
aguuuguagguaacuuacu

SEQ ID NO: 10406 - RNA, 19 nt, Artificial Sequence
  Description of Artificial Sequence: Synthetic oligonucleotide
gaguuugccuuuuguuuaa

SEQ ID NO: 10407 - RNA, 19 nt, Artificial Sequence
  Description of Artificial Sequence: Synthetic oligonucleotide
augauucgguaaaagcaga

SEQ ID NO: 10408 - RNA, 19 nt, Artificial Sequence
  Description of Artificial Sequence: Synthetic oligonucleotide
ccuagucucaugcuuucag

SEQ ID NO: 10409 - RNA, 19 nt, Artificial Sequence
  Description of Artificial Sequence: Synthetic oligonucleotide
uuuugggcuaugugauaua

SEQ ID NO: 10410 - RNA, 19 nt, Artificial Sequence
  Description of Artificial Sequence: Synthetic oligonucleotide
aaggugcauaaagaacuua

SEQ ID NO: 10411 - RNA, 19 nt, Artificial Sequence
  Description of Artificial Sequence: Synthetic oligonucleotide
cuaugugauauaaggcacu

SEQ ID NO: 10412 - RNA, 19 nt, Artificial Sequence
  Description of Artificial Sequence: Synthetic oligonucleotide
agcuaacuugccucauuau

SEQ ID NO: 10413 - RNA, 19 nt, Artificial Sequence
  Description of Artificial Sequence: Synthetic oligonucleotide
ucuuucgauacugcagauu

SEQ ID NO: 10414 - RNA, 19 nt, Artificial Sequence
  Description of Artificial Sequence: Synthetic oligonucleotide
uugcaacccuugguaagcc

SEQ ID NO: 10415 - RNA, 19 nt, Artificial Sequence
  Description of Artificial Sequence: Synthetic oligonucleotide
cauuaaugcgcauuagguu

SEQ ID NO: 10416 - RNA, 19 nt, Artificial Sequence
  Description of Artificial Sequence: Synthetic oligonucleotide
gcgacgacauucuagcguc

SEQ ID NO: 10417 - RNA, 19 nt, Artificial Sequence
  Description of Artificial Sequence: Synthetic oligonucleotide
ggcuugacgcucgagcagg

SEQ ID NO: 10418 - RNA, 19 nt, Artificial Sequence
  Description of Artificial Sequence: Synthetic oligonucleotide
agguuauauacgaacuaua

SEQ ID NO: 10419 - RNA, 19 nt, Artificial Sequence
  Description of Artificial Sequence: Synthetic oligonucleotide
ccauacugcuaccucgagg

SEQ ID NO: 10420 - RNA, 19 nt, Artificial Sequence
  Description of Artificial Sequence: Synthetic oligonucleotide
gcuaacuugccucauuaua

SEQ ID NO: 10421 - RNA, 19 nt, Artificial Sequence
  Description of Artificial Sequence: Synthetic oligonucleotide
gggcuaugugauauaaggc

SEQ ID NO: 10422 - RNA, 19 nt, Artificial Sequence
  Description of Artificial Sequence: Synthetic oligonucleotide
  modified_base (4)..(4): a, c, u, g, unknown or other
gcanacaagaggcacguau

SEQ ID NO: 10423 - RNA, 19 nt, Artificial Sequence
  Description of Artificial Sequence: Synthetic oligonucleotide
caaacgcgcaagaaggacu

SEQ ID NO: 10424 - RNA, 19 nt, Artificial Sequence
  Description of Artificial Sequence: Synthetic oligonucleotide
  modified_base (15)..(15): a, c, u, g, unknown or other
caguaguccuugcanacaa

SEQ ID NO: 10425 - RNA, 19 nt, Artificial Sequence
  Description of Artificial Sequence: Synthetic oligonucleotide
auguacgaaguuccacuuu

SEQ ID NO: 10426 - RNA, 19 nt, Artificial Sequence
  Description of Artificial Sequence: Synthetic oligonucleotide
agcauacaauugaggguuc

SEQ ID NO: 10427 - RNA, 19 nt, Artificial Sequence
  Description of Artificial Sequence: Synthetic oligonucleotide
gaucaaugugccagcaaua

SEQ ID NO: 10428 - RNA, 19 nt, Artificial Sequence
  Description of Artificial Sequence: Synthetic oligonucleotide
ucaacucacaacgcaucuu

SEQ ID NO: 10429 - RNA, 19 nt, Artificial Sequence
  Description of Artificial Sequence: Synthetic oligonucleotide
auaagccuuaccaguuagu

SEQ ID NO: 10430 - RNA, 19 nt, Artificial Sequence
  Description of Artificial Sequence: Synthetic oligonucleotide
uugaagcgacgacauucua

SEQ ID NO: 10431 - RNA, 19 nt, Artificial Sequence
  Description of Artificial Sequence: Synthetic oligonucleotide
ccuagggaaguuaugugca

SEQ ID NO: 10432 - RNA, 19 nt, Artificial Sequence
  Description of Artificial Sequence: Synthetic oligonucleotide
augugauauaaggcacuca

SEQ ID NO: 10433 - RNA, 19 nt, Artificial Sequence
  Description of Artificial Sequence: Synthetic oligonucleotide
agguuaguagaaagacuga

SEQ ID NO: 10434 - RNA, 19 nt, Artificial Sequence
  Description of Artificial Sequence: Synthetic oligonucleotide
agagaccaaccaaacugca

SEQ ID NO: 10435 - RNA, 19 nt, Artificial Sequence
  Description of Artificial Sequence: Synthetic oligonucleotide
ggcaaucuaaauaggcaca

SEQ ID NO: 10436 - RNA, 19 nt, Artificial Sequence
  Description of Artificial Sequence: Synthetic oligonucleotide
cauaugaccuguuuucguu

SEQ ID NO: 10437 - RNA, 19 nt, Artificial Sequence
  Description of Artificial Sequence: Synthetic oligonucleotide
ggguuauauguguauuuaa

SEQ ID NO: 10438 - RNA, 19 nt, Artificial Sequence
  Description of Artificial Sequence: Synthetic oligonucleotide
  modified_base (8)..(8): a, c, u, g, unknown or other
ccuugcanacaagaggcac

SEQ ID NO: 10439 - RNA, 19 nt, Artificial Sequence
  Description of Artificial Sequence: Synthetic oligonucleotide
gacgacauucuagcgucga

SEQ ID NO: 10440 - RNA, 19 nt, Artificial Sequence
  Description of Artificial Sequence: Synthetic oligonucleotide
aauaacccuuugaggcuau

SEQ ID NO: 10441 - RNA, 19 nt, Artificial Sequence
  Description of Artificial Sequence: Synthetic oligonucleotide
aggcacguaugcugagugu

SEQ ID NO: 10442 - RNA, 19 nt, Artificial Sequence
  Description of Artificial Sequence: Synthetic oligonucleotide
cuucgcuuauuguauucua

SEQ ID NO: 10443 - RNA, 19 nt, Artificial Sequence
  Description of Artificial Sequence: Synthetic oligonucleotide
uucuagcgucgaagaaggu

SEQ ID NO: 10444 - RNA, 19 nt, Artificial Sequence
  Description of Artificial Sequence: Synthetic oligonucleotide
auacugcuaccucgaggga

SEQ ID NO: 10445 - RNA, 19 nt, Artificial Sequence
  Description of Artificial Sequence: Synthetic oligonucleotide
uuucgccuuaguucccguu

SEQ ID NO: 10446 - RNA, 19 nt, Artificial Sequence
  Description of Artificial Sequence: Synthetic oligonucleotide
acgacauucuagcgucgaa

SEQ ID NO: 10447 - RNA, 19 nt, Artificial Sequence
  Description of Artificial Sequence: Synthetic oligonucleotide
guacgaaguuccacuuuac

SEQ ID NO: 10448 - RNA, 19 nt, Artificial Sequence
  Description of Artificial Sequence: Synthetic oligonucleotide
agaggcacguaugcugagu

SEQ ID NO: 10449 - RNA, 19 nt, Artificial Sequence
  Description of Artificial Sequence: Synthetic oligonucleotide
auccgaggguaggaauuuc

SEQ ID NO: 10450 - RNA, 19 nt, Artificial Sequence
  Description of Artificial Sequence: Synthetic oligonucleotide
cuauucccacuuuuaaaau

SEQ ID NO: 10451 - RNA, 19 nt, Artificial Sequence
  Description of Artificial Sequence: Synthetic oligonucleotide
aucuuagcuacaaggcaua

SEQ ID NO: 10452 - RNA, 19 nt, Artificial Sequence
  Description of Artificial Sequence: Synthetic oligonucleotide
acgcgcaagaaggacucca

SEQ ID NO: 10453 - RNA, 19 nt, Artificial Sequence
  Description of Artificial Sequence: Synthetic oligonucleotide
aaacgaccauaaguccuuu

SEQ ID NO: 10454 - RNA, 19 nt, Artificial Sequence
  Description of Artificial Sequence: Synthetic oligonucleotide
ucccugacaagguccuguu

SEQ ID NO: 10455 - RNA, 19 nt, Artificial Sequence
  Description of Artificial Sequence: Synthetic oligonucleotide
gacgcucgagcaggcuacg

SEQ ID NO: 10456 - RNA, 19 nt, Artificial Sequence
  Description of Artificial Sequence: Synthetic oligonucleotide
ucccuucgcuuauuguauu

SEQ ID NO: 10457 - RNA, 19 nt, Artificial Sequence
  Description of Artificial Sequence: Synthetic oligonucleotide
ggacuauucaugucuaguu

SEQ ID NO: 10458 - RNA, 19 nt, Artificial Sequence
  Description of Artificial Sequence: Synthetic oligonucleotide
guaagacaugugugaccca

SEQ ID NO: 10459 - RNA, 19 nt, Artificial Sequence
  Description of Artificial Sequence: Synthetic oligonucleotide
gcaaacacucucugauguc

SEQ ID NO: 10460 - RNA, 19 nt, Artificial Sequence
  Description of Artificial Sequence: Synthetic oligonucleotide
gaccaacuagaagcuccug

SEQ ID NO: 10461 - RNA, 19 nt, Artificial Sequence
  Description of Artificial Sequence: Synthetic oligonucleotide
ggaauaacugaaacagacu

SEQ ID NO: 10462 - RNA, 19 nt, Artificial Sequence
  Description of Artificial Sequence: Synthetic oligonucleotide
aagacaugugugacccauu

SEQ ID NO: 10463 - RNA, 19 nt, Artificial Sequence
  Description of Artificial Sequence: Synthetic oligonucleotide
ggauacuaagccaagccau

SEQ ID NO: 10464 - RNA, 19 nt, Artificial Sequence
  Description of Artificial Sequence: Synthetic oligonucleotide
gccucauuauaaccugcac

SEQ ID NO: 10465 - RNA, 19 nt, Artificial Sequence
  Description of Artificial Sequence: Synthetic oligonucleotide
cuccgcuaauucaauacau

SEQ ID NO: 10466 - RNA, 19 nt, Artificial Sequence
  Description of Artificial Sequence: Synthetic oligonucleotide
cuaugacaucccaauuagu

SEQ ID NO: 10467 - RNA, 19 nt, Artificial Sequence
  Description of Artificial Sequence: Synthetic oligonucleotide
caugugugacccauuggau

SEQ ID NO: 10468 - RNA, 19 nt, Artificial Sequence
  Description of Artificial Sequence: Synthetic oligonucleotide
gucacaauuuaggguuaga

SEQ ID NO: 10469 - RNA, 19 nt, Artificial Sequence
  Description of Artificial Sequence: Synthetic oligonucleotide
cggacucccauacugcuac

SEQ ID NO: 10470 - RNA, 19 nt, Artificial Sequence
  Description of Artificial Sequence: Synthetic oligonucleotide
ggcuacguauucuuucugu

SEQ ID NO: 10471 - RNA, 19 nt, Artificial Sequence
  Description of Artificial Sequence: Synthetic oligonucleotide
ccaaacgcgcaagaaggac

SEQ ID NO: 10472 - RNA, 19 nt, Artificial Sequence
  Description of Artificial Sequence: Synthetic oligonucleotide
gcuauugcggacucccaua

SEQ ID NO: 10473 - RNA, 19 nt, Artificial Sequence
  Description of Artificial Sequence: Synthetic oligonucleotide
cgacauucuagcgucgaag

SEQ ID NO: 10474 - RNA, 19 nt, Artificial Sequence
  Description of Artificial Sequence: Synthetic oligonucleotide
gaaggugcauaaagaacuu

SEQ ID NO: 10475 - RNA, 19 nt, Artificial Sequence
  Description of Artificial Sequence: Synthetic oligonucleotide
accuagucucaugcuuuca

SEQ ID NO: 10476 - RNA, 19 nt, Artificial Sequence
  Description of Artificial Sequence: Synthetic oligonucleotide
ggagacucccuacaccaua

SEQ ID NO: 10477 - RNA, 19 nt, Artificial Sequence
  Description of Artificial Sequence: Synthetic oligonucleotide
auauuacauaugaccuguu

SEQ ID NO: 10478 - RNA, 19 nt, Artificial Sequence
  Description of Artificial Sequence: Synthetic oligonucleotide
cucguucaggacuauucau

SEQ ID NO: 10479 - RNA, 19 nt, Artificial Sequence
  Description of Artificial Sequence: Synthetic oligonucleotide
ccgcuaauucaauacaugu

SEQ ID NO: 10480 - RNA, 19 nt, Artificial Sequence
  Description of Artificial Sequence: Synthetic oligonucleotide
gcugucguaguagcauagc

SEQ ID NO: 10481 - RNA, 19 nt, Artificial Sequence
  Description of Artificial Sequence: Synthetic oligonucleotide
gagacucccuacaccauau

SEQ ID NO: 10482 - RNA, 19 nt, Artificial Sequence
  Description of Artificial Sequence: Synthetic oligonucleotide
  modified_base (5)..(5): a, c, u, g, unknown or other
ugcanacaagaggcacgua

SEQ ID NO: 10483 - RNA, 19 nt, Artificial Sequence
  Description of Artificial Sequence: Synthetic oligonucleotide
ccugacuugugggaauaac

SEQ ID NO: 10484 - RNA, 19 nt, Artificial Sequence
  Description of Artificial Sequence: Synthetic oligonucleotide
gacucccauacugcuaccu

SEQ ID NO: 10485 - RNA, 19 nt, Artificial Sequence
  Description of Artificial Sequence: Synthetic oligonucleotide
gaccugacuugugggaaua

SEQ ID NO: 10486 - RNA, 19 nt, Artificial Sequence
  Description of Artificial Sequence: Synthetic oligonucleotide
aggccucgacuugagacua

SEQ ID NO: 10487 - RNA, 19 nt, Artificial Sequence
  Description of Artificial Sequence: Synthetic oligonucleotide
ccucauuaaugcgcauuag

SEQ ID NO: 10488 - RNA, 19 nt, Artificial Sequence
  Description of Artificial Sequence: Synthetic oligonucleotide
ggcacguaugcugagugua

SEQ ID NO: 10489 - RNA, 19 nt, Artificial Sequence
  Description of Artificial Sequence: Synthetic oligonucleotide
augucacaauuuaggguua

SEQ ID NO: 10490 - RNA, 19 nt, Artificial Sequence
  Description of Artificial Sequence: Synthetic oligonucleotide
ugcuaccucgagggacccc

SEQ ID NO: 10491 - RNA, 19 nt, Artificial Sequence
  Description of Artificial Sequence: Synthetic oligonucleotide
gccucgacuugagacuaag

SEQ ID NO: 10492 - RNA, 19 nt, Artificial Sequence
  Description of Artificial Sequence: Synthetic oligonucleotide
cacaacgcaucuucugaau

SEQ ID NO: 10493 - RNA, 19 nt, Artificial Sequence
  Description of Artificial Sequence: Synthetic oligonucleotide
ggacuaaaucucagcuuga

SEQ ID NO: 10494 - RNA, 19 nt, Artificial Sequence
  Description of Artificial Sequence: Synthetic oligonucleotide
ggcacaauucccauuuaau

SEQ ID NO: 10495 - RNA, 19 nt, Artificial Sequence
  Description of Artificial Sequence: Synthetic oligonucleotide
ggggugggagacucccuac

SEQ ID NO: 10496 - RNA, 19 nt, Artificial Sequence
  Description of Artificial Sequence: Synthetic oligonucleotide
cggaauucuggaaguagga

SEQ ID NO: 10497 - RNA, 19 nt, Artificial Sequence
  Description of Artificial Sequence: Synthetic oligonucleotide
cgguaguacccaagugagg

SEQ ID NO: 10498 - RNA, 19 nt, Artificial Sequence
  Description of Artificial Sequence: Synthetic oligonucleotide
ccgaggguaggaauuucca

SEQ ID NO: 10499 - RNA, 19 nt, Artificial Sequence
  Description of Artificial Sequence: Synthetic oligonucleotide
gggaucaaugugccagcaa

SEQ ID NO: 10500 - RNA, 19 nt, Artificial Sequence
  Description of Artificial Sequence: Synthetic oligonucleotide
cccuguuccguccgucccc

SEQ ID NO: 10501 - RNA, 19 nt, Artificial Sequence
  Description of Artificial Sequence: Synthetic oligonucleotide
gcucgagcaggcuacguau

SEQ ID NO: 10502 - RNA, 19 nt, Artificial Sequence
  Description of Artificial Sequence: Synthetic oligonucleotide
caaucgacugaagcauugu

SEQ ID NO: 10503 - RNA, 19 nt, Artificial Sequence
  Description of Artificial Sequence: Synthetic oligonucleotide
guaguguaggggauucauu

SEQ ID NO: 10504 - RNA, 19 nt, Artificial Sequence
  Description of Artificial Sequence: Synthetic oligonucleotide
cccaaacgcgcaagaagga

SEQ ID NO: 10505 - RNA, 19 nt, Artificial Sequence
  Description of Artificial Sequence: Synthetic oligonucleotide
cgucuagaugauucgguaa

SEQ ID NO: 10506 - RNA, 19 nt, Artificial Sequence
  Description of Artificial Sequence: Synthetic oligonucleotide
ggcuauugcggacucccau

SEQ ID NO: 10507 - RNA, 19 nt, Artificial Sequence
  Description of Artificial Sequence: Synthetic oligonucleotide
ggcgcucucgaagaacaaa

SEQ ID NO: 10508 - RNA, 19 nt, Artificial Sequence
  Description of Artificial Sequence: Synthetic oligonucleotide
caaucuaaauaggcacaau

SEQ ID NO: 10509 - RNA, 19 nt, Artificial Sequence
  Description of Artificial Sequence: Synthetic oligonucleotide
gcuaccucgagggaccccu

SEQ ID NO: 10510 - RNA, 19 nt, Artificial Sequence
  Description of Artificial Sequence: Synthetic oligonucleotide
cgacgacauucuagcgucg

SEQ ID NO: 10511 - RNA, 19 nt, Artificial Sequence
  Description of Artificial Sequence: Synthetic oligonucleotide
acccggcagccaaauacua

SEQ ID NO: 10512 - RNA, 19 nt, Artificial Sequence
  Description of Artificial Sequence: Synthetic oligonucleotide
cgggcgcucucgaagaaca

SEQ ID NO: 10513 - RNA, 19 nt, Artificial Sequence
  Description of Artificial Sequence: Synthetic oligonucleotide
gggaaguuaugugcacugu

SEQ ID NO: 10514 - RNA, 19 nt, Artificial Sequence
  Description of Artificial Sequence: Synthetic oligonucleotide
gcgcaagaaggacuccaua

SEQ ID NO: 10515 - RNA, 19 nt, Artificial Sequence
  Description of Artificial Sequence: Synthetic oligonucleotide
cugcccuaauauuguguuu

SEQ ID NO: 10516 - RNA, 19 nt, Artificial Sequence
  Description of Artificial Sequence: Synthetic oligonucleotide
caaagcuaacuugccucau

SEQ ID NO: 10517 - RNA, 19 nt, Artificial Sequence
  Description of Artificial Sequence: Synthetic oligonucleotide
ccuucgcuuauuguauucu

SEQ ID NO: 10518 - RNA, 19 nt, Artificial Sequence
  Description of Artificial Sequence: Synthetic oligonucleotide
cuugacgcucgagcaggcu

SEQ ID NO: 10519 - RNA, 19 nt, Artificial Sequence
  Description of Artificial Sequence: Synthetic oligonucleotide
caaccucauuaaugcgcau

SEQ ID NO: 10520 - RNA, 19 nt, Artificial Sequence
  Description of Artificial Sequence: Synthetic oligonucleotide
ggguguuguguuggacuaa

SEQ ID NO: 10521 - RNA, 19 nt, Artificial Sequence
  Description of Artificial Sequence: Synthetic oligonucleotide
ccuuaguucccguucccuu

SEQ ID NO: 10522 - RNA, 19 nt, Artificial Sequence
  Description of Artificial Sequence: Synthetic oligonucleotide
cccacucuaugccaguuuu

SEQ ID NO: 10523 - RNA, 19 nt, Artificial Sequence
  Description of Artificial Sequence: Synthetic oligonucleotide
ccgggcgcucucgaagaac

SEQ ID NO: 10524 - RNA, 19 nt, Artificial Sequence
  Description of Artificial Sequence: Synthetic oligonucleotide
ccgcacauguggaaugaau

SEQ ID NO: 10525 - RNA, 19 nt, Artificial Sequence
  Description of Artificial Sequence: Synthetic oligonucleotide
ggccaacccuaggcauuug

SEQ ID NO: 10526 - RNA, 19 nt, Artificial Sequence
  Description of Artificial Sequence: Synthetic oligonucleotide
ccucgacuugagacuaagu

SEQ ID NO: 10527 - RNA, 19 nt, Artificial Sequence
  Description of Artificial Sequence: Synthetic oligonucleotide
gcggacucccauacugcua

SEQ ID NO: 10528 - RNA, 19 nt, Artificial Sequence
  Description of Artificial Sequence: Synthetic oligonucleotide
cguucccuucgcuuauugu

SEQ ID NO: 10529 - RNA, 19 nt, Artificial Sequence
  Description of Artificial Sequence: Synthetic oligonucleotide
gggcgcucucgaagaacaa

SEQ ID NO: 10530 - RNA, 19 nt, Artificial Sequence
  Description of Artificial Sequence: Synthetic oligonucleotide
ggcuaacuuccgagucugu

SEQ ID NO: 10531 - RNA, 19 nt, Artificial Sequence
  Description of Artificial Sequence: Synthetic oligonucleotide
ggccucgacuugagacuaa

SEQ ID NO: 10532 - RNA, 19 nt, Artificial Sequence
  Description of Artificial Sequence: Synthetic oligonucleotide
cccuaggcauuugcacaaa

SEQ ID NO: 10533 - RNA, 19 nt, Artificial Sequence
  Description of Artificial Sequence: Synthetic oligonucleotide
aauauuuccauguagcuac

SEQ ID NO: 10534 - RNA, 19 nt, Artificial Sequence
  Description of Artificial Sequence: Synthetic oligonucleotide
aaaauugucaauuacgaga

SEQ ID NO: 10535 - RNA, 19 nt, Artificial Sequence
  Description of Artificial Sequence: Synthetic oligonucleotide
aauaaugugcaguaauaac

SEQ ID NO: 10536 - RNA, 19 nt, Artificial Sequence
  Description of Artificial Sequence: Synthetic oligonucleotide
acguuuauguaucauaucc

SEQ ID NO: 10537 - RNA, 19 nt, Artificial Sequence
  Description of Artificial Sequence: Synthetic oligonucleotide
aaucuaucuacgcuaaugg

SEQ ID NO: 10538 - RNA, 19 nt, Artificial Sequence
  Description of Artificial Sequence: Synthetic oligonucleotide
aauuaugcuguguaaacag

SEQ ID NO: 10539 - RNA, 19 nt, Artificial Sequence
  Description of Artificial Sequence: Synthetic oligonucleotide
ucuaaaacgaguaaaugca

SEQ ID NO: 10540 - RNA, 19 nt, Artificial Sequence
  Description of Artificial Sequence: Synthetic oligonucleotide
uacgagaugauuaugacac

SEQ ID NO: 10541 - RNA, 19 nt, Artificial Sequence
  Description of Artificial Sequence: Synthetic oligonucleotide
aucagaauauccuaucagc

SEQ ID NO: 10542 - RNA, 19 nt, Artificial Sequence
  Description of Artificial Sequence: Synthetic oligonucleotide
aacccaaugaaauaaugug

SEQ ID NO: 10543 - RNA, 19 nt, Artificial Sequence
  Description of Artificial Sequence: Synthetic oligonucleotide
ucaguuauaaauuggcggc

SEQ ID NO: 10544 - RNA, 19 nt, Artificial Sequence
  Description of Artificial Sequence: Synthetic oligonucleotide
ugauugauaugcuagaagu

SEQ ID NO: 10545 - RNA, 19 nt, Artificial Sequence
  Description of Artificial Sequence: Synthetic oligonucleotide
cuaucaagaguccagaaag

SEQ ID NO: 10546 - RNA, 19 nt, Artificial Sequence
  Description of Artificial Sequence: Synthetic oligonucleotide
aaaauuguguaggagccac

SEQ ID NO: 10547 - RNA, 19 nt, Artificial Sequence
  Description of Artificial Sequence: Synthetic oligonucleotide
aggaaauuaaugucuacuc

SEQ ID NO: 10548 - RNA, 19 nt, Artificial Sequence
  Description of Artificial Sequence: Synthetic oligonucleotide
auaaggauaaagucuguag

SEQ ID NO: 10549 - RNA, 19 nt, Artificial Sequence
  Description of Artificial Sequence: Synthetic oligonucleotide
uauauuuaccauuagucau

SEQ ID NO: 10550 - RNA, 19 nt, Artificial Sequence
  Description of Artificial Sequence: Synthetic oligonucleotide
aacgcuuuugucaugauug

SEQ ID NO: 10551 - RNA, 19 nt, Artificial Sequence
  Description of Artificial Sequence: Synthetic oligonucleotide
ucuacucuuaucaaaagua

SEQ ID NO: 10552 - RNA, 19 nt, Artificial Sequence
  Description of Artificial Sequence: Synthetic oligonucleotide
gaauugauugauaugcuag

SEQ ID NO: 10553 - RNA, 19 nt, Artificial Sequence
  Description of Artificial Sequence: Synthetic oligonucleotide
uuaaccugcuuuauuuggg

SEQ ID NO: 10554 - RNA, 19 nt, Artificial Sequence
  Description of Artificial Sequence: Synthetic oligonucleotide
uuuacgacaggaaugcaac

SEQ ID NO: 10555 - RNA, 19 nt, Artificial Sequence
  Description of Artificial Sequence: Synthetic oligonucleotide
uuauguaucauauccugcu

SEQ ID NO: 10556 - RNA, 19 nt, Artificial Sequence
  Description of Artificial Sequence: Synthetic oligonucleotide
uuccguaucggcaacacug

SEQ ID NO: 10557 - RNA, 19 nt, Artificial Sequence
  Description of Artificial Sequence: Synthetic oligonucleotide
uaugccgccacauuuaaga

SEQ ID NO: 10558 - RNA, 19 nt, Artificial Sequence
  Description of Artificial Sequence: Synthetic oligonucleotide
aaugguuaggcugcugacc

SEQ ID NO: 10559 - RNA, 19 nt, Artificial Sequence
  Description of Artificial Sequence: Synthetic oligonucleotide
aauucaacgugcuccacca

SEQ ID NO: 10560 - RNA, 19 nt, Artificial Sequence
  Description of Artificial Sequence: Synthetic oligonucleotide
auuacgagaugauuaugac

SEQ ID NO: 10561 - RNA, 19 nt, Artificial Sequence
  Description of Artificial Sequence: Synthetic oligonucleotide
ugaucgaaagcuauugaug

SEQ ID NO: 10562 - RNA, 19 nt, Artificial Sequence
  Description of Artificial Sequence: Synthetic oligonucleotide
ucuaucuacgcuaauggaa

SEQ ID NO: 10563 - RNA, 19 nt, Artificial Sequence
  Description of Artificial Sequence: Synthetic oligonucleotide
agaguuaucuccccacccc

SEQ ID NO: 10564 - RNA, 19 nt, Artificial Sequence
  Description of Artificial Sequence: Synthetic oligonucleotide
uuaacuguagacugcuucc

SEQ ID NO: 10565 - RNA, 19 nt, Artificial Sequence
  Description of Artificial Sequence: Synthetic oligonucleotide
aaaucuaucuacgcuaaug

SEQ ID NO: 10566 - RNA, 19 nt, Artificial Sequence
  Description of Artificial Sequence: Synthetic oligonucleotide
uauaaucagaauauccuau

SEQ ID NO: 10567 - RNA, 19 nt, Artificial Sequence
  Description of Artificial Sequence: Synthetic oligonucleotide
acucgugacauucuacagc

SEQ ID NO: 10568 - RNA, 19 nt, Artificial Sequence
  Description of Artificial Sequence: Synthetic oligonucleotide
uugauugauaugcuagaag

SEQ ID NO: 10569 - RNA, 19 nt, Artificial Sequence
  Description of Artificial Sequence: Synthetic oligonucleotide
uguagcuacccauucaagc

SEQ ID NO: 10570 - RNA, 19 nt, Artificial Sequence
  Description of Artificial Sequence: Synthetic oligonucleotide
aauuacgagaugauuauga

SEQ ID NO: 10571 - RNA, 19 nt, Artificial Sequence
  Description of Artificial Sequence: Synthetic oligonucleotide
aacggaaaagguuuaaauu

SEQ ID NO: 10572 - RNA, 19 nt, Artificial Sequence
  Description of Artificial Sequence: Synthetic oligonucleotide
acauucagcgcguacuccc

SEQ ID NO: 10573 - RNA, 19 nt, Artificial Sequence
  Description of Artificial Sequence: Synthetic oligonucleotide
uucguauaaggauaaaguc

SEQ ID NO: 10574 - RNA, 19 nt, Artificial Sequence
  Description of Artificial Sequence: Synthetic oligonucleotide
guuuauguaucauauccug

SEQ ID NO: 10575 - RNA, 19 nt, Artificial Sequence
  Description of Artificial Sequence: Synthetic oligonucleotide
aacucguuaacccucguaa

SEQ ID NO: 10576 - RNA, 19 nt, Artificial Sequence
  Description of Artificial Sequence: Synthetic oligonucleotide
uauacaacggccucuacau

SEQ ID NO: 10577 - RNA, 19 nt, Artificial Sequence
  Description of Artificial Sequence: Synthetic oligonucleotide
agcgauuucaccugaguag

SEQ ID NO: 10578 - RNA, 19 nt, Artificial Sequence
  Description of Artificial Sequence: Synthetic oligonucleotide
ugucauaacaaaguguaga

SEQ ID NO: 10579 - RNA, 19 nt, Artificial Sequence
  Description of Artificial Sequence: Synthetic oligonucleotide
gucaguucgagucugauga

SEQ ID NO: 10580 - RNA, 19 nt, Artificial Sequence
  Description of Artificial Sequence: Synthetic oligonucleotide
uuacuuaacccauggaacu

SEQ ID NO: 10581 - RNA, 19 nt, Artificial Sequence
  Description of Artificial Sequence: Synthetic oligonucleotide
ugaucuaaaacgaguaaau

SEQ ID NO: 10582 - RNA, 19 nt, Artificial Sequence
  Description of Artificial Sequence: Synthetic oligonucleotide
ucguaauuaguacugcugu

SEQ ID NO: 10583 - RNA, 19 nt, Artificial Sequence
  Description of Artificial Sequence: Synthetic oligonucleotide
uauaacggugacaacacau

SEQ ID NO: 10584 - RNA, 19 nt, Artificial Sequence
  Description of Artificial Sequence: Synthetic oligonucleotide
uuacguuccaacagaagga

SEQ ID NO: 10585 - RNA, 19 nt, Artificial Sequence
  Description of Artificial Sequence: Synthetic oligonucleotide
ucuucguauaaggauaaag

SEQ ID NO: 10586 - RNA, 19 nt, Artificial Sequence
  Description of Artificial Sequence: Synthetic oligonucleotide
aaauugaguugcuauccca

SEQ ID NO: 10587 - RNA, 19 nt, Artificial Sequence
  Description of Artificial Sequence: Synthetic oligonucleotide
acgacaggaaugcaacacc

SEQ ID NO: 10588 - RNA, 19 nt, Artificial Sequence
  Description of Artificial Sequence: Synthetic oligonucleotide
aacgaaaugcagguauugg

SEQ ID NO: 10589 - RNA, 19 nt, Artificial Sequence
  Description of Artificial Sequence: Synthetic oligonucleotide
acccgauuaauucuaagug

SEQ ID NO: 10590 - RNA, 19 nt, Artificial Sequence
  Description of Artificial Sequence: Synthetic oligonucleotide
aaugcgcacuaaccaaacg

SEQ ID NO: 10591 - RNA, 19 nt, Artificial Sequence
  Description of Artificial Sequence: Synthetic oligonucleotide
uggauuaucuugcuauucu

SEQ ID NO: 10592 - RNA, 19 nt, Artificial Sequence
  Description of Artificial Sequence: Synthetic oligonucleotide
uaguaaccaacuugggagg

SEQ ID NO: 10593 - RNA, 19 nt, Artificial Sequence
  Description of Artificial Sequence: Synthetic oligonucleotide
ugcaauaguagaccaucag

SEQ ID NO: 10594 - RNA, 19 nt, Artificial Sequence
  Description of Artificial Sequence: Synthetic oligonucleotide
ucuaaagcagugacgggug

SEQ ID NO: 10595 - RNA, 19 nt, Artificial Sequence
  Description of Artificial Sequence: Synthetic oligonucleotide
ucaauuacgagaugauuau

SEQ ID NO: 10596 - RNA, 19 nt, Artificial Sequence
  Description of Artificial Sequence: Synthetic oligonucleotide
aaugcuggcggauuuggaa

SEQ ID NO: 10597 - RNA, 19 nt, Artificial Sequence
  Description of Artificial Sequence: Synthetic oligonucleotide
uaucauauccugcugucuc

SEQ ID NO: 10598 - RNA, 19 nt, Artificial Sequence
  Description of Artificial Sequence: Synthetic oligonucleotide
ugacuaggcaugaaacaag

SEQ ID NO: 10599 - RNA, 19 nt, Artificial Sequence
  Description of Artificial Sequence: Synthetic oligonucleotide
ugugcgaaagucuuuuccu

SEQ ID NO: 10600 - RNA, 19 nt, Artificial Sequence
  Description of Artificial Sequence: Synthetic oligonucleotide
agcuauucuaaacccaaug

SEQ ID NO: 10601 - RNA, 19 nt, Artificial Sequence
  Description of Artificial Sequence: Synthetic oligonucleotide
ugugaagcgauuucaccug

SEQ ID NO: 10602 - RNA, 19 nt, Artificial Sequence
  Description of Artificial Sequence: Synthetic oligonucleotide
uuuagugcuugaagaguag

SEQ ID NO: 10603 - RNA, 19 nt, Artificial Sequence
  Description of Artificial Sequence: Synthetic oligonucleotide
aaagccguacugugauugg

SEQ ID NO: 10604 - RNA, 19 nt, Artificial Sequence
  Description of Artificial Sequence: Synthetic oligonucleotide
acgccuucuaacauaaagc

SEQ ID NO: 10605 - RNA, 19 nt, Artificial Sequence
  Description of Artificial Sequence: Synthetic oligonucleotide
aguguuacguuccaacaga

SEQ ID NO: 10606 - RNA, 19 nt, Artificial Sequence
  Description of Artificial Sequence: Synthetic oligonucleotide
uaaagccguacugugauug

SEQ ID NO: 10607 - RNA, 19 nt, Artificial Sequence
  Description of Artificial Sequence: Synthetic oligonucleotide
aauauccuaucagccuacc

SEQ ID NO: 10608 - RNA, 19 nt, Artificial Sequence
  Description of Artificial Sequence: Synthetic oligonucleotide
cucguuaacccucguaacg

SEQ ID NO: 10609 - RNA, 19 nt, Artificial Sequence
  Description of Artificial Sequence: Synthetic oligonucleotide
caaggucccggcaaggugg

SEQ ID NO: 10610 - RNA, 19 nt, Artificial Sequence
  Description of Artificial Sequence: Synthetic oligonucleotide
auaugcuagaagucacuuc

SEQ ID NO: 10611 - RNA, 19 nt, Artificial Sequence
  Description of Artificial Sequence: Synthetic oligonucleotide
uacccgauuaauucuaagu

SEQ ID NO: 10612 - RNA, 19 nt, Artificial Sequence
  Description of Artificial Sequence: Synthetic oligonucleotide
uuaucagcuugcuaugaac

SEQ ID NO: 10613 - RNA, 19 nt, Artificial Sequence
  Description of Artificial Sequence: Synthetic oligonucleotide
guuaacuguagacugcuuc

SEQ ID NO: 10614 - RNA, 19 nt, Artificial Sequence
  Description of Artificial Sequence: Synthetic oligonucleotide
cuagugcucauguuuuggg

SEQ ID NO: 10615 - RNA, 19 nt, Artificial Sequence
  Description of Artificial Sequence: Synthetic oligonucleotide
agugagcgcagacgaagcc

SEQ ID NO: 10616 - RNA, 19 nt, Artificial Sequence
  Description of Artificial Sequence: Synthetic oligonucleotide
aguauaauucaaacccaac

SEQ ID NO: 10617 - RNA, 19 nt, Artificial Sequence
  Description of Artificial Sequence: Synthetic oligonucleotide
aaacgaaaugcagguauug

SEQ ID NO: 10618 - RNA, 19 nt, Artificial Sequence
  Description of Artificial Sequence: Synthetic oligonucleotide
caucguguagauuuaaaga

SEQ ID NO: 10619 - RNA, 19 nt, Artificial Sequence
  Description of Artificial Sequence: Synthetic oligonucleotide
gaacucgugacauucuaca

SEQ ID NO: 10620 - RNA, 19 nt, Artificial Sequence
  Description of Artificial Sequence: Synthetic oligonucleotide
acaugcgcacuguagauca

SEQ ID NO: 10621 - RNA, 19 nt, Artificial Sequence
  Description of Artificial Sequence: Synthetic oligonucleotide
ugcuaauaagccaggucug

SEQ ID NO: 10622 - RNA, 19 nt, Artificial Sequence
  Description of Artificial Sequence: Synthetic oligonucleotide
gaugauuaugacacaacca

SEQ ID NO: 10623 - RNA, 19 nt, Artificial Sequence
  Description of Artificial Sequence: Synthetic oligonucleotide
acacacggaaaagaugagc

SEQ ID NO: 10624 - RNA, 19 nt, Artificial Sequence
  Description of Artificial Sequence: Synthetic oligonucleotide
cucacuucaagcuauaagu

SEQ ID NO: 10625 - RNA, 19 nt, Artificial Sequence
  Description of Artificial Sequence: Synthetic oligonucleotide
uguuacguuccaacagaag

SEQ ID NO: 10626 - RNA, 19 nt, Artificial Sequence
  Description of Artificial Sequence: Synthetic oligonucleotide
cccauuacaaccauugccc

SEQ ID NO: 10627 - RNA, 19 nt, Artificial Sequence
  Description of Artificial Sequence: Synthetic oligonucleotide
ugggucgauagcaagguuc

SEQ ID NO: 10628 - RNA, 19 nt, Artificial Sequence
  Description of Artificial Sequence: Synthetic oligonucleotide
aauuaggaaugcauaacau

SEQ ID NO: 10629 - RNA, 19 nt, Artificial Sequence
  Description of Artificial Sequence: Synthetic oligonucleotide
guagcuacccauucaagca

SEQ ID NO: 10630 - RNA, 19 nt, Artificial Sequence
  Description of Artificial Sequence: Synthetic oligonucleotide
ucguguagauuuaaagaaa

SEQ ID NO: 10631 - RNA, 19 nt, Artificial Sequence
  Description of Artificial Sequence: Synthetic oligonucleotide
uccacaagcucaaaugcau

SEQ ID NO: 10632 - RNA, 19 nt, Artificial Sequence
  Description of Artificial Sequence: Synthetic oligonucleotide
gaggaaugcgcacuaacca

SEQ ID NO: 10633 - RNA, 19 nt, Artificial Sequence
  Description of Artificial Sequence: Synthetic oligonucleotide
ugucuacucuuaucaaaag

SEQ ID NO: 10634 - RNA, 19 nt, Artificial Sequence
  Description of Artificial Sequence: Synthetic oligonucleotide
gcuaugaacucguuaaccc

SEQ ID NO: 10635 - RNA, 19 nt, Artificial Sequence
  Description of Artificial Sequence: Synthetic oligonucleotide
aacaagccgccacugaaaa

SEQ ID NO: 10636 - RNA, 19 nt, Artificial Sequence
  Description of Artificial Sequence: Synthetic oligonucleotide
augcgcacuaaccaaacga

SEQ ID NO: 10637 - RNA, 19 nt, Artificial Sequence
  Description of Artificial Sequence: Synthetic oligonucleotide
auuacguaguugguuacag

SEQ ID NO: 10638 - RNA, 19 nt, Artificial Sequence
  Description of Artificial Sequence: Synthetic oligonucleotide
cauguuuaauuagcaauag

SEQ ID NO: 10639 - RNA, 19 nt, Artificial Sequence
  Description of Artificial Sequence: Synthetic oligonucleotide
ucugauggggugacuucgg

SEQ ID NO: 10640 - RNA, 19 nt, Artificial Sequence
  Description of Artificial Sequence: Synthetic oligonucleotide
aagcgauuucaccugagua

SEQ ID NO: 10641 - RNA, 19 nt, Artificial Sequence
  Description of Artificial Sequence: Synthetic oligonucleotide
uucgagucugaugacuagg

SEQ ID NO: 10642 - RNA, 19 nt, Artificial Sequence
  Description of Artificial Sequence: Synthetic oligonucleotide
augcauugcucuauaacgg

SEQ ID NO: 10643 - RNA, 19 nt, Artificial Sequence
  Description of Artificial Sequence: Synthetic oligonucleotide
aagacuagacagauaaaau

SEQ ID NO: 10644 - RNA, 19 nt, Artificial Sequence
  Description of Artificial Sequence: Synthetic oligonucleotide
uaacggugacaacacauaa

SEQ ID NO: 10645 - RNA, 19 nt, Artificial Sequence
  Description of Artificial Sequence: Synthetic oligonucleotide
aucaucguaauuaguacug

SEQ ID NO: 10646 - RNA, 19 nt, Artificial Sequence
  Description of Artificial Sequence: Synthetic oligonucleotide
ugcgcacuaaccaaacgaa

SEQ ID NO: 10647 - RNA, 19 nt, Artificial Sequence
  Description of Artificial Sequence: Synthetic oligonucleotide
acuuaacccauggaacugg

SEQ ID NO: 10648 - RNA, 19 nt, Artificial Sequence
  Description of Artificial Sequence: Synthetic oligonucleotide
agaauugauugauaugcua

SEQ ID NO: 10649 - RNA, 19 nt, Artificial Sequence
  Description of Artificial Sequence: Synthetic oligonucleotide
gacuaggcaugaaacaagc

SEQ ID NO: 10650 - RNA, 19 nt, Artificial Sequence
  Description of Artificial Sequence: Synthetic oligonucleotide
aaguguagaggaaaccaca

SEQ ID NO: 10651 - RNA, 19 nt, Artificial Sequence
  Description of Artificial Sequence: Synthetic oligonucleotide
accauuacguaguugguua

SEQ ID NO: 10652 - RNA, 19 nt, Artificial Sequence
  Description of Artificial Sequence: Synthetic oligonucleotide
cguauaaggauaaagucug

SEQ ID NO: 10653 - RNA, 19 nt, Artificial Sequence
  Description of Artificial Sequence: Synthetic oligonucleotide
cuucguauaaggauaaagu

SEQ ID NO: 10654 - RNA, 19 nt, Artificial Sequence
  Description of Artificial Sequence: Synthetic oligonucleotide
ugcgcacuguagaucaaag

SEQ ID NO: 10655 - RNA, 19 nt, Artificial Sequence
  Description of Artificial Sequence: Synthetic oligonucleotide
uguugugagcaguauucac

SEQ ID NO: 10656 - RNA, 19 nt, Artificial Sequence
  Description of Artificial Sequence: Synthetic oligonucleotide
cagugguaccauuacguag

SEQ ID NO: 10657 - RNA, 19 nt, Artificial Sequence
  Description of Artificial Sequence: Synthetic oligonucleotide
cuaucuacgcuaauggaaa

SEQ ID NO: 10658 - RNA, 19 nt, Artificial Sequence
  Description of Artificial Sequence: Synthetic oligonucleotide
ugcauugcucuauaacggu

SEQ ID NO: 10659 - RNA, 19 nt, Artificial Sequence
  Description of Artificial Sequence: Synthetic oligonucleotide
caguguuacguuccaacag

SEQ ID NO: 10660 - RNA, 19 nt, Artificial Sequence
  Description of Artificial Sequence: Synthetic oligonucleotide
gauugauaugcuagaaguc

SEQ ID NO: 10661 - RNA, 19 nt, Artificial Sequence
  Description of Artificial Sequence: Synthetic oligonucleotide
gucaauuacgagaugauua

SEQ ID NO: 10662 - RNA, 19 nt, Artificial Sequence
  Description of Artificial Sequence: Synthetic oligonucleotide
gaguaaugaucuagcagag

SEQ ID NO: 10663 - RNA, 19 nt, Artificial Sequence
  Description of Artificial Sequence: Synthetic oligonucleotide
aagaauugauugauaugcu

SEQ ID NO: 10664 - RNA, 19 nt, Artificial Sequence
  Description of Artificial Sequence: Synthetic oligonucleotide
cuaccucuuaggaagauaa

SEQ ID NO: 10665 - RNA, 19 nt, Artificial Sequence
  Description of Artificial Sequence: Synthetic oligonucleotide
gauuaauucuaagugcucu

SEQ ID NO: 10666 - RNA, 19 nt, Artificial Sequence
  Description of Artificial Sequence: Synthetic oligonucleotide
accaacuauuaguccaaag

SEQ ID NO: 10667 - RNA, 19 nt, Artificial Sequence
  Description of Artificial Sequence: Synthetic oligonucleotide
agagugagcgcagacgaag

SEQ ID NO: 10668 - RNA, 19 nt, Artificial Sequence
  Description of Artificial Sequence: Synthetic oligonucleotide
auacguuuauguaucauau

SEQ ID NO: 10669 - RNA, 19 nt, Artificial Sequence
  Description of Artificial Sequence: Synthetic oligonucleotide
aucuaucuacgcuaaugga

SEQ ID NO: 10670 - RNA, 19 nt, Artificial Sequence
  Description of Artificial Sequence: Synthetic oligonucleotide
aucguaauuaguacugcug

SEQ ID NO: 10671 - RNA, 19 nt, Artificial Sequence
  Description of Artificial Sequence: Synthetic oligonucleotide
uguuauaaccugguaggaa

SEQ ID NO: 10672 - RNA, 19 nt, Artificial Sequence
  Description of Artificial Sequence: Synthetic oligonucleotide
aauaacuguguaccacauu

SEQ ID NO: 10673 - RNA, 19 nt, Artificial Sequence
  Description of Artificial Sequence: Synthetic oligonucleotide
uacgacaggaaugcaacac

SEQ ID NO: 10674 - RNA, 19 nt, Artificial Sequence
  Description of Artificial Sequence: Synthetic oligonucleotide
aaucuagugcucauguuuu

SEQ ID NO: 10675 - RNA, 19 nt, Artificial Sequence
  Description of Artificial Sequence: Synthetic oligonucleotide
augacuaggcaugaaacaa

SEQ ID NO: 10676 - RNA, 19 nt, Artificial Sequence
  Description of Artificial Sequence: Synthetic oligonucleotide
aguaaccaacuugggaggg

SEQ ID NO: 10677 - RNA, 19 nt, Artificial Sequence
  Description of Artificial Sequence: Synthetic oligonucleotide
acgucaauuaugcugugua

SEQ ID NO: 10678 - RNA, 19 nt, Artificial Sequence
  Description of Artificial Sequence: Synthetic oligonucleotide
ugaagcgauuucaccugag

SEQ ID NO: 10679 - RNA, 19 nt, Artificial Sequence
  Description of Artificial Sequence: Synthetic oligonucleotide
ucgaggaaugcgcacuaac

SEQ ID NO: 10680 - RNA, 19 nt, Artificial Sequence
  Description of Artificial Sequence: Synthetic oligonucleotide
cuacuuguaaaguuagcaa

SEQ ID NO: 10681 - RNA, 19 nt, Artificial Sequence
  Description of Artificial Sequence: Synthetic oligonucleotide
cauacguuuauguaucaua

SEQ ID NO: 10682 - RNA, 19 nt, Artificial Sequence
  Description of Artificial Sequence: Synthetic oligonucleotide
uacuuaacccauggaacug

SEQ ID NO: 10683 - RNA, 19 nt, Artificial Sequence
  Description of Artificial Sequence: Synthetic oligonucleotide
auacccgauuaauucuaag

SEQ ID NO: 10684 - RNA, 19 nt, Artificial Sequence
  Description of Artificial Sequence: Synthetic oligonucleotide
ugccuagguagcacaugcg

SEQ ID NO: 10685 - RNA, 19 nt, Artificial Sequence
  Description of Artificial Sequence: Synthetic oligonucleotide
uuagugcuugaagaguaga

SEQ ID NO: 10686 - RNA, 19 nt, Artificial Sequence
  Description of Artificial Sequence: Synthetic oligonucleotide
uccguaucggcaacacuga

SEQ ID NO: 10687 - RNA, 19 nt, Artificial Sequence
  Description of Artificial Sequence: Synthetic oligonucleotide
cuauacaacggccucuaca

SEQ ID NO: 10688 - RNA, 19 nt, Artificial Sequence
  Description of Artificial Sequence: Synthetic oligonucleotide
ucuaugccgccacauuuaa

SEQ ID NO: 10689 - RNA, 19 nt, Artificial Sequence
  Description of Artificial Sequence: Synthetic oligonucleotide
cccgauuaauucuaagugc

SEQ ID NO: 10690 - RNA, 19 nt, Artificial Sequence
  Description of Artificial Sequence: Synthetic oligonucleotide
aggaaugcgcacuaaccaa

SEQ ID NO: 10691 - RNA, 19 nt, Artificial Sequence
  Description of Artificial Sequence: Synthetic oligonucleotide
uuugucucgucaccugaaa

SEQ ID NO: 10692 - RNA, 19 nt, Artificial Sequence
  Description of Artificial Sequence: Synthetic oligonucleotide
uucggguacgucagaagaa

SEQ ID NO: 10693 - RNA, 19 nt, Artificial Sequence
  Description of Artificial Sequence: Synthetic oligonucleotide
ugucagguagaguuaucuc

SEQ ID NO: 10694 - RNA, 19 nt, Artificial Sequence
  Description of Artificial Sequence: Synthetic oligonucleotide
uacguuuauguaucauauc

SEQ ID NO: 10695 - RNA, 19 nt, Artificial Sequence
  Description of Artificial Sequence: Synthetic oligonucleotide
ccaucguguagauuuaaag

SEQ ID NO: 10696 - RNA, 19 nt, Artificial Sequence
  Description of Artificial Sequence: Synthetic oligonucleotide
auugauugauaugcuagaa

SEQ ID NO: 10697 - RNA, 19 nt, Artificial Sequence
  Description of Artificial Sequence: Synthetic oligonucleotide
guuauaaauuggcggcuuc

SEQ ID NO: 10698 - RNA, 19 nt, Artificial Sequence
  Description of Artificial Sequence: Synthetic oligonucleotide
ggauacuguuuaauuaucc

SEQ ID NO: 10699 - RNA, 19 nt, Artificial Sequence
  Description of Artificial Sequence: Synthetic oligonucleotide
cguaacgucaguucgaguc

SEQ ID NO: 10700 - RNA, 19 nt, Artificial Sequence
  Description of Artificial Sequence: Synthetic oligonucleotide
aaagugggacuuaucugga

SEQ ID NO: 10701 - RNA, 19 nt, Artificial Sequence
  Description of Artificial Sequence: Synthetic oligonucleotide
acuuccguaucggcaacac

SEQ ID NO: 10702 - RNA, 19 nt, Artificial Sequence
  Description of Artificial Sequence: Synthetic oligonucleotide
cauaagggauuccaggaaa

SEQ ID NO: 10703 - RNA, 19 nt, Artificial Sequence
  Description of Artificial Sequence: Synthetic oligonucleotide
aguucgaggaaugcgcacu

SEQ ID NO: 10704 - RNA, 19 nt, Artificial Sequence
  Description of Artificial Sequence: Synthetic oligonucleotide
aacgucaauuaugcugugu

SEQ ID NO: 10705 - RNA, 19 nt, Artificial Sequence
  Description of Artificial Sequence: Synthetic oligonucleotide
gaauaacgcuuuugucaug

SEQ ID NO: 10706 - RNA, 19 nt, Artificial Sequence
  Description of Artificial Sequence: Synthetic oligonucleotide
uggcuaguucuguccaaag

SEQ ID NO: 10707 - RNA, 19 nt, Artificial Sequence
  Description of Artificial Sequence: Synthetic oligonucleotide
aaacgggugcugugaguca

SEQ ID NO: 10708 - RNA, 19 nt, Artificial Sequence
  Description of Artificial Sequence: Synthetic oligonucleotide
acgcuaauggaaaagguua

SEQ ID NO: 10709 - RNA, 19 nt, Artificial Sequence
  Description of Artificial Sequence: Synthetic oligonucleotide
ugccaguauuauuuuacuu

SEQ ID NO: 10710 - RNA, 19 nt, Artificial Sequence
  Description of Artificial Sequence: Synthetic oligonucleotide
uaucuacgcuaauggaaaa

SEQ ID NO: 10711 - RNA, 19 nt, Artificial Sequence
  Description of Artificial Sequence: Synthetic oligonucleotide
ugucaauuacgagaugauu

SEQ ID NO: 10712 - RNA, 19 nt, Artificial Sequence
  Description of Artificial Sequence: Synthetic oligonucleotide
guucgagucugaugacuag

SEQ ID NO: 10713 - RNA, 19 nt, Artificial Sequence
  Description of Artificial Sequence: Synthetic oligonucleotide
uuagcacauugguacucac

SEQ ID NO: 10714 - RNA, 19 nt, Artificial Sequence
  Description of Artificial Sequence: Synthetic oligonucleotide
caauuaugcuguguaaaca

SEQ ID NO: 10715 - RNA, 19 nt, Artificial Sequence
  Description of Artificial Sequence: Synthetic oligonucleotide
ccucuuaauaacuguguac

SEQ ID NO: 10716 - RNA, 19 nt, Artificial Sequence
  Description of Artificial Sequence: Synthetic oligonucleotide
aucaggcucgacuuaggaa

SEQ ID NO: 10717 - RNA, 19 nt, Artificial Sequence
  Description of Artificial Sequence: Synthetic oligonucleotide
cucguaacgucaguucgag

SEQ ID NO: 10718 - RNA, 19 nt, Artificial Sequence
  Description of Artificial Sequence: Synthetic oligonucleotide
guaccugaaccgcucagca

SEQ ID NO: 10719 - RNA, 19 nt, Artificial Sequence
  Description of Artificial Sequence: Synthetic oligonucleotide
cucagcuauucuaaaccca

SEQ ID NO: 10720 - RNA, 19 nt, Artificial Sequence
  Description of Artificial Sequence: Synthetic oligonucleotide
cucuuaaucuccacauuaa

SEQ ID NO: 10721 - RNA, 19 nt, Artificial Sequence
  Description of Artificial Sequence: Synthetic oligonucleotide
uaacgucaguucgagucug

SEQ ID NO: 10722 - RNA, 19 nt, Artificial Sequence
  Description of Artificial Sequence: Synthetic oligonucleotide
uaaggccauucaaugcuua

SEQ ID NO: 10723 - RNA, 19 nt, Artificial Sequence
  Description of Artificial Sequence: Synthetic oligonucleotide
aacguguuuacgacaggaa

SEQ ID NO: 10724 - RNA, 19 nt, Artificial Sequence
  Description of Artificial Sequence: Synthetic oligonucleotide
ucuauacaacggccucuac

SEQ ID NO: 10725 - RNA, 19 nt, Artificial Sequence
  Description of Artificial Sequence: Synthetic oligonucleotide
gaaugcgcacuaaccaaac

SEQ ID NO: 10726 - RNA, 19 nt, Artificial Sequence
  Description of Artificial Sequence: Synthetic oligonucleotide
ugaccgcaguguaaaaguu

SEQ ID NO: 10727 - RNA, 19 nt, Artificial Sequence
  Description of Artificial Sequence: Synthetic oligonucleotide
acuuuaaugguaagucaau

SEQ ID NO: 10728 - RNA, 19 nt, Artificial Sequence
  Description of Artificial Sequence: Synthetic oligonucleotide
caauuacgagaugauuaug

SEQ ID NO: 10729 - RNA, 19 nt, Artificial Sequence
  Description of Artificial Sequence: Synthetic oligonucleotide
aguaaugaucuagcagagu

SEQ ID NO: 10730 - RNA, 19 nt, Artificial Sequence
  Description of Artificial Sequence: Synthetic oligonucleotide
ccauggaacugguaauucc

SEQ ID NO: 10731 - RNA, 19 nt, Artificial Sequence
  Description of Artificial Sequence: Synthetic oligonucleotide
cacccauuacaaccauugc

SEQ ID NO: 10732 - RNA, 19 nt, Artificial Sequence
  Description of Artificial Sequence: Synthetic oligonucleotide
ucaguucgagucugaugac

SEQ ID NO: 10733 - RNA, 19 nt, Artificial Sequence
  Description of Artificial Sequence: Synthetic oligonucleotide
gugucauaacaaaguguag

SEQ ID NO: 10734 - RNA, 19 nt, Artificial Sequence
  Description of Artificial Sequence: Synthetic oligonucleotide
gaaccgcucagcaacuguc

SEQ ID NO: 10735 - RNA, 19 nt, Artificial Sequence
  Description of Artificial Sequence: Synthetic oligonucleotide
gagugagcgcagacgaagc

SEQ ID NO: 10736 - RNA, 19 nt, Artificial Sequence
  Description of Artificial Sequence: Synthetic oligonucleotide
ucggguacgucagaagaau

SEQ ID NO: 10737 - RNA, 19 nt, Artificial Sequence
  Description of Artificial Sequence: Synthetic oligonucleotide
gccuagguagcacaugcgc

SEQ ID NO: 10738 - RNA, 19 nt, Artificial Sequence
  Description of Artificial Sequence: Synthetic oligonucleotide
gccuucuaacauaaagccg

SEQ ID NO: 10739 - RNA, 19 nt, Artificial Sequence
  Description of Artificial Sequence: Synthetic oligonucleotide
augaacgcauugcucuuaa

SEQ ID NO: 10740 - RNA, 19 nt, Artificial Sequence
  Description of Artificial Sequence: Synthetic oligonucleotide
aagccguacugugauuggu

SEQ ID NO: 10741 - RNA, 19 nt, Artificial Sequence
  Description of Artificial Sequence: Synthetic oligonucleotide
uaccauuacguaguugguu

SEQ ID NO: 10742 - RNA, 19 nt, Artificial Sequence
  Description of Artificial Sequence: Synthetic oligonucleotide
cuaugaacucguuaacccu

SEQ ID NO: 10743 - RNA, 19 nt, Artificial Sequence
  Description of Artificial Sequence: Synthetic oligonucleotide
ggauccuccaacugaagaa

SEQ ID NO: 10744 - RNA, 19 nt, Artificial Sequence
  Description of Artificial Sequence: Synthetic oligonucleotide
auaacggugacaacacaua

SEQ ID NO: 10745 - RNA, 19 nt, Artificial Sequence
  Description of Artificial Sequence: Synthetic oligonucleotide
auacuguuacuuaacccau

SEQ ID NO: 10746 - RNA, 19 nt, Artificial Sequence
  Description of Artificial Sequence: Synthetic oligonucleotide
gguucaaucugaaagaguu

SEQ ID NO: 10747 - RNA, 19 nt, Artificial Sequence
  Description of Artificial Sequence: Synthetic oligonucleotide
agcuauugaugggcauggc

SEQ ID NO: 10748 - RNA, 19 nt, Artificial Sequence
  Description of Artificial Sequence: Synthetic oligonucleotide
cuuccuaaggguaccugaa

SEQ ID NO: 10749 - RNA, 19 nt, Artificial Sequence
  Description of Artificial Sequence: Synthetic oligonucleotide
cuaugccgccacauuuaag

SEQ ID NO: 10750 - RNA, 19 nt, Artificial Sequence
  Description of Artificial Sequence: Synthetic oligonucleotide
accaugcuaauaagccagg

SEQ ID NO: 10751 - RNA, 19 nt, Artificial Sequence
  Description of Artificial Sequence: Synthetic oligonucleotide
cuuuaaugguaagucaaua

SEQ ID NO: 10752 - RNA, 19 nt, Artificial Sequence
  Description of Artificial Sequence: Synthetic oligonucleotide
ggguacgucagaagaauug

SEQ ID NO: 10753 - RNA, 19 nt, Artificial Sequence
  Description of Artificial Sequence: Synthetic oligonucleotide
guuaacccucguaacguca

SEQ ID NO: 10754 - RNA, 19 nt, Artificial Sequence
  Description of Artificial Sequence: Synthetic oligonucleotide
cccucguaacgucaguucg

SEQ ID NO: 10755 - RNA, 19 nt, Artificial Sequence
  Description of Artificial Sequence: Synthetic oligonucleotide
gaagcgauuucaccugagu

SEQ ID NO: 10756 - RNA, 19 nt, Artificial Sequence
  Description of Artificial Sequence: Synthetic oligonucleotide
gcagggauccgucucgagc

SEQ ID NO: 10757 - RNA, 19 nt, Artificial Sequence
  Description of Artificial Sequence: Synthetic oligonucleotide
acaaccauaucaagccuaa

SEQ ID NO: 10758 - RNA, 19 nt, Artificial Sequence
  Description of Artificial Sequence: Synthetic oligonucleotide
acgcucauagagggugagc

SEQ ID NO: 10759 - RNA, 19 nt, Artificial Sequence
  Description of Artificial Sequence: Synthetic oligonucleotide
uaugaacgcauugcucuua

SEQ ID NO: 10760 - RNA, 19 nt, Artificial Sequence
  Description of Artificial Sequence: Synthetic oligonucleotide
acgagaugauuaugacaca

SEQ ID NO: 10761 - RNA, 19 nt, Artificial Sequence
  Description of Artificial Sequence: Synthetic oligonucleotide
cgaggaaugcgcacuaacc

SEQ ID NO: 10762 - RNA, 19 nt, Artificial Sequence
  Description of Artificial Sequence: Synthetic oligonucleotide
ugaacucguuaacccucgu

SEQ ID NO: 10763 - RNA, 19 nt, Artificial Sequence
  Description of Artificial Sequence: Synthetic oligonucleotide
cugaucgaaagcuauugau

SEQ ID NO: 10764 - RNA, 19 nt, Artificial Sequence
  Description of Artificial Sequence: Synthetic oligonucleotide
guaacgucaguucgagucu

SEQ ID NO: 10765 - RNA, 19 nt, Artificial Sequence
  Description of Artificial Sequence: Synthetic oligonucleotide
cugaccgcaguguaaaagu

SEQ ID NO: 10766 - RNA, 19 nt, Artificial Sequence
  Description of Artificial Sequence: Synthetic oligonucleotide
gggcuauucaaauaggcau

SEQ ID NO: 10767 - RNA, 19 nt, Artificial Sequence
  Description of Artificial Sequence: Synthetic oligonucleotide
cacacgccuucuaacauaa

SEQ ID NO: 10768 - RNA, 19 nt, Artificial Sequence
  Description of Artificial Sequence: Synthetic oligonucleotide
gcuugcuaugaacgcauug

SEQ ID NO: 10769 - RNA, 19 nt, Artificial Sequence
  Description of Artificial Sequence: Synthetic oligonucleotide
gaguggacuagcaaauccu

SEQ ID NO: 10770 - RNA, 19 nt, Artificial Sequence
  Description of Artificial Sequence: Synthetic oligonucleotide
gaacucguuaacccucgua

SEQ ID NO: 10771 - RNA, 19 nt, Artificial Sequence
  Description of Artificial Sequence: Synthetic oligonucleotide
uaccugaaccgcucagcaa

SEQ ID NO: 10772 - RNA, 19 nt, Artificial Sequence
  Description of Artificial Sequence: Synthetic oligonucleotide
uuacaaccauugcccugga

SEQ ID NO: 10773 - RNA, 19 nt, Artificial Sequence
  Description of Artificial Sequence: Synthetic oligonucleotide
guauuggauuaucuugcua

SEQ ID NO: 10774 - RNA, 19 nt, Artificial Sequence
  Description of Artificial Sequence: Synthetic oligonucleotide
gaguuaucuccccaccccu

SEQ ID NO: 10775 - RNA, 19 nt, Artificial Sequence
  Description of Artificial Sequence: Synthetic oligonucleotide
ucgucuaugccgccacauu

SEQ ID NO: 10776 - RNA, 19 nt, Artificial Sequence
  Description of Artificial Sequence: Synthetic oligonucleotide
acauacguuuauguaucau

SEQ ID NO: 10777 - RNA, 19 nt, Artificial Sequence
  Description of Artificial Sequence: Synthetic oligonucleotide
caguucgaggaaugcgcac

SEQ ID NO: 10778 - RNA, 19 nt, Artificial Sequence
  Description of Artificial Sequence: Synthetic oligonucleotide
aucuaaccucacuggcacu

SEQ ID NO: 10779 - RNA, 19 nt, Artificial Sequence
  Description of Artificial Sequence: Synthetic oligonucleotide
caucguaauuaguacugcu

SEQ ID NO: 10780 - RNA, 19 nt, Artificial Sequence
  Description of Artificial Sequence: Synthetic oligonucleotide
cucgacuuaggaaauuaau

SEQ ID NO: 10781 - RNA, 19 nt, Artificial Sequence
  Description of Artificial Sequence: Synthetic oligonucleotide
cacauacguuuauguauca

SEQ ID NO: 10782 - RNA, 19 nt, Artificial Sequence
  Description of Artificial Sequence: Synthetic oligonucleotide
gucuauggaagagaaugcu

SEQ ID NO: 10783 - RNA, 19 nt, Artificial Sequence
  Description of Artificial Sequence: Synthetic oligonucleotide
cacaugcgcacuguagauc

SEQ ID NO: 10784 - RNA, 19 nt, Artificial Sequence
  Description of Artificial Sequence: Synthetic oligonucleotide
aggguaccugaaccgcuca

SEQ ID NO: 10785 - RNA, 19 nt, Artificial Sequence
  Description of Artificial Sequence: Synthetic oligonucleotide
cauuacguaguugguuaca

SEQ ID NO: 10786 - RNA, 19 nt, Artificial Sequence
  Description of Artificial Sequence: Synthetic oligonucleotide
ucguaacgucaguucgagu

SEQ ID NO: 10787 - RNA, 19 nt, Artificial Sequence
  Description of Artificial Sequence: Synthetic oligonucleotide
cuaagaugguggauuccua

SEQ ID NO: 10788 - RNA, 19 nt, Artificial Sequence
  Description of Artificial Sequence: Synthetic oligonucleotide
cuguuacuuaacccaugga

SEQ ID NO: 10789 - RNA, 19 nt, Artificial Sequence
  Description of Artificial Sequence: Synthetic oligonucleotide
ccgauuaauucuaagugcu

SEQ ID NO: 10790 - RNA, 19 nt, Artificial Sequence
  Description of Artificial Sequence: Synthetic oligonucleotide
gacggguguucagagagcu

SEQ ID NO: 10791 - RNA, 19 nt, Artificial Sequence
  Description of Artificial Sequence: Synthetic oligonucleotide
ggaacucgugacauucuac

SEQ ID NO: 10792 - RNA, 19 nt, Artificial Sequence
  Description of Artificial Sequence: Synthetic oligonucleotide
gcuuagugagagugagcgc

SEQ ID NO: 10793 - RNA, 19 nt, Artificial Sequence
  Description of Artificial Sequence: Synthetic oligonucleotide
uucuucguauaaggauaaa

SEQ ID NO: 10794 - RNA, 19 nt, Artificial Sequence
  Description of Artificial Sequence: Synthetic oligonucleotide
ccauuacguaguugguuac

SEQ ID NO: 10795 - RNA, 19 nt, Artificial Sequence
  Description of Artificial Sequence: Synthetic oligonucleotide
auucaacgugcuccaccau

SEQ ID NO: 10796 - RNA, 19 nt, Artificial Sequence
  Description of Artificial Sequence: Synthetic oligonucleotide
gggauacuguuuaauuauc

SEQ ID NO: 10797 - RNA, 19 nt, Artificial Sequence
  Description of Artificial Sequence: Synthetic oligonucleotide
ugccaucguguagauuuaa

SEQ ID NO: 10798 - RNA, 19 nt, Artificial Sequence
  Description of Artificial Sequence: Synthetic oligonucleotide
guucgaggaaugcgcacua

SEQ ID NO: 10799 - RNA, 19 nt, Artificial Sequence
  Description of Artificial Sequence: Synthetic oligonucleotide
ccccuuacacuguacaaga

SEQ ID NO: 10800 - RNA, 19 nt, Artificial Sequence
  Description of Artificial Sequence: Synthetic oligonucleotide
gcuagaagucacuuccgua

SEQ ID NO: 10801 - RNA, 19 nt, Artificial Sequence
  Description of Artificial Sequence: Synthetic oligonucleotide
guguuacguuccaacagaa

SEQ ID NO: 10802 - RNA, 19 nt, Artificial Sequence
  Description of Artificial Sequence: Synthetic oligonucleotide
ggaaugcgcacuaaccaaa

SEQ ID NO: 10803 - RNA, 19 nt, Artificial Sequence
  Description of Artificial Sequence: Synthetic oligonucleotide
aggcgugguuugucucguc

SEQ ID NO: 10804 - RNA, 19 nt, Artificial Sequence
  Description of Artificial Sequence: Synthetic oligonucleotide
acacuaugucucagaaaau

SEQ ID NO: 10805 - RNA, 19 nt, Artificial Sequence
  Description of Artificial Sequence: Synthetic oligonucleotide
cgugguuugucucgucacc

SEQ ID NO: 10806 - RNA, 19 nt, Artificial Sequence
  Description of Artificial Sequence: Synthetic oligonucleotide
uugaagcaaugagguuaac

SEQ ID NO: 10807 - RNA, 19 nt, Artificial Sequence
  Description of Artificial Sequence: Synthetic oligonucleotide
ccguacugugauugguuug

SEQ ID NO: 10808 - RNA, 19 nt, Artificial Sequence
  Description of Artificial Sequence: Synthetic oligonucleotide
agccguacugugauugguu

SEQ ID NO: 10809 - RNA, 19 nt, Artificial Sequence
  Description of Artificial Sequence: Synthetic oligonucleotide
agacugcauuucgucuaug

SEQ ID NO: 10810 - RNA, 19 nt, Artificial Sequence
  Description of Artificial Sequence: Synthetic oligonucleotide
gugcgaaagucuuuuccuu

SEQ ID NO: 10811 - RNA, 19 nt, Artificial Sequence
  Description of Artificial Sequence: Synthetic oligonucleotide
cauucagcgcguacucccu

SEQ ID NO: 10812 - RNA, 19 nt, Artificial Sequence
  Description of Artificial Sequence: Synthetic oligonucleotide
cuaugaacgcauugcucuu

SEQ ID NO: 10813 - RNA, 19 nt, Artificial Sequence
  Description of Artificial Sequence: Synthetic oligonucleotide
ggauccgucucgagcagca

SEQ ID NO: 10814 - RNA, 19 nt, Artificial Sequence
  Description of Artificial Sequence: Synthetic oligonucleotide
cgucaguucgagucugaug

SEQ ID NO: 10815 - RNA, 19 nt, Artificial Sequence
  Description of Artificial Sequence: Synthetic oligonucleotide
gcaguucgaggaaugcgca

SEQ ID NO: 10816 - RNA, 19 nt, Artificial Sequence
  Description of Artificial Sequence: Synthetic oligonucleotide
ccucguaacgucaguucga

SEQ ID NO: 10817 - RNA, 19 nt, Artificial Sequence
  Description of Artificial Sequence: Synthetic oligonucleotide
cguuuauguaucauauccu

SEQ ID NO: 10818 - RNA, 19 nt, Artificial Sequence
  Description of Artificial Sequence: Synthetic oligonucleotide
cguuaacccucguaacguc

SEQ ID NO: 10819 - RNA, 19 nt, Artificial Sequence
  Description of Artificial Sequence: Synthetic oligonucleotide
ggcucgacuuaggaaauua

SEQ ID NO: 10820 - RNA, 19 nt, Artificial Sequence
  Description of Artificial Sequence: Synthetic oligonucleotide
gggucgauagcaagguucu

SEQ ID NO: 10821 - RNA, 19 nt, Artificial Sequence
  Description of Artificial Sequence: Synthetic oligonucleotide
cuuccguaucggcaacacu

SEQ ID NO: 10822 - RNA, 19 nt, Artificial Sequence
  Description of Artificial Sequence: Synthetic oligonucleotide
aguuaaggcuugggcuauu

SEQ ID NO: 10823 - RNA, 19 nt, Artificial Sequence
  Description of Artificial Sequence: Synthetic oligonucleotide
gcucgacuuaggaaauuaa

SEQ ID NO: 10824 - RNA, 19 nt, Artificial Sequence
  Description of Artificial Sequence: Synthetic oligonucleotide
cacuuccguaucggcaaca

SEQ ID NO: 10825 - RNA, 19 nt, Artificial Sequence
  Description of Artificial Sequence: Synthetic oligonucleotide
gcacaugcgcacuguagau

SEQ ID NO: 10826 - RNA, 19 nt, Artificial Sequence
  Description of Artificial Sequence: Synthetic oligonucleotide
ccugccuagguagcacaug

SEQ ID NO: 10827 - RNA, 19 nt, Artificial Sequence
  Description of Artificial Sequence: Synthetic oligonucleotide
gccaucguguagauuuaaa

SEQ ID NO: 10828 - RNA, 19 nt, Artificial Sequence
  Description of Artificial Sequence: Synthetic oligonucleotide
gccaccgacacagcggucu

SEQ ID NO: 10829 - RNA, 19 nt, Artificial Sequence
  Description of Artificial Sequence: Synthetic oligonucleotide
caccgacacagcggucuuc

SEQ ID NO: 10830 - RNA, 19 nt, Artificial Sequence
  Description of Artificial Sequence: Synthetic oligonucleotide
gcgcacuaaccaaacgaaa

SEQ ID NO: 10831 - RNA, 19 nt, Artificial Sequence
  Description of Artificial Sequence: Synthetic oligonucleotide
gccguacugugauugguuu

SEQ ID NO: 10832 - RNA, 19 nt, Artificial Sequence
  Description of Artificial Sequence: Synthetic oligonucleotide
cucuaacacccagaacuuu

SEQ ID NO: 10833 - RNA, 19 nt, Artificial Sequence
  Description of Artificial Sequence: Synthetic oligonucleotide
cuggcggauuuggaagggu

SEQ ID NO: 10834 - RNA, 19 nt, Artificial Sequence
  Description of Artificial Sequence: Synthetic oligonucleotide
ccauaacaccucaucugau

SEQ ID NO: 10835 - RNA, 19 nt, Artificial Sequence
  Description of Artificial Sequence: Synthetic oligonucleotide
cuaaccucacuggcacuuu

SEQ ID NO: 10836 - RNA, 19 nt, Artificial Sequence
  Description of Artificial Sequence: Synthetic oligonucleotide
cgucuaugccgccacauuu

SEQ ID NO: 10837 - RNA, 19 nt, Artificial Sequence
  Description of Artificial Sequence: Synthetic oligonucleotide
ccguaucggcaacacugaa

SEQ ID NO: 10838 - RNA, 19 nt, Artificial Sequence
  Description of Artificial Sequence: Synthetic oligonucleotide
ccaacuugggaggguguau

SEQ ID NO: 10839 - RNA, 19 nt, Artificial Sequence
  Description of Artificial Sequence: Synthetic oligonucleotide
aggucccggcaaggugguu

SEQ ID NO: 10840 - RNA, 19 nt, Artificial Sequence
  Description of Artificial Sequence: Synthetic oligonucleotide
ccgucucgagcagcacaca

SEQ ID NO: 10841 - RNA, 19 nt, Artificial Sequence
  Description of Artificial Sequence: Synthetic oligonucleotide
cggguacgucagaagaauu

SEQ ID NO: 10842 - RNA, 19 nt, Artificial Sequence
  Description of Artificial Sequence: Synthetic oligonucleotide
aauauaugaaacuaguuuc

SEQ ID NO: 10843 - RNA, 19 nt, Artificial Sequence
  Description of Artificial Sequence: Synthetic oligonucleotide
ucuaauaauaacuagugca

SEQ ID NO: 10844 - RNA, 19 nt, Artificial Sequence
  Description of Artificial Sequence: Synthetic oligonucleotide
ucuacaauauaaauguagg

SEQ ID NO: 10845 - RNA, 19 nt, Artificial Sequence
  Description of Artificial Sequence: Synthetic oligonucleotide
aaaugugauaagcacuugc

SEQ ID NO: 10846 - RNA, 19 nt, Artificial Sequence
  Description of Artificial Sequence: Synthetic oligonucleotide
ugugcuauggaacaaauac

SEQ ID NO: 10847 - RNA, 19 nt, Artificial Sequence
  Description of Artificial Sequence: Synthetic oligonucleotide
uuuaugacauguaaguaag

SEQ ID NO: 10848 - RNA, 19 nt, Artificial Sequence
  Description of Artificial Sequence: Synthetic oligonucleotide
uggaguauaacgaacguag

SEQ ID NO: 10849 - RNA, 19 nt, Artificial Sequence
  Description of Artificial Sequence: Synthetic oligonucleotide
aauaauaacuagugcagug

SEQ ID NO: 10850 - RNA, 19 nt, Artificial Sequence
  Description of Artificial Sequence: Synthetic oligonucleotide
cuagagaauaacaaguuag

SEQ ID NO: 10851 - RNA, 19 nt, Artificial Sequence
  Description of Artificial Sequence: Synthetic oligonucleotide
aaugggguuaagcuauacc

SEQ ID NO: 10852 - RNA, 19 nt, Artificial Sequence
  Description of Artificial Sequence: Synthetic oligonucleotide
ugcuauggaacaaauaccc

SEQ ID NO: 10853 - RNA, 19 nt, Artificial Sequence
  Description of Artificial Sequence: Synthetic oligonucleotide
gagaauaacaaguuaguac

SEQ ID NO: 10854 - RNA, 19 nt, Artificial Sequence
  Description of Artificial Sequence: Synthetic oligonucleotide
aauuacauuggaaauacca

SEQ ID NO: 10855 - RNA, 19 nt, Artificial Sequence
  Description of Artificial Sequence: Synthetic oligonucleotide
uaauaacuagugcagugcg

SEQ ID NO: 10856 - RNA, 19 nt, Artificial Sequence
  Description of Artificial Sequence: Synthetic oligonucleotide
uuuacaucggugcaaacac

SEQ ID NO: 10857 - RNA, 19 nt, Artificial Sequence
  Description of Artificial Sequence: Synthetic oligonucleotide
ugugaugaauguaaaaggu

SEQ ID NO: 10858 - RNA, 19 nt, Artificial Sequence
  Description of Artificial Sequence: Synthetic oligonucleotide
auaauaacuagugcagugc

SEQ ID NO: 10859 - RNA, 19 nt, Artificial Sequence
  Description of Artificial Sequence: Synthetic oligonucleotide
uaacaaguuaguaccauug

SEQ ID NO: 10860 - RNA, 19 nt, Artificial Sequence
  Description of Artificial Sequence: Synthetic oligonucleotide
aaaacaaaacaaaacaaaa

SEQ ID NO: 10861 - RNA, 19 nt, Artificial Sequence
  Description of Artificial Sequence: Synthetic oligonucleotide
aagcaauucaaaccuauga

SEQ ID NO: 10862 - RNA, 19 nt, Artificial Sequence
  Description of Artificial Sequence: Synthetic oligonucleotide
aaacacgucauucaguuuu

SEQ ID NO: 10863 - RNA, 19 nt, Artificial Sequence
  Description of Artificial Sequence: Synthetic oligonucleotide
guugaauuguuguuaagcc

SEQ ID NO: 10864 - RNA, 19 nt, Artificial Sequence
  Description of Artificial Sequence: Synthetic oligonucleotide
acuaaccuaauuuggggac

SEQ ID NO: 10865 - RNA, 19 nt, Artificial Sequence
  Description of Artificial Sequence: Synthetic oligonucleotide
acgucauucaguuuucaac

SEQ ID NO: 10866 - RNA, 19 nt, Artificial Sequence
  Description of Artificial Sequence: Synthetic oligonucleotide
uguuaaucuaaguaagacu

SEQ ID NO: 10867 - RNA, 19 nt, Artificial Sequence
  Description of Artificial Sequence: Synthetic oligonucleotide
acacuuaggacgcauacag

SEQ ID NO: 10868 - RNA, 19 nt, Artificial Sequence
  Description of Artificial Sequence: Synthetic oligonucleotide
uuuauaaccuggugugugg

SEQ ID NO: 10869 - RNA, 19 nt, Artificial Sequence
  Description of Artificial Sequence: Synthetic oligonucleotide
aaacuaguuucacacucuc

SEQ ID NO: 10870 - RNA, 19 nt, Artificial Sequence
  Description of Artificial Sequence: Synthetic oligonucleotide
aagcgaaagacagacuuac

SEQ ID NO: 10871 - RNA, 19 nt, Artificial Sequence
  Description of Artificial Sequence: Synthetic oligonucleotide
uauuaguccauuacuauua

SEQ ID NO: 10872 - RNA, 19 nt, Artificial Sequence
  Description of Artificial Sequence: Synthetic oligonucleotide
uuuagguuagagcuuguga

SEQ ID NO: 10873 - RNA, 19 nt, Artificial Sequence
  Description of Artificial Sequence: Synthetic oligonucleotide
ucugagacuaaccuaauuu

SEQ ID NO: 10874 - RNA, 19 nt, Artificial Sequence
  Description of Artificial Sequence: Synthetic oligonucleotide
aguaucacgaaguaacacu

SEQ ID NO: 10875 - RNA, 19 nt, Artificial Sequence
  Description of Artificial Sequence: Synthetic oligonucleotide
auuaaagggugcuucacug

SEQ ID NO: 10876 - RNA, 19 nt, Artificial Sequence
  Description of Artificial Sequence: Synthetic oligonucleotide
acaaguuaguaccauuguc

SEQ ID NO: 10877 - RNA, 19 nt, Artificial Sequence
  Description of Artificial Sequence: Synthetic oligonucleotide
uguaaugcaagagugggga

SEQ ID NO: 10878 - RNA, 19 nt, Artificial Sequence
  Description of Artificial Sequence: Synthetic oligonucleotide
agacuaaccuaauuugggg

SEQ ID NO: 10879 - RNA, 19 nt, Artificial Sequence
  Description of Artificial Sequence: Synthetic oligonucleotide
aauaacuagguaauauaug

SEQ ID NO: 10880 - RNA, 19 nt, Artificial Sequence
  Description of Artificial Sequence: Synthetic oligonucleotide
augggguuaagcuauaccu

SEQ ID NO: 10881 - RNA, 19 nt, Artificial Sequence
  Description of Artificial Sequence: Synthetic oligonucleotide
uucuaauguacucuagaga

SEQ ID NO: 10882 - RNA, 19 nt, Artificial Sequence
  Description of Artificial Sequence: Synthetic oligonucleotide
uaugacauguaaguaagca

SEQ ID NO: 10883 - RNA, 19 nt, Artificial Sequence
  Description of Artificial Sequence: Synthetic oligonucleotide
aaaggucucucucucucuc

SEQ ID NO: 10884 - RNA, 19 nt, Artificial Sequence
  Description of Artificial Sequence: Synthetic oligonucleotide
uuaagcuauaccuacugau

SEQ ID NO: 10885 - RNA, 19 nt, Artificial Sequence
  Description of Artificial Sequence: Synthetic oligonucleotide
ucaaaugccaagcuuggaa

SEQ ID NO: 10886 - RNA, 19 nt, Artificial Sequence
  Description of Artificial Sequence: Synthetic oligonucleotide
ucuaugauuuagguuagag

SEQ ID NO: 10887 - RNA, 19 nt, Artificial Sequence
  Description of Artificial Sequence: Synthetic oligonucleotide
guuaguaccauugucaaga

SEQ ID NO: 10888 - RNA, 19 nt, Artificial Sequence
  Description of Artificial Sequence: Synthetic oligonucleotide
guauucggaggacugaagg

SEQ ID NO: 10889 - RNA, 19 nt, Artificial Sequence
  Description of Artificial Sequence: Synthetic oligonucleotide
uaauagagucauuuuauau

SEQ ID NO: 10890 - RNA, 19 nt, Artificial Sequence
  Description of Artificial Sequence: Synthetic oligonucleotide
uagaucuauucuaauguac

SEQ ID NO: 10891 - RNA, 19 nt, Artificial Sequence
  Description of Artificial Sequence: Synthetic oligonucleotide
uguuauacacaugauuuac

SEQ ID NO: 10892 - RNA, 19 nt, Artificial Sequence
  Description of Artificial Sequence: Synthetic oligonucleotide
cauuuagagaucuaauuca

SEQ ID NO: 10893 - RNA, 19 nt, Artificial Sequence
  Description of Artificial Sequence: Synthetic oligonucleotide
auaacuagugcagugcguc

SEQ ID NO: 10894 - RNA, 19 nt, Artificial Sequence
  Description of Artificial Sequence: Synthetic oligonucleotide
uagguauaaccuauuauau

SEQ ID NO: 10895 - RNA, 19 nt, Artificial Sequence
  Description of Artificial Sequence: Synthetic oligonucleotide
guagguauaaccuauuaua

SEQ ID NO: 10896 - RNA, 19 nt, Artificial Sequence
  Description of Artificial Sequence: Synthetic oligonucleotide
aaagcuagauaaaaccaug

SEQ ID NO: 10897 - RNA, 19 nt, Artificial Sequence
  Description of Artificial Sequence: Synthetic oligonucleotide
gaacguagcuaucacuucc

SEQ ID NO: 10898 - RNA, 19 nt, Artificial Sequence
  Description of Artificial Sequence: Synthetic oligonucleotide
ugguuuauuuaugacaugu

SEQ ID NO: 10899 - RNA, 19 nt, Artificial Sequence
  Description of Artificial Sequence: Synthetic oligonucleotide
uagucuguaacuucccacc

SEQ ID NO: 10900 - RNA, 19 nt, Artificial Sequence
  Description of Artificial Sequence: Synthetic oligonucleotide
uguagguauaaccuauuau

SEQ ID NO: 10901 - RNA, 19 nt, Artificial Sequence
  Description of Artificial Sequence: Synthetic oligonucleotide
aaugccuguauaaacagaa

SEQ ID NO: 10902 - RNA, 19 nt, Artificial Sequence
  Description of Artificial Sequence: Synthetic oligonucleotide
aggguaguuagguaaagca

SEQ ID NO: 10903 - RNA, 19 nt, Artificial Sequence
  Description of Artificial Sequence: Synthetic oligonucleotide
cugagacuaaccuaauuug

SEQ ID NO: 10904 - RNA, 19 nt, Artificial Sequence
  Description of Artificial Sequence: Synthetic oligonucleotide
uacugcucauuucagcaag

SEQ ID NO: 10905 - RNA, 19 nt, Artificial Sequence
  Description of Artificial Sequence: Synthetic oligonucleotide
agaagguaauaaugucccc

SEQ ID NO: 10906 - RNA, 19 nt, Artificial Sequence
  Description of Artificial Sequence: Synthetic oligonucleotide
auacuuugugcuauggaac

SEQ ID NO: 10907 - RNA, 19 nt, Artificial Sequence
  Description of Artificial Sequence: Synthetic oligonucleotide
cuagcacuaucaaaacucc

SEQ ID NO: 10908 - RNA, 19 nt, Artificial Sequence
  Description of Artificial Sequence: Synthetic oligonucleotide
uaaaaggucucucucucuc

SEQ ID NO: 10909 - RNA, 19 nt, Artificial Sequence
  Description of Artificial Sequence: Synthetic oligonucleotide
aagcuauaccuacugauuu

SEQ ID NO: 10910 - RNA, 19 nt, Artificial Sequence
  Description of Artificial Sequence: Synthetic oligonucleotide
acaguaguuuagcaggcag

SEQ ID NO: 10911 - RNA, 19 nt, Artificial Sequence
  Description of Artificial Sequence: Synthetic oligonucleotide
ucuuaaacuucuugcuccc

SEQ ID NO: 10912 - RNA, 19 nt, Artificial Sequence
  Description of Artificial Sequence: Synthetic oligonucleotide
uucggaggacugaaggagg

SEQ ID NO: 10913 - RNA, 19 nt, Artificial Sequence
  Description of Artificial Sequence: Synthetic oligonucleotide
aaauguauucggaggacug

SEQ ID NO: 10914 - RNA, 19 nt, Artificial Sequence
  Description of Artificial Sequence: Synthetic oligonucleotide
aaccuuauaagcaggcucu

SEQ ID NO: 10915 - RNA, 19 nt, Artificial Sequence
  Description of Artificial Sequence: Synthetic oligonucleotide
caucaaaugccaagcuugg

SEQ ID NO: 10916 - RNA, 19 nt, Artificial Sequence
  Description of Artificial Sequence: Synthetic oligonucleotide
uauauggcuauuaggucaa

SEQ ID NO: 10917 - RNA, 19 nt, Artificial Sequence
  Description of Artificial Sequence: Synthetic oligonucleotide
aacgaacguagcuaucacu

SEQ ID NO: 10918 - RNA, 19 nt, Artificial Sequence
  Description of Artificial Sequence: Synthetic oligonucleotide
acaguauuaauagagucau

SEQ ID NO: 10919 - RNA, 19 nt, Artificial Sequence
  Description of Artificial Sequence: Synthetic oligonucleotide
cauacaccgcuaacaaugg

SEQ ID NO: 10920 - RNA, 19 nt, Artificial Sequence
  Description of Artificial Sequence: Synthetic oligonucleotide
ucaguaucacgaaguaaca

SEQ ID NO: 10921 - RNA, 19 nt, Artificial Sequence
  Description of Artificial Sequence: Synthetic oligonucleotide
ccuacugaaauguauucgg

SEQ ID NO: 10922 - RNA, 19 nt, Artificial Sequence
  Description of Artificial Sequence: Synthetic oligonucleotide
agacuaagaauuucuaaua

SEQ ID NO: 10923 - RNA, 19 nt, Artificial Sequence
  Description of Artificial Sequence: Synthetic oligonucleotide
uauucggaggacugaagga

SEQ ID NO: 10924 - RNA, 19 nt, Artificial Sequence
  Description of Artificial Sequence: Synthetic oligonucleotide
uucacuggucagcacaaga

SEQ ID NO: 10925 - RNA, 19 nt, Artificial Sequence
  Description of Artificial Sequence: Synthetic oligonucleotide
gagggcuauauugaggaag

SEQ ID NO: 10926 - RNA, 19 nt, Artificial Sequence
  Description of Artificial Sequence: Synthetic oligonucleotide
gacuaaccuaauuugggga

SEQ ID NO: 10927 - RNA, 19 nt, Artificial Sequence
  Description of Artificial Sequence: Synthetic oligonucleotide
aaaaggucucucucucucu

SEQ ID NO: 10928 - RNA, 19 nt, Artificial Sequence
  Description of Artificial Sequence: Synthetic oligonucleotide
auaacgaacguagcuauca

SEQ ID NO: 10929 - RNA, 19 nt, Artificial Sequence
  Description of Artificial Sequence: Synthetic oligonucleotide
uaauaauaacuagugcagu

SEQ ID NO: 10930 - RNA, 19 nt, Artificial Sequence
  Description of Artificial Sequence: Synthetic oligonucleotide
agauucguguugugggugg

SEQ ID NO: 10931 - RNA, 19 nt, Artificial Sequence
  Description of Artificial Sequence: Synthetic oligonucleotide
uguauucggaggacugaag

SEQ ID NO: 10932 - RNA, 19 nt, Artificial Sequence
  Description of Artificial Sequence: Synthetic oligonucleotide
acuaauuauuaucuugcua

SEQ ID NO: 10933 - RNA, 19 nt, Artificial Sequence
  Description of Artificial Sequence: Synthetic oligonucleotide
ccaugcaaagcaaaggucc

SEQ ID NO: 10934 - RNA, 19 nt, Artificial Sequence
  Description of Artificial Sequence: Synthetic oligonucleotide
ugggaaugccuguauaaac

SEQ ID NO: 10935 - RNA, 19 nt, Artificial Sequence
  Description of Artificial Sequence: Synthetic oligonucleotide
uauuauccuauuuguaguu

SEQ ID NO: 10936 - RNA, 19 nt, Artificial Sequence
  Description of Artificial Sequence: Synthetic oligonucleotide
cagacuuacugaaacuaac

SEQ ID NO: 10937 - RNA, 19 nt, Artificial Sequence
  Description of Artificial Sequence: Synthetic oligonucleotide
ugccuaagggaauagccac

SEQ ID NO: 10938 - RNA, 19 nt, Artificial Sequence
  Description of Artificial Sequence: Synthetic oligonucleotide
auagcaaucgcaacccguc

SEQ ID NO: 10939 - RNA, 19 nt, Artificial Sequence
  Description of Artificial Sequence: Synthetic oligonucleotide
aguuuagcaggcagcaugg

SEQ ID NO: 10940 - RNA, 19 nt, Artificial Sequence
  Description of Artificial Sequence: Synthetic oligonucleotide
uguagguggaucugacuga

SEQ ID NO: 10941 - RNA, 19 nt, Artificial Sequence
  Description of Artificial Sequence: Synthetic oligonucleotide
aguauaacgaacguagcua

SEQ ID NO: 10942 - RNA, 19 nt, Artificial Sequence
  Description of Artificial Sequence: Synthetic oligonucleotide
uuagucgauucugaggaca

SEQ ID NO: 10943 - RNA, 19 nt, Artificial Sequence
  Description of Artificial Sequence: Synthetic oligonucleotide
uacucaauaccuccucaac

SEQ ID NO: 10944 - RNA, 19 nt, Artificial Sequence
  Description of Artificial Sequence: Synthetic oligonucleotide
aauauggcuucuguagggu

SEQ ID NO: 10945 - RNA, 19 nt, Artificial Sequence
  Description of Artificial Sequence: Synthetic oligonucleotide
uaagauucguguugugggu

SEQ ID NO: 10946 - RNA, 19 nt, Artificial Sequence
  Description of Artificial Sequence: Synthetic oligonucleotide
agguaauauaugaaacuag

SEQ ID NO: 10947 - RNA, 19 nt, Artificial Sequence
  Description of Artificial Sequence: Synthetic oligonucleotide
uguugauugggugcugucc

SEQ ID NO: 10948 - RNA, 19 nt, Artificial Sequence
  Description of Artificial Sequence: Synthetic oligonucleotide
uugaaagagcgcagaauuc

SEQ ID NO: 10949 - RNA, 19 nt, Artificial Sequence
  Description of Artificial Sequence: Synthetic oligonucleotide
acgcauacaguaguuuagc

SEQ ID NO: 10950 - RNA, 19 nt, Artificial Sequence
  Description of Artificial Sequence: Synthetic oligonucleotide
gagauuuuacaucggugca

SEQ ID NO: 10951 - RNA, 19 nt, Artificial Sequence
  Description of Artificial Sequence: Synthetic oligonucleotide
aauguauucggaggacuga

SEQ ID NO: 10952 - RNA, 19 nt, Artificial Sequence
  Description of Artificial Sequence: Synthetic oligonucleotide
uauuaggccugcauagcaa

SEQ ID NO: 10953 - RNA, 19 nt, Artificial Sequence
  Description of Artificial Sequence: Synthetic oligonucleotide
agagccgaggcacuaacgu

SEQ ID NO: 10954 - RNA, 19 nt, Artificial Sequence
  Description of Artificial Sequence: Synthetic oligonucleotide
acaacuaguucugugcaug

SEQ ID NO: 10955 - RNA, 19 nt, Artificial Sequence
  Description of Artificial Sequence: Synthetic oligonucleotide
agggcuauauugaggaagg

SEQ ID NO: 10956 - RNA, 19 nt, Artificial Sequence
  Description of Artificial Sequence: Synthetic oligonucleotide
auagaucuauucuaaugua

SEQ ID NO: 10957 - RNA, 19 nt, Artificial Sequence
  Description of Artificial Sequence: Synthetic oligonucleotide
agugucucuaugauuuagg

SEQ ID NO: 10958 - RNA, 19 nt, Artificial Sequence
  Description of Artificial Sequence: Synthetic oligonucleotide
gacgcauacaguaguuuag

SEQ ID NO: 10959 - RNA, 19 nt, Artificial Sequence
  Description of Artificial Sequence: Synthetic oligonucleotide
cuuacaagcggggacuccc

SEQ ID NO: 10960 - RNA, 19 nt, Artificial Sequence
  Description of Artificial Sequence: Synthetic oligonucleotide
uuggccuuaucugaggacu

SEQ ID NO: 10961 - RNA, 19 nt, Artificial Sequence
  Description of Artificial Sequence: Synthetic oligonucleotide
uacaucggugcaaacacuu

SEQ ID NO: 10962 - RNA, 19 nt, Artificial Sequence
  Description of Artificial Sequence: Synthetic oligonucleotide
uccugugacuuuuaucagu

SEQ ID NO: 10963 - RNA, 19 nt, Artificial Sequence
  Description of Artificial Sequence: Synthetic oligonucleotide
ugcuaaguucugcuucaag

SEQ ID NO: 10964 - RNA, 19 nt, Artificial Sequence
  Description of Artificial Sequence: Synthetic oligonucleotide
uggaacaaauacccuguaa

SEQ ID NO: 10965 - RNA, 19 nt, Artificial Sequence
  Description of Artificial Sequence: Synthetic oligonucleotide
aacaacuaguucugugcau

SEQ ID NO: 10966 - RNA, 19 nt, Artificial Sequence
  Description of Artificial Sequence: Synthetic oligonucleotide
aagauucguguugugggug

SEQ ID NO: 10967 - RNA, 19 nt, Artificial Sequence
  Description of Artificial Sequence: Synthetic oligonucleotide
aagcuagauaaaaccaugu

SEQ ID NO: 10968 - RNA, 19 nt, Artificial Sequence
  Description of Artificial Sequence: Synthetic oligonucleotide
aauuaacaauuaguacacu

SEQ ID NO: 10969 - RNA, 19 nt, Artificial Sequence
  Description of Artificial Sequence: Synthetic oligonucleotide
ccauuuagagaucuaauuc

SEQ ID NO: 10970 - RNA, 19 nt, Artificial Sequence
  Description of Artificial Sequence: Synthetic oligonucleotide
gguuaagcuauaccuacug

SEQ ID NO: 10971 - RNA, 19 nt, Artificial Sequence
  Description of Artificial Sequence: Synthetic oligonucleotide
gauagcacagauaggugca

SEQ ID NO: 10972 - RNA, 19 nt, Artificial Sequence
  Description of Artificial Sequence: Synthetic oligonucleotide
aacacuuaggacgcauaca

SEQ ID NO: 10973 - RNA, 19 nt, Artificial Sequence
  Description of Artificial Sequence: Synthetic oligonucleotide
guacgcggaagccaaagac

SEQ ID NO: 10974 - RNA, 19 nt, Artificial Sequence
  Description of Artificial Sequence: Synthetic oligonucleotide
cagucuaacucuuugggaa

SEQ ID NO: 10975 - RNA, 19 nt, Artificial Sequence
  Description of Artificial Sequence: Synthetic oligonucleotide
agcaucccugguaaaagac

SEQ ID NO: 10976 - RNA, 19 nt, Artificial Sequence
  Description of Artificial Sequence: Synthetic oligonucleotide
gaguauaacgaacguagcu

SEQ ID NO: 10977 - RNA, 19 nt, Artificial Sequence
  Description of Artificial Sequence: Synthetic oligonucleotide
caauaccuccucaacaaca

SEQ ID NO: 10978 - RNA, 19 nt, Artificial Sequence
  Description of Artificial Sequence: Synthetic oligonucleotide
uaacgaacguagcuaucac

SEQ ID NO: 10979 - RNA, 19 nt, Artificial Sequence
  Description of Artificial Sequence: Synthetic oligonucleotide
aguguugggaauggauagg

SEQ ID NO: 10980 - RNA, 19 nt, Artificial Sequence
  Description of Artificial Sequence: Synthetic oligonucleotide
ugauuuacaugugcaauuu

SEQ ID NO: 10981 - RNA, 19 nt, Artificial Sequence
  Description of Artificial Sequence: Synthetic oligonucleotide
guugaaagagcgcagaauu

SEQ ID NO: 10982 - RNA, 19 nt, Artificial Sequence
  Description of Artificial Sequence: Synthetic oligonucleotide
cuauaccuacugauuuacc

SEQ ID NO: 10983 - RNA, 19 nt, Artificial Sequence
  Description of Artificial Sequence: Synthetic oligonucleotide
acuuccguacgcggaagcc

SEQ ID NO: 10984 - RNA, 19 nt, Artificial Sequence
  Description of Artificial Sequence: Synthetic oligonucleotide
agguauaaccuauuauaua

SEQ ID NO: 10985 - RNA, 19 nt, Artificial Sequence
  Description of Artificial Sequence: Synthetic oligonucleotide
uauaacgaacguagcuauc

SEQ ID NO: 10986 - RNA, 19 nt, Artificial Sequence
  Description of Artificial Sequence: Synthetic oligonucleotide
gcauggaguauaacgaacg

SEQ ID NO: 10987 - RNA, 19 nt, Artificial Sequence
  Description of Artificial Sequence: Synthetic oligonucleotide
ugccuauuaggccugcaua

SEQ ID NO: 10988 - RNA, 19 nt, Artificial Sequence
  Description of Artificial Sequence: Synthetic oligonucleotide
auaaguacaggagccugug

SEQ ID NO: 10989 - RNA, 19 nt, Artificial Sequence
  Description of Artificial Sequence: Synthetic oligonucleotide
gugcuauggaacaaauacc

SEQ ID NO: 10990 - RNA, 19 nt, Artificial Sequence
  Description of Artificial Sequence: Synthetic oligonucleotide
acuaacgugaggagucagg

SEQ ID NO: 10991 - RNA, 19 nt, Artificial Sequence
  Description of Artificial Sequence: Synthetic oligonucleotide
acaugagugucucuaugau

SEQ ID NO: 10992 - RNA, 19 nt, Artificial Sequence
  Description of Artificial Sequence: Synthetic oligonucleotide
aggucucucucucucucuc

SEQ ID NO: 10993 - RNA, 19 nt, Artificial Sequence
  Description of Artificial Sequence: Synthetic oligonucleotide
gagugucucuaugauuuag

SEQ ID NO: 10994 - RNA, 19 nt, Artificial Sequence
  Description of Artificial Sequence: Synthetic oligonucleotide
accgcuaacaaugguacgu

SEQ ID NO: 10995 - RNA, 19 nt, Artificial Sequence
  Description of Artificial Sequence: Synthetic oligonucleotide
caugaacuuuugaggacac

SEQ ID NO: 10996 - RNA, 19 nt, Artificial Sequence
  Description of Artificial Sequence: Synthetic oligonucleotide
uagcaaucgcaacccgucc

SEQ ID NO: 10997 - RNA, 19 nt, Artificial Sequence
  Description of Artificial Sequence: Synthetic oligonucleotide
agagaauaacaaguuagua

SEQ ID NO: 10998 - RNA, 19 nt, Artificial Sequence
  Description of Artificial Sequence: Synthetic oligonucleotide
cuaggggugguuaagucaa

SEQ ID NO: 10999 - RNA, 19 nt, Artificial Sequence
  Description of Artificial Sequence: Synthetic oligonucleotide
aaggucucucucucucucu

SEQ ID NO: 11000 - RNA, 19 nt, Artificial Sequence
  Description of Artificial Sequence: Synthetic oligonucleotide
cucucucucucucucugcc

SEQ ID NO: 11001 - RNA, 19 nt, Artificial Sequence
  Description of Artificial Sequence: Synthetic oligonucleotide
uuuagucgauucugaggac

SEQ ID NO: 11002 - RNA, 19 nt, Artificial Sequence
  Description of Artificial Sequence: Synthetic oligonucleotide
uaguauuccccaccccacu

SEQ ID NO: 11003 - RNA, 19 nt, Artificial Sequence
  Description of Artificial Sequence: Synthetic oligonucleotide
gacagacuuacugaaacua

SEQ ID NO: 11004 - RNA, 19 nt, Artificial Sequence
  Description of Artificial Sequence: Synthetic oligonucleotide
aaacacuuccguacgcgga

SEQ ID NO: 11005 - RNA, 19 nt, Artificial Sequence
  Description of Artificial Sequence: Synthetic oligonucleotide
aaucagggaagugacugua

SEQ ID NO: 11006 - RNA, 19 nt, Artificial Sequence
  Description of Artificial Sequence: Synthetic oligonucleotide
aagagccgaggcacuaacg

SEQ ID NO: 11007 - RNA, 19 nt, Artificial Sequence
  Description of Artificial Sequence: Synthetic oligonucleotide
uagucgauucugaggacau

SEQ ID NO: 11008 - RNA, 19 nt, Artificial Sequence
  Description of Artificial Sequence: Synthetic oligonucleotide
ucgcaacccguccagucug

SEQ ID NO: 11009 - RNA, 19 nt, Artificial Sequence
  Description of Artificial Sequence: Synthetic oligonucleotide
gggguuaagcuauaccuac

SEQ ID NO: 11010 - RNA, 19 nt, Artificial Sequence
  Description of Artificial Sequence: Synthetic oligonucleotide
ugauugggugcuguccucc

SEQ ID NO: 11011 - RNA, 19 nt, Artificial Sequence
  Description of Artificial Sequence: Synthetic oligonucleotide
cuguuaguauuguuguaca

SEQ ID NO: 11012 - RNA, 19 nt, Artificial Sequence
  Description of Artificial Sequence: Synthetic oligonucleotide
aacguagcuaucacuucca

SEQ ID NO: 11013 - RNA, 19 nt, Artificial Sequence
  Description of Artificial Sequence: Synthetic oligonucleotide
uuccguacgcggaagccaa

SEQ ID NO: 11014 - RNA, 19 nt, Artificial Sequence
  Description of Artificial Sequence: Synthetic oligonucleotide
aaaugaagcuaugguuuau

SEQ ID NO: 11015 - RNA, 19 nt, Artificial Sequence
  Description of Artificial Sequence: Synthetic oligonucleotide
gcgcagaauucccacagcg

SEQ ID NO: 11016 - RNA, 19 nt, Artificial Sequence
  Description of Artificial Sequence: Synthetic oligonucleotide
cucucucucucucugccac

SEQ ID NO: 11017 - RNA, 19 nt, Artificial Sequence
  Description of Artificial Sequence: Synthetic oligonucleotide
uucguuucccucugucaac

SEQ ID NO: 11018 - RNA, 19 nt, Artificial Sequence
  Description of Artificial Sequence: Synthetic oligonucleotide
ucaugggugagcggaguug

SEQ ID NO: 11019 - RNA, 19 nt, Artificial Sequence
  Description of Artificial Sequence: Synthetic oligonucleotide
uuaguaccauugucaagau

SEQ ID NO: 11020 - RNA, 19 nt, Artificial Sequence
  Description of Artificial Sequence: Synthetic oligonucleotide
aguugaaagagcgcagaau

SEQ ID NO: 11021 - RNA, 19 nt, Artificial Sequence
  Description of Artificial Sequence: Synthetic oligonucleotide
ucucucucucucucucugc

SEQ ID NO: 11022 - RNA, 19 nt, Artificial Sequence
  Description of Artificial Sequence: Synthetic oligonucleotide
ucccuuacaagcggggacu

SEQ ID NO: 11023 - RNA, 19 nt, Artificial Sequence
  Description of Artificial Sequence: Synthetic oligonucleotide
ucaagugauucugggcugu

SEQ ID NO: 11024 - RNA, 19 nt, Artificial Sequence
  Description of Artificial Sequence: Synthetic oligonucleotide
uguugcuaggggugguuaa

SEQ ID NO: 11025 - RNA, 19 nt, Artificial Sequence
  Description of Artificial Sequence: Synthetic oligonucleotide
acgaacguagcuaucacuu

SEQ ID NO: 11026 - RNA, 19 nt, Artificial Sequence
  Description of Artificial Sequence: Synthetic oligonucleotide
ucguuucccucugucaaca

SEQ ID NO: 11027 - RNA, 19 nt, Artificial Sequence
  Description of Artificial Sequence: Synthetic oligonucleotide
agcuauaccuacugauuua

SEQ ID NO: 11028 - RNA, 19 nt, Artificial Sequence
  Description of Artificial Sequence: Synthetic oligonucleotide
aucguggcacugaagguag

SEQ ID NO: 11029 - RNA, 19 nt, Artificial Sequence
  Description of Artificial Sequence: Synthetic oligonucleotide
aagcuagaccuagacagua

SEQ ID NO: 11030 - RNA, 19 nt, Artificial Sequence
  Description of Artificial Sequence: Synthetic oligonucleotide
cugguuaaauguccagcuc

SEQ ID NO: 11031 - RNA, 19 nt, Artificial Sequence
  Description of Artificial Sequence: Synthetic oligonucleotide
guauaacgaacguagcuau

SEQ ID NO: 11032 - RNA, 19 nt, Artificial Sequence
  Description of Artificial Sequence: Synthetic oligonucleotide
gaguacccugccuaaggga

SEQ ID NO: 11033 - RNA, 19 nt, Artificial Sequence
  Description of Artificial Sequence: Synthetic oligonucleotide
cacgaaguaacacugcccu

SEQ ID NO: 11034 - RNA, 19 nt, Artificial Sequence
  Description of Artificial Sequence: Synthetic oligonucleotide
ggauuggccuuaucugagg

SEQ ID NO: 11035 - RNA, 19 nt, Artificial Sequence
  Description of Artificial Sequence: Synthetic oligonucleotide
ugcuaggggugguuaaguc

SEQ ID NO: 11036 - RNA, 19 nt, Artificial Sequence
  Description of Artificial Sequence: Synthetic oligonucleotide
cucucucucucucucucug

SEQ ID NO: 11037 - RNA, 19 nt, Artificial Sequence
  Description of Artificial Sequence: Synthetic oligonucleotide
ucucucucucucucugcca

SEQ ID NO: 11038 - RNA, 19 nt, Artificial Sequence
  Description of Artificial Sequence: Synthetic oligonucleotide
cucucugguugguaaaaga

SEQ ID NO: 11039 - RNA, 19 nt, Artificial Sequence
  Description of Artificial Sequence: Synthetic oligonucleotide
ccccacucuauaaacaaac

SEQ ID NO: 11040 - RNA, 19 nt, Artificial Sequence
  Description of Artificial Sequence: Synthetic oligonucleotide
cuaggguaguuagguaaag

SEQ ID NO: 11041 - RNA, 19 nt, Artificial Sequence
  Description of Artificial Sequence: Synthetic oligonucleotide
ucaucccuacaaugaacau

SEQ ID NO: 11042 - RNA, 19 nt, Artificial Sequence
  Description of Artificial Sequence: Synthetic oligonucleotide
ucucucucucucucucucu

SEQ ID NO: 11043 - RNA, 19 nt, Artificial Sequence
  Description of Artificial Sequence: Synthetic oligonucleotide
caccgcuaacaaugguacg

SEQ ID NO: 11044 - RNA, 19 nt, Artificial Sequence
  Description of Artificial Sequence: Synthetic oligonucleotide
gaagucaagcauaugucau

SEQ ID NO: 11045 - RNA, 19 nt, Artificial Sequence
  Description of Artificial Sequence: Synthetic oligonucleotide
ggcuaggguaguuagguaa

SEQ ID NO: 11046 - RNA, 19 nt, Artificial Sequence
  Description of Artificial Sequence: Synthetic oligonucleotide
acccugacgcuucacuaga

SEQ ID NO: 11047 - RNA, 19 nt, Artificial Sequence
  Description of Artificial Sequence: Synthetic oligonucleotide
guugaucucuccggagaag

SEQ ID NO: 11048 - RNA, 19 nt, Artificial Sequence
  Description of Artificial Sequence: Synthetic oligonucleotide
gcuauaccuacugauuuac

SEQ ID NO: 11049 - RNA, 19 nt, Artificial Sequence
  Description of Artificial Sequence: Synthetic oligonucleotide
cuauauugaggaaggcugu

SEQ ID NO: 11050 - RNA, 19 nt, Artificial Sequence
  Description of Artificial Sequence: Synthetic oligonucleotide
uaguauuguuguacauauu

SEQ ID NO: 11051 - RNA, 19 nt, Artificial Sequence
  Description of Artificial Sequence: Synthetic oligonucleotide
auggaguauaacgaacgua

SEQ ID NO: 11052 - RNA, 19 nt, Artificial Sequence
  Description of Artificial Sequence: Synthetic oligonucleotide
ugagcggaguugaccucug

SEQ ID NO: 11053 - RNA, 19 nt, Artificial Sequence
  Description of Artificial Sequence: Synthetic oligonucleotide
auacaccgcuaacaauggu

SEQ ID NO: 11054 - RNA, 19 nt, Artificial Sequence
  Description of Artificial Sequence: Synthetic oligonucleotide
cucucucucucucucucuc

SEQ ID NO: 11055 - RNA, 19 nt, Artificial Sequence
  Description of Artificial Sequence: Synthetic oligonucleotide
agcaccuuugcaagaccuc

SEQ ID NO: 11056 - RNA, 19 nt, Artificial Sequence
  Description of Artificial Sequence: Synthetic oligonucleotide
gaaugggguuaagcuauac

SEQ ID NO: 11057 - RNA, 19 nt, Artificial Sequence
  Description of Artificial Sequence: Synthetic oligonucleotide
acaagcggggacucccagu

SEQ ID NO: 11058 - RNA, 19 nt, Artificial Sequence
  Description of Artificial Sequence: Synthetic oligonucleotide
gcaaucgcaacccguccag

SEQ ID NO: 11059 - RNA, 19 nt, Artificial Sequence
  Description of Artificial Sequence: Synthetic oligonucleotide
ggcacuaacgugaggaguc

SEQ ID NO: 11060 - RNA, 19 nt, Artificial Sequence
  Description of Artificial Sequence: Synthetic oligonucleotide
gcuugugagguaagauucg

SEQ ID NO: 11061 - RNA, 19 nt, Artificial Sequence
  Description of Artificial Sequence: Synthetic oligonucleotide
cuaaccuaauuuggggaca

SEQ ID NO: 11062 - RNA, 19 nt, Artificial Sequence
  Description of Artificial Sequence: Synthetic oligonucleotide
gaagcgaaagacagacuua

SEQ ID NO: 11063 - RNA, 19 nt, Artificial Sequence
  Description of Artificial Sequence: Synthetic oligonucleotide
gucucucucucucucucuc

SEQ ID NO: 11064 - RNA, 19 nt, Artificial Sequence
  Description of Artificial Sequence: Synthetic oligonucleotide
cucccuaccugcuuuggaa

SEQ ID NO: 11065 - RNA, 19 nt, Artificial Sequence
  Description of Artificial Sequence: Synthetic oligonucleotide
ucucucucucucugccaca

SEQ ID NO: 11066 - RNA, 19 nt, Artificial Sequence
  Description of Artificial Sequence: Synthetic oligonucleotide
auuagcucggagggaggug

SEQ ID NO: 11067 - RNA, 19 nt, Artificial Sequence
  Description of Artificial Sequence: Synthetic oligonucleotide
cauagcaaucgcaacccgu

SEQ ID NO: 11068 - RNA, 19 nt, Artificial Sequence
  Description of Artificial Sequence: Synthetic oligonucleotide
cccucguguacucaauacc

SEQ ID NO: 11069 - RNA, 19 nt, Artificial Sequence
  Description of Artificial Sequence: Synthetic oligonucleotide
augguacgucugccugccc

SEQ ID NO: 11070 - RNA, 19 nt, Artificial Sequence
  Description of Artificial Sequence: Synthetic oligonucleotide
cauuuccggucaaauguaa

SEQ ID NO: 11071 - RNA, 19 nt, Artificial Sequence
  Description of Artificial Sequence: Synthetic oligonucleotide
cucuagagaauaacaaguu

SEQ ID NO: 11072 - RNA, 19 nt, Artificial Sequence
  Description of Artificial Sequence: Synthetic oligonucleotide
gcccucuuaauuccaugag

SEQ ID NO: 11073 - RNA, 19 nt, Artificial Sequence
  Description of Artificial Sequence: Synthetic oligonucleotide
caccuuugcaagaccucuc

SEQ ID NO: 11074 - RNA, 19 nt, Artificial Sequence
  Description of Artificial Sequence: Synthetic oligonucleotide
aucaaaugccaagcuugga

SEQ ID NO: 11075 - RNA, 19 nt, Artificial Sequence
  Description of Artificial Sequence: Synthetic oligonucleotide
gaagccgagguagcccaug

SEQ ID NO: 11076 - RNA, 19 nt, Artificial Sequence
  Description of Artificial Sequence: Synthetic oligonucleotide
aucaugggugagcggaguu

SEQ ID NO: 11077 - RNA, 19 nt, Artificial Sequence
  Description of Artificial Sequence: Synthetic oligonucleotide
caugggugagcggaguuga

SEQ ID NO: 11078 - RNA, 19 nt, Artificial Sequence
  Description of Artificial Sequence: Synthetic oligonucleotide
ggacgcauacaguaguuua

SEQ ID NO: 11079 - RNA, 19 nt, Artificial Sequence
  Description of Artificial Sequence: Synthetic oligonucleotide
accuuauaagcaggcucug

SEQ ID NO: 11080 - RNA, 19 nt, Artificial Sequence
  Description of Artificial Sequence: Synthetic oligonucleotide
auacccuguaaaaucugua

SEQ ID NO: 11081 - RNA, 19 nt, Artificial Sequence
  Description of Artificial Sequence: Synthetic oligonucleotide
cacuaacgugaggagucag

SEQ ID NO: 11082 - RNA, 19 nt, Artificial Sequence
  Description of Artificial Sequence: Synthetic oligonucleotide
acguagcuaucacuuccaa

SEQ ID NO: 11083 - RNA, 19 nt, Artificial Sequence
  Description of Artificial Sequence: Synthetic oligonucleotide
cauggaguauaacgaacgu

SEQ ID NO: 11084 - RNA, 19 nt, Artificial Sequence
  Description of Artificial Sequence: Synthetic oligonucleotide
cuuccguacgcggaagcca

SEQ ID NO: 11085 - RNA, 19 nt, Artificial Sequence
  Description of Artificial Sequence: Synthetic oligonucleotide
ccuuagaugguuucucaaa

SEQ ID NO: 11086 - RNA, 19 nt, Artificial Sequence
  Description of Artificial Sequence: Synthetic oligonucleotide
cagcuuaagagcugcaguu

SEQ ID NO: 11087 - RNA, 19 nt, Artificial Sequence
  Description of Artificial Sequence: Synthetic oligonucleotide
auucguguugugggugggu

SEQ ID NO: 11088 - RNA, 19 nt, Artificial Sequence
  Description of Artificial Sequence: Synthetic oligonucleotide
uaauuccaugagggugaca

SEQ ID NO: 11089 - RNA, 19 nt, Artificial Sequence
  Description of Artificial Sequence: Synthetic oligonucleotide
agcgaaagacagacuuacu

SEQ ID NO: 11090 - RNA, 19 nt, Artificial Sequence
  Description of Artificial Sequence: Synthetic oligonucleotide
ugcuagcaucccugguaaa

SEQ ID NO: 11091 - RNA, 19 nt, Artificial Sequence
  Description of Artificial Sequence: Synthetic oligonucleotide
aggacgcauacaguaguuu

SEQ ID NO: 11092 - RNA, 19 nt, Artificial Sequence
  Description of Artificial Sequence: Synthetic oligonucleotide
gggugagcggaguugaccu

SEQ ID NO: 11093 - RNA, 19 nt, Artificial Sequence
  Description of Artificial Sequence: Synthetic oligonucleotide
uaggggugguuaagucaau

SEQ ID NO: 11094 - RNA, 19 nt, Artificial Sequence
  Description of Artificial Sequence: Synthetic oligonucleotide
agcuagaccuagacaguau

SEQ ID NO: 11095 - RNA, 19 nt, Artificial Sequence
  Description of Artificial Sequence: Synthetic oligonucleotide
cuugugagguaagauucgu

SEQ ID NO: 11096 - RNA, 19 nt, Artificial Sequence
  Description of Artificial Sequence: Synthetic oligonucleotide
gcuagcaucccugguaaaa

SEQ ID NO: 11097 - RNA, 19 nt, Artificial Sequence
  Description of Artificial Sequence: Synthetic oligonucleotide
cacuaagcucaaggucccc

SEQ ID NO: 11098 - RNA, 19 nt, Artificial Sequence
  Description of Artificial Sequence: Synthetic oligonucleotide
ccccucguguacucaauac

SEQ ID NO: 11099 - RNA, 19 nt, Artificial Sequence
  Description of Artificial Sequence: Synthetic oligonucleotide
aggggugguuaagucaaua

SEQ ID NO: 11100 - RNA, 19 nt, Artificial Sequence
  Description of Artificial Sequence: Synthetic oligonucleotide
caacauuagcucggaggga

SEQ ID NO: 11101 - RNA, 19 nt, Artificial Sequence
  Description of Artificial Sequence: Synthetic oligonucleotide
uccguacgcggaagccaaa

SEQ ID NO: 11102 - RNA, 19 nt, Artificial Sequence
  Description of Artificial Sequence: Synthetic oligonucleotide
caaggauguguggggagaa

SEQ ID NO: 11103 - RNA, 19 nt, Artificial Sequence
  Description of Artificial Sequence: Synthetic oligonucleotide
gcuaggguaguuagguaaa

SEQ ID NO: 11104 - RNA, 19 nt, Artificial Sequence
  Description of Artificial Sequence: Synthetic oligonucleotide
gugccuauuaggccugcau

SEQ ID NO: 11105 - RNA, 19 nt, Artificial Sequence
  Description of Artificial Sequence: Synthetic oligonucleotide
gagcggaguugaccucuga

SEQ ID NO: 11106 - RNA, 19 nt, Artificial Sequence
  Description of Artificial Sequence: Synthetic oligonucleotide
ccaaguccagucuaacucu

SEQ ID NO: 11107 - RNA, 19 nt, Artificial Sequence
  Description of Artificial Sequence: Synthetic oligonucleotide
gugagcggaguugaccucu

SEQ ID NO: 11108 - RNA, 19 nt, Artificial Sequence
  Description of Artificial Sequence: Synthetic oligonucleotide
caccggaacugaaguaaua

SEQ ID NO: 11109 - RNA, 19 nt, Artificial Sequence
  Description of Artificial Sequence: Synthetic oligonucleotide
guacgucugccugcccaug

SEQ ID NO: 11110 - RNA, 19 nt, Artificial Sequence
  Description of Artificial Sequence: Synthetic oligonucleotide
ggugagcggaguugaccuc

SEQ ID NO: 11111 - RNA, 19 nt, Artificial Sequence
  Description of Artificial Sequence: Synthetic oligonucleotide
cucuaugauuuagguuaga

SEQ ID NO: 11112 - RNA, 19 nt, Artificial Sequence
  Description of Artificial Sequence: Synthetic oligonucleotide
cgaacguagcuaucacuuc

SEQ ID NO: 11113 - RNA, 19 nt, Artificial Sequence
  Description of Artificial Sequence: Synthetic oligonucleotide
gcuauggaacaaauacccu

SEQ ID NO: 11114 - RNA, 19 nt, Artificial Sequence
  Description of Artificial Sequence: Synthetic oligonucleotide
gccgaggcacuaacgugag

SEQ ID NO: 11115 - RNA, 19 nt, Artificial Sequence
  Description of Artificial Sequence: Synthetic oligonucleotide
ccuuacaagcggggacucc

SEQ ID NO: 11116 - RNA, 19 nt, Artificial Sequence
  Description of Artificial Sequence: Synthetic oligonucleotide
ccgcuaacaaugguacguc

SEQ ID NO: 11117 - RNA, 19 nt, Artificial Sequence
  Description of Artificial Sequence: Synthetic oligonucleotide
ccguacgcggaagccaaag

SEQ ID NO: 11118 - RNA, 19 nt, Artificial Sequence
  Description of Artificial Sequence: Synthetic oligonucleotide
gcacuaacgugaggaguca

SEQ ID NO: 11119 - RNA, 19 nt, Artificial Sequence
  Description of Artificial Sequence: Synthetic oligonucleotide
cagaacacuuaggacgcau

SEQ ID NO: 11120 - RNA, 19 nt, Artificial Sequence
  Description of Artificial Sequence: Synthetic oligonucleotide
ggucucucucucucucucu

SEQ ID NO: 11121 - RNA, 19 nt, Artificial Sequence
  Description of Artificial Sequence: Synthetic oligonucleotide
cccuaccugcuuuggaaaa

SEQ ID NO: 11122 - RNA, 19 nt, Artificial Sequence
  Description of Artificial Sequence: Synthetic oligonucleotide
ggguuaagcuauaccuacu

SEQ ID NO: 11123 - RNA, 19 nt, Artificial Sequence
  Description of Artificial Sequence: Synthetic oligonucleotide
cucucucucucugccacau

SEQ ID NO: 11124 - RNA, 19 nt, Artificial Sequence
  Description of Artificial Sequence: Synthetic oligonucleotide
cucggagggaggugagcau

SEQ ID NO: 11125 - RNA, 19 nt, Artificial Sequence
  Description of Artificial Sequence: Synthetic oligonucleotide
cguacgcggaagccaaaga

SEQ ID NO: 11126 - RNA, 19 nt, Artificial Sequence
  Description of Artificial Sequence: Synthetic oligonucleotide
gccuaagggaauagccacu

SEQ ID NO: 11127 - RNA, 19 nt, Artificial Sequence
  Description of Artificial Sequence: Synthetic oligonucleotide
caaucgcaacccguccagu

SEQ ID NO: 11128 - RNA, 19 nt, Artificial Sequence
  Description of Artificial Sequence: Synthetic oligonucleotide
cauugucaagaugcauguu

SEQ ID NO: 11129 - RNA, 19 nt, Artificial Sequence
  Description of Artificial Sequence: Synthetic oligonucleotide
ccccaacacuucccuuaca

SEQ ID NO: 11130 - RNA, 19 nt, Artificial Sequence
  Description of Artificial Sequence: Synthetic oligonucleotide
cccugacgcuucacuagau

SEQ ID NO: 11131 - RNA, 19 nt, Artificial Sequence
  Description of Artificial Sequence: Synthetic oligonucleotide
aauuagaggagcuacuugg

SEQ ID NO: 11132 - RNA, 19 nt, Artificial Sequence
  Description of Artificial Sequence: Synthetic oligonucleotide
aacaaagugucuuagauca

SEQ ID NO: 11133 - RNA, 19 nt, Artificial Sequence
  Description of Artificial Sequence: Synthetic oligonucleotide
guaaauaugagacugcagg

SEQ ID NO: 11134 - RNA, 19 nt, Artificial Sequence
  Description of Artificial Sequence: Synthetic oligonucleotide
agaauaaauuuauagacag

SEQ ID NO: 11135 - RNA, 19 nt, Artificial Sequence
  Description of Artificial Sequence: Synthetic oligonucleotide
cuuagugucgacuaggugg

SEQ ID NO: 11136 - RNA, 19 nt, Artificial Sequence
  Description of Artificial Sequence: Synthetic oligonucleotide
uuuagucuaaccaucacca

SEQ ID NO: 11137 - RNA, 19 nt, Artificial Sequence
  Description of Artificial Sequence: Synthetic oligonucleotide
ucuaaaugagcuaucacug

SEQ ID NO: 11138 - RNA, 19 nt, Artificial Sequence
  Description of Artificial Sequence: Synthetic oligonucleotide
uuaauugccauaaauuugu

SEQ ID NO: 11139 - RNA, 19 nt, Artificial Sequence
  Description of Artificial Sequence: Synthetic oligonucleotide
ucuaugaauauauuugaag

SEQ ID NO: 11140 - RNA, 19 nt, Artificial Sequence
  Description of Artificial Sequence: Synthetic oligonucleotide
uugaauguuaauauucaag

SEQ ID NO: 11141 - RNA, 19 nt, Artificial Sequence
  Description of Artificial Sequence: Synthetic oligonucleotide
uguucaauuagcuauugga

SEQ ID NO: 11142 - RNA, 19 nt, Artificial Sequence
  Description of Artificial Sequence: Synthetic oligonucleotide
  modified_base (5)..(5): a, c, u, g, unknown or other
aaagnuaguugcuauuucu

SEQ ID NO: 11143 - RNA, 19 nt, Artificial Sequence
  Description of Artificial Sequence: Synthetic oligonucleotide
cuuauuaugugaaaugcac

SEQ ID NO: 11144 - RNA, 19 nt, Artificial Sequence
  Description of Artificial Sequence: Synthetic oligonucleotide
aaaccuaacacagaagcag

SEQ ID NO: 11145 - RNA, 19 nt, Artificial Sequence
  Description of Artificial Sequence: Synthetic oligonucleotide
ugugcuuaccaacugggcg

SEQ ID NO: 11146 - RNA, 19 nt, Artificial Sequence
  Description of Artificial Sequence: Synthetic oligonucleotide
ucuuuaacgaaaagaaaca

SEQ ID NO: 11147 - RNA, 19 nt, Artificial Sequence
  Description of Artificial Sequence: Synthetic oligonucleotide
uuagaugacucucuguugc

SEQ ID NO: 11148 - RNA, 19 nt, Artificial Sequence
  Description of Artificial Sequence: Synthetic oligonucleotide
ucacugauaauaaagugac

SEQ ID NO: 11149 - RNA, 19 nt, Artificial Sequence
  Description of Artificial Sequence: Synthetic oligonucleotide
aaauaugagacugcaggac

SEQ ID NO: 11150 - RNA, 19 nt, Artificial Sequence
  Description of Artificial Sequence: Synthetic oligonucleotide
uacuacucugcuuagauga

SEQ ID NO: 11151 - RNA, 19 nt, Artificial Sequence
  Description of Artificial Sequence: Synthetic oligonucleotide
uuagaugcaauguagucac

SEQ ID NO: 11152 - RNA, 19 nt, Artificial Sequence
  Description of Artificial Sequence: Synthetic oligonucleotide
uuaaacgcauguuugacac

SEQ ID NO: 11153 - RNA, 19 nt, Artificial Sequence
  Description of Artificial Sequence: Synthetic oligonucleotide
uuagcuauuggaaaauuaa

SEQ ID NO: 11154 - RNA, 19 nt, Artificial Sequence
  Description of Artificial Sequence: Synthetic oligonucleotide
agcuuauuaugugaaaugc

SEQ ID NO: 11155 - RNA, 19 nt, Artificial Sequence
  Description of Artificial Sequence: Synthetic oligonucleotide
agugacuuuucacaugugg

SEQ ID NO: 11156 - RNA, 19 nt, Artificial Sequence
  Description of Artificial Sequence: Synthetic oligonucleotide
aaaucaguaguggucaauc

SEQ ID NO: 11157 - RNA, 19 nt, Artificial Sequence
  Description of Artificial Sequence: Synthetic oligonucleotide
agaauuaaaucaguagugg

SEQ ID NO: 11158 - RNA, 19 nt, Artificial Sequence
  Description of Artificial Sequence: Synthetic oligonucleotide
acacaauccaagcucauuc

SEQ ID NO: 11159 - RNA, 19 nt, Artificial Sequence
  Description of Artificial Sequence: Synthetic oligonucleotide
ucaacgguauguaaaauaa

SEQ ID NO: 11160 - RNA, 19 nt, Artificial Sequence
  Description of Artificial Sequence: Synthetic oligonucleotide
uauacaacgaagccauuug

SEQ ID NO: 11161 - RNA, 19 nt, Artificial Sequence
  Description of Artificial Sequence: Synthetic oligonucleotide
agcacaugcauauaaacgu

SEQ ID NO: 11162 - RNA, 19 nt, Artificial Sequence
  Description of Artificial Sequence: Synthetic oligonucleotide
uuuugagccccaaaguacc

SEQ ID NO: 11163 - RNA, 19 nt, Artificial Sequence
  Description of Artificial Sequence: Synthetic oligonucleotide
uuauuaugugaaaugcaca

SEQ ID NO: 11164 - RNA, 19 nt, Artificial Sequence
  Description of Artificial Sequence: Synthetic oligonucleotide
aacacuaggugugcaauac

SEQ ID NO: 11165 - RNA, 19 nt, Artificial Sequence
  Description of Artificial Sequence: Synthetic oligonucleotide
uuauagacaggaauaacua

SEQ ID NO: 11166 - RNA, 19 nt, Artificial Sequence
  Description of Artificial Sequence: Synthetic oligonucleotide
caaaacggaggcuagguag

SEQ ID NO: 11167 - RNA, 19 nt, Artificial Sequence
  Description of Artificial Sequence: Synthetic oligonucleotide
uugagaauuacuguaagaa

SEQ ID NO: 11168 - RNA, 19 nt, Artificial Sequence
  Description of Artificial Sequence: Synthetic oligonucleotide
cucaauaccacaaaauaca

SEQ ID NO: 11169 - RNA, 19 nt, Artificial Sequence
  Description of Artificial Sequence: Synthetic oligonucleotide
agcugcuuaaaucuuuaac

SEQ ID NO: 11170 - RNA, 19 nt, Artificial Sequence
  Description of Artificial Sequence: Synthetic oligonucleotide
gaugccuauaaaucccugg

SEQ ID NO: 11171 - RNA, 19 nt, Artificial Sequence
  Description of Artificial Sequence: Synthetic oligonucleotide
gagaauuaaaucaguagug

SEQ ID NO: 11172 - RNA, 19 nt, Artificial Sequence
  Description of Artificial Sequence: Synthetic oligonucleotide
ucucuaaucauaaggacuu

SEQ ID NO: 11173 - RNA, 19 nt, Artificial Sequence
  Description of Artificial Sequence: Synthetic oligonucleotide
cuuagaguacuucagagca

SEQ ID NO: 11174 - RNA, 19 nt, Artificial Sequence
  Description of Artificial Sequence: Synthetic oligonucleotide
uuugugaugugacacaguu

SEQ ID NO: 11175 - RNA, 19 nt, Artificial Sequence
  Description of Artificial Sequence: Synthetic oligonucleotide
uguaaguaugugaaaagua

SEQ ID NO: 11176 - RNA, 19 nt, Artificial Sequence
  Description of Artificial Sequence: Synthetic oligonucleotide
ucugaguacauaggaaacg

SEQ ID NO: 11177 - RNA, 19 nt, Artificial Sequence
  Description of Artificial Sequence: Synthetic oligonucleotide
ucuuagaguacuucagagc

SEQ ID NO: 11178 - RNA, 19 nt, Artificial Sequence
  Description of Artificial Sequence: Synthetic oligonucleotide
aguucaagauaucaacuug

SEQ ID NO: 11179 - RNA, 19 nt, Artificial Sequence
  Description of Artificial Sequence: Synthetic oligonucleotide
aguuacuagcacaagagag

SEQ ID NO: 11180 - RNA, 19 nt, Artificial Sequence
  Description of Artificial Sequence: Synthetic oligonucleotide
guuacuagcacaagagagg

SEQ ID NO: 11181 - RNA, 19 nt, Artificial Sequence
  Description of Artificial Sequence: Synthetic oligonucleotide
aauaccaagcauaaaucca

SEQ ID NO: 11182 - RNA, 19 nt, Artificial Sequence
  Description of Artificial Sequence: Synthetic oligonucleotide
auacacauuaaacgcaugu

SEQ ID NO: 11183 - RNA, 19 nt, Artificial Sequence
  Description of Artificial Sequence: Synthetic oligonucleotide
guagauaucuuugggagcc

SEQ ID NO: 11184 - RNA, 19 nt, Artificial Sequence
  Description of Artificial Sequence: Synthetic oligonucleotide
uguacuacucugcuuagau

SEQ ID NO: 11185 - RNA, 19 nt, Artificial Sequence
  Description of Artificial Sequence: Synthetic oligonucleotide
aaugauggugccuaaucua

SEQ ID NO: 11186 - RNA, 19 nt, Artificial Sequence
  Description of Artificial Sequence: Synthetic oligonucleotide
  modified_base (7)..(7): a, c, u, g, unknown or other
uuaaagnuaguugcuauuu

SEQ ID NO: 11187 - RNA, 19 nt, Artificial Sequence
  Description of Artificial Sequence: Synthetic oligonucleotide
gccuacauuaaauuuaugc

SEQ ID NO: 11188 - RNA, 19 nt, Artificial Sequence
  Description of Artificial Sequence: Synthetic oligonucleotide
aaguuacuagcacaagaga

SEQ ID NO: 11189 - RNA, 19 nt, Artificial Sequence
  Description of Artificial Sequence: Synthetic oligonucleotide
cauagaggaaguuagaugu

SEQ ID NO: 11190 - RNA, 19 nt, Artificial Sequence
  Description of Artificial Sequence: Synthetic oligonucleotide
uccacgcucacuuaagcgc

SEQ ID NO: 11191 - RNA, 19 nt, Artificial Sequence
  Description of Artificial Sequence: Synthetic oligonucleotide
guagauauuaacccucaac

SEQ ID NO: 11192 - RNA, 19 nt, Artificial Sequence
  Description of Artificial Sequence: Synthetic oligonucleotide
uuagaggagcuacuuggag

SEQ ID NO: 11193 - RNA, 19 nt, Artificial Sequence
  Description of Artificial Sequence: Synthetic oligonucleotide
  modified_base (3)..(3): a, c, u, g, unknown or other
uunuccgaggcuucgagaa

SEQ ID NO: 11194 - RNA, 19 nt, Artificial Sequence
  Description of Artificial Sequence: Synthetic oligonucleotide
uuagugucgacuagguggu

SEQ ID NO: 11195 - RNA, 19 nt, Artificial Sequence
  Description of Artificial Sequence: Synthetic oligonucleotide
auuaaacgcauguuugaca

SEQ ID NO: 11196 - RNA, 19 nt, Artificial Sequence
  Description of Artificial Sequence: Synthetic oligonucleotide
uugaacaaggugcucuggc

SEQ ID NO: 11197 - RNA, 19 nt, Artificial Sequence
  Description of Artificial Sequence: Synthetic oligonucleotide
uuacucacagcaacacuag

SEQ ID NO: 11198 - RNA, 19 nt, Artificial Sequence
  Description of Artificial Sequence: Synthetic oligonucleotide
auuaaagaugagagggccc

SEQ ID NO: 11199 - RNA, 19 nt, Artificial Sequence
  Description of Artificial Sequence: Synthetic oligonucleotide
aaucaguaguggucaaucu

SEQ ID NO: 11200 - RNA, 19 nt, Artificial Sequence
  Description of Artificial Sequence: Synthetic oligonucleotide
agugagagcacaugcauau

SEQ ID NO: 11201 - RNA, 19 nt, Artificial Sequence
  Description of Artificial Sequence: Synthetic oligonucleotide
acuaagcuaaaauacuaaa

SEQ ID NO: 11202 - RNA, 19 nt, Artificial Sequence
  Description of Artificial Sequence: Synthetic oligonucleotide
ugucagaccauguaaguua

SEQ ID NO: 11203 - RNA, 19 nt, Artificial Sequence
  Description of Artificial Sequence: Synthetic oligonucleotide
ucaaccguguuacuucccc

SEQ ID NO: 11204 - RNA, 19 nt, Artificial Sequence
  Description of Artificial Sequence: Synthetic oligonucleotide
ugaccauuaccucagggua

SEQ ID NO: 11205 - RNA, 19 nt, Artificial Sequence
  Description of Artificial Sequence: Synthetic oligonucleotide
  modified_base (6)..(6): a, c, u, g, unknown or other
uaaagnuaguugcuauuuc

SEQ ID NO: 11206 - RNA, 19 nt, Artificial Sequence
  Description of Artificial Sequence: Synthetic oligonucleotide
uguggaaauaguugcacua

SEQ ID NO: 11207 - RNA, 19 nt, Artificial Sequence
  Description of Artificial Sequence: Synthetic oligonucleotide
uuacuagcacaagagagga

SEQ ID NO: 11208 - RNA, 19 nt, Artificial Sequence
  Description of Artificial Sequence: Synthetic oligonucleotide
uuugaaaggcagcacuuau

SEQ ID NO: 11209 - RNA, 19 nt, Artificial Sequence
  Description of Artificial Sequence: Synthetic oligonucleotide
uccuaggggaauaugaguu

SEQ ID NO: 11210 - RNA, 19 nt, Artificial Sequence
  Description of Artificial Sequence: Synthetic oligonucleotide
uuuuacucacagcaacacu

SEQ ID NO: 11211 - RNA, 19 nt, Artificial Sequence
  Description of Artificial Sequence: Synthetic oligonucleotide
ucauccucgguagauaucu

SEQ ID NO: 11212 - RNA, 19 nt, Artificial Sequence
  Description of Artificial Sequence: Synthetic oligonucleotide
  modified_base (11)..(11): a, c, u, g, unknown or other
caagcuuguunuccgaggc

SEQ ID NO: 11213 - RNA, 19 nt, Artificial Sequence
  Description of Artificial Sequence: Synthetic oligonucleotide
auagaagugugaucuuaag

SEQ ID NO: 11214 - RNA, 19 nt, Artificial Sequence
  Description of Artificial Sequence: Synthetic oligonucleotide
ucgguagauaucuuuggga

SEQ ID NO: 11215 - RNA, 19 nt, Artificial Sequence
  Description of Artificial Sequence: Synthetic oligonucleotide
agugucuuagaucaauuua

SEQ ID NO: 11216 - RNA, 19 nt, Artificial Sequence
  Description of Artificial Sequence: Synthetic oligonucleotide
ucuaaugguauacgcugcu

SEQ ID NO: 11217 - RNA, 19 nt, Artificial Sequence
  Description of Artificial Sequence: Synthetic oligonucleotide
ucggguuuauggaugauua

SEQ ID NO: 11218 - RNA, 19 nt, Artificial Sequence
  Description of Artificial Sequence: Synthetic oligonucleotide
agcauccuuaauaccaagc

SEQ ID NO: 11219 - RNA, 19 nt, Artificial Sequence
  Description of Artificial Sequence: Synthetic oligonucleotide
cauccuaggggaauaugag

SEQ ID NO: 11220 - RNA, 19 nt, Artificial Sequence
  Description of Artificial Sequence: Synthetic oligonucleotide
ugaguuacaggagucuaca

SEQ ID NO: 11221 - RNA, 19 nt, Artificial Sequence
  Description of Artificial Sequence: Synthetic oligonucleotide
  modified_base (3)..(3): a, c, u, g, unknown or other
agnuaguugcuauuucuau

SEQ ID NO: 11222 - RNA, 19 nt, Artificial Sequence
  Description of Artificial Sequence: Synthetic oligonucleotide
cucgguagauaucuuuggg

SEQ ID NO: 11223 - RNA, 19 nt, Artificial Sequence
  Description of Artificial Sequence: Synthetic oligonucleotide
ucuuaagagcagugaacug

SEQ ID NO: 11224 - RNA, 19 nt, Artificial Sequence
  Description of Artificial Sequence: Synthetic oligonucleotide
ugucuuagaucaauuuaau

SEQ ID NO: 11225 - RNA, 19 nt, Artificial Sequence
  Description of Artificial Sequence: Synthetic oligonucleotide
uuuguacuacucugcuuag

SEQ ID NO: 11226 - RNA, 19 nt, Artificial Sequence
  Description of Artificial Sequence: Synthetic oligonucleotide
auaucaacuuggcauccug

SEQ ID NO: 11227 - RNA, 19 nt, Artificial Sequence
  Description of Artificial Sequence: Synthetic oligonucleotide
ucccuaacugugcuuacca

SEQ ID NO: 11228 - RNA, 19 nt, Artificial Sequence
  Description of Artificial Sequence: Synthetic oligonucleotide
  modified_base (8)..(8): a, c, u, g, unknown or other
auuaaagnuaguugcuauu

SEQ ID NO: 11229 - RNA, 19 nt, Artificial Sequence
  Description of Artificial Sequence: Synthetic oligonucleotide
cuuaagagcagugaacuga

SEQ ID NO: 11230 - RNA, 19 nt, Artificial Sequence
  Description of Artificial Sequence: Synthetic oligonucleotide
ugccuauaaaucccuggug

SEQ ID NO: 11231 - RNA, 19 nt, Artificial Sequence
  Description of Artificial Sequence: Synthetic oligonucleotide
augccuauaaaucccuggu

SEQ ID NO: 11232 - RNA, 19 nt, Artificial Sequence
  Description of Artificial Sequence: Synthetic oligonucleotide
  modified_base (7)..(7): a, c, u, g, unknown or other
cuuguunuccgaggcuucg

SEQ ID NO: 11233 - RNA, 19 nt, Artificial Sequence
  Description of Artificial Sequence: Synthetic oligonucleotide
agcgucuuagaguacuuca

SEQ ID NO: 11234 - RNA, 19 nt, Artificial Sequence
  Description of Artificial Sequence: Synthetic oligonucleotide
cauucaaaacggaggcuag

SEQ ID NO: 11235 - RNA, 19 nt, Artificial Sequence
  Description of Artificial Sequence: Synthetic oligonucleotide
gccuauaaaucccuggugc

SEQ ID NO: 11236 - RNA, 19 nt, Artificial Sequence
  Description of Artificial Sequence: Synthetic oligonucleotide
uucaaaacggaggcuaggu

SEQ ID NO: 11237 - RNA, 19 nt, Artificial Sequence
  Description of Artificial Sequence: Synthetic oligonucleotide
auguaaccuggacauagcu

SEQ ID NO: 11238 - RNA, 19 nt, Artificial Sequence
  Description of Artificial Sequence: Synthetic oligonucleotide
aaaacggaggcuagguaga

SEQ ID NO: 11239 - RNA, 19 nt, Artificial Sequence
  Description of Artificial Sequence: Synthetic oligonucleotide
aggcaacgagaauauguuc

SEQ ID NO: 11240 - RNA, 19 nt, Artificial Sequence
  Description of Artificial Sequence: Synthetic oligonucleotide
uaacugugcuuaccaacug

SEQ ID NO: 11241 - RNA, 19 nt, Artificial Sequence
  Description of Artificial Sequence: Synthetic oligonucleotide
acuuaguugaaaaggcuga

SEQ ID NO: 11242 - RNA, 19 nt, Artificial Sequence
  Description of Artificial Sequence: Synthetic oligonucleotide
  modified_base (4)..(4): a, c, u, g, unknown or other
aagnuaguugcuauuucua

SEQ ID NO: 11243 - RNA, 19 nt, Artificial Sequence
  Description of Artificial Sequence: Synthetic oligonucleotide
acggaggcuagguagaaau

SEQ ID NO: 11244 - RNA, 19 nt, Artificial Sequence
  Description of Artificial Sequence: Synthetic oligonucleotide
auaguguauuugaugagcu

SEQ ID NO: 11245 - RNA, 19 nt, Artificial Sequence
  Description of Artificial Sequence: Synthetic oligonucleotide
acaacugucagaccaugua

SEQ ID NO: 11246 - RNA, 19 nt, Artificial Sequence
  Description of Artificial Sequence: Synthetic oligonucleotide
uuagucuaaccaucaccac

SEQ ID NO: 11247 - RNA, 19 nt, Artificial Sequence
  Description of Artificial Sequence: Synthetic oligonucleotide
  modified_base (2)..(2): a, c, u, g, unknown or other
unuccgaggcuucgagaag

SEQ ID NO: 11248 - RNA, 19 nt, Artificial Sequence
  Description of Artificial Sequence: Synthetic oligonucleotide
uguagauauuaacccucaa

SEQ ID NO: 11249 - RNA, 19 nt, Artificial Sequence
  Description of Artificial Sequence: Synthetic oligonucleotide
auccuaggggaauaugagu

SEQ ID NO: 11250 - RNA, 19 nt, Artificial Sequence
  Description of Artificial Sequence: Synthetic oligonucleotide
agaugccuagauguuuugg

SEQ ID NO: 11251 - RNA, 19 nt, Artificial Sequence
  Description of Artificial Sequence: Synthetic oligonucleotide
cagguaauuagcuguagaa

SEQ ID NO: 11252 - RNA, 19 nt, Artificial Sequence
  Description of Artificial Sequence: Synthetic oligonucleotide
ucaaaacggaggcuaggua

SEQ ID NO: 11253 - RNA, 19 nt, Artificial Sequence
  Description of Artificial Sequence: Synthetic oligonucleotide
auauacaacgaagccauuu

SEQ ID NO: 11254 - RNA, 19 nt, Artificial Sequence
  Description of Artificial Sequence: Synthetic oligonucleotide
uggaggaacuauucuugcu

SEQ ID NO: 11255 - RNA, 19 nt, Artificial Sequence
  Description of Artificial Sequence: Synthetic oligonucleotide
cuuaguugaaaaggcugac

SEQ ID NO: 11256 - RNA, 19 nt, Artificial Sequence
  Description of Artificial Sequence: Synthetic oligonucleotide
cuaggggaauaugaguuac

SEQ ID NO: 11257 - RNA, 19 nt, Artificial Sequence
  Description of Artificial Sequence: Synthetic oligonucleotide
acguaguuucuccagcuau

SEQ ID NO: 11258 - RNA, 19 nt, Artificial Sequence
  Description of Artificial Sequence: Synthetic oligonucleotide
cagagucuaaugguauacg

SEQ ID NO: 11259 - RNA, 19 nt, Artificial Sequence
  Description of Artificial Sequence: Synthetic oligonucleotide
uugugauugcuaguguuuc

SEQ ID NO: 11260 - RNA, 19 nt, Artificial Sequence
  Description of Artificial Sequence: Synthetic oligonucleotide
acuaaccccauguuuucau

SEQ ID NO: 11261 - RNA, 19 nt, Artificial Sequence
  Description of Artificial Sequence: Synthetic oligonucleotide
ugccuagauguuuuggaua

SEQ ID NO: 11262 - RNA, 19 nt, Artificial Sequence
  Description of Artificial Sequence: Synthetic oligonucleotide
acaccuauagacuccuaua

SEQ ID NO: 11263 - RNA, 19 nt, Artificial Sequence
  Description of Artificial Sequence: Synthetic oligonucleotide
aggcuguguaaucuuaaau

SEQ ID NO: 11264 - RNA, 19 nt, Artificial Sequence
  Description of Artificial Sequence: Synthetic oligonucleotide
accuauagacuccuauaaa

SEQ ID NO: 11265 - RNA, 19 nt, Artificial Sequence
  Description of Artificial Sequence: Synthetic oligonucleotide
gcaacgagaauauguucag

SEQ ID NO: 11266 - RNA, 19 nt, Artificial Sequence
  Description of Artificial Sequence: Synthetic oligonucleotide
auuucccuaacugugcuua

SEQ ID NO: 11267 - RNA, 19 nt, Artificial Sequence
  Description of Artificial Sequence: Synthetic oligonucleotide
acuaaacuuuaaacaagcu

SEQ ID NO: 11268 - RNA, 19 nt, Artificial Sequence
  Description of Artificial Sequence: Synthetic oligonucleotide
cucaacgguauguaaaaua

SEQ ID NO: 11269 - RNA, 19 nt, Artificial Sequence
  Description of Artificial Sequence: Synthetic oligonucleotide
caccuugugauugcuagug

SEQ ID NO: 11270 - RNA, 19 nt, Artificial Sequence
  Description of Artificial Sequence: Synthetic oligonucleotide
  modified_base (2)..(2): a, c, u, g, unknown or other
gnuaguugcuauuucuauu

SEQ ID NO: 11271 - RNA, 19 nt, Artificial Sequence
  Description of Artificial Sequence: Synthetic oligonucleotide
ugcauacccucagaccuag

SEQ ID NO: 11272 - RNA, 19 nt, Artificial Sequence
  Description of Artificial Sequence: Synthetic oligonucleotide
auuagcuauuggaaaauua

SEQ ID NO: 11273 - RNA, 19 nt, Artificial Sequence
  Description of Artificial Sequence: Synthetic oligonucleotide
acuacucugcuuagaugac

SEQ ID NO: 11274 - RNA, 19 nt, Artificial Sequence
  Description of Artificial Sequence: Synthetic oligonucleotide
caacuuggcauccugccga

SEQ ID NO: 11275 - RNA, 19 nt, Artificial Sequence
  Description of Artificial Sequence: Synthetic oligonucleotide
aacccucaacgguauguaa

SEQ ID NO: 11276 - RNA, 19 nt, Artificial Sequence
  Description of Artificial Sequence: Synthetic oligonucleotide
ggcaacgagaauauguuca

SEQ ID NO: 11277 - RNA, 19 nt, Artificial Sequence
  Description of Artificial Sequence: Synthetic oligonucleotide
ucccaaauuucaguggcau

SEQ ID NO: 11278 - RNA, 19 nt, Artificial Sequence
  Description of Artificial Sequence: Synthetic oligonucleotide
  modified_base (4)..(4): a, c, u, g, unknown or other
guunuccgaggcuucgaga

SEQ ID NO: 11279 - RNA, 19 nt, Artificial Sequence
  Description of Artificial Sequence: Synthetic oligonucleotide
cuacaacagucauccucgg

SEQ ID NO: 11280 - RNA, 19 nt, Artificial Sequence
  Description of Artificial Sequence: Synthetic oligonucleotide
caccuauagacuccuauaa

SEQ ID NO: 11281 - RNA, 19 nt, Artificial Sequence
  Description of Artificial Sequence: Synthetic oligonucleotide
  modified_base (9)..(9): a, c, u, g, unknown or other
cauuaaagnuaguugcuau

SEQ ID NO: 11282 - RNA, 19 nt, Artificial Sequence
  Description of Artificial Sequence: Synthetic oligonucleotide
cgguagauaucuuugggag

SEQ ID NO: 11283 - RNA, 19 nt, Artificial Sequence
  Description of Artificial Sequence: Synthetic oligonucleotide
auuagaggagcuacuugga

SEQ ID NO: 11284 - RNA, 19 nt, Artificial Sequence
  Description of Artificial Sequence: Synthetic oligonucleotide
acguuauacagaaaagcua

SEQ ID NO: 11285 - RNA, 19 nt, Artificial Sequence
  Description of Artificial Sequence: Synthetic oligonucleotide
ggacaauuagaggagcuac

SEQ ID NO: 11286 - RNA, 19 nt, Artificial Sequence
  Description of Artificial Sequence: Synthetic oligonucleotide
accauuaccucaggguaug

SEQ ID NO: 11287 - RNA, 19 nt, Artificial Sequence
  Description of Artificial Sequence: Synthetic oligonucleotide
agcuaggcaucaucuaaau

SEQ ID NO: 11288 - RNA, 19 nt, Artificial Sequence
  Description of Artificial Sequence: Synthetic oligonucleotide
uucccuaacugugcuuacc

SEQ ID NO: 11289 - RNA, 19 nt, Artificial Sequence
  Description of Artificial Sequence: Synthetic oligonucleotide
cuaaugguauacgcugcug

SEQ ID NO: 11290 - RNA, 19 nt, Artificial Sequence
  Description of Artificial Sequence: Synthetic oligonucleotide
aguuaaggagccagaguga

SEQ ID NO: 11291 - RNA, 19 nt, Artificial Sequence
  Description of Artificial Sequence: Synthetic oligonucleotide
cacuaggugugcaauacua

SEQ ID NO: 11292 - RNA, 19 nt, Artificial Sequence
  Description of Artificial Sequence: Synthetic oligonucleotide
cugccggguguaacgagcc

SEQ ID NO: 11293 - RNA, 19 nt, Artificial Sequence
  Description of Artificial Sequence: Synthetic oligonucleotide
gacaccuauagacuccuau

SEQ ID NO: 11294 - RNA, 19 nt, Artificial Sequence
  Description of Artificial Sequence: Synthetic oligonucleotide
uugcugcugcugcugcugc

SEQ ID NO: 11295 - RNA, 19 nt, Artificial Sequence
  Description of Artificial Sequence: Synthetic oligonucleotide
guaugaugugcuuguccca

SEQ ID NO: 11296 - RNA, 19 nt, Artificial Sequence
  Description of Artificial Sequence: Synthetic oligonucleotide
aaccuggacauagcuugcu

SEQ ID NO: 11297 - RNA, 19 nt, Artificial Sequence
  Description of Artificial Sequence: Synthetic oligonucleotide
uuguacuacucugcuuaga

SEQ ID NO: 11298 - RNA, 19 nt, Artificial Sequence
  Description of Artificial Sequence: Synthetic oligonucleotide
auccucgguagauaucuuu

SEQ ID NO: 11299 - RNA, 19 nt, Artificial Sequence
  Description of Artificial Sequence: Synthetic oligonucleotide
gugcuuaccaacugggcgu

SEQ ID NO: 11300 - RNA, 19 nt, Artificial Sequence
  Description of Artificial Sequence: Synthetic oligonucleotide
uacacaauccaagcucauu

SEQ ID NO: 11301 - RNA, 19 nt, Artificial Sequence
  Description of Artificial Sequence: Synthetic oligonucleotide
ucgacuaggugguguguua

SEQ ID NO: 11302 - RNA, 19 nt, Artificial Sequence
  Description of Artificial Sequence: Synthetic oligonucleotide
ccauuacacuacagaaggg

SEQ ID NO: 11303 - RNA, 19 nt, Artificial Sequence
  Description of Artificial Sequence: Synthetic oligonucleotide
cuugcugcugcugcugcug

SEQ ID NO: 11304 - RNA, 19 nt, Artificial Sequence
  Description of Artificial Sequence: Synthetic oligonucleotide
ugugcauaauggggacacc

SEQ ID NO: 11305 - RNA, 19 nt, Artificial Sequence
  Description of Artificial Sequence: Synthetic oligonucleotide
  modified_base (6)..(6): a, c, u, g, unknown or other
uuguunuccgaggcuucga

SEQ ID NO: 11306 - RNA, 19 nt, Artificial Sequence
  Description of Artificial Sequence: Synthetic oligonucleotide
aggcaacuucuccaaggga

SEQ ID NO: 11307 - RNA, 19 nt, Artificial Sequence
  Description of Artificial Sequence: Synthetic oligonucleotide
cucaaguguggccuuugca

SEQ ID NO: 11308 - RNA, 19 nt, Artificial Sequence
  Description of Artificial Sequence: Synthetic oligonucleotide
cggacaauccugaaaauca

SEQ ID NO: 11309 - RNA, 19 nt, Artificial Sequence
  Description of Artificial Sequence: Synthetic oligonucleotide
cuguaaguaugugaaaagu

SEQ ID NO: 11310 - RNA, 19 nt, Artificial Sequence
  Description of Artificial Sequence: Synthetic oligonucleotide
ugcuugcauuaaagaugag

SEQ ID NO: 11311 - RNA, 19 nt, Artificial Sequence
  Description of Artificial Sequence: Synthetic oligonucleotide
caucagguaauuagcugua

SEQ ID NO: 11312 - RNA, 19 nt, Artificial Sequence
  Description of Artificial Sequence: Synthetic oligonucleotide
uagauaucuuugggagcca

SEQ ID NO: 11313 - RNA, 19 nt, Artificial Sequence
  Description of Artificial Sequence: Synthetic oligonucleotide
acccucaacgguauguaaa

SEQ ID NO: 11314 - RNA, 19 nt, Artificial Sequence
  Description of Artificial Sequence: Synthetic oligonucleotide
caaaguacugugagucucu

SEQ ID NO: 11315 - RNA, 19 nt, Artificial Sequence
  Description of Artificial Sequence: Synthetic oligonucleotide
  modified_base (13)..(13): a, c, u, g, unknown or other
ggcaagcuuguunuccgag

SEQ ID NO: 11316 - RNA, 19 nt, Artificial Sequence
  Description of Artificial Sequence: Synthetic oligonucleotide
gaagauggaugggauuugu

SEQ ID NO: 11317 - RNA, 19 nt, Artificial Sequence
  Description of Artificial Sequence: Synthetic oligonucleotide
gucaguugauaugauggcu

SEQ ID NO: 11318 - RNA, 19 nt, Artificial Sequence
  Description of Artificial Sequence: Synthetic oligonucleotide
gcgucuuagaguacuucag

SEQ ID NO: 11319 - RNA, 19 nt, Artificial Sequence
  Description of Artificial Sequence: Synthetic oligonucleotide
gcuuuuauauuggagaauu

SEQ ID NO: 11320 - RNA, 19 nt, Artificial Sequence
  Description of Artificial Sequence: Synthetic oligonucleotide
cagugaacugagcauuaaa

SEQ ID NO: 11321 - RNA, 19 nt, Artificial Sequence
  Description of Artificial Sequence: Synthetic oligonucleotide
gcuauuuaagcuggaaacu

SEQ ID NO: 11322 - RNA, 19 nt, Artificial Sequence
  Description of Artificial Sequence: Synthetic oligonucleotide
ccugccggguguaacgagc

SEQ ID NO: 11323 - RNA, 19 nt, Artificial Sequence
  Description of Artificial Sequence: Synthetic oligonucleotide
ugucgacuagguggugugu

SEQ ID NO: 11324 - RNA, 19 nt, Artificial Sequence
  Description of Artificial Sequence: Synthetic oligonucleotide
gcaauacuacuggaaaaga

SEQ ID NO: 11325 - RNA, 19 nt, Artificial Sequence
  Description of Artificial Sequence: Synthetic oligonucleotide
auagaggaaguuagaugua

SEQ ID NO: 11326 - RNA, 19 nt, Artificial Sequence
  Description of Artificial Sequence: Synthetic oligonucleotide
gcuacucuaaaagccacaa

SEQ ID NO: 11327 - RNA, 19 nt, Artificial Sequence
  Description of Artificial Sequence: Synthetic oligonucleotide
ggaaacggagacuuggauu

SEQ ID NO: 11328 - RNA, 19 nt, Artificial Sequence
  Description of Artificial Sequence: Synthetic oligonucleotide
ugccggguguaacgagcca

SEQ ID NO: 11329 - RNA, 19 nt, Artificial Sequence
  Description of Artificial Sequence: Synthetic oligonucleotide
cuaaccccauguuuucaua

SEQ ID NO: 11330 - RNA, 19 nt, Artificial Sequence
  Description of Artificial Sequence: Synthetic oligonucleotide
gcacccuugaauguuaaua

SEQ ID NO: 11331 - RNA, 19 nt, Artificial Sequence
  Description of Artificial Sequence: Synthetic oligonucleotide
ugcugcugcugcugcugcu

SEQ ID NO: 11332 - RNA, 19 nt, Artificial Sequence
  Description of Artificial Sequence: Synthetic oligonucleotide
ggugaagguagcaaauccu

SEQ ID NO: 11333 - RNA, 19 nt, Artificial Sequence
  Description of Artificial Sequence: Synthetic oligonucleotide
gaggcgcaugcggacaauc

SEQ ID NO: 11334 - RNA, 19 nt, Artificial Sequence
  Description of Artificial Sequence: Synthetic oligonucleotide
ggguguaacgagccagauc

SEQ ID NO: 11335 - RNA, 19 nt, Artificial Sequence
  Description of Artificial Sequence: Synthetic oligonucleotide
acaccaaaccagacccacu

SEQ ID NO: 11336 - RNA, 19 nt, Artificial Sequence
  Description of Artificial Sequence: Synthetic oligonucleotide
cagcgucuuagaguacuuc

SEQ ID NO: 11337 - RNA, 19 nt, Artificial Sequence
  Description of Artificial Sequence: Synthetic oligonucleotide
ggagaaaaccauuccucau

SEQ ID NO: 11338 - RNA, 19 nt, Artificial Sequence
  Description of Artificial Sequence: Synthetic oligonucleotide
gaccauuaccucaggguau

SEQ ID NO: 11339 - RNA, 19 nt, Artificial Sequence
  Description of Artificial Sequence: Synthetic oligonucleotide
gcgcaugcggacaauccug

SEQ ID NO: 11340 - RNA, 19 nt, Artificial Sequence
  Description of Artificial Sequence: Synthetic oligonucleotide
cacaacugucagaccaugu

SEQ ID NO: 11341 - RNA, 19 nt, Artificial Sequence
  Description of Artificial Sequence: Synthetic oligonucleotide
ccagcgcuguuggugagcc

SEQ ID NO: 11342 - RNA, 19 nt, Artificial Sequence
  Description of Artificial Sequence: Synthetic oligonucleotide
cccucaacgguauguaaaa

SEQ ID NO: 11343 - RNA, 19 nt, Artificial Sequence
  Description of Artificial Sequence: Synthetic oligonucleotide
ggcaaaguacugugagucu

SEQ ID NO: 11344 - RNA, 19 nt, Artificial Sequence
  Description of Artificial Sequence: Synthetic oligonucleotide
ggcugaccauuaccucagg

SEQ ID NO: 11345 - RNA, 19 nt, Artificial Sequence
  Description of Artificial Sequence: Synthetic oligonucleotide
uagugucgacuagguggug

SEQ ID NO: 11346 - RNA, 19 nt, Artificial Sequence
  Description of Artificial Sequence: Synthetic oligonucleotide
gcgucugacccucaagugu

SEQ ID NO: 11347 - RNA, 19 nt, Artificial Sequence
  Description of Artificial Sequence: Synthetic oligonucleotide
cuggaaacucugacuuagu

SEQ ID NO: 11348 - RNA, 19 nt, Artificial Sequence
  Description of Artificial Sequence: Synthetic oligonucleotide
caaccguguuacuuccccu

SEQ ID NO: 11349 - RNA, 19 nt, Artificial Sequence
  Description of Artificial Sequence: Synthetic oligonucleotide
ccuaggggaauaugaguua

SEQ ID NO: 11350 - RNA, 19 nt, Artificial Sequence
  Description of Artificial Sequence: Synthetic oligonucleotide
guggaagagcauccuuaau

SEQ ID NO: 11351 - RNA, 19 nt, Artificial Sequence
  Description of Artificial Sequence: Synthetic oligonucleotide
caacgagaauauguucagu

SEQ ID NO: 11352 - RNA, 19 nt, Artificial Sequence
  Description of Artificial Sequence: Synthetic oligonucleotide
gcucacuuaagcgcuuucu

SEQ ID NO: 11353 - RNA, 19 nt, Artificial Sequence
  Description of Artificial Sequence: Synthetic oligonucleotide
ggaugggauuuguguucca

SEQ ID NO: 11354 - RNA, 19 nt, Artificial Sequence
  Description of Artificial Sequence: Synthetic oligonucleotide
ccuaaucuagcugcuuaaa

SEQ ID NO: 11355 - RNA, 19 nt, Artificial Sequence
  Description of Artificial Sequence: Synthetic oligonucleotide
gucgacuaggugguguguu

SEQ ID NO: 11356 - RNA, 19 nt, Artificial Sequence
  Description of Artificial Sequence: Synthetic oligonucleotide
cccugccggguguaacgag

SEQ ID NO: 11357 - RNA, 19 nt, Artificial Sequence
  Description of Artificial Sequence: Synthetic oligonucleotide
caccgugucugaguacaua

SEQ ID NO: 11358 - RNA, 19 nt, Artificial Sequence
  Description of Artificial Sequence: Synthetic oligonucleotide
cgcaugcggacaauccuga

SEQ ID NO: 11359 - RNA, 19 nt, Artificial Sequence
  Description of Artificial Sequence: Synthetic oligonucleotide
cccuaacugugcuuaccaa

SEQ ID NO: 11360 - RNA, 19 nt, Artificial Sequence
  Description of Artificial Sequence: Synthetic oligonucleotide
agacaccuauagacuccua

SEQ ID NO: 11361 - RNA, 19 nt, Artificial Sequence
  Description of Artificial Sequence: Synthetic oligonucleotide
gcugcugcugcugcugcua

SEQ ID NO: 11362 - RNA, 19 nt, Artificial Sequence
  Description of Artificial Sequence: Synthetic oligonucleotide
cgcucacuuaagcgcuuuc

SEQ ID NO: 11363 - RNA, 19 nt, Artificial Sequence
  Description of Artificial Sequence: Synthetic oligonucleotide
cugcugcugcugcugcuau

SEQ ID NO: 11364 - RNA, 19 nt, Artificial Sequence
  Description of Artificial Sequence: Synthetic oligonucleotide
cuucggguuuauggaugau

SEQ ID NO: 11365 - RNA, 19 nt, Artificial Sequence
  Description of Artificial Sequence: Synthetic oligonucleotide
gcauacccucagaccuaga

SEQ ID NO: 11366 - RNA, 19 nt, Artificial Sequence
  Description of Artificial Sequence: Synthetic oligonucleotide
cggguuuauggaugauuau

SEQ ID NO: 11367 - RNA, 19 nt, Artificial Sequence
  Description of Artificial Sequence: Synthetic oligonucleotide
aauagaaaggcugaaaucc

SEQ ID NO: 11368 - RNA, 19 nt, Artificial Sequence
  Description of Artificial Sequence: Synthetic oligonucleotide
augguaucgauacagagcc

SEQ ID NO: 11369 - RNA, 19 nt, Artificial Sequence
  Description of Artificial Sequence: Synthetic oligonucleotide
ucauauauguuuaagaauc

SEQ ID NO: 11370 - RNA, 19 nt, Artificial Sequence
  Description of Artificial Sequence: Synthetic oligonucleotide
agugcugcgaaccaaaucg

SEQ ID NO: 11371 - RNA, 19 nt, Artificial Sequence
  Description of Artificial Sequence: Synthetic oligonucleotide
aagauauuaaacuguuacg

SEQ ID NO: 11372 - RNA, 19 nt, Artificial Sequence
  Description of Artificial Sequence: Synthetic oligonucleotide
aauucuaguccugucaacc

SEQ ID NO: 11373 - RNA, 19 nt, Artificial Sequence
  Description of Artificial Sequence: Synthetic oligonucleotide
uucguaauaauaaaggaaa

SEQ ID NO: 11374 - RNA, 19 nt, Artificial Sequence
  Description of Artificial Sequence: Synthetic oligonucleotide
ugugaguacaacaagacaa

SEQ ID NO: 11375 - RNA, 19 nt, Artificial Sequence
  Description of Artificial Sequence: Synthetic oligonucleotide
acgaucacaauucuagucc

SEQ ID NO: 11376 - RNA, 19 nt, Artificial Sequence
  Description of Artificial Sequence: Synthetic oligonucleotide
uuugauaacccuaccagag

SEQ ID NO: 11377 - RNA, 19 nt, Artificial Sequence
  Description of Artificial Sequence: Synthetic oligonucleotide
gauacguuggguuuauugg

SEQ ID NO: 11378 - RNA, 19 nt, Artificial Sequence
  Description of Artificial Sequence: Synthetic oligonucleotide
aauggauaggacuuuuauc

SEQ ID NO: 11379 - RNA, 19 nt, Artificial Sequence
  Description of Artificial Sequence: Synthetic oligonucleotide
aaugguaucgauacagagc

SEQ ID NO: 11380 - RNA, 19 nt, Artificial Sequence
  Description of Artificial Sequence: Synthetic oligonucleotide
uguuugcuagaauauaacg

SEQ ID NO: 11381 - RNA, 19 nt, Artificial Sequence
  Description of Artificial Sequence: Synthetic oligonucleotide
ucaaagacuauuagcacag

SEQ ID NO: 11382 - RNA, 19 nt, Artificial Sequence
  Description of Artificial Sequence: Synthetic oligonucleotide
auuuucguaauaauaaagg

SEQ ID NO: 11383 - RNA, 19 nt, Artificial Sequence
  Description of Artificial Sequence: Synthetic oligonucleotide
uuaccuaccacucauguuc

SEQ ID NO: 11384 - RNA, 19 nt, Artificial Sequence
  Description of Artificial Sequence: Synthetic oligonucleotide
aauuuucguaauaauaaag

SEQ ID NO: 11385 - RNA, 19 nt, Artificial Sequence
  Description of Artificial Sequence: Synthetic oligonucleotide
ucaauugacauuaaucaaa

SEQ ID NO: 11386 - RNA, 19 nt, Artificial Sequence
  Description of Artificial Sequence: Synthetic oligonucleotide
aagccguuaggaucaaugc

SEQ ID NO: 11387 - RNA, 19 nt, Artificial Sequence
  Description of Artificial Sequence: Synthetic oligonucleotide
uuagagaucgguuuaccag

SEQ ID NO: 11388 - RNA, 19 nt, Artificial Sequence
  Description of Artificial Sequence: Synthetic oligonucleotide
aacaaguugcuauauagaa

SEQ ID NO: 11389 - RNA, 19 nt, Artificial Sequence
  Description of Artificial Sequence: Synthetic oligonucleotide
acgagcuuaacaugaagcc

SEQ ID NO: 11390 - RNA, 19 nt, Artificial Sequence
  Description of Artificial Sequence: Synthetic oligonucleotide
uaguuaaccaccaaagaac

SEQ ID NO: 11391 - RNA, 19 nt, Artificial Sequence
  Description of Artificial Sequence: Synthetic oligonucleotide
uauucgaugagauuuagua

SEQ ID NO: 11392 - RNA, 19 nt, Artificial Sequence
  Description of Artificial Sequence: Synthetic oligonucleotide
uaacugauaaauuaauggu

SEQ ID NO: 11393 - RNA, 19 nt, Artificial Sequence
  Description of Artificial Sequence: Synthetic oligonucleotide
uuuaacuaacccauggacu

SEQ ID NO: 11394 - RNA, 19 nt, Artificial Sequence
  Description of Artificial Sequence: Synthetic oligonucleotide
uuucguaauaauaaaggaa

SEQ ID NO: 11395 - RNA, 19 nt, Artificial Sequence
  Description of Artificial Sequence: Synthetic oligonucleotide
uuuucguaauaauaaagga

SEQ ID NO: 11396 - RNA, 19 nt, Artificial Sequence
  Description of Artificial Sequence: Synthetic oligonucleotide
agaaccaccgucuaaagca

SEQ ID NO: 11397 - RNA, 19 nt, Artificial Sequence
  Description of Artificial Sequence: Synthetic oligonucleotide
agacuauuagcacagaacu

SEQ ID NO: 11398 - RNA, 19 nt, Artificial Sequence
  Description of Artificial Sequence: Synthetic oligonucleotide
ucagauaucuccaucacau

SEQ ID NO: 11399 - RNA, 19 nt, Artificial Sequence
  Description of Artificial Sequence: Synthetic oligonucleotide
uuagauuagauccacgcau

SEQ ID NO: 11400 - RNA, 19 nt, Artificial Sequence
  Description of Artificial Sequence: Synthetic oligonucleotide
ucagacauaagcacuaccu

SEQ ID NO: 11401 - RNA, 19 nt, Artificial Sequence
  Description of Artificial Sequence: Synthetic oligonucleotide
ugauaacccuaccagagag

SEQ ID NO: 11402 - RNA, 19 nt, Artificial Sequence
  Description of Artificial Sequence: Synthetic oligonucleotide
auuucguacagccacucgg

SEQ ID NO: 11403 - RNA, 19 nt, Artificial Sequence
  Description of Artificial Sequence: Synthetic oligonucleotide
cuuucuacuaaccaggauc

SEQ ID NO: 11404 - RNA, 19 nt, Artificial Sequence
  Description of Artificial Sequence: Synthetic oligonucleotide
ugauaaauuaaugguauca

SEQ ID NO: 11405 - RNA, 19 nt, Artificial Sequence
  Description of Artificial Sequence: Synthetic oligonucleotide
aggacuuuuauccagcuca

SEQ ID NO: 11406 - RNA, 19 nt, Artificial Sequence
  Description of Artificial Sequence: Synthetic oligonucleotide
uguccuaacacugugacac

SEQ ID NO: 11407 - RNA, 19 nt, Artificial Sequence
  Description of Artificial Sequence: Synthetic oligonucleotide
uugauuaaugcuucaaacu

SEQ ID NO: 11408 - RNA, 19 nt, Artificial Sequence
  Description of Artificial Sequence: Synthetic oligonucleotide
  modified_base (2)..(2): a, c, u, g, unknown or other
unauuuacuguauguagca

SEQ ID NO: 11409 - RNA, 19 nt, Artificial Sequence
  Description of Artificial Sequence: Synthetic oligonucleotide
uucauuacaaguccucuca

SEQ ID NO: 11410 - RNA, 19 nt, Artificial Sequence
  Description of Artificial Sequence: Synthetic oligonucleotide
aacccuaccagagagguag

SEQ ID NO: 11411 - RNA, 19 nt, Artificial Sequence
  Description of Artificial Sequence: Synthetic oligonucleotide
uacgucauugguaagacuc

SEQ ID NO: 11412 - RNA, 19 nt, Artificial Sequence
  Description of Artificial Sequence: Synthetic oligonucleotide
guuuauuggagauuucgag

SEQ ID NO: 11413 - RNA, 19 nt, Artificial Sequence
  Description of Artificial Sequence: Synthetic oligonucleotide
auaguuaaccaccaaagaa

SEQ ID NO: 11414 - RNA, 19 nt, Artificial Sequence
  Description of Artificial Sequence: Synthetic oligonucleotide
uuuacuguauguagcaacu

SEQ ID NO: 11415 - RNA, 19 nt, Artificial Sequence
  Description of Artificial Sequence: Synthetic oligonucleotide
aagauuagauuagauccac

SEQ ID NO: 11416 - RNA, 19 nt, Artificial Sequence
  Description of Artificial Sequence: Synthetic oligonucleotide
agaugaaugaguauuaugu

SEQ ID NO: 11417 - RNA, 19 nt, Artificial Sequence
  Description of Artificial Sequence: Synthetic oligonucleotide
ugaguuccccuuaagauga

SEQ ID NO: 11418 - RNA, 19 nt, Artificial Sequence
  Description of Artificial Sequence: Synthetic oligonucleotide
aguuaaccaccaaagaacc

SEQ ID NO: 11419 - RNA, 19 nt, Artificial Sequence
  Description of Artificial Sequence: Synthetic oligonucleotide
ucauuacagacuuagaauu

SEQ ID NO: 11420 - RNA, 19 nt, Artificial Sequence
  Description of Artificial Sequence: Synthetic oligonucleotide
  modified_base (4)..(4): a, c, u, g, unknown or other
ggunauuuacuguauguag

SEQ ID NO: 11421 - RNA, 19 nt, Artificial Sequence
  Description of Artificial Sequence: Synthetic oligonucleotide
ugucacaugaacuugguuu

SEQ ID NO: 11422 - RNA, 19 nt, Artificial Sequence
  Description of Artificial Sequence: Synthetic oligonucleotide
ucauagguaacagagggug

SEQ ID NO: 11423 - RNA, 19 nt, Artificial Sequence
  Description of Artificial Sequence: Synthetic oligonucleotide
  modified_base (7)..(7): a, c, u, g, unknown or other
ucuggunauuuacuguaug

SEQ ID NO: 11424 - RNA, 19 nt, Artificial Sequence
  Description of Artificial Sequence: Synthetic oligonucleotide
ucacuaauucagcaaaucu

SEQ ID NO: 11425 - RNA, 19 nt, Artificial Sequence
  Description of Artificial Sequence: Synthetic oligonucleotide
aaaucgguuacuucagggu

SEQ ID NO: 11426 - RNA, 19 nt, Artificial Sequence
  Description of Artificial Sequence: Synthetic oligonucleotide
ucgguuuaggucaaaguug

SEQ ID NO: 11427 - RNA, 19 nt, Artificial Sequence
  Description of Artificial Sequence: Synthetic oligonucleotide
gaaugguaucgauacagag

SEQ ID NO: 11428 - RNA, 19 nt, Artificial Sequence
  Description of Artificial Sequence: Synthetic oligonucleotide
ucggauaagucuuuguaug

SEQ ID NO: 11429 - RNA, 19 nt, Artificial Sequence
  Description of Artificial Sequence: Synthetic oligonucleotide
gguaguaaaacccugcuac

SEQ ID NO: 11430 - RNA, 19 nt, Artificial Sequence
  Description of Artificial Sequence: Synthetic oligonucleotide
aacauuaccuaccacucau

SEQ ID NO: 11431 - RNA, 19 nt, Artificial Sequence
  Description of Artificial Sequence: Synthetic oligonucleotide
ugcaugaacuaaaacaaaa

SEQ ID NO: 11432 - RNA, 19 nt, Artificial Sequence
  Description of Artificial Sequence: Synthetic oligonucleotide
aaaugugacgauacucagc

SEQ ID NO: 11433 - RNA, 19 nt, Artificial Sequence
  Description of Artificial Sequence: Synthetic oligonucleotide
agacugagcacuuaagaug

SEQ ID NO: 11434 - RNA, 19 nt, Artificial Sequence
  Description of Artificial Sequence: Synthetic oligonucleotide
aacuaggagagauuucuga

SEQ ID NO: 11435 - RNA, 19 nt, Artificial Sequence
  Description of Artificial Sequence: Synthetic oligonucleotide
ugauacguuggguuuauug

SEQ ID NO: 11436 - RNA, 19 nt, Artificial Sequence
  Description of Artificial Sequence: Synthetic oligonucleotide
acuuacugagucuccuucc

SEQ ID NO: 11437 - RNA, 19 nt, Artificial Sequence
  Description of Artificial Sequence: Synthetic oligonucleotide
uccaagauuagauuagauc

SEQ ID NO: 11438 - RNA, 19 nt, Artificial Sequence
  Description of Artificial Sequence: Synthetic oligonucleotide
cacgcauaaaagaaggcag

SEQ ID NO: 11439 - RNA, 19 nt, Artificial Sequence
  Description of Artificial Sequence: Synthetic oligonucleotide
caauugacauuaaucaaac

SEQ ID NO: 11440 - RNA, 19 nt, Artificial Sequence
  Description of Artificial Sequence: Synthetic oligonucleotide
uuucgagggaccaaaugug

SEQ ID NO: 11441 - RNA, 19 nt, Artificial Sequence
  Description of Artificial Sequence: Synthetic oligonucleotide
  modified_base (3)..(3): a, c, u, g, unknown or other
gunauuuacuguauguagc

SEQ ID NO: 11442 - RNA, 19 nt, Artificial Sequence
  Description of Artificial Sequence: Synthetic oligonucleotide
augaauauuuaaccauuag

SEQ ID NO: 11443 - RNA, 19 nt, Artificial Sequence
  Description of Artificial Sequence: Synthetic oligonucleotide
ugcuacuguaaaacaaucc

SEQ ID NO: 11444 - RNA, 19 nt, Artificial Sequence
  Description of Artificial Sequence: Synthetic oligonucleotide
caaaucgguuacuucaggg

SEQ ID NO: 11445 - RNA, 19 nt, Artificial Sequence
  Description of Artificial Sequence: Synthetic oligonucleotide
aacauccuaaucacccucc

SEQ ID NO: 11446 - RNA, 19 nt, Artificial Sequence
  Description of Artificial Sequence: Synthetic oligonucleotide
aagcauuacuugugaaguc

SEQ ID NO: 11447 - RNA, 19 nt, Artificial Sequence
  Description of Artificial Sequence: Synthetic oligonucleotide
aggaccucauuauaguuag

SEQ ID NO: 11448 - RNA, 19 nt, Artificial Sequence
  Description of Artificial Sequence: Synthetic oligonucleotide
acgacuaagagaacuauuc

SEQ ID NO: 11449 - RNA, 19 nt, Artificial Sequence
  Description of Artificial Sequence: Synthetic oligonucleotide
uuuagagaucgguuuacca

SEQ ID NO: 11450 - RNA, 19 nt, Artificial Sequence
  Description of Artificial Sequence: Synthetic oligonucleotide
agaguggccgaaccuaagc

SEQ ID NO: 11451 - RNA, 19 nt, Artificial Sequence
  Description of Artificial Sequence: Synthetic oligonucleotide
gaagguacgaucacaauuc

SEQ ID NO: 11452 - RNA, 19 nt, Artificial Sequence
  Description of Artificial Sequence: Synthetic oligonucleotide
cauuaccugaauaagagaa

SEQ ID NO: 11453 - RNA, 19 nt, Artificial Sequence
  Description of Artificial Sequence: Synthetic oligonucleotide
uacccgucgggauucaugg

SEQ ID NO: 11454 - RNA, 19 nt, Artificial Sequence
  Description of Artificial Sequence: Synthetic oligonucleotide
uacaguuaccacgaguucc

SEQ ID NO: 11455 - RNA, 19 nt, Artificial Sequence
  Description of Artificial Sequence: Synthetic oligonucleotide
guagcuaguacauucaugu

SEQ ID NO: 11456 - RNA, 19 nt, Artificial Sequence
  Description of Artificial Sequence: Synthetic oligonucleotide
gacgagcuuaacaugaagc

SEQ ID NO: 11457 - RNA, 19 nt, Artificial Sequence
  Description of Artificial Sequence: Synthetic oligonucleotide
guccaauugccucaaaaug

SEQ ID NO: 11458 - RNA, 19 nt, Artificial Sequence
  Description of Artificial Sequence: Synthetic oligonucleotide
uagagaucgguuuaccagu

SEQ ID NO: 11459 - RNA, 19 nt, Artificial Sequence
  Description of Artificial Sequence: Synthetic oligonucleotide
ugaacggaggagcaagucu

SEQ ID NO: 11460 - RNA, 19 nt, Artificial Sequence
  Description of Artificial Sequence: Synthetic oligonucleotide
uauuugggcaacugggcug

SEQ ID NO: 11461 - RNA, 19 nt, Artificial Sequence
  Description of Artificial Sequence: Synthetic oligonucleotide
cagccuauuugcuaacugg

SEQ ID NO: 11462 - RNA, 19 nt, Artificial Sequence
  Description of Artificial Sequence: Synthetic oligonucleotide
gacuuuucauacccgucgg

SEQ ID NO: 11463 - RNA, 19 nt, Artificial Sequence
  Description of Artificial Sequence: Synthetic oligonucleotide
cauuacuccuccuggaaug

SEQ ID NO: 11464 - RNA, 19 nt, Artificial Sequence
  Description of Artificial Sequence: Synthetic oligonucleotide
aucauuaaguacaaugacu

SEQ ID NO: 11465 - RNA, 19 nt, Artificial Sequence
  Description of Artificial Sequence: Synthetic oligonucleotide
gugaguuccccuuaagaug

SEQ ID NO: 11466 - RNA, 19 nt, Artificial Sequence
  Description of Artificial Sequence: Synthetic oligonucleotide
ggacuuuucauacccgucg

SEQ ID NO: 11467 - RNA, 19 nt, Artificial Sequence
  Description of Artificial Sequence: Synthetic oligonucleotide
caagccguuaggaucaaug

SEQ ID NO: 11468 - RNA, 19 nt, Artificial Sequence
  Description of Artificial Sequence: Synthetic oligonucleotide
uacgaucacaauucuaguc

SEQ ID NO: 11469 - RNA, 19 nt, Artificial Sequence
  Description of Artificial Sequence: Synthetic oligonucleotide
uauaacguuuccuccucug

SEQ ID NO: 11470 - RNA, 19 nt, Artificial Sequence
  Description of Artificial Sequence: Synthetic oligonucleotide
gauuucgagggaccaaaug

SEQ ID NO: 11471 - RNA, 19 nt, Artificial Sequence
  Description of Artificial Sequence: Synthetic oligonucleotide
auacguuggguuuauugga

SEQ ID NO: 11472 - RNA, 19 nt, Artificial Sequence
  Description of Artificial Sequence: Synthetic oligonucleotide
cuccauuucguacagccac

SEQ ID NO: 11473 - RNA, 19 nt, Artificial Sequence
  Description of Artificial Sequence: Synthetic oligonucleotide
guacaaagaccugugaaug

SEQ ID NO: 11474 - RNA, 19 nt, Artificial Sequence
  Description of Artificial Sequence: Synthetic oligonucleotide
aucgauacagagccagguc

SEQ ID NO: 11475 - RNA, 19 nt, Artificial Sequence
  Description of Artificial Sequence: Synthetic oligonucleotide
ucgaugagauuuaguagca

SEQ ID NO: 11476 - RNA, 19 nt, Artificial Sequence
  Description of Artificial Sequence: Synthetic oligonucleotide
caaaugugacgauacucag

SEQ ID NO: 11477 - RNA, 19 nt, Artificial Sequence
  Description of Artificial Sequence: Synthetic oligonucleotide
agcuaguacauucauguua

SEQ ID NO: 11478 - RNA, 19 nt, Artificial Sequence
  Description of Artificial Sequence: Synthetic oligonucleotide
gccaacuacacuuacugag

SEQ ID NO: 11479 - RNA, 19 nt, Artificial Sequence
  Description of Artificial Sequence: Synthetic oligonucleotide
auauccgguuaucuguauc

SEQ ID NO: 11480 - RNA, 19 nt, Artificial Sequence
  Description of Artificial Sequence: Synthetic oligonucleotide
uagcuauggacaguuuugg

SEQ ID NO: 11481 - RNA, 19 nt, Artificial Sequence
  Description of Artificial Sequence: Synthetic oligonucleotide
ggauaguuaaccaccaaag

SEQ ID NO: 11482 - RNA, 19 nt, Artificial Sequence
  Description of Artificial Sequence: Synthetic oligonucleotide
aaauacggaagcccgcuua

SEQ ID NO: 11483 - RNA, 19 nt, Artificial Sequence
  Description of Artificial Sequence: Synthetic oligonucleotide
cauagguaacagagggugg

SEQ ID NO: 11484 - RNA, 19 nt, Artificial Sequence
  Description of Artificial Sequence: Synthetic oligonucleotide
uuucgguuuaggucaaagu

SEQ ID NO: 11485 - RNA, 19 nt, Artificial Sequence
  Description of Artificial Sequence: Synthetic oligonucleotide
aauacggaagcccgcuuau

SEQ ID NO: 11486 - RNA, 19 nt, Artificial Sequence
  Description of Artificial Sequence: Synthetic oligonucleotide
ucucuaaaacuuucacaca

SEQ ID NO: 11487 - RNA, 19 nt, Artificial Sequence
  Description of Artificial Sequence: Synthetic oligonucleotide
auacaguuaccacgaguuc

SEQ ID NO: 11488 - RNA, 19 nt, Artificial Sequence
  Description of Artificial Sequence: Synthetic oligonucleotide
uucgagggaccaaauguga

SEQ ID NO: 11489 - RNA, 19 nt, Artificial Sequence
  Description of Artificial Sequence: Synthetic oligonucleotide
uuggagauuucgagggacc

SEQ ID NO: 11490 - RNA, 19 nt, Artificial Sequence
  Description of Artificial Sequence: Synthetic oligonucleotide
uauuagcacagaacuggcu

SEQ ID NO: 11491 - RNA, 19 nt, Artificial Sequence
  Description of Artificial Sequence: Synthetic oligonucleotide
guguuauuggaagaaauga

SEQ ID NO: 11492 - RNA, 19 nt, Artificial Sequence
  Description of Artificial Sequence: Synthetic oligonucleotide
aacccauggacuccuuugu

SEQ ID NO: 11493 - RNA, 19 nt, Artificial Sequence
  Description of Artificial Sequence: Synthetic oligonucleotide
aaugaauauuuaaccauua

SEQ ID NO: 11494 - RNA, 19 nt, Artificial Sequence
  Description of Artificial Sequence: Synthetic oligonucleotide
gauaacccuaccagagagg

SEQ ID NO: 11495 - RNA, 19 nt, Artificial Sequence
  Description of Artificial Sequence: Synthetic oligonucleotide
gaaggaaucccucuucuua

SEQ ID NO: 11496 - RNA, 19 nt, Artificial Sequence
  Description of Artificial Sequence: Synthetic oligonucleotide
auaacccuaccagagaggu

SEQ ID NO: 11497 - RNA, 19 nt, Artificial Sequence
  Description of Artificial Sequence: Synthetic oligonucleotide
aguugcuauauagaaagau

SEQ ID NO: 11498 - RNA, 19 nt, Artificial Sequence
  Description of Artificial Sequence: Synthetic oligonucleotide
gauaucuccaucacauaca

SEQ ID NO: 11499 - RNA, 19 nt, Artificial Sequence
  Description of Artificial Sequence: Synthetic oligonucleotide
acaaaacgaaucuuugguu

SEQ ID NO: 11500 - RNA, 19 nt, Artificial Sequence
  Description of Artificial Sequence: Synthetic oligonucleotide
cauggauggcauaagguga

SEQ ID NO: 11501 - RNA, 19 nt, Artificial Sequence
  Description of Artificial Sequence: Synthetic oligonucleotide
caagauuagauuagaucca

SEQ ID NO: 11502 - RNA, 19 nt, Artificial Sequence
  Description of Artificial Sequence: Synthetic oligonucleotide
accgucaaaggaaucacuc

SEQ ID NO: 11503 - RNA, 19 nt, Artificial Sequence
  Description of Artificial Sequence: Synthetic oligonucleotide
guccugucaaccaauuggg

SEQ ID NO: 11504 - RNA, 19 nt, Artificial Sequence
  Description of Artificial Sequence: Synthetic oligonucleotide
cauccggauuuagagaagg

SEQ ID NO: 11505 - RNA, 19 nt, Artificial Sequence
  Description of Artificial Sequence: Synthetic oligonucleotide
guaaugccagcgcugauuc

SEQ ID NO: 11506 - RNA, 19 nt, Artificial Sequence
  Description of Artificial Sequence: Synthetic oligonucleotide
agaggagcugucauuuuac

SEQ ID NO: 11507 - RNA, 19 nt, Artificial Sequence
  Description of Artificial Sequence: Synthetic oligonucleotide
auaacguuuccuccucugu

SEQ ID NO: 11508 - RNA, 19 nt, Artificial Sequence
  Description of Artificial Sequence: Synthetic oligonucleotide
  modified_base (5)..(5): a, c, u, g, unknown or other
uggunauuuacuguaugua

SEQ ID NO: 11509 - RNA, 19 nt, Artificial Sequence
  Description of Artificial Sequence: Synthetic oligonucleotide
agaccugguaaugccagcg

SEQ ID NO: 11510 - RNA, 19 nt, Artificial Sequence
  Description of Artificial Sequence: Synthetic oligonucleotide
uucacuaauucagcaaauc

SEQ ID NO: 11511 - RNA, 19 nt, Artificial Sequence
  Description of Artificial Sequence: Synthetic oligonucleotide
gauacaguuaccacgaguu

SEQ ID NO: 11512 - RNA, 19 nt, Artificial Sequence
  Description of Artificial Sequence: Synthetic oligonucleotide
auuucgguuuaggucaaag

SEQ ID NO: 11513 - RNA, 19 nt, Artificial Sequence
  Description of Artificial Sequence: Synthetic oligonucleotide
agauccacgcauaaaagaa

SEQ ID NO: 11514 - RNA, 19 nt, Artificial Sequence
  Description of Artificial Sequence: Synthetic oligonucleotide
uuugauccccugauuuagu

SEQ ID NO: 11515 - RNA, 19 nt, Artificial Sequence
  Description of Artificial Sequence: Synthetic oligonucleotide
uugcuagaauauaacguuu

SEQ ID NO: 11516 - RNA, 19 nt, Artificial Sequence
  Description of Artificial Sequence: Synthetic oligonucleotide
cauucggauuucuaucuuc

SEQ ID NO: 11517 - RNA, 19 nt, Artificial Sequence
  Description of Artificial Sequence: Synthetic oligonucleotide
aaacgacuaagagaacuau

SEQ ID NO: 11518 - RNA, 19 nt, Artificial Sequence
  Description of Artificial Sequence: Synthetic oligonucleotide
ugcgaaccaaaucgguuac

SEQ ID NO: 11519 - RNA, 19 nt, Artificial Sequence
  Description of Artificial Sequence: Synthetic oligonucleotide
ugauuguaacaaacugguc

SEQ ID NO: 11520 - RNA, 19 nt, Artificial Sequence
  Description of Artificial Sequence: Synthetic oligonucleotide
acuuaagaugaaugaguau

SEQ ID NO: 11521 - RNA, 19 nt, Artificial Sequence
  Description of Artificial Sequence: Synthetic oligonucleotide
ucuugguuacugguaaccu

SEQ ID NO: 11522 - RNA, 19 nt, Artificial Sequence
  Description of Artificial Sequence: Synthetic oligonucleotide
cuuaagaugaaugaguauu

SEQ ID NO: 11523 - RNA, 19 nt, Artificial Sequence
  Description of Artificial Sequence: Synthetic oligonucleotide
ccugaauaagagaaacccc

SEQ ID NO: 11524 - RNA, 19 nt, Artificial Sequence
  Description of Artificial Sequence: Synthetic oligonucleotide
ccuaaaguuauuaacaagu

SEQ ID NO: 11525 - RNA, 19 nt, Artificial Sequence
  Description of Artificial Sequence: Synthetic oligonucleotide
ccggauuuagagaagguac

SEQ ID NO: 11526 - RNA, 19 nt, Artificial Sequence
  Description of Artificial Sequence: Synthetic oligonucleotide
gaaugaguauuaugucaca

SEQ ID NO: 11527 - RNA, 19 nt, Artificial Sequence
  Description of Artificial Sequence: Synthetic oligonucleotide
uccaaccggagcauuucca

SEQ ID NO: 11528 - RNA, 19 nt, Artificial Sequence
  Description of Artificial Sequence: Synthetic oligonucleotide
guuugcuagaauauaacgu

SEQ ID NO: 11529 - RNA, 19 nt, Artificial Sequence
  Description of Artificial Sequence: Synthetic oligonucleotide
acagaaccaccgucuaaag

SEQ ID NO: 11530 - RNA, 19 nt, Artificial Sequence
  Description of Artificial Sequence: Synthetic oligonucleotide
caguacaaauggauaggac

SEQ ID NO: 11531 - RNA, 19 nt, Artificial Sequence
  Description of Artificial Sequence: Synthetic oligonucleotide
ugaugcaagccguuaggau

SEQ ID NO: 11532 - RNA, 19 nt, Artificial Sequence
  Description of Artificial Sequence: Synthetic oligonucleotide
agauuagauuagauccacg

SEQ ID NO: 11533 - RNA, 19 nt, Artificial Sequence
  Description of Artificial Sequence: Synthetic oligonucleotide
accaauuggguaacaacug

SEQ ID NO: 11534 - RNA, 19 nt, Artificial Sequence
  Description of Artificial Sequence: Synthetic oligonucleotide
accaaauauccgguuaucu

SEQ ID NO: 11535 - RNA, 19 nt, Artificial Sequence
  Description of Artificial Sequence: Synthetic oligonucleotide
guuacgucauugguaagac

SEQ ID NO: 11536 - RNA, 19 nt, Artificial Sequence
  Description of Artificial Sequence: Synthetic oligonucleotide
ucguccauccggauuuaga

SEQ ID NO: 11537 - RNA, 19 nt, Artificial Sequence
  Description of Artificial Sequence: Synthetic oligonucleotide
ggcugagcgaccuagguga

SEQ ID NO: 11538 - RNA, 19 nt, Artificial Sequence
  Description of Artificial Sequence: Synthetic oligonucleotide
gacaaauacggaagcccgc

SEQ ID NO: 11539 - RNA, 19 nt, Artificial Sequence
  Description of Artificial Sequence: Synthetic oligonucleotide
cauagggauaugugaccag

SEQ ID NO: 11540 - RNA, 19 nt, Artificial Sequence
  Description of Artificial Sequence: Synthetic oligonucleotide
aaauauccgguuaucugua

SEQ ID NO: 11541 - RNA, 19 nt, Artificial Sequence
  Description of Artificial Sequence: Synthetic oligonucleotide
aggaccgucaaaggaauca

SEQ ID NO: 11542 - RNA, 19 nt, Artificial Sequence
  Description of Artificial Sequence: Synthetic oligonucleotide
agaaagguguuugauuaau

SEQ ID NO: 11543 - RNA, 19 nt, Artificial Sequence
  Description of Artificial Sequence: Synthetic oligonucleotide
gagggaccaaaugugacga

SEQ ID NO: 11544 - RNA, 19 nt, Artificial Sequence
  Description of Artificial Sequence: Synthetic oligonucleotide
auauaacguuuccuccucu

SEQ ID NO: 11545 - RNA, 19 nt, Artificial Sequence
  Description of Artificial Sequence: Synthetic oligonucleotide
uaccuaccacucauguucu

SEQ ID NO: 11546 - RNA, 19 nt, Artificial Sequence
  Description of Artificial Sequence: Synthetic oligonucleotide
agaucgguuuaccagucuu

SEQ ID NO: 11547 - RNA, 19 nt, Artificial Sequence
  Description of Artificial Sequence: Synthetic oligonucleotide
guaacacuauaauccuuca

SEQ ID NO: 11548 - RNA, 19 nt, Artificial Sequence
  Description of Artificial Sequence: Synthetic oligonucleotide
cucuuugguaguuggguca

SEQ ID NO: 11549 - RNA, 19 nt, Artificial Sequence
  Description of Artificial Sequence: Synthetic oligonucleotide
aaaucaacuaggagagauu

SEQ ID NO: 11550 - RNA, 19 nt, Artificial Sequence
  Description of Artificial Sequence: Synthetic oligonucleotide
caugcuaaggagagaccuc

SEQ ID NO: 11551 - RNA, 19 nt, Artificial Sequence
  Description of Artificial Sequence: Synthetic oligonucleotide
cauccuaaucacccucccc

SEQ ID NO: 11552 - RNA, 19 nt, Artificial Sequence
  Description of Artificial Sequence: Synthetic oligonucleotide
accaaaugaugcaagccgu

SEQ ID NO: 11553 - RNA, 19 nt, Artificial Sequence
  Description of Artificial Sequence: Synthetic oligonucleotide
cugggacuuuucauacccg

SEQ ID NO: 11554 - RNA, 19 nt, Artificial Sequence
  Description of Artificial Sequence: Synthetic oligonucleotide
acaaguugcuauauagaaa

SEQ ID NO: 11555 - RNA, 19 nt, Artificial Sequence
  Description of Artificial Sequence: Synthetic oligonucleotide
uccugucaaccaauugggu

SEQ ID NO: 11556 - RNA, 19 nt, Artificial Sequence
  Description of Artificial Sequence: Synthetic oligonucleotide
guguggguaguucauuaca

SEQ ID NO: 11557 - RNA, 19 nt, Artificial Sequence
  Description of Artificial Sequence: Synthetic oligonucleotide
aguacagaaccaccgucua

SEQ ID NO: 11558 - RNA, 19 nt, Artificial Sequence
  Description of Artificial Sequence: Synthetic oligonucleotide
uuacgucauugguaagacu

SEQ ID NO: 11559 - RNA, 19 nt, Artificial Sequence
  Description of Artificial Sequence: Synthetic oligonucleotide
agagaucgguuuaccaguc

SEQ ID NO: 11560 - RNA, 19 nt, Artificial Sequence
  Description of Artificial Sequence: Synthetic oligonucleotide
guaucgauacagagccagg

SEQ ID NO: 11561 - RNA, 19 nt, Artificial Sequence
  Description of Artificial Sequence: Synthetic oligonucleotide
uucauacccgucgggauuc

SEQ ID NO: 11562 - RNA, 19 nt, Artificial Sequence
  Description of Artificial Sequence: Synthetic oligonucleotide
gagauuucgagggaccaaa

SEQ ID NO: 11563 - RNA, 19 nt, Artificial Sequence
  Description of Artificial Sequence: Synthetic oligonucleotide
auguguggguaguucauua

SEQ ID NO: 11564 - RNA, 19 nt, Artificial Sequence
  Description of Artificial Sequence: Synthetic oligonucleotide
cuuguucucugcccacaag

SEQ ID NO: 11565 - RNA, 19 nt, Artificial Sequence
  Description of Artificial Sequence: Synthetic oligonucleotide
uaguaaagcaaaggcuguc

SEQ ID NO: 11566 - RNA, 19 nt, Artificial Sequence
  Description of Artificial Sequence: Synthetic oligonucleotide
ucacaaagaguggcugagc

SEQ ID NO: 11567 - RNA, 19 nt, Artificial Sequence
  Description of Artificial Sequence: Synthetic oligonucleotide
ucguuuccaugcauauuuc

SEQ ID NO: 11568 - RNA, 19 nt, Artificial Sequence
  Description of Artificial Sequence: Synthetic oligonucleotide
gggauaugugaccaguaca

SEQ ID NO: 11569 - RNA, 19 nt, Artificial Sequence
  Description of Artificial Sequence: Synthetic oligonucleotide
gaggagcaagucuugguua

SEQ ID NO: 11570 - RNA, 19 nt, Artificial Sequence
  Description of Artificial Sequence: Synthetic oligonucleotide
auaagccccuuguugguuu

SEQ ID NO: 11571 - RNA, 19 nt, Artificial Sequence
  Description of Artificial Sequence: Synthetic oligonucleotide
  modified_base (6)..(6): a, c, u, g, unknown or other
cuggunauuuacuguaugu

SEQ ID NO: 11572 - RNA, 19 nt, Artificial Sequence
  Description of Artificial Sequence: Synthetic oligonucleotide
agaucuguuuacauauaaa

SEQ ID NO: 11573 - RNA, 19 nt, Artificial Sequence
  Description of Artificial Sequence: Synthetic oligonucleotide
auguccuaacacugugaca

SEQ ID NO: 11574 - RNA, 19 nt, Artificial Sequence
  Description of Artificial Sequence: Synthetic oligonucleotide
ccuaaugucauauauguuu

SEQ ID NO: 11575 - RNA, 19 nt, Artificial Sequence
  Description of Artificial Sequence: Synthetic oligonucleotide
aaacgaaucuuugguucuu

SEQ ID NO: 11576 - RNA, 19 nt, Artificial Sequence
  Description of Artificial Sequence: Synthetic oligonucleotide
cugcgaaccaaaucgguua

SEQ ID NO: 11577 - RNA, 19 nt, Artificial Sequence
  Description of Artificial Sequence: Synthetic oligonucleotide
cugacacaagugugaguac

SEQ ID NO: 11578 - RNA, 19 nt, Artificial Sequence
  Description of Artificial Sequence: Synthetic oligonucleotide
cuaguaaagcaaaggcugu

SEQ ID NO: 11579 - RNA, 19 nt, Artificial Sequence
  Description of Artificial Sequence: Synthetic oligonucleotide
acgcauuacuccuccugga

SEQ ID NO: 11580 - RNA, 19 nt, Artificial Sequence
  Description of Artificial Sequence: Synthetic oligonucleotide
ggacgagcuuaacaugaag

SEQ ID NO: 11581 - RNA, 19 nt, Artificial Sequence
  Description of Artificial Sequence: Synthetic oligonucleotide
gguauucgaugagauuuag

SEQ ID NO: 11582 - RNA, 19 nt, Artificial Sequence
  Description of Artificial Sequence: Synthetic oligonucleotide
ucgguuacuucagggucug

SEQ ID NO: 11583 - RNA, 19 nt, Artificial Sequence
  Description of Artificial Sequence: Synthetic oligonucleotide
acguagcuaguacauucau

SEQ ID NO: 11584 - RNA, 19 nt, Artificial Sequence
  Description of Artificial Sequence: Synthetic oligonucleotide
acgaacuauucugucccug

SEQ ID NO: 11585 - RNA, 19 nt, Artificial Sequence
  Description of Artificial Sequence: Synthetic oligonucleotide
gguaaccuggugcucgcug

SEQ ID NO: 11586 - RNA, 19 nt, Artificial Sequence
  Description of Artificial Sequence: Synthetic oligonucleotide
gugcugcgaaccaaaucgg

SEQ ID NO: 11587 - RNA, 19 nt, Artificial Sequence
  Description of Artificial Sequence: Synthetic oligonucleotide
ccgucaaaggaaucacucc

SEQ ID NO: 11588 - RNA, 19 nt, Artificial Sequence
  Description of Artificial Sequence: Synthetic oligonucleotide
ucgguuuaccagucuuguc

SEQ ID NO: 11589 - RNA, 19 nt, Artificial Sequence
  Description of Artificial Sequence: Synthetic oligonucleotide
guacaaugacugcuuuaga

SEQ ID NO: 11590 - RNA, 19 nt, Artificial Sequence
  Description of Artificial Sequence: Synthetic oligonucleotide
uccccugauuuaguacaag

SEQ ID NO: 11591 - RNA, 19 nt, Artificial Sequence
  Description of Artificial Sequence: Synthetic oligonucleotide
cauuaccuaccacucaugu

SEQ ID NO: 11592 - RNA, 19 nt, Artificial Sequence
  Description of Artificial Sequence: Synthetic oligonucleotide
guggccgaaccuaagccac

SEQ ID NO: 11593 - RNA, 19 nt, Artificial Sequence
  Description of Artificial Sequence: Synthetic oligonucleotide
acauuaccuaccacucaug

SEQ ID NO: 11594 - RNA, 19 nt, Artificial Sequence
  Description of Artificial Sequence: Synthetic oligonucleotide
ccaugugcaucgauggaug

SEQ ID NO: 11595 - RNA, 19 nt, Artificial Sequence
  Description of Artificial Sequence: Synthetic oligonucleotide
gacauuaaucaaacauccu

SEQ ID NO: 11596 - RNA, 19 nt, Artificial Sequence
  Description of Artificial Sequence: Synthetic oligonucleotide
auacccgucgggauucaug

SEQ ID NO: 11597 - RNA, 19 nt, Artificial Sequence
  Description of Artificial Sequence: Synthetic oligonucleotide
acgucauugguaagacuca

SEQ ID NO: 11598 - RNA, 19 nt, Artificial Sequence
  Description of Artificial Sequence: Synthetic oligonucleotide
augugcaucgauggauggu

SEQ ID NO: 11599 - RNA, 19 nt, Artificial Sequence
  Description of Artificial Sequence: Synthetic oligonucleotide
gcauuacuugugaagucug

SEQ ID NO: 11600 - RNA, 19 nt, Artificial Sequence
  Description of Artificial Sequence: Synthetic oligonucleotide
guacgaucacaauucuagu

SEQ ID NO: 11601 - RNA, 19 nt, Artificial Sequence
  Description of Artificial Sequence: Synthetic oligonucleotide
guuccaaccggagcauuuc

SEQ ID NO: 11602 - RNA, 19 nt, Artificial Sequence
  Description of Artificial Sequence: Synthetic oligonucleotide
uaacccuaccagagaggua

SEQ ID NO: 11603 - RNA, 19 nt, Artificial Sequence
  Description of Artificial Sequence: Synthetic oligonucleotide
gggcaaauguccuaacacu

SEQ ID NO: 11604 - RNA, 19 nt, Artificial Sequence
  Description of Artificial Sequence: Synthetic oligonucleotide
uuauggacaccaggagcua

SEQ ID NO: 11605 - RNA, 19 nt, Artificial Sequence
  Description of Artificial Sequence: Synthetic oligonucleotide
caccgucuaaagcaauaga

SEQ ID NO: 11606 - RNA, 19 nt, Artificial Sequence
  Description of Artificial Sequence: Synthetic oligonucleotide
ggcgccuccauagcaaagc

SEQ ID NO: 11607 - RNA, 19 nt, Artificial Sequence
  Description of Artificial Sequence: Synthetic oligonucleotide
guacagaaccaccgucuaa

SEQ ID NO: 11608 - RNA, 19 nt, Artificial Sequence
  Description of Artificial Sequence: Synthetic oligonucleotide
ccaguacagaaccaccguc

SEQ ID NO: 11609 - RNA, 19 nt, Artificial Sequence
  Description of Artificial Sequence: Synthetic oligonucleotide
cauuacuugugaagucugu

SEQ ID NO: 11610 - RNA, 19 nt, Artificial Sequence
  Description of Artificial Sequence: Synthetic oligonucleotide
  modified_base (8)..(8): a, c, u, g, unknown or other
aucuggunauuuacuguau

SEQ ID NO: 11611 - RNA, 19 nt, Artificial Sequence
  Description of Artificial Sequence: Synthetic oligonucleotide
cguagcuaguacauucaug

SEQ ID NO: 11612 - RNA, 19 nt, Artificial Sequence
  Description of Artificial Sequence: Synthetic oligonucleotide
aguuccaaccggagcauuu

SEQ ID NO: 11613 - RNA, 19 nt, Artificial Sequence
  Description of Artificial Sequence: Synthetic oligonucleotide
cagccaguucagacauaag

SEQ ID NO: 11614 - RNA, 19 nt, Artificial Sequence
  Description of Artificial Sequence: Synthetic oligonucleotide
caccaagaucaaccaagca

SEQ ID NO: 11615 - RNA, 19 nt, Artificial Sequence
  Description of Artificial Sequence: Synthetic oligonucleotide
uccacgcauuacuccuccu

SEQ ID NO: 11616 - RNA, 19 nt, Artificial Sequence
  Description of Artificial Sequence: Synthetic oligonucleotide
gucaaaggaaucacucccu

SEQ ID NO: 11617 - RNA, 19 nt, Artificial Sequence
  Description of Artificial Sequence: Synthetic oligonucleotide
ccagccuauuugcuaacug

SEQ ID NO: 11618 - RNA, 19 nt, Artificial Sequence
  Description of Artificial Sequence: Synthetic oligonucleotide
cuggggcaaauguccuaac

SEQ ID NO: 11619 - RNA, 19 nt, Artificial Sequence
  Description of Artificial Sequence: Synthetic oligonucleotide
ccacgcauaaaagaaggca

SEQ ID NO: 11620 - RNA, 19 nt, Artificial Sequence
  Description of Artificial Sequence: Synthetic oligonucleotide
ggaccgucaaaggaaucac

SEQ ID NO: 11621 - RNA, 19 nt, Artificial Sequence
  Description of Artificial Sequence: Synthetic oligonucleotide
ccaccgucuaaagcaauag

SEQ ID NO: 11622 - RNA, 19 nt, Artificial Sequence
  Description of Artificial Sequence: Synthetic oligonucleotide
gccauagguaacacuauaa

SEQ ID NO: 11623 - RNA, 19 nt, Artificial Sequence
  Description of Artificial Sequence: Synthetic oligonucleotide
agauuucgagggaccaaau

SEQ ID NO: 11624 - RNA, 19 nt, Artificial Sequence
  Description of Artificial Sequence: Synthetic oligonucleotide
aaccaccgucuaaagcaau

SEQ ID NO: 11625 - RNA, 19 nt, Artificial Sequence
  Description of Artificial Sequence: Synthetic oligonucleotide
gagcgaccuaggugagcug

SEQ ID NO: 11626 - RNA, 19 nt, Artificial Sequence
  Description of Artificial Sequence: Synthetic oligonucleotide
cagauaucuccaucacaua

SEQ ID NO: 11627 - RNA, 19 nt, Artificial Sequence
  Description of Artificial Sequence: Synthetic oligonucleotide
accaccgucuaaagcaaua

SEQ ID NO: 11628 - RNA, 19 nt, Artificial Sequence
  Description of Artificial Sequence: Synthetic oligonucleotide
ccaauugccucaaaauggu

SEQ ID NO: 11629 - RNA, 19 nt, Artificial Sequence
  Description of Artificial Sequence: Synthetic oligonucleotide
agggaccaaaugugacgau

SEQ ID NO: 11630 - RNA, 19 nt, Artificial Sequence
  Description of Artificial Sequence: Synthetic oligonucleotide
gcauuccccaucccauaug

SEQ ID NO: 11631 - RNA, 19 nt, Artificial Sequence
  Description of Artificial Sequence: Synthetic oligonucleotide
cugagcgaccuaggugagc

SEQ ID NO: 11632 - RNA, 19 nt, Artificial Sequence
  Description of Artificial Sequence: Synthetic oligonucleotide
gcgcugauuccagaguggc

SEQ ID NO: 11633 - RNA, 19 nt, Artificial Sequence
  Description of Artificial Sequence: Synthetic oligonucleotide
ggccauagguaacacuaua

SEQ ID NO: 11634 - RNA, 19 nt, Artificial Sequence
  Description of Artificial Sequence: Synthetic oligonucleotide
ccauccggauuuagagaag

SEQ ID NO: 11635 - RNA, 19 nt, Artificial Sequence
  Description of Artificial Sequence: Synthetic oligonucleotide
ccgucgggauucauggaug

SEQ ID NO: 11636 - RNA, 19 nt, Artificial Sequence
  Description of Artificial Sequence: Synthetic oligonucleotide
acccgucgggauucaugga

SEQ ID NO: 11637 - RNA, 19 nt, Artificial Sequence
  Description of Artificial Sequence: Synthetic oligonucleotide
ccaacuacacuuacugagu

SEQ ID NO: 11638 - RNA, 19 nt, Artificial Sequence
  Description of Artificial Sequence: Synthetic oligonucleotide
gagaaaccccagccuauuu

SEQ ID NO: 11639 - RNA, 19 nt, Artificial Sequence
  Description of Artificial Sequence: Synthetic oligonucleotide
auccccugauuuaguacaa

SEQ ID NO: 11640 - RNA, 19 nt, Artificial Sequence
  Description of Artificial Sequence: Synthetic oligonucleotide
cuggcgccuccauagcaaa

SEQ ID NO: 11641 - RNA, 19 nt, Artificial Sequence
  Description of Artificial Sequence: Synthetic oligonucleotide
ccgaaccuaagccaccuaa

SEQ ID NO: 11642 - RNA, 19 nt, Artificial Sequence
  Description of Artificial Sequence: Synthetic oligonucleotide
auacggaagcccgcuuauu

SEQ ID NO: 11643 - RNA, 19 nt, Artificial Sequence
  Description of Artificial Sequence: Synthetic oligonucleotide
cauggcuuaggagggacuu

SEQ ID NO: 11644 - RNA, 19 nt, Artificial Sequence
  Description of Artificial Sequence: Synthetic oligonucleotide
cgguuuaggucaaaguugu

SEQ ID NO: 11645 - RNA, 19 nt, Artificial Sequence
  Description of Artificial Sequence: Synthetic oligonucleotide
gcacagaacguagcuagua

SEQ ID NO: 11646 - RNA, 19 nt, Artificial Sequence
  Description of Artificial Sequence: Synthetic oligonucleotide
gcgaccuaggugagcugag

SEQ ID NO: 11647 - RNA, 19 nt, Artificial Sequence
  Description of Artificial Sequence: Synthetic oligonucleotide
ccccugauuuaguacaagu

SEQ ID NO: 11648 - RNA, 19 nt, Artificial Sequence
  Description of Artificial Sequence: Synthetic oligonucleotide
gcccgucauuaguauuaac

SEQ ID NO: 11649 - RNA, 19 nt, Artificial Sequence
  Description of Artificial Sequence: Synthetic oligonucleotide
caaauacggaagcccgcuu

SEQ ID NO: 11650 - RNA, 19 nt, Artificial Sequence
  Description of Artificial Sequence: Synthetic oligonucleotide
cgaccuaggugagcugagg

SEQ ID NO: 11651 - RNA, 19 nt, Artificial Sequence
  Description of Artificial Sequence: Synthetic oligonucleotide
acccuaccagagagguagu

SEQ ID NO: 11652 - RNA, 19 nt, Artificial Sequence
  Description of Artificial Sequence: Synthetic oligonucleotide
gcugcgaaccaaaucgguu

SEQ ID NO: 11653 - RNA, 19 nt, Artificial Sequence
  Description of Artificial Sequence: Synthetic oligonucleotide
cccgucgggauucauggau

SEQ ID NO: 11654 - RNA, 19 nt, Artificial Sequence
  Description of Artificial Sequence: Synthetic oligonucleotide
ccguuuccuaaugucauau

SEQ ID NO: 11655 - RNA, 19 nt, Artificial Sequence
  Description of Artificial Sequence: Synthetic oligonucleotide
ccccuggcgccuccauagc

SEQ ID NO: 11656 - RNA, 19 nt, Artificial Sequence
  Description of Artificial Sequence: Synthetic oligonucleotide
gcaucgauggaugguuauu

SEQ ID NO: 11657 - RNA, 19 nt, Artificial Sequence
  Description of Artificial Sequence: Synthetic oligonucleotide
gccgaaccuaagccaccua

SEQ ID NO: 11658 - RNA, 19 nt, Artificial Sequence
  Description of Artificial Sequence: Synthetic oligonucleotide
cccagccuauuugcuaacu

SEQ ID NO: 11659 - RNA, 19 nt, Artificial Sequence
  Description of Artificial Sequence: Synthetic oligonucleotide
cugauacguuggguuuauu

SEQ ID NO: 11660 - RNA, 19 nt, Artificial Sequence
  Description of Artificial Sequence: Synthetic oligonucleotide
ccggagcauuuccauggau

SEQ ID NO: 11661 - RNA, 19 nt, Artificial Sequence
  Description of Artificial Sequence: Synthetic oligonucleotide
cccuuaagaugaggguauu

SEQ ID NO: 11662 - RNA, 19 nt, Artificial Sequence
  Description of Artificial Sequence: Synthetic oligonucleotide
uuaagaguaagcaccaagc

SEQ ID NO: 11663 - RNA, 19 nt, Artificial Sequence
  Description of Artificial Sequence: Synthetic oligonucleotide
aagcgugccagacaggagc

SEQ ID NO: 11664 - RNA, 19 nt, Artificial Sequence
  Description of Artificial Sequence: Synthetic oligonucleotide
uacccuucuaaccucaggg

SEQ ID NO: 11665 - RNA, 19 nt, Artificial Sequence
  Description of Artificial Sequence: Synthetic oligonucleotide
gauugcaguacagaaacgg

SEQ ID NO: 11666 - RNA, 19 nt, Artificial Sequence
  Description of Artificial Sequence: Synthetic oligonucleotide
aagaguaagcaccaagcug

SEQ ID NO: 11667 - RNA, 19 nt, Artificial Sequence
  Description of Artificial Sequence: Synthetic oligonucleotide
uuggauaguggagagaucc

SEQ ID NO: 11668 - RNA, 19 nt, Artificial Sequence
  Description of Artificial Sequence: Synthetic oligonucleotide
uccgggaugaccacgcucg

SEQ ID NO: 11669 - RNA, 19 nt, Artificial Sequence
  Description of Artificial Sequence: Synthetic oligonucleotide
uuguuagcgaaguaguggc

SEQ ID NO: 11670 - RNA, 19 nt, Artificial Sequence
  Description of Artificial Sequence: Synthetic oligonucleotide
aaguguaccuuccagcaga

SEQ ID NO: 11671 - RNA, 19 nt, Artificial Sequence
  Description of Artificial Sequence: Synthetic oligonucleotide
auaugugugcggaugaggc

SEQ ID NO: 11672 - RNA, 19 nt, Artificial Sequence
  Description of Artificial Sequence: Synthetic oligonucleotide
agagauguuggauagugga

SEQ ID NO: 11673 - RNA, 19 nt, Artificial Sequence
  Description of Artificial Sequence: Synthetic oligonucleotide
aauaugugugcggaugagg

SEQ ID NO: 11674 - RNA, 19 nt, Artificial Sequence
  Description of Artificial Sequence: Synthetic oligonucleotide
gggaaauccaacuucaccc

SEQ ID NO: 11675 - RNA, 19 nt, Artificial Sequence
  Description of Artificial Sequence: Synthetic oligonucleotide
ucuaggcucagcuugguac

SEQ ID NO: 11676 - RNA, 19 nt, Artificial Sequence
  Description of Artificial Sequence: Synthetic oligonucleotide
guaagcaccaagcugggug

SEQ ID NO: 11677 - RNA, 19 nt, Artificial Sequence
  Description of Artificial Sequence: Synthetic oligonucleotide
cuuguuagcgaaguagugg

SEQ ID NO: 11678 - RNA, 19 nt, Artificial Sequence
  Description of Artificial Sequence: Synthetic oligonucleotide
aagccuugcaacccugggg

SEQ ID NO: 11679 - RNA, 19 nt, Artificial Sequence
  Description of Artificial Sequence: Synthetic oligonucleotide
aguaccaaccaccccuggc

SEQ ID NO: 11680 - RNA, 19 nt, Artificial Sequence
  Description of Artificial Sequence: Synthetic oligonucleotide
uacuaagaucaacuuuggg

SEQ ID NO: 11681 - RNA, 19 nt, Artificial Sequence
  Description of Artificial Sequence: Synthetic oligonucleotide
aagaccaacuacaccgggc

SEQ ID NO: 11682 - RNA, 19 nt, Artificial Sequence
  Description of Artificial Sequence: Synthetic oligonucleotide
augacuugcuaaguguacc

SEQ ID NO: 11683 - RNA, 19 nt, Artificial Sequence
  Description of Artificial Sequence: Synthetic oligonucleotide
guaaucucccuugucaccg

SEQ ID NO: 11684 - RNA, 19 nt, Artificial Sequence
  Description of Artificial Sequence: Synthetic oligonucleotide
aguuuaagguggcacaggu

SEQ ID NO: 11685 - RNA, 19 nt, Artificial Sequence
  Description of Artificial Sequence: Synthetic oligonucleotide
aauuccaucugcgccgggg

SEQ ID NO: 11686 - RNA, 19 nt, Artificial Sequence
  Description of Artificial Sequence: Synthetic oligonucleotide
ucuuuacgcaguacguaag

SEQ ID NO: 11687 - RNA, 19 nt, Artificial Sequence
  Description of Artificial Sequence: Synthetic oligonucleotide
aacccgguaauuccaggag

SEQ ID NO: 11688 - RNA, 19 nt, Artificial Sequence
  Description of Artificial Sequence: Synthetic oligonucleotide
ugguguuacacaggaaagg

SEQ ID NO: 11689 - RNA, 19 nt, Artificial Sequence
  Description of Artificial Sequence: Synthetic oligonucleotide
auaguggagagaucccagg

SEQ ID NO: 11690 - RNA, 19 nt, Artificial Sequence
  Description of Artificial Sequence: Synthetic oligonucleotide
ugcuaaguguaccuuccag

SEQ ID NO: 11691 - RNA, 19 nt, Artificial Sequence
  Description of Artificial Sequence: Synthetic oligonucleotide
cuaagaucaacuuuggggu

SEQ ID NO: 11692 - RNA, 19 nt, Artificial Sequence
  Description of Artificial Sequence: Synthetic oligonucleotide
uucuuuacgcaguacguaa

SEQ ID NO: 11693 - RNA, 19 nt, Artificial Sequence
  Description of Artificial Sequence: Synthetic oligonucleotide
cuuuacgcaguacguaagg

SEQ ID NO: 11694 - RNA, 19 nt, Artificial Sequence
  Description of Artificial Sequence: Synthetic oligonucleotide
acggauuugguagaaaaug

SEQ ID NO: 11695 - RNA, 19 nt, Artificial Sequence
  Description of Artificial Sequence: Synthetic oligonucleotide
aucccacggagccaggagc

SEQ ID NO: 11696 - RNA, 19 nt, Artificial Sequence
  Description of Artificial Sequence: Synthetic oligonucleotide
aauuccagugacuccucgu

SEQ ID NO: 11697 - RNA, 19 nt, Artificial Sequence
  Description of Artificial Sequence: Synthetic oligonucleotide
gguacguuguuguuguggg

SEQ ID NO: 11698 - RNA, 19 nt, Artificial Sequence
  Description of Artificial Sequence: Synthetic oligonucleotide
uaaguguaccuuccagcag

SEQ ID NO: 11699 - RNA, 19 nt, Artificial Sequence
  Description of Artificial Sequence: Synthetic oligonucleotide
uaugccgacaucaccucug

SEQ ID NO: 11700 - RNA, 19 nt, Artificial Sequence
  Description of Artificial Sequence: Synthetic oligonucleotide
agcuugguacccuucuaac

SEQ ID NO: 11701 - RNA, 19 nt, Artificial Sequence
  Description of Artificial Sequence: Synthetic oligonucleotide
cuaaguguaccuuccagca

SEQ ID NO: 11702 - RNA, 19 nt, Artificial Sequence
  Description of Artificial Sequence: Synthetic oligonucleotide
uggacgucagcuccugggg

SEQ ID NO: 11703 - RNA, 19 nt, Artificial Sequence
  Description of Artificial Sequence: Synthetic oligonucleotide
uguugugggcccaaugagu

SEQ ID NO: 11704 - RNA, 19 nt, Artificial Sequence
  Description of Artificial Sequence: Synthetic oligonucleotide
gaacccggggucuccaugg

SEQ ID NO: 11705 - RNA, 19 nt, Artificial Sequence
  Description of Artificial Sequence: Synthetic oligonucleotide
augugugcggaugaggccg

SEQ ID NO: 11706 - RNA, 19 nt, Artificial Sequence
  Description of Artificial Sequence: Synthetic oligonucleotide
guacagaaacggcauagug

SEQ ID NO: 11707 - RNA, 19 nt, Artificial Sequence
  Description of Artificial Sequence: Synthetic oligonucleotide
cuuggcagcggcuaauaug

SEQ ID NO: 11708 - RNA, 19 nt, Artificial Sequence
  Description of Artificial Sequence: Synthetic oligonucleotide
ugaucuggacgguacguug

SEQ ID NO: 11709 - RNA, 19 nt, Artificial Sequence
  Description of Artificial Sequence: Synthetic oligonucleotide
auagagugcauugaaggga

SEQ ID NO: 11710 - RNA, 19 nt, Artificial Sequence
  Description of Artificial Sequence: Synthetic oligonucleotide
uacugaucuggacgguacg

SEQ ID NO: 11711 - RNA, 19 nt, Artificial Sequence
  Description of Artificial Sequence: Synthetic oligonucleotide
acagcuaccgggcgacacc

SEQ ID NO: 11712 - RNA, 19 nt, Artificial Sequence
  Description of Artificial Sequence: Synthetic oligonucleotide
uguuaucccgggaaaucca

SEQ ID NO: 11713 - RNA, 19 nt, Artificial Sequence
  Description of Artificial Sequence: Synthetic oligonucleotide
uccacaguauccccaauau

SEQ ID NO: 11714 - RNA, 19 nt, Artificial Sequence
  Description of Artificial Sequence: Synthetic oligonucleotide
agaccaacuacaccgggcu

SEQ ID NO: 11715 - RNA, 19 nt, Artificial Sequence
  Description of Artificial Sequence: Synthetic oligonucleotide
ucgccuuucaaggaggggc

SEQ ID NO: 11716 - RNA, 19 nt, Artificial Sequence
  Description of Artificial Sequence: Synthetic oligonucleotide
gguauagagacaucuuggc

SEQ ID NO: 11717 - RNA, 19 nt, Artificial Sequence
  Description of Artificial Sequence: Synthetic oligonucleotide
uccuuugcggcccuguagu

SEQ ID NO: 11718 - RNA, 19 nt, Artificial Sequence
  Description of Artificial Sequence: Synthetic oligonucleotide
ucggccucauucuaggaca

SEQ ID NO: 11719 - RNA, 19 nt, Artificial Sequence
  Description of Artificial Sequence: Synthetic oligonucleotide
guaguagcagacgucaccc

SEQ ID NO: 11720 - RNA, 19 nt, Artificial Sequence
  Description of Artificial Sequence: Synthetic oligonucleotide
uuggcgagcaaaaggacua

SEQ ID NO: 11721 - RNA, 19 nt, Artificial Sequence
  Description of Artificial Sequence: Synthetic oligonucleotide
augaggccggccuugagug

SEQ ID NO: 11722 - RNA, 19 nt, Artificial Sequence
  Description of Artificial Sequence: Synthetic oligonucleotide
aguauccccaauaucacca

SEQ ID NO: 11723 - RNA, 19 nt, Artificial Sequence
  Description of Artificial Sequence: Synthetic oligonucleotide
cuccgauuuccuuuaacac

SEQ ID NO: 11724 - RNA, 19 nt, Artificial Sequence
  Description of Artificial Sequence: Synthetic oligonucleotide
cuaggcucagcuugguacc

SEQ ID NO: 11725 - RNA, 19 nt, Artificial Sequence
  Description of Artificial Sequence: Synthetic oligonucleotide
gaagccuugcaacccuggg

SEQ ID NO: 11726 - RNA, 19 nt, Artificial Sequence
  Description of Artificial Sequence: Synthetic oligonucleotide
gauaguggagagaucccag

SEQ ID NO: 11727 - RNA, 19 nt, Artificial Sequence
  Description of Artificial Sequence: Synthetic oligonucleotide
uaagcaccaagcugggugu

SEQ ID NO: 11728 - RNA, 19 nt, Artificial Sequence
  Description of Artificial Sequence: Synthetic oligonucleotide
guuagcgaaguaguggcag

SEQ ID NO: 11729 - RNA, 19 nt, Artificial Sequence
  Description of Artificial Sequence: Synthetic oligonucleotide
uguugcacggaaguccucc

SEQ ID NO: 11730 - RNA, 19 nt, Artificial Sequence
  Description of Artificial Sequence: Synthetic oligonucleotide
agaaacggcauagugcuga

SEQ ID NO: 11731 - RNA, 19 nt, Artificial Sequence
  Description of Artificial Sequence: Synthetic oligonucleotide
uguuguugugggcccaaug

SEQ ID NO: 11732 - RNA, 19 nt, Artificial Sequence
  Description of Artificial Sequence: Synthetic oligonucleotide
ugacuugcuaaguguaccu

SEQ ID NO: 11733 - RNA, 19 nt, Artificial Sequence
  Description of Artificial Sequence: Synthetic oligonucleotide
gcugaagcgugccagacag

SEQ ID NO: 11734 - RNA, 19 nt, Artificial Sequence
  Description of Artificial Sequence: Synthetic oligonucleotide
uccucgccuuucaaggagg

SEQ ID NO: 11735 - RNA, 19 nt, Artificial Sequence
  Description of Artificial Sequence: Synthetic oligonucleotide
aaauauuccuggcgccccu

SEQ ID NO: 11736 - RNA, 19 nt, Artificial Sequence
  Description of Artificial Sequence: Synthetic oligonucleotide
cuggauagggugcugggug

SEQ ID NO: 11737 - RNA, 19 nt, Artificial Sequence
  Description of Artificial Sequence: Synthetic oligonucleotide
gauuguggucagccaaaag

SEQ ID NO: 11738 - RNA, 19 nt, Artificial Sequence
  Description of Artificial Sequence: Synthetic oligonucleotide
ucuuuccguaaaaccaagu

SEQ ID NO: 11739 - RNA, 19 nt, Artificial Sequence
  Description of Artificial Sequence: Synthetic oligonucleotide
gcuaaguguaccuuccagc

SEQ ID NO: 11740 - RNA, 19 nt, Artificial Sequence
  Description of Artificial Sequence: Synthetic oligonucleotide
ucaccgugugggaucuugg

SEQ ID NO: 11741 - RNA, 19 nt, Artificial Sequence
  Description of Artificial Sequence: Synthetic oligonucleotide
uuuacgcaguacguaaggu

SEQ ID NO: 11742 - RNA, 19 nt, Artificial Sequence
  Description of Artificial Sequence: Synthetic oligonucleotide
uguuagcgaaguaguggca

SEQ ID NO: 11743 - RNA, 19 nt, Artificial Sequence
  Description of Artificial Sequence: Synthetic oligonucleotide
cuuucuguccagggaaucc

SEQ ID NO: 11744 - RNA, 19 nt, Artificial Sequence
  Description of Artificial Sequence: Synthetic oligonucleotide
ugggaacccgguaauucca

SEQ ID NO: 11745 - RNA, 19 nt, Artificial Sequence
  Description of Artificial Sequence: Synthetic oligonucleotide
cuaauaugugugcggauga

SEQ ID NO: 11746 - RNA, 19 nt, Artificial Sequence
  Description of Artificial Sequence: Synthetic oligonucleotide
cuaugaauccugggaaccc

SEQ ID NO: 11747 - RNA, 19 nt, Artificial Sequence
  Description of Artificial Sequence: Synthetic oligonucleotide
cuaccgggcgacaccagcg

SEQ ID NO: 11748 - RNA, 19 nt, Artificial Sequence
  Description of Artificial Sequence: Synthetic oligonucleotide
gagugaaguacagugagcu

SEQ ID NO: 11749 - RNA, 19 nt, Artificial Sequence
  Description of Artificial Sequence: Synthetic oligonucleotide
gauaugccgacaucaccuc

SEQ ID NO: 11750 - RNA, 19 nt, Artificial Sequence
  Description of Artificial Sequence: Synthetic oligonucleotide
auagggugcuggguggccc

SEQ ID NO: 11751 - RNA, 19 nt, Artificial Sequence
  Description of Artificial Sequence: Synthetic oligonucleotide
uguagggcuugauuucuuc

SEQ ID NO: 11752 - RNA, 19 nt, Artificial Sequence
  Description of Artificial Sequence: Synthetic oligonucleotide
cuacgucacccuuuucacc

SEQ ID NO: 11753 - RNA, 19 nt, Artificial Sequence
  Description of Artificial Sequence: Synthetic oligonucleotide
caaauauuccuggcgcccc

SEQ ID NO: 11754 - RNA, 19 nt, Artificial Sequence
  Description of Artificial Sequence: Synthetic oligonucleotide
guuggcuacuccugguggc

SEQ ID NO: 11755 - RNA, 19 nt, Artificial Sequence
  Description of Artificial Sequence: Synthetic oligonucleotide
gucggaugggaucccauug

SEQ ID NO: 11756 - RNA, 19 nt, Artificial Sequence
  Description of Artificial Sequence: Synthetic oligonucleotide
agcggcuaauaugugugcg

SEQ ID NO: 11757 - RNA, 19 nt, Artificial Sequence
  Description of Artificial Sequence: Synthetic oligonucleotide
agugugaugucggauggga

SEQ ID NO: 11758 - RNA, 19 nt, Artificial Sequence
  Description of Artificial Sequence: Synthetic oligonucleotide
cauuguaccccugggugcc

SEQ ID NO: 11759 - RNA, 19 nt, Artificial Sequence
  Description of Artificial Sequence: Synthetic oligonucleotide
gauggauggggcgaguaga

SEQ ID NO: 11760 - RNA, 19 nt, Artificial Sequence
  Description of Artificial Sequence: Synthetic oligonucleotide
cuugguacccuucuaaccu

SEQ ID NO: 11761 - RNA, 19 nt, Artificial Sequence
  Description of Artificial Sequence: Synthetic oligonucleotide
uuaucccgggaaauccaac

SEQ ID NO: 11762 - RNA, 19 nt, Artificial Sequence
  Description of Artificial Sequence: Synthetic oligonucleotide
auuggcgagcaaaaggacu

SEQ ID NO: 11763 - RNA, 19 nt, Artificial Sequence
  Description of Artificial Sequence: Synthetic oligonucleotide
gccucgguagccuucagag

SEQ ID NO: 11764 - RNA, 19 nt, Artificial Sequence
  Description of Artificial Sequence: Synthetic oligonucleotide
gcuaauaugugugcggaug

SEQ ID NO: 11765 - RNA, 19 nt, Artificial Sequence
  Description of Artificial Sequence: Synthetic oligonucleotide
auccaauccacaagcuccg

SEQ ID NO: 11766 - RNA, 19 nt, Artificial Sequence
  Description of Artificial Sequence: Synthetic oligonucleotide
acgcucgccugauaugccg

SEQ ID NO: 11767 - RNA, 19 nt, Artificial Sequence
  Description of Artificial Sequence: Synthetic oligonucleotide
ugcgccggggaauccagag

SEQ ID NO: 11768 - RNA, 19 nt, Artificial Sequence
  Description of Artificial Sequence: Synthetic oligonucleotide
uaccaaccaccccuggcug

SEQ ID NO: 11769 - RNA, 19 nt, Artificial Sequence
  Description of Artificial Sequence: Synthetic oligonucleotide
accugguaacccugacuac

SEQ ID NO: 11770 - RNA, 19 nt, Artificial Sequence
  Description of Artificial Sequence: Synthetic oligonucleotide
cuacaucaccaggugaccc

SEQ ID NO: 11771 - RNA, 19 nt, Artificial Sequence
  Description of Artificial Sequence: Synthetic oligonucleotide
uggacggccuauagguucu

SEQ ID NO: 11772 - RNA, 19 nt, Artificial Sequence
  Description of Artificial Sequence: Synthetic oligonucleotide
gccauuguaccccugggug

SEQ ID NO: 11773 - RNA, 19 nt, Artificial Sequence
  Description of Artificial Sequence: Synthetic oligonucleotide
agauggcgugcccuggaag

SEQ ID NO: 11774 - RNA, 19 nt, Artificial Sequence
  Description of Artificial Sequence: Synthetic oligonucleotide
accccuguauuugucuugg

SEQ ID NO: 11775 - RNA, 19 nt, Artificial Sequence
  Description of Artificial Sequence: Synthetic oligonucleotide
acggccuauagguucuuca

SEQ ID NO: 11776 - RNA, 19 nt, Artificial Sequence
  Description of Artificial Sequence: Synthetic oligonucleotide
augccuguuaucccgggaa

SEQ ID NO: 11777 - RNA, 19 nt, Artificial Sequence
  Description of Artificial Sequence: Synthetic oligonucleotide
uccuacgcuccccucgucu

SEQ ID NO: 11778 - RNA, 19 nt, Artificial Sequence
  Description of Artificial Sequence: Synthetic oligonucleotide
ugcugaagcgugccagaca

SEQ ID NO: 11779 - RNA, 19 nt, Artificial Sequence
  Description of Artificial Sequence: Synthetic oligonucleotide
ggauuggcgagcaaaagga

SEQ ID NO: 11780 - RNA, 19 nt, Artificial Sequence
  Description of Artificial Sequence: Synthetic oligonucleotide
gacgguacguuguuguugu

SEQ ID NO: 11781 - RNA, 19 nt, Artificial Sequence
  Description of Artificial Sequence: Synthetic oligonucleotide
ucgccugauaugccgacau

SEQ ID NO: 11782 - RNA, 19 nt, Artificial Sequence
  Description of Artificial Sequence: Synthetic oligonucleotide
acuuguuagcgaaguagug

SEQ ID NO: 11783 - RNA, 19 nt, Artificial Sequence
  Description of Artificial Sequence: Synthetic oligonucleotide
guggacggccuauagguuc

SEQ ID NO: 11784 - RNA, 19 nt, Artificial Sequence
  Description of Artificial Sequence: Synthetic oligonucleotide
aggauuugucauugcggcu

SEQ ID NO: 11785 - RNA, 19 nt, Artificial Sequence
  Description of Artificial Sequence: Synthetic oligonucleotide
gcuugguacccuucuaacc

SEQ ID NO: 11786 - RNA, 19 nt, Artificial Sequence
  Description of Artificial Sequence: Synthetic oligonucleotide
uccguaaaaccaaguccuc

SEQ ID NO: 11787 - RNA, 19 nt, Artificial Sequence
  Description of Artificial Sequence: Synthetic oligonucleotide
gauuggcgagcaaaaggac

SEQ ID NO: 11788 - RNA, 19 nt, Artificial Sequence
  Description of Artificial Sequence: Synthetic oligonucleotide
acuaccccuggccagccgu

SEQ ID NO: 11789 - RNA, 19 nt, Artificial Sequence
  Description of Artificial Sequence: Synthetic oligonucleotide
cacggccuccguuacauuc

SEQ ID NO: 11790 - RNA, 19 nt, Artificial Sequence
  Description of Artificial Sequence: Synthetic oligonucleotide
aaacaggccuagauagagu

SEQ ID NO: 11791 - RNA, 19 nt, Artificial Sequence
  Description of Artificial Sequence: Synthetic oligonucleotide
cuccccggaacccuggaac

SEQ ID NO: 11792 - RNA, 19 nt, Artificial Sequence
  Description of Artificial Sequence: Synthetic oligonucleotide
cuuugcggcccuguagucc

SEQ ID NO: 11793 - RNA, 19 nt, Artificial Sequence
  Description of Artificial Sequence: Synthetic oligonucleotide
guauagagacaucuuggcu

SEQ ID NO: 11794 - RNA, 19 nt, Artificial Sequence
  Description of Artificial Sequence: Synthetic oligonucleotide
acccgguaauuccaggagu

SEQ ID NO: 11795 - RNA, 19 nt, Artificial Sequence
  Description of Artificial Sequence: Synthetic oligonucleotide
auaugccgacaucaccucu

SEQ ID NO: 11796 - RNA, 19 nt, Artificial Sequence
  Description of Artificial Sequence: Synthetic oligonucleotide
ccguguaauccgcugaucc

SEQ ID NO: 11797 - RNA, 19 nt, Artificial Sequence
  Description of Artificial Sequence: Synthetic oligonucleotide
cacggaaaccuggaucucc

SEQ ID NO: 11798 - RNA, 19 nt, Artificial Sequence
  Description of Artificial Sequence: Synthetic oligonucleotide
gacgucacccggauugcag

SEQ ID NO: 11799 - RNA, 19 nt, Artificial Sequence
  Description of Artificial Sequence: Synthetic oligonucleotide
uugguacccuucuaaccuc

SEQ ID NO: 11800 - RNA, 19 nt, Artificial Sequence
  Description of Artificial Sequence: Synthetic oligonucleotide
cuagcgagaccucucccuc

SEQ ID NO: 11801 - RNA, 19 nt, Artificial Sequence
  Description of Artificial Sequence: Synthetic oligonucleotide
guacccacuccagagcuug

SEQ ID NO: 11802 - RNA, 19 nt, Artificial Sequence
  Description of Artificial Sequence: Synthetic oligonucleotide
guagccgaugcugacgcug

SEQ ID NO: 11803 - RNA, 19 nt, Artificial Sequence
  Description of Artificial Sequence: Synthetic oligonucleotide
agccguaaucucccuuguc

SEQ ID NO: 11804 - RNA, 19 nt, Artificial Sequence
  Description of Artificial Sequence: Synthetic oligonucleotide
ucaaugccgggaugacccc

SEQ ID NO: 11805 - RNA, 19 nt, Artificial Sequence
  Description of Artificial Sequence: Synthetic oligonucleotide
agagacgccucuggcuccc

SEQ ID NO: 11806 - RNA, 19 nt, Artificial Sequence
  Description of Artificial Sequence: Synthetic oligonucleotide
gcgagcaaaaggacuaagg

SEQ ID NO: 11807 - RNA, 19 nt, Artificial Sequence
  Description of Artificial Sequence: Synthetic oligonucleotide
agguucaccccuguauuug

SEQ ID NO: 11808 - RNA, 19 nt, Artificial Sequence
  Description of Artificial Sequence: Synthetic oligonucleotide
caguacguaagguucaccu

SEQ ID NO: 11809 - RNA, 19 nt, Artificial Sequence
  Description of Artificial Sequence: Synthetic oligonucleotide
ugguagccgaucuguccag

SEQ ID NO: 11810 - RNA, 19 nt, Artificial Sequence
  Description of Artificial Sequence: Synthetic oligonucleotide
gcggcuaauaugugugcgg

SEQ ID NO: 11811 - RNA, 19 nt, Artificial Sequence
  Description of Artificial Sequence: Synthetic oligonucleotide
acuacaccgggcuggcccu

SEQ ID NO: 11812 - RNA, 19 nt, Artificial Sequence
  Description of Artificial Sequence: Synthetic oligonucleotide
gccguaaucucccuuguca

SEQ ID NO: 11813 - RNA, 19 nt, Artificial Sequence
  Description of Artificial Sequence: Synthetic oligonucleotide
ggaagaccaacuacaccgg

SEQ ID NO: 11814 - RNA, 19 nt, Artificial Sequence
  Description of Artificial Sequence: Synthetic oligonucleotide
acaguuacuguuggcuacu

SEQ ID NO: 11815 - RNA, 19 nt, Artificial Sequence
  Description of Artificial Sequence: Synthetic oligonucleotide
cugcucgcgcgcaugggcc

SEQ ID NO: 11816 - RNA, 19 nt, Artificial Sequence
  Description of Artificial Sequence: Synthetic oligonucleotide
guacguuguuguugugggc

SEQ ID NO: 11817 - RNA, 19 nt, Artificial Sequence
  Description of Artificial Sequence: Synthetic oligonucleotide
uggggcgaguagacagggg

SEQ ID NO: 11818 - RNA, 19 nt, Artificial Sequence
  Description of Artificial Sequence: Synthetic oligonucleotide
uuccgggaugaccacgcuc

SEQ ID NO: 11819 - RNA, 19 nt, Artificial Sequence
  Description of Artificial Sequence: Synthetic oligonucleotide
ccuaugaauccugggaacc

SEQ ID NO: 11820 - RNA, 19 nt, Artificial Sequence
  Description of Artificial Sequence: Synthetic oligonucleotide
acgucacccggauugcagu

SEQ ID NO: 11821 - RNA, 19 nt, Artificial Sequence
  Description of Artificial Sequence: Synthetic oligonucleotide
guaccaaccaccccuggcu

SEQ ID NO: 11822 - RNA, 19 nt, Artificial Sequence
  Description of Artificial Sequence: Synthetic oligonucleotide
aaggccaaucucgccaaaa

SEQ ID NO: 11823 - RNA, 19 nt, Artificial Sequence
  Description of Artificial Sequence: Synthetic oligonucleotide
caccaggugacccagagau

SEQ ID NO: 11824 - RNA, 19 nt, Artificial Sequence
  Description of Artificial Sequence: Synthetic oligonucleotide
ucuggacgguacguuguug

SEQ ID NO: 11825 - RNA, 19 nt, Artificial Sequence
  Description of Artificial Sequence: Synthetic oligonucleotide
acggccuccguuacauucg

SEQ ID NO: 11826 - RNA, 19 nt, Artificial Sequence
  Description of Artificial Sequence: Synthetic oligonucleotide
ggguguugcacggaagucc

SEQ ID NO: 11827 - RNA, 19 nt, Artificial Sequence
  Description of Artificial Sequence: Synthetic oligonucleotide
cugacuaccccuggccagc

SEQ ID NO: 11828 - RNA, 19 nt, Artificial Sequence
  Description of Artificial Sequence: Synthetic oligonucleotide
accgggcgacaccagcgac

SEQ ID NO: 11829 - RNA, 19 nt, Artificial Sequence
  Description of Artificial Sequence: Synthetic oligonucleotide
uaccgggcgacaccagcga

SEQ ID NO: 11830 - RNA, 19 nt, Artificial Sequence
  Description of Artificial Sequence: Synthetic oligonucleotide
cagcggcuaauaugugugc

SEQ ID NO: 11831 - RNA, 19 nt, Artificial Sequence
  Description of Artificial Sequence: Synthetic oligonucleotide
ucgggguagcacuggcagc

SEQ ID NO: 11832 - RNA, 19 nt, Artificial Sequence
  Description of Artificial Sequence: Synthetic oligonucleotide
gaccaacuacaccgggcug

SEQ ID NO: 11833 - RNA, 19 nt, Artificial Sequence
  Description of Artificial Sequence: Synthetic oligonucleotide
ugucaccggguacuccgcu

SEQ ID NO: 11834 - RNA, 19 nt, Artificial Sequence
  Description of Artificial Sequence: Synthetic oligonucleotide
cacaucuccuuuuggucca

SEQ ID NO: 11835 - RNA, 19 nt, Artificial Sequence
  Description of Artificial Sequence: Synthetic oligonucleotide
aaugccgggaugaccccgu

SEQ ID NO: 11836 - RNA, 19 nt, Artificial Sequence
  Description of Artificial Sequence: Synthetic oligonucleotide
cuuguggaccugcgucucc

SEQ ID NO: 11837 - RNA, 19 nt, Artificial Sequence
  Description of Artificial Sequence: Synthetic oligonucleotide
ugucggaugggaucccauu

SEQ ID NO: 11838 - RNA, 19 nt, Artificial Sequence
  Description of Artificial Sequence: Synthetic oligonucleotide
caguaggauuugucauugc

SEQ ID NO: 11839 - RNA, 19 nt, Artificial Sequence
  Description of Artificial Sequence: Synthetic oligonucleotide
gaagcgugccagacaggag

SEQ ID NO: 11840 - RNA, 19 nt, Artificial Sequence
  Description of Artificial Sequence: Synthetic oligonucleotide
gcagcggcuaauaugugug

SEQ ID NO: 11841 - RNA, 19 nt, Artificial Sequence
  Description of Artificial Sequence: Synthetic oligonucleotide
aggccguguaauccgcuga

SEQ ID NO: 11842 - RNA, 19 nt, Artificial Sequence
  Description of Artificial Sequence: Synthetic oligonucleotide
accacgcucgccugauaug

SEQ ID NO: 11843 - RNA, 19 nt, Artificial Sequence
  Description of Artificial Sequence: Synthetic oligonucleotide
uuugguccagucggcccag

SEQ ID NO: 11844 - RNA, 19 nt, Artificial Sequence
  Description of Artificial Sequence: Synthetic oligonucleotide
acccggggucuccauggac

SEQ ID NO: 11845 - RNA, 19 nt, Artificial Sequence
  Description of Artificial Sequence: Synthetic oligonucleotide
guaaaaccaaguccucggu

SEQ ID NO: 11846 - RNA, 19 nt, Artificial Sequence
  Description of Artificial Sequence: Synthetic oligonucleotide
uggcgccccuacaucacca

SEQ ID NO: 11847 - RNA, 19 nt, Artificial Sequence
  Description of Artificial Sequence: Synthetic oligonucleotide
cuacgcuccccucgucucc

SEQ ID NO: 11848 - RNA, 19 nt, Artificial Sequence
  Description of Artificial Sequence: Synthetic oligonucleotide
ccugauaugccgacaucac

SEQ ID NO: 11849 - RNA, 19 nt, Artificial Sequence
  Description of Artificial Sequence: Synthetic oligonucleotide
caaugccgggaugaccccg

SEQ ID NO: 11850 - RNA, 19 nt, Artificial Sequence
  Description of Artificial Sequence: Synthetic oligonucleotide
cacacggugaggguccaug

SEQ ID NO: 11851 - RNA, 19 nt, Artificial Sequence
  Description of Artificial Sequence: Synthetic oligonucleotide
ccagccguaaucucccuug

SEQ ID NO: 11852 - RNA, 19 nt, Artificial Sequence
  Description of Artificial Sequence: Synthetic oligonucleotide
gacagcuaccgggcgacac

SEQ ID NO: 11853 - RNA, 19 nt, Artificial Sequence
  Description of Artificial Sequence: Synthetic oligonucleotide
gucaccgugugggaucuug

SEQ ID NO: 11854 - RNA, 19 nt, Artificial Sequence
  Description of Artificial Sequence: Synthetic oligonucleotide
gugagggcuagcgagaccu

SEQ ID NO: 11855 - RNA, 19 nt, Artificial Sequence
  Description of Artificial Sequence: Synthetic oligonucleotide
gugggguauagagacaucu

SEQ ID NO: 11856 - RNA, 19 nt, Artificial Sequence
  Description of Artificial Sequence: Synthetic oligonucleotide
ggugucaccgugugggauc

SEQ ID NO: 11857 - RNA, 19 nt, Artificial Sequence
  Description of Artificial Sequence: Synthetic oligonucleotide
ccguaaaaccaaguccucg

SEQ ID NO: 11858 - RNA, 19 nt, Artificial Sequence
  Description of Artificial Sequence: Synthetic oligonucleotide
agcgcagagccccugcguu

SEQ ID NO: 11859 - RNA, 19 nt, Artificial Sequence
  Description of Artificial Sequence: Synthetic oligonucleotide
gaaacggcauagugcugaa

SEQ ID NO: 11860 - RNA, 19 nt, Artificial Sequence
  Description of Artificial Sequence: Synthetic oligonucleotide
ggcguaguagcagacguca

SEQ ID NO: 11861 - RNA, 19 nt, Artificial Sequence
  Description of Artificial Sequence: Synthetic oligonucleotide
ggccaauugggcccuguug

SEQ ID NO: 11862 - RNA, 19 nt, Artificial Sequence
  Description of Artificial Sequence: Synthetic oligonucleotide
gaauccugggaacccggua

SEQ ID NO: 11863 - RNA, 19 nt, Artificial Sequence
  Description of Artificial Sequence: Synthetic oligonucleotide
uuccgacucucagcgacac

SEQ ID NO: 11864 - RNA, 19 nt, Artificial Sequence
  Description of Artificial Sequence: Synthetic oligonucleotide
aacccggggucuccaugga

SEQ ID NO: 11865 - RNA, 19 nt, Artificial Sequence
  Description of Artificial Sequence: Synthetic oligonucleotide
cacgcucgccugauaugcc

SEQ ID NO: 11866 - RNA, 19 nt, Artificial Sequence
  Description of Artificial Sequence: Synthetic oligonucleotide
gacuaccccuggccagccg

SEQ ID NO: 11867 - RNA, 19 nt, Artificial Sequence
  Description of Artificial Sequence: Synthetic oligonucleotide
guagcacuggcagccacca

SEQ ID NO: 11868 - RNA, 19 nt, Artificial Sequence
  Description of Artificial Sequence: Synthetic oligonucleotide
gcgaaguaguggcagguuc

SEQ ID NO: 11869 - RNA, 19 nt, Artificial Sequence
  Description of Artificial Sequence: Synthetic oligonucleotide
uccgacucucagcgacacc

SEQ ID NO: 11870 - RNA, 19 nt, Artificial Sequence
  Description of Artificial Sequence: Synthetic oligonucleotide
cgggaaauccaacuucacc

SEQ ID NO: 11871 - RNA, 19 nt, Artificial Sequence
  Description of Artificial Sequence: Synthetic oligonucleotide
uccccuccgauuuccuuua

SEQ ID NO: 11872 - RNA, 19 nt, Artificial Sequence
  Description of Artificial Sequence: Synthetic oligonucleotide
gccugauaugccgacauca

SEQ ID NO: 11873 - RNA, 19 nt, Artificial Sequence
  Description of Artificial Sequence: Synthetic oligonucleotide
cagaaacggcauagugcug

SEQ ID NO: 11874 - RNA, 19 nt, Artificial Sequence
  Description of Artificial Sequence: Synthetic oligonucleotide
ccggccuugagugugucgg

SEQ ID NO: 11875 - RNA, 19 nt, Artificial Sequence
  Description of Artificial Sequence: Synthetic oligonucleotide
acggaaaccuggaucucca

SEQ ID NO: 11876 - RNA, 19 nt, Artificial Sequence
  Description of Artificial Sequence: Synthetic oligonucleotide
ggacgguacguuguuguug

SEQ ID NO: 11877 - RNA, 19 nt, Artificial Sequence
  Description of Artificial Sequence: Synthetic oligonucleotide
agugggguauagagacauc

SEQ ID NO: 11878 - RNA, 19 nt, Artificial Sequence
  Description of Artificial Sequence: Synthetic oligonucleotide
ggacuaaggggacccuggc

SEQ ID NO: 11879 - RNA, 19 nt, Artificial Sequence
  Description of Artificial Sequence: Synthetic oligonucleotide
uccaauccacaagcuccgc

SEQ ID NO: 11880 - RNA, 19 nt, Artificial Sequence
  Description of Artificial Sequence: Synthetic oligonucleotide
ggcuacuccugguggcacg

SEQ ID NO: 11881 - RNA, 19 nt, Artificial Sequence
  Description of Artificial Sequence: Synthetic oligonucleotide
guuaucccgggaaauccaa

SEQ ID NO: 11882 - RNA, 19 nt, Artificial Sequence
  Description of Artificial Sequence: Synthetic oligonucleotide
uggacgguacguuguuguu

SEQ ID NO: 11883 - RNA, 19 nt, Artificial Sequence
  Description of Artificial Sequence: Synthetic oligonucleotide
cucgccuuucaaggagggg

SEQ ID NO: 11884 - RNA, 19 nt, Artificial Sequence
  Description of Artificial Sequence: Synthetic oligonucleotide
cguaaucucccuugucacc

SEQ ID NO: 11885 - RNA, 19 nt, Artificial Sequence
  Description of Artificial Sequence: Synthetic oligonucleotide
ugcggcccuguaguccugg

SEQ ID NO: 11886 - RNA, 19 nt, Artificial Sequence
  Description of Artificial Sequence: Synthetic oligonucleotide
uccaucugcgccggggaau

SEQ ID NO: 11887 - RNA, 19 nt, Artificial Sequence
  Description of Artificial Sequence: Synthetic oligonucleotide
ggagcgcagagccccugcg

SEQ ID NO: 11888 - RNA, 19 nt, Artificial Sequence
  Description of Artificial Sequence: Synthetic oligonucleotide
ccuuugacuccagggaacc

SEQ ID NO: 11889 - RNA, 19 nt, Artificial Sequence
  Description of Artificial Sequence: Synthetic oligonucleotide
ccugacuaccccuggccag

SEQ ID NO: 11890 - RNA, 19 nt, Artificial Sequence
  Description of Artificial Sequence: Synthetic oligonucleotide
cuggacgguacguuguugu

SEQ ID NO: 11891 - RNA, 19 nt, Artificial Sequence
  Description of Artificial Sequence: Synthetic oligonucleotide
cuggcguaguagcagacgu

SEQ ID NO: 11892 - RNA, 19 nt, Artificial Sequence
  Description of Artificial Sequence: Synthetic oligonucleotide
aucuggacgguacguuguu

SEQ ID NO: 11893 - RNA, 19 nt, Artificial Sequence
  Description of Artificial Sequence: Synthetic oligonucleotide
acccauggucccagguugg

SEQ ID NO: 11894 - RNA, 19 nt, Artificial Sequence
  Description of Artificial Sequence: Synthetic oligonucleotide
gaucuggacgguacguugu

SEQ ID NO: 11895 - RNA, 19 nt, Artificial Sequence
  Description of Artificial Sequence: Synthetic oligonucleotide
gcuaccgggcgacaccagc

SEQ ID NO: 11896 - RNA, 19 nt, Artificial Sequence
  Description of Artificial Sequence: Synthetic oligonucleotide
cuccguuacauucgaugaa

SEQ ID NO: 11897 - RNA, 19 nt, Artificial Sequence
  Description of Artificial Sequence: Synthetic oligonucleotide
ucugcaccgugggcgccgg

SEQ ID NO: 11898 - RNA, 19 nt, Artificial Sequence
  Description of Artificial Sequence: Synthetic oligonucleotide
agguagcagcuacggauuu

SEQ ID NO: 11899 - RNA, 19 nt, Artificial Sequence
  Description of Artificial Sequence: Synthetic oligonucleotide
ccacgcucgccugauaugc

SEQ ID NO: 11900 - RNA, 19 nt, Artificial Sequence
  Description of Artificial Sequence: Synthetic oligonucleotide
ccugcguuccgacucucag

SEQ ID NO: 11901 - RNA, 19 nt, Artificial Sequence
  Description of Artificial Sequence: Synthetic oligonucleotide
ugacuaccccuggccagcc

SEQ ID NO: 11902 - RNA, 19 nt, Artificial Sequence
  Description of Artificial Sequence: Synthetic oligonucleotide
gguagcacuggcagccacc

SEQ ID NO: 11903 - RNA, 19 nt, Artificial Sequence
  Description of Artificial Sequence: Synthetic oligonucleotide
gcugcucgcgcgcaugggc

SEQ ID NO: 11904 - RNA, 19 nt, Artificial Sequence
  Description of Artificial Sequence: Synthetic oligonucleotide
ugguggcacgauguccaug

SEQ ID NO: 11905 - RNA, 19 nt, Artificial Sequence
  Description of Artificial Sequence: Synthetic oligonucleotide
ggauccucgaggccccaug

SEQ ID NO: 11906 - RNA, 19 nt, Artificial Sequence
  Description of Artificial Sequence: Synthetic oligonucleotide
ugagggcuagcgagaccuc

SEQ ID NO: 11907 - RNA, 19 nt, Artificial Sequence
  Description of Artificial Sequence: Synthetic oligonucleotide
ggauccuuggguggaaaga

SEQ ID NO: 11908 - RNA, 19 nt, Artificial Sequence
  Description of Artificial Sequence: Synthetic oligonucleotide
ccggggaauccagagacgc

SEQ ID NO: 11909 - RNA, 19 nt, Artificial Sequence
  Description of Artificial Sequence: Synthetic oligonucleotide
uacauagguccaggccaga

SEQ ID NO: 11910 - RNA, 19 nt, Artificial Sequence
  Description of Artificial Sequence: Synthetic oligonucleotide
cguuccgacucucagcgac

SEQ ID NO: 11911 - RNA, 19 nt, Artificial Sequence
  Description of Artificial Sequence: Synthetic oligonucleotide
cauagguccaggccagacu

SEQ ID NO: 11912 - RNA, 19 nt, Artificial Sequence
  Description of Artificial Sequence: Synthetic oligonucleotide
guuggauaguggagagauc

SEQ ID NO: 11913 - RNA, 19 nt, Artificial Sequence
  Description of Artificial Sequence: Synthetic oligonucleotide
uacgcuccccucgucuccu

SEQ ID NO: 11914 - RNA, 19 nt, Artificial Sequence
  Description of Artificial Sequence: Synthetic oligonucleotide
uucuaaccucagggucccg

SEQ ID NO: 11915 - RNA, 19 nt, Artificial Sequence
  Description of Artificial Sequence: Synthetic oligonucleotide
cccuccgccaaggaaacag

SEQ ID NO: 11916 - RNA, 19 nt, Artificial Sequence
  Description of Artificial Sequence: Synthetic oligonucleotide
gcuuccgggaugaccacgc

SEQ ID NO: 11917 - RNA, 19 nt, Artificial Sequence
  Description of Artificial Sequence: Synthetic oligonucleotide
ggggccugguaucccuugg

SEQ ID NO: 11918 - RNA, 19 nt, Artificial Sequence
  Description of Artificial Sequence: Synthetic oligonucleotide
cagguacuccuuggagacc

SEQ ID NO: 11919 - RNA, 19 nt, Artificial Sequence
  Description of Artificial Sequence: Synthetic oligonucleotide
ccuuuggggccucugucac

SEQ ID NO: 11920 - RNA, 19 nt, Artificial Sequence
  Description of Artificial Sequence: Synthetic oligonucleotide
ccucgccuuucaaggaggg

SEQ ID NO: 11921 - RNA, 19 nt, Artificial Sequence
  Description of Artificial Sequence: Synthetic oligonucleotide
cccaagauuccccuugaga

SEQ ID NO: 11922 - RNA, 19 nt, Artificial Sequence
  Description of Artificial Sequence: Synthetic oligonucleotide
aguguaccuuccagcagau

SEQ ID NO: 11923 - RNA, 19 nt, Artificial Sequence
  Description of Artificial Sequence: Synthetic oligonucleotide
gggaacccgguaauuccag

SEQ ID NO: 11924 - RNA, 19 nt, Artificial Sequence
  Description of Artificial Sequence: Synthetic oligonucleotide
ccgacucucagcgacacca

SEQ ID NO: 11925 - RNA, 19 nt, Artificial Sequence
  Description of Artificial Sequence: Synthetic oligonucleotide
ccuagauagagugcauuga

SEQ ID NO: 11926 - RNA, 19 nt, Artificial Sequence
  Description of Artificial Sequence: Synthetic oligonucleotide
ggcuagcgagaccucuccc

SEQ ID NO: 11927 - RNA, 19 nt, Artificial Sequence
  Description of Artificial Sequence: Synthetic oligonucleotide
gccccuacaucaccaggug

SEQ ID NO: 11928 - RNA, 19 nt, Artificial Sequence
  Description of Artificial Sequence: Synthetic oligonucleotide
agacgucacccggauugca

SEQ ID NO: 11929 - RNA, 19 nt, Artificial Sequence
  Description of Artificial Sequence: Synthetic oligonucleotide
cgguacguuguuguugugg

SEQ ID NO: 11930 - RNA, 19 nt, Artificial Sequence
  Description of Artificial Sequence: Synthetic oligonucleotide
cgccggggaauccagagac

SEQ ID NO: 11931 - RNA, 19 nt, Artificial Sequence
  Description of Artificial Sequence: Synthetic oligonucleotide
acgguacguuguuguugug

SEQ ID NO: 11932 - RNA, 19 nt, Artificial Sequence
  Description of Artificial Sequence: Synthetic oligonucleotide
gagguagcagcuacggauu

SEQ ID NO: 11933 - RNA, 19 nt, Artificial Sequence
  Description of Artificial Sequence: Synthetic oligonucleotide
augaccacgcucgccugau

SEQ ID NO: 11934 - RNA, 19 nt, Artificial Sequence
  Description of Artificial Sequence: Synthetic oligonucleotide
ccgggugcucccaugggac

SEQ ID NO: 11935 - RNA, 19 nt, Artificial Sequence
  Description of Artificial Sequence: Synthetic oligonucleotide
ugggugcggagcgcagagc

SEQ ID NO: 11936 - RNA, 19 nt, Artificial Sequence
  Description of Artificial Sequence: Synthetic oligonucleotide
agguuccacggccuccguu

SEQ ID NO: 11937 - RNA, 19 nt, Artificial Sequence
  Description of Artificial Sequence: Synthetic oligonucleotide
ggcccgguucuccugagaa

SEQ ID NO: 11938 - RNA, 19 nt, Artificial Sequence
  Description of Artificial Sequence: Synthetic oligonucleotide
gaagugcguuuggcccagg

SEQ ID NO: 11939 - RNA, 19 nt, Artificial Sequence
  Description of Artificial Sequence: Synthetic oligonucleotide
uuguuguugugggcccaau

SEQ ID NO: 11940 - RNA, 19 nt, Artificial Sequence
  Description of Artificial Sequence: Synthetic oligonucleotide
ggcgccccuacaucaccag

SEQ ID NO: 11941 - RNA, 19 nt, Artificial Sequence
  Description of Artificial Sequence: Synthetic oligonucleotide
ccaggugacccucgaucgc

SEQ ID NO: 11942 - RNA, 19 nt, Artificial Sequence
  Description of Artificial Sequence: Synthetic oligonucleotide
gcaguacguaagguucacc

SEQ ID NO: 11943 - RNA, 19 nt, Artificial Sequence
  Description of Artificial Sequence: Synthetic oligonucleotide
gguguugcacggaaguccu

SEQ ID NO: 11944 - RNA, 19 nt, Artificial Sequence
  Description of Artificial Sequence: Synthetic oligonucleotide
gcucagggauuguggucag

SEQ ID NO: 11945 - RNA, 19 nt, Artificial Sequence
  Description of Artificial Sequence: Synthetic oligonucleotide
ccuacgcuccccucgucuc

SEQ ID NO: 11946 - RNA, 19 nt, Artificial Sequence
  Description of Artificial Sequence: Synthetic oligonucleotide
cagcuaccgggcgacacca

SEQ ID NO: 11947 - RNA, 19 nt, Artificial Sequence
  Description of Artificial Sequence: Synthetic oligonucleotide
cuccccucgucuccuuuga

SEQ ID NO: 11948 - RNA, 19 nt, Artificial Sequence
  Description of Artificial Sequence: Synthetic oligonucleotide
ccggauugcaguacagaaa

SEQ ID NO: 11949 - RNA, 19 nt, Artificial Sequence
  Description of Artificial Sequence: Synthetic oligonucleotide
ugaccacgcucgccugaua

SEQ ID NO: 11950 - RNA, 19 nt, Artificial Sequence
  Description of Artificial Sequence: Synthetic oligonucleotide
gggagguagcagcuacgga

SEQ ID NO: 11951 - RNA, 19 nt, Artificial Sequence
  Description of Artificial Sequence: Synthetic oligonucleotide
caacuacaccgggcuggcc

SEQ ID NO: 11952 - RNA, 19 nt, Artificial Sequence
  Description of Artificial Sequence: Synthetic oligonucleotide
augucggaugggaucccau

SEQ ID NO: 11953 - RNA, 19 nt, Artificial Sequence
  Description of Artificial Sequence: Synthetic oligonucleotide
cccgguaauuccaggagua

SEQ ID NO: 11954 - RNA, 19 nt, Artificial Sequence
  Description of Artificial Sequence: Synthetic oligonucleotide
ggcaggccguguaauccgc

SEQ ID NO: 11955 - RNA, 19 nt, Artificial Sequence
  Description of Artificial Sequence: Synthetic oligonucleotide
ccuucguccccagcugcgg

SEQ ID NO: 11956 - RNA, 19 nt, Artificial Sequence
  Description of Artificial Sequence: Synthetic oligonucleotide
gcucgccugauaugccgac

SEQ ID NO: 11957 - RNA, 19 nt, Artificial Sequence
  Description of Artificial Sequence: Synthetic oligonucleotide
uaccccuggccagccguaa

SEQ ID NO: 11958 - RNA, 19 nt, Artificial Sequence
  Description of Artificial Sequence: Synthetic oligonucleotide
ucauugcggcuggcguagu

SEQ ID NO: 11959 - RNA, 19 nt, Artificial Sequence
  Description of Artificial Sequence: Synthetic oligonucleotide
cagauggcgugcccuggaa

SEQ ID NO: 11960 - RNA, 19 nt, Artificial Sequence
  Description of Artificial Sequence: Synthetic oligonucleotide
agcgacuggccgccgccuu

SEQ ID NO: 11961 - RNA, 19 nt, Artificial Sequence
  Description of Artificial Sequence: Synthetic oligonucleotide
gccggggaauccagagacg

SEQ ID NO: 11962 - RNA, 19 nt, Artificial Sequence
  Description of Artificial Sequence: Synthetic oligonucleotide
ggccucgguagccuucaga

SEQ ID NO: 11963 - RNA, 19 nt, Artificial Sequence
  Description of Artificial Sequence: Synthetic oligonucleotide
cucgccugauaugccgaca

SEQ ID NO: 11964 - RNA, 19 nt, Artificial Sequence
  Description of Artificial Sequence: Synthetic oligonucleotide
cuguccuacgucacccuuu

SEQ ID NO: 11965 - RNA, 19 nt, Artificial Sequence
  Description of Artificial Sequence: Synthetic oligonucleotide
aggccuagauagagugcau

SEQ ID NO: 11966 - RNA, 19 nt, Artificial Sequence
  Description of Artificial Sequence: Synthetic oligonucleotide
agcuaccgggcgacaccag

SEQ ID NO: 11967 - RNA, 19 nt, Artificial Sequence
  Description of Artificial Sequence: Synthetic oligonucleotide
agacagcuaccgggcgaca

SEQ ID NO: 11968 - RNA, 19 nt, Artificial Sequence
  Description of Artificial Sequence: Synthetic oligonucleotide
ccuggccagccguaaucuc

SEQ ID NO: 11969 - RNA, 19 nt, Artificial Sequence
  Description of Artificial Sequence: Synthetic oligonucleotide
gguaucccuuggucuccuc

SEQ ID NO: 11970 - RNA, 19 nt, Artificial Sequence
  Description of Artificial Sequence: Synthetic oligonucleotide
gcgacaccagcgacuggcc

SEQ ID NO: 11971 - RNA, 19 nt, Artificial Sequence
  Description of Artificial Sequence: Synthetic oligonucleotide
gccccugguagccgaucug

SEQ ID NO: 11972 - RNA, 19 nt, Artificial Sequence
  Description of Artificial Sequence: Synthetic oligonucleotide
gcuacggauuugguagaaa

SEQ ID NO: 11973 - RNA, 19 nt, Artificial Sequence
  Description of Artificial Sequence: Synthetic oligonucleotide
cuaccccuggccagccgua

SEQ ID NO: 11974 - RNA, 19 nt, Artificial Sequence
  Description of Artificial Sequence: Synthetic oligonucleotide
ggcuaauaugugugcggau

SEQ ID NO: 11975 - RNA, 19 nt, Artificial Sequence
  Description of Artificial Sequence: Synthetic oligonucleotide
cgacaucaccucugucccc

SEQ ID NO: 11976 - RNA, 19 nt, Artificial Sequence
  Description of Artificial Sequence: Synthetic oligonucleotide
ggcuggcguaguagcagac

SEQ ID NO: 11977 - RNA, 19 nt, Artificial Sequence
  Description of Artificial Sequence: Synthetic oligonucleotide
gagccccugcguuccgacu

SEQ ID NO: 11978 - RNA, 19 nt, Artificial Sequence
  Description of Artificial Sequence: Synthetic oligonucleotide
gcguaguagcagacgucac

SEQ ID NO: 11979 - RNA, 19 nt, Artificial Sequence
  Description of Artificial Sequence: Synthetic oligonucleotide
gcgcagagccccugcguuc

SEQ ID NO: 11980 - RNA, 19 nt, Artificial Sequence
  Description of Artificial Sequence: Synthetic oligonucleotide
guguugcacggaaguccuc

SEQ ID NO: 11981 - RNA, 19 nt, Artificial Sequence
  Description of Artificial Sequence: Synthetic oligonucleotide
cagccguaaucucccuugu

SEQ ID NO: 11982 - RNA, 19 nt, Artificial Sequence
  Description of Artificial Sequence: Synthetic oligonucleotide
cugcgccggggaauccaga

SEQ ID NO: 11983 - RNA, 19 nt, Artificial Sequence
  Description of Artificial Sequence: Synthetic oligonucleotide
gugacccucgaucgccuuu

SEQ ID NO: 11984 - RNA, 19 nt, Artificial Sequence
  Description of Artificial Sequence: Synthetic oligonucleotide
gcugggcagugggguauag

SEQ ID NO: 11985 - RNA, 19 nt, Artificial Sequence
  Description of Artificial Sequence: Synthetic oligonucleotide
ccccggauuccuggaaaac

SEQ ID NO: 11986 - RNA, 19 nt, Artificial Sequence
  Description of Artificial Sequence: Synthetic oligonucleotide
ggccguguaauccgcugau

SEQ ID NO: 11987 - RNA, 19 nt, Artificial Sequence
  Description of Artificial Sequence: Synthetic oligonucleotide
cggcuaauaugugugcgga

SEQ ID NO: 11988 - RNA, 19 nt, Artificial Sequence
  Description of Artificial Sequence: Synthetic oligonucleotide
gcgccggggaauccagaga

SEQ ID NO: 11989 - RNA, 19 nt, Artificial Sequence
  Description of Artificial Sequence: Synthetic oligonucleotide
ggacccuggcgcgggagga

SEQ ID NO: 11990 - RNA, 19 nt, Artificial Sequence
  Description of Artificial Sequence: Synthetic oligonucleotide
gccguguaauccgcugauc

SEQ ID NO: 11991 - RNA, 19 nt, Artificial Sequence
  Description of Artificial Sequence: Synthetic oligonucleotide
gcgacuggccgccgccuuc

SEQ ID NO: 11992 - RNA, 19 nt, Artificial Sequence
  Description of Artificial Sequence: Synthetic oligonucleotide
ccgggaugaccccguguuc

SEQ ID NO: 11993 - RNA, 19 nt, Artificial Sequence
  Description of Artificial Sequence: Synthetic oligonucleotide
cgcaguacguaagguucac

SEQ ID NO: 11994 - RNA, 19 nt, Artificial Sequence
  Description of Artificial Sequence: Synthetic oligonucleotide
ggccacgcuccccuggggu

SEQ ID NO: 11995 - RNA, 19 nt, Artificial Sequence
  Description of Artificial Sequence: Synthetic oligonucleotide
cuuccgggaugaccacgcu

SEQ ID NO: 11996 - RNA, 19 nt, Artificial Sequence
  Description of Artificial Sequence: Synthetic oligonucleotide
gggccugguaucccuuggu

SEQ ID NO: 11997 - RNA, 19 nt, Artificial Sequence
  Description of Artificial Sequence: Synthetic oligonucleotide
cugcaccgugggcgccggc

SEQ ID NO: 11998 - RNA, 19 nt, Artificial Sequence
  Description of Artificial Sequence: Synthetic oligonucleotide
gcuguccuacgucacccuu

SEQ ID NO: 11999 - RNA, 19 nt, Artificial Sequence
  Description of Artificial Sequence: Synthetic oligonucleotide
ucgcgcgcaugggccccug

SEQ ID NO: 12000 - RNA, 19 nt, Artificial Sequence
  Description of Artificial Sequence: Synthetic oligonucleotide
gggccucgguagccuucag

SEQ ID NO: 12001 - RNA, 19 nt, Artificial Sequence
  Description of Artificial Sequence: Synthetic oligonucleotide
gcgcgcaugggccccugaa

SEQ ID NO: 12002 - RNA, 19 nt, Artificial Sequence
  Description of Artificial Sequence: Synthetic oligonucleotide
gguagccgaugcugacgcu

SEQ ID NO: 12003 - RNA, 19 nt, Artificial Sequence
  Description of Artificial Sequence: Synthetic oligonucleotide
gccuguuaucccgggaaau

SEQ ID NO: 12004 - RNA, 19 nt, Artificial Sequence
  Description of Artificial Sequence: Synthetic oligonucleotide
cccgcgucaggagcugcug

SEQ ID NO: 12005 - RNA, 19 nt, Artificial Sequence
  Description of Artificial Sequence: Synthetic oligonucleotide
cgccccuacaucaccaggu

SEQ ID NO: 12006 - RNA, 19 nt, Artificial Sequence
  Description of Artificial Sequence: Synthetic oligonucleotide
cgcucgccugauaugccga

SEQ ID NO: 12007 - RNA, 19 nt, Artificial Sequence
  Description of Artificial Sequence: Synthetic oligonucleotide
gcguuuggcccaggugguc

SEQ ID NO: 12008 - RNA, 19 nt, Artificial Sequence
  Description of Artificial Sequence: Synthetic oligonucleotide
cgccugauaugccgacauc

SEQ ID NO: 12009 - RNA, 19 nt, Artificial Sequence
  Description of Artificial Sequence: Synthetic oligonucleotide
gcgucccggcaucccuggc

SEQ ID NO: 12010 - RNA, 19 nt, Artificial Sequence
  Description of Artificial Sequence: Synthetic oligonucleotide
gguggacggccuauagguu

SEQ ID NO: 12011 - RNA, 19 nt, Artificial Sequence
  Description of Artificial Sequence: Synthetic oligonucleotide
ccgggcgacaccagcgacu

SEQ ID NO: 12012 - RNA, 19 nt, Artificial Sequence
  Description of Artificial Sequence: Synthetic oligonucleotide
cgucacccggauugcagua

SEQ ID NO: 12013 - RNA, 19 nt, Artificial Sequence
  Description of Artificial Sequence: Synthetic oligonucleotide
ccccugguagccgaucugu

SEQ ID NO: 12014 - RNA, 19 nt, Artificial Sequence
  Description of Artificial Sequence: Synthetic oligonucleotide
gccuuucaaggaggggccu

SEQ ID NO: 12015 - RNA, 19 nt, Artificial Sequence
  Description of Artificial Sequence: Synthetic oligonucleotide
gccagccguaaucucccuu

SEQ ID NO: 12016 - RNA, 19 nt, Artificial Sequence
  Description of Artificial Sequence: Synthetic oligonucleotide
gcaggccguguaauccgcu

SEQ ID NO: 12017 - RNA, 19 nt, Artificial Sequence
  Description of Artificial Sequence: Synthetic oligonucleotide
ccgaucuguccaggcucuc

SEQ ID NO: 12018 - RNA, 19 nt, Artificial Sequence
  Description of Artificial Sequence: Synthetic oligonucleotide
ggccagccguaaucucccu

SEQ ID NO: 12019 - RNA, 19 nt, Artificial Sequence
  Description of Artificial Sequence: Synthetic oligonucleotide
cggccuccguuacauucga

SEQ ID NO: 12020 - RNA, 19 nt, Artificial Sequence
  Description of Artificial Sequence: Synthetic oligonucleotide
gcgagaccucucccucccu

SEQ ID NO: 12021 - RNA, 19 nt, Artificial Sequence
  Description of Artificial Sequence: Synthetic oligonucleotide
cucccuccgcagggcacau

SEQ ID NO: 12022 - RNA, 19 nt, Artificial Sequence
  Description of Artificial Sequence: Synthetic oligonucleotide
ccccuccgauuuccuuuaa

SEQ ID NO: 12023 - RNA, 19 nt, Artificial Sequence
  Description of Artificial Sequence: Synthetic oligonucleotide
ccccuccgccaaggaaaca

SEQ ID NO: 12024 - RNA, 19 nt, Artificial Sequence
  Description of Artificial Sequence: Synthetic oligonucleotide
cgcgcgcaugggccccuga

SEQ ID NO: 12025 - RNA, 19 nt, Artificial Sequence
  Description of Artificial Sequence: Synthetic oligonucleotide
auuaagguugaauauaugc

SEQ ID NO: 12026 - RNA, 19 nt, Artificial Sequence
  Description of Artificial Sequence: Synthetic oligonucleotide
aauaauauugcacauauuu

SEQ ID NO: 12027 - RNA, 19 nt, Artificial Sequence
  Description of Artificial Sequence: Synthetic oligonucleotide
ucuaauucuaccuauuacg

SEQ ID NO: 12028 - RNA, 19 nt, Artificial Sequence
  Description of Artificial Sequence: Synthetic oligonucleotide
auuuauagaaucuaggucu

SEQ ID NO: 12029 - RNA, 19 nt, Artificial Sequence
  Description of Artificial Sequence: Synthetic oligonucleotide
uauuauauaagauuuccag

SEQ ID NO: 12030 - RNA, 19 nt, Artificial Sequence
  Description of Artificial Sequence: Synthetic oligonucleotide
gguuauaacaccuaaaacc

SEQ ID NO: 12031 - RNA, 19 nt, Artificial Sequence
  Description of Artificial Sequence: Synthetic oligonucleotide
aagcuuacuguguagugcc

SEQ ID NO: 12032 - RNA, 19 nt, Artificial Sequence
  Description of Artificial Sequence: Synthetic oligonucleotide
uuuagauauguuaugaguc

SEQ ID NO: 12033 - RNA, 19 nt, Artificial Sequence
  Description of Artificial Sequence: Synthetic oligonucleotide
uguuuugaauaacuuauag

SEQ ID NO: 12034 - RNA, 19 nt, Artificial Sequence
  Description of Artificial Sequence: Synthetic oligonucleotide
uuaagguugaauauaugca

SEQ ID NO: 12035 - RNA, 19 nt, Artificial Sequence
  Description of Artificial Sequence: Synthetic oligonucleotide
cuaucuacaguuaauuuag

SEQ ID NO: 12036 - RNA, 19 nt, Artificial Sequence
  Description of Artificial Sequence: Synthetic oligonucleotide
ucuagauagugacugaggc

SEQ ID NO: 12037 - RNA, 19 nt, Artificial Sequence
  Description of Artificial Sequence: Synthetic oligonucleotide
uguauaguacggaugaaug

SEQ ID NO: 12038 - RNA, 19 nt, Artificial Sequence
  Description of Artificial Sequence: Synthetic oligonucleotide
auaaggaaguuacuugggc

SEQ ID NO: 12039 - RNA, 19 nt, Artificial Sequence
  Description of Artificial Sequence: Synthetic oligonucleotide
acaugauuggcuccuaagc

SEQ ID NO: 12040 - RNA, 19 nt, Artificial Sequence
  Description of Artificial Sequence: Synthetic oligonucleotide
uauaggauaaucaaagcuu

SEQ ID NO: 12041 - RNA, 19 nt, Artificial Sequence
  Description of Artificial Sequence: Synthetic oligonucleotide
guuauaacaccuaaaaccc

SEQ ID NO: 12042 - RNA, 19 nt, Artificial Sequence
  Description of Artificial Sequence: Synthetic oligonucleotide
uuuuagauauguuaugagu

SEQ ID NO: 12043 - RNA, 19 nt, Artificial Sequence
  Description of Artificial Sequence: Synthetic oligonucleotide
agaucaaaauuugugagac

SEQ ID NO: 12044 - RNA, 19 nt, Artificial Sequence
  Description of Artificial Sequence: Synthetic oligonucleotide
aacggguguguacagauuc

SEQ ID NO: 12045 - RNA, 19 nt, Artificial Sequence
  Description of Artificial Sequence: Synthetic oligonucleotide
acuagcacgagugagugcc

SEQ ID NO: 12046 - RNA, 19 nt, Artificial Sequence
  Description of Artificial Sequence: Synthetic oligonucleotide
  modified_base (19)..(19): a, c, u, g, unknown or other
uuaucauuugcacugacun

SEQ ID NO: 12047 - RNA, 19 nt, Artificial Sequence
  Description of Artificial Sequence: Synthetic oligonucleotide
agauauaugcugguaaccc

SEQ ID NO: 12048 - RNA, 19 nt, Artificial Sequence
  Description of Artificial Sequence: Synthetic oligonucleotide
aagauauaugcugguaacc

SEQ ID NO: 12049 - RNA, 19 nt, Artificial Sequence
  Description of Artificial Sequence: Synthetic oligonucleotide
uuauaggacaaguaagggc

SEQ ID NO: 12050 - RNA, 19 nt, Artificial Sequence
  Description of Artificial Sequence: Synthetic oligonucleotide
aauagcuaggagaauacag

SEQ ID NO: 12051 - RNA, 19 nt, Artificial Sequence
  Description of Artificial Sequence: Synthetic oligonucleotide
uugaauaacuuauaggaua

SEQ ID NO: 12052 - RNA, 19 nt, Artificial Sequence
  Description of Artificial Sequence: Synthetic oligonucleotide
auauugacuggccggaugg

SEQ ID NO: 12053 - RNA, 19 nt, Artificial Sequence
  Description of Artificial Sequence: Synthetic oligonucleotide
uagaaucuaggucuuacug

SEQ ID NO: 12054 - RNA, 19 nt, Artificial Sequence
  Description of Artificial Sequence: Synthetic oligonucleotide
uauaugcaugacaagaauc

SEQ ID NO: 12055 - RNA, 19 nt, Artificial Sequence
  Description of Artificial Sequence: Synthetic oligonucleotide
agguuauaacaccuaaaac

SEQ ID NO: 12056 - RNA, 19 nt, Artificial Sequence
  Description of Artificial Sequence: Synthetic oligonucleotide
uaugauggauuaaaacuca

SEQ ID NO: 12057 - RNA, 19 nt, Artificial Sequence
  Description of Artificial Sequence: Synthetic oligonucleotide
uuuagcauccaugagcagc

SEQ ID NO: 12058 - RNA, 19 nt, Artificial Sequence
  Description of Artificial Sequence: Synthetic oligonucleotide
uaugagucuaauucuaccu

SEQ ID NO: 12059 - RNA, 19 nt, Artificial Sequence
  Description of Artificial Sequence: Synthetic oligonucleotide
accggcauguguuagagag

SEQ ID NO: 12060 - RNA, 19 nt, Artificial Sequence
  Description of Artificial Sequence: Synthetic oligonucleotide
uuagauauguuaugagucu

SEQ ID NO: 12061 - RNA, 19 nt, Artificial Sequence
  Description of Artificial Sequence: Synthetic oligonucleotide
aagaacauaauuagggacu

SEQ ID NO: 12062 - RNA, 19 nt, Artificial Sequence
  Description of Artificial Sequence: Synthetic oligonucleotide
uaacuuauaggauaaucaa

SEQ ID NO: 12063 - RNA, 19 nt, Artificial Sequence
  Description of Artificial Sequence: Synthetic oligonucleotide
cauuagguaauauccagug

SEQ ID NO: 12064 - RNA, 19 nt, Artificial Sequence
  Description of Artificial Sequence: Synthetic oligonucleotide
aaauaagauauaugcuggu

SEQ ID NO: 12065 - RNA, 19 nt, Artificial Sequence
  Description of Artificial Sequence: Synthetic oligonucleotide
ugauuaagguugaauauau

SEQ ID NO: 12066 - RNA, 19 nt, Artificial Sequence
  Description of Artificial Sequence: Synthetic oligonucleotide
uuaugagucuaauucuacc

SEQ ID NO: 12067 - RNA, 19 nt, Artificial Sequence
  Description of Artificial Sequence: Synthetic oligonucleotide
uucuagauagugacugagg

SEQ ID NO: 12068 - RNA, 19 nt, Artificial Sequence
  Description of Artificial Sequence: Synthetic oligonucleotide
aaacugaucugguugaauu

SEQ ID NO: 12069 - RNA, 19 nt, Artificial Sequence
  Description of Artificial Sequence: Synthetic oligonucleotide
augacagauacacacuaag

SEQ ID NO: 12070 - RNA, 19 nt, Artificial Sequence
  Description of Artificial Sequence: Synthetic oligonucleotide
ucauugucccgaauuauca

SEQ ID NO: 12071 - RNA, 19 nt, Artificial Sequence
  Description of Artificial Sequence: Synthetic oligonucleotide
uaagcugauaugauauaug

SEQ ID NO: 12072 - RNA, 19 nt, Artificial Sequence
  Description of Artificial Sequence: Synthetic oligonucleotide
guacggaugaaugaaacag

SEQ ID NO: 12073 - RNA, 19 nt, Artificial Sequence
  Description of Artificial Sequence: Synthetic oligonucleotide
accgcaucuguauaguacg

SEQ ID NO: 12074 - RNA, 19 nt, Artificial Sequence
  Description of Artificial Sequence: Synthetic oligonucleotide
ucuuacaguguaacuauac

SEQ ID NO: 12075 - RNA, 19 nt, Artificial Sequence
  Description of Artificial Sequence: Synthetic oligonucleotide
auaggauaaucaaagcuuc

SEQ ID NO: 12076 - RNA, 19 nt, Artificial Sequence
  Description of Artificial Sequence: Synthetic oligonucleotide
aagcauuaaauuauauaug

SEQ ID NO: 12077 - RNA, 19 nt, Artificial Sequence
  Description of Artificial Sequence: Synthetic oligonucleotide
uauaguacggaugaaugaa

SEQ ID NO: 12078 - RNA, 19 nt, Artificial Sequence
  Description of Artificial Sequence: Synthetic oligonucleotide
uuaggcuaagauuuuguaa

SEQ ID NO: 12079 - RNA, 19 nt, Artificial Sequence
  Description of Artificial Sequence: Synthetic oligonucleotide
acacuagacagcuacaaau

SEQ ID NO: 12080 - RNA, 19 nt, Artificial Sequence
  Description of Artificial Sequence: Synthetic oligonucleotide
ucccgaauuaucauuugca

SEQ ID NO: 12081 - RNA, 19 nt, Artificial Sequence
  Description of Artificial Sequence: Synthetic oligonucleotide
agaugaagaguacccuuac

SEQ ID NO: 12082 - RNA, 19 nt, Artificial Sequence
  Description of Artificial Sequence: Synthetic oligonucleotide
ugggaacuaaaauaaguaa

SEQ ID NO: 12083 - RNA, 19 nt, Artificial Sequence
  Description of Artificial Sequence: Synthetic oligonucleotide
ggauaauugcauauaaucc

SEQ ID NO: 12084 - RNA, 19 nt, Artificial Sequence
  Description of Artificial Sequence: Synthetic oligonucleotide
uuaacuagcuagaccaaau

SEQ ID NO: 12085 - RNA, 19 nt, Artificial Sequence
  Description of Artificial Sequence: Synthetic oligonucleotide
guuaauuuaggugcuauga

SEQ ID NO: 12086 - RNA, 19 nt, Artificial Sequence
  Description of Artificial Sequence: Synthetic oligonucleotide
uuaugccuccugaagaacu

SEQ ID NO: 12087 - RNA, 19 nt, Artificial Sequence
  Description of Artificial Sequence: Synthetic oligonucleotide
aaccgcaucuguauaguac

SEQ ID NO: 12088 - RNA, 19 nt, Artificial Sequence
  Description of Artificial Sequence: Synthetic oligonucleotide
gacgcugugaggaagugag

SEQ ID NO: 12089 - RNA, 19 nt, Artificial Sequence
  Description of Artificial Sequence: Synthetic oligonucleotide
ugauuggcuccuaagcuga

SEQ ID NO: 12090 - RNA, 19 nt, Artificial Sequence
  Description of Artificial Sequence: Synthetic oligonucleotide
ucauuaacggguguguaca

SEQ ID NO: 12091 - RNA, 19 nt, Artificial Sequence
  Description of Artificial Sequence: Synthetic oligonucleotide
auaugcaugacaagaauca

SEQ ID NO: 12092 - RNA, 19 nt, Artificial Sequence
  Description of Artificial Sequence: Synthetic oligonucleotide
ugauauauguucaguggau

SEQ ID NO: 12093 - RNA, 19 nt, Artificial Sequence
  Description of Artificial Sequence: Synthetic oligonucleotide
agaguacccuuacuagccc

SEQ ID NO: 12094 - RNA, 19 nt, Artificial Sequence
  Description of Artificial Sequence: Synthetic oligonucleotide
  modified_base (5)..(5): a, c, u, g, unknown or other
gacunugggagcucucucc

SEQ ID NO: 12095 - RNA, 19 nt, Artificial Sequence
  Description of Artificial Sequence: Synthetic oligonucleotide
auucaauaccuugacgauc

SEQ ID NO: 12096 - RNA, 19 nt, Artificial Sequence
  Description of Artificial Sequence: Synthetic oligonucleotide
ccgauauucagcaagauca

SEQ ID NO: 12097 - RNA, 19 nt, Artificial Sequence
  Description of Artificial Sequence: Synthetic oligonucleotide
acaauagcuaggagaauac

SEQ ID NO: 12098 - RNA, 19 nt, Artificial Sequence
  Description of Artificial Sequence: Synthetic oligonucleotide
agguugaauauaugcauga

SEQ ID NO: 12099 - RNA, 19 nt, Artificial Sequence
  Description of Artificial Sequence: Synthetic oligonucleotide
uguuaaaugccaugagcuc

SEQ ID NO: 12100 - RNA, 19 nt, Artificial Sequence
  Description of Artificial Sequence: Synthetic oligonucleotide
uuaggugcuaugauggauu

SEQ ID NO: 12101 - RNA, 19 nt, Artificial Sequence
  Description of Artificial Sequence: Synthetic oligonucleotide
ugcuuacugucacaaggag

SEQ ID NO: 12102 - RNA, 19 nt, Artificial Sequence
  Description of Artificial Sequence: Synthetic oligonucleotide
ucuaccuauuacgucaaca

SEQ ID NO: 12103 - RNA, 19 nt, Artificial Sequence
  Description of Artificial Sequence: Synthetic oligonucleotide
uccacuauauugcuucaaa

SEQ ID NO: 12104 - RNA, 19 nt, Artificial Sequence
  Description of Artificial Sequence: Synthetic oligonucleotide
gaaucagauugacagccac

SEQ ID NO: 12105 - RNA, 19 nt, Artificial Sequence
  Description of Artificial Sequence: Synthetic oligonucleotide
cuuccugucucguaaccgc

SEQ ID NO: 12106 - RNA, 19 nt, Artificial Sequence
  Description of Artificial Sequence: Synthetic oligonucleotide
cucauaccauuaaagauga

SEQ ID NO: 12107 - RNA, 19 nt, Artificial Sequence
  Description of Artificial Sequence: Synthetic oligonucleotide
ggauaaucaaagcuucaag

SEQ ID NO: 12108 - RNA, 19 nt, Artificial Sequence
  Description of Artificial Sequence: Synthetic oligonucleotide
aguacggaugaaugaaaca

SEQ ID NO: 12109 - RNA, 19 nt, Artificial Sequence
  Description of Artificial Sequence: Synthetic oligonucleotide
auaucccucacugaggaca

SEQ ID NO: 12110 - RNA, 19 nt, Artificial Sequence
  Description of Artificial Sequence: Synthetic oligonucleotide
cauuaaagaugaagaguac

SEQ ID NO: 12111 - RNA, 19 nt, Artificial Sequence
  Description of Artificial Sequence: Synthetic oligonucleotide
uagcuagaccaaauuauaa

SEQ ID NO: 12112 - RNA, 19 nt, Artificial Sequence
  Description of Artificial Sequence: Synthetic oligonucleotide
auauauguucaguggauuu

SEQ ID NO: 12113 - RNA, 19 nt, Artificial Sequence
  Description of Artificial Sequence: Synthetic oligonucleotide
caaaggcaagccuagucac

SEQ ID NO: 12114 - RNA, 19 nt, Artificial Sequence
  Description of Artificial Sequence: Synthetic oligonucleotide
aaagggauuggugguagga

SEQ ID NO: 12115 - RNA, 19 nt, Artificial Sequence
  Description of Artificial Sequence: Synthetic oligonucleotide
cucauuaacggguguguac

SEQ ID NO: 12116 - RNA, 19 nt, Artificial Sequence
  Description of Artificial Sequence: Synthetic oligonucleotide
auaucauugucccgaauua

SEQ ID NO: 12117 - RNA, 19 nt, Artificial Sequence
  Description of Artificial Sequence: Synthetic oligonucleotide
aaggguuagugaaaggcga

SEQ ID NO: 12118 - RNA, 19 nt, Artificial Sequence
  Description of Artificial Sequence: Synthetic oligonucleotide
gacccgugcaaugaaaccc

SEQ ID NO: 12119 - RNA, 19 nt, Artificial Sequence
  Description of Artificial Sequence: Synthetic oligonucleotide
cuuuccggggaauauugac

SEQ ID NO: 12120 - RNA, 19 nt, Artificial Sequence
  Description of Artificial Sequence: Synthetic oligonucleotide
guauaguacggaugaauga

SEQ ID NO: 12121 - RNA, 19 nt, Artificial Sequence
  Description of Artificial Sequence: Synthetic oligonucleotide
ugucgcacacacauaaaua

SEQ ID NO: 12122 - RNA, 19 nt, Artificial Sequence
  Description of Artificial Sequence: Synthetic oligonucleotide
acuagcuagaccaaauuau

SEQ ID NO: 12123 - RNA, 19 nt, Artificial Sequence
  Description of Artificial Sequence: Synthetic oligonucleotide
  modified_base (4)..(4): a, c, u, g, unknown or other
acunugggagcucucuccu

SEQ ID NO: 12124 - RNA, 19 nt, Artificial Sequence
  Description of Artificial Sequence: Synthetic oligonucleotide
acggaugaaugaaacagag

SEQ ID NO: 12125 - RNA, 19 nt, Artificial Sequence
  Description of Artificial Sequence: Synthetic oligonucleotide
uuaguaucacuguaccaua

SEQ ID NO: 12126 - RNA, 19 nt, Artificial Sequence
  Description of Artificial Sequence: Synthetic oligonucleotide
uacacccugaauuguuuca

SEQ ID NO: 12127 - RNA, 19 nt, Artificial Sequence
  Description of Artificial Sequence: Synthetic oligonucleotide
aaggcgagaccccaugaau

SEQ ID NO: 12128 - RNA, 19 nt, Artificial Sequence
  Description of Artificial Sequence: Synthetic oligonucleotide
ugaccauaucauugucccg

SEQ ID NO: 12129 - RNA, 19 nt, Artificial Sequence
  Description of Artificial Sequence: Synthetic oligonucleotide
cugguuaugccuccugaag

SEQ ID NO: 12130 - RNA, 19 nt, Artificial Sequence
  Description of Artificial Sequence: Synthetic oligonucleotide
acuugggcaauuacuuuac

SEQ ID NO: 12131 - RNA, 19 nt, Artificial Sequence
  Description of Artificial Sequence: Synthetic oligonucleotide
aagggcucaugugacuuag

SEQ ID NO: 12132 - RNA, 19 nt, Artificial Sequence
  Description of Artificial Sequence: Synthetic oligonucleotide
ucacuauuuauaggacaag

SEQ ID NO: 12133 - RNA, 19 nt, Artificial Sequence
  Description of Artificial Sequence: Synthetic oligonucleotide
agaacacuauaccaugaua

SEQ ID NO: 12134 - RNA, 19 nt, Artificial Sequence
  Description of Artificial Sequence: Synthetic oligonucleotide
uuuagggugauggcgccca

SEQ ID NO: 12135 - RNA, 19 nt, Artificial Sequence
  Description of Artificial Sequence: Synthetic oligonucleotide
ucguagcaguaauuuaaga

SEQ ID NO: 12136 - RNA, 19 nt, Artificial Sequence
  Description of Artificial Sequence: Synthetic oligonucleotide
acaccuaaaaccccugauu

SEQ ID NO: 12137 - RNA, 19 nt, Artificial Sequence
  Description of Artificial Sequence: Synthetic oligonucleotide
aaucagauugacagccacu

SEQ ID NO: 12138 - RNA, 19 nt, Artificial Sequence
  Description of Artificial Sequence: Synthetic oligonucleotide
gcuaacacuuaauaaauua

SEQ ID NO: 12139 - RNA, 19 nt, Artificial Sequence
  Description of Artificial Sequence: Synthetic oligonucleotide
aagaugaagaguacccuua

SEQ ID NO: 12140 - RNA, 19 nt, Artificial Sequence
  Description of Artificial Sequence: Synthetic oligonucleotide
uucugauauugguuuggcu

SEQ ID NO: 12141 - RNA, 19 nt, Artificial Sequence
  Description of Artificial Sequence: Synthetic oligonucleotide
gauauaugcugguaacccu

SEQ ID NO: 12142 - RNA, 19 nt, Artificial Sequence
  Description of Artificial Sequence: Synthetic oligonucleotide
uucggacaguuuuauccug

SEQ ID NO: 12143 - RNA, 19 nt, Artificial Sequence
  Description of Artificial Sequence: Synthetic oligonucleotide
augagucuaauucuaccua

SEQ ID NO: 12144 - RNA, 19 nt, Artificial Sequence
  Description of Artificial Sequence: Synthetic oligonucleotide
ucucguaaccgcaucugua

SEQ ID NO: 12145 - RNA, 19 nt, Artificial Sequence
  Description of Artificial Sequence: Synthetic oligonucleotide
aacuuuccaagaacacgag

SEQ ID NO: 12146 - RNA, 19 nt, Artificial Sequence
  Description of Artificial Sequence: Synthetic oligonucleotide
auuuaggugcuaugaugga

SEQ ID NO: 12147 - RNA, 19 nt, Artificial Sequence
  Description of Artificial Sequence: Synthetic oligonucleotide
gucccgaauuaucauuugc

SEQ ID NO: 12148 - RNA, 19 nt, Artificial Sequence
  Description of Artificial Sequence: Synthetic oligonucleotide
cgugcaaugaaacccaagc

SEQ ID NO: 12149 - RNA, 19 nt, Artificial Sequence
  Description of Artificial Sequence: Synthetic oligonucleotide
aguaucacuguaccauaau

SEQ ID NO: 12150 - RNA, 19 nt, Artificial Sequence
  Description of Artificial Sequence: Synthetic oligonucleotide
acuauaccaugauaugaua

SEQ ID NO: 12151 - RNA, 19 nt, Artificial Sequence
  Description of Artificial Sequence: Synthetic oligonucleotide
uuccaagcauuaaauuaua

SEQ ID NO: 12152 - RNA, 19 nt, Artificial Sequence
  Description of Artificial Sequence: Synthetic oligonucleotide
uaccuauuacgucaacauu

SEQ ID NO: 12153 - RNA, 19 nt, Artificial Sequence
  Description of Artificial Sequence: Synthetic oligonucleotide
cagacccgugcaaugaaac

SEQ ID NO: 12154 - RNA, 19 nt, Artificial Sequence
  Description of Artificial Sequence: Synthetic oligonucleotide
cauuaacggguguguacag

SEQ ID NO: 12155 - RNA, 19 nt, Artificial Sequence
  Description of Artificial Sequence: Synthetic oligonucleotide
caaggaguugcacuaucuc

SEQ ID NO: 12156 - RNA, 19 nt, Artificial Sequence
  Description of Artificial Sequence: Synthetic oligonucleotide
agguucgcuuucugagccc

SEQ ID NO: 12157 - RNA, 19 nt, Artificial Sequence
  Description of Artificial Sequence: Synthetic oligonucleotide
cuagcuagaccaaauuaua

SEQ ID NO: 12158 - RNA, 19 nt, Artificial Sequence
  Description of Artificial Sequence: Synthetic oligonucleotide
ucuggcgagauguguugug

SEQ ID NO: 12159 - RNA, 19 nt, Artificial Sequence
  Description of Artificial Sequence: Synthetic oligonucleotide
cuagacagcuacaaauuua

SEQ ID NO: 12160 - RNA, 19 nt, Artificial Sequence
  Description of Artificial Sequence: Synthetic oligonucleotide
uccggggaauauugacugg

SEQ ID NO: 12161 - RNA, 19 nt, Artificial Sequence
  Description of Artificial Sequence: Synthetic oligonucleotide
uuccugucucguaaccgca

SEQ ID NO: 12162 - RNA, 19 nt, Artificial Sequence
  Description of Artificial Sequence: Synthetic oligonucleotide
aucaauaauauugcacaua

SEQ ID NO: 12163 - RNA, 19 nt, Artificial Sequence
  Description of Artificial Sequence: Synthetic oligonucleotide
augugacuuaggcuaagau

SEQ ID NO: 12164 - RNA, 19 nt, Artificial Sequence
  Description of Artificial Sequence: Synthetic oligonucleotide
caguguucauucuggcgag

SEQ ID NO: 12165 - RNA, 19 nt, Artificial Sequence
  Description of Artificial Sequence: Synthetic oligonucleotide
uaucccucacugaggacaa

SEQ ID NO: 12166 - RNA, 19 nt, Artificial Sequence
  Description of Artificial Sequence: Synthetic oligonucleotide
ugucccgaauuaucauuug

SEQ ID NO: 12167 - RNA, 19 nt, Artificial Sequence
  Description of Artificial Sequence: Synthetic oligonucleotide
agguaauauccagugaaaa

SEQ ID NO: 12168 - RNA, 19 nt, Artificial Sequence
  Description of Artificial Sequence: Synthetic oligonucleotide
uagauauguuaugagucua

SEQ ID NO: 12169 - RNA, 19 nt, Artificial Sequence
  Description of Artificial Sequence: Synthetic oligonucleotide
uuacuugggcaauuacuuu

SEQ ID NO: 12170 - RNA, 19 nt, Artificial Sequence
  Description of Artificial Sequence: Synthetic oligonucleotide
gcauguguuagagagccag

SEQ ID NO: 12171 - RNA, 19 nt, Artificial Sequence
  Description of Artificial Sequence: Synthetic oligonucleotide
uggccucaagcaugcaugc

SEQ ID NO: 12172 - RNA, 19 nt, Artificial Sequence
  Description of Artificial Sequence: Synthetic oligonucleotide
  modified_base (6)..(6): a, c, u, g, unknown or other
ugacunugggagcucucuc

SEQ ID NO: 12173 - RNA, 19 nt, Artificial Sequence
  Description of Artificial Sequence: Synthetic oligonucleotide
ugucucguaaccgcaucug

SEQ ID NO: 12174 - RNA, 19 nt, Artificial Sequence
  Description of Artificial Sequence: Synthetic oligonucleotide
acauaauuagggacuacaa

SEQ ID NO: 12175 - RNA, 19 nt, Artificial Sequence
  Description of Artificial Sequence: Synthetic oligonucleotide
uucagacccgugcaaugaa

SEQ ID NO: 12176 - RNA, 19 nt, Artificial Sequence
  Description of Artificial Sequence: Synthetic oligonucleotide
aagggauuggugguaggaa

SEQ ID NO: 12177 - RNA, 19 nt, Artificial Sequence
  Description of Artificial Sequence: Synthetic oligonucleotide
uacauauugccaguuuauu

SEQ ID NO: 12178 - RNA, 19 nt, Artificial Sequence
  Description of Artificial Sequence: Synthetic oligonucleotide
ucuccacuauauugcuuca

SEQ ID NO: 12179 - RNA, 19 nt, Artificial Sequence
  Description of Artificial Sequence: Synthetic oligonucleotide
agugguaucugagaacauu

SEQ ID NO: 12180 - RNA, 19 nt, Artificial Sequence
  Description of Artificial Sequence: Synthetic oligonucleotide
gaaaggcgagaccccauga

SEQ ID NO: 12181 - RNA, 19 nt, Artificial Sequence
  Description of Artificial Sequence: Synthetic oligonucleotide
acccuuacuagcccagggu

SEQ ID NO: 12182 - RNA, 19 nt, Artificial Sequence
  Description of Artificial Sequence: Synthetic oligonucleotide
cuuaggcuaagauuuugua

SEQ ID NO: 12183 - RNA, 19 nt, Artificial Sequence
  Description of Artificial Sequence: Synthetic oligonucleotide
gaacccacaaaagaacaua

SEQ ID NO: 12184 - RNA, 19 nt, Artificial Sequence
  Description of Artificial Sequence: Synthetic oligonucleotide
caugauuggcuccuaagcu

SEQ ID NO: 12185 - RNA, 19 nt, Artificial Sequence
  Description of Artificial Sequence: Synthetic oligonucleotide
cuuucuagauagugacuga

SEQ ID NO: 12186 - RNA, 19 nt, Artificial Sequence
  Description of Artificial Sequence: Synthetic oligonucleotide
auaggacaaguaagggcuc

SEQ ID NO: 12187 - RNA, 19 nt, Artificial Sequence
  Description of Artificial Sequence: Synthetic oligonucleotide
acaaggaguugcacuaucu

SEQ ID NO: 12188 - RNA, 19 nt, Artificial Sequence
  Description of Artificial Sequence: Synthetic oligonucleotide
auuaacggguguguacaga

SEQ ID NO: 12189 - RNA, 19 nt, Artificial Sequence
  Description of Artificial Sequence: Synthetic oligonucleotide
ugguaacccuggaaucaga

SEQ ID NO: 12190 - RNA, 19 nt, Artificial Sequence
  Description of Artificial Sequence: Synthetic oligonucleotide
ugccacccuaggcaaguca

SEQ ID NO: 12191 - RNA, 19 nt, Artificial Sequence
  Description of Artificial Sequence: Synthetic oligonucleotide
ccguguaaucucaugcugc

SEQ ID NO: 12192 - RNA, 19 nt, Artificial Sequence
  Description of Artificial Sequence: Synthetic oligonucleotide
cccgaauuaucauuugcac

SEQ ID NO: 12193 - RNA, 19 nt, Artificial Sequence
  Description of Artificial Sequence: Synthetic oligonucleotide
uaaaacugaucugguugaa

SEQ ID NO: 12194 - RNA, 19 nt, Artificial Sequence
  Description of Artificial Sequence: Synthetic oligonucleotide
cugcgauacuggagguucg

SEQ ID NO: 12195 - RNA, 19 nt, Artificial Sequence
  Description of Artificial Sequence: Synthetic oligonucleotide
uugucacggagccacucuu

SEQ ID NO: 12196 - RNA, 19 nt, Artificial Sequence
  Description of Artificial Sequence: Synthetic oligonucleotide
cacauaacaacaguaaguu

SEQ ID NO: 12197 - RNA, 19 nt, Artificial Sequence
  Description of Artificial Sequence: Synthetic oligonucleotide
gauagugacugaggcuaac

SEQ ID NO: 12198 - RNA, 19 nt, Artificial Sequence
  Description of Artificial Sequence: Synthetic oligonucleotide
agagguuauaacaccuaaa

SEQ ID NO: 12199 - RNA, 19 nt, Artificial Sequence
  Description of Artificial Sequence: Synthetic oligonucleotide
auaguacggaugaaugaaa

SEQ ID NO: 12200 - RNA, 19 nt, Artificial Sequence
  Description of Artificial Sequence: Synthetic oligonucleotide
ugcgauacuggagguucgc

SEQ ID NO: 12201 - RNA, 19 nt, Artificial Sequence
  Description of Artificial Sequence: Synthetic oligonucleotide
  modified_base (3)..(3): a, c, u, g, unknown or other
cunugggagcucucuccug

SEQ ID NO: 12202 - RNA, 19 nt, Artificial Sequence
  Description of Artificial Sequence: Synthetic oligonucleotide
uucaccccggauacacccu

SEQ ID NO: 12203 - RNA, 19 nt, Artificial Sequence
  Description of Artificial Sequence: Synthetic oligonucleotide
accuguggauaauugcaua

SEQ ID NO: 12204 - RNA, 19 nt, Artificial Sequence
  Description of Artificial Sequence: Synthetic oligonucleotide
accccugauuuauaaugau

SEQ ID NO: 12205 - RNA, 19 nt, Artificial Sequence
  Description of Artificial Sequence: Synthetic oligonucleotide
ccggauacacccugaauug

SEQ ID NO: 12206 - RNA, 19 nt, Artificial Sequence
  Description of Artificial Sequence: Synthetic oligonucleotide
uucuaccuauuacgucaac

SEQ ID NO: 12207 - RNA, 19 nt, Artificial Sequence
  Description of Artificial Sequence: Synthetic oligonucleotide
ccucacaaguugcugguag

SEQ ID NO: 12208 - RNA, 19 nt, Artificial Sequence
  Description of Artificial Sequence: Synthetic oligonucleotide
aaccggcauguguuagaga

SEQ ID NO: 12209 - RNA, 19 nt, Artificial Sequence
  Description of Artificial Sequence: Synthetic oligonucleotide
cuaucauuggcugaaggau

SEQ ID NO: 12210 - RNA, 19 nt, Artificial Sequence
  Description of Artificial Sequence: Synthetic oligonucleotide
cuguuuugaauaacuuaua

SEQ ID NO: 12211 - RNA, 19 nt, Artificial Sequence
  Description of Artificial Sequence: Synthetic oligonucleotide
gaccaugcagugucacaca

SEQ ID NO: 12212 - RNA, 19 nt, Artificial Sequence
  Description of Artificial Sequence: Synthetic oligonucleotide
cauguguuagagagccaga

SEQ ID NO: 12213 - RNA, 19 nt, Artificial Sequence
  Description of Artificial Sequence: Synthetic oligonucleotide
gccguguaaucucaugcug

SEQ ID NO: 12214 - RNA, 19 nt, Artificial Sequence
  Description of Artificial Sequence: Synthetic oligonucleotide
cuaggucuuacugaaccaa

SEQ ID NO: 12215 - RNA, 19 nt, Artificial Sequence
  Description of Artificial Sequence: Synthetic oligonucleotide
cacuauuuauaggacaagu

SEQ ID NO: 12216 - RNA, 19 nt, Artificial Sequence
  Description of Artificial Sequence: Synthetic oligonucleotide
gccgauauucagcaagauc

SEQ ID NO: 12217 - RNA, 19 nt, Artificial Sequence
  Description of Artificial Sequence: Synthetic oligonucleotide
cacuagcacgagugagugc

SEQ ID NO: 12218 - RNA, 19 nt, Artificial Sequence
  Description of Artificial Sequence: Synthetic oligonucleotide
ugacucaccuaugguggac

SEQ ID NO: 12219 - RNA, 19 nt, Artificial Sequence
  Description of Artificial Sequence: Synthetic oligonucleotide
cuaagcugauaugauauau

SEQ ID NO: 12220 - RNA, 19 nt, Artificial Sequence
  Description of Artificial Sequence: Synthetic oligonucleotide
acacuagggcaccaccuuu

SEQ ID NO: 12221 - RNA, 19 nt, Artificial Sequence
  Description of Artificial Sequence: Synthetic oligonucleotide
gcauaugggcacuaguucu

SEQ ID NO: 12222 - RNA, 19 nt, Artificial Sequence
  Description of Artificial Sequence: Synthetic oligonucleotide
guaaguugaugcucauccu

SEQ ID NO: 12223 - RNA, 19 nt, Artificial Sequence
  Description of Artificial Sequence: Synthetic oligonucleotide
  modified_base (8)..(8): a, c, u, g, unknown or other
acugacunugggagcucuc

SEQ ID NO: 12224 - RNA, 19 nt, Artificial Sequence
  Description of Artificial Sequence: Synthetic oligonucleotide
caccuaaaaccccugauuu

SEQ ID NO: 12225 - RNA, 19 nt, Artificial Sequence
  Description of Artificial Sequence: Synthetic oligonucleotide
uccugcccuuuuaguucgg

SEQ ID NO: 12226 - RNA, 19 nt, Artificial Sequence
  Description of Artificial Sequence: Synthetic oligonucleotide
ggcacuaguucuguucuac

SEQ ID NO: 12227 - RNA, 19 nt, Artificial Sequence
  Description of Artificial Sequence: Synthetic oligonucleotide
uaggcaagucacugaccau

SEQ ID NO: 12228 - RNA, 19 nt, Artificial Sequence
  Description of Artificial Sequence: Synthetic oligonucleotide
acccgugcaaugaaaccca

SEQ ID NO: 12229 - RNA, 19 nt, Artificial Sequence
  Description of Artificial Sequence: Synthetic oligonucleotide
auucuaccuauuacgucaa

SEQ ID NO: 12230 - RNA, 19 nt, Artificial Sequence
  Description of Artificial Sequence: Synthetic oligonucleotide
acucauuaacgggugugua

SEQ ID NO: 12231 - RNA, 19 nt, Artificial Sequence
  Description of Artificial Sequence: Synthetic oligonucleotide
ucguucagguagucagcau

SEQ ID NO: 12232 - RNA, 19 nt, Artificial Sequence
  Description of Artificial Sequence: Synthetic oligonucleotide
uuagggugauggcgcccac

SEQ ID NO: 12233 - RNA, 19 nt, Artificial Sequence
  Description of Artificial Sequence: Synthetic oligonucleotide
ccuuccugucucguaaccg

SEQ ID NO: 12234 - RNA, 19 nt, Artificial Sequence
  Description of Artificial Sequence: Synthetic oligonucleotide
uggacgcugugaggaagug

SEQ ID NO: 12235 - RNA, 19 nt, Artificial Sequence
  Description of Artificial Sequence: Synthetic oligonucleotide
ggccggauggggcucauca

SEQ ID NO: 12236 - RNA, 19 nt, Artificial Sequence
  Description of Artificial Sequence: Synthetic oligonucleotide
cugacucaccuauggugga

SEQ ID NO: 12237 - RNA, 19 nt, Artificial Sequence
  Description of Artificial Sequence: Synthetic oligonucleotide
acguggcuucaauucuaga

SEQ ID NO: 12238 - RNA, 19 nt, Artificial Sequence
  Description of Artificial Sequence: Synthetic oligonucleotide
gcaaggguuaaggcggccc

SEQ ID NO: 12239 - RNA, 19 nt, Artificial Sequence
  Description of Artificial Sequence: Synthetic oligonucleotide
  modified_base (7)..(7): a, c, u, g, unknown or other
cugacunugggagcucucu

SEQ ID NO: 12240 - RNA, 19 nt, Artificial Sequence
  Description of Artificial Sequence: Synthetic oligonucleotide
cuguauaguacggaugaau

SEQ ID NO: 12241 - RNA, 19 nt, Artificial Sequence
  Description of Artificial Sequence: Synthetic oligonucleotide
ccgcaucuguauaguacgg

SEQ ID NO: 12242 - RNA, 19 nt, Artificial Sequence
  Description of Artificial Sequence: Synthetic oligonucleotide
cauucuggcgagauguguu

SEQ ID NO: 12243 - RNA, 19 nt, Artificial Sequence
  Description of Artificial Sequence: Synthetic oligonucleotide
gguuaaggcggcccucaca

SEQ ID NO: 12244 - RNA, 19 nt, Artificial Sequence
  Description of Artificial Sequence: Synthetic oligonucleotide
caugucgcacacacauaaa

SEQ ID NO: 12245 - RNA, 19 nt, Artificial Sequence
  Description of Artificial Sequence: Synthetic oligonucleotide
gucucguaaccgcaucugu

SEQ ID NO: 12246 - RNA, 19 nt, Artificial Sequence
  Description of Artificial Sequence: Synthetic oligonucleotide
cguagcaguaauuuaagau

SEQ ID NO: 12247 - RNA, 19 nt, Artificial Sequence
  Description of Artificial Sequence: Synthetic oligonucleotide
ccgaauuaucauuugcacu

SEQ ID NO: 12248 - RNA, 19 nt, Artificial Sequence
  Description of Artificial Sequence: Synthetic oligonucleotide
gcgagauguguuguguuuc

SEQ ID NO: 12249 - RNA, 19 nt, Artificial Sequence
  Description of Artificial Sequence: Synthetic oligonucleotide
gccacccuaggcaagucac

SEQ ID NO: 12250 - RNA, 19 nt, Artificial Sequence
  Description of Artificial Sequence: Synthetic oligonucleotide
caaggguuaaggcggcccu

SEQ ID NO: 12251 - RNA, 19 nt, Artificial Sequence
  Description of Artificial Sequence: Synthetic oligonucleotide
accccggauacacccugaa

SEQ ID NO: 12252 - RNA, 19 nt, Artificial Sequence
  Description of Artificial Sequence: Synthetic oligonucleotide
cuccccacggagggccucg

SEQ ID NO: 12253 - RNA, 19 nt, Artificial Sequence
  Description of Artificial Sequence: Synthetic oligonucleotide
aggugcccucaucugcgau

SEQ ID NO: 12254 - RNA, 19 nt, Artificial Sequence
  Description of Artificial Sequence: Synthetic oligonucleotide
ccgugcaaugaaacccaag

SEQ ID NO: 12255 - RNA, 19 nt, Artificial Sequence
  Description of Artificial Sequence: Synthetic oligonucleotide
cugucucguaaccgcaucu

SEQ ID NO: 12256 - RNA, 19 nt, Artificial Sequence
  Description of Artificial Sequence: Synthetic oligonucleotide
cccggauacacccugaauu

SEQ ID NO: 12257 - RNA, 19 nt, Artificial Sequence
  Description of Artificial Sequence: Synthetic oligonucleotide
gguaacccuggaaucagau

SEQ ID NO: 12258 - RNA, 19 nt, Artificial Sequence
  Description of Artificial Sequence: Synthetic oligonucleotide
ccuauuacgucaacauuuu

SEQ ID NO: 12259 - RNA, 19 nt, Artificial Sequence
  Description of Artificial Sequence: Synthetic oligonucleotide
accgcucguagcaguaauu

SEQ ID NO: 12260 - RNA, 19 nt, Artificial Sequence
  Description of Artificial Sequence: Synthetic oligonucleotide
ugcgcaggaguagguuguu

SEQ ID NO: 12261 - RNA, 19 nt, Artificial Sequence
  Description of Artificial Sequence: Synthetic oligonucleotide
cuggcgagauguguugugu

SEQ ID NO: 12262 - RNA, 19 nt, Artificial Sequence
  Description of Artificial Sequence: Synthetic oligonucleotide
ggguuaaggcggcccucac

SEQ ID NO: 12263 - RNA, 19 nt, Artificial Sequence
  Description of Artificial Sequence: Synthetic oligonucleotide
gguucgcuuucugagcccu

SEQ ID NO: 12264 - RNA, 19 nt, Artificial Sequence
  Description of Artificial Sequence: Synthetic oligonucleotide
cuagcacgagugagugccu

SEQ ID NO: 12265 - RNA, 19 nt, Artificial Sequence
  Description of Artificial Sequence: Synthetic oligonucleotide
ggguuacccagaggacccc

SEQ ID NO: 12266 - RNA, 19 nt, Artificial Sequence
  Description of Artificial Sequence: Synthetic oligonucleotide
ggcaaggguuaaggcggcc

SEQ ID NO: 12267 - RNA, 19 nt, Artificial Sequence
  Description of Artificial Sequence: Synthetic oligonucleotide
guacaacacuagacagcua

SEQ ID NO: 12268 - RNA, 19 nt, Artificial Sequence
  Description of Artificial Sequence: Synthetic oligonucleotide
ggaaguuacuugggcaauu

SEQ ID NO: 12269 - RNA, 19 nt, Artificial Sequence
  Description of Artificial Sequence: Synthetic oligonucleotide
cgcaucuguauaguacgga

SEQ ID NO: 12270 - RNA, 19 nt, Artificial Sequence
  Description of Artificial Sequence: Synthetic oligonucleotide
gguuacccagaggaccccu

SEQ ID NO: 12271 - RNA, 19 nt, Artificial Sequence
  Description of Artificial Sequence: Synthetic oligonucleotide
gggcacuaguucuguucua

SEQ ID NO: 12272 - RNA, 19 nt, Artificial Sequence
  Description of Artificial Sequence: Synthetic oligonucleotide
ccuguguggccucaagcau

SEQ ID NO: 12273 - RNA, 19 nt, Artificial Sequence
  Description of Artificial Sequence: Synthetic oligonucleotide
ggguguguacagauucaau

SEQ ID NO: 12274 - RNA, 19 nt, Artificial Sequence
  Description of Artificial Sequence: Synthetic oligonucleotide
cgcucguagcaguaauuua

SEQ ID NO: 12275 - RNA, 19 nt, Artificial Sequence
  Description of Artificial Sequence: Synthetic oligonucleotide
cccgugcaaugaaacccaa

SEQ ID NO: 12276 - RNA, 19 nt, Artificial Sequence
  Description of Artificial Sequence: Synthetic oligonucleotide
ccgcucguagcaguaauuu

SEQ ID NO: 12277 - RNA, 19 nt, Artificial Sequence
  Description of Artificial Sequence: Synthetic oligonucleotide
cggauacacccugaauugu

SEQ ID NO: 12278 - RNA, 19 nt, Artificial Sequence
  Description of Artificial Sequence: Synthetic oligonucleotide
cuggccggauggggcucau

SEQ ID NO: 12279 - RNA, 19 nt, Artificial Sequence
  Description of Artificial Sequence: Synthetic oligonucleotide
aacacuaucaaauauccaa

SEQ ID NO: 12280 - RNA, 19 nt, Artificial Sequence
  Description of Artificial Sequence: Synthetic oligonucleotide
aaaucuacuugucacuaac

SEQ ID NO: 12281 - RNA, 19 nt, Artificial Sequence
  Description of Artificial Sequence: Synthetic oligonucleotide
aaagucucacaucaugaac

SEQ ID NO: 12282 - RNA, 19 nt, Artificial Sequence
  Description of Artificial Sequence: Synthetic oligonucleotide
aacgcugcaauaaagaaag

SEQ ID NO: 12283 - RNA, 19 nt, Artificial Sequence
  Description of Artificial Sequence: Synthetic oligonucleotide
ugauaagggcauuauaggg

SEQ ID NO: 12284 - RNA, 19 nt, Artificial Sequence
  Description of Artificial Sequence: Synthetic oligonucleotide
aagagcgccaacuuguuuc

SEQ ID NO: 12285 - RNA, 19 nt, Artificial Sequence
  Description of Artificial Sequence: Synthetic oligonucleotide
aaguucuacuauuagacca

SEQ ID NO: 12286 - RNA, 19 nt, Artificial Sequence
  Description of Artificial Sequence: Synthetic oligonucleotide
cauguauucguucuuaacc

SEQ ID NO: 12287 - RNA, 19 nt, Artificial Sequence
  Description of Artificial Sequence: Synthetic oligonucleotide
agugucgcauguuugauac

SEQ ID NO: 12288 - RNA, 19 nt, Artificial Sequence
  Description of Artificial Sequence: Synthetic oligonucleotide
aagaguaccuucacaaugc

SEQ ID NO: 12289 - RNA, 19 nt, Artificial Sequence
  Description of Artificial Sequence: Synthetic oligonucleotide
aaguuugaucagcaaagac

SEQ ID NO: 12290 - RNA, 19 nt, Artificial Sequence
  Description of Artificial Sequence: Synthetic oligonucleotide
auauauauagcaucggagu

SEQ ID NO: 12291 - RNA, 19 nt, Artificial Sequence
  Description of Artificial Sequence: Synthetic oligonucleotide
cauuauguuuagcagaugc

SEQ ID NO: 12292 - RNA, 19 nt, Artificial Sequence
  Description of Artificial Sequence: Synthetic oligonucleotide
aaaauuccgguuccggcac

SEQ ID NO: 12293 - RNA, 19 nt, Artificial Sequence
  Description of Artificial Sequence: Synthetic oligonucleotide
aaaucggacuuauaaaagu

SEQ ID NO: 12294 - RNA, 19 nt, Artificial Sequence
  Description of Artificial Sequence: Synthetic oligonucleotide
uuuguuacuaggacguugc

SEQ ID NO: 12295 - RNA, 19 nt, Artificial Sequence
  Description of Artificial Sequence: Synthetic oligonucleotide
uuacuagagauguaauuag

SEQ ID NO: 12296 - RNA, 19 nt, Artificial Sequence
  Description of Artificial Sequence: Synthetic oligonucleotide
gaucuuaucucaaagcacc

SEQ ID NO: 12297 - RNA, 19 nt, Artificial Sequence
  Description of Artificial Sequence: Synthetic oligonucleotide
aauagacggaaccccagag

SEQ ID NO: 12298 - RNA, 19 nt, Artificial Sequence
  Description of Artificial Sequence: Synthetic oligonucleotide
aucaaugguauaaagccgc

SEQ ID NO: 12299 - RNA, 19 nt, Artificial Sequence
  Description of Artificial Sequence: Synthetic oligonucleotide
uauaaagccgcauaugcaa

SEQ ID NO: 12300 - RNA, 19 nt, Artificial Sequence
  Description of Artificial Sequence: Synthetic oligonucleotide
aauuacguugguaacagcu

SEQ ID NO: 12301 - RNA, 19 nt, Artificial Sequence
  Description of Artificial Sequence: Synthetic oligonucleotide
uaccaaguuacauccaggg

SEQ ID NO: 12302 - RNA, 19 nt, Artificial Sequence
  Description of Artificial Sequence: Synthetic oligonucleotide
aaucaaugguauaaagccg

SEQ ID NO: 12303 - RNA, 19 nt, Artificial Sequence
  Description of Artificial Sequence: Synthetic oligonucleotide
augaucuuaucucaaagca

SEQ ID NO: 12304 - RNA, 19 nt, Artificial Sequence
  Description of Artificial Sequence: Synthetic oligonucleotide
ugcaaggcuaauuacguug

SEQ ID NO: 12305 - RNA, 19 nt, Artificial Sequence
  Description of Artificial Sequence: Synthetic oligonucleotide
uguaauuagcauuuugcuc

SEQ ID NO: 12306 - RNA, 19 nt, Artificial Sequence
  Description of Artificial Sequence: Synthetic oligonucleotide
uaugcaaggcuaauuacgu

SEQ ID NO: 12307 - RNA, 19 nt, Artificial Sequence
  Description of Artificial Sequence: Synthetic oligonucleotide
aagugugcgaaauccacug

SEQ ID NO: 12308 - RNA, 19 nt, Artificial Sequence
  Description of Artificial Sequence: Synthetic oligonucleotide
uagacggaaccccagaggc

SEQ ID NO: 12309 - RNA, 19 nt, Artificial Sequence
  Description of Artificial Sequence: Synthetic oligonucleotide
uaaguugccuccucgauga

SEQ ID NO: 12310 - RNA, 19 nt, Artificial Sequence
  Description of Artificial Sequence: Synthetic oligonucleotide
uauuuacccagggaaagcg

SEQ ID NO: 12311 - RNA, 19 nt, Artificial Sequence
  Description of Artificial Sequence: Synthetic oligonucleotide
ucuacuauguuucccuuac

SEQ ID NO: 12312 - RNA, 19 nt, Artificial Sequence
  Description of Artificial Sequence: Synthetic oligonucleotide
caucacucuaacuuggacc

SEQ ID NO: 12313 - RNA, 19 nt, Artificial Sequence
  Description of Artificial Sequence: Synthetic oligonucleotide
auaugugugaaauaaucau

SEQ ID NO: 12314 - RNA, 19 nt, Artificial Sequence
  Description of Artificial Sequence: Synthetic oligonucleotide
uacaguagggugaagagua

SEQ ID NO: 12315 - RNA, 19 nt, Artificial Sequence
  Description of Artificial Sequence: Synthetic oligonucleotide
guuacaaugucaaaugcug

SEQ ID NO: 12316 - RNA, 19 nt, Artificial Sequence
  Description of Artificial Sequence: Synthetic oligonucleotide
aauaacgcugcaauaaaga

SEQ ID NO: 12317 - RNA, 19 nt, Artificial Sequence
  Description of Artificial Sequence: Synthetic oligonucleotide
auugauaccucuuccucag

SEQ ID NO: 12318 - RNA, 19 nt, Artificial Sequence
  Description of Artificial Sequence: Synthetic oligonucleotide
auagggaaaaucauuugcg

SEQ ID NO: 12319 - RNA, 19 nt, Artificial Sequence
  Description of Artificial Sequence: Synthetic oligonucleotide
gguauaaagccgcauaugc

SEQ ID NO: 12320 - RNA, 19 nt, Artificial Sequence
  Description of Artificial Sequence: Synthetic oligonucleotide
ucuagaccuaauucaauca

SEQ ID NO: 12321 - RNA, 19 nt, Artificial Sequence
  Description of Artificial Sequence: Synthetic oligonucleotide
auaugcaaggcuaauuacg

SEQ ID NO: 12322 - RNA, 19 nt, Artificial Sequence
  Description of Artificial Sequence: Synthetic oligonucleotide
uuagagcuaauucaauuau

SEQ ID NO: 12323 - RNA, 19 nt, Artificial Sequence
  Description of Artificial Sequence: Synthetic oligonucleotide
uauauagcaucggaguucc

SEQ ID NO: 12324 - RNA, 19 nt, Artificial Sequence
  Description of Artificial Sequence: Synthetic oligonucleotide
auugaaauggcaaauuggu

SEQ ID NO: 12325 - RNA, 19 nt, Artificial Sequence
  Description of Artificial Sequence: Synthetic oligonucleotide
gaugcguuuguucauucug

SEQ ID NO: 12326 - RNA, 19 nt, Artificial Sequence
  Description of Artificial Sequence: Synthetic oligonucleotide
ugauauucauaaugaccgg

SEQ ID NO: 12327 - RNA, 19 nt, Artificial Sequence
  Description of Artificial Sequence: Synthetic oligonucleotide
uauauauagcaucggaguu

SEQ ID NO: 12328 - RNA, 19 nt, Artificial Sequence
  Description of Artificial Sequence: Synthetic oligonucleotide
aaauaacgcugcaauaaag

SEQ ID NO: 12329 - RNA, 19 nt, Artificial Sequence
  Description of Artificial Sequence: Synthetic oligonucleotide
aguuugaucagcaaagaca

SEQ ID NO: 12330 - RNA, 19 nt, Artificial Sequence
  Description of Artificial Sequence: Synthetic oligonucleotide
uaaagugucgcauguuuga

SEQ ID NO: 12331 - RNA, 19 nt, Artificial Sequence
  Description of Artificial Sequence: Synthetic oligonucleotide
ugaccgauccucuucacug

SEQ ID NO: 12332 - RNA, 19 nt, Artificial Sequence
  Description of Artificial Sequence: Synthetic oligonucleotide
cauucugaacuaaaacccc

SEQ ID NO: 12333 - RNA, 19 nt, Artificial Sequence
  Description of Artificial Sequence: Synthetic oligonucleotide
uuauagggaaaaucauuug

SEQ ID NO: 12334 - RNA, 19 nt, Artificial Sequence
  Description of Artificial Sequence: Synthetic oligonucleotide
uucgcuucuacaguaaugu

SEQ ID NO: 12335 - RNA, 19 nt, Artificial Sequence
  Description of Artificial Sequence: Synthetic oligonucleotide
cuagaccuaauucaaucag

SEQ ID NO: 12336 - RNA, 19 nt, Artificial Sequence
  Description of Artificial Sequence: Synthetic oligonucleotide
auaauauaugcaaugcuga

SEQ ID NO: 12337 - RNA, 19 nt, Artificial Sequence
  Description of Artificial Sequence: Synthetic oligonucleotide
ugguaauaaaagguaagca

SEQ ID NO: 12338 - RNA, 19 nt, Artificial Sequence
  Description of Artificial Sequence: Synthetic oligonucleotide
cuuugugcgcuuuuguuac

SEQ ID NO: 12339 - RNA, 19 nt, Artificial Sequence
  Description of Artificial Sequence: Synthetic oligonucleotide
agcauaaguugccuccucg

SEQ ID NO: 12340 - RNA, 19 nt, Artificial Sequence
  Description of Artificial Sequence: Synthetic oligonucleotide
uggguuuauaaaucggacu

SEQ ID NO: 12341 - RNA, 19 nt, Artificial Sequence
  Description of Artificial Sequence: Synthetic oligonucleotide
agagcgccaacuuguuucc

SEQ ID NO: 12342 - RNA, 19 nt, Artificial Sequence
  Description of Artificial Sequence: Synthetic oligonucleotide
agguuuugagaauguuagc

SEQ ID NO: 12343 - RNA, 19 nt, Artificial Sequence
  Description of Artificial Sequence: Synthetic oligonucleotide
aggauaauaagaguuuugu

SEQ ID NO: 12344 - RNA, 19 nt, Artificial Sequence
  Description of Artificial Sequence: Synthetic oligonucleotide
aaccacggaggauaauaag

SEQ ID NO: 12345 - RNA, 19 nt, Artificial Sequence
  Description of Artificial Sequence: Synthetic oligonucleotide
uccggcaccacaauucuga

SEQ ID NO: 12346 - RNA, 19 nt, Artificial Sequence
  Description of Artificial Sequence: Synthetic oligonucleotide
cacacuuacaaauggucug

SEQ ID NO: 12347 - RNA, 19 nt, Artificial Sequence
  Description of Artificial Sequence: Synthetic oligonucleotide
gauaagggcauuauaggga

SEQ ID NO: 12348 - RNA, 19 nt, Artificial Sequence
  Description of Artificial Sequence: Synthetic oligonucleotide
aggcuaauuacguugguaa

SEQ ID NO: 12349 - RNA, 19 nt, Artificial Sequence
  Description of Artificial Sequence: Synthetic oligonucleotide
ugcacuauacggacagcag

SEQ ID NO: 12350 - RNA, 19 nt, Artificial Sequence
  Description of Artificial Sequence: Synthetic oligonucleotide
auaacgcugcaauaaagaa

SEQ ID NO: 12351 - RNA, 19 nt, Artificial Sequence
  Description of Artificial Sequence: Synthetic oligonucleotide
cucuagaccuaauucaauc

SEQ ID NO: 12352 - RNA, 19 nt, Artificial Sequence
  Description of Artificial Sequence: Synthetic oligonucleotide
guacaaccagcccaguagg

SEQ ID NO: 12353 - RNA, 19 nt, Artificial Sequence
  Description of Artificial Sequence: Synthetic oligonucleotide
ugacaaucugaacuccucu

SEQ ID NO: 12354 - RNA, 19 nt, Artificial Sequence
  Description of Artificial Sequence: Synthetic oligonucleotide
agugugcgaaauccacugc

SEQ ID NO: 12355 - RNA, 19 nt, Artificial Sequence
  Description of Artificial Sequence: Synthetic oligonucleotide
ugagaguuuguggugaagu

SEQ ID NO: 12356 - RNA, 19 nt, Artificial Sequence
  Description of Artificial Sequence: Synthetic oligonucleotide
uaucuuacaacgucacuua

SEQ ID NO: 12357 - RNA, 19 nt, Artificial Sequence
  Description of Artificial Sequence: Synthetic oligonucleotide
uaguacuauauauguguga

SEQ ID NO: 12358 - RNA, 19 nt, Artificial Sequence
  Description of Artificial Sequence: Synthetic oligonucleotide
ucgaugaaucaauuccagc

SEQ ID NO: 12359 - RNA, 19 nt, Artificial Sequence
  Description of Artificial Sequence: Synthetic oligonucleotide
uguuacuaggacguugcca

SEQ ID NO: 12360 - RNA, 19 nt, Artificial Sequence
  Description of Artificial Sequence: Synthetic oligonucleotide
aguuacaaugucaaaugcu

SEQ ID NO: 12361 - RNA, 19 nt, Artificial Sequence
  Description of Artificial Sequence: Synthetic oligonucleotide
gauuccucacaauaagaaa

SEQ ID NO: 12362 - RNA, 19 nt, Artificial Sequence
  Description of Artificial Sequence: Synthetic oligonucleotide
gaauaucguucucaggaga

SEQ ID NO: 12363 - RNA, 19 nt, Artificial Sequence
  Description of Artificial Sequence: Synthetic oligonucleotide
aaggaaaauuccgguuccg

SEQ ID NO: 12364 - RNA, 19 nt, Artificial Sequence
  Description of Artificial Sequence: Synthetic oligonucleotide
aggaauugcuugauaguac

SEQ ID NO: 12365 - RNA, 19 nt, Artificial Sequence
  Description of Artificial Sequence: Synthetic oligonucleotide
uucacaaggguuagccgcu

SEQ ID NO: 12366 - RNA, 19 nt, Artificial Sequence
  Description of Artificial Sequence: Synthetic oligonucleotide
gauaaagaauuggaacuuc

SEQ ID NO: 12367 - RNA, 19 nt, Artificial Sequence
  Description of Artificial Sequence: Synthetic oligonucleotide
ucaaugguauaaagccgca

SEQ ID NO: 12368 - RNA, 19 nt, Artificial Sequence
  Description of Artificial Sequence: Synthetic oligonucleotide
aacguucugguccacccau

SEQ ID NO: 12369 - RNA, 19 nt, Artificial Sequence
  Description of Artificial Sequence: Synthetic oligonucleotide
gacggaaccccagaggcag

SEQ ID NO: 12370 - RNA, 19 nt, Artificial Sequence
  Description of Artificial Sequence: Synthetic oligonucleotide
uuuaggaaccuuggugcag

SEQ ID NO: 12371 - RNA, 19 nt, Artificial Sequence
  Description of Artificial Sequence: Synthetic oligonucleotide
aaagugugcgaaauccacu

SEQ ID NO: 12372 - RNA, 19 nt, Artificial Sequence
  Description of Artificial Sequence: Synthetic oligonucleotide
gaggauaauaagaguuuug

SEQ ID NO: 12373 - RNA, 19 nt, Artificial Sequence
  Description of Artificial Sequence: Synthetic oligonucleotide
ucuuacaacgucacuuauu

SEQ ID NO: 12374 - RNA, 19 nt, Artificial Sequence
  Description of Artificial Sequence: Synthetic oligonucleotide
ugaugggaaagcucccggc

SEQ ID NO: 12375 - RNA, 19 nt, Artificial Sequence
  Description of Artificial Sequence: Synthetic oligonucleotide
auaguacuauauaugugug

SEQ ID NO: 12376 - RNA, 19 nt, Artificial Sequence
  Description of Artificial Sequence: Synthetic oligonucleotide
agacaauaugcuuuccuua

SEQ ID NO: 12377 - RNA, 19 nt, Artificial Sequence
  Description of Artificial Sequence: Synthetic oligonucleotide
uaauuagcauuuugcuccu

SEQ ID NO: 12378 - RNA, 19 nt, Artificial Sequence
  Description of Artificial Sequence: Synthetic oligonucleotide
uggugacuaauucaccaau

SEQ ID NO: 12379 - RNA, 19 nt, Artificial Sequence
  Description of Artificial Sequence: Synthetic oligonucleotide
ugcuugcaacaguacaacc

SEQ ID NO: 12380 - RNA, 19 nt, Artificial Sequence
  Description of Artificial Sequence: Synthetic oligonucleotide
auuacguugguaacagcug

SEQ ID NO: 12381 - RNA, 19 nt, Artificial Sequence
  Description of Artificial Sequence: Synthetic oligonucleotide
uacuaggacguugccaaag

SEQ ID NO: 12382 - RNA, 19 nt, Artificial Sequence
  Description of Artificial Sequence: Synthetic oligonucleotide
gcguuuaugaaauuccuga

SEQ ID NO: 12383 - RNA, 19 nt, Artificial Sequence
  Description of Artificial Sequence: Synthetic oligonucleotide
augaugcguuuguucauuc

SEQ ID NO: 12384 - RNA, 19 nt, Artificial Sequence
  Description of Artificial Sequence: Synthetic oligonucleotide
uaggacguugccaaagguu

SEQ ID NO: 12385 - RNA, 19 nt, Artificial Sequence
  Description of Artificial Sequence: Synthetic oligonucleotide
auguauucaaguacaauuu

SEQ ID NO: 12386 - RNA, 19 nt, Artificial Sequence
  Description of Artificial Sequence: Synthetic oligonucleotide
ucuuacugacuguauuuua

SEQ ID NO: 12387 - RNA, 19 nt, Artificial Sequence
  Description of Artificial Sequence: Synthetic oligonucleotide
gugguuaccaagcaccuaa

SEQ ID NO: 12388 - RNA, 19 nt, Artificial Sequence
  Description of Artificial Sequence: Synthetic oligonucleotide
gagcuauacccucagccca

SEQ ID NO: 12389 - RNA, 19 nt, Artificial Sequence
  Description of Artificial Sequence: Synthetic oligonucleotide
cacucuaacauaauuuaua

SEQ ID NO: 12390 - RNA, 19 nt, Artificial Sequence
  Description of Artificial Sequence: Synthetic oligonucleotide
uauacggacagcagcuauu

SEQ ID NO: 12391 - RNA, 19 nt, Artificial Sequence
  Description of Artificial Sequence: Synthetic oligonucleotide
ugcguuuguucauucugcu

SEQ ID NO: 12392 - RNA, 19 nt, Artificial Sequence
  Description of Artificial Sequence: Synthetic oligonucleotide
gugcgcuuuuguuacuagg

SEQ ID NO: 12393 - RNA, 19 nt, Artificial Sequence
  Description of Artificial Sequence: Synthetic oligonucleotide
uauucguucuuaacccuuu

SEQ ID NO: 12394 - RNA, 19 nt, Artificial Sequence
  Description of Artificial Sequence: Synthetic oligonucleotide
ugugcgcuuuuguuacuag

SEQ ID NO: 12395 - RNA, 19 nt, Artificial Sequence
  Description of Artificial Sequence: Synthetic oligonucleotide
auaaagccgcauaugcaag

SEQ ID NO: 12396 - RNA, 19 nt, Artificial Sequence
  Description of Artificial Sequence: Synthetic oligonucleotide
aaacacuaucaaauaucca

SEQ ID NO: 12397 - RNA, 19 nt, Artificial Sequence
  Description of Artificial Sequence: Synthetic oligonucleotide
agcaucggaguuccaaacu

SEQ ID NO: 12398 - RNA, 19 nt, Artificial Sequence
  Description of Artificial Sequence: Synthetic oligonucleotide
ucuuaucucaaagcaccac

SEQ ID NO: 12399 - RNA, 19 nt, Artificial Sequence
  Description of Artificial Sequence: Synthetic oligonucleotide
gaauguuagcuaagcaguc

SEQ ID NO: 12400 - RNA, 19 nt, Artificial Sequence
  Description of Artificial Sequence: Synthetic oligonucleotide
auguuagcuaagcagucua

SEQ ID NO: 12401 - RNA, 19 nt, Artificial Sequence
  Description of Artificial Sequence: Synthetic oligonucleotide
guaaagagcccaaaccauc

SEQ ID NO: 12402 - RNA, 19 nt, Artificial Sequence
  Description of Artificial Sequence: Synthetic oligonucleotide
cuuugcguaagggcugugg

SEQ ID NO: 12403 - RNA, 19 nt, Artificial Sequence
  Description of Artificial Sequence: Synthetic oligonucleotide
ucccuuuagacaguucacu

SEQ ID NO: 12404 - RNA, 19 nt, Artificial Sequence
  Description of Artificial Sequence: Synthetic oligonucleotide
accaaguuacauccaggga

SEQ ID NO: 12405 - RNA, 19 nt, Artificial Sequence
  Description of Artificial Sequence: Synthetic oligonucleotide
acggaggauaauaagaguu

SEQ ID NO: 12406 - RNA, 19 nt, Artificial Sequence
  Description of Artificial Sequence: Synthetic oligonucleotide
uugcguaagggcuguggca

SEQ ID NO: 12407 - RNA, 19 nt, Artificial Sequence
  Description of Artificial Sequence: Synthetic oligonucleotide
agaccuaauucaaucagau

SEQ ID NO: 12408 - RNA, 19 nt, Artificial Sequence
  Description of Artificial Sequence: Synthetic oligonucleotide
aagugucgcauguuugaua

SEQ ID NO: 12409 - RNA, 19 nt, Artificial Sequence
  Description of Artificial Sequence: Synthetic oligonucleotide
caauaggacuaaccacugc

SEQ ID NO: 12410 - RNA, 19 nt, Artificial Sequence
  Description of Artificial Sequence: Synthetic oligonucleotide
caacgucacuuauuucuag

SEQ ID NO: 12411 - RNA, 19 nt, Artificial Sequence
  Description of Artificial Sequence: Synthetic oligonucleotide
gauauucauaaugaccggu

SEQ ID NO: 12412 - RNA, 19 nt, Artificial Sequence
  Description of Artificial Sequence: Synthetic oligonucleotide
ccacggaggauaauaagag

SEQ ID NO: 12413 - RNA, 19 nt, Artificial Sequence
  Description of Artificial Sequence: Synthetic oligonucleotide
aaggcuaauuacguuggua

SEQ ID NO: 12414 - RNA, 19 nt, Artificial Sequence
  Description of Artificial Sequence: Synthetic oligonucleotide
auuucgcuucuacaguaau

SEQ ID NO: 12415 - RNA, 19 nt, Artificial Sequence
  Description of Artificial Sequence: Synthetic oligonucleotide
agaguaccuucacaaugca

SEQ ID NO: 12416 - RNA, 19 nt, Artificial Sequence
  Description of Artificial Sequence: Synthetic oligonucleotide
gcacuauacggacagcagc

SEQ ID NO: 12417 - RNA, 19 nt, Artificial Sequence
  Description of Artificial Sequence: Synthetic oligonucleotide
uacaaccagcccaguaggu

SEQ ID NO: 12418 - RNA, 19 nt, Artificial Sequence
  Description of Artificial Sequence: Synthetic oligonucleotide
gcaaggcuaauuacguugg

SEQ ID NO: 12419 - RNA, 19 nt, Artificial Sequence
  Description of Artificial Sequence: Synthetic oligonucleotide
acgucacuuauuucuaguu

SEQ ID NO: 12420 - RNA, 19 nt, Artificial Sequence
  Description of Artificial Sequence: Synthetic oligonucleotide
cagucuaucacugagcuau

SEQ ID NO: 12421 - RNA, 19 nt, Artificial Sequence
  Description of Artificial Sequence: Synthetic oligonucleotide
uacguugguaacagcugau

SEQ ID NO: 12422 - RNA, 19 nt, Artificial Sequence
  Description of Artificial Sequence: Synthetic oligonucleotide
guucuuugcguaagggcug

SEQ ID NO: 12423 - RNA, 19 nt, Artificial Sequence
  Description of Artificial Sequence: Synthetic oligonucleotide
uucuacuauuagaccaauu

SEQ ID NO: 12424 - RNA, 19 nt, Artificial Sequence
  Description of Artificial Sequence: Synthetic oligonucleotide
cauaaugaccggugcaaaa

SEQ ID NO: 12425 - RNA, 19 nt, Artificial Sequence
  Description of Artificial Sequence: Synthetic oligonucleotide
gccuuaaacuuuuaacaga

SEQ ID NO: 12426 - RNA, 19 nt, Artificial Sequence
  Description of Artificial Sequence: Synthetic oligonucleotide
gcuaauuacguugguaaca

SEQ ID NO: 12427 - RNA, 19 nt, Artificial Sequence
  Description of Artificial Sequence: Synthetic oligonucleotide
accaagcaccuaauuuugg

SEQ ID NO: 12428 - RNA, 19 nt, Artificial Sequence
  Description of Artificial Sequence: Synthetic oligonucleotide
agccacggaaauccaaaau

SEQ ID NO: 12429 - RNA, 19 nt, Artificial Sequence
  Description of Artificial Sequence: Synthetic oligonucleotide
acacauaugcucagucucu

SEQ ID NO: 12430 - RNA, 19 nt, Artificial Sequence
  Description of Artificial Sequence: Synthetic oligonucleotide
cacuauacggacagcagcu

SEQ ID NO: 12431 - RNA, 19 nt, Artificial Sequence
  Description of Artificial Sequence: Synthetic oligonucleotide
caggaauugcuugauagua

SEQ ID NO: 12432 - RNA, 19 nt, Artificial Sequence
  Description of Artificial Sequence: Synthetic oligonucleotide
uucuuugcguaagggcugu

SEQ ID NO: 12433 - RNA, 19 nt, Artificial Sequence
  Description of Artificial Sequence: Synthetic oligonucleotide
aucggacuuauaaaaguua

SEQ ID NO: 12434 - RNA, 19 nt, Artificial Sequence
  Description of Artificial Sequence: Synthetic oligonucleotide
gaccuaauucaaucagaua

SEQ ID NO: 12435 - RNA, 19 nt, Artificial Sequence
  Description of Artificial Sequence: Synthetic oligonucleotide
gccacggaaauccaaaaua

SEQ ID NO: 12436 - RNA, 19 nt, Artificial Sequence
  Description of Artificial Sequence: Synthetic oligonucleotide
ugguuaccaagcaccuaau

SEQ ID NO: 12437 - RNA, 19 nt, Artificial Sequence
  Description of Artificial Sequence: Synthetic oligonucleotide
aacaagccacggaaaucca

SEQ ID NO: 12438 - RNA, 19 nt, Artificial Sequence
  Description of Artificial Sequence: Synthetic oligonucleotide
cugcacuauacggacagca

SEQ ID NO: 12439 - RNA, 19 nt, Artificial Sequence
  Description of Artificial Sequence: Synthetic oligonucleotide
aucuuaucucaaagcacca

SEQ ID NO: 12440 - RNA, 19 nt, Artificial Sequence
  Description of Artificial Sequence: Synthetic oligonucleotide
uuacuaggacguugccaaa

SEQ ID NO: 12441 - RNA, 19 nt, Artificial Sequence
  Description of Artificial Sequence: Synthetic oligonucleotide
augugguuaccaagcaccu

SEQ ID NO: 12442 - RNA, 19 nt, Artificial Sequence
  Description of Artificial Sequence: Synthetic oligonucleotide
caagcuugguugguaauaa

SEQ ID NO: 12443 - RNA, 19 nt, Artificial Sequence
  Description of Artificial Sequence: Synthetic oligonucleotide
acaacgucacuuauuucua

SEQ ID NO: 12444 - RNA, 19 nt, Artificial Sequence
  Description of Artificial Sequence: Synthetic oligonucleotide
augcaaggcuaauuacguu

SEQ ID NO: 12445 - RNA, 19 nt, Artificial Sequence
  Description of Artificial Sequence: Synthetic oligonucleotide
ccuaauuuuggaaaggcuu

SEQ ID NO: 12446 - RNA, 19 nt, Artificial Sequence
  Description of Artificial Sequence: Synthetic oligonucleotide
gagaguuuguggugaaguu

SEQ ID NO: 12447 - RNA, 19 nt, Artificial Sequence
  Description of Artificial Sequence: Synthetic oligonucleotide
cucgccuaaggucccgguc

SEQ ID NO: 12448 - RNA, 19 nt, Artificial Sequence
  Description of Artificial Sequence: Synthetic oligonucleotide
gccgcucugagccuuuccc

SEQ ID NO: 12449 - RNA, 19 nt, Artificial Sequence
  Description of Artificial Sequence: Synthetic oligonucleotide
ucacucuaacuuggaccug

SEQ ID NO: 12450 - RNA, 19 nt, Artificial Sequence
  Description of Artificial Sequence: Synthetic oligonucleotide
ugugguuaccaagcaccua

SEQ ID NO: 12451 - RNA, 19 nt, Artificial Sequence
  Description of Artificial Sequence: Synthetic oligonucleotide
uuucuucgcucugcuacua

SEQ ID NO: 12452 - RNA, 19 nt, Artificial Sequence
  Description of Artificial Sequence: Synthetic oligonucleotide
ugcaccgccugagcauaag

SEQ ID NO: 12453 - RNA, 19 nt, Artificial Sequence
  Description of Artificial Sequence: Synthetic oligonucleotide
agccgcauaugcaaggcua

SEQ ID NO: 12454 - RNA, 19 nt, Artificial Sequence
  Description of Artificial Sequence: Synthetic oligonucleotide
cugcuuaauuauaaagguu

SEQ ID NO: 12455 - RNA, 19 nt, Artificial Sequence
  Description of Artificial Sequence: Synthetic oligonucleotide
guaucgcuccucacagaug

SEQ ID NO: 12456 - RNA, 19 nt, Artificial Sequence
  Description of Artificial Sequence: Synthetic oligonucleotide
ggauaauaagaguuuuguu

SEQ ID NO: 12457 - RNA, 19 nt, Artificial Sequence
  Description of Artificial Sequence: Synthetic oligonucleotide
acuauacggacagcagcua

SEQ ID NO: 12458 - RNA, 19 nt, Artificial Sequence
  Description of Artificial Sequence: Synthetic oligonucleotide
cugaccuaaaacugaugau

SEQ ID NO: 12459 - RNA, 19 nt, Artificial Sequence
  Description of Artificial Sequence: Synthetic oligonucleotide
cacgucauuccaaaauuuu

SEQ ID NO: 12460 - RNA, 19 nt, Artificial Sequence
  Description of Artificial Sequence: Synthetic oligonucleotide
cugaacuaaaaccccuaau

SEQ ID NO: 12461 - RNA, 19 nt, Artificial Sequence
  Description of Artificial Sequence: Synthetic oligonucleotide
cauaaguugccuccucgau

SEQ ID NO: 12462 - RNA, 19 nt, Artificial Sequence
  Description of Artificial Sequence: Synthetic oligonucleotide
aaguugccuccucgaugaa

SEQ ID NO: 12463 - RNA, 19 nt, Artificial Sequence
  Description of Artificial Sequence: Synthetic oligonucleotide
ggcugaccgauccucuuca

SEQ ID NO: 12464 - RNA, 19 nt, Artificial Sequence
  Description of Artificial Sequence: Synthetic oligonucleotide
cacggaggauaauaagagu

SEQ ID NO: 12465 - RNA, 19 nt, Artificial Sequence
  Description of Artificial Sequence: Synthetic oligonucleotide
uccuuuuauggaggucuuu

SEQ ID NO: 12466 - RNA, 19 nt, Artificial Sequence
  Description of Artificial Sequence: Synthetic oligonucleotide
agacggaaccccagaggca

SEQ ID NO: 12467 - RNA, 19 nt, Artificial Sequence
  Description of Artificial Sequence: Synthetic oligonucleotide
gcauugucccggcacugac

SEQ ID NO: 12468 - RNA, 19 nt, Artificial Sequence
  Description of Artificial Sequence: Synthetic oligonucleotide
cuauacggacagcagcuau

SEQ ID NO: 12469 - RNA, 19 nt, Artificial Sequence
  Description of Artificial Sequence: Synthetic oligonucleotide
ucuuugcguaagggcugug

SEQ ID NO: 12470 - RNA, 19 nt, Artificial Sequence
  Description of Artificial Sequence: Synthetic oligonucleotide
ugccucgccuaaggucccg

SEQ ID NO: 12471 - RNA, 19 nt, Artificial Sequence
  Description of Artificial Sequence: Synthetic oligonucleotide
cuaggacguugccaaaggu

SEQ ID NO: 12472 - RNA, 19 nt, Artificial Sequence
  Description of Artificial Sequence: Synthetic oligonucleotide
ccacacuuacaaauggucu

SEQ ID NO: 12473 - RNA, 19 nt, Artificial Sequence
  Description of Artificial Sequence: Synthetic oligonucleotide
ccacucuaucagugaagag

SEQ ID NO: 12474 - RNA, 19 nt, Artificial Sequence
  Description of Artificial Sequence: Synthetic oligonucleotide
ccgcucugagccuuucccc

SEQ ID NO: 12475 - RNA, 19 nt, Artificial Sequence
  Description of Artificial Sequence: Synthetic oligonucleotide
cacucuaacuuggaccugu

SEQ ID NO: 12476 - RNA, 19 nt, Artificial Sequence
  Description of Artificial Sequence: Synthetic oligonucleotide
guauucguucuuaacccuu

SEQ ID NO: 12477 - RNA, 19 nt, Artificial Sequence
  Description of Artificial Sequence: Synthetic oligonucleotide
agaguucucuagaccuaau

SEQ ID NO: 12478 - RNA, 19 nt, Artificial Sequence
  Description of Artificial Sequence: Synthetic oligonucleotide
gcauuauguuuagcagaug

SEQ ID NO: 12479 - RNA, 19 nt, Artificial Sequence
  Description of Artificial Sequence: Synthetic oligonucleotide
cugaccgauccucuucacu

SEQ ID NO: 12480 - RNA, 19 nt, Artificial Sequence
  Description of Artificial Sequence: Synthetic oligonucleotide
ugcuccgguugaugaucuc

SEQ ID NO: 12481 - RNA, 19 nt, Artificial Sequence
  Description of Artificial Sequence: Synthetic oligonucleotide
acguugccaaagguuguuu

SEQ ID NO: 12482 - RNA, 19 nt, Artificial Sequence
  Description of Artificial Sequence: Synthetic oligonucleotide
cuaagagcgccaacuuguu

SEQ ID NO: 12483 - RNA, 19 nt, Artificial Sequence
  Description of Artificial Sequence: Synthetic oligonucleotide
ccggcaccacaauucugag

SEQ ID NO: 12484 - RNA, 19 nt, Artificial Sequence
  Description of Artificial Sequence: Synthetic oligonucleotide
gucgcauguuugauaccaa

SEQ ID NO: 12485 - RNA, 19 nt, Artificial Sequence
  Description of Artificial Sequence: Synthetic oligonucleotide
caccgccugagcauaaguu

SEQ ID NO: 12486 - RNA, 19 nt, Artificial Sequence
  Description of Artificial Sequence: Synthetic oligonucleotide
gguuaccaagcaccuaauu

SEQ ID NO: 12487 - RNA, 19 nt, Artificial Sequence
  Description of Artificial Sequence: Synthetic oligonucleotide
ccucuuacugacuguauuu

SEQ ID NO: 12488 - RNA, 19 nt, Artificial Sequence
  Description of Artificial Sequence: Synthetic oligonucleotide
auauagcaucggaguucca

SEQ ID NO: 12489 - RNA, 19 nt, Artificial Sequence
  Description of Artificial Sequence: Synthetic oligonucleotide
caaugguauaaagccgcau

SEQ ID NO: 12490 - RNA, 19 nt, Artificial Sequence
  Description of Artificial Sequence: Synthetic oligonucleotide
cgcauguuugauaccaagu

SEQ ID NO: 12491 - RNA, 19 nt, Artificial Sequence
  Description of Artificial Sequence: Synthetic oligonucleotide
guuagccgcucugagccuu

SEQ ID NO: 12492 - RNA, 19 nt, Artificial Sequence
  Description of Artificial Sequence: Synthetic oligonucleotide
gccgcauaugcaaggcuaa

SEQ ID NO: 12493 - RNA, 19 nt, Artificial Sequence
  Description of Artificial Sequence: Synthetic oligonucleotide
ggacguugccaaagguugu

SEQ ID NO: 12494 - RNA, 19 nt, Artificial Sequence
  Description of Artificial Sequence: Synthetic oligonucleotide
gggucuugcuauagucucu

SEQ ID NO: 12495 - RNA, 19 nt, Artificial Sequence
  Description of Artificial Sequence: Synthetic oligonucleotide
gguuagccgcucugagccu

SEQ ID NO: 12496 - RNA, 19 nt, Artificial Sequence
  Description of Artificial Sequence: Synthetic oligonucleotide
ccuguaaugccacgucauu

SEQ ID NO: 12497 - RNA, 19 nt, Artificial Sequence
  Description of Artificial Sequence: Synthetic oligonucleotide
ccuccucgaugaaucaauu

SEQ ID NO: 12498 - RNA, 19 nt, Artificial Sequence
  Description of Artificial Sequence: Synthetic oligonucleotide
ccgagccaccugaugugcu

SEQ ID NO: 12499 - RNA, 19 nt, Artificial Sequence
  Description of Artificial Sequence: Synthetic oligonucleotide
caucauauggccaucaucc

SEQ ID NO: 12500 - RNA, 19 nt, Artificial Sequence
  Description of Artificial Sequence: Synthetic oligonucleotide
aaggggaauacauauuuuc

SEQ ID NO: 12501 - RNA, 19 nt, Artificial Sequence
  Description of Artificial Sequence: Synthetic oligonucleotide
aacucgaucauggauacac

SEQ ID NO: 12502 - RNA, 19 nt, Artificial Sequence
  Description of Artificial Sequence: Synthetic oligonucleotide
ugagacacuguuacaaucg

SEQ ID NO: 12503 - RNA, 19 nt, Artificial Sequence
  Description of Artificial Sequence: Synthetic oligonucleotide
gauguaaggguuguuaucg

SEQ ID NO: 12504 - RNA, 19 nt, Artificial Sequence
  Description of Artificial Sequence: Synthetic oligonucleotide
cuuugaugaaccuauuagg

SEQ ID NO: 12505 - RNA, 19 nt, Artificial Sequence
  Description of Artificial Sequence: Synthetic oligonucleotide
uaauccaucggaaaggcac

SEQ ID NO: 12506 - RNA, 19 nt, Artificial Sequence
  Description of Artificial Sequence: Synthetic oligonucleotide
aaaauuugaggcuuccccu

SEQ ID NO: 12507 - RNA, 19 nt, Artificial Sequence
  Description of Artificial Sequence: Synthetic oligonucleotide
cauuugcccaauuagagag

SEQ ID NO: 12508 - RNA, 19 nt, Artificial Sequence
  Description of Artificial Sequence: Synthetic oligonucleotide
guuaucguaagacauuucc

SEQ ID NO: 12509 - RNA, 19 nt, Artificial Sequence
  Description of Artificial Sequence: Synthetic oligonucleotide
aauuauccagagcuaauca

SEQ ID NO: 12510 - RNA, 19 nt, Artificial Sequence
  Description of Artificial Sequence: Synthetic oligonucleotide
ugaugaaccuauuaggaga

SEQ ID NO: 12511 - RNA, 19 nt, Artificial Sequence
  Description of Artificial Sequence: Synthetic oligonucleotide
ugugauucggcuccguggg

SEQ ID NO: 12512 - RNA, 19 nt, Artificial Sequence
  Description of Artificial Sequence: Synthetic oligonucleotide
aucggaaaggcacacgugg

SEQ ID NO: 12513 - RNA, 19 nt, Artificial Sequence
  Description of Artificial Sequence: Synthetic oligonucleotide
gaaauuagcaccacaaaca

SEQ ID NO: 12514 - RNA, 19 nt, Artificial Sequence
  Description of Artificial Sequence: Synthetic oligonucleotide
gaacacugggguaugaugg

SEQ ID NO: 12515 - RNA, 19 nt, Artificial Sequence
  Description of Artificial Sequence: Synthetic oligonucleotide
aagucguugaacaugauau

SEQ ID NO: 12516 - RNA, 19 nt, Artificial Sequence
  Description of Artificial Sequence: Synthetic oligonucleotide
auacaguguauccuuuggc

SEQ ID NO: 12517 - RNA, 19 nt, Artificial Sequence
  Description of Artificial Sequence: Synthetic oligonucleotide
cugggaaaccucuugagcc

SEQ ID NO: 12518 - RNA, 19 nt, Artificial Sequence
  Description of Artificial Sequence: Synthetic oligonucleotide
uugaugaaccuauuaggag

SEQ ID NO: 12519 - RNA, 19 nt, Artificial Sequence
  Description of Artificial Sequence: Synthetic oligonucleotide
aauuuauugcacguucuug

SEQ ID NO: 12520 - RNA, 19 nt, Artificial Sequence
  Description of Artificial Sequence: Synthetic oligonucleotide
cauucagcaacugaacucg

SEQ ID NO: 12521 - RNA, 19 nt, Artificial Sequence
  Description of Artificial Sequence: Synthetic oligonucleotide
ucuauuuacguuucccugu

SEQ ID NO: 12522 - RNA, 19 nt, Artificial Sequence
  Description of Artificial Sequence: Synthetic oligonucleotide
uuuggcgaccuuuacaaga

SEQ ID NO: 12523 - RNA, 19 nt, Artificial Sequence
  Description of Artificial Sequence: Synthetic oligonucleotide
uuauccagagcuaaucaaa

SEQ ID NO: 12524 - RNA, 19 nt, Artificial Sequence
  Description of Artificial Sequence: Synthetic oligonucleotide
aaggucauuuguaccacgc

SEQ ID NO: 12525 - RNA, 19 nt, Artificial Sequence
  Description of Artificial Sequence: Synthetic oligonucleotide
gaaauugcaguagacuuug

SEQ ID NO: 12526 - RNA, 19 nt, Artificial Sequence
  Description of Artificial Sequence: Synthetic oligonucleotide
uguaacuuggaagggacug

SEQ ID NO: 12527 - RNA, 19 nt, Artificial Sequence
  Description of Artificial Sequence: Synthetic oligonucleotide
gaucccacgaagaccaucg

SEQ ID NO: 12528 - RNA, 19 nt, Artificial Sequence
  Description of Artificial Sequence: Synthetic oligonucleotide
aauugcaguagacuuugaa

SEQ ID NO: 12529 - RNA, 19 nt, Artificial Sequence
  Description of Artificial Sequence: Synthetic oligonucleotide
accaucuugaccugcgggg

SEQ ID NO: 12530 - RNA, 19 nt, Artificial Sequence
  Description of Artificial Sequence: Synthetic oligonucleotide
uaucauagcguucuauuua

SEQ ID NO: 12531 - RNA, 19 nt, Artificial Sequence
  Description of Artificial Sequence: Synthetic oligonucleotide
augagcacggggcaccugc

SEQ ID NO: 12532 - RNA, 19 nt, Artificial Sequence
  Description of Artificial Sequence: Synthetic oligonucleotide
aggaaggucauuuguacca

SEQ ID NO: 12533 - RNA, 19 nt, Artificial Sequence
  Description of Artificial Sequence: Synthetic oligonucleotide
aaagucguugaacaugaua

SEQ ID NO: 12534 - RNA, 19 nt, Artificial Sequence
  Description of Artificial Sequence: Synthetic oligonucleotide
ugggguguaaacaguaacu

SEQ ID NO: 12535 - RNA, 19 nt, Artificial Sequence
  Description of Artificial Sequence: Synthetic oligonucleotide
augacauuuggccucugag

SEQ ID NO: 12536 - RNA, 19 nt, Artificial Sequence
  Description of Artificial Sequence: Synthetic oligonucleotide
augugauucggcuccgugg

SEQ ID NO: 12537 - RNA, 19 nt, Artificial Sequence
  Description of Artificial Sequence: Synthetic oligonucleotide
agcaccuuuaauccaucgg

SEQ ID NO: 12538 - RNA, 19 nt, Artificial Sequence
  Description of Artificial Sequence: Synthetic oligonucleotide
ugacuaagcaaauuuccaa

SEQ ID NO: 12539 - RNA, 19 nt, Artificial Sequence
  Description of Artificial Sequence: Synthetic oligonucleotide
aaaccgaaucacaugaccu

SEQ ID NO: 12540 - RNA, 19 nt, Artificial Sequence
  Description of Artificial Sequence: Synthetic oligonucleotide
uaaggguuguuaucguaag

SEQ ID NO: 12541 - RNA, 19 nt, Artificial Sequence
  Description of Artificial Sequence: Synthetic oligonucleotide
uaucagugcaggcacccag

SEQ ID NO: 12542 - RNA, 19 nt, Artificial Sequence
  Description of Artificial Sequence: Synthetic oligonucleotide
ucguugaacaugauaucca

SEQ ID NO: 12543 - RNA, 19 nt, Artificial Sequence
  Description of Artificial Sequence: Synthetic oligonucleotide
uaaacauauuuuagagcac

SEQ ID NO: 12544 - RNA, 19 nt, Artificial Sequence
  Description of Artificial Sequence: Synthetic oligonucleotide
uucuaagccggcuucuccc

SEQ ID NO: 12545 - RNA, 19 nt, Artificial Sequence
  Description of Artificial Sequence: Synthetic oligonucleotide
aacgggacagagugagagg

SEQ ID NO: 12546 - RNA, 19 nt, Artificial Sequence
  Description of Artificial Sequence: Synthetic oligonucleotide
aggucauuuguaccacgcc

SEQ ID NO: 12547 - RNA, 19 nt, Artificial Sequence
  Description of Artificial Sequence: Synthetic oligonucleotide
ugaaccuauuaggagagcu

SEQ ID NO: 12548 - RNA, 19 nt, Artificial Sequence
  Description of Artificial Sequence: Synthetic oligonucleotide
uugggaucgacccaguauu

SEQ ID NO: 12549 - RNA, 19 nt, Artificial Sequence
  Description of Artificial Sequence: Synthetic oligonucleotide
caauccuggucauuucugg

SEQ ID NO: 12550 - RNA, 19 nt, Artificial Sequence
  Description of Artificial Sequence: Synthetic oligonucleotide
aucgauguuccgccgaguc

SEQ ID NO: 12551 - RNA, 19 nt, Artificial Sequence
  Description of Artificial Sequence: Synthetic oligonucleotide
ugaauucacugaaccagga

SEQ ID NO: 12552 - RNA, 19 nt, Artificial Sequence
  Description of Artificial Sequence: Synthetic oligonucleotide
acgaacaccuuugaugaac

SEQ ID NO: 12553 - RNA, 19 nt, Artificial Sequence
  Description of Artificial Sequence: Synthetic oligonucleotide
agucguugaacaugauauc

SEQ ID NO: 12554 - RNA, 19 nt, Artificial Sequence
  Description of Artificial Sequence: Synthetic oligonucleotide
auuauccagagcuaaucaa

SEQ ID NO: 12555 - RNA, 19 nt, Artificial Sequence
  Description of Artificial Sequence: Synthetic oligonucleotide
uguauugaggguuguuuaa

SEQ ID NO: 12556 - RNA, 19 nt, Artificial Sequence
  Description of Artificial Sequence: Synthetic oligonucleotide
uuaaaauuugaggcuuccc

SEQ ID NO: 12557 - RNA, 19 nt, Artificial Sequence
  Description of Artificial Sequence: Synthetic oligonucleotide
gucguugaacaugauaucc

SEQ ID NO: 12558 - RNA, 19 nt, Artificial Sequence
  Description of Artificial Sequence: Synthetic oligonucleotide
uuagagcacucuucugggg

SEQ ID NO: 12559 - RNA, 19 nt, Artificial Sequence
  Description of Artificial Sequence: Synthetic oligonucleotide
aucccgucuguccagguuc

SEQ ID NO: 12560 - RNA, 19 nt, Artificial Sequence
  Description of Artificial Sequence: Synthetic oligonucleotide
ucauagcguucuauuuacg

SEQ ID NO: 12561 - RNA, 19 nt, Artificial Sequence
  Description of Artificial Sequence: Synthetic oligonucleotide
gaccaucuugaccugcggg

SEQ ID NO: 12562 - RNA, 19 nt, Artificial Sequence
  Description of Artificial Sequence: Synthetic oligonucleotide
uguaaucccacuggccccg

SEQ ID NO: 12563 - RNA, 19 nt, Artificial Sequence
  Description of Artificial Sequence: Synthetic oligonucleotide
uuggcgaccuuuacaagac

SEQ ID NO: 12564 - RNA, 19 nt, Artificial Sequence
  Description of Artificial Sequence: Synthetic oligonucleotide
uagcguucuauuuacguuu

SEQ ID NO: 12565 - RNA, 19 nt, Artificial Sequence
  Description of Artificial Sequence: Synthetic oligonucleotide
aucaugagcacggggcacc

SEQ ID NO: 12566 - RNA, 19 nt, Artificial Sequence
  Description of Artificial Sequence: Synthetic oligonucleotide
uuuacguuucccuguguau

SEQ ID NO: 12567 - RNA, 19 nt, Artificial Sequence
  Description of Artificial Sequence: Synthetic oligonucleotide
auuuuagagcacucuucug

SEQ ID NO: 12568 - RNA, 19 nt, Artificial Sequence
  Description of Artificial Sequence: Synthetic oligonucleotide
uuggaagccggucucgccu

SEQ ID NO: 12569 - RNA, 19 nt, Artificial Sequence
  Description of Artificial Sequence: Synthetic oligonucleotide
acugggguaugauggcugg

SEQ ID NO: 12570 - RNA, 19 nt, Artificial Sequence
  Description of Artificial Sequence: Synthetic oligonucleotide
uggguuuccaugcaagauu

SEQ ID NO: 12571 - RNA, 19 nt, Artificial Sequence
  Description of Artificial Sequence: Synthetic oligonucleotide
uuucucaugcagaggcaug

SEQ ID NO: 12572 - RNA, 19 nt, Artificial Sequence
  Description of Artificial Sequence: Synthetic oligonucleotide
aaccgaaucacaugaccua

SEQ ID NO: 12573 - RNA, 19 nt, Artificial Sequence
  Description of Artificial Sequence: Synthetic oligonucleotide
uuauugagacacuguuaca

SEQ ID NO: 12574 - RNA, 19 nt, Artificial Sequence
  Description of Artificial Sequence: Synthetic oligonucleotide
aaggguuguuaucguaaga

SEQ ID NO: 12575 - RNA, 19 nt, Artificial Sequence
  Description of Artificial Sequence: Synthetic oligonucleotide
acuucaauacaaauuguaa

SEQ ID NO: 12576 - RNA, 19 nt, Artificial Sequence
  Description of Artificial Sequence: Synthetic oligonucleotide
uuaauccaucggaaaggca

SEQ ID NO: 12577 - RNA, 19 nt, Artificial Sequence
  Description of Artificial Sequence: Synthetic oligonucleotide
aagaccggugggcucagca

SEQ ID NO: 12578 - RNA, 19 nt, Artificial Sequence
  Description of Artificial Sequence: Synthetic oligonucleotide
aguauucaccgucugggaa

SEQ ID NO: 12579 - RNA, 19 nt, Artificial Sequence
  Description of Artificial Sequence: Synthetic oligonucleotide
ucgaucauggauacacaau

SEQ ID NO: 12580 - RNA, 19 nt, Artificial Sequence
  Description of Artificial Sequence: Synthetic oligonucleotide
agcaaucaggauuaauuua

SEQ ID NO: 12581 - RNA, 19 nt, Artificial Sequence
  Description of Artificial Sequence: Synthetic oligonucleotide
caggaaggucauuuguacc

SEQ ID NO: 12582 - RNA, 19 nt, Artificial Sequence
  Description of Artificial Sequence: Synthetic oligonucleotide
auuuacguuucccugugua

SEQ ID NO: 12583 - RNA, 19 nt, Artificial Sequence
  Description of Artificial Sequence: Synthetic oligonucleotide
auagcguucuauuuacguu

SEQ ID NO: 12584 - RNA, 19 nt, Artificial Sequence
  Description of Artificial Sequence: Synthetic oligonucleotide
aguaacuccuuuauugaga

SEQ ID NO: 12585 - RNA, 19 nt, Artificial Sequence
  Description of Artificial Sequence: Synthetic oligonucleotide
aucauggauacacaaugua

SEQ ID NO: 12586 - RNA, 19 nt, Artificial Sequence
  Description of Artificial Sequence: Synthetic oligonucleotide
gacacauguggacccuccg

SEQ ID NO: 12587 - RNA, 19 nt, Artificial Sequence
  Description of Artificial Sequence: Synthetic oligonucleotide
guccaaugaguccaaucag

SEQ ID NO: 12588 - RNA, 19 nt, Artificial Sequence
  Description of Artificial Sequence: Synthetic oligonucleotide
gaaccuauuaggagagcug

SEQ ID NO: 12589 - RNA, 19 nt, Artificial Sequence
  Description of Artificial Sequence: Synthetic oligonucleotide
acguggaaugacauuuggc

SEQ ID NO: 12590 - RNA, 19 nt, Artificial Sequence
  Description of Artificial Sequence: Synthetic oligonucleotide
ucgauguuccgccgagucc

SEQ ID NO: 12591 - RNA, 19 nt, Artificial Sequence
  Description of Artificial Sequence: Synthetic oligonucleotide
uuguuaucguaagacauuu

SEQ ID NO: 12592 - RNA, 19 nt, Artificial Sequence
  Description of Artificial Sequence: Synthetic oligonucleotide
cugaacucgaucauggaua

SEQ ID NO: 12593 - RNA, 19 nt, Artificial Sequence
  Description of Artificial Sequence: Synthetic oligonucleotide
acgcucucccauuggaccg

SEQ ID NO: 12594 - RNA, 19 nt, Artificial Sequence
  Description of Artificial Sequence: Synthetic oligonucleotide
cauaccauccuuggcacac

SEQ ID NO: 12595 - RNA, 19 nt, Artificial Sequence
  Description of Artificial Sequence: Synthetic oligonucleotide
ugggaaaccucuugagccu

SEQ ID NO: 12596 - RNA, 19 nt, Artificial Sequence
  Description of Artificial Sequence: Synthetic oligonucleotide
aauccacagggcaucauau

SEQ ID NO: 12597 - RNA, 19 nt, Artificial Sequence
  Description of Artificial Sequence: Synthetic oligonucleotide
cuucuaagccggcuucucc

SEQ ID NO: 12598 - RNA, 19 nt, Artificial Sequence
  Description of Artificial Sequence: Synthetic oligonucleotide
gagagagcacacaccagag

SEQ ID NO: 12599 - RNA, 19 nt, Artificial Sequence
  Description of Artificial Sequence: Synthetic oligonucleotide
aguagacuuugaaggaguc

SEQ ID NO: 12600 - RNA, 19 nt, Artificial Sequence
  Description of Artificial Sequence: Synthetic oligonucleotide
aauccaucggaaaggcaca

SEQ ID NO: 12601 - RNA, 19 nt, Artificial Sequence
  Description of Artificial Sequence: Synthetic oligonucleotide
gcaagauugaaagccaggc

SEQ ID NO: 12602 - RNA, 19 nt, Artificial Sequence
  Description of Artificial Sequence: Synthetic oligonucleotide
gggugagaaauguucacug

SEQ ID NO: 12603 - RNA, 19 nt, Artificial Sequence
  Description of Artificial Sequence: Synthetic oligonucleotide
ccaaugaguccaaucaggc

SEQ ID NO: 12604 - RNA, 19 nt, Artificial Sequence
  Description of Artificial Sequence: Synthetic oligonucleotide
ugaagauaagguggacuga

SEQ ID NO: 12605 - RNA, 19 nt, Artificial Sequence
  Description of Artificial Sequence: Synthetic oligonucleotide
gaucgacccaguauucacc

SEQ ID NO: 12606 - RNA, 19 nt, Artificial Sequence
  Description of Artificial Sequence: Synthetic oligonucleotide
ggcaaaaucucagaaugug

SEQ ID NO: 12607 - RNA, 19 nt, Artificial Sequence
  Description of Artificial Sequence: Synthetic oligonucleotide
agaaaccgaaucacaugac

SEQ ID NO: 12608 - RNA, 19 nt, Artificial Sequence
  Description of Artificial Sequence: Synthetic oligonucleotide
agucuugccuuggaagccg

SEQ ID NO: 12609 - RNA, 19 nt, Artificial Sequence
  Description of Artificial Sequence: Synthetic oligonucleotide
auacccuguucuccuuugg

SEQ ID NO: 12610 - RNA, 19 nt, Artificial Sequence
  Description of Artificial Sequence: Synthetic oligonucleotide
aguguauccuuuggccugg

SEQ ID NO: 12611 - RNA, 19 nt, Artificial Sequence
  Description of Artificial Sequence: Synthetic oligonucleotide
aggggaauacauauuuuca

SEQ ID NO: 12612 - RNA, 19 nt, Artificial Sequence
  Description of Artificial Sequence: Synthetic oligonucleotide
cuuccauaccauccuuggc

SEQ ID NO: 12613 - RNA, 19 nt, Artificial Sequence
  Description of Artificial Sequence: Synthetic oligonucleotide
guauucaccgucugggaaa

SEQ ID NO: 12614 - RNA, 19 nt, Artificial Sequence
  Description of Artificial Sequence: Synthetic oligonucleotide
aucauauggccaucaucca

SEQ ID NO: 12615 - RNA, 19 nt, Artificial Sequence
  Description of Artificial Sequence: Synthetic oligonucleotide
agagcaguuucccacgcuu

SEQ ID NO: 12616 - RNA, 19 nt, Artificial Sequence
  Description of Artificial Sequence: Synthetic oligonucleotide
aguucacgaacaccuuuga

SEQ ID NO: 12617 - RNA, 19 nt, Artificial Sequence
  Description of Artificial Sequence: Synthetic oligonucleotide
gaauucacugaaccaggaa

SEQ ID NO: 12618 - RNA, 19 nt, Artificial Sequence
  Description of Artificial Sequence: Synthetic oligonucleotide
gcaccuuuaauccaucgga

SEQ ID NO: 12619 - RNA, 19 nt, Artificial Sequence
  Description of Artificial Sequence: Synthetic oligonucleotide
ucuaagccggcuucucccu

SEQ ID NO: 12620 - RNA, 19 nt, Artificial Sequence
  Description of Artificial Sequence: Synthetic oligonucleotide
guagacuuugaaggagucc

SEQ ID NO: 12621 - RNA, 19 nt, Artificial Sequence
  Description of Artificial Sequence: Synthetic oligonucleotide
ggcuaggucaugugauucg

SEQ ID NO: 12622 - RNA, 19 nt, Artificial Sequence
  Description of Artificial Sequence: Synthetic oligonucleotide
ucguagcugccuguggcgg

SEQ ID NO: 12623 - RNA, 19 nt, Artificial Sequence
  Description of Artificial Sequence: Synthetic oligonucleotide
ggagccgcaaaguccauug

SEQ ID NO: 12624 - RNA, 19 nt, Artificial Sequence
  Description of Artificial Sequence: Synthetic oligonucleotide
uccuugcagguacgggcgg

SEQ ID NO: 12625 - RNA, 19 nt, Artificial Sequence
  Description of Artificial Sequence: Synthetic oligonucleotide
uucagcaacugaacucgau

SEQ ID NO: 12626 - RNA, 19 nt, Artificial Sequence
  Description of Artificial Sequence: Synthetic oligonucleotide
ugacucccggccaacaguu

SEQ ID NO: 12627 - RNA, 19 nt, Artificial Sequence
  Description of Artificial Sequence: Synthetic oligonucleotide
agaccggugggcucagcag

SEQ ID NO: 12628 - RNA, 19 nt, Artificial Sequence
  Description of Artificial Sequence: Synthetic oligonucleotide
cauuuccucgucguuggag

SEQ ID NO: 12629 - RNA, 19 nt, Artificial Sequence
  Description of Artificial Sequence: Synthetic oligonucleotide
cacgcuugaauucacugaa

SEQ ID NO: 12630 - RNA, 19 nt, Artificial Sequence
  Description of Artificial Sequence: Synthetic oligonucleotide
guaaggguuguuaucguaa

SEQ ID NO: 12631 - RNA, 19 nt, Artificial Sequence
  Description of Artificial Sequence: Synthetic oligonucleotide
uacguuucccuguguauuu

SEQ ID NO: 12632 - RNA, 19 nt, Artificial Sequence
  Description of Artificial Sequence: Synthetic oligonucleotide
cuuuggcgaccuuuacaag

SEQ ID NO: 12633 - RNA, 19 nt, Artificial Sequence
  Description of Artificial Sequence: Synthetic oligonucleotide
ucugaucuuuagguccuug

SEQ ID NO: 12634 - RNA, 19 nt, Artificial Sequence
  Description of Artificial Sequence: Synthetic oligonucleotide
uugggcgugucgaucucca

SEQ ID NO: 12635 - RNA, 19 nt, Artificial Sequence
  Description of Artificial Sequence: Synthetic oligonucleotide
gacccguugggccucucug

SEQ ID NO: 12636 - RNA, 19 nt, Artificial Sequence
  Description of Artificial Sequence: Synthetic oligonucleotide
uccaucggaaaggcacacg

SEQ ID NO: 12637 - RNA, 19 nt, Artificial Sequence
  Description of Artificial Sequence: Synthetic oligonucleotide
auguaaggguuguuaucgu

SEQ ID NO: 12638 - RNA, 19 nt, Artificial Sequence
  Description of Artificial Sequence: Synthetic oligonucleotide
agcguucuauuuacguuuc

SEQ ID NO: 12639 - RNA, 19 nt, Artificial Sequence
  Description of Artificial Sequence: Synthetic oligonucleotide
cucuccguuggcaccuggg

SEQ ID NO: 12640 - RNA, 19 nt, Artificial Sequence
  Description of Artificial Sequence: Synthetic oligonucleotide
cucgaucauggauacacaa

SEQ ID NO: 12641 - RNA, 19 nt, Artificial Sequence
  Description of Artificial Sequence: Synthetic oligonucleotide
caucggaaaggcacacgug

SEQ ID NO: 12642 - RNA, 19 nt, Artificial Sequence
  Description of Artificial Sequence: Synthetic oligonucleotide
ucccugugaugccccgugg

SEQ ID NO: 12643 - RNA, 19 nt, Artificial Sequence
  Description of Artificial Sequence: Synthetic oligonucleotide
agaacaccccucuggugga

SEQ ID NO: 12644 - RNA, 19 nt, Artificial Sequence
  Description of Artificial Sequence: Synthetic oligonucleotide
aaagggucugaggucuuau

SEQ ID NO: 12645 - RNA, 19 nt, Artificial Sequence
  Description of Artificial Sequence: Synthetic oligonucleotide
auccaucggaaaggcacac

SEQ ID NO: 12646 - RNA, 19 nt, Artificial Sequence
  Description of Artificial Sequence: Synthetic oligonucleotide
cagggaucccacgaagacc

SEQ ID NO: 12647 - RNA, 19 nt, Artificial Sequence
  Description of Artificial Sequence: Synthetic oligonucleotide
ugauucggcuccgugggaa

SEQ ID NO: 12648 - RNA, 19 nt, Artificial Sequence
  Description of Artificial Sequence: Synthetic oligonucleotide
gauucggcuccgugggaac

SEQ ID NO: 12649 - RNA, 19 nt, Artificial Sequence
  Description of Artificial Sequence: Synthetic oligonucleotide
ggaucgacccaguauucac

SEQ ID NO: 12650 - RNA, 19 nt, Artificial Sequence
  Description of Artificial Sequence: Synthetic oligonucleotide
gccaggauaaaggaaggug

SEQ ID NO: 12651 - RNA, 19 nt, Artificial Sequence
  Description of Artificial Sequence: Synthetic oligonucleotide
cucccauuggaccgguuuc

SEQ ID NO: 12652 - RNA, 19 nt, Artificial Sequence
  Description of Artificial Sequence: Synthetic oligonucleotide
gcuaggucaugugauucgg

SEQ ID NO: 12653 - RNA, 19 nt, Artificial Sequence
  Description of Artificial Sequence: Synthetic oligonucleotide
uggcgaccuuuacaagacc

SEQ ID NO: 12654 - RNA, 19 nt, Artificial Sequence
  Description of Artificial Sequence: Synthetic oligonucleotide
uggcuaggucaugugauuc

SEQ ID NO: 12655 - RNA, 19 nt, Artificial Sequence
  Description of Artificial Sequence: Synthetic oligonucleotide
caccccucggacccguugg

SEQ ID NO: 12656 - RNA, 19 nt, Artificial Sequence
  Description of Artificial Sequence: Synthetic oligonucleotide
cauuuggccucugagugga

SEQ ID NO: 12657 - RNA, 19 nt, Artificial Sequence
  Description of Artificial Sequence: Synthetic oligonucleotide
ccuauuaggagagcugcag

SEQ ID NO: 12658 - RNA, 19 nt, Artificial Sequence
  Description of Artificial Sequence: Synthetic oligonucleotide
guaacuuggaagggacuga

SEQ ID NO: 12659 - RNA, 19 nt, Artificial Sequence
  Description of Artificial Sequence: Synthetic oligonucleotide
ugaggucacgaaguugcuc

SEQ ID NO: 12660 - RNA, 19 nt, Artificial Sequence
  Description of Artificial Sequence: Synthetic oligonucleotide
ggguuguuaucguaagaca

SEQ ID NO: 12661 - RNA, 19 nt, Artificial Sequence
  Description of Artificial Sequence: Synthetic oligonucleotide
cauuggaccgguuucuccu

SEQ ID NO: 12662 - RNA, 19 nt, Artificial Sequence
  Description of Artificial Sequence: Synthetic oligonucleotide
guguggcuaggucauguga

SEQ ID NO: 12663 - RNA, 19 nt, Artificial Sequence
  Description of Artificial Sequence: Synthetic oligonucleotide
caccuuuaauccaucggaa

SEQ ID NO: 12664 - RNA, 19 nt, Artificial Sequence
  Description of Artificial Sequence: Synthetic oligonucleotide
cuuugggccaagaagugau

SEQ ID NO: 12665 - RNA, 19 nt, Artificial Sequence
  Description of Artificial Sequence: Synthetic oligonucleotide
cauguaucaagucuuuguu

SEQ ID NO: 12666 - RNA, 19 nt, Artificial Sequence
  Description of Artificial Sequence: Synthetic oligonucleotide
gcaucauauggccaucauc

SEQ ID NO: 12667 - RNA, 19 nt, Artificial Sequence
  Description of Artificial Sequence: Synthetic oligonucleotide
aaguugcucugaagaccgg

SEQ ID NO: 12668 - RNA, 19 nt, Artificial Sequence
  Description of Artificial Sequence: Synthetic oligonucleotide
ggaccgguuucuccugugg

SEQ ID NO: 12669 - RNA, 19 nt, Artificial Sequence
  Description of Artificial Sequence: Synthetic oligonucleotide
ucccacgcuugaauucacu

SEQ ID NO: 12670 - RNA, 19 nt, Artificial Sequence
  Description of Artificial Sequence: Synthetic oligonucleotide
ucccggccaacaguucacg

SEQ ID NO: 12671 - RNA, 19 nt, Artificial Sequence
  Description of Artificial Sequence: Synthetic oligonucleotide
aggucacgaaguugcucug

SEQ ID NO: 12672 - RNA, 19 nt, Artificial Sequence
  Description of Artificial Sequence: Synthetic oligonucleotide
agggcgcggauguaagggu

SEQ ID NO: 12673 - RNA, 19 nt, Artificial Sequence
  Description of Artificial Sequence: Synthetic oligonucleotide
ggauuaauuuaagccugug

SEQ ID NO: 12674 - RNA, 19 nt, Artificial Sequence
  Description of Artificial Sequence: Synthetic oligonucleotide
auuugcccaauuagagaga

SEQ ID NO: 12675 - RNA, 19 nt, Artificial Sequence
  Description of Artificial Sequence: Synthetic oligonucleotide
caauuagagagagcacaca

SEQ ID NO: 12676 - RNA, 19 nt, Artificial Sequence
  Description of Artificial Sequence: Synthetic oligonucleotide
cccaauuagagagagcaca

SEQ ID NO: 12677 - RNA, 19 nt, Artificial Sequence
  Description of Artificial Sequence: Synthetic oligonucleotide
uucccacgcuugaauucac

SEQ ID NO: 12678 - RNA, 19 nt, Artificial Sequence
  Description of Artificial Sequence: Synthetic oligonucleotide
gaccagugauacccuguuc

SEQ ID NO: 12679 - RNA, 19 nt, Artificial Sequence
  Description of Artificial Sequence: Synthetic oligonucleotide
uggauguauugaggguugu

SEQ ID NO: 12680 - RNA, 19 nt, Artificial Sequence
  Description of Artificial Sequence: Synthetic oligonucleotide
gguuguuaucguaagacau

SEQ ID NO: 12681 - RNA, 19 nt, Artificial Sequence
  Description of Artificial Sequence: Synthetic oligonucleotide
cguucuauuuacguuuccc

SEQ ID NO: 12682 - RNA, 19 nt, Artificial Sequence
  Description of Artificial Sequence: Synthetic oligonucleotide
caguagacuuugaaggagu

SEQ ID NO: 12683 - RNA, 19 nt, Artificial Sequence
  Description of Artificial Sequence: Synthetic oligonucleotide
gcaucgauguuccgccgag

SEQ ID NO: 12684 - RNA, 19 nt, Artificial Sequence
  Description of Artificial Sequence: Synthetic oligonucleotide
ucggcuccgugggaacacg

SEQ ID NO: 12685 - RNA, 19 nt, Artificial Sequence
  Description of Artificial Sequence: Synthetic oligonucleotide
cagauggaccagguucacc

SEQ ID NO: 12686 - RNA, 19 nt, Artificial Sequence
  Description of Artificial Sequence: Synthetic oligonucleotide
gcucacaaggcagucuggc

SEQ ID NO: 12687 - RNA, 19 nt, Artificial Sequence
  Description of Artificial Sequence: Synthetic oligonucleotide
ccauuggaccgguuucucc

SEQ ID NO: 12688 - RNA, 19 nt, Artificial Sequence
  Description of Artificial Sequence: Synthetic oligonucleotide
ucgacccaguauucaccgu

SEQ ID NO: 12689 - RNA, 19 nt, Artificial Sequence
  Description of Artificial Sequence: Synthetic oligonucleotide
cacacguggaaugacauuu

SEQ ID NO: 12690 - RNA, 19 nt, Artificial Sequence
  Description of Artificial Sequence: Synthetic oligonucleotide
uucggcuccgugggaacac

SEQ ID NO: 12691 - RNA, 19 nt, Artificial Sequence
  Description of Artificial Sequence: Synthetic oligonucleotide
guaccauguaucaagucuu

SEQ ID NO: 12692 - RNA, 19 nt, Artificial Sequence
  Description of Artificial Sequence: Synthetic oligonucleotide
accuauuaggagagcugca

SEQ ID NO: 12693 - RNA, 19 nt, Artificial Sequence
  Description of Artificial Sequence: Synthetic oligonucleotide
guuguuaucguaagacauu

SEQ ID NO: 12694 - RNA, 19 nt, Artificial Sequence
  Description of Artificial Sequence: Synthetic oligonucleotide
ggcgaccuuuacaagacca

SEQ ID NO: 12695 - RNA, 19 nt, Artificial Sequence
  Description of Artificial Sequence: Synthetic oligonucleotide
acucgaucauggauacaca

SEQ ID NO: 12696 - RNA, 19 nt, Artificial Sequence
  Description of Artificial Sequence: Synthetic oligonucleotide
ugaagaccggugggcucag

SEQ ID NO: 12697 - RNA, 19 nt, Artificial Sequence
  Description of Artificial Sequence: Synthetic oligonucleotide
aggcacacguggaaugaca

SEQ ID NO: 12698 - RNA, 19 nt, Artificial Sequence
  Description of Artificial Sequence: Synthetic oligonucleotide
acgcccacaggguugccuu

SEQ ID NO: 12699 - RNA, 19 nt, Artificial Sequence
  Description of Artificial Sequence: Synthetic oligonucleotide
guggccguuucaucugcuc

SEQ ID NO: 12700 - RNA, 19 nt, Artificial Sequence
  Description of Artificial Sequence: Synthetic oligonucleotide
uacgggcgggguucugcug

SEQ ID NO: 12701 - RNA, 19 nt, Artificial Sequence
  Description of Artificial Sequence: Synthetic oligonucleotide
auucggcuccgugggaaca

SEQ ID NO: 12702 - RNA, 19 nt, Artificial Sequence
  Description of Artificial Sequence: Synthetic oligonucleotide
gauguuccgccgaguccug

SEQ ID NO: 12703 - RNA, 19 nt, Artificial Sequence
  Description of Artificial Sequence: Synthetic oligonucleotide
ucaugugauucggcuccgu

SEQ ID NO: 12704 - RNA, 19 nt, Artificial Sequence
  Description of Artificial Sequence: Synthetic oligonucleotide
auguuccgccgaguccugg

SEQ ID NO: 12705 - RNA, 19 nt, Artificial Sequence
  Description of Artificial Sequence: Synthetic oligonucleotide
ggacagagugagaggauga

SEQ ID NO: 12706 - RNA, 19 nt, Artificial Sequence
  Description of Artificial Sequence: Synthetic oligonucleotide
gcucccgagggaccuggcg

SEQ ID NO: 12707 - RNA, 19 nt, Artificial Sequence
  Description of Artificial Sequence: Synthetic oligonucleotide
cgcccuucgggccaguggg

SEQ ID NO: 12708 - RNA, 19 nt, Artificial Sequence
  Description of Artificial Sequence: Synthetic oligonucleotide
ggguccauuggguccccgc

SEQ ID NO: 12709 - RNA, 19 nt, Artificial Sequence
  Description of Artificial Sequence: Synthetic oligonucleotide
gggguaugauggcuggcuc

SEQ ID NO: 12710 - RNA, 19 nt, Artificial Sequence
  Description of Artificial Sequence: Synthetic oligonucleotide
ggggaucccgucuguccag

SEQ ID NO: 12711 - RNA, 19 nt, Artificial Sequence
  Description of Artificial Sequence: Synthetic oligonucleotide
ggcaucgauguuccgccga

SEQ ID NO: 12712 - RNA, 19 nt, Artificial Sequence
  Description of Artificial Sequence: Synthetic oligonucleotide
gacccuccggcugugaaau

SEQ ID NO: 12713 - RNA, 19 nt, Artificial Sequence
  Description of Artificial Sequence: Synthetic oligonucleotide
gaaugacauuuggccucug

SEQ ID NO: 12714 - RNA, 19 nt, Artificial Sequence
  Description of Artificial Sequence: Synthetic oligonucleotide
cuccuaaccuaggaagcaa

SEQ ID NO: 12715 - RNA, 19 nt, Artificial Sequence
  Description of Artificial Sequence: Synthetic oligonucleotide
gcgaccuuuacaagaccac

SEQ ID NO: 12716 - RNA, 19 nt, Artificial Sequence
  Description of Artificial Sequence: Synthetic oligonucleotide
gcguucuauuuacguuucc

SEQ ID NO: 12717 - RNA, 19 nt, Artificial Sequence
  Description of Artificial Sequence: Synthetic oligonucleotide
gaacucgaucauggauaca

SEQ ID NO: 12718 - RNA, 19 nt, Artificial Sequence
  Description of Artificial Sequence: Synthetic oligonucleotide
ggcacggcaggcacccuag

SEQ ID NO: 12719 - RNA, 19 nt, Artificial Sequence
  Description of Artificial Sequence: Synthetic oligonucleotide
gugauucggcuccguggga

SEQ ID NO: 12720 - RNA, 19 nt, Artificial Sequence
  Description of Artificial Sequence: Synthetic oligonucleotide
gggaucccgucuguccagg

SEQ ID NO: 12721 - RNA, 19 nt, Artificial Sequence
  Description of Artificial Sequence: Synthetic oligonucleotide
gggaucgacccaguauuca

SEQ ID NO: 12722 - RNA, 19 nt, Artificial Sequence
  Description of Artificial Sequence: Synthetic oligonucleotide
gaccaucggggccaggcuu

SEQ ID NO: 12723 - RNA, 19 nt, Artificial Sequence
  Description of Artificial Sequence: Synthetic oligonucleotide
ggcgcggauguaaggguug

SEQ ID NO: 12724 - RNA, 19 nt, Artificial Sequence
  Description of Artificial Sequence: Synthetic oligonucleotide
gcggauguaaggguuguua

SEQ ID NO: 12725 - RNA, 19 nt, Artificial Sequence
  Description of Artificial Sequence: Synthetic oligonucleotide
ccaucggaaaggcacacgu

SEQ ID NO: 12726 - RNA, 19 nt, Artificial Sequence
  Description of Artificial Sequence: Synthetic oligonucleotide
ccgcaaaguccauugcaca

SEQ ID NO: 12727 - RNA, 19 nt, Artificial Sequence
  Description of Artificial Sequence: Synthetic oligonucleotide
cacgaacaccuuugaugaa

SEQ ID NO: 12728 - RNA, 19 nt, Artificial Sequence
  Description of Artificial Sequence: Synthetic oligonucleotide
agccugauugcaagcccaa

SEQ ID NO: 12729 - RNA, 19 nt, Artificial Sequence
  Description of Artificial Sequence: Synthetic oligonucleotide
guggcuaggucaugugauu

SEQ ID NO: 12730 - RNA, 19 nt, Artificial Sequence
  Description of Artificial Sequence: Synthetic oligonucleotide
gcaagccggccccacuuca

SEQ ID NO: 12731 - RNA, 19 nt, Artificial Sequence
  Description of Artificial Sequence: Synthetic oligonucleotide
ggcuccgugggaacacggc

SEQ ID NO: 12732 - RNA, 19 nt, Artificial Sequence
  Description of Artificial Sequence: Synthetic oligonucleotide
ccuugcagguacgggcggg

SEQ ID NO: 12733 - RNA, 19 nt, Artificial Sequence
  Description of Artificial Sequence: Synthetic oligonucleotide
gaagaccggugggcucagc

SEQ ID NO: 12734 - RNA, 19 nt, Artificial Sequence
  Description of Artificial Sequence: Synthetic oligonucleotide
cccagccccaucgucuagg

SEQ ID NO: 12735 - RNA, 19 nt, Artificial Sequence
  Description of Artificial Sequence: Synthetic oligonucleotide
gccugauugcaagcccaag

SEQ ID NO: 12736 - RNA, 19 nt, Artificial Sequence
  Description of Artificial Sequence: Synthetic oligonucleotide
gacucccggccaacaguuc

SEQ ID NO: 12737 - RNA, 19 nt, Artificial Sequence
  Description of Artificial Sequence: Synthetic oligonucleotide
guaccacgcccacaggguu

SEQ ID NO: 12738 - RNA, 19 nt, Artificial Sequence
  Description of Artificial Sequence: Synthetic oligonucleotide
gcuccgugggaacacggcu

SEQ ID NO: 12739 - RNA, 19 nt, Artificial Sequence
  Description of Artificial Sequence: Synthetic oligonucleotide
ugccgcccuucucuccguu

SEQ ID NO: 12740 - RNA, 19 nt, Artificial Sequence
  Description of Artificial Sequence: Synthetic oligonucleotide
cgucguuggagcccaagaa

SEQ ID NO: 12741 - RNA, 19 nt, Artificial Sequence
  Description of Artificial Sequence: Synthetic oligonucleotide
ggcacacguggaaugacau

SEQ ID NO: 12742 - RNA, 19 nt, Artificial Sequence
  Description of Artificial Sequence: Synthetic oligonucleotide
ggccgauagggccagucuu

SEQ ID NO: 12743 - RNA, 19 nt, Artificial Sequence
  Description of Artificial Sequence: Synthetic oligonucleotide
ccauaccauccuuggcaca

SEQ ID NO: 12744 - RNA, 19 nt, Artificial Sequence
  Description of Artificial Sequence: Synthetic oligonucleotide
cagcagucccuggcucaug

SEQ ID NO: 12745 - RNA, 19 nt, Artificial Sequence
  Description of Artificial Sequence: Synthetic oligonucleotide
ggcauucaucaauccuggu

SEQ ID NO: 12746 - RNA, 19 nt, Artificial Sequence
  Description of Artificial Sequence: Synthetic oligonucleotide
gcgugucgaucuccagcac

SEQ ID NO: 12747 - RNA, 19 nt, Artificial Sequence
  Description of Artificial Sequence: Synthetic oligonucleotide
cccggugguccugggaaac

SEQ ID NO: 12748 - RNA, 19 nt, Artificial Sequence
  Description of Artificial Sequence: Synthetic oligonucleotide
cgauguuccgccgaguccu

SEQ ID NO: 12749 - RNA, 19 nt, Artificial Sequence
  Description of Artificial Sequence: Synthetic oligonucleotide
ccacauaugagagcaguuu

SEQ ID NO: 12750 - RNA, 19 nt, Artificial Sequence
  Description of Artificial Sequence: Synthetic oligonucleotide
guaugauggcuggcucccu

SEQ ID NO: 12751 - RNA, 19 nt, Artificial Sequence
  Description of Artificial Sequence: Synthetic oligonucleotide
acccuccggcugugaaauu

SEQ ID NO: 12752 - RNA, 19 nt, Artificial Sequence
  Description of Artificial Sequence: Synthetic oligonucleotide
cggauguaaggguuguuau

SEQ ID NO: 12753 - RNA, 19 nt, Artificial Sequence
  Description of Artificial Sequence: Synthetic oligonucleotide
ggagcccaagaagcggaua

SEQ ID NO: 12754 - RNA, 19 nt, Artificial Sequence
  Description of Artificial Sequence: Synthetic oligonucleotide
cccggaacugacaccugua

SEQ ID NO: 12755 - RNA, 19 nt, Artificial Sequence
  Description of Artificial Sequence: Synthetic oligonucleotide
caucgauguuccgccgagu

SEQ ID NO: 12756 - RNA, 19 nt, Artificial Sequence
  Description of Artificial Sequence: Synthetic oligonucleotide
cccggccaacaguucacga

SEQ ID NO: 12757 - RNA, 19 nt, Artificial Sequence
  Description of Artificial Sequence: Synthetic oligonucleotide
cagcaccaauguucauagu

SEQ ID NO: 12758 - RNA, 19 nt, Artificial Sequence
  Description of Artificial Sequence: Synthetic oligonucleotide
ccgagggaccuggcgggcc

SEQ ID NO: 12759 - RNA, 19 nt, Artificial Sequence
  Description of Artificial Sequence: Synthetic oligonucleotide
ggacccguugggccucucu

SEQ ID NO: 12760 - RNA, 19 nt, Artificial Sequence
  Description of Artificial Sequence: Synthetic oligonucleotide
cagguacgggcgggguucu

SEQ ID NO: 12761 - RNA, 19 nt, Artificial Sequence
  Description of Artificial Sequence: Synthetic oligonucleotide
gcgcggauguaaggguugu

SEQ ID NO: 12762 - RNA, 19 nt, Artificial Sequence
  Description of Artificial Sequence: Synthetic oligonucleotide
gggcgcggauguaaggguu

SEQ ID NO: 12763 - RNA, 19 nt, Artificial Sequence
  Description of Artificial Sequence: Synthetic oligonucleotide
ccacuuugggcgugucgau

SEQ ID NO: 12764 - RNA, 19 nt, Artificial Sequence
  Description of Artificial Sequence: Synthetic oligonucleotide
cccagagacuccccaccau

SEQ ID NO: 12765 - RNA, 19 nt, Artificial Sequence
  Description of Artificial Sequence: Synthetic oligonucleotide
cgcggauguaaggguuguu

SEQ ID NO: 12766 - RNA, 19 nt, Artificial Sequence
  Description of Artificial Sequence: Synthetic oligonucleotide
ccgugggaacacggcucuu

SEQ ID NO: 12767 - RNA, 19 nt, Artificial Sequence
  Description of Artificial Sequence: Synthetic oligonucleotide
auuaugaugucacaccucc

SEQ ID NO: 12768 - RNA, 19 nt, Artificial Sequence
  Description of Artificial Sequence: Synthetic oligonucleotide
ugaguuauuaacuggagag

SEQ ID NO: 12769 - RNA, 19 nt, Artificial Sequence
  Description of Artificial Sequence: Synthetic oligonucleotide
uuuaucaggaaacuggaug

SEQ ID NO: 12770 - RNA, 19 nt, Artificial Sequence
  Description of Artificial Sequence: Synthetic oligonucleotide
uuacuaguugaucagauga

SEQ ID NO: 12771 - RNA, 19 nt, Artificial Sequence
  Description of Artificial Sequence: Synthetic oligonucleotide
aguacuaccacacuggcug

SEQ ID NO: 12772 - RNA, 19 nt, Artificial Sequence
  Description of Artificial Sequence: Synthetic oligonucleotide
aaaacugggaaauucuuca

SEQ ID NO: 12773 - RNA, 19 nt, Artificial Sequence
  Description of Artificial Sequence: Synthetic oligonucleotide
acuguuugaagauuggcac

SEQ ID NO: 12774 - RNA, 19 nt, Artificial Sequence
  Description of Artificial Sequence: Synthetic oligonucleotide
ugauaauuuaaacuuuacc

SEQ ID NO: 12775 - RNA, 19 nt, Artificial Sequence
  Description of Artificial Sequence: Synthetic oligonucleotide
aauuucacgaauccguuca

SEQ ID NO: 12776 - RNA, 19 nt, Artificial Sequence
  Description of Artificial Sequence: Synthetic oligonucleotide
uuuacgaggguccagcugc

SEQ ID NO: 12777 - RNA, 19 nt, Artificial Sequence
  Description of Artificial Sequence: Synthetic oligonucleotide
uaaacuuuaccuuccgggg

SEQ ID NO: 12778 - RNA, 19 nt, Artificial Sequence
  Description of Artificial Sequence: Synthetic oligonucleotide
guaccauuccucuaaaugg

SEQ ID NO: 12779 - RNA, 19 nt, Artificial Sequence
  Description of Artificial Sequence: Synthetic oligonucleotide
acagaauccggcuacgggc

SEQ ID NO: 12780 - RNA, 19 nt, Artificial Sequence
  Description of Artificial Sequence: Synthetic oligonucleotide
aacauuguagucccuagug

SEQ ID NO: 12781 - RNA, 19 nt, Artificial Sequence
  Description of Artificial Sequence: Synthetic oligonucleotide
uuaaaacuccuuaaagccc

SEQ ID NO: 12782 - RNA, 19 nt, Artificial Sequence
  Description of Artificial Sequence: Synthetic oligonucleotide
uuauggucgauguugaucu

SEQ ID NO: 12783 - RNA, 19 nt, Artificial Sequence
  Description of Artificial Sequence: Synthetic oligonucleotide
gaaacauaggacauggaag

SEQ ID NO: 12784 - RNA, 19 nt, Artificial Sequence
  Description of Artificial Sequence: Synthetic oligonucleotide
ucuaaggguacauauauau

SEQ ID NO: 12785 - RNA, 19 nt, Artificial Sequence
  Description of Artificial Sequence: Synthetic oligonucleotide
ucauuuuccauccgagagg

SEQ ID NO: 12786 - RNA, 19 nt, Artificial Sequence
  Description of Artificial Sequence: Synthetic oligonucleotide
agcaucaacaauuuacgag

SEQ ID NO: 12787 - RNA, 19 nt, Artificial Sequence
  Description of Artificial Sequence: Synthetic oligonucleotide
ucacgaaaugcucaaauac

SEQ ID NO: 12788 - RNA, 19 nt, Artificial Sequence
  Description of Artificial Sequence: Synthetic oligonucleotide
cuuuacucgauccaguagc

SEQ ID NO: 12789 - RNA, 19 nt, Artificial Sequence
  Description of Artificial Sequence: Synthetic oligonucleotide
aaugguuucagaguugcug

SEQ ID NO: 12790 - RNA, 19 nt, Artificial Sequence
  Description of Artificial Sequence: Synthetic oligonucleotide
agucaaggaaauuuauuuc

SEQ ID NO: 12791 - RNA, 19 nt, Artificial Sequence
  Description of Artificial Sequence: Synthetic oligonucleotide
gcaucaacaauuuacgagg

SEQ ID NO: 12792 - RNA, 19 nt, Artificial Sequence
  Description of Artificial Sequence: Synthetic oligonucleotide
cuucggaugacaaaauggc

SEQ ID NO: 12793 - RNA, 19 nt, Artificial Sequence
  Description of Artificial Sequence: Synthetic oligonucleotide
ucacuuagggucaagcccc

SEQ ID NO: 12794 - RNA, 19 nt, Artificial Sequence
  Description of Artificial Sequence: Synthetic oligonucleotide
auaggguaggguuuacagc

SEQ ID NO: 12795 - RNA, 19 nt, Artificial Sequence
  Description of Artificial Sequence: Synthetic oligonucleotide
uuagcaauaaauggggaug

SEQ ID NO: 12796 - RNA, 19 nt, Artificial Sequence
  Description of Artificial Sequence: Synthetic oligonucleotide
uuuucuaggaacccaagua

SEQ ID NO: 12797 - RNA, 19 nt, Artificial Sequence
  Description of Artificial Sequence: Synthetic oligonucleotide
ugauuaugaugucacaccu

SEQ ID NO: 12798 - RNA, 19 nt, Artificial Sequence
  Description of Artificial Sequence: Synthetic oligonucleotide
gaugcgggcaugcacacgg

SEQ ID NO: 12799 - RNA, 19 nt, Artificial Sequence
  Description of Artificial Sequence: Synthetic oligonucleotide
ugcccaaugacauagcggu

SEQ ID NO: 12800 - RNA, 19 nt, Artificial Sequence
  Description of Artificial Sequence: Synthetic oligonucleotide
gaagcugaccaucaccccg

SEQ ID NO: 12801 - RNA, 19 nt, Artificial Sequence
  Description of Artificial Sequence: Synthetic oligonucleotide
cacuauugugaucaggucc

SEQ ID NO: 12802 - RNA, 19 nt, Artificial Sequence
  Description of Artificial Sequence: Synthetic oligonucleotide
cuugguacgcucauuuucc

SEQ ID NO: 12803 - RNA, 19 nt, Artificial Sequence
  Description of Artificial Sequence: Synthetic oligonucleotide
guauauucaccucaaacuc

SEQ ID NO: 12804 - RNA, 19 nt, Artificial Sequence
  Description of Artificial Sequence: Synthetic oligonucleotide
gaguugugaagcuuggcag

SEQ ID NO: 12805 - RNA, 19 nt, Artificial Sequence
  Description of Artificial Sequence: Synthetic oligonucleotide
aucacuacugacugaggac

SEQ ID NO: 12806 - RNA, 19 nt, Artificial Sequence
  Description of Artificial Sequence: Synthetic oligonucleotide
uggaauuuauggucgaugu

SEQ ID NO: 12807 - RNA, 19 nt, Artificial Sequence
  Description of Artificial Sequence: Synthetic oligonucleotide
uugaauagcuauuuuccac

SEQ ID NO: 12808 - RNA, 19 nt, Artificial Sequence
  Description of Artificial Sequence: Synthetic oligonucleotide
aagccugaguuauuaacug

SEQ ID NO: 12809 - RNA, 19 nt, Artificial Sequence
  Description of Artificial Sequence: Synthetic oligonucleotide
agaguacuaccacacuggc

SEQ ID NO: 12810 - RNA, 19 nt, Artificial Sequence
  Description of Artificial Sequence: Synthetic oligonucleotide
caguauucuucucauaccc

SEQ ID NO: 12811 - RNA, 19 nt, Artificial Sequence
  Description of Artificial Sequence: Synthetic oligonucleotide
aguugugaagcuuggcagg

SEQ ID NO: 12812 - RNA, 19 nt, Artificial Sequence
  Description of Artificial Sequence: Synthetic oligonucleotide
aaauaccuugcuuaguguu

SEQ ID NO: 12813 - RNA, 19 nt, Artificial Sequence
  Description of Artificial Sequence: Synthetic oligonucleotide
uccgcaaccaucuucugca

SEQ ID NO: 12814 - RNA, 19 nt, Artificial Sequence
  Description of Artificial Sequence: Synthetic oligonucleotide
aguagccccgucuuagccc

SEQ ID NO: 12815 - RNA, 19 nt, Artificial Sequence
  Description of Artificial Sequence: Synthetic oligonucleotide
cugacuacaugcugggugg

SEQ ID NO: 12816 - RNA, 19 nt, Artificial Sequence
  Description of Artificial Sequence: Synthetic oligonucleotide
gcuaagcagauuuugacag

SEQ ID NO: 12817 - RNA, 19 nt, Artificial Sequence
  Description of Artificial Sequence: Synthetic oligonucleotide
uucaugagccuuuacacau

SEQ ID NO: 12818 - RNA, 19 nt, Artificial Sequence
  Description of Artificial Sequence: Synthetic oligonucleotide
uuagagucuacagggagcc

SEQ ID NO: 12819 - RNA, 19 nt, Artificial Sequence
  Description of Artificial Sequence: Synthetic oligonucleotide
aaacuuuaccuuccgggga

SEQ ID NO: 12820 - RNA, 19 nt, Artificial Sequence
  Description of Artificial Sequence: Synthetic oligonucleotide
auugaauagcuauuuucca

SEQ ID NO: 12821 - RNA, 19 nt, Artificial Sequence
  Description of Artificial Sequence: Synthetic oligonucleotide
gucacuuagggucaagccc

SEQ ID NO: 12822 - RNA, 19 nt, Artificial Sequence
  Description of Artificial Sequence: Synthetic oligonucleotide
ugaacauuguagucccuag

SEQ ID NO: 12823 - RNA, 19 nt, Artificial Sequence
  Description of Artificial Sequence: Synthetic oligonucleotide
agcaucucgcaccacaaag

SEQ ID NO: 12824 - RNA, 19 nt, Artificial Sequence
  Description of Artificial Sequence: Synthetic oligonucleotide
aacuguuugaagauuggca

SEQ ID NO: 12825 - RNA, 19 nt, Artificial Sequence
  Description of Artificial Sequence: Synthetic oligonucleotide
cuagugaucugcuggauuc

SEQ ID NO: 12826 - RNA, 19 nt, Artificial Sequence
  Description of Artificial Sequence: Synthetic oligonucleotide
uuccccacuauugugauca

SEQ ID NO: 12827 - RNA, 19 nt, Artificial Sequence
  Description of Artificial Sequence: Synthetic oligonucleotide
ucaguauucuucucauacc

SEQ ID NO: 12828 - RNA, 19 nt, Artificial Sequence
  Description of Artificial Sequence: Synthetic oligonucleotide
gccaauuaggaauuugugg

SEQ ID NO: 12829 - RNA, 19 nt, Artificial Sequence
  Description of Artificial Sequence: Synthetic oligonucleotide
ugcuaagcagauuuugaca

SEQ ID NO: 12830 - RNA, 19 nt, Artificial Sequence
  Description of Artificial Sequence: Synthetic oligonucleotide
ugcgaugaaaucuuugcuc

SEQ ID NO: 12831 - RNA, 19 nt, Artificial Sequence
  Description of Artificial Sequence: Synthetic oligonucleotide
gacagaauccggcuacggg

SEQ ID NO: 12832 - RNA, 19 nt, Artificial Sequence
  Description of Artificial Sequence: Synthetic oligonucleotide
cuguagaagugacaguucc

SEQ ID NO: 12833 - RNA, 19 nt, Artificial Sequence
  Description of Artificial Sequence: Synthetic oligonucleotide
gacauagcggugaagauca

SEQ ID NO: 12834 - RNA, 19 nt, Artificial Sequence
  Description of Artificial Sequence: Synthetic oligonucleotide
auagcggugaagaucaaag

SEQ ID NO: 12835 - RNA, 19 nt, Artificial Sequence
  Description of Artificial Sequence: Synthetic oligonucleotide
ucaagcucacccacaaucu

SEQ ID NO: 12836 - RNA, 19 nt, Artificial Sequence
  Description of Artificial Sequence: Synthetic oligonucleotide
gagaugauuaugaugucac

SEQ ID NO: 12837 - RNA, 19 nt, Artificial Sequence
  Description of Artificial Sequence: Synthetic oligonucleotide
ugucacuuagggucaagcc

SEQ ID NO: 12838 - RNA, 19 nt, Artificial Sequence
  Description of Artificial Sequence: Synthetic oligonucleotide
uuagggucaagccccuucc

SEQ ID NO: 12839 - RNA, 19 nt, Artificial Sequence
  Description of Artificial Sequence: Synthetic oligonucleotide
cucaagcucacccacaauc

SEQ ID NO: 12840 - RNA, 19 nt, Artificial Sequence
  Description of Artificial Sequence: Synthetic oligonucleotide
uguuacuaguugaucagau

SEQ ID NO: 12841 - RNA, 19 nt, Artificial Sequence
  Description of Artificial Sequence: Synthetic oligonucleotide
ucguuuggggccccaaggg

SEQ ID NO: 12842 - RNA, 19 nt, Artificial Sequence
  Description of Artificial Sequence: Synthetic oligonucleotide
ugauggagcggaucagacg

SEQ ID NO: 12843 - RNA, 19 nt, Artificial Sequence
  Description of Artificial Sequence: Synthetic oligonucleotide
aauuuauggucgauguuga

SEQ ID NO: 12844 - RNA, 19 nt, Artificial Sequence
  Description of Artificial Sequence: Synthetic oligonucleotide
uucacgaauccguucaccu

SEQ ID NO: 12845 - RNA, 19 nt, Artificial Sequence
  Description of Artificial Sequence: Synthetic oligonucleotide
auguuugcgccuccuuucc

SEQ ID NO: 12846 - RNA, 19 nt, Artificial Sequence
  Description of Artificial Sequence: Synthetic oligonucleotide
uacagcuacagcacuuagc

SEQ ID NO: 12847 - RNA, 19 nt, Artificial Sequence
  Description of Artificial Sequence: Synthetic oligonucleotide
uggggcccaugacagaucg

SEQ ID NO: 12848 - RNA, 19 nt, Artificial Sequence
  Description of Artificial Sequence: Synthetic oligonucleotide
gucccuagugaucugcugg

SEQ ID NO: 12849 - RNA, 19 nt, Artificial Sequence
  Description of Artificial Sequence: Synthetic oligonucleotide
aucguuuggggccccaagg

SEQ ID NO: 12850 - RNA, 19 nt, Artificial Sequence
  Description of Artificial Sequence: Synthetic oligonucleotide
uaagcagauuuugacagcu

SEQ ID NO: 12851 - RNA, 19 nt, Artificial Sequence
  Description of Artificial Sequence: Synthetic oligonucleotide
uacuaguugaucagaugac

SEQ ID NO: 12852 - RNA, 19 nt, Artificial Sequence
  Description of Artificial Sequence: Synthetic oligonucleotide
aggacauguuacuaguuga

SEQ ID NO: 12853 - RNA, 19 nt, Artificial Sequence
  Description of Artificial Sequence: Synthetic oligonucleotide
aauaugaugcgggcuccgg

SEQ ID NO: 12854 - RNA, 19 nt, Artificial Sequence
  Description of Artificial Sequence: Synthetic oligonucleotide
uaaaagaccuguucccagu

SEQ ID NO: 12855 - RNA, 19 nt, Artificial Sequence
  Description of Artificial Sequence: Synthetic oligonucleotide
auuccaccgucacuugagc

SEQ ID NO: 12856 - RNA, 19 nt, Artificial Sequence
  Description of Artificial Sequence: Synthetic oligonucleotide
uucuaggaacccaaguauc

SEQ ID NO: 12857 - RNA, 19 nt, Artificial Sequence
  Description of Artificial Sequence: Synthetic oligonucleotide
aauccuguggugauaauuu

SEQ ID NO: 12858 - RNA, 19 nt, Artificial Sequence
  Description of Artificial Sequence: Synthetic oligonucleotide
agucucuaccuucccuugc

SEQ ID NO: 12859 - RNA, 19 nt, Artificial Sequence
  Description of Artificial Sequence: Synthetic oligonucleotide
guuacuaguugaucagaug

SEQ ID NO: 12860 - RNA, 19 nt, Artificial Sequence
  Description of Artificial Sequence: Synthetic oligonucleotide
gauuuuacggauggcuuug

SEQ ID NO: 12861 - RNA, 19 nt, Artificial Sequence
  Description of Artificial Sequence: Synthetic oligonucleotide
uauggaaacauaggacaug

SEQ ID NO: 12862 - RNA, 19 nt, Artificial Sequence
  Description of Artificial Sequence: Synthetic oligonucleotide
agugacacaauuggggucu

SEQ ID NO: 12863 - RNA, 19 nt, Artificial Sequence
  Description of Artificial Sequence: Synthetic oligonucleotide
caauuuacgaggguccagc

SEQ ID NO: 12864 - RNA, 19 nt, Artificial Sequence
  Description of Artificial Sequence: Synthetic oligonucleotide
aacucaauggcaagcccag

SEQ ID NO: 12865 - RNA, 19 nt, Artificial Sequence
  Description of Artificial Sequence: Synthetic oligonucleotide
uaggguuuacagcuacagc

SEQ ID NO: 12866 - RNA, 19 nt, Artificial Sequence
  Description of Artificial Sequence: Synthetic oligonucleotide
ggaauuugugguauucugg

SEQ ID NO: 12867 - RNA, 19 nt, Artificial Sequence
  Description of Artificial Sequence: Synthetic oligonucleotide
cauuccaccgucacuugag

SEQ ID NO: 12868 - RNA, 19 nt, Artificial Sequence
  Description of Artificial Sequence: Synthetic oligonucleotide
uccgguacugucucgcacc

SEQ ID NO: 12869 - RNA, 19 nt, Artificial Sequence
  Description of Artificial Sequence: Synthetic oligonucleotide
gcuacgggcagcuucacag

SEQ ID NO: 12870 - RNA, 19 nt, Artificial Sequence
  Description of Artificial Sequence: Synthetic oligonucleotide
aaauccuguggugauaauu

SEQ ID NO: 12871 - RNA, 19 nt, Artificial Sequence
  Description of Artificial Sequence: Synthetic oligonucleotide
cagcucaugaggcuggagc

SEQ ID NO: 12872 - RNA, 19 nt, Artificial Sequence
  Description of Artificial Sequence: Synthetic oligonucleotide
guacgcucauuuuccaucc

SEQ ID NO: 12873 - RNA, 19 nt, Artificial Sequence
  Description of Artificial Sequence: Synthetic oligonucleotide
uccaaguuacuucccugca

SEQ ID NO: 12874 - RNA, 19 nt, Artificial Sequence
  Description of Artificial Sequence: Synthetic oligonucleotide
auagugauuugguccugag

SEQ ID NO: 12875 - RNA, 19 nt, Artificial Sequence
  Description of Artificial Sequence: Synthetic oligonucleotide
cacgcaugagaguacuacc

SEQ ID NO: 12876 - RNA, 19 nt, Artificial Sequence
  Description of Artificial Sequence: Synthetic oligonucleotide
auaaauggggaugugcaaa

SEQ ID NO: 12877 - RNA, 19 nt, Artificial Sequence
  Description of Artificial Sequence: Synthetic oligonucleotide
uaucguuuggggccccaag

SEQ ID NO: 12878 - RNA, 19 nt, Artificial Sequence
  Description of Artificial Sequence: Synthetic oligonucleotide
uuaaugcgagccacggccu

SEQ ID NO: 12879 - RNA, 19 nt, Artificial Sequence
  Description of Artificial Sequence: Synthetic oligonucleotide
auuuacgaggguccagcug

SEQ ID NO: 12880 - RNA, 19 nt, Artificial Sequence
  Description of Artificial Sequence: Synthetic oligonucleotide
ugacauagcggugaagauc

SEQ ID NO: 12881 - RNA, 19 nt, Artificial Sequence
  Description of Artificial Sequence: Synthetic oligonucleotide
acuaacccacgcaugagag

SEQ ID NO: 12882 - RNA, 19 nt, Artificial Sequence
  Description of Artificial Sequence: Synthetic oligonucleotide
ggaaacauaggacauggaa

SEQ ID NO: 12883 - RNA, 19 nt, Artificial Sequence
  Description of Artificial Sequence: Synthetic oligonucleotide
uaacccacgcaugagagua

SEQ ID NO: 12884 - RNA, 19 nt, Artificial Sequence
  Description of Artificial Sequence: Synthetic oligonucleotide
aauccggaucagguuacuc

SEQ ID NO: 12885 - RNA, 19 nt, Artificial Sequence
  Description of Artificial Sequence: Synthetic oligonucleotide
uccucaacucaauggcaag

SEQ ID NO: 12886 - RNA, 19 nt, Artificial Sequence
  Description of Artificial Sequence: Synthetic oligonucleotide
uagcaauaaauggggaugu

SEQ ID NO: 12887 - RNA, 19 nt, Artificial Sequence
  Description of Artificial Sequence: Synthetic oligonucleotide
cacgaauuucacgaauccg

SEQ ID NO: 12888 - RNA, 19 nt, Artificial Sequence
  Description of Artificial Sequence: Synthetic oligonucleotide
ucucucgcaagaccugccc

SEQ ID NO: 12889 - RNA, 19 nt, Artificial Sequence
  Description of Artificial Sequence: Synthetic oligonucleotide
auuguagucccuagugauc

SEQ ID NO: 12890 - RNA, 19 nt, Artificial Sequence
  Description of Artificial Sequence: Synthetic oligonucleotide
ugccuagaccccucaacag

SEQ ID NO: 12891 - RNA, 19 nt, Artificial Sequence
  Description of Artificial Sequence: Synthetic oligonucleotide
gaagcgaauguccaccuua

SEQ ID NO: 12892 - RNA, 19 nt, Artificial Sequence
  Description of Artificial Sequence: Synthetic oligonucleotide
uacggauggcuuugccucg

SEQ ID NO: 12893 - RNA, 19 nt, Artificial Sequence
  Description of Artificial Sequence: Synthetic oligonucleotide
agaugauuaugaugucaca

SEQ ID NO: 12894 - RNA, 19 nt, Artificial Sequence
  Description of Artificial Sequence: Synthetic oligonucleotide
aaguuaaggccaagggaug

SEQ ID NO: 12895 - RNA, 19 nt, Artificial Sequence
  Description of Artificial Sequence: Synthetic oligonucleotide
aguuacuucccugcacccg

SEQ ID NO: 12896 - RNA, 19 nt, Artificial Sequence
  Description of Artificial Sequence: Synthetic oligonucleotide
gcugacuacaugcugggug

SEQ ID NO: 12897 - RNA, 19 nt, Artificial Sequence
  Description of Artificial Sequence: Synthetic oligonucleotide
ucauacccugugauaguga

SEQ ID NO: 12898 - RNA, 19 nt, Artificial Sequence
  Description of Artificial Sequence: Synthetic oligonucleotide
cauccgagaggcgagcucc

SEQ ID NO: 12899 - RNA, 19 nt, Artificial Sequence
  Description of Artificial Sequence: Synthetic oligonucleotide
gauagacagaauccggcua

SEQ ID NO: 12900 - RNA, 19 nt, Artificial Sequence
  Description of Artificial Sequence: Synthetic oligonucleotide
cuugagggugacuuuguca

SEQ ID NO: 12901 - RNA, 19 nt, Artificial Sequence
  Description of Artificial Sequence: Synthetic oligonucleotide
agauugagacaaaccauug

SEQ ID NO: 12902 - RNA, 19 nt, Artificial Sequence
  Description of Artificial Sequence: Synthetic oligonucleotide
cucuucggaugacaaaaug

SEQ ID NO: 12903 - RNA, 19 nt, Artificial Sequence
  Description of Artificial Sequence: Synthetic oligonucleotide
ucucgcaccuuucggauuu

SEQ ID NO: 12904 - RNA, 19 nt, Artificial Sequence
  Description of Artificial Sequence: Synthetic oligonucleotide
uuuacagcuacagcacuua

SEQ ID NO: 12905 - RNA, 19 nt, Artificial Sequence
  Description of Artificial Sequence: Synthetic oligonucleotide
uuuaccuuccggggaagga

SEQ ID NO: 12906 - RNA, 19 nt, Artificial Sequence
  Description of Artificial Sequence: Synthetic oligonucleotide
guggaauuuauggucgaug

SEQ ID NO: 12907 - RNA, 19 nt, Artificial Sequence
  Description of Artificial Sequence: Synthetic oligonucleotide
gaauaugaugcgggcuccg

SEQ ID NO: 12908 - RNA, 19 nt, Artificial Sequence
  Description of Artificial Sequence: Synthetic oligonucleotide
uccuuaaagcccgaucuuc

SEQ ID NO: 12909 - RNA, 19 nt, Artificial Sequence
  Description of Artificial Sequence: Synthetic oligonucleotide
uuaugaugucacaccuccu

SEQ ID NO: 12910 - RNA, 19 nt, Artificial Sequence
  Description of Artificial Sequence: Synthetic oligonucleotide
ucucuaccuucccuugccc

SEQ ID NO: 12911 - RNA, 19 nt, Artificial Sequence
  Description of Artificial Sequence: Synthetic oligonucleotide
gagcaucaacaauuuacga

SEQ ID NO: 12912 - RNA, 19 nt, Artificial Sequence
  Description of Artificial Sequence: Synthetic oligonucleotide
ugcgagaccucggggaggg

SEQ ID NO: 12913 - RNA, 19 nt, Artificial Sequence
  Description of Artificial Sequence: Synthetic oligonucleotide
gcaccuuucggauuuuacc

SEQ ID NO: 12914 - RNA, 19 nt, Artificial Sequence
  Description of Artificial Sequence: Synthetic oligonucleotide
ucccgauaauuuugggaug

SEQ ID NO: 12915 - RNA, 19 nt, Artificial Sequence
  Description of Artificial Sequence: Synthetic oligonucleotide
gucucuaccuucccuugcc

SEQ ID NO: 12916 - RNA, 19 nt, Artificial Sequence
  Description of Artificial Sequence: Synthetic oligonucleotide
ugcucagaucacuuuuccu

SEQ ID NO: 12917 - RNA, 19 nt, Artificial Sequence
  Description of Artificial Sequence: Synthetic oligonucleotide
ggagaagagaccuggcuca

SEQ ID NO: 12918 - RNA, 19 nt, Artificial Sequence
  Description of Artificial Sequence: Synthetic oligonucleotide
gauuaugaugucacaccuc

SEQ ID NO: 12919 - RNA, 19 nt, Artificial Sequence
  Description of Artificial Sequence: Synthetic oligonucleotide
gacauguuacuaguugauc

SEQ ID NO: 12920 - RNA, 19 nt, Artificial Sequence
  Description of Artificial Sequence: Synthetic oligonucleotide
gaucacgaaaugcucaaau

SEQ ID NO: 12921 - RNA, 19 nt, Artificial Sequence
  Description of Artificial Sequence: Synthetic oligonucleotide
ucucauacccugugauagu

SEQ ID NO: 12922 - RNA, 19 nt, Artificial Sequence
  Description of Artificial Sequence: Synthetic oligonucleotide
agucccuugcuuucacucu

SEQ ID NO: 12923 - RNA, 19 nt, Artificial Sequence
  Description of Artificial Sequence: Synthetic oligonucleotide
uccaccgucacuugagcuu

SEQ ID NO: 12924 - RNA, 19 nt, Artificial Sequence
  Description of Artificial Sequence: Synthetic oligonucleotide
uguuugcgccuccuuuccc

SEQ ID NO: 12925 - RNA, 19 nt, Artificial Sequence
  Description of Artificial Sequence: Synthetic oligonucleotide
agaccuguucccagucucc

SEQ ID NO: 12926 - RNA, 19 nt, Artificial Sequence
  Description of Artificial Sequence: Synthetic oligonucleotide
gguacgcucauuuuccauc

SEQ ID NO: 12927 - RNA, 19 nt, Artificial Sequence
  Description of Artificial Sequence: Synthetic oligonucleotide
aucuugcggauuccacuuc

SEQ ID NO: 12928 - RNA, 19 nt, Artificial Sequence
  Description of Artificial Sequence: Synthetic oligonucleotide
guggacuccaccacauucc

SEQ ID NO: 12929 - RNA, 19 nt, Artificial Sequence
  Description of Artificial Sequence: Synthetic oligonucleotide
ccuuaaagcccgaucuucc

SEQ ID NO: 12930 - RNA, 19 nt, Artificial Sequence
  Description of Artificial Sequence: Synthetic oligonucleotide
aaagcccgaucuuccugcu

SEQ ID NO: 12931 - RNA, 19 nt, Artificial Sequence
  Description of Artificial Sequence: Synthetic oligonucleotide
augagaguacuaccacacu

SEQ ID NO: 12932 - RNA, 19 nt, Artificial Sequence
  Description of Artificial Sequence: Synthetic oligonucleotide
agcagccgggaauaugaug

SEQ ID NO: 12933 - RNA, 19 nt, Artificial Sequence
  Description of Artificial Sequence: Synthetic oligonucleotide
cucaauccggaucagguua

SEQ ID NO: 12934 - RNA, 19 nt, Artificial Sequence
  Description of Artificial Sequence: Synthetic oligonucleotide
aggaucgcaucacgggcag

SEQ ID NO: 12935 - RNA, 19 nt, Artificial Sequence
  Description of Artificial Sequence: Synthetic oligonucleotide
acuaccacacuggcugagg

SEQ ID NO: 12936 - RNA, 19 nt, Artificial Sequence
  Description of Artificial Sequence: Synthetic oligonucleotide
ccaauuaggaauuuguggu

SEQ ID NO: 12937 - RNA, 19 nt, Artificial Sequence
  Description of Artificial Sequence: Synthetic oligonucleotide
cuccuagccgcuguggagc

SEQ ID NO: 12938 - RNA, 19 nt, Artificial Sequence
  Description of Artificial Sequence: Synthetic oligonucleotide
ugacagaucgauggaacuu

SEQ ID NO: 12939 - RNA, 19 nt, Artificial Sequence
  Description of Artificial Sequence: Synthetic oligonucleotide
cucccgauaauuuugggau

SEQ ID NO: 12940 - RNA, 19 nt, Artificial Sequence
  Description of Artificial Sequence: Synthetic oligonucleotide
cuuaggaguuagagucuac

SEQ ID NO: 12941 - RNA, 19 nt, Artificial Sequence
  Description of Artificial Sequence: Synthetic oligonucleotide
uuacucgauccaguagccc

SEQ ID NO: 12942 - RNA, 19 nt, Artificial Sequence
  Description of Artificial Sequence: Synthetic oligonucleotide
guccgcaaccaucuucugc

SEQ ID NO: 12943 - RNA, 19 nt, Artificial Sequence
  Description of Artificial Sequence: Synthetic oligonucleotide
gucccuugcuuucacucug

SEQ ID NO: 12944 - RNA, 19 nt, Artificial Sequence
  Description of Artificial Sequence: Synthetic oligonucleotide
agaccugcccucuucggau

SEQ ID NO: 12945 - RNA, 19 nt, Artificial Sequence
  Description of Artificial Sequence: Synthetic oligonucleotide
uagucccuagugaucugcu

SEQ ID NO: 12946 - RNA, 19 nt, Artificial Sequence
  Description of Artificial Sequence: Synthetic oligonucleotide
caguagccccgucuuagcc

SEQ ID NO: 12947 - RNA, 19 nt, Artificial Sequence
  Description of Artificial Sequence: Synthetic oligonucleotide
auguuacuaguugaucaga

SEQ ID NO: 12948 - RNA, 19 nt, Artificial Sequence
  Description of Artificial Sequence: Synthetic oligonucleotide
uugccucgggcaccaauga

SEQ ID NO: 12949 - RNA, 19 nt, Artificial Sequence
  Description of Artificial Sequence: Synthetic oligonucleotide
cuugggcuacauuuuccuc

SEQ ID NO: 12950 - RNA, 19 nt, Artificial Sequence
  Description of Artificial Sequence: Synthetic oligonucleotide
ccaagccugaguuauuaac

SEQ ID NO: 12951 - RNA, 19 nt, Artificial Sequence
  Description of Artificial Sequence: Synthetic oligonucleotide
agucucaugcagacgggag

SEQ ID NO: 12952 - RNA, 19 nt, Artificial Sequence
  Description of Artificial Sequence: Synthetic oligonucleotide
caccuuucggauuuuaccu

SEQ ID NO: 12953 - RNA, 19 nt, Artificial Sequence
  Description of Artificial Sequence: Synthetic oligonucleotide
auaguccauccgguuaauc

SEQ ID NO: 12954 - RNA, 19 nt, Artificial Sequence
  Description of Artificial Sequence: Synthetic oligonucleotide
agucccuagugaucugcug

SEQ ID NO: 12955 - RNA, 19 nt, Artificial Sequence
  Description of Artificial Sequence: Synthetic oligonucleotide
gcaagaccugcccucuucg

SEQ ID NO: 12956 - RNA, 19 nt, Artificial Sequence
  Description of Artificial Sequence: Synthetic oligonucleotide
acgcaugagaguacuacca

SEQ ID NO: 12957 - RNA, 19 nt, Artificial Sequence
  Description of Artificial Sequence: Synthetic oligonucleotide
acuuagcaauaaaugggga

SEQ ID NO: 12958 - RNA, 19 nt, Artificial Sequence
  Description of Artificial Sequence: Synthetic oligonucleotide
cacaguggcgugccugucc

SEQ ID NO: 12959 - RNA, 19 nt, Artificial Sequence
  Description of Artificial Sequence: Synthetic oligonucleotide
uugugguauucuggcuugg

SEQ ID NO: 12960 - RNA, 19 nt, Artificial Sequence
  Description of Artificial Sequence: Synthetic oligonucleotide
aacccacgcaugagaguac

SEQ ID NO: 12961 - RNA, 19 nt, Artificial Sequence
  Description of Artificial Sequence: Synthetic oligonucleotide
ucgcaucacgggcagcuuc

SEQ ID NO: 12962 - RNA, 19 nt, Artificial Sequence
  Description of Artificial Sequence: Synthetic oligonucleotide
cccgauaauuuugggaugg

SEQ ID NO: 12963 - RNA, 19 nt, Artificial Sequence
  Description of Artificial Sequence: Synthetic oligonucleotide
uggagcggaucagacggcc

SEQ ID NO: 12964 - RNA, 19 nt, Artificial Sequence
  Description of Artificial Sequence: Synthetic oligonucleotide
ucacgaauccguucaccuu

SEQ ID NO: 12965 - RNA, 19 nt, Artificial Sequence
  Description of Artificial Sequence: Synthetic oligonucleotide
uacuaccacacuggcugag

SEQ ID NO: 12966 - RNA, 19 nt, Artificial Sequence
  Description of Artificial Sequence: Synthetic oligonucleotide
gaacauuguagucccuagu

SEQ ID NO: 12967 - RNA, 19 nt, Artificial Sequence
  Description of Artificial Sequence: Synthetic oligonucleotide
ucuuagcccuguccaaauu

SEQ ID NO: 12968 - RNA, 19 nt, Artificial Sequence
  Description of Artificial Sequence: Synthetic oligonucleotide
cuccucaacucaauggcaa

SEQ ID NO: 12969 - RNA, 19 nt, Artificial Sequence
  Description of Artificial Sequence: Synthetic oligonucleotide
cagccgggaauaugaugcg

SEQ ID NO: 12970 - RNA, 19 nt, Artificial Sequence
  Description of Artificial Sequence: Synthetic oligonucleotide
agcuccuagccgcugugga

SEQ ID NO: 12971 - RNA, 19 nt, Artificial Sequence
  Description of Artificial Sequence: Synthetic oligonucleotide
agaauccggcuacgggcag

SEQ ID NO: 12972 - RNA, 19 nt, Artificial Sequence
  Description of Artificial Sequence: Synthetic oligonucleotide
ugagucccuugcuuucacu

SEQ ID NO: 12973 - RNA, 19 nt, Artificial Sequence
  Description of Artificial Sequence: Synthetic oligonucleotide
ggugauaauuuaaacuuua

SEQ ID NO: 12974 - RNA, 19 nt, Artificial Sequence
  Description of Artificial Sequence: Synthetic oligonucleotide
cagucucuaccuucccuug

SEQ ID NO: 12975 - RNA, 19 nt, Artificial Sequence
  Description of Artificial Sequence: Synthetic oligonucleotide
uuacgaggguccagcugcu

SEQ ID NO: 12976 - RNA, 19 nt, Artificial Sequence
  Description of Artificial Sequence: Synthetic oligonucleotide
acaguauaggguaggguuu

SEQ ID NO: 12977 - RNA, 19 nt, Artificial Sequence
  Description of Artificial Sequence: Synthetic oligonucleotide
ugguacgcucauuuuccau

SEQ ID NO: 12978 - RNA, 19 nt, Artificial Sequence
  Description of Artificial Sequence: Synthetic oligonucleotide
agccgggaauaugaugcgg

SEQ ID NO: 12979 - RNA, 19 nt, Artificial Sequence
  Description of Artificial Sequence: Synthetic oligonucleotide
caaugauugugcgaugaaa

SEQ ID NO: 12980 - RNA, 19 nt, Artificial Sequence
  Description of Artificial Sequence: Synthetic oligonucleotide
ccuugguacgcucauuuuc

SEQ ID NO: 12981 - RNA, 19 nt, Artificial Sequence
  Description of Artificial Sequence: Synthetic oligonucleotide
cagaucgauggaacuucug

SEQ ID NO: 12982 - RNA, 19 nt, Artificial Sequence
  Description of Artificial Sequence: Synthetic oligonucleotide
gcaacugaacaagaggcca

SEQ ID NO: 12983 - RNA, 19 nt, Artificial Sequence
  Description of Artificial Sequence: Synthetic oligonucleotide
gccgggaauaugaugcggg

SEQ ID NO: 12984 - RNA, 19 nt, Artificial Sequence
  Description of Artificial Sequence: Synthetic oligonucleotide
caggaucgcaucacgggca

SEQ ID NO: 12985 - RNA, 19 nt, Artificial Sequence
  Description of Artificial Sequence: Synthetic oligonucleotide
caacugaacaagaggccaa

SEQ ID NO: 12986 - RNA, 19 nt, Artificial Sequence
  Description of Artificial Sequence: Synthetic oligonucleotide
uugcggauuccacuuccuu

SEQ ID NO: 12987 - RNA, 19 nt, Artificial Sequence
  Description of Artificial Sequence: Synthetic oligonucleotide
ccucgcauuucucucuccg

SEQ ID NO: 12988 - RNA, 19 nt, Artificial Sequence
  Description of Artificial Sequence: Synthetic oligonucleotide
caccaaagagaagccaguc

SEQ ID NO: 12989 - RNA, 19 nt, Artificial Sequence
  Description of Artificial Sequence: Synthetic oligonucleotide
gcaugagaguacuaccaca

SEQ ID NO: 12990 - RNA, 19 nt, Artificial Sequence
  Description of Artificial Sequence: Synthetic oligonucleotide
ugaucacgaaaugcucaaa

SEQ ID NO: 12991 - RNA, 19 nt, Artificial Sequence
  Description of Artificial Sequence: Synthetic oligonucleotide
gaucgcaucacgggcagcu

SEQ ID NO: 12992 - RNA, 19 nt, Artificial Sequence
  Description of Artificial Sequence: Synthetic oligonucleotide
acugagucccuugcuuuca

SEQ ID NO: 12993 - RNA, 19 nt, Artificial Sequence
  Description of Artificial Sequence: Synthetic oligonucleotide
agaucaaaggguaccucua

SEQ ID NO: 12994 - RNA, 19 nt, Artificial Sequence
  Description of Artificial Sequence: Synthetic oligonucleotide
gcaucucgcaccacaaagc

SEQ ID NO: 12995 - RNA, 19 nt, Artificial Sequence
  Description of Artificial Sequence: Synthetic oligonucleotide
uauggucgauguugaucuc

SEQ ID NO: 12996 - RNA, 19 nt, Artificial Sequence
  Description of Artificial Sequence: Synthetic oligonucleotide
cuucucauacccugugaua

SEQ ID NO: 12997 - RNA, 19 nt, Artificial Sequence
  Description of Artificial Sequence: Synthetic oligonucleotide
acgaauccguucaccuuuc

SEQ ID NO: 12998 - RNA, 19 nt, Artificial Sequence
  Description of Artificial Sequence: Synthetic oligonucleotide
gaauccggcuacgggcagc

SEQ ID NO: 12999 - RNA, 19 nt, Artificial Sequence
  Description of Artificial Sequence: Synthetic oligonucleotide
uccuagccgcuguggagcu

SEQ ID NO: 13000 - RNA, 19 nt, Artificial Sequence
  Description of Artificial Sequence: Synthetic oligonucleotide
cuccgguacugucucgcac

SEQ ID NO: 13001 - RNA, 19 nt, Artificial Sequence
  Description of Artificial Sequence: Synthetic oligonucleotide
guauaggguaggguuuaca

SEQ ID NO: 13002 - RNA, 19 nt, Artificial Sequence
  Description of Artificial Sequence: Synthetic oligonucleotide
ggccaagggauggauguag

SEQ ID NO: 13003 - RNA, 19 nt, Artificial Sequence
  Description of Artificial Sequence: Synthetic oligonucleotide
ugaccaucaccccgccaua

SEQ ID NO: 13004 - RNA, 19 nt, Artificial Sequence
  Description of Artificial Sequence: Synthetic oligonucleotide
cauacccugugauagugau

SEQ ID NO: 13005 - RNA, 19 nt, Artificial Sequence
  Description of Artificial Sequence: Synthetic oligonucleotide
gaacccuccacaggaaagu

SEQ ID NO: 13006 - RNA, 19 nt, Artificial Sequence
  Description of Artificial Sequence: Synthetic oligonucleotide
ccuuauuaacaaucagaga

SEQ ID NO: 13007 - RNA, 19 nt, Artificial Sequence
  Description of Artificial Sequence: Synthetic oligonucleotide
acggauggcuuugccucgg

SEQ ID NO: 13008 - RNA, 19 nt, Artificial Sequence
  Description of Artificial Sequence: Synthetic oligonucleotide
uccguccagagaugauuau

SEQ ID NO: 13009 - RNA, 19 nt, Artificial Sequence
  Description of Artificial Sequence: Synthetic oligonucleotide
ccucaauggugacuggaac

SEQ ID NO: 13010 - RNA, 19 nt, Artificial Sequence
  Description of Artificial Sequence: Synthetic oligonucleotide
cucucuccguccagagaug

SEQ ID NO: 13011 - RNA, 19 nt, Artificial Sequence
  Description of Artificial Sequence: Synthetic oligonucleotide
ggguaggguuuacagcuac

SEQ ID NO: 13012 - RNA, 19 nt, Artificial Sequence
  Description of Artificial Sequence: Synthetic oligonucleotide
cucuaaggguacauauaua

SEQ ID NO: 13013 - RNA, 19 nt, Artificial Sequence
  Description of Artificial Sequence: Synthetic oligonucleotide
ugacuacaugcugggugga

SEQ ID NO: 13014 - RNA, 19 nt, Artificial Sequence
  Description of Artificial Sequence: Synthetic oligonucleotide
uuaucguuuggggccccaa

SEQ ID NO: 13015 - RNA, 19 nt, Artificial Sequence
  Description of Artificial Sequence: Synthetic oligonucleotide
guagccccgucuuagcccu

SEQ ID NO: 13016 - RNA, 19 nt, Artificial Sequence
  Description of Artificial Sequence: Synthetic oligonucleotide
uuggggcccaugacagauc

SEQ ID NO: 13017 - RNA, 19 nt, Artificial Sequence
  Description of Artificial Sequence: Synthetic oligonucleotide
uccccacuauugugaucag

SEQ ID NO: 13018 - RNA, 19 nt, Artificial Sequence
  Description of Artificial Sequence: Synthetic oligonucleotide
gagcggaucagacggcccu

SEQ ID NO: 13019 - RNA, 19 nt, Artificial Sequence
  Description of Artificial Sequence: Synthetic oligonucleotide
gaccuguucccagucucca

SEQ ID NO: 13020 - RNA, 19 nt, Artificial Sequence
  Description of Artificial Sequence: Synthetic oligonucleotide
agccaagccugaguuauua

SEQ ID NO: 13021 - RNA, 19 nt, Artificial Sequence
  Description of Artificial Sequence: Synthetic oligonucleotide
agcgaauguccaccuuaaa

SEQ ID NO: 13022 - RNA, 19 nt, Artificial Sequence
  Description of Artificial Sequence: Synthetic oligonucleotide
cucgggcaccaaugaugcg

SEQ ID NO: 13023 - RNA, 19 nt, Artificial Sequence
  Description of Artificial Sequence: Synthetic oligonucleotide
cuuagcccuguccaaauuu

SEQ ID NO: 13024 - RNA, 19 nt, Artificial Sequence
  Description of Artificial Sequence: Synthetic oligonucleotide
cacggugguccagugggac

SEQ ID NO: 13025 - RNA, 19 nt, Artificial Sequence
  Description of Artificial Sequence: Synthetic oligonucleotide
agccgugccucuaagggua

SEQ ID NO: 13026 - RNA, 19 nt, Artificial Sequence
  Description of Artificial Sequence: Synthetic oligonucleotide
cugcccaaugauugugcga

SEQ ID NO: 13027 - RNA, 19 nt, Artificial Sequence
  Description of Artificial Sequence: Synthetic oligonucleotide
ccacgcaugagaguacuac

SEQ ID NO: 13028 - RNA, 19 nt, Artificial Sequence
  Description of Artificial Sequence: Synthetic oligonucleotide
ccgggaauaugaugcgggc

SEQ ID NO: 13029 - RNA, 19 nt, Artificial Sequence
  Description of Artificial Sequence: Synthetic oligonucleotide
acccacgcaugagaguacu

SEQ ID NO: 13030 - RNA, 19 nt, Artificial Sequence
  Description of Artificial Sequence: Synthetic oligonucleotide
cacgaauccguucaccuuu

SEQ ID NO: 13031 - RNA, 19 nt, Artificial Sequence
  Description of Artificial Sequence: Synthetic oligonucleotide
cucgaggggcggcacuaac

SEQ ID NO: 13032 - RNA, 19 nt, Artificial Sequence
  Description of Artificial Sequence: Synthetic oligonucleotide
ucgggagcuggcacaugua

SEQ ID NO: 13033 - RNA, 19 nt, Artificial Sequence
  Description of Artificial Sequence: Synthetic oligonucleotide
auuaucguuuggggcccca

SEQ ID NO: 13034 - RNA, 19 nt, Artificial Sequence
  Description of Artificial Sequence: Synthetic oligonucleotide
agcgcgggaagcugaccau

SEQ ID NO: 13035 - RNA, 19 nt, Artificial Sequence
  Description of Artificial Sequence: Synthetic oligonucleotide
cauagcggugaagaucaaa

SEQ ID NO: 13036 - RNA, 19 nt, Artificial Sequence
  Description of Artificial Sequence: Synthetic oligonucleotide
gggucuacagugacgcuca

SEQ ID NO: 13037 - RNA, 19 nt, Artificial Sequence
  Description of Artificial Sequence: Synthetic oligonucleotide
cauuaucguuuggggcccc

SEQ ID NO: 13038 - RNA, 19 nt, Artificial Sequence
  Description of Artificial Sequence: Synthetic oligonucleotide
cugcgagaccucggggagg

SEQ ID NO: 13039 - RNA, 19 nt, Artificial Sequence
  Description of Artificial Sequence: Synthetic oligonucleotide
gaguacuaccacacuggcu

SEQ ID NO: 13040 - RNA, 19 nt, Artificial Sequence
  Description of Artificial Sequence: Synthetic oligonucleotide
cgucuaaaucaagagaaga

SEQ ID NO: 13041 - RNA, 19 nt, Artificial Sequence
  Description of Artificial Sequence: Synthetic oligonucleotide
guccagggagcaucucgca

SEQ ID NO: 13042 - RNA, 19 nt, Artificial Sequence
  Description of Artificial Sequence: Synthetic oligonucleotide
caguauaggguaggguuua

SEQ ID NO: 13043 - RNA, 19 nt, Artificial Sequence
  Description of Artificial Sequence: Synthetic oligonucleotide
caccgucacuugagcuucc

SEQ ID NO: 13044 - RNA, 19 nt, Artificial Sequence
  Description of Artificial Sequence: Synthetic oligonucleotide
cuaacccacgcaugagagu

SEQ ID NO: 13045 - RNA, 19 nt, Artificial Sequence
  Description of Artificial Sequence: Synthetic oligonucleotide
ccaguagccccgucuuagc

SEQ ID NO: 13046 - RNA, 19 nt, Artificial Sequence
  Description of Artificial Sequence: Synthetic oligonucleotide
cgcaugagaguacuaccac

SEQ ID NO: 13047 - RNA, 19 nt, Artificial Sequence
  Description of Artificial Sequence: Synthetic oligonucleotide
ggcggcacuaacccacgca

SEQ ID NO: 13048 - RNA, 19 nt, Artificial Sequence
  Description of Artificial Sequence: Synthetic oligonucleotide
ccacucuaucaccaggaca

SEQ ID NO: 13049 - RNA, 19 nt, Artificial Sequence
  Description of Artificial Sequence: Synthetic oligonucleotide
cucugggaguccugucaca

SEQ ID NO: 13050 - RNA, 19 nt, Artificial Sequence
  Description of Artificial Sequence: Synthetic oligonucleotide
uguacgccuugugggucuc

SEQ ID NO: 13051 - RNA, 19 nt, Artificial Sequence
  Description of Artificial Sequence: Synthetic oligonucleotide
cucgcauuucucucuccgu

SEQ ID NO: 13052 - RNA, 19 nt, Artificial Sequence
  Description of Artificial Sequence: Synthetic oligonucleotide
cugggcgcugaccaggccu

SEQ ID NO: 13053 - RNA, 19 nt, Artificial Sequence
  Description of Artificial Sequence: Synthetic oligonucleotide
cccaaugauugugcgauga

SEQ ID NO: 13054 - RNA, 19 nt, Artificial Sequence
  Description of Artificial Sequence: Synthetic oligonucleotide
ccuccucaacucaauggca

SEQ ID NO: 13055 - RNA, 19 nt, Artificial Sequence
  Description of Artificial Sequence: Synthetic oligonucleotide
ggaucagacggcccuuugu

SEQ ID NO: 13056 - RNA, 19 nt, Artificial Sequence
  Description of Artificial Sequence: Synthetic oligonucleotide
gugacacaauuggggucug

SEQ ID NO: 13057 - RNA, 19 nt, Artificial Sequence
  Description of Artificial Sequence: Synthetic oligonucleotide
ggaauuuauggucgauguu

SEQ ID NO: 13058 - RNA, 19 nt, Artificial Sequence
  Description of Artificial Sequence: Synthetic oligonucleotide
gccuagaccccucaacagu

SEQ ID NO: 13059 - RNA, 19 nt, Artificial Sequence
  Description of Artificial Sequence: Synthetic oligonucleotide
accgucacuugagcuucca

SEQ ID NO: 13060 - RNA, 19 nt, Artificial Sequence
  Description of Artificial Sequence: Synthetic oligonucleotide
cgcaccuuucggauuuuac

SEQ ID NO: 13061 - RNA, 19 nt, Artificial Sequence
  Description of Artificial Sequence: Synthetic oligonucleotide
ggagcggaucagacggccc

SEQ ID NO: 13062 - RNA, 19 nt, Artificial Sequence
  Description of Artificial Sequence: Synthetic oligonucleotide
ggacauguuacuaguugau

SEQ ID NO: 13063 - RNA, 19 nt, Artificial Sequence
  Description of Artificial Sequence: Synthetic oligonucleotide
gguccgcaaccaucuucug

SEQ ID NO: 13064 - RNA, 19 nt, Artificial Sequence
  Description of Artificial Sequence: Synthetic oligonucleotide
aggguaccucuaccucaau

SEQ ID NO: 13065 - RNA, 19 nt, Artificial Sequence
  Description of Artificial Sequence: Synthetic oligonucleotide
ucgcaccuuucggauuuua

SEQ ID NO: 13066 - RNA, 19 nt, Artificial Sequence
  Description of Artificial Sequence: Synthetic oligonucleotide
gggaagcgaauguccaccu

SEQ ID NO: 13067 - RNA, 19 nt, Artificial Sequence
  Description of Artificial Sequence: Synthetic oligonucleotide
gcagggaucgagaccucca

SEQ ID NO: 13068 - RNA, 19 nt, Artificial Sequence
  Description of Artificial Sequence: Synthetic oligonucleotide
cagccucgcauuucucucu

SEQ ID NO: 13069 - RNA, 19 nt, Artificial Sequence
  Description of Artificial Sequence: Synthetic oligonucleotide
gcggcacuaacccacgcau

SEQ ID NO: 13070 - RNA, 19 nt, Artificial Sequence
  Description of Artificial Sequence: Synthetic oligonucleotide
ccaaugauugugcgaugaa

SEQ ID NO: 13071 - RNA, 19 nt, Artificial Sequence
  Description of Artificial Sequence: Synthetic oligonucleotide
ccaccucagcuauguuggc

SEQ ID NO: 13072 - RNA, 19 nt, Artificial Sequence
  Description of Artificial Sequence: Synthetic oligonucleotide
auccgagaggcgagcucca

SEQ ID NO: 13073 - RNA, 19 nt, Artificial Sequence
  Description of Artificial Sequence: Synthetic oligonucleotide
cuccuuaaagcccgaucuu

SEQ ID NO: 13074 - RNA, 19 nt, Artificial Sequence
  Description of Artificial Sequence: Synthetic oligonucleotide
aggccaagggauggaugua

SEQ ID NO: 13075 - RNA, 19 nt, Artificial Sequence
  Description of Artificial Sequence: Synthetic oligonucleotide
ccaaugacauagcggugaa

SEQ ID NO: 13076 - RNA, 19 nt, Artificial Sequence
  Description of Artificial Sequence: Synthetic oligonucleotide
ggcuacgggcagcuucaca

SEQ ID NO: 13077 - RNA, 19 nt, Artificial Sequence
  Description of Artificial Sequence: Synthetic oligonucleotide
agcggaucagacggcccuu

SEQ ID NO: 13078 - RNA, 19 nt, Artificial Sequence
  Description of Artificial Sequence: Synthetic oligonucleotide
gccagauauuccuccucua

SEQ ID NO: 13079 - RNA, 19 nt, Artificial Sequence
  Description of Artificial Sequence: Synthetic oligonucleotide
gaccaucaccccgccauau

SEQ ID NO: 13080 - RNA, 19 nt, Artificial Sequence
  Description of Artificial Sequence: Synthetic oligonucleotide
gugccucuaaggguacaua

SEQ ID NO: 13081 - RNA, 19 nt, Artificial Sequence
  Description of Artificial Sequence: Synthetic oligonucleotide
aucgcaucacgggcagcuu

SEQ ID NO: 13082 - RNA, 19 nt, Artificial Sequence
  Description of Artificial Sequence: Synthetic oligonucleotide
gcuccgguacugucucgca

SEQ ID NO: 13083 - RNA, 19 nt, Artificial Sequence
  Description of Artificial Sequence: Synthetic oligonucleotide
gccgcuguggagcucuggu

SEQ ID NO: 13084 - RNA, 19 nt, Artificial Sequence
  Description of Artificial Sequence: Synthetic oligonucleotide
augcgggcaugcacacggu

SEQ ID NO: 13085 - RNA, 19 nt, Artificial Sequence
  Description of Artificial Sequence: Synthetic oligonucleotide
ggucuccccucaauccgga

SEQ ID NO: 13086 - RNA, 19 nt, Artificial Sequence
  Description of Artificial Sequence: Synthetic oligonucleotide
ggaucgcaucacgggcagc

SEQ ID NO: 13087 - RNA, 19 nt, Artificial Sequence
  Description of Artificial Sequence: Synthetic oligonucleotide
acauagcggugaagaucaa

SEQ ID NO: 13088 - RNA, 19 nt, Artificial Sequence
  Description of Artificial Sequence: Synthetic oligonucleotide
cgaugaaaucuuugcucaa

SEQ ID NO: 13089 - RNA, 19 nt, Artificial Sequence
  Description of Artificial Sequence: Synthetic oligonucleotide
gcgccuccuuucccaauga

SEQ ID NO: 13090 - RNA, 19 nt, Artificial Sequence
  Description of Artificial Sequence: Synthetic oligonucleotide
uggcacccuugagggugac

SEQ ID NO: 13091 - RNA, 19 nt, Artificial Sequence
  Description of Artificial Sequence: Synthetic oligonucleotide
gcgcgggaagcugaccauc

SEQ ID NO: 13092 - RNA, 19 nt, Artificial Sequence
  Description of Artificial Sequence: Synthetic oligonucleotide
cacgggcagcuucaguauu

SEQ ID NO: 13093 - RNA, 19 nt, Artificial Sequence
  Description of Artificial Sequence: Synthetic oligonucleotide
ggaagcgaauguccaccuu

SEQ ID NO: 13094 - RNA, 19 nt, Artificial Sequence
  Description of Artificial Sequence: Synthetic oligonucleotide
caauccggaucagguuacu

SEQ ID NO: 13095 - RNA, 19 nt, Artificial Sequence
  Description of Artificial Sequence: Synthetic oligonucleotide
cggaucagacggcccuuug

SEQ ID NO: 13096 - RNA, 19 nt, Artificial Sequence
  Description of Artificial Sequence: Synthetic oligonucleotide
cggcccuuugugccaauga

SEQ ID NO: 13097 - RNA, 19 nt, Artificial Sequence
  Description of Artificial Sequence: Synthetic oligonucleotide
gcccugcuagcuggggcca

SEQ ID NO: 13098 - RNA, 19 nt, Artificial Sequence
  Description of Artificial Sequence: Synthetic oligonucleotide
gcgagaccucggggagggg

SEQ ID NO: 13099 - RNA, 19 nt, Artificial Sequence
  Description of Artificial Sequence: Synthetic oligonucleotide
ccgguacugucucgcaccu

SEQ ID NO: 13100 - RNA, 19 nt, Artificial Sequence
  Description of Artificial Sequence: Synthetic oligonucleotide
gacggcccuuugugccaau

SEQ ID NO: 13101 - RNA, 19 nt, Artificial Sequence
  Description of Artificial Sequence: Synthetic oligonucleotide
cccacgcaugagaguacua

SEQ ID NO: 13102 - RNA, 19 nt, Artificial Sequence
  Description of Artificial Sequence: Synthetic oligonucleotide
ggggcccaugacagaucga

SEQ ID NO: 13103 - RNA, 19 nt, Artificial Sequence
  Description of Artificial Sequence: Synthetic oligonucleotide
gccccgucuuagcccuguc

SEQ ID NO: 13104 - RNA, 19 nt, Artificial Sequence
  Description of Artificial Sequence: Synthetic oligonucleotide
cgggaauaugaugcgggcu

SEQ ID NO: 13105 - RNA, 19 nt, Artificial Sequence
  Description of Artificial Sequence: Synthetic oligonucleotide
ccgauaauuuugggauggu

SEQ ID NO: 13106 - RNA, 19 nt, Artificial Sequence
  Description of Artificial Sequence: Synthetic oligonucleotide
auccggcuacgggcagcuu

SEQ ID NO: 13107 - RNA, 19 nt, Artificial Sequence
  Description of Artificial Sequence: Synthetic oligonucleotide
ccgugccucuaaggguaca

SEQ ID NO: 13108 - RNA, 19 nt, Artificial Sequence
  Description of Artificial Sequence: Synthetic oligonucleotide
ggcaaacguuuuggucuuu

SEQ ID NO: 13109 - RNA, 19 nt, Artificial Sequence
  Description of Artificial Sequence: Synthetic oligonucleotide
gcggaucagacggcccuuu

SEQ ID NO: 13110 - RNA, 19 nt, Artificial Sequence
  Description of Artificial Sequence: Synthetic oligonucleotide
ucaauaaggaaacagcugg

SEQ ID NO: 13111 - RNA, 19 nt, Artificial Sequence
  Description of Artificial Sequence: Synthetic oligonucleotide
aauuaugucagaguaggcc

SEQ ID NO: 13112 - RNA, 19 nt, Artificial Sequence
  Description of Artificial Sequence: Synthetic oligonucleotide
aauaaagugugccccaccc

SEQ ID NO: 13113 - RNA, 19 nt, Artificial Sequence
  Description of Artificial Sequence: Synthetic oligonucleotide
uuuucuaauccaaagacca

SEQ ID NO: 13114 - RNA, 19 nt, Artificial Sequence
  Description of Artificial Sequence: Synthetic oligonucleotide
acauucuagaaauaugggc

SEQ ID NO: 13115 - RNA, 19 nt, Artificial Sequence
  Description of Artificial Sequence: Synthetic oligonucleotide
aggucuguaauauggaucc

SEQ ID NO: 13116 - RNA, 19 nt, Artificial Sequence
  Description of Artificial Sequence: Synthetic oligonucleotide
auagugauggaccaggaac

SEQ ID NO: 13117 - RNA, 19 nt, Artificial Sequence
  Description of Artificial Sequence: Synthetic oligonucleotide
uacuaggucuguaauaugg

SEQ ID NO: 13118 - RNA, 19 nt, Artificial Sequence
  Description of Artificial Sequence: Synthetic oligonucleotide
aauaaggaaacagcugggc

SEQ ID NO: 13119 - RNA, 19 nt, Artificial Sequence
  Description of Artificial Sequence: Synthetic oligonucleotide
acaguggucagucacuugc

SEQ ID NO: 13120 - RNA, 19 nt, Artificial Sequence
  Description of Artificial Sequence: Synthetic oligonucleotide
uacaaaguaacccagccuc

SEQ ID NO: 13121 - RNA, 19 nt, Artificial Sequence
  Description of Artificial Sequence: Synthetic oligonucleotide
uuaguuaguucucuggggc

SEQ ID NO: 13122 - RNA, 19 nt, Artificial Sequence
  Description of Artificial Sequence: Synthetic oligonucleotide
caggccucaaucuagaggg

SEQ ID NO: 13123 - RNA, 19 nt, Artificial Sequence
  Description of Artificial Sequence: Synthetic oligonucleotide
accauuaggaaauggcccc

SEQ ID NO: 13124 - RNA, 19 nt, Artificial Sequence
  Description of Artificial Sequence: Synthetic oligonucleotide
agaacuauggcugacuagg

SEQ ID NO: 13125 - RNA, 19 nt, Artificial Sequence
  Description of Artificial Sequence: Synthetic oligonucleotide
agaaguaucacauguggug

SEQ ID NO: 13126 - RNA, 19 nt, Artificial Sequence
  Description of Artificial Sequence: Synthetic oligonucleotide
ugagcuuagagugacagcc

SEQ ID NO: 13127 - RNA, 19 nt, Artificial Sequence
  Description of Artificial Sequence: Synthetic oligonucleotide
uuaaucggacaucaaauac

SEQ ID NO: 13128 - RNA, 19 nt, Artificial Sequence
  Description of Artificial Sequence: Synthetic oligonucleotide
uugaucccuaauuacaucc

SEQ ID NO: 13129 - RNA, 19 nt, Artificial Sequence
  Description of Artificial Sequence: Synthetic oligonucleotide
ucauacugaaauaaagcac

SEQ ID NO: 13130 - RNA, 19 nt, Artificial Sequence
  Description of Artificial Sequence: Synthetic oligonucleotide
ucugagguugcuaacauaa

SEQ ID NO: 13131 - RNA, 19 nt, Artificial Sequence
  Description of Artificial Sequence: Synthetic oligonucleotide
ugccuuuuagcuuagccag

SEQ ID NO: 13132 - RNA, 19 nt, Artificial Sequence
  Description of Artificial Sequence: Synthetic oligonucleotide
uaaccuaaaccucauguac

SEQ ID NO: 13133 - RNA, 19 nt, Artificial Sequence
  Description of Artificial Sequence: Synthetic oligonucleotide
aaucuagaggguuagggau

SEQ ID NO: 13134 - RNA, 19 nt, Artificial Sequence
  Description of Artificial Sequence: Synthetic oligonucleotide
aggucaaguguucuguugc

SEQ ID NO: 13135 - RNA, 19 nt, Artificial Sequence
  Description of Artificial Sequence: Synthetic oligonucleotide
uaaaguuacacgacauuca

SEQ ID NO: 13136 - RNA, 19 nt, Artificial Sequence
  Description of Artificial Sequence: Synthetic oligonucleotide
aaccuaaaccucauguacc

SEQ ID NO: 13137 - RNA, 19 nt, Artificial Sequence
  Description of Artificial Sequence: Synthetic oligonucleotide
uuugcaaggacggaaagca

SEQ ID NO: 13138 - RNA, 19 nt, Artificial Sequence
  Description of Artificial Sequence: Synthetic oligonucleotide
auuacauccucccuagaag

SEQ ID NO: 13139 - RNA, 19 nt, Artificial Sequence
  Description of Artificial Sequence: Synthetic oligonucleotide
auuaugucagaguaggcca

SEQ ID NO: 13140 - RNA, 19 nt, Artificial Sequence
  Description of Artificial Sequence: Synthetic oligonucleotide
uuugguacaucauccacug

SEQ ID NO: 13141 - RNA, 19 nt, Artificial Sequence
  Description of Artificial Sequence: Synthetic oligonucleotide
uugaauuaugucagaguag

SEQ ID NO: 13142 - RNA, 19 nt, Artificial Sequence
  Description of Artificial Sequence: Synthetic oligonucleotide
cauuguaccgcucuguuug

SEQ ID NO: 13143 - RNA, 19 nt, Artificial Sequence
  Description of Artificial Sequence: Synthetic oligonucleotide
uuuguuuuguuuuguuuug

SEQ ID NO: 13144 - RNA, 19 nt, Artificial Sequence
  Description of Artificial Sequence: Synthetic oligonucleotide
cuaauuacauccucccuag

SEQ ID NO: 13145 - RNA, 19 nt, Artificial Sequence
  Description of Artificial Sequence: Synthetic oligonucleotide
uagugauggaccaggaacc

SEQ ID NO: 13146 - RNA, 19 nt, Artificial Sequence
  Description of Artificial Sequence: Synthetic oligonucleotide
aaagcacuaagcucaaaau

SEQ ID NO: 13147 - RNA, 19 nt, Artificial Sequence
  Description of Artificial Sequence: Synthetic oligonucleotide
uaacaauccagguugggcu

SEQ ID NO: 13148 - RNA, 19 nt, Artificial Sequence
  Description of Artificial Sequence: Synthetic oligonucleotide
uaaaggaccuuucucaaau

SEQ ID NO: 13149 - RNA, 19 nt, Artificial Sequence
  Description of Artificial Sequence: Synthetic oligonucleotide
agacuuuuaaggucaagug

SEQ ID NO: 13150 - RNA, 19 nt, Artificial Sequence
  Description of Artificial Sequence: Synthetic oligonucleotide
uauaccuugccaagcacug

SEQ ID NO: 13151 - RNA, 19 nt, Artificial Sequence
  Description of Artificial Sequence: Synthetic oligonucleotide
aauaccuucugcugagacu

SEQ ID NO: 13152 - RNA, 19 nt, Artificial Sequence
  Description of Artificial Sequence: Synthetic oligonucleotide
cucccuagaagagagaccg

SEQ ID NO: 13153 - RNA, 19 nt, Artificial Sequence
  Description of Artificial Sequence: Synthetic oligonucleotide
uuugugagugcgcuguuug

SEQ ID NO: 13154 - RNA, 19 nt, Artificial Sequence
  Description of Artificial Sequence: Synthetic oligonucleotide
agggagaaagcuuucaagu

SEQ ID NO: 13155 - RNA, 19 nt, Artificial Sequence
  Description of Artificial Sequence: Synthetic oligonucleotide
agguaauguuccuuaacuc

SEQ ID NO: 13156 - RNA, 19 nt, Artificial Sequence
  Description of Artificial Sequence: Synthetic oligonucleotide
ucugggaauaaacccaaac

SEQ ID NO: 13157 - RNA, 19 nt, Artificial Sequence
  Description of Artificial Sequence: Synthetic oligonucleotide
uuacauccucccuagaaga

SEQ ID NO: 13158 - RNA, 19 nt, Artificial Sequence
  Description of Artificial Sequence: Synthetic oligonucleotide
uugaguauaccuugccaag

SEQ ID NO: 13159 - RNA, 19 nt, Artificial Sequence
  Description of Artificial Sequence: Synthetic oligonucleotide
uuugggauuagaccccuca

SEQ ID NO: 13160 - RNA, 19 nt, Artificial Sequence
  Description of Artificial Sequence: Synthetic oligonucleotide
uuuaaucggacaucaaaua

SEQ ID NO: 13161 - RNA, 19 nt, Artificial Sequence
  Description of Artificial Sequence: Synthetic oligonucleotide
ucggcagcaagccacaaac

SEQ ID NO: 13162 - RNA, 19 nt, Artificial Sequence
  Description of Artificial Sequence: Synthetic oligonucleotide
caugauguagagugcacag

SEQ ID NO: 13163 - RNA, 19 nt, Artificial Sequence
  Description of Artificial Sequence: Synthetic oligonucleotide
acaacugaccaccagugcu

SEQ ID NO: 13164 - RNA, 19 nt, Artificial Sequence
  Description of Artificial Sequence: Synthetic oligonucleotide
ucuaauccaaagaccagaa

SEQ ID NO: 13165 - RNA, 19 nt, Artificial Sequence
  Description of Artificial Sequence: Synthetic oligonucleotide
uaucccuacgggaagggug

SEQ ID NO: 13166 - RNA, 19 nt, Artificial Sequence
  Description of Artificial Sequence: Synthetic oligonucleotide
uuaugucagaguaggccag

SEQ ID NO: 13167 - RNA, 19 nt, Artificial Sequence
  Description of Artificial Sequence: Synthetic oligonucleotide
uaagcucaaaauagaggug

SEQ ID NO: 13168 - RNA, 19 nt, Artificial Sequence
  Description of Artificial Sequence: Synthetic oligonucleotide
uuuccuaacaauccagguu

SEQ ID NO: 13169 - RNA, 19 nt, Artificial Sequence
  Description of Artificial Sequence: Synthetic oligonucleotide
ucugaccuagaaaaugccu

SEQ ID NO: 13170 - RNA, 19 nt, Artificial Sequence
  Description of Artificial Sequence: Synthetic oligonucleotide
uuccccgaugcuaugugcg

SEQ ID NO: 13171 - RNA, 19 nt, Artificial Sequence
  Description of Artificial Sequence: Synthetic oligonucleotide
ugaggcucggcccacccgg

SEQ ID NO: 13172 - RNA, 19 nt, Artificial Sequence
  Description of Artificial Sequence: Synthetic oligonucleotide
uaguuaguucucuggggcg

SEQ ID NO: 13173 - RNA, 19 nt, Artificial Sequence
  Description of Artificial Sequence: Synthetic oligonucleotide
uucuaauccaaagaccaga

SEQ ID NO: 13174 - RNA, 19 nt, Artificial Sequence
  Description of Artificial Sequence: Synthetic oligonucleotide
uuaaccuaaaccucaugua

SEQ ID NO: 13175 - RNA, 19 nt, Artificial Sequence
  Description of Artificial Sequence: Synthetic oligonucleotide
ucuagaaauaugggccugg

SEQ ID NO: 13176 - RNA, 19 nt, Artificial Sequence
  Description of Artificial Sequence: Synthetic oligonucleotide
cacuaguugucuuggauac

SEQ ID NO: 13177 - RNA, 19 nt, Artificial Sequence
  Description of Artificial Sequence: Synthetic oligonucleotide
gagaccgaguucuucugcg

SEQ ID NO: 13178 - RNA, 19 nt, Artificial Sequence
  Description of Artificial Sequence: Synthetic oligonucleotide
ggcuuguaaauagugaugg

SEQ ID NO: 13179 - RNA, 19 nt, Artificial Sequence
  Description of Artificial Sequence: Synthetic oligonucleotide
agagaccgaguucuucugc

SEQ ID NO: 13180 - RNA, 19 nt, Artificial Sequence
  Description of Artificial Sequence: Synthetic oligonucleotide
gucaagaauaccgaaacca

SEQ ID NO: 13181 - RNA, 19 nt, Artificial Sequence
  Description of Artificial Sequence: Synthetic oligonucleotide
uuaaggucaaguguucugu

SEQ ID NO: 13182 - RNA, 19 nt, Artificial Sequence
  Description of Artificial Sequence: Synthetic oligonucleotide
uggacaacugaccaccagu

SEQ ID NO: 13183 - RNA, 19 nt, Artificial Sequence
  Description of Artificial Sequence: Synthetic oligonucleotide
ucuggggcgacucugggaa

SEQ ID NO: 13184 - RNA, 19 nt, Artificial Sequence
  Description of Artificial Sequence: Synthetic oligonucleotide
acuugcuaggggcuaagag

SEQ ID NO: 13185 - RNA, 19 nt, Artificial Sequence
  Description of Artificial Sequence: Synthetic oligonucleotide
uacugggaaucugaaauag

SEQ ID NO: 13186 - RNA, 19 nt, Artificial Sequence
  Description of Artificial Sequence: Synthetic oligonucleotide
augccuuuuagcuuagcca

SEQ ID NO: 13187 - RNA, 19 nt, Artificial Sequence
  Description of Artificial Sequence: Synthetic oligonucleotide
auuuaaucggacaucaaau

SEQ ID NO: 13188 - RNA, 19 nt, Artificial Sequence
  Description of Artificial Sequence: Synthetic oligonucleotide
cucaaaauagaggugagga

SEQ ID NO: 13189 - RNA, 19 nt, Artificial Sequence
  Description of Artificial Sequence: Synthetic oligonucleotide
cuaacaauccagguugggc

SEQ ID NO: 13190 - RNA, 19 nt, Artificial Sequence
  Description of Artificial Sequence: Synthetic oligonucleotide
guaccauuaggaaauggcc

SEQ ID NO: 13191 - RNA, 19 nt, Artificial Sequence
  Description of Artificial Sequence: Synthetic oligonucleotide
gaugcuaaaguuacacgac

SEQ ID NO: 13192 - RNA, 19 nt, Artificial Sequence
  Description of Artificial Sequence: Synthetic oligonucleotide
ugaaugcacgguguggccg

SEQ ID NO: 13193 - RNA, 19 nt, Artificial Sequence
  Description of Artificial Sequence: Synthetic oligonucleotide
guguguguguguuugugag

SEQ ID NO: 13194 - RNA, 19 nt, Artificial Sequence
  Description of Artificial Sequence: Synthetic oligonucleotide
uaugcuagggcuagccuaa

SEQ ID NO: 13195 - RNA, 19 nt, Artificial Sequence
  Description of Artificial Sequence: Synthetic oligonucleotide
ucccuagagauccacucug

SEQ ID NO: 13196 - RNA, 19 nt, Artificial Sequence
  Description of Artificial Sequence: Synthetic oligonucleotide
aucccuaauuacauccucc

SEQ ID NO: 13197 - RNA, 19 nt, Artificial Sequence
  Description of Artificial Sequence: Synthetic oligonucleotide
uccuccguuggacacaacu

SEQ ID NO: 13198 - RNA, 19 nt, Artificial Sequence
  Description of Artificial Sequence: Synthetic oligonucleotide
ucagucuuaccugagaguu

SEQ ID NO: 13199 - RNA, 19 nt, Artificial Sequence
  Description of Artificial Sequence: Synthetic oligonucleotide
uuaugggcacuucguagcc

SEQ ID NO: 13200 - RNA, 19 nt, Artificial Sequence
  Description of Artificial Sequence: Synthetic oligonucleotide
uuccugaugcucauuggga

SEQ ID NO: 13201 - RNA, 19 nt, Artificial Sequence
  Description of Artificial Sequence: Synthetic oligonucleotide
uccuuuaugggcacuucgu

SEQ ID NO: 13202 - RNA, 19 nt, Artificial Sequence
  Description of Artificial Sequence: Synthetic oligonucleotide
augaaccagauuaagagaa

SEQ ID NO: 13203 - RNA, 19 nt, Artificial Sequence
  Description of Artificial Sequence: Synthetic oligonucleotide
acuuugaucccuaauuaca

SEQ ID NO: 13204 - RNA, 19 nt, Artificial Sequence
  Description of Artificial Sequence: Synthetic oligonucleotide
aggaggcccaaaguaaccc

SEQ ID NO: 13205 - RNA, 19 nt, Artificial Sequence
  Description of Artificial Sequence: Synthetic oligonucleotide
agaaagauguuccuccguu

SEQ ID NO: 13206 - RNA, 19 nt, Artificial Sequence
  Description of Artificial Sequence: Synthetic oligonucleotide
uguguguguguguuuguga

SEQ ID NO: 13207 - RNA, 19 nt, Artificial Sequence
  Description of Artificial Sequence: Synthetic oligonucleotide
cacuuugaucccuaauuac

SEQ ID NO: 13208 - RNA, 19 nt, Artificial Sequence
  Description of Artificial Sequence: Synthetic oligonucleotide
uggccugagauucuauacu

SEQ ID NO: 13209 - RNA, 19 nt, Artificial Sequence
  Description of Artificial Sequence: Synthetic oligonucleotide
aucaauaaggaaacagcug

SEQ ID NO: 13210 - RNA, 19 nt, Artificial Sequence
  Description of Artificial Sequence: Synthetic oligonucleotide
cuccguuggacacaacuag

SEQ ID NO: 13211 - RNA, 19 nt, Artificial Sequence
  Description of Artificial Sequence: Synthetic oligonucleotide
uguggugugugugugugug

SEQ ID NO: 13212 - RNA, 19 nt, Artificial Sequence
  Description of Artificial Sequence: Synthetic oligonucleotide
uguaggcaauuugaggacc

SEQ ID NO: 13213 - RNA, 19 nt, Artificial Sequence
  Description of Artificial Sequence: Synthetic oligonucleotide
acuagagaggaaggcaccg

SEQ ID NO: 13214 - RNA, 19 nt, Artificial Sequence
  Description of Artificial Sequence: Synthetic oligonucleotide
agaugaacaauggaguaau

SEQ ID NO: 13215 - RNA, 19 nt, Artificial Sequence
  Description of Artificial Sequence: Synthetic oligonucleotide
uuugaucccuaauuacauc

SEQ ID NO: 13216 - RNA, 19 nt, Artificial Sequence
  Description of Artificial Sequence: Synthetic oligonucleotide
gauagaccagaucggcagc

SEQ ID NO: 13217 - RNA, 19 nt, Artificial Sequence
  Description of Artificial Sequence: Synthetic oligonucleotide
gauuagaccccucaucaua

SEQ ID NO: 13218 - RNA, 19 nt, Artificial Sequence
  Description of Artificial Sequence: Synthetic oligonucleotide
ugaucccuaauuacauccu

SEQ ID NO: 13219 - RNA, 19 nt, Artificial Sequence
  Description of Artificial Sequence: Synthetic oligonucleotide
aaggucgacaccuccccgu

SEQ ID NO: 13220 - RNA, 19 nt, Artificial Sequence
  Description of Artificial Sequence: Synthetic oligonucleotide
cugacuaggggucuuucug

SEQ ID NO: 13221 - RNA, 19 nt, Artificial Sequence
  Description of Artificial Sequence: Synthetic oligonucleotide
ugacuaaaugcuggccugg

SEQ ID NO: 13222 - RNA, 19 nt, Artificial Sequence
  Description of Artificial Sequence: Synthetic oligonucleotide
ggcaguaaagcuucuuugc

SEQ ID NO: 13223 - RNA, 19 nt, Artificial Sequence
  Description of Artificial Sequence: Synthetic oligonucleotide
gagaccgauggagacagcc

SEQ ID NO: 13224 - RNA, 19 nt, Artificial Sequence
  Description of Artificial Sequence: Synthetic oligonucleotide
cuugccaagucuccccucc

SEQ ID NO: 13225 - RNA, 19 nt, Artificial Sequence
  Description of Artificial Sequence: Synthetic oligonucleotide
ggcacuacuguuucccugg

SEQ ID NO: 13226 - RNA, 19 nt, Artificial Sequence
  Description of Artificial Sequence: Synthetic oligonucleotide
cucugaccuagaaaaugcc

SEQ ID NO: 13227 - RNA, 19 nt, Artificial Sequence
  Description of Artificial Sequence: Synthetic oligonucleotide
aggaccuuucucaaaugac

SEQ ID NO: 13228 - RNA, 19 nt, Artificial Sequence
  Description of Artificial Sequence: Synthetic oligonucleotide
uccguuggacacaacuaga

SEQ ID NO: 13229 - RNA, 19 nt, Artificial Sequence
  Description of Artificial Sequence: Synthetic oligonucleotide
cuaugugcgcccaucgcac

SEQ ID NO: 13230 - RNA, 19 nt, Artificial Sequence
  Description of Artificial Sequence: Synthetic oligonucleotide
uguacgaccccugcccagg

SEQ ID NO: 13231 - RNA, 19 nt, Artificial Sequence
  Description of Artificial Sequence: Synthetic oligonucleotide
uucccucauacugaaauaa

SEQ ID NO: 13232 - RNA, 19 nt, Artificial Sequence
  Description of Artificial Sequence: Synthetic oligonucleotide
acguacacuaguugucuug

SEQ ID NO: 13233 - RNA, 19 nt, Artificial Sequence
  Description of Artificial Sequence: Synthetic oligonucleotide
uguguggugugugugugug

SEQ ID NO: 13234 - RNA, 19 nt, Artificial Sequence
  Description of Artificial Sequence: Synthetic oligonucleotide
guaaauagugauggaccag

SEQ ID NO: 13235 - RNA, 19 nt, Artificial Sequence
  Description of Artificial Sequence: Synthetic oligonucleotide
auaucugauaaggcaaacu

SEQ ID NO: 13236 - RNA, 19 nt, Artificial Sequence
  Description of Artificial Sequence: Synthetic oligonucleotide
caucccuagagauccacuc

SEQ ID NO: 13237 - RNA, 19 nt, Artificial Sequence
  Description of Artificial Sequence: Synthetic oligonucleotide
caaucuagaggguuaggga

SEQ ID NO: 13238 - RNA, 19 nt, Artificial Sequence
  Description of Artificial Sequence: Synthetic oligonucleotide
ccuacagaguguuuacugg

SEQ ID NO: 13239 - RNA, 19 nt, Artificial Sequence
  Description of Artificial Sequence: Synthetic oligonucleotide
guuuguuuuguuuuguuuu

SEQ ID NO: 13240 - RNA, 19 nt, Artificial Sequence
  Description of Artificial Sequence: Synthetic oligonucleotide
gaaggucgacaccuccccg

SEQ ID NO: 13241 - RNA, 19 nt, Artificial Sequence
  Description of Artificial Sequence: Synthetic oligonucleotide
cacgucaaagagaugagaa

SEQ ID NO: 13242 - RNA, 19 nt, Artificial Sequence
  Description of Artificial Sequence: Synthetic oligonucleotide
ugcccaggccucaaucuag

SEQ ID NO: 13243 - RNA, 19 nt, Artificial Sequence
  Description of Artificial Sequence: Synthetic oligonucleotide
gugaccaaaaguuggggaa

SEQ ID NO: 13244 - RNA, 19 nt, Artificial Sequence
  Description of Artificial Sequence: Synthetic oligonucleotide
ucacaaccggcagaggcag

SEQ ID NO: 13245 - RNA, 19 nt, Artificial Sequence
  Description of Artificial Sequence: Synthetic oligonucleotide
caauuugaggaccugacgu

SEQ ID NO: 13246 - RNA, 19 nt, Artificial Sequence
  Description of Artificial Sequence: Synthetic oligonucleotide
acguacaaaguaacccagc

SEQ ID NO: 13247 - RNA, 19 nt, Artificial Sequence
  Description of Artificial Sequence: Synthetic oligonucleotide
agaccgaguucuucugcgg

SEQ ID NO: 13248 - RNA, 19 nt, Artificial Sequence
  Description of Artificial Sequence: Synthetic oligonucleotide
gaucccuaauuacauccuc

SEQ ID NO: 13249 - RNA, 19 nt, Artificial Sequence
  Description of Artificial Sequence: Synthetic oligonucleotide
ucuuaccugagaguugccu

SEQ ID NO: 13250 - RNA, 19 nt, Artificial Sequence
  Description of Artificial Sequence: Synthetic oligonucleotide
auaaagugugccccaccca

SEQ ID NO: 13251 - RNA, 19 nt, Artificial Sequence
  Description of Artificial Sequence: Synthetic oligonucleotide
ccaaacuaucugaaguagg

SEQ ID NO: 13252 - RNA, 19 nt, Artificial Sequence
  Description of Artificial Sequence: Synthetic oligonucleotide
cugacguacacuaguuguc

SEQ ID NO: 13253 - RNA, 19 nt, Artificial Sequence
  Description of Artificial Sequence: Synthetic oligonucleotide
uguguguguggugugugug

SEQ ID NO: 13254 - RNA, 19 nt, Artificial Sequence
  Description of Artificial Sequence: Synthetic oligonucleotide
gcuaacauaagccuuuucu

SEQ ID NO: 13255 - RNA, 19 nt, Artificial Sequence
  Description of Artificial Sequence: Synthetic oligonucleotide
caauuccaggcaaacucug

SEQ ID NO: 13256 - RNA, 19 nt, Artificial Sequence
  Description of Artificial Sequence: Synthetic oligonucleotide
gaccgauggagacagccca

SEQ ID NO: 13257 - RNA, 19 nt, Artificial Sequence
  Description of Artificial Sequence: Synthetic oligonucleotide
aguaugcuagggcuagccu

SEQ ID NO: 13258 - RNA, 19 nt, Artificial Sequence
  Description of Artificial Sequence: Synthetic oligonucleotide
gauggaccaggaaccaaag

SEQ ID NO: 13259 - RNA, 19 nt, Artificial Sequence
  Description of Artificial Sequence: Synthetic oligonucleotide
uccggguuggaacgcagga

SEQ ID NO: 13260 - RNA, 19 nt, Artificial Sequence
  Description of Artificial Sequence: Synthetic oligonucleotide
gguuuccuaacaauccagg

SEQ ID NO: 13261 - RNA, 19 nt, Artificial Sequence
  Description of Artificial Sequence: Synthetic oligonucleotide
ugcuaugugcgcccaucgc

SEQ ID NO: 13262 - RNA, 19 nt, Artificial Sequence
  Description of Artificial Sequence: Synthetic oligonucleotide
augugaaugcacggugugg

SEQ ID NO: 13263 - RNA, 19 nt, Artificial Sequence
  Description of Artificial Sequence: Synthetic oligonucleotide
acgucaaagagaugagaaa

SEQ ID NO: 13264 - RNA, 19 nt, Artificial Sequence
  Description of Artificial Sequence: Synthetic oligonucleotide
gaggaccugacguacacua

SEQ ID NO: 13265 - RNA, 19 nt, Artificial Sequence
  Description of Artificial Sequence: Synthetic oligonucleotide
uguguguggugugugugug

SEQ ID NO: 13266 - RNA, 19 nt, Artificial Sequence
  Description of Artificial Sequence: Synthetic oligonucleotide
ugcggaugaccauuuguuc

SEQ ID NO: 13267 - RNA, 19 nt, Artificial Sequence
  Description of Artificial Sequence: Synthetic oligonucleotide
guuacacgacauucagagc

SEQ ID NO: 13268 - RNA, 19 nt, Artificial Sequence
  Description of Artificial Sequence: Synthetic oligonucleotide
cagaacuauggcugacuag

SEQ ID NO: 13269 - RNA, 19 nt, Artificial Sequence
  Description of Artificial Sequence: Synthetic oligonucleotide
uccuacuaggucuguaaua

SEQ ID NO: 13270 - RNA, 19 nt, Artificial Sequence
  Description of Artificial Sequence: Synthetic oligonucleotide
ucccucauacugaaauaaa

SEQ ID NO: 13271 - RNA, 19 nt, Artificial Sequence
  Description of Artificial Sequence: Synthetic oligonucleotide
ggaauaaacccaaacuauc

SEQ ID NO: 13272 - RNA, 19 nt, Artificial Sequence
  Description of Artificial Sequence: Synthetic oligonucleotide
aucccuacgggaagggugg

SEQ ID NO: 13273 - RNA, 19 nt, Artificial Sequence
  Description of Artificial Sequence: Synthetic oligonucleotide
agaccagaucggcagcaag

SEQ ID NO: 13274 - RNA, 19 nt, Artificial Sequence
  Description of Artificial Sequence: Synthetic oligonucleotide
acuugcagggcucgagucu

SEQ ID NO: 13275 - RNA, 19 nt, Artificial Sequence
  Description of Artificial Sequence: Synthetic oligonucleotide
uggugugugugugugugug

SEQ ID NO: 13276 - RNA, 19 nt, Artificial Sequence
  Description of Artificial Sequence: Synthetic oligonucleotide
aucccuagagauccacucu

SEQ ID NO: 13277 - RNA, 19 nt, Artificial Sequence
  Description of Artificial Sequence: Synthetic oligonucleotide
cuagaaauaugggccuggc

SEQ ID NO: 13278 - RNA, 19 nt, Artificial Sequence
  Description of Artificial Sequence: Synthetic oligonucleotide
ggcgacuccgaccacgccg

SEQ ID NO: 13279 - RNA, 19 nt, Artificial Sequence
  Description of Artificial Sequence: Synthetic oligonucleotide
uugggauuagaccccucau

SEQ ID NO: 13280 - RNA, 19 nt, Artificial Sequence
  Description of Artificial Sequence: Synthetic oligonucleotide
cagaacuacuuacuuuguc

SEQ ID NO: 13281 - RNA, 19 nt, Artificial Sequence
  Description of Artificial Sequence: Synthetic oligonucleotide
cuagggcuagccuaaaucu

SEQ ID NO: 13282 - RNA, 19 nt, Artificial Sequence
  Description of Artificial Sequence: Synthetic oligonucleotide
uaauuacauccucccuaga

SEQ ID NO: 13283 - RNA, 19 nt, Artificial Sequence
  Description of Artificial Sequence: Synthetic oligonucleotide
ggcacuucguagccaaagg

SEQ ID NO: 13284 - RNA, 19 nt, Artificial Sequence
  Description of Artificial Sequence: Synthetic oligonucleotide
aaguuacacgacauucaga

SEQ ID NO: 13285 - RNA, 19 nt, Artificial Sequence
  Description of Artificial Sequence: Synthetic oligonucleotide
caacccuuuuaaccuaaac

SEQ ID NO: 13286 - RNA, 19 nt, Artificial Sequence
  Description of Artificial Sequence: Synthetic oligonucleotide
guuacaggagcugcuaaga

SEQ ID NO: 13287 - RNA, 19 nt, Artificial Sequence
  Description of Artificial Sequence: Synthetic oligonucleotide
agcuuagagugacagccau

SEQ ID NO: 13288 - RNA, 19 nt, Artificial Sequence
  Description of Artificial Sequence: Synthetic oligonucleotide
guuggaacgcaggauuggc

SEQ ID NO: 13289 - RNA, 19 nt, Artificial Sequence
  Description of Artificial Sequence: Synthetic oligonucleotide
guaugcuagggcuagccua

SEQ ID NO: 13290 - RNA, 19 nt, Artificial Sequence
  Description of Artificial Sequence: Synthetic oligonucleotide
accugacguacacuaguug

SEQ ID NO: 13291 - RNA, 19 nt, Artificial Sequence
  Description of Artificial Sequence: Synthetic oligonucleotide
ugacugcuacuugcuaggg

SEQ ID NO: 13292 - RNA, 19 nt, Artificial Sequence
  Description of Artificial Sequence: Synthetic oligonucleotide
auguagagcuucccuguga

SEQ ID NO: 13293 - RNA, 19 nt, Artificial Sequence
  Description of Artificial Sequence: Synthetic oligonucleotide
uagggcuagccuaaaucua

SEQ ID NO: 13294 - RNA, 19 nt, Artificial Sequence
  Description of Artificial Sequence: Synthetic oligonucleotide
ggccugagauucuauacug

SEQ ID NO: 13295 - RNA, 19 nt, Artificial Sequence
  Description of Artificial Sequence: Synthetic oligonucleotide
guaccuacaucaucuugga

SEQ ID NO: 13296 - RNA, 19 nt, Artificial Sequence
  Description of Artificial Sequence: Synthetic oligonucleotide
guuccuuaacuccaacaaa

SEQ ID NO: 13297 - RNA, 19 nt, Artificial Sequence
  Description of Artificial Sequence: Synthetic oligonucleotide
aaguagaccucagcaaauu

SEQ ID NO: 13298 - RNA, 19 nt, Artificial Sequence
  Description of Artificial Sequence: Synthetic oligonucleotide
ccagaugacgcucucgggc

SEQ ID NO: 13299 - RNA, 19 nt, Artificial Sequence
  Description of Artificial Sequence: Synthetic oligonucleotide
guguguguguguguguuug

SEQ ID NO: 13300 - RNA, 19 nt, Artificial Sequence
  Description of Artificial Sequence: Synthetic oligonucleotide
gcagcuuugguacaucauc

SEQ ID NO: 13301 - RNA, 19 nt, Artificial Sequence
  Description of Artificial Sequence: Synthetic oligonucleotide
ccuuuuaaccuaaaccuca

SEQ ID NO: 13302 - RNA, 19 nt, Artificial Sequence
  Description of Artificial Sequence: Synthetic oligonucleotide
gaaugcacgguguggccga

SEQ ID NO: 13303 - RNA, 19 nt, Artificial Sequence
  Description of Artificial Sequence: Synthetic oligonucleotide
gagccccggauucuggagc

SEQ ID NO: 13304 - RNA, 19 nt, Artificial Sequence
  Description of Artificial Sequence: Synthetic oligonucleotide
ggcaacucaguaugcuagg

SEQ ID NO: 13305 - RNA, 19 nt, Artificial Sequence
  Description of Artificial Sequence: Synthetic oligonucleotide
caguaugcuagggcuagcc

SEQ ID NO: 13306 - RNA, 19 nt, Artificial Sequence
  Description of Artificial Sequence: Synthetic oligonucleotide
ucuccaauacuugguucca

SEQ ID NO: 13307 - RNA, 19 nt, Artificial Sequence
  Description of Artificial Sequence: Synthetic oligonucleotide
gaugcuaugugcgcccauc

SEQ ID NO: 13308 - RNA, 19 nt, Artificial Sequence
  Description of Artificial Sequence: Synthetic oligonucleotide
acuuacuuugucacagagu

SEQ ID NO: 13309 - RNA, 19 nt, Artificial Sequence
  Description of Artificial Sequence: Synthetic oligonucleotide
ugugugugugugugugugu

SEQ ID NO: 13310 - RNA, 19 nt, Artificial Sequence
  Description of Artificial Sequence: Synthetic oligonucleotide
aauaugggccuggccugag

SEQ ID NO: 13311 - RNA, 19 nt, Artificial Sequence
  Description of Artificial Sequence: Synthetic oligonucleotide
cauggcagggacuguacga

SEQ ID NO: 13312 - RNA, 19 nt, Artificial Sequence
  Description of Artificial Sequence: Synthetic oligonucleotide
cccaacacggucaaauaug

SEQ ID NO: 13313 - RNA, 19 nt, Artificial Sequence
  Description of Artificial Sequence: Synthetic oligonucleotide
agucggaggagcgccacag

SEQ ID NO: 13314 - RNA, 19 nt, Artificial Sequence
  Description of Artificial Sequence: Synthetic oligonucleotide
uuguguguguggugugugu

SEQ ID NO: 13315 - RNA, 19 nt, Artificial Sequence
  Description of Artificial Sequence: Synthetic oligonucleotide
uaacugacaaagggaugga

SEQ ID NO: 13316 - RNA, 19 nt, Artificial Sequence
  Description of Artificial Sequence: Synthetic oligonucleotide
gugaaugcacgguguggcc

SEQ ID NO: 13317 - RNA, 19 nt, Artificial Sequence
  Description of Artificial Sequence: Synthetic oligonucleotide
cuuugaucccuaauuacau

SEQ ID NO: 13318 - RNA, 19 nt, Artificial Sequence
  Description of Artificial Sequence: Synthetic oligonucleotide
gugugugugugugugugug

SEQ ID NO: 13319 - RNA, 19 nt, Artificial Sequence
  Description of Artificial Sequence: Synthetic oligonucleotide
uguguguguguguguuugu

SEQ ID NO: 13320 - RNA, 19 nt, Artificial Sequence
  Description of Artificial Sequence: Synthetic oligonucleotide
uucauccccuacagagugu

SEQ ID NO: 13321 - RNA, 19 nt, Artificial Sequence
  Description of Artificial Sequence: Synthetic oligonucleotide
guuuccuaacaauccaggu

SEQ ID NO: 13322 - RNA, 19 nt, Artificial Sequence
  Description of Artificial Sequence: Synthetic oligonucleotide
uaugugcgcccaucgcaca

SEQ ID NO: 13323 - RNA, 19 nt, Artificial Sequence
  Description of Artificial Sequence: Synthetic oligonucleotide
cagaugacgcucucgggca

SEQ ID NO: 13324 - RNA, 19 nt, Artificial Sequence
  Description of Artificial Sequence: Synthetic oligonucleotide
ugcuaacauaagccuuuuc

SEQ ID NO: 13325 - RNA, 19 nt, Artificial Sequence
  Description of Artificial Sequence: Synthetic oligonucleotide
ggaugcaagugugccaagg

SEQ ID NO: 13326 - RNA, 19 nt, Artificial Sequence
  Description of Artificial Sequence: Synthetic oligonucleotide
acuaguccagggucaaauu

SEQ ID NO: 13327 - RNA, 19 nt, Artificial Sequence
  Description of Artificial Sequence: Synthetic oligonucleotide
gcuagccuaaaucuagaga

SEQ ID NO: 13328 - RNA, 19 nt, Artificial Sequence
  Description of Artificial Sequence: Synthetic oligonucleotide
ugugagugcgcuguuuguu

SEQ ID NO: 13329 - RNA, 19 nt, Artificial Sequence
  Description of Artificial Sequence: Synthetic oligonucleotide
uacgggaagggugggcuug

SEQ ID NO: 13330 - RNA, 19 nt, Artificial Sequence
  Description of Artificial Sequence: Synthetic oligonucleotide
uugccaagucuccccuccc

SEQ ID NO: 13331 - RNA, 19 nt, Artificial Sequence
  Description of Artificial Sequence: Synthetic oligonucleotide
uguuccuccguuggacaca

SEQ ID NO: 13332 - RNA, 19 nt, Artificial Sequence
  Description of Artificial Sequence: Synthetic oligonucleotide
cucguccucggccggacgc

SEQ ID NO: 13333 - RNA, 19 nt, Artificial Sequence
  Description of Artificial Sequence: Synthetic oligonucleotide
ccuuauagucauagagaag

SEQ ID NO: 13334 - RNA, 19 nt, Artificial Sequence
  Description of Artificial Sequence: Synthetic oligonucleotide
gaacccaucccuagagauc

SEQ ID NO: 13335 - RNA, 19 nt, Artificial Sequence
  Description of Artificial Sequence: Synthetic oligonucleotide
agcuaacccucaccccagg

SEQ ID NO: 13336 - RNA, 19 nt, Artificial Sequence
  Description of Artificial Sequence: Synthetic oligonucleotide
ucgcacaagacugccugga

SEQ ID NO: 13337 - RNA, 19 nt, Artificial Sequence
  Description of Artificial Sequence: Synthetic oligonucleotide
cuuguguguguggugugug

SEQ ID NO: 13338 - RNA, 19 nt, Artificial Sequence
  Description of Artificial Sequence: Synthetic oligonucleotide
cucaaucuagaggguuagg

SEQ ID NO: 13339 - RNA, 19 nt, Artificial Sequence
  Description of Artificial Sequence: Synthetic oligonucleotide
caaggcccuauggaggggc

SEQ ID NO: 13340 - RNA, 19 nt, Artificial Sequence
  Description of Artificial Sequence: Synthetic oligonucleotide
gcuaugugcgcccaucgca

SEQ ID NO: 13341 - RNA, 19 nt, Artificial Sequence
  Description of Artificial Sequence: Synthetic oligonucleotide
gcacaagacugccuggaug

SEQ ID NO: 13342 - RNA, 19 nt, Artificial Sequence
  Description of Artificial Sequence: Synthetic oligonucleotide
gagauagggaacagcccca

SEQ ID NO: 13343 - RNA, 19 nt, Artificial Sequence
  Description of Artificial Sequence: Synthetic oligonucleotide
gguuggaacgcaggauugg

SEQ ID NO: 13344 - RNA, 19 nt, Artificial Sequence
  Description of Artificial Sequence: Synthetic oligonucleotide
ugcggaucucugagcaggu

SEQ ID NO: 13345 - RNA, 19 nt, Artificial Sequence
  Description of Artificial Sequence: Synthetic oligonucleotide
guguguguguguguuugug

SEQ ID NO: 13346 - RNA, 19 nt, Artificial Sequence
  Description of Artificial Sequence: Synthetic oligonucleotide
gucuuucugucccagugua

SEQ ID NO: 13347 - RNA, 19 nt, Artificial Sequence
  Description of Artificial Sequence: Synthetic oligonucleotide
agauucuauacugcuccaa

SEQ ID NO: 13348 - RNA, 19 nt, Artificial Sequence
  Description of Artificial Sequence: Synthetic oligonucleotide
aucccgugcacguccacau

SEQ ID NO: 13349 - RNA, 19 nt, Artificial Sequence
  Description of Artificial Sequence: Synthetic oligonucleotide
aguggaucccgugcacguc

SEQ ID NO: 13350 - RNA, 19 nt, Artificial Sequence
  Description of Artificial Sequence: Synthetic oligonucleotide
caguccucuaacuggugca

SEQ ID NO: 13351 - RNA, 19 nt, Artificial Sequence
  Description of Artificial Sequence: Synthetic oligonucleotide
uaugggcacuucguagcca

SEQ ID NO: 13352 - RNA, 19 nt, Artificial Sequence
  Description of Artificial Sequence: Synthetic oligonucleotide
gcaacucaguaugcuaggg

SEQ ID NO: 13353 - RNA, 19 nt, Artificial Sequence
  Description of Artificial Sequence: Synthetic oligonucleotide
aggucgacaccuccccgug

SEQ ID NO: 13354 - RNA, 19 nt, Artificial Sequence
  Description of Artificial Sequence: Synthetic oligonucleotide
acuuguguguguggugugu

SEQ ID NO: 13355 - RNA, 19 nt, Artificial Sequence
  Description of Artificial Sequence: Synthetic oligonucleotide
ggugugcggggccugacug

SEQ ID NO: 13356 - RNA, 19 nt, Artificial Sequence
  Description of Artificial Sequence: Synthetic oligonucleotide
ccuaauuacauccucccua

SEQ ID NO: 13357 - RNA, 19 nt, Artificial Sequence
  Description of Artificial Sequence: Synthetic oligonucleotide
acugggaaucugaaauaga

SEQ ID NO: 13358 - RNA, 19 nt, Artificial Sequence
  Description of Artificial Sequence: Synthetic oligonucleotide
accgaguucuucugcggau

SEQ ID NO: 13359 - RNA, 19 nt, Artificial Sequence
  Description of Artificial Sequence: Synthetic oligonucleotide
gccaacaaguuguaggcaa

SEQ ID NO: 13360 - RNA, 19 nt, Artificial Sequence
  Description of Artificial Sequence: Synthetic oligonucleotide
cccuuuuaaccuaaaccuc

SEQ ID NO: 13361 - RNA, 19 nt, Artificial Sequence
  Description of Artificial Sequence: Synthetic oligonucleotide
cuguuugauacaggaucug

SEQ ID NO: 13362 - RNA, 19 nt, Artificial Sequence
  Description of Artificial Sequence: Synthetic oligonucleotide
caacacggucaaauauguc

SEQ ID NO: 13363 - RNA, 19 nt, Artificial Sequence
  Description of Artificial Sequence: Synthetic oligonucleotide
cugaccuagaaaaugccuu

SEQ ID NO: 13364 - RNA, 19 nt, Artificial Sequence
  Description of Artificial Sequence: Synthetic oligonucleotide
gaugacgcucucgggcagc

SEQ ID NO: 13365 - RNA, 19 nt, Artificial Sequence
  Description of Artificial Sequence: Synthetic oligonucleotide
ggauucuggagcuccggca

SEQ ID NO: 13366 - RNA, 19 nt, Artificial Sequence
  Description of Artificial Sequence: Synthetic oligonucleotide
uguguguguguguguguuu

SEQ ID NO: 13367 - RNA, 19 nt, Artificial Sequence
  Description of Artificial Sequence: Synthetic oligonucleotide
accaacacguuugguuucu

SEQ ID NO: 13368 - RNA, 19 nt, Artificial Sequence
  Description of Artificial Sequence: Synthetic oligonucleotide
guauaccuugccaagcacu

SEQ ID NO: 13369 - RNA, 19 nt, Artificial Sequence
  Description of Artificial Sequence: Synthetic oligonucleotide
ucccuagaagagagaccga

SEQ ID NO: 13370 - RNA, 19 nt, Artificial Sequence
  Description of Artificial Sequence: Synthetic oligonucleotide
uugauuuguuguggccaac

SEQ ID NO: 13371 - RNA, 19 nt, Artificial Sequence
  Description of Artificial Sequence: Synthetic oligonucleotide
cugacugcuacccuguuuu

SEQ ID NO: 13372 - RNA, 19 nt, Artificial Sequence
  Description of Artificial Sequence: Synthetic oligonucleotide
ucaguaugcuagggcuagc

SEQ ID NO: 13373 - RNA, 19 nt, Artificial Sequence
  Description of Artificial Sequence: Synthetic oligonucleotide
gccucugaccuagaaaaug

SEQ ID NO: 13374 - RNA, 19 nt, Artificial Sequence
  Description of Artificial Sequence: Synthetic oligonucleotide
ugaggaccugacguacacu

SEQ ID NO: 13375 - RNA, 19 nt, Artificial Sequence
  Description of Artificial Sequence: Synthetic oligonucleotide
cuuguggaaagguaauguu

SEQ ID NO: 13376 - RNA, 19 nt, Artificial Sequence
  Description of Artificial Sequence: Synthetic oligonucleotide
cacgccgagccccggauuc

SEQ ID NO: 13377 - RNA, 19 nt, Artificial Sequence
  Description of Artificial Sequence: Synthetic oligonucleotide
cacuuguguguguggugug

SEQ ID NO: 13378 - RNA, 19 nt, Artificial Sequence
  Description of Artificial Sequence: Synthetic oligonucleotide
cuggcagcaaggcccuaug

SEQ ID NO: 13379 - RNA, 19 nt, Artificial Sequence
  Description of Artificial Sequence: Synthetic oligonucleotide
gacuaguccagggucaaau

SEQ ID NO: 13380 - RNA, 19 nt, Artificial Sequence
  Description of Artificial Sequence: Synthetic oligonucleotide
cccuagaagagagaccgag

SEQ ID NO: 13381 - RNA, 19 nt, Artificial Sequence
  Description of Artificial Sequence: Synthetic oligonucleotide
cuuuuaaccuaaaccucau

SEQ ID NO: 13382 - RNA, 19 nt, Artificial Sequence
  Description of Artificial Sequence: Synthetic oligonucleotide
aagagacuuuuaaggucaa

SEQ ID NO: 13383 - RNA, 19 nt, Artificial Sequence
  Description of Artificial Sequence: Synthetic oligonucleotide
gagcuuagagugacagcca

SEQ ID NO: 13384 - RNA, 19 nt, Artificial Sequence
  Description of Artificial Sequence: Synthetic oligonucleotide
guacacuaguugucuugga

SEQ ID NO: 13385 - RNA, 19 nt, Artificial Sequence
  Description of Artificial Sequence: Synthetic oligonucleotide
gguguggccgauaggaaga

SEQ ID NO: 13386 - RNA, 19 nt, Artificial Sequence
  Description of Artificial Sequence: Synthetic oligonucleotide
cuggcaacucaguaugcua

SEQ ID NO: 13387 - RNA, 19 nt, Artificial Sequence
  Description of Artificial Sequence: Synthetic oligonucleotide
auaugggccuggccugaga

SEQ ID NO: 13388 - RNA, 19 nt, Artificial Sequence
  Description of Artificial Sequence: Synthetic oligonucleotide
gaucccgugcacguccaca

SEQ ID NO: 13389 - RNA, 19 nt, Artificial Sequence
  Description of Artificial Sequence: Synthetic oligonucleotide
ccgaaaccaacacguuugg

SEQ ID NO: 13390 - RNA, 19 nt, Artificial Sequence
  Description of Artificial Sequence: Synthetic oligonucleotide
aggaccugacguacacuag

SEQ ID NO: 13391 - RNA, 19 nt, Artificial Sequence
  Description of Artificial Sequence: Synthetic oligonucleotide
cccgugcacguccacaugc

SEQ ID NO: 13392 - RNA, 19 nt, Artificial Sequence
  Description of Artificial Sequence: Synthetic oligonucleotide
gugugcggggccugacugc

SEQ ID NO: 13393 - RNA, 19 nt, Artificial Sequence
  Description of Artificial Sequence: Synthetic oligonucleotide
gcuuguaaauagugaugga

SEQ ID NO: 13394 - RNA, 19 nt, Artificial Sequence
  Description of Artificial Sequence: Synthetic oligonucleotide
augugcgcccaucgcacaa

SEQ ID NO: 13395 - RNA, 19 nt, Artificial Sequence
  Description of Artificial Sequence: Synthetic oligonucleotide
acauggccauuuaaucgga

SEQ ID NO: 13396 - RNA, 19 nt, Artificial Sequence
  Description of Artificial Sequence: Synthetic oligonucleotide
ggaccuuucucaaaugacu

SEQ ID NO: 13397 - RNA, 19 nt, Artificial Sequence
  Description of Artificial Sequence: Synthetic oligonucleotide
accgauggagacagcccag

SEQ ID NO: 13398 - RNA, 19 nt, Artificial Sequence
  Description of Artificial Sequence: Synthetic oligonucleotide
ggaacccaucccuagagau

SEQ ID NO: 13399 - RNA, 19 nt, Artificial Sequence
  Description of Artificial Sequence: Synthetic oligonucleotide
ugcuacuugcuaggggcua

SEQ ID NO: 13400 - RNA, 19 nt, Artificial Sequence
  Description of Artificial Sequence: Synthetic oligonucleotide
gacccucguccucggccgg

SEQ ID NO: 13401 - RNA, 19 nt, Artificial Sequence
  Description of Artificial Sequence: Synthetic oligonucleotide
guguggccgauaggaagag

SEQ ID NO: 13402 - RNA, 19 nt, Artificial Sequence
  Description of Artificial Sequence: Synthetic oligonucleotide
cgcccaucgcacaagacug

SEQ ID NO: 13403 - RNA, 19 nt, Artificial Sequence
  Description of Artificial Sequence: Synthetic oligonucleotide
caguggucagucacuugca

SEQ ID NO: 13404 - RNA, 19 nt, Artificial Sequence
  Description of Artificial Sequence: Synthetic oligonucleotide
gcggaugaccauuuguucu

SEQ ID NO: 13405 - RNA, 19 nt, Artificial Sequence
  Description of Artificial Sequence: Synthetic oligonucleotide
cccuagagauccacucugc

SEQ ID NO: 13406 - RNA, 19 nt, Artificial Sequence
  Description of Artificial Sequence: Synthetic oligonucleotide
cacggucaaauaugucuaa

SEQ ID NO: 13407 - RNA, 19 nt, Artificial Sequence
  Description of Artificial Sequence: Synthetic oligonucleotide
ccucaaucuagaggguuag

SEQ ID NO: 13408 - RNA, 19 nt, Artificial Sequence
  Description of Artificial Sequence: Synthetic oligonucleotide
agaucggcagcaagccaca

SEQ ID NO: 13409 - RNA, 19 nt, Artificial Sequence
  Description of Artificial Sequence: Synthetic oligonucleotide
ggguuggaacgcaggauug

SEQ ID NO: 13410 - RNA, 19 nt, Artificial Sequence
  Description of Artificial Sequence: Synthetic oligonucleotide
cacucaccuccauacccca

SEQ ID NO: 13411 - RNA, 19 nt, Artificial Sequence
  Description of Artificial Sequence: Synthetic oligonucleotide
cugcggaugaccauuuguu

SEQ ID NO: 13412 - RNA, 19 nt, Artificial Sequence
  Description of Artificial Sequence: Synthetic oligonucleotide
ucccuacgggaaggguggg

SEQ ID NO: 13413 - RNA, 19 nt, Artificial Sequence
  Description of Artificial Sequence: Synthetic oligonucleotide
guaggcaauuugaggaccu

SEQ ID NO: 13414 - RNA, 19 nt, Artificial Sequence
  Description of Artificial Sequence: Synthetic oligonucleotide
ggcccggcgacuccgacca

SEQ ID NO: 13415 - RNA, 19 nt, Artificial Sequence
  Description of Artificial Sequence: Synthetic oligonucleotide
caacuucgggucacagcca

SEQ ID NO: 13416 - RNA, 19 nt, Artificial Sequence
  Description of Artificial Sequence: Synthetic oligonucleotide
guguguguggugugugugu

SEQ ID NO: 13417 - RNA, 19 nt, Artificial Sequence
  Description of Artificial Sequence: Synthetic oligonucleotide
ggaccugacguacacuagu

SEQ ID NO: 13418 - RNA, 19 nt, Artificial Sequence
  Description of Artificial Sequence: Synthetic oligonucleotide
agagaccgauggagacagc

SEQ ID NO: 13419 - RNA, 19 nt, Artificial Sequence
  Description of Artificial Sequence: Synthetic oligonucleotide
cccagaugacgcucucggg

SEQ ID NO: 13420 - RNA, 19 nt, Artificial Sequence
  Description of Artificial Sequence: Synthetic oligonucleotide
ugggcacuucguagccaaa

SEQ ID NO: 13421 - RNA, 19 nt, Artificial Sequence
  Description of Artificial Sequence: Synthetic oligonucleotide
accacgccgagccccggau

SEQ ID NO: 13422 - RNA, 19 nt, Artificial Sequence
  Description of Artificial Sequence: Synthetic oligonucleotide
ggccauuuaaucggacauc

SEQ ID NO: 13423 - RNA, 19 nt, Artificial Sequence
  Description of Artificial Sequence: Synthetic oligonucleotide
gccaagucuccccucccac

SEQ ID NO: 13424 - RNA, 19 nt, Artificial Sequence
  Description of Artificial Sequence: Synthetic oligonucleotide
ccuaucccuacgggaaggg

SEQ ID NO: 13425 - RNA, 19 nt, Artificial Sequence
  Description of Artificial Sequence: Synthetic oligonucleotide
ccaacacggucaaauaugu

SEQ ID NO: 13426 - RNA, 19 nt, Artificial Sequence
  Description of Artificial Sequence: Synthetic oligonucleotide
acacauaguuuuagcucua

SEQ ID NO: 13427 - RNA, 19 nt, Artificial Sequence
  Description of Artificial Sequence: Synthetic oligonucleotide
gcugcggaugaccauuugu

SEQ ID NO: 13428 - RNA, 19 nt, Artificial Sequence
  Description of Artificial Sequence: Synthetic oligonucleotide
gucuuaccugagaguugcc

SEQ ID NO: 13429 - RNA, 19 nt, Artificial Sequence
  Description of Artificial Sequence: Synthetic oligonucleotide
cccuaucccuacgggaagg

SEQ ID NO: 13430 - RNA, 19 nt, Artificial Sequence
  Description of Artificial Sequence: Synthetic oligonucleotide
gugcgcccaucgcacaaga

SEQ ID NO: 13431 - RNA, 19 nt, Artificial Sequence
  Description of Artificial Sequence: Synthetic oligonucleotide
uccuuccuacuaggucugu

SEQ ID NO: 13432 - RNA, 19 nt, Artificial Sequence
  Description of Artificial Sequence: Synthetic oligonucleotide
gcuaacccucaccccagga

SEQ ID NO: 13433 - RNA, 19 nt, Artificial Sequence
  Description of Artificial Sequence: Synthetic oligonucleotide
cuuuugggauuagaccccu

SEQ ID NO: 13434 - RNA, 19 nt, Artificial Sequence
  Description of Artificial Sequence: Synthetic oligonucleotide
gcgcccaucgcacaagacu

SEQ ID NO: 13435 - RNA, 19 nt, Artificial Sequence
  Description of Artificial Sequence: Synthetic oligonucleotide
ccaagccccuugaguauac

SEQ ID NO: 13436 - RNA, 19 nt, Artificial Sequence
  Description of Artificial Sequence: Synthetic oligonucleotide
cccggauucuggagcuccg

SEQ ID NO: 13437 - RNA, 19 nt, Artificial Sequence
  Description of Artificial Sequence: Synthetic oligonucleotide
ccgucccuaucccuacggg

SEQ ID NO: 13438 - RNA, 19 nt, Artificial Sequence
  Description of Artificial Sequence: Synthetic oligonucleotide
gaccugacguacacuaguu

SEQ ID NO: 13439 - RNA, 19 nt, Artificial Sequence
  Description of Artificial Sequence: Synthetic oligonucleotide
gcaccgucccuaucccuac

SEQ ID NO: 13440 - RNA, 19 nt, Artificial Sequence
  Description of Artificial Sequence: Synthetic oligonucleotide
cggauucuggagcuccggc

SEQ ID NO: 13441 - RNA, 19 nt, Artificial Sequence
  Description of Artificial Sequence: Synthetic oligonucleotide
gcuuagagugacagccauc

SEQ ID NO: 13442 - RNA, 19 nt, Artificial Sequence
  Description of Artificial Sequence: Synthetic oligonucleotide
ccggcgacuccgaccacgc

SEQ ID NO: 13443 - RNA, 19 nt, Artificial Sequence
  Description of Artificial Sequence: Synthetic oligonucleotide
ccuccguuggacacaacua

SEQ ID NO: 13444 - RNA, 19 nt, Artificial Sequence
  Description of Artificial Sequence: Synthetic oligonucleotide
gcugacuaggggucuuucu

SEQ ID NO: 13445 - RNA, 19 nt, Artificial Sequence
  Description of Artificial Sequence: Synthetic oligonucleotide
guguguguguguguguguu

SEQ ID NO: 13446 - RNA, 19 nt, Artificial Sequence
  Description of Artificial Sequence: Synthetic oligonucleotide
guguguggugugugugugu

SEQ ID NO: 13447 - RNA, 19 nt, Artificial Sequence
  Description of Artificial Sequence: Synthetic oligonucleotide
gcccaacacggucaaauau

SEQ ID NO: 13448 - RNA, 19 nt, Artificial Sequence
  Description of Artificial Sequence: Synthetic oligonucleotide
cuccgaccacgccgagccc

SEQ ID NO: 13449 - RNA, 19 nt, Artificial Sequence
  Description of Artificial Sequence: Synthetic oligonucleotide
cacaugcgccucgccgccc

SEQ ID NO: 13450 - RNA, 19 nt, Artificial Sequence
  Description of Artificial Sequence: Synthetic oligonucleotide
guggugugugugugugugu

SEQ ID NO: 13451 - RNA, 19 nt, Artificial Sequence
  Description of Artificial Sequence: Synthetic oligonucleotide
uggcugacuaggggucuuu

SEQ ID NO: 13452 - RNA, 19 nt, Artificial Sequence
  Description of Artificial Sequence: Synthetic oligonucleotide
cgugcacguccacaugcgc

SEQ ID NO: 13453 - RNA, 19 nt, Artificial Sequence
  Description of Artificial Sequence: Synthetic oligonucleotide
gaucggcagcaagccacaa

SEQ ID NO: 13454 - RNA, 19 nt, Artificial Sequence
  Description of Artificial Sequence: Synthetic oligonucleotide
ccccgaugcuaugugcgcc

SEQ ID NO: 13455 - RNA, 19 nt, Artificial Sequence
  Description of Artificial Sequence: Synthetic oligonucleotide
auggcugacuaggggucuu

SEQ ID NO: 13456 - RNA, 19 nt, Artificial Sequence
  Description of Artificial Sequence: Synthetic oligonucleotide
gccucaaucuagaggguua

SEQ ID NO: 13457 - RNA, 19 nt, Artificial Sequence
  Description of Artificial Sequence: Synthetic oligonucleotide
ccggauucuggagcuccgg

SEQ ID NO: 13458 - RNA, 19 nt, Artificial Sequence
  Description of Artificial Sequence: Synthetic oligonucleotide
uuccuccguuggacacaac

SEQ ID NO: 13459 - RNA, 19 nt, Artificial Sequence
  Description of Artificial Sequence: Synthetic oligonucleotide
ggugugugugugugugugu

SEQ ID NO: 13460 - RNA, 19 nt, Artificial Sequence
  Description of Artificial Sequence: Synthetic oligonucleotide
ccuauggaggggccaguga

SEQ ID NO: 13461 - RNA, 19 nt, Artificial Sequence
  Description of Artificial Sequence: Synthetic oligonucleotide
gcgacuccgaccacgccga

SEQ ID NO: 13462 - RNA, 19 nt, Artificial Sequence
  Description of Artificial Sequence: Synthetic oligonucleotide
cccggcgacuccgaccacg

SEQ ID NO: 13463 - RNA, 19 nt, Artificial Sequence
  Description of Artificial Sequence: Synthetic oligonucleotide
ccauuuaaucggacaucaa

SEQ ID NO: 13464 - RNA, 19 nt, Artificial Sequence
  Description of Artificial Sequence: Synthetic oligonucleotide
gcuacuugcuaggggcuaa

SEQ ID NO: 13465 - RNA, 19 nt, Artificial Sequence
  Description of Artificial Sequence: Synthetic oligonucleotide
ggcaccgucccuaucccua

SEQ ID NO: 13466 - RNA, 19 nt, Artificial Sequence
  Description of Artificial Sequence: Synthetic oligonucleotide
guguggugugugugugugu

SEQ ID NO: 13467 - RNA, 19 nt, Artificial Sequence
  Description of Artificial Sequence: Synthetic oligonucleotide
cgucccuaucccuacggga

SEQ ID NO: 13468 - RNA, 19 nt, Artificial Sequence
  Description of Artificial Sequence: Synthetic oligonucleotide
cggucaaauaugucuaagu

SEQ ID NO: 13469 - RNA, 19 nt, Artificial Sequence
  Description of Artificial Sequence: Synthetic oligonucleotide
gcaggauuggcaguuucau

SEQ ID NO: 13470 - RNA, 19 nt, Artificial Sequence
  Description of Artificial Sequence: Synthetic oligonucleotide
cagucggaggagcgccaca

SEQ ID NO: 13471 - RNA, 19 nt, Artificial Sequence
  Description of Artificial Sequence: Synthetic oligonucleotide
gcccgcguugacugcccag

SEQ ID NO: 13472 - RNA, 19 nt, Artificial Sequence
  Description of Artificial Sequence: Synthetic oligonucleotide
cagccagucuuaguuaguu

SEQ ID NO: 13473 - RNA, 19 nt, Artificial Sequence
  Description of Artificial Sequence: Synthetic oligonucleotide
acgccgagccccggauucu

SEQ ID NO: 13474 - RNA, 19 nt, Artificial Sequence
  Description of Artificial Sequence: Synthetic oligonucleotide
cuaucccuacgggaagggu

SEQ ID NO: 13475 - RNA, 19 nt, Artificial Sequence
  Description of Artificial Sequence: Synthetic oligonucleotide
cacgcauggcgggccacca

SEQ ID NO: 13476 - RNA, 19 nt, Artificial Sequence
  Description of Artificial Sequence: Synthetic oligonucleotide
gccgagccccggauucugg

SEQ ID NO: 13477 - RNA, 19 nt, Artificial Sequence
  Description of Artificial Sequence: Synthetic oligonucleotide
augcuagggcuagccuaaa

SEQ ID NO: 13478 - RNA, 19 nt, Artificial Sequence
  Description of Artificial Sequence: Synthetic oligonucleotide
ccaacaaguuguaggcaau

SEQ ID NO: 13479 - RNA, 19 nt, Artificial Sequence
  Description of Artificial Sequence: Synthetic oligonucleotide
ggaucccgugcacguccac

SEQ ID NO: 13480 - RNA, 19 nt, Artificial Sequence
  Description of Artificial Sequence: Synthetic oligonucleotide
cucugccacgacauccauu

SEQ ID NO: 13481 - RNA, 19 nt, Artificial Sequence
  Description of Artificial Sequence: Synthetic oligonucleotide
ccuacgggaagggugggcu

SEQ ID NO: 13482 - RNA, 19 nt, Artificial Sequence
  Description of Artificial Sequence: Synthetic oligonucleotide
cuacgggaagggugggcuu

SEQ ID NO: 13483 - RNA, 19 nt, Artificial Sequence
  Description of Artificial Sequence: Synthetic oligonucleotide
cccgcguugacugcccaga

SEQ ID NO: 13484 - RNA, 19 nt, Artificial Sequence
  Description of Artificial Sequence: Synthetic oligonucleotide
gcggggccugacugcuacc

SEQ ID NO: 13485 - RNA, 19 nt, Artificial Sequence
  Description of Artificial Sequence: Synthetic oligonucleotide
ccgauggagacagcccaga

SEQ ID NO: 13486 - RNA, 19 nt, Artificial Sequence
  Description of Artificial Sequence: Synthetic oligonucleotide
ggggcgacucugggaauaa

SEQ ID NO: 13487 - RNA, 19 nt, Artificial Sequence
  Description of Artificial Sequence: Synthetic oligonucleotide
gcggaucucugagcagguc

SEQ ID NO: 13488 - RNA, 19 nt, Artificial Sequence
  Description of Artificial Sequence: Synthetic oligonucleotide
ccuaaaccucauguaccua

SEQ ID NO: 13489 - RNA, 19 nt, Artificial Sequence
  Description of Artificial Sequence: Synthetic oligonucleotide
cggcccggcgacuccgacc

SEQ ID NO: 13490 - RNA, 19 nt, Artificial Sequence
  Description of Artificial Sequence: Synthetic oligonucleotide
ccaucgcacaagacugccu

SEQ ID NO: 13491 - RNA, 19 nt, Artificial Sequence
  Description of Artificial Sequence: Synthetic oligonucleotide
ccuuccuacuaggucugua

SEQ ID NO: 13492 - RNA, 19 nt, Artificial Sequence
  Description of Artificial Sequence: Synthetic oligonucleotide
cuggggcgacucugggaau

SEQ ID NO: 13493 - RNA, 19 nt, Artificial Sequence
  Description of Artificial Sequence: Synthetic oligonucleotide
cagaggcgcuuggcuuaca

SEQ ID NO: 13494 - RNA, 19 nt, Artificial Sequence
  Description of Artificial Sequence: Synthetic oligonucleotide
cccacgcauggcgggccac

SEQ ID NO: 13495 - RNA, 19 nt, Artificial Sequence
  Description of Artificial Sequence: Synthetic oligonucleotide
cggcgacuccgaccacgcc

SEQ ID NO: 13496 - RNA, 19 nt, Artificial Sequence
  Description of Artificial Sequence: Synthetic oligonucleotide
ccccuagcuuugucuuuua

SEQ ID NO: 13497 - RNA, 19 nt, Artificial Sequence
  Description of Artificial Sequence: Synthetic oligonucleotide
ccgcguugacugcccagau

SEQ ID NO: 13498 - RNA, 19 nt, Artificial Sequence
  Description of Artificial Sequence: Synthetic oligonucleotide
cccugccgacccucguccu

SEQ ID NO: 13499 - RNA, 19 nt, Artificial Sequence
  Description of Artificial Sequence: Synthetic oligonucleotide
ccccguggacacucagcuu

SEQ ID NO: 13500 - RNA, 19 nt, Artificial Sequence
  Description of Artificial Sequence: Synthetic oligonucleotide
ccacgccgagccccggauu

SEQ ID NO: 13501 - RNA, 19 nt, Artificial Sequence
  Description of Artificial Sequence: Synthetic oligonucleotide
aaaaggugcgccuaaaacc

SEQ ID NO: 13502 - RNA, 19 nt, Artificial Sequence
  Description of Artificial Sequence: Synthetic oligonucleotide
uuuaguguuauuuacacug

SEQ ID NO: 13503 - RNA, 19 nt, Artificial Sequence
  Description of Artificial Sequence: Synthetic oligonucleotide
aaaauaacuuagcucaccg

SEQ ID NO: 13504 - RNA, 19 nt, Artificial Sequence
  Description of Artificial Sequence: Synthetic oligonucleotide
uauacgaacaaccuuaucu

SEQ ID NO: 13505 - RNA, 19 nt, Artificial Sequence
  Description of Artificial Sequence: Synthetic oligonucleotide
cuaucaagagguaaaaucc

SEQ ID NO: 13506 - RNA, 19 nt, Artificial Sequence
  Description of Artificial Sequence: Synthetic oligonucleotide
ugcaguaugacauuguaca

SEQ ID NO: 13507 - RNA, 19 nt, Artificial Sequence
  Description of Artificial Sequence: Synthetic oligonucleotide
aacauuguaagcugcguag

SEQ ID NO: 13508 - RNA, 19 nt, Artificial Sequence
  Description of Artificial Sequence: Synthetic oligonucleotide
cucgaaauuuaauacaggg

SEQ ID NO: 13509 - RNA, 19 nt, Artificial Sequence
  Description of Artificial Sequence: Synthetic oligonucleotide
aaauggagcuaucaagagg

SEQ ID NO: 13510 - RNA, 19 nt, Artificial Sequence
  Description of Artificial Sequence: Synthetic oligonucleotide
uuauugauagucuauauuu

SEQ ID NO: 13511 - RNA, 19 nt, Artificial Sequence
  Description of Artificial Sequence: Synthetic oligonucleotide
aauuauggugacuuuauau

SEQ ID NO: 13512 - RNA, 19 nt, Artificial Sequence
  Description of Artificial Sequence: Synthetic oligonucleotide
acuuagaagauccuaacug

SEQ ID NO: 13513 - RNA, 19 nt, Artificial Sequence
  Description of Artificial Sequence: Synthetic oligonucleotide
ucuuauggguuucacagag

SEQ ID NO: 13514 - RNA, 19 nt, Artificial Sequence
  Description of Artificial Sequence: Synthetic oligonucleotide
auuauggugacuuuauaug

SEQ ID NO: 13515 - RNA, 19 nt, Artificial Sequence
  Description of Artificial Sequence: Synthetic oligonucleotide
uugacaucuacacacuuag

SEQ ID NO: 13516 - RNA, 19 nt, Artificial Sequence
  Description of Artificial Sequence: Synthetic oligonucleotide
uguagauucaccauggcua

SEQ ID NO: 13517 - RNA, 19 nt, Artificial Sequence
  Description of Artificial Sequence: Synthetic oligonucleotide
uuagcaauuaucugguacc

SEQ ID NO: 13518 - RNA, 19 nt, Artificial Sequence
  Description of Artificial Sequence: Synthetic oligonucleotide
cuauauuucgacuggagac

SEQ ID NO: 13519 - RNA, 19 nt, Artificial Sequence
  Description of Artificial Sequence: Synthetic oligonucleotide
aacaucuauaccaaaguag

SEQ ID NO: 13520 - RNA, 19 nt, Artificial Sequence
  Description of Artificial Sequence: Synthetic oligonucleotide
uuuaauacagggcuuccca

SEQ ID NO: 13521 - RNA, 19 nt, Artificial Sequence
  Description of Artificial Sequence: Synthetic oligonucleotide
cacuguuuggauuaguccg

SEQ ID NO: 13522 - RNA, 19 nt, Artificial Sequence
  Description of Artificial Sequence: Synthetic oligonucleotide
agucucauuuaccacaggg

SEQ ID NO: 13523 - RNA, 19 nt, Artificial Sequence
  Description of Artificial Sequence: Synthetic oligonucleotide
auuaguccggcucacugcc

SEQ ID NO: 13524 - RNA, 19 nt, Artificial Sequence
  Description of Artificial Sequence: Synthetic oligonucleotide
uacacuaagacgucuagca

SEQ ID NO: 13525 - RNA, 19 nt, Artificial Sequence
  Description of Artificial Sequence: Synthetic oligonucleotide
uuaagccaaucuauuauag

SEQ ID NO: 13526 - RNA, 19 nt, Artificial Sequence
  Description of Artificial Sequence: Synthetic oligonucleotide
ugcuuuauggucaaagacu

SEQ ID NO: 13527 - RNA, 19 nt, Artificial Sequence
  Description of Artificial Sequence: Synthetic oligonucleotide
aacaugcuaaaugcuaccc

SEQ ID NO: 13528 - RNA, 19 nt, Artificial Sequence
  Description of Artificial Sequence: Synthetic oligonucleotide
ugauuaagcggauuaaaac

SEQ ID NO: 13529 - RNA, 19 nt, Artificial Sequence
  Description of Artificial Sequence: Synthetic oligonucleotide
uauuguauaccugacaccu

SEQ ID NO: 13530 - RNA, 19 nt, Artificial Sequence
  Description of Artificial Sequence: Synthetic oligonucleotide
aucucaauuaaacuauaag

SEQ ID NO: 13531 - RNA, 19 nt, Artificial Sequence
  Description of Artificial Sequence: Synthetic oligonucleotide
ucgaaauuuaauacagggc

SEQ ID NO: 13532 - RNA, 19 nt, Artificial Sequence
  Description of Artificial Sequence: Synthetic oligonucleotide
acaguuaauacacuuagaa

SEQ ID NO: 13533 - RNA, 19 nt, Artificial Sequence
  Description of Artificial Sequence: Synthetic oligonucleotide
agcacuaauaaaucucaac

SEQ ID NO: 13534 - RNA, 19 nt, Artificial Sequence
  Description of Artificial Sequence: Synthetic oligonucleotide
ucuauauuucgacuggaga

SEQ ID NO: 13535 - RNA, 19 nt, Artificial Sequence
  Description of Artificial Sequence: Synthetic oligonucleotide
uguuuggacacugaugagg

SEQ ID NO: 13536 - RNA, 19 nt, Artificial Sequence
  Description of Artificial Sequence: Synthetic oligonucleotide
uguuuuacuaugcuggcuc

SEQ ID NO: 13537 - RNA, 19 nt, Artificial Sequence
  Description of Artificial Sequence: Synthetic oligonucleotide
auuauuacgguuaacauuu

SEQ ID NO: 13538 - RNA, 19 nt, Artificial Sequence
  Description of Artificial Sequence: Synthetic oligonucleotide
agcaagguaguuuacggag

SEQ ID NO: 13539 - RNA, 19 nt, Artificial Sequence
  Description of Artificial Sequence: Synthetic oligonucleotide
gauaagacugcccugcgac

SEQ ID NO: 13540 - RNA, 19 nt, Artificial Sequence
  Description of Artificial Sequence: Synthetic oligonucleotide
ucucucuauauuucgacug

SEQ ID NO: 13541 - RNA, 19 nt, Artificial Sequence
  Description of Artificial Sequence: Synthetic oligonucleotide
caaucuauuauagagucac

SEQ ID NO: 13542 - RNA, 19 nt, Artificial Sequence
  Description of Artificial Sequence: Synthetic oligonucleotide
uuuggauuaguccggcuca

SEQ ID NO: 13543 - RNA, 19 nt, Artificial Sequence
  Description of Artificial Sequence: Synthetic oligonucleotide
ucucgaaauuuaauacagg

SEQ ID NO: 13544 - RNA, 19 nt, Artificial Sequence
  Description of Artificial Sequence: Synthetic oligonucleotide
gaaaaggugcgccuaaaac

SEQ ID NO: 13545 - RNA, 19 nt, Artificial Sequence
  Description of Artificial Sequence: Synthetic oligonucleotide
ugcgccuaaaaccuccacg

SEQ ID NO: 13546 - RNA, 19 nt, Artificial Sequence
  Description of Artificial Sequence: Synthetic oligonucleotide
aacacuaguaauauauagu

SEQ ID NO: 13547 - RNA, 19 nt, Artificial Sequence
  Description of Artificial Sequence: Synthetic oligonucleotide
uucaaugcaucauuuucgc

SEQ ID NO: 13548 - RNA, 19 nt, Artificial Sequence
  Description of Artificial Sequence: Synthetic oligonucleotide
aaagacuucuaccuagcaa

SEQ ID NO: 13549 - RNA, 19 nt, Artificial Sequence
  Description of Artificial Sequence: Synthetic oligonucleotide
ugaaugaccuuucaauguc

SEQ ID NO: 13550 - RNA, 19 nt, Artificial Sequence
  Description of Artificial Sequence: Synthetic oligonucleotide
ugucugacugaguuaagcc

SEQ ID NO: 13551 - RNA, 19 nt, Artificial Sequence
  Description of Artificial Sequence: Synthetic oligonucleotide
auuacgguuaacauuuauc

SEQ ID NO: 13552 - RNA, 19 nt, Artificial Sequence
  Description of Artificial Sequence: Synthetic oligonucleotide
ucugguaccgaacccaaac

SEQ ID NO: 13553 - RNA, 19 nt, Artificial Sequence
  Description of Artificial Sequence: Synthetic oligonucleotide
aguucacucuauugugugc

SEQ ID NO: 13554 - RNA, 19 nt, Artificial Sequence
  Description of Artificial Sequence: Synthetic oligonucleotide
uuauuguauaccugacacc

SEQ ID NO: 13555 - RNA, 19 nt, Artificial Sequence
  Description of Artificial Sequence: Synthetic oligonucleotide
guggacgugguacucaugg

SEQ ID NO: 13556 - RNA, 19 nt, Artificial Sequence
  Description of Artificial Sequence: Synthetic oligonucleotide
ucuacacuaagacgucuag

SEQ ID NO: 13557 - RNA, 19 nt, Artificial Sequence
  Description of Artificial Sequence: Synthetic oligonucleotide
aaacuauaaguucacucua

SEQ ID NO: 13558 - RNA, 19 nt, Artificial Sequence
  Description of Artificial Sequence: Synthetic oligonucleotide
uaagcugcguagaauaaaa

SEQ ID NO: 13559 - RNA, 19 nt, Artificial Sequence
  Description of Artificial Sequence: Synthetic oligonucleotide
uauucuaagcuguaggcuu

SEQ ID NO: 13560 - RNA, 19 nt, Artificial Sequence
  Description of Artificial Sequence: Synthetic oligonucleotide
auauguucugcucuugaca

SEQ ID NO: 13561 - RNA, 19 nt, Artificial Sequence
  Description of Artificial Sequence: Synthetic oligonucleotide
ugauauguccaugucaccu

SEQ ID NO: 13562 - RNA, 19 nt, Artificial Sequence
  Description of Artificial Sequence: Synthetic oligonucleotide
uauauuucgacuggagacu

SEQ ID NO: 13563 - RNA, 19 nt, Artificial Sequence
  Description of Artificial Sequence: Synthetic oligonucleotide
aaucuauuauagagucacc

SEQ ID NO: 13564 - RNA, 19 nt, Artificial Sequence
  Description of Artificial Sequence: Synthetic oligonucleotide
uuauggucaaagacuuaag

SEQ ID NO: 13565 - RNA, 19 nt, Artificial Sequence
  Description of Artificial Sequence: Synthetic oligonucleotide
ucuauaccaaaguagcuuu

SEQ ID NO: 13566 - RNA, 19 nt, Artificial Sequence
  Description of Artificial Sequence: Synthetic oligonucleotide
gaauucuccgauaaccagc

SEQ ID NO: 13567 - RNA, 19 nt, Artificial Sequence
  Description of Artificial Sequence: Synthetic oligonucleotide
agcuauuaccaccagaguu

SEQ ID NO: 13568 - RNA, 19 nt, Artificial Sequence
  Description of Artificial Sequence: Synthetic oligonucleotide
agauccuaacuguuuagug

SEQ ID NO: 13569 - RNA, 19 nt, Artificial Sequence
  Description of Artificial Sequence: Synthetic oligonucleotide
auuaagcggauuaaaaccu

SEQ ID NO: 13570 - RNA, 19 nt, Artificial Sequence
  Description of Artificial Sequence: Synthetic oligonucleotide
gauuaguccggcucacugc

SEQ ID NO: 13571 - RNA, 19 nt, Artificial Sequence
  Description of Artificial Sequence: Synthetic oligonucleotide
acuagggcagaccuuaaga

SEQ ID NO: 13572 - RNA, 19 nt, Artificial Sequence
  Description of Artificial Sequence: Synthetic oligonucleotide
gcuaucaagagguaaaauc

SEQ ID NO: 13573 - RNA, 19 nt, Artificial Sequence
  Description of Artificial Sequence: Synthetic oligonucleotide
gauauguucugcucuugac

SEQ ID NO: 13574 - RNA, 19 nt, Artificial Sequence
  Description of Artificial Sequence: Synthetic oligonucleotide
cucagaacgugaaaaggug

SEQ ID NO: 13575 - RNA, 19 nt, Artificial Sequence
  Description of Artificial Sequence: Synthetic oligonucleotide
uaagccaaucuauuauaga

SEQ ID NO: 13576 - RNA, 19 nt, Artificial Sequence
  Description of Artificial Sequence: Synthetic oligonucleotide
ggaacuuagucuugagugg

SEQ ID NO: 13577 - RNA, 19 nt, Artificial Sequence
  Description of Artificial Sequence: Synthetic oligonucleotide
cucucuauauuucgacugg

SEQ ID NO: 13578 - RNA, 19 nt, Artificial Sequence
  Description of Artificial Sequence: Synthetic oligonucleotide
aaggguguuuuguucagau

SEQ ID NO: 13579 - RNA, 19 nt, Artificial Sequence
  Description of Artificial Sequence: Synthetic oligonucleotide
uuggguacauucucgaaau

SEQ ID NO: 13580 - RNA, 19 nt, Artificial Sequence
  Description of Artificial Sequence: Synthetic oligonucleotide
auaacuuagcucaccgaac

SEQ ID NO: 13581 - RNA, 19 nt, Artificial Sequence
  Description of Artificial Sequence: Synthetic oligonucleotide
ggagcaagguaguuuacgg

SEQ ID NO: 13582 - RNA, 19 nt, Artificial Sequence
  Description of Artificial Sequence: Synthetic oligonucleotide
aaaucccacuaacaauacu

SEQ ID NO: 13583 - RNA, 19 nt, Artificial Sequence
  Description of Artificial Sequence: Synthetic oligonucleotide
cuauacuaucucucugccg

SEQ ID NO: 13584 - RNA, 19 nt, Artificial Sequence
  Description of Artificial Sequence: Synthetic oligonucleotide
cugacguagguucucacac

SEQ ID NO: 13585 - RNA, 19 nt, Artificial Sequence
  Description of Artificial Sequence: Synthetic oligonucleotide
uuuaagucugcaguaugac

SEQ ID NO: 13586 - RNA, 19 nt, Artificial Sequence
  Description of Artificial Sequence: Synthetic oligonucleotide
caaggucacauggugacgg

SEQ ID NO: 13587 - RNA, 19 nt, Artificial Sequence
  Description of Artificial Sequence: Synthetic oligonucleotide
acagguuagcaauuaucug

SEQ ID NO: 13588 - RNA, 19 nt, Artificial Sequence
  Description of Artificial Sequence: Synthetic oligonucleotide
aaauuauggugacuuuaua

SEQ ID NO: 13589 - RNA, 19 nt, Artificial Sequence
  Description of Artificial Sequence: Synthetic oligonucleotide
caguguuacugcaaauagc

SEQ ID NO: 13590 - RNA, 19 nt, Artificial Sequence
  Description of Artificial Sequence: Synthetic oligonucleotide
cucuauauuucgacuggag

SEQ ID NO: 13591 - RNA, 19 nt, Artificial Sequence
  Description of Artificial Sequence: Synthetic oligonucleotide
acacuaagacgucuagcag

SEQ ID NO: 13592 - RNA, 19 nt, Artificial Sequence
  Description of Artificial Sequence: Synthetic oligonucleotide
uccuaaaagauagcuauua

SEQ ID NO: 13593 - RNA, 19 nt, Artificial Sequence
  Description of Artificial Sequence: Synthetic oligonucleotide
ugauaguacugacguaggu

SEQ ID NO: 13594 - RNA, 19 nt, Artificial Sequence
  Description of Artificial Sequence: Synthetic oligonucleotide
uucguacuuuguuuggugu

SEQ ID NO: 13595 - RNA, 19 nt, Artificial Sequence
  Description of Artificial Sequence: Synthetic oligonucleotide
cugauaguacugacguagg

SEQ ID NO: 13596 - RNA, 19 nt, Artificial Sequence
  Description of Artificial Sequence: Synthetic oligonucleotide
gaccuagauggucuggcag

SEQ ID NO: 13597 - RNA, 19 nt, Artificial Sequence
  Description of Artificial Sequence: Synthetic oligonucleotide
guuuggauuaguccggcuc

SEQ ID NO: 13598 - RNA, 19 nt, Artificial Sequence
  Description of Artificial Sequence: Synthetic oligonucleotide
gaacgugaaaaggugcgcc

SEQ ID NO: 13599 - RNA, 19 nt, Artificial Sequence
  Description of Artificial Sequence: Synthetic oligonucleotide
ucuuuaacguccgcaacac

SEQ ID NO: 13600 - RNA, 19 nt, Artificial Sequence
  Description of Artificial Sequence: Synthetic oligonucleotide
uguaagcugcguagaauaa

SEQ ID NO: 13601 - RNA, 19 nt, Artificial Sequence
  Description of Artificial Sequence: Synthetic oligonucleotide
acgugguacucaugggagc

SEQ ID NO: 13602 - RNA, 19 nt, Artificial Sequence
  Description of Artificial Sequence: Synthetic oligonucleotide
uguaaucucccaacauuau

SEQ ID NO: 13603 - RNA, 19 nt, Artificial Sequence
  Description of Artificial Sequence: Synthetic oligonucleotide
uaacaugguuugaaucgca

SEQ ID NO: 13604 - RNA, 19 nt, Artificial Sequence
  Description of Artificial Sequence: Synthetic oligonucleotide
ugcguaccuacuccacugg

SEQ ID NO: 13605 - RNA, 19 nt, Artificial Sequence
  Description of Artificial Sequence: Synthetic oligonucleotide
aaaguaacuccugcacaug

SEQ ID NO: 13606 - RNA, 19 nt, Artificial Sequence
  Description of Artificial Sequence: Synthetic oligonucleotide
acuguuuggauuaguccgg

SEQ ID NO: 13607 - RNA, 19 nt, Artificial Sequence
  Description of Artificial Sequence: Synthetic oligonucleotide
auucuacgaaugggaaucc

SEQ ID NO: 13608 - RNA, 19 nt, Artificial Sequence
  Description of Artificial Sequence: Synthetic oligonucleotide
cuugaccgaguucugcuag

SEQ ID NO: 13609 - RNA, 19 nt, Artificial Sequence
  Description of Artificial Sequence: Synthetic oligonucleotide
gccgguauucuccaggacg

SEQ ID NO: 13610 - RNA, 19 nt, Artificial Sequence
  Description of Artificial Sequence: Synthetic oligonucleotide
agaaggguguuuuguucag

SEQ ID NO: 13611 - RNA, 19 nt, Artificial Sequence
  Description of Artificial Sequence: Synthetic oligonucleotide
agcuucguacuuuguuugg

SEQ ID NO: 13612 - RNA, 19 nt, Artificial Sequence
  Description of Artificial Sequence: Synthetic oligonucleotide
acuagagcuauuaccacca

SEQ ID NO: 13613 - RNA, 19 nt, Artificial Sequence
  Description of Artificial Sequence: Synthetic oligonucleotide
cuauuaccaccagaguucc

SEQ ID NO: 13614 - RNA, 19 nt, Artificial Sequence
  Description of Artificial Sequence: Synthetic oligonucleotide
uuaggacaguuaauacacu

SEQ ID NO: 13615 - RNA, 19 nt, Artificial Sequence
  Description of Artificial Sequence: Synthetic oligonucleotide
cuuagcucaccgaacccug

SEQ ID NO: 13616 - RNA, 19 nt, Artificial Sequence
  Description of Artificial Sequence: Synthetic oligonucleotide
acgucuagcagauguuuca

SEQ ID NO: 13617 - RNA, 19 nt, Artificial Sequence
  Description of Artificial Sequence: Synthetic oligonucleotide
gacccuaagugcucugcag

SEQ ID NO: 13618 - RNA, 19 nt, Artificial Sequence
  Description of Artificial Sequence: Synthetic oligonucleotide
aucuauaccaaaguagcuu

SEQ ID NO: 13619 - RNA, 19 nt, Artificial Sequence
  Description of Artificial Sequence: Synthetic oligonucleotide
accuauacgaacaaccuua

SEQ ID NO: 13620 - RNA, 19 nt, Artificial Sequence
  Description of Artificial Sequence: Synthetic oligonucleotide
gucgaugcaguggacgugg

SEQ ID NO: 13621 - RNA, 19 nt, Artificial Sequence
  Description of Artificial Sequence: Synthetic oligonucleotide
aaauuaucaguaacagguu

SEQ ID NO: 13622 - RNA, 19 nt, Artificial Sequence
  Description of Artificial Sequence: Synthetic oligonucleotide
guuuacggagcuuguugcc

SEQ ID NO: 13623 - RNA, 19 nt, Artificial Sequence
  Description of Artificial Sequence: Synthetic oligonucleotide
cuuauggguuucacagagc

SEQ ID NO: 13624 - RNA, 19 nt, Artificial Sequence
  Description of Artificial Sequence: Synthetic oligonucleotide
ugacguagguucucacacc

SEQ ID NO: 13625 - RNA, 19 nt, Artificial Sequence
  Description of Artificial Sequence: Synthetic oligonucleotide
uggacgugguacucauggg

SEQ ID NO: 13626 - RNA, 19 nt, Artificial Sequence
  Description of Artificial Sequence: Synthetic oligonucleotide
auauuucgacuggagacug

SEQ ID NO: 13627 - RNA, 19 nt, Artificial Sequence
  Description of Artificial Sequence: Synthetic oligonucleotide
uuacacaagcauaggcuuu

SEQ ID NO: 13628 - RNA, 19 nt, Artificial Sequence
  Description of Artificial Sequence: Synthetic oligonucleotide
cugcccugcgacaaauggg

SEQ ID NO: 13629 - RNA, 19 nt, Artificial Sequence
  Description of Artificial Sequence: Synthetic oligonucleotide
acuacuagggcagaccuua

SEQ ID NO: 13630 - RNA, 19 nt, Artificial Sequence
  Description of Artificial Sequence: Synthetic oligonucleotide
ucccaaguaucucacugua

SEQ ID NO: 13631 - RNA, 19 nt, Artificial Sequence
  Description of Artificial Sequence: Synthetic oligonucleotide
cagcuucguacuuuguuug

SEQ ID NO: 13632 - RNA, 19 nt, Artificial Sequence
  Description of Artificial Sequence: Synthetic oligonucleotide
acucuauugugugccacag

SEQ ID NO: 13633 - RNA, 19 nt, Artificial Sequence
  Description of Artificial Sequence: Synthetic oligonucleotide
augcugauuaagcggauua

SEQ ID NO: 13634 - RNA, 19 nt, Artificial Sequence
  Description of Artificial Sequence: Synthetic oligonucleotide
aaucagacuguaguacuuu

SEQ ID NO: 13635 - RNA, 19 nt, Artificial Sequence
  Description of Artificial Sequence: Synthetic oligonucleotide
uaccugacaccuauacgaa

SEQ ID NO: 13636 - RNA, 19 nt, Artificial Sequence
  Description of Artificial Sequence: Synthetic oligonucleotide
ucucuauauuucgacugga

SEQ ID NO: 13637 - RNA, 19 nt, Artificial Sequence
  Description of Artificial Sequence: Synthetic oligonucleotide
agggcagaccuuaagauaa

SEQ ID NO: 13638 - RNA, 19 nt, Artificial Sequence
  Description of Artificial Sequence: Synthetic oligonucleotide
cuacacuaagacgucuagc

SEQ ID NO: 13639 - RNA, 19 nt, Artificial Sequence
  Description of Artificial Sequence: Synthetic oligonucleotide
gagacccucucaaaauacc

SEQ ID NO: 13640 - RNA, 19 nt, Artificial Sequence
  Description of Artificial Sequence: Synthetic oligonucleotide
accgaacccaaacauuuaa

SEQ ID NO: 13641 - RNA, 19 nt, Artificial Sequence
  Description of Artificial Sequence: Synthetic oligonucleotide
aauucuauucuaagcugua

SEQ ID NO: 13642 - RNA, 19 nt, Artificial Sequence
  Description of Artificial Sequence: Synthetic oligonucleotide
auggcacuucuguuaaugu

SEQ ID NO: 13643 - RNA, 19 nt, Artificial Sequence
  Description of Artificial Sequence: Synthetic oligonucleotide
accgaacccugucauuauc

SEQ ID NO: 13644 - RNA, 19 nt, Artificial Sequence
  Description of Artificial Sequence: Synthetic oligonucleotide
augagacccucucaaaaua

SEQ ID NO: 13645 - RNA, 19 nt, Artificial Sequence
  Description of Artificial Sequence: Synthetic oligonucleotide
ugcgcaucucuagacagcu

SEQ ID NO: 13646 - RNA, 19 nt, Artificial Sequence
  Description of Artificial Sequence: Synthetic oligonucleotide
aggugcgccuaaaaccucc

SEQ ID NO: 13647 - RNA, 19 nt, Artificial Sequence
  Description of Artificial Sequence: Synthetic oligonucleotide
aggacccuaagugcucugc

SEQ ID NO: 13648 - RNA, 19 nt, Artificial Sequence
  Description of Artificial Sequence: Synthetic oligonucleotide
cugcguaccuacuccacug

SEQ ID NO: 13649 - RNA, 19 nt, Artificial Sequence
  Description of Artificial Sequence: Synthetic oligonucleotide
ugacaucuacacacuuaga

SEQ ID NO: 13650 - RNA, 19 nt, Artificial Sequence
  Description of Artificial Sequence: Synthetic oligonucleotide
acguguaacagggaagcca

SEQ ID NO: 13651 - RNA, 19 nt, Artificial Sequence
  Description of Artificial Sequence: Synthetic oligonucleotide
ugaacuucguucugaccua

SEQ ID NO: 13652 - RNA, 19 nt, Artificial Sequence
  Description of Artificial Sequence: Synthetic oligonucleotide
agauaagacugcccugcga

SEQ ID NO: 13653 - RNA, 19 nt, Artificial Sequence
  Description of Artificial Sequence: Synthetic oligonucleotide
gcuauacuaucucucugcc

SEQ ID NO: 13654 - RNA, 19 nt, Artificial Sequence
  Description of Artificial Sequence: Synthetic oligonucleotide
uuguuuuacuaugcuggcu

SEQ ID NO: 13655 - RNA, 19 nt, Artificial Sequence
  Description of Artificial Sequence: Synthetic oligonucleotide
acuaagacgucuagcagau

SEQ ID NO: 13656 - RNA, 19 nt, Artificial Sequence
  Description of Artificial Sequence: Synthetic oligonucleotide
ggauuaguccggcucacug

SEQ ID NO: 13657 - RNA, 19 nt, Artificial Sequence
  Description of Artificial Sequence: Synthetic oligonucleotide
caccuauucuggaagguga

SEQ ID NO: 13658 - RNA, 19 nt, Artificial Sequence
  Description of Artificial Sequence: Synthetic oligonucleotide
ucugucugacugaguuaag

SEQ ID NO: 13659 - RNA, 19 nt, Artificial Sequence
  Description of Artificial Sequence: Synthetic oligonucleotide
uugaaucgcaacagaugua

SEQ ID NO: 13660 - RNA, 19 nt, Artificial Sequence
  Description of Artificial Sequence: Synthetic oligonucleotide
agccaaucuauuauagagu

SEQ ID NO: 13661 - RNA, 19 nt, Artificial Sequence
  Description of Artificial Sequence: Synthetic oligonucleotide
cugaccuagauggucuggc

SEQ ID NO: 13662 - RNA, 19 nt, Artificial Sequence
  Description of Artificial Sequence: Synthetic oligonucleotide
uuccuaaaagauagcuauu

SEQ ID NO: 13663 - RNA, 19 nt, Artificial Sequence
  Description of Artificial Sequence: Synthetic oligonucleotide
gacugaguuaagccaaucu

SEQ ID NO: 13664 - RNA, 19 nt, Artificial Sequence
  Description of Artificial Sequence: Synthetic oligonucleotide
guuaguuaacagggcacug

SEQ ID NO: 13665 - RNA, 19 nt, Artificial Sequence
  Description of Artificial Sequence: Synthetic oligonucleotide
aacaugguuugaaucgcaa

SEQ ID NO: 13666 - RNA, 19 nt, Artificial Sequence
  Description of Artificial Sequence: Synthetic oligonucleotide
cggaacuagagcuauuacc

SEQ ID NO: 13667 - RNA, 19 nt, Artificial Sequence
  Description of Artificial Sequence: Synthetic oligonucleotide
agauagcuauuaauaguca

SEQ ID NO: 13668 - RNA, 19 nt, Artificial Sequence
  Description of Artificial Sequence: Synthetic oligonucleotide
uuaugcugauuaagcggau

SEQ ID NO: 13669 - RNA, 19 nt, Artificial Sequence
  Description of Artificial Sequence: Synthetic oligonucleotide
uguuuggauuaguccggcu

SEQ ID NO: 13670 - RNA, 19 nt, Artificial Sequence
  Description of Artificial Sequence: Synthetic oligonucleotide
auguaugauaggguucacu

SEQ ID NO: 13671 - RNA, 19 nt, Artificial Sequence
  Description of Artificial Sequence: Synthetic oligonucleotide
ugcugucucaaggucacau

SEQ ID NO: 13672 - RNA, 19 nt, Artificial Sequence
  Description of Artificial Sequence: Synthetic oligonucleotide
aucaagagguaaaauccaa

SEQ ID NO: 13673 - RNA, 19 nt, Artificial Sequence
  Description of Artificial Sequence: Synthetic oligonucleotide
aucagacuguaguacuuuu

SEQ ID NO: 13674 - RNA, 19 nt, Artificial Sequence
  Description of Artificial Sequence: Synthetic oligonucleotide
aaggacccuaagugcucug

SEQ ID NO: 13675 - RNA, 19 nt, Artificial Sequence
  Description of Artificial Sequence: Synthetic oligonucleotide
cuauuauagagucaccguu

SEQ ID NO: 13676 - RNA, 19 nt, Artificial Sequence
  Description of Artificial Sequence: Synthetic oligonucleotide
uuaguccggcucacugccc

SEQ ID NO: 13677 - RNA, 19 nt, Artificial Sequence
  Description of Artificial Sequence: Synthetic oligonucleotide
uggugacggguucuagaac

SEQ ID NO: 13678 - RNA, 19 nt, Artificial Sequence
  Description of Artificial Sequence: Synthetic oligonucleotide
cuuacacaagcauaggcuu

SEQ ID NO: 13679 - RNA, 19 nt, Artificial Sequence
  Description of Artificial Sequence: Synthetic oligonucleotide
gauaguacugacguagguu

SEQ ID NO: 13680 - RNA, 19 nt, Artificial Sequence
  Description of Artificial Sequence: Synthetic oligonucleotide
uuauuacgguuaacauuua

SEQ ID NO: 13681 - RNA, 19 nt, Artificial Sequence
  Description of Artificial Sequence: Synthetic oligonucleotide
cagauguaguuucacuuaa

SEQ ID NO: 13682 - RNA, 19 nt, Artificial Sequence
  Description of Artificial Sequence: Synthetic oligonucleotide
auacuaucucucugccggu

SEQ ID NO: 13683 - RNA, 19 nt, Artificial Sequence
  Description of Artificial Sequence: Synthetic oligonucleotide
agacuuaagggcugcccuu

SEQ ID NO: 13684 - RNA, 19 nt, Artificial Sequence
  Description of Artificial Sequence: Synthetic oligonucleotide
ccugacaccuauacgaaca

SEQ ID NO: 13685 - RNA, 19 nt, Artificial Sequence
  Description of Artificial Sequence: Synthetic oligonucleotide
uaccgaacccaaacauuua

SEQ ID NO: 13686 - RNA, 19 nt, Artificial Sequence
  Description of Artificial Sequence: Synthetic oligonucleotide
cuuccauuauuacgguuaa

SEQ ID NO: 13687 - RNA, 19 nt, Artificial Sequence
  Description of Artificial Sequence: Synthetic oligonucleotide
uucuacgaaugggaauccu

SEQ ID NO: 13688 - RNA, 19 nt, Artificial Sequence
  Description of Artificial Sequence: Synthetic oligonucleotide
cauuucuaagcaugguacu

SEQ ID NO: 13689 - RNA, 19 nt, Artificial Sequence
  Description of Artificial Sequence: Synthetic oligonucleotide
gacguguaacagggaagcc

SEQ ID NO: 13690 - RNA, 19 nt, Artificial Sequence
  Description of Artificial Sequence: Synthetic oligonucleotide
uggguuucacagagcuuuc

SEQ ID NO: 13691 - RNA, 19 nt, Artificial Sequence
  Description of Artificial Sequence: Synthetic oligonucleotide
ucggguucuucgguguucu

SEQ ID NO: 13692 - RNA, 19 nt, Artificial Sequence
  Description of Artificial Sequence: Synthetic oligonucleotide
gguacauucucgaaauuua

SEQ ID NO: 13693 - RNA, 19 nt, Artificial Sequence
  Description of Artificial Sequence: Synthetic oligonucleotide
agcaauuaucugguaccga

SEQ ID NO: 13694 - RNA, 19 nt, Artificial Sequence
  Description of Artificial Sequence: Synthetic oligonucleotide
uuggauuaguccggcucac

SEQ ID NO: 13695 - RNA, 19 nt, Artificial Sequence
  Description of Artificial Sequence: Synthetic oligonucleotide
cuguagauucaccauggcu

SEQ ID NO: 13696 - RNA, 19 nt, Artificial Sequence
  Description of Artificial Sequence: Synthetic oligonucleotide
ggagcuaucaagagguaaa

SEQ ID NO: 13697 - RNA, 19 nt, Artificial Sequence
  Description of Artificial Sequence: Synthetic oligonucleotide
guaagcugcguagaauaaa

SEQ ID NO: 13698 - RNA, 19 nt, Artificial Sequence
  Description of Artificial Sequence: Synthetic oligonucleotide
gacuucuaccuagcaacuc

SEQ ID NO: 13699 - RNA, 19 nt, Artificial Sequence
  Description of Artificial Sequence: Synthetic oligonucleotide
agacuucuaccuagcaacu

SEQ ID NO: 13700 - RNA, 19 nt, Artificial Sequence
  Description of Artificial Sequence: Synthetic oligonucleotide
gguacucaugggagcaagg

SEQ ID NO: 13701 - RNA, 19 nt, Artificial Sequence
  Description of Artificial Sequence: Synthetic oligonucleotide
accggaacuagagcuauua

SEQ ID NO: 13702 - RNA, 19 nt, Artificial Sequence
  Description of Artificial Sequence: Synthetic oligonucleotide
ccgaacccaaacauuuaag

SEQ ID NO: 13703 - RNA, 19 nt, Artificial Sequence
  Description of Artificial Sequence: Synthetic oligonucleotide
caucuauaccaaaguagcu

SEQ ID NO: 13704 - RNA, 19 nt, Artificial Sequence
  Description of Artificial Sequence: Synthetic oligonucleotide
caacugcguaccuacucca

SEQ ID NO: 13705 - RNA, 19 nt, Artificial Sequence
  Description of Artificial Sequence: Synthetic oligonucleotide
agacgucuagcagauguuu

SEQ ID NO: 13706 - RNA, 19 nt, Artificial Sequence
  Description of Artificial Sequence: Synthetic oligonucleotide
gccacugcauucuagcaaa

SEQ ID NO: 13707 - RNA, 19 nt, Artificial Sequence
  Description of Artificial Sequence: Synthetic oligonucleotide
gcaagguaguuuacggagc

SEQ ID NO: 13708 - RNA, 19 nt, Artificial Sequence
  Description of Artificial Sequence: Synthetic oligonucleotide
agccacuacuagggcagac

SEQ ID NO: 13709 - RNA, 19 nt, Artificial Sequence
  Description of Artificial Sequence: Synthetic oligonucleotide
guaccgaacccaaacauuu

SEQ ID NO: 13710 - RNA, 19 nt, Artificial Sequence
  Description of Artificial Sequence: Synthetic oligonucleotide
ggcacuaggcuccggguca

SEQ ID NO: 13711 - RNA, 19 nt, Artificial Sequence
  Description of Artificial Sequence: Synthetic oligonucleotide
uggguacauucucgaaauu

SEQ ID NO: 13712 - RNA, 19 nt, Artificial Sequence
  Description of Artificial Sequence: Synthetic oligonucleotide
uggauuaguccggcucacu

SEQ ID NO: 13713 - RNA, 19 nt, Artificial Sequence
  Description of Artificial Sequence: Synthetic oligonucleotide
guaugauaggguucacuuu

SEQ ID NO: 13714 - RNA, 19 nt, Artificial Sequence
  Description of Artificial Sequence: Synthetic oligonucleotide
gagcuauuaccaccagagu

SEQ ID NO: 13715 - RNA, 19 nt, Artificial Sequence
  Description of Artificial Sequence: Synthetic oligonucleotide
cugacaccuauacgaacaa

SEQ ID NO: 13716 - RNA, 19 nt, Artificial Sequence
  Description of Artificial Sequence: Synthetic oligonucleotide
guaucucacuguaauucua

SEQ ID NO: 13717 - RNA, 19 nt, Artificial Sequence
  Description of Artificial Sequence: Synthetic oligonucleotide
guacugacguagguucuca

SEQ ID NO: 13718 - RNA, 19 nt, Artificial Sequence
  Description of Artificial Sequence: Synthetic oligonucleotide
ggcauguaugauaggguuc

SEQ ID NO: 13719 - RNA, 19 nt, Artificial Sequence
  Description of Artificial Sequence: Synthetic oligonucleotide
accuauucuggaaggugaa

SEQ ID NO: 13720 - RNA, 19 nt, Artificial Sequence
  Description of Artificial Sequence: Synthetic oligonucleotide
gcgccuaaaaccuccacgu

SEQ ID NO: 13721 - RNA, 19 nt, Artificial Sequence
  Description of Artificial Sequence: Synthetic oligonucleotide
cgcucagaacgugaaaagg

SEQ ID NO: 13722 - RNA, 19 nt, Artificial Sequence
  Description of Artificial Sequence: Synthetic oligonucleotide
ggacccuaagugcucugca

SEQ ID NO: 13723 - RNA, 19 nt, Artificial Sequence
  Description of Artificial Sequence: Synthetic oligonucleotide
cagaaggaucacuaauuuu

SEQ ID NO: 13724 - RNA, 19 nt, Artificial Sequence
  Description of Artificial Sequence: Synthetic oligonucleotide
gaccgaguucugcuagcua

SEQ ID NO: 13725 - RNA, 19 nt, Artificial Sequence
  Description of Artificial Sequence: Synthetic oligonucleotide
ccauuauuacgguuaacau

SEQ ID NO: 13726 - RNA, 19 nt, Artificial Sequence
  Description of Artificial Sequence: Synthetic oligonucleotide
ccggaacuagagcuauuac

SEQ ID NO: 13727 - RNA, 19 nt, Artificial Sequence
  Description of Artificial Sequence: Synthetic oligonucleotide
gucaccuauucuggaaggu

SEQ ID NO: 13728 - RNA, 19 nt, Artificial Sequence
  Description of Artificial Sequence: Synthetic oligonucleotide
cacuccgcgucucuauucu

SEQ ID NO: 13729 - RNA, 19 nt, Artificial Sequence
  Description of Artificial Sequence: Synthetic oligonucleotide
cuuuaacguccgcaacacu

SEQ ID NO: 13730 - RNA, 19 nt, Artificial Sequence
  Description of Artificial Sequence: Synthetic oligonucleotide
cuacuagggcagaccuuaa

SEQ ID NO: 13731 - RNA, 19 nt, Artificial Sequence
  Description of Artificial Sequence: Synthetic oligonucleotide
caccuauacgaacaaccuu

SEQ ID NO: 13732 - RNA, 19 nt, Artificial Sequence
  Description of Artificial Sequence: Synthetic oligonucleotide
aaccggaacuagagcuauu

SEQ ID NO: 13733 - RNA, 19 nt, Artificial Sequence
  Description of Artificial Sequence: Synthetic oligonucleotide
gguuagcaauuaucuggua

SEQ ID NO: 13734 - RNA, 19 nt, Artificial Sequence
  Description of Artificial Sequence: Synthetic oligonucleotide
guaguuuacggagcuuguu

SEQ ID NO: 13735 - RNA, 19 nt, Artificial Sequence
  Description of Artificial Sequence: Synthetic oligonucleotide
gcguaccuacuccacugga

SEQ ID NO: 13736 - RNA, 19 nt, Artificial Sequence
  Description of Artificial Sequence: Synthetic oligonucleotide
gguaguuuacggagcuugu

SEQ ID NO: 13737 - RNA, 19 nt, Artificial Sequence
  Description of Artificial Sequence: Synthetic oligonucleotide
gcuucguacuuuguuuggu

SEQ ID NO: 13738 - RNA, 19 nt, Artificial Sequence
  Description of Artificial Sequence: Synthetic oligonucleotide
ccaggacgaacucuucuua

SEQ ID NO: 13739 - RNA, 19 nt, Artificial Sequence
  Description of Artificial Sequence: Synthetic oligonucleotide
cacuacuagggcagaccuu

SEQ ID NO: 13740 - RNA, 19 nt, Artificial Sequence
  Description of Artificial Sequence: Synthetic oligonucleotide
caguuugauucugcauggu

SEQ ID NO: 13741 - RNA, 19 nt, Artificial Sequence
  Description of Artificial Sequence: Synthetic oligonucleotide
cgugaaaaggugcgccuaa

SEQ ID NO: 13742 - RNA, 19 nt, Artificial Sequence
  Description of Artificial Sequence: Synthetic oligonucleotide
cucaccgaacccugucauu

SEQ ID NO: 13743 - RNA, 19 nt, Artificial Sequence
  Description of Artificial Sequence: Synthetic oligonucleotide
ccgaguucugcuagcuaua

SEQ ID NO: 13744 - RNA, 19 nt, Artificial Sequence
  Description of Artificial Sequence: Synthetic oligonucleotide
ccgcaacacuaguaauaua

SEQ ID NO: 13745 - RNA, 19 nt, Artificial Sequence
  Description of Artificial Sequence: Synthetic oligonucleotide
ccgcgucucuauucucucu

SEQ ID NO: 13746 - RNA, 19 nt, Artificial Sequence
  Description of Artificial Sequence: Synthetic oligonucleotide
aaaucauagaagcaaauac

SEQ ID NO: 13747 - RNA, 19 nt, Artificial Sequence
  Description of Artificial Sequence: Synthetic oligonucleotide
uuucauauuagaaagcccc

SEQ ID NO: 13748 - RNA, 19 nt, Artificial Sequence
  Description of Artificial Sequence: Synthetic oligonucleotide
uuuacuuuauuccacgucc

SEQ ID NO: 13749 - RNA, 19 nt, Artificial Sequence
  Description of Artificial Sequence: Synthetic oligonucleotide
aguggucuaauucuuaugc

SEQ ID NO: 13750 - RNA, 19 nt, Artificial Sequence
  Description of Artificial Sequence: Synthetic oligonucleotide
gauaauguaacuuguggcc

SEQ ID NO: 13751 - RNA, 19 nt, Artificial Sequence
  Description of Artificial Sequence: Synthetic oligonucleotide
cuuugugagaucauuaagg

SEQ ID NO: 13752 - RNA, 19 nt, Artificial Sequence
  Description of Artificial Sequence: Synthetic oligonucleotide
agugguauaggcuugugac

SEQ ID NO: 13753 - RNA, 19 nt, Artificial Sequence
  Description of Artificial Sequence: Synthetic oligonucleotide
auauuuagccauuugauca

SEQ ID NO: 13754 - RNA, 19 nt, Artificial Sequence
  Description of Artificial Sequence: Synthetic oligonucleotide
agacuauuacacuagaguc

SEQ ID NO: 13755 - RNA, 19 nt, Artificial Sequence
  Description of Artificial Sequence: Synthetic oligonucleotide
auuucuaacuuucagccuc

SEQ ID NO: 13756 - RNA, 19 nt, Artificial Sequence
  Description of Artificial Sequence: Synthetic oligonucleotide
cacagaaucuauuuggucg

SEQ ID NO: 13757 - RNA, 19 nt, Artificial Sequence
  Description of Artificial Sequence: Synthetic oligonucleotide
ugauucaaauauaugaacu

SEQ ID NO: 13758 - RNA, 19 nt, Artificial Sequence
  Description of Artificial Sequence: Synthetic oligonucleotide
aguugagacacauaucgac

SEQ ID NO: 13759 - RNA, 19 nt, Artificial Sequence
  Description of Artificial Sequence: Synthetic oligonucleotide
  modified_base (16)..(16): a, c, u, g, unknown or other
uaucggucaggaaagnucc

SEQ ID NO: 13760 - RNA, 19 nt, Artificial Sequence
  Description of Artificial Sequence: Synthetic oligonucleotide
aaaguuuauguaauguggg

SEQ ID NO: 13761 - RNA, 19 nt, Artificial Sequence
  Description of Artificial Sequence: Synthetic oligonucleotide
uaaagcuauguccaacacg

SEQ ID NO: 13762 - RNA, 19 nt, Artificial Sequence
  Description of Artificial Sequence: Synthetic oligonucleotide
ugaaaguuuauguaaugug

SEQ ID NO: 13763 - RNA, 19 nt, Artificial Sequence
  Description of Artificial Sequence: Synthetic oligonucleotide
acgguuucauauuagaaag

SEQ ID NO: 13764 - RNA, 19 nt, Artificial Sequence
  Description of Artificial Sequence: Synthetic oligonucleotide
uauaacgguaaaauaguca

SEQ ID NO: 13765 - RNA, 19 nt, Artificial Sequence
  Description of Artificial Sequence: Synthetic oligonucleotide
aauauaacgguaaaauagu

SEQ ID NO: 13766 - RNA, 19 nt, Artificial Sequence
  Description of Artificial Sequence: Synthetic oligonucleotide
aaaucuacaaccugggguu

SEQ ID NO: 13767 - RNA, 19 nt, Artificial Sequence
  Description of Artificial Sequence: Synthetic oligonucleotide
uacugaagcuguaaggcgg

SEQ ID NO: 13768 - RNA, 19 nt, Artificial Sequence
  Description of Artificial Sequence: Synthetic oligonucleotide
ugcucuuucacuaggaagu

SEQ ID NO: 13769 - RNA, 19 nt, Artificial Sequence
  Description of Artificial Sequence: Synthetic oligonucleotide
aagguuacaauguaguguu

SEQ ID NO: 13770 - RNA, 19 nt, Artificial Sequence
  Description of Artificial Sequence: Synthetic oligonucleotide
uuaugcgggaaucagacuc

SEQ ID NO: 13771 - RNA, 19 nt, Artificial Sequence
  Description of Artificial Sequence: Synthetic oligonucleotide
auaugcuuaaauggcaacc

SEQ ID NO: 13772 - RNA, 19 nt, Artificial Sequence
  Description of Artificial Sequence: Synthetic oligonucleotide
uugaguaaccaguugagac

SEQ ID NO: 13773 - RNA, 19 nt, Artificial Sequence
  Description of Artificial Sequence: Synthetic oligonucleotide
caaauauuuaguugaccgg

SEQ ID NO: 13774 - RNA, 19 nt, Artificial Sequence
  Description of Artificial Sequence: Synthetic oligonucleotide
agaucuacuuacaagaaag

SEQ ID NO: 13775 - RNA, 19 nt, Artificial Sequence
  Description of Artificial Sequence: Synthetic oligonucleotide
uuuaccauagucauccaau

SEQ ID NO: 13776 - RNA, 19 nt, Artificial Sequence
  Description of Artificial Sequence: Synthetic oligonucleotide
cacauaucgacgcagagug

SEQ ID NO: 13777 - RNA, 19 nt, Artificial Sequence
  Description of Artificial Sequence: Synthetic oligonucleotide
cacacugcggcauauaaag

SEQ ID NO: 13778 - RNA, 19 nt, Artificial Sequence
  Description of Artificial Sequence: Synthetic oligonucleotide
ugccaauuaguccacagga

SEQ ID NO: 13779 - RNA, 19 nt, Artificial Sequence
  Description of Artificial Sequence: Synthetic oligonucleotide
agaauugcagcuuacucca

SEQ ID NO: 13780 - RNA, 19 nt, Artificial Sequence
  Description of Artificial Sequence: Synthetic oligonucleotide
  modified_base (13)..(13): a, c, u, g, unknown or other
ucaucaugaaacngcuggg

SEQ ID NO: 13781 - RNA, 19 nt, Artificial Sequence
  Description of Artificial Sequence: Synthetic oligonucleotide
uguguucacuaauuuacag

SEQ ID NO: 13782 - RNA, 19 nt, Artificial Sequence
  Description of Artificial Sequence: Synthetic oligonucleotide
cauccaaugguuacuaaag

SEQ ID NO: 13783 - RNA, 19 nt, Artificial Sequence
  Description of Artificial Sequence: Synthetic oligonucleotide
aaauuauuguacaagguua

SEQ ID NO: 13784 - RNA, 19 nt, Artificial Sequence
  Description of Artificial Sequence: Synthetic oligonucleotide
ugugguuacugcaauauua

SEQ ID NO: 13785 - RNA, 19 nt, Artificial Sequence
  Description of Artificial Sequence: Synthetic oligonucleotide
agacuaguugaugacaucg

SEQ ID NO: 13786 - RNA, 19 nt, Artificial Sequence
  Description of Artificial Sequence: Synthetic oligonucleotide
ugcaaauagacacccuugc

SEQ ID NO: 13787 - RNA, 19 nt, Artificial Sequence
  Description of Artificial Sequence: Synthetic oligonucleotide
acacgauggacucuggagg

SEQ ID NO: 13788 - RNA, 19 nt, Artificial Sequence
  Description of Artificial Sequence: Synthetic oligonucleotide
aauuuguucaacgcccauc

SEQ ID NO: 13789 - RNA, 19 nt, Artificial Sequence
  Description of Artificial Sequence: Synthetic oligonucleotide
auuuguucaacgcccauca

SEQ ID NO: 13790 - RNA, 19 nt, Artificial Sequence
  Description of Artificial Sequence: Synthetic oligonucleotide
aacgguaaaauagucaaau

SEQ ID NO: 13791 - RNA, 19 nt, Artificial Sequence
  Description of Artificial Sequence: Synthetic oligonucleotide
ugaucgagucucacaaugg

SEQ ID NO: 13792 - RNA, 19 nt, Artificial Sequence
  Description of Artificial Sequence: Synthetic oligonucleotide
ugcagcuuacuccacauac

SEQ ID NO: 13793 - RNA, 19 nt, Artificial Sequence
  Description of Artificial Sequence: Synthetic oligonucleotide
aagagauagguacuaagua

SEQ ID NO: 13794 - RNA, 19 nt, Artificial Sequence
  Description of Artificial Sequence: Synthetic oligonucleotide
agaaccggcaaccacacca

SEQ ID NO: 13795 - RNA, 19 nt, Artificial Sequence
  Description of Artificial Sequence: Synthetic oligonucleotide
caagguugaagguacuagg

SEQ ID NO: 13796 - RNA, 19 nt, Artificial Sequence
  Description of Artificial Sequence: Synthetic oligonucleotide
auauuuaguugaccggcac

SEQ ID NO: 13797 - RNA, 19 nt, Artificial Sequence
  Description of Artificial Sequence: Synthetic oligonucleotide
gaucgagucucacaauggg

SEQ ID NO: 13798 - RNA, 19 nt, Artificial Sequence
  Description of Artificial Sequence: Synthetic oligonucleotide
aaguuuauguaaugugggu

SEQ ID NO: 13799 - RNA, 19 nt, Artificial Sequence
  Description of Artificial Sequence: Synthetic oligonucleotide
uugagacacauaucgacgc

SEQ ID NO: 13800 - RNA, 19 nt, Artificial Sequence
  Description of Artificial Sequence: Synthetic oligonucleotide
aucguagggacacucacag

SEQ ID NO: 13801 - RNA, 19 nt, Artificial Sequence
  Description of Artificial Sequence: Synthetic oligonucleotide
cuguuugcgagucaaaaug

SEQ ID NO: 13802 - RNA, 19 nt, Artificial Sequence
  Description of Artificial Sequence: Synthetic oligonucleotide
ugagacuauuacacuagag

SEQ ID NO: 13803 - RNA, 19 nt, Artificial Sequence
  Description of Artificial Sequence: Synthetic oligonucleotide
uuuuauucccucaguagaa

SEQ ID NO: 13804 - RNA, 19 nt, Artificial Sequence
  Description of Artificial Sequence: Synthetic oligonucleotide
augaacuuaggaauuuggc

SEQ ID NO: 13805 - RNA, 19 nt, Artificial Sequence
  Description of Artificial Sequence: Synthetic oligonucleotide
auuuaguugaccggcacuc

SEQ ID NO: 13806 - RNA, 19 nt, Artificial Sequence
  Description of Artificial Sequence: Synthetic oligonucleotide
uguuugcgagucaaaauga

SEQ ID NO: 13807 - RNA, 19 nt, Artificial Sequence
  Description of Artificial Sequence: Synthetic oligonucleotide
ugauuaguucuuuaccaca

SEQ ID NO: 13808 - RNA, 19 nt, Artificial Sequence
  Description of Artificial Sequence: Synthetic oligonucleotide
uaugcgggaaucagacucg

SEQ ID NO: 13809 - RNA, 19 nt, Artificial Sequence
  Description of Artificial Sequence: Synthetic oligonucleotide
uaaagggcuaaguggauga

SEQ ID NO: 13810 - RNA, 19 nt, Artificial Sequence
  Description of Artificial Sequence: Synthetic oligonucleotide
ggagacaccguuuaugcgg

SEQ ID NO: 13811 - RNA, 19 nt, Artificial Sequence
  Description of Artificial Sequence: Synthetic oligonucleotide
gacacgauggacucuggag

SEQ ID NO: 13812 - RNA, 19 nt, Artificial Sequence
  Description of Artificial Sequence: Synthetic oligonucleotide
uucaagagaugccagcaac

SEQ ID NO: 13813 - RNA, 19 nt, Artificial Sequence
  Description of Artificial Sequence: Synthetic oligonucleotide
aucaaaacauauuaacuuu

SEQ ID NO: 13814 - RNA, 19 nt, Artificial Sequence
  Description of Artificial Sequence: Synthetic oligonucleotide
uccgcuauaaguucugagu

SEQ ID NO: 13815 - RNA, 19 nt, Artificial Sequence
  Description of Artificial Sequence: Synthetic oligonucleotide
uggcauauugcucuauucu

SEQ ID NO: 13816 - RNA, 19 nt, Artificial Sequence
  Description of Artificial Sequence: Synthetic oligonucleotide
aagacgguuucauauuaga

SEQ ID NO: 13817 - RNA, 19 nt, Artificial Sequence
  Description of Artificial Sequence: Synthetic oligonucleotide
uuugguucauaucauccaa

SEQ ID NO: 13818 - RNA, 19 nt, Artificial Sequence
  Description of Artificial Sequence: Synthetic oligonucleotide
guuaauaugagcagcagaa

SEQ ID NO: 13819 - RNA, 19 nt, Artificial Sequence
  Description of Artificial Sequence: Synthetic oligonucleotide
ucucuuuggauagucagug

SEQ ID NO: 13820 - RNA, 19 nt, Artificial Sequence
  Description of Artificial Sequence: Synthetic oligonucleotide
ucgagucucacaaugggaa

SEQ ID NO: 13821 - RNA, 19 nt, Artificial Sequence
  Description of Artificial Sequence: Synthetic oligonucleotide
gaaguccauggugugaucg

SEQ ID NO: 13822 - RNA, 19 nt, Artificial Sequence
  Description of Artificial Sequence: Synthetic oligonucleotide
ucagcugacuguuugcgca

SEQ ID NO: 13823 - RNA, 19 nt, Artificial Sequence
  Description of Artificial Sequence: Synthetic oligonucleotide
gacgguuucauauuagaaa

SEQ ID NO: 13824 - RNA, 19 nt, Artificial Sequence
  Description of Artificial Sequence: Synthetic oligonucleotide
cauugaguaaccaguugag

SEQ ID NO: 13825 - RNA, 19 nt, Artificial Sequence
  Description of Artificial Sequence: Synthetic oligonucleotide
cuaagaggccuuuggagag

SEQ ID NO: 13826 - RNA, 19 nt, Artificial Sequence
  Description of Artificial Sequence: Synthetic oligonucleotide
cugaauccaacaauuggac

SEQ ID NO: 13827 - RNA, 19 nt, Artificial Sequence
  Description of Artificial Sequence: Synthetic oligonucleotide
uacaaccugggguucagag

SEQ ID NO: 13828 - RNA, 19 nt, Artificial Sequence
  Description of Artificial Sequence: Synthetic oligonucleotide
gagacuauuacacuagagu

SEQ ID NO: 13829 - RNA, 19 nt, Artificial Sequence
  Description of Artificial Sequence: Synthetic oligonucleotide
aaaucucuggaaaccuugg

SEQ ID NO: 13830 - RNA, 19 nt, Artificial Sequence
  Description of Artificial Sequence: Synthetic oligonucleotide
uauuuaguugaccggcacu

SEQ ID NO: 13831 - RNA, 19 nt, Artificial Sequence
  Description of Artificial Sequence: Synthetic oligonucleotide
aguuagcauguccugaugu

SEQ ID NO: 13832 - RNA, 19 nt, Artificial Sequence
  Description of Artificial Sequence: Synthetic oligonucleotide
ucaacgcucaacagcaagu

SEQ ID NO: 13833 - RNA, 19 nt, Artificial Sequence
  Description of Artificial Sequence: Synthetic oligonucleotide
  modified_base (17)..(17): a, c, u, g, unknown or other
cuaucggucaggaaagnuc

SEQ ID NO: 13834 - RNA, 19 nt, Artificial Sequence
  Description of Artificial Sequence: Synthetic oligonucleotide
gaugcuagcagauuuugcu

SEQ ID NO: 13835 - RNA, 19 nt, Artificial Sequence
  Description of Artificial Sequence: Synthetic oligonucleotide
ucguguggcauauugcucu

SEQ ID NO: 13836 - RNA, 19 nt, Artificial Sequence
  Description of Artificial Sequence: Synthetic oligonucleotide
uccaguucgacccguguca

SEQ ID NO: 13837 - RNA, 19 nt, Artificial Sequence
  Description of Artificial Sequence: Synthetic oligonucleotide
ucauccaaugguuacuaaa

SEQ ID NO: 13838 - RNA, 19 nt, Artificial Sequence
  Description of Artificial Sequence: Synthetic oligonucleotide
agucguguggcauauugcu

SEQ ID NO: 13839 - RNA, 19 nt, Artificial Sequence
  Description of Artificial Sequence: Synthetic oligonucleotide
  modified_base (9)..(9): a, c, u, g, unknown or other
caggaaagnuccauuugcc

SEQ ID NO: 13840 - RNA, 19 nt, Artificial Sequence
  Description of Artificial Sequence: Synthetic oligonucleotide
uauucagaauugcagcuua

SEQ ID NO: 13841 - RNA, 19 nt, Artificial Sequence
  Description of Artificial Sequence: Synthetic oligonucleotide
uaagggaguuuagagaugu

SEQ ID NO: 13842 - RNA, 19 nt, Artificial Sequence
  Description of Artificial Sequence: Synthetic oligonucleotide
uucucaaaguaagaacaag

SEQ ID NO: 13843 - RNA, 19 nt, Artificial Sequence
  Description of Artificial Sequence: Synthetic oligonucleotide
auaaaagaauacaugacuu

SEQ ID NO: 13844 - RNA, 19 nt, Artificial Sequence
  Description of Artificial Sequence: Synthetic oligonucleotide
aucgacgcagaguggaacg

SEQ ID NO: 13845 - RNA, 19 nt, Artificial Sequence
  Description of Artificial Sequence: Synthetic oligonucleotide
caagcaacaauaaaagucu

SEQ ID NO: 13846 - RNA, 19 nt, Artificial Sequence
  Description of Artificial Sequence: Synthetic oligonucleotide
aauaugucauugugggcau

SEQ ID NO: 13847 - RNA, 19 nt, Artificial Sequence
  Description of Artificial Sequence: Synthetic oligonucleotide
uuugcgagucaaaaugaaa

SEQ ID NO: 13848 - RNA, 19 nt, Artificial Sequence
  Description of Artificial Sequence: Synthetic oligonucleotide
ucuauaccugaauccaaca

SEQ ID NO: 13849 - RNA, 19 nt, Artificial Sequence
  Description of Artificial Sequence: Synthetic oligonucleotide
ccaaugguuacuaaagggc

SEQ ID NO: 13850 - RNA, 19 nt, Artificial Sequence
  Description of Artificial Sequence: Synthetic oligonucleotide
gaugaaauggccugaugaa

SEQ ID NO: 13851 - RNA, 19 nt, Artificial Sequence
  Description of Artificial Sequence: Synthetic oligonucleotide
guugaccagguccuuaugc

SEQ ID NO: 13852 - RNA, 19 nt, Artificial Sequence
  Description of Artificial Sequence: Synthetic oligonucleotide
aauggcaaccuuugguaaa

SEQ ID NO: 13853 - RNA, 19 nt, Artificial Sequence
  Description of Artificial Sequence: Synthetic oligonucleotide
uuucuaacuuucagccucc

SEQ ID NO: 13854 - RNA, 19 nt, Artificial Sequence
  Description of Artificial Sequence: Synthetic oligonucleotide
ucuaugcugcaaauagaca

SEQ ID NO: 13855 - RNA, 19 nt, Artificial Sequence
  Description of Artificial Sequence: Synthetic oligonucleotide
auaggcuugugacugacau

SEQ ID NO: 13856 - RNA, 19 nt, Artificial Sequence
  Description of Artificial Sequence: Synthetic oligonucleotide
auauaacgguaaaauaguc

SEQ ID NO: 13857 - RNA, 19 nt, Artificial Sequence
  Description of Artificial Sequence: Synthetic oligonucleotide
guuuaugcgggaaucagac

SEQ ID NO: 13858 - RNA, 19 nt, Artificial Sequence
  Description of Artificial Sequence: Synthetic oligonucleotide
uugcgcauagcuuuggcaa

SEQ ID NO: 13859 - RNA, 19 nt, Artificial Sequence
  Description of Artificial Sequence: Synthetic oligonucleotide
uuauuguacaagguuaaua

SEQ ID NO: 13860 - RNA, 19 nt, Artificial Sequence
  Description of Artificial Sequence: Synthetic oligonucleotide
uuuggccuccgcuauaagu

SEQ ID NO: 13861 - RNA, 19 nt, Artificial Sequence
  Description of Artificial Sequence: Synthetic oligonucleotide
aaugcauuaccaccuccaa

SEQ ID NO: 13862 - RNA, 19 nt, Artificial Sequence
  Description of Artificial Sequence: Synthetic oligonucleotide
cauuaagggaguuuagaga

SEQ ID NO: 13863 - RNA, 19 nt, Artificial Sequence
  Description of Artificial Sequence: Synthetic oligonucleotide
aauauuuaguugaccggca

SEQ ID NO: 13864 - RNA, 19 nt, Artificial Sequence
  Description of Artificial Sequence: Synthetic oligonucleotide
agucucgcacaucuucccc

SEQ ID NO: 13865 - RNA, 19 nt, Artificial Sequence
  Description of Artificial Sequence: Synthetic oligonucleotide
cuuauugugaucuuccagu

SEQ ID NO: 13866 - RNA, 19 nt, Artificial Sequence
  Description of Artificial Sequence: Synthetic oligonucleotide
cauauguugugucagacua

SEQ ID NO: 13867 - RNA, 19 nt, Artificial Sequence
  Description of Artificial Sequence: Synthetic oligonucleotide
uauguugugucagacuagu

SEQ ID NO: 13868 - RNA, 19 nt, Artificial Sequence
  Description of Artificial Sequence: Synthetic oligonucleotide
uuguucaacgcccaucaua

SEQ ID NO: 13869 - RNA, 19 nt, Artificial Sequence
  Description of Artificial Sequence: Synthetic oligonucleotide
agcauuguugccuccucag

SEQ ID NO: 13870 - RNA, 19 nt, Artificial Sequence
  Description of Artificial Sequence: Synthetic oligonucleotide
uguaaccagauuagaugac

SEQ ID NO: 13871 - RNA, 19 nt, Artificial Sequence
  Description of Artificial Sequence: Synthetic oligonucleotide
uuaagggaguuuagagaug

SEQ ID NO: 13872 - RNA, 19 nt, Artificial Sequence
  Description of Artificial Sequence: Synthetic oligonucleotide
aacucgagcuuggucuacc

SEQ ID NO: 13873 - RNA, 19 nt, Artificial Sequence
  Description of Artificial Sequence: Synthetic oligonucleotide
aauacccgagcagccuugc

SEQ ID NO: 13874 - RNA, 19 nt, Artificial Sequence
  Description of Artificial Sequence: Synthetic oligonucleotide
uaauguaacuuguggcccu

SEQ ID NO: 13875 - RNA, 19 nt, Artificial Sequence
  Description of Artificial Sequence: Synthetic oligonucleotide
cugcaagagggaaacgugc

SEQ ID NO: 13876 - RNA, 19 nt, Artificial Sequence
  Description of Artificial Sequence: Synthetic oligonucleotide
ucuauucuugagugggugu

SEQ ID NO: 13877 - RNA, 19 nt, Artificial Sequence
  Description of Artificial Sequence: Synthetic oligonucleotide
aaagacgguuucauauuag

SEQ ID NO: 13878 - RNA, 19 nt, Artificial Sequence
  Description of Artificial Sequence: Synthetic oligonucleotide
ugcaagagggaaacgugcu

SEQ ID NO: 13879 - RNA, 19 nt, Artificial Sequence
  Description of Artificial Sequence: Synthetic oligonucleotide
cuuuacuuuauuccacguc

SEQ ID NO: 13880 - RNA, 19 nt, Artificial Sequence
  Description of Artificial Sequence: Synthetic oligonucleotide
uugagacuauuacacuaga

SEQ ID NO: 13881 - RNA, 19 nt, Artificial Sequence
  Description of Artificial Sequence: Synthetic oligonucleotide
  modified_base (12)..(12): a, c, u, g, unknown or other
caucaugaaacngcugggg

SEQ ID NO: 13882 - RNA, 19 nt, Artificial Sequence
  Description of Artificial Sequence: Synthetic oligonucleotide
gugauuaguucuuuaccac

SEQ ID NO: 13883 - RNA, 19 nt, Artificial Sequence
  Description of Artificial Sequence: Synthetic oligonucleotide
gacacauaucgacgcagag

SEQ ID NO: 13884 - RNA, 19 nt, Artificial Sequence
  Description of Artificial Sequence: Synthetic oligonucleotide
cugcucuuucacuaggaag

SEQ ID NO: 13885 - RNA, 19 nt, Artificial Sequence
  Description of Artificial Sequence: Synthetic oligonucleotide
aacguccccuccaaugggc

SEQ ID NO: 13886 - RNA, 19 nt, Artificial Sequence
  Description of Artificial Sequence: Synthetic oligonucleotide
uuggccuccgcuauaaguu

SEQ ID NO: 13887 - RNA, 19 nt, Artificial Sequence
  Description of Artificial Sequence: Synthetic oligonucleotide
  modified_base (5)..(5): a, c, u, g, unknown or other
aaagnuccauuugccuuuc

SEQ ID NO: 13888 - RNA, 19 nt, Artificial Sequence
  Description of Artificial Sequence: Synthetic oligonucleotide
aaguuagcauguccugaug

SEQ ID NO: 13889 - RNA, 19 nt, Artificial Sequence
  Description of Artificial Sequence: Synthetic oligonucleotide
aaaagcacguauguuugaa

SEQ ID NO: 13890 - RNA, 19 nt, Artificial Sequence
  Description of Artificial Sequence: Synthetic oligonucleotide
ucuguuugcgagucaaaau

SEQ ID NO: 13891 - RNA, 19 nt, Artificial Sequence
  Description of Artificial Sequence: Synthetic oligonucleotide
gaguaaccaguugagacac

SEQ ID NO: 13892 - RNA, 19 nt, Artificial Sequence
  Description of Artificial Sequence: Synthetic oligonucleotide
uauuccacguccccuggac

SEQ ID NO: 13893 - RNA, 19 nt, Artificial Sequence
  Description of Artificial Sequence: Synthetic oligonucleotide
cuaugggcugaucagccag

SEQ ID NO: 13894 - RNA, 19 nt, Artificial Sequence
  Description of Artificial Sequence: Synthetic oligonucleotide
ugcgagucaaaaugaaaau

SEQ ID NO: 13895 - RNA, 19 nt, Artificial Sequence
  Description of Artificial Sequence: Synthetic oligonucleotide
ugagacacauaucgacgca

SEQ ID NO: 13896 - RNA, 19 nt, Artificial Sequence
  Description of Artificial Sequence: Synthetic oligonucleotide
cagucaacgcucaacagca

SEQ ID NO: 13897 - RNA, 19 nt, Artificial Sequence
  Description of Artificial Sequence: Synthetic oligonucleotide
uggcuguauauauuauaca

SEQ ID NO: 13898 - RNA, 19 nt, Artificial Sequence
  Description of Artificial Sequence: Synthetic oligonucleotide
aacgcucaacagcaagugu

SEQ ID NO: 13899 - RNA, 19 nt, Artificial Sequence
  Description of Artificial Sequence: Synthetic oligonucleotide
uaaaagcacguauguuuga

SEQ ID NO: 13900 - RNA, 19 nt, Artificial Sequence
  Description of Artificial Sequence: Synthetic oligonucleotide
gaagguuacaauguagugu

SEQ ID NO: 13901 - RNA, 19 nt, Artificial Sequence
  Description of Artificial Sequence: Synthetic oligonucleotide
uuuagagaugucugggcuu

SEQ ID NO: 13902 - RNA, 19 nt, Artificial Sequence
  Description of Artificial Sequence: Synthetic oligonucleotide
uucgacccgugucauaaac

SEQ ID NO: 13903 - RNA, 19 nt, Artificial Sequence
  Description of Artificial Sequence: Synthetic oligonucleotide
ucacgucucagcaccuugc

SEQ ID NO: 13904 - RNA, 19 nt, Artificial Sequence
  Description of Artificial Sequence: Synthetic oligonucleotide
uagagauuacaagaugaaa

SEQ ID NO: 13905 - RNA, 19 nt, Artificial Sequence
  Description of Artificial Sequence: Synthetic oligonucleotide
gagacaccguuuaugcggg

SEQ ID NO: 13906 - RNA, 19 nt, Artificial Sequence
  Description of Artificial Sequence: Synthetic oligonucleotide
cuuugguucauaucaucca

SEQ ID NO: 13907 - RNA, 19 nt, Artificial Sequence
  Description of Artificial Sequence: Synthetic oligonucleotide
auguaauguggguuuguga

SEQ ID NO: 13908 - RNA, 19 nt, Artificial Sequence
  Description of Artificial Sequence: Synthetic oligonucleotide
accauuggauaauguaacu

SEQ ID NO: 13909 - RNA, 19 nt, Artificial Sequence
  Description of Artificial Sequence: Synthetic oligonucleotide
ggcuucuauaccugaaucc

SEQ ID NO: 13910 - RNA, 19 nt, Artificial Sequence
  Description of Artificial Sequence: Synthetic oligonucleotide
agguacuaaguaucugucu

SEQ ID NO: 13911 - RNA, 19 nt, Artificial Sequence
  Description of Artificial Sequence: Synthetic oligonucleotide
uaacgguaaaauagucaaa

SEQ ID NO: 13912 - RNA, 19 nt, Artificial Sequence
  Description of Artificial Sequence: Synthetic oligonucleotide
gcugcuaucggucaggaaa

SEQ ID NO: 13913 - RNA, 19 nt, Artificial Sequence
  Description of Artificial Sequence: Synthetic oligonucleotide
gucgguauacaguauucca

SEQ ID NO: 13914 - RNA, 19 nt, Artificial Sequence
  Description of Artificial Sequence: Synthetic oligonucleotide
acgcagucaacgcucaaca

SEQ ID NO: 13915 - RNA, 19 nt, Artificial Sequence
  Description of Artificial Sequence: Synthetic oligonucleotide
agcacauucacggugguuu

SEQ ID NO: 13916 - RNA, 19 nt, Artificial Sequence
  Description of Artificial Sequence: Synthetic oligonucleotide
cagccuugccaauuagucc

SEQ ID NO: 13917 - RNA, 19 nt, Artificial Sequence
  Description of Artificial Sequence: Synthetic oligonucleotide
gaaacgugcuguugaucug

SEQ ID NO: 13918 - RNA, 19 nt, Artificial Sequence
  Description of Artificial Sequence: Synthetic oligonucleotide
uucagaauugcagcuuacu

SEQ ID NO: 13919 - RNA, 19 nt, Artificial Sequence
  Description of Artificial Sequence: Synthetic oligonucleotide
uaccgcauucagcacagaa

SEQ ID NO: 13920 - RNA, 19 nt, Artificial Sequence
  Description of Artificial Sequence: Synthetic oligonucleotide
gugugaucgagucucacaa

SEQ ID NO: 13921 - RNA, 19 nt, Artificial Sequence
  Description of Artificial Sequence: Synthetic oligonucleotide
ucgacccgugucauaaaca

SEQ ID NO: 13922 - RNA, 19 nt, Artificial Sequence
  Description of Artificial Sequence: Synthetic oligonucleotide
ucaacgcccaucauauguu

SEQ ID NO: 13923 - RNA, 19 nt, Artificial Sequence
  Description of Artificial Sequence: Synthetic oligonucleotide
auugcagcuuacuccacau

SEQ ID NO: 13924 - RNA, 19 nt, Artificial Sequence
  Description of Artificial Sequence: Synthetic oligonucleotide
uuuaugcgggaaucagacu

SEQ ID NO: 13925 - RNA, 19 nt, Artificial Sequence
  Description of Artificial Sequence: Synthetic oligonucleotide
gcaaccuuugguaaaauga

SEQ ID NO: 13926 - RNA, 19 nt, Artificial Sequence
  Description of Artificial Sequence: Synthetic oligonucleotide
uuuuccccuagagauuaca

SEQ ID NO: 13927 - RNA, 19 nt, Artificial Sequence
  Description of Artificial Sequence: Synthetic oligonucleotide
ugcuagucaugugaggggu

SEQ ID NO: 13928 - RNA, 19 nt, Artificial Sequence
  Description of Artificial Sequence: Synthetic oligonucleotide
uuccaguucgacccguguc

SEQ ID NO: 13929 - RNA, 19 nt, Artificial Sequence
  Description of Artificial Sequence: Synthetic oligonucleotide
ugcggcauauaaagcuaug

SEQ ID NO: 13930 - RNA, 19 nt, Artificial Sequence
  Description of Artificial Sequence: Synthetic oligonucleotide
gggcugaucagccagaaaa

SEQ ID NO: 13931 - RNA, 19 nt, Artificial Sequence
  Description of Artificial Sequence: Synthetic oligonucleotide
uguuugcgcauagcuuugg

SEQ ID NO: 13932 - RNA, 19 nt, Artificial Sequence
  Description of Artificial Sequence: Synthetic oligonucleotide
guaaccagauuagaugaca

SEQ ID NO: 13933 - RNA, 19 nt, Artificial Sequence
  Description of Artificial Sequence: Synthetic oligonucleotide
acgcccaucauauguugug

SEQ ID NO: 13934 - RNA, 19 nt, Artificial Sequence
  Description of Artificial Sequence: Synthetic oligonucleotide
aguucgacccgugucauaa

SEQ ID NO: 13935 - RNA, 19 nt, Artificial Sequence
  Description of Artificial Sequence: Synthetic oligonucleotide
ucuccacggacuucaagau

SEQ ID NO: 13936 - RNA, 19 nt, Artificial Sequence
  Description of Artificial Sequence: Synthetic oligonucleotide
  modified_base (6)..(6): a, c, u, g, unknown or other
gaaagnuccauuugccuuu

SEQ ID NO: 13937 - RNA, 19 nt, Artificial Sequence
  Description of Artificial Sequence: Synthetic oligonucleotide
cuauucuugaguggguguc

SEQ ID NO: 13938 - RNA, 19 nt, Artificial Sequence
  Description of Artificial Sequence: Synthetic oligonucleotide
acacauaucgacgcagagu

SEQ ID NO: 13939 - RNA, 19 nt, Artificial Sequence
  Description of Artificial Sequence: Synthetic oligonucleotide
cauaucgacgcagagugga

SEQ ID NO: 13940 - RNA, 19 nt, Artificial Sequence
  Description of Artificial Sequence: Synthetic oligonucleotide
gaggcugcacuguaccaac

SEQ ID NO: 13941 - RNA, 19 nt, Artificial Sequence
  Description of Artificial Sequence: Synthetic oligonucleotide
ucgcacaucuuccccagau

SEQ ID NO: 13942 - RNA, 19 nt, Artificial Sequence
  Description of Artificial Sequence: Synthetic oligonucleotide
uucaggucgaaugggacuu

SEQ ID NO: 13943 - RNA, 19 nt, Artificial Sequence
  Description of Artificial Sequence: Synthetic oligonucleotide
uccaaucggugcugaagca

SEQ ID NO: 13944 - RNA, 19 nt, Artificial Sequence
  Description of Artificial Sequence: Synthetic oligonucleotide
cacgauggaggaagguggc

SEQ ID NO: 13945 - RNA, 19 nt, Artificial Sequence
  Description of Artificial Sequence: Synthetic oligonucleotide
uccacgcuuccugugguag

SEQ ID NO: 13946 - RNA, 19 nt, Artificial Sequence
  Description of Artificial Sequence: Synthetic oligonucleotide
aaauacccgagcagccuug

SEQ ID NO: 13947 - RNA, 19 nt, Artificial Sequence
  Description of Artificial Sequence: Synthetic oligonucleotide
uuuaguugaccggcacuca

SEQ ID NO: 13948 - RNA, 19 nt, Artificial Sequence
  Description of Artificial Sequence: Synthetic oligonucleotide
cucuauucuugagugggug

SEQ ID NO: 13949 - RNA, 19 nt, Artificial Sequence
  Description of Artificial Sequence: Synthetic oligonucleotide
ggaaacgugcuguugaucu

SEQ ID NO: 13950 - RNA, 19 nt, Artificial Sequence
  Description of Artificial Sequence: Synthetic oligonucleotide
uuagcacauuggucaagcu

SEQ ID NO: 13951 - RNA, 19 nt, Artificial Sequence
  Description of Artificial Sequence: Synthetic oligonucleotide
aaacaaccagggcuuucaa

SEQ ID NO: 13952 - RNA, 19 nt, Artificial Sequence
  Description of Artificial Sequence: Synthetic oligonucleotide
gggacauuugggcugcaag

SEQ ID NO: 13953 - RNA, 19 nt, Artificial Sequence
  Description of Artificial Sequence: Synthetic oligonucleotide
ggaagucuuucacaccacc

SEQ ID NO: 13954 - RNA, 19 nt, Artificial Sequence
  Description of Artificial Sequence: Synthetic oligonucleotide
agaauuccccagcgcuuuc

SEQ ID NO: 13955 - RNA, 19 nt, Artificial Sequence
  Description of Artificial Sequence: Synthetic oligonucleotide
guggucuaauucuuaugca

SEQ ID NO: 13956 - RNA, 19 nt, Artificial Sequence
  Description of Artificial Sequence: Synthetic oligonucleotide
uaucgacgcagaguggaac

SEQ ID NO: 13957 - RNA, 19 nt, Artificial Sequence
  Description of Artificial Sequence: Synthetic oligonucleotide
cuucgugaagucucgcaca

SEQ ID NO: 13958 - RNA, 19 nt, Artificial Sequence
  Description of Artificial Sequence: Synthetic oligonucleotide
  modified_base (14)..(14): a, c, u, g, unknown or other
ucggucaggaaagnuccau

SEQ ID NO: 13959 - RNA, 19 nt, Artificial Sequence
  Description of Artificial Sequence: Synthetic oligonucleotide
ucccucaguagaacacgca

SEQ ID NO: 13960 - RNA, 19 nt, Artificial Sequence
  Description of Artificial Sequence: Synthetic oligonucleotide
ucaguccaaucuucaggcu

SEQ ID NO: 13961 - RNA, 19 nt, Artificial Sequence
  Description of Artificial Sequence: Synthetic oligonucleotide
augguuacuaaagggcuaa

SEQ ID NO: 13962 - RNA, 19 nt, Artificial Sequence
  Description of Artificial Sequence: Synthetic oligonucleotide
acgucauaauuaaaaugcu

SEQ ID NO: 13963 - RNA, 19 nt, Artificial Sequence
  Description of Artificial Sequence: Synthetic oligonucleotide
augugaggggucuuaugau

SEQ ID NO: 13964 - RNA, 19 nt, Artificial Sequence
  Description of Artificial Sequence: Synthetic oligonucleotide
caacgcucaacagcaagug

SEQ ID NO: 13965 - RNA, 19 nt, Artificial Sequence
  Description of Artificial Sequence: Synthetic oligonucleotide
gauuaguucuuuaccacau

SEQ ID NO: 13966 - RNA, 19 nt, Artificial Sequence
  Description of Artificial Sequence: Synthetic oligonucleotide
auauucagaauugcagcuu

SEQ ID NO: 13967 - RNA, 19 nt, Artificial Sequence
  Description of Artificial Sequence: Synthetic oligonucleotide
caacgcccaucauauguug

SEQ ID NO: 13968 - RNA, 19 nt, Artificial Sequence
  Description of Artificial Sequence: Synthetic oligonucleotide
uuccaccauuggauaaugu

SEQ ID NO: 13969 - RNA, 19 nt, Artificial Sequence
  Description of Artificial Sequence: Synthetic oligonucleotide
uguugucgguauacaguau

SEQ ID NO: 13970 - RNA, 19 nt, Artificial Sequence
  Description of Artificial Sequence: Synthetic oligonucleotide
gggaacguccccuccaaug

SEQ ID NO: 13971 - RNA, 19 nt, Artificial Sequence
  Description of Artificial Sequence: Synthetic oligonucleotide
ugugaucgagucucacaau

SEQ ID NO: 13972 - RNA, 19 nt, Artificial Sequence
  Description of Artificial Sequence: Synthetic oligonucleotide
uccucggaugugugauggg

SEQ ID NO: 13973 - RNA, 19 nt, Artificial Sequence
  Description of Artificial Sequence: Synthetic oligonucleotide
ggcaaccuuugguaaaaug

SEQ ID NO: 13974 - RNA, 19 nt, Artificial Sequence
  Description of Artificial Sequence: Synthetic oligonucleotide
  modified_base (4)..(4): a, c, u, g, unknown or other
aagnuccauuugccuuuca

SEQ ID NO: 13975 - RNA, 19 nt, Artificial Sequence
  Description of Artificial Sequence: Synthetic oligonucleotide
aguggaacguugaccaggu

SEQ ID NO: 13976 - RNA, 19 nt, Artificial Sequence
  Description of Artificial Sequence: Synthetic oligonucleotide
cucacgucucagcaccuug

SEQ ID NO: 13977 - RNA, 19 nt, Artificial Sequence
  Description of Artificial Sequence: Synthetic oligonucleotide
acuucuguguucacuaauu

SEQ ID NO: 13978 - RNA, 19 nt, Artificial Sequence
  Description of Artificial Sequence: Synthetic oligonucleotide
ugcgcauagcuuuggcaau

SEQ ID NO: 13979 - RNA, 19 nt, Artificial Sequence
  Description of Artificial Sequence: Synthetic oligonucleotide
  modified_base (7)..(7): a, c, u, g, unknown or other
ggaaagnuccauuugccuu

SEQ ID NO: 13980 - RNA, 19 nt, Artificial Sequence
  Description of Artificial Sequence: Synthetic oligonucleotide
agacgguuucauauuagaa

SEQ ID NO: 13981 - RNA, 19 nt, Artificial Sequence
  Description of Artificial Sequence: Synthetic oligonucleotide
augcuuaaauggcaaccuu

SEQ ID NO: 13982 - RNA, 19 nt, Artificial Sequence
  Description of Artificial Sequence: Synthetic oligonucleotide
aacgcccaucauauguugu

SEQ ID NO: 13983 - RNA, 19 nt, Artificial Sequence
  Description of Artificial Sequence: Synthetic oligonucleotide
ggcuaaguggaugauguca

SEQ ID NO: 13984 - RNA, 19 nt, Artificial Sequence
  Description of Artificial Sequence: Synthetic oligonucleotide
gcuggugucaugaggcggg

SEQ ID NO: 13985 - RNA, 19 nt, Artificial Sequence
  Description of Artificial Sequence: Synthetic oligonucleotide
acaccguuuaugcgggaau

SEQ ID NO: 13986 - RNA, 19 nt, Artificial Sequence
  Description of Artificial Sequence: Synthetic oligonucleotide
aauagcagauagaguucau

SEQ ID NO: 13987 - RNA, 19 nt, Artificial Sequence
  Description of Artificial Sequence: Synthetic oligonucleotide
aucgagucucacaauggga

SEQ ID NO: 13988 - RNA, 19 nt, Artificial Sequence
  Description of Artificial Sequence: Synthetic oligonucleotide
ccucaagcaaauguaaauc

SEQ ID NO: 13989 - RNA, 19 nt, Artificial Sequence
  Description of Artificial Sequence: Synthetic oligonucleotide
caucguagggacacucaca

SEQ ID NO: 13990 - RNA, 19 nt, Artificial Sequence
  Description of Artificial Sequence: Synthetic oligonucleotide
ccgcuauaaguucugaguc

SEQ ID NO: 13991 - RNA, 19 nt, Artificial Sequence
  Description of Artificial Sequence: Synthetic oligonucleotide
ucguagggacacucacagc

SEQ ID NO: 13992 - RNA, 19 nt, Artificial Sequence
  Description of Artificial Sequence: Synthetic oligonucleotide
guugaccggcacucagaag

SEQ ID NO: 13993 - RNA, 19 nt, Artificial Sequence
  Description of Artificial Sequence: Synthetic oligonucleotide
guagcucaaugcagaacug

SEQ ID NO: 13994 - RNA, 19 nt, Artificial Sequence
  Description of Artificial Sequence: Synthetic oligonucleotide
guauaggcuugugacugac

SEQ ID NO: 13995 - RNA, 19 nt, Artificial Sequence
  Description of Artificial Sequence: Synthetic oligonucleotide
ugagcccacggggaguccc

SEQ ID NO: 13996 - RNA, 19 nt, Artificial Sequence
  Description of Artificial Sequence: Synthetic oligonucleotide
aaagggcuaaguggaugau

SEQ ID NO: 13997 - RNA, 19 nt, Artificial Sequence
  Description of Artificial Sequence: Synthetic oligonucleotide
agggaaacgugcuguugau

SEQ ID NO: 13998 - RNA, 19 nt, Artificial Sequence
  Description of Artificial Sequence: Synthetic oligonucleotide
uggcuagauggaugcuuca

SEQ ID NO: 13999 - RNA, 19 nt, Artificial Sequence
  Description of Artificial Sequence: Synthetic oligonucleotide
gcuacgaacacugggcuca

SEQ ID NO: 14000 - RNA, 19 nt, Artificial Sequence
  Description of Artificial Sequence: Synthetic oligonucleotide
acauaucgacgcagagugg

SEQ ID NO: 14001 - RNA, 19 nt, Artificial Sequence
  Description of Artificial Sequence: Synthetic oligonucleotide
uggccuccgcuauaaguuc

SEQ ID NO: 14002 - RNA, 19 nt, Artificial Sequence
  Description of Artificial Sequence: Synthetic oligonucleotide
accguuuaugcgggaauca

SEQ ID NO: 14003 - RNA, 19 nt, Artificial Sequence
  Description of Artificial Sequence: Synthetic oligonucleotide
ccagucguguggcauauug

SEQ ID NO: 14004 - RNA, 19 nt, Artificial Sequence
  Description of Artificial Sequence: Synthetic oligonucleotide
agacacauaucgacgcaga

SEQ ID NO: 14005 - RNA, 19 nt, Artificial Sequence
  Description of Artificial Sequence: Synthetic oligonucleotide
acguccccuggacaucauc

SEQ ID NO: 14006 - RNA, 19 nt, Artificial Sequence
  Description of Artificial Sequence: Synthetic oligonucleotide
aguuuggccuccgcuauaa

SEQ ID NO: 14007 - RNA, 19 nt, Artificial Sequence
  Description of Artificial Sequence: Synthetic oligonucleotide
cacuguaccaacuucuguu

SEQ ID NO: 14008 - RNA, 19 nt, Artificial Sequence
  Description of Artificial Sequence: Synthetic oligonucleotide
agcaacucuggcagacguc

SEQ ID NO: 14009 - RNA, 19 nt, Artificial Sequence
  Description of Artificial Sequence: Synthetic oligonucleotide
guuugcgagucaaaaugaa

SEQ ID NO: 14010 - RNA, 19 nt, Artificial Sequence
  Description of Artificial Sequence: Synthetic oligonucleotide
gagaacccaaaguuagcau

SEQ ID NO: 14011 - RNA, 19 nt, Artificial Sequence
  Description of Artificial Sequence: Synthetic oligonucleotide
cuccacggacuucaagauc

SEQ ID NO: 14012 - RNA, 19 nt, Artificial Sequence
  Description of Artificial Sequence: Synthetic oligonucleotide
caccuuugugagaucauua

SEQ ID NO: 14013 - RNA, 19 nt, Artificial Sequence
  Description of Artificial Sequence: Synthetic oligonucleotide
ugugcugccgaaggaguuu

SEQ ID NO: 14014 - RNA, 19 nt, Artificial Sequence
  Description of Artificial Sequence: Synthetic oligonucleotide
guucaacgcccaucauaug

SEQ ID NO: 14015 - RNA, 19 nt, Artificial Sequence
  Description of Artificial Sequence: Synthetic oligonucleotide
ucgacgcagaguggaacgu

SEQ ID NO: 14016 - RNA, 19 nt, Artificial Sequence
  Description of Artificial Sequence: Synthetic oligonucleotide
gcaacucuggcagacguca

SEQ ID NO: 14017 - RNA, 19 nt, Artificial Sequence
  Description of Artificial Sequence: Synthetic oligonucleotide
acugcggcauauaaagcua

SEQ ID NO: 14018 - RNA, 19 nt, Artificial Sequence
  Description of Artificial Sequence: Synthetic oligonucleotide
caccguuuaugcgggaauc

SEQ ID NO: 14019 - RNA, 19 nt, Artificial Sequence
  Description of Artificial Sequence: Synthetic oligonucleotide
  modified_base (19)..(19): a, c, u, g, unknown or other
ugcuaucggucaggaaagn

SEQ ID NO: 14020 - RNA, 19 nt, Artificial Sequence
  Description of Artificial Sequence: Synthetic oligonucleotide
cggagcuucaggucgaaug

SEQ ID NO: 14021 - RNA, 19 nt, Artificial Sequence
  Description of Artificial Sequence: Synthetic oligonucleotide
guuuggccuccgcuauaag

SEQ ID NO: 14022 - RNA, 19 nt, Artificial Sequence
  Description of Artificial Sequence: Synthetic oligonucleotide
ccucggaugugugaugggg

SEQ ID NO: 14023 - RNA, 19 nt, Artificial Sequence
  Description of Artificial Sequence: Synthetic oligonucleotide
ucauggcucuccucuuaua

SEQ ID NO: 14024 - RNA, 19 nt, Artificial Sequence
  Description of Artificial Sequence: Synthetic oligonucleotide
gacuaguugaugacaucgu

SEQ ID NO: 14025 - RNA, 19 nt, Artificial Sequence
  Description of Artificial Sequence: Synthetic oligonucleotide
gacaccguuuaugcgggaa

SEQ ID NO: 14026 - RNA, 19 nt, Artificial Sequence
  Description of Artificial Sequence: Synthetic oligonucleotide
uucuaacuuucagccuccu

SEQ ID NO: 14027 - RNA, 19 nt, Artificial Sequence
  Description of Artificial Sequence: Synthetic oligonucleotide
ggaugugugauggggugac

SEQ ID NO: 14028 - RNA, 19 nt, Artificial Sequence
  Description of Artificial Sequence: Synthetic oligonucleotide
ggggugacacgauggacuc

SEQ ID NO: 14029 - RNA, 19 nt, Artificial Sequence
  Description of Artificial Sequence: Synthetic oligonucleotide
ccgugucauaaacauugag

SEQ ID NO: 14030 - RNA, 19 nt, Artificial Sequence
  Description of Artificial Sequence: Synthetic oligonucleotide
aggcggggaacguccccuc

SEQ ID NO: 14031 - RNA, 19 nt, Artificial Sequence
  Description of Artificial Sequence: Synthetic oligonucleotide
guaaggcggggaacguccc

SEQ ID NO: 14032 - RNA, 19 nt, Artificial Sequence
  Description of Artificial Sequence: Synthetic oligonucleotide
cacgauggacucuggaggu

SEQ ID NO: 14033 - RNA, 19 nt, Artificial Sequence
  Description of Artificial Sequence: Synthetic oligonucleotide
cccaaaguuagcauguccu

SEQ ID NO: 14034 - RNA, 19 nt, Artificial Sequence
  Description of Artificial Sequence: Synthetic oligonucleotide
cccgcugagaggcauccgc

SEQ ID NO: 14035 - RNA, 19 nt, Artificial Sequence
  Description of Artificial Sequence: Synthetic oligonucleotide
gguauaggcuugugacuga

SEQ ID NO: 14036 - RNA, 19 nt, Artificial Sequence
  Description of Artificial Sequence: Synthetic oligonucleotide
cuggugucaugaggcgggg

SEQ ID NO: 14037 - RNA, 19 nt, Artificial Sequence
  Description of Artificial Sequence: Synthetic oligonucleotide
cacgucucagcaccuugca

SEQ ID NO: 14038 - RNA, 19 nt, Artificial Sequence
  Description of Artificial Sequence: Synthetic oligonucleotide
ggcuagauggaugcuucac

SEQ ID NO: 14039 - RNA, 19 nt, Artificial Sequence
  Description of Artificial Sequence: Synthetic oligonucleotide
cgaaagagaacccaaaguu

SEQ ID NO: 14040 - RNA, 19 nt, Artificial Sequence
  Description of Artificial Sequence: Synthetic oligonucleotide
acgauggaggaagguggcu

SEQ ID NO: 14041 - RNA, 19 nt, Artificial Sequence
  Description of Artificial Sequence: Synthetic oligonucleotide
auaucgacgcagaguggaa

SEQ ID NO: 14042 - RNA, 19 nt, Artificial Sequence
  Description of Artificial Sequence: Synthetic oligonucleotide
gugacacgauggacucugg

SEQ ID NO: 14043 - RNA, 19 nt, Artificial Sequence
  Description of Artificial Sequence: Synthetic oligonucleotide
gggucuuaugaugucuguc

SEQ ID NO: 14044 - RNA, 19 nt, Artificial Sequence
  Description of Artificial Sequence: Synthetic oligonucleotide
aagcuauguccaacacgau

SEQ ID NO: 14045 - RNA, 19 nt, Artificial Sequence
  Description of Artificial Sequence: Synthetic oligonucleotide
ccguuuaugcgggaaucag

SEQ ID NO: 14046 - RNA, 19 nt, Artificial Sequence
  Description of Artificial Sequence: Synthetic oligonucleotide
ggucuaauucuuaugcaau

SEQ ID NO: 14047 - RNA, 19 nt, Artificial Sequence
  Description of Artificial Sequence: Synthetic oligonucleotide
gguuacuaaagggcuaagu

SEQ ID NO: 14048 - RNA, 19 nt, Artificial Sequence
  Description of Artificial Sequence: Synthetic oligonucleotide
caaucggugcugaagcauu

SEQ ID NO: 14049 - RNA, 19 nt, Artificial Sequence
  Description of Artificial Sequence: Synthetic oligonucleotide
gugagaucauuaagggagu

SEQ ID NO: 14050 - RNA, 19 nt, Artificial Sequence
  Description of Artificial Sequence: Synthetic oligonucleotide
ccacacgaugcagaaccgg

SEQ ID NO: 14051 - RNA, 19 nt, Artificial Sequence
  Description of Artificial Sequence: Synthetic oligonucleotide
guaaaucucuggaaaccuu

SEQ ID NO: 14052 - RNA, 19 nt, Artificial Sequence
  Description of Artificial Sequence: Synthetic oligonucleotide
gcagaaccggcaaccacac

SEQ ID NO: 14053 - RNA, 19 nt, Artificial Sequence
  Description of Artificial Sequence: Synthetic oligonucleotide
ccgcugagaggcauccgcc

SEQ ID NO: 14054 - RNA, 19 nt, Artificial Sequence
  Description of Artificial Sequence: Synthetic oligonucleotide
gggagacucccgcccagug

SEQ ID NO: 14055 - RNA, 19 nt, Artificial Sequence
  Description of Artificial Sequence: Synthetic oligonucleotide
agccgccccuugugcugcc

SEQ ID NO: 14056 - RNA, 19 nt, Artificial Sequence
  Description of Artificial Sequence: Synthetic oligonucleotide
ccagcgaaagagaacccaa

SEQ ID NO: 14057 - RNA, 19 nt, Artificial Sequence
  Description of Artificial Sequence: Synthetic oligonucleotide
agacaccguuuaugcggga

SEQ ID NO: 14058 - RNA, 19 nt, Artificial Sequence
  Description of Artificial Sequence: Synthetic oligonucleotide
  modified_base (15)..(15): a, c, u, g, unknown or other
aucggucaggaaagnucca

SEQ ID NO: 14059 - RNA, 19 nt, Artificial Sequence
  Description of Artificial Sequence: Synthetic oligonucleotide
acacuauccugcagagcau

SEQ ID NO: 14060 - RNA, 19 nt, Artificial Sequence
  Description of Artificial Sequence: Synthetic oligonucleotide
caacagcaagugucaugga

SEQ ID NO: 14061 - RNA, 19 nt, Artificial Sequence
  Description of Artificial Sequence: Synthetic oligonucleotide
ggacacuauccugcagagc

SEQ ID NO: 14062 - RNA, 19 nt, Artificial Sequence
  Description of Artificial Sequence: Synthetic oligonucleotide
cguuuaugcgggaaucaga

SEQ ID NO: 14063 - RNA, 19 nt, Artificial Sequence
  Description of Artificial Sequence: Synthetic oligonucleotide
acguccccuccaaugggca

SEQ ID NO: 14064 - RNA, 19 nt, Artificial Sequence
  Description of Artificial Sequence: Synthetic oligonucleotide
uugcacacugcggcauaua

SEQ ID NO: 14065 - RNA, 19 nt, Artificial Sequence
  Description of Artificial Sequence: Synthetic oligonucleotide
guucgacccgugucauaaa

SEQ ID NO: 14066 - RNA, 19 nt, Artificial Sequence
  Description of Artificial Sequence: Synthetic oligonucleotide
gggaaacgugcuguugauc

SEQ ID NO: 14067 - RNA, 19 nt, Artificial Sequence
  Description of Artificial Sequence: Synthetic oligonucleotide
gaaucagacucgggcugcu

SEQ ID NO: 14068 - RNA, 19 nt, Artificial Sequence
  Description of Artificial Sequence: Synthetic oligonucleotide
gcggcauauaaagcuaugu

SEQ ID NO: 14069 - RNA, 19 nt, Artificial Sequence
  Description of Artificial Sequence: Synthetic oligonucleotide
cccagaugugcugcuaguc

SEQ ID NO: 14070 - RNA, 19 nt, Artificial Sequence
  Description of Artificial Sequence: Synthetic oligonucleotide
guggaacguugaccagguc

SEQ ID NO: 14071 - RNA, 19 nt, Artificial Sequence
  Description of Artificial Sequence: Synthetic oligonucleotide
aggcugcacuguaccaacu

SEQ ID NO: 14072 - RNA, 19 nt, Artificial Sequence
  Description of Artificial Sequence: Synthetic oligonucleotide
cucuggcaagcagcuacga

SEQ ID NO: 14073 - RNA, 19 nt, Artificial Sequence
  Description of Artificial Sequence: Synthetic oligonucleotide
agcucacgucucagcaccu

SEQ ID NO: 14074 - RNA, 19 nt, Artificial Sequence
  Description of Artificial Sequence: Synthetic oligonucleotide
ccuuuacuuuauuccacgu

SEQ ID NO: 14075 - RNA, 19 nt, Artificial Sequence
  Description of Artificial Sequence: Synthetic oligonucleotide
ggagacucccgcccagugu

SEQ ID NO: 14076 - RNA, 19 nt, Artificial Sequence
  Description of Artificial Sequence: Synthetic oligonucleotide
gcgcauagcuuuggcaauc

SEQ ID NO: 14077 - RNA, 19 nt, Artificial Sequence
  Description of Artificial Sequence: Synthetic oligonucleotide
gucaugugaggggucuuau

SEQ ID NO: 14078 - RNA, 19 nt, Artificial Sequence
  Description of Artificial Sequence: Synthetic oligonucleotide
cucgcacaucuuccccaga

SEQ ID NO: 14079 - RNA, 19 nt, Artificial Sequence
  Description of Artificial Sequence: Synthetic oligonucleotide
gcacacugcggcauauaaa

SEQ ID NO: 14080 - RNA, 19 nt, Artificial Sequence
  Description of Artificial Sequence: Synthetic oligonucleotide
ggggucuuaugaugucugu

SEQ ID NO: 14081 - RNA, 19 nt, Artificial Sequence
  Description of Artificial Sequence: Synthetic oligonucleotide
caacacgauggaggaaggu

SEQ ID NO: 14082 - RNA, 19 nt, Artificial Sequence
  Description of Artificial Sequence: Synthetic oligonucleotide
gccaauuaguccacaggau

SEQ ID NO: 14083 - RNA, 19 nt, Artificial Sequence
  Description of Artificial Sequence: Synthetic oligonucleotide
ggcagacgucauaauuaaa

SEQ ID NO: 14084 - RNA, 19 nt, Artificial Sequence
  Description of Artificial Sequence: Synthetic oligonucleotide
gacccgugucauaaacauu

SEQ ID NO: 14085 - RNA, 19 nt, Artificial Sequence
  Description of Artificial Sequence: Synthetic oligonucleotide
cacuauccugcagagcauu

SEQ ID NO: 14086 - RNA, 19 nt, Artificial Sequence
  Description of Artificial Sequence: Synthetic oligonucleotide
cagcugacuguuugcgcau

SEQ ID NO: 14087 - RNA, 19 nt, Artificial Sequence
  Description of Artificial Sequence: Synthetic oligonucleotide
  modified_base (18)..(18): a, c, u, g, unknown or other
gcuaucggucaggaaagnu

SEQ ID NO: 14088 - RNA, 19 nt, Artificial Sequence
  Description of Artificial Sequence: Synthetic oligonucleotide
ccauuggauaauguaacuu

SEQ ID NO: 14089 - RNA, 19 nt, Artificial Sequence
  Description of Artificial Sequence: Synthetic oligonucleotide
ggcugcacuguaccaacuu

SEQ ID NO: 14090 - RNA, 19 nt, Artificial Sequence
  Description of Artificial Sequence: Synthetic oligonucleotide
uggggacauuugggcugca

SEQ ID NO: 14091 - RNA, 19 nt, Artificial Sequence
  Description of Artificial Sequence: Synthetic oligonucleotide
caguucgacccgugucaua

SEQ ID NO: 14092 - RNA, 19 nt, Artificial Sequence
  Description of Artificial Sequence: Synthetic oligonucleotide
gggccagucguguggcaua

SEQ ID NO: 14093 - RNA, 19 nt, Artificial Sequence
  Description of Artificial Sequence: Synthetic oligonucleotide
cucugagucugggaugauu

SEQ ID NO: 14094 - RNA, 19 nt, Artificial Sequence
  Description of Artificial Sequence: Synthetic oligonucleotide
cgacccgugucauaaacau

SEQ ID NO: 14095 - RNA, 19 nt, Artificial Sequence
  Description of Artificial Sequence: Synthetic oligonucleotide
caacucuggcagacgucau

SEQ ID NO: 14096 - RNA, 19 nt, Artificial Sequence
  Description of Artificial Sequence: Synthetic oligonucleotide
ccacguccccuggacauca

SEQ ID NO: 14097 - RNA, 19 nt, Artificial Sequence
  Description of Artificial Sequence: Synthetic oligonucleotide
cuaccgcauucagcacaga

SEQ ID NO: 14098 - RNA, 19 nt, Artificial Sequence
  Description of Artificial Sequence: Synthetic oligonucleotide
ggggacauuugggcugcaa

SEQ ID NO: 14099 - RNA, 19 nt, Artificial Sequence
  Description of Artificial Sequence: Synthetic oligonucleotide
cacggagcuucaggucgaa

SEQ ID NO: 14100 - RNA, 19 nt, Artificial Sequence
  Description of Artificial Sequence: Synthetic oligonucleotide
cgcauucagcacagaauau

SEQ ID NO: 14101 - RNA, 19 nt, Artificial Sequence
  Description of Artificial Sequence: Synthetic oligonucleotide
ccuccacgcuuccuguggu

SEQ ID NO: 14102 - RNA, 19 nt, Artificial Sequence
  Description of Artificial Sequence: Synthetic oligonucleotide
ggccagucguguggcauau

SEQ ID NO: 14103 - RNA, 19 nt, Artificial Sequence
  Description of Artificial Sequence: Synthetic oligonucleotide
cacguccccuggacaucau

SEQ ID NO: 14104 - RNA, 19 nt, Artificial Sequence
  Description of Artificial Sequence: Synthetic oligonucleotide
cgcauagcuuuggcaaucu

SEQ ID NO: 14105 - RNA, 19 nt, Artificial Sequence
  Description of Artificial Sequence: Synthetic oligonucleotide
ccacggggaguccccuucu

SEQ ID NO: 14106 - RNA, 19 nt, Artificial Sequence
  Description of Artificial Sequence: Synthetic oligonucleotide
cgacgcagaguggaacguu

SEQ ID NO: 14107 - RNA, 19 nt, Artificial Sequence
  Description of Artificial Sequence: Synthetic oligonucleotide
gccagucguguggcauauu

SEQ ID NO: 14108 - RNA, 19 nt, Artificial Sequence
  Description of Artificial Sequence: Synthetic oligonucleotide
aaaguuagaaauuagagcc

SEQ ID NO: 14109 - RNA, 19 nt, Artificial Sequence
  Description of Artificial Sequence: Synthetic oligonucleotide
aauauaccgaaauucauac

SEQ ID NO: 14110 - RNA, 19 nt, Artificial Sequence
  Description of Artificial Sequence: Synthetic oligonucleotide
aaguuuauggcuaaaaugc

SEQ ID NO: 14111 - RNA, 19 nt, Artificial Sequence
  Description of Artificial Sequence: Synthetic oligonucleotide
ugaagugucaaucugaaag

SEQ ID NO: 14112 - RNA, 19 nt, Artificial Sequence
  Description of Artificial Sequence: Synthetic oligonucleotide
aauuagagccaacugaagg

SEQ ID NO: 14113 - RNA, 19 nt, Artificial Sequence
  Description of Artificial Sequence: Synthetic oligonucleotide
cuuacaauccguaacaggg

SEQ ID NO: 14114 - RNA, 19 nt, Artificial Sequence
  Description of Artificial Sequence: Synthetic oligonucleotide
aauuccaggcaugagaucc

SEQ ID NO: 14115 - RNA, 19 nt, Artificial Sequence
  Description of Artificial Sequence: Synthetic oligonucleotide
aaaguuuauggcuaaaaug

SEQ ID NO: 14116 - RNA, 19 nt, Artificial Sequence
  Description of Artificial Sequence: Synthetic oligonucleotide
caaagaaucaguuaaggac

SEQ ID NO: 14117 - RNA, 19 nt, Artificial Sequence
  Description of Artificial Sequence: Synthetic oligonucleotide
aacgagaggacaaagcugc

SEQ ID NO: 14118 - RNA, 19 nt, Artificial Sequence
  Description of Artificial Sequence: Synthetic oligonucleotide
uuaacugaugcauuaaagc

SEQ ID NO: 14119 - RNA, 19 nt, Artificial Sequence
  Description of Artificial Sequence: Synthetic oligonucleotide
aaaugcgccaagcaacugc

SEQ ID NO: 14120 - RNA, 19 nt, Artificial Sequence
  Description of Artificial Sequence: Synthetic oligonucleotide
aaacuaugcuuguuuaugg

SEQ ID NO: 14121 - RNA, 19 nt, Artificial Sequence
  Description of Artificial Sequence: Synthetic oligonucleotide
uauaccgaaauucauacaa

SEQ ID NO: 14122 - RNA, 19 nt, Artificial Sequence
  Description of Artificial Sequence: Synthetic oligonucleotide
ucugauuugcuuuugcucc

SEQ ID NO: 14123 - RNA, 19 nt, Artificial Sequence
  Description of Artificial Sequence: Synthetic oligonucleotide
uaacugaugcauuaaagcc

SEQ ID NO: 14124 - RNA, 19 nt, Artificial Sequence
  Description of Artificial Sequence: Synthetic oligonucleotide
uacuagaauacuuuuagga

SEQ ID NO: 14125 - RNA, 19 nt, Artificial Sequence
  Description of Artificial Sequence: Synthetic oligonucleotide
aacauuagauuauugccug

SEQ ID NO: 14126 - RNA, 19 nt, Artificial Sequence
  Description of Artificial Sequence: Synthetic oligonucleotide
acaaauagguauugggcgc

SEQ ID NO: 14127 - RNA, 19 nt, Artificial Sequence
  Description of Artificial Sequence: Synthetic oligonucleotide
uaggauaaaacccacuacu

SEQ ID NO: 14128 - RNA, 19 nt, Artificial Sequence
  Description of Artificial Sequence: Synthetic oligonucleotide
uuuggaaccagcucaagug

SEQ ID NO: 14129 - RNA, 19 nt, Artificial Sequence
  Description of Artificial Sequence: Synthetic oligonucleotide
aauuuaccaagugaacuac

SEQ ID NO: 14130 - RNA, 19 nt, Artificial Sequence
  Description of Artificial Sequence: Synthetic oligonucleotide
ugagucacuaucuuggucu

SEQ ID NO: 14131 - RNA, 19 nt, Artificial Sequence
  Description of Artificial Sequence: Synthetic oligonucleotide
aacuugauuugcuucaaca

SEQ ID NO: 14132 - RNA, 19 nt, Artificial Sequence
  Description of Artificial Sequence: Synthetic oligonucleotide
uguauagauucuuuguuca

SEQ ID NO: 14133 - RNA, 19 nt, Artificial Sequence
  Description of Artificial Sequence: Synthetic oligonucleotide
uuucaagaguuguagaucu

SEQ ID NO: 14134 - RNA, 19 nt, Artificial Sequence
  Description of Artificial Sequence: Synthetic oligonucleotide
aacuugcuuaaauauggag

SEQ ID NO: 14135 - RNA, 19 nt, Artificial Sequence
  Description of Artificial Sequence: Synthetic oligonucleotide
uuuaacccaaacaugacua

SEQ ID NO: 14136 - RNA, 19 nt, Artificial Sequence
  Description of Artificial Sequence: Synthetic oligonucleotide
aacaucaaucccuuucaag

SEQ ID NO: 14137 - RNA, 19 nt, Artificial Sequence
  Description of Artificial Sequence: Synthetic oligonucleotide
caacugagcaguuuaagcc

SEQ ID NO: 14138 - RNA, 19 nt, Artificial Sequence
  Description of Artificial Sequence: Synthetic oligonucleotide
uuuauuacaguuugccgca

SEQ ID NO: 14139 - RNA, 19 nt, Artificial Sequence
  Description of Artificial Sequence: Synthetic oligonucleotide
aaaagcgagguauaaacua

SEQ ID NO: 14140 - RNA, 19 nt, Artificial Sequence
  Description of Artificial Sequence: Synthetic oligonucleotide
uguggaaucccaaauuaca

SEQ ID NO: 14141 - RNA, 19 nt, Artificial Sequence
  Description of Artificial Sequence: Synthetic oligonucleotide
uagguacuaaguauguucc

SEQ ID NO: 14142 - RNA, 19 nt, Artificial Sequence
  Description of Artificial Sequence: Synthetic oligonucleotide
aaacauuagauuauugccu

SEQ ID NO: 14143 - RNA, 19 nt, Artificial Sequence
  Description of Artificial Sequence: Synthetic oligonucleotide
uucgagcaaauaaugauac

SEQ ID NO: 14144 - RNA, 19 nt, Artificial Sequence
  Description of Artificial Sequence: Synthetic oligonucleotide
aacccuaugcagugcaugg

SEQ ID NO: 14145 - RNA, 19 nt, Artificial Sequence
  Description of Artificial Sequence: Synthetic oligonucleotide
uuuauccggaacaauccag

SEQ ID NO: 14146 - RNA, 19 nt, Artificial Sequence
  Description of Artificial Sequence: Synthetic oligonucleotide
auaugcaaucugcugggcc

SEQ ID NO: 14147 - RNA, 19 nt, Artificial Sequence
  Description of Artificial Sequence: Synthetic oligonucleotide
agaacugcaauucuugagu

SEQ ID NO: 14148 - RNA, 19 nt, Artificial Sequence
  Description of Artificial Sequence: Synthetic oligonucleotide
aaaguaccggaaacuaugc

SEQ ID NO: 14149 - RNA, 19 nt, Artificial Sequence
  Description of Artificial Sequence: Synthetic oligonucleotide
uuacuagaauacuuuuagg

SEQ ID NO: 14150 - RNA, 19 nt, Artificial Sequence
  Description of Artificial Sequence: Synthetic oligonucleotide
aaauaaugauacuuaguuu

SEQ ID NO: 14151 - RNA, 19 nt, Artificial Sequence
  Description of Artificial Sequence: Synthetic oligonucleotide
uauuacauucaauaccccu

SEQ ID NO: 14152 - RNA, 19 nt, Artificial Sequence
  Description of Artificial Sequence: Synthetic oligonucleotide
ucuugaacaggcuuuaaau

SEQ ID NO: 14153 - RNA, 19 nt, Artificial Sequence
  Description of Artificial Sequence: Synthetic oligonucleotide
acaggugacaaauggauca

SEQ ID NO: 14154 - RNA, 19 nt, Artificial Sequence
  Description of Artificial Sequence: Synthetic oligonucleotide
agauccauauuugagucac

SEQ ID NO: 14155 - RNA, 19 nt, Artificial Sequence
  Description of Artificial Sequence: Synthetic oligonucleotide
aaauggucgauguuucaca

SEQ ID NO: 14156 - RNA, 19 nt, Artificial Sequence
  Description of Artificial Sequence: Synthetic oligonucleotide
uaauugaccaacuggugga

SEQ ID NO: 14157 - RNA, 19 nt, Artificial Sequence
  Description of Artificial Sequence: Synthetic oligonucleotide
uuuaugguuggcagccugg

SEQ ID NO: 14158 - RNA, 19 nt, Artificial Sequence
  Description of Artificial Sequence: Synthetic oligonucleotide
uauuguagguacuaaguau

SEQ ID NO: 14159 - RNA, 19 nt, Artificial Sequence
  Description of Artificial Sequence: Synthetic oligonucleotide
ucccaaauuacacauuuuc

SEQ ID NO: 14160 - RNA, 19 nt, Artificial Sequence
  Description of Artificial Sequence: Synthetic oligonucleotide
acuagaauacuuuuaggau

SEQ ID NO: 14161 - RNA, 19 nt, Artificial Sequence
  Description of Artificial Sequence: Synthetic oligonucleotide
acuaguacaccauuagaga

SEQ ID NO: 14162 - RNA, 19 nt, Artificial Sequence
  Description of Artificial Sequence: Synthetic oligonucleotide
guagacgacuauuugcagg

SEQ ID NO: 14163 - RNA, 19 nt, Artificial Sequence
  Description of Artificial Sequence: Synthetic oligonucleotide
uuauuguagguacuaagua

SEQ ID NO: 14164 - RNA, 19 nt, Artificial Sequence
  Description of Artificial Sequence: Synthetic oligonucleotide
aaagugaucuuagcgcagg

SEQ ID NO: 14165 - RNA, 19 nt, Artificial Sequence
  Description of Artificial Sequence: Synthetic oligonucleotide
cacauggcgacccugaggc

SEQ ID NO: 14166 - RNA, 19 nt, Artificial Sequence
  Description of Artificial Sequence: Synthetic oligonucleotide
gagguagacgacuauuugc

SEQ ID NO: 14167 - RNA, 19 nt, Artificial Sequence
  Description of Artificial Sequence: Synthetic oligonucleotide
cuaugcuuguuuaugguug

SEQ ID NO: 14168 - RNA, 19 nt, Artificial Sequence
  Description of Artificial Sequence: Synthetic oligonucleotide
gaaaaugcuagccccagca

SEQ ID NO: 14169 - RNA, 19 nt, Artificial Sequence
  Description of Artificial Sequence: Synthetic oligonucleotide
uguuacaaguugcaugugu

SEQ ID NO: 14170 - RNA, 19 nt, Artificial Sequence
  Description of Artificial Sequence: Synthetic oligonucleotide
gaaaccucgaaacaaucuc

SEQ ID NO: 14171 - RNA, 19 nt, Artificial Sequence
  Description of Artificial Sequence: Synthetic oligonucleotide
ucuuagcgcaggcaggagg

SEQ ID NO: 14172 - RNA, 19 nt, Artificial Sequence
  Description of Artificial Sequence: Synthetic oligonucleotide
ggcaguauaaaauucuggc

SEQ ID NO: 14173 - RNA, 19 nt, Artificial Sequence
  Description of Artificial Sequence: Synthetic oligonucleotide
ucagcuccuaacuugcaag

SEQ ID NO: 14174 - RNA, 19 nt, Artificial Sequence
  Description of Artificial Sequence: Synthetic oligonucleotide
uccugagauacccaguucu

SEQ ID NO: 14175 - RNA, 19 nt, Artificial Sequence
  Description of Artificial Sequence: Synthetic oligonucleotide
ugauuuuagcucugaauac

SEQ ID NO: 14176 - RNA, 19 nt, Artificial Sequence
  Description of Artificial Sequence: Synthetic oligonucleotide
ugguccucgaaccaguggc

SEQ ID NO: 14177 - RNA, 19 nt, Artificial Sequence
  Description of Artificial Sequence: Synthetic oligonucleotide
uagcguuccacccagacua

SEQ ID NO: 14178 - RNA, 19 nt, Artificial Sequence
  Description of Artificial Sequence: Synthetic oligonucleotide
augacuaguacaccauuag

SEQ ID NO: 14179 - RNA, 19 nt, Artificial Sequence
  Description of Artificial Sequence: Synthetic oligonucleotide
caaaacgagaggacaaagc

SEQ ID NO: 14180 - RNA, 19 nt, Artificial Sequence
  Description of Artificial Sequence: Synthetic oligonucleotide
aagugaucuuagcgcaggc

SEQ ID NO: 14181 - RNA, 19 nt, Artificial Sequence
  Description of Artificial Sequence: Synthetic oligonucleotide
agauauuacuuuccaaaga

SEQ ID NO: 14182 - RNA, 19 nt, Artificial Sequence
  Description of Artificial Sequence: Synthetic oligonucleotide
gaauuuugagaguucucug

SEQ ID NO: 14183 - RNA, 19 nt, Artificial Sequence
  Description of Artificial Sequence: Synthetic oligonucleotide
ugggugaaggaaaugcgcc

SEQ ID NO: 14184 - RNA, 19 nt, Artificial Sequence
  Description of Artificial Sequence: Synthetic oligonucleotide
ucgaaacaaucucacagcu

SEQ ID NO: 14185 - RNA, 19 nt, Artificial Sequence
  Description of Artificial Sequence: Synthetic oligonucleotide
cucgaaacaaucucacagc

SEQ ID NO: 14186 - RNA, 19 nt, Artificial Sequence
  Description of Artificial Sequence: Synthetic oligonucleotide
aacugaugcauuaaagccu

SEQ ID NO: 14187 - RNA, 19 nt, Artificial Sequence
  Description of Artificial Sequence: Synthetic oligonucleotide
uuuccgacggacauguggu

SEQ ID NO: 14188 - RNA, 19 nt, Artificial Sequence
  Description of Artificial Sequence: Synthetic oligonucleotide
uuuaugguuuacccuguca

SEQ ID NO: 14189 - RNA, 19 nt, Artificial Sequence
  Description of Artificial Sequence: Synthetic oligonucleotide
uagacgacuauuugcaggu

SEQ ID NO: 14190 - RNA, 19 nt, Artificial Sequence
  Description of Artificial Sequence: Synthetic oligonucleotide
gugaucuuagcgcaggcag

SEQ ID NO: 14191 - RNA, 19 nt, Artificial Sequence
  Description of Artificial Sequence: Synthetic oligonucleotide
ugguuucgagcaaauaaug

SEQ ID NO: 14192 - RNA, 19 nt, Artificial Sequence
  Description of Artificial Sequence: Synthetic oligonucleotide
aauugaccacauauauuac

SEQ ID NO: 14193 - RNA, 19 nt, Artificial Sequence
  Description of Artificial Sequence: Synthetic oligonucleotide
uuaacccaaacaugacuag

SEQ ID NO: 14194 - RNA, 19 nt, Artificial Sequence
  Description of Artificial Sequence: Synthetic oligonucleotide
ccauauguuaucuuucugg

SEQ ID NO: 14195 - RNA, 19 nt, Artificial Sequence
  Description of Artificial Sequence: Synthetic oligonucleotide
cucugugaggaauuaagac

SEQ ID NO: 14196 - RNA, 19 nt, Artificial Sequence
  Description of Artificial Sequence: Synthetic oligonucleotide
uuauccggaacaauccagu

SEQ ID NO: 14197 - RNA, 19 nt, Artificial Sequence
  Description of Artificial Sequence: Synthetic oligonucleotide
agugcuacuauuugcagua

SEQ ID NO: 14198 - RNA, 19 nt, Artificial Sequence
  Description of Artificial Sequence: Synthetic oligonucleotide
guuaaggacuccaugggag

SEQ ID NO: 14199 - RNA, 19 nt, Artificial Sequence
  Description of Artificial Sequence: Synthetic oligonucleotide
ucacaacuauuaauugacc

SEQ ID NO: 14200 - RNA, 19 nt, Artificial Sequence
  Description of Artificial Sequence: Synthetic oligonucleotide
auagguauugggcgccuac

SEQ ID NO: 14201 - RNA, 19 nt, Artificial Sequence
  Description of Artificial Sequence: Synthetic oligonucleotide
ugacuaguacaccauuaga

SEQ ID NO: 14202 - RNA, 19 nt, Artificial Sequence
  Description of Artificial Sequence: Synthetic oligonucleotide
ucaguuauuuguagccucu

SEQ ID NO: 14203 - RNA, 19 nt, Artificial Sequence
  Description of Artificial Sequence: Synthetic oligonucleotide
cagggcgucagcauaauac

SEQ ID NO: 14204 - RNA, 19 nt, Artificial Sequence
  Description of Artificial Sequence: Synthetic oligonucleotide
ucaagaguuguagaucuca

SEQ ID NO: 14205 - RNA, 19 nt, Artificial Sequence
  Description of Artificial Sequence: Synthetic oligonucleotide
agaacaagaguggcuauuc

SEQ ID NO: 14206 - RNA, 19 nt, Artificial Sequence
  Description of Artificial Sequence: Synthetic oligonucleotide
uacauguuaaaguggcuuc

SEQ ID NO: 14207 - RNA, 19 nt, Artificial Sequence
  Description of Artificial Sequence: Synthetic oligonucleotide
uggaaacauuagauuauug

SEQ ID NO: 14208 - RNA, 19 nt, Artificial Sequence
  Description of Artificial Sequence: Synthetic oligonucleotide
aguaagcccacccaacaca

SEQ ID NO: 14209 - RNA, 19 nt, Artificial Sequence
  Description of Artificial Sequence: Synthetic oligonucleotide
uacaguuugccgcaccaga

SEQ ID NO: 14210 - RNA, 19 nt, Artificial Sequence
  Description of Artificial Sequence: Synthetic oligonucleotide
aaaacccacuacuaauuuu

SEQ ID NO: 14211 - RNA, 19 nt, Artificial Sequence
  Description of Artificial Sequence: Synthetic oligonucleotide
gauccagauacccaauguc

SEQ ID NO: 14212 - RNA, 19 nt, Artificial Sequence
  Description of Artificial Sequence: Synthetic oligonucleotide
ccaaacaugacuaguacac

SEQ ID NO: 14213 - RNA, 19 nt, Artificial Sequence
  Description of Artificial Sequence: Synthetic oligonucleotide
caaauaaugauacuuaguu

SEQ ID NO: 14214 - RNA, 19 nt, Artificial Sequence
  Description of Artificial Sequence: Synthetic oligonucleotide
aguaccggaaacuaugcuu

SEQ ID NO: 14215 - RNA, 19 nt, Artificial Sequence
  Description of Artificial Sequence: Synthetic oligonucleotide
cuaagggacaacugcugcc

SEQ ID NO: 14216 - RNA, 19 nt, Artificial Sequence
  Description of Artificial Sequence: Synthetic oligonucleotide
aaacgagaggacaaagcug

SEQ ID NO: 14217 - RNA, 19 nt, Artificial Sequence
  Description of Artificial Sequence: Synthetic oligonucleotide
ucgagugcaaugaggugag

SEQ ID NO: 14218 - RNA, 19 nt, Artificial Sequence
  Description of Artificial Sequence: Synthetic oligonucleotide
uuaaggacuccaugggaga

SEQ ID NO: 14219 - RNA, 19 nt, Artificial Sequence
  Description of Artificial Sequence: Synthetic oligonucleotide
aaucgagugcaaugaggug

SEQ ID NO: 14220 - RNA, 19 nt, Artificial Sequence
  Description of Artificial Sequence: Synthetic oligonucleotide
cagacuacagauacucuug

SEQ ID NO: 14221 - RNA, 19 nt, Artificial Sequence
  Description of Artificial Sequence: Synthetic oligonucleotide
cacaacuauuaauugacca

SEQ ID NO: 14222 - RNA, 19 nt, Artificial Sequence
  Description of Artificial Sequence: Synthetic oligonucleotide
caguuaaggacuccauggg

SEQ ID NO: 14223 - RNA, 19 nt, Artificial Sequence
  Description of Artificial Sequence: Synthetic oligonucleotide
auuagauuauugccugacu

SEQ ID NO: 14224 - RNA, 19 nt, Artificial Sequence
  Description of Artificial Sequence: Synthetic oligonucleotide
acgaaagcuauuuccguca

SEQ ID NO: 14225 - RNA, 19 nt, Artificial Sequence
  Description of Artificial Sequence: Synthetic oligonucleotide
aguuaaggacuccauggga

SEQ ID NO: 14226 - RNA, 19 nt, Artificial Sequence
  Description of Artificial Sequence: Synthetic oligonucleotide
guaugguagaaucgagugc

SEQ ID NO: 14227 - RNA, 19 nt, Artificial Sequence
  Description of Artificial Sequence: Synthetic oligonucleotide
accccauaguaucaccugg

SEQ ID NO: 14228 - RNA, 19 nt, Artificial Sequence
  Description of Artificial Sequence: Synthetic oligonucleotide
aaaccucgaaacaaucuca

SEQ ID NO: 14229 - RNA, 19 nt, Artificial Sequence
  Description of Artificial Sequence: Synthetic oligonucleotide
ccauuuaugguuuacccug

SEQ ID NO: 14230 - RNA, 19 nt, Artificial Sequence
  Description of Artificial Sequence: Synthetic oligonucleotide
aucgagugcaaugagguga

SEQ ID NO: 14231 - RNA, 19 nt, Artificial Sequence
  Description of Artificial Sequence: Synthetic oligonucleotide
uuauuccgguauuuguuga

SEQ ID NO: 14232 - RNA, 19 nt, Artificial Sequence
  Description of Artificial Sequence: Synthetic oligonucleotide
agaagugcuacuauuugca

SEQ ID NO: 14233 - RNA, 19 nt, Artificial Sequence
  Description of Artificial Sequence: Synthetic oligonucleotide
guuuagaauaacgcuggcc

SEQ ID NO: 14234 - RNA, 19 nt, Artificial Sequence
  Description of Artificial Sequence: Synthetic oligonucleotide
gaaagcuauuuccgucagg

SEQ ID NO: 14235 - RNA, 19 nt, Artificial Sequence
  Description of Artificial Sequence: Synthetic oligonucleotide
agauccagauacccaaugu

SEQ ID NO: 14236 - RNA, 19 nt, Artificial Sequence
  Description of Artificial Sequence: Synthetic oligonucleotide
guaccggaaacuaugcuug

SEQ ID NO: 14237 - RNA, 19 nt, Artificial Sequence
  Description of Artificial Sequence: Synthetic oligonucleotide
uacuaaguauguuccucug

SEQ ID NO: 14238 - RNA, 19 nt, Artificial Sequence
  Description of Artificial Sequence: Synthetic oligonucleotide
aaacccuaugcagugcaug

SEQ ID NO: 14239 - RNA, 19 nt, Artificial Sequence
  Description of Artificial Sequence: Synthetic oligonucleotide
aaguaccggaaacuaugcu

SEQ ID NO: 14240 - RNA, 19 nt, Artificial Sequence
  Description of Artificial Sequence: Synthetic oligonucleotide
caucaaucccuuucaaguc

SEQ ID NO: 14241 - RNA, 19 nt, Artificial Sequence
  Description of Artificial Sequence: Synthetic oligonucleotide
gagaaggaaccacgaaagc

SEQ ID NO: 14242 - RNA, 19 nt, Artificial Sequence
  Description of Artificial Sequence: Synthetic oligonucleotide
guaugcaaggcacugugga

SEQ ID NO: 14243 - RNA, 19 nt, Artificial Sequence
  Description of Artificial Sequence: Synthetic oligonucleotide
aagcgagguauaaacuauc

SEQ ID NO: 14244 - RNA, 19 nt, Artificial Sequence
  Description of Artificial Sequence: Synthetic oligonucleotide
gaaaguuuauggcuaaaau

SEQ ID NO: 14245 - RNA, 19 nt, Artificial Sequence
  Description of Artificial Sequence: Synthetic oligonucleotide
uauccggaacaauccagug

SEQ ID NO: 14246 - RNA, 19 nt, Artificial Sequence
  Description of Artificial Sequence: Synthetic oligonucleotide
gucccguccaaccagggug

SEQ ID NO: 14247 - RNA, 19 nt, Artificial Sequence
  Description of Artificial Sequence: Synthetic oligonucleotide
aaugcgccaagcaacugca

SEQ ID NO: 14248 - RNA, 19 nt, Artificial Sequence
  Description of Artificial Sequence: Synthetic oligonucleotide
cgagguauaaacuaucuuc

SEQ ID NO: 14249 - RNA, 19 nt, Artificial Sequence
  Description of Artificial Sequence: Synthetic oligonucleotide
caauauaccgaaauucaua

SEQ ID NO: 14250 - RNA, 19 nt, Artificial Sequence
  Description of Artificial Sequence: Synthetic oligonucleotide
ugacacuaccaaugcaugu

SEQ ID NO: 14251 - RNA, 19 nt, Artificial Sequence
  Description of Artificial Sequence: Synthetic oligonucleotide
acuaggauuauuguaggua

SEQ ID NO: 14252 - RNA, 19 nt, Artificial Sequence
  Description of Artificial Sequence: Synthetic oligonucleotide
uuacccucauggacgcagg

SEQ ID NO: 14253 - RNA, 19 nt, Artificial Sequence
  Description of Artificial Sequence: Synthetic oligonucleotide
ugcuacuauuugcaguagu

SEQ ID NO: 14254 - RNA, 19 nt, Artificial Sequence
  Description of Artificial Sequence: Synthetic oligonucleotide
gcaacugagcaguuuaagc

SEQ ID NO: 14255 - RNA, 19 nt, Artificial Sequence
  Description of Artificial Sequence: Synthetic oligonucleotide
caaauagguauugggcgcc

SEQ ID NO: 14256 - RNA, 19 nt, Artificial Sequence
  Description of Artificial Sequence: Synthetic oligonucleotide
auuuaauugaccacauaua

SEQ ID NO: 14257 - RNA, 19 nt, Artificial Sequence
  Description of Artificial Sequence: Synthetic oligonucleotide
auauaccgaaauucauaca

SEQ ID NO: 14258 - RNA, 19 nt, Artificial Sequence
  Description of Artificial Sequence: Synthetic oligonucleotide
gcuuacaauccguaacagg

SEQ ID NO: 14259 - RNA, 19 nt, Artificial Sequence
  Description of Artificial Sequence: Synthetic oligonucleotide
aucuugaacaggcuuuaaa

SEQ ID NO: 14260 - RNA, 19 nt, Artificial Sequence
  Description of Artificial Sequence: Synthetic oligonucleotide
agacuacagauacucuugu

SEQ ID NO: 14261 - RNA, 19 nt, Artificial Sequence
  Description of Artificial Sequence: Synthetic oligonucleotide
agguagacgacuauuugca

SEQ ID NO: 14262 - RNA, 19 nt, Artificial Sequence
  Description of Artificial Sequence: Synthetic oligonucleotide
cacgaaagcuauuuccguc

SEQ ID NO: 14263 - RNA, 19 nt, Artificial Sequence
  Description of Artificial Sequence: Synthetic oligonucleotide
gaaucgagugcaaugaggu

SEQ ID NO: 14264 - RNA, 19 nt, Artificial Sequence
  Description of Artificial Sequence: Synthetic oligonucleotide
acauuccccggaccaacac

SEQ ID NO: 14265 - RNA, 19 nt, Artificial Sequence
  Description of Artificial Sequence: Synthetic oligonucleotide
gaagauuacagggacuucu

SEQ ID NO: 14266 - RNA, 19 nt, Artificial Sequence
  Description of Artificial Sequence: Synthetic oligonucleotide
caaagugaucuuagcgcag

SEQ ID NO: 14267 - RNA, 19 nt, Artificial Sequence
  Description of Artificial Sequence: Synthetic oligonucleotide
uacuaggauuauuguaggu

SEQ ID NO: 14268 - RNA, 19 nt, Artificial Sequence
  Description of Artificial Sequence: Synthetic oligonucleotide
aguggcuauucugagaaaa

SEQ ID NO: 14269 - RNA, 19 nt, Artificial Sequence
  Description of Artificial Sequence: Synthetic oligonucleotide
uggcuaaaaugcuugucau

SEQ ID NO: 14270 - RNA, 19 nt, Artificial Sequence
  Description of Artificial Sequence: Synthetic oligonucleotide
acuaucuuggucugagaua

SEQ ID NO: 14271 - RNA, 19 nt, Artificial Sequence
  Description of Artificial Sequence: Synthetic oligonucleotide
uccccggaccaacacagug

SEQ ID NO: 14272 - RNA, 19 nt, Artificial Sequence
  Description of Artificial Sequence: Synthetic oligonucleotide
aaguugcauguguauguau

SEQ ID NO: 14273 - RNA, 19 nt, Artificial Sequence
  Description of Artificial Sequence: Synthetic oligonucleotide
agacaaaguaccggaaacu

SEQ ID NO: 14274 - RNA, 19 nt, Artificial Sequence
  Description of Artificial Sequence: Synthetic oligonucleotide
agaaagcuggugguccucg

SEQ ID NO: 14275 - RNA, 19 nt, Artificial Sequence
  Description of Artificial Sequence: Synthetic oligonucleotide
caguggaugccaaugguca

SEQ ID NO: 14276 - RNA, 19 nt, Artificial Sequence
  Description of Artificial Sequence: Synthetic oligonucleotide
ggugauucaacagugagcu

SEQ ID NO: 14277 - RNA, 19 nt, Artificial Sequence
  Description of Artificial Sequence: Synthetic oligonucleotide
auagcguuccacccagacu

SEQ ID NO: 14278 - RNA, 19 nt, Artificial Sequence
  Description of Artificial Sequence: Synthetic oligonucleotide
aauaugguuucgagcaaau

SEQ ID NO: 14279 - RNA, 19 nt, Artificial Sequence
  Description of Artificial Sequence: Synthetic oligonucleotide
agacauuccccggaccaac

SEQ ID NO: 14280 - RNA, 19 nt, Artificial Sequence
  Description of Artificial Sequence: Synthetic oligonucleotide
acacuguggggacaaagaa

SEQ ID NO: 14281 - RNA, 19 nt, Artificial Sequence
  Description of Artificial Sequence: Synthetic oligonucleotide
cugaacauuucuggaagac

SEQ ID NO: 14282 - RNA, 19 nt, Artificial Sequence
  Description of Artificial Sequence: Synthetic oligonucleotide
aacaugacuaguacaccau

SEQ ID NO: 14283 - RNA, 19 nt, Artificial Sequence
  Description of Artificial Sequence: Synthetic oligonucleotide
cauagcguuccacccagac

SEQ ID NO: 14284 - RNA, 19 nt, Artificial Sequence
  Description of Artificial Sequence: Synthetic oligonucleotide
aguuuauggcuaaaaugcu

SEQ ID NO: 14285 - RNA, 19 nt, Artificial Sequence
  Description of Artificial Sequence: Synthetic oligonucleotide
ucaggacuaucuugcuuug

SEQ ID NO: 14286 - RNA, 19 nt, Artificial Sequence
  Description of Artificial Sequence: Synthetic oligonucleotide
cagcuccuaacuugcaagc

SEQ ID NO: 14287 - RNA, 19 nt, Artificial Sequence
  Description of Artificial Sequence: Synthetic oligonucleotide
uggaaccagcucaaguguc

SEQ ID NO: 14288 - RNA, 19 nt, Artificial Sequence
  Description of Artificial Sequence: Synthetic oligonucleotide
uaagaacggcucuguaccu

SEQ ID NO: 14289 - RNA, 19 nt, Artificial Sequence
  Description of Artificial Sequence: Synthetic oligonucleotide
gucucauucaccagacuac

SEQ ID NO: 14290 - RNA, 19 nt, Artificial Sequence
  Description of Artificial Sequence: Synthetic oligonucleotide
acauguuaaaguggcuucu

SEQ ID NO: 14291 - RNA, 19 nt, Artificial Sequence
  Description of Artificial Sequence: Synthetic oligonucleotide
ucgagcaaauaaugauacu

SEQ ID NO: 14292 - RNA, 19 nt, Artificial Sequence
  Description of Artificial Sequence: Synthetic oligonucleotide
uacuugaccucuugcucac

SEQ ID NO: 14293 - RNA, 19 nt, Artificial Sequence
  Description of Artificial Sequence: Synthetic oligonucleotide
ggcaauauaccgaaauuca

SEQ ID NO: 14294 - RNA, 19 nt, Artificial Sequence
  Description of Artificial Sequence: Synthetic oligonucleotide
cuucauauuuacaucuccu

SEQ ID NO: 14295 - RNA, 19 nt, Artificial Sequence
  Description of Artificial Sequence: Synthetic oligonucleotide
aucucagagaagugcuacu

SEQ ID NO: 14296 - RNA, 19 nt, Artificial Sequence
  Description of Artificial Sequence: Synthetic oligonucleotide
gacuacagauacucuuguc

SEQ ID NO: 14297 - RNA, 19 nt, Artificial Sequence
  Description of Artificial Sequence: Synthetic oligonucleotide
cagacuacaaggagaggca

SEQ ID NO: 14298 - RNA, 19 nt, Artificial Sequence
  Description of Artificial Sequence: Synthetic oligonucleotide
agauucuauucaaagugau

SEQ ID NO: 14299 - RNA, 19 nt, Artificial Sequence
  Description of Artificial Sequence: Synthetic oligonucleotide
aguuauaggggugcaucca

SEQ ID NO: 14300 - RNA, 19 nt, Artificial Sequence
  Description of Artificial Sequence: Synthetic oligonucleotide
uucaagaguuguagaucuc

SEQ ID NO: 14301 - RNA, 19 nt, Artificial Sequence
  Description of Artificial Sequence: Synthetic oligonucleotide
uuccagacauuccccggac

SEQ ID NO: 14302 - RNA, 19 nt, Artificial Sequence
  Description of Artificial Sequence: Synthetic oligonucleotide
cugguggacacgugucccg

SEQ ID NO: 14303 - RNA, 19 nt, Artificial Sequence
  Description of Artificial Sequence: Synthetic oligonucleotide
gcaagguccauucaucaga

SEQ ID NO: 14304 - RNA, 19 nt, Artificial Sequence
  Description of Artificial Sequence: Synthetic oligonucleotide
guuauaggggugcauccaa

SEQ ID NO: 14305 - RNA, 19 nt, Artificial Sequence
  Description of Artificial Sequence: Synthetic oligonucleotide
accccauauguuaucuuuc

SEQ ID NO: 14306 - RNA, 19 nt, Artificial Sequence
  Description of Artificial Sequence: Synthetic oligonucleotide
aaaaggcgggcuguuugga

SEQ ID NO: 14307 - RNA, 19 nt, Artificial Sequence
  Description of Artificial Sequence: Synthetic oligonucleotide
ggagguagacgacuauuug

SEQ ID NO: 14308 - RNA, 19 nt, Artificial Sequence
  Description of Artificial Sequence: Synthetic oligonucleotide
aagaucccaucuuggcaau

SEQ ID NO: 14309 - RNA, 19 nt, Artificial Sequence
  Description of Artificial Sequence: Synthetic oligonucleotide
guacuaaguauguuccucu

SEQ ID NO: 14310 - RNA, 19 nt, Artificial Sequence
  Description of Artificial Sequence: Synthetic oligonucleotide
gacacuaccaaugcaugua

SEQ ID NO: 14311 - RNA, 19 nt, Artificial Sequence
  Description of Artificial Sequence: Synthetic oligonucleotide
acccuaugcagugcauggc

SEQ ID NO: 14312 - RNA, 19 nt, Artificial Sequence
  Description of Artificial Sequence: Synthetic oligonucleotide
guugacacuaccaaugcau

SEQ ID NO: 14313 - RNA, 19 nt, Artificial Sequence
  Description of Artificial Sequence: Synthetic oligonucleotide
cuucaggaaauggucgaug

SEQ ID NO: 14314 - RNA, 19 nt, Artificial Sequence
  Description of Artificial Sequence: Synthetic oligonucleotide
gugucaaaaggacgacaug

SEQ ID NO: 14315 - RNA, 19 nt, Artificial Sequence
  Description of Artificial Sequence: Synthetic oligonucleotide
acugaugcauuaaagccuu

SEQ ID NO: 14316 - RNA, 19 nt, Artificial Sequence
  Description of Artificial Sequence: Synthetic oligonucleotide
aaauagguauugggcgccu

SEQ ID NO: 14317 - RNA, 19 nt, Artificial Sequence
  Description of Artificial Sequence: Synthetic oligonucleotide
uuggaauuccugggcagga

SEQ ID NO: 14318 - RNA, 19 nt, Artificial Sequence
  Description of Artificial Sequence: Synthetic oligonucleotide
acgugucccguccaaccag

SEQ ID NO: 14319 - RNA, 19 nt, Artificial Sequence
  Description of Artificial Sequence: Synthetic oligonucleotide
acaugacuaguacaccauu

SEQ ID NO: 14320 - RNA, 19 nt, Artificial Sequence
  Description of Artificial Sequence: Synthetic oligonucleotide
caugacuaguacaccauua

SEQ ID NO: 14321 - RNA, 19 nt, Artificial Sequence
  Description of Artificial Sequence: Synthetic oligonucleotide
gacuccaugggagaaggaa

SEQ ID NO: 14322 - RNA, 19 nt, Artificial Sequence
  Description of Artificial Sequence: Synthetic oligonucleotide
ggggcuuacaauccguaac

SEQ ID NO: 14323 - RNA, 19 nt, Artificial Sequence
  Description of Artificial Sequence: Synthetic oligonucleotide
guggacacgugucccgucc

SEQ ID NO: 14324 - RNA, 19 nt, Artificial Sequence
  Description of Artificial Sequence: Synthetic oligonucleotide
augcuuguuuaugguuggc

SEQ ID NO: 14325 - RNA, 19 nt, Artificial Sequence
  Description of Artificial Sequence: Synthetic oligonucleotide
cuaucuuggucugagauau

SEQ ID NO: 14326 - RNA, 19 nt, Artificial Sequence
  Description of Artificial Sequence: Synthetic oligonucleotide
gguagacgacuauuugcag

SEQ ID NO: 14327 - RNA, 19 nt, Artificial Sequence
  Description of Artificial Sequence: Synthetic oligonucleotide
gguacuaaguauguuccuc

SEQ ID NO: 14328 - RNA, 19 nt, Artificial Sequence
  Description of Artificial Sequence: Synthetic oligonucleotide
uaaggacuccaugggagaa

SEQ ID NO: 14329 - RNA, 19 nt, Artificial Sequence
  Description of Artificial Sequence: Synthetic oligonucleotide
cuauucugagaaaacccua

SEQ ID NO: 14330 - RNA, 19 nt, Artificial Sequence
  Description of Artificial Sequence: Synthetic oligonucleotide
agugaucuuagcgcaggca

SEQ ID NO: 14331 - RNA, 19 nt, Artificial Sequence
  Description of Artificial Sequence: Synthetic oligonucleotide
agcgagguauaaacuaucu

SEQ ID NO: 14332 - RNA, 19 nt, Artificial Sequence
  Description of Artificial Sequence: Synthetic oligonucleotide
accucgaaacaaucucaca

SEQ ID NO: 14333 - RNA, 19 nt, Artificial Sequence
  Description of Artificial Sequence: Synthetic oligonucleotide
uuuccgucagggcgucagc

SEQ ID NO: 14334 - RNA, 19 nt, Artificial Sequence
  Description of Artificial Sequence: Synthetic oligonucleotide
uuccugagauacccaguuc

SEQ ID NO: 14335 - RNA, 19 nt, Artificial Sequence
  Description of Artificial Sequence: Synthetic oligonucleotide
ccacccagacuacagauac

SEQ ID NO: 14336 - RNA, 19 nt, Artificial Sequence
  Description of Artificial Sequence: Synthetic oligonucleotide
cacgguuguucucuuacca

SEQ ID NO: 14337 - RNA, 19 nt, Artificial Sequence
  Description of Artificial Sequence: Synthetic oligonucleotide
uucaugccugucuucuaau

SEQ ID NO: 14338 - RNA, 19 nt, Artificial Sequence
  Description of Artificial Sequence: Synthetic oligonucleotide
uguagguacuaaguauguu

SEQ ID NO: 14339 - RNA, 19 nt, Artificial Sequence
  Description of Artificial Sequence: Synthetic oligonucleotide
aggauaaaacccacuacua

SEQ ID NO: 14340 - RNA, 19 nt, Artificial Sequence
  Description of Artificial Sequence: Synthetic oligonucleotide
ucacuaucuuggucugaga

SEQ ID NO: 14341 - RNA, 19 nt, Artificial Sequence
  Description of Artificial Sequence: Synthetic oligonucleotide
guuugccgcaccagaaagc

SEQ ID NO: 14342 - RNA, 19 nt, Artificial Sequence
  Description of Artificial Sequence: Synthetic oligonucleotide
ugugcacaauaggacuucu

SEQ ID NO: 14343 - RNA, 19 nt, Artificial Sequence
  Description of Artificial Sequence: Synthetic oligonucleotide
caacuugcuuaaauaugga

SEQ ID NO: 14344 - RNA, 19 nt, Artificial Sequence
  Description of Artificial Sequence: Synthetic oligonucleotide
gguuucgagcaaauaauga

SEQ ID NO: 14345 - RNA, 19 nt, Artificial Sequence
  Description of Artificial Sequence: Synthetic oligonucleotide
ugaagauuacagggacuuc

SEQ ID NO: 14346 - RNA, 19 nt, Artificial Sequence
  Description of Artificial Sequence: Synthetic oligonucleotide
ggugucugcccacaucuac

SEQ ID NO: 14347 - RNA, 19 nt, Artificial Sequence
  Description of Artificial Sequence: Synthetic oligonucleotide
ggcgucagcauaauacagc

SEQ ID NO: 14348 - RNA, 19 nt, Artificial Sequence
  Description of Artificial Sequence: Synthetic oligonucleotide
ggucgagagacaucuaaaa

SEQ ID NO: 14349 - RNA, 19 nt, Artificial Sequence
  Description of Artificial Sequence: Synthetic oligonucleotide
accgaaauucauacaaauu

SEQ ID NO: 14350 - RNA, 19 nt, Artificial Sequence
  Description of Artificial Sequence: Synthetic oligonucleotide
cacagcaaggaaguacauc

SEQ ID NO: 14351 - RNA, 19 nt, Artificial Sequence
  Description of Artificial Sequence: Synthetic oligonucleotide
gaaaugcgccaagcaacug

SEQ ID NO: 14352 - RNA, 19 nt, Artificial Sequence
  Description of Artificial Sequence: Synthetic oligonucleotide
cugcuuauuccgguauuug

SEQ ID NO: 14353 - RNA, 19 nt, Artificial Sequence
  Description of Artificial Sequence: Synthetic oligonucleotide
uaccggaaacuaugcuugu

SEQ ID NO: 14354 - RNA, 19 nt, Artificial Sequence
  Description of Artificial Sequence: Synthetic oligonucleotide
ugaguccaaccuccugaaa

SEQ ID NO: 14355 - RNA, 19 nt, Artificial Sequence
  Description of Artificial Sequence: Synthetic oligonucleotide
ucgaaccaguggcuucaca

SEQ ID NO: 14356 - RNA, 19 nt, Artificial Sequence
  Description of Artificial Sequence: Synthetic oligonucleotide
acugcuuauuccgguauuu

SEQ ID NO: 14357 - RNA, 19 nt, Artificial Sequence
  Description of Artificial Sequence: Synthetic oligonucleotide
ugccaugagaguggugccu

SEQ ID NO: 14358 - RNA, 19 nt, Artificial Sequence
  Description of Artificial Sequence: Synthetic oligonucleotide
cuggauaaauaagcuggca

SEQ ID NO: 14359 - RNA, 19 nt, Artificial Sequence
  Description of Artificial Sequence: Synthetic oligonucleotide
cauacaccccauauguuau

SEQ ID NO: 14360 - RNA, 19 nt, Artificial Sequence
  Description of Artificial Sequence: Synthetic oligonucleotide
ucauagcguuccacccaga

SEQ ID NO: 14361 - RNA, 19 nt, Artificial Sequence
  Description of Artificial Sequence: Synthetic oligonucleotide
cauggacgcaggguuuggc

SEQ ID NO: 14362 - RNA, 19 nt, Artificial Sequence
  Description of Artificial Sequence: Synthetic oligonucleotide
aauagguauugggcgccua

SEQ ID NO: 14363 - RNA, 19 nt, Artificial Sequence
  Description of Artificial Sequence: Synthetic oligonucleotide
cauuccccggaccaacaca

SEQ ID NO: 14364 - RNA, 19 nt, Artificial Sequence
  Description of Artificial Sequence: Synthetic oligonucleotide
gccacgguuguucucuuac

SEQ ID NO: 14365 - RNA, 19 nt, Artificial Sequence
  Description of Artificial Sequence: Synthetic oligonucleotide
ucagggcgucagcauaaua

SEQ ID NO: 14366 - RNA, 19 nt, Artificial Sequence
  Description of Artificial Sequence: Synthetic oligonucleotide
agggguguguagcccuucu

SEQ ID NO: 14367 - RNA, 19 nt, Artificial Sequence
  Description of Artificial Sequence: Synthetic oligonucleotide
ggcuuacaauccguaacag

SEQ ID NO: 14368 - RNA, 19 nt, Artificial Sequence
  Description of Artificial Sequence: Synthetic oligonucleotide
gugccaaaaugaugaggga

SEQ ID NO: 14369 - RNA, 19 nt, Artificial Sequence
  Description of Artificial Sequence: Synthetic oligonucleotide
aguucucugucaggcaaaa

SEQ ID NO: 14370 - RNA, 19 nt, Artificial Sequence
  Description of Artificial Sequence: Synthetic oligonucleotide
gcaaaacccauuuaugguu

SEQ ID NO: 14371 - RNA, 19 nt, Artificial Sequence
  Description of Artificial Sequence: Synthetic oligonucleotide
ccaguuauaggggugcauc

SEQ ID NO: 14372 - RNA, 19 nt, Artificial Sequence
  Description of Artificial Sequence: Synthetic oligonucleotide
uccgucagggcgucagcau

SEQ ID NO: 14373 - RNA, 19 nt, Artificial Sequence
  Description of Artificial Sequence: Synthetic oligonucleotide
gaagaacaagaguggcuau

SEQ ID NO: 14374 - RNA, 19 nt, Artificial Sequence
  Description of Artificial Sequence: Synthetic oligonucleotide
auaugguuucgagcaaaua

SEQ ID NO: 14375 - RNA, 19 nt, Artificial Sequence
  Description of Artificial Sequence: Synthetic oligonucleotide
aggucgagagacaucuaaa

SEQ ID NO: 14376 - RNA, 19 nt, Artificial Sequence
  Description of Artificial Sequence: Synthetic oligonucleotide
gcuauucugagaaaacccu

SEQ ID NO: 14377 - RNA, 19 nt, Artificial Sequence
  Description of Artificial Sequence: Synthetic oligonucleotide
gacauuccccggaccaaca

SEQ ID NO: 14378 - RNA, 19 nt, Artificial Sequence
  Description of Artificial Sequence: Synthetic oligonucleotide
cccuagauuucaaacugca

SEQ ID NO: 14379 - RNA, 19 nt, Artificial Sequence
  Description of Artificial Sequence: Synthetic oligonucleotide
gaguuuacuucaucuuguu

SEQ ID NO: 14380 - RNA, 19 nt, Artificial Sequence
  Description of Artificial Sequence: Synthetic oligonucleotide
cucauucaccagacuacaa

SEQ ID NO: 14381 - RNA, 19 nt, Artificial Sequence
  Description of Artificial Sequence: Synthetic oligonucleotide
agcguuccacccagacuac

SEQ ID NO: 14382 - RNA, 19 nt, Artificial Sequence
  Description of Artificial Sequence: Synthetic oligonucleotide
ggcugugcacaauaggacu

SEQ ID NO: 14383 - RNA, 19 nt, Artificial Sequence
  Description of Artificial Sequence: Synthetic oligonucleotide
aucuuagcgcaggcaggag

SEQ ID NO: 14384 - RNA, 19 nt, Artificial Sequence
  Description of Artificial Sequence: Synthetic oligonucleotide
gugcuacuauuugcaguag

SEQ ID NO: 14385 - RNA, 19 nt, Artificial Sequence
  Description of Artificial Sequence: Synthetic oligonucleotide
gcaaauaaugauacuuagu

SEQ ID NO: 14386 - RNA, 19 nt, Artificial Sequence
  Description of Artificial Sequence: Synthetic oligonucleotide
cacgugucccguccaacca

SEQ ID NO: 14387 - RNA, 19 nt, Artificial Sequence
  Description of Artificial Sequence: Synthetic oligonucleotide
ccagacauuccccggacca

SEQ ID NO: 14388 - RNA, 19 nt, Artificial Sequence
  Description of Artificial Sequence: Synthetic oligonucleotide
agucacuaucuuggucuga

SEQ ID NO: 14389 - RNA, 19 nt, Artificial Sequence
  Description of Artificial Sequence: Synthetic oligonucleotide
gcgacccugaggcagcuuc

SEQ ID NO: 14390 - RNA, 19 nt, Artificial Sequence
  Description of Artificial Sequence: Synthetic oligonucleotide
ggaaccacgaaagcuauuu

SEQ ID NO: 14391 - RNA, 19 nt, Artificial Sequence
  Description of Artificial Sequence: Synthetic oligonucleotide
caaguugcauguguaugua

SEQ ID NO: 14392 - RNA, 19 nt, Artificial Sequence
  Description of Artificial Sequence: Synthetic oligonucleotide
cugagcaguuuaagccaca

SEQ ID NO: 14393 - RNA, 19 nt, Artificial Sequence
  Description of Artificial Sequence: Synthetic oligonucleotide
acauggcgacccugaggca

SEQ ID NO: 14394 - RNA, 19 nt, Artificial Sequence
  Description of Artificial Sequence: Synthetic oligonucleotide
ggaaaugcgccaagcaacu

SEQ ID NO: 14395 - RNA, 19 nt, Artificial Sequence
  Description of Artificial Sequence: Synthetic oligonucleotide
ccaguaagcccacccaaca

SEQ ID NO: 14396 - RNA, 19 nt, Artificial Sequence
  Description of Artificial Sequence: Synthetic oligonucleotide
gaguggcuauucugagaaa

SEQ ID NO: 14397 - RNA, 19 nt, Artificial Sequence
  Description of Artificial Sequence: Synthetic oligonucleotide
guaagcccacccaacacau

SEQ ID NO: 14398 - RNA, 19 nt, Artificial Sequence
  Description of Artificial Sequence: Synthetic oligonucleotide
guguuuacccaaaguuucu

SEQ ID NO: 14399 - RNA, 19 nt, Artificial Sequence
  Description of Artificial Sequence: Synthetic oligonucleotide
agugucaacuugagccuua

SEQ ID NO: 14400 - RNA, 19 nt, Artificial Sequence
  Description of Artificial Sequence: Synthetic oligonucleotide
cuuagggaaccaccacaua

SEQ ID NO: 14401 - RNA, 19 nt, Artificial Sequence
  Description of Artificial Sequence: Synthetic oligonucleotide
gcuauuuccgucagggcgu

SEQ ID NO: 14402 - RNA, 19 nt, Artificial Sequence
  Description of Artificial Sequence: Synthetic oligonucleotide
aucccaaauuacacauuuu

SEQ ID NO: 14403 - RNA, 19 nt, Artificial Sequence
  Description of Artificial Sequence: Synthetic oligonucleotide
cgugucccguccaaccagg

SEQ ID NO: 14404 - RNA, 19 nt, Artificial Sequence
  Description of Artificial Sequence: Synthetic oligonucleotide
ccauaguaucaccuggaaa

SEQ ID NO: 14405 - RNA, 19 nt, Artificial Sequence
  Description of Artificial Sequence: Synthetic oligonucleotide
accggaaacuaugcuuguu

SEQ ID NO: 14406 - RNA, 19 nt, Artificial Sequence
  Description of Artificial Sequence: Synthetic oligonucleotide
gcuggugguccucgaacca

SEQ ID NO: 14407 - RNA, 19 nt, Artificial Sequence
  Description of Artificial Sequence: Synthetic oligonucleotide
ccaugggagaaggaaccac

SEQ ID NO: 14408 - RNA, 19 nt, Artificial Sequence
  Description of Artificial Sequence: Synthetic oligonucleotide
uauuuccgucagggcguca

SEQ ID NO: 14409 - RNA, 19 nt, Artificial Sequence
  Description of Artificial Sequence: Synthetic oligonucleotide
cccauuuaugguuuacccu

SEQ ID NO: 14410 - RNA, 19 nt, Artificial Sequence
  Description of Artificial Sequence: Synthetic oligonucleotide
agccaagugcucggcggcu

SEQ ID NO: 14411 - RNA, 19 nt, Artificial Sequence
  Description of Artificial Sequence: Synthetic oligonucleotide
ccaagacaaaguaccggaa

SEQ ID NO: 14412 - RNA, 19 nt, Artificial Sequence
  Description of Artificial Sequence: Synthetic oligonucleotide
acgagaggacaaagcugca

SEQ ID NO: 14413 - RNA, 19 nt, Artificial Sequence
  Description of Artificial Sequence: Synthetic oligonucleotide
ccagacuacagauacucuu

SEQ ID NO: 14414 - RNA, 19 nt, Artificial Sequence
  Description of Artificial Sequence: Synthetic oligonucleotide
agacgacuauuugcagguu

SEQ ID NO: 14415 - RNA, 19 nt, Artificial Sequence
  Description of Artificial Sequence: Synthetic oligonucleotide
ccguaacagggucagggaa

SEQ ID NO: 14416 - RNA, 19 nt, Artificial Sequence
  Description of Artificial Sequence: Synthetic oligonucleotide
agaucccaucuuggcaaua

SEQ ID NO: 14417 - RNA, 19 nt, Artificial Sequence
  Description of Artificial Sequence: Synthetic oligonucleotide
ccgacggacauguggugga

SEQ ID NO: 14418 - RNA, 19 nt, Artificial Sequence
  Description of Artificial Sequence: Synthetic oligonucleotide
ccccauauguuaucuuucu

SEQ ID NO: 14419 - RNA, 19 nt, Artificial Sequence
  Description of Artificial Sequence: Synthetic oligonucleotide
acgcuggccaagacaggau

SEQ ID NO: 14420 - RNA, 19 nt, Artificial Sequence
  Description of Artificial Sequence: Synthetic oligonucleotide
gccuguugacacuaccaau

SEQ ID NO: 14421 - RNA, 19 nt, Artificial Sequence
  Description of Artificial Sequence: Synthetic oligonucleotide
gcgagguauaaacuaucuu

SEQ ID NO: 14422 - RNA, 19 nt, Artificial Sequence
  Description of Artificial Sequence: Synthetic oligonucleotide
ccuagauuucaaacugcau

SEQ ID NO: 14423 - RNA, 19 nt, Artificial Sequence
  Description of Artificial Sequence: Synthetic oligonucleotide
cacccagacuacagauacu

SEQ ID NO: 14424 - RNA, 19 nt, Artificial Sequence
  Description of Artificial Sequence: Synthetic oligonucleotide
ccuagggguguguagcccu

SEQ ID NO: 14425 - RNA, 19 nt, Artificial Sequence
  Description of Artificial Sequence: Synthetic oligonucleotide
acaggucgagagacaucua

SEQ ID NO: 14426 - RNA, 19 nt, Artificial Sequence
  Description of Artificial Sequence: Synthetic oligonucleotide
cuagggguguguagcccuu

SEQ ID NO: 14427 - RNA, 19 nt, Artificial Sequence
  Description of Artificial Sequence: Synthetic oligonucleotide
gggagugauucgauuuuau

SEQ ID NO: 14428 - RNA, 19 nt, Artificial Sequence
  Description of Artificial Sequence: Synthetic oligonucleotide
ggcgggcuguuuggaauuc

SEQ ID NO: 14429 - RNA, 19 nt, Artificial Sequence
  Description of Artificial Sequence: Synthetic oligonucleotide
ggacuccaugggagaagga

SEQ ID NO: 14430 - RNA, 19 nt, Artificial Sequence
  Description of Artificial Sequence: Synthetic oligonucleotide
gcguuccacccagacuaca

SEQ ID NO: 14431 - RNA, 19 nt, Artificial Sequence
  Description of Artificial Sequence: Synthetic oligonucleotide
ccgucagggcgucagcaua

SEQ ID NO: 14432 - RNA, 19 nt, Artificial Sequence
  Description of Artificial Sequence: Synthetic oligonucleotide
cucggcggcugacuaucau

SEQ ID NO: 14433 - RNA, 19 nt, Artificial Sequence
  Description of Artificial Sequence: Synthetic oligonucleotide
ggucgauguuucacagaau

SEQ ID NO: 14434 - RNA, 19 nt, Artificial Sequence
  Description of Artificial Sequence: Synthetic oligonucleotide
caauaccccuugggucucu

SEQ ID NO: 14435 - RNA, 19 nt, Artificial Sequence
  Description of Artificial Sequence: Synthetic oligonucleotide
gcucggcggcugacuauca

SEQ ID NO: 14436 - RNA, 19 nt, Artificial Sequence
  Description of Artificial Sequence: Synthetic oligonucleotide
cccguccaaccaggguguc

SEQ ID NO: 14437 - RNA, 19 nt, Artificial Sequence
  Description of Artificial Sequence: Synthetic oligonucleotide
ccguccaaccagggugucu

SEQ ID NO: 14438 - RNA, 19 nt, Artificial Sequence
  Description of Artificial Sequence: Synthetic oligonucleotide
ggcgacccugaggcagcuu

SEQ ID NO: 14439 - RNA, 19 nt, Artificial Sequence
  Description of Artificial Sequence: Synthetic oligonucleotide
aguaccuucaacuugaccc

SEQ ID NO: 14440 - RNA, 19 nt, Artificial Sequence
  Description of Artificial Sequence: Synthetic oligonucleotide
uucaacuugacccaaaucc

SEQ ID NO: 14441 - RNA, 19 nt, Artificial Sequence
  Description of Artificial Sequence: Synthetic oligonucleotide
acuagaacuauauuuaaac

SEQ ID NO: 14442 - RNA, 19 nt, Artificial Sequence
  Description of Artificial Sequence: Synthetic oligonucleotide
agaaaauagaccaugcucc

SEQ ID NO: 14443 - RNA, 19 nt, Artificial Sequence
  Description of Artificial Sequence: Synthetic oligonucleotide
uguacugcuacauauagug

SEQ ID NO: 14444 - RNA, 19 nt, Artificial Sequence
  Description of Artificial Sequence: Synthetic oligonucleotide
aauccuagaauuaucacuc

SEQ ID NO: 14445 - RNA, 19 nt, Artificial Sequence
  Description of Artificial Sequence: Synthetic oligonucleotide
uauaaaacccuccucguag

SEQ ID NO: 14446 - RNA, 19 nt, Artificial Sequence
  Description of Artificial Sequence: Synthetic oligonucleotide
cuaauaaucaacuccuagg

SEQ ID NO: 14447 - RNA, 19 nt, Artificial Sequence
  Description of Artificial Sequence: Synthetic oligonucleotide
uguuguaaaaggaagcaca

SEQ ID NO: 14448 - RNA, 19 nt, Artificial Sequence
  Description of Artificial Sequence: Synthetic oligonucleotide
aauaagucacaugaaacag

SEQ ID NO: 14449 - RNA, 19 nt, Artificial Sequence
  Description of Artificial Sequence: Synthetic oligonucleotide
ugagacaucugaauuagcc

SEQ ID NO: 14450 - RNA, 19 nt, Artificial Sequence
  Description of Artificial Sequence: Synthetic oligonucleotide
aaauuggugguauaagcug

SEQ ID NO: 14451 - RNA, 19 nt, Artificial Sequence
  Description of Artificial Sequence: Synthetic oligonucleotide
uuacccauuuuauugaugc

SEQ ID NO: 14452 - RNA, 19 nt, Artificial Sequence
  Description of Artificial Sequence: Synthetic oligonucleotide
gauagugcuauacugguug

SEQ ID NO: 14453 - RNA, 19 nt, Artificial Sequence
  Description of Artificial Sequence: Synthetic oligonucleotide
auaagucuuaauaagagag

SEQ ID NO: 14454 - RNA, 19 nt, Artificial Sequence
  Description of Artificial Sequence: Synthetic oligonucleotide
uaccauauuauguagaaaa

SEQ ID NO: 14455 - RNA, 19 nt, Artificial Sequence
  Description of Artificial Sequence: Synthetic oligonucleotide
acuaggacaauuucacagc

SEQ ID NO: 14456 - RNA, 19 nt, Artificial Sequence
  Description of Artificial Sequence: Synthetic oligonucleotide
ucaaccaacagacugcuga

SEQ ID NO: 14457 - RNA, 19 nt, Artificial Sequence
  Description of Artificial Sequence: Synthetic oligonucleotide
acaaugaugguucgagugc

SEQ ID NO: 14458 - RNA, 19 nt, Artificial Sequence
  Description of Artificial Sequence: Synthetic oligonucleotide
aacacuagugacaaacuac

SEQ ID NO: 14459 - RNA, 19 nt, Artificial Sequence
  Description of Artificial Sequence: Synthetic oligonucleotide
ucugcauacuauuguaugg

SEQ ID NO: 14460 - RNA, 19 nt, Artificial Sequence
  Description of Artificial Sequence: Synthetic oligonucleotide
caugauagugcuauacugg

SEQ ID NO: 14461 - RNA, 19 nt, Artificial Sequence
  Description of Artificial Sequence: Synthetic oligonucleotide
aaauagaccaugcuccuga

SEQ ID NO: 14462 - RNA, 19 nt, Artificial Sequence
  Description of Artificial Sequence: Synthetic oligonucleotide
aaaucuuaggcaaagcuca

SEQ ID NO: 14463 - RNA, 19 nt, Artificial Sequence
  Description of Artificial Sequence: Synthetic oligonucleotide
aacuacacaaauucguggu

SEQ ID NO: 14464 - RNA, 19 nt, Artificial Sequence
  Description of Artificial Sequence: Synthetic oligonucleotide
uacugcuacauauagugag

SEQ ID NO: 14465 - RNA, 19 nt, Artificial Sequence
  Description of Artificial Sequence: Synthetic oligonucleotide
ucuggaaugaugauuggcu

SEQ ID NO: 14466 - RNA, 19 nt, Artificial Sequence
  Description of Artificial Sequence: Synthetic oligonucleotide
aauaagaauacugacugau

SEQ ID NO: 14467 - RNA, 19 nt, Artificial Sequence
  Description of Artificial Sequence: Synthetic oligonucleotide
uuuacauacucccuaagua

SEQ ID NO: 14468 - RNA, 19 nt, Artificial Sequence
  Description of Artificial Sequence: Synthetic oligonucleotide
gagaaaauagaccaugcuc

SEQ ID NO: 14469 - RNA, 19 nt, Artificial Sequence
  Description of Artificial Sequence: Synthetic oligonucleotide
ugacccaaauccauggagg

SEQ ID NO: 14470 - RNA, 19 nt, Artificial Sequence
  Description of Artificial Sequence: Synthetic oligonucleotide
aaaacaccgauuuuaccgu

SEQ ID NO: 14471 - RNA, 19 nt, Artificial Sequence
  Description of Artificial Sequence: Synthetic oligonucleotide
auacguauacaggugaggc

SEQ ID NO: 14472 - RNA, 19 nt, Artificial Sequence
  Description of Artificial Sequence: Synthetic oligonucleotide
auacaugugaacccuccgc

SEQ ID NO: 14473 - RNA, 19 nt, Artificial Sequence
  Description of Artificial Sequence: Synthetic oligonucleotide
cuggcuaauaaucaacucc

SEQ ID NO: 14474 - RNA, 19 nt, Artificial Sequence
  Description of Artificial Sequence: Synthetic oligonucleotide
uuuuacauacucccuaagu

SEQ ID NO: 14475 - RNA, 19 nt, Artificial Sequence
  Description of Artificial Sequence: Synthetic oligonucleotide
uguuucuagaagcuuguug

SEQ ID NO: 14476 - RNA, 19 nt, Artificial Sequence
  Description of Artificial Sequence: Synthetic oligonucleotide
aguuguguagagcuacccc

SEQ ID NO: 14477 - RNA, 19 nt, Artificial Sequence
  Description of Artificial Sequence: Synthetic oligonucleotide
guacugacuacuuaccccg

SEQ ID NO: 14478 - RNA, 19 nt, Artificial Sequence
  Description of Artificial Sequence: Synthetic oligonucleotide
uauaagucuuaauaagaga

SEQ ID NO: 14479 - RNA, 19 nt, Artificial Sequence
  Description of Artificial Sequence: Synthetic oligonucleotide
aauggaacuuguggaaccc

SEQ ID NO: 14480 - RNA, 19 nt, Artificial Sequence
  Description of Artificial Sequence: Synthetic oligonucleotide
ugcagaauaaaacaccgau

SEQ ID NO: 14481 - RNA, 19 nt, Artificial Sequence
  Description of Artificial Sequence: Synthetic oligonucleotide
ucaacuaguagaucucugc

SEQ ID NO: 14482 - RNA, 19 nt, Artificial Sequence
  Description of Artificial Sequence: Synthetic oligonucleotide
aaacugaugguuaagaguu

SEQ ID NO: 14483 - RNA, 19 nt, Artificial Sequence
  Description of Artificial Sequence: Synthetic oligonucleotide
aauaaacuugggaaggcag

SEQ ID NO: 14484 - RNA, 19 nt, Artificial Sequence
  Description of Artificial Sequence: Synthetic oligonucleotide
accuuggugauucaagagg

SEQ ID NO: 14485 - RNA, 19 nt, Artificial Sequence
  Description of Artificial Sequence: Synthetic oligonucleotide
acuuaagacucccaucuuc

SEQ ID NO: 14486 - RNA, 19 nt, Artificial Sequence
  Description of Artificial Sequence: Synthetic oligonucleotide
uuuggagcaacauguguag

SEQ ID NO: 14487 - RNA, 19 nt, Artificial Sequence
  Description of Artificial Sequence: Synthetic oligonucleotide
  modified_base (8)..(8): a, c, u, g, unknown or other
caagcugnguuuucaaugg

SEQ ID NO: 14488 - RNA, 19 nt, Artificial Sequence
  Description of Artificial Sequence: Synthetic oligonucleotide
uauggggacauguuaagca

SEQ ID NO: 14489 - RNA, 19 nt, Artificial Sequence
  Description of Artificial Sequence: Synthetic oligonucleotide
uggcuaauaaucaacuccu

SEQ ID NO: 14490 - RNA, 19 nt, Artificial Sequence
  Description of Artificial Sequence: Synthetic oligonucleotide
uguacugacuacuuacccc

SEQ ID NO: 14491 - RNA, 19 nt, Artificial Sequence
  Description of Artificial Sequence: Synthetic oligonucleotide
cugacuacuccccauagcc

SEQ ID NO: 14492 - RNA, 19 nt, Artificial Sequence
  Description of Artificial Sequence: Synthetic oligonucleotide
uguagcuuaggguuaaccu

SEQ ID NO: 14493 - RNA, 19 nt, Artificial Sequence
  Description of Artificial Sequence: Synthetic oligonucleotide
aaaccuuggugauucaaga

SEQ ID NO: 14494 - RNA, 19 nt, Artificial Sequence
  Description of Artificial Sequence: Synthetic oligonucleotide
uuguauuuggagcaacaug

SEQ ID NO: 14495 - RNA, 19 nt, Artificial Sequence
  Description of Artificial Sequence: Synthetic oligonucleotide
ugacuuaaacuguuuaaca

SEQ ID NO: 14496 - RNA, 19 nt, Artificial Sequence
  Description of Artificial Sequence: Synthetic oligonucleotide
gaauuauaagaugugguac

SEQ ID NO: 14497 - RNA, 19 nt, Artificial Sequence
  Description of Artificial Sequence: Synthetic oligonucleotide
aaacucugaauucgucaac

SEQ ID NO: 14498 - RNA, 19 nt, Artificial Sequence
  Description of Artificial Sequence: Synthetic oligonucleotide
auucgugguugucucaacc

SEQ ID NO: 14499 - RNA, 19 nt, Artificial Sequence
  Description of Artificial Sequence: Synthetic oligonucleotide
cugaauuagccagagaaag

SEQ ID NO: 14500 - RNA, 19 nt, Artificial Sequence
  Description of Artificial Sequence: Synthetic oligonucleotide
caagacuuaacaugguuac

SEQ ID NO: 14501 - RNA, 19 nt, Artificial Sequence
  Description of Artificial Sequence: Synthetic oligonucleotide
acuagugacaaacuacaca

SEQ ID NO: 14502 - RNA, 19 nt, Artificial Sequence
  Description of Artificial Sequence: Synthetic oligonucleotide
guugcuacagugcagucgc

SEQ ID NO: 14503 - RNA, 19 nt, Artificial Sequence
  Description of Artificial Sequence: Synthetic oligonucleotide
aauacuaacauuacauaua

SEQ ID NO: 14504 - RNA, 19 nt, Artificial Sequence
  Description of Artificial Sequence: Synthetic oligonucleotide
auaagagagcauucaaucu

SEQ ID NO: 14505 - RNA, 19 nt, Artificial Sequence
  Description of Artificial Sequence: Synthetic oligonucleotide
uucugcauacuauuguaug

SEQ ID NO: 14506 - RNA, 19 nt, Artificial Sequence
  Description of Artificial Sequence: Synthetic oligonucleotide
gaggauuuggaugaggcug

SEQ ID NO: 14507 - RNA, 19 nt, Artificial Sequence
  Description of Artificial Sequence: Synthetic oligonucleotide
ugagccauaucaucuaaac

SEQ ID NO: 14508 - RNA, 19 nt, Artificial Sequence
  Description of Artificial Sequence: Synthetic oligonucleotide
acauguguagugaagggac

SEQ ID NO: 14509 - RNA, 19 nt, Artificial Sequence
  Description of Artificial Sequence: Synthetic oligonucleotide
uauacugguugccaugaga

SEQ ID NO: 14510 - RNA, 19 nt, Artificial Sequence
  Description of Artificial Sequence: Synthetic oligonucleotide
ucaaucgucauuucuuuaa

SEQ ID NO: 14511 - RNA, 19 nt, Artificial Sequence
  Description of Artificial Sequence: Synthetic oligonucleotide
aacauagcucaguaauucu

SEQ ID NO: 14512 - RNA, 19 nt, Artificial Sequence
  Description of Artificial Sequence: Synthetic oligonucleotide
ugaauucgucaacagcucc

SEQ ID NO: 14513 - RNA, 19 nt, Artificial Sequence
  Description of Artificial Sequence: Synthetic oligonucleotide
gaugcuagaacacuggccu

SEQ ID NO: 14514 - RNA, 19 nt, Artificial Sequence
  Description of Artificial Sequence: Synthetic oligonucleotide
agcucaguaauucucagaa

SEQ ID NO: 14515 - RNA, 19 nt, Artificial Sequence
  Description of Artificial Sequence: Synthetic oligonucleotide
uccaaggucaagcaaugcu

SEQ ID NO: 14516 - RNA, 19 nt, Artificial Sequence
  Description of Artificial Sequence: Synthetic oligonucleotide
ugaugacgcucacaggagg

SEQ ID NO: 14517 - RNA, 19 nt, Artificial Sequence
  Description of Artificial Sequence: Synthetic oligonucleotide
uauuuggagcaacaugugu

SEQ ID NO: 14518 - RNA, 19 nt, Artificial Sequence
  Description of Artificial Sequence: Synthetic oligonucleotide
cacaaugaugguucgagug

SEQ ID NO: 14519 - RNA, 19 nt, Artificial Sequence
  Description of Artificial Sequence: Synthetic oligonucleotide
aaacccuuacuccccauga

SEQ ID NO: 14520 - RNA, 19 nt, Artificial Sequence
  Description of Artificial Sequence: Synthetic oligonucleotide
uguuccgacuagaaacuag

SEQ ID NO: 14521 - RNA, 19 nt, Artificial Sequence
  Description of Artificial Sequence: Synthetic oligonucleotide
guaacuagcauaucaaaua

SEQ ID NO: 14522 - RNA, 19 nt, Artificial Sequence
  Description of Artificial Sequence: Synthetic oligonucleotide
  modified_base (3)..(3): a, c, u, g, unknown or other
ugnguuuucaauggaggca

SEQ ID NO: 14523 - RNA, 19 nt, Artificial Sequence
  Description of Artificial Sequence: Synthetic oligonucleotide
acuagggaauuauaagaug

SEQ ID NO: 14524 - RNA, 19 nt, Artificial Sequence
  Description of Artificial Sequence: Synthetic oligonucleotide
aauucgugguugucucaac

SEQ ID NO: 14525 - RNA, 19 nt, Artificial Sequence
  Description of Artificial Sequence: Synthetic oligonucleotide
uccuauccuaaaacaaacc

SEQ ID NO: 14526 - RNA, 19 nt, Artificial Sequence
  Description of Artificial Sequence: Synthetic oligonucleotide
uagggaauuauaagaugug

SEQ ID NO: 14527 - RNA, 19 nt, Artificial Sequence
  Description of Artificial Sequence: Synthetic oligonucleotide
uccgacuagaaacuagaac

SEQ ID NO: 14528 - RNA, 19 nt, Artificial Sequence
  Description of Artificial Sequence: Synthetic oligonucleotide
uagagagagauucugcaua

SEQ ID NO: 14529 - RNA, 19 nt, Artificial Sequence
  Description of Artificial Sequence: Synthetic oligonucleotide
ugcaguuccuacaugcacu

SEQ ID NO: 14530 - RNA, 19 nt, Artificial Sequence
  Description of Artificial Sequence: Synthetic oligonucleotide
aacuaguagaucucugcau

SEQ ID NO: 14531 - RNA, 19 nt, Artificial Sequence
  Description of Artificial Sequence: Synthetic oligonucleotide
acauguuaagcaauacaac

SEQ ID NO: 14532 - RNA, 19 nt, Artificial Sequence
  Description of Artificial Sequence: Synthetic oligonucleotide
aauguuccgacuagaaacu

SEQ ID NO: 14533 - RNA, 19 nt, Artificial Sequence
  Description of Artificial Sequence: Synthetic oligonucleotide
agguggaacacaucuguag

SEQ ID NO: 14534 - RNA, 19 nt, Artificial Sequence
  Description of Artificial Sequence: Synthetic oligonucleotide
ugaauugaaaccacacauu

SEQ ID NO: 14535 - RNA, 19 nt, Artificial Sequence
  Description of Artificial Sequence: Synthetic oligonucleotide
uaguauggggacauguuaa

SEQ ID NO: 14536 - RNA, 19 nt, Artificial Sequence
  Description of Artificial Sequence: Synthetic oligonucleotide
guagcugguugucugaagc

SEQ ID NO: 14537 - RNA, 19 nt, Artificial Sequence
  Description of Artificial Sequence: Synthetic oligonucleotide
gaugacauuggaccucgcc

SEQ ID NO: 14538 - RNA, 19 nt, Artificial Sequence
  Description of Artificial Sequence: Synthetic oligonucleotide
  modified_base (2)..(2): a, c, u, g, unknown or other
gnguuuucaauggaggcac

SEQ ID NO: 14539 - RNA, 19 nt, Artificial Sequence
  Description of Artificial Sequence: Synthetic oligonucleotide
ugaucugacucacuguguc

SEQ ID NO: 14540 - RNA, 19 nt, Artificial Sequence
  Description of Artificial Sequence: Synthetic oligonucleotide
aacuagggaauuauaagau

SEQ ID NO: 14541 - RNA, 19 nt, Artificial Sequence
  Description of Artificial Sequence: Synthetic oligonucleotide
ugaugguuaagaguuuuca

SEQ ID NO: 14542 - RNA, 19 nt, Artificial Sequence
  Description of Artificial Sequence: Synthetic oligonucleotide
ugaguacauugucacaaac

SEQ ID NO: 14543 - RNA, 19 nt, Artificial Sequence
  Description of Artificial Sequence: Synthetic oligonucleotide
aacauguguagugaaggga

SEQ ID NO: 14544 - RNA, 19 nt, Artificial Sequence
  Description of Artificial Sequence: Synthetic oligonucleotide
accgauuuuaccgugcuug

SEQ ID NO: 14545 - RNA, 19 nt, Artificial Sequence
  Description of Artificial Sequence: Synthetic oligonucleotide
ugcagaucucccauguucu

SEQ ID NO: 14546 - RNA, 19 nt, Artificial Sequence
  Description of Artificial Sequence: Synthetic oligonucleotide
uacuauuguaugguaaaga

SEQ ID NO: 14547 - RNA, 19 nt, Artificial Sequence
  Description of Artificial Sequence: Synthetic oligonucleotide
ugcauugcaauuguucuac

SEQ ID NO: 14548 - RNA, 19 nt, Artificial Sequence
  Description of Artificial Sequence: Synthetic oligonucleotide
uagcuuaggguuaaccuuc

SEQ ID NO: 14549 - RNA, 19 nt, Artificial Sequence
  Description of Artificial Sequence: Synthetic oligonucleotide
auuuuacauacucccuaag

SEQ ID NO: 14550 - RNA, 19 nt, Artificial Sequence
  Description of Artificial Sequence: Synthetic oligonucleotide
caaccauggagacaugaag

SEQ ID NO: 14551 - RNA, 19 nt, Artificial Sequence
  Description of Artificial Sequence: Synthetic oligonucleotide
uguuacaaagaaaccucaa

SEQ ID NO: 14552 - RNA, 19 nt, Artificial Sequence
  Description of Artificial Sequence: Synthetic oligonucleotide
acugcggauagugaugacg

SEQ ID NO: 14553 - RNA, 19 nt, Artificial Sequence
  Description of Artificial Sequence: Synthetic oligonucleotide
agaaugcuugaggaaaagg

SEQ ID NO: 14554 - RNA, 19 nt, Artificial Sequence
  Description of Artificial Sequence: Synthetic oligonucleotide
gcuaauaaucaacuccuag

SEQ ID NO: 14555 - RNA, 19 nt, Artificial Sequence
  Description of Artificial Sequence: Synthetic oligonucleotide
acguauacaggugaggcug

SEQ ID NO: 14556 - RNA, 19 nt, Artificial Sequence
  Description of Artificial Sequence: Synthetic oligonucleotide
auauuccucacugacucag

SEQ ID NO: 14557 - RNA, 19 nt, Artificial Sequence
  Description of Artificial Sequence: Synthetic oligonucleotide
gagcagcauacguauacag

SEQ ID NO: 14558 - RNA, 19 nt, Artificial Sequence
  Description of Artificial Sequence: Synthetic oligonucleotide
uuaagacucccaucuucag

SEQ ID NO: 14559 - RNA, 19 nt, Artificial Sequence
  Description of Artificial Sequence: Synthetic oligonucleotide
aguacuccugacuguaucu

SEQ ID NO: 14560 - RNA, 19 nt, Artificial Sequence
  Description of Artificial Sequence: Synthetic oligonucleotide
gaugacgcucacaggaggg

SEQ ID NO: 14561 - RNA, 19 nt, Artificial Sequence
  Description of Artificial Sequence: Synthetic oligonucleotide
aaacaccgauuuuaccgug

SEQ ID NO: 14562 - RNA, 19 nt, Artificial Sequence
  Description of Artificial Sequence: Synthetic oligonucleotide
aaucuuaggcaaagcucac

SEQ ID NO: 14563 - RNA, 19 nt, Artificial Sequence
  Description of Artificial Sequence: Synthetic oligonucleotide
uucgugguugucucaacca

SEQ ID NO: 14564 - RNA, 19 nt, Artificial Sequence
  Description of Artificial Sequence: Synthetic oligonucleotide
cuuaagcugguccaagguc

SEQ ID NO: 14565 - RNA, 19 nt, Artificial Sequence
  Description of Artificial Sequence: Synthetic oligonucleotide
cuagggaauuauaagaugu

SEQ ID NO: 14566 - RNA, 19 nt, Artificial Sequence
  Description of Artificial Sequence: Synthetic oligonucleotide
uggagaguugcuaccauua

SEQ ID NO: 14567 - RNA, 19 nt, Artificial Sequence
  Description of Artificial Sequence: Synthetic oligonucleotide
cauacuauuguaugguaaa

SEQ ID NO: 14568 - RNA, 19 nt, Artificial Sequence
  Description of Artificial Sequence: Synthetic oligonucleotide
aaaauagaccaugcuccug

SEQ ID NO: 14569 - RNA, 19 nt, Artificial Sequence
  Description of Artificial Sequence: Synthetic oligonucleotide
auuuuaccgugcuugccug

SEQ ID NO: 14570 - RNA, 19 nt, Artificial Sequence
  Description of Artificial Sequence: Synthetic oligonucleotide
ugguucgagugccagugcc

SEQ ID NO: 14571 - RNA, 19 nt, Artificial Sequence
  Description of Artificial Sequence: Synthetic oligonucleotide
  modified_base (7)..(7): a, c, u, g, unknown or other
aagcugnguuuucaaugga

SEQ ID NO: 14572 - RNA, 19 nt, Artificial Sequence
  Description of Artificial Sequence: Synthetic oligonucleotide
aagugggagcagcauacgu

SEQ ID NO: 14573 - RNA, 19 nt, Artificial Sequence
  Description of Artificial Sequence: Synthetic oligonucleotide
gauuuuaccgugcuugccu

SEQ ID NO: 14574 - RNA, 19 nt, Artificial Sequence
  Description of Artificial Sequence: Synthetic oligonucleotide
auacuauuguaugguaaag

SEQ ID NO: 14575 - RNA, 19 nt, Artificial Sequence
  Description of Artificial Sequence: Synthetic oligonucleotide
gacuacuccccauagccuc

SEQ ID NO: 14576 - RNA, 19 nt, Artificial Sequence
  Description of Artificial Sequence: Synthetic oligonucleotide
gauuggcugaugcugaucu

SEQ ID NO: 14577 - RNA, 19 nt, Artificial Sequence
  Description of Artificial Sequence: Synthetic oligonucleotide
uuuuaccgugcuugccugg

SEQ ID NO: 14578 - RNA, 19 nt, Artificial Sequence
  Description of Artificial Sequence: Synthetic oligonucleotide
gaaacccuuacuccccaug

SEQ ID NO: 14579 - RNA, 19 nt, Artificial Sequence
  Description of Artificial Sequence: Synthetic oligonucleotide
ugaagggccccaagaaugu

SEQ ID NO: 14580 - RNA, 19 nt, Artificial Sequence
  Description of Artificial Sequence: Synthetic oligonucleotide
cauacguauacaggugagg

SEQ ID NO: 14581 - RNA, 19 nt, Artificial Sequence
  Description of Artificial Sequence: Synthetic oligonucleotide
guagaggaaagauaaggua

SEQ ID NO: 14582 - RNA, 19 nt, Artificial Sequence
  Description of Artificial Sequence: Synthetic oligonucleotide
ugacaggcuguacugacua

SEQ ID NO: 14583 - RNA, 19 nt, Artificial Sequence
  Description of Artificial Sequence: Synthetic oligonucleotide
aucuuaggcaaagcucacc

SEQ ID NO: 14584 - RNA, 19 nt, Artificial Sequence
  Description of Artificial Sequence: Synthetic oligonucleotide
ucagcggguauccagugua

SEQ ID NO: 14585 - RNA, 19 nt, Artificial Sequence
  Description of Artificial Sequence: Synthetic oligonucleotide
acacuagugacaaacuaca

SEQ ID NO: 14586 - RNA, 19 nt, Artificial Sequence
  Description of Artificial Sequence: Synthetic oligonucleotide
ugaacccuccgcuugcaga

SEQ ID NO: 14587 - RNA, 19 nt, Artificial Sequence
  Description of Artificial Sequence: Synthetic oligonucleotide
uacguauacaggugaggcu

SEQ ID NO: 14588 - RNA, 19 nt, Artificial Sequence
  Description of Artificial Sequence: Synthetic oligonucleotide
caaugaugguucgagugcc

SEQ ID NO: 14589 - RNA, 19 nt, Artificial Sequence
  Description of Artificial Sequence: Synthetic oligonucleotide
gcauacugcggugugaugg

SEQ ID NO: 14590 - RNA, 19 nt, Artificial Sequence
  Description of Artificial Sequence: Synthetic oligonucleotide
acuacuuaccccgcccugg

SEQ ID NO: 14591 - RNA, 19 nt, Artificial Sequence
  Description of Artificial Sequence: Synthetic oligonucleotide
aggguuaaccuucucccca

SEQ ID NO: 14592 - RNA, 19 nt, Artificial Sequence
  Description of Artificial Sequence: Synthetic oligonucleotide
cuggaaacccuuacucccc

SEQ ID NO: 14593 - RNA, 19 nt, Artificial Sequence
  Description of Artificial Sequence: Synthetic oligonucleotide
  modified_base (5)..(5): a, c, u, g, unknown or other
gcugnguuuucaauggagg

SEQ ID NO: 14594 - RNA, 19 nt, Artificial Sequence
  Description of Artificial Sequence: Synthetic oligonucleotide
ggaauuauaagauguggua

SEQ ID NO: 14595 - RNA, 19 nt, Artificial Sequence
  Description of Artificial Sequence: Synthetic oligonucleotide
cugcauuacaaacauagcu

SEQ ID NO: 14596 - RNA, 19 nt, Artificial Sequence
  Description of Artificial Sequence: Synthetic oligonucleotide
uagaaaggcuauacacaac

SEQ ID NO: 14597 - RNA, 19 nt, Artificial Sequence
  Description of Artificial Sequence: Synthetic oligonucleotide
cugaauugaaaccacacau

SEQ ID NO: 14598 - RNA, 19 nt, Artificial Sequence
  Description of Artificial Sequence: Synthetic oligonucleotide
gaauaaacuugggaaggca

SEQ ID NO: 14599 - RNA, 19 nt, Artificial Sequence
  Description of Artificial Sequence: Synthetic oligonucleotide
acaugguuagucagcaaag

SEQ ID NO: 14600 - RNA, 19 nt, Artificial Sequence
  Description of Artificial Sequence: Synthetic oligonucleotide
cuaaguacaccugcauuac

SEQ ID NO: 14601 - RNA, 19 nt, Artificial Sequence
  Description of Artificial Sequence: Synthetic oligonucleotide
ugacuacuccccauagccu

SEQ ID NO: 14602 - RNA, 19 nt, Artificial Sequence
  Description of Artificial Sequence: Synthetic oligonucleotide
acauauagugagauuauuu

SEQ ID NO: 14603 - RNA, 19 nt, Artificial Sequence
  Description of Artificial Sequence: Synthetic oligonucleotide
ccggagagcacucagagug

SEQ ID NO: 14604 - RNA, 19 nt, Artificial Sequence
  Description of Artificial Sequence: Synthetic oligonucleotide
ugacuacuuaccccgcccu

SEQ ID NO: 14605 - RNA, 19 nt, Artificial Sequence
  Description of Artificial Sequence: Synthetic oligonucleotide
gaggcacaaugaugguucg

SEQ ID NO: 14606 - RNA, 19 nt, Artificial Sequence
  Description of Artificial Sequence: Synthetic oligonucleotide
auuuggagcaacaugugua

SEQ ID NO: 14607 - RNA, 19 nt, Artificial Sequence
  Description of Artificial Sequence: Synthetic oligonucleotide
cauggagacaugaagacau

SEQ ID NO: 14608 - RNA, 19 nt, Artificial Sequence
  Description of Artificial Sequence: Synthetic oligonucleotide
ucucaacuaguagaucucu

SEQ ID NO: 14609 - RNA, 19 nt, Artificial Sequence
  Description of Artificial Sequence: Synthetic oligonucleotide
ugcaguacagcagcagucu

SEQ ID NO: 14610 - RNA, 19 nt, Artificial Sequence
  Description of Artificial Sequence: Synthetic oligonucleotide
auaaacuugggaaggcaga

SEQ ID NO: 14611 - RNA, 19 nt, Artificial Sequence
  Description of Artificial Sequence: Synthetic oligonucleotide
aggaacuagggaauuauaa

SEQ ID NO: 14612 - RNA, 19 nt, Artificial Sequence
  Description of Artificial Sequence: Synthetic oligonucleotide
aucucaacuaguagaucuc

SEQ ID NO: 14613 - RNA, 19 nt, Artificial Sequence
  Description of Artificial Sequence: Synthetic oligonucleotide
cucaacuacaaauaagaau

SEQ ID NO: 14614 - RNA, 19 nt, Artificial Sequence
  Description of Artificial Sequence: Synthetic oligonucleotide
ucgugguugucucaaccaa

SEQ ID NO: 14615 - RNA, 19 nt, Artificial Sequence
  Description of Artificial Sequence: Synthetic oligonucleotide
gugauuguguguccuggug

SEQ ID NO: 14616 - RNA, 19 nt, Artificial Sequence
  Description of Artificial Sequence: Synthetic oligonucleotide
uuguggaacccagugcagc

SEQ ID NO: 14617 - RNA, 19 nt, Artificial Sequence
  Description of Artificial Sequence: Synthetic oligonucleotide
acaagacuuaacaugguua

SEQ ID NO: 14618 - RNA, 19 nt, Artificial Sequence
  Description of Artificial Sequence: Synthetic oligonucleotide
uggugauucaagaggcuuu

SEQ ID NO: 14619 - RNA, 19 nt, Artificial Sequence
  Description of Artificial Sequence: Synthetic oligonucleotide
  modified_base (6)..(6): a, c, u, g, unknown or other
agcugnguuuucaauggag

SEQ ID NO: 14620 - RNA, 19 nt, Artificial Sequence
  Description of Artificial Sequence: Synthetic oligonucleotide
uuccuacaugcacuuauua

SEQ ID NO: 14621 - RNA, 19 nt, Artificial Sequence
  Description of Artificial Sequence: Synthetic oligonucleotide
cuuaccccgcccuggaaac

SEQ ID NO: 14622 - RNA, 19 nt, Artificial Sequence
  Description of Artificial Sequence: Synthetic oligonucleotide
gcuaaggagaccugaggcc

SEQ ID NO: 14623 - RNA, 19 nt, Artificial Sequence
  Description of Artificial Sequence: Synthetic oligonucleotide
acaguaacuagcauaucaa

SEQ ID NO: 14624 - RNA, 19 nt, Artificial Sequence
  Description of Artificial Sequence: Synthetic oligonucleotide
ugcuagaacacuggccuga

SEQ ID NO: 14625 - RNA, 19 nt, Artificial Sequence
  Description of Artificial Sequence: Synthetic oligonucleotide
ucccugaguaaguacuccu

SEQ ID NO: 14626 - RNA, 19 nt, Artificial Sequence
  Description of Artificial Sequence: Synthetic oligonucleotide
uguugagcucgguaccugu

SEQ ID NO: 14627 - RNA, 19 nt, Artificial Sequence
  Description of Artificial Sequence: Synthetic oligonucleotide
cuagaauuaucacucaaau

SEQ ID NO: 14628 - RNA, 19 nt, Artificial Sequence
  Description of Artificial Sequence: Synthetic oligonucleotide
uuuaccgugcuugccuggc

SEQ ID NO: 14629 - RNA, 19 nt, Artificial Sequence
  Description of Artificial Sequence: Synthetic oligonucleotide
ugcauacuauuguauggua

SEQ ID NO: 14630 - RNA, 19 nt, Artificial Sequence
  Description of Artificial Sequence: Synthetic oligonucleotide
cacaugguuagucagcaaa

SEQ ID NO: 14631 - RNA, 19 nt, Artificial Sequence
  Description of Artificial Sequence: Synthetic oligonucleotide
auuggaccucgccuucagg

SEQ ID NO: 14632 - RNA, 19 nt, Artificial Sequence
  Description of Artificial Sequence: Synthetic oligonucleotide
augacgcucacaggagggc

SEQ ID NO: 14633 - RNA, 19 nt, Artificial Sequence
  Description of Artificial Sequence: Synthetic oligonucleotide
ggcacaaugaugguucgag

SEQ ID NO: 14634 - RNA, 19 nt, Artificial Sequence
  Description of Artificial Sequence: Synthetic oligonucleotide
uacgcagaggacugcuccc

SEQ ID NO: 14635 - RNA, 19 nt, Artificial Sequence
  Description of Artificial Sequence: Synthetic oligonucleotide
ucguaguauggggacaugu

SEQ ID NO: 14636 - RNA, 19 nt, Artificial Sequence
  Description of Artificial Sequence: Synthetic oligonucleotide
guaguauggggacauguua

SEQ ID NO: 14637 - RNA, 19 nt, Artificial Sequence
  Description of Artificial Sequence: Synthetic oligonucleotide
caacuaguagaucucugca

SEQ ID NO: 14638 - RNA, 19 nt, Artificial Sequence
  Description of Artificial Sequence: Synthetic oligonucleotide
augugguacgcagaggacu

SEQ ID NO: 14639 - RNA, 19 nt, Artificial Sequence
  Description of Artificial Sequence: Synthetic oligonucleotide
cagcauacguauacaggug

SEQ ID NO: 14640 - RNA, 19 nt, Artificial Sequence
  Description of Artificial Sequence: Synthetic oligonucleotide
gaguuguguagagcuaccc

SEQ ID NO: 14641 - RNA, 19 nt, Artificial Sequence
  Description of Artificial Sequence: Synthetic oligonucleotide
uuccgacuagaaacuagaa

SEQ ID NO: 14642 - RNA, 19 nt, Artificial Sequence
  Description of Artificial Sequence: Synthetic oligonucleotide
aaggcguagggagcuuggg

SEQ ID NO: 14643 - RNA, 19 nt, Artificial Sequence
  Description of Artificial Sequence: Synthetic oligonucleotide
uguguuguagcugguuguc

SEQ ID NO: 14644 - RNA, 19 nt, Artificial Sequence
  Description of Artificial Sequence: Synthetic oligonucleotide
gguauccaguguaaauugg

SEQ ID NO: 14645 - RNA, 19 nt, Artificial Sequence
  Description of Artificial Sequence: Synthetic oligonucleotide
caccagaagcucuauaaaa

SEQ ID NO: 14646 - RNA, 19 nt, Artificial Sequence
  Description of Artificial Sequence: Synthetic oligonucleotide
guauggggacauguuaagc

SEQ ID NO: 14647 - RNA, 19 nt, Artificial Sequence
  Description of Artificial Sequence: Synthetic oligonucleotide
cuguagcuuaggguuaacc

SEQ ID NO: 14648 - RNA, 19 nt, Artificial Sequence
  Description of Artificial Sequence: Synthetic oligonucleotide
guucaaccagcgccggccg

SEQ ID NO: 14649 - RNA, 19 nt, Artificial Sequence
  Description of Artificial Sequence: Synthetic oligonucleotide
gaaggcguagggagcuugg

SEQ ID NO: 14650 - RNA, 19 nt, Artificial Sequence
  Description of Artificial Sequence: Synthetic oligonucleotide
acaggaacuagggaauuau

SEQ ID NO: 14651 - RNA, 19 nt, Artificial Sequence
  Description of Artificial Sequence: Synthetic oligonucleotide
guauuuggagcaacaugug

SEQ ID NO: 14652 - RNA, 19 nt, Artificial Sequence
  Description of Artificial Sequence: Synthetic oligonucleotide
agaaggcggaaacgcaagu

SEQ ID NO: 14653 - RNA, 19 nt, Artificial Sequence
  Description of Artificial Sequence: Synthetic oligonucleotide
uacauauagugagauuauu

SEQ ID NO: 14654 - RNA, 19 nt, Artificial Sequence
  Description of Artificial Sequence: Synthetic oligonucleotide
uagugaagggacucuugau

SEQ ID NO: 14655 - RNA, 19 nt, Artificial Sequence
  Description of Artificial Sequence: Synthetic oligonucleotide
uaagcugguccaaggucaa

SEQ ID NO: 14656 - RNA, 19 nt, Artificial Sequence
  Description of Artificial Sequence: Synthetic oligonucleotide
ugaugguucgagugccagu

SEQ ID NO: 14657 - RNA, 19 nt, Artificial Sequence
  Description of Artificial Sequence: Synthetic oligonucleotide
ucccuaaguacaccugcau

SEQ ID NO: 14658 - RNA, 19 nt, Artificial Sequence
  Description of Artificial Sequence: Synthetic oligonucleotide
gacuacuuaccccgcccug

SEQ ID NO: 14659 - RNA, 19 nt, Artificial Sequence
  Description of Artificial Sequence: Synthetic oligonucleotide
caacuccuaggaacaacug

SEQ ID NO: 14660 - RNA, 19 nt, Artificial Sequence
  Description of Artificial Sequence: Synthetic oligonucleotide
uggagugauuguguguccu

SEQ ID NO: 14661 - RNA, 19 nt, Artificial Sequence
  Description of Artificial Sequence: Synthetic oligonucleotide
augaugguucgagugccag

SEQ ID NO: 14662 - RNA, 19 nt, Artificial Sequence
  Description of Artificial Sequence: Synthetic oligonucleotide
acacaacuuaucugguuuu

SEQ ID NO: 14663 - RNA, 19 nt, Artificial Sequence
  Description of Artificial Sequence: Synthetic oligonucleotide
auagaccaugcuccugaca

SEQ ID NO: 14664 - RNA, 19 nt, Artificial Sequence
  Description of Artificial Sequence: Synthetic oligonucleotide
gcagcauacguauacaggu

SEQ ID NO: 14665 - RNA, 19 nt, Artificial Sequence
  Description of Artificial Sequence: Synthetic oligonucleotide
gagaguugcuaccauuagu

SEQ ID NO: 14666 - RNA, 19 nt, Artificial Sequence
  Description of Artificial Sequence: Synthetic oligonucleotide
aggaacaacugggaacucu

SEQ ID NO: 14667 - RNA, 19 nt, Artificial Sequence
  Description of Artificial Sequence: Synthetic oligonucleotide
caguaacauaacugaugac

SEQ ID NO: 14668 - RNA, 19 nt, Artificial Sequence
  Description of Artificial Sequence: Synthetic oligonucleotide
aaugaugguucgagugcca

SEQ ID NO: 14669 - RNA, 19 nt, Artificial Sequence
  Description of Artificial Sequence: Synthetic oligonucleotide
caugguuagauuuguugcu

SEQ ID NO: 14670 - RNA, 19 nt, Artificial Sequence
  Description of Artificial Sequence: Synthetic oligonucleotide
gacaucugaauuagccaga

SEQ ID NO: 14671 - RNA, 19 nt, Artificial Sequence
  Description of Artificial Sequence: Synthetic oligonucleotide
gcuaagguugaguggcugc

SEQ ID NO: 14672 - RNA, 19 nt, Artificial Sequence
  Description of Artificial Sequence: Synthetic oligonucleotide
cuucaggugucuuaagccu

SEQ ID NO: 14673 - RNA, 19 nt, Artificial Sequence
  Description of Artificial Sequence: Synthetic oligonucleotide
gugaugacgcucacaggag

SEQ ID NO: 14674 - RNA, 19 nt, Artificial Sequence
  Description of Artificial Sequence: Synthetic oligonucleotide
gacauuggaccucgccuuc

SEQ ID NO: 14675 - RNA, 19 nt, Artificial Sequence
  Description of Artificial Sequence: Synthetic oligonucleotide
cucccauggacuuaagacu

SEQ ID NO: 14676 - RNA, 19 nt, Artificial Sequence
  Description of Artificial Sequence: Synthetic oligonucleotide
gucuuaauaagagagcauu

SEQ ID NO: 14677 - RNA, 19 nt, Artificial Sequence
  Description of Artificial Sequence: Synthetic oligonucleotide
caacaaugcagucaacacu

SEQ ID NO: 14678 - RNA, 19 nt, Artificial Sequence
  Description of Artificial Sequence: Synthetic oligonucleotide
acauguuguuacaaagaaa

SEQ ID NO: 14679 - RNA, 19 nt, Artificial Sequence
  Description of Artificial Sequence: Synthetic oligonucleotide
ucccauguucuggaaacaa

SEQ ID NO: 14680 - RNA, 19 nt, Artificial Sequence
  Description of Artificial Sequence: Synthetic oligonucleotide
uauuuaccugagccauauc

SEQ ID NO: 14681 - RNA, 19 nt, Artificial Sequence
  Description of Artificial Sequence: Synthetic oligonucleotide
caacgucacaugguuaguc

SEQ ID NO: 14682 - RNA, 19 nt, Artificial Sequence
  Description of Artificial Sequence: Synthetic oligonucleotide
aggcguagggagcuuggga

SEQ ID NO: 14683 - RNA, 19 nt, Artificial Sequence
  Description of Artificial Sequence: Synthetic oligonucleotide
gaacuagauugcuguuguc

SEQ ID NO: 14684 - RNA, 19 nt, Artificial Sequence
  Description of Artificial Sequence: Synthetic oligonucleotide
uuccugcgagguuggagcu

SEQ ID NO: 14685 - RNA, 19 nt, Artificial Sequence
  Description of Artificial Sequence: Synthetic oligonucleotide
gggaacuagauugcuguug

SEQ ID NO: 14686 - RNA, 19 nt, Artificial Sequence
  Description of Artificial Sequence: Synthetic oligonucleotide
caccaucucuauacagaac

SEQ ID NO: 14687 - RNA, 19 nt, Artificial Sequence
  Description of Artificial Sequence: Synthetic oligonucleotide
uguggaauaugggcugcuc

SEQ ID NO: 14688 - RNA, 19 nt, Artificial Sequence
  Description of Artificial Sequence: Synthetic oligonucleotide
agucuuaauaagagagcau

SEQ ID NO: 14689 - RNA, 19 nt, Artificial Sequence
  Description of Artificial Sequence: Synthetic oligonucleotide
ggaacuagauugcuguugu

SEQ ID NO: 14690 - RNA, 19 nt, Artificial Sequence
  Description of Artificial Sequence: Synthetic oligonucleotide
  modified_base (12)..(12): a, c, u, g, unknown or other
ucgccaagcugnguuuuca

SEQ ID NO: 14691 - RNA, 19 nt, Artificial Sequence
  Description of Artificial Sequence: Synthetic oligonucleotide
acaugugaacccuccgcuu

SEQ ID NO: 14692 - RNA, 19 nt, Artificial Sequence
  Description of Artificial Sequence: Synthetic oligonucleotide
ucgaggcucuaugcaaccc

SEQ ID NO: 14693 - RNA, 19 nt, Artificial Sequence
  Description of Artificial Sequence: Synthetic oligonucleotide
gagcaacauguguagugaa

SEQ ID NO: 14694 - RNA, 19 nt, Artificial Sequence
  Description of Artificial Sequence: Synthetic oligonucleotide
ccauuuacucucaugugga

SEQ ID NO: 14695 - RNA, 19 nt, Artificial Sequence
  Description of Artificial Sequence: Synthetic oligonucleotide
uuaccgugcuugccuggcu

SEQ ID NO: 14696 - RNA, 19 nt, Artificial Sequence
  Description of Artificial Sequence: Synthetic oligonucleotide
agugggagcagcauacgua

SEQ ID NO: 14697 - RNA, 19 nt, Artificial Sequence
  Description of Artificial Sequence: Synthetic oligonucleotide
cuauugggcuuauauuugu

SEQ ID NO: 14698 - RNA, 19 nt, Artificial Sequence
  Description of Artificial Sequence: Synthetic oligonucleotide
augagcaauggaacuugug

SEQ ID NO: 14699 - RNA, 19 nt, Artificial Sequence
  Description of Artificial Sequence: Synthetic oligonucleotide
ccuagaauuaucacucaaa

SEQ ID NO: 14700 - RNA, 19 nt, Artificial Sequence
  Description of Artificial Sequence: Synthetic oligonucleotide
auguacugcuacauauagu

SEQ ID NO: 14701 - RNA, 19 nt, Artificial Sequence
  Description of Artificial Sequence: Synthetic oligonucleotide
uuggagcaacauguguagu

SEQ ID NO: 14702 - RNA, 19 nt, Artificial Sequence
  Description of Artificial Sequence: Synthetic oligonucleotide
ggagugauuguguguccug

SEQ ID NO: 14703 - RNA, 19 nt, Artificial Sequence
  Description of Artificial Sequence: Synthetic oligonucleotide
gcgagguuggagcugacga

SEQ ID NO: 14704 - RNA, 19 nt, Artificial Sequence
  Description of Artificial Sequence: Synthetic oligonucleotide
acacaguaacuagcauauc

SEQ ID NO: 14705 - RNA, 19 nt, Artificial Sequence
  Description of Artificial Sequence: Synthetic oligonucleotide
uggcuaagguugaguggcu

SEQ ID NO: 14706 - RNA, 19 nt, Artificial Sequence
  Description of Artificial Sequence: Synthetic oligonucleotide
uuccagucuccaguucaug

SEQ ID NO: 14707 - RNA, 19 nt, Artificial Sequence
  Description of Artificial Sequence: Synthetic oligonucleotide
caccauuacaaaacuucua

SEQ ID NO: 14708 - RNA, 19 nt, Artificial Sequence
  Description of Artificial Sequence: Synthetic oligonucleotide
guauccaguguaaauuggu

SEQ ID NO: 14709 - RNA, 19 nt, Artificial Sequence
  Description of Artificial Sequence: Synthetic oligonucleotide
cucccuaaguacaccugca

SEQ ID NO: 14710 - RNA, 19 nt, Artificial Sequence
  Description of Artificial Sequence: Synthetic oligonucleotide
ugauuggcugaugcugauc

SEQ ID NO: 14711 - RNA, 19 nt, Artificial Sequence
  Description of Artificial Sequence: Synthetic oligonucleotide
ugugaacccuccgcuugca

SEQ ID NO: 14712 - RNA, 19 nt, Artificial Sequence
  Description of Artificial Sequence: Synthetic oligonucleotide
aacccuccgcuugcagauc

SEQ ID NO: 14713 - RNA, 19 nt, Artificial Sequence
  Description of Artificial Sequence: Synthetic oligonucleotide
ccgauuuuaccgugcuugc

SEQ ID NO: 14714 - RNA, 19 nt, Artificial Sequence
  Description of Artificial Sequence: Synthetic oligonucleotide
gugggagcagcauacguau

SEQ ID NO: 14715 - RNA, 19 nt, Artificial Sequence
  Description of Artificial Sequence: Synthetic oligonucleotide
guacugcuacauauaguga

SEQ ID NO: 14716 - RNA, 19 nt, Artificial Sequence
  Description of Artificial Sequence: Synthetic oligonucleotide
acacgcugacuuaaacugu

SEQ ID NO: 14717 - RNA, 19 nt, Artificial Sequence
  Description of Artificial Sequence: Synthetic oligonucleotide
gcugacuacuccccauagc

SEQ ID NO: 14718 - RNA, 19 nt, Artificial Sequence
  Description of Artificial Sequence: Synthetic oligonucleotide
auggaggaguugaauacua

SEQ ID NO: 14719 - RNA, 19 nt, Artificial Sequence
  Description of Artificial Sequence: Synthetic oligonucleotide
aucuguagcuuaggguuaa

SEQ ID NO: 14720 - RNA, 19 nt, Artificial Sequence
  Description of Artificial Sequence: Synthetic oligonucleotide
ccuggcuaauaaucaacuc

SEQ ID NO: 14721 - RNA, 19 nt, Artificial Sequence
  Description of Artificial Sequence: Synthetic oligonucleotide
cugagccauaucaucuaaa

SEQ ID NO: 14722 - RNA, 19 nt, Artificial Sequence
  Description of Artificial Sequence: Synthetic oligonucleotide
gugagacaucugaauuagc

SEQ ID NO: 14723 - RNA, 19 nt, Artificial Sequence
  Description of Artificial Sequence: Synthetic oligonucleotide
cugacucagaagcuuuucu

SEQ ID NO: 14724 - RNA, 19 nt, Artificial Sequence
  Description of Artificial Sequence: Synthetic oligonucleotide
gagcauucaaucugcuguu

SEQ ID NO: 14725 - RNA, 19 nt, Artificial Sequence
  Description of Artificial Sequence: Synthetic oligonucleotide
cccauaguuaguauuaaau

SEQ ID NO: 14726 - RNA, 19 nt, Artificial Sequence
  Description of Artificial Sequence: Synthetic oligonucleotide
gcauacuauuguaugguaa

SEQ ID NO: 14727 - RNA, 19 nt, Artificial Sequence
  Description of Artificial Sequence: Synthetic oligonucleotide
acuacuccccauagccucu

SEQ ID NO: 14728 - RNA, 19 nt, Artificial Sequence
  Description of Artificial Sequence: Synthetic oligonucleotide
  modified_base (14)..(14): a, c, u, g, unknown or other
agucgccaagcugnguuuu

SEQ ID NO: 14729 - RNA, 19 nt, Artificial Sequence
  Description of Artificial Sequence: Synthetic oligonucleotide
cgucacaugguuagucagc

SEQ ID NO: 14730 - RNA, 19 nt, Artificial Sequence
  Description of Artificial Sequence: Synthetic oligonucleotide
cugcauacuauuguauggu

SEQ ID NO: 14731 - RNA, 19 nt, Artificial Sequence
  Description of Artificial Sequence: Synthetic oligonucleotide
ccauauuauguagaaaaua

SEQ ID NO: 14732 - RNA, 19 nt, Artificial Sequence
  Description of Artificial Sequence: Synthetic oligonucleotide
cuacuuaccccgcccugga

SEQ ID NO: 14733 - RNA, 19 nt, Artificial Sequence
  Description of Artificial Sequence: Synthetic oligonucleotide
auacugcggugugauggug

SEQ ID NO: 14734 - RNA, 19 nt, Artificial Sequence
  Description of Artificial Sequence: Synthetic oligonucleotide
ugggagcagcauacguaua

SEQ ID NO: 14735 - RNA, 19 nt, Artificial Sequence
  Description of Artificial Sequence: Synthetic oligonucleotide
accgugcuugccuggcuaa

SEQ ID NO: 14736 - RNA, 19 nt, Artificial Sequence
  Description of Artificial Sequence: Synthetic oligonucleotide
ucuguagcuuaggguuaac

SEQ ID NO: 14737 - RNA, 19 nt, Artificial Sequence
  Description of Artificial Sequence: Synthetic oligonucleotide
gaucucccauguucuggaa

SEQ ID NO: 14738 - RNA, 19 nt, Artificial Sequence
  Description of Artificial Sequence: Synthetic oligonucleotide
guaaagggcaccgcauacu

SEQ ID NO: 14739 - RNA, 19 nt, Artificial Sequence
  Description of Artificial Sequence: Synthetic oligonucleotide
cauacugcggugugauggu

SEQ ID NO: 14740 - RNA, 19 nt, Artificial Sequence
  Description of Artificial Sequence: Synthetic oligonucleotide
gaugacucgcccacucacu

SEQ ID NO: 14741 - RNA, 19 nt, Artificial Sequence
  Description of Artificial Sequence: Synthetic oligonucleotide
cagaugacucgcccacuca

SEQ ID NO: 14742 - RNA, 19 nt, Artificial Sequence
  Description of Artificial Sequence: Synthetic oligonucleotide
aucucauccuagagagaga

SEQ ID NO: 14743 - RNA, 19 nt, Artificial Sequence
  Description of Artificial Sequence: Synthetic oligonucleotide
ggaauaugggcugcucaga

SEQ ID NO: 14744 - RNA, 19 nt, Artificial Sequence
  Description of Artificial Sequence: Synthetic oligonucleotide
gcugcaccgcgcucggucc

SEQ ID NO: 14745 - RNA, 19 nt, Artificial Sequence
  Description of Artificial Sequence: Synthetic oligonucleotide
caguggccaacgucacaug

SEQ ID NO: 14746 - RNA, 19 nt, Artificial Sequence
  Description of Artificial Sequence: Synthetic oligonucleotide
caccgcauacugcggugug

SEQ ID NO: 14747 - RNA, 19 nt, Artificial Sequence
  Description of Artificial Sequence: Synthetic oligonucleotide
agcuuaggguuaaccuucu

SEQ ID NO: 14748 - RNA, 19 nt, Artificial Sequence
  Description of Artificial Sequence: Synthetic oligonucleotide
gcggauagugaugacgcuc

SEQ ID NO: 14749 - RNA, 19 nt, Artificial Sequence
  Description of Artificial Sequence: Synthetic oligonucleotide
cccauggacuuaagacucc

SEQ ID NO: 14750 - RNA, 19 nt, Artificial Sequence
  Description of Artificial Sequence: Synthetic oligonucleotide
ggcuggacagaguugugua

SEQ ID NO: 14751 - RNA, 19 nt, Artificial Sequence
  Description of Artificial Sequence: Synthetic oligonucleotide
ggcaccgcauacugcggug

SEQ ID NO: 14752 - RNA, 19 nt, Artificial Sequence
  Description of Artificial Sequence: Synthetic oligonucleotide
cggaaacgcaaguucuaag

SEQ ID NO: 14753 - RNA, 19 nt, Artificial Sequence
  Description of Artificial Sequence: Synthetic oligonucleotide
agcggguauccaguguaaa

SEQ ID NO: 14754 - RNA, 19 nt, Artificial Sequence
  Description of Artificial Sequence: Synthetic oligonucleotide
uaggaacaacugggaacuc

SEQ ID NO: 14755 - RNA, 19 nt, Artificial Sequence
  Description of Artificial Sequence: Synthetic oligonucleotide
auguuccgacuagaaacua

SEQ ID NO: 14756 - RNA, 19 nt, Artificial Sequence
  Description of Artificial Sequence: Synthetic oligonucleotide
gacuuaagacucccaucuu

SEQ ID NO: 14757 - RNA, 19 nt, Artificial Sequence
  Description of Artificial Sequence: Synthetic oligonucleotide
cggauagugaugacgcuca

SEQ ID NO: 14758 - RNA, 19 nt, Artificial Sequence
  Description of Artificial Sequence: Synthetic oligonucleotide
aggcacaaugaugguucga

SEQ ID NO: 14759 - RNA, 19 nt, Artificial Sequence
  Description of Artificial Sequence: Synthetic oligonucleotide
cugcaccgcgcucgguccc

SEQ ID NO: 14760 - RNA, 19 nt, Artificial Sequence
  Description of Artificial Sequence: Synthetic oligonucleotide
ggguaaagggcaccgcaua

SEQ ID NO: 14761 - RNA, 19 nt, Artificial Sequence
  Description of Artificial Sequence: Synthetic oligonucleotide
ugcaccgcgcucggucccc

SEQ ID NO: 14762 - RNA, 19 nt, Artificial Sequence
  Description of Artificial Sequence: Synthetic oligonucleotide
cacgcugacuuaaacuguu

SEQ ID NO: 14763 - RNA, 19 nt, Artificial Sequence
  Description of Artificial Sequence: Synthetic oligonucleotide
cacugcggauagugaugac

SEQ ID NO: 14764 - RNA, 19 nt, Artificial Sequence
  Description of Artificial Sequence: Synthetic oligonucleotide
caguguaaauuggugguau

SEQ ID NO: 14765 - RNA, 19 nt, Artificial Sequence
  Description of Artificial Sequence: Synthetic oligonucleotide
cucguaguauggggacaug

SEQ ID NO: 14766 - RNA, 19 nt, Artificial Sequence
  Description of Artificial Sequence: Synthetic oligonucleotide
gcaucaaucgucauuucuu

SEQ ID NO: 14767 - RNA, 19 nt, Artificial Sequence
  Description of Artificial Sequence: Synthetic oligonucleotide
  modified_base (13)..(13): a, c, u, g, unknown or other
gucgccaagcugnguuuuc

SEQ ID NO: 14768 - RNA, 19 nt, Artificial Sequence
  Description of Artificial Sequence: Synthetic oligonucleotide
  modified_base (10)..(10): a, c, u, g, unknown or other
gccaagcugnguuuucaau

SEQ ID NO: 14769 - RNA, 19 nt, Artificial Sequence
  Description of Artificial Sequence: Synthetic oligonucleotide
cucccauguucuggaaaca

SEQ ID NO: 14770 - RNA, 19 nt, Artificial Sequence
  Description of Artificial Sequence: Synthetic oligonucleotide
guugccccggagagcacuc

SEQ ID NO: 14771 - RNA, 19 nt, Artificial Sequence
  Description of Artificial Sequence: Synthetic oligonucleotide
cgauuuuaccgugcuugcc

SEQ ID NO: 14772 - RNA, 19 nt, Artificial Sequence
  Description of Artificial Sequence: Synthetic oligonucleotide
gaagggccccaagaaugua

SEQ ID NO: 14773 - RNA, 19 nt, Artificial Sequence
  Description of Artificial Sequence: Synthetic oligonucleotide
uugccccggagagcacuca

SEQ ID NO: 14774 - RNA, 19 nt, Artificial Sequence
  Description of Artificial Sequence: Synthetic oligonucleotide
guucgagugccagugccau

SEQ ID NO: 14775 - RNA, 19 nt, Artificial Sequence
  Description of Artificial Sequence: Synthetic oligonucleotide
cagcggguauccaguguaa

SEQ ID NO: 14776 - RNA, 19 nt, Artificial Sequence
  Description of Artificial Sequence: Synthetic oligonucleotide
cgagcuauugggcuuauau

SEQ ID NO: 14777 - RNA, 19 nt, Artificial Sequence
  Description of Artificial Sequence: Synthetic oligonucleotide
gaggcucuaugcaacccuu

SEQ ID NO: 14778 - RNA, 19 nt, Artificial Sequence
  Description of Artificial Sequence: Synthetic oligonucleotide
guuccuacaugcacuuauu

SEQ ID NO: 14779 - RNA, 19 nt, Artificial Sequence
  Description of Artificial Sequence: Synthetic oligonucleotide
gcacaaugaugguucgagu

SEQ ID NO: 14780 - RNA, 19 nt, Artificial Sequence
  Description of Artificial Sequence: Synthetic oligonucleotide
ggguugcuacagugcaguc

SEQ ID NO: 14781 - RNA, 19 nt, Artificial Sequence
  Description of Artificial Sequence: Synthetic oligonucleotide
gcuuaggguuaaccuucuc

SEQ ID NO: 14782 - RNA, 19 nt, Artificial Sequence
  Description of Artificial Sequence: Synthetic oligonucleotide
cugcuagcugcugacuacu

SEQ ID NO: 14783 - RNA, 19 nt, Artificial Sequence
  Description of Artificial Sequence: Synthetic oligonucleotide
ggcuaauaaucaacuccua

SEQ ID NO: 14784 - RNA, 19 nt, Artificial Sequence
  Description of Artificial Sequence: Synthetic oligonucleotide
cucagcggguauccagugu

SEQ ID NO: 14785 - RNA, 19 nt, Artificial Sequence
  Description of Artificial Sequence: Synthetic oligonucleotide
aggcucuaugcaacccuuu

SEQ ID NO: 14786 - RNA, 19 nt, Artificial Sequence
  Description of Artificial Sequence: Synthetic oligonucleotide
ggguagcuucagaaugauc

SEQ ID NO: 14787 - RNA, 19 nt, Artificial Sequence
  Description of Artificial Sequence: Synthetic oligonucleotide
ggaccccuuucccauaguu

SEQ ID NO: 14788 - RNA, 19 nt, Artificial Sequence
  Description of Artificial Sequence: Synthetic oligonucleotide
ccgcccuggaaacccuuac

SEQ ID NO: 14789 - RNA, 19 nt, Artificial Sequence
  Description of Artificial Sequence: Synthetic oligonucleotide
ggguaucuggaaugaugau

SEQ ID NO: 14790 - RNA, 19 nt, Artificial Sequence
  Description of Artificial Sequence: Synthetic oligonucleotide
  modified_base (15)..(15): a, c, u, g, unknown or other
cagucgccaagcugnguuu

SEQ ID NO: 14791 - RNA, 19 nt, Artificial Sequence
  Description of Artificial Sequence: Synthetic oligonucleotide
ggugccccgucgagugcag

SEQ ID NO: 14792 - RNA, 19 nt, Artificial Sequence
  Description of Artificial Sequence: Synthetic oligonucleotide
gggcaccgcauacugcggu

SEQ ID NO: 14793 - RNA, 19 nt, Artificial Sequence
  Description of Artificial Sequence: Synthetic oligonucleotide
cguaguauggggacauguu

SEQ ID NO: 14794 - RNA, 19 nt, Artificial Sequence
  Description of Artificial Sequence: Synthetic oligonucleotide
gcuagaacacuggccugau

SEQ ID NO: 14795 - RNA, 19 nt, Artificial Sequence
  Description of Artificial Sequence: Synthetic oligonucleotide
gcaccgcauacugcggugu

SEQ ID NO: 14796 - RNA, 19 nt, Artificial Sequence
  Description of Artificial Sequence: Synthetic oligonucleotide
ccucguaguauggggacau

SEQ ID NO: 14797 - RNA, 19 nt, Artificial Sequence
  Description of Artificial Sequence: Synthetic oligonucleotide
gcccgagcuauugggcuua

SEQ ID NO: 14798 - RNA, 19 nt, Artificial Sequence
  Description of Artificial Sequence: Synthetic oligonucleotide
ccgcuugcagaucucccau

SEQ ID NO: 14799 - RNA, 19 nt, Artificial Sequence
  Description of Artificial Sequence: Synthetic oligonucleotide
gugccccgucgagugcagu

SEQ ID NO: 14800 - RNA, 19 nt, Artificial Sequence
  Description of Artificial Sequence: Synthetic oligonucleotide
ccgagcuauugggcuuaua

SEQ ID NO: 14801 - RNA, 19 nt, Artificial Sequence
  Description of Artificial Sequence: Synthetic oligonucleotide
cccgagcuauugggcuuau

SEQ ID NO: 14802 - RNA, 19 nt, Artificial Sequence
  Description of Artificial Sequence: Synthetic oligonucleotide
agagcuguuaacuugaccc

SEQ ID NO: 14803 - RNA, 19 nt, Artificial Sequence
  Description of Artificial Sequence: Synthetic oligonucleotide
uguguauacaagcaaaggg

SEQ ID NO: 14804 - RNA, 19 nt, Artificial Sequence
  Description of Artificial Sequence: Synthetic oligonucleotide
aaaaugacgagaauucugc

SEQ ID NO: 14805 - RNA, 19 nt, Artificial Sequence
  Description of Artificial Sequence: Synthetic oligonucleotide
uguaauuauaggcauaaga

SEQ ID NO: 14806 - RNA, 19 nt, Artificial Sequence
  Description of Artificial Sequence: Synthetic oligonucleotide
gaugcaguuacauggaacg

SEQ ID NO: 14807 - RNA, 19 nt, Artificial Sequence
  Description of Artificial Sequence: Synthetic oligonucleotide
gaaacggacacauuguacg

SEQ ID NO: 14808 - RNA, 19 nt, Artificial Sequence
  Description of Artificial Sequence: Synthetic oligonucleotide
uuagcauugacaauuuacc

SEQ ID NO: 14809 - RNA, 19 nt, Artificial Sequence
  Description of Artificial Sequence: Synthetic oligonucleotide
uacaauauaaugcuuguac

SEQ ID NO: 14810 - RNA, 19 nt, Artificial Sequence
  Description of Artificial Sequence: Synthetic oligonucleotide
aauauaaugcuuguacuuc

SEQ ID NO: 14811 - RNA, 19 nt, Artificial Sequence
  Description of Artificial Sequence: Synthetic oligonucleotide
uguugaaacggacacauug

SEQ ID NO: 14812 - RNA, 19 nt, Artificial Sequence
  Description of Artificial Sequence: Synthetic oligonucleotide
uuaaugcauagcuuaaggg

SEQ ID NO: 14813 - RNA, 19 nt, Artificial Sequence
  Description of Artificial Sequence: Synthetic oligonucleotide
aauucugcuacuuaauuau

SEQ ID NO: 14814 - RNA, 19 nt, Artificial Sequence
  Description of Artificial Sequence: Synthetic oligonucleotide
uuaugcaucuuauaucuag

SEQ ID NO: 14815 - RNA, 19 nt, Artificial Sequence
  Description of Artificial Sequence: Synthetic oligonucleotide
aaucauaaccccaucaaag

SEQ ID NO: 14816 - RNA, 19 nt, Artificial Sequence
  Description of Artificial Sequence: Synthetic oligonucleotide
aaucucaucgguuacccug

SEQ ID NO: 14817 - RNA, 19 nt, Artificial Sequence
  Description of Artificial Sequence: Synthetic oligonucleotide
auuaagauugcauucuuca

SEQ ID NO: 14818 - RNA, 19 nt, Artificial Sequence
  Description of Artificial Sequence: Synthetic oligonucleotide
acaaauuuugauaaacugg

SEQ ID NO: 14819 - RNA, 19 nt, Artificial Sequence
  Description of Artificial Sequence: Synthetic oligonucleotide
uuaaagaucaaauggcaau

SEQ ID NO: 14820 - RNA, 19 nt, Artificial Sequence
  Description of Artificial Sequence: Synthetic oligonucleotide
agcaagaccuuguuuaaac

SEQ ID NO: 14821 - RNA, 19 nt, Artificial Sequence
  Description of Artificial Sequence: Synthetic oligonucleotide
ugcguaacaagccuuaccu

SEQ ID NO: 14822 - RNA, 19 nt, Artificial Sequence
  Description of Artificial Sequence: Synthetic oligonucleotide
guguauacaagcaaagggg

SEQ ID NO: 14823 - RNA, 19 nt, Artificial Sequence
  Description of Artificial Sequence: Synthetic oligonucleotide
uuaaucauaaccccaucaa

SEQ ID NO: 14824 - RNA, 19 nt, Artificial Sequence
  Description of Artificial Sequence: Synthetic oligonucleotide
ucgcauacuaaccuggacc

SEQ ID NO: 14825 - RNA, 19 nt, Artificial Sequence
  Description of Artificial Sequence: Synthetic oligonucleotide
aaugcuuucgcucgauuga

SEQ ID NO: 14826 - RNA, 19 nt, Artificial Sequence
  Description of Artificial Sequence: Synthetic oligonucleotide
gauagcaagaccuuguuua

SEQ ID NO: 14827 - RNA, 19 nt, Artificial Sequence
  Description of Artificial Sequence: Synthetic oligonucleotide
uccauagacaagucgaggc

SEQ ID NO: 14828 - RNA, 19 nt, Artificial Sequence
  Description of Artificial Sequence: Synthetic oligonucleotide
agaccguaggcuuuggugg

SEQ ID NO: 14829 - RNA, 19 nt, Artificial Sequence
  Description of Artificial Sequence: Synthetic oligonucleotide
aacgacaagacuaauucug

SEQ ID NO: 14830 - RNA, 19 nt, Artificial Sequence
  Description of Artificial Sequence: Synthetic oligonucleotide
auagcuuaaggggaaagac

SEQ ID NO: 14831 - RNA, 19 nt, Artificial Sequence
  Description of Artificial Sequence: Synthetic oligonucleotide
acguuuauuaaacugaauu

SEQ ID NO: 14832 - RNA, 19 nt, Artificial Sequence
  Description of Artificial Sequence: Synthetic oligonucleotide
cauggaacguuuauuaaac

SEQ ID NO: 14833 - RNA, 19 nt, Artificial Sequence
  Description of Artificial Sequence: Synthetic oligonucleotide
uguacuccuagucuauaag

SEQ ID NO: 14834 - RNA, 19 nt, Artificial Sequence
  Description of Artificial Sequence: Synthetic oligonucleotide
ucaugcgaaagcaacaguc

SEQ ID NO: 14835 - RNA, 19 nt, Artificial Sequence
  Description of Artificial Sequence: Synthetic oligonucleotide
acaauauaaugcuuguacu

SEQ ID NO: 14836 - RNA, 19 nt, Artificial Sequence
  Description of Artificial Sequence: Synthetic oligonucleotide
uuaccagacguguugagga

SEQ ID NO: 14837 - RNA, 19 nt, Artificial Sequence
  Description of Artificial Sequence: Synthetic oligonucleotide
ugcguuguaacuggaaacg

SEQ ID NO: 14838 - RNA, 19 nt, Artificial Sequence
  Description of Artificial Sequence: Synthetic oligonucleotide
ugcgagaugcuucacaggu

SEQ ID NO: 14839 - RNA, 19 nt, Artificial Sequence
  Description of Artificial Sequence: Synthetic oligonucleotide
uucguuguuuugaagagaa

SEQ ID NO: 14840 - RNA, 19 nt, Artificial Sequence
  Description of Artificial Sequence: Synthetic oligonucleotide
ucaugucuagucuuguacc

SEQ ID NO: 14841 - RNA, 19 nt, Artificial Sequence
  Description of Artificial Sequence: Synthetic oligonucleotide
ucaucgguuacccugcaac

SEQ ID NO: 14842 - RNA, 19 nt, Artificial Sequence
  Description of Artificial Sequence: Synthetic oligonucleotide
ugguacuagauguaaaauc

SEQ ID NO: 14843 - RNA, 19 nt, Artificial Sequence
  Description of Artificial Sequence: Synthetic oligonucleotide
aagacuaauucugugccug

SEQ ID NO: 14844 - RNA, 19 nt, Artificial Sequence
  Description of Artificial Sequence: Synthetic oligonucleotide
uuuaccagacguguugagg

SEQ ID NO: 14845 - RNA, 19 nt, Artificial Sequence
  Description of Artificial Sequence: Synthetic oligonucleotide
ugcuauaggauuagguacu

SEQ ID NO: 14846 - RNA, 19 nt, Artificial Sequence
  Description of Artificial Sequence: Synthetic oligonucleotide
aaacgacaagacuaauucu

SEQ ID NO: 14847 - RNA, 19 nt, Artificial Sequence
  Description of Artificial Sequence: Synthetic oligonucleotide
aaacgugugauagaaugca

SEQ ID NO: 14848 - RNA, 19 nt, Artificial Sequence
  Description of Artificial Sequence: Synthetic oligonucleotide
ugaccauccguguugaaac

SEQ ID NO: 14849 - RNA, 19 nt, Artificial Sequence
  Description of Artificial Sequence: Synthetic oligonucleotide
aguacaauauaaugcuugu

SEQ ID NO: 14850 - RNA, 19 nt, Artificial Sequence
  Description of Artificial Sequence: Synthetic oligonucleotide
auaaacccaauccggaugu

SEQ ID NO: 14851 - RNA, 19 nt, Artificial Sequence
  Description of Artificial Sequence: Synthetic oligonucleotide
gaaagccuuaauuaaugca

SEQ ID NO: 14852 - RNA, 19 nt, Artificial Sequence
  Description of Artificial Sequence: Synthetic oligonucleotide
uaggauuagguacuuuugu

SEQ ID NO: 14853 - RNA, 19 nt, Artificial Sequence
  Description of Artificial Sequence: Synthetic oligonucleotide
cuaacauggcgcccgagcg

SEQ ID NO: 14854 - RNA, 19 nt, Artificial Sequence
  Description of Artificial Sequence: Synthetic oligonucleotide
aaugacgagaauucugcua

SEQ ID NO: 14855 - RNA, 19 nt, Artificial Sequence
  Description of Artificial Sequence: Synthetic oligonucleotide
uguugaggagacaacucug

SEQ ID NO: 14856 - RNA, 19 nt, Artificial Sequence
  Description of Artificial Sequence: Synthetic oligonucleotide
acagggaagaguuuaagua

SEQ ID NO: 14857 - RNA, 19 nt, Artificial Sequence
  Description of Artificial Sequence: Synthetic oligonucleotide
auauaaugcuuguacuucu

SEQ ID NO: 14858 - RNA, 19 nt, Artificial Sequence
  Description of Artificial Sequence: Synthetic oligonucleotide
uauaaugcuuguacuucug

SEQ ID NO: 14859 - RNA, 19 nt, Artificial Sequence
  Description of Artificial Sequence: Synthetic oligonucleotide
uccguguugaaacggacac

SEQ ID NO: 14860 - RNA, 19 nt, Artificial Sequence
  Description of Artificial Sequence: Synthetic oligonucleotide
caaacgugugauagaaugc

SEQ ID NO: 14861 - RNA, 19 nt, Artificial Sequence
  Description of Artificial Sequence: Synthetic oligonucleotide
accauuaaggcuucuuaug

SEQ ID NO: 14862 - RNA, 19 nt, Artificial Sequence
  Description of Artificial Sequence: Synthetic oligonucleotide
ugaaacggacacauuguac

SEQ ID NO: 14863 - RNA, 19 nt, Artificial Sequence
  Description of Artificial Sequence: Synthetic oligonucleotide
ugccuauaaacuguauccg

SEQ ID NO: 14864 - RNA, 19 nt, Artificial Sequence
  Description of Artificial Sequence: Synthetic oligonucleotide
acggacacauuguacgugg

SEQ ID NO: 14865 - RNA, 19 nt, Artificial Sequence
  Description of Artificial Sequence: Synthetic oligonucleotide
ucguauguacuccuagucu

SEQ ID NO: 14866 - RNA, 19 nt, Artificial Sequence
  Description of Artificial Sequence: Synthetic oligonucleotide
guuaaucauaaccccauca

SEQ ID NO: 14867 - RNA, 19 nt, Artificial Sequence
  Description of Artificial Sequence: Synthetic oligonucleotide
uuacacgucaccuguuagc

SEQ ID NO: 14868 - RNA, 19 nt, Artificial Sequence
  Description of Artificial Sequence: Synthetic oligonucleotide
uucguauguacuccuaguc

SEQ ID NO: 14869 - RNA, 19 nt, Artificial Sequence
  Description of Artificial Sequence: Synthetic oligonucleotide
aaacggacacauuguacgu

SEQ ID NO: 14870 - RNA, 19 nt, Artificial Sequence
  Description of Artificial Sequence: Synthetic oligonucleotide
uaccgauucagucucaguu

SEQ ID NO: 14871 - RNA, 19 nt, Artificial Sequence
  Description of Artificial Sequence: Synthetic oligonucleotide
aaaugacgagaauucugcu

SEQ ID NO: 14872 - RNA, 19 nt, Artificial Sequence
  Description of Artificial Sequence: Synthetic oligonucleotide
agccuuaccuuguguauac

SEQ ID NO: 14873 - RNA, 19 nt, Artificial Sequence
  Description of Artificial Sequence: Synthetic oligonucleotide
aguauaccuuagcauugac

SEQ ID NO: 14874 - RNA, 19 nt, Artificial Sequence
  Description of Artificial Sequence: Synthetic oligonucleotide
cuugacuccugcuauagga

SEQ ID NO: 14875 - RNA, 19 nt, Artificial Sequence
  Description of Artificial Sequence: Synthetic oligonucleotide
gauaggagagguaaugcca

SEQ ID NO: 14876 - RNA, 19 nt, Artificial Sequence
  Description of Artificial Sequence: Synthetic oligonucleotide
ugcgccaguguaauaaacu

SEQ ID NO: 14877 - RNA, 19 nt, Artificial Sequence
  Description of Artificial Sequence: Synthetic oligonucleotide
cuucguccuaacauggcgc

SEQ ID NO: 14878 - RNA, 19 nt, Artificial Sequence
  Description of Artificial Sequence: Synthetic oligonucleotide
uuucguauguacuccuagu

SEQ ID NO: 14879 - RNA, 19 nt, Artificial Sequence
  Description of Artificial Sequence: Synthetic oligonucleotide
cuuucguauguacuccuag

SEQ ID NO: 14880 - RNA, 19 nt, Artificial Sequence
  Description of Artificial Sequence: Synthetic oligonucleotide
acacuacuuacaucaugcg

SEQ ID NO: 14881 - RNA, 19 nt, Artificial Sequence
  Description of Artificial Sequence: Synthetic oligonucleotide
auagacaagucgaggcugc

SEQ ID NO: 14882 - RNA, 19 nt, Artificial Sequence
  Description of Artificial Sequence: Synthetic oligonucleotide
guugaggagacaacucugg

SEQ ID NO: 14883 - RNA, 19 nt, Artificial Sequence
  Description of Artificial Sequence: Synthetic oligonucleotide
accaugaccauccguguug

SEQ ID NO: 14884 - RNA, 19 nt, Artificial Sequence
  Description of Artificial Sequence: Synthetic oligonucleotide
aaucguacuccuggcuucg

SEQ ID NO: 14885 - RNA, 19 nt, Artificial Sequence
  Description of Artificial Sequence: Synthetic oligonucleotide
uugaaacggacacauugua

SEQ ID NO: 14886 - RNA, 19 nt, Artificial Sequence
  Description of Artificial Sequence: Synthetic oligonucleotide
cuuaaagaucaaauggcaa

SEQ ID NO: 14887 - RNA, 19 nt, Artificial Sequence
  Description of Artificial Sequence: Synthetic oligonucleotide
agacuaauucugugccugg

SEQ ID NO: 14888 - RNA, 19 nt, Artificial Sequence
  Description of Artificial Sequence: Synthetic oligonucleotide
cagaccgucuucuuuacuc

SEQ ID NO: 14889 - RNA, 19 nt, Artificial Sequence
  Description of Artificial Sequence: Synthetic oligonucleotide
uucguccuaacauggcgcc

SEQ ID NO: 14890 - RNA, 19 nt, Artificial Sequence
  Description of Artificial Sequence: Synthetic oligonucleotide
uuucacgucacggcuuagg

SEQ ID NO: 14891 - RNA, 19 nt, Artificial Sequence
  Description of Artificial Sequence: Synthetic oligonucleotide
uuuacccuaagggucacaa

SEQ ID NO: 14892 - RNA, 19 nt, Artificial Sequence
  Description of Artificial Sequence: Synthetic oligonucleotide
aguuacauggaacguuuau

SEQ ID NO: 14893 - RNA, 19 nt, Artificial Sequence
  Description of Artificial Sequence: Synthetic oligonucleotide
uuuaccgauucagucucag

SEQ ID NO: 14894 - RNA, 19 nt, Artificial Sequence
  Description of Artificial Sequence: Synthetic oligonucleotide
guuacacgucaccuguuag

SEQ ID NO: 14895 - RNA, 19 nt, Artificial Sequence
  Description of Artificial Sequence: Synthetic oligonucleotide
caucgguuacccugcaacc

SEQ ID NO: 14896 - RNA, 19 nt, Artificial Sequence
  Description of Artificial Sequence: Synthetic oligonucleotide
ugggcaugauccaccgagg

SEQ ID NO: 14897 - RNA, 19 nt, Artificial Sequence
  Description of Artificial Sequence: Synthetic oligonucleotide
cugcguuguaacuggaaac

SEQ ID NO: 14898 - RNA, 19 nt, Artificial Sequence
  Description of Artificial Sequence: Synthetic oligonucleotide
cagaaaagauccacggcuc

SEQ ID NO: 14899 - RNA, 19 nt, Artificial Sequence
  Description of Artificial Sequence: Synthetic oligonucleotide
cuccaagcuuccaaccagg

SEQ ID NO: 14900 - RNA, 19 nt, Artificial Sequence
  Description of Artificial Sequence: Synthetic oligonucleotide
cauagacaagucgaggcug

SEQ ID NO: 14901 - RNA, 19 nt, Artificial Sequence
  Description of Artificial Sequence: Synthetic oligonucleotide
caccaaacccuaaauccac

SEQ ID NO: 14902 - RNA, 19 nt, Artificial Sequence
  Description of Artificial Sequence: Synthetic oligonucleotide
uucgcauacuaaccuggac

SEQ ID NO: 14903 - RNA, 19 nt, Artificial Sequence
  Description of Artificial Sequence: Synthetic oligonucleotide
aacggacacauuguacgug

SEQ ID NO: 14904 - RNA, 19 nt, Artificial Sequence
  Description of Artificial Sequence: Synthetic oligonucleotide
uccuagucuauaagaucca

SEQ ID NO: 14905 - RNA, 19 nt, Artificial Sequence
  Description of Artificial Sequence: Synthetic oligonucleotide
uuucguuguuuugaagaga

SEQ ID NO: 14906 - RNA, 19 nt, Artificial Sequence
  Description of Artificial Sequence: Synthetic oligonucleotide
auagcaagaccuuguuuaa

SEQ ID NO: 14907 - RNA, 19 nt, Artificial Sequence
  Description of Artificial Sequence: Synthetic oligonucleotide
acacauuguacguggaguu

SEQ ID NO: 14908 - RNA, 19 nt, Artificial Sequence
  Description of Artificial Sequence: Synthetic oligonucleotide
cacgucacggcuuaggaaa

SEQ ID NO: 14909 - RNA, 19 nt, Artificial Sequence
  Description of Artificial Sequence: Synthetic oligonucleotide
ucaccuguuagcagaccgu

SEQ ID NO: 14910 - RNA, 19 nt, Artificial Sequence
  Description of Artificial Sequence: Synthetic oligonucleotide
gguacuagauguaaaaucu

SEQ ID NO: 14911 - RNA, 19 nt, Artificial Sequence
  Description of Artificial Sequence: Synthetic oligonucleotide
ugccuuacucagcaaaauu

SEQ ID NO: 14912 - RNA, 19 nt, Artificial Sequence
  Description of Artificial Sequence: Synthetic oligonucleotide
uaccagacguguugaggag

SEQ ID NO: 14913 - RNA, 19 nt, Artificial Sequence
  Description of Artificial Sequence: Synthetic oligonucleotide
guuuauugcuugccuauaa

SEQ ID NO: 14914 - RNA, 19 nt, Artificial Sequence
  Description of Artificial Sequence: Synthetic oligonucleotide
cugcguaacaagccuuacc

SEQ ID NO: 14915 - RNA, 19 nt, Artificial Sequence
  Description of Artificial Sequence: Synthetic oligonucleotide
gaauagucugcagugcuaa

SEQ ID NO: 14916 - RNA, 19 nt, Artificial Sequence
  Description of Artificial Sequence: Synthetic oligonucleotide
uucugcguaacaagccuua

SEQ ID NO: 14917 - RNA, 19 nt, Artificial Sequence
  Description of Artificial Sequence: Synthetic oligonucleotide
guccauagacaagucgagg

SEQ ID NO: 14918 - RNA, 19 nt, Artificial Sequence
  Description of Artificial Sequence: Synthetic oligonucleotide
acuagauguaaaaucucau

SEQ ID NO: 14919 - RNA, 19 nt, Artificial Sequence
  Description of Artificial Sequence: Synthetic oligonucleotide
auugugcggaauucuuccu

SEQ ID NO: 14920 - RNA, 19 nt, Artificial Sequence
  Description of Artificial Sequence: Synthetic oligonucleotide
ucgguuacccugcaaccau

SEQ ID NO: 14921 - RNA, 19 nt, Artificial Sequence
  Description of Artificial Sequence: Synthetic oligonucleotide
cacuacuuacaucaugcga

SEQ ID NO: 14922 - RNA, 19 nt, Artificial Sequence
  Description of Artificial Sequence: Synthetic oligonucleotide
uuuuaccgauucagucuca

SEQ ID NO: 14923 - RNA, 19 nt, Artificial Sequence
  Description of Artificial Sequence: Synthetic oligonucleotide
ugauugaaucgcacucguc

SEQ ID NO: 14924 - RNA, 19 nt, Artificial Sequence
  Description of Artificial Sequence: Synthetic oligonucleotide
gaucuguaugcacuauaaa

SEQ ID NO: 14925 - RNA, 19 nt, Artificial Sequence
  Description of Artificial Sequence: Synthetic oligonucleotide
aucaugcgaaagcaacagu

SEQ ID NO: 14926 - RNA, 19 nt, Artificial Sequence
  Description of Artificial Sequence: Synthetic oligonucleotide
acguguugaggagacaacu

SEQ ID NO: 14927 - RNA, 19 nt, Artificial Sequence
  Description of Artificial Sequence: Synthetic oligonucleotide
agacguguugaggagacaa

SEQ ID NO: 14928 - RNA, 19 nt, Artificial Sequence
  Description of Artificial Sequence: Synthetic oligonucleotide
ccuuacucagcaaaauuuc

SEQ ID NO: 14929 - RNA, 19 nt, Artificial Sequence
  Description of Artificial Sequence: Synthetic oligonucleotide
agaguugaugcuauugcau

SEQ ID NO: 14930 - RNA, 19 nt, Artificial Sequence
  Description of Artificial Sequence: Synthetic oligonucleotide
ugaaucgcacucgucucca

SEQ ID NO: 14931 - RNA, 19 nt, Artificial Sequence
  Description of Artificial Sequence: Synthetic oligonucleotide
acuaauccaaucacccaca

SEQ ID NO: 14932 - RNA, 19 nt, Artificial Sequence
  Description of Artificial Sequence: Synthetic oligonucleotide
agcccacccauuccagacg

SEQ ID NO: 14933 - RNA, 19 nt, Artificial Sequence
  Description of Artificial Sequence: Synthetic oligonucleotide
ggcaugauccaccgaggcg

SEQ ID NO: 14934 - RNA, 19 nt, Artificial Sequence
  Description of Artificial Sequence: Synthetic oligonucleotide
uuaugccaguuuguauugc

SEQ ID NO: 14935 - RNA, 19 nt, Artificial Sequence
  Description of Artificial Sequence: Synthetic oligonucleotide
gggguuuacccuugggucc

SEQ ID NO: 14936 - RNA, 19 nt, Artificial Sequence
  Description of Artificial Sequence: Synthetic oligonucleotide
cacucgucuccauaucaac

SEQ ID NO: 14937 - RNA, 19 nt, Artificial Sequence
  Description of Artificial Sequence: Synthetic oligonucleotide
ugcggaauucuuccuuguc

SEQ ID NO: 14938 - RNA, 19 nt, Artificial Sequence
  Description of Artificial Sequence: Synthetic oligonucleotide
cauccguguugaaacggac

SEQ ID NO: 14939 - RNA, 19 nt, Artificial Sequence
  Description of Artificial Sequence: Synthetic oligonucleotide
uguauccgugaaagacuga

SEQ ID NO: 14940 - RNA, 19 nt, Artificial Sequence
  Description of Artificial Sequence: Synthetic oligonucleotide
ucuaggugauggguuuacc

SEQ ID NO: 14941 - RNA, 19 nt, Artificial Sequence
  Description of Artificial Sequence: Synthetic oligonucleotide
aacccaauccggaugucaa

SEQ ID NO: 14942 - RNA, 19 nt, Artificial Sequence
  Description of Artificial Sequence: Synthetic oligonucleotide
ucacgucacggcuuaggaa

SEQ ID NO: 14943 - RNA, 19 nt, Artificial Sequence
  Description of Artificial Sequence: Synthetic oligonucleotide
gguguaauuauaggcauaa

SEQ ID NO: 14944 - RNA, 19 nt, Artificial Sequence
  Description of Artificial Sequence: Synthetic oligonucleotide
uuaccgauucagucucagu

SEQ ID NO: 14945 - RNA, 19 nt, Artificial Sequence
  Description of Artificial Sequence: Synthetic oligonucleotide
cauuguacguggaguucug

SEQ ID NO: 14946 - RNA, 19 nt, Artificial Sequence
  Description of Artificial Sequence: Synthetic oligonucleotide
gcuucgcauacuaaccugg

SEQ ID NO: 14947 - RNA, 19 nt, Artificial Sequence
  Description of Artificial Sequence: Synthetic oligonucleotide
ugacuccugcuauaggauu

SEQ ID NO: 14948 - RNA, 19 nt, Artificial Sequence
  Description of Artificial Sequence: Synthetic oligonucleotide
acaccguuacacgucaccu

SEQ ID NO: 14949 - RNA, 19 nt, Artificial Sequence
  Description of Artificial Sequence: Synthetic oligonucleotide
ugcuugccuauaaacugua

SEQ ID NO: 14950 - RNA, 19 nt, Artificial Sequence
  Description of Artificial Sequence: Synthetic oligonucleotide
auaccuuagcauugacaau

SEQ ID NO: 14951 - RNA, 19 nt, Artificial Sequence
  Description of Artificial Sequence: Synthetic oligonucleotide
acgacaagacuaauucugu

SEQ ID NO: 14952 - RNA, 19 nt, Artificial Sequence
  Description of Artificial Sequence: Synthetic oligonucleotide
aagccuuaccuuguguaua

SEQ ID NO: 14953 - RNA, 19 nt, Artificial Sequence
  Description of Artificial Sequence: Synthetic oligonucleotide
augaccauccguguugaaa

SEQ ID NO: 14954 - RNA, 19 nt, Artificial Sequence
  Description of Artificial Sequence: Synthetic oligonucleotide
acgagaauucugcuacuua

SEQ ID NO: 14955 - RNA, 19 nt, Artificial Sequence
  Description of Artificial Sequence: Synthetic oligonucleotide
uacuaaccuggaccucuga

SEQ ID NO: 14956 - RNA, 19 nt, Artificial Sequence
  Description of Artificial Sequence: Synthetic oligonucleotide
gcuaggggcucucuugucc

SEQ ID NO: 14957 - RNA, 19 nt, Artificial Sequence
  Description of Artificial Sequence: Synthetic oligonucleotide
augcacuauaaaacaccuc

SEQ ID NO: 14958 - RNA, 19 nt, Artificial Sequence
  Description of Artificial Sequence: Synthetic oligonucleotide
caugcgaaagcaacagucu

SEQ ID NO: 14959 - RNA, 19 nt, Artificial Sequence
  Description of Artificial Sequence: Synthetic oligonucleotide
cuacuuacaucaugcgaaa

SEQ ID NO: 14960 - RNA, 19 nt, Artificial Sequence
  Description of Artificial Sequence: Synthetic oligonucleotide
acggacaccguuacacguc

SEQ ID NO: 14961 - RNA, 19 nt, Artificial Sequence
  Description of Artificial Sequence: Synthetic oligonucleotide
gacaacagguugaguuggc

SEQ ID NO: 14962 - RNA, 19 nt, Artificial Sequence
  Description of Artificial Sequence: Synthetic oligonucleotide
guugaaacggacacauugu

SEQ ID NO: 14963 - RNA, 19 nt, Artificial Sequence
  Description of Artificial Sequence: Synthetic oligonucleotide
gccuuaauuaaugcauagc

SEQ ID NO: 14964 - RNA, 19 nt, Artificial Sequence
  Description of Artificial Sequence: Synthetic oligonucleotide
uuguacccuccauucuccu

SEQ ID NO: 14965 - RNA, 19 nt, Artificial Sequence
  Description of Artificial Sequence: Synthetic oligonucleotide
ucugcguaacaagccuuac

SEQ ID NO: 14966 - RNA, 19 nt, Artificial Sequence
  Description of Artificial Sequence: Synthetic oligonucleotide
agcgagacagaggauuuaa

SEQ ID NO: 14967 - RNA, 19 nt, Artificial Sequence
  Description of Artificial Sequence: Synthetic oligonucleotide
gacguguugaggagacaac

SEQ ID NO: 14968 - RNA, 19 nt, Artificial Sequence
  Description of Artificial Sequence: Synthetic oligonucleotide
caagugcugaugaacccaa

SEQ ID NO: 14969 - RNA, 19 nt, Artificial Sequence
  Description of Artificial Sequence: Synthetic oligonucleotide
ccaaacccuaaauccacug

SEQ ID NO: 14970 - RNA, 19 nt, Artificial Sequence
  Description of Artificial Sequence: Synthetic oligonucleotide
acagauuguggaagauucu

SEQ ID NO: 14971 - RNA, 19 nt, Artificial Sequence
  Description of Artificial Sequence: Synthetic oligonucleotide
uccgugggcgcacuugcua

SEQ ID NO: 14972 - RNA, 19 nt, Artificial Sequence
  Description of Artificial Sequence: Synthetic oligonucleotide
acccacauugugcggaauu

SEQ ID NO: 14973 - RNA, 19 nt, Artificial Sequence
  Description of Artificial Sequence: Synthetic oligonucleotide
cauacuaaccuggaccucu

SEQ ID NO: 14974 - RNA, 19 nt, Artificial Sequence
  Description of Artificial Sequence: Synthetic oligonucleotide
caucuuauaucuagguuuu

SEQ ID NO: 14975 - RNA, 19 nt, Artificial Sequence
  Description of Artificial Sequence: Synthetic oligonucleotide
ggcuucgcauacuaaccug

SEQ ID NO: 14976 - RNA, 19 nt, Artificial Sequence
  Description of Artificial Sequence: Synthetic oligonucleotide
ccuaauauauuggaauaga

SEQ ID NO: 14977 - RNA, 19 nt, Artificial Sequence
  Description of Artificial Sequence: Synthetic oligonucleotide
cacauuguacguggaguuc

SEQ ID NO: 14978 - RNA, 19 nt, Artificial Sequence
  Description of Artificial Sequence: Synthetic oligonucleotide
ggaugcaguuacauggaac

SEQ ID NO: 14979 - RNA, 19 nt, Artificial Sequence
  Description of Artificial Sequence: Synthetic oligonucleotide
cagguauggcuuucaguca

SEQ ID NO: 14980 - RNA, 19 nt, Artificial Sequence
  Description of Artificial Sequence: Synthetic oligonucleotide
uagcaagaccuuguuuaaa

SEQ ID NO: 14981 - RNA, 19 nt, Artificial Sequence
  Description of Artificial Sequence: Synthetic oligonucleotide
auccguguugaaacggaca

SEQ ID NO: 14982 - RNA, 19 nt, Artificial Sequence
  Description of Artificial Sequence: Synthetic oligonucleotide
gcguuguaacuggaaacgg

SEQ ID NO: 14983 - RNA, 19 nt, Artificial Sequence
  Description of Artificial Sequence: Synthetic oligonucleotide
caccuguuagcagaccguc

SEQ ID NO: 14984 - RNA, 19 nt, Artificial Sequence
  Description of Artificial Sequence: Synthetic oligonucleotide
ugcauagcuuaaggggaaa

SEQ ID NO: 14985 - RNA, 19 nt, Artificial Sequence
  Description of Artificial Sequence: Synthetic oligonucleotide
guugugaucccugcguugu

SEQ ID NO: 14986 - RNA, 19 nt, Artificial Sequence
  Description of Artificial Sequence: Synthetic oligonucleotide
cacggcuuaggaaaauacu

SEQ ID NO: 14987 - RNA, 19 nt, Artificial Sequence
  Description of Artificial Sequence: Synthetic oligonucleotide
gcucaaacgugugauagaa

SEQ ID NO: 14988 - RNA, 19 nt, Artificial Sequence
  Description of Artificial Sequence: Synthetic oligonucleotide
ccccuucguccuaacaugg

SEQ ID NO: 14989 - RNA, 19 nt, Artificial Sequence
  Description of Artificial Sequence: Synthetic oligonucleotide
guacaauauaaugcuugua

SEQ ID NO: 14990 - RNA, 19 nt, Artificial Sequence
  Description of Artificial Sequence: Synthetic oligonucleotide
gcauagcuuaaggggaaag

SEQ ID NO: 14991 - RNA, 19 nt, Artificial Sequence
  Description of Artificial Sequence: Synthetic oligonucleotide
ucguccuaacauggcgccc

SEQ ID NO: 14992 - RNA, 19 nt, Artificial Sequence
  Description of Artificial Sequence: Synthetic oligonucleotide
gucuaggugauggguuuac

SEQ ID NO: 14993 - RNA, 19 nt, Artificial Sequence
  Description of Artificial Sequence: Synthetic oligonucleotide
gguuuaccagacguguuga

SEQ ID NO: 14994 - RNA, 19 nt, Artificial Sequence
  Description of Artificial Sequence: Synthetic oligonucleotide
uagacaagucgaggcugcu

SEQ ID NO: 14995 - RNA, 19 nt, Artificial Sequence
  Description of Artificial Sequence: Synthetic oligonucleotide
caagacuaauucugugccu

SEQ ID NO: 14996 - RNA, 19 nt, Artificial Sequence
  Description of Artificial Sequence: Synthetic oligonucleotide
cugauugaaucgcacucgu

SEQ ID NO: 14997 - RNA, 19 nt, Artificial Sequence
  Description of Artificial Sequence: Synthetic oligonucleotide
ucccugcguuguaacugga

SEQ ID NO: 14998 - RNA, 19 nt, Artificial Sequence
  Description of Artificial Sequence: Synthetic oligonucleotide
gcaagugcugaugaaccca

SEQ ID NO: 14999 - RNA, 19 nt, Artificial Sequence
  Description of Artificial Sequence: Synthetic oligonucleotide
ggguuuacccuuggguccc

SEQ ID NO: 15000 - RNA, 19 nt, Artificial Sequence
  Description of Artificial Sequence: Synthetic oligonucleotide
gaccguaggcuuugguggu

SEQ ID NO: 15001 - RNA, 19 nt, Artificial Sequence
  Description of Artificial Sequence: Synthetic oligonucleotide
caagccuuaccuuguguau

SEQ ID NO: 15002 - RNA, 19 nt, Artificial Sequence
  Description of Artificial Sequence: Synthetic oligonucleotide
ggaauagauguugugccgu

SEQ ID NO: 15003 - RNA, 19 nt, Artificial Sequence
  Description of Artificial Sequence: Synthetic oligonucleotide
cacagguauggcuuucagu

SEQ ID NO: 15004 - RNA, 19 nt, Artificial Sequence
  Description of Artificial Sequence: Synthetic oligonucleotide
gccuauaaacuguauccgu

SEQ ID NO: 15005 - RNA, 19 nt, Artificial Sequence
  Description of Artificial Sequence: Synthetic oligonucleotide
accuguuagcagaccgucu

SEQ ID NO: 15006 - RNA, 19 nt, Artificial Sequence
  Description of Artificial Sequence: Synthetic oligonucleotide
cgacaagacuaauucugug

SEQ ID NO: 15007 - RNA, 19 nt, Artificial Sequence
  Description of Artificial Sequence: Synthetic oligonucleotide
ucacuccgaucaacauguc

SEQ ID NO: 15008 - RNA, 19 nt, Artificial Sequence
  Description of Artificial Sequence: Synthetic oligonucleotide
cguauguacuccuagucua

SEQ ID NO: 15009 - RNA, 19 nt, Artificial Sequence
  Description of Artificial Sequence: Synthetic oligonucleotide
cguccuaacauggcgcccg

SEQ ID NO: 15010 - RNA, 19 nt, Artificial Sequence
  Description of Artificial Sequence: Synthetic oligonucleotide
cacggacaccguuacacgu

SEQ ID NO: 15011 - RNA, 19 nt, Artificial Sequence
  Description of Artificial Sequence: Synthetic oligonucleotide
gucuuguacccuccauucu

SEQ ID NO: 15012 - RNA, 19 nt, Artificial Sequence
  Description of Artificial Sequence: Synthetic oligonucleotide
accuuagcauugacaauuu

SEQ ID NO: 15013 - RNA, 19 nt, Artificial Sequence
  Description of Artificial Sequence: Synthetic oligonucleotide
gugauagcaagaccuuguu

SEQ ID NO: 15014 - RNA, 19 nt, Artificial Sequence
  Description of Artificial Sequence: Synthetic oligonucleotide
gggcgcacuugcuagaagu

SEQ ID NO: 15015 - RNA, 19 nt, Artificial Sequence
  Description of Artificial Sequence: Synthetic oligonucleotide
gccguguagcuaaaggguc

SEQ ID NO: 15016 - RNA, 19 nt, Artificial Sequence
  Description of Artificial Sequence: Synthetic oligonucleotide
ccgugggcgcacuugcuag

SEQ ID NO: 15017 - RNA, 19 nt, Artificial Sequence
  Description of Artificial Sequence: Synthetic oligonucleotide
gucacggcuuaggaaaaua

SEQ ID NO: 15018 - RNA, 19 nt, Artificial Sequence
  Description of Artificial Sequence: Synthetic oligonucleotide
uaaccccaucaaagccaaa

SEQ ID NO: 15019 - RNA, 19 nt, Artificial Sequence
  Description of Artificial Sequence: Synthetic oligonucleotide
guuucacgucacggcuuag

SEQ ID NO: 15020 - RNA, 19 nt, Artificial Sequence
  Description of Artificial Sequence: Synthetic oligonucleotide
cacucaaaucaagacaguu

SEQ ID NO: 15021 - RNA, 19 nt, Artificial Sequence
  Description of Artificial Sequence: Synthetic oligonucleotide
ggagagguaaugccauagu

SEQ ID NO: 15022 - RNA, 19 nt, Artificial Sequence
  Description of Artificial Sequence: Synthetic oligonucleotide
gacgagaauucugcuacuu

SEQ ID NO: 15023 - RNA, 19 nt, Artificial Sequence
  Description of Artificial Sequence: Synthetic oligonucleotide
cacgugacugggcagcagu

SEQ ID NO: 15024 - RNA, 19 nt, Artificial Sequence
  Description of Artificial Sequence: Synthetic oligonucleotide
ucaagacaguuagcaucuu

SEQ ID NO: 15025 - RNA, 19 nt, Artificial Sequence
  Description of Artificial Sequence: Synthetic oligonucleotide
uaccuaucacugggguuua

SEQ ID NO: 15026 - RNA, 19 nt, Artificial Sequence
  Description of Artificial Sequence: Synthetic oligonucleotide
cuaauccaaucacccacau

SEQ ID NO: 15027 - RNA, 19 nt, Artificial Sequence
  Description of Artificial Sequence: Synthetic oligonucleotide
cccuucguccuaacauggc

SEQ ID NO: 15028 - RNA, 19 nt, Artificial Sequence
  Description of Artificial Sequence: Synthetic oligonucleotide
cuugaccccuucuguugaa

SEQ ID NO: 15029 - RNA, 19 nt, Artificial Sequence
  Description of Artificial Sequence: Synthetic oligonucleotide
gcgcacuugcuagaaguac

SEQ ID NO: 15030 - RNA, 19 nt, Artificial Sequence
  Description of Artificial Sequence: Synthetic oligonucleotide
ccguguagcuaaaggguca

SEQ ID NO: 15031 - RNA, 19 nt, Artificial Sequence
  Description of Artificial Sequence: Synthetic oligonucleotide
gugcggaauucuuccuugu

SEQ ID NO: 15032 - RNA, 19 nt, Artificial Sequence
  Description of Artificial Sequence: Synthetic oligonucleotide
acaaugcaucacacauaaa

SEQ ID NO: 15033 - RNA, 19 nt, Artificial Sequence
  Description of Artificial Sequence: Synthetic oligonucleotide
acgucacggcuuaggaaaa

SEQ ID NO: 15034 - RNA, 19 nt, Artificial Sequence
  Description of Artificial Sequence: Synthetic oligonucleotide
cgcauacuaaccuggaccu

SEQ ID NO: 15035 - RNA, 19 nt, Artificial Sequence
  Description of Artificial Sequence: Synthetic oligonucleotide
ccucaaccaugaccauccg

SEQ ID NO: 15036 - RNA, 19 nt, Artificial Sequence
  Description of Artificial Sequence: Synthetic oligonucleotide
cguguagcuaaagggucac

SEQ ID NO: 15037 - RNA, 19 nt, Artificial Sequence
  Description of Artificial Sequence: Synthetic oligonucleotide
ccgaucaacaugucuuggu

SEQ ID NO: 15038 - RNA, 19 nt, Artificial Sequence
  Description of Artificial Sequence: Synthetic oligonucleotide
cacaugcgccaguguaaua

SEQ ID NO: 15039 - RNA, 19 nt, Artificial Sequence
  Description of Artificial Sequence: Synthetic oligonucleotide
gggccaacccagucccgca

SEQ ID NO: 15040 - RNA, 19 nt, Artificial Sequence
  Description of Artificial Sequence: Synthetic oligonucleotide
ccuuucguauguacuccua

SEQ ID NO: 15041 - RNA, 19 nt, Artificial Sequence
  Description of Artificial Sequence: Synthetic oligonucleotide
ggcgcacuugcuagaagua

SEQ ID NO: 15042 - RNA, 19 nt, Artificial Sequence
  Description of Artificial Sequence: Synthetic oligonucleotide
cuauaggauuagguacuuu

SEQ ID NO: 15043 - RNA, 19 nt, Artificial Sequence
  Description of Artificial Sequence: Synthetic oligonucleotide
cguuacacgucaccuguua

SEQ ID NO: 15044 - RNA, 19 nt, Artificial Sequence
  Description of Artificial Sequence: Synthetic oligonucleotide
cggacaccguuacacguca

SEQ ID NO: 15045 - RNA, 19 nt, Artificial Sequence
  Description of Artificial Sequence: Synthetic oligonucleotide
cagcgagacagaggauuua

SEQ ID NO: 15046 - RNA, 19 nt, Artificial Sequence
  Description of Artificial Sequence: Synthetic oligonucleotide
gcguaacaagccuuaccuu

SEQ ID NO: 15047 - RNA, 19 nt, Artificial Sequence
  Description of Artificial Sequence: Synthetic oligonucleotide
cagguugaguuggcagaua

SEQ ID NO: 15048 - RNA, 19 nt, Artificial Sequence
  Description of Artificial Sequence: Synthetic oligonucleotide
uugugccguuuggcccaca

SEQ ID NO: 15049 - RNA, 19 nt, Artificial Sequence
  Description of Artificial Sequence: Synthetic oligonucleotide
ggaagcgcuuucguuguuu

SEQ ID NO: 15050 - RNA, 19 nt, Artificial Sequence
  Description of Artificial Sequence: Synthetic oligonucleotide
ccguguugaaacggacaca

SEQ ID NO: 15051 - RNA, 19 nt, Artificial Sequence
  Description of Artificial Sequence: Synthetic oligonucleotide
gcgagaugcuucacaggua

SEQ ID NO: 15052 - RNA, 19 nt, Artificial Sequence
  Description of Artificial Sequence: Synthetic oligonucleotide
gcagcgagacagaggauuu

SEQ ID NO: 15053 - RNA, 19 nt, Artificial Sequence
  Description of Artificial Sequence: Synthetic oligonucleotide
ggcaucccucagacgucac

SEQ ID NO: 15054 - RNA, 19 nt, Artificial Sequence
  Description of Artificial Sequence: Synthetic oligonucleotide
cgugggcgcacuugcuaga

SEQ ID NO: 15055 - RNA, 19 nt, Artificial Sequence
  Description of Artificial Sequence: Synthetic oligonucleotide
ggacggagcuaggggcucu

SEQ ID NO: 15056 - RNA, 19 nt, Artificial Sequence
  Description of Artificial Sequence: Synthetic oligonucleotide
cgcgccccgccgcuuuaag

SEQ ID NO: 15057 - RNA, 19 nt, Artificial Sequence
  Description of Artificial Sequence: Synthetic oligonucleotide
cgaugccggaacaguuucu

SEQ ID NO: 15058 - RNA, 19 nt, Artificial Sequence
  Description of Artificial Sequence: Synthetic oligonucleotide
cacccacauugugcggaau

SEQ ID NO: 15059 - RNA, 19 nt, Artificial Sequence
  Description of Artificial Sequence: Synthetic oligonucleotide
cgucacggcuuaggaaaau

SEQ ID NO: 15060 - RNA, 19 nt, Artificial Sequence
  Description of Artificial Sequence: Synthetic oligonucleotide
aacaauaacaaguaugggg

SEQ ID NO: 15061 - RNA, 19 nt, Artificial Sequence
  Description of Artificial Sequence: Synthetic oligonucleotide
aaaaccaugauguugaggu

SEQ ID NO: 15062 - RNA, 19 nt, Artificial Sequence
  Description of Artificial Sequence: Synthetic oligonucleotide
uuaauuagaugaauggacg

SEQ ID NO: 15063 - RNA, 19 nt, Artificial Sequence
  Description of Artificial Sequence: Synthetic oligonucleotide
aaagucauuauuccaacuc

SEQ ID NO: 15064 - RNA, 19 nt, Artificial Sequence
  Description of Artificial Sequence: Synthetic oligonucleotide
ucuagcagaagucaguugg

SEQ ID NO: 15065 - RNA, 19 nt, Artificial Sequence
  Description of Artificial Sequence: Synthetic oligonucleotide
uacaauuggauuaagaauc

SEQ ID NO: 15066 - RNA, 19 nt, Artificial Sequence
  Description of Artificial Sequence: Synthetic oligonucleotide
acuuuuacggguuugaaag

SEQ ID NO: 15067 - RNA, 19 nt, Artificial Sequence
  Description of Artificial Sequence: Synthetic oligonucleotide
ucguuauucggacaaaucg

SEQ ID NO: 15068 - RNA, 19 nt, Artificial Sequence
  Description of Artificial Sequence: Synthetic oligonucleotide
auuaacuauauucagcuug

SEQ ID NO: 15069 - RNA, 19 nt, Artificial Sequence
  Description of Artificial Sequence: Synthetic oligonucleotide
uguaguuucgcucucagga

SEQ ID NO: 15070 - RNA, 19 nt, Artificial Sequence
  Description of Artificial Sequence: Synthetic oligonucleotide
aaauguucagcagagauug

SEQ ID NO: 15071 - RNA, 19 nt, Artificial Sequence
  Description of Artificial Sequence: Synthetic oligonucleotide
uaagauuuagucucugugg

SEQ ID NO: 15072 - RNA, 19 nt, Artificial Sequence
  Description of Artificial Sequence: Synthetic oligonucleotide
agcagugcgaaacauauac

SEQ ID NO: 15073 - RNA, 19 nt, Artificial Sequence
  Description of Artificial Sequence: Synthetic oligonucleotide
uccuuuacaucaaauaucc

SEQ ID NO: 15074 - RNA, 19 nt, Artificial Sequence
  Description of Artificial Sequence: Synthetic oligonucleotide
aauagugaauaguuuuaac

SEQ ID NO: 15075 - RNA, 19 nt, Artificial Sequence
  Description of Artificial Sequence: Synthetic oligonucleotide
aguaacuugaauucuagug

SEQ ID NO: 15076 - RNA, 19 nt, Artificial Sequence
  Description of Artificial Sequence: Synthetic oligonucleotide
gaaauaucggauuuuggag

SEQ ID NO: 15077 - RNA, 19 nt, Artificial Sequence
  Description of Artificial Sequence: Synthetic oligonucleotide
cuuaauuagaugaauggac

SEQ ID NO: 15078 - RNA, 19 nt, Artificial Sequence
  Description of Artificial Sequence: Synthetic oligonucleotide
uacuauucaagucacuucc

SEQ ID NO: 15079 - RNA, 19 nt, Artificial Sequence
  Description of Artificial Sequence: Synthetic oligonucleotide
ugauauguaacgauaagaa

SEQ ID NO: 15080 - RNA, 19 nt, Artificial Sequence
  Description of Artificial Sequence: Synthetic oligonucleotide
auuagauaugacuggauag

SEQ ID NO: 15081 - RNA, 19 nt, Artificial Sequence
  Description of Artificial Sequence: Synthetic oligonucleotide
agcacuaaacuguuggacc

SEQ ID NO: 15082 - RNA, 19 nt, Artificial Sequence
  Description of Artificial Sequence: Synthetic oligonucleotide
gauaugacuggauaggaug

SEQ ID NO: 15083 - RNA, 19 nt, Artificial Sequence
  Description of Artificial Sequence: Synthetic oligonucleotide
aauaucggauuuuggagag

SEQ ID NO: 15084 - RNA, 19 nt, Artificial Sequence
  Description of Artificial Sequence: Synthetic oligonucleotide
aaauaucggauuuuggaga

SEQ ID NO: 15085 - RNA, 19 nt, Artificial Sequence
  Description of Artificial Sequence: Synthetic oligonucleotide
uuauagucaacgaagucug

SEQ ID NO: 15086 - RNA, 19 nt, Artificial Sequence
  Description of Artificial Sequence: Synthetic oligonucleotide
uuuuguaccuuuaaugugu

SEQ ID NO: 15087 - RNA, 19 nt, Artificial Sequence
  Description of Artificial Sequence: Synthetic oligonucleotide
auagugaauaguuuuaaca

SEQ ID NO: 15088 - RNA, 19 nt, Artificial Sequence
  Description of Artificial Sequence: Synthetic oligonucleotide
agaaauaucggauuuugga

SEQ ID NO: 15089 - RNA, 19 nt, Artificial Sequence
  Description of Artificial Sequence: Synthetic oligonucleotide
uuugcuucagucuagcaga

SEQ ID NO: 15090 - RNA, 19 nt, Artificial Sequence
  Description of Artificial Sequence: Synthetic oligonucleotide
uuagauaugacuggauagg

SEQ ID NO: 15091 - RNA, 19 nt, Artificial Sequence
  Description of Artificial Sequence: Synthetic oligonucleotide
agcacuacauauuacuuuc

SEQ ID NO: 15092 - RNA, 19 nt, Artificial Sequence
  Description of Artificial Sequence: Synthetic oligonucleotide
uagugaauaguuuuaacac

SEQ ID NO: 15093 - RNA, 19 nt, Artificial Sequence
  Description of Artificial Sequence: Synthetic oligonucleotide
ugaugcaggauuauaagac

SEQ ID NO: 15094 - RNA, 19 nt, Artificial Sequence
  Description of Artificial Sequence: Synthetic oligonucleotide
auaucagugacuugcauca

SEQ ID NO: 15095 - RNA, 19 nt, Artificial Sequence
  Description of Artificial Sequence: Synthetic oligonucleotide
uauucggacaaaucgaaca

SEQ ID NO: 15096 - RNA, 19 nt, Artificial Sequence
  Description of Artificial Sequence: Synthetic oligonucleotide
augguuacuucccuuagcg

SEQ ID NO: 15097 - RNA, 19 nt, Artificial Sequence
  Description of Artificial Sequence: Synthetic oligonucleotide
auauacaugguccauugug

SEQ ID NO: 15098 - RNA, 19 nt, Artificial Sequence
  Description of Artificial Sequence: Synthetic oligonucleotide
uuucucauucguuauucgg

SEQ ID NO: 15099 - RNA, 19 nt, Artificial Sequence
  Description of Artificial Sequence: Synthetic oligonucleotide
aaccuaauugcuaucaaag

SEQ ID NO: 15100 - RNA, 19 nt, Artificial Sequence
  Description of Artificial Sequence: Synthetic oligonucleotide
uacauauuacuuucacugg

SEQ ID NO: 15101 - RNA, 19 nt, Artificial Sequence
  Description of Artificial Sequence: Synthetic oligonucleotide
uuaauguguuacuuuuacg

SEQ ID NO: 15102 - RNA, 19 nt, Artificial Sequence
  Description of Artificial Sequence: Synthetic oligonucleotide
cauauuuacucccaccugc

SEQ ID NO: 15103 - RNA, 19 nt, Artificial Sequence
  Description of Artificial Sequence: Synthetic oligonucleotide
uaugauauguaacgauaag

SEQ ID NO: 15104 - RNA, 19 nt, Artificial Sequence
  Description of Artificial Sequence: Synthetic oligonucleotide
uauacaugguccauuguga

SEQ ID NO: 15105 - RNA, 19 nt, Artificial Sequence
  Description of Artificial Sequence: Synthetic oligonucleotide
aguucuaucuugcaugcag

SEQ ID NO: 15106 - RNA, 19 nt, Artificial Sequence
  Description of Artificial Sequence: Synthetic oligonucleotide
uucuuuugaauuccauggg

SEQ ID NO: 15107 - RNA, 19 nt, Artificial Sequence
  Description of Artificial Sequence: Synthetic oligonucleotide
gauuaagaaucauaugcac

SEQ ID NO: 15108 - RNA, 19 nt, Artificial Sequence
  Description of Artificial Sequence: Synthetic oligonucleotide
ucuguagaucuuaagaguc

SEQ ID NO: 15109 - RNA, 19 nt, Artificial Sequence
  Description of Artificial Sequence: Synthetic oligonucleotide
uuaacuauauucagcuugu

SEQ ID NO: 15110 - RNA, 19 nt, Artificial Sequence
  Description of Artificial Sequence: Synthetic oligonucleotide
aauaaguauuagaaagcuc

SEQ ID NO: 15111 - RNA, 19 nt, Artificial Sequence
  Description of Artificial Sequence: Synthetic oligonucleotide
uuggaauggaggauuaucu

SEQ ID NO: 15112 - RNA, 19 nt, Artificial Sequence
  Description of Artificial Sequence: Synthetic oligonucleotide
uucauaagcuauuggaaac

SEQ ID NO: 15113 - RNA, 19 nt, Artificial Sequence
  Description of Artificial Sequence: Synthetic oligonucleotide
gaauggacguuuuagaaaa

SEQ ID NO: 15114 - RNA, 19 nt, Artificial Sequence
  Description of Artificial Sequence: Synthetic oligonucleotide
aagaggacagaauugguua

SEQ ID NO: 15115 - RNA, 19 nt, Artificial Sequence
  Description of Artificial Sequence: Synthetic oligonucleotide
uuugaaaaguauugucccc

SEQ ID NO: 15116 - RNA, 19 nt, Artificial Sequence
  Description of Artificial Sequence: Synthetic oligonucleotide
aaggauucgucuugcauga

SEQ ID NO: 15117 - RNA, 19 nt, Artificial Sequence
  Description of Artificial Sequence: Synthetic oligonucleotide
cuaagauuuagucucugug

SEQ ID NO: 15118 - RNA, 19 nt, Artificial Sequence
  Description of Artificial Sequence: Synthetic oligonucleotide
uguaagaggcgcaacgugu

SEQ ID NO: 15119 - RNA, 19 nt, Artificial Sequence
  Description of Artificial Sequence: Synthetic oligonucleotide
acguguuuggcugaggggc

SEQ ID NO: 15120 - RNA, 19 nt, Artificial Sequence
  Description of Artificial Sequence: Synthetic oligonucleotide
ugggaauaugguuacuucc

SEQ ID NO: 15121 - RNA, 19 nt, Artificial Sequence
  Description of Artificial Sequence: Synthetic oligonucleotide
uaaaugauaaaagcuuaca

SEQ ID NO: 15122 - RNA, 19 nt, Artificial Sequence
  Description of Artificial Sequence: Synthetic oligonucleotide
aacuaauuguguauguaug

SEQ ID NO: 15123 - RNA, 19 nt, Artificial Sequence
  Description of Artificial Sequence: Synthetic oligonucleotide
uacaauccuacauggaugu

SEQ ID NO: 15124 - RNA, 19 nt, Artificial Sequence
  Description of Artificial Sequence: Synthetic oligonucleotide
aaacccucagaggaaauag

SEQ ID NO: 15125 - RNA, 19 nt, Artificial Sequence
  Description of Artificial Sequence: Synthetic oligonucleotide
aaauguagugugacagagc

SEQ ID NO: 15126 - RNA, 19 nt, Artificial Sequence
  Description of Artificial Sequence: Synthetic oligonucleotide
aaaccuaauugcuaucaaa

SEQ ID NO: 15127 - RNA, 19 nt, Artificial Sequence
  Description of Artificial Sequence: Synthetic oligonucleotide
ggugaguggagaaauaucg

SEQ ID NO: 15128 - RNA, 19 nt, Artificial Sequence
  Description of Artificial Sequence: Synthetic oligonucleotide
aacauauacuucacagacg

SEQ ID NO: 15129 - RNA, 19 nt, Artificial Sequence
  Description of Artificial Sequence: Synthetic oligonucleotide
aagaggggauauugcacac

SEQ ID NO: 15130 - RNA, 19 nt, Artificial Sequence
  Description of Artificial Sequence: Synthetic oligonucleotide
ucagcugguuaaaugauaa

SEQ ID NO: 15131 - RNA, 19 nt, Artificial Sequence
  Description of Artificial Sequence: Synthetic oligonucleotide
ccuaauugcuaucaaagcg

SEQ ID NO: 15132 - RNA, 19 nt, Artificial Sequence
  Description of Artificial Sequence: Synthetic oligonucleotide
aaaauuggaauggaggauu

SEQ ID NO: 15133 - RNA, 19 nt, Artificial Sequence
  Description of Artificial Sequence: Synthetic oligonucleotide
uggaccaaucgcaugagcu

SEQ ID NO: 15134 - RNA, 19 nt, Artificial Sequence
  Description of Artificial Sequence: Synthetic oligonucleotide
uauacaggcuaaauaaauu

SEQ ID NO: 15135 - RNA, 19 nt, Artificial Sequence
  Description of Artificial Sequence: Synthetic oligonucleotide
agaucuuaagagucuguag

SEQ ID NO: 15136 - RNA, 19 nt, Artificial Sequence
  Description of Artificial Sequence: Synthetic oligonucleotide
gaugaauggacguuuuaga

SEQ ID NO: 15137 - RNA, 19 nt, Artificial Sequence
  Description of Artificial Sequence: Synthetic oligonucleotide
ugcagaccgacacaaacac

SEQ ID NO: 15138 - RNA, 19 nt, Artificial Sequence
  Description of Artificial Sequence: Synthetic oligonucleotide
aagacucggaaccaucgcu

SEQ ID NO: 15139 - RNA, 19 nt, Artificial Sequence
  Description of Artificial Sequence: Synthetic oligonucleotide
gauuugguaagaaggcuag

SEQ ID NO: 15140 - RNA, 19 nt, Artificial Sequence
  Description of Artificial Sequence: Synthetic oligonucleotide
aaaguauuguccccauuaa

SEQ ID NO: 15141 - RNA, 19 nt, Artificial Sequence
  Description of Artificial Sequence: Synthetic oligonucleotide
auauccucaauggaagagg

SEQ ID NO: 15142 - RNA, 19 nt, Artificial Sequence
  Description of Artificial Sequence: Synthetic oligonucleotide
accacauaguaagaugacc

SEQ ID NO: 15143 - RNA, 19 nt, Artificial Sequence
  Description of Artificial Sequence: Synthetic oligonucleotide
ugaauggacguuuuagaaa

SEQ ID NO: 15144 - RNA, 19 nt, Artificial Sequence
  Description of Artificial Sequence: Synthetic oligonucleotide
gauuaucucuaagauuuag

SEQ ID NO: 15145 - RNA, 19 nt, Artificial Sequence
  Description of Artificial Sequence: Synthetic oligonucleotide
caaacaacaucgaggcacg

SEQ ID NO: 15146 - RNA, 19 nt, Artificial Sequence
  Description of Artificial Sequence: Synthetic oligonucleotide
uaaguauuagaaagcuccu

SEQ ID NO: 15147 - RNA, 19 nt, Artificial Sequence
  Description of Artificial Sequence: Synthetic oligonucleotide
uauagcacagguccaaaua

SEQ ID NO: 15148 - RNA, 19 nt, Artificial Sequence
  Description of Artificial Sequence: Synthetic oligonucleotide
agcucaauagaaucccauc

SEQ ID NO: 15149 - RNA, 19 nt, Artificial Sequence
  Description of Artificial Sequence: Synthetic oligonucleotide
uccucaauggaagagggga

SEQ ID NO: 15150 - RNA, 19 nt, Artificial Sequence
  Description of Artificial Sequence: Synthetic oligonucleotide
uuacggguuugaaagaaaa

SEQ ID NO: 15151 - RNA, 19 nt, Artificial Sequence
  Description of Artificial Sequence: Synthetic oligonucleotide
augacucagcacuaaacug

SEQ ID NO: 15152 - RNA, 19 nt, Artificial Sequence
  Description of Artificial Sequence: Synthetic oligonucleotide
uugaaaaguauugucccca

SEQ ID NO: 15153 - RNA, 19 nt, Artificial Sequence
  Description of Artificial Sequence: Synthetic oligonucleotide
aaaucagauuagccaagca

SEQ ID NO: 15154 - RNA, 19 nt, Artificial Sequence
  Description of Artificial Sequence: Synthetic oligonucleotide
cagugacuuaauuagauga

SEQ ID NO: 15155 - RNA, 19 nt, Artificial Sequence
  Description of Artificial Sequence: Synthetic oligonucleotide
auaugacuggauaggaugg

SEQ ID NO: 15156 - RNA, 19 nt, Artificial Sequence
  Description of Artificial Sequence: Synthetic oligonucleotide
aacuguuggaccaaucgca

SEQ ID NO: 15157 - RNA, 19 nt, Artificial Sequence
  Description of Artificial Sequence: Synthetic oligonucleotide
uguaaagcaaagguaguuc

SEQ ID NO: 15158 - RNA, 19 nt, Artificial Sequence
  Description of Artificial Sequence: Synthetic oligonucleotide
uaugguuacuucccuuagc

SEQ ID NO: 15159 - RNA, 19 nt, Artificial Sequence
  Description of Artificial Sequence: Synthetic oligonucleotide
uguucagcagagauugaac

SEQ ID NO: 15160 - RNA, 19 nt, Artificial Sequence
  Description of Artificial Sequence: Synthetic oligonucleotide
ggaauugggguuuggaaag

SEQ ID NO: 15161 - RNA, 19 nt, Artificial Sequence
  Description of Artificial Sequence: Synthetic oligonucleotide
guaaagcaaagguaguuca

SEQ ID NO: 15162 - RNA, 19 nt, Artificial Sequence
  Description of Artificial Sequence: Synthetic oligonucleotide
cagaauuguaguuucgcuc

SEQ ID NO: 15163 - RNA, 19 nt, Artificial Sequence
  Description of Artificial Sequence: Synthetic oligonucleotide
ucucauucguuauucggac

SEQ ID NO: 15164 - RNA, 19 nt, Artificial Sequence
  Description of Artificial Sequence: Synthetic oligonucleotide
ggaacaacaucagacagag

SEQ ID NO: 15165 - RNA, 19 nt, Artificial Sequence
  Description of Artificial Sequence: Synthetic oligonucleotide
ucuguaggaaauguagugu

SEQ ID NO: 15166 - RNA, 19 nt, Artificial Sequence
  Description of Artificial Sequence: Synthetic oligonucleotide
gaugcaggauuauaagaca

SEQ ID NO: 15167 - RNA, 19 nt, Artificial Sequence
  Description of Artificial Sequence: Synthetic oligonucleotide
aaaaccuaauugcuaucaa

SEQ ID NO: 15168 - RNA, 19 nt, Artificial Sequence
  Description of Artificial Sequence: Synthetic oligonucleotide
ggugcaucaguaauggugg

SEQ ID NO: 15169 - RNA, 19 nt, Artificial Sequence
  Description of Artificial Sequence: Synthetic oligonucleotide
ucuggguccgaccauggac

SEQ ID NO: 15170 - RNA, 19 nt, Artificial Sequence
  Description of Artificial Sequence: Synthetic oligonucleotide
aguauuguccccauuaaau

SEQ ID NO: 15171 - RNA, 19 nt, Artificial Sequence
  Description of Artificial Sequence: Synthetic oligonucleotide
ucaacgaagucuguuuuca

SEQ ID NO: 15172 - RNA, 19 nt, Artificial Sequence
  Description of Artificial Sequence: Synthetic oligonucleotide
ucuaagauuuagucucugu

SEQ ID NO: 15173 - RNA, 19 nt, Artificial Sequence
  Description of Artificial Sequence: Synthetic oligonucleotide
agucauuauuccaacucac

SEQ ID NO: 15174 - RNA, 19 nt, Artificial Sequence
  Description of Artificial Sequence: Synthetic oligonucleotide
aacuugcugucucacauua

SEQ ID NO: 15175 - RNA, 19 nt, Artificial Sequence
  Description of Artificial Sequence: Synthetic oligonucleotide
ucccuuagcgaucagcaaa

SEQ ID NO: 15176 - RNA, 19 nt, Artificial Sequence
  Description of Artificial Sequence: Synthetic oligonucleotide
agcuccuaaauuucauaag

SEQ ID NO: 15177 - RNA, 19 nt, Artificial Sequence
  Description of Artificial Sequence: Synthetic oligonucleotide
aaauaucagugacuugcau

SEQ ID NO: 15178 - RNA, 19 nt, Artificial Sequence
  Description of Artificial Sequence: Synthetic oligonucleotide
acuagcaaaaucagauuag

SEQ ID NO: 15179 - RNA, 19 nt, Artificial Sequence
  Description of Artificial Sequence: Synthetic oligonucleotide
gauggcuacuucuaaacua

SEQ ID NO: 15180 - RNA, 19 nt, Artificial Sequence
  Description of Artificial Sequence: Synthetic oligonucleotide
aauuagaugaauggacguu

SEQ ID NO: 15181 - RNA, 19 nt, Artificial Sequence
  Description of Artificial Sequence: Synthetic oligonucleotide
gugcgaaacauauacuuca

SEQ ID NO: 15182 - RNA, 19 nt, Artificial Sequence
  Description of Artificial Sequence: Synthetic oligonucleotide
uguguuacuuuuacggguu

SEQ ID NO: 15183 - RNA, 19 nt, Artificial Sequence
  Description of Artificial Sequence: Synthetic oligonucleotide
uucaaauccuguggugugg

SEQ ID NO: 15184 - RNA, 19 nt, Artificial Sequence
  Description of Artificial Sequence: Synthetic oligonucleotide
uggggaagagguuugucga

SEQ ID NO: 15185 - RNA, 19 nt, Artificial Sequence
  Description of Artificial Sequence: Synthetic oligonucleotide
agugcgaaacauauacuuc

SEQ ID NO: 15186 - RNA, 19 nt, Artificial Sequence
  Description of Artificial Sequence: Synthetic oligonucleotide
uuauucggacaaaucgaac

SEQ ID NO: 15187 - RNA, 19 nt, Artificial Sequence
  Description of Artificial Sequence: Synthetic oligonucleotide
uuccuagagacgccuaaca

SEQ ID NO: 15188 - RNA, 19 nt, Artificial Sequence
  Description of Artificial Sequence: Synthetic oligonucleotide
uuuaaacccucagaggaaa

SEQ ID NO: 15189 - RNA, 19 nt, Artificial Sequence
  Description of Artificial Sequence: Synthetic oligonucleotide
ugguuuaggagacgcugcc

SEQ ID NO: 15190 - RNA, 19 nt, Artificial Sequence
  Description of Artificial Sequence: Synthetic oligonucleotide
uacuuuuacggguuugaaa

SEQ ID NO: 15191 - RNA, 19 nt, Artificial Sequence
  Description of Artificial Sequence: Synthetic oligonucleotide
aggugcaucaguaauggug

SEQ ID NO: 15192 - RNA, 19 nt, Artificial Sequence
  Description of Artificial Sequence: Synthetic oligonucleotide
uuuuacggguuugaaagaa

SEQ ID NO: 15193 - RNA, 19 nt, Artificial Sequence
  Description of Artificial Sequence: Synthetic oligonucleotide
guaguuucgcucucaggag

SEQ ID NO: 15194 - RNA, 19 nt, Artificial Sequence
  Description of Artificial Sequence: Synthetic oligonucleotide
uucguuauucggacaaauc

SEQ ID NO: 15195 - RNA, 19 nt, Artificial Sequence
  Description of Artificial Sequence: Synthetic oligonucleotide
ggggaaaccauucacuaug

SEQ ID NO: 15196 - RNA, 19 nt, Artificial Sequence
  Description of Artificial Sequence: Synthetic oligonucleotide
ugagucauguguugggauc

SEQ ID NO: 15197 - RNA, 19 nt, Artificial Sequence
  Description of Artificial Sequence: Synthetic oligonucleotide
cuaauugcuaucaaagcgu

SEQ ID NO: 15198 - RNA, 19 nt, Artificial Sequence
  Description of Artificial Sequence: Synthetic oligonucleotide
acaagacucggaaccaucg

SEQ ID NO: 15199 - RNA, 19 nt, Artificial Sequence
  Description of Artificial Sequence: Synthetic oligonucleotide
ugccagauuguguaggaaa

SEQ ID NO: 15200 - RNA, 19 nt, Artificial Sequence
  Description of Artificial Sequence: Synthetic oligonucleotide
uccacacuagaugugguca

SEQ ID NO: 15201 - RNA, 19 nt, Artificial Sequence
  Description of Artificial Sequence: Synthetic oligonucleotide
uagauaugacuggauagga

SEQ ID NO: 15202 - RNA, 19 nt, Artificial Sequence
  Description of Artificial Sequence: Synthetic oligonucleotide
gacucggaaccaucgcugg

SEQ ID NO: 15203 - RNA, 19 nt, Artificial Sequence
  Description of Artificial Sequence: Synthetic oligonucleotide
gauuagccaagcagguagg

SEQ ID NO: 15204 - RNA, 19 nt, Artificial Sequence
  Description of Artificial Sequence: Synthetic oligonucleotide
uaauugcuaucaaagcguu

SEQ ID NO: 15205 - RNA, 19 nt, Artificial Sequence
  Description of Artificial Sequence: Synthetic oligonucleotide
aguggagaaauaucggauu

SEQ ID NO: 15206 - RNA, 19 nt, Artificial Sequence
  Description of Artificial Sequence: Synthetic oligonucleotide
ugcgaaacauauacuucac

SEQ ID NO: 15207 - RNA, 19 nt, Artificial Sequence
  Description of Artificial Sequence: Synthetic oligonucleotide
aauucuagugugggaauau

SEQ ID NO: 15208 - RNA, 19 nt, Artificial Sequence
  Description of Artificial Sequence: Synthetic oligonucleotide
uuuacggguuugaaagaaa

SEQ ID NO: 15209 - RNA, 19 nt, Artificial Sequence
  Description of Artificial Sequence: Synthetic oligonucleotide
acauaguaagaugaccuca

SEQ ID NO: 15210 - RNA, 19 nt, Artificial Sequence
  Description of Artificial Sequence: Synthetic oligonucleotide
agaggcgcaacguguuugg

SEQ ID NO: 15211 - RNA, 19 nt, Artificial Sequence
  Description of Artificial Sequence: Synthetic oligonucleotide
cugguuuaggagacgcugc

SEQ ID NO: 15212 - RNA, 19 nt, Artificial Sequence
  Description of Artificial Sequence: Synthetic oligonucleotide
ucacuaugauauguaacga

SEQ ID NO: 15213 - RNA, 19 nt, Artificial Sequence
  Description of Artificial Sequence: Synthetic oligonucleotide
ucucuaagauuuagucucu

SEQ ID NO: 15214 - RNA, 19 nt, Artificial Sequence
  Description of Artificial Sequence: Synthetic oligonucleotide
agaugcggcauccauuggu

SEQ ID NO: 15215 - RNA, 19 nt, Artificial Sequence
  Description of Artificial Sequence: Synthetic oligonucleotide
acaaaucgaacagcuauca

SEQ ID NO: 15216 - RNA, 19 nt, Artificial Sequence
  Description of Artificial Sequence: Synthetic oligonucleotide
auagcagugcgaaacauau

SEQ ID NO: 15217 - RNA, 19 nt, Artificial Sequence
  Description of Artificial Sequence: Synthetic oligonucleotide
cacaaauauacauggucca

SEQ ID NO: 15218 - RNA, 19 nt, Artificial Sequence
  Description of Artificial Sequence: Synthetic oligonucleotide
guuuuggggagcuccacac

SEQ ID NO: 15219 - RNA, 19 nt, Artificial Sequence
  Description of Artificial Sequence: Synthetic oligonucleotide
cuucccuuagcgaucagca

SEQ ID NO: 15220 - RNA, 19 nt, Artificial Sequence
  Description of Artificial Sequence: Synthetic oligonucleotide
auuagaugaauggacguuu

SEQ ID NO: 15221 - RNA, 19 nt, Artificial Sequence
  Description of Artificial Sequence: Synthetic oligonucleotide
uaauggugguauucaacaa

SEQ ID NO: 15222 - RNA, 19 nt, Artificial Sequence
  Description of Artificial Sequence: Synthetic oligonucleotide
gggagugcuagcucaauag

SEQ ID NO: 15223 - RNA, 19 nt, Artificial Sequence
  Description of Artificial Sequence: Synthetic oligonucleotide
acagacgaaaauaaacuaa

SEQ ID NO: 15224 - RNA, 19 nt, Artificial Sequence
  Description of Artificial Sequence: Synthetic oligonucleotide
ugaucauagaagccauuuu

SEQ ID NO: 15225 - RNA, 19 nt, Artificial Sequence
  Description of Artificial Sequence: Synthetic oligonucleotide
auaccauacacagcugcag

SEQ ID NO: 15226 - RNA, 19 nt, Artificial Sequence
  Description of Artificial Sequence: Synthetic oligonucleotide
caaagggagugcuagcuca

SEQ ID NO: 15227 - RNA, 19 nt, Artificial Sequence
  Description of Artificial Sequence: Synthetic oligonucleotide
auuccuagagacgccuaac

SEQ ID NO: 15228 - RNA, 19 nt, Artificial Sequence
  Description of Artificial Sequence: Synthetic oligonucleotide
acaucgaggcacggaagcc

SEQ ID NO: 15229 - RNA, 19 nt, Artificial Sequence
  Description of Artificial Sequence: Synthetic oligonucleotide
aagaggcgcaacguguuug

SEQ ID NO: 15230 - RNA, 19 nt, Artificial Sequence
  Description of Artificial Sequence: Synthetic oligonucleotide
uguuacuuuuacggguuug

SEQ ID NO: 15231 - RNA, 19 nt, Artificial Sequence
  Description of Artificial Sequence: Synthetic oligonucleotide
gguuaaaauuggaauggag

SEQ ID NO: 15232 - RNA, 19 nt, Artificial Sequence
  Description of Artificial Sequence: Synthetic oligonucleotide
agcaaagguaguucacccu

SEQ ID NO: 15233 - RNA, 19 nt, Artificial Sequence
  Description of Artificial Sequence: Synthetic oligonucleotide
gggaggaacaacaucagac

SEQ ID NO: 15234 - RNA, 19 nt, Artificial Sequence
  Description of Artificial Sequence: Synthetic oligonucleotide
aacaaguaugggguagagu

SEQ ID NO: 15235 - RNA, 19 nt, Artificial Sequence
  Description of Artificial Sequence: Synthetic oligonucleotide
auacaugguccauugugau

SEQ ID NO: 15236 - RNA, 19 nt, Artificial Sequence
  Description of Artificial Sequence: Synthetic oligonucleotide
uagcucaauagaaucccau

SEQ ID NO: 15237 - RNA, 19 nt, Artificial Sequence
  Description of Artificial Sequence: Synthetic oligonucleotide
gaagccgauucuuagcugu

SEQ ID NO: 15238 - RNA, 19 nt, Artificial Sequence
  Description of Artificial Sequence: Synthetic oligonucleotide
cucuauucaaggccagaug

SEQ ID NO: 15239 - RNA, 19 nt, Artificial Sequence
  Description of Artificial Sequence: Synthetic oligonucleotide
gugcuagcucaauagaauc

SEQ ID NO: 15240 - RNA, 19 nt, Artificial Sequence
  Description of Artificial Sequence: Synthetic oligonucleotide
uaacaaguaugggguagag

SEQ ID NO: 15241 - RNA, 19 nt, Artificial Sequence
  Description of Artificial Sequence: Synthetic oligonucleotide
ggagaaauaucggauuuug

SEQ ID NO: 15242 - RNA, 19 nt, Artificial Sequence
  Description of Artificial Sequence: Synthetic oligonucleotide
gcuaucauuaauuaacuau

SEQ ID NO: 15243 - RNA, 19 nt, Artificial Sequence
  Description of Artificial Sequence: Synthetic oligonucleotide
uuuguaccuuuaauguguu

SEQ ID NO: 15244 - RNA, 19 nt, Artificial Sequence
  Description of Artificial Sequence: Synthetic oligonucleotide
cuugcauguguucccauca

SEQ ID NO: 15245 - RNA, 19 nt, Artificial Sequence
  Description of Artificial Sequence: Synthetic oligonucleotide
uugucgaccugcugcauuc

SEQ ID NO: 15246 - RNA, 19 nt, Artificial Sequence
  Description of Artificial Sequence: Synthetic oligonucleotide
cucggaaccaucgcugggg

SEQ ID NO: 15247 - RNA, 19 nt, Artificial Sequence
  Description of Artificial Sequence: Synthetic oligonucleotide
gcucaauagaaucccauca

SEQ ID NO: 15248 - RNA, 19 nt, Artificial Sequence
  Description of Artificial Sequence: Synthetic oligonucleotide
aggcauauaaggacauauc

SEQ ID NO: 15249 - RNA, 19 nt, Artificial Sequence
  Description of Artificial Sequence: Synthetic oligonucleotide
auaacaaguaugggguaga

SEQ ID NO: 15250 - RNA, 19 nt, Artificial Sequence
  Description of Artificial Sequence: Synthetic oligonucleotide
agaauugguuaaaauugga

SEQ ID NO: 15251 - RNA, 19 nt, Artificial Sequence
  Description of Artificial Sequence: Synthetic oligonucleotide
guuuaggagacgcugccaa

SEQ ID NO: 15252 - RNA, 19 nt, Artificial Sequence
  Description of Artificial Sequence: Synthetic oligonucleotide
gguacuugggacaucagga

SEQ ID NO: 15253 - RNA, 19 nt, Artificial Sequence
  Description of Artificial Sequence: Synthetic oligonucleotide
ucaguugggugcgcgagug

SEQ ID NO: 15254 - RNA, 19 nt, Artificial Sequence
  Description of Artificial Sequence: Synthetic oligonucleotide
cacuagauguggucaaguc

SEQ ID NO: 15255 - RNA, 19 nt, Artificial Sequence
  Description of Artificial Sequence: Synthetic oligonucleotide
cagucccaccacaagacug

SEQ ID NO: 15256 - RNA, 19 nt, Artificial Sequence
  Description of Artificial Sequence: Synthetic oligonucleotide
uucgucuugcaugaccacu

SEQ ID NO: 15257 - RNA, 19 nt, Artificial Sequence
  Description of Artificial Sequence: Synthetic oligonucleotide
aaggccagaugauguugca

SEQ ID NO: 15258 - RNA, 19 nt, Artificial Sequence
  Description of Artificial Sequence: Synthetic oligonucleotide
cauucacuaugauauguaa

SEQ ID NO: 15259 - RNA, 19 nt, Artificial Sequence
  Description of Artificial Sequence: Synthetic oligonucleotide
auuuagucucuguggaauu

SEQ ID NO: 15260 - RNA, 19 nt, Artificial Sequence
  Description of Artificial Sequence: Synthetic oligonucleotide
aagucaguugggugcgcga

SEQ ID NO: 15261 - RNA, 19 nt, Artificial Sequence
  Description of Artificial Sequence: Synthetic oligonucleotide
guuauucggacaaaucgaa

SEQ ID NO: 15262 - RNA, 19 nt, Artificial Sequence
  Description of Artificial Sequence: Synthetic oligonucleotide
agauuuagucucuguggaa

SEQ ID NO: 15263 - RNA, 19 nt, Artificial Sequence
  Description of Artificial Sequence: Synthetic oligonucleotide
cccgcuacaugaaucagcc

SEQ ID NO: 15264 - RNA, 19 nt, Artificial Sequence
  Description of Artificial Sequence: Synthetic oligonucleotide
aaacaacaucgaggcacgg

SEQ ID NO: 15265 - RNA, 19 nt, Artificial Sequence
  Description of Artificial Sequence: Synthetic oligonucleotide
ugguuacuucccuuagcga

SEQ ID NO: 15266 - RNA, 19 nt, Artificial Sequence
  Description of Artificial Sequence: Synthetic oligonucleotide
uacuuucacuggaaacuaa

SEQ ID NO: 15267 - RNA, 19 nt, Artificial Sequence
  Description of Artificial Sequence: Synthetic oligonucleotide
gugggaauaugguuacuuc

SEQ ID NO: 15268 - RNA, 19 nt, Artificial Sequence
  Description of Artificial Sequence: Synthetic oligonucleotide
caugacucagcacuaaacu

SEQ ID NO: 15269 - RNA, 19 nt, Artificial Sequence
  Description of Artificial Sequence: Synthetic oligonucleotide
agugaauugaugacaguuu

SEQ ID NO: 15270 - RNA, 19 nt, Artificial Sequence
  Description of Artificial Sequence: Synthetic oligonucleotide
ugacuugcaucaccaugac

SEQ ID NO: 15271 - RNA, 19 nt, Artificial Sequence
  Description of Artificial Sequence: Synthetic oligonucleotide
uuugucgaccugcugcauu

SEQ ID NO: 15272 - RNA, 19 nt, Artificial Sequence
  Description of Artificial Sequence: Synthetic oligonucleotide
acaaauauacaugguccau

SEQ ID NO: 15273 - RNA, 19 nt, Artificial Sequence
  Description of Artificial Sequence: Synthetic oligonucleotide
ggcgcaacguguuuggcug

SEQ ID NO: 15274 - RNA, 19 nt, Artificial Sequence
  Description of Artificial Sequence: Synthetic oligonucleotide
agugcuagcucaauagaau

SEQ ID NO: 15275 - RNA, 19 nt, Artificial Sequence
  Description of Artificial Sequence: Synthetic oligonucleotide
uguuggauaucuguaucuu

SEQ ID NO: 15276 - RNA, 19 nt, Artificial Sequence
  Description of Artificial Sequence: Synthetic oligonucleotide
aaauuggaauggaggauua

SEQ ID NO: 15277 - RNA, 19 nt, Artificial Sequence
  Description of Artificial Sequence: Synthetic oligonucleotide
ugaaccccgcuacaugaau

SEQ ID NO: 15278 - RNA, 19 nt, Artificial Sequence
  Description of Artificial Sequence: Synthetic oligonucleotide
agcuaucauuaauuaacua

SEQ ID NO: 15279 - RNA, 19 nt, Artificial Sequence
  Description of Artificial Sequence: Synthetic oligonucleotide
gaagagguuugucgaccug

SEQ ID NO: 15280 - RNA, 19 nt, Artificial Sequence
  Description of Artificial Sequence: Synthetic oligonucleotide
accaaucgcaugagcuucc

SEQ ID NO: 15281 - RNA, 19 nt, Artificial Sequence
  Description of Artificial Sequence: Synthetic oligonucleotide
cagcacuaaacuguuggac

SEQ ID NO: 15282 - RNA, 19 nt, Artificial Sequence
  Description of Artificial Sequence: Synthetic oligonucleotide
ugcgguuuucgcugacuug

SEQ ID NO: 15283 - RNA, 19 nt, Artificial Sequence
  Description of Artificial Sequence: Synthetic oligonucleotide
auggcuacuucuaaacuaa

SEQ ID NO: 15284 - RNA, 19 nt, Artificial Sequence
  Description of Artificial Sequence: Synthetic oligonucleotide
acguuuuagaaaagguagu

SEQ ID NO: 15285 - RNA, 19 nt, Artificial Sequence
  Description of Artificial Sequence: Synthetic oligonucleotide
aaagcguugcucaucccua

SEQ ID NO: 15286 - RNA, 19 nt, Artificial Sequence
  Description of Artificial Sequence: Synthetic oligonucleotide
agucaguugggugcgcgag

SEQ ID NO: 15287 - RNA, 19 nt, Artificial Sequence
  Description of Artificial Sequence: Synthetic oligonucleotide
aauuggaauggaggauuau

SEQ ID NO: 15288 - RNA, 19 nt, Artificial Sequence
  Description of Artificial Sequence: Synthetic oligonucleotide
gaauuguaguuucgcucuc

SEQ ID NO: 15289 - RNA, 19 nt, Artificial Sequence
  Description of Artificial Sequence: Synthetic oligonucleotide
cuguacgcugccugcagug

SEQ ID NO: 15290 - RNA, 19 nt, Artificial Sequence
  Description of Artificial Sequence: Synthetic oligonucleotide
auucguuauucggacaaau

SEQ ID NO: 15291 - RNA, 19 nt, Artificial Sequence
  Description of Artificial Sequence: Synthetic oligonucleotide
cuuuuacggguuugaaaga

SEQ ID NO: 15292 - RNA, 19 nt, Artificial Sequence
  Description of Artificial Sequence: Synthetic oligonucleotide
caugacacaguauagcauu

SEQ ID NO: 15293 - RNA, 19 nt, Artificial Sequence
  Description of Artificial Sequence: Synthetic oligonucleotide
gagugcuagcucaauagaa

SEQ ID NO: 15294 - RNA, 19 nt, Artificial Sequence
  Description of Artificial Sequence: Synthetic oligonucleotide
gguuaaaugauaaaagcuu

SEQ ID NO: 15295 - RNA, 19 nt, Artificial Sequence
  Description of Artificial Sequence: Synthetic oligonucleotide
guuguaacugaaggcuggc

SEQ ID NO: 15296 - RNA, 19 nt, Artificial Sequence
  Description of Artificial Sequence: Synthetic oligonucleotide
auaccauugccaagcagga

SEQ ID NO: 15297 - RNA, 19 nt, Artificial Sequence
  Description of Artificial Sequence: Synthetic oligonucleotide
guuacuucccuuagcgauc

SEQ ID NO: 15298 - RNA, 19 nt, Artificial Sequence
  Description of Artificial Sequence: Synthetic oligonucleotide
auaagcuauuggaaacacu

SEQ ID NO: 15299 - RNA, 19 nt, Artificial Sequence
  Description of Artificial Sequence: Synthetic oligonucleotide
ucggaaccaucgcuggggu

SEQ ID NO: 15300 - RNA, 19 nt, Artificial Sequence
  Description of Artificial Sequence: Synthetic oligonucleotide
uguacgcugccugcagugc

SEQ ID NO: 15301 - RNA, 19 nt, Artificial Sequence
  Description of Artificial Sequence: Synthetic oligonucleotide
aguugggugcgcgagugca

SEQ ID NO: 15302 - RNA, 19 nt, Artificial Sequence
  Description of Artificial Sequence: Synthetic oligonucleotide
aggguggaaaucccuucca

SEQ ID NO: 15303 - RNA, 19 nt, Artificial Sequence
  Description of Artificial Sequence: Synthetic oligonucleotide
aggggcacucuuccgucuc

SEQ ID NO: 15304 - RNA, 19 nt, Artificial Sequence
  Description of Artificial Sequence: Synthetic oligonucleotide
gaggcauauaaggacauau

SEQ ID NO: 15305 - RNA, 19 nt, Artificial Sequence
  Description of Artificial Sequence: Synthetic oligonucleotide
agagucagucgugggagug

SEQ ID NO: 15306 - RNA, 19 nt, Artificial Sequence
  Description of Artificial Sequence: Synthetic oligonucleotide
auaauaccauacacagcug

SEQ ID NO: 15307 - RNA, 19 nt, Artificial Sequence
  Description of Artificial Sequence: Synthetic oligonucleotide
augcaggauuauaagacau

SEQ ID NO: 15308 - RNA, 19 nt, Artificial Sequence
  Description of Artificial Sequence: Synthetic oligonucleotide
cuuugccuagguucugcuc

SEQ ID NO: 15309 - RNA, 19 nt, Artificial Sequence
  Description of Artificial Sequence: Synthetic oligonucleotide
gaggcacggaagccauagg

SEQ ID NO: 15310 - RNA, 19 nt, Artificial Sequence
  Description of Artificial Sequence: Synthetic oligonucleotide
ugguuucuacaguucuauc

SEQ ID NO: 15311 - RNA, 19 nt, Artificial Sequence
  Description of Artificial Sequence: Synthetic oligonucleotide
caccucugaaccccgcuac

SEQ ID NO: 15312 - RNA, 19 nt, Artificial Sequence
  Description of Artificial Sequence: Synthetic oligonucleotide
gguuacuucccuuagcgau

SEQ ID NO: 15313 - RNA, 19 nt, Artificial Sequence
  Description of Artificial Sequence: Synthetic oligonucleotide
guaccuuuaauguguuacu

SEQ ID NO: 15314 - RNA, 19 nt, Artificial Sequence
  Description of Artificial Sequence: Synthetic oligonucleotide
uggagaaauaucggauuuu

SEQ ID NO: 15315 - RNA, 19 nt, Artificial Sequence
  Description of Artificial Sequence: Synthetic oligonucleotide
acacuagauguggucaagu

SEQ ID NO: 15316 - RNA, 19 nt, Artificial Sequence
  Description of Artificial Sequence: Synthetic oligonucleotide
agauaugacuggauaggau

SEQ ID NO: 15317 - RNA, 19 nt, Artificial Sequence
  Description of Artificial Sequence: Synthetic oligonucleotide
aagcuauuggaaacacuua

SEQ ID NO: 15318 - RNA, 19 nt, Artificial Sequence
  Description of Artificial Sequence: Synthetic oligonucleotide
guucacuacucuguagauc

SEQ ID NO: 15319 - RNA, 19 nt, Artificial Sequence
  Description of Artificial Sequence: Synthetic oligonucleotide
ggucuucguagccuuuucc

SEQ ID NO: 15320 - RNA, 19 nt, Artificial Sequence
  Description of Artificial Sequence: Synthetic oligonucleotide
ugcgcgagugcauggcuuc

SEQ ID NO: 15321 - RNA, 19 nt, Artificial Sequence
  Description of Artificial Sequence: Synthetic oligonucleotide
uccucaaugaggggacccu

SEQ ID NO: 15322 - RNA, 19 nt, Artificial Sequence
  Description of Artificial Sequence: Synthetic oligonucleotide
auuagccaagcagguagga

SEQ ID NO: 15323 - RNA, 19 nt, Artificial Sequence
  Description of Artificial Sequence: Synthetic oligonucleotide
uucccuuagcgaucagcaa

SEQ ID NO: 15324 - RNA, 19 nt, Artificial Sequence
  Description of Artificial Sequence: Synthetic oligonucleotide
acccuagagaagcauuguu

SEQ ID NO: 15325 - RNA, 19 nt, Artificial Sequence
  Description of Artificial Sequence: Synthetic oligonucleotide
ggaaccaucgcugggguga

SEQ ID NO: 15326 - RNA, 19 nt, Artificial Sequence
  Description of Artificial Sequence: Synthetic oligonucleotide
uggucuucguagccuuuuc

SEQ ID NO: 15327 - RNA, 19 nt, Artificial Sequence
  Description of Artificial Sequence: Synthetic oligonucleotide
gaaccccgcuacaugaauc

SEQ ID NO: 15328 - RNA, 19 nt, Artificial Sequence
  Description of Artificial Sequence: Synthetic oligonucleotide
gguuugucgaccugcugca

SEQ ID NO: 15329 - RNA, 19 nt, Artificial Sequence
  Description of Artificial Sequence: Synthetic oligonucleotide
gggguuagguaauuuugca

SEQ ID NO: 15330 - RNA, 19 nt, Artificial Sequence
  Description of Artificial Sequence: Synthetic oligonucleotide
gccagaugauguugcauug

SEQ ID NO: 15331 - RNA, 19 nt, Artificial Sequence
  Description of Artificial Sequence: Synthetic oligonucleotide
aacagggguuagguaauuu

SEQ ID NO: 15332 - RNA, 19 nt, Artificial Sequence
  Description of Artificial Sequence: Synthetic oligonucleotide
cacacuagauguggucaag

SEQ ID NO: 15333 - RNA, 19 nt, Artificial Sequence
  Description of Artificial Sequence: Synthetic oligonucleotide
ugcaugggaauugggguuu

SEQ ID NO: 15334 - RNA, 19 nt, Artificial Sequence
  Description of Artificial Sequence: Synthetic oligonucleotide
acuaaacuguuggaccaau

SEQ ID NO: 15335 - RNA, 19 nt, Artificial Sequence
  Description of Artificial Sequence: Synthetic oligonucleotide
cagugcgaaacauauacuu

SEQ ID NO: 15336 - RNA, 19 nt, Artificial Sequence
  Description of Artificial Sequence: Synthetic oligonucleotide
ggagugcuagcucaauaga

SEQ ID NO: 15337 - RNA, 19 nt, Artificial Sequence
  Description of Artificial Sequence: Synthetic oligonucleotide
cucauucguuauucggaca

SEQ ID NO: 15338 - RNA, 19 nt, Artificial Sequence
  Description of Artificial Sequence: Synthetic oligonucleotide
cagcuaucauuaauuaacu

SEQ ID NO: 15339 - RNA, 19 nt, Artificial Sequence
  Description of Artificial Sequence: Synthetic oligonucleotide
auuugguaagaaggcuaga

SEQ ID NO: 15340 - RNA, 19 nt, Artificial Sequence
  Description of Artificial Sequence: Synthetic oligonucleotide
uggcuacuucuaaacuaau

SEQ ID NO: 15341 - RNA, 19 nt, Artificial Sequence
  Description of Artificial Sequence: Synthetic oligonucleotide
agggagugcuagcucaaua

SEQ ID NO: 15342 - RNA, 19 nt, Artificial Sequence
  Description of Artificial Sequence: Synthetic oligonucleotide
cacuaugauauguaacgau

SEQ ID NO: 15343 - RNA, 19 nt, Artificial Sequence
  Description of Artificial Sequence: Synthetic oligonucleotide
ccacauaguaagaugaccu

SEQ ID NO: 15344 - RNA, 19 nt, Artificial Sequence
  Description of Artificial Sequence: Synthetic oligonucleotide
cauuccuagagacgccuaa

SEQ ID NO: 15345 - RNA, 19 nt, Artificial Sequence
  Description of Artificial Sequence: Synthetic oligonucleotide
cauuuucgaucuugaagua

SEQ ID NO: 15346 - RNA, 19 nt, Artificial Sequence
  Description of Artificial Sequence: Synthetic oligonucleotide
ccgaccauggacacaucag

SEQ ID NO: 15347 - RNA, 19 nt, Artificial Sequence
  Description of Artificial Sequence: Synthetic oligonucleotide
uaucagugacuugcaucac

SEQ ID NO: 15348 - RNA, 19 nt, Artificial Sequence
  Description of Artificial Sequence: Synthetic oligonucleotide
gacaccuugucagaggauu

SEQ ID NO: 15349 - RNA, 19 nt, Artificial Sequence
  Description of Artificial Sequence: Synthetic oligonucleotide
uuguaccuuuaauguguua

SEQ ID NO: 15350 - RNA, 19 nt, Artificial Sequence
  Description of Artificial Sequence: Synthetic oligonucleotide
ugcggagaagccgauucuu

SEQ ID NO: 15351 - RNA, 19 nt, Artificial Sequence
  Description of Artificial Sequence: Synthetic oligonucleotide
ggugguauucaacaagcau

SEQ ID NO: 15352 - RNA, 19 nt, Artificial Sequence
  Description of Artificial Sequence: Synthetic oligonucleotide
gcauuuggcagguaauugu

SEQ ID NO: 15353 - RNA, 19 nt, Artificial Sequence
  Description of Artificial Sequence: Synthetic oligonucleotide
gcguugcucaucccuaggc

SEQ ID NO: 15354 - RNA, 19 nt, Artificial Sequence
  Description of Artificial Sequence: Synthetic oligonucleotide
ggaaaucccuuccacucaa

SEQ ID NO: 15355 - RNA, 19 nt, Artificial Sequence
  Description of Artificial Sequence: Synthetic oligonucleotide
aagcuuugccuagguucug

SEQ ID NO: 15356 - RNA, 19 nt, Artificial Sequence
  Description of Artificial Sequence: Synthetic oligonucleotide
ggaauauagcacaggucca

SEQ ID NO: 15357 - RNA, 19 nt, Artificial Sequence
  Description of Artificial Sequence: Synthetic oligonucleotide
accaggugaagaaaaccua

SEQ ID NO: 15358 - RNA, 19 nt, Artificial Sequence
  Description of Artificial Sequence: Synthetic oligonucleotide
caugaucaaagggagugcu

SEQ ID NO: 15359 - RNA, 19 nt, Artificial Sequence
  Description of Artificial Sequence: Synthetic oligonucleotide
cagaugcggcauccauugg

SEQ ID NO: 15360 - RNA, 19 nt, Artificial Sequence
  Description of Artificial Sequence: Synthetic oligonucleotide
cugugguuucuacaguucu

SEQ ID NO: 15361 - RNA, 19 nt, Artificial Sequence
  Description of Artificial Sequence: Synthetic oligonucleotide
gcgaaacauauacuucaca

SEQ ID NO: 15362 - RNA, 19 nt, Artificial Sequence
  Description of Artificial Sequence: Synthetic oligonucleotide
caucgaggcacggaagcca

SEQ ID NO: 15363 - RNA, 19 nt, Artificial Sequence
  Description of Artificial Sequence: Synthetic oligonucleotide
guauccagucccaccacaa

SEQ ID NO: 15364 - RNA, 19 nt, Artificial Sequence
  Description of Artificial Sequence: Synthetic oligonucleotide
aggauucgucuugcaugac

SEQ ID NO: 15365 - RNA, 19 nt, Artificial Sequence
  Description of Artificial Sequence: Synthetic oligonucleotide
auaucggauuuuggagaga

SEQ ID NO: 15366 - RNA, 19 nt, Artificial Sequence
  Description of Artificial Sequence: Synthetic oligonucleotide
gcaacuccagaauuguagu

SEQ ID NO: 15367 - RNA, 19 nt, Artificial Sequence
  Description of Artificial Sequence: Synthetic oligonucleotide
cucucguggggugagugga

SEQ ID NO: 15368 - RNA, 19 nt, Artificial Sequence
  Description of Artificial Sequence: Synthetic oligonucleotide
auugucggcccuguugcuu

SEQ ID NO: 15369 - RNA, 19 nt, Artificial Sequence
  Description of Artificial Sequence: Synthetic oligonucleotide
ucguagccuuuuccacaga

SEQ ID NO: 15370 - RNA, 19 nt, Artificial Sequence
  Description of Artificial Sequence: Synthetic oligonucleotide
ccaaauguucagcagagau

SEQ ID NO: 15371 - RNA, 19 nt, Artificial Sequence
  Description of Artificial Sequence: Synthetic oligonucleotide
augacacaguauagcauuu

SEQ ID NO: 15372 - RNA, 19 nt, Artificial Sequence
  Description of Artificial Sequence: Synthetic oligonucleotide
cagucuagcagaagucagu

SEQ ID NO: 15373 - RNA, 19 nt, Artificial Sequence
  Description of Artificial Sequence: Synthetic oligonucleotide
aaccaucgcuggggugagg

SEQ ID NO: 15374 - RNA, 19 nt, Artificial Sequence
  Description of Artificial Sequence: Synthetic oligonucleotide
cacguguggcuuugaucuc

SEQ ID NO: 15375 - RNA, 19 nt, Artificial Sequence
  Description of Artificial Sequence: Synthetic oligonucleotide
cuugggacuugcauguguu

SEQ ID NO: 15376 - RNA, 19 nt, Artificial Sequence
  Description of Artificial Sequence: Synthetic oligonucleotide
caguugggugcgcgagugc

SEQ ID NO: 15377 - RNA, 19 nt, Artificial Sequence
  Description of Artificial Sequence: Synthetic oligonucleotide
ugucgaccugcugcauucu

SEQ ID NO: 15378 - RNA, 19 nt, Artificial Sequence
  Description of Artificial Sequence: Synthetic oligonucleotide
ggaaggauucgucuugcau

SEQ ID NO: 15379 - RNA, 19 nt, Artificial Sequence
  Description of Artificial Sequence: Synthetic oligonucleotide
caguaccuucccuccccac

SEQ ID NO: 15380 - RNA, 19 nt, Artificial Sequence
  Description of Artificial Sequence: Synthetic oligonucleotide
caggugaagaaaaccuaau

SEQ ID NO: 15381 - RNA, 19 nt, Artificial Sequence
  Description of Artificial Sequence: Synthetic oligonucleotide
ucacauugucggcccuguu

SEQ ID NO: 15382 - RNA, 19 nt, Artificial Sequence
  Description of Artificial Sequence: Synthetic oligonucleotide
ggaagagguuugucgaccu

SEQ ID NO: 15383 - RNA, 19 nt, Artificial Sequence
  Description of Artificial Sequence: Synthetic oligonucleotide
gaauuccaugggaaauggu

SEQ ID NO: 15384 - RNA, 19 nt, Artificial Sequence
  Description of Artificial Sequence: Synthetic oligonucleotide
gaaaucccuuccacucaaa

SEQ ID NO: 15385 - RNA, 19 nt, Artificial Sequence
  Description of Artificial Sequence: Synthetic oligonucleotide
cacuacucuguagaucuua

SEQ ID NO: 15386 - RNA, 19 nt, Artificial Sequence
  Description of Artificial Sequence: Synthetic oligonucleotide
gucagucgugggagugggg

SEQ ID NO: 15387 - RNA, 19 nt, Artificial Sequence
  Description of Artificial Sequence: Synthetic oligonucleotide
ucgcucucaggagcugagu

SEQ ID NO: 15388 - RNA, 19 nt, Artificial Sequence
  Description of Artificial Sequence: Synthetic oligonucleotide
auccccacguguggcuuug

SEQ ID NO: 15389 - RNA, 19 nt, Artificial Sequence
  Description of Artificial Sequence: Synthetic oligonucleotide
gguuuaggagacgcugcca

SEQ ID NO: 15390 - RNA, 19 nt, Artificial Sequence
  Description of Artificial Sequence: Synthetic oligonucleotide
gugaggacucucguggggu

SEQ ID NO: 15391 - RNA, 19 nt, Artificial Sequence
  Description of Artificial Sequence: Synthetic oligonucleotide
gcagaccgacacaaacacc

SEQ ID NO: 15392 - RNA, 19 nt, Artificial Sequence
  Description of Artificial Sequence: Synthetic oligonucleotide
cauucguuauucggacaaa

SEQ ID NO: 15393 - RNA, 19 nt, Artificial Sequence
  Description of Artificial Sequence: Synthetic oligonucleotide
cuuugaucucgggaguggu

SEQ ID NO: 15394 - RNA, 19 nt, Artificial Sequence
  Description of Artificial Sequence: Synthetic oligonucleotide
gguccgaccauggacacau

SEQ ID NO: 15395 - RNA, 19 nt, Artificial Sequence
  Description of Artificial Sequence: Synthetic oligonucleotide
ucgaggcacggaagccaua

SEQ ID NO: 15396 - RNA, 19 nt, Artificial Sequence
  Description of Artificial Sequence: Synthetic oligonucleotide
gccaagggcuuggacuucc

SEQ ID NO: 15397 - RNA, 19 nt, Artificial Sequence
  Description of Artificial Sequence: Synthetic oligonucleotide
gcaacguguuuggcugagg

SEQ ID NO: 15398 - RNA, 19 nt, Artificial Sequence
  Description of Artificial Sequence: Synthetic oligonucleotide
ggaccaaucgcaugagcuu

SEQ ID NO: 15399 - RNA, 19 nt, Artificial Sequence
  Description of Artificial Sequence: Synthetic oligonucleotide
uuuugucgguggggauggu

SEQ ID NO: 15400 - RNA, 19 nt, Artificial Sequence
  Description of Artificial Sequence: Synthetic oligonucleotide
acaauccuacauggauguu

SEQ ID NO: 15401 - RNA, 19 nt, Artificial Sequence
  Description of Artificial Sequence: Synthetic oligonucleotide
gggaaggauucgucuugca

SEQ ID NO: 15402 - RNA, 19 nt, Artificial Sequence
  Description of Artificial Sequence: Synthetic oligonucleotide
gucaguugggugcgcgagu

SEQ ID NO: 15403 - RNA, 19 nt, Artificial Sequence
  Description of Artificial Sequence: Synthetic oligonucleotide
ggggagcuccacacugcgg

SEQ ID NO: 15404 - RNA, 19 nt, Artificial Sequence
  Description of Artificial Sequence: Synthetic oligonucleotide
gguggggaagagguuuguc

SEQ ID NO: 15405 - RNA, 19 nt, Artificial Sequence
  Description of Artificial Sequence: Synthetic oligonucleotide
gugaggcauauaaggacau

SEQ ID NO: 15406 - RNA, 19 nt, Artificial Sequence
  Description of Artificial Sequence: Synthetic oligonucleotide
cucgggagugguggugguc

SEQ ID NO: 15407 - RNA, 19 nt, Artificial Sequence
  Description of Artificial Sequence: Synthetic oligonucleotide
aggggauauugcacacaaa

SEQ ID NO: 15408 - RNA, 19 nt, Artificial Sequence
  Description of Artificial Sequence: Synthetic oligonucleotide
caguucuaucuugcaugca

SEQ ID NO: 15409 - RNA, 19 nt, Artificial Sequence
  Description of Artificial Sequence: Synthetic oligonucleotide
gugcaucaguaaugguggu

SEQ ID NO: 15410 - RNA, 19 nt, Artificial Sequence
  Description of Artificial Sequence: Synthetic oligonucleotide
ccacacuagauguggucaa

SEQ ID NO: 15411 - RNA, 19 nt, Artificial Sequence
  Description of Artificial Sequence: Synthetic oligonucleotide
cagagucagucgugggagu

SEQ ID NO: 15412 - RNA, 19 nt, Artificial Sequence
  Description of Artificial Sequence: Synthetic oligonucleotide
gucgugggaguggggcuga

SEQ ID NO: 15413 - RNA, 19 nt, Artificial Sequence
  Description of Artificial Sequence: Synthetic oligonucleotide
ggugcgcgagugcauggcu

SEQ ID NO: 15414 - RNA, 19 nt, Artificial Sequence
  Description of Artificial Sequence: Synthetic oligonucleotide
uccccacguguggcuuuga

SEQ ID NO: 15415 - RNA, 19 nt, Artificial Sequence
  Description of Artificial Sequence: Synthetic oligonucleotide
ucgugggaguggggcugac

SEQ ID NO: 15416 - RNA, 19 nt, Artificial Sequence
  Description of Artificial Sequence: Synthetic oligonucleotide
acacugcggagaagccgau

SEQ ID NO: 15417 - RNA, 19 nt, Artificial Sequence
  Description of Artificial Sequence: Synthetic oligonucleotide
gcgcaacguguuuggcuga

SEQ ID NO: 15418 - RNA, 19 nt, Artificial Sequence
  Description of Artificial Sequence: Synthetic oligonucleotide
gcuauggcucuuguuggau

SEQ ID NO: 15419 - RNA, 19 nt, Artificial Sequence
  Description of Artificial Sequence: Synthetic oligonucleotide
guugggugcgcgagugcau

SEQ ID NO: 15420 - RNA, 19 nt, Artificial Sequence
  Description of Artificial Sequence: Synthetic oligonucleotide
gcgcgagugcauggcuucc

SEQ ID NO: 15421 - RNA, 19 nt, Artificial Sequence
  Description of Artificial Sequence: Synthetic oligonucleotide
guuugucgaccugcugcau

SEQ ID NO: 15422 - RNA, 19 nt, Artificial Sequence
  Description of Artificial Sequence: Synthetic oligonucleotide
ccaaucgcaugagcuucca

SEQ ID NO: 15423 - RNA, 19 nt, Artificial Sequence
  Description of Artificial Sequence: Synthetic oligonucleotide
gugcgcgagugcauggcuu

SEQ ID NO: 15424 - RNA, 19 nt, Artificial Sequence
  Description of Artificial Sequence: Synthetic oligonucleotide
ggguccgaccauggacaca

SEQ ID NO: 15425 - RNA, 19 nt, Artificial Sequence
  Description of Artificial Sequence: Synthetic oligonucleotide
cgguuuucgcugacuugga

SEQ ID NO: 15426 - RNA, 19 nt, Artificial Sequence
  Description of Artificial Sequence: Synthetic oligonucleotide
gcgaggggcuucucagaau

SEQ ID NO: 15427 - RNA, 19 nt, Artificial Sequence
  Description of Artificial Sequence: Synthetic oligonucleotide
ggacaccuugucagaggau

SEQ ID NO: 15428 - RNA, 19 nt, Artificial Sequence
  Description of Artificial Sequence: Synthetic oligonucleotide
cagccggcccgggacugua

SEQ ID NO: 15429 - RNA, 19 nt, Artificial Sequence
  Description of Artificial Sequence: Synthetic oligonucleotide
cacugcggagaagccgauu

SEQ ID NO: 15430 - RNA, 19 nt, Artificial Sequence
  Description of Artificial Sequence: Synthetic oligonucleotide
ucuuauuuaucuaacaccc

SEQ ID NO: 15431 - RNA, 19 nt, Artificial Sequence
  Description of Artificial Sequence: Synthetic oligonucleotide
cuuguaaucccauacacgg

SEQ ID NO: 15432 - RNA, 19 nt, Artificial Sequence
  Description of Artificial Sequence: Synthetic oligonucleotide
aaugcauucuaccacaugu

SEQ ID NO: 15433 - RNA, 19 nt, Artificial Sequence
  Description of Artificial Sequence: Synthetic oligonucleotide
aauaagcucaaucuacauc

SEQ ID NO: 15434 - RNA, 19 nt, Artificial Sequence
  Description of Artificial Sequence: Synthetic oligonucleotide
uuuaauaagcucaaucuac

SEQ ID NO: 15435 - RNA, 19 nt, Artificial Sequence
  Description of Artificial Sequence: Synthetic oligonucleotide
uuaaggauuaucaagccac

SEQ ID NO: 15436 - RNA, 19 nt, Artificial Sequence
  Description of Artificial Sequence: Synthetic oligonucleotide
uauagcucgauuuaguuca

SEQ ID NO: 15437 - RNA, 19 nt, Artificial Sequence
  Description of Artificial Sequence: Synthetic oligonucleotide
cauaaauauaccacuagcc

SEQ ID NO: 15438 - RNA, 19 nt, Artificial Sequence
  Description of Artificial Sequence: Synthetic oligonucleotide
aaccaagugagacucaauc

SEQ ID NO: 15439 - RNA, 19 nt, Artificial Sequence
  Description of Artificial Sequence: Synthetic oligonucleotide
agucuuauuuaucuaacac

SEQ ID NO: 15440 - RNA, 19 nt, Artificial Sequence
  Description of Artificial Sequence: Synthetic oligonucleotide
ucaaucuacauccagaaua

SEQ ID NO: 15441 - RNA, 19 nt, Artificial Sequence
  Description of Artificial Sequence: Synthetic oligonucleotide
uguguaaaauguugaaugg

SEQ ID NO: 15442 - RNA, 19 nt, Artificial Sequence
  Description of Artificial Sequence: Synthetic oligonucleotide
ucuacuuauaaccgaaacc

SEQ ID NO: 15443 - RNA, 19 nt, Artificial Sequence
  Description of Artificial Sequence: Synthetic oligonucleotide
gcuuauuugauauaguggg

SEQ ID NO: 15444 - RNA, 19 nt, Artificial Sequence
  Description of Artificial Sequence: Synthetic oligonucleotide
aaacaacuauucuccaggc

SEQ ID NO: 15445 - RNA, 19 nt, Artificial Sequence
  Description of Artificial Sequence: Synthetic oligonucleotide
uguaaucccauacacggag

SEQ ID NO: 15446 - RNA, 19 nt, Artificial Sequence
  Description of Artificial Sequence: Synthetic oligonucleotide
ugaguuacgaucauuuucu

SEQ ID NO: 15447 - RNA, 19 nt, Artificial Sequence
  Description of Artificial Sequence: Synthetic oligonucleotide
agacauuauggucauggcc

SEQ ID NO: 15448 - RNA, 19 nt, Artificial Sequence
  Description of Artificial Sequence: Synthetic oligonucleotide
aucauaaacacauagcgau

SEQ ID NO: 15449 - RNA, 19 nt, Artificial Sequence
  Description of Artificial Sequence: Synthetic oligonucleotide
aacccuacguaguaguaac

SEQ ID NO: 15450 - RNA, 19 nt, Artificial Sequence
  Description of Artificial Sequence: Synthetic oligonucleotide
aacgcuaaccaauuuauaa

SEQ ID NO: 15451 - RNA, 19 nt, Artificial Sequence
  Description of Artificial Sequence: Synthetic oligonucleotide
uauguugucagugagucgc

SEQ ID NO: 15452 - RNA, 19 nt, Artificial Sequence
  Description of Artificial Sequence: Synthetic oligonucleotide
aacccuaugguacuucuag

SEQ ID NO: 15453 - RNA, 19 nt, Artificial Sequence
  Description of Artificial Sequence: Synthetic oligonucleotide
ucaagcuuauuugauauag

SEQ ID NO: 15454 - RNA, 19 nt, Artificial Sequence
  Description of Artificial Sequence: Synthetic oligonucleotide
uuaauaagcucaaucuaca

SEQ ID NO: 15455 - RNA, 19 nt, Artificial Sequence
  Description of Artificial Sequence: Synthetic oligonucleotide
ucaaauuggacgccaaaug

SEQ ID NO: 15456 - RNA, 19 nt, Artificial Sequence
  Description of Artificial Sequence: Synthetic oligonucleotide
uucuagacaacauauguaa

SEQ ID NO: 15457 - RNA, 19 nt, Artificial Sequence
  Description of Artificial Sequence: Synthetic oligonucleotide
acguaaauucuucuuuugc

SEQ ID NO: 15458 - RNA, 19 nt, Artificial Sequence
  Description of Artificial Sequence: Synthetic oligonucleotide
cuaacacuagcaauugugg

SEQ ID NO: 15459 - RNA, 19 nt, Artificial Sequence
  Description of Artificial Sequence: Synthetic oligonucleotide
uguaaucuaauaacagaug

SEQ ID NO: 15460 - RNA, 19 nt, Artificial Sequence
  Description of Artificial Sequence: Synthetic oligonucleotide
uugaacgaagauaaucugc

SEQ ID NO: 15461 - RNA, 19 nt, Artificial Sequence
  Description of Artificial Sequence: Synthetic oligonucleotide
gauuaaccaacacauugag

SEQ ID NO: 15462 - RNA, 19 nt, Artificial Sequence
  Description of Artificial Sequence: Synthetic oligonucleotide
auuauggucauggccaugc

SEQ ID NO: 15463 - RNA, 19 nt, Artificial Sequence
  Description of Artificial Sequence: Synthetic oligonucleotide
aauuggacgccaaaugugg

SEQ ID NO: 15464 - RNA, 19 nt, Artificial Sequence
  Description of Artificial Sequence: Synthetic oligonucleotide
aggaaaugcauucuaccac

SEQ ID NO: 15465 - RNA, 19 nt, Artificial Sequence
  Description of Artificial Sequence: Synthetic oligonucleotide
ucuacuuguaugauuuagc

SEQ ID NO: 15466 - RNA, 19 nt, Artificial Sequence
  Description of Artificial Sequence: Synthetic oligonucleotide
aguuuagugcccuaguuca

SEQ ID NO: 15467 - RNA, 19 nt, Artificial Sequence
  Description of Artificial Sequence: Synthetic oligonucleotide
uuuauccuaaagcauggcu

SEQ ID NO: 15468 - RNA, 19 nt, Artificial Sequence
  Description of Artificial Sequence: Synthetic oligonucleotide
uauaaccgaaaccaguaac

SEQ ID NO: 15469 - RNA, 19 nt, Artificial Sequence
  Description of Artificial Sequence: Synthetic oligonucleotide
augcguauuucucuggugg

SEQ ID NO: 15470 - RNA, 19 nt, Artificial Sequence
  Description of Artificial Sequence: Synthetic oligonucleotide
ucgacuucuaacuuguaga

SEQ ID NO: 15471 - RNA, 19 nt, Artificial Sequence
  Description of Artificial Sequence: Synthetic oligonucleotide
ugcgguuaggauuucuugg

SEQ ID NO: 15472 - RNA, 19 nt, Artificial Sequence
  Description of Artificial Sequence: Synthetic oligonucleotide
aauaccucuuaacccuacg

SEQ ID NO: 15473 - RNA, 19 nt, Artificial Sequence
  Description of Artificial Sequence: Synthetic oligonucleotide
acauuacucaaacagggcu

SEQ ID NO: 15474 - RNA, 19 nt, Artificial Sequence
  Description of Artificial Sequence: Synthetic oligonucleotide
ugauauagugggagggagg

SEQ ID NO: 15475 - RNA, 19 nt, Artificial Sequence
  Description of Artificial Sequence: Synthetic oligonucleotide
uuugaacgaagauaaucug

SEQ ID NO: 15476 - RNA, 19 nt, Artificial Sequence
  Description of Artificial Sequence: Synthetic oligonucleotide
ugaccuaguuuacuaaagc

SEQ ID NO: 15477 - RNA, 19 nt, Artificial Sequence
  Description of Artificial Sequence: Synthetic oligonucleotide
uccacguacccaauuauca

SEQ ID NO: 15478 - RNA, 19 nt, Artificial Sequence
  Description of Artificial Sequence: Synthetic oligonucleotide
cuacuuauaaccgaaacca

SEQ ID NO: 15479 - RNA, 19 nt, Artificial Sequence
  Description of Artificial Sequence: Synthetic oligonucleotide
ucuugaguuacgaucauuu

SEQ ID NO: 15480 - RNA, 19 nt, Artificial Sequence
  Description of Artificial Sequence: Synthetic oligonucleotide
uguaauccccauuaauuac

SEQ ID NO: 15481 - RNA, 19 nt, Artificial Sequence
  Description of Artificial Sequence: Synthetic oligonucleotide
ucuaacacccuuaaagauu

SEQ ID NO: 15482 - RNA, 19 nt, Artificial Sequence
  Description of Artificial Sequence: Synthetic oligonucleotide
aaccaugguaucaucagag

SEQ ID NO: 15483 - RNA, 19 nt, Artificial Sequence
  Description of Artificial Sequence: Synthetic oligonucleotide
agaaucgacuucuaacuug

SEQ ID NO: 15484 - RNA, 19 nt, Artificial Sequence
  Description of Artificial Sequence: Synthetic oligonucleotide
augcacgcuucauuaaacc

SEQ ID NO: 15485 - RNA, 19 nt, Artificial Sequence
  Description of Artificial Sequence: Synthetic oligonucleotide
gaauggccacauuagagug

SEQ ID NO: 15486 - RNA, 19 nt, Artificial Sequence
  Description of Artificial Sequence: Synthetic oligonucleotide
aguauggagaauacaacuc

SEQ ID NO: 15487 - RNA, 19 nt, Artificial Sequence
  Description of Artificial Sequence: Synthetic oligonucleotide
agacauauccacuuauaga

SEQ ID NO: 15488 - RNA, 19 nt, Artificial Sequence
  Description of Artificial Sequence: Synthetic oligonucleotide
agcaauuguggauagugcu

SEQ ID NO: 15489 - RNA, 19 nt, Artificial Sequence
  Description of Artificial Sequence: Synthetic oligonucleotide
aucgacuucuaacuuguag

SEQ ID NO: 15490 - RNA, 19 nt, Artificial Sequence
  Description of Artificial Sequence: Synthetic oligonucleotide
aacaaaguguucaugcgca

SEQ ID NO: 15491 - RNA, 19 nt, Artificial Sequence
  Description of Artificial Sequence: Synthetic oligonucleotide
agcuuauuugauauagugg

SEQ ID NO: 15492 - RNA, 19 nt, Artificial Sequence
  Description of Artificial Sequence: Synthetic oligonucleotide
ccuaugaccacucaaugcg

SEQ ID NO: 15493 - RNA, 19 nt, Artificial Sequence
  Description of Artificial Sequence: Synthetic oligonucleotide
uccuaugaccacucaaugc

SEQ ID NO: 15494 - RNA, 19 nt, Artificial Sequence
  Description of Artificial Sequence: Synthetic oligonucleotide
uuaucaagccaccacuguc

SEQ ID NO: 15495 - RNA, 19 nt, Artificial Sequence
  Description of Artificial Sequence: Synthetic oligonucleotide
agcgauuuguaccaugaca

SEQ ID NO: 15496 - RNA, 19 nt, Artificial Sequence
  Description of Artificial Sequence: Synthetic oligonucleotide
aguacugacgucccacauc

SEQ ID NO: 15497 - RNA, 19 nt, Artificial Sequence
  Description of Artificial Sequence: Synthetic oligonucleotide
ucuaguguggggagaagcu

SEQ ID NO: 15498 - RNA, 19 nt, Artificial Sequence
  Description of Artificial Sequence: Synthetic oligonucleotide
uggauagugcucuaagcac

SEQ ID NO: 15499 - RNA, 19 nt, Artificial Sequence
  Description of Artificial Sequence: Synthetic oligonucleotide
cauuugaacgaagauaauc

SEQ ID NO: 15500 - RNA, 19 nt, Artificial Sequence
  Description of Artificial Sequence: Synthetic oligonucleotide
uaaggauuaucaagccacc

SEQ ID NO: 15501 - RNA, 19 nt, Artificial Sequence
  Description of Artificial Sequence: Synthetic oligonucleotide
uaagaguaagggcaucaac

SEQ ID NO: 15502 - RNA, 19 nt, Artificial Sequence
  Description of Artificial Sequence: Synthetic oligonucleotide
ucaaucaacggcacuccca

SEQ ID NO: 15503 - RNA, 19 nt, Artificial Sequence
  Description of Artificial Sequence: Synthetic oligonucleotide
ucaaugcguauuucucugg

SEQ ID NO: 15504 - RNA, 19 nt, Artificial Sequence
  Description of Artificial Sequence: Synthetic oligonucleotide
uguuguuaucccaggcaag

SEQ ID NO: 15505 - RNA, 19 nt, Artificial Sequence
  Description of Artificial Sequence: Synthetic oligonucleotide
ccaauuuugcccauguugc

SEQ ID NO: 15506 - RNA, 19 nt, Artificial Sequence
  Description of Artificial Sequence: Synthetic oligonucleotide
uaggaguaaccauuuuaag

SEQ ID NO: 15507 - RNA, 19 nt, Artificial Sequence
  Description of Artificial Sequence: Synthetic oligonucleotide
gaccuaguuuacuaaagca

SEQ ID NO: 15508 - RNA, 19 nt, Artificial Sequence
  Description of Artificial Sequence: Synthetic oligonucleotide
aguaggaguaaccauuuua

SEQ ID NO: 15509 - RNA, 19 nt, Artificial Sequence
  Description of Artificial Sequence: Synthetic oligonucleotide
gcucguuacauuuggaucc

SEQ ID NO: 15510 - RNA, 19 nt, Artificial Sequence
  Description of Artificial Sequence: Synthetic oligonucleotide
uaugcacgcuucauuaaac

SEQ ID NO: 15511 - RNA, 19 nt, Artificial Sequence
  Description of Artificial Sequence: Synthetic oligonucleotide
gacguaaauucuucuuuug

SEQ ID NO: 15512 - RNA, 19 nt, Artificial Sequence
  Description of Artificial Sequence: Synthetic oligonucleotide
cauuacucaaacagggcuc

SEQ ID NO: 15513 - RNA, 19 nt, Artificial Sequence
  Description of Artificial Sequence: Synthetic oligonucleotide
aaggagguaacaaaguguu

SEQ ID NO: 15514 - RNA, 19 nt, Artificial Sequence
  Description of Artificial Sequence: Synthetic oligonucleotide
ccacauuacucaaacaggg

SEQ ID NO: 15515 - RNA, 19 nt, Artificial Sequence
  Description of Artificial Sequence: Synthetic oligonucleotide
cuauagcucgauuuaguuc

SEQ ID NO: 15516 - RNA, 19 nt, Artificial Sequence
  Description of Artificial Sequence: Synthetic oligonucleotide
uuauaaccgaaaccaguaa

SEQ ID NO: 15517 - RNA, 19 nt, Artificial Sequence
  Description of Artificial Sequence: Synthetic oligonucleotide
ugcauucuaccacauguuc

SEQ ID NO: 15518 - RNA, 19 nt, Artificial Sequence
  Description of Artificial Sequence: Synthetic oligonucleotide
agcccuaauaaccaccacu

SEQ ID NO: 15519 - RNA, 19 nt, Artificial Sequence
  Description of Artificial Sequence: Synthetic oligonucleotide
ucauccuaggacacaauua

SEQ ID NO: 15520 - RNA, 19 nt, Artificial Sequence
  Description of Artificial Sequence: Synthetic oligonucleotide
uaauccccauuaauuacac

SEQ ID NO: 15521 - RNA, 19 nt, Artificial Sequence
  Description of Artificial Sequence: Synthetic oligonucleotide
uacguacccauucucugug

SEQ ID NO: 15522 - RNA, 19 nt, Artificial Sequence
  Description of Artificial Sequence: Synthetic oligonucleotide
guacccaauuaucaugacc

SEQ ID NO: 15523 - RNA, 19 nt, Artificial Sequence
  Description of Artificial Sequence: Synthetic oligonucleotide
cugaccuaguuuacuaaag

SEQ ID NO: 15524 - RNA, 19 nt, Artificial Sequence
  Description of Artificial Sequence: Synthetic oligonucleotide
cuuauaaccgaaaccagua

SEQ ID NO: 15525 - RNA, 19 nt, Artificial Sequence
  Description of Artificial Sequence: Synthetic oligonucleotide
ugaucuacacugccaguga

SEQ ID NO: 15526 - RNA, 19 nt, Artificial Sequence
  Description of Artificial Sequence: Synthetic oligonucleotide
uccgcaacagucauaugaa

SEQ ID NO: 15527 - RNA, 19 nt, Artificial Sequence
  Description of Artificial Sequence: Synthetic oligonucleotide
agucgugacuugugagucc

SEQ ID NO: 15528 - RNA, 19 nt, Artificial Sequence
  Description of Artificial Sequence: Synthetic oligonucleotide
auaaccgaaaccaguaacu

SEQ ID NO: 15529 - RNA, 19 nt, Artificial Sequence
  Description of Artificial Sequence: Synthetic oligonucleotide
cacauuacucaaacagggc

SEQ ID NO: 15530 - RNA, 19 nt, Artificial Sequence
  Description of Artificial Sequence: Synthetic oligonucleotide
aaauaccucuuaacccuac

SEQ ID NO: 15531 - RNA, 19 nt, Artificial Sequence
  Description of Artificial Sequence: Synthetic oligonucleotide
uagaguaggacaguguuuu

SEQ ID NO: 15532 - RNA, 19 nt, Artificial Sequence
  Description of Artificial Sequence: Synthetic oligonucleotide
ugcuauagcucgauuuagu

SEQ ID NO: 15533 - RNA, 19 nt, Artificial Sequence
  Description of Artificial Sequence: Synthetic oligonucleotide
agauuaaccaacacauuga

SEQ ID NO: 15534 - RNA, 19 nt, Artificial Sequence
  Description of Artificial Sequence: Synthetic oligonucleotide
gauaacaguggaaggauaa

SEQ ID NO: 15535 - RNA, 19 nt, Artificial Sequence
  Description of Artificial Sequence: Synthetic oligonucleotide
acucgagugacuggacucc

SEQ ID NO: 15536 - RNA, 19 nt, Artificial Sequence
  Description of Artificial Sequence: Synthetic oligonucleotide
caucauaaacacauagcga

SEQ ID NO: 15537 - RNA, 19 nt, Artificial Sequence
  Description of Artificial Sequence: Synthetic oligonucleotide
uaauaagcucaaucuacau

SEQ ID NO: 15538 - RNA, 19 nt, Artificial Sequence
  Description of Artificial Sequence: Synthetic oligonucleotide
uucaguuuagugcccuagu

SEQ ID NO: 15539 - RNA, 19 nt, Artificial Sequence
  Description of Artificial Sequence: Synthetic oligonucleotide
acgcuaaccaauuuauaaa

SEQ ID NO: 15540 - RNA, 19 nt, Artificial Sequence
  Description of Artificial Sequence: Synthetic oligonucleotide
aacuccacguacccaauua

SEQ ID NO: 15541 - RNA, 19 nt, Artificial Sequence
  Description of Artificial Sequence: Synthetic oligonucleotide
auggcuacugaagagacau

SEQ ID NO: 15542 - RNA, 19 nt, Artificial Sequence
  Description of Artificial Sequence: Synthetic oligonucleotide
uagauagguccauauacuu

SEQ ID NO: 15543 - RNA, 19 nt, Artificial Sequence
  Description of Artificial Sequence: Synthetic oligonucleotide
cuccgcaacagucauauga

SEQ ID NO: 15544 - RNA, 19 nt, Artificial Sequence
  Description of Artificial Sequence: Synthetic oligonucleotide
auagauagguccauauacu

SEQ ID NO: 15545 - RNA, 19 nt, Artificial Sequence
  Description of Artificial Sequence: Synthetic oligonucleotide
gagacauuauggucauggc

SEQ ID NO: 15546 - RNA, 19 nt, Artificial Sequence
  Description of Artificial Sequence: Synthetic oligonucleotide
acuuauaaccgaaaccagu

SEQ ID NO: 15547 - RNA, 19 nt, Artificial Sequence
  Description of Artificial Sequence: Synthetic oligonucleotide
ugcuauagguggcacugga

SEQ ID NO: 15548 - RNA, 19 nt, Artificial Sequence
  Description of Artificial Sequence: Synthetic oligonucleotide
uaacucgagugacuggacu

SEQ ID NO: 15549 - RNA, 19 nt, Artificial Sequence
  Description of Artificial Sequence: Synthetic oligonucleotide
cacguacccaauuaucaug

SEQ ID NO: 15550 - RNA, 19 nt, Artificial Sequence
  Description of Artificial Sequence: Synthetic oligonucleotide
uugcuacaacccauacacg

SEQ ID NO: 15551 - RNA, 19 nt, Artificial Sequence
  Description of Artificial Sequence: Synthetic oligonucleotide
cacauagcgauuuguacca

SEQ ID NO: 15552 - RNA, 19 nt, Artificial Sequence
  Description of Artificial Sequence: Synthetic oligonucleotide
aucugcuauagcucgauuu

SEQ ID NO: 15553 - RNA, 19 nt, Artificial Sequence
  Description of Artificial Sequence: Synthetic oligonucleotide
cuuaaggauuaucaagcca

SEQ ID NO: 15554 - RNA, 19 nt, Artificial Sequence
  Description of Artificial Sequence: Synthetic oligonucleotide
uuagaguaggacaguguuu

SEQ ID NO: 15555 - RNA, 19 nt, Artificial Sequence
  Description of Artificial Sequence: Synthetic oligonucleotide
aaccgaaaccaguaacuuu

SEQ ID NO: 15556 - RNA, 19 nt, Artificial Sequence
  Description of Artificial Sequence: Synthetic oligonucleotide
auacguacccauucucugu

SEQ ID NO: 15557 - RNA, 19 nt, Artificial Sequence
  Description of Artificial Sequence: Synthetic oligonucleotide
uucaauguguaauccccau

SEQ ID NO: 15558 - RNA, 19 nt, Artificial Sequence
  Description of Artificial Sequence: Synthetic oligonucleotide
aacacccuuaaagauuuau

SEQ ID NO: 15559 - RNA, 19 nt, Artificial Sequence
  Description of Artificial Sequence: Synthetic oligonucleotide
gcuaacacuagcaauugug

SEQ ID NO: 15560 - RNA, 19 nt, Artificial Sequence
  Description of Artificial Sequence: Synthetic oligonucleotide
gaccacccgacguaaauuc

SEQ ID NO: 15561 - RNA, 19 nt, Artificial Sequence
  Description of Artificial Sequence: Synthetic oligonucleotide
cacgcuucauuaaacccug

SEQ ID NO: 15562 - RNA, 19 nt, Artificial Sequence
  Description of Artificial Sequence: Synthetic oligonucleotide
ugucagaaucgacuucuaa

SEQ ID NO: 15563 - RNA, 19 nt, Artificial Sequence
  Description of Artificial Sequence: Synthetic oligonucleotide
ugauaacaguggaaggaua

SEQ ID NO: 15564 - RNA, 19 nt, Artificial Sequence
  Description of Artificial Sequence: Synthetic oligonucleotide
uuggccgcaccauacguac

SEQ ID NO: 15565 - RNA, 19 nt, Artificial Sequence
  Description of Artificial Sequence: Synthetic oligonucleotide
augcgguuaggauuucuug

SEQ ID NO: 15566 - RNA, 19 nt, Artificial Sequence
  Description of Artificial Sequence: Synthetic oligonucleotide
ggaacagaacuccacguac

SEQ ID NO: 15567 - RNA, 19 nt, Artificial Sequence
  Description of Artificial Sequence: Synthetic oligonucleotide
auagcgauuuguaccauga

SEQ ID NO: 15568 - RNA, 19 nt, Artificial Sequence
  Description of Artificial Sequence: Synthetic oligonucleotide
guagucuuauuuaucuaac

SEQ ID NO: 15569 - RNA, 19 nt, Artificial Sequence
  Description of Artificial Sequence: Synthetic oligonucleotide
uuucuuagucucagauccu

SEQ ID NO: 15570 - RNA, 19 nt, Artificial Sequence
  Description of Artificial Sequence: Synthetic oligonucleotide
aggauggaaaauaacucga

SEQ ID NO: 15571 - RNA, 19 nt, Artificial Sequence
  Description of Artificial Sequence: Synthetic oligonucleotide
ugcgcauugagggucuuca

SEQ ID NO: 15572 - RNA, 19 nt, Artificial Sequence
  Description of Artificial Sequence: Synthetic oligonucleotide
uuuuaucccuugaggcaga

SEQ ID NO: 15573 - RNA, 19 nt, Artificial Sequence
  Description of Artificial Sequence: Synthetic oligonucleotide
ugcguauuucucuggugga

SEQ ID NO: 15574 - RNA, 19 nt, Artificial Sequence
  Description of Artificial Sequence: Synthetic oligonucleotide
cauagcgauuuguaccaug

SEQ ID NO: 15575 - RNA, 19 nt, Artificial Sequence
  Description of Artificial Sequence: Synthetic oligonucleotide
ugcugcuuaaguagaggau

SEQ ID NO: 15576 - RNA, 19 nt, Artificial Sequence
  Description of Artificial Sequence: Synthetic oligonucleotide
gcgguuaggauuucuuggg

SEQ ID NO: 15577 - RNA, 19 nt, Artificial Sequence
  Description of Artificial Sequence: Synthetic oligonucleotide
uggacgccaaauguggaug

SEQ ID NO: 15578 - RNA, 19 nt, Artificial Sequence
  Description of Artificial Sequence: Synthetic oligonucleotide
accgaaaccaguaacuuua

SEQ ID NO: 15579 - RNA, 19 nt, Artificial Sequence
  Description of Artificial Sequence: Synthetic oligonucleotide
cagggcucguuacauuugg

SEQ ID NO: 15580 - RNA, 19 nt, Artificial Sequence
  Description of Artificial Sequence: Synthetic oligonucleotide
cauaucaaggauguguaaa

SEQ ID NO: 15581 - RNA, 19 nt, Artificial Sequence
  Description of Artificial Sequence: Synthetic oligonucleotide
gauauagugggagggaggu

SEQ ID NO: 15582 - RNA, 19 nt, Artificial Sequence
  Description of Artificial Sequence: Synthetic oligonucleotide
gcugcuuaaguagaggaug

SEQ ID NO: 15583 - RNA, 19 nt, Artificial Sequence
  Description of Artificial Sequence: Synthetic oligonucleotide
ugcuaacacuagcaauugu

SEQ ID NO: 15584 - RNA, 19 nt, Artificial Sequence
  Description of Artificial Sequence: Synthetic oligonucleotide
cuucuagacaacauaugua

SEQ ID NO: 15585 - RNA, 19 nt, Artificial Sequence
  Description of Artificial Sequence: Synthetic oligonucleotide
aaggauaggcaggcgagaa

SEQ ID NO: 15586 - RNA, 19 nt, Artificial Sequence
  Description of Artificial Sequence: Synthetic oligonucleotide
uuuagugcccuaguucaau

SEQ ID NO: 15587 - RNA, 19 nt, Artificial Sequence
  Description of Artificial Sequence: Synthetic oligonucleotide
gaaacgcuaaccaauuuau

SEQ ID NO: 15588 - RNA, 19 nt, Artificial Sequence
  Description of Artificial Sequence: Synthetic oligonucleotide
caacauaucaaggaugugu

SEQ ID NO: 15589 - RNA, 19 nt, Artificial Sequence
  Description of Artificial Sequence: Synthetic oligonucleotide
agcuuagaguaggacagug

SEQ ID NO: 15590 - RNA, 19 nt, Artificial Sequence
  Description of Artificial Sequence: Synthetic oligonucleotide
auaacucgagugacuggac

SEQ ID NO: 15591 - RNA, 19 nt, Artificial Sequence
  Description of Artificial Sequence: Synthetic oligonucleotide
uuggacgccaaauguggau

SEQ ID NO: 15592 - RNA, 19 nt, Artificial Sequence
  Description of Artificial Sequence: Synthetic oligonucleotide
gagaagcuuagaguaggac

SEQ ID NO: 15593 - RNA, 19 nt, Artificial Sequence
  Description of Artificial Sequence: Synthetic oligonucleotide
acguaguaguaacuuugga

SEQ ID NO: 15594 - RNA, 19 nt, Artificial Sequence
  Description of Artificial Sequence: Synthetic oligonucleotide
uaaccgaaaccaguaacuu

SEQ ID NO: 15595 - RNA, 19 nt, Artificial Sequence
  Description of Artificial Sequence: Synthetic oligonucleotide
acuuuuagugagugguauu

SEQ ID NO: 15596 - RNA, 19 nt, Artificial Sequence
  Description of Artificial Sequence: Synthetic oligonucleotide
auaucuaauucagcuuccu

SEQ ID NO: 15597 - RNA, 19 nt, Artificial Sequence
  Description of Artificial Sequence: Synthetic oligonucleotide
ucgcgcguccucucgcucg

SEQ ID NO: 15598 - RNA, 19 nt, Artificial Sequence
  Description of Artificial Sequence: Synthetic oligonucleotide
ucaugcgcauugagggucu

SEQ ID NO: 15599 - RNA, 19 nt, Artificial Sequence
  Description of Artificial Sequence: Synthetic oligonucleotide
cuccacguacccaauuauc

SEQ ID NO: 15600 - RNA, 19 nt, Artificial Sequence
  Description of Artificial Sequence: Synthetic oligonucleotide
gaaucgacuucuaacuugu

SEQ ID NO: 15601 - RNA, 19 nt, Artificial Sequence
  Description of Artificial Sequence: Synthetic oligonucleotide
aggacggucuuucuccuaa

SEQ ID NO: 15602 - RNA, 19 nt, Artificial Sequence
  Description of Artificial Sequence: Synthetic oligonucleotide
ggauggaaaauaacucgag

SEQ ID NO: 15603 - RNA, 19 nt, Artificial Sequence
  Description of Artificial Sequence: Synthetic oligonucleotide
uagcgauuuguaccaugac

SEQ ID NO: 15604 - RNA, 19 nt, Artificial Sequence
  Description of Artificial Sequence: Synthetic oligonucleotide
caaggagguaacaaagugu

SEQ ID NO: 15605 - RNA, 19 nt, Artificial Sequence
  Description of Artificial Sequence: Synthetic oligonucleotide
guuuauccuaaagcauggc

SEQ ID NO: 15606 - RNA, 19 nt, Artificial Sequence
  Description of Artificial Sequence: Synthetic oligonucleotide
cuccaauuaccaccuccgc

SEQ ID NO: 15607 - RNA, 19 nt, Artificial Sequence
  Description of Artificial Sequence: Synthetic oligonucleotide
cugcuauagcucgauuuag

SEQ ID NO: 15608 - RNA, 19 nt, Artificial Sequence
  Description of Artificial Sequence: Synthetic oligonucleotide
accuccgcaacagucauau

SEQ ID NO: 15609 - RNA, 19 nt, Artificial Sequence
  Description of Artificial Sequence: Synthetic oligonucleotide
ggcucguuacauuuggauc

SEQ ID NO: 15610 - RNA, 19 nt, Artificial Sequence
  Description of Artificial Sequence: Synthetic oligonucleotide
cuugagaguucgcucaaaa

SEQ ID NO: 15611 - RNA, 19 nt, Artificial Sequence
  Description of Artificial Sequence: Synthetic oligonucleotide
gaauaaagaaggcggcuuu

SEQ ID NO: 15612 - RNA, 19 nt, Artificial Sequence
  Description of Artificial Sequence: Synthetic oligonucleotide
cuuagaguaggacaguguu

SEQ ID NO: 15613 - RNA, 19 nt, Artificial Sequence
  Description of Artificial Sequence: Synthetic oligonucleotide
ugaucuccauuaggcauga

SEQ ID NO: 15614 - RNA, 19 nt, Artificial Sequence
  Description of Artificial Sequence: Synthetic oligonucleotide
acccaauuaucaugaccca

SEQ ID NO: 15615 - RNA, 19 nt, Artificial Sequence
  Description of Artificial Sequence: Synthetic oligonucleotide
cuaugcacgcuucauuaaa

SEQ ID NO: 15616 - RNA, 19 nt, Artificial Sequence
  Description of Artificial Sequence: Synthetic oligonucleotide
cccuaugguacuucuagac

SEQ ID NO: 15617 - RNA, 19 nt, Artificial Sequence
  Description of Artificial Sequence: Synthetic oligonucleotide
accacucaaugcguauuuc

SEQ ID NO: 15618 - RNA, 19 nt, Artificial Sequence
  Description of Artificial Sequence: Synthetic oligonucleotide
aguaguaacuuuggaucaa

SEQ ID NO: 15619 - RNA, 19 nt, Artificial Sequence
  Description of Artificial Sequence: Synthetic oligonucleotide
accacauguucguguucuc

SEQ ID NO: 15620 - RNA, 19 nt, Artificial Sequence
  Description of Artificial Sequence: Synthetic oligonucleotide
augaccacucaaugcguau

SEQ ID NO: 15621 - RNA, 19 nt, Artificial Sequence
  Description of Artificial Sequence: Synthetic oligonucleotide
augccaguacugacguccc

SEQ ID NO: 15622 - RNA, 19 nt, Artificial Sequence
  Description of Artificial Sequence: Synthetic oligonucleotide
ucgagcccuagcccggcgc

SEQ ID NO: 15623 - RNA, 19 nt, Artificial Sequence
  Description of Artificial Sequence: Synthetic oligonucleotide
cacccgacguaaauucuuc

SEQ ID NO: 15624 - RNA, 19 nt, Artificial Sequence
  Description of Artificial Sequence: Synthetic oligonucleotide
aaaacggaauaugccucuu

SEQ ID NO: 15625 - RNA, 19 nt, Artificial Sequence
  Description of Artificial Sequence: Synthetic oligonucleotide
ccaauuaccaccuccgcaa

SEQ ID NO: 15626 - RNA, 19 nt, Artificial Sequence
  Description of Artificial Sequence: Synthetic oligonucleotide
cagucgugacuugugaguc

SEQ ID NO: 15627 - RNA, 19 nt, Artificial Sequence
  Description of Artificial Sequence: Synthetic oligonucleotide
ggauagugcucuaagcaca

SEQ ID NO: 15628 - RNA, 19 nt, Artificial Sequence
  Description of Artificial Sequence: Synthetic oligonucleotide
cgacuucuaacuuguagag

SEQ ID NO: 15629 - RNA, 19 nt, Artificial Sequence
  Description of Artificial Sequence: Synthetic oligonucleotide
gccaugucuacacaaaccu

SEQ ID NO: 15630 - RNA, 19 nt, Artificial Sequence
  Description of Artificial Sequence: Synthetic oligonucleotide
caucguuuguucuuguaau

SEQ ID NO: 15631 - RNA, 19 nt, Artificial Sequence
  Description of Artificial Sequence: Synthetic oligonucleotide
acccgacguaaauucuucu

SEQ ID NO: 15632 - RNA, 19 nt, Artificial Sequence
  Description of Artificial Sequence: Synthetic oligonucleotide
acuuauagauagguccaua

SEQ ID NO: 15633 - RNA, 19 nt, Artificial Sequence
  Description of Artificial Sequence: Synthetic oligonucleotide
cugacgucccacaucuuaa

SEQ ID NO: 15634 - RNA, 19 nt, Artificial Sequence
  Description of Artificial Sequence: Synthetic oligonucleotide
ggccgcaccauacguaccc

SEQ ID NO: 15635 - RNA, 19 nt, Artificial Sequence
  Description of Artificial Sequence: Synthetic oligonucleotide
acggggaauccauucuuua

SEQ ID NO: 15636 - RNA, 19 nt, Artificial Sequence
  Description of Artificial Sequence: Synthetic oligonucleotide
gucgugacuugugagucca

SEQ ID NO: 15637 - RNA, 19 nt, Artificial Sequence
  Description of Artificial Sequence: Synthetic oligonucleotide
auuggacgccaaaugugga

SEQ ID NO: 15638 - RNA, 19 nt, Artificial Sequence
  Description of Artificial Sequence: Synthetic oligonucleotide
ucguuacauuuggauccag

SEQ ID NO: 15639 - RNA, 19 nt, Artificial Sequence
  Description of Artificial Sequence: Synthetic oligonucleotide
gcaauuguggauagugcuc

SEQ ID NO: 15640 - RNA, 19 nt, Artificial Sequence
  Description of Artificial Sequence: Synthetic oligonucleotide
aaacccuaugguacuucua

SEQ ID NO: 15641 - RNA, 19 nt, Artificial Sequence
  Description of Artificial Sequence: Synthetic oligonucleotide
uggccgcaccauacguacc

SEQ ID NO: 15642 - RNA, 19 nt, Artificial Sequence
  Description of Artificial Sequence: Synthetic oligonucleotide
cuaccacauguucguguuc

SEQ ID NO: 15643 - RNA, 19 nt, Artificial Sequence
  Description of Artificial Sequence: Synthetic oligonucleotide
gugaccacguagggcgccg

SEQ ID NO: 15644 - RNA, 19 nt, Artificial Sequence
  Description of Artificial Sequence: Synthetic oligonucleotide
ucgagugacuggacuccua

SEQ ID NO: 15645 - RNA, 19 nt, Artificial Sequence
  Description of Artificial Sequence: Synthetic oligonucleotide
cagagcucaaaugggguaa

SEQ ID NO: 15646 - RNA, 19 nt, Artificial Sequence
  Description of Artificial Sequence: Synthetic oligonucleotide
gugagucgcugcagcagag

SEQ ID NO: 15647 - RNA, 19 nt, Artificial Sequence
  Description of Artificial Sequence: Synthetic oligonucleotide
cuaugaccacucaaugcgu

SEQ ID NO: 15648 - RNA, 19 nt, Artificial Sequence
  Description of Artificial Sequence: Synthetic oligonucleotide
caaugcguauuucucuggu

SEQ ID NO: 15649 - RNA, 19 nt, Artificial Sequence
  Description of Artificial Sequence: Synthetic oligonucleotide
ccauacacggagagucuug

SEQ ID NO: 15650 - RNA, 19 nt, Artificial Sequence
  Description of Artificial Sequence: Synthetic oligonucleotide
augcgcauugagggucuuc

SEQ ID NO: 15651 - RNA, 19 nt, Artificial Sequence
  Description of Artificial Sequence: Synthetic oligonucleotide
acguagggcgccgucuugu

SEQ ID NO: 15652 - RNA, 19 nt, Artificial Sequence
  Description of Artificial Sequence: Synthetic oligonucleotide
gaccacucaaugcguauuu

SEQ ID NO: 15653 - RNA, 19 nt, Artificial Sequence
  Description of Artificial Sequence: Synthetic oligonucleotide
cccaauuaucaugacccac

SEQ ID NO: 15654 - RNA, 19 nt, Artificial Sequence
  Description of Artificial Sequence: Synthetic oligonucleotide
cuagauuaaccaacacauu

SEQ ID NO: 15655 - RNA, 19 nt, Artificial Sequence
  Description of Artificial Sequence: Synthetic oligonucleotide
cucguuacauuuggaucca

SEQ ID NO: 15656 - RNA, 19 nt, Artificial Sequence
  Description of Artificial Sequence: Synthetic oligonucleotide
gggagaaccaagugagacu

SEQ ID NO: 15657 - RNA, 19 nt, Artificial Sequence
  Description of Artificial Sequence: Synthetic oligonucleotide
ccuaauaaccaccacuuuu

SEQ ID NO: 15658 - RNA, 19 nt, Artificial Sequence
  Description of Artificial Sequence: Synthetic oligonucleotide
uugcaccaucuagauuaac

SEQ ID NO: 15659 - RNA, 19 nt, Artificial Sequence
  Description of Artificial Sequence: Synthetic oligonucleotide
ccugaccuaguuuacuaaa

SEQ ID NO: 15660 - RNA, 19 nt, Artificial Sequence
  Description of Artificial Sequence: Synthetic oligonucleotide
guuuagugcccuaguucaa

SEQ ID NO: 15661 - RNA, 19 nt, Artificial Sequence
  Description of Artificial Sequence: Synthetic oligonucleotide
aaucgacuucuaacuugua

SEQ ID NO: 15662 - RNA, 19 nt, Artificial Sequence
  Description of Artificial Sequence: Synthetic oligonucleotide
gucaacuauucaguuuagu

SEQ ID NO: 15663 - RNA, 19 nt, Artificial Sequence
  Description of Artificial Sequence: Synthetic oligonucleotide
uugggcacgcugugcuaua

SEQ ID NO: 15664 - RNA, 19 nt, Artificial Sequence
  Description of Artificial Sequence: Synthetic oligonucleotide
cccuccuauguugucagug

SEQ ID NO: 15665 - RNA, 19 nt, Artificial Sequence
  Description of Artificial Sequence: Synthetic oligonucleotide
caugcgguuaggauuucuu

SEQ ID NO: 15666 - RNA, 19 nt, Artificial Sequence
  Description of Artificial Sequence: Synthetic oligonucleotide
acccuacguaguaguaacu

SEQ ID NO: 15667 - RNA, 19 nt, Artificial Sequence
  Description of Artificial Sequence: Synthetic oligonucleotide
cacguagggcgccgucuug

SEQ ID NO: 15668 - RNA, 19 nt, Artificial Sequence
  Description of Artificial Sequence: Synthetic oligonucleotide
aacggcacucccacaccuu

SEQ ID NO: 15669 - RNA, 19 nt, Artificial Sequence
  Description of Artificial Sequence: Synthetic oligonucleotide
aggcgagaaagcagcuacu

SEQ ID NO: 15670 - RNA, 19 nt, Artificial Sequence
  Description of Artificial Sequence: Synthetic oligonucleotide
auauagugggagggaggua

SEQ ID NO: 15671 - RNA, 19 nt, Artificial Sequence
  Description of Artificial Sequence: Synthetic oligonucleotide
caccauacguacccauucu

SEQ ID NO: 15672 - RNA, 19 nt, Artificial Sequence
  Description of Artificial Sequence: Synthetic oligonucleotide
acauagcgauuuguaccau

SEQ ID NO: 15673 - RNA, 19 nt, Artificial Sequence
  Description of Artificial Sequence: Synthetic oligonucleotide
cagaaucgacuucuaacuu

SEQ ID NO: 15674 - RNA, 19 nt, Artificial Sequence
  Description of Artificial Sequence: Synthetic oligonucleotide
caacggcacucccacaccu

SEQ ID NO: 15675 - RNA, 19 nt, Artificial Sequence
  Description of Artificial Sequence: Synthetic oligonucleotide
gggcucguuacauuuggau

SEQ ID NO: 15676 - RNA, 19 nt, Artificial Sequence
  Description of Artificial Sequence: Synthetic oligonucleotide
cuggacuccuaugaccacu

SEQ ID NO: 15677 - RNA, 19 nt, Artificial Sequence
  Description of Artificial Sequence: Synthetic oligonucleotide
cauugguaccauucuuguu

SEQ ID NO: 15678 - RNA, 19 nt, Artificial Sequence
  Description of Artificial Sequence: Synthetic oligonucleotide
ugaccacguagggcgccgu

SEQ ID NO: 15679 - RNA, 19 nt, Artificial Sequence
  Description of Artificial Sequence: Synthetic oligonucleotide
ccucuuaacccuacguagu

SEQ ID NO: 15680 - RNA, 19 nt, Artificial Sequence
  Description of Artificial Sequence: Synthetic oligonucleotide
ccacucaaugcguauuucu

SEQ ID NO: 15681 - RNA, 19 nt, Artificial Sequence
  Description of Artificial Sequence: Synthetic oligonucleotide
ccuagcccggcgcucgcgc

SEQ ID NO: 15682 - RNA, 19 nt, Artificial Sequence
  Description of Artificial Sequence: Synthetic oligonucleotide
cucgcgcguccucucgcuc

SEQ ID NO: 15683 - RNA, 19 nt, Artificial Sequence
  Description of Artificial Sequence: Synthetic oligonucleotide
gacggggaauccauucuuu

SEQ ID NO: 15684 - RNA, 19 nt, Artificial Sequence
  Description of Artificial Sequence: Synthetic oligonucleotide
cguacccaauuaucaugac

SEQ ID NO: 15685 - RNA, 19 nt, Artificial Sequence
  Description of Artificial Sequence: Synthetic oligonucleotide
gcuuagaguaggacagugu

SEQ ID NO: 15686 - RNA, 19 nt, Artificial Sequence
  Description of Artificial Sequence: Synthetic oligonucleotide
ccucuacuuauaaccgaaa

SEQ ID NO: 15687 - RNA, 19 nt, Artificial Sequence
  Description of Artificial Sequence: Synthetic oligonucleotide
ggcgccgucuuguggaagu

SEQ ID NO: 15688 - RNA, 19 nt, Artificial Sequence
  Description of Artificial Sequence: Synthetic oligonucleotide
ggacuccuaugaccacuca

SEQ ID NO: 15689 - RNA, 19 nt, Artificial Sequence
  Description of Artificial Sequence: Synthetic oligonucleotide
ccuacguaguaguaacuuu

SEQ ID NO: 15690 - RNA, 19 nt, Artificial Sequence
  Description of Artificial Sequence: Synthetic oligonucleotide
ggacggggaauccauucuu

SEQ ID NO: 15691 - RNA, 19 nt, Artificial Sequence
  Description of Artificial Sequence: Synthetic oligonucleotide
ggacggucuuucuccuaaa

SEQ ID NO: 15692 - RNA, 19 nt, Artificial Sequence
  Description of Artificial Sequence: Synthetic oligonucleotide
ccgcaacagucauaugaaa

SEQ ID NO: 15693 - RNA, 19 nt, Artificial Sequence
  Description of Artificial Sequence: Synthetic oligonucleotide
cucgagugacuggacuccu

SEQ ID NO: 15694 - RNA, 19 nt, Artificial Sequence
  Description of Artificial Sequence: Synthetic oligonucleotide
caccuccgcaacagucaua

SEQ ID NO: 15695 - RNA, 19 nt, Artificial Sequence
  Description of Artificial Sequence: Synthetic oligonucleotide
gccgcgggcgggcuccuca

SEQ ID NO: 15696 - RNA, 19 nt, Artificial Sequence
  Description of Artificial Sequence: Synthetic oligonucleotide
ggaccacccgacguaaauu

SEQ ID NO: 15697 - RNA, 19 nt, Artificial Sequence
  Description of Artificial Sequence: Synthetic oligonucleotide
ccuccgcaacagucauaug

SEQ ID NO: 15698 - RNA, 19 nt, Artificial Sequence
  Description of Artificial Sequence: Synthetic oligonucleotide
cccuugagaguucgcucaa

SEQ ID NO: 15699 - RNA, 19 nt, Artificial Sequence
  Description of Artificial Sequence: Synthetic oligonucleotide
cgcgcguccucucgcucgc

SEQ ID NO: 15700 - RNA, 19 nt, Artificial Sequence
  Description of Artificial Sequence: Synthetic oligonucleotide
gccgcaccauacguaccca

SEQ ID NO: 15701 - RNA, 19 nt, Artificial Sequence
  Description of Artificial Sequence: Synthetic oligonucleotide
cccuacguaguaguaacuu

SEQ ID NO: 15702 - RNA, 19 nt, Artificial Sequence
  Description of Artificial Sequence: Synthetic oligonucleotide
ccacccgacguaaauucuu

SEQ ID NO: 15703 - RNA, 19 nt, Artificial Sequence
  Description of Artificial Sequence: Synthetic oligonucleotide
cgagugacuggacuccuau

SEQ ID NO: 15704 - RNA, 19 nt, Artificial Sequence
  Description of Artificial Sequence: Synthetic oligonucleotide
gcccuagcccggcgcucgc

SEQ ID NO: 15705 - RNA, 19 nt, Artificial Sequence
  Description of Artificial Sequence: Synthetic oligonucleotide
ccuugagaguucgcucaaa

SEQ ID NO: 15706 - RNA, 19 nt, Artificial Sequence
  Description of Artificial Sequence: Synthetic oligonucleotide
gcucgcgcguccucucgcu

SEQ ID NO: 15707 - RNA, 19 nt, Artificial Sequence
  Description of Artificial Sequence: Synthetic oligonucleotide
ccaugcgguuaggauuucu

SEQ ID NO: 15708 - RNA, 19 nt, Artificial Sequence
  Description of Artificial Sequence: Synthetic oligonucleotide
ccgcaccauacguacccau

SEQ ID NO: 15709 - RNA, 19 nt, Artificial Sequence
  Description of Artificial Sequence: Synthetic oligonucleotide
ccacguagggcgccgucuu

SEQ ID NO: 15710 - RNA, 19 nt, Artificial Sequence
  Description of Artificial Sequence: Synthetic oligonucleotide
cgagcccuagcccggcgcu

SEQ ID NO: 15711 - RNA, 19 nt, Artificial Sequence
  Description of Artificial Sequence: Synthetic oligonucleotide
cgcgcccgagcacuccccu

SEQ ID NO: 15712 - RNA, 19 nt, Artificial Sequence
  Description of Artificial Sequence: Synthetic oligonucleotide
aacucaauaacauaggucu

SEQ ID NO: 15713 - RNA, 19 nt, Artificial Sequence
  Description of Artificial Sequence: Synthetic oligonucleotide
aguuaauaaaaccaccacc

SEQ ID NO: 15714 - RNA, 19 nt, Artificial Sequence
  Description of Artificial Sequence: Synthetic oligonucleotide
uaagauaucacaaccauga

SEQ ID NO: 15715 - RNA, 19 nt, Artificial Sequence
  Description of Artificial Sequence: Synthetic oligonucleotide
acuuaugacacucagaccu

SEQ ID NO: 15716 - RNA, 19 nt, Artificial Sequence
  Description of Artificial Sequence: Synthetic oligonucleotide
acauuaugcaaacacgugc

SEQ ID NO: 15717 - RNA, 19 nt, Artificial Sequence
  Description of Artificial Sequence: Synthetic oligonucleotide
ucuauaucgggauacgugg

SEQ ID NO: 15718 - RNA, 19 nt, Artificial Sequence
  Description of Artificial Sequence: Synthetic oligonucleotide
uguuauuaaaugcugauau

SEQ ID NO: 15719 - RNA, 19 nt, Artificial Sequence
  Description of Artificial Sequence: Synthetic oligonucleotide
  modified_base (3)..(3): a, c, u, g, unknown or other
aanacccuaacauaaagaa

SEQ ID NO: 15720 - RNA, 19 nt, Artificial Sequence
  Description of Artificial Sequence: Synthetic oligonucleotide
gaagcaugcaccuacaaug

SEQ ID NO: 15721 - RNA, 19 nt, Artificial Sequence
  Description of Artificial Sequence: Synthetic oligonucleotide
acaaaugguaaacacuccc

SEQ ID NO: 15722 - RNA, 19 nt, Artificial Sequence
  Description of Artificial Sequence: Synthetic oligonucleotide
uaaaguacgaguuagggua

SEQ ID NO: 15723 - RNA, 19 nt, Artificial Sequence
  Description of Artificial Sequence: Synthetic oligonucleotide
accacuuacauuuaacagg

SEQ ID NO: 15724 - RNA, 19 nt, Artificial Sequence
  Description of Artificial Sequence: Synthetic oligonucleotide
ugacuaaggaguauucucg

SEQ ID NO: 15725 - RNA, 19 nt, Artificial Sequence
  Description of Artificial Sequence: Synthetic oligonucleotide
cuuauuuuaaguagagccc

SEQ ID NO: 15726 - RNA, 19 nt, Artificial Sequence
  Description of Artificial Sequence: Synthetic oligonucleotide
aaugaagcuacguuacaag

SEQ ID NO: 15727 - RNA, 19 nt, Artificial Sequence
  Description of Artificial Sequence: Synthetic oligonucleotide
aacuguacuacacucacga

SEQ ID NO: 15728 - RNA, 19 nt, Artificial Sequence
  Description of Artificial Sequence: Synthetic oligonucleotide
aauaucucguucaagguag

SEQ ID NO: 15729 - RNA, 19 nt, Artificial Sequence
  Description of Artificial Sequence: Synthetic oligonucleotide
auuagaauuaggaauguuc

SEQ ID NO: 15730 - RNA, 19 nt, Artificial Sequence
  Description of Artificial Sequence: Synthetic oligonucleotide
uuuugcgucaggauauugg

SEQ ID NO: 15731 - RNA, 19 nt, Artificial Sequence
  Description of Artificial Sequence: Synthetic oligonucleotide
  modified_base (5)..(5): a, c, u, g, unknown or other
ucaanacccuaacauaaag

SEQ ID NO: 15732 - RNA, 19 nt, Artificial Sequence
  Description of Artificial Sequence: Synthetic oligonucleotide
uaaccguuuauuuuauuag

SEQ ID NO: 15733 - RNA, 19 nt, Artificial Sequence
  Description of Artificial Sequence: Synthetic oligonucleotide
uaguuauaccucuugaucu

SEQ ID NO: 15734 - RNA, 19 nt, Artificial Sequence
  Description of Artificial Sequence: Synthetic oligonucleotide
uaggguaugagagaaagug

SEQ ID NO: 15735 - RNA, 19 nt, Artificial Sequence
  Description of Artificial Sequence: Synthetic oligonucleotide
auauaacuaaauuaaccgu

SEQ ID NO: 15736 - RNA, 19 nt, Artificial Sequence
  Description of Artificial Sequence: Synthetic oligonucleotide
uuauccaugcauaugcgcu

SEQ ID NO: 15737 - RNA, 19 nt, Artificial Sequence
  Description of Artificial Sequence: Synthetic oligonucleotide
cauuaugcaaacacgugcc

SEQ ID NO: 15738 - RNA, 19 nt, Artificial Sequence
  Description of Artificial Sequence: Synthetic oligonucleotide
guuaggguaguucaaguag

SEQ ID NO: 15739 - RNA, 19 nt, Artificial Sequence
  Description of Artificial Sequence: Synthetic oligonucleotide
augcucaaagcguagacuc

SEQ ID NO: 15740 - RNA, 19 nt, Artificial Sequence
  Description of Artificial Sequence: Synthetic oligonucleotide
ugcacuaucucuccauggg

SEQ ID NO: 15741 - RNA, 19 nt, Artificial Sequence
  Description of Artificial Sequence: Synthetic oligonucleotide
cauauagcgauuacaguag

SEQ ID NO: 15742 - RNA, 19 nt, Artificial Sequence
  Description of Artificial Sequence: Synthetic oligonucleotide
auuaauacccucagguccc

SEQ ID NO: 15743 - RNA, 19 nt, Artificial Sequence
  Description of Artificial Sequence: Synthetic oligonucleotide
guuacgacaaaccauguga

SEQ ID NO: 15744 - RNA, 19 nt, Artificial Sequence
  Description of Artificial Sequence: Synthetic oligonucleotide
aaacugacagucuuaggga

SEQ ID NO: 15745 - RNA, 19 nt, Artificial Sequence
  Description of Artificial Sequence: Synthetic oligonucleotide
uuuaaguagagcccucuga

SEQ ID NO: 15746 - RNA, 19 nt, Artificial Sequence
  Description of Artificial Sequence: Synthetic oligonucleotide
auagcgauuacaguagaac

SEQ ID NO: 15747 - RNA, 19 nt, Artificial Sequence
  Description of Artificial Sequence: Synthetic oligonucleotide
uacuuaaauucacuggaug

SEQ ID NO: 15748 - RNA, 19 nt, Artificial Sequence
  Description of Artificial Sequence: Synthetic oligonucleotide
guggacugagacuauaagg

SEQ ID NO: 15749 - RNA, 19 nt, Artificial Sequence
  Description of Artificial Sequence: Synthetic oligonucleotide
aggaaaaguagggugauuc

SEQ ID NO: 15750 - RNA, 19 nt, Artificial Sequence
  Description of Artificial Sequence: Synthetic oligonucleotide
cugaaaguaccucaguggc

SEQ ID NO: 15751 - RNA, 19 nt, Artificial Sequence
  Description of Artificial Sequence: Synthetic oligonucleotide
uuuguuauuaaaugcugau

SEQ ID NO: 15752 - RNA, 19 nt, Artificial Sequence
  Description of Artificial Sequence: Synthetic oligonucleotide
guaaacacucccuaggcac

SEQ ID NO: 15753 - RNA, 19 nt, Artificial Sequence
  Description of Artificial Sequence: Synthetic oligonucleotide
uuuaacaggccacagcuuu

SEQ ID NO: 15754 - RNA, 19 nt, Artificial Sequence
  Description of Artificial Sequence: Synthetic oligonucleotide
uuuaaucaauuuaucgauc

SEQ ID NO: 15755 - RNA, 19 nt, Artificial Sequence
  Description of Artificial Sequence: Synthetic oligonucleotide
uuuauccaugcauaugcgc

SEQ ID NO: 15756 - RNA, 19 nt, Artificial Sequence
  Description of Artificial Sequence: Synthetic oligonucleotide
cugguuacgacaaaccaug

SEQ ID NO: 15757 - RNA, 19 nt, Artificial Sequence
  Description of Artificial Sequence: Synthetic oligonucleotide
  modified_base (8)..(8): a, c, u, g, unknown or other
uauucaanacccuaacaua

SEQ ID NO: 15758 - RNA, 19 nt, Artificial Sequence
  Description of Artificial Sequence: Synthetic oligonucleotide
aguagggugauucagcaaa

SEQ ID NO: 15759 - RNA, 19 nt, Artificial Sequence
  Description of Artificial Sequence: Synthetic oligonucleotide
agauaagccaacugaaaga

SEQ ID NO: 15760 - RNA, 19 nt, Artificial Sequence
  Description of Artificial Sequence: Synthetic oligonucleotide
uggacuuuaacaacauggu

SEQ ID NO: 15761 - RNA, 19 nt, Artificial Sequence
  Description of Artificial Sequence: Synthetic oligonucleotide
ucucguucaagguagccug

SEQ ID NO: 15762 - RNA, 19 nt, Artificial Sequence
  Description of Artificial Sequence: Synthetic oligonucleotide
uuaacagucgguugcacuc

SEQ ID NO: 15763 - RNA, 19 nt, Artificial Sequence
  Description of Artificial Sequence: Synthetic oligonucleotide
cuauaaggugcauacacuc

SEQ ID NO: 15764 - RNA, 19 nt, Artificial Sequence
  Description of Artificial Sequence: Synthetic oligonucleotide
uuaucgaucugauugucuc

SEQ ID NO: 15765 - RNA, 19 nt, Artificial Sequence
  Description of Artificial Sequence: Synthetic oligonucleotide
caggacacgaaauagucug

SEQ ID NO: 15766 - RNA, 19 nt, Artificial Sequence
  Description of Artificial Sequence: Synthetic oligonucleotide
ugugaucaggcgcauaacu

SEQ ID NO: 15767 - RNA, 19 nt, Artificial Sequence
  Description of Artificial Sequence: Synthetic oligonucleotide
gugauuacaaccgccaucc

SEQ ID NO: 15768 - RNA, 19 nt, Artificial Sequence
  Description of Artificial Sequence: Synthetic oligonucleotide
auagcgguuacaguuguac

SEQ ID NO: 15769 - RNA, 19 nt, Artificial Sequence
  Description of Artificial Sequence: Synthetic oligonucleotide
uuugcgucaggauauugga

SEQ ID NO: 15770 - RNA, 19 nt, Artificial Sequence
  Description of Artificial Sequence: Synthetic oligonucleotide
gcaugagcacucuagaugg

SEQ ID NO: 15771 - RNA, 19 nt, Artificial Sequence
  Description of Artificial Sequence: Synthetic oligonucleotide
agaaagcgaagacauaagu

SEQ ID NO: 15772 - RNA, 19 nt, Artificial Sequence
  Description of Artificial Sequence: Synthetic oligonucleotide
  modified_base (7)..(7): a, c, u, g, unknown or other
auucaanacccuaacauaa

SEQ ID NO: 15773 - RNA, 19 nt, Artificial Sequence
  Description of Artificial Sequence: Synthetic oligonucleotide
  modified_base (2)..(2): a, c, u, g, unknown or other
anacccuaacauaaagaag

SEQ ID NO: 15774 - RNA, 19 nt, Artificial Sequence
  Description of Artificial Sequence: Synthetic oligonucleotide
agaaagugaguccaacugu

SEQ ID NO: 15775 - RNA, 19 nt, Artificial Sequence
  Description of Artificial Sequence: Synthetic oligonucleotide
aggaguauucucguuauag

SEQ ID NO: 15776 - RNA, 19 nt, Artificial Sequence
  Description of Artificial Sequence: Synthetic oligonucleotide
aaacccuucgucgacucuc

SEQ ID NO: 15777 - RNA, 19 nt, Artificial Sequence
  Description of Artificial Sequence: Synthetic oligonucleotide
ucugguuacgacaaaccau

SEQ ID NO: 15778 - RNA, 19 nt, Artificial Sequence
  Description of Artificial Sequence: Synthetic oligonucleotide
uuuuaaguagagcccucug

SEQ ID NO: 15779 - RNA, 19 nt, Artificial Sequence
  Description of Artificial Sequence: Synthetic oligonucleotide
cuuuauccaugcauaugcg

SEQ ID NO: 15780 - RNA, 19 nt, Artificial Sequence
  Description of Artificial Sequence: Synthetic oligonucleotide
aucgaacagguuuugcguc

SEQ ID NO: 15781 - RNA, 19 nt, Artificial Sequence
  Description of Artificial Sequence: Synthetic oligonucleotide
uuuaucgaucugauugucu

SEQ ID NO: 15782 - RNA, 19 nt, Artificial Sequence
  Description of Artificial Sequence: Synthetic oligonucleotide
augggaguuaucaauguuc

SEQ ID NO: 15783 - RNA, 19 nt, Artificial Sequence
  Description of Artificial Sequence: Synthetic oligonucleotide
auaugcgcuauauacaauu

SEQ ID NO: 15784 - RNA, 19 nt, Artificial Sequence
  Description of Artificial Sequence: Synthetic oligonucleotide
aguuguuaaaagcuuggau

SEQ ID NO: 15785 - RNA, 19 nt, Artificial Sequence
  Description of Artificial Sequence: Synthetic oligonucleotide
agcuaauaaucauuauuca

SEQ ID NO: 15786 - RNA, 19 nt, Artificial Sequence
  Description of Artificial Sequence: Synthetic oligonucleotide
aguauucucguuauaguug

SEQ ID NO: 15787 - RNA, 19 nt, Artificial Sequence
  Description of Artificial Sequence: Synthetic oligonucleotide
aacauuaugcaaacacgug

SEQ ID NO: 15788 - RNA, 19 nt, Artificial Sequence
  Description of Artificial Sequence: Synthetic oligonucleotide
uaacuguacuacacucacg

SEQ ID NO: 15789 - RNA, 19 nt, Artificial Sequence
  Description of Artificial Sequence: Synthetic oligonucleotide
ugaucuaguugccuaguuc

SEQ ID NO: 15790 - RNA, 19 nt, Artificial Sequence
  Description of Artificial Sequence: Synthetic oligonucleotide
uacguggcuaaaauaauuu

SEQ ID NO: 15791 - RNA, 19 nt, Artificial Sequence
  Description of Artificial Sequence: Synthetic oligonucleotide
uauaucgggauacguggcu

SEQ ID NO: 15792 - RNA, 19 nt, Artificial Sequence
  Description of Artificial Sequence: Synthetic oligonucleotide
ugucucaccaacccacccc

SEQ ID NO: 15793 - RNA, 19 nt, Artificial Sequence
  Description of Artificial Sequence: Synthetic oligonucleotide
augaccuuaggguaugaga

SEQ ID NO: 15794 - RNA, 19 nt, Artificial Sequence
  Description of Artificial Sequence: Synthetic oligonucleotide
agcgguuacaguuguacca

SEQ ID NO: 15795 - RNA, 19 nt, Artificial Sequence
  Description of Artificial Sequence: Synthetic oligonucleotide
uguucuagugguguuugcc

SEQ ID NO: 15796 - RNA, 19 nt, Artificial Sequence
  Description of Artificial Sequence: Synthetic oligonucleotide
gaagcuacguuacaaguua

SEQ ID NO: 15797 - RNA, 19 nt, Artificial Sequence
  Description of Artificial Sequence: Synthetic oligonucleotide
auggaguaauaagauguac

SEQ ID NO: 15798 - RNA, 19 nt, Artificial Sequence
  Description of Artificial Sequence: Synthetic oligonucleotide
gacacgaaauagucugucc

SEQ ID NO: 15799 - RNA, 19 nt, Artificial Sequence
  Description of Artificial Sequence: Synthetic oligonucleotide
aagaacaguugcaaguaca

SEQ ID NO: 15800 - RNA, 19 nt, Artificial Sequence
  Description of Artificial Sequence: Synthetic oligonucleotide
ugaagcuacguuacaaguu

SEQ ID NO: 15801 - RNA, 19 nt, Artificial Sequence
  Description of Artificial Sequence: Synthetic oligonucleotide
agucuuagggaugcugacc

SEQ ID NO: 15802 - RNA, 19 nt, Artificial Sequence
  Description of Artificial Sequence: Synthetic oligonucleotide
  modified_base (6)..(6): a, c, u, g, unknown or other
uucaanacccuaacauaaa

SEQ ID NO: 15803 - RNA, 19 nt, Artificial Sequence
  Description of Artificial Sequence: Synthetic oligonucleotide
  modified_base (9)..(9): a, c, u, g, unknown or other
guauucaanacccuaacau

SEQ ID NO: 15804 - RNA, 19 nt, Artificial Sequence
  Description of Artificial Sequence: Synthetic oligonucleotide
  modified_base (4)..(4): a, c, u, g, unknown or other
caanacccuaacauaaaga

SEQ ID NO: 15805 - RNA, 19 nt, Artificial Sequence
  Description of Artificial Sequence: Synthetic oligonucleotide
uccuuuaccaaaguacaac

SEQ ID NO: 15806 - RNA, 19 nt, Artificial Sequence
  Description of Artificial Sequence: Synthetic oligonucleotide
gaauccuaaagcaacaagu

SEQ ID NO: 15807 - RNA, 19 nt, Artificial Sequence
  Description of Artificial Sequence: Synthetic oligonucleotide
uuacgacaaaccaugugau

SEQ ID NO: 15808 - RNA, 19 nt, Artificial Sequence
  Description of Artificial Sequence: Synthetic oligonucleotide
agucuggugauguuauaug

SEQ ID NO: 15809 - RNA, 19 nt, Artificial Sequence
  Description of Artificial Sequence: Synthetic oligonucleotide
agcgauuacaguagaacag

SEQ ID NO: 15810 - RNA, 19 nt, Artificial Sequence
  Description of Artificial Sequence: Synthetic oligonucleotide
cuaguugccuaguucacuc

SEQ ID NO: 15811 - RNA, 19 nt, Artificial Sequence
  Description of Artificial Sequence: Synthetic oligonucleotide
uuacuuaaacuuuccguua

SEQ ID NO: 15812 - RNA, 19 nt, Artificial Sequence
  Description of Artificial Sequence: Synthetic oligonucleotide
aagugcucuauaucgggau

SEQ ID NO: 15813 - RNA, 19 nt, Artificial Sequence
  Description of Artificial Sequence: Synthetic oligonucleotide
uuauagcgguuacaguugu

SEQ ID NO: 15814 - RNA, 19 nt, Artificial Sequence
  Description of Artificial Sequence: Synthetic oligonucleotide
ugucaaggagcuauuugaa

SEQ ID NO: 15815 - RNA, 19 nt, Artificial Sequence
  Description of Artificial Sequence: Synthetic oligonucleotide
ucguugaccucccggauac

SEQ ID NO: 15816 - RNA, 19 nt, Artificial Sequence
  Description of Artificial Sequence: Synthetic oligonucleotide
auuauagcgguuacaguug

SEQ ID NO: 15817 - RNA, 19 nt, Artificial Sequence
  Description of Artificial Sequence: Synthetic oligonucleotide
ggaucuauugguauguaug

SEQ ID NO: 15818 - RNA, 19 nt, Artificial Sequence
  Description of Artificial Sequence: Synthetic oligonucleotide
acguggcuaaaauaauuug

SEQ ID NO: 15819 - RNA, 19 nt, Artificial Sequence
  Description of Artificial Sequence: Synthetic oligonucleotide
cuauaucgggauacguggc

SEQ ID NO: 15820 - RNA, 19 nt, Artificial Sequence
  Description of Artificial Sequence: Synthetic oligonucleotide
aauuuagagucuggugaug

SEQ ID NO: 15821 - RNA, 19 nt, Artificial Sequence
  Description of Artificial Sequence: Synthetic oligonucleotide
auaacuguguugucaucca

SEQ ID NO: 15822 - RNA, 19 nt, Artificial Sequence
  Description of Artificial Sequence: Synthetic oligonucleotide
uuguguuagcugcaaucca

SEQ ID NO: 15823 - RNA, 19 nt, Artificial Sequence
  Description of Artificial Sequence: Synthetic oligonucleotide
uaugcucaaagcguagacu

SEQ ID NO: 15824 - RNA, 19 nt, Artificial Sequence
  Description of Artificial Sequence: Synthetic oligonucleotide
uauuuuaaguagagcccuc

SEQ ID NO: 15825 - RNA, 19 nt, Artificial Sequence
  Description of Artificial Sequence: Synthetic oligonucleotide
uuaugcaaacacgugccac

SEQ ID NO: 15826 - RNA, 19 nt, Artificial Sequence
  Description of Artificial Sequence: Synthetic oligonucleotide
ugaccccaaaacacaagga

SEQ ID NO: 15827 - RNA, 19 nt, Artificial Sequence
  Description of Artificial Sequence: Synthetic oligonucleotide
caaacucagugauuccuac

SEQ ID NO: 15828 - RNA, 19 nt, Artificial Sequence
  Description of Artificial Sequence: Synthetic oligonucleotide
uuaugacacucagaccuag

SEQ ID NO: 15829 - RNA, 19 nt, Artificial Sequence
  Description of Artificial Sequence: Synthetic oligonucleotide
uaucgaucugauugucuca

SEQ ID NO: 15830 - RNA, 19 nt, Artificial Sequence
  Description of Artificial Sequence: Synthetic oligonucleotide
gguuaggagcauuuaauca

SEQ ID NO: 15831 - RNA, 19 nt, Artificial Sequence
  Description of Artificial Sequence: Synthetic oligonucleotide
uucaaccacuuacauuuaa

SEQ ID NO: 15832 - RNA, 19 nt, Artificial Sequence
  Description of Artificial Sequence: Synthetic oligonucleotide
gaugcuuuaacaggccaca

SEQ ID NO: 15833 - RNA, 19 nt, Artificial Sequence
  Description of Artificial Sequence: Synthetic oligonucleotide
acgacaaaccaugugauua

SEQ ID NO: 15834 - RNA, 19 nt, Artificial Sequence
  Description of Artificial Sequence: Synthetic oligonucleotide
ucgaacagguuuugcguca

SEQ ID NO: 15835 - RNA, 19 nt, Artificial Sequence
  Description of Artificial Sequence: Synthetic oligonucleotide
ucgacucucacaguaucug

SEQ ID NO: 15836 - RNA, 19 nt, Artificial Sequence
  Description of Artificial Sequence: Synthetic oligonucleotide
aguuauaccucuugaucua

SEQ ID NO: 15837 - RNA, 19 nt, Artificial Sequence
  Description of Artificial Sequence: Synthetic oligonucleotide
cugcacuaucucuccaugg

SEQ ID NO: 15838 - RNA, 19 nt, Artificial Sequence
  Description of Artificial Sequence: Synthetic oligonucleotide
aguuaggguaguucaagua

SEQ ID NO: 15839 - RNA, 19 nt, Artificial Sequence
  Description of Artificial Sequence: Synthetic oligonucleotide
ccacuaagauaucacaacc

SEQ ID NO: 15840 - RNA, 19 nt, Artificial Sequence
  Description of Artificial Sequence: Synthetic oligonucleotide
ccuucgucgacucucacag

SEQ ID NO: 15841 - RNA, 19 nt, Artificial Sequence
  Description of Artificial Sequence: Synthetic oligonucleotide
uagcgguuacaguuguacc

SEQ ID NO: 15842 - RNA, 19 nt, Artificial Sequence
  Description of Artificial Sequence: Synthetic oligonucleotide
auuuuaaguagagcccucu

SEQ ID NO: 15843 - RNA, 19 nt, Artificial Sequence
  Description of Artificial Sequence: Synthetic oligonucleotide
ucccggauacauuccacca

SEQ ID NO: 15844 - RNA, 19 nt, Artificial Sequence
  Description of Artificial Sequence: Synthetic oligonucleotide
uaugacacucagaccuaga

SEQ ID NO: 15845 - RNA, 19 nt, Artificial Sequence
  Description of Artificial Sequence: Synthetic oligonucleotide
acaugaguguggcacgaca

SEQ ID NO: 15846 - RNA, 19 nt, Artificial Sequence
  Description of Artificial Sequence: Synthetic oligonucleotide
ugcucuauaucgggauacg

SEQ ID NO: 15847 - RNA, 19 nt, Artificial Sequence
  Description of Artificial Sequence: Synthetic oligonucleotide
uccucauuauagcgguuac

SEQ ID NO: 15848 - RNA, 19 nt, Artificial Sequence
  Description of Artificial Sequence: Synthetic oligonucleotide
aggcgcauaacuguguugu

SEQ ID NO: 15849 - RNA, 19 nt, Artificial Sequence
  Description of Artificial Sequence: Synthetic oligonucleotide
ucuaguugccuaguucacu

SEQ ID NO: 15850 - RNA, 19 nt, Artificial Sequence
  Description of Artificial Sequence: Synthetic oligonucleotide
aaaacccuucgucgacucu

SEQ ID NO: 15851 - RNA, 19 nt, Artificial Sequence
  Description of Artificial Sequence: Synthetic oligonucleotide
uggaucuauugguauguau

SEQ ID NO: 15852 - RNA, 19 nt, Artificial Sequence
  Description of Artificial Sequence: Synthetic oligonucleotide
ggguaguucaaguagcaga

SEQ ID NO: 15853 - RNA, 19 nt, Artificial Sequence
  Description of Artificial Sequence: Synthetic oligonucleotide
guaaaguacgaguuagggu

SEQ ID NO: 15854 - RNA, 19 nt, Artificial Sequence
  Description of Artificial Sequence: Synthetic oligonucleotide
ucuccuauaugcugacaau

SEQ ID NO: 15855 - RNA, 19 nt, Artificial Sequence
  Description of Artificial Sequence: Synthetic oligonucleotide
ucuggcguguucgagacuu

SEQ ID NO: 15856 - RNA, 19 nt, Artificial Sequence
  Description of Artificial Sequence: Synthetic oligonucleotide
uauccaugcauaugcgcua

SEQ ID NO: 15857 - RNA, 19 nt, Artificial Sequence
  Description of Artificial Sequence: Synthetic oligonucleotide
gaucaggcgcauaacugug

SEQ ID NO: 15858 - RNA, 19 nt, Artificial Sequence
  Description of Artificial Sequence: Synthetic oligonucleotide
uacaggguuaggagcauuu

SEQ ID NO: 15859 - RNA, 19 nt, Artificial Sequence
  Description of Artificial Sequence: Synthetic oligonucleotide
ucccaauugaagugacuaa

SEQ ID NO: 15860 - RNA, 19 nt, Artificial Sequence
  Description of Artificial Sequence: Synthetic oligonucleotide
uugaauccuaaagcaacaa

SEQ ID NO: 15861 - RNA, 19 nt, Artificial Sequence
  Description of Artificial Sequence: Synthetic oligonucleotide
gcaccuacaauguaacuga

SEQ ID NO: 15862 - RNA, 19 nt, Artificial Sequence
  Description of Artificial Sequence: Synthetic oligonucleotide
aaguagggugauucagcaa

SEQ ID NO: 15863 - RNA, 19 nt, Artificial Sequence
  Description of Artificial Sequence: Synthetic oligonucleotide
ugguucauauagcgauuac

SEQ ID NO: 15864 - RNA, 19 nt, Artificial Sequence
  Description of Artificial Sequence: Synthetic oligonucleotide
auaugcuacuccauuuaca

SEQ ID NO: 15865 - RNA, 19 nt, Artificial Sequence
  Description of Artificial Sequence: Synthetic oligonucleotide
agggaccauauauaucuau

SEQ ID NO: 15866 - RNA, 19 nt, Artificial Sequence
  Description of Artificial Sequence: Synthetic oligonucleotide
aucuaguugccuaguucac

SEQ ID NO: 15867 - RNA, 19 nt, Artificial Sequence
  Description of Artificial Sequence: Synthetic oligonucleotide
acguuacaaguuaaaguug

SEQ ID NO: 15868 - RNA, 19 nt, Artificial Sequence
  Description of Artificial Sequence: Synthetic oligonucleotide
uugaucuaguugccuaguu

SEQ ID NO: 15869 - RNA, 19 nt, Artificial Sequence
  Description of Artificial Sequence: Synthetic oligonucleotide
agugaaccuacuucccaau

SEQ ID NO: 15870 - RNA, 19 nt, Artificial Sequence
  Description of Artificial Sequence: Synthetic oligonucleotide
uaucucguucaagguagcc

SEQ ID NO: 15871 - RNA, 19 nt, Artificial Sequence
  Description of Artificial Sequence: Synthetic oligonucleotide
auaucucguucaagguagc

SEQ ID NO: 15872 - RNA, 19 nt, Artificial Sequence
  Description of Artificial Sequence: Synthetic oligonucleotide
gguuacgacaaaccaugug

SEQ ID NO: 15873 - RNA, 19 nt, Artificial Sequence
  Description of Artificial Sequence: Synthetic oligonucleotide
cccuagaucgcucuugggc

SEQ ID NO: 15874 - RNA, 19 nt, Artificial Sequence
  Description of Artificial Sequence: Synthetic oligonucleotide
accuuaggguaugagagaa

SEQ ID NO: 15875 - RNA, 19 nt, Artificial Sequence
  Description of Artificial Sequence: Synthetic oligonucleotide
ggguuaggagcauuuaauc

SEQ ID NO: 15876 - RNA, 19 nt, Artificial Sequence
  Description of Artificial Sequence: Synthetic oligonucleotide
uaucgggauacguggcuaa

SEQ ID NO: 15877 - RNA, 19 nt, Artificial Sequence
  Description of Artificial Sequence: Synthetic oligonucleotide
guacuacagaccagcagug

SEQ ID NO: 15878 - RNA, 19 nt, Artificial Sequence
  Description of Artificial Sequence: Synthetic oligonucleotide
caggugaaccacacauuac

SEQ ID NO: 15879 - RNA, 19 nt, Artificial Sequence
  Description of Artificial Sequence: Synthetic oligonucleotide
ucacacuuuguuggcggcc

SEQ ID NO: 15880 - RNA, 19 nt, Artificial Sequence
  Description of Artificial Sequence: Synthetic oligonucleotide
acuaaggaguauucucguu

SEQ ID NO: 15881 - RNA, 19 nt, Artificial Sequence
  Description of Artificial Sequence: Synthetic oligonucleotide
caaaacccuucgucgacuc

SEQ ID NO: 15882 - RNA, 19 nt, Artificial Sequence
  Description of Artificial Sequence: Synthetic oligonucleotide
gauuacaguagaacaggua

SEQ ID NO: 15883 - RNA, 19 nt, Artificial Sequence
  Description of Artificial Sequence: Synthetic oligonucleotide
aaguaccucaguggcauuu

SEQ ID NO: 15884 - RNA, 19 nt, Artificial Sequence
  Description of Artificial Sequence: Synthetic oligonucleotide
caaaugguaaacacucccu

SEQ ID NO: 15885 - RNA, 19 nt, Artificial Sequence
  Description of Artificial Sequence: Synthetic oligonucleotide
guauucaucuggcguguuc

SEQ ID NO: 15886 - RNA, 19 nt, Artificial Sequence
  Description of Artificial Sequence: Synthetic oligonucleotide
cagucuuagggaugcugac

SEQ ID NO: 15887 - RNA, 19 nt, Artificial Sequence
  Description of Artificial Sequence: Synthetic oligonucleotide
agguuuugcgucaggauau

SEQ ID NO: 15888 - RNA, 19 nt, Artificial Sequence
  Description of Artificial Sequence: Synthetic oligonucleotide
auguauacacgugugucuu

SEQ ID NO: 15889 - RNA, 19 nt, Artificial Sequence
  Description of Artificial Sequence: Synthetic oligonucleotide
gacuaaggaguauucucgu

SEQ ID NO: 15890 - RNA, 19 nt, Artificial Sequence
  Description of Artificial Sequence: Synthetic oligonucleotide
cccaauugaagugacuaag

SEQ ID NO: 15891 - RNA, 19 nt, Artificial Sequence
  Description of Artificial Sequence: Synthetic oligonucleotide
gauuacaaccgccauccuu

SEQ ID NO: 15892 - RNA, 19 nt, Artificial Sequence
  Description of Artificial Sequence: Synthetic oligonucleotide
cauauccugugcugaugac

SEQ ID NO: 15893 - RNA, 19 nt, Artificial Sequence
  Description of Artificial Sequence: Synthetic oligonucleotide
cugucacacuuuguuggcg

SEQ ID NO: 15894 - RNA, 19 nt, Artificial Sequence
  Description of Artificial Sequence: Synthetic oligonucleotide
auacguggcuaaaauaauu

SEQ ID NO: 15895 - RNA, 19 nt, Artificial Sequence
  Description of Artificial Sequence: Synthetic oligonucleotide
agugcucuauaucgggaua

SEQ ID NO: 15896 - RNA, 19 nt, Artificial Sequence
  Description of Artificial Sequence: Synthetic oligonucleotide
ucccuaggcacaagacagu

SEQ ID NO: 15897 - RNA, 19 nt, Artificial Sequence
  Description of Artificial Sequence: Synthetic oligonucleotide
ggcauugaagcuacuaaca

SEQ ID NO: 15898 - RNA, 19 nt, Artificial Sequence
  Description of Artificial Sequence: Synthetic oligonucleotide
gugcucuauaucgggauac

SEQ ID NO: 15899 - RNA, 19 nt, Artificial Sequence
  Description of Artificial Sequence: Synthetic oligonucleotide
gaguuaggguaguucaagu

SEQ ID NO: 15900 - RNA, 19 nt, Artificial Sequence
  Description of Artificial Sequence: Synthetic oligonucleotide
caucgaacagguuuugcgu

SEQ ID NO: 15901 - RNA, 19 nt, Artificial Sequence
  Description of Artificial Sequence: Synthetic oligonucleotide
ggaacucaauaacauaggu

SEQ ID NO: 15902 - RNA, 19 nt, Artificial Sequence
  Description of Artificial Sequence: Synthetic oligonucleotide
uguacuuaucuuggacuuu

SEQ ID NO: 15903 - RNA, 19 nt, Artificial Sequence
  Description of Artificial Sequence: Synthetic oligonucleotide
aacagucgguugcacucua

SEQ ID NO: 15904 - RNA, 19 nt, Artificial Sequence
  Description of Artificial Sequence: Synthetic oligonucleotide
acuguacuacacucacgaa

SEQ ID NO: 15905 - RNA, 19 nt, Artificial Sequence
  Description of Artificial Sequence: Synthetic oligonucleotide
uuaauacccucagguccca

SEQ ID NO: 15906 - RNA, 19 nt, Artificial Sequence
  Description of Artificial Sequence: Synthetic oligonucleotide
ccuagaucgcucuugggca

SEQ ID NO: 15907 - RNA, 19 nt, Artificial Sequence
  Description of Artificial Sequence: Synthetic oligonucleotide
uauagcgguuacaguugua

SEQ ID NO: 15908 - RNA, 19 nt, Artificial Sequence
  Description of Artificial Sequence: Synthetic oligonucleotide
gaagugacuaaggaguauu

SEQ ID NO: 15909 - RNA, 19 nt, Artificial Sequence
  Description of Artificial Sequence: Synthetic oligonucleotide
cugacaaggcauauccugu

SEQ ID NO: 15910 - RNA, 19 nt, Artificial Sequence
  Description of Artificial Sequence: Synthetic oligonucleotide
cagaggugcuuaacaaaca

SEQ ID NO: 15911 - RNA, 19 nt, Artificial Sequence
  Description of Artificial Sequence: Synthetic oligonucleotide
agacuaaagugaauugcua

SEQ ID NO: 15912 - RNA, 19 nt, Artificial Sequence
  Description of Artificial Sequence: Synthetic oligonucleotide
aggacuuaugacacucaga

SEQ ID NO: 15913 - RNA, 19 nt, Artificial Sequence
  Description of Artificial Sequence: Synthetic oligonucleotide
agcuuaugcucaaagcgua

SEQ ID NO: 15914 - RNA, 19 nt, Artificial Sequence
  Description of Artificial Sequence: Synthetic oligonucleotide
gcgguuacaguuguaccag

SEQ ID NO: 15915 - RNA, 19 nt, Artificial Sequence
  Description of Artificial Sequence: Synthetic oligonucleotide
aagcuacguuacaaguuaa

SEQ ID NO: 15916 - RNA, 19 nt, Artificial Sequence
  Description of Artificial Sequence: Synthetic oligonucleotide
agacccuggugcuuauuuu

SEQ ID NO: 15917 - RNA, 19 nt, Artificial Sequence
  Description of Artificial Sequence: Synthetic oligonucleotide
uugcaucgaacagguuuug

SEQ ID NO: 15918 - RNA, 19 nt, Artificial Sequence
  Description of Artificial Sequence: Synthetic oligonucleotide
gaugggaguuaucaauguu

SEQ ID NO: 15919 - RNA, 19 nt, Artificial Sequence
  Description of Artificial Sequence: Synthetic oligonucleotide
aacccuucgucgacucuca

SEQ ID NO: 15920 - RNA, 19 nt, Artificial Sequence
  Description of Artificial Sequence: Synthetic oligonucleotide
cauugaaaguucaccugcu

SEQ ID NO: 15921 - RNA, 19 nt, Artificial Sequence
  Description of Artificial Sequence: Synthetic oligonucleotide
caggcgcauaacuguguug

SEQ ID NO: 15922 - RNA, 19 nt, Artificial Sequence
  Description of Artificial Sequence: Synthetic oligonucleotide
ucgggauacguggcuaaaa

SEQ ID NO: 15923 - RNA, 19 nt, Artificial Sequence
  Description of Artificial Sequence: Synthetic oligonucleotide
cuccuauaugcugacaaua

SEQ ID NO: 15924 - RNA, 19 nt, Artificial Sequence
  Description of Artificial Sequence: Synthetic oligonucleotide
caugcauaugcgcuauaua

SEQ ID NO: 15925 - RNA, 19 nt, Artificial Sequence
  Description of Artificial Sequence: Synthetic oligonucleotide
gagucuggugauguuauau

SEQ ID NO: 15926 - RNA, 19 nt, Artificial Sequence
  Description of Artificial Sequence: Synthetic oligonucleotide
acagucgguugcacucuac

SEQ ID NO: 15927 - RNA, 19 nt, Artificial Sequence
  Description of Artificial Sequence: Synthetic oligonucleotide
auaucgggauacguggcua

SEQ ID NO: 15928 - RNA, 19 nt, Artificial Sequence
  Description of Artificial Sequence: Synthetic oligonucleotide
cagucgguugcacucuaca

SEQ ID NO: 15929 - RNA, 19 nt, Artificial Sequence
  Description of Artificial Sequence: Synthetic oligonucleotide
acccuucgucgacucucac

SEQ ID NO: 15930 - RNA, 19 nt, Artificial Sequence
  Description of Artificial Sequence: Synthetic oligonucleotide
ggcguguaugugcagggga

SEQ ID NO: 15931 - RNA, 19 nt, Artificial Sequence
  Description of Artificial Sequence: Synthetic oligonucleotide
gcuuaugcucaaagcguag

SEQ ID NO: 15932 - RNA, 19 nt, Artificial Sequence
  Description of Artificial Sequence: Synthetic oligonucleotide
gugguucauauagcgauua

SEQ ID NO: 15933 - RNA, 19 nt, Artificial Sequence
  Description of Artificial Sequence: Synthetic oligonucleotide
gagacccuggugcuuauuu

SEQ ID NO: 15934 - RNA, 19 nt, Artificial Sequence
  Description of Artificial Sequence: Synthetic oligonucleotide
aggacacgaaauagucugu

SEQ ID NO: 15935 - RNA, 19 nt, Artificial Sequence
  Description of Artificial Sequence: Synthetic oligonucleotide
cugugaucaggcgcauaac

SEQ ID NO: 15936 - RNA, 19 nt, Artificial Sequence
  Description of Artificial Sequence: Synthetic oligonucleotide
aucaggcgcauaacugugu

SEQ ID NO: 15937 - RNA, 19 nt, Artificial Sequence
  Description of Artificial Sequence: Synthetic oligonucleotide
gugcucuaugcacaaaauu

SEQ ID NO: 15938 - RNA, 19 nt, Artificial Sequence
  Description of Artificial Sequence: Synthetic oligonucleotide
guccuuuaccaaaguacaa

SEQ ID NO: 15939 - RNA, 19 nt, Artificial Sequence
  Description of Artificial Sequence: Synthetic oligonucleotide
caucucauguaacaaccuu

SEQ ID NO: 15940 - RNA, 19 nt, Artificial Sequence
  Description of Artificial Sequence: Synthetic oligonucleotide
ccgccauccuucucaauug

SEQ ID NO: 15941 - RNA, 19 nt, Artificial Sequence
  Description of Artificial Sequence: Synthetic oligonucleotide
gcgcauaacuguguuguca

SEQ ID NO: 15942 - RNA, 19 nt, Artificial Sequence
  Description of Artificial Sequence: Synthetic oligonucleotide
uggcguguucgagacuuuu

SEQ ID NO: 15943 - RNA, 19 nt, Artificial Sequence
  Description of Artificial Sequence: Synthetic oligonucleotide
aucuggcguguucgagacu

SEQ ID NO: 15944 - RNA, 19 nt, Artificial Sequence
  Description of Artificial Sequence: Synthetic oligonucleotide
ugccuacccgguuccccuc

SEQ ID NO: 15945 - RNA, 19 nt, Artificial Sequence
  Description of Artificial Sequence: Synthetic oligonucleotide
cauaugcgcuauauacaau

SEQ ID NO: 15946 - RNA, 19 nt, Artificial Sequence
  Description of Artificial Sequence: Synthetic oligonucleotide
aucgggauacguggcuaaa

SEQ ID NO: 15947 - RNA, 19 nt, Artificial Sequence
  Description of Artificial Sequence: Synthetic oligonucleotide
gcccuagaucgcucuuggg

SEQ ID NO: 15948 - RNA, 19 nt, Artificial Sequence
  Description of Artificial Sequence: Synthetic oligonucleotide
gucgacucucacaguaucu

SEQ ID NO: 15949 - RNA, 19 nt, Artificial Sequence
  Description of Artificial Sequence: Synthetic oligonucleotide
cuagaucgcucuugggcau

SEQ ID NO: 15950 - RNA, 19 nt, Artificial Sequence
  Description of Artificial Sequence: Synthetic oligonucleotide
uaauacccucaggucccau

SEQ ID NO: 15951 - RNA, 19 nt, Artificial Sequence
  Description of Artificial Sequence: Synthetic oligonucleotide
guggcacgacacuggcaga

SEQ ID NO: 15952 - RNA, 19 nt, Artificial Sequence
  Description of Artificial Sequence: Synthetic oligonucleotide
gcugccuacccgguucccc

SEQ ID NO: 15953 - RNA, 19 nt, Artificial Sequence
  Description of Artificial Sequence: Synthetic oligonucleotide
caacuguguguggggcgug

SEQ ID NO: 15954 - RNA, 19 nt, Artificial Sequence
  Description of Artificial Sequence: Synthetic oligonucleotide
ggcgcauaacuguguuguc

SEQ ID NO: 15955 - RNA, 19 nt, Artificial Sequence
  Description of Artificial Sequence: Synthetic oligonucleotide
caaaauuggcgcccacauu

SEQ ID NO: 15956 - RNA, 19 nt, Artificial Sequence
  Description of Artificial Sequence: Synthetic oligonucleotide
guuggcggccuagaauacu

SEQ ID NO: 15957 - RNA, 19 nt, Artificial Sequence
  Description of Artificial Sequence: Synthetic oligonucleotide
cugccuacccgguuccccu

SEQ ID NO: 15958 - RNA, 19 nt, Artificial Sequence
  Description of Artificial Sequence: Synthetic oligonucleotide
gccaaaacuggcauuuaau

SEQ ID NO: 15959 - RNA, 19 nt, Artificial Sequence
  Description of Artificial Sequence: Synthetic oligonucleotide
cgucgacucucacaguauc

SEQ ID NO: 15960 - RNA, 19 nt, Artificial Sequence
  Description of Artificial Sequence: Synthetic oligonucleotide
cccuucgucgacucucaca

SEQ ID NO: 15961 - RNA, 19 nt, Artificial Sequence
  Description of Artificial Sequence: Synthetic oligonucleotide
gugccacgcuugcuuuauc

SEQ ID NO: 15962 - RNA, 19 nt, Artificial Sequence
  Description of Artificial Sequence: Synthetic oligonucleotide
cgaacagguuuugcgucag

SEQ ID NO: 15963 - RNA, 19 nt, Artificial Sequence
  Description of Artificial Sequence: Synthetic oligonucleotide
ggugcucuaugcacaaaau

SEQ ID NO: 15964 - RNA, 19 nt, Artificial Sequence
  Description of Artificial Sequence: Synthetic oligonucleotide
ccuaggcacaagacaguua

SEQ ID NO: 15965 - RNA, 19 nt, Artificial Sequence
  Description of Artificial Sequence: Synthetic oligonucleotide
cgauuacaguagaacaggu

SEQ ID NO: 15966 - RNA, 19 nt, Artificial Sequence
  Description of Artificial Sequence: Synthetic oligonucleotide
cuucgucgacucucacagu

SEQ ID NO: 15967 - RNA, 19 nt, Artificial Sequence
  Description of Artificial Sequence: Synthetic oligonucleotide
gcgucaggauauuggacuu

SEQ ID NO: 15968 - RNA, 19 nt, Artificial Sequence
  Description of Artificial Sequence: Synthetic oligonucleotide
ccaugcauaugcgcuauau

SEQ ID NO: 15969 - RNA, 19 nt, Artificial Sequence
  Description of Artificial Sequence: Synthetic oligonucleotide
cggauacauuccaccaugu

SEQ ID NO: 15970 - RNA, 19 nt, Artificial Sequence
  Description of Artificial Sequence: Synthetic oligonucleotide
ggguguggacugagacuau

SEQ ID NO: 15971 - RNA, 19 nt, Artificial Sequence
  Description of Artificial Sequence: Synthetic oligonucleotide
acuacaacuaccuagcucc

SEQ ID NO: 15972 - RNA, 19 nt, Artificial Sequence
  Description of Artificial Sequence: Synthetic oligonucleotide
aagaguuacaauucaaagc

SEQ ID NO: 15973 - RNA, 19 nt, Artificial Sequence
  Description of Artificial Sequence: Synthetic oligonucleotide
acauuaaacgauuuuacac

SEQ ID NO: 15974 - RNA, 19 nt, Artificial Sequence
  Description of Artificial Sequence: Synthetic oligonucleotide
uguaguuuuauacugcucc

SEQ ID NO: 15975 - RNA, 19 nt, Artificial Sequence
  Description of Artificial Sequence: Synthetic oligonucleotide
aacggaaccaacugaauac

SEQ ID NO: 15976 - RNA, 19 nt, Artificial Sequence
  Description of Artificial Sequence: Synthetic oligonucleotide
ugugaaaucuuacagguug

SEQ ID NO: 15977 - RNA, 19 nt, Artificial Sequence
  Description of Artificial Sequence: Synthetic oligonucleotide
uuauuaaucaguagcuacg

SEQ ID NO: 15978 - RNA, 19 nt, Artificial Sequence
  Description of Artificial Sequence: Synthetic oligonucleotide
aacgauuuuacacauccag

SEQ ID NO: 15979 - RNA, 19 nt, Artificial Sequence
  Description of Artificial Sequence: Synthetic oligonucleotide
aaaguuguuaguuucaaau

SEQ ID NO: 15980 - RNA, 19 nt, Artificial Sequence
  Description of Artificial Sequence: Synthetic oligonucleotide
uuaaaagcaauauccacag

SEQ ID NO: 15981 - RNA, 19 nt, Artificial Sequence
  Description of Artificial Sequence: Synthetic oligonucleotide
aaugucauuagcccgaacu

SEQ ID NO: 15982 - RNA, 19 nt, Artificial Sequence
  Description of Artificial Sequence: Synthetic oligonucleotide
agaaacaauugucuaauac

SEQ ID NO: 15983 - RNA, 19 nt, Artificial Sequence
  Description of Artificial Sequence: Synthetic oligonucleotide
aguaguauuucagacaccc

SEQ ID NO: 15984 - RNA, 19 nt, Artificial Sequence
  Description of Artificial Sequence: Synthetic oligonucleotide
ugucaugucagugugagcg

SEQ ID NO: 15985 - RNA, 19 nt, Artificial Sequence
  Description of Artificial Sequence: Synthetic oligonucleotide
uguacuuucaaagugggag

SEQ ID NO: 15986 - RNA, 19 nt, Artificial Sequence
  Description of Artificial Sequence: Synthetic oligonucleotide
cagauuauuaaucaguagc

SEQ ID NO: 15987 - RNA, 19 nt, Artificial Sequence
  Description of Artificial Sequence: Synthetic oligonucleotide
aauaaugucuagaacagug

SEQ ID NO: 15988 - RNA, 19 nt, Artificial Sequence
  Description of Artificial Sequence: Synthetic oligonucleotide
acaauugucuaauacagug

SEQ ID NO: 15989 - RNA, 19 nt, Artificial Sequence
  Description of Artificial Sequence: Synthetic oligonucleotide
ucauaaucaagcacagacg

SEQ ID NO: 15990 - RNA, 19 nt, Artificial Sequence
  Description of Artificial Sequence: Synthetic oligonucleotide
uccauauugggccuuagag

SEQ ID NO: 15991 - RNA, 19 nt, Artificial Sequence
  Description of Artificial Sequence: Synthetic oligonucleotide
aauauaaauagugguaugu

SEQ ID NO: 15992 - RNA, 19 nt, Artificial Sequence
  Description of Artificial Sequence: Synthetic oligonucleotide
ugaagccacaacuugaugc

SEQ ID NO: 15993 - RNA, 19 nt, Artificial Sequence
  Description of Artificial Sequence: Synthetic oligonucleotide
uguggaaaucaucaacugg

SEQ ID NO: 15994 - RNA, 19 nt, Artificial Sequence
  Description of Artificial Sequence: Synthetic oligonucleotide
aagucaauguaucagcaca

SEQ ID NO: 15995 - RNA, 19 nt, Artificial Sequence
  Description of Artificial Sequence: Synthetic oligonucleotide
gaauuagacucucagcuag

SEQ ID NO: 15996 - RNA, 19 nt, Artificial Sequence
  Description of Artificial Sequence: Synthetic oligonucleotide
cuagacuacaacuaccuag

SEQ ID NO: 15997 - RNA, 19 nt, Artificial Sequence
  Description of Artificial Sequence: Synthetic oligonucleotide
auugagucaugucaggagg

SEQ ID NO: 15998 - RNA, 19 nt, Artificial Sequence
  Description of Artificial Sequence: Synthetic oligonucleotide
aaaucacugauagaccucg

SEQ ID NO: 15999 - RNA, 19 nt, Artificial Sequence
  Description of Artificial Sequence: Synthetic oligonucleotide
auaaaucacugauagaccu

SEQ ID NO: 16000 - RNA, 19 nt, Artificial Sequence
  Description of Artificial Sequence: Synthetic oligonucleotide
uauaaaucacugauagacc

SEQ ID NO: 16001 - RNA, 19 nt, Artificial Sequence
  Description of Artificial Sequence: Synthetic oligonucleotide
agacauaccuuccaugugg

SEQ ID NO: 16002 - RNA, 19 nt, Artificial Sequence
  Description of Artificial Sequence: Synthetic oligonucleotide
uaguauuucagacacccca

SEQ ID NO: 16003 - RNA, 19 nt, Artificial Sequence
  Description of Artificial Sequence: Synthetic oligonucleotide
auuucagacaccccagucg

SEQ ID NO: 16004 - RNA, 19 nt, Artificial Sequence
  Description of Artificial Sequence: Synthetic oligonucleotide
ugaauuacuacuagacuac

SEQ ID NO: 16005 - RNA, 19 nt, Artificial Sequence
  Description of Artificial Sequence: Synthetic oligonucleotide
ugaauaugcacauauuauc

SEQ ID NO: 16006 - RNA, 19 nt, Artificial Sequence
  Description of Artificial Sequence: Synthetic oligonucleotide
aacuagcaaaaccaaagcu

SEQ ID NO: 16007 - RNA, 19 nt, Artificial Sequence
  Description of Artificial Sequence: Synthetic oligonucleotide
uagacuacaacuaccuagc

SEQ ID NO: 16008 - RNA, 19 nt, Artificial Sequence
  Description of Artificial Sequence: Synthetic oligonucleotide
uuaccuuucugccugaggu

SEQ ID NO: 16009 - RNA, 19 nt, Artificial Sequence
  Description of Artificial Sequence: Synthetic oligonucleotide
acaccaaguguucaauucc

SEQ ID NO: 16010 - RNA, 19 nt, Artificial Sequence
  Description of Artificial Sequence: Synthetic oligonucleotide
cauauugggccuuagaguc

SEQ ID NO: 16011 - RNA, 19 nt, Artificial Sequence
  Description of Artificial Sequence: Synthetic oligonucleotide
uugccaauagguuaaggcc

SEQ ID NO: 16012 - RNA, 19 nt, Artificial Sequence
  Description of Artificial Sequence: Synthetic oligonucleotide
ugacguuagacacagaauu

SEQ ID NO: 16013 - RNA, 19 nt, Artificial Sequence
  Description of Artificial Sequence: Synthetic oligonucleotide
aaauuggggucauuccaac

SEQ ID NO: 16014 - RNA, 19 nt, Artificial Sequence
  Description of Artificial Sequence: Synthetic oligonucleotide
aaacgucuaaggaagcccc

SEQ ID NO: 16015 - RNA, 19 nt, Artificial Sequence
  Description of Artificial Sequence: Synthetic oligonucleotide
guaguuaaugucauuagcc

SEQ ID NO: 16016 - RNA, 19 nt, Artificial Sequence
  Description of Artificial Sequence: Synthetic oligonucleotide
aaugauagggugggaaacg

SEQ ID NO: 16017 - RNA, 19 nt, Artificial Sequence
  Description of Artificial Sequence: Synthetic oligonucleotide
uggugaauuacuacuagac

SEQ ID NO: 16018 - RNA, 19 nt, Artificial Sequence
  Description of Artificial Sequence: Synthetic oligonucleotide
aacacauucuaugucuggg

SEQ ID NO: 16019 - RNA, 19 nt, Artificial Sequence
  Description of Artificial Sequence: Synthetic oligonucleotide
uacaugucaaacucaaaca

SEQ ID NO: 16020 - RNA, 19 nt, Artificial Sequence
  Description of Artificial Sequence: Synthetic oligonucleotide
aggugaaucagguugauau

SEQ ID NO: 16021 - RNA, 19 nt, Artificial Sequence
  Description of Artificial Sequence: Synthetic oligonucleotide
uuacuacuagacuacaacu

SEQ ID NO: 16022 - RNA, 19 nt, Artificial Sequence
  Description of Artificial Sequence: Synthetic oligonucleotide
augaaauccucaaaacugc

SEQ ID NO: 16023 - RNA, 19 nt, Artificial Sequence
  Description of Artificial Sequence: Synthetic oligonucleotide
acaacuaccuagcuccugg

SEQ ID NO: 16024 - RNA, 19 nt, Artificial Sequence
  Description of Artificial Sequence: Synthetic oligonucleotide
gugagaaccauccacgcag

SEQ ID NO: 16025 - RNA, 19 nt, Artificial Sequence
  Description of Artificial Sequence: Synthetic oligonucleotide
uccacuuaugguaccaugc

SEQ ID NO: 16026 - RNA, 19 nt, Artificial Sequence
  Description of Artificial Sequence: Synthetic oligonucleotide
cuagcuauaaagcuaccac

SEQ ID NO: 16027 - RNA, 19 nt, Artificial Sequence
  Description of Artificial Sequence: Synthetic oligonucleotide
agcaaggugaaaccuuccc

SEQ ID NO: 16028 - RNA, 19 nt, Artificial Sequence
  Description of Artificial Sequence: Synthetic oligonucleotide
gacaacuuacacgacaaag

SEQ ID NO: 16029 - RNA, 19 nt, Artificial Sequence
  Description of Artificial Sequence: Synthetic oligonucleotide
auucuaucucugaauaugc

SEQ ID NO: 16030 - RNA, 19 nt, Artificial Sequence
  Description of Artificial Sequence: Synthetic oligonucleotide
uacuagacuacaacuaccu

SEQ ID NO: 16031 - RNA, 19 nt, Artificial Sequence
  Description of Artificial Sequence: Synthetic oligonucleotide
caucgaauacuucauuucc

SEQ ID NO: 16032 - RNA, 19 nt, Artificial Sequence
  Description of Artificial Sequence: Synthetic oligonucleotide
uuaacaguagucaccccug

SEQ ID NO: 16033 - RNA, 19 nt, Artificial Sequence
  Description of Artificial Sequence: Synthetic oligonucleotide
aaugacaucacuggcuugu

SEQ ID NO: 16034 - RNA, 19 nt, Artificial Sequence
  Description of Artificial Sequence: Synthetic oligonucleotide
aaggaagaguuacaauuca

SEQ ID NO: 16035 - RNA, 19 nt, Artificial Sequence
  Description of Artificial Sequence: Synthetic oligonucleotide
agugacguuagacacagaa

SEQ ID NO: 16036 - RNA, 19 nt, Artificial Sequence
  Description of Artificial Sequence: Synthetic oligonucleotide
ucuaguggagucuuauucu

SEQ ID NO: 16037 - RNA, 19 nt, Artificial Sequence
  Description of Artificial Sequence: Synthetic oligonucleotide
uuauccucauauauaaaua

SEQ ID NO: 16038 - RNA, 19 nt, Artificial Sequence
  Description of Artificial Sequence: Synthetic oligonucleotide
agagcgugaagccacaacu

SEQ ID NO: 16039 - RNA, 19 nt, Artificial Sequence
  Description of Artificial Sequence: Synthetic oligonucleotide
cuaccaauuacugagcaac

SEQ ID NO: 16040 - RNA, 19 nt, Artificial Sequence
  Description of Artificial Sequence: Synthetic oligonucleotide
caauuacugagcaacaaca

SEQ ID NO: 16041 - RNA, 19 nt, Artificial Sequence
  Description of Artificial Sequence: Synthetic oligonucleotide
aaaucaucaacuggugugu

SEQ ID NO: 16042 - RNA, 19 nt, Artificial Sequence
  Description of Artificial Sequence: Synthetic oligonucleotide
uuacagguuguuuaaaguu

SEQ ID NO: 16043 - RNA, 19 nt, Artificial Sequence
  Description of Artificial Sequence: Synthetic oligonucleotide
cacuuaaugaaauccaaca

SEQ ID NO: 16044 - RNA, 19 nt, Artificial Sequence
  Description of Artificial Sequence: Synthetic oligonucleotide
caggccuaggacuagagac

SEQ ID NO: 16045 - RNA, 19 nt, Artificial Sequence
  Description of Artificial Sequence: Synthetic oligonucleotide
agcucgggcauucauuugg

SEQ ID NO: 16046 - RNA, 19 nt, Artificial Sequence
  Description of Artificial Sequence: Synthetic oligonucleotide
uaaaugauagggugggaaa

SEQ ID NO: 16047 - RNA, 19 nt, Artificial Sequence
  Description of Artificial Sequence: Synthetic oligonucleotide
uuagcugagccauuaggac

SEQ ID NO: 16048 - RNA, 19 nt, Artificial Sequence
  Description of Artificial Sequence: Synthetic oligonucleotide
guuguuaguuucaaauuag

SEQ ID NO: 16049 - RNA, 19 nt, Artificial Sequence
  Description of Artificial Sequence: Synthetic oligonucleotide
ucacugauagaccucgggu

SEQ ID NO: 16050 - RNA, 19 nt, Artificial Sequence
  Description of Artificial Sequence: Synthetic oligonucleotide
caaagguacacuccacagg

SEQ ID NO: 16051 - RNA, 19 nt, Artificial Sequence
  Description of Artificial Sequence: Synthetic oligonucleotide
ugcuuaaguccucacaauc

SEQ ID NO: 16052 - RNA, 19 nt, Artificial Sequence
  Description of Artificial Sequence: Synthetic oligonucleotide
ucaauguaucagcacaguc

SEQ ID NO: 16053 - RNA, 19 nt, Artificial Sequence
  Description of Artificial Sequence: Synthetic oligonucleotide
uacuacuagacuacaacua

SEQ ID NO: 16054 - RNA, 19 nt, Artificial Sequence
  Description of Artificial Sequence: Synthetic oligonucleotide
aauccgcucccucacuauc

SEQ ID NO: 16055 - RNA, 19 nt, Artificial Sequence
  Description of Artificial Sequence: Synthetic oligonucleotide
uccagauagcugauaaaga

SEQ ID NO: 16056 - RNA, 19 nt, Artificial Sequence
  Description of Artificial Sequence: Synthetic oligonucleotide
uaaucaagcacagacguuu

SEQ ID NO: 16057 - RNA, 19 nt, Artificial Sequence
  Description of Artificial Sequence: Synthetic oligonucleotide
gaaacgucuaaggaagccc

SEQ ID NO: 16058 - RNA, 19 nt, Artificial Sequence
  Description of Artificial Sequence: Synthetic oligonucleotide
aauagguuaaggccagauu

SEQ ID NO: 16059 - RNA, 19 nt, Artificial Sequence
  Description of Artificial Sequence: Synthetic oligonucleotide
aaucacuaacacugccaag

SEQ ID NO: 16060 - RNA, 19 nt, Artificial Sequence
  Description of Artificial Sequence: Synthetic oligonucleotide
cauuaggacugucaauugc

SEQ ID NO: 16061 - RNA, 19 nt, Artificial Sequence
  Description of Artificial Sequence: Synthetic oligonucleotide
uuuacuccucccuauuacu

SEQ ID NO: 16062 - RNA, 19 nt, Artificial Sequence
  Description of Artificial Sequence: Synthetic oligonucleotide
uguuguauguccuguccca

SEQ ID NO: 16063 - RNA, 19 nt, Artificial Sequence
  Description of Artificial Sequence: Synthetic oligonucleotide
cuaccggaaacgucuaagg

SEQ ID NO: 16064 - RNA, 19 nt, Artificial Sequence
  Description of Artificial Sequence: Synthetic oligonucleotide
uauuaaucaguagcuacgu

SEQ ID NO: 16065 - RNA, 19 nt, Artificial Sequence
  Description of Artificial Sequence: Synthetic oligonucleotide
cagauagcugauaaagaac

SEQ ID NO: 16066 - RNA, 19 nt, Artificial Sequence
  Description of Artificial Sequence: Synthetic oligonucleotide
gaagccacaacuugaugca

SEQ ID NO: 16067 - RNA, 19 nt, Artificial Sequence
  Description of Artificial Sequence: Synthetic oligonucleotide
cuuagaguccaaaagggaa

SEQ ID NO: 16068 - RNA, 19 nt, Artificial Sequence
  Description of Artificial Sequence: Synthetic oligonucleotide
uuaggacugucaauugcca

SEQ ID NO: 16069 - RNA, 19 nt, Artificial Sequence
  Description of Artificial Sequence: Synthetic oligonucleotide
ucgggugcagucagcaagg

SEQ ID NO: 16070 - RNA, 19 nt, Artificial Sequence
  Description of Artificial Sequence: Synthetic oligonucleotide
aauuggggucauuccaaca

SEQ ID NO: 16071 - RNA, 19 nt, Artificial Sequence
  Description of Artificial Sequence: Synthetic oligonucleotide
uaaacacuagcaucucaga

SEQ ID NO: 16072 - RNA, 19 nt, Artificial Sequence
  Description of Artificial Sequence: Synthetic oligonucleotide
uaacugucauaaucaagca

SEQ ID NO: 16073 - RNA, 19 nt, Artificial Sequence
  Description of Artificial Sequence: Synthetic oligonucleotide
auuagcugagccauuagga

SEQ ID NO: 16074 - RNA, 19 nt, Artificial Sequence
  Description of Artificial Sequence: Synthetic oligonucleotide
ugucauuagcccgaacugc

SEQ ID NO: 16075 - RNA, 19 nt, Artificial Sequence
  Description of Artificial Sequence: Synthetic oligonucleotide
ccaugauucaccucuaaag

SEQ ID NO: 16076 - RNA, 19 nt, Artificial Sequence
  Description of Artificial Sequence: Synthetic oligonucleotide
auagugguaugucuucaug

SEQ ID NO: 16077 - RNA, 19 nt, Artificial Sequence
  Description of Artificial Sequence: Synthetic oligonucleotide
aaauagugguaugucuuca

SEQ ID NO: 16078 - RNA, 19 nt, Artificial Sequence
  Description of Artificial Sequence: Synthetic oligonucleotide
ugcaaccuuccucauauau

SEQ ID NO: 16079 - RNA, 19 nt, Artificial Sequence
  Description of Artificial Sequence: Synthetic oligonucleotide
cagaauuagacucucagcu

SEQ ID NO: 16080 - RNA, 19 nt, Artificial Sequence
  Description of Artificial Sequence: Synthetic oligonucleotide
gauauaguccccagaacca

SEQ ID NO: 16081 - RNA, 19 nt, Artificial Sequence
  Description of Artificial Sequence: Synthetic oligonucleotide
acguuagacacagaauuag

SEQ ID NO: 16082 - RNA, 19 nt, Artificial Sequence
  Description of Artificial Sequence: Synthetic oligonucleotide
ucagcaugagagagcaaca

SEQ ID NO: 16083 - RNA, 19 nt, Artificial Sequence
  Description of Artificial Sequence: Synthetic oligonucleotide
uguagcaaggugaaaccuu

SEQ ID NO: 16084 - RNA, 19 nt, Artificial Sequence
  Description of Artificial Sequence: Synthetic oligonucleotide
uaccggaaacgucuaagga

SEQ ID NO: 16085 - RNA, 19 nt, Artificial Sequence
  Description of Artificial Sequence: Synthetic oligonucleotide
acuuacacgacaaaguguu

SEQ ID NO: 16086 - RNA, 19 nt, Artificial Sequence
  Description of Artificial Sequence: Synthetic oligonucleotide
agccccuauguguauguac

SEQ ID NO: 16087 - RNA, 19 nt, Artificial Sequence
  Description of Artificial Sequence: Synthetic oligonucleotide
gauuuuacuccccagcuau

SEQ ID NO: 16088 - RNA, 19 nt, Artificial Sequence
  Description of Artificial Sequence: Synthetic oligonucleotide
acugguuagaaaagcugac

SEQ ID NO: 16089 - RNA, 19 nt, Artificial Sequence
  Description of Artificial Sequence: Synthetic oligonucleotide
accggaaacgucuaaggaa

SEQ ID NO: 16090 - RNA, 19 nt, Artificial Sequence
  Description of Artificial Sequence: Synthetic oligonucleotide
auuagcccgaacugcucgg

SEQ ID NO: 16091 - RNA, 19 nt, Artificial Sequence
  Description of Artificial Sequence: Synthetic oligonucleotide
aacuuacacgacaaagugu

SEQ ID NO: 16092 - RNA, 19 nt, Artificial Sequence
  Description of Artificial Sequence: Synthetic oligonucleotide
acagacguuuucauccacc

SEQ ID NO: 16093 - RNA, 19 nt, Artificial Sequence
  Description of Artificial Sequence: Synthetic oligonucleotide
aaguaguauuucagacacc

SEQ ID NO: 16094 - RNA, 19 nt, Artificial Sequence
  Description of Artificial Sequence: Synthetic oligonucleotide
ucgggcauucauuuggcac

SEQ ID NO: 16095 - RNA, 19 nt, Artificial Sequence
  Description of Artificial Sequence: Synthetic oligonucleotide
cuuauauccucaugccuuc

SEQ ID NO: 16096 - RNA, 19 nt, Artificial Sequence
  Description of Artificial Sequence: Synthetic oligonucleotide
aaaauccgcucccucacua

SEQ ID NO: 16097 - RNA, 19 nt, Artificial Sequence
  Description of Artificial Sequence: Synthetic oligonucleotide
auaaugagaucaaaacccu

SEQ ID NO: 16098 - RNA, 19 nt, Artificial Sequence
  Description of Artificial Sequence: Synthetic oligonucleotide
auaaauggcuugacaagag

SEQ ID NO: 16099 - RNA, 19 nt, Artificial Sequence
  Description of Artificial Sequence: Synthetic oligonucleotide
gacugguuagaaaagcuga

SEQ ID NO: 16100 - RNA, 19 nt, Artificial Sequence
  Description of Artificial Sequence: Synthetic oligonucleotide
uauacccuaacuccugguu

SEQ ID NO: 16101 - RNA, 19 nt, Artificial Sequence
  Description of Artificial Sequence: Synthetic oligonucleotide
uuaaguuuaggugcuuaaa

SEQ ID NO: 16102 - RNA, 19 nt, Artificial Sequence
  Description of Artificial Sequence: Synthetic oligonucleotide
caugcuuaaguccucacaa

SEQ ID NO: 16103 - RNA, 19 nt, Artificial Sequence
  Description of Artificial Sequence: Synthetic oligonucleotide
acuuuacaucuguaaaagu

SEQ ID NO: 16104 - RNA, 19 nt, Artificial Sequence
  Description of Artificial Sequence: Synthetic oligonucleotide
cccucuguaaaugauaggg

SEQ ID NO: 16105 - RNA, 19 nt, Artificial Sequence
  Description of Artificial Sequence: Synthetic oligonucleotide
agcgugaagccacaacuug

SEQ ID NO: 16106 - RNA, 19 nt, Artificial Sequence
  Description of Artificial Sequence: Synthetic oligonucleotide
gagugagaaccauccacgc

SEQ ID NO: 16107 - RNA, 19 nt, Artificial Sequence
  Description of Artificial Sequence: Synthetic oligonucleotide
uaccaauuacugagcaaca

SEQ ID NO: 16108 - RNA, 19 nt, Artificial Sequence
  Description of Artificial Sequence: Synthetic oligonucleotide
ucuagccaguuuacuacca

SEQ ID NO: 16109 - RNA, 19 nt, Artificial Sequence
  Description of Artificial Sequence: Synthetic oligonucleotide
uuaaacgauuuuacacauc

SEQ ID NO: 16110 - RNA, 19 nt, Artificial Sequence
  Description of Artificial Sequence: Synthetic oligonucleotide
cucgggugcagucagcaag

SEQ ID NO: 16111 - RNA, 19 nt, Artificial Sequence
  Description of Artificial Sequence: Synthetic oligonucleotide
aacaauugucuaauacagu

SEQ ID NO: 16112 - RNA, 19 nt, Artificial Sequence
  Description of Artificial Sequence: Synthetic oligonucleotide
acuagcaucucagaacaca

SEQ ID NO: 16113 - RNA, 19 nt, Artificial Sequence
  Description of Artificial Sequence: Synthetic oligonucleotide
aacugaauacuaaguguca

SEQ ID NO: 16114 - RNA, 19 nt, Artificial Sequence
  Description of Artificial Sequence: Synthetic oligonucleotide
gauaaagaacacuucggau

SEQ ID NO: 16115 - RNA, 19 nt, Artificial Sequence
  Description of Artificial Sequence: Synthetic oligonucleotide
aacuaccuagcuccuggca

SEQ ID NO: 16116 - RNA, 19 nt, Artificial Sequence
  Description of Artificial Sequence: Synthetic oligonucleotide
auagaccucgggugcaguc

SEQ ID NO: 16117 - RNA, 19 nt, Artificial Sequence
  Description of Artificial Sequence: Synthetic oligonucleotide
cuugagcaaaucgaagcag

SEQ ID NO: 16118 - RNA, 19 nt, Artificial Sequence
  Description of Artificial Sequence: Synthetic oligonucleotide
ucgaauacuucauuuccuu

SEQ ID NO: 16119 - RNA, 19 nt, Artificial Sequence
  Description of Artificial Sequence: Synthetic oligonucleotide
gacucaccugugcaguggg

SEQ ID NO: 16120 - RNA, 19 nt, Artificial Sequence
  Description of Artificial Sequence: Synthetic oligonucleotide
cugacaguaauuuaacagu

SEQ ID NO: 16121 - RNA, 19 nt, Artificial Sequence
  Description of Artificial Sequence: Synthetic oligonucleotide
agucacuuaaugaaaucca

SEQ ID NO: 16122 - RNA, 19 nt, Artificial Sequence
  Description of Artificial Sequence: Synthetic oligonucleotide
acuaccagcauaguucagu

SEQ ID NO: 16123 - RNA, 19 nt, Artificial Sequence
  Description of Artificial Sequence: Synthetic oligonucleotide
uccucccuauuacuguugc

SEQ ID NO: 16124 - RNA, 19 nt, Artificial Sequence
  Description of Artificial Sequence: Synthetic oligonucleotide
ucuaccaauuacugagcaa

SEQ ID NO: 16125 - RNA, 19 nt, Artificial Sequence
  Description of Artificial Sequence: Synthetic oligonucleotide
aauuacuacuagacuacaa

SEQ ID NO: 16126 - RNA, 19 nt, Artificial Sequence
  Description of Artificial Sequence: Synthetic oligonucleotide
gagacauaccuuccaugug

SEQ ID NO: 16127 - RNA, 19 nt, Artificial Sequence
  Description of Artificial Sequence: Synthetic oligonucleotide
cauaagcguggaugggugg

SEQ ID NO: 16128 - RNA, 19 nt, Artificial Sequence
  Description of Artificial Sequence: Synthetic oligonucleotide
cuugcaggcuuauauccuc

SEQ ID NO: 16129 - RNA, 19 nt, Artificial Sequence
  Description of Artificial Sequence: Synthetic oligonucleotide
agcaugagagagcaacagu

SEQ ID NO: 16130 - RNA, 19 nt, Artificial Sequence
  Description of Artificial Sequence: Synthetic oligonucleotide
auaaugucuagaacagugu

SEQ ID NO: 16131 - RNA, 19 nt, Artificial Sequence
  Description of Artificial Sequence: Synthetic oligonucleotide
ugcacgauagaaugacauc

SEQ ID NO: 16132 - RNA, 19 nt, Artificial Sequence
  Description of Artificial Sequence: Synthetic oligonucleotide
ggaaaucacuaacacugcc

SEQ ID NO: 16133 - RNA, 19 nt, Artificial Sequence
  Description of Artificial Sequence: Synthetic oligonucleotide
ugcuuauuaaagucacaua

SEQ ID NO: 16134 - RNA, 19 nt, Artificial Sequence
  Description of Artificial Sequence: Synthetic oligonucleotide
acgacaaaguguucuggga

SEQ ID NO: 16135 - RNA, 19 nt, Artificial Sequence
  Description of Artificial Sequence: Synthetic oligonucleotide
aauccgacuucugcgguca

SEQ ID NO: 16136 - RNA, 19 nt, Artificial Sequence
  Description of Artificial Sequence: Synthetic oligonucleotide
ggcucaaccaaauuuaugu

SEQ ID NO: 16137 - RNA, 19 nt, Artificial Sequence
  Description of Artificial Sequence: Synthetic oligonucleotide
agugagaaccauccacgca

SEQ ID NO: 16138 - RNA, 19 nt, Artificial Sequence
  Description of Artificial Sequence: Synthetic oligonucleotide
auauugggccuuagagucc

SEQ ID NO: 16139 - RNA, 19 nt, Artificial Sequence
  Description of Artificial Sequence: Synthetic oligonucleotide
uauugggccuuagagucca

SEQ ID NO: 16140 - RNA, 19 nt, Artificial Sequence
  Description of Artificial Sequence: Synthetic oligonucleotide
guguauguacauagugagg

SEQ ID NO: 16141 - RNA, 19 nt, Artificial Sequence
  Description of Artificial Sequence: Synthetic oligonucleotide
ccggaaacgucuaaggaag

SEQ ID NO: 16142 - RNA, 19 nt, Artificial Sequence
  Description of Artificial Sequence: Synthetic oligonucleotide
ucaauccgacuucugcggu

SEQ ID NO: 16143 - RNA, 19 nt, Artificial Sequence
  Description of Artificial Sequence: Synthetic oligonucleotide
guaaaugauagggugggaa

SEQ ID NO: 16144 - RNA, 19 nt, Artificial Sequence
  Description of Artificial Sequence: Synthetic oligonucleotide
guggaaaucaucaacuggu

SEQ ID NO: 16145 - RNA, 19 nt, Artificial Sequence
  Description of Artificial Sequence: Synthetic oligonucleotide
cacuuaugguaccaugcac

SEQ ID NO: 16146 - RNA, 19 nt, Artificial Sequence
  Description of Artificial Sequence: Synthetic oligonucleotide
ucugaguuuuaaguaguau

SEQ ID NO: 16147 - RNA, 19 nt, Artificial Sequence
  Description of Artificial Sequence: Synthetic oligonucleotide
cugaauacuaagugucaca

SEQ ID NO: 16148 - RNA, 19 nt, Artificial Sequence
  Description of Artificial Sequence: Synthetic oligonucleotide
uggguaacgaaggggaaaa

SEQ ID NO: 16149 - RNA, 19 nt, Artificial Sequence
  Description of Artificial Sequence: Synthetic oligonucleotide
augcaacauuaucugauau

SEQ ID NO: 16150 - RNA, 19 nt, Artificial Sequence
  Description of Artificial Sequence: Synthetic oligonucleotide
gccuuagaguccaaaaggg

SEQ ID NO: 16151 - RNA, 19 nt, Artificial Sequence
  Description of Artificial Sequence: Synthetic oligonucleotide
uagagcgugaagccacaac

SEQ ID NO: 16152 - RNA, 19 nt, Artificial Sequence
  Description of Artificial Sequence: Synthetic oligonucleotide
aaaacccuucucagaaacu

SEQ ID NO: 16153 - RNA, 19 nt, Artificial Sequence
  Description of Artificial Sequence: Synthetic oligonucleotide
auacccuaacuccugguuu

SEQ ID NO: 16154 - RNA, 19 nt, Artificial Sequence
  Description of Artificial Sequence: Synthetic oligonucleotide
ggagugacguuagacacag

SEQ ID NO: 16155 - RNA, 19 nt, Artificial Sequence
  Description of Artificial Sequence: Synthetic oligonucleotide
caucccaugauucaccucu

SEQ ID NO: 16156 - RNA, 19 nt, Artificial Sequence
  Description of Artificial Sequence: Synthetic oligonucleotide
aaaccauggugaauuacua

SEQ ID NO: 16157 - RNA, 19 nt, Artificial Sequence
  Description of Artificial Sequence: Synthetic oligonucleotide
gggauacaaaaccugucug

SEQ ID NO: 16158 - RNA, 19 nt, Artificial Sequence
  Description of Artificial Sequence: Synthetic oligonucleotide
uacguguuucaaguccucc

SEQ ID NO: 16159 - RNA, 19 nt, Artificial Sequence
  Description of Artificial Sequence: Synthetic oligonucleotide
gaaagcugacaguaauuua

SEQ ID NO: 16160 - RNA, 19 nt, Artificial Sequence
  Description of Artificial Sequence: Synthetic oligonucleotide
ugggccuuagaguccaaaa

SEQ ID NO: 16161 - RNA, 19 nt, Artificial Sequence
  Description of Artificial Sequence: Synthetic oligonucleotide
ccauuuaucaacuauuagu

SEQ ID NO: 16162 - RNA, 19 nt, Artificial Sequence
  Description of Artificial Sequence: Synthetic oligonucleotide
ugauagggugggaaacguc

SEQ ID NO: 16163 - RNA, 19 nt, Artificial Sequence
  Description of Artificial Sequence: Synthetic oligonucleotide
gggccuuagaguccaaaag

SEQ ID NO: 16164 - RNA, 19 nt, Artificial Sequence
  Description of Artificial Sequence: Synthetic oligonucleotide
aaacgauuuuacacaucca

SEQ ID NO: 16165 - RNA, 19 nt, Artificial Sequence
  Description of Artificial Sequence: Synthetic oligonucleotide
agauuuuacuccccagcua

SEQ ID NO: 16166 - RNA, 19 nt, Artificial Sequence
  Description of Artificial Sequence: Synthetic oligonucleotide
aggugaaaccuucccgugu

SEQ ID NO: 16167 - RNA, 19 nt, Artificial Sequence
  Description of Artificial Sequence: Synthetic oligonucleotide
aaaacggaaccaacugaau

SEQ ID NO: 16168 - RNA, 19 nt, Artificial Sequence
  Description of Artificial Sequence: Synthetic oligonucleotide
ucaaauuagcugagccauu

SEQ ID NO: 16169 - RNA, 19 nt, Artificial Sequence
  Description of Artificial Sequence: Synthetic oligonucleotide
aucaacugguguguuugag

SEQ ID NO: 16170 - RNA, 19 nt, Artificial Sequence
  Description of Artificial Sequence: Synthetic oligonucleotide
uuagcccgaacugcucggg

SEQ ID NO: 16171 - RNA, 19 nt, Artificial Sequence
  Description of Artificial Sequence: Synthetic oligonucleotide
aaggaagccccuaugugua

SEQ ID NO: 16172 - RNA, 19 nt, Artificial Sequence
  Description of Artificial Sequence: Synthetic oligonucleotide
ggcuuuauacagguguucc

SEQ ID NO: 16173 - RNA, 19 nt, Artificial Sequence
  Description of Artificial Sequence: Synthetic oligonucleotide
ccaauuacugagcaacaac

SEQ ID NO: 16174 - RNA, 19 nt, Artificial Sequence
  Description of Artificial Sequence: Synthetic oligonucleotide
gacgucauugguguggaaa

SEQ ID NO: 16175 - RNA, 19 nt, Artificial Sequence
  Description of Artificial Sequence: Synthetic oligonucleotide
cuccacuuaugguaccaug

SEQ ID NO: 16176 - RNA, 19 nt, Artificial Sequence
  Description of Artificial Sequence: Synthetic oligonucleotide
uccuaaagcuguccucaaa

SEQ ID NO: 16177 - RNA, 19 nt, Artificial Sequence
  Description of Artificial Sequence: Synthetic oligonucleotide
gacagcggugaacauuaca

SEQ ID NO: 16178 - RNA, 19 nt, Artificial Sequence
  Description of Artificial Sequence: Synthetic oligonucleotide
gcacgauagaaugacauca

SEQ ID NO: 16179 - RNA, 19 nt, Artificial Sequence
  Description of Artificial Sequence: Synthetic oligonucleotide
ugacaacuuacacgacaaa

SEQ ID NO: 16180 - RNA, 19 nt, Artificial Sequence
  Description of Artificial Sequence: Synthetic oligonucleotide
caguggagaaccuuuggaa

SEQ ID NO: 16181 - RNA, 19 nt, Artificial Sequence
  Description of Artificial Sequence: Synthetic oligonucleotide
cuuaugguaccaugcacua

SEQ ID NO: 16182 - RNA, 19 nt, Artificial Sequence
  Description of Artificial Sequence: Synthetic oligonucleotide
cagcaugagagagcaacag

SEQ ID NO: 16183 - RNA, 19 nt, Artificial Sequence
  Description of Artificial Sequence: Synthetic oligonucleotide
gugcacaaugugcaacuac

SEQ ID NO: 16184 - RNA, 19 nt, Artificial Sequence
  Description of Artificial Sequence: Synthetic oligonucleotide
ugauagaccucgggugcag

SEQ ID NO: 16185 - RNA, 19 nt, Artificial Sequence
  Description of Artificial Sequence: Synthetic oligonucleotide
uauuaccuuucugccugag

SEQ ID NO: 16186 - RNA, 19 nt, Artificial Sequence
  Description of Artificial Sequence: Synthetic oligonucleotide
augcuuaaguccucacaau

SEQ ID NO: 16187 - RNA, 19 nt, Artificial Sequence
  Description of Artificial Sequence: Synthetic oligonucleotide
gaagcugcgggucuccacu

SEQ ID NO: 16188 - RNA, 19 nt, Artificial Sequence
  Description of Artificial Sequence: Synthetic oligonucleotide
acaggccuaggacuagaga

SEQ ID NO: 16189 - RNA, 19 nt, Artificial Sequence
  Description of Artificial Sequence: Synthetic oligonucleotide
uagaccucgggugcaguca

SEQ ID NO: 16190 - RNA, 19 nt, Artificial Sequence
  Description of Artificial Sequence: Synthetic oligonucleotide
guacuuucaaagugggagu

SEQ ID NO: 16191 - RNA, 19 nt, Artificial Sequence
  Description of Artificial Sequence: Synthetic oligonucleotide
uuaaugucauuagcccgaa

SEQ ID NO: 16192 - RNA, 19 nt, Artificial Sequence
  Description of Artificial Sequence: Synthetic oligonucleotide
gcaccuaaaauccgcuccc

SEQ ID NO: 16193 - RNA, 19 nt, Artificial Sequence
  Description of Artificial Sequence: Synthetic oligonucleotide
acggaaccaacugaauacu

SEQ ID NO: 16194 - RNA, 19 nt, Artificial Sequence
  Description of Artificial Sequence: Synthetic oligonucleotide
gagcaaaucgaagcagauc

SEQ ID NO: 16195 - RNA, 19 nt, Artificial Sequence
  Description of Artificial Sequence: Synthetic oligonucleotide
acuagacuacaacuaccua

SEQ ID NO: 16196 - RNA, 19 nt, Artificial Sequence
  Description of Artificial Sequence: Synthetic oligonucleotide
aagcguggaugggugggag

SEQ ID NO: 16197 - RNA, 19 nt, Artificial Sequence
  Description of Artificial Sequence: Synthetic oligonucleotide
aggacagcggugaacauua

SEQ ID NO: 16198 - RNA, 19 nt, Artificial Sequence
  Description of Artificial Sequence: Synthetic oligonucleotide
uacaacuaccuagcuccug

SEQ ID NO: 16199 - RNA, 19 nt, Artificial Sequence
  Description of Artificial Sequence: Synthetic oligonucleotide
accaauuacugagcaacaa

SEQ ID NO: 16200 - RNA, 19 nt, Artificial Sequence
  Description of Artificial Sequence: Synthetic oligonucleotide
gucuaauacaguguugccu

SEQ ID NO: 16201 - RNA, 19 nt, Artificial Sequence
  Description of Artificial Sequence: Synthetic oligonucleotide
uagcccgaacugcucgggc

SEQ ID NO: 16202 - RNA, 19 nt, Artificial Sequence
  Description of Artificial Sequence: Synthetic oligonucleotide
agcaccacauuaaacgauu

SEQ ID NO: 16203 - RNA, 19 nt, Artificial Sequence
  Description of Artificial Sequence: Synthetic oligonucleotide
aacgucuaaggaagccccu

SEQ ID NO: 16204 - RNA, 19 nt, Artificial Sequence
  Description of Artificial Sequence: Synthetic oligonucleotide
uaagcguggauggguggga

SEQ ID NO: 16205 - RNA, 19 nt, Artificial Sequence
  Description of Artificial Sequence: Synthetic oligonucleotide
agcuagcuauaaagcuacc

SEQ ID NO: 16206 - RNA, 19 nt, Artificial Sequence
  Description of Artificial Sequence: Synthetic oligonucleotide
ucccaugauucaccucuaa

SEQ ID NO: 16207 - RNA, 19 nt, Artificial Sequence
  Description of Artificial Sequence: Synthetic oligonucleotide
uccuacacucaguucuguu

SEQ ID NO: 16208 - RNA, 19 nt, Artificial Sequence
  Description of Artificial Sequence: Synthetic oligonucleotide
ggaggauuuguuccagauc

SEQ ID NO: 16209 - RNA, 19 nt, Artificial Sequence
  Description of Artificial Sequence: Synthetic oligonucleotide
ugaccugaaccugggcaga

SEQ ID NO: 16210 - RNA, 19 nt, Artificial Sequence
  Description of Artificial Sequence: Synthetic oligonucleotide
ucgugaccagugcguuggg

SEQ ID NO: 16211 - RNA, 19 nt, Artificial Sequence
  Description of Artificial Sequence: Synthetic oligonucleotide
ugcaggcuuauauccucau

SEQ ID NO: 16212 - RNA, 19 nt, Artificial Sequence
  Description of Artificial Sequence: Synthetic oligonucleotide
caccuacucagaguccagc

SEQ ID NO: 16213 - RNA, 19 nt, Artificial Sequence
  Description of Artificial Sequence: Synthetic oligonucleotide
uagcucgggcauucauuug

SEQ ID NO: 16214 - RNA, 19 nt, Artificial Sequence
  Description of Artificial Sequence: Synthetic oligonucleotide
cacuagggguagcucgggc

SEQ ID NO: 16215 - RNA, 19 nt, Artificial Sequence
  Description of Artificial Sequence: Synthetic oligonucleotide
ccauaagcguggaugggug

SEQ ID NO: 16216 - RNA, 19 nt, Artificial Sequence
  Description of Artificial Sequence: Synthetic oligonucleotide
uguucccauaagcguggau

SEQ ID NO: 16217 - RNA, 19 nt, Artificial Sequence
  Description of Artificial Sequence: Synthetic oligonucleotide
gggucuugccaauagguua

SEQ ID NO: 16218 - RNA, 19 nt, Artificial Sequence
  Description of Artificial Sequence: Synthetic oligonucleotide
ucaucccaugauucaccuc

SEQ ID NO: 16219 - RNA, 19 nt, Artificial Sequence
  Description of Artificial Sequence: Synthetic oligonucleotide
gaagccccuauguguaugu

SEQ ID NO: 16220 - RNA, 19 nt, Artificial Sequence
  Description of Artificial Sequence: Synthetic oligonucleotide
guagcucgggcauucauuu

SEQ ID NO: 16221 - RNA, 19 nt, Artificial Sequence
  Description of Artificial Sequence: Synthetic oligonucleotide
auaaucaagcacagacguu

SEQ ID NO: 16222 - RNA, 19 nt, Artificial Sequence
  Description of Artificial Sequence: Synthetic oligonucleotide
auggaacauuuggcugagc

SEQ ID NO: 16223 - RNA, 19 nt, Artificial Sequence
  Description of Artificial Sequence: Synthetic oligonucleotide
gcuagcuauaaagcuacca

SEQ ID NO: 16224 - RNA, 19 nt, Artificial Sequence
  Description of Artificial Sequence: Synthetic oligonucleotide
cacgcagagcacgagcauc

SEQ ID NO: 16225 - RNA, 19 nt, Artificial Sequence
  Description of Artificial Sequence: Synthetic oligonucleotide
guaccaugcacuaggggua

SEQ ID NO: 16226 - RNA, 19 nt, Artificial Sequence
  Description of Artificial Sequence: Synthetic oligonucleotide
agacguuuucauccaccua

SEQ ID NO: 16227 - RNA, 19 nt, Artificial Sequence
  Description of Artificial Sequence: Synthetic oligonucleotide
cauccagauagcugauaaa

SEQ ID NO: 16228 - RNA, 19 nt, Artificial Sequence
  Description of Artificial Sequence: Synthetic oligonucleotide
uuccuacacucaguucugu

SEQ ID NO: 16229 - RNA, 19 nt, Artificial Sequence
  Description of Artificial Sequence: Synthetic oligonucleotide
ccucuaaaggaaagcugac

SEQ ID NO: 16230 - RNA, 19 nt, Artificial Sequence
  Description of Artificial Sequence: Synthetic oligonucleotide
guugguccuggguaacgaa

SEQ ID NO: 16231 - RNA, 19 nt, Artificial Sequence
  Description of Artificial Sequence: Synthetic oligonucleotide
gcucuauuccuaaacacua

SEQ ID NO: 16232 - RNA, 19 nt, Artificial Sequence
  Description of Artificial Sequence: Synthetic oligonucleotide
caccaaguguucaauuccu

SEQ ID NO: 16233 - RNA, 19 nt, Artificial Sequence
  Description of Artificial Sequence: Synthetic oligonucleotide
agcguggaugggugggaga

SEQ ID NO: 16234 - RNA, 19 nt, Artificial Sequence
  Description of Artificial Sequence: Synthetic oligonucleotide
cccaaugcaaaucuggagu

SEQ ID NO: 16235 - RNA, 19 nt, Artificial Sequence
  Description of Artificial Sequence: Synthetic oligonucleotide
agcuuagaaucuggacuga

SEQ ID NO: 16236 - RNA, 19 nt, Artificial Sequence
  Description of Artificial Sequence: Synthetic oligonucleotide
cuccaacauggcuaaauau

SEQ ID NO: 16237 - RNA, 19 nt, Artificial Sequence
  Description of Artificial Sequence: Synthetic oligonucleotide
gccccuauguguauguaca

SEQ ID NO: 16238 - RNA, 19 nt, Artificial Sequence
  Description of Artificial Sequence: Synthetic oligonucleotide
gugcacgauagaaugacau

SEQ ID NO: 16239 - RNA, 19 nt, Artificial Sequence
  Description of Artificial Sequence: Synthetic oligonucleotide
gucuugccgaauggacucc

SEQ ID NO: 16240 - RNA, 19 nt, Artificial Sequence
  Description of Artificial Sequence: Synthetic oligonucleotide
cuggguaacgaaggggaaa

SEQ ID NO: 16241 - RNA, 19 nt, Artificial Sequence
  Description of Artificial Sequence: Synthetic oligonucleotide
cauuuggcugagcuuauuu

SEQ ID NO: 16242 - RNA, 19 nt, Artificial Sequence
  Description of Artificial Sequence: Synthetic oligonucleotide
ggaagccccuauguguaug

SEQ ID NO: 16243 - RNA, 19 nt, Artificial Sequence
  Description of Artificial Sequence: Synthetic oligonucleotide
cacgagcaucucccauugc

SEQ ID NO: 16244 - RNA, 19 nt, Artificial Sequence
  Description of Artificial Sequence: Synthetic oligonucleotide
agugcacaaugugcaacua

SEQ ID NO: 16245 - RNA, 19 nt, Artificial Sequence
  Description of Artificial Sequence: Synthetic oligonucleotide
cucgggcauucauuuggca

SEQ ID NO: 16246 - RNA, 19 nt, Artificial Sequence
  Description of Artificial Sequence: Synthetic oligonucleotide
ccacuuaugguaccaugca

SEQ ID NO: 16247 - RNA, 19 nt, Artificial Sequence
  Description of Artificial Sequence: Synthetic oligonucleotide
cuugacaagagugcacgau

SEQ ID NO: 16248 - RNA, 19 nt, Artificial Sequence
  Description of Artificial Sequence: Synthetic oligonucleotide
gucaauguaucagcacagu

SEQ ID NO: 16249 - RNA, 19 nt, Artificial Sequence
  Description of Artificial Sequence: Synthetic oligonucleotide
cagacgucauuggugugga

SEQ ID NO: 16250 - RNA, 19 nt, Artificial Sequence
  Description of Artificial Sequence: Synthetic oligonucleotide
ccaugcuuaaguccucaca

SEQ ID NO: 16251 - RNA, 19 nt, Artificial Sequence
  Description of Artificial Sequence: Synthetic oligonucleotide
gguauaaaaugugcuguau

SEQ ID NO: 16252 - RNA, 19 nt, Artificial Sequence
  Description of Artificial Sequence: Synthetic oligonucleotide
cugugaugcuuaagagaaa

SEQ ID NO: 16253 - RNA, 19 nt, Artificial Sequence
  Description of Artificial Sequence: Synthetic oligonucleotide
accaaguguucaauuccua

SEQ ID NO: 16254 - RNA, 19 nt, Artificial Sequence
  Description of Artificial Sequence: Synthetic oligonucleotide
acgucuaaggaagccccua

SEQ ID NO: 16255 - RNA, 19 nt, Artificial Sequence
  Description of Artificial Sequence: Synthetic oligonucleotide
ccuacucagaguccagcca

SEQ ID NO: 16256 - RNA, 19 nt, Artificial Sequence
  Description of Artificial Sequence: Synthetic oligonucleotide
ugcagucagcaagguuacu

SEQ ID NO: 16257 - RNA, 19 nt, Artificial Sequence
  Description of Artificial Sequence: Synthetic oligonucleotide
gugacguuagacacagaau

SEQ ID NO: 16258 - RNA, 19 nt, Artificial Sequence
  Description of Artificial Sequence: Synthetic oligonucleotide
aagccccuauguguaugua

SEQ ID NO: 16259 - RNA, 19 nt, Artificial Sequence
  Description of Artificial Sequence: Synthetic oligonucleotide
cauucuaugucugggccuu

SEQ ID NO: 16260 - RNA, 19 nt, Artificial Sequence
  Description of Artificial Sequence: Synthetic oligonucleotide
ccgaggacagcggugaaca

SEQ ID NO: 16261 - RNA, 19 nt, Artificial Sequence
  Description of Artificial Sequence: Synthetic oligonucleotide
cuacaacuaccuagcuccu

SEQ ID NO: 16262 - RNA, 19 nt, Artificial Sequence
  Description of Artificial Sequence: Synthetic oligonucleotide
gauagaccucgggugcagu

SEQ ID NO: 16263 - RNA, 19 nt, Artificial Sequence
  Description of Artificial Sequence: Synthetic oligonucleotide
ucccguguucuggggucca

SEQ ID NO: 16264 - RNA, 19 nt, Artificial Sequence
  Description of Artificial Sequence: Synthetic oligonucleotide
gagcgugaagccacaacuu

SEQ ID NO: 16265 - RNA, 19 nt, Artificial Sequence
  Description of Artificial Sequence: Synthetic oligonucleotide
ccccagucguacuuuuguc

SEQ ID NO: 16266 - RNA, 19 nt, Artificial Sequence
  Description of Artificial Sequence: Synthetic oligonucleotide
cgggucuccacuuauggua

SEQ ID NO: 16267 - RNA, 19 nt, Artificial Sequence
  Description of Artificial Sequence: Synthetic oligonucleotide
cccaugauucaccucuaaa

SEQ ID NO: 16268 - RNA, 19 nt, Artificial Sequence
  Description of Artificial Sequence: Synthetic oligonucleotide
gguuuuacuccucccuauu

SEQ ID NO: 16269 - RNA, 19 nt, Artificial Sequence
  Description of Artificial Sequence: Synthetic oligonucleotide
ggagugggcacagcuuaga

SEQ ID NO: 16270 - RNA, 19 nt, Artificial Sequence
  Description of Artificial Sequence: Synthetic oligonucleotide
guagagcgugaagccacaa

SEQ ID NO: 16271 - RNA, 19 nt, Artificial Sequence
  Description of Artificial Sequence: Synthetic oligonucleotide
cccagucguacuuuugucu

SEQ ID NO: 16272 - RNA, 19 nt, Artificial Sequence
  Description of Artificial Sequence: Synthetic oligonucleotide
cccuaacuccugguuuucc

SEQ ID NO: 16273 - RNA, 19 nt, Artificial Sequence
  Description of Artificial Sequence: Synthetic oligonucleotide
gccgcuuuuggguuugcau

SEQ ID NO: 16274 - RNA, 19 nt, Artificial Sequence
  Description of Artificial Sequence: Synthetic oligonucleotide
aucccaugauucaccucua

SEQ ID NO: 16275 - RNA, 19 nt, Artificial Sequence
  Description of Artificial Sequence: Synthetic oligonucleotide
ccuugcaggcuuauauccu

SEQ ID NO: 16276 - RNA, 19 nt, Artificial Sequence
  Description of Artificial Sequence: Synthetic oligonucleotide
gguagcucgggcauucauu

SEQ ID NO: 16277 - RNA, 19 nt, Artificial Sequence
  Description of Artificial Sequence: Synthetic oligonucleotide
gagugacguuagacacaga

SEQ ID NO: 16278 - RNA, 19 nt, Artificial Sequence
  Description of Artificial Sequence: Synthetic oligonucleotide
ccucccuauuacuguugca

SEQ ID NO: 16279 - RNA, 19 nt, Artificial Sequence
  Description of Artificial Sequence: Synthetic oligonucleotide
ccucacuaucaggcccucc

SEQ ID NO: 16280 - RNA, 19 nt, Artificial Sequence
  Description of Artificial Sequence: Synthetic oligonucleotide
ggacagcggugaacauuac

SEQ ID NO: 16281 - RNA, 19 nt, Artificial Sequence
  Description of Artificial Sequence: Synthetic oligonucleotide
ggccgcuuuuggguuugca

SEQ ID NO: 16282 - RNA, 19 nt, Artificial Sequence
  Description of Artificial Sequence: Synthetic oligonucleotide
gccuguuguacuggacgau

SEQ ID NO: 16283 - RNA, 19 nt, Artificial Sequence
  Description of Artificial Sequence: Synthetic oligonucleotide
ccacgcagagcacgagcau

SEQ ID NO: 16284 - RNA, 19 nt, Artificial Sequence
  Description of Artificial Sequence: Synthetic oligonucleotide
uuuucagucaucaacgggg

SEQ ID NO: 16285 - RNA, 19 nt, Artificial Sequence
  Description of Artificial Sequence: Synthetic oligonucleotide
ucaacuuugaagaagacac

SEQ ID NO: 16286 - RNA, 19 nt, Artificial Sequence
  Description of Artificial Sequence: Synthetic oligonucleotide
aauggaguccauccgaugc

SEQ ID NO: 16287 - RNA, 19 nt, Artificial Sequence
  Description of Artificial Sequence: Synthetic oligonucleotide
ucuaauagcacguaaacac

SEQ ID NO: 16288 - RNA, 19 nt, Artificial Sequence
  Description of Artificial Sequence: Synthetic oligonucleotide
uuuaaguuagggaagaacu

SEQ ID NO: 16289 - RNA, 19 nt, Artificial Sequence
  Description of Artificial Sequence: Synthetic oligonucleotide
aacacagauacguagccac

SEQ ID NO: 16290 - RNA, 19 nt, Artificial Sequence
  Description of Artificial Sequence: Synthetic oligonucleotide
uuuaaauauucgaagcucc

SEQ ID NO: 16291 - RNA, 19 nt, Artificial Sequence
  Description of Artificial Sequence: Synthetic oligonucleotide
aguucuauagcuuggggac

SEQ ID NO: 16292 - RNA, 19 nt, Artificial Sequence
  Description of Artificial Sequence: Synthetic oligonucleotide
aauacuucauaugauagug

SEQ ID NO: 16293 - RNA, 19 nt, Artificial Sequence
  Description of Artificial Sequence: Synthetic oligonucleotide
uuauccaaaacaccgaugu

SEQ ID NO: 16294 - RNA, 19 nt, Artificial Sequence
  Description of Artificial Sequence: Synthetic oligonucleotide
uucauuaugcgucacacac

SEQ ID NO: 16295 - RNA, 19 nt, Artificial Sequence
  Description of Artificial Sequence: Synthetic oligonucleotide
uguugauggauaaagguac

SEQ ID NO: 16296 - RNA, 19 nt, Artificial Sequence
  Description of Artificial Sequence: Synthetic oligonucleotide
aacagucgaaaccuccugc

SEQ ID NO: 16297 - RNA, 19 nt, Artificial Sequence
  Description of Artificial Sequence: Synthetic oligonucleotide
aggaguggcaaguuaauac

SEQ ID NO: 16298 - RNA, 19 nt, Artificial Sequence
  Description of Artificial Sequence: Synthetic oligonucleotide
auacagaugagaccuggcc

SEQ ID NO: 16299 - RNA, 19 nt, Artificial Sequence
  Description of Artificial Sequence: Synthetic oligonucleotide
cuugcaucgaaacuugugg

SEQ ID NO: 16300 - RNA, 19 nt, Artificial Sequence
  Description of Artificial Sequence: Synthetic oligonucleotide
caauucucuacuauguggg

SEQ ID NO: 16301 - RNA, 19 nt, Artificial Sequence
  Description of Artificial Sequence: Synthetic oligonucleotide
ucacaauggaaccagauua

SEQ ID NO: 16302 - RNA, 19 nt, Artificial Sequence
  Description of Artificial Sequence: Synthetic oligonucleotide
uuaugcgucacacacuccc

SEQ ID NO: 16303 - RNA, 19 nt, Artificial Sequence
  Description of Artificial Sequence: Synthetic oligonucleotide
aacauaucauuggacaggg

SEQ ID NO: 16304 - RNA, 19 nt, Artificial Sequence
  Description of Artificial Sequence: Synthetic oligonucleotide
uaauagcacguaaacacag

SEQ ID NO: 16305 - RNA, 19 nt, Artificial Sequence
  Description of Artificial Sequence: Synthetic oligonucleotide
auauagcaauuacacaugg

SEQ ID NO: 16306 - RNA, 19 nt, Artificial Sequence
  Description of Artificial Sequence: Synthetic oligonucleotide
aaguucuauagcuugggga

SEQ ID NO: 16307 - RNA, 19 nt, Artificial Sequence
  Description of Artificial Sequence: Synthetic oligonucleotide
aagacuaugcgcugccuuc

SEQ ID NO: 16308 - RNA, 19 nt, Artificial Sequence
  Description of Artificial Sequence: Synthetic oligonucleotide
accgguucaguuuucauag

SEQ ID NO: 16309 - RNA, 19 nt, Artificial Sequence
  Description of Artificial Sequence: Synthetic oligonucleotide
uacuucauaugauagugca

SEQ ID NO: 16310 - RNA, 19 nt, Artificial Sequence
  Description of Artificial Sequence: Synthetic oligonucleotide
uaucaucgagggcagaucc

SEQ ID NO: 16311 - RNA, 19 nt, Artificial Sequence
  Description of Artificial Sequence: Synthetic oligonucleotide
acaguugcagaucagggug

SEQ ID NO: 16312 - RNA, 19 nt, Artificial Sequence
  Description of Artificial Sequence: Synthetic oligonucleotide
ugucuaauagcacguaaac

SEQ ID NO: 16313 - RNA, 19 nt, Artificial Sequence
  Description of Artificial Sequence: Synthetic oligonucleotide
uagggguuaauucacugug

SEQ ID NO: 16314 - RNA, 19 nt, Artificial Sequence
  Description of Artificial Sequence: Synthetic oligonucleotide
accaaauucgucaucacuc

SEQ ID NO: 16315 - RNA, 19 nt, Artificial Sequence
  Description of Artificial Sequence: Synthetic oligonucleotide
ucuuuaaacggucccgagc

SEQ ID NO: 16316 - RNA, 19 nt, Artificial Sequence
  Description of Artificial Sequence: Synthetic oligonucleotide
ugccuaguaagguaaaaca

SEQ ID NO: 16317 - RNA, 19 nt, Artificial Sequence
  Description of Artificial Sequence: Synthetic oligonucleotide
cugaagagacuccacaugc

SEQ ID NO: 16318 - RNA, 19 nt, Artificial Sequence
  Description of Artificial Sequence: Synthetic oligonucleotide
uuccuaacagaacucaggu

SEQ ID NO: 16319 - RNA, 19 nt, Artificial Sequence
  Description of Artificial Sequence: Synthetic oligonucleotide
ccuaacagaacucagguag

SEQ ID NO: 16320 - RNA, 19 nt, Artificial Sequence
  Description of Artificial Sequence: Synthetic oligonucleotide
uguuucuuuaggccuagca

SEQ ID NO: 16321 - RNA, 19 nt, Artificial Sequence
  Description of Artificial Sequence: Synthetic oligonucleotide
auucuagcuacugacauug

SEQ ID NO: 16322 - RNA, 19 nt, Artificial Sequence
  Description of Artificial Sequence: Synthetic oligonucleotide
acagaugcaacggaccacc

SEQ ID NO: 16323 - RNA, 19 nt, Artificial Sequence
  Description of Artificial Sequence: Synthetic oligonucleotide
ugcuauucuagcuacugac

SEQ ID NO: 16324 - RNA, 19 nt, Artificial Sequence
  Description of Artificial Sequence: Synthetic oligonucleotide
gaugcaacggaccaccuca

SEQ ID NO: 16325 - RNA, 19 nt, Artificial Sequence
  Description of Artificial Sequence: Synthetic oligonucleotide
ucuagcuacugacauuggc

SEQ ID NO: 16326 - RNA, 19 nt, Artificial Sequence
  Description of Artificial Sequence: Synthetic oligonucleotide
acaaucaucauaccucaca

SEQ ID NO: 16327 - RNA, 19 nt, Artificial Sequence
  Description of Artificial Sequence: Synthetic oligonucleotide
acaaugaccuguuacgccu

SEQ ID NO: 16328 - RNA, 19 nt, Artificial Sequence
  Description of Artificial Sequence: Synthetic oligonucleotide
cuuugcuucccuaugaaca

SEQ ID NO: 16329 - RNA, 19 nt, Artificial Sequence
  Description of Artificial Sequence: Synthetic oligonucleotide
caguguaagcccuucuucg

SEQ ID NO: 16330 - RNA, 19 nt, Artificial Sequence
  Description of Artificial Sequence: Synthetic oligonucleotide
uguacagugccuucugucu

SEQ ID NO: 16331 - RNA, 19 nt, Artificial Sequence
  Description of Artificial Sequence: Synthetic oligonucleotide
gauacguagccacagugca

SEQ ID NO: 16332 - RNA, 19 nt, Artificial Sequence
  Description of Artificial Sequence: Synthetic oligonucleotide
caugucgagcagcagaggg

SEQ ID NO: 16333 - RNA, 19 nt, Artificial Sequence
  Description of Artificial Sequence: Synthetic oligonucleotide
uuacgccugaagcugaaca

SEQ ID NO: 16334 - RNA, 19 nt, Artificial Sequence
  Description of Artificial Sequence: Synthetic oligonucleotide
ucuaagacuaugcgcugcc

SEQ ID NO: 16335 - RNA, 19 nt, Artificial Sequence
  Description of Artificial Sequence: Synthetic oligonucleotide
acagucgaaaccuccugcg

SEQ ID NO: 16336 - RNA, 19 nt, Artificial Sequence
  Description of Artificial Sequence: Synthetic oligonucleotide
uguaagcccuucuucguag

SEQ ID NO: 16337 - RNA, 19 nt, Artificial Sequence
  Description of Artificial Sequence: Synthetic oligonucleotide
guggcaagcaccuuuacca

SEQ ID NO: 16338 - RNA, 19 nt, Artificial Sequence
  Description of Artificial Sequence: Synthetic oligonucleotide
cuaaaugauaaacccagca

SEQ ID NO: 16339 - RNA, 19 nt, Artificial Sequence
  Description of Artificial Sequence: Synthetic oligonucleotide
cauuaugcgucacacacuc

SEQ ID NO: 16340 - RNA, 19 nt, Artificial Sequence
  Description of Artificial Sequence: Synthetic oligonucleotide
uuaucagaacaugagucug

SEQ ID NO: 16341 - RNA, 19 nt, Artificial Sequence
  Description of Artificial Sequence: Synthetic oligonucleotide
agauacguagccacagugc

SEQ ID NO: 16342 - RNA, 19 nt, Artificial Sequence
  Description of Artificial Sequence: Synthetic oligonucleotide
gucacgugcauucagcaug

SEQ ID NO: 16343 - RNA, 19 nt, Artificial Sequence
  Description of Artificial Sequence: Synthetic oligonucleotide
cagugcuccaacuuagggg

SEQ ID NO: 16344 - RNA, 19 nt, Artificial Sequence
  Description of Artificial Sequence: Synthetic oligonucleotide
cauuuucagucaucaacgg

SEQ ID NO: 16345 - RNA, 19 nt, Artificial Sequence
  Description of Artificial Sequence: Synthetic oligonucleotide
aaauuauccaaaacaccga

SEQ ID NO: 16346 - RNA, 19 nt, Artificial Sequence
  Description of Artificial Sequence: Synthetic oligonucleotide
auacuucaaugacugauca

SEQ ID NO: 16347 - RNA, 19 nt, Artificial Sequence
  Description of Artificial Sequence: Synthetic oligonucleotide
agguacuuugauauuugcc

SEQ ID NO: 16348 - RNA, 19 nt, Artificial Sequence
  Description of Artificial Sequence: Synthetic oligonucleotide
guaaacacagauacguagc

SEQ ID NO: 16349 - RNA, 19 nt, Artificial Sequence
  Description of Artificial Sequence: Synthetic oligonucleotide
cucgcucaaauuauccucc

SEQ ID NO: 16350 - RNA, 19 nt, Artificial Sequence
  Description of Artificial Sequence: Synthetic oligonucleotide
uucuucgaaacguauuccu

SEQ ID NO: 16351 - RNA, 19 nt, Artificial Sequence
  Description of Artificial Sequence: Synthetic oligonucleotide
uucgguagauuccuuggca

SEQ ID NO: 16352 - RNA, 19 nt, Artificial Sequence
  Description of Artificial Sequence: Synthetic oligonucleotide
aguacucccugucauucuc

SEQ ID NO: 16353 - RNA, 19 nt, Artificial Sequence
  Description of Artificial Sequence: Synthetic oligonucleotide
cauacuucaaugacugauc

SEQ ID NO: 16354 - RNA, 19 nt, Artificial Sequence
  Description of Artificial Sequence: Synthetic oligonucleotide
ugccuaaagcauuacagau

SEQ ID NO: 16355 - RNA, 19 nt, Artificial Sequence
  Description of Artificial Sequence: Synthetic oligonucleotide
uuugacaguuugaacuacu

SEQ ID NO: 16356 - RNA, 19 nt, Artificial Sequence
  Description of Artificial Sequence: Synthetic oligonucleotide
uggcuuuaaguuagggaag

SEQ ID NO: 16357 - RNA, 19 nt, Artificial Sequence
  Description of Artificial Sequence: Synthetic oligonucleotide
uucgaaacguauuccuuca

SEQ ID NO: 16358 - RNA, 19 nt, Artificial Sequence
  Description of Artificial Sequence: Synthetic oligonucleotide
aauauguuugacaguuuga

SEQ ID NO: 16359 - RNA, 19 nt, Artificial Sequence
  Description of Artificial Sequence: Synthetic oligonucleotide
uuagggguuaauucacugu

SEQ ID NO: 16360 - RNA, 19 nt, Artificial Sequence
  Description of Artificial Sequence: Synthetic oligonucleotide
uggaauaagcuuugacaug

SEQ ID NO: 16361 - RNA, 19 nt, Artificial Sequence
  Description of Artificial Sequence: Synthetic oligonucleotide
gcaaauauugcuugagagc

SEQ ID NO: 16362 - RNA, 19 nt, Artificial Sequence
  Description of Artificial Sequence: Synthetic oligonucleotide
uacgccugaagcugaacag

SEQ ID NO: 16363 - RNA, 19 nt, Artificial Sequence
  Description of Artificial Sequence: Synthetic oligonucleotide
gaugcgucacuucauccug

SEQ ID NO: 16364 - RNA, 19 nt, Artificial Sequence
  Description of Artificial Sequence: Synthetic oligonucleotide
agcauuguuugcaaaugac

SEQ ID NO: 16365 - RNA, 19 nt, Artificial Sequence
  Description of Artificial Sequence: Synthetic oligonucleotide
uauugcuugagagcaacac

SEQ ID NO: 16366 - RNA, 19 nt, Artificial Sequence
  Description of Artificial Sequence: Synthetic oligonucleotide
uggcaaguuaauacagaug

SEQ ID NO: 16367 - RNA, 19 nt, Artificial Sequence
  Description of Artificial Sequence: Synthetic oligonucleotide
gcuccaauuguccugggcg

SEQ ID NO: 16368 - RNA, 19 nt, Artificial Sequence
  Description of Artificial Sequence: Synthetic oligonucleotide
ucugucuaauagcacguaa

SEQ ID NO: 16369 - RNA, 19 nt, Artificial Sequence
  Description of Artificial Sequence: Synthetic oligonucleotide
aauuacacauggaaccaga

SEQ ID NO: 16370 - RNA, 19 nt, Artificial Sequence
  Description of Artificial Sequence: Synthetic oligonucleotide
ugagccggauaccaguucu

SEQ ID NO: 16371 - RNA, 19 nt, Artificial Sequence
  Description of Artificial Sequence: Synthetic oligonucleotide
auagcacguaaacacagau

SEQ ID NO: 16372 - RNA, 19 nt, Artificial Sequence
  Description of Artificial Sequence: Synthetic oligonucleotide
cuuagggguuaauucacug

SEQ ID NO: 16373 - RNA, 19 nt, Artificial Sequence
  Description of Artificial Sequence: Synthetic oligonucleotide
agacucgcuucguucaacg

SEQ ID NO: 16374 - RNA, 19 nt, Artificial Sequence
  Description of Artificial Sequence: Synthetic oligonucleotide
aagucauagcggucgucag

SEQ ID NO: 16375 - RNA, 19 nt, Artificial Sequence
  Description of Artificial Sequence: Synthetic oligonucleotide
gaaacguauuccuucaccu

SEQ ID NO: 16376 - RNA, 19 nt, Artificial Sequence
  Description of Artificial Sequence: Synthetic oligonucleotide
uucuuuaggccuagcauua

SEQ ID NO: 16377 - RNA, 19 nt, Artificial Sequence
  Description of Artificial Sequence: Synthetic oligonucleotide
gcucauauggacuccaggc

SEQ ID NO: 16378 - RNA, 19 nt, Artificial Sequence
  Description of Artificial Sequence: Synthetic oligonucleotide
auggaguccauccgaugcg

SEQ ID NO: 16379 - RNA, 19 nt, Artificial Sequence
  Description of Artificial Sequence: Synthetic oligonucleotide
cucaaggguaguuacauaa

SEQ ID NO: 16380 - RNA, 19 nt, Artificial Sequence
  Description of Artificial Sequence: Synthetic oligonucleotide
cacaauggaaccagauuac

SEQ ID NO: 16381 - RNA, 19 nt, Artificial Sequence
  Description of Artificial Sequence: Synthetic oligonucleotide
cuaugcgcugccuucguag

SEQ ID NO: 16382 - RNA, 19 nt, Artificial Sequence
  Description of Artificial Sequence: Synthetic oligonucleotide
ccuaaagcauuacagauuc

SEQ ID NO: 16383 - RNA, 19 nt, Artificial Sequence
  Description of Artificial Sequence: Synthetic oligonucleotide
cuaauagcacguaaacaca

SEQ ID NO: 16384 - RNA, 19 nt, Artificial Sequence
  Description of Artificial Sequence: Synthetic oligonucleotide
cuucguucaacgaugugca

SEQ ID NO: 16385 - RNA, 19 nt, Artificial Sequence
  Description of Artificial Sequence: Synthetic oligonucleotide
ucauuaugcgucacacacu

SEQ ID NO: 16386 - RNA, 19 nt, Artificial Sequence
  Description of Artificial Sequence: Synthetic oligonucleotide
ucaucaacggggcugcuuu

SEQ ID NO: 16387 - RNA, 19 nt, Artificial Sequence
  Description of Artificial Sequence: Synthetic oligonucleotide
guacacaagucucaauuca

SEQ ID NO: 16388 - RNA, 19 nt, Artificial Sequence
  Description of Artificial Sequence: Synthetic oligonucleotide
uugcaucgaaacuuguggu

SEQ ID NO: 16389 - RNA, 19 nt, Artificial Sequence
  Description of Artificial Sequence: Synthetic oligonucleotide
cucgcuucguucaacgaug

SEQ ID NO: 16390 - RNA, 19 nt, Artificial Sequence
  Description of Artificial Sequence: Synthetic oligonucleotide
ucuuuugcaguuggggagc

SEQ ID NO: 16391 - RNA, 19 nt, Artificial Sequence
  Description of Artificial Sequence: Synthetic oligonucleotide
cuuuaggccuagcauuacc

SEQ ID NO: 16392 - RNA, 19 nt, Artificial Sequence
  Description of Artificial Sequence: Synthetic oligonucleotide
aagaggagacaccgguuca

SEQ ID NO: 16393 - RNA, 19 nt, Artificial Sequence
  Description of Artificial Sequence: Synthetic oligonucleotide
ucaaggguaguuacauaaa

SEQ ID NO: 16394 - RNA, 19 nt, Artificial Sequence
  Description of Artificial Sequence: Synthetic oligonucleotide
uauuacauuuuguguguau

SEQ ID NO: 16395 - RNA, 19 nt, Artificial Sequence
  Description of Artificial Sequence: Synthetic oligonucleotide
accuguuacgccugaagcu

SEQ ID NO: 16396 - RNA, 19 nt, Artificial Sequence
  Description of Artificial Sequence: Synthetic oligonucleotide
gaugcaaugcuugagcugu

SEQ ID NO: 16397 - RNA, 19 nt, Artificial Sequence
  Description of Artificial Sequence: Synthetic oligonucleotide
uaugcgucacacacucccc

SEQ ID NO: 16398 - RNA, 19 nt, Artificial Sequence
  Description of Artificial Sequence: Synthetic oligonucleotide
uggucuagauccacagcug

SEQ ID NO: 16399 - RNA, 19 nt, Artificial Sequence
  Description of Artificial Sequence: Synthetic oligonucleotide
ucgguagauuccuuggcac

SEQ ID NO: 16400 - RNA, 19 nt, Artificial Sequence
  Description of Artificial Sequence: Synthetic oligonucleotide
ucguucaacgaugugcaca

SEQ ID NO: 16401 - RNA, 19 nt, Artificial Sequence
  Description of Artificial Sequence: Synthetic oligonucleotide
agaucaagagugccccguc

SEQ ID NO: 16402 - RNA, 19 nt, Artificial Sequence
  Description of Artificial Sequence: Synthetic oligonucleotide
cugcaagccgugaagcacc

SEQ ID NO: 16403 - RNA, 19 nt, Artificial Sequence
  Description of Artificial Sequence: Synthetic oligonucleotide
aaauucgucaucacuccaa

SEQ ID NO: 16404 - RNA, 19 nt, Artificial Sequence
  Description of Artificial Sequence: Synthetic oligonucleotide
gaucaagagugccccgucc

SEQ ID NO: 16405 - RNA, 19 nt, Artificial Sequence
  Description of Artificial Sequence: Synthetic oligonucleotide
ucaucauaccucacacagu

SEQ ID NO: 16406 - RNA, 19 nt, Artificial Sequence
  Description of Artificial Sequence: Synthetic oligonucleotide
aaugugagccggauaccag

SEQ ID NO: 16407 - RNA, 19 nt, Artificial Sequence
  Description of Artificial Sequence: Synthetic oligonucleotide
uucucaagaugcaacuauu

SEQ ID NO: 16408 - RNA, 19 nt, Artificial Sequence
  Description of Artificial Sequence: Synthetic oligonucleotide
cuccaauuguccugggcgc

SEQ ID NO: 16409 - RNA, 19 nt, Artificial Sequence
  Description of Artificial Sequence: Synthetic oligonucleotide
caaugacugaucacaccag

SEQ ID NO: 16410 - RNA, 19 nt, Artificial Sequence
  Description of Artificial Sequence: Synthetic oligonucleotide
ugucgagcagcagagggca

SEQ ID NO: 16411 - RNA, 19 nt, Artificial Sequence
  Description of Artificial Sequence: Synthetic oligonucleotide
cuuuaaacggucccgagcu

SEQ ID NO: 16412 - RNA, 19 nt, Artificial Sequence
  Description of Artificial Sequence: Synthetic oligonucleotide
aauagcacguaaacacaga

SEQ ID NO: 16413 - RNA, 19 nt, Artificial Sequence
  Description of Artificial Sequence: Synthetic oligonucleotide
auugaccguggcuuuucuc

SEQ ID NO: 16414 - RNA, 19 nt, Artificial Sequence
  Description of Artificial Sequence: Synthetic oligonucleotide
gcuucguucaacgaugugc

SEQ ID NO: 16415 - RNA, 19 nt, Artificial Sequence
  Description of Artificial Sequence: Synthetic oligonucleotide
uaagacuaugcgcugccuu

SEQ ID NO: 16416 - RNA, 19 nt, Artificial Sequence
  Description of Artificial Sequence: Synthetic oligonucleotide
uucuaagacuaugcgcugc

SEQ ID NO: 16417 - RNA, 19 nt, Artificial Sequence
  Description of Artificial Sequence: Synthetic oligonucleotide
uguaucaucgagggcagau

SEQ ID NO: 16418 - RNA, 19 nt, Artificial Sequence
  Description of Artificial Sequence: Synthetic oligonucleotide
ugcugccuaaagcauuaca

SEQ ID NO: 16419 - RNA, 19 nt, Artificial Sequence
  Description of Artificial Sequence: Synthetic oligonucleotide
cuucgguagauuccuuggc

SEQ ID NO: 16420 - RNA, 19 nt, Artificial Sequence
  Description of Artificial Sequence: Synthetic oligonucleotide
augcuaaguuuauuuauuu

SEQ ID NO: 16421 - RNA, 19 nt, Artificial Sequence
  Description of Artificial Sequence: Synthetic oligonucleotide
uuaaacggucccgagcuuc

SEQ ID NO: 16422 - RNA, 19 nt, Artificial Sequence
  Description of Artificial Sequence: Synthetic oligonucleotide
gugcucacuggugauauag

SEQ ID NO: 16423 - RNA, 19 nt, Artificial Sequence
  Description of Artificial Sequence: Synthetic oligonucleotide
cguaaacacagauacguag

SEQ ID NO: 16424 - RNA, 19 nt, Artificial Sequence
  Description of Artificial Sequence: Synthetic oligonucleotide
cauaugauagugcagcagu

SEQ ID NO: 16425 - RNA, 19 nt, Artificial Sequence
  Description of Artificial Sequence: Synthetic oligonucleotide
uucuagcuacugacauugg

SEQ ID NO: 16426 - RNA, 19 nt, Artificial Sequence
  Description of Artificial Sequence: Synthetic oligonucleotide
agcaugcuaaguuuauuua

SEQ ID NO: 16427 - RNA, 19 nt, Artificial Sequence
  Description of Artificial Sequence: Synthetic oligonucleotide
ucaugcuugcccugccugc

SEQ ID NO: 16428 - RNA, 19 nt, Artificial Sequence
  Description of Artificial Sequence: Synthetic oligonucleotide
cuucuucgaaacguauucc

SEQ ID NO: 16429 - RNA, 19 nt, Artificial Sequence
  Description of Artificial Sequence: Synthetic oligonucleotide
cacuacagagccccgaguc

SEQ ID NO: 16430 - RNA, 19 nt, Artificial Sequence
  Description of Artificial Sequence: Synthetic oligonucleotide
auucgucaucacuccaaag

SEQ ID NO: 16431 - RNA, 19 nt, Artificial Sequence
  Description of Artificial Sequence: Synthetic oligonucleotide
aaugaccuguuacgccuga

SEQ ID NO: 16432 - RNA, 19 nt, Artificial Sequence
  Description of Artificial Sequence: Synthetic oligonucleotide
ugcaaugcuugagcugugg

SEQ ID NO: 16433 - RNA, 19 nt, Artificial Sequence
  Description of Artificial Sequence: Synthetic oligonucleotide
aguccauccgaugcgucac

SEQ ID NO: 16434 - RNA, 19 nt, Artificial Sequence
  Description of Artificial Sequence: Synthetic oligonucleotide
ggguucuaagacuaugcgc

SEQ ID NO: 16435 - RNA, 19 nt, Artificial Sequence
  Description of Artificial Sequence: Synthetic oligonucleotide
cuuggggacuccucuuugc

SEQ ID NO: 16436 - RNA, 19 nt, Artificial Sequence
  Description of Artificial Sequence: Synthetic oligonucleotide
augugugucagaggauaac

SEQ ID NO: 16437 - RNA, 19 nt, Artificial Sequence
  Description of Artificial Sequence: Synthetic oligonucleotide
uaaaugguaucagcauugu

SEQ ID NO: 16438 - RNA, 19 nt, Artificial Sequence
  Description of Artificial Sequence: Synthetic oligonucleotide
acgauuccaagugaagaug

SEQ ID NO: 16439 - RNA, 19 nt, Artificial Sequence
  Description of Artificial Sequence: Synthetic oligonucleotide
aaagacucgcuucguucaa

SEQ ID NO: 16440 - RNA, 19 nt, Artificial Sequence
  Description of Artificial Sequence: Synthetic oligonucleotide
cuugugugaggacccacac

SEQ ID NO: 16441 - RNA, 19 nt, Artificial Sequence
  Description of Artificial Sequence: Synthetic oligonucleotide
acucgcuucguucaacgau

SEQ ID NO: 16442 - RNA, 19 nt, Artificial Sequence
  Description of Artificial Sequence: Synthetic oligonucleotide
gaagaggguucuaagacua

SEQ ID NO: 16443 - RNA, 19 nt, Artificial Sequence
  Description of Artificial Sequence: Synthetic oligonucleotide
uauucuagcuacugacauu

SEQ ID NO: 16444 - RNA, 19 nt, Artificial Sequence
  Description of Artificial Sequence: Synthetic oligonucleotide
ggaguggcaaguuaauaca

SEQ ID NO: 16445 - RNA, 19 nt, Artificial Sequence
  Description of Artificial Sequence: Synthetic oligonucleotide
ugguaacagugcucacugg

SEQ ID NO: 16446 - RNA, 19 nt, Artificial Sequence
  Description of Artificial Sequence: Synthetic oligonucleotide
gguucuaagacuaugcgcu

SEQ ID NO: 16447 - RNA, 19 nt, Artificial Sequence
  Description of Artificial Sequence: Synthetic oligonucleotide
uuccaaguuacagcuuccc

SEQ ID NO: 16448 - RNA, 19 nt, Artificial Sequence
  Description of Artificial Sequence: Synthetic oligonucleotide
ccauucaaaguucuauagc

SEQ ID NO: 16449 - RNA, 19 nt, Artificial Sequence
  Description of Artificial Sequence: Synthetic oligonucleotide
gaacaugagucugcuuugc

SEQ ID NO: 16450 - RNA, 19 nt, Artificial Sequence
  Description of Artificial Sequence: Synthetic oligonucleotide
gcaacggaccaccucaaag

SEQ ID NO: 16451 - RNA, 19 nt, Artificial Sequence
  Description of Artificial Sequence: Synthetic oligonucleotide
cugccuaaagcauuacaga

SEQ ID NO: 16452 - RNA, 19 nt, Artificial Sequence
  Description of Artificial Sequence: Synthetic oligonucleotide
uaugauagugcagcaguuu

SEQ ID NO: 16453 - RNA, 19 nt, Artificial Sequence
  Description of Artificial Sequence: Synthetic oligonucleotide
acgucuuucuaaaugguau

SEQ ID NO: 16454 - RNA, 19 nt, Artificial Sequence
  Description of Artificial Sequence: Synthetic oligonucleotide
auagcggucgucagcauca

SEQ ID NO: 16455 - RNA, 19 nt, Artificial Sequence
  Description of Artificial Sequence: Synthetic oligonucleotide
uccgaugcgucacuucauc

SEQ ID NO: 16456 - RNA, 19 nt, Artificial Sequence
  Description of Artificial Sequence: Synthetic oligonucleotide
gaagagacuccacaugcgu

SEQ ID NO: 16457 - RNA, 19 nt, Artificial Sequence
  Description of Artificial Sequence: Synthetic oligonucleotide
ccaauggagaguucaacug

SEQ ID NO: 16458 - RNA, 19 nt, Artificial Sequence
  Description of Artificial Sequence: Synthetic oligonucleotide
gucuaauagcacguaaaca

SEQ ID NO: 16459 - RNA, 19 nt, Artificial Sequence
  Description of Artificial Sequence: Synthetic oligonucleotide
uucugaucuuuggaauaag

SEQ ID NO: 16460 - RNA, 19 nt, Artificial Sequence
  Description of Artificial Sequence: Synthetic oligonucleotide
agacuaugcgcugccuucg

SEQ ID NO: 16461 - RNA, 19 nt, Artificial Sequence
  Description of Artificial Sequence: Synthetic oligonucleotide
uccaacuuagggguuaauu

SEQ ID NO: 16462 - RNA, 19 nt, Artificial Sequence
  Description of Artificial Sequence: Synthetic oligonucleotide
cacguaaacacagauacgu

SEQ ID NO: 16463 - RNA, 19 nt, Artificial Sequence
  Description of Artificial Sequence: Synthetic oligonucleotide
uaugcgcugccuucguagu

SEQ ID NO: 16464 - RNA, 19 nt, Artificial Sequence
  Description of Artificial Sequence: Synthetic oligonucleotide
ugacuguaucaucgagggc

SEQ ID NO: 16465 - RNA, 19 nt, Artificial Sequence
  Description of Artificial Sequence: Synthetic oligonucleotide
acaauggaaccagauuacu

SEQ ID NO: 16466 - RNA, 19 nt, Artificial Sequence
  Description of Artificial Sequence: Synthetic oligonucleotide
ugcgggcucauauggacuc

SEQ ID NO: 16467 - RNA, 19 nt, Artificial Sequence
  Description of Artificial Sequence: Synthetic oligonucleotide
ccauuuaucaccaguggca

SEQ ID NO: 16468 - RNA, 19 nt, Artificial Sequence
  Description of Artificial Sequence: Synthetic oligonucleotide
uggcggucaugccaggacu

SEQ ID NO: 16469 - RNA, 19 nt, Artificial Sequence
  Description of Artificial Sequence: Synthetic oligonucleotide
gaguccauccgaugcguca

SEQ ID NO: 16470 - RNA, 19 nt, Artificial Sequence
  Description of Artificial Sequence: Synthetic oligonucleotide
auuaugcgucacacacucc

SEQ ID NO: 16471 - RNA, 19 nt, Artificial Sequence
  Description of Artificial Sequence: Synthetic oligonucleotide
uccuaacagaacucaggua

SEQ ID NO: 16472 - RNA, 19 nt, Artificial Sequence
  Description of Artificial Sequence: Synthetic oligonucleotide
ggcucauauggacuccagg

SEQ ID NO: 16473 - RNA, 19 nt, Artificial Sequence
  Description of Artificial Sequence: Synthetic oligonucleotide
cauagcggucgucagcauc

SEQ ID NO: 16474 - RNA, 19 nt, Artificial Sequence
  Description of Artificial Sequence: Synthetic oligonucleotide
uucucucguuucucagaag

SEQ ID NO: 16475 - RNA, 19 nt, Artificial Sequence
  Description of Artificial Sequence: Synthetic oligonucleotide
acuguaucaucgagggcag

SEQ ID NO: 16476 - RNA, 19 nt, Artificial Sequence
  Description of Artificial Sequence: Synthetic oligonucleotide
cuagcauuacccacaauau

SEQ ID NO: 16477 - RNA, 19 nt, Artificial Sequence
  Description of Artificial Sequence: Synthetic oligonucleotide
ugcauacuucaaugacuga

SEQ ID NO: 16478 - RNA, 19 nt, Artificial Sequence
  Description of Artificial Sequence: Synthetic oligonucleotide
guaugugugucagaggaua

SEQ ID NO: 16479 - RNA, 19 nt, Artificial Sequence
  Description of Artificial Sequence: Synthetic oligonucleotide
ugucacgugcauucagcau

SEQ ID NO: 16480 - RNA, 19 nt, Artificial Sequence
  Description of Artificial Sequence: Synthetic oligonucleotide
ucguucuugggaaggcuuu

SEQ ID NO: 16481 - RNA, 19 nt, Artificial Sequence
  Description of Artificial Sequence: Synthetic oligonucleotide
caucauaccucacacaguu

SEQ ID NO: 16482 - RNA, 19 nt, Artificial Sequence
  Description of Artificial Sequence: Synthetic oligonucleotide
aggacucgcucaaauuauc

SEQ ID NO: 16483 - RNA, 19 nt, Artificial Sequence
  Description of Artificial Sequence: Synthetic oligonucleotide
ggauaaagguacuuugaua

SEQ ID NO: 16484 - RNA, 19 nt, Artificial Sequence
  Description of Artificial Sequence: Synthetic oligonucleotide
gguaucacuguccccucug

SEQ ID NO: 16485 - RNA, 19 nt, Artificial Sequence
  Description of Artificial Sequence: Synthetic oligonucleotide
uguuacgccugaagcugaa

SEQ ID NO: 16486 - RNA, 19 nt, Artificial Sequence
  Description of Artificial Sequence: Synthetic oligonucleotide
ucgcuucguucaacgaugu

SEQ ID NO: 16487 - RNA, 19 nt, Artificial Sequence
  Description of Artificial Sequence: Synthetic oligonucleotide
gugucacgugcauucagca

SEQ ID NO: 16488 - RNA, 19 nt, Artificial Sequence
  Description of Artificial Sequence: Synthetic oligonucleotide
uuuaaacggucccgagcuu

SEQ ID NO: 16489 - RNA, 19 nt, Artificial Sequence
  Description of Artificial Sequence: Synthetic oligonucleotide
ucuuggucgagaggccagc

SEQ ID NO: 16490 - RNA, 19 nt, Artificial Sequence
  Description of Artificial Sequence: Synthetic oligonucleotide
cuauucuagcuacugacau

SEQ ID NO: 16491 - RNA, 19 nt, Artificial Sequence
  Description of Artificial Sequence: Synthetic oligonucleotide
ugcauucagcaugcuaagu

SEQ ID NO: 16492 - RNA, 19 nt, Artificial Sequence
  Description of Artificial Sequence: Synthetic oligonucleotide
ggcgcccaaucucaugucg

SEQ ID NO: 16493 - RNA, 19 nt, Artificial Sequence
  Description of Artificial Sequence: Synthetic oligonucleotide
caacggaccaccucaaagu

SEQ ID NO: 16494 - RNA, 19 nt, Artificial Sequence
  Description of Artificial Sequence: Synthetic oligonucleotide
cacagaccggggcagcggc

SEQ ID NO: 16495 - RNA, 19 nt, Artificial Sequence
  Description of Artificial Sequence: Synthetic oligonucleotide
agaugugcaaagacucgcu

SEQ ID NO: 16496 - RNA, 19 nt, Artificial Sequence
  Description of Artificial Sequence: Synthetic oligonucleotide
aacggucccgagcuuccaa

SEQ ID NO: 16497 - RNA, 19 nt, Artificial Sequence
  Description of Artificial Sequence: Synthetic oligonucleotide
ucuauagcuuggggacucc

SEQ ID NO: 16498 - RNA, 19 nt, Artificial Sequence
  Description of Artificial Sequence: Synthetic oligonucleotide
ucgcucaaauuauccuccu

SEQ ID NO: 16499 - RNA, 19 nt, Artificial Sequence
  Description of Artificial Sequence: Synthetic oligonucleotide
ugcaagccgugaagcaccu

SEQ ID NO: 16500 - RNA, 19 nt, Artificial Sequence
  Description of Artificial Sequence: Synthetic oligonucleotide
gcauuguuugcaaaugaca

SEQ ID NO: 16501 - RNA, 19 nt, Artificial Sequence
  Description of Artificial Sequence: Synthetic oligonucleotide
ucuuuaggccuagcauuac

SEQ ID NO: 16502 - RNA, 19 nt, Artificial Sequence
  Description of Artificial Sequence: Synthetic oligonucleotide
caccuggugacagcaaaug

SEQ ID NO: 16503 - RNA, 19 nt, Artificial Sequence
  Description of Artificial Sequence: Synthetic oligonucleotide
ugcugcuauucuagcuacu

SEQ ID NO: 16504 - RNA, 19 nt, Artificial Sequence
  Description of Artificial Sequence: Synthetic oligonucleotide
uucguucaacgaugugcac

SEQ ID NO: 16505 - RNA, 19 nt, Artificial Sequence
  Description of Artificial Sequence: Synthetic oligonucleotide
gcugcuauucuagcuacug

SEQ ID NO: 16506 - RNA, 19 nt, Artificial Sequence
  Description of Artificial Sequence: Synthetic oligonucleotide
auuugcugccuaaagcauu

SEQ ID NO: 16507 - RNA, 19 nt, Artificial Sequence
  Description of Artificial Sequence: Synthetic oligonucleotide
ggacucgcucaaauuaucc

SEQ ID NO: 16508 - RNA, 19 nt, Artificial Sequence
  Description of Artificial Sequence: Synthetic oligonucleotide
uggaguccauccgaugcgu

SEQ ID NO: 16509 - RNA, 19 nt, Artificial Sequence
  Description of Artificial Sequence: Synthetic oligonucleotide
cucauauggacuccaggcu

SEQ ID NO: 16510 - RNA, 19 nt, Artificial Sequence
  Description of Artificial Sequence: Synthetic oligonucleotide
acuuagggguuaauucacu

SEQ ID NO: 16511 - RNA, 19 nt, Artificial Sequence
  Description of Artificial Sequence: Synthetic oligonucleotide
cccuaugaacagaagucac

SEQ ID NO: 16512 - RNA, 19 nt, Artificial Sequence
  Description of Artificial Sequence: Synthetic oligonucleotide
auuauccuccucacaugcu

SEQ ID NO: 16513 - RNA, 19 nt, Artificial Sequence
  Description of Artificial Sequence: Synthetic oligonucleotide
ugcaacggaccaccucaaa

SEQ ID NO: 16514 - RNA, 19 nt, Artificial Sequence
  Description of Artificial Sequence: Synthetic oligonucleotide
aguucucaagaugcaacua

SEQ ID NO: 16515 - RNA, 19 nt, Artificial Sequence
  Description of Artificial Sequence: Synthetic oligonucleotide
gacucgcuucguucaacga

SEQ ID NO: 16516 - RNA, 19 nt, Artificial Sequence
  Description of Artificial Sequence: Synthetic oligonucleotide
guaucaucgagggcagauc

SEQ ID NO: 16517 - RNA, 19 nt, Artificial Sequence
  Description of Artificial Sequence: Synthetic oligonucleotide
cuuggucgagaggccagcc

SEQ ID NO: 16518 - RNA, 19 nt, Artificial Sequence
  Description of Artificial Sequence: Synthetic oligonucleotide
ccuaugaacagaagucaca

SEQ ID NO: 16519 - RNA, 19 nt, Artificial Sequence
  Description of Artificial Sequence: Synthetic oligonucleotide
acgccugaagcugaacagu

SEQ ID NO: 16520 - RNA, 19 nt, Artificial Sequence
  Description of Artificial Sequence: Synthetic oligonucleotide
gcuaugccaggucaauuca

SEQ ID NO: 16521 - RNA, 19 nt, Artificial Sequence
  Description of Artificial Sequence: Synthetic oligonucleotide
caguucucaagaugcaacu

SEQ ID NO: 16522 - RNA, 19 nt, Artificial Sequence
  Description of Artificial Sequence: Synthetic oligonucleotide
acucaaggguaguuacaua

SEQ ID NO: 16523 - RNA, 19 nt, Artificial Sequence
  Description of Artificial Sequence: Synthetic oligonucleotide
auauugcuugagagcaaca

SEQ ID NO: 16524 - RNA, 19 nt, Artificial Sequence
  Description of Artificial Sequence: Synthetic oligonucleotide
ccacaaugaccuguuacgc

SEQ ID NO: 16525 - RNA, 19 nt, Artificial Sequence
  Description of Artificial Sequence: Synthetic oligonucleotide
uucugucuaauagcacgua

SEQ ID NO: 16526 - RNA, 19 nt, Artificial Sequence
  Description of Artificial Sequence: Synthetic oligonucleotide
caccgguucaguuuucaua

SEQ ID NO: 16527 - RNA, 19 nt, Artificial Sequence
  Description of Artificial Sequence: Synthetic oligonucleotide
ggagcuagguuugguauca

SEQ ID NO: 16528 - RNA, 19 nt, Artificial Sequence
  Description of Artificial Sequence: Synthetic oligonucleotide
uacccacaauauucugauc

SEQ ID NO: 16529 - RNA, 19 nt, Artificial Sequence
  Description of Artificial Sequence: Synthetic oligonucleotide
ugguucagccaggauccac

SEQ ID NO: 16530 - RNA, 19 nt, Artificial Sequence
  Description of Artificial Sequence: Synthetic oligonucleotide
aagccgugaagcaccucga

SEQ ID NO: 16531 - RNA, 19 nt, Artificial Sequence
  Description of Artificial Sequence: Synthetic oligonucleotide
gacaccgguucaguuuuca

SEQ ID NO: 16532 - RNA, 19 nt, Artificial Sequence
  Description of Artificial Sequence: Synthetic oligonucleotide
gcuauucuagcuacugaca

SEQ ID NO: 16533 - RNA, 19 nt, Artificial Sequence
  Description of Artificial Sequence: Synthetic oligonucleotide
acacagauacguagccaca

SEQ ID NO: 16534 - RNA, 19 nt, Artificial Sequence
  Description of Artificial Sequence: Synthetic oligonucleotide
cuguuacgccugaagcuga

SEQ ID NO: 16535 - RNA, 19 nt, Artificial Sequence
  Description of Artificial Sequence: Synthetic oligonucleotide
aagaggguucuaagacuau

SEQ ID NO: 16536 - RNA, 19 nt, Artificial Sequence
  Description of Artificial Sequence: Synthetic oligonucleotide
aucauaccucacacaguug

SEQ ID NO: 16537 - RNA, 19 nt, Artificial Sequence
  Description of Artificial Sequence: Synthetic oligonucleotide
ggcacgauuccaagugaag

SEQ ID NO: 16538 - RNA, 19 nt, Artificial Sequence
  Description of Artificial Sequence: Synthetic oligonucleotide
accuugccuaggucaguca

SEQ ID NO: 16539 - RNA, 19 nt, Artificial Sequence
  Description of Artificial Sequence: Synthetic oligonucleotide
gaggaguggcaaguuaaua

SEQ ID NO: 16540 - RNA, 19 nt, Artificial Sequence
  Description of Artificial Sequence: Synthetic oligonucleotide
acguagccacagugcaaug

SEQ ID NO: 16541 - RNA, 19 nt, Artificial Sequence
  Description of Artificial Sequence: Synthetic oligonucleotide
cucgucuguuagguggaug

SEQ ID NO: 16542 - RNA, 19 nt, Artificial Sequence
  Description of Artificial Sequence: Synthetic oligonucleotide
aucucaugucgagcagcag

SEQ ID NO: 16543 - RNA, 19 nt, Artificial Sequence
  Description of Artificial Sequence: Synthetic oligonucleotide
acuaugcgcugccuucgua

SEQ ID NO: 16544 - RNA, 19 nt, Artificial Sequence
  Description of Artificial Sequence: Synthetic oligonucleotide
ugccccauucaaaguucua

SEQ ID NO: 16545 - RNA, 19 nt, Artificial Sequence
  Description of Artificial Sequence: Synthetic oligonucleotide
gcuggguaguaggugcggg

SEQ ID NO: 16546 - RNA, 19 nt, Artificial Sequence
  Description of Artificial Sequence: Synthetic oligonucleotide
acguaaacacagauacgua

SEQ ID NO: 16547 - RNA, 19 nt, Artificial Sequence
  Description of Artificial Sequence: Synthetic oligonucleotide
cuuggacuucacagaugca

SEQ ID NO: 16548 - RNA, 19 nt, Artificial Sequence
  Description of Artificial Sequence: Synthetic oligonucleotide
gcagacauaacagguauau

SEQ ID NO: 16549 - RNA, 19 nt, Artificial Sequence
  Description of Artificial Sequence: Synthetic oligonucleotide
gugagccggauaccaguuc

SEQ ID NO: 16550 - RNA, 19 nt, Artificial Sequence
  Description of Artificial Sequence: Synthetic oligonucleotide
gaguacucccugucauucu

SEQ ID NO: 16551 - RNA, 19 nt, Artificial Sequence
  Description of Artificial Sequence: Synthetic oligonucleotide
gcauucagcaugcuaaguu

SEQ ID NO: 16552 - RNA, 19 nt, Artificial Sequence
  Description of Artificial Sequence: Synthetic oligonucleotide
ccagaucaagagugccccg

SEQ ID NO: 16553 - RNA, 19 nt, Artificial Sequence
  Description of Artificial Sequence: Synthetic oligonucleotide
cugggcgcccaaucucaug

SEQ ID NO: 16554 - RNA, 19 nt, Artificial Sequence
  Description of Artificial Sequence: Synthetic oligonucleotide
guuacgccugaagcugaac

SEQ ID NO: 16555 - RNA, 19 nt, Artificial Sequence
  Description of Artificial Sequence: Synthetic oligonucleotide
caccucgaucacccucugc

SEQ ID NO: 16556 - RNA, 19 nt, Artificial Sequence
  Description of Artificial Sequence: Synthetic oligonucleotide
ccgaugucacacagacucc

SEQ ID NO: 16557 - RNA, 19 nt, Artificial Sequence
  Description of Artificial Sequence: Synthetic oligonucleotide
cacaugcuuucagcuuccc

SEQ ID NO: 16558 - RNA, 19 nt, Artificial Sequence
  Description of Artificial Sequence: Synthetic oligonucleotide
gccgugaagcaccucgauc

SEQ ID NO: 16559 - RNA, 19 nt, Artificial Sequence
  Description of Artificial Sequence: Synthetic oligonucleotide
uccauccgaugcgucacuu

SEQ ID NO: 16560 - RNA, 19 nt, Artificial Sequence
  Description of Artificial Sequence: Synthetic oligonucleotide
guucuauagcuuggggacu

SEQ ID NO: 16561 - RNA, 19 nt, Artificial Sequence
  Description of Artificial Sequence: Synthetic oligonucleotide
augcgcugccuucguaguu

SEQ ID NO: 16562 - RNA, 19 nt, Artificial Sequence
  Description of Artificial Sequence: Synthetic oligonucleotide
cucucguuucucagaagau

SEQ ID NO: 16563 - RNA, 19 nt, Artificial Sequence
  Description of Artificial Sequence: Synthetic oligonucleotide
accuugcaucgaaacuugu

SEQ ID NO: 16564 - RNA, 19 nt, Artificial Sequence
  Description of Artificial Sequence: Synthetic oligonucleotide
gacuaugcgcugccuucgu

SEQ ID NO: 16565 - RNA, 19 nt, Artificial Sequence
  Description of Artificial Sequence: Synthetic oligonucleotide
agcugcgggcucauaugga

SEQ ID NO: 16566 - RNA, 19 nt, Artificial Sequence
  Description of Artificial Sequence: Synthetic oligonucleotide
gaccuucuucgaaacguau

SEQ ID NO: 16567 - RNA, 19 nt, Artificial Sequence
  Description of Artificial Sequence: Synthetic oligonucleotide
gcccaaucucaugucgagc

SEQ ID NO: 16568 - RNA, 19 nt, Artificial Sequence
  Description of Artificial Sequence: Synthetic oligonucleotide
cagaucaagagugccccgu

SEQ ID NO: 16569 - RNA, 19 nt, Artificial Sequence
  Description of Artificial Sequence: Synthetic oligonucleotide
ggaaccagauuacuuccuu

SEQ ID NO: 16570 - RNA, 19 nt, Artificial Sequence
  Description of Artificial Sequence: Synthetic oligonucleotide
caaugaccauauggcaaaa

SEQ ID NO: 16571 - RNA, 19 nt, Artificial Sequence
  Description of Artificial Sequence: Synthetic oligonucleotide
caugcgucagcagguuaaa

SEQ ID NO: 16572 - RNA, 19 nt, Artificial Sequence
  Description of Artificial Sequence: Synthetic oligonucleotide
caauuguccugggcgccca

SEQ ID NO: 16573 - RNA, 19 nt, Artificial Sequence
  Description of Artificial Sequence: Synthetic oligonucleotide
auccgaugcgucacuucau

SEQ ID NO: 16574 - RNA, 19 nt, Artificial Sequence
  Description of Artificial Sequence: Synthetic oligonucleotide
cgcccaaucucaugucgag

SEQ ID NO: 16575 - RNA, 19 nt, Artificial Sequence
  Description of Artificial Sequence: Synthetic oligonucleotide
augaccuguuacgccugaa

SEQ ID NO: 16576 - RNA, 19 nt, Artificial Sequence
  Description of Artificial Sequence: Synthetic oligonucleotide
cugccccauucaaaguucu

SEQ ID NO: 16577 - RNA, 19 nt, Artificial Sequence
  Description of Artificial Sequence: Synthetic oligonucleotide
caguggcacgauuccaagu

SEQ ID NO: 16578 - RNA, 19 nt, Artificial Sequence
  Description of Artificial Sequence: Synthetic oligonucleotide
ggauaacuuuaagguuuca

SEQ ID NO: 16579 - RNA, 19 nt, Artificial Sequence
  Description of Artificial Sequence: Synthetic oligonucleotide
cugccuucguaguuggcuu

SEQ ID NO: 16580 - RNA, 19 nt, Artificial Sequence
  Description of Artificial Sequence: Synthetic oligonucleotide
ccauccgaugcgucacuuc

SEQ ID NO: 16581 - RNA, 19 nt, Artificial Sequence
  Description of Artificial Sequence: Synthetic oligonucleotide
augcaacggaccaccucaa

SEQ ID NO: 16582 - RNA, 19 nt, Artificial Sequence
  Description of Artificial Sequence: Synthetic oligonucleotide
cauugaccguggcuuuucu

SEQ ID NO: 16583 - RNA, 19 nt, Artificial Sequence
  Description of Artificial Sequence: Synthetic oligonucleotide
ccaagccugcagcucccag

SEQ ID NO: 16584 - RNA, 19 nt, Artificial Sequence
  Description of Artificial Sequence: Synthetic oligonucleotide
uagcggucgucagcaucaa

SEQ ID NO: 16585 - RNA, 19 nt, Artificial Sequence
  Description of Artificial Sequence: Synthetic oligonucleotide
ggaccuucuucgaaacgua

SEQ ID NO: 16586 - RNA, 19 nt, Artificial Sequence
  Description of Artificial Sequence: Synthetic oligonucleotide
cuaagacuaugcgcugccu

SEQ ID NO: 16587 - RNA, 19 nt, Artificial Sequence
  Description of Artificial Sequence: Synthetic oligonucleotide
gccuaaagcauuacagauu

SEQ ID NO: 16588 - RNA, 19 nt, Artificial Sequence
  Description of Artificial Sequence: Synthetic oligonucleotide
ccuauguacagugccuucu

SEQ ID NO: 16589 - RNA, 19 nt, Artificial Sequence
  Description of Artificial Sequence: Synthetic oligonucleotide
ggccagccuaggcgagggg

SEQ ID NO: 16590 - RNA, 19 nt, Artificial Sequence
  Description of Artificial Sequence: Synthetic oligonucleotide
ggaguccauccgaugcguc

SEQ ID NO: 16591 - RNA, 19 nt, Artificial Sequence
  Description of Artificial Sequence: Synthetic oligonucleotide
gccccauucaaaguucuau

SEQ ID NO: 16592 - RNA, 19 nt, Artificial Sequence
  Description of Artificial Sequence: Synthetic oligonucleotide
gcgcccaaucucaugucga

SEQ ID NO: 16593 - RNA, 19 nt, Artificial Sequence
  Description of Artificial Sequence: Synthetic oligonucleotide
ccccaagcuaugccagguc

SEQ ID NO: 16594 - RNA, 19 nt, Artificial Sequence
  Description of Artificial Sequence: Synthetic oligonucleotide
gggcgcccaaucucauguc

SEQ ID NO: 16595 - RNA, 19 nt, Artificial Sequence
  Description of Artificial Sequence: Synthetic oligonucleotide
gagccggauaccaguucuu

SEQ ID NO: 16596 - RNA, 19 nt, Artificial Sequence
  Description of Artificial Sequence: Synthetic oligonucleotide
caucaacggggcugcuuuu

SEQ ID NO: 16597 - RNA, 19 nt, Artificial Sequence
  Description of Artificial Sequence: Synthetic oligonucleotide
cgcuucguucaacgaugug

SEQ ID NO: 16598 - RNA, 19 nt, Artificial Sequence
  Description of Artificial Sequence: Synthetic oligonucleotide
cgaugucacacagacuccu

SEQ ID NO: 16599 - RNA, 19 nt, Artificial Sequence
  Description of Artificial Sequence: Synthetic oligonucleotide
ccuucguaguuggcuucca

SEQ ID NO: 16600 - RNA, 19 nt, Artificial Sequence
  Description of Artificial Sequence: Synthetic oligonucleotide
gcaagccgugaagcaccuc

SEQ ID NO: 16601 - RNA, 19 nt, Artificial Sequence
  Description of Artificial Sequence: Synthetic oligonucleotide
ccgguucaguuuucauagu

SEQ ID NO: 16602 - RNA, 19 nt, Artificial Sequence
  Description of Artificial Sequence: Synthetic oligonucleotide
cuccaacuuagggguuaau

SEQ ID NO: 16603 - RNA, 19 nt, Artificial Sequence
  Description of Artificial Sequence: Synthetic oligonucleotide
ccugggcgcccaaucucau

SEQ ID NO: 16604 - RNA, 19 nt, Artificial Sequence
  Description of Artificial Sequence: Synthetic oligonucleotide
ccucgucuguuagguggau

SEQ ID NO: 16605 - RNA, 19 nt, Artificial Sequence
  Description of Artificial Sequence: Synthetic oligonucleotide
uuaguucacagacugaucg

SEQ ID NO: 16606 - RNA, 19 nt, Artificial Sequence
  Description of Artificial Sequence: Synthetic oligonucleotide
uguguguagaaacauagcc

SEQ ID NO: 16607 - RNA, 19 nt, Artificial Sequence
  Description of Artificial Sequence: Synthetic oligonucleotide
acugaucgaaaauucaccc

SEQ ID NO: 16608 - RNA, 19 nt, Artificial Sequence
  Description of Artificial Sequence: Synthetic oligonucleotide
aaacauaaaaccccgggcu

SEQ ID NO: 16609 - RNA, 19 nt, Artificial Sequence
  Description of Artificial Sequence: Synthetic oligonucleotide
aguaagaaggcuuccacuc

SEQ ID NO: 16610 - RNA, 19 nt, Artificial Sequence
  Description of Artificial Sequence: Synthetic oligonucleotide
uaugaaggccuuaagucgg

SEQ ID NO: 16611 - RNA, 19 nt, Artificial Sequence
  Description of Artificial Sequence: Synthetic oligonucleotide
gagacucuaaaacacgugg

SEQ ID NO: 16612 - RNA, 19 nt, Artificial Sequence
  Description of Artificial Sequence: Synthetic oligonucleotide
aagauacaggaacguaucc

SEQ ID NO: 16613 - RNA, 19 nt, Artificial Sequence
  Description of Artificial Sequence: Synthetic oligonucleotide
agauucucgaccuaaaaca

SEQ ID NO: 16614 - RNA, 19 nt, Artificial Sequence
  Description of Artificial Sequence: Synthetic oligonucleotide
ucuguagcgaacuagcuga

SEQ ID NO: 16615 - RNA, 19 nt, Artificial Sequence
  Description of Artificial Sequence: Synthetic oligonucleotide
caaaucaagucauacgggg

SEQ ID NO: 16616 - RNA, 19 nt, Artificial Sequence
  Description of Artificial Sequence: Synthetic oligonucleotide
uaaaccuaaaagcaacagc

SEQ ID NO: 16617 - RNA, 19 nt, Artificial Sequence
  Description of Artificial Sequence: Synthetic oligonucleotide
uaugcauacucguugagug

SEQ ID NO: 16618 - RNA, 19 nt, Artificial Sequence
  Description of Artificial Sequence: Synthetic oligonucleotide
ugggaaacguuacauaaag

SEQ ID NO: 16619 - RNA, 19 nt, Artificial Sequence
  Description of Artificial Sequence: Synthetic oligonucleotide
aacauaaaaccccgggcuc

SEQ ID NO: 16620 - RNA, 19 nt, Artificial Sequence
  Description of Artificial Sequence: Synthetic oligonucleotide
ggcaaaucaagucauacgg

SEQ ID NO: 16621 - RNA, 19 nt, Artificial Sequence
  Description of Artificial Sequence: Synthetic oligonucleotide
cugugaauagccaagacuc

SEQ ID NO: 16622 - RNA, 19 nt, Artificial Sequence
  Description of Artificial Sequence: Synthetic oligonucleotide
aauaggccauguuacagug

SEQ ID NO: 16623 - RNA, 19 nt, Artificial Sequence
  Description of Artificial Sequence: Synthetic oligonucleotide
uggccaauugcuuagacga

SEQ ID NO: 16624 - RNA, 19 nt, Artificial Sequence
  Description of Artificial Sequence: Synthetic oligonucleotide
uguauccuuaaugagagca

SEQ ID NO: 16625 - RNA, 19 nt, Artificial Sequence
  Description of Artificial Sequence: Synthetic oligonucleotide
ucagauuggacgaauaaua

SEQ ID NO: 16626 - RNA, 19 nt, Artificial Sequence
  Description of Artificial Sequence: Synthetic oligonucleotide
caucuaaagauucucgacc

SEQ ID NO: 16627 - RNA, 19 nt, Artificial Sequence
  Description of Artificial Sequence: Synthetic oligonucleotide
auuacuauugccugugugu

SEQ ID NO: 16628 - RNA, 19 nt, Artificial Sequence
  Description of Artificial Sequence: Synthetic oligonucleotide
uuaagucccuuaaaggggc

SEQ ID NO: 16629 - RNA, 19 nt, Artificial Sequence
  Description of Artificial Sequence: Synthetic oligonucleotide
uuuuggaggucauagcuca

SEQ ID NO: 16630 - RNA, 19 nt, Artificial Sequence
  Description of Artificial Sequence: Synthetic oligonucleotide
aaugaaauuucaggaguuc

SEQ ID NO: 16631 - RNA, 19 nt, Artificial Sequence
  Description of Artificial Sequence: Synthetic oligonucleotide
ucugguaugggaaacguua

SEQ ID NO: 16632 - RNA, 19 nt, Artificial Sequence
  Description of Artificial Sequence: Synthetic oligonucleotide
aaauaggccauguuacagu

SEQ ID NO: 16633 - RNA, 19 nt, Artificial Sequence
  Description of Artificial Sequence: Synthetic oligonucleotide
aagagaucgcauauacgcc

SEQ ID NO: 16634 - RNA, 19 nt, Artificial Sequence
  Description of Artificial Sequence: Synthetic oligonucleotide
aacguuacauaaagauucc

SEQ ID NO: 16635 - RNA, 19 nt, Artificial Sequence
  Description of Artificial Sequence: Synthetic oligonucleotide
acggcauguaaucauuuac

SEQ ID NO: 16636 - RNA, 19 nt, Artificial Sequence
  Description of Artificial Sequence: Synthetic oligonucleotide
aacaucgaaguaguaauug

SEQ ID NO: 16637 - RNA, 19 nt, Artificial Sequence
  Description of Artificial Sequence: Synthetic oligonucleotide
ugguauagcuucuugcuug

SEQ ID NO: 16638 - RNA, 19 nt, Artificial Sequence
  Description of Artificial Sequence: Synthetic oligonucleotide
ugucauguuaugaaccacu

SEQ ID NO: 16639 - RNA, 19 nt, Artificial Sequence
  Description of Artificial Sequence: Synthetic oligonucleotide
cacguuguuuggaaaaugg

SEQ ID NO: 16640 - RNA, 19 nt, Artificial Sequence
  Description of Artificial Sequence: Synthetic oligonucleotide
ucgaaaauucacccuagga

SEQ ID NO: 16641 - RNA, 19 nt, Artificial Sequence
  Description of Artificial Sequence: Synthetic oligonucleotide
guaaccguuuuauaucucc

SEQ ID NO: 16642 - RNA, 19 nt, Artificial Sequence
  Description of Artificial Sequence: Synthetic oligonucleotide
gaaauucaggcaaagggac

SEQ ID NO: 16643 - RNA, 19 nt, Artificial Sequence
  Description of Artificial Sequence: Synthetic oligonucleotide
uucucgaccuaaaacacaa

SEQ ID NO: 16644 - RNA, 19 nt, Artificial Sequence
  Description of Artificial Sequence: Synthetic oligonucleotide
ugauggauucaaauacuca

SEQ ID NO: 16645 - RNA, 19 nt, Artificial Sequence
  Description of Artificial Sequence: Synthetic oligonucleotide
auaagggaauuucucuuag

SEQ ID NO: 16646 - RNA, 19 nt, Artificial Sequence
  Description of Artificial Sequence: Synthetic oligonucleotide
guauuuagcacacucugca

SEQ ID NO: 16647 - RNA, 19 nt, Artificial Sequence
  Description of Artificial Sequence: Synthetic oligonucleotide
ugacgcacgccuaaucccg

SEQ ID NO: 16648 - RNA, 19 nt, Artificial Sequence
  Description of Artificial Sequence: Synthetic oligonucleotide
ugugcggucaguuuucccu

SEQ ID NO: 16649 - RNA, 19 nt, Artificial Sequence
  Description of Artificial Sequence: Synthetic oligonucleotide
agauuggacgaauaauaug

SEQ ID NO: 16650 - RNA, 19 nt, Artificial Sequence
  Description of Artificial Sequence: Synthetic oligonucleotide
uuugucgagucgacgaaug

SEQ ID NO: 16651 - RNA, 19 nt, Artificial Sequence
  Description of Artificial Sequence: Synthetic oligonucleotide
agcauucaaguccuugcac

SEQ ID NO: 16652 - RNA, 19 nt, Artificial Sequence
  Description of Artificial Sequence: Synthetic oligonucleotide
auguaaccguuuuauaucu

SEQ ID NO: 16653 - RNA, 19 nt, Artificial Sequence
  Description of Artificial Sequence: Synthetic oligonucleotide
ucgacgaauggcuagugcu

SEQ ID NO: 16654 - RNA, 19 nt, Artificial Sequence
  Description of Artificial Sequence: Synthetic oligonucleotide
uuuucgcaaaucucgcuug

SEQ ID NO: 16655 - RNA, 19 nt, Artificial Sequence
  Description of Artificial Sequence: Synthetic oligonucleotide
auucguaggaauaaauuca

SEQ ID NO: 16656 - RNA, 19 nt, Artificial Sequence
  Description of Artificial Sequence: Synthetic oligonucleotide
agaaacauagccacgcuug

SEQ ID NO: 16657 - RNA, 19 nt, Artificial Sequence
  Description of Artificial Sequence: Synthetic oligonucleotide
agagaucgcauauacgccu

SEQ ID NO: 16658 - RNA, 19 nt, Artificial Sequence
  Description of Artificial Sequence: Synthetic oligonucleotide
uuacucaacggcauguaau

SEQ ID NO: 16659 - RNA, 19 nt, Artificial Sequence
  Description of Artificial Sequence: Synthetic oligonucleotide
aaaauucguaggaauaaau

SEQ ID NO: 16660 - RNA, 19 nt, Artificial Sequence
  Description of Artificial Sequence: Synthetic oligonucleotide
aacaguugauauaagggaa

SEQ ID NO: 16661 - RNA, 19 nt, Artificial Sequence
  Description of Artificial Sequence: Synthetic oligonucleotide
aauaacacuuaaggcaaga

SEQ ID NO: 16662 - RNA, 19 nt, Artificial Sequence
  Description of Artificial Sequence: Synthetic oligonucleotide
aggucgagucucuagagug

SEQ ID NO: 16663 - RNA, 19 nt, Artificial Sequence
  Description of Artificial Sequence: Synthetic oligonucleotide
caggguaugacguugcauc

SEQ ID NO: 16664 - RNA, 19 nt, Artificial Sequence
  Description of Artificial Sequence: Synthetic oligonucleotide
ucuucucguguucugaauc

SEQ ID NO: 16665 - RNA, 19 nt, Artificial Sequence
  Description of Artificial Sequence: Synthetic oligonucleotide
aaccagaguauuaacccag

SEQ ID NO: 16666 - RNA, 19 nt, Artificial Sequence
  Description of Artificial Sequence: Synthetic oligonucleotide
uuaggucgagucucuagag

SEQ ID NO: 16667 - RNA, 19 nt, Artificial Sequence
  Description of Artificial Sequence: Synthetic oligonucleotide
ucgcauauacgccucuuug

SEQ ID NO: 16668 - RNA, 19 nt, Artificial Sequence
  Description of Artificial Sequence: Synthetic oligonucleotide
ugguuugucgagucgacga

SEQ ID NO: 16669 - RNA, 19 nt, Artificial Sequence
  Description of Artificial Sequence: Synthetic oligonucleotide
uucguaggaauaaauucau

SEQ ID NO: 16670 - RNA, 19 nt, Artificial Sequence
  Description of Artificial Sequence: Synthetic oligonucleotide
ccuggcaagaacauggacg

SEQ ID NO: 16671 - RNA, 19 nt, Artificial Sequence
  Description of Artificial Sequence: Synthetic oligonucleotide
acucaucuuuaguccaggc

SEQ ID NO: 16672 - RNA, 19 nt, Artificial Sequence
  Description of Artificial Sequence: Synthetic oligonucleotide
gacugaucgaaaauucacc

SEQ ID NO: 16673 - RNA, 19 nt, Artificial Sequence
  Description of Artificial Sequence: Synthetic oligonucleotide
uauuaacccagcccuuuga

SEQ ID NO: 16674 - RNA, 19 nt, Artificial Sequence
  Description of Artificial Sequence: Synthetic oligonucleotide
auagcaagccagaaacuac

SEQ ID NO: 16675 - RNA, 19 nt, Artificial Sequence
  Description of Artificial Sequence: Synthetic oligonucleotide
ucgaccuaaaacacaaaua

SEQ ID NO: 16676 - RNA, 19 nt, Artificial Sequence
  Description of Artificial Sequence: Synthetic oligonucleotide
aagauucuauuaggauacc

SEQ ID NO: 16677 - RNA, 19 nt, Artificial Sequence
  Description of Artificial Sequence: Synthetic oligonucleotide
aucgaaaauucacccuagg

SEQ ID NO: 16678 - RNA, 19 nt, Artificial Sequence
  Description of Artificial Sequence: Synthetic oligonucleotide
uacucaacggcauguaauc

SEQ ID NO: 16679 - RNA, 19 nt, Artificial Sequence
  Description of Artificial Sequence: Synthetic oligonucleotide
uugaguacacggcagucuc

SEQ ID NO: 16680 - RNA, 19 nt, Artificial Sequence
  Description of Artificial Sequence: Synthetic oligonucleotide
auccacggccaacauuucc

SEQ ID NO: 16681 - RNA, 19 nt, Artificial Sequence
  Description of Artificial Sequence: Synthetic oligonucleotide
uugucgagucgacgaaugg

SEQ ID NO: 16682 - RNA, 19 nt, Artificial Sequence
  Description of Artificial Sequence: Synthetic oligonucleotide
aacucaucuuuaguccagg

SEQ ID NO: 16683 - RNA, 19 nt, Artificial Sequence
  Description of Artificial Sequence: Synthetic oligonucleotide
ugagacaagcuuucggcaa

SEQ ID NO: 16684 - RNA, 19 nt, Artificial Sequence
  Description of Artificial Sequence: Synthetic oligonucleotide
uuaaugagagcaggguaug

SEQ ID NO: 16685 - RNA, 19 nt, Artificial Sequence
  Description of Artificial Sequence: Synthetic oligonucleotide
aaccguuuuauaucuccaa

SEQ ID NO: 16686 - RNA, 19 nt, Artificial Sequence
  Description of Artificial Sequence: Synthetic oligonucleotide
cgaaaauucacccuaggag

SEQ ID NO: 16687 - RNA, 19 nt, Artificial Sequence
  Description of Artificial Sequence: Synthetic oligonucleotide
uuucgcaaaucucgcuugc

SEQ ID NO: 16688 - RNA, 19 nt, Artificial Sequence
  Description of Artificial Sequence: Synthetic oligonucleotide
ugcuuggccaauugcuuag

SEQ ID NO: 16689 - RNA, 19 nt, Artificial Sequence
  Description of Artificial Sequence: Synthetic oligonucleotide
uggacggauacuuuauguc

SEQ ID NO: 16690 - RNA, 19 nt, Artificial Sequence
  Description of Artificial Sequence: Synthetic oligonucleotide
gaagacaauauagcccagc

SEQ ID NO: 16691 - RNA, 19 nt, Artificial Sequence
  Description of Artificial Sequence: Synthetic oligonucleotide
gaaccggucaggaugucag

SEQ ID NO: 16692 - RNA, 19 nt, Artificial Sequence
  Description of Artificial Sequence: Synthetic oligonucleotide
guuaggucgagucucuaga

SEQ ID NO: 16693 - RNA, 19 nt, Artificial Sequence
  Description of Artificial Sequence: Synthetic oligonucleotide
uucggagacugcuauguaa

SEQ ID NO: 16694 - RNA, 19 nt, Artificial Sequence
  Description of Artificial Sequence: Synthetic oligonucleotide
agcgaacuagcugacuugg

SEQ ID NO: 16695 - RNA, 19 nt, Artificial Sequence
  Description of Artificial Sequence: Synthetic oligonucleotide
ucugucgguuuacaggaaa

SEQ ID NO: 16696 - RNA, 19 nt, Artificial Sequence
  Description of Artificial Sequence: Synthetic oligonucleotide
ugucgagucgacgaauggc

SEQ ID NO: 16697 - RNA, 19 nt, Artificial Sequence
  Description of Artificial Sequence: Synthetic oligonucleotide
gaucgaaaauucacccuag

SEQ ID NO: 16698 - RNA, 19 nt, Artificial Sequence
  Description of Artificial Sequence: Synthetic oligonucleotide
gacaucgcagcaccacggg

SEQ ID NO: 16699 - RNA, 19 nt, Artificial Sequence
  Description of Artificial Sequence: Synthetic oligonucleotide
ggaaacuauugccacccgg

SEQ ID NO: 16700 - RNA, 19 nt, Artificial Sequence
  Description of Artificial Sequence: Synthetic oligonucleotide
aauauccuuaaugguacua

SEQ ID NO: 16701 - RNA, 19 nt, Artificial Sequence
  Description of Artificial Sequence: Synthetic oligonucleotide
ugacucacaccuucugaug

SEQ ID NO: 16702 - RNA, 19 nt, Artificial Sequence
  Description of Artificial Sequence: Synthetic oligonucleotide
uuacaucgaugccuucuug

SEQ ID NO: 16703 - RNA, 19 nt, Artificial Sequence
  Description of Artificial Sequence: Synthetic oligonucleotide
ugaaagauacaggaacgua

SEQ ID NO: 16704 - RNA, 19 nt, Artificial Sequence
  Description of Artificial Sequence: Synthetic oligonucleotide
cagcccggaaauuauuaag

SEQ ID NO: 16705 - RNA, 19 nt, Artificial Sequence
  Description of Artificial Sequence: Synthetic oligonucleotide
uuggauguauagccucgug

SEQ ID NO: 16706 - RNA, 19 nt, Artificial Sequence
  Description of Artificial Sequence: Synthetic oligonucleotide
gauguauagccucgugguc

SEQ ID NO: 16707 - RNA, 19 nt, Artificial Sequence
  Description of Artificial Sequence: Synthetic oligonucleotide
cagauuaaacaguugauau

SEQ ID NO: 16708 - RNA, 19 nt, Artificial Sequence
  Description of Artificial Sequence: Synthetic oligonucleotide
uugguuugucgagucgacg

SEQ ID NO: 16709 - RNA, 19 nt, Artificial Sequence
  Description of Artificial Sequence: Synthetic oligonucleotide
auaugcauacucguugagu

SEQ ID NO: 16710 - RNA, 19 nt, Artificial Sequence
  Description of Artificial Sequence: Synthetic oligonucleotide
uuacuauugccugugugua

SEQ ID NO: 16711 - RNA, 19 nt, Artificial Sequence
  Description of Artificial Sequence: Synthetic oligonucleotide
uacucguugagugagucuu

SEQ ID NO: 16712 - RNA, 19 nt, Artificial Sequence
  Description of Artificial Sequence: Synthetic oligonucleotide
accguuuuauaucuccaaa

SEQ ID NO: 16713 - RNA, 19 nt, Artificial Sequence
  Description of Artificial Sequence: Synthetic oligonucleotide
ggugacgcacgccuaaucc

SEQ ID NO: 16714 - RNA, 19 nt, Artificial Sequence
  Description of Artificial Sequence: Synthetic oligonucleotide
auaguauucuugugagaaa

SEQ ID NO: 16715 - RNA, 19 nt, Artificial Sequence
  Description of Artificial Sequence: Synthetic oligonucleotide
uauuaagagaucgcauaua

SEQ ID NO: 16716 - RNA, 19 nt, Artificial Sequence
  Description of Artificial Sequence: Synthetic oligonucleotide
guauuaacccagcccuuug

SEQ ID NO: 16717 - RNA, 19 nt, Artificial Sequence
  Description of Artificial Sequence: Synthetic oligonucleotide
aacgucugauaacucuuuu

SEQ ID NO: 16718 - RNA, 19 nt, Artificial Sequence
  Description of Artificial Sequence: Synthetic oligonucleotide
cauaugcauacucguugag

SEQ ID NO: 16719 - RNA, 19 nt, Artificial Sequence
  Description of Artificial Sequence: Synthetic oligonucleotide
ucagcccggaaauuauuaa

SEQ ID NO: 16720 - RNA, 19 nt, Artificial Sequence
  Description of Artificial Sequence: Synthetic oligonucleotide
ugucgguuuacaggaaacu

SEQ ID NO: 16721 - RNA, 19 nt, Artificial Sequence
  Description of Artificial Sequence: Synthetic oligonucleotide
auagccacgcuuguucuug

SEQ ID NO: 16722 - RNA, 19 nt, Artificial Sequence
  Description of Artificial Sequence: Synthetic oligonucleotide
accagaguauuaacccagc

SEQ ID NO: 16723 - RNA, 19 nt, Artificial Sequence
  Description of Artificial Sequence: Synthetic oligonucleotide
aggauauuuaagaggcaug

SEQ ID NO: 16724 - RNA, 19 nt, Artificial Sequence
  Description of Artificial Sequence: Synthetic oligonucleotide
augaugaaucgcaagcccu

SEQ ID NO: 16725 - RNA, 19 nt, Artificial Sequence
  Description of Artificial Sequence: Synthetic oligonucleotide
uguaaccguuuuauaucuc

SEQ ID NO: 16726 - RNA, 19 nt, Artificial Sequence
  Description of Artificial Sequence: Synthetic oligonucleotide
uggguuccauaccauugcu

SEQ ID NO: 16727 - RNA, 19 nt, Artificial Sequence
  Description of Artificial Sequence: Synthetic oligonucleotide
uugguuaggucgagucucu

SEQ ID NO: 16728 - RNA, 19 nt, Artificial Sequence
  Description of Artificial Sequence: Synthetic oligonucleotide
agacaucgcagcaccacgg

SEQ ID NO: 16729 - RNA, 19 nt, Artificial Sequence
  Description of Artificial Sequence: Synthetic oligonucleotide
uacgccucuuugauaauuu

SEQ ID NO: 16730 - RNA, 19 nt, Artificial Sequence
  Description of Artificial Sequence: Synthetic oligonucleotide
guaaguaagaaggcuucca

SEQ ID NO: 16731 - RNA, 19 nt, Artificial Sequence
  Description of Artificial Sequence: Synthetic oligonucleotide
cauggacggauacuuuaug

SEQ ID NO: 16732 - RNA, 19 nt, Artificial Sequence
  Description of Artificial Sequence: Synthetic oligonucleotide
auaggccauguuacagugc

SEQ ID NO: 16733 - RNA, 19 nt, Artificial Sequence
  Description of Artificial Sequence: Synthetic oligonucleotide
agacgagaaggaaaugaug

SEQ ID NO: 16734 - RNA, 19 nt, Artificial Sequence
  Description of Artificial Sequence: Synthetic oligonucleotide
cauacggggcagucaaaug

SEQ ID NO: 16735 - RNA, 19 nt, Artificial Sequence
  Description of Artificial Sequence: Synthetic oligonucleotide
gguuaggucgagucucuag

SEQ ID NO: 16736 - RNA, 19 nt, Artificial Sequence
  Description of Artificial Sequence: Synthetic oligonucleotide
augauuuaguucacagacu

SEQ ID NO: 16737 - RNA, 19 nt, Artificial Sequence
  Description of Artificial Sequence: Synthetic oligonucleotide
gacucuaaaacacguggau

SEQ ID NO: 16738 - RNA, 19 nt, Artificial Sequence
  Description of Artificial Sequence: Synthetic oligonucleotide
agacucuaaaacacgugga

SEQ ID NO: 16739 - RNA, 19 nt, Artificial Sequence
  Description of Artificial Sequence: Synthetic oligonucleotide
cuuggugcauccacggcca

SEQ ID NO: 16740 - RNA, 19 nt, Artificial Sequence
  Description of Artificial Sequence: Synthetic oligonucleotide
ucaccgggagacucuaaaa

SEQ ID NO: 16741 - RNA, 19 nt, Artificial Sequence
  Description of Artificial Sequence: Synthetic oligonucleotide
ccggaaauuauuaagagau

SEQ ID NO: 16742 - RNA, 19 nt, Artificial Sequence
  Description of Artificial Sequence: Synthetic oligonucleotide
acaguugauauaagggaau

SEQ ID NO: 16743 - RNA, 19 nt, Artificial Sequence
  Description of Artificial Sequence: Synthetic oligonucleotide
acucuaaaacacguggaua

SEQ ID NO: 16744 - RNA, 19 nt, Artificial Sequence
  Description of Artificial Sequence: Synthetic oligonucleotide
gucgacgaauggcuagugc

SEQ ID NO: 16745 - RNA, 19 nt, Artificial Sequence
  Description of Artificial Sequence: Synthetic oligonucleotide
aguauuaacccagcccuuu

SEQ ID NO: 16746 - RNA, 19 nt, Artificial Sequence
  Description of Artificial Sequence: Synthetic oligonucleotide
caugcccaauuagaugacc

SEQ ID NO: 16747 - RNA, 19 nt, Artificial Sequence
  Description of Artificial Sequence: Synthetic oligonucleotide
ucguugagugagucuuuga

SEQ ID NO: 16748 - RNA, 19 nt, Artificial Sequence
  Description of Artificial Sequence: Synthetic oligonucleotide
ggauguauagccucguggu

SEQ ID NO: 16749 - RNA, 19 nt, Artificial Sequence
  Description of Artificial Sequence: Synthetic oligonucleotide
auucucgaccuaaaacaca

SEQ ID NO: 16750 - RNA, 19 nt, Artificial Sequence
  Description of Artificial Sequence: Synthetic oligonucleotide
aaacauagccacgcuuguu

SEQ ID NO: 16751 - RNA, 19 nt, Artificial Sequence
  Description of Artificial Sequence: Synthetic oligonucleotide
caaaauucguaggaauaaa

SEQ ID NO: 16752 - RNA, 19 nt, Artificial Sequence
  Description of Artificial Sequence: Synthetic oligonucleotide
aucgcauauacgccucuuu

SEQ ID NO: 16753 - RNA, 19 nt, Artificial Sequence
  Description of Artificial Sequence: Synthetic oligonucleotide
auguuacagugcaaggggu

SEQ ID NO: 16754 - RNA, 19 nt, Artificial Sequence
  Description of Artificial Sequence: Synthetic oligonucleotide
gcauaugcauacucguuga

SEQ ID NO: 16755 - RNA, 19 nt, Artificial Sequence
  Description of Artificial Sequence: Synthetic oligonucleotide
uguagcgaacuagcugacu

SEQ ID NO: 16756 - RNA, 19 nt, Artificial Sequence
  Description of Artificial Sequence: Synthetic oligonucleotide
ucucgaccuaaaacacaaa

SEQ ID NO: 16757 - RNA, 19 nt, Artificial Sequence
  Description of Artificial Sequence: Synthetic oligonucleotide
acacguggauagaagacau

SEQ ID NO: 16758 - RNA, 19 nt, Artificial Sequence
  Description of Artificial Sequence: Synthetic oligonucleotide
ucgagucgacgaauggcua

SEQ ID NO: 16759 - RNA, 19 nt, Artificial Sequence
  Description of Artificial Sequence: Synthetic oligonucleotide
gggaggguaacaucgucca

SEQ ID NO: 16760 - RNA, 19 nt, Artificial Sequence
  Description of Artificial Sequence: Synthetic oligonucleotide
acguuacauaaagauuccu

SEQ ID NO: 16761 - RNA, 19 nt, Artificial Sequence
  Description of Artificial Sequence: Synthetic oligonucleotide
agaggcuuggugugagcau

SEQ ID NO: 16762 - RNA, 19 nt, Artificial Sequence
  Description of Artificial Sequence: Synthetic oligonucleotide
ggacggauacuuuaugucu

SEQ ID NO: 16763 - RNA, 19 nt, Artificial Sequence
  Description of Artificial Sequence: Synthetic oligonucleotide
acgaauggcuagugcuuga

SEQ ID NO: 16764 - RNA, 19 nt, Artificial Sequence
  Description of Artificial Sequence: Synthetic oligonucleotide
ugccacaguuauugugaac

SEQ ID NO: 16765 - RNA, 19 nt, Artificial Sequence
  Description of Artificial Sequence: Synthetic oligonucleotide
aaaccccgggcuccuuccu

SEQ ID NO: 16766 - RNA, 19 nt, Artificial Sequence
  Description of Artificial Sequence: Synthetic oligonucleotide
cuccgaggugcucugcaug

SEQ ID NO: 16767 - RNA, 19 nt, Artificial Sequence
  Description of Artificial Sequence: Synthetic oligonucleotide
gcugcauagucacgcuggg

SEQ ID NO: 16768 - RNA, 19 nt, Artificial Sequence
  Description of Artificial Sequence: Synthetic oligonucleotide
cucgaccuaaaacacaaau

SEQ ID NO: 16769 - RNA, 19 nt, Artificial Sequence
  Description of Artificial Sequence: Synthetic oligonucleotide
gagaucgcauauacgccuc

SEQ ID NO: 16770 - RNA, 19 nt, Artificial Sequence
  Description of Artificial Sequence: Synthetic oligonucleotide
cuguagcgaacuagcugac

SEQ ID NO: 16771 - RNA, 19 nt, Artificial Sequence
  Description of Artificial Sequence: Synthetic oligonucleotide
ccagaguauuaacccagcc

SEQ ID NO: 16772 - RNA, 19 nt, Artificial Sequence
  Description of Artificial Sequence: Synthetic oligonucleotide
cagauuggacgaauaauau

SEQ ID NO: 16773 - RNA, 19 nt, Artificial Sequence
  Description of Artificial Sequence: Synthetic oligonucleotide
uucugucgguuuacaggaa

SEQ ID NO: 16774 - RNA, 19 nt, Artificial Sequence
  Description of Artificial Sequence: Synthetic oligonucleotide
gacgcacgccuaaucccgg

SEQ ID NO: 16775 - RNA, 19 nt, Artificial Sequence
  Description of Artificial Sequence: Synthetic oligonucleotide
acccgcugagaugaaccgg

SEQ ID NO: 16776 - RNA, 19 nt, Artificial Sequence
  Description of Artificial Sequence: Synthetic oligonucleotide
augaugacucacaccuucu

SEQ ID NO: 16777 - RNA, 19 nt, Artificial Sequence
  Description of Artificial Sequence: Synthetic oligonucleotide
cauauacgccucuuugaua

SEQ ID NO: 16778 - RNA, 19 nt, Artificial Sequence
  Description of Artificial Sequence: Synthetic oligonucleotide
ggagacucuaaaacacgug

SEQ ID NO: 16779 - RNA, 19 nt, Artificial Sequence
  Description of Artificial Sequence: Synthetic oligonucleotide
ucgagucucuagaguguau

SEQ ID NO: 16780 - RNA, 19 nt, Artificial Sequence
  Description of Artificial Sequence: Synthetic oligonucleotide
caagucgggucuaaauucu

SEQ ID NO: 16781 - RNA, 19 nt, Artificial Sequence
  Description of Artificial Sequence: Synthetic oligonucleotide
acauggacggauacuuuau

SEQ ID NO: 16782 - RNA, 19 nt, Artificial Sequence
  Description of Artificial Sequence: Synthetic oligonucleotide
auuggacgaauaauaugua

SEQ ID NO: 16783 - RNA, 19 nt, Artificial Sequence
  Description of Artificial Sequence: Synthetic oligonucleotide
aagucccuuaaaggggcaa

SEQ ID NO: 16784 - RNA, 19 nt, Artificial Sequence
  Description of Artificial Sequence: Synthetic oligonucleotide
cacgcuugaacucugucau

SEQ ID NO: 16785 - RNA, 19 nt, Artificial Sequence
  Description of Artificial Sequence: Synthetic oligonucleotide
gucgguuuacaggaaacua

SEQ ID NO: 16786 - RNA, 19 nt, Artificial Sequence
  Description of Artificial Sequence: Synthetic oligonucleotide
gacgaauaauauguagaau

SEQ ID NO: 16787 - RNA, 19 nt, Artificial Sequence
  Description of Artificial Sequence: Synthetic oligonucleotide
augugcagccgugacagua

SEQ ID NO: 16788 - RNA, 19 nt, Artificial Sequence
  Description of Artificial Sequence: Synthetic oligonucleotide
cacguggauagaagacauc

SEQ ID NO: 16789 - RNA, 19 nt, Artificial Sequence
  Description of Artificial Sequence: Synthetic oligonucleotide
auacgccucuuugauaauu

SEQ ID NO: 16790 - RNA, 19 nt, Artificial Sequence
  Description of Artificial Sequence: Synthetic oligonucleotide
gucgagucgacgaauggcu

SEQ ID NO: 16791 - RNA, 19 nt, Artificial Sequence
  Description of Artificial Sequence: Synthetic oligonucleotide
agucccuuaaaggggcaaa

SEQ ID NO: 16792 - RNA, 19 nt, Artificial Sequence
  Description of Artificial Sequence: Synthetic oligonucleotide
cucaacggcauguaaucau

SEQ ID NO: 16793 - RNA, 19 nt, Artificial Sequence
  Description of Artificial Sequence: Synthetic oligonucleotide
cgguuuacaggaaacuauc

SEQ ID NO: 16794 - RNA, 19 nt, Artificial Sequence
  Description of Artificial Sequence: Synthetic oligonucleotide
uagccacgcuuguucuuga

SEQ ID NO: 16795 - RNA, 19 nt, Artificial Sequence
  Description of Artificial Sequence: Synthetic oligonucleotide
cugcauagucacgcugggc

SEQ ID NO: 16796 - RNA, 19 nt, Artificial Sequence
  Description of Artificial Sequence: Synthetic oligonucleotide
ggaggguaacaucguccag

SEQ ID NO: 16797 - RNA, 19 nt, Artificial Sequence
  Description of Artificial Sequence: Synthetic oligonucleotide
cagcaugucuaaucagcaa

SEQ ID NO: 16798 - RNA, 19 nt, Artificial Sequence
  Description of Artificial Sequence: Synthetic oligonucleotide
aagucgggucuaaauucuu

SEQ ID NO: 16799 - RNA, 19 nt, Artificial Sequence
  Description of Artificial Sequence: Synthetic oligonucleotide
gcauauacgccucuuugau

SEQ ID NO: 16800 - RNA, 19 nt, Artificial Sequence
  Description of Artificial Sequence: Synthetic oligonucleotide
gguuugucgagucgacgaa

SEQ ID NO: 16801 - RNA, 19 nt, Artificial Sequence
  Description of Artificial Sequence: Synthetic oligonucleotide
cucaggcccgcuagcucug

SEQ ID NO: 16802 - RNA, 19 nt, Artificial Sequence
  Description of Artificial Sequence: Synthetic oligonucleotide
gccaauugcuuagacgaga

SEQ ID NO: 16803 - RNA, 19 nt, Artificial Sequence
  Description of Artificial Sequence: Synthetic oligonucleotide
gcucagagauaaucugaca

SEQ ID NO: 16804 - RNA, 19 nt, Artificial Sequence
  Description of Artificial Sequence: Synthetic oligonucleotide
cuuacaucgaugccuucuu

SEQ ID NO: 16805 - RNA, 19 nt, Artificial Sequence
  Description of Artificial Sequence: Synthetic oligonucleotide
auacccuucugcagauuaa

SEQ ID NO: 16806 - RNA, 19 nt, Artificial Sequence
  Description of Artificial Sequence: Synthetic oligonucleotide
cgagucgacgaauggcuag

SEQ ID NO: 16807 - RNA, 19 nt, Artificial Sequence
  Description of Artificial Sequence: Synthetic oligonucleotide
gggaaacguuacauaaaga

SEQ ID NO: 16808 - RNA, 19 nt, Artificial Sequence
  Description of Artificial Sequence: Synthetic oligonucleotide
uggcaagaacauggacgga

SEQ ID NO: 16809 - RNA, 19 nt, Artificial Sequence
  Description of Artificial Sequence: Synthetic oligonucleotide
gguaugacguugcaucuuu

SEQ ID NO: 16810 - RNA, 19 nt, Artificial Sequence
  Description of Artificial Sequence: Synthetic oligonucleotide
augaaccggucaggauguc

SEQ ID NO: 16811 - RNA, 19 nt, Artificial Sequence
  Description of Artificial Sequence: Synthetic oligonucleotide
caggcgucguucaucacau

SEQ ID NO: 16812 - RNA, 19 nt, Artificial Sequence
  Description of Artificial Sequence: Synthetic oligonucleotide
gucgagucucuagagugua

SEQ ID NO: 16813 - RNA, 19 nt, Artificial Sequence
  Description of Artificial Sequence: Synthetic oligonucleotide
gcacgccuaaucccggcac

SEQ ID NO: 16814 - RNA, 19 nt, Artificial Sequence
  Description of Artificial Sequence: Synthetic oligonucleotide
cgcauauacgccucuuuga

SEQ ID NO: 16815 - RNA, 19 nt, Artificial Sequence
  Description of Artificial Sequence: Synthetic oligonucleotide
cugguauagcuucuugcuu

SEQ ID NO: 16816 - RNA, 19 nt, Artificial Sequence
  Description of Artificial Sequence: Synthetic oligonucleotide
ugguuaggucgagucucua

SEQ ID NO: 16817 - RNA, 19 nt, Artificial Sequence
  Description of Artificial Sequence: Synthetic oligonucleotide
guuugucgagucgacgaau

SEQ ID NO: 16818 - RNA, 19 nt, Artificial Sequence
  Description of Artificial Sequence: Synthetic oligonucleotide
cugcacguagcuucugaau

SEQ ID NO: 16819 - RNA, 19 nt, Artificial Sequence
  Description of Artificial Sequence: Synthetic oligonucleotide
cuuggauguauagccucgu

SEQ ID NO: 16820 - RNA, 19 nt, Artificial Sequence
  Description of Artificial Sequence: Synthetic oligonucleotide
gggugacgcacgccuaauc

SEQ ID NO: 16821 - RNA, 19 nt, Artificial Sequence
  Description of Artificial Sequence: Synthetic oligonucleotide
acgccuaaucccggcacuu

SEQ ID NO: 16822 - RNA, 19 nt, Artificial Sequence
  Description of Artificial Sequence: Synthetic oligonucleotide
gaguauuaacccagcccuu

SEQ ID NO: 16823 - RNA, 19 nt, Artificial Sequence
  Description of Artificial Sequence: Synthetic oligonucleotide
cacgccuaaucccggcacu

SEQ ID NO: 16824 - RNA, 19 nt, Artificial Sequence
  Description of Artificial Sequence: Synthetic oligonucleotide
caguuuacucauggcugua

SEQ ID NO: 16825 - RNA, 19 nt, Artificial Sequence
  Description of Artificial Sequence: Synthetic oligonucleotide
cauagccacgcuuguucuu

SEQ ID NO: 16826 - RNA, 19 nt, Artificial Sequence
  Description of Artificial Sequence: Synthetic oligonucleotide
gcgaacuagcugacuugga

SEQ ID NO: 16827 - RNA, 19 nt, Artificial Sequence
  Description of Artificial Sequence: Synthetic oligonucleotide
gggaaacaucgaaguagua

SEQ ID NO: 16828 - RNA, 19 nt, Artificial Sequence
  Description of Artificial Sequence: Synthetic oligonucleotide
guaugacguugcaucuuuu

SEQ ID NO: 16829 - RNA, 19 nt, Artificial Sequence
  Description of Artificial Sequence: Synthetic oligonucleotide
gcaggguaugacguugcau

SEQ ID NO: 16830 - RNA, 19 nt, Artificial Sequence
  Description of Artificial Sequence: Synthetic oligonucleotide
cuggacccgcugagaugaa

SEQ ID NO: 16831 - RNA, 19 nt, Artificial Sequence
  Description of Artificial Sequence: Synthetic oligonucleotide
gcccgcuagcucugcugca

SEQ ID NO: 16832 - RNA, 19 nt, Artificial Sequence
  Description of Artificial Sequence: Synthetic oligonucleotide
gcgcaggguguugaagcaa

SEQ ID NO: 16833 - RNA, 19 nt, Artificial Sequence
  Description of Artificial Sequence: Synthetic oligonucleotide
ggguaugacguugcaucuu

SEQ ID NO: 16834 - RNA, 19 nt, Artificial Sequence
  Description of Artificial Sequence: Synthetic oligonucleotide
cgccuaaucccggcacuug

SEQ ID NO: 16835 - RNA, 19 nt, Artificial Sequence
  Description of Artificial Sequence: Synthetic oligonucleotide
ccgaggugcucugcauguc

SEQ ID NO: 16836 - RNA, 19 nt, Artificial Sequence
  Description of Artificial Sequence: Synthetic oligonucleotide
cccagcccugaaagauaca

SEQ ID NO: 16837 - RNA, 19 nt, Artificial Sequence
  Description of Artificial Sequence: Synthetic oligonucleotide
gcgcuucugacaaguuuau

SEQ ID NO: 16838 - RNA, 19 nt, Artificial Sequence
  Description of Artificial Sequence: Synthetic oligonucleotide
ccacggccaacauuuccuu

SEQ ID NO: 16839 - RNA, 19 nt, Artificial Sequence
  Description of Artificial Sequence: Synthetic oligonucleotide
ccucguggucucucuuuau

SEQ ID NO: 16840 - RNA, 19 nt, Artificial Sequence
  Description of Artificial Sequence: Synthetic oligonucleotide
ggccacgcuugaacucugu

SEQ ID NO: 16841 - RNA, 19 nt, Artificial Sequence
  Description of Artificial Sequence: Synthetic oligonucleotide
cggauacuuuaugucuccu

SEQ ID NO: 16842 - RNA, 19 nt, Artificial Sequence
  Description of Artificial Sequence: Synthetic oligonucleotide
gcggggugacgcacgccua

SEQ ID NO: 16843 - RNA, 19 nt, Artificial Sequence
  Description of Artificial Sequence: Synthetic oligonucleotide
cccgcuagcucugcugcau

SEQ ID NO: 16844 - RNA, 19 nt, Artificial Sequence
  Description of Artificial Sequence: Synthetic oligonucleotide
ucaauuaagaccugaacag

SEQ ID NO: 16845 - RNA, 19 nt, Artificial Sequence
  Description of Artificial Sequence: Synthetic oligonucleotide
uuuauaaacugagaggugg

SEQ ID NO: 16846 - RNA, 19 nt, Artificial Sequence
  Description of Artificial Sequence: Synthetic oligonucleotide
ucgauguauauuuuggucg

SEQ ID NO: 16847 - RNA, 19 nt, Artificial Sequence
  Description of Artificial Sequence: Synthetic oligonucleotide
uuaauauacuccauaacac

SEQ ID NO: 16848 - RNA, 19 nt, Artificial Sequence
  Description of Artificial Sequence: Synthetic oligonucleotide
aaacucauaugcacgaucc

SEQ ID NO: 16849 - RNA, 19 nt, Artificial Sequence
  Description of Artificial Sequence: Synthetic oligonucleotide
uugaauaguaagcaguucu

SEQ ID NO: 16850 - RNA, 19 nt, Artificial Sequence
  Description of Artificial Sequence: Synthetic oligonucleotide
aaaucgaucacagacgaug

SEQ ID NO: 16851 - RNA, 19 nt, Artificial Sequence
  Description of Artificial Sequence: Synthetic oligonucleotide
uguucgaguacuauuagcu

SEQ ID NO: 16852 - RNA, 19 nt, Artificial Sequence
  Description of Artificial Sequence: Synthetic oligonucleotide
auauagacgauccaagucu

SEQ ID NO: 16853 - RNA, 19 nt, Artificial Sequence
  Description of Artificial Sequence: Synthetic oligonucleotide
uguacuacaauaugaaguc

SEQ ID NO: 16854 - RNA, 19 nt, Artificial Sequence
  Description of Artificial Sequence: Synthetic oligonucleotide
gauuauggcauuaucauac

SEQ ID NO: 16855 - RNA, 19 nt, Artificial Sequence
  Description of Artificial Sequence: Synthetic oligonucleotide
aucaguagagaauugaccu

SEQ ID NO: 16856 - RNA, 19 nt, Artificial Sequence
  Description of Artificial Sequence: Synthetic oligonucleotide
ugaauacagaguuaucaag

SEQ ID NO: 16857 - RNA, 19 nt, Artificial Sequence
  Description of Artificial Sequence: Synthetic oligonucleotide
aggaaagucauuuugugcu

SEQ ID NO: 16858 - RNA, 19 nt, Artificial Sequence
  Description of Artificial Sequence: Synthetic oligonucleotide
agcguccaaaguuagaaac

SEQ ID NO: 16859 - RNA, 19 nt, Artificial Sequence
  Description of Artificial Sequence: Synthetic oligonucleotide
ucuauugauguucguagag

SEQ ID NO: 16860 - RNA, 19 nt, Artificial Sequence
  Description of Artificial Sequence: Synthetic oligonucleotide
guaauaaagagguuguuca

SEQ ID NO: 16861 - RNA, 19 nt, Artificial Sequence
  Description of Artificial Sequence: Synthetic oligonucleotide
auaaacgaugggcugaguc

SEQ ID NO: 16862 - RNA, 19 nt, Artificial Sequence
  Description of Artificial Sequence: Synthetic oligonucleotide
ucaaaucgaucacagacga

SEQ ID NO: 16863 - RNA, 19 nt, Artificial Sequence
  Description of Artificial Sequence: Synthetic oligonucleotide
uaauuuauccaccuugguc

SEQ ID NO: 16864 - RNA, 19 nt, Artificial Sequence
  Description of Artificial Sequence: Synthetic oligonucleotide
cauagagguggauauaacc

SEQ ID NO: 16865 - RNA, 19 nt, Artificial Sequence
  Description of Artificial Sequence: Synthetic oligonucleotide
cauacguguggaaucaugg

SEQ ID NO: 16866 - RNA, 19 nt, Artificial Sequence
  Description of Artificial Sequence: Synthetic oligonucleotide
ugauaaguuccucuaauuc

SEQ ID NO: 16867 - RNA, 19 nt, Artificial Sequence
  Description of Artificial Sequence: Synthetic oligonucleotide
accuuaggaauauucacuc

SEQ ID NO: 16868 - RNA, 19 nt, Artificial Sequence
  Description of Artificial Sequence: Synthetic oligonucleotide
caucuauugauguucguag

SEQ ID NO: 16869 - RNA, 19 nt, Artificial Sequence
  Description of Artificial Sequence: Synthetic oligonucleotide
uuuauucgggacauuggcc

SEQ ID NO: 16870 - RNA, 19 nt, Artificial Sequence
  Description of Artificial Sequence: Synthetic oligonucleotide
ucgguaaacauucccaugu

SEQ ID NO: 16871 - RNA, 19 nt, Artificial Sequence
  Description of Artificial Sequence: Synthetic oligonucleotide
uccggaaaauagcaaaugc

SEQ ID NO: 16872 - RNA, 19 nt, Artificial Sequence
  Description of Artificial Sequence: Synthetic oligonucleotide
aucgcguccuuguaaaggc

SEQ ID NO: 16873 - RNA, 19 nt, Artificial Sequence
  Description of Artificial Sequence: Synthetic oligonucleotide
uaguaaauacauacgugug

SEQ ID NO: 16874 - RNA, 19 nt, Artificial Sequence
  Description of Artificial Sequence: Synthetic oligonucleotide
uguucguagagccugguaa

SEQ ID NO: 16875 - RNA, 19 nt, Artificial Sequence
  Description of Artificial Sequence: Synthetic oligonucleotide
cuuuauucgggacauuggc

SEQ ID NO: 16876 - RNA, 19 nt, Artificial Sequence
  Description of Artificial Sequence: Synthetic oligonucleotide
gucguaaugucauugugag

SEQ ID NO: 16877 - RNA, 19 nt, Artificial Sequence
  Description of Artificial Sequence: Synthetic oligonucleotide
agguuacaagaacacaugg

SEQ ID NO: 16878 - RNA, 19 nt, Artificial Sequence
  Description of Artificial Sequence: Synthetic oligonucleotide
uuuccacuaguauuggcag

SEQ ID NO: 16879 - RNA, 19 nt, Artificial Sequence
  Description of Artificial Sequence: Synthetic oligonucleotide
guucuaaugaugcggaaug

SEQ ID NO: 16880 - RNA, 19 nt, Artificial Sequence
  Description of Artificial Sequence: Synthetic oligonucleotide
auguucgaguacuauuagc

SEQ ID NO: 16881 - RNA, 19 nt, Artificial Sequence
  Description of Artificial Sequence: Synthetic oligonucleotide
ugcggaaugugaaaauaag

SEQ ID NO: 16882 - RNA, 19 nt, Artificial Sequence
  Description of Artificial Sequence: Synthetic oligonucleotide
agugaucuaaaacaccaca

SEQ ID NO: 16883 - RNA, 19 nt, Artificial Sequence
  Description of Artificial Sequence: Synthetic oligonucleotide
uuuuaauauagacgaucca

SEQ ID NO: 16884 - RNA, 19 nt, Artificial Sequence
  Description of Artificial Sequence: Synthetic oligonucleotide
auauugugccuccaugccg

SEQ ID NO: 16885 - RNA, 19 nt, Artificial Sequence
  Description of Artificial Sequence: Synthetic oligonucleotide
uguaauaaagagguuguuc

SEQ ID NO: 16886 - RNA, 19 nt, Artificial Sequence
  Description of Artificial Sequence: Synthetic oligonucleotide
cacucagugaucuaaaaca

SEQ ID NO: 16887 - RNA, 19 nt, Artificial Sequence
  Description of Artificial Sequence: Synthetic oligonucleotide
uagagaauugaccucucac

SEQ ID NO: 16888 - RNA, 19 nt, Artificial Sequence
  Description of Artificial Sequence: Synthetic oligonucleotide
aaacgaugggcugagucuc

SEQ ID NO: 16889 - RNA, 19 nt, Artificial Sequence
  Description of Artificial Sequence: Synthetic oligonucleotide
uuacugucgauguauauuu

SEQ ID NO: 16890 - RNA, 19 nt, Artificial Sequence
  Description of Artificial Sequence: Synthetic oligonucleotide
ugaucuaaaacaccacaau

SEQ ID NO: 16891 - RNA, 19 nt, Artificial Sequence
  Description of Artificial Sequence: Synthetic oligonucleotide
aacacguguucggucagcc

SEQ ID NO: 16892 - RNA, 19 nt, Artificial Sequence
  Description of Artificial Sequence: Synthetic oligonucleotide
acguguggaaucauggugc

SEQ ID NO: 16893 - RNA, 19 nt, Artificial Sequence
  Description of Artificial Sequence: Synthetic oligonucleotide
uggccuuaaaagaucauaa

SEQ ID NO: 16894 - RNA, 19 nt, Artificial Sequence
  Description of Artificial Sequence: Synthetic oligonucleotide
aucauaacaacggucacca

SEQ ID NO: 16895 - RNA, 19 nt, Artificial Sequence
  Description of Artificial Sequence: Synthetic oligonucleotide
uauugugccuccaugccgu

SEQ ID NO: 16896 - RNA, 19 nt, Artificial Sequence
  Description of Artificial Sequence: Synthetic oligonucleotide
agcucuacgcucuguuucc

SEQ ID NO: 16897 - RNA, 19 nt, Artificial Sequence
  Description of Artificial Sequence: Synthetic oligonucleotide
aguuugaccuggcugagcu

SEQ ID NO: 16898 - RNA, 19 nt, Artificial Sequence
  Description of Artificial Sequence: Synthetic oligonucleotide
aauaugcugauuaguguug

SEQ ID NO: 16899 - RNA, 19 nt, Artificial Sequence
  Description of Artificial Sequence: Synthetic oligonucleotide
uaugagcauuauuuggccc

SEQ ID NO: 16900 - RNA, 19 nt, Artificial Sequence
  Description of Artificial Sequence: Synthetic oligonucleotide
accucucacaacgagaauc

SEQ ID NO: 16901 - RNA, 19 nt, Artificial Sequence
  Description of Artificial Sequence: Synthetic oligonucleotide
aaggguagaugccaagcgu

SEQ ID NO: 16902 - RNA, 19 nt, Artificial Sequence
  Description of Artificial Sequence: Synthetic oligonucleotide
ugauguaaggaauuauguu

SEQ ID NO: 16903 - RNA, 19 nt, Artificial Sequence
  Description of Artificial Sequence: Synthetic oligonucleotide
ucacaauagauugaauagu

SEQ ID NO: 16904 - RNA, 19 nt, Artificial Sequence
  Description of Artificial Sequence: Synthetic oligonucleotide
uaauuauccaggcgguuaa

SEQ ID NO: 16905 - RNA, 19 nt, Artificial Sequence
  Description of Artificial Sequence: Synthetic oligonucleotide
ggcgauuuguuuuagccag

SEQ ID NO: 16906 - RNA, 19 nt, Artificial Sequence
  Description of Artificial Sequence: Synthetic oligonucleotide
acgagugugauccaaccgu

SEQ ID NO: 16907 - RNA, 19 nt, Artificial Sequence
  Description of Artificial Sequence: Synthetic oligonucleotide
ucuaaugaugcggaaugug

SEQ ID NO: 16908 - RNA, 19 nt, Artificial Sequence
  Description of Artificial Sequence: Synthetic oligonucleotide
caggcgguuaauauacucc

SEQ ID NO: 16909 - RNA, 19 nt, Artificial Sequence
  Description of Artificial Sequence: Synthetic oligonucleotide
ugcgcauaacauuucucag

SEQ ID NO: 16910 - RNA, 19 nt, Artificial Sequence
  Description of Artificial Sequence: Synthetic oligonucleotide
caaggguagaugccaagcg

SEQ ID NO: 16911 - RNA, 19 nt, Artificial Sequence
  Description of Artificial Sequence: Synthetic oligonucleotide
aacgaagaucguuucucca

SEQ ID NO: 16912 - RNA, 19 nt, Artificial Sequence
  Description of Artificial Sequence: Synthetic oligonucleotide
uguacacucagugaucuaa

SEQ ID NO: 16913 - RNA, 19 nt, Artificial Sequence
  Description of Artificial Sequence: Synthetic oligonucleotide
ucauaugcacgauccaagu

SEQ ID NO: 16914 - RNA, 19 nt, Artificial Sequence
  Description of Artificial Sequence: Synthetic oligonucleotide
cuauugauguucguagagc

SEQ ID NO: 16915 - RNA, 19 nt, Artificial Sequence
  Description of Artificial Sequence: Synthetic oligonucleotide
uaugcacgauccaaguuuc

SEQ ID NO: 16916 - RNA, 19 nt, Artificial Sequence
  Description of Artificial Sequence: Synthetic oligonucleotide
uuauccaggcgguuaauau

SEQ ID NO: 16917 - RNA, 19 nt, Artificial Sequence
  Description of Artificial Sequence: Synthetic oligonucleotide
ugauguucguagagccugg

SEQ ID NO: 16918 - RNA, 19 nt, Artificial Sequence
  Description of Artificial Sequence: Synthetic oligonucleotide
ugauaguaguugauaaguu

SEQ ID NO: 16919 - RNA, 19 nt, Artificial Sequence
  Description of Artificial Sequence: Synthetic oligonucleotide
cuacgcucuguuuccagcg

SEQ ID NO: 16920 - RNA, 19 nt, Artificial Sequence
  Description of Artificial Sequence: Synthetic oligonucleotide
ugaugcgcauaacauuucu

SEQ ID NO: 16921 - RNA, 19 nt, Artificial Sequence
  Description of Artificial Sequence: Synthetic oligonucleotide
ugaagguuguuucuauaua

SEQ ID NO: 16922 - RNA, 19 nt, Artificial Sequence
  Description of Artificial Sequence: Synthetic oligonucleotide
auaugcgcaauggggaaac

SEQ ID NO: 16923 - RNA, 19 nt, Artificial Sequence
  Description of Artificial Sequence: Synthetic oligonucleotide
aguaacgaagaucguuucu

SEQ ID NO: 16924 - RNA, 19 nt, Artificial Sequence
  Description of Artificial Sequence: Synthetic oligonucleotide
ucuacacaacucuaaggau

SEQ ID NO: 16925 - RNA, 19 nt, Artificial Sequence
  Description of Artificial Sequence: Synthetic oligonucleotide
uuauggcauuaucauacuc

SEQ ID NO: 16926 - RNA, 19 nt, Artificial Sequence
  Description of Artificial Sequence: Synthetic oligonucleotide
aaauagcuaguucgguaaa

SEQ ID NO: 16927 - RNA, 19 nt, Artificial Sequence
  Description of Artificial Sequence: Synthetic oligonucleotide
uggucguaaugucauugug

SEQ ID NO: 16928 - RNA, 19 nt, Artificial Sequence
  Description of Artificial Sequence: Synthetic oligonucleotide
ucggucagccuuaauugca

SEQ ID NO: 16929 - RNA, 19 nt, Artificial Sequence
  Description of Artificial Sequence: Synthetic oligonucleotide
gucucaagaucauagaggu

SEQ ID NO: 16930 - RNA, 19 nt, Artificial Sequence
  Description of Artificial Sequence: Synthetic oligonucleotide
caucauaacaacggucacc

SEQ ID NO: 16931 - RNA, 19 nt, Artificial Sequence
  Description of Artificial Sequence: Synthetic oligonucleotide
gauucucgagccuucuuuc

SEQ ID NO: 16932 - RNA, 19 nt, Artificial Sequence
  Description of Artificial Sequence: Synthetic oligonucleotide
ucaguagagaauugaccuc

SEQ ID NO: 16933 - RNA, 19 nt, Artificial Sequence
  Description of Artificial Sequence: Synthetic oligonucleotide
gaccauaaacgaugggcug

SEQ ID NO: 16934 - RNA, 19 nt, Artificial Sequence
  Description of Artificial Sequence: Synthetic oligonucleotide
uugauaaguuccucuaauu

SEQ ID NO: 16935 - RNA, 19 nt, Artificial Sequence
  Description of Artificial Sequence: Synthetic oligonucleotide
aguuacugacaccucuucu

SEQ ID NO: 16936 - RNA, 19 nt, Artificial Sequence
  Description of Artificial Sequence: Synthetic oligonucleotide
agugugauccaaccgugga

SEQ ID NO: 16937 - RNA, 19 nt, Artificial Sequence
  Description of Artificial Sequence: Synthetic oligonucleotide
cucucgaccagaacaacuc

SEQ ID NO: 16938 - RNA, 19 nt, Artificial Sequence
  Description of Artificial Sequence: Synthetic oligonucleotide
aaucgaucacagacgauga

SEQ ID NO: 16939 - RNA, 19 nt, Artificial Sequence
  Description of Artificial Sequence: Synthetic oligonucleotide
aacucauaugcacgaucca

SEQ ID NO: 16940 - RNA, 19 nt, Artificial Sequence
  Description of Artificial Sequence: Synthetic oligonucleotide
ucauagagguggauauaac

SEQ ID NO: 16941 - RNA, 19 nt, Artificial Sequence
  Description of Artificial Sequence: Synthetic oligonucleotide
ccugcauagguuaaagggc

SEQ ID NO: 16942 - RNA, 19 nt, Artificial Sequence
  Description of Artificial Sequence: Synthetic oligonucleotide
uuccccguuuauaaacuga

SEQ ID NO: 16943 - RNA, 19 nt, Artificial Sequence
  Description of Artificial Sequence: Synthetic oligonucleotide
auuauggcauuaucauacu

SEQ ID NO: 16944 - RNA, 19 nt, Artificial Sequence
  Description of Artificial Sequence: Synthetic oligonucleotide
uggugcauuagcagccacc

SEQ ID NO: 16945 - RNA, 19 nt, Artificial Sequence
  Description of Artificial Sequence: Synthetic oligonucleotide
aucuauugauguucguaga

SEQ ID NO: 16946 - RNA, 19 nt, Artificial Sequence
  Description of Artificial Sequence: Synthetic oligonucleotide
guaacgaagaucguuucuc

SEQ ID NO: 16947 - RNA, 19 nt, Artificial Sequence
  Description of Artificial Sequence: Synthetic oligonucleotide
aguacgaaggauucccuuu

SEQ ID NO: 16948 - RNA, 19 nt, Artificial Sequence
  Description of Artificial Sequence: Synthetic oligonucleotide
cuaauucaucugcauguac

SEQ ID NO: 16949 - RNA, 19 nt, Artificial Sequence
  Description of Artificial Sequence: Synthetic oligonucleotide
ucgaguacuauuagcuuuu

SEQ ID NO: 16950 - RNA, 19 nt, Artificial Sequence
  Description of Artificial Sequence: Synthetic oligonucleotide
aguucgguaaacauuccca

SEQ ID NO: 16951 - RNA, 19 nt, Artificial Sequence
  Description of Artificial Sequence: Synthetic oligonucleotide
gaagaucguuucuccacug

SEQ ID NO: 16952 - RNA, 19 nt, Artificial Sequence
  Description of Artificial Sequence: Synthetic oligonucleotide
cauguucgaguacuauuag

SEQ ID NO: 16953 - RNA, 19 nt, Artificial Sequence
  Description of Artificial Sequence: Synthetic oligonucleotide
gguuaguaaauacauacgu

SEQ ID NO: 16954 - RNA, 19 nt, Artificial Sequence
  Description of Artificial Sequence: Synthetic oligonucleotide
agucgacuuggauuuaccu

SEQ ID NO: 16955 - RNA, 19 nt, Artificial Sequence
  Description of Artificial Sequence: Synthetic oligonucleotide
guacgaaggauucccuuug

SEQ ID NO: 16956 - RNA, 19 nt, Artificial Sequence
  Description of Artificial Sequence: Synthetic oligonucleotide
uauaaacugagaggugggu

SEQ ID NO: 16957 - RNA, 19 nt, Artificial Sequence
  Description of Artificial Sequence: Synthetic oligonucleotide
ucuggacugaugcgcauaa

SEQ ID NO: 16958 - RNA, 19 nt, Artificial Sequence
  Description of Artificial Sequence: Synthetic oligonucleotide
uuccggaaaauagcaaaug

SEQ ID NO: 16959 - RNA, 19 nt, Artificial Sequence
  Description of Artificial Sequence: Synthetic oligonucleotide
gucacauaccaguauuuuc

SEQ ID NO: 16960 - RNA, 19 nt, Artificial Sequence
  Description of Artificial Sequence: Synthetic oligonucleotide
aucauagagguggauauaa

SEQ ID NO: 16961 - RNA, 19 nt, Artificial Sequence
  Description of Artificial Sequence: Synthetic oligonucleotide
auagcuaguucgguaaaca

SEQ ID NO: 16962 - RNA, 19 nt, Artificial Sequence
  Description of Artificial Sequence: Synthetic oligonucleotide
gcgauuguugccuuugaag

SEQ ID NO: 16963 - RNA, 19 nt, Artificial Sequence
  Description of Artificial Sequence: Synthetic oligonucleotide
ggaauggucccacagaaaa

SEQ ID NO: 16964 - RNA, 19 nt, Artificial Sequence
  Description of Artificial Sequence: Synthetic oligonucleotide
guuacacaugaagugagca

SEQ ID NO: 16965 - RNA, 19 nt, Artificial Sequence
  Description of Artificial Sequence: Synthetic oligonucleotide
uaauuuggagagcgcugug

SEQ ID NO: 16966 - RNA, 19 nt, Artificial Sequence
  Description of Artificial Sequence: Synthetic oligonucleotide
uccauguucgaguacuauu

SEQ ID NO: 16967 - RNA, 19 nt, Artificial Sequence
  Description of Artificial Sequence: Synthetic oligonucleotide
acugaugcgcauaacauuu

SEQ ID NO: 16968 - RNA, 19 nt, Artificial Sequence
  Description of Artificial Sequence: Synthetic oligonucleotide
aggugcaguaacgaagauc

SEQ ID NO: 16969 - RNA, 19 nt, Artificial Sequence
  Description of Artificial Sequence: Synthetic oligonucleotide
aggcgauuuguuuuagcca

SEQ ID NO: 16970 - RNA, 19 nt, Artificial Sequence
  Description of Artificial Sequence: Synthetic oligonucleotide
ugcaucgcguccuuguaaa

SEQ ID NO: 16971 - RNA, 19 nt, Artificial Sequence
  Description of Artificial Sequence: Synthetic oligonucleotide
gcgcauaacauuucucagg

SEQ ID NO: 16972 - RNA, 19 nt, Artificial Sequence
  Description of Artificial Sequence: Synthetic oligonucleotide
caucgcguccuuguaaagg

SEQ ID NO: 16973 - RNA, 19 nt, Artificial Sequence
  Description of Artificial Sequence: Synthetic oligonucleotide
auaauuauccaggcgguua

SEQ ID NO: 16974 - RNA, 19 nt, Artificial Sequence
  Description of Artificial Sequence: Synthetic oligonucleotide
uacacgcuaagugccaaug

SEQ ID NO: 16975 - RNA, 19 nt, Artificial Sequence
  Description of Artificial Sequence: Synthetic oligonucleotide
cuguuuucgcccuugcuga

SEQ ID NO: 16976 - RNA, 19 nt, Artificial Sequence
  Description of Artificial Sequence: Synthetic oligonucleotide
gugauuauggcauuaucau

SEQ ID NO: 16977 - RNA, 19 nt, Artificial Sequence
  Description of Artificial Sequence: Synthetic oligonucleotide
gagacaagccccgaagcac

SEQ ID NO: 16978 - RNA, 19 nt, Artificial Sequence
  Description of Artificial Sequence: Synthetic oligonucleotide
cugcauguacuacaauaug

SEQ ID NO: 16979 - RNA, 19 nt, Artificial Sequence
  Description of Artificial Sequence: Synthetic oligonucleotide
ugcacgauccaaguuucca

SEQ ID NO: 16980 - RNA, 19 nt, Artificial Sequence
  Description of Artificial Sequence: Synthetic oligonucleotide
aguucuaaugaugcggaau

SEQ ID NO: 16981 - RNA, 19 nt, Artificial Sequence
  Description of Artificial Sequence: Synthetic oligonucleotide
uacugaaggagaggugaag

SEQ ID NO: 16982 - RNA, 19 nt, Artificial Sequence
  Description of Artificial Sequence: Synthetic oligonucleotide
agaucguuucuccacugau

SEQ ID NO: 16983 - RNA, 19 nt, Artificial Sequence
  Description of Artificial Sequence: Synthetic oligonucleotide
uccauguaggaugaaggau

SEQ ID NO: 16984 - RNA, 19 nt, Artificial Sequence
  Description of Artificial Sequence: Synthetic oligonucleotide
uggaaucgacggauggugu

SEQ ID NO: 16985 - RNA, 19 nt, Artificial Sequence
  Description of Artificial Sequence: Synthetic oligonucleotide
cagccuuaauugcagugag

SEQ ID NO: 16986 - RNA, 19 nt, Artificial Sequence
  Description of Artificial Sequence: Synthetic oligonucleotide
ugcaaggcgauuuguuuua

SEQ ID NO: 16987 - RNA, 19 nt, Artificial Sequence
  Description of Artificial Sequence: Synthetic oligonucleotide
aaguucuaaugaugcggaa

SEQ ID NO: 16988 - RNA, 19 nt, Artificial Sequence
  Description of Artificial Sequence: Synthetic oligonucleotide
acuaguauuggcagccuga

SEQ ID NO: 16989 - RNA, 19 nt, Artificial Sequence
  Description of Artificial Sequence: Synthetic oligonucleotide
ugcauagguuaaagggccu

SEQ ID NO: 16990 - RNA, 19 nt, Artificial Sequence
  Description of Artificial Sequence: Synthetic oligonucleotide
acucauaugcacgauccaa

SEQ ID NO: 16991 - RNA, 19 nt, Artificial Sequence
  Description of Artificial Sequence: Synthetic oligonucleotide
gacggaauucuuucccauc

SEQ ID NO: 16992 - RNA, 19 nt, Artificial Sequence
  Description of Artificial Sequence: Synthetic oligonucleotide
uucuaaugaugcggaaugu

SEQ ID NO: 16993 - RNA, 19 nt, Artificial Sequence
  Description of Artificial Sequence: Synthetic oligonucleotide
gagugugauccaaccgugg

SEQ ID NO: 16994 - RNA, 19 nt, Artificial Sequence
  Description of Artificial Sequence: Synthetic oligonucleotide
acaggauacagcacaacau

SEQ ID NO: 16995 - RNA, 19 nt, Artificial Sequence
  Description of Artificial Sequence: Synthetic oligonucleotide
acugagcguaaauaugguu

SEQ ID NO: 16996 - RNA, 19 nt, Artificial Sequence
  Description of Artificial Sequence: Synthetic oligonucleotide
gaaguuugaccuggcugag

SEQ ID NO: 16997 - RNA, 19 nt, Artificial Sequence
  Description of Artificial Sequence: Synthetic oligonucleotide
aaucgacggauggugucug

SEQ ID NO: 16998 - RNA, 19 nt, Artificial Sequence
  Description of Artificial Sequence: Synthetic oligonucleotide
cacaacgagaaucaaauuu

SEQ ID NO: 16999 - RNA, 19 nt, Artificial Sequence
  Description of Artificial Sequence: Synthetic oligonucleotide
gaaucuggccucaagccaa

SEQ ID NO: 17000 - RNA, 19 nt, Artificial Sequence
  Description of Artificial Sequence: Synthetic oligonucleotide
ucguagagccugguaaucu

SEQ ID NO: 17001 - RNA, 19 nt, Artificial Sequence
  Description of Artificial Sequence: Synthetic oligonucleotide
cugauaguaguugauaagu

SEQ ID NO: 17002 - RNA, 19 nt, Artificial Sequence
  Description of Artificial Sequence: Synthetic oligonucleotide
gcguaaauaugguuucacc

SEQ ID NO: 17003 - RNA, 19 nt, Artificial Sequence
  Description of Artificial Sequence: Synthetic oligonucleotide
gugaucuaaaacaccacaa

SEQ ID NO: 17004 - RNA, 19 nt, Artificial Sequence
  Description of Artificial Sequence: Synthetic oligonucleotide
guugauaaguuccucuaau

SEQ ID NO: 17005 - RNA, 19 nt, Artificial Sequence
  Description of Artificial Sequence: Synthetic oligonucleotide
gaugcggaaugugaaaaua

SEQ ID NO: 17006 - RNA, 19 nt, Artificial Sequence
  Description of Artificial Sequence: Synthetic oligonucleotide
uauaugcgcaauggggaaa

SEQ ID NO: 17007 - RNA, 19 nt, Artificial Sequence
  Description of Artificial Sequence: Synthetic oligonucleotide
agucuggaguguauccaac

SEQ ID NO: 17008 - RNA, 19 nt, Artificial Sequence
  Description of Artificial Sequence: Synthetic oligonucleotide
uacgcucuguuuccagcga

SEQ ID NO: 17009 - RNA, 19 nt, Artificial Sequence
  Description of Artificial Sequence: Synthetic oligonucleotide
aauugaccucucacaacga

SEQ ID NO: 17010 - RNA, 19 nt, Artificial Sequence
  Description of Artificial Sequence: Synthetic oligonucleotide
cugagcguaaauaugguuu

SEQ ID NO: 17011 - RNA, 19 nt, Artificial Sequence
  Description of Artificial Sequence: Synthetic oligonucleotide
gaugcgcauaacauuucuc

SEQ ID NO: 17012 - RNA, 19 nt, Artificial Sequence
  Description of Artificial Sequence: Synthetic oligonucleotide
ucguaaugucauugugagu

SEQ ID NO: 17013 - RNA, 19 nt, Artificial Sequence
  Description of Artificial Sequence: Synthetic oligonucleotide
auuggugauguaaggaauu

SEQ ID NO: 17014 - RNA, 19 nt, Artificial Sequence
  Description of Artificial Sequence: Synthetic oligonucleotide
cuauaugcgcaauggggaa

SEQ ID NO: 17015 - RNA, 19 nt, Artificial Sequence
  Description of Artificial Sequence: Synthetic oligonucleotide
acauacguguggaaucaug

SEQ ID NO: 17016 - RNA, 19 nt, Artificial Sequence
  Description of Artificial Sequence: Synthetic oligonucleotide
cacuaguauuggcagccug

SEQ ID NO: 17017 - RNA, 19 nt, Artificial Sequence
  Description of Artificial Sequence: Synthetic oligonucleotide
uggguagacgaugcuucag

SEQ ID NO: 17018 - RNA, 19 nt, Artificial Sequence
  Description of Artificial Sequence: Synthetic oligonucleotide
gcaagacggaauucuuucc

SEQ ID NO: 17019 - RNA, 19 nt, Artificial Sequence
  Description of Artificial Sequence: Synthetic oligonucleotide
gagucgacuuggauuuacc

SEQ ID NO: 17020 - RNA, 19 nt, Artificial Sequence
  Description of Artificial Sequence: Synthetic oligonucleotide
guagaauaugcugauuagu

SEQ ID NO: 17021 - RNA, 19 nt, Artificial Sequence
  Description of Artificial Sequence: Synthetic oligonucleotide
caguuacugacaccucuuc

SEQ ID NO: 17022 - RNA, 19 nt, Artificial Sequence
  Description of Artificial Sequence: Synthetic oligonucleotide
ggcaaagcagaccuccuuc

SEQ ID NO: 17023 - RNA, 19 nt, Artificial Sequence
  Description of Artificial Sequence: Synthetic oligonucleotide
agcgauuguugccuuugaa

SEQ ID NO: 17024 - RNA, 19 nt, Artificial Sequence
  Description of Artificial Sequence: Synthetic oligonucleotide
ggucguaaugucauuguga

SEQ ID NO: 17025 - RNA, 19 nt, Artificial Sequence
  Description of Artificial Sequence: Synthetic oligonucleotide
uucguagagccugguaauc

SEQ ID NO: 17026 - RNA, 19 nt, Artificial Sequence
  Description of Artificial Sequence: Synthetic oligonucleotide
agcuaguucgguaaacauu

SEQ ID NO: 17027 - RNA, 19 nt, Artificial Sequence
  Description of Artificial Sequence: Synthetic oligonucleotide
agcuguuuucgcccuugcu

SEQ ID NO: 17028 - RNA, 19 nt, Artificial Sequence
  Description of Artificial Sequence: Synthetic oligonucleotide
aagcccacaugaauacuau

SEQ ID NO: 17029 - RNA, 19 nt, Artificial Sequence
  Description of Artificial Sequence: Synthetic oligonucleotide
acgauccaaguuuccaaua

SEQ ID NO: 17030 - RNA, 19 nt, Artificial Sequence
  Description of Artificial Sequence: Synthetic oligonucleotide
uguuuucgcccuugcugaa

SEQ ID NO: 17031 - RNA, 19 nt, Artificial Sequence
  Description of Artificial Sequence: Synthetic oligonucleotide
acaagaacacauggccggu

SEQ ID NO: 17032 - RNA, 19 nt, Artificial Sequence
  Description of Artificial Sequence: Synthetic oligonucleotide
ucgcguccuuguaaaggcu

SEQ ID NO: 17033 - RNA, 19 nt, Artificial Sequence
  Description of Artificial Sequence: Synthetic oligonucleotide
uaacaacggucaccaacuu

SEQ ID NO: 17034 - RNA, 19 nt, Artificial Sequence
  Description of Artificial Sequence: Synthetic oligonucleotide
ugagcauuauuuggcccau

SEQ ID NO: 17035 - RNA, 19 nt, Artificial Sequence
  Description of Artificial Sequence: Synthetic oligonucleotide
gcacgagugugauccaacc

SEQ ID NO: 17036 - RNA, 19 nt, Artificial Sequence
  Description of Artificial Sequence: Synthetic oligonucleotide
guucgguaaacauucccau

SEQ ID NO: 17037 - RNA, 19 nt, Artificial Sequence
  Description of Artificial Sequence: Synthetic oligonucleotide
uaccaacuucaaugauaug

SEQ ID NO: 17038 - RNA, 19 nt, Artificial Sequence
  Description of Artificial Sequence: Synthetic oligonucleotide
auagguuaaagggccuuuu

SEQ ID NO: 17039 - RNA, 19 nt, Artificial Sequence
  Description of Artificial Sequence: Synthetic oligonucleotide
uccuuccauguucgaguac

SEQ ID NO: 17040 - RNA, 19 nt, Artificial Sequence
  Description of Artificial Sequence: Synthetic oligonucleotide
augcacgauccaaguuucc

SEQ ID NO: 17041 - RNA, 19 nt, Artificial Sequence
  Description of Artificial Sequence: Synthetic oligonucleotide
uuccauguucgaguacuau

SEQ ID NO: 17042 - RNA, 19 nt, Artificial Sequence
  Description of Artificial Sequence: Synthetic oligonucleotide
ggaaucgacggaugguguc

SEQ ID NO: 17043 - RNA, 19 nt, Artificial Sequence
  Description of Artificial Sequence: Synthetic oligonucleotide
uccaugccguuuccaggac

SEQ ID NO: 17044 - RNA, 19 nt, Artificial Sequence
  Description of Artificial Sequence: Synthetic oligonucleotide
cauuggugauguaaggaau

SEQ ID NO: 17045 - RNA, 19 nt, Artificial Sequence
  Description of Artificial Sequence: Synthetic oligonucleotide
gaaucgacggauggugucu

SEQ ID NO: 17046 - RNA, 19 nt, Artificial Sequence
  Description of Artificial Sequence: Synthetic oligonucleotide
ccagcgcaaauaucaauuc

SEQ ID NO: 17047 - RNA, 19 nt, Artificial Sequence
  Description of Artificial Sequence: Synthetic oligonucleotide
guagacgaugcuucaguau

SEQ ID NO: 17048 - RNA, 19 nt, Artificial Sequence
  Description of Artificial Sequence: Synthetic oligonucleotide
cuuacugucgauguauauu

SEQ ID NO: 17049 - RNA, 19 nt, Artificial Sequence
  Description of Artificial Sequence: Synthetic oligonucleotide
auguucguagagccuggua

SEQ ID NO: 17050 - RNA, 19 nt, Artificial Sequence
  Description of Artificial Sequence: Synthetic oligonucleotide
guaaagagacaagccccga

SEQ ID NO: 17051 - RNA, 19 nt, Artificial Sequence
  Description of Artificial Sequence: Synthetic oligonucleotide
gcgguuaauauacuccaua

SEQ ID NO: 17052 - RNA, 19 nt, Artificial Sequence
  Description of Artificial Sequence: Synthetic oligonucleotide
gcuuugauguaugaaucaa

SEQ ID NO: 17053 - RNA, 19 nt, Artificial Sequence
  Description of Artificial Sequence: Synthetic oligonucleotide
gcguucagcaaacucauau

SEQ ID NO: 17054 - RNA, 19 nt, Artificial Sequence
  Description of Artificial Sequence: Synthetic oligonucleotide
guucgaguacuauuagcuu

SEQ ID NO: 17055 - RNA, 19 nt, Artificial Sequence
  Description of Artificial Sequence: Synthetic oligonucleotide
uacauacguguggaaucau

SEQ ID NO: 17056 - RNA, 19 nt, Artificial Sequence
  Description of Artificial Sequence: Synthetic oligonucleotide
cgaucacagacgaugauaa

SEQ ID NO: 17057 - RNA, 19 nt, Artificial Sequence
  Description of Artificial Sequence: Synthetic oligonucleotide
gaguacgaaggauucccuu

SEQ ID NO: 17058 - RNA, 19 nt, Artificial Sequence
  Description of Artificial Sequence: Synthetic oligonucleotide
ccaaacgcugagcaaguga

SEQ ID NO: 17059 - RNA, 19 nt, Artificial Sequence
  Description of Artificial Sequence: Synthetic oligonucleotide
auagacgauccaagucuau

SEQ ID NO: 17060 - RNA, 19 nt, Artificial Sequence
  Description of Artificial Sequence: Synthetic oligonucleotide
uccagcgauuguugccuuu

SEQ ID NO: 17061 - RNA, 19 nt, Artificial Sequence
  Description of Artificial Sequence: Synthetic oligonucleotide
gaucguuucuccacugauu

SEQ ID NO: 17062 - RNA, 19 nt, Artificial Sequence
  Description of Artificial Sequence: Synthetic oligonucleotide
gcguccaaaguuagaaaca

SEQ ID NO: 17063 - RNA, 19 nt, Artificial Sequence
  Description of Artificial Sequence: Synthetic oligonucleotide
cugugauccaauguagaau

SEQ ID NO: 17064 - RNA, 19 nt, Artificial Sequence
  Description of Artificial Sequence: Synthetic oligonucleotide
cgagugugauccaaccgug

SEQ ID NO: 17065 - RNA, 19 nt, Artificial Sequence
  Description of Artificial Sequence: Synthetic oligonucleotide
cgguuaauauacuccauaa

SEQ ID NO: 17066 - RNA, 19 nt, Artificial Sequence
  Description of Artificial Sequence: Synthetic oligonucleotide
ggauucucgagccuucuuu

SEQ ID NO: 17067 - RNA, 19 nt, Artificial Sequence
  Description of Artificial Sequence: Synthetic oligonucleotide
cacguguucggucagccuu

SEQ ID NO: 17068 - RNA, 19 nt, Artificial Sequence
  Description of Artificial Sequence: Synthetic oligonucleotide
cuuccauguucgaguacua

SEQ ID NO: 17069 - RNA, 19 nt, Artificial Sequence
  Description of Artificial Sequence: Synthetic oligonucleotide
ucgggacauuggcccugag

SEQ ID NO: 17070 - RNA, 19 nt, Artificial Sequence
  Description of Artificial Sequence: Synthetic oligonucleotide
gcaucgcguccuuguaaag

SEQ ID NO: 17071 - RNA, 19 nt, Artificial Sequence
  Description of Artificial Sequence: Synthetic oligonucleotide
ggguagacgaugcuucagu

SEQ ID NO: 17072 - RNA, 19 nt, Artificial Sequence
  Description of Artificial Sequence: Synthetic oligonucleotide
cugcaucgcguccuuguaa

SEQ ID NO: 17073 - RNA, 19 nt, Artificial Sequence
  Description of Artificial Sequence: Synthetic oligonucleotide
cacgcuaagugccaauguu

SEQ ID NO: 17074 - RNA, 19 nt, Artificial Sequence
  Description of Artificial Sequence: Synthetic oligonucleotide
uuccagcgauuguugccuu

SEQ ID NO: 17075 - RNA, 19 nt, Artificial Sequence
  Description of Artificial Sequence: Synthetic oligonucleotide
cagucuugcauggucacau

SEQ ID NO: 17076 - RNA, 19 nt, Artificial Sequence
  Description of Artificial Sequence: Synthetic oligonucleotide
ccagcgauuguugccuuug

SEQ ID NO: 17077 - RNA, 19 nt, Artificial Sequence
  Description of Artificial Sequence: Synthetic oligonucleotide
aggacgacaucuggccuua

SEQ ID NO: 17078 - RNA, 19 nt, Artificial Sequence
  Description of Artificial Sequence: Synthetic oligonucleotide
accucagggaaggguuagu

SEQ ID NO: 17079 - RNA, 19 nt, Artificial Sequence
  Description of Artificial Sequence: Synthetic oligonucleotide
gauguucguagagccuggu

SEQ ID NO: 17080 - RNA, 19 nt, Artificial Sequence
  Description of Artificial Sequence: Synthetic oligonucleotide
cgcguccuuguaaaggcug

SEQ ID NO: 17081 - RNA, 19 nt, Artificial Sequence
  Description of Artificial Sequence: Synthetic oligonucleotide
gcgauuuguuuuagccagc

SEQ ID NO: 17082 - RNA, 19 nt, Artificial Sequence
  Description of Artificial Sequence: Synthetic oligonucleotide
cagcgauuguugccuuuga

SEQ ID NO: 17083 - RNA, 19 nt, Artificial Sequence
  Description of Artificial Sequence: Synthetic oligonucleotide
auggccgguuuccccguuu

SEQ ID NO: 17084 - RNA, 19 nt, Artificial Sequence
  Description of Artificial Sequence: Synthetic oligonucleotide
acguguucggucagccuua

SEQ ID NO: 17085 - RNA, 19 nt, Artificial Sequence
  Description of Artificial Sequence: Synthetic oligonucleotide
ccuuccauguucgaguacu

SEQ ID NO: 17086 - RNA, 19 nt, Artificial Sequence
  Description of Artificial Sequence: Synthetic oligonucleotide
gccagcgcaaauaucaauu

SEQ ID NO: 17087 - RNA, 19 nt, Artificial Sequence
  Description of Artificial Sequence: Synthetic oligonucleotide
cccugagguacacgcuaag

SEQ ID NO: 17088 - RNA, 19 nt, Artificial Sequence
  Description of Artificial Sequence: Synthetic oligonucleotide
cauagguuaaagggccuuu

SEQ ID NO: 17089 - RNA, 19 nt, Artificial Sequence
  Description of Artificial Sequence: Synthetic oligonucleotide
guacacgcuaagugccaau

SEQ ID NO: 17090 - RNA, 19 nt, Artificial Sequence
  Description of Artificial Sequence: Synthetic oligonucleotide
cacgauccugauaguaguu

SEQ ID NO: 17091 - RNA, 19 nt, Artificial Sequence
  Description of Artificial Sequence: Synthetic oligonucleotide
ccaagcguccaaaguuaga

SEQ ID NO: 17092 - RNA, 19 nt, Artificial Sequence
  Description of Artificial Sequence: Synthetic oligonucleotide
ccacgauccugauaguagu

SEQ ID NO: 17093 - RNA, 19 nt, Artificial Sequence
  Description of Artificial Sequence: Synthetic oligonucleotide
ggaguacgaaggauucccu

SEQ ID NO: 17094 - RNA, 19 nt, Artificial Sequence
  Description of Artificial Sequence: Synthetic oligonucleotide
ggggcugaccauaaacgau

SEQ ID NO: 17095 - RNA, 19 nt, Artificial Sequence
  Description of Artificial Sequence: Synthetic oligonucleotide
gcauagguuaaagggccuu

SEQ ID NO: 17096 - RNA, 19 nt, Artificial Sequence
  Description of Artificial Sequence: Synthetic oligonucleotide
cauugugaguaggcagguu

SEQ ID NO: 17097 - RNA, 19 nt, Artificial Sequence
  Description of Artificial Sequence: Synthetic oligonucleotide
cguguggaaucauggugcu

SEQ ID NO: 17098 - RNA, 19 nt, Artificial Sequence
  Description of Artificial Sequence: Synthetic oligonucleotide
gggagucgacuuggauuua

SEQ ID NO: 17099 - RNA, 19 nt, Artificial Sequence
  Description of Artificial Sequence: Synthetic oligonucleotide
uauacuauggcuaaguaug

SEQ ID NO: 17100 - RNA, 19 nt, Artificial Sequence
  Description of Artificial Sequence: Synthetic oligonucleotide
ugaucauugaacaagaaga

SEQ ID NO: 17101 - RNA, 19 nt, Artificial Sequence
  Description of Artificial Sequence: Synthetic oligonucleotide
aguagauuaauauaaacug

SEQ ID NO: 17102 - RNA, 19 nt, Artificial Sequence
  Description of Artificial Sequence: Synthetic oligonucleotide
aguuuaacaaccuggagac

SEQ ID NO: 17103 - RNA, 19 nt, Artificial Sequence
  Description of Artificial Sequence: Synthetic oligonucleotide
uguauauggaacaacauac

SEQ ID NO: 17104 - RNA, 19 nt, Artificial Sequence
  Description of Artificial Sequence: Synthetic oligonucleotide
uaauauaugguucaauagc

SEQ ID NO: 17105 - RNA, 19 nt, Artificial Sequence
  Description of Artificial Sequence: Synthetic oligonucleotide
uuucaaugcacuuugauga

SEQ ID NO: 17106 - RNA, 19 nt, Artificial Sequence
  Description of Artificial Sequence: Synthetic oligonucleotide
uauuguaacccaauguugg

SEQ ID NO: 17107 - RNA, 19 nt, Artificial Sequence
  Description of Artificial Sequence: Synthetic oligonucleotide
aauuugaugaacgaugauc

SEQ ID NO: 17108 - RNA, 19 nt, Artificial Sequence
  Description of Artificial Sequence: Synthetic oligonucleotide
acauggauaucauuaaacc

SEQ ID NO: 17109 - RNA, 19 nt, Artificial Sequence
  Description of Artificial Sequence: Synthetic oligonucleotide
agaaggucaacacugaagg

SEQ ID NO: 17110 - RNA, 19 nt, Artificial Sequence
  Description of Artificial Sequence: Synthetic oligonucleotide
ucaucuaucauauacuaug

SEQ ID NO: 17111 - RNA, 19 nt, Artificial Sequence
  Description of Artificial Sequence: Synthetic oligonucleotide
ugauucugaagcuauacgg

SEQ ID NO: 17112 - RNA, 19 nt, Artificial Sequence
  Description of Artificial Sequence: Synthetic oligonucleotide
uuaacuccaacaaacagug

SEQ ID NO: 17113 - RNA, 19 nt, Artificial Sequence
  Description of Artificial Sequence: Synthetic oligonucleotide
aacgaaaucuacaaugacc

SEQ ID NO: 17114 - RNA, 19 nt, Artificial Sequence
  Description of Artificial Sequence: Synthetic oligonucleotide
uauaguguaauaauuugca

SEQ ID NO: 17115 - RNA, 19 nt, Artificial Sequence
  Description of Artificial Sequence: Synthetic oligonucleotide
ugaugaacgaugaucaugc

SEQ ID NO: 17116 - RNA, 19 nt, Artificial Sequence
  Description of Artificial Sequence: Synthetic oligonucleotide
uauauaucagauuuuauau

SEQ ID NO: 17117 - RNA, 19 nt, Artificial Sequence
  Description of Artificial Sequence: Synthetic oligonucleotide
acaaacgaaaucuacaaug

SEQ ID NO: 17118 - RNA, 19 nt, Artificial Sequence
  Description of Artificial Sequence: Synthetic oligonucleotide
aaacuagauauaucacugc

SEQ ID NO: 17119 - RNA, 19 nt, Artificial Sequence
  Description of Artificial Sequence: Synthetic oligonucleotide
augaaaguggcuuauuaac

SEQ ID NO: 17120 - RNA, 19 nt, Artificial Sequence
  Description of Artificial Sequence: Synthetic oligonucleotide
uucacuuuaaguauacucu

SEQ ID NO: 17121 - RNA, 19 nt, Artificial Sequence
  Description of Artificial Sequence: Synthetic oligonucleotide
uuauaguguaauaauuugc

SEQ ID NO: 17122 - RNA, 19 nt, Artificial Sequence
  Description of Artificial Sequence: Synthetic oligonucleotide
uauggaacaacauacucug

SEQ ID NO: 17123 - RNA, 19 nt, Artificial Sequence
  Description of Artificial Sequence: Synthetic oligonucleotide
uuuggagcguccuacacgg

SEQ ID NO: 17124 - RNA, 19 nt, Artificial Sequence
  Description of Artificial Sequence: Synthetic oligonucleotide
auuauaguguaauaauuug

SEQ ID NO: 17125 - RNA, 19 nt, Artificial Sequence
  Description of Artificial Sequence: Synthetic oligonucleotide
ucuaucauauacuauggcu

SEQ ID NO: 17126 - RNA, 19 nt, Artificial Sequence
  Description of Artificial Sequence: Synthetic oligonucleotide
cagauuuuauauuauagug

SEQ ID NO: 17127 - RNA, 19 nt, Artificial Sequence
  Description of Artificial Sequence: Synthetic oligonucleotide
aauagucgcuucuuuauug

SEQ ID NO: 17128 - RNA, 19 nt, Artificial Sequence
  Description of Artificial Sequence: Synthetic oligonucleotide
uuuauuuagccucauacuu

SEQ ID NO: 17129 - RNA, 19 nt, Artificial Sequence
  Description of Artificial Sequence: Synthetic oligonucleotide
aaacgaaaucuacaaugac

SEQ ID NO: 17130 - RNA, 19 nt, Artificial Sequence
  Description of Artificial Sequence: Synthetic oligonucleotide
uuaaauauguagcucucca

SEQ ID NO: 17131 - RNA, 19 nt, Artificial Sequence
  Description of Artificial Sequence: Synthetic oligonucleotide
aaugaaauuugaugaacga

SEQ ID NO: 17132 - RNA, 19 nt, Artificial Sequence
  Description of Artificial Sequence: Synthetic oligonucleotide
gauaucauuaaaccugccc

SEQ ID NO: 17133 - RNA, 19 nt, Artificial Sequence
  Description of Artificial Sequence: Synthetic oligonucleotide
caaugaaauuugaugaacg

SEQ ID NO: 17134 - RNA, 19 nt, Artificial Sequence
  Description of Artificial Sequence: Synthetic oligonucleotide
uguugaaauugaaacaaca

SEQ ID NO: 17135 - RNA, 19 nt, Artificial Sequence
  Description of Artificial Sequence: Synthetic oligonucleotide
aauauaugguucaauagcu

SEQ ID NO: 17136 - RNA, 19 nt, Artificial Sequence
  Description of Artificial Sequence: Synthetic oligonucleotide
uagauuaauauaaacugaa

SEQ ID NO: 17137 - RNA, 19 nt, Artificial Sequence
  Description of Artificial Sequence: Synthetic oligonucleotide
uuuccgaccacgcugacug

SEQ ID NO: 17138 - RNA, 19 nt, Artificial Sequence
  Description of Artificial Sequence: Synthetic oligonucleotide
uauuauaguguaauaauuu

SEQ ID NO: 17139 - RNA, 19 nt, Artificial Sequence
  Description of Artificial Sequence: Synthetic oligonucleotide
uauaugguucaauagcuug

SEQ ID NO: 17140 - RNA, 19 nt, Artificial Sequence
  Description of Artificial Sequence: Synthetic oligonucleotide
aaauauguagcucuccaaa

SEQ ID NO: 17141 - RNA, 19 nt, Artificial Sequence
  Description of Artificial Sequence: Synthetic oligonucleotide
uuuauugcauccccaaucu

SEQ ID NO: 17142 - RNA, 19 nt, Artificial Sequence
  Description of Artificial Sequence: Synthetic oligonucleotide
auuauagccaauuuuggaa

SEQ ID NO: 17143 - RNA, 19 nt, Artificial Sequence
  Description of Artificial Sequence: Synthetic oligonucleotide
uuuucguaucaucuggucc

SEQ ID NO: 17144 - RNA, 19 nt, Artificial Sequence
  Description of Artificial Sequence: Synthetic oligonucleotide
aagcauacuucuuauaaaa

SEQ ID NO: 17145 - RNA, 19 nt, Artificial Sequence
  Description of Artificial Sequence: Synthetic oligonucleotide
augcacaacauuaaugugc

SEQ ID NO: 17146 - RNA, 19 nt, Artificial Sequence
  Description of Artificial Sequence: Synthetic oligonucleotide
agugucaucacugauagga

SEQ ID NO: 17147 - RNA, 19 nt, Artificial Sequence
  Description of Artificial Sequence: Synthetic oligonucleotide
agauccaguaagcagcugg

SEQ ID NO: 17148 - RNA, 19 nt, Artificial Sequence
  Description of Artificial Sequence: Synthetic oligonucleotide
auaucuauacacaauaaca

SEQ ID NO: 17149 - RNA, 19 nt, Artificial Sequence
  Description of Artificial Sequence: Synthetic oligonucleotide
ugauacaguagauuaauau

SEQ ID NO: 17150 - RNA, 19 nt, Artificial Sequence
  Description of Artificial Sequence: Synthetic oligonucleotide
acuauuaaaagcccauuca

SEQ ID NO: 17151 - RNA, 19 nt, Artificial Sequence
  Description of Artificial Sequence: Synthetic oligonucleotide
cuauuauagccaauuuugg

SEQ ID NO: 17152 - RNA, 19 nt, Artificial Sequence
  Description of Artificial Sequence: Synthetic oligonucleotide
uuaaaccugcccaaguagc

SEQ ID NO: 17153 - RNA, 19 nt, Artificial Sequence
  Description of Artificial Sequence: Synthetic oligonucleotide
uguaauaauuugcauuuuc

SEQ ID NO: 17154 - RNA, 19 nt, Artificial Sequence
  Description of Artificial Sequence: Synthetic oligonucleotide
auuguaacccaauguuggc

SEQ ID NO: 17155 - RNA, 19 nt, Artificial Sequence
  Description of Artificial Sequence: Synthetic oligonucleotide
aguauuguaacccaauguu

SEQ ID NO: 17156 - RNA, 19 nt, Artificial Sequence
  Description of Artificial Sequence: Synthetic oligonucleotide
cuagauauaucacugccac

SEQ ID NO: 17157 - RNA, 19 nt, Artificial Sequence
  Description of Artificial Sequence: Synthetic oligonucleotide
aaauccuuugcuaaaucag

SEQ ID NO: 17158 - RNA, 19 nt, Artificial Sequence
  Description of Artificial Sequence: Synthetic oligonucleotide
guaaacacaggcgagauac

SEQ ID NO: 17159 - RNA, 19 nt, Artificial Sequence
  Description of Artificial Sequence: Synthetic oligonucleotide
aacauacagaucucuaaga

SEQ ID NO: 17160 - RNA, 19 nt, Artificial Sequence
  Description of Artificial Sequence: Synthetic oligonucleotide
aucuaucauauacuauggc

SEQ ID NO: 17161 - RNA, 19 nt, Artificial Sequence
  Description of Artificial Sequence: Synthetic oligonucleotide
uauagaacacaauaacauc

SEQ ID NO: 17162 - RNA, 19 nt, Artificial Sequence
  Description of Artificial Sequence: Synthetic oligonucleotide
gagugcgacaccuacagug

SEQ ID NO: 17163 - RNA, 19 nt, Artificial Sequence
  Description of Artificial Sequence: Synthetic oligonucleotide
uggauaucauuaaaccugc

SEQ ID NO: 17164 - RNA, 19 nt, Artificial Sequence
  Description of Artificial Sequence: Synthetic oligonucleotide
auggauaucauuaaaccug

SEQ ID NO: 17165 - RNA, 19 nt, Artificial Sequence
  Description of Artificial Sequence: Synthetic oligonucleotide
uuaaugugcaaugaaauuu

SEQ ID NO: 17166 - RNA, 19 nt, Artificial Sequence
  Description of Artificial Sequence: Synthetic oligonucleotide
aguuuaaagccgcagagaa

SEQ ID NO: 17167 - RNA, 19 nt, Artificial Sequence
  Description of Artificial Sequence: Synthetic oligonucleotide
uuuuagucaauguuaucac

SEQ ID NO: 17168 - RNA, 19 nt, Artificial Sequence
  Description of Artificial Sequence: Synthetic oligonucleotide
caucuaucauauacuaugg

SEQ ID NO: 17169 - RNA, 19 nt, Artificial Sequence
  Description of Artificial Sequence: Synthetic oligonucleotide
aguguaauggcagacgcuc

SEQ ID NO: 17170 - RNA, 19 nt, Artificial Sequence
  Description of Artificial Sequence: Synthetic oligonucleotide
ggcacugucaguuuaaagc

SEQ ID NO: 17171 - RNA, 19 nt, Artificial Sequence
  Description of Artificial Sequence: Synthetic oligonucleotide
uuguauauggaacaacaua

SEQ ID NO: 17172 - RNA, 19 nt, Artificial Sequence
  Description of Artificial Sequence: Synthetic oligonucleotide
auuugaugaacgaugauca

SEQ ID NO: 17173 - RNA, 19 nt, Artificial Sequence
  Description of Artificial Sequence: Synthetic oligonucleotide
uggaacaacauacucuggu

SEQ ID NO: 17174 - RNA, 19 nt, Artificial Sequence
  Description of Artificial Sequence: Synthetic oligonucleotide
cucguuuggaacuucuccg

SEQ ID NO: 17175 - RNA, 19 nt, Artificial Sequence
  Description of Artificial Sequence: Synthetic oligonucleotide
guagcugucuguuuggagc

SEQ ID NO: 17176 - RNA, 19 nt, Artificial Sequence
  Description of Artificial Sequence: Synthetic oligonucleotide
agaaagaucagagucgucu

SEQ ID NO: 17177 - RNA, 19 nt, Artificial Sequence
  Description of Artificial Sequence: Synthetic oligonucleotide
guugauuaacuuuuacaug

SEQ ID NO: 17178 - RNA, 19 nt, Artificial Sequence
  Description of Artificial Sequence: Synthetic oligonucleotide
uuauagccaauuuuggaaa

SEQ ID NO: 17179 - RNA, 19 nt, Artificial Sequence
  Description of Artificial Sequence: Synthetic oligonucleotide
ucuaguguaauggcagacg

SEQ ID NO: 17180 - RNA, 19 nt, Artificial Sequence
  Description of Artificial Sequence: Synthetic oligonucleotide
aaaugacaccaauuguuga

SEQ ID NO: 17181 - RNA, 19 nt, Artificial Sequence
  Description of Artificial Sequence: Synthetic oligonucleotide
ugccaguaguuuaacaacc

SEQ ID NO: 17182 - RNA, 19 nt, Artificial Sequence
  Description of Artificial Sequence: Synthetic oligonucleotide
uaguuuaugucuacacagc

SEQ ID NO: 17183 - RNA, 19 nt, Artificial Sequence
  Description of Artificial Sequence: Synthetic oligonucleotide
uauauauguagcagcuugu

SEQ ID NO: 17184 - RNA, 19 nt, Artificial Sequence
  Description of Artificial Sequence: Synthetic oligonucleotide
ugagacaauggcuagcaaa

SEQ ID NO: 17185 - RNA, 19 nt, Artificial Sequence
  Description of Artificial Sequence: Synthetic oligonucleotide
cuaguguaauggcagacgc

SEQ ID NO: 17186 - RNA, 19 nt, Artificial Sequence
  Description of Artificial Sequence: Synthetic oligonucleotide
agcuauacggccucuuuuc

SEQ ID NO: 17187 - RNA, 19 nt, Artificial Sequence
  Description of Artificial Sequence: Synthetic oligonucleotide
auuuucguaucaucugguc

SEQ ID NO: 17188 - RNA, 19 nt, Artificial Sequence
  Description of Artificial Sequence: Synthetic oligonucleotide
ucaugaacaugcaacucac

SEQ ID NO: 17189 - RNA, 19 nt, Artificial Sequence
  Description of Artificial Sequence: Synthetic oligonucleotide
auauacuauggcuaaguau

SEQ ID NO: 17190 - RNA, 19 nt, Artificial Sequence
  Description of Artificial Sequence: Synthetic oligonucleotide
aaaagcccauucaaauuac

SEQ ID NO: 17191 - RNA, 19 nt, Artificial Sequence
  Description of Artificial Sequence: Synthetic oligonucleotide
gaaguaauaucuauacaca

SEQ ID NO: 17192 - RNA, 19 nt, Artificial Sequence
  Description of Artificial Sequence: Synthetic oligonucleotide
aagcacaucucaugauuag

SEQ ID NO: 17193 - RNA, 19 nt, Artificial Sequence
  Description of Artificial Sequence: Synthetic oligonucleotide
acuguugaaauugaaacaa

SEQ ID NO: 17194 - RNA, 19 nt, Artificial Sequence
  Description of Artificial Sequence: Synthetic oligonucleotide
agugguuuauuuugcgaag

SEQ ID NO: 17195 - RNA, 19 nt, Artificial Sequence
  Description of Artificial Sequence: Synthetic oligonucleotide
agaugaguaugaucaccgc

SEQ ID NO: 17196 - RNA, 19 nt, Artificial Sequence
  Description of Artificial Sequence: Synthetic oligonucleotide
uagugcaugaaauguuaag

SEQ ID NO: 17197 - RNA, 19 nt, Artificial Sequence
  Description of Artificial Sequence: Synthetic oligonucleotide
auagauguuuucccaagca

SEQ ID NO: 17198 - RNA, 19 nt, Artificial Sequence
  Description of Artificial Sequence: Synthetic oligonucleotide
gugaauuguauauggaaca

SEQ ID NO: 17199 - RNA, 19 nt, Artificial Sequence
  Description of Artificial Sequence: Synthetic oligonucleotide
gaacauuggcuguuuuagg

SEQ ID NO: 17200 - RNA, 19 nt, Artificial Sequence
  Description of Artificial Sequence: Synthetic oligonucleotide
agugcaugaaauguuaagu

SEQ ID NO: 17201 - RNA, 19 nt, Artificial Sequence
  Description of Artificial Sequence: Synthetic oligonucleotide
acgucauuuucuaaaauag

SEQ ID NO: 17202 - RNA, 19 nt, Artificial Sequence
  Description of Artificial Sequence: Synthetic oligonucleotide
ucuuuuccgaccacgcuga

SEQ ID NO: 17203 - RNA, 19 nt, Artificial Sequence
  Description of Artificial Sequence: Synthetic oligonucleotide
cuuugcguacucuccaccg

SEQ ID NO: 17204 - RNA, 19 nt, Artificial Sequence
  Description of Artificial Sequence: Synthetic oligonucleotide
acagacuacugcuugagau

SEQ ID NO: 17205 - RNA, 19 nt, Artificial Sequence
  Description of Artificial Sequence: Synthetic oligonucleotide
uguuuuagguacucccgcc

SEQ ID NO: 17206 - RNA, 19 nt, Artificial Sequence
  Description of Artificial Sequence: Synthetic oligonucleotide
uaaggggucaucuaucaua

SEQ ID NO: 17207 - RNA, 19 nt, Artificial Sequence
  Description of Artificial Sequence: Synthetic oligonucleotide
ugaggacuauuucacaauc

SEQ ID NO: 17208 - RNA, 19 nt, Artificial Sequence
  Description of Artificial Sequence: Synthetic oligonucleotide
ugguuauggagaacgagaa

SEQ ID NO: 17209 - RNA, 19 nt, Artificial Sequence
  Description of Artificial Sequence: Synthetic oligonucleotide
guuuggagcguccuacacg

SEQ ID NO: 17210 - RNA, 19 nt, Artificial Sequence
  Description of Artificial Sequence: Synthetic oligonucleotide
cugauucugaagcuauacg

SEQ ID NO: 17211 - RNA, 19 nt, Artificial Sequence
  Description of Artificial Sequence: Synthetic oligonucleotide
acauacagaucucuaagau

SEQ ID NO: 17212 - RNA, 19 nt, Artificial Sequence
  Description of Artificial Sequence: Synthetic oligonucleotide
guuuaugagagugcgacac

SEQ ID NO: 17213 - RNA, 19 nt, Artificial Sequence
  Description of Artificial Sequence: Synthetic oligonucleotide
uucaugagacaauggcuag

SEQ ID NO: 17214 - RNA, 19 nt, Artificial Sequence
  Description of Artificial Sequence: Synthetic oligonucleotide
cuguuuaugagagugcgac

SEQ ID NO: 17215 - RNA, 19 nt, Artificial Sequence
  Description of Artificial Sequence: Synthetic oligonucleotide
ugaacaugcaacucacuau

SEQ ID NO: 17216 - RNA, 19 nt, Artificial Sequence
  Description of Artificial Sequence: Synthetic oligonucleotide
aucuauuauagccaauuuu

SEQ ID NO: 17217 - RNA, 19 nt, Artificial Sequence
  Description of Artificial Sequence: Synthetic oligonucleotide
aguaugaucaccgcagugu

SEQ ID NO: 17218 - RNA, 19 nt, Artificial Sequence
  Description of Artificial Sequence: Synthetic oligonucleotide
ucauauacuauggcuaagu

SEQ ID NO: 17219 - RNA, 19 nt, Artificial Sequence
  Description of Artificial Sequence: Synthetic oligonucleotide
uuuaugagagugcgacacc

SEQ ID NO: 17220 - RNA, 19 nt, Artificial Sequence
  Description of Artificial Sequence: Synthetic oligonucleotide
ucauuaaaccugcccaagu

SEQ ID NO: 17221 - RNA, 19 nt, Artificial Sequence
  Description of Artificial Sequence: Synthetic oligonucleotide
auccccaaucuauuauagc

SEQ ID NO: 17222 - RNA, 19 nt, Artificial Sequence
  Description of Artificial Sequence: Synthetic oligonucleotide
caaacgaaaucuacaauga

SEQ ID NO: 17223 - RNA, 19 nt, Artificial Sequence
  Description of Artificial Sequence: Synthetic oligonucleotide
acaacauuguuuggcgagc

SEQ ID NO: 17224 - RNA, 19 nt, Artificial Sequence
  Description of Artificial Sequence: Synthetic oligonucleotide
auauaucagauuuuauauu

SEQ ID NO: 17225 - RNA, 19 nt, Artificial Sequence
  Description of Artificial Sequence: Synthetic oligonucleotide
uuaugccauagauuuaaaa

SEQ ID NO: 17226 - RNA, 19 nt, Artificial Sequence
  Description of Artificial Sequence: Synthetic oligonucleotide
caccaagcgguuuuggcgg

SEQ ID NO: 17227 - RNA, 19 nt, Artificial Sequence
  Description of Artificial Sequence: Synthetic oligonucleotide
agcaauuaauguugcauau

SEQ ID NO: 17228 - RNA, 19 nt, Artificial Sequence
  Description of Artificial Sequence: Synthetic oligonucleotide
acuauggcuaaguaugaau

SEQ ID NO: 17229 - RNA, 19 nt, Artificial Sequence
  Description of Artificial Sequence: Synthetic oligonucleotide
ugauuaacuuuuacauggu

SEQ ID NO: 17230 - RNA, 19 nt, Artificial Sequence
  Description of Artificial Sequence: Synthetic oligonucleotide
agcacaucucaugauuagc

SEQ ID NO: 17231 - RNA, 19 nt, Artificial Sequence
  Description of Artificial Sequence: Synthetic oligonucleotide
cuauacggccucuuuuccg

SEQ ID NO: 17232 - RNA, 19 nt, Artificial Sequence
  Description of Artificial Sequence: Synthetic oligonucleotide
aauuaauguugcauauaca

SEQ ID NO: 17233 - RNA, 19 nt, Artificial Sequence
  Description of Artificial Sequence: Synthetic oligonucleotide
uuuacaggguucuucuuua

SEQ ID NO: 17234 - RNA, 19 nt, Artificial Sequence
  Description of Artificial Sequence: Synthetic oligonucleotide
aucucuaagauagacccca

SEQ ID NO: 17235 - RNA, 19 nt, Artificial Sequence
  Description of Artificial Sequence: Synthetic oligonucleotide
cacuguuuaugagagugcg

SEQ ID NO: 17236 - RNA, 19 nt, Artificial Sequence
  Description of Artificial Sequence: Synthetic oligonucleotide
caagcaaagcucaccuggg

SEQ ID NO: 17237 - RNA, 19 nt, Artificial Sequence
  Description of Artificial Sequence: Synthetic oligonucleotide
aggcgagauacaaagagag

SEQ ID NO: 17238 - RNA, 19 nt, Artificial Sequence
  Description of Artificial Sequence: Synthetic oligonucleotide
uauuuugcgaagccagcuc

SEQ ID NO: 17239 - RNA, 19 nt, Artificial Sequence
  Description of Artificial Sequence: Synthetic oligonucleotide
guauuguaacccaauguug

SEQ ID NO: 17240 - RNA, 19 nt, Artificial Sequence
  Description of Artificial Sequence: Synthetic oligonucleotide
uuaugagagugcgacaccu

SEQ ID NO: 17241 - RNA, 19 nt, Artificial Sequence
  Description of Artificial Sequence: Synthetic oligonucleotide
gauccaguaagcagcuggg

SEQ ID NO: 17242 - RNA, 19 nt, Artificial Sequence
  Description of Artificial Sequence: Synthetic oligonucleotide
aaaccgagcugguaacacu

SEQ ID NO: 17243 - RNA, 19 nt, Artificial Sequence
  Description of Artificial Sequence: Synthetic oligonucleotide
caggcguauugguacaugg

SEQ ID NO: 17244 - RNA, 19 nt, Artificial Sequence
  Description of Artificial Sequence: Synthetic oligonucleotide
ugaaggauuaagacacaau

SEQ ID NO: 17245 - RNA, 19 nt, Artificial Sequence
  Description of Artificial Sequence: Synthetic oligonucleotide
cucuuuuccgaccacgcug

SEQ ID NO: 17246 - RNA, 19 nt, Artificial Sequence
  Description of Artificial Sequence: Synthetic oligonucleotide
uccaaacuguauguggugc

SEQ ID NO: 17247 - RNA, 19 nt, Artificial Sequence
  Description of Artificial Sequence: Synthetic oligonucleotide
cuauuaaaagcccauucaa

SEQ ID NO: 17248 - RNA, 19 nt, Artificial Sequence
  Description of Artificial Sequence: Synthetic oligonucleotide
aagugaucauugaacaaga

SEQ ID NO: 17249 - RNA, 19 nt, Artificial Sequence
  Description of Artificial Sequence: Synthetic oligonucleotide
auaguguaauaauuugcau

SEQ ID NO: 17250 - RNA, 19 nt, Artificial Sequence
  Description of Artificial Sequence: Synthetic oligonucleotide
ucuguuuggagcguccuac

SEQ ID NO: 17251 - RNA, 19 nt, Artificial Sequence
  Description of Artificial Sequence: Synthetic oligonucleotide
agacuacuuaacuccaaca

SEQ ID NO: 17252 - RNA, 19 nt, Artificial Sequence
  Description of Artificial Sequence: Synthetic oligonucleotide
uuagugcaugaaauguuaa

SEQ ID NO: 17253 - RNA, 19 nt, Artificial Sequence
  Description of Artificial Sequence: Synthetic oligonucleotide
caauguuaucacuauguga

SEQ ID NO: 17254 - RNA, 19 nt, Artificial Sequence
  Description of Artificial Sequence: Synthetic oligonucleotide
ugaauuguauauggaacaa

SEQ ID NO: 17255 - RNA, 19 nt, Artificial Sequence
  Description of Artificial Sequence: Synthetic oligonucleotide
guaugaucaccgcagugug

SEQ ID NO: 17256 - RNA, 19 nt, Artificial Sequence
  Description of Artificial Sequence: Synthetic oligonucleotide
auguuaaggggucaucuau

SEQ ID NO: 17257 - RNA, 19 nt, Artificial Sequence
  Description of Artificial Sequence: Synthetic oligonucleotide
uccgucguacauuuccugc

SEQ ID NO: 17258 - RNA, 19 nt, Artificial Sequence
  Description of Artificial Sequence: Synthetic oligonucleotide
agagugguuuauuuugcga

SEQ ID NO: 17259 - RNA, 19 nt, Artificial Sequence
  Description of Artificial Sequence: Synthetic oligonucleotide
ugauccauuucagagcuau

SEQ ID NO: 17260 - RNA, 19 nt, Artificial Sequence
  Description of Artificial Sequence: Synthetic oligonucleotide
uguuacuauagaacacaau

SEQ ID NO: 17261 - RNA, 19 nt, Artificial Sequence
  Description of Artificial Sequence: Synthetic oligonucleotide
cagagugguuuauuuugcg

SEQ ID NO: 17262 - RNA, 19 nt, Artificial Sequence
  Description of Artificial Sequence: Synthetic oligonucleotide
gaauuguauauggaacaac

SEQ ID NO: 17263 - RNA, 19 nt, Artificial Sequence
  Description of Artificial Sequence: Synthetic oligonucleotide
uuuuagguacucccgccuc

SEQ ID NO: 17264 - RNA, 19 nt, Artificial Sequence
  Description of Artificial Sequence: Synthetic oligonucleotide
cuaagauagaccccaggca

SEQ ID NO: 17265 - RNA, 19 nt, Artificial Sequence
  Description of Artificial Sequence: Synthetic oligonucleotide
uguuuaugagagugcgaca

SEQ ID NO: 17266 - RNA, 19 nt, Artificial Sequence
  Description of Artificial Sequence: Synthetic oligonucleotide
ggugaauuguauauggaac

SEQ ID NO: 17267 - RNA, 19 nt, Artificial Sequence
  Description of Artificial Sequence: Synthetic oligonucleotide
ugaugaccggugcuguuug

SEQ ID NO: 17268 - RNA, 19 nt, Artificial Sequence
  Description of Artificial Sequence: Synthetic oligonucleotide
ugaguaugaucaccgcagu

SEQ ID NO: 17269 - RNA, 19 nt, Artificial Sequence
  Description of Artificial Sequence: Synthetic oligonucleotide
aaacacaggcgagauacaa

SEQ ID NO: 17270 - RNA, 19 nt, Artificial Sequence
  Description of Artificial Sequence: Synthetic oligonucleotide
uguuuggagcguccuacac

SEQ ID NO: 17271 - RNA, 19 nt, Artificial Sequence
  Description of Artificial Sequence: Synthetic oligonucleotide
uuuugcgaagccagcucug

SEQ ID NO: 17272 - RNA, 19 nt, Artificial Sequence
  Description of Artificial Sequence: Synthetic oligonucleotide
ucagaucaagagauccagu

SEQ ID NO: 17273 - RNA, 19 nt, Artificial Sequence
  Description of Artificial Sequence: Synthetic oligonucleotide
augaaauuugaugaacgau

SEQ ID NO: 17274 - RNA, 19 nt, Artificial Sequence
  Description of Artificial Sequence: Synthetic oligonucleotide
uguaauggcagacgcucua

SEQ ID NO: 17275 - RNA, 19 nt, Artificial Sequence
  Description of Artificial Sequence: Synthetic oligonucleotide
cuguugaaauugaaacaac

SEQ ID NO: 17276 - RNA, 19 nt, Artificial Sequence
  Description of Artificial Sequence: Synthetic oligonucleotide
uauguuaaggggucaucua

SEQ ID NO: 17277 - RNA, 19 nt, Artificial Sequence
  Description of Artificial Sequence: Synthetic oligonucleotide
cauuguuuggcgagccgag

SEQ ID NO: 17278 - RNA, 19 nt, Artificial Sequence
  Description of Artificial Sequence: Synthetic oligonucleotide
uccaccaagcgguuuuggc

SEQ ID NO: 17279 - RNA, 19 nt, Artificial Sequence
  Description of Artificial Sequence: Synthetic oligonucleotide
auuguuuggcgagccgagc

SEQ ID NO: 17280 - RNA, 19 nt, Artificial Sequence
  Description of Artificial Sequence: Synthetic oligonucleotide
uaacaaugucagcaauuaa

SEQ ID NO: 17281 - RNA, 19 nt, Artificial Sequence
  Description of Artificial Sequence: Synthetic oligonucleotide
uggagcguccuacacggac

SEQ ID NO: 17282 - RNA, 19 nt, Artificial Sequence
  Description of Artificial Sequence: Synthetic oligonucleotide
gucauccauaccuaauuuc

SEQ ID NO: 17283 - RNA, 19 nt, Artificial Sequence
  Description of Artificial Sequence: Synthetic oligonucleotide
gaguaugaucaccgcagug

SEQ ID NO: 17284 - RNA, 19 nt, Artificial Sequence
  Description of Artificial Sequence: Synthetic oligonucleotide
gcccauucaaauuacauaa

SEQ ID NO: 17285 - RNA, 19 nt, Artificial Sequence
  Description of Artificial Sequence: Synthetic oligonucleotide
ugcuugagauccauccuaa

SEQ ID NO: 17286 - RNA, 19 nt, Artificial Sequence
  Description of Artificial Sequence: Synthetic oligonucleotide
uuuuagccaucaauaucuc

SEQ ID NO: 17287 - RNA, 19 nt, Artificial Sequence
  Description of Artificial Sequence: Synthetic oligonucleotide
caugguuauggagaacgag

SEQ ID NO: 17288 - RNA, 19 nt, Artificial Sequence
  Description of Artificial Sequence: Synthetic oligonucleotide
ucguuuggaacuucuccgu

SEQ ID NO: 17289 - RNA, 19 nt, Artificial Sequence
  Description of Artificial Sequence: Synthetic oligonucleotide
uuugcguacucuccaccgu

SEQ ID NO: 17290 - RNA, 19 nt, Artificial Sequence
  Description of Artificial Sequence: Synthetic oligonucleotide
uuguaacccaauguuggcu

SEQ ID NO: 17291 - RNA, 19 nt, Artificial Sequence
  Description of Artificial Sequence: Synthetic oligonucleotide
aagagacuacuuaacucca

SEQ ID NO: 17292 - RNA, 19 nt, Artificial Sequence
  Description of Artificial Sequence: Synthetic oligonucleotide
cauggauaucauuaaaccu

SEQ ID NO: 17293 - RNA, 19 nt, Artificial Sequence
  Description of Artificial Sequence: Synthetic oligonucleotide
aaggcuuuauuuagccuca

SEQ ID NO: 17294 - RNA, 19 nt, Artificial Sequence
  Description of Artificial Sequence: Synthetic oligonucleotide
uggcgagccgagcuaauga

SEQ ID NO: 17295 - RNA, 19 nt, Artificial Sequence
  Description of Artificial Sequence: Synthetic oligonucleotide
ucuccgucguacauuuccu

SEQ ID NO: 17296 - RNA, 19 nt, Artificial Sequence
  Description of Artificial Sequence: Synthetic oligonucleotide
acacacaguguacaguuuu

SEQ ID NO: 17297 - RNA, 19 nt, Artificial Sequence
  Description of Artificial Sequence: Synthetic oligonucleotide
accguuuguccaguguucg

SEQ ID NO: 17298 - RNA, 19 nt, Artificial Sequence
  Description of Artificial Sequence: Synthetic oligonucleotide
aguguucgcucucucacaa

SEQ ID NO: 17299 - RNA, 19 nt, Artificial Sequence
  Description of Artificial Sequence: Synthetic oligonucleotide
aaggugaauuguauaugga

SEQ ID NO: 17300 - RNA, 19 nt, Artificial Sequence
  Description of Artificial Sequence: Synthetic oligonucleotide
ugcucuucgacaugaugau

SEQ ID NO: 17301 - RNA, 19 nt, Artificial Sequence
  Description of Artificial Sequence: Synthetic oligonucleotide
gagucgucucucuugucac

SEQ ID NO: 17302 - RNA, 19 nt, Artificial Sequence
  Description of Artificial Sequence: Synthetic oligonucleotide
uucgaugucccuccaccaa

SEQ ID NO: 17303 - RNA, 19 nt, Artificial Sequence
  Description of Artificial Sequence: Synthetic oligonucleotide
aucaccgcagugugcuaac

SEQ ID NO: 17304 - RNA, 19 nt, Artificial Sequence
  Description of Artificial Sequence: Synthetic oligonucleotide
gauuugucaugaacugaug

SEQ ID NO: 17305 - RNA, 19 nt, Artificial Sequence
  Description of Artificial Sequence: Synthetic oligonucleotide
acauuguuuggcgagccga

SEQ ID NO: 17306 - RNA, 19 nt, Artificial Sequence
  Description of Artificial Sequence: Synthetic oligonucleotide
cucuucgacaugaugaugu

SEQ ID NO: 17307 - RNA, 19 nt, Artificial Sequence
  Description of Artificial Sequence: Synthetic oligonucleotide
auacaccuagcuuuauuuu

SEQ ID NO: 17308 - RNA, 19 nt, Artificial Sequence
  Description of Artificial Sequence: Synthetic oligonucleotide
gacugucgauguuguagag

SEQ ID NO: 17309 - RNA, 19 nt, Artificial Sequence
  Description of Artificial Sequence: Synthetic oligonucleotide
uggauucaacugcacuacu

SEQ ID NO: 17310 - RNA, 19 nt, Artificial Sequence
  Description of Artificial Sequence: Synthetic oligonucleotide
gcaacucacuauaaaauac

SEQ ID NO: 17311 - RNA, 19 nt, Artificial Sequence
  Description of Artificial Sequence: Synthetic oligonucleotide
gcgagauacaaagagagga

SEQ ID NO: 17312 - RNA, 19 nt, Artificial Sequence
  Description of Artificial Sequence: Synthetic oligonucleotide
uuaaggggucaucuaucau

SEQ ID NO: 17313 - RNA, 19 nt, Artificial Sequence
  Description of Artificial Sequence: Synthetic oligonucleotide
accaagcgguuuuggcggc

SEQ ID NO: 17314 - RNA, 19 nt, Artificial Sequence
  Description of Artificial Sequence: Synthetic oligonucleotide
uucuuugcguacucuccac

SEQ ID NO: 17315 - RNA, 19 nt, Artificial Sequence
  Description of Artificial Sequence: Synthetic oligonucleotide
caccucucgggaugaaggg

SEQ ID NO: 17316 - RNA, 19 nt, Artificial Sequence
  Description of Artificial Sequence: Synthetic oligonucleotide
ccaccaagcgguuuuggcg

SEQ ID NO: 17317 - RNA, 19 nt, Artificial Sequence
  Description of Artificial Sequence: Synthetic oligonucleotide
aagauacacugcaucaaua

SEQ ID NO: 17318 - RNA, 19 nt, Artificial Sequence
  Description of Artificial Sequence: Synthetic oligonucleotide
cuggagacguucuucauua

SEQ ID NO: 17319 - RNA, 19 nt, Artificial Sequence
  Description of Artificial Sequence: Synthetic oligonucleotide
ucaccgucucucucguuug

SEQ ID NO: 17320 - RNA, 19 nt, Artificial Sequence
  Description of Artificial Sequence: Synthetic oligonucleotide
guggauucaacugcacuac

SEQ ID NO: 17321 - RNA, 19 nt, Artificial Sequence
  Description of Artificial Sequence: Synthetic oligonucleotide
aaauggggagggcguauuu

SEQ ID NO: 17322 - RNA, 19 nt, Artificial Sequence
  Description of Artificial Sequence: Synthetic oligonucleotide
auguggugcucuucgacau

SEQ ID NO: 17323 - RNA, 19 nt, Artificial Sequence
  Description of Artificial Sequence: Synthetic oligonucleotide
gacguaugugaccacaaau

SEQ ID NO: 17324 - RNA, 19 nt, Artificial Sequence
  Description of Artificial Sequence: Synthetic oligonucleotide
acguaugugaccacaaauu

SEQ ID NO: 17325 - RNA, 19 nt, Artificial Sequence
  Description of Artificial Sequence: Synthetic oligonucleotide
uccaccguuuguccagugu

SEQ ID NO: 17326 - RNA, 19 nt, Artificial Sequence
  Description of Artificial Sequence: Synthetic oligonucleotide
cagcaauuaauguugcaua

SEQ ID NO: 17327 - RNA, 19 nt, Artificial Sequence
  Description of Artificial Sequence: Synthetic oligonucleotide
gguacauggauaucauuaa

SEQ ID NO: 17328 - RNA, 19 nt, Artificial Sequence
  Description of Artificial Sequence: Synthetic oligonucleotide
cauuaaaccugcccaagua

SEQ ID NO: 17329 - RNA, 19 nt, Artificial Sequence
  Description of Artificial Sequence: Synthetic oligonucleotide
caacauacucugguagaag

SEQ ID NO: 17330 - RNA, 19 nt, Artificial Sequence
  Description of Artificial Sequence: Synthetic oligonucleotide
guuuaacaaccuggagacg

SEQ ID NO: 17331 - RNA, 19 nt, Artificial Sequence
  Description of Artificial Sequence: Synthetic oligonucleotide
accgcagugugcuaacaau

SEQ ID NO: 17332 - RNA, 19 nt, Artificial Sequence
  Description of Artificial Sequence: Synthetic oligonucleotide
auacggccucuuuuccgac

SEQ ID NO: 17333 - RNA, 19 nt, Artificial Sequence
  Description of Artificial Sequence: Synthetic oligonucleotide
uguuuggcgagccgagcua

SEQ ID NO: 17334 - RNA, 19 nt, Artificial Sequence
  Description of Artificial Sequence: Synthetic oligonucleotide
aucaucuacuacagaaggu

SEQ ID NO: 17335 - RNA, 19 nt, Artificial Sequence
  Description of Artificial Sequence: Synthetic oligonucleotide
agcgguuuuggcggccugc

SEQ ID NO: 17336 - RNA, 19 nt, Artificial Sequence
  Description of Artificial Sequence: Synthetic oligonucleotide
aacacaggcgagauacaaa

SEQ ID NO: 17337 - RNA, 19 nt, Artificial Sequence
  Description of Artificial Sequence: Synthetic oligonucleotide
cucuaguguaauggcagac

SEQ ID NO: 17338 - RNA, 19 nt, Artificial Sequence
  Description of Artificial Sequence: Synthetic oligonucleotide
aaacccugacagacuacug

SEQ ID NO: 17339 - RNA, 19 nt, Artificial Sequence
  Description of Artificial Sequence: Synthetic oligonucleotide
cuauggcuaaguaugaauu

SEQ ID NO: 17340 - RNA, 19 nt, Artificial Sequence
  Description of Artificial Sequence: Synthetic oligonucleotide
uaacccaauguuggcugcc

SEQ ID NO: 17341 - RNA, 19 nt, Artificial Sequence
  Description of Artificial Sequence: Synthetic oligonucleotide
uauggagaacgagaacuuu

SEQ ID NO: 17342 - RNA, 19 nt, Artificial Sequence
  Description of Artificial Sequence: Synthetic oligonucleotide
uguccuguacuuugacaua

SEQ ID NO: 17343 - RNA, 19 nt, Artificial Sequence
  Description of Artificial Sequence: Synthetic oligonucleotide
gggagggcguauuuacagg

SEQ ID NO: 17344 - RNA, 19 nt, Artificial Sequence
  Description of Artificial Sequence: Synthetic oligonucleotide
ucccgccucacagugauau

SEQ ID NO: 17345 - RNA, 19 nt, Artificial Sequence
  Description of Artificial Sequence: Synthetic oligonucleotide
ccuucgaugucccuccacc

SEQ ID NO: 17346 - RNA, 19 nt, Artificial Sequence
  Description of Artificial Sequence: Synthetic oligonucleotide
caggcgagauacaaagaga

SEQ ID NO: 17347 - RNA, 19 nt, Artificial Sequence
  Description of Artificial Sequence: Synthetic oligonucleotide
ugguauugugauggugaug

SEQ ID NO: 17348 - RNA, 19 nt, Artificial Sequence
  Description of Artificial Sequence: Synthetic oligonucleotide
uugcguacucuccaccguu

SEQ ID NO: 17349 - RNA, 19 nt, Artificial Sequence
  Description of Artificial Sequence: Synthetic oligonucleotide
cauauacuauggcuaagua

SEQ ID NO: 17350 - RNA, 19 nt, Artificial Sequence
  Description of Artificial Sequence: Synthetic oligonucleotide
uacuauggcuaaguaugaa

SEQ ID NO: 17351 - RNA, 19 nt, Artificial Sequence
  Description of Artificial Sequence: Synthetic oligonucleotide
auacuauggcuaaguauga

SEQ ID NO: 17352 - RNA, 19 nt, Artificial Sequence
  Description of Artificial Sequence: Synthetic oligonucleotide
gacagacuacugcuugaga

SEQ ID NO: 17353 - RNA, 19 nt, Artificial Sequence
  Description of Artificial Sequence: Synthetic oligonucleotide
agugcgacaccuacagugu

SEQ ID NO: 17354 - RNA, 19 nt, Artificial Sequence
  Description of Artificial Sequence: Synthetic oligonucleotide
agccgagcuaaugaaacau

SEQ ID NO: 17355 - RNA, 19 nt, Artificial Sequence
  Description of Artificial Sequence: Synthetic oligonucleotide
gaugaccggugcuguuugc

SEQ ID NO: 17356 - RNA, 19 nt, Artificial Sequence
  Description of Artificial Sequence: Synthetic oligonucleotide
gagccgagcuaaugaaaca

SEQ ID NO: 17357 - RNA, 19 nt, Artificial Sequence
  Description of Artificial Sequence: Synthetic oligonucleotide
ugucgauguuguagaguuc

SEQ ID NO: 17358 - RNA, 19 nt, Artificial Sequence
  Description of Artificial Sequence: Synthetic oligonucleotide
guacucuccaccguuuguc

SEQ ID NO: 17359 - RNA, 19 nt, Artificial Sequence
  Description of Artificial Sequence: Synthetic oligonucleotide
acaaacccugacagacuac

SEQ ID NO: 17360 - RNA, 19 nt, Artificial Sequence
  Description of Artificial Sequence: Synthetic oligonucleotide
cuaugugaauggcugacgu

SEQ ID NO: 17361 - RNA, 19 nt, Artificial Sequence
  Description of Artificial Sequence: Synthetic oligonucleotide
aaacucaagcugggguaga

SEQ ID NO: 17362 - RNA, 19 nt, Artificial Sequence
  Description of Artificial Sequence: Synthetic oligonucleotide
uuuuccgaccacgcugacu

SEQ ID NO: 17363 - RNA, 19 nt, Artificial Sequence
  Description of Artificial Sequence: Synthetic oligonucleotide
cuuagucaggucauccaua

SEQ ID NO: 17364 - RNA, 19 nt, Artificial Sequence
  Description of Artificial Sequence: Synthetic oligonucleotide
uugaugaccggugcuguuu

SEQ ID NO: 17365 - RNA, 19 nt, Artificial Sequence
  Description of Artificial Sequence: Synthetic oligonucleotide
auggaacaacauacucugg

SEQ ID NO: 17366 - RNA, 19 nt, Artificial Sequence
  Description of Artificial Sequence: Synthetic oligonucleotide
uucacacacuccaggcgua

SEQ ID NO: 17367 - RNA, 19 nt, Artificial Sequence
  Description of Artificial Sequence: Synthetic oligonucleotide
guauugugauggugauggc

SEQ ID NO: 17368 - RNA, 19 nt, Artificial Sequence
  Description of Artificial Sequence: Synthetic oligonucleotide
auauaugguucaauagcuu

SEQ ID NO: 17369 - RNA, 19 nt, Artificial Sequence
  Description of Artificial Sequence: Synthetic oligonucleotide
gcuauacggccucuuuucc

SEQ ID NO: 17370 - RNA, 19 nt, Artificial Sequence
  Description of Artificial Sequence: Synthetic oligonucleotide
cccaaacuagauauaucac

SEQ ID NO: 17371 - RNA, 19 nt, Artificial Sequence
  Description of Artificial Sequence: Synthetic oligonucleotide
uuggcgagccgagcuaaug

SEQ ID NO: 17372 - RNA, 19 nt, Artificial Sequence
  Description of Artificial Sequence: Synthetic oligonucleotide
ucauggcuucuuugcguac

SEQ ID NO: 17373 - RNA, 19 nt, Artificial Sequence
  Description of Artificial Sequence: Synthetic oligonucleotide
agucgucucucuugucacu

SEQ ID NO: 17374 - RNA, 19 nt, Artificial Sequence
  Description of Artificial Sequence: Synthetic oligonucleotide
ggaacaacauacucuggua

SEQ ID NO: 17375 - RNA, 19 nt, Artificial Sequence
  Description of Artificial Sequence: Synthetic oligonucleotide
agacuauuaaaagcccauu

SEQ ID NO: 17376 - RNA, 19 nt, Artificial Sequence
  Description of Artificial Sequence: Synthetic oligonucleotide
ccaaacuagauauaucacu

SEQ ID NO: 17377 - RNA, 19 nt, Artificial Sequence
  Description of Artificial Sequence: Synthetic oligonucleotide
cuccgucguacauuuccug

SEQ ID NO: 17378 - RNA, 19 nt, Artificial Sequence
  Description of Artificial Sequence: Synthetic oligonucleotide
uguccaguguucgcucucu

SEQ ID NO: 17379 - RNA, 19 nt, Artificial Sequence
  Description of Artificial Sequence: Synthetic oligonucleotide
cuucgaugucccuccacca

SEQ ID NO: 17380 - RNA, 19 nt, Artificial Sequence
  Description of Artificial Sequence: Synthetic oligonucleotide
uccuucgaugucccuccac

SEQ ID NO: 17381 - RNA, 19 nt, Artificial Sequence
  Description of Artificial Sequence: Synthetic oligonucleotide
agcuauccuuuauuauuua

SEQ ID NO: 17382 - RNA, 19 nt, Artificial Sequence
  Description of Artificial Sequence: Synthetic oligonucleotide
aagcgguuuuggcggccug

SEQ ID NO: 17383 - RNA, 19 nt, Artificial Sequence
  Description of Artificial Sequence: Synthetic oligonucleotide
ugcguacucuccaccguuu

SEQ ID NO: 17384 - RNA, 19 nt, Artificial Sequence
  Description of Artificial Sequence: Synthetic oligonucleotide
ggucaaagguccaacuguc

SEQ ID NO: 17385 - RNA, 19 nt, Artificial Sequence
  Description of Artificial Sequence: Synthetic oligonucleotide
ugaccggugcuguuugcuu

SEQ ID NO: 17386 - RNA, 19 nt, Artificial Sequence
  Description of Artificial Sequence: Synthetic oligonucleotide
uuggcggccugccucuuuu

SEQ ID NO: 17387 - RNA, 19 nt, Artificial Sequence
  Description of Artificial Sequence: Synthetic oligonucleotide
agagugcgacaccuacagu

SEQ ID NO: 17388 - RNA, 19 nt, Artificial Sequence
  Description of Artificial Sequence: Synthetic oligonucleotide
cgagccgagcuaaugaaac

SEQ ID NO: 17389 - RNA, 19 nt, Artificial Sequence
  Description of Artificial Sequence: Synthetic oligonucleotide
acaugguuauggagaacga

SEQ ID NO: 17390 - RNA, 19 nt, Artificial Sequence
  Description of Artificial Sequence: Synthetic oligonucleotide
uugcuaaaucaggaugguu

SEQ ID NO: 17391 - RNA, 19 nt, Artificial Sequence
  Description of Artificial Sequence: Synthetic oligonucleotide
gggcacugucaguuuaaag

SEQ ID NO: 17392 - RNA, 19 nt, Artificial Sequence
  Description of Artificial Sequence: Synthetic oligonucleotide
cucccuucgccauuggugu

SEQ ID NO: 17393 - RNA, 19 nt, Artificial Sequence
  Description of Artificial Sequence: Synthetic oligonucleotide
ugacaguugcgcugcucua

SEQ ID NO: 17394 - RNA, 19 nt, Artificial Sequence
  Description of Artificial Sequence: Synthetic oligonucleotide
agugaucauugaacaagaa

SEQ ID NO: 17395 - RNA, 19 nt, Artificial Sequence
  Description of Artificial Sequence: Synthetic oligonucleotide
gucguacauuuccugcaga

SEQ ID NO: 17396 - RNA, 19 nt, Artificial Sequence
  Description of Artificial Sequence: Synthetic oligonucleotide
gguucaugagacaauggcu

SEQ ID NO: 17397 - RNA, 19 nt, Artificial Sequence
  Description of Artificial Sequence: Synthetic oligonucleotide
ccgcagugugcuaacaaug

SEQ ID NO: 17398 - RNA, 19 nt, Artificial Sequence
  Description of Artificial Sequence: Synthetic oligonucleotide
uuuggcgagccgagcuaau

SEQ ID NO: 17399 - RNA, 19 nt, Artificial Sequence
  Description of Artificial Sequence: Synthetic oligonucleotide
ugcgcugcucuaguguaau

SEQ ID NO: 17400 - RNA, 19 nt, Artificial Sequence
  Description of Artificial Sequence: Synthetic oligonucleotide
cagaaagaucagagucguc

SEQ ID NO: 17401 - RNA, 19 nt, Artificial Sequence
  Description of Artificial Sequence: Synthetic oligonucleotide
gauccauuucagagcuauc

SEQ ID NO: 17402 - RNA, 19 nt, Artificial Sequence
  Description of Artificial Sequence: Synthetic oligonucleotide
cuguuuggagcguccuaca

SEQ ID NO: 17403 - RNA, 19 nt, Artificial Sequence
  Description of Artificial Sequence: Synthetic oligonucleotide
caaacccugacagacuacu

SEQ ID NO: 17404 - RNA, 19 nt, Artificial Sequence
  Description of Artificial Sequence: Synthetic oligonucleotide
gcagugugcuaacaauguc

SEQ ID NO: 17405 - RNA, 19 nt, Artificial Sequence
  Description of Artificial Sequence: Synthetic oligonucleotide
caguguucgcucucucaca

SEQ ID NO: 17406 - RNA, 19 nt, Artificial Sequence
  Description of Artificial Sequence: Synthetic oligonucleotide
cuccaccaagcgguuuugg

SEQ ID NO: 17407 - RNA, 19 nt, Artificial Sequence
  Description of Artificial Sequence: Synthetic oligonucleotide
ccaaauauuagugcaugaa

SEQ ID NO: 17408 - RNA, 19 nt, Artificial Sequence
  Description of Artificial Sequence: Synthetic oligonucleotide
ccccaaucuauuauagcca

SEQ ID NO: 17409 - RNA, 19 nt, Artificial Sequence
  Description of Artificial Sequence: Synthetic oligonucleotide
agagacuacuuaacuccaa

SEQ ID NO: 17410 - RNA, 19 nt, Artificial Sequence
  Description of Artificial Sequence: Synthetic oligonucleotide
gagauccauccuaacaaau

SEQ ID NO: 17411 - RNA, 19 nt, Artificial Sequence
  Description of Artificial Sequence: Synthetic oligonucleotide
uuggagcguccuacacgga

SEQ ID NO: 17412 - RNA, 19 nt, Artificial Sequence
  Description of Artificial Sequence: Synthetic oligonucleotide
ucuccaccguuuguccagu

SEQ ID NO: 17413 - RNA, 19 nt, Artificial Sequence
  Description of Artificial Sequence: Synthetic oligonucleotide
agacaauggcuagcaaauu

SEQ ID NO: 17414 - RNA, 19 nt, Artificial Sequence
  Description of Artificial Sequence: Synthetic oligonucleotide
uuccgaccacgcugacugc

SEQ ID NO: 17415 - RNA, 19 nt, Artificial Sequence
  Description of Artificial Sequence: Synthetic oligonucleotide
ucaccgcagugugcuaaca

SEQ ID NO: 17416 - RNA, 19 nt, Artificial Sequence
  Description of Artificial Sequence: Synthetic oligonucleotide
gaccccaggauaucuguuu

SEQ ID NO: 17417 - RNA, 19 nt, Artificial Sequence
  Description of Artificial Sequence: Synthetic oligonucleotide
gugcgacaccuacaguguc

SEQ ID NO: 17418 - RNA, 19 nt, Artificial Sequence
  Description of Artificial Sequence: Synthetic oligonucleotide
guuuggcgagccgagcuaa

SEQ ID NO: 17419 - RNA, 19 nt, Artificial Sequence
  Description of Artificial Sequence: Synthetic oligonucleotide
cugcccugauagacagcag

SEQ ID NO: 17420 - RNA, 19 nt, Artificial Sequence
  Description of Artificial Sequence: Synthetic oligonucleotide
cuuuuccgaccacgcugac

SEQ ID NO: 17421 - RNA, 19 nt, Artificial Sequence
  Description of Artificial Sequence: Synthetic oligonucleotide
uccaggcguauugguacau

SEQ ID NO: 17422 - RNA, 19 nt, Artificial Sequence
  Description of Artificial Sequence: Synthetic oligonucleotide
uccgacuucuaggcuucuc

SEQ ID NO: 17423 - RNA, 19 nt, Artificial Sequence
  Description of Artificial Sequence: Synthetic oligonucleotide
ucccacagucugccuguua

SEQ ID NO: 17424 - RNA, 19 nt, Artificial Sequence
  Description of Artificial Sequence: Synthetic oligonucleotide
ggcgagccgagcuaaugaa

SEQ ID NO: 17425 - RNA, 19 nt, Artificial Sequence
  Description of Artificial Sequence: Synthetic oligonucleotide
gcguacucuccaccguuug

SEQ ID NO: 17426 - RNA, 19 nt, Artificial Sequence
  Description of Artificial Sequence: Synthetic oligonucleotide
ggagcguccuacacggaca

SEQ ID NO: 17427 - RNA, 19 nt, Artificial Sequence
  Description of Artificial Sequence: Synthetic oligonucleotide
cgucguacauuuccugcag

SEQ ID NO: 17428 - RNA, 19 nt, Artificial Sequence
  Description of Artificial Sequence: Synthetic oligonucleotide
gagcguccuacacggacau

SEQ ID NO: 17429 - RNA, 19 nt, Artificial Sequence
  Description of Artificial Sequence: Synthetic oligonucleotide
gggcguauuuacaggguuc

SEQ ID NO: 17430 - RNA, 19 nt, Artificial Sequence
  Description of Artificial Sequence: Synthetic oligonucleotide
ccgccucacagugauauuc

SEQ ID NO: 17431 - RNA, 19 nt, Artificial Sequence
  Description of Artificial Sequence: Synthetic oligonucleotide
caccgcagugugcuaacaa

SEQ ID NO: 17432 - RNA, 19 nt, Artificial Sequence
  Description of Artificial Sequence: Synthetic oligonucleotide
cgcucucucacaaaauuaa

SEQ ID NO: 17433 - RNA, 19 nt, Artificial Sequence
  Description of Artificial Sequence: Synthetic oligonucleotide
ggucauccauaccuaauuu

SEQ ID NO: 17434 - RNA, 19 nt, Artificial Sequence
  Description of Artificial Sequence: Synthetic oligonucleotide
ggcguauuuacaggguucu

SEQ ID NO: 17435 - RNA, 19 nt, Artificial Sequence
  Description of Artificial Sequence: Synthetic oligonucleotide
cuccaccguuuguccagug

SEQ ID NO: 17436 - RNA, 19 nt, Artificial Sequence
  Description of Artificial Sequence: Synthetic oligonucleotide
ccguuuguccaguguucgc

SEQ ID NO: 17437 - RNA, 19 nt, Artificial Sequence
  Description of Artificial Sequence: Synthetic oligonucleotide
ccgucguacauuuccugca

SEQ ID NO: 17438 - RNA, 19 nt, Artificial Sequence
  Description of Artificial Sequence: Synthetic oligonucleotide
gagggcguauuuacagggu

SEQ ID NO: 17439 - RNA, 19 nt, Artificial Sequence
  Description of Artificial Sequence: Synthetic oligonucleotide
gcguauugguacauggaua

SEQ ID NO: 17440 - RNA, 19 nt, Artificial Sequence
  Description of Artificial Sequence: Synthetic oligonucleotide
guguucgcucucucacaaa

SEQ ID NO: 17441 - RNA, 19 nt, Artificial Sequence
  Description of Artificial Sequence: Synthetic oligonucleotide
cugagauuguuugccugcu

SEQ ID NO: 17442 - RNA, 19 nt, Artificial Sequence
  Description of Artificial Sequence: Synthetic oligonucleotide
gcgguuuuggcggccugcc

SEQ ID NO: 17443 - RNA, 19 nt, Artificial Sequence
  Description of Artificial Sequence: Synthetic oligonucleotide
guguaauggcagacgcucu

SEQ ID NO: 17444 - RNA, 19 nt, Artificial Sequence
  Description of Artificial Sequence: Synthetic oligonucleotide
ugacugccuuuagguuucu

SEQ ID NO: 17445 - RNA, 19 nt, Artificial Sequence
  Description of Artificial Sequence: Synthetic oligonucleotide
caguaagcagcugggcacu

SEQ ID NO: 17446 - RNA, 19 nt, Artificial Sequence
  Description of Artificial Sequence: Synthetic oligonucleotide
gcguccuacacggacauuu

SEQ ID NO: 17447 - RNA, 19 nt, Artificial Sequence
  Description of Artificial Sequence: Synthetic oligonucleotide
ggguaaacacaggcgagau

SEQ ID NO: 17448 - RNA, 19 nt, Artificial Sequence
  Description of Artificial Sequence: Synthetic oligonucleotide
ccaggcguauugguacaug

SEQ ID NO: 17449 - RNA, 19 nt, Artificial Sequence
  Description of Artificial Sequence: Synthetic oligonucleotide
gcugacuguaaagcauacu

SEQ ID NO: 17450 - RNA, 19 nt, Artificial Sequence
  Description of Artificial Sequence: Synthetic oligonucleotide
gcgagccgagcuaaugaaa

SEQ ID NO: 17451 - RNA, 19 nt, Artificial Sequence
  Description of Artificial Sequence: Synthetic oligonucleotide
cuguucuguucauccucau

SEQ ID NO: 17452 - RNA, 19 nt, Artificial Sequence
  Description of Artificial Sequence: Synthetic oligonucleotide
cccauucaaauuacauaau

SEQ ID NO: 17453 - RNA, 19 nt, Artificial Sequence
  Description of Artificial Sequence: Synthetic oligonucleotide
uagcaccucucgggaugaa

SEQ ID NO: 17454 - RNA, 19 nt, Artificial Sequence
  Description of Artificial Sequence: Synthetic oligonucleotide
caagcgguuuuggcggccu

SEQ ID NO: 17455 - RNA, 19 nt, Artificial Sequence
  Description of Artificial Sequence: Synthetic oligonucleotide
ccaccguuuguccaguguu

SEQ ID NO: 17456 - RNA, 19 nt, Artificial Sequence
  Description of Artificial Sequence: Synthetic oligonucleotide
agcguccuacacggacauu

SEQ ID NO: 17457 - RNA, 19 nt, Artificial Sequence
  Description of Artificial Sequence: Synthetic oligonucleotide
gccgagcuaaugaaacauu

SEQ ID NO: 17458 - RNA, 19 nt, Artificial Sequence
  Description of Artificial Sequence: Synthetic oligonucleotide
guucaccgucucucucguu

SEQ ID NO: 17459 - RNA, 19 nt, Artificial Sequence
  Description of Artificial Sequence: Synthetic oligonucleotide
ccgaccacgcugacugccu

SEQ ID NO: 17460 - RNA, 19 nt, Artificial Sequence
  Description of Artificial Sequence: Synthetic oligonucleotide
gucccuccaccaagcgguu

SEQ ID NO: 17461 - RNA, 19 nt, Artificial Sequence
  Description of Artificial Sequence: Synthetic oligonucleotide
aagucaacgaucuugaugg

SEQ ID NO: 17462 - RNA, 19 nt, Artificial Sequence
  Description of Artificial Sequence: Synthetic oligonucleotide
aacguuacaauauacacag

SEQ ID NO: 17463 - RNA, 19 nt, Artificial Sequence
  Description of Artificial Sequence: Synthetic oligonucleotide
aacugcucaacuuaaaugg

SEQ ID NO: 17464 - RNA, 19 nt, Artificial Sequence
  Description of Artificial Sequence: Synthetic oligonucleotide
aaaauugaccuagucagcc

SEQ ID NO: 17465 - RNA, 19 nt, Artificial Sequence
  Description of Artificial Sequence: Synthetic oligonucleotide
uuuagaaugugacaggagc

SEQ ID NO: 17466 - RNA, 19 nt, Artificial Sequence
  Description of Artificial Sequence: Synthetic oligonucleotide
uaaguuaacguccauagcu

SEQ ID NO: 17467 - RNA, 19 nt, Artificial Sequence
  Description of Artificial Sequence: Synthetic oligonucleotide
aaaauugguauguuggaug

SEQ ID NO: 17468 - RNA, 19 nt, Artificial Sequence
  Description of Artificial Sequence: Synthetic oligonucleotide
uuuaacguuacaauauaca

SEQ ID NO: 17469 - RNA, 19 nt, Artificial Sequence
  Description of Artificial Sequence: Synthetic oligonucleotide
guuaaguuaacguccauag

SEQ ID NO: 17470 - RNA, 19 nt, Artificial Sequence
  Description of Artificial Sequence: Synthetic oligonucleotide
agacaaacccacuaugacc

SEQ ID NO: 17471 - RNA, 19 nt, Artificial Sequence
  Description of Artificial Sequence: Synthetic oligonucleotide
aacauaacacaguaugcag

SEQ ID NO: 17472 - RNA, 19 nt, Artificial Sequence
  Description of Artificial Sequence: Synthetic oligonucleotide
uuaacguuacaauauacac

SEQ ID NO: 17473 - RNA, 19 nt, Artificial Sequence
  Description of Artificial Sequence: Synthetic oligonucleotide
  modified_base (11)..(11): a, c, u, g, unknown or other
cuggagaccgnuaaaagcg

SEQ ID NO: 17474 - RNA, 19 nt, Artificial Sequence
  Description of Artificial Sequence: Synthetic oligonucleotide
uacgauauaaucauaguua

SEQ ID NO: 17475 - RNA, 19 nt, Artificial Sequence
  Description of Artificial Sequence: Synthetic oligonucleotide
uuucgaaacauaaaguguc

SEQ ID NO: 17476 - RNA, 19 nt, Artificial Sequence
  Description of Artificial Sequence: Synthetic oligonucleotide
cauaauaagguugaauccg

SEQ ID NO: 17477 - RNA, 19 nt, Artificial Sequence
  Description of Artificial Sequence: Synthetic oligonucleotide
aaaccacuacaucuguggc

SEQ ID NO: 17478 - RNA, 19 nt, Artificial Sequence
  Description of Artificial Sequence: Synthetic oligonucleotide
ucauguaaugugcagggcc

SEQ ID NO: 17479 - RNA, 19 nt, Artificial Sequence
  Description of Artificial Sequence: Synthetic oligonucleotide
aaucgucccuuucacauag

SEQ ID NO: 17480 - RNA, 19 nt, Artificial Sequence
  Description of Artificial Sequence: Synthetic oligonucleotide
uguaaaauucacagcauaa

SEQ ID NO: 17481 - RNA, 19 nt, Artificial Sequence
  Description of Artificial Sequence: Synthetic oligonucleotide
aagugauuguaucugaaau

SEQ ID NO: 17482 - RNA, 19 nt, Artificial Sequence
  Description of Artificial Sequence: Synthetic oligonucleotide
uuaugacacacgcaaagug

SEQ ID NO: 17483 - RNA, 19 nt, Artificial Sequence
  Description of Artificial Sequence: Synthetic oligonucleotide
aucgaucucauaacgaucc

SEQ ID NO: 17484 - RNA, 19 nt, Artificial Sequence
  Description of Artificial Sequence: Synthetic oligonucleotide
uaugacacacgcaaaguga

SEQ ID NO: 17485 - RNA, 19 nt, Artificial Sequence
  Description of Artificial Sequence: Synthetic oligonucleotide
ucagggaucgaucucauaa

SEQ ID NO: 17486 - RNA, 19 nt, Artificial Sequence
  Description of Artificial Sequence: Synthetic oligonucleotide
ugucaaucuauucugucca

SEQ ID NO: 17487 - RNA, 19 nt, Artificial Sequence
  Description of Artificial Sequence: Synthetic oligonucleotide
aguuaacguccauagcucc

SEQ ID NO: 17488 - RNA, 19 nt, Artificial Sequence
  Description of Artificial Sequence: Synthetic oligonucleotide
ucgcgugagauucaaagag

SEQ ID NO: 17489 - RNA, 19 nt, Artificial Sequence
  Description of Artificial Sequence: Synthetic oligonucleotide
uucgaaacauaaagugucg

SEQ ID NO: 17490 - RNA, 19 nt, Artificial Sequence
  Description of Artificial Sequence: Synthetic oligonucleotide
aauguagucacgagcuagc

SEQ ID NO: 17491 - RNA, 19 nt, Artificial Sequence
  Description of Artificial Sequence: Synthetic oligonucleotide
ugauacuaagcucuggagu

SEQ ID NO: 17492 - RNA, 19 nt, Artificial Sequence
  Description of Artificial Sequence: Synthetic oligonucleotide
agacgguuaaguuaacguc

SEQ ID NO: 17493 - RNA, 19 nt, Artificial Sequence
  Description of Artificial Sequence: Synthetic oligonucleotide
uuacgauauaaucauaguu

SEQ ID NO: 17494 - RNA, 19 nt, Artificial Sequence
  Description of Artificial Sequence: Synthetic oligonucleotide
uuaucauacauaagaccgc

SEQ ID NO: 17495 - RNA, 19 nt, Artificial Sequence
  Description of Artificial Sequence: Synthetic oligonucleotide
auauugguauauccucugc

SEQ ID NO: 17496 - RNA, 19 nt, Artificial Sequence
  Description of Artificial Sequence: Synthetic oligonucleotide
gguuucgaaacauaaagug

SEQ ID NO: 17497 - RNA, 19 nt, Artificial Sequence
  Description of Artificial Sequence: Synthetic oligonucleotide
cuugauuaccaguagagga

SEQ ID NO: 17498 - RNA, 19 nt, Artificial Sequence
  Description of Artificial Sequence: Synthetic oligonucleotide
ugaugcaaugcguuuugcg

SEQ ID NO: 17499 - RNA, 19 nt, Artificial Sequence
  Description of Artificial Sequence: Synthetic oligonucleotide
ugggaacacaaacuuaggc

SEQ ID NO: 17500 - RNA, 19 nt, Artificial Sequence
  Description of Artificial Sequence: Synthetic oligonucleotide
caaacgcucaucaacuacc

SEQ ID NO: 17501 - RNA, 19 nt, Artificial Sequence
  Description of Artificial Sequence: Synthetic oligonucleotide
acauuuagaaugugacagg

SEQ ID NO: 17502 - RNA, 19 nt, Artificial Sequence
  Description of Artificial Sequence: Synthetic oligonucleotide
uauauugguauauccucug

SEQ ID NO: 17503 - RNA, 19 nt, Artificial Sequence
  Description of Artificial Sequence: Synthetic oligonucleotide
auuguaucugaaaugguag

SEQ ID NO: 17504 - RNA, 19 nt, Artificial Sequence
  Description of Artificial Sequence: Synthetic oligonucleotide
ucggaaguugcaaagacua

SEQ ID NO: 17505 - RNA, 19 nt, Artificial Sequence
  Description of Artificial Sequence: Synthetic oligonucleotide
ucguuauggaaauagcggu

SEQ ID NO: 17506 - RNA, 19 nt, Artificial Sequence
  Description of Artificial Sequence: Synthetic oligonucleotide
aacguccauagcuccauuc

SEQ ID NO: 17507 - RNA, 19 nt, Artificial Sequence
  Description of Artificial Sequence: Synthetic oligonucleotide
aaguuaacguccauagcuc

SEQ ID NO: 17508 - RNA, 19 nt, Artificial Sequence
  Description of Artificial Sequence: Synthetic oligonucleotide
gacgguuaaguuaacgucc

SEQ ID NO: 17509 - RNA, 19 nt, Artificial Sequence
  Description of Artificial Sequence: Synthetic oligonucleotide
uuaaguuaacguccauagc

SEQ ID NO: 17510 - RNA, 19 nt, Artificial Sequence
  Description of Artificial Sequence: Synthetic oligonucleotide
uagacgguuaaguuaacgu

SEQ ID NO: 17511 - RNA, 19 nt, Artificial Sequence
  Description of Artificial Sequence: Synthetic oligonucleotide
ggugcguugggucugaccg

SEQ ID NO: 17512 - RNA, 19 nt, Artificial Sequence
  Description of Artificial Sequence: Synthetic oligonucleotide
  modified_base (2)..(2): a, c, u, g, unknown or other
gngccuuugccuaucaggg

SEQ ID NO: 17513 - RNA, 19 nt, Artificial Sequence
  Description of Artificial Sequence: Synthetic oligonucleotide
  modified_base (7)..(7): a, c, u, g, unknown or other
agaccgnuaaaagcgacuc

SEQ ID NO: 17514 - RNA, 19 nt, Artificial Sequence
  Description of Artificial Sequence: Synthetic oligonucleotide
uuagcggaaaauugguaug

SEQ ID NO: 17515 - RNA, 19 nt, Artificial Sequence
  Description of Artificial Sequence: Synthetic oligonucleotide
cuugcuaacauguggcaac

SEQ ID NO: 17516 - RNA, 19 nt, Artificial Sequence
  Description of Artificial Sequence: Synthetic oligonucleotide
aguguguuaaucuccuucu

SEQ ID NO: 17517 - RNA, 19 nt, Artificial Sequence
  Description of Artificial Sequence: Synthetic oligonucleotide
uuaaggacugucugcaaac

SEQ ID NO: 17518 - RNA, 19 nt, Artificial Sequence
  Description of Artificial Sequence: Synthetic oligonucleotide
agggaucgaucucauaacg

SEQ ID NO: 17519 - RNA, 19 nt, Artificial Sequence
  Description of Artificial Sequence: Synthetic oligonucleotide
acugcuacauuauugguua

SEQ ID NO: 17520 - RNA, 19 nt, Artificial Sequence
  Description of Artificial Sequence: Synthetic oligonucleotide
ucuaacuucgaguccaaau

SEQ ID NO: 17521 - RNA, 19 nt, Artificial Sequence
  Description of Artificial Sequence: Synthetic oligonucleotide
uacaguacugcauuuccgu

SEQ ID NO: 17522 - RNA, 19 nt, Artificial Sequence
  Description of Artificial Sequence: Synthetic oligonucleotide
acaaucgucccuuucacau

SEQ ID NO: 17523 - RNA, 19 nt, Artificial Sequence
  Description of Artificial Sequence: Synthetic oligonucleotide
cuguguuacgugaaggcag

SEQ ID NO: 17524 - RNA, 19 nt, Artificial Sequence
  Description of Artificial Sequence: Synthetic oligonucleotide
uaacgauccauccuacuuc

SEQ ID NO: 17525 - RNA, 19 nt, Artificial Sequence
  Description of Artificial Sequence: Synthetic oligonucleotide
augauacuaagcucuggag

SEQ ID NO: 17526 - RNA, 19 nt, Artificial Sequence
  Description of Artificial Sequence: Synthetic oligonucleotide
  modified_base (16)..(16): a, c, u, g, unknown or other
caaccuguccaaaggngcc

SEQ ID NO: 17527 - RNA, 19 nt, Artificial Sequence
  Description of Artificial Sequence: Synthetic oligonucleotide
aaauugaccuagucagcca

SEQ ID NO: 17528 - RNA, 19 nt, Artificial Sequence
  Description of Artificial Sequence: Synthetic oligonucleotide
cuuacaauuagugggucac

SEQ ID NO: 17529 - RNA, 19 nt, Artificial Sequence
  Description of Artificial Sequence: Synthetic oligonucleotide
  modified_base (19)..(19): a, c, u, g, unknown or other
ucacaaccuguccaaaggn

SEQ ID NO: 17530 - RNA, 19 nt, Artificial Sequence
  Description of Artificial Sequence: Synthetic oligonucleotide
gacgucuuugugcagaaga

SEQ ID NO: 17531 - RNA, 19 nt, Artificial Sequence
  Description of Artificial Sequence: Synthetic oligonucleotide
aguaacgugguguucugcu

SEQ ID NO: 17532 - RNA, 19 nt, Artificial Sequence
  Description of Artificial Sequence: Synthetic oligonucleotide
aaaguaacgugguguucug

SEQ ID NO: 17533 - RNA, 19 nt, Artificial Sequence
  Description of Artificial Sequence: Synthetic oligonucleotide
  modified_base (10)..(10): a, c, u, g, unknown or other
uggagaccgnuaaaagcga

SEQ ID NO: 17534 - RNA, 19 nt, Artificial Sequence
  Description of Artificial Sequence: Synthetic oligonucleotide
guggcuauggccaaccucc

SEQ ID NO: 17535 - RNA, 19 nt, Artificial Sequence
  Description of Artificial Sequence: Synthetic oligonucleotide
gugaaucaggaauacgggc

SEQ ID NO: 17536 - RNA, 19 nt, Artificial Sequence
  Description of Artificial Sequence: Synthetic oligonucleotide
aaugcguuuugcggagggc

SEQ ID NO: 17537 - RNA, 19 nt, Artificial Sequence
  Description of Artificial Sequence: Synthetic oligonucleotide
  modified_base (3)..(3): a, c, u, g, unknown or other
ggngccuuugccuaucagg

SEQ ID NO: 17538 - RNA, 19 nt, Artificial Sequence
  Description of Artificial Sequence: Synthetic oligonucleotide
uaggcuuucacaaccuguc

SEQ ID NO: 17539 - RNA, 19 nt, Artificial Sequence
  Description of Artificial Sequence: Synthetic oligonucleotide
uuuaugacacacgcaaagu

SEQ ID NO: 17540 - RNA, 19 nt, Artificial Sequence
  Description of Artificial Sequence: Synthetic oligonucleotide
uaacgugguguucugcuga

SEQ ID NO: 17541 - RNA, 19 nt, Artificial Sequence
  Description of Artificial Sequence: Synthetic oligonucleotide
  modified_base (5)..(5): a, c, u, g, unknown or other
accgnuaaaagcgacucug

SEQ ID NO: 17542 - RNA, 19 nt, Artificial Sequence
  Description of Artificial Sequence: Synthetic oligonucleotide
auaacgauccauccuacuu

SEQ ID NO: 17543 - RNA, 19 nt, Artificial Sequence
  Description of Artificial Sequence: Synthetic oligonucleotide
augcguuuugcggagggcc

SEQ ID NO: 17544 - RNA, 19 nt, Artificial Sequence
  Description of Artificial Sequence: Synthetic oligonucleotide
cacuaugaccgggagaugg

SEQ ID NO: 17545 - RNA, 19 nt, Artificial Sequence
  Description of Artificial Sequence: Synthetic oligonucleotide
uguaggguguacuacuuua

SEQ ID NO: 17546 - RNA, 19 nt, Artificial Sequence
  Description of Artificial Sequence: Synthetic oligonucleotide
aaacgcauguccacaagug

SEQ ID NO: 17547 - RNA, 19 nt, Artificial Sequence
  Description of Artificial Sequence: Synthetic oligonucleotide
aaagcgacucugaauauau

SEQ ID NO: 17548 - RNA, 19 nt, Artificial Sequence
  Description of Artificial Sequence: Synthetic oligonucleotide
aaguaacgugguguucugc

SEQ ID NO: 17549 - RNA, 19 nt, Artificial Sequence
  Description of Artificial Sequence: Synthetic oligonucleotide
caauuagugggucacaaaa

SEQ ID NO: 17550 - RNA, 19 nt, Artificial Sequence
  Description of Artificial Sequence: Synthetic oligonucleotide
ucguuucaaaugcacuaug

SEQ ID NO: 17551 - RNA, 19 nt, Artificial Sequence
  Description of Artificial Sequence: Synthetic oligonucleotide
ugcaaugcguuuugcggag

SEQ ID NO: 17552 - RNA, 19 nt, Artificial Sequence
  Description of Artificial Sequence: Synthetic oligonucleotide
agucggcuacaguaugacc

SEQ ID NO: 17553 - RNA, 19 nt, Artificial Sequence
  Description of Artificial Sequence: Synthetic oligonucleotide
ucgauagcaaggucauaag

SEQ ID NO: 17554 - RNA, 19 nt, Artificial Sequence
  Description of Artificial Sequence: Synthetic oligonucleotide
gguuucguuauggaaauag

SEQ ID NO: 17555 - RNA, 19 nt, Artificial Sequence
  Description of Artificial Sequence: Synthetic oligonucleotide
uguugcucgugcccgagga

SEQ ID NO: 17556 - RNA, 19 nt, Artificial Sequence
  Description of Artificial Sequence: Synthetic oligonucleotide
uucgcgugagauucaaaga

SEQ ID NO: 17557 - RNA, 19 nt, Artificial Sequence
  Description of Artificial Sequence: Synthetic oligonucleotide
gaucauaggcuuucacaac

SEQ ID NO: 17558 - RNA, 19 nt, Artificial Sequence
  Description of Artificial Sequence: Synthetic oligonucleotide
augcaaugcguuuugcgga

SEQ ID NO: 17559 - RNA, 19 nt, Artificial Sequence
  Description of Artificial Sequence: Synthetic oligonucleotide
  modified_base (2)..(2): a, c, u, g, unknown or other
gnuaaaagcgacucugaau

SEQ ID NO: 17560 - RNA, 19 nt, Artificial Sequence
  Description of Artificial Sequence: Synthetic oligonucleotide
aguagucggcuacaguaug

SEQ ID NO: 17561 - RNA, 19 nt, Artificial Sequence
  Description of Artificial Sequence: Synthetic oligonucleotide
cuaguuacaccuuguguca

SEQ ID NO: 17562 - RNA, 19 nt, Artificial Sequence
  Description of Artificial Sequence: Synthetic oligonucleotide
ucauaacgauccauccuac

SEQ ID NO: 17563 - RNA, 19 nt, Artificial Sequence
  Description of Artificial Sequence: Synthetic oligonucleotide
guagacgguuaaguuaacg

SEQ ID NO: 17564 - RNA, 19 nt, Artificial Sequence
  Description of Artificial Sequence: Synthetic oligonucleotide
uuacgugaaggcaguguac

SEQ ID NO: 17565 - RNA, 19 nt, Artificial Sequence
  Description of Artificial Sequence: Synthetic oligonucleotide
uuugcccucuuguagcggu

SEQ ID NO: 17566 - RNA, 19 nt, Artificial Sequence
  Description of Artificial Sequence: Synthetic oligonucleotide
uaagaccgcaugacuauaa

SEQ ID NO: 17567 - RNA, 19 nt, Artificial Sequence
  Description of Artificial Sequence: Synthetic oligonucleotide
  modified_base (6)..(6): a, c, u, g, unknown or other
aaaggngccuuugccuauc

SEQ ID NO: 17568 - RNA, 19 nt, Artificial Sequence
  Description of Artificial Sequence: Synthetic oligonucleotide
uacaauuagugggucacaa

SEQ ID NO: 17569 - RNA, 19 nt, Artificial Sequence
  Description of Artificial Sequence: Synthetic oligonucleotide
uggagucgcaaggaaaagc

SEQ ID NO: 17570 - RNA, 19 nt, Artificial Sequence
  Description of Artificial Sequence: Synthetic oligonucleotide
uguuagcggaaaauuggua

SEQ ID NO: 17571 - RNA, 19 nt, Artificial Sequence
  Description of Artificial Sequence: Synthetic oligonucleotide
aggaauacgggcaucgacu

SEQ ID NO: 17572 - RNA, 19 nt, Artificial Sequence
  Description of Artificial Sequence: Synthetic oligonucleotide
ucguguuuguaccuucauc

SEQ ID NO: 17573 - RNA, 19 nt, Artificial Sequence
  Description of Artificial Sequence: Synthetic oligonucleotide
uuuguaggguguacuacuu

SEQ ID NO: 17574 - RNA, 19 nt, Artificial Sequence
  Description of Artificial Sequence: Synthetic oligonucleotide
cucauaacgauccauccua

SEQ ID NO: 17575 - RNA, 19 nt, Artificial Sequence
  Description of Artificial Sequence: Synthetic oligonucleotide
auggugguggugguggugg

SEQ ID NO: 17576 - RNA, 19 nt, Artificial Sequence
  Description of Artificial Sequence: Synthetic oligonucleotide
uccuacuguggaccugccg

SEQ ID NO: 17577 - RNA, 19 nt, Artificial Sequence
  Description of Artificial Sequence: Synthetic oligonucleotide
ugcuacauuauugguuaca

SEQ ID NO: 17578 - RNA, 19 nt, Artificial Sequence
  Description of Artificial Sequence: Synthetic oligonucleotide
caaugcguuuugcggaggg

SEQ ID NO: 17579 - RNA, 19 nt, Artificial Sequence
  Description of Artificial Sequence: Synthetic oligonucleotide
acguccauagcuccauucu

SEQ ID NO: 17580 - RNA, 19 nt, Artificial Sequence
  Description of Artificial Sequence: Synthetic oligonucleotide
agcuauuuguuggagaauu

SEQ ID NO: 17581 - RNA, 19 nt, Artificial Sequence
  Description of Artificial Sequence: Synthetic oligonucleotide
aacucccgaagucaacgau

SEQ ID NO: 17582 - RNA, 19 nt, Artificial Sequence
  Description of Artificial Sequence: Synthetic oligonucleotide
caguaugacccgauucccc

SEQ ID NO: 17583 - RNA, 19 nt, Artificial Sequence
  Description of Artificial Sequence: Synthetic oligonucleotide
aagaccgcaugacuauaau

SEQ ID NO: 17584 - RNA, 19 nt, Artificial Sequence
  Description of Artificial Sequence: Synthetic oligonucleotide
gaagacgucuuugugcaga

SEQ ID NO: 17585 - RNA, 19 nt, Artificial Sequence
  Description of Artificial Sequence: Synthetic oligonucleotide
guuacgugaaggcagugua

SEQ ID NO: 17586 - RNA, 19 nt, Artificial Sequence
  Description of Artificial Sequence: Synthetic oligonucleotide
ugcucgugcccgaggaucc

SEQ ID NO: 17587 - RNA, 19 nt, Artificial Sequence
  Description of Artificial Sequence: Synthetic oligonucleotide
accgcaugacuauaauaca

SEQ ID NO: 17588 - RNA, 19 nt, Artificial Sequence
  Description of Artificial Sequence: Synthetic oligonucleotide
ccacaugucgauagcaagg

SEQ ID NO: 17589 - RNA, 19 nt, Artificial Sequence
  Description of Artificial Sequence: Synthetic oligonucleotide
ucgaaacauaaagugucgu

SEQ ID NO: 17590 - RNA, 19 nt, Artificial Sequence
  Description of Artificial Sequence: Synthetic oligonucleotide
uagcggaaaauugguaugu

SEQ ID NO: 17591 - RNA, 19 nt, Artificial Sequence
  Description of Artificial Sequence: Synthetic oligonucleotide
ugcuugcuaacauguggca

SEQ ID NO: 17592 - RNA, 19 nt, Artificial Sequence
  Description of Artificial Sequence: Synthetic oligonucleotide
guguacuacuuuauuaguc

SEQ ID NO: 17593 - RNA, 19 nt, Artificial Sequence
  Description of Artificial Sequence: Synthetic oligonucleotide
augaugcaaugcguuuugc

SEQ ID NO: 17594 - RNA, 19 nt, Artificial Sequence
  Description of Artificial Sequence: Synthetic oligonucleotide
aaacgcucaucaacuacca

SEQ ID NO: 17595 - RNA, 19 nt, Artificial Sequence
  Description of Artificial Sequence: Synthetic oligonucleotide
ggaauacgggcaucgacug

SEQ ID NO: 17596 - RNA, 19 nt, Artificial Sequence
  Description of Artificial Sequence: Synthetic oligonucleotide
uagcgguucaguguguuaa

SEQ ID NO: 17597 - RNA, 19 nt, Artificial Sequence
  Description of Artificial Sequence: Synthetic oligonucleotide
caggaauacgggcaucgac

SEQ ID NO: 17598 - RNA, 19 nt, Artificial Sequence
  Description of Artificial Sequence: Synthetic oligonucleotide
gaucgaucucauaacgauc

SEQ ID NO: 17599 - RNA, 19 nt, Artificial Sequence
  Description of Artificial Sequence: Synthetic oligonucleotide
acauaagaccgcaugacua

SEQ ID NO: 17600 - RNA, 19 nt, Artificial Sequence
  Description of Artificial Sequence: Synthetic oligonucleotide
uacgggcaucgacugcugg

SEQ ID NO: 17601 - RNA, 19 nt, Artificial Sequence
  Description of Artificial Sequence: Synthetic oligonucleotide
gaauacgggcaucgacugc

SEQ ID NO: 17602 - RNA, 19 nt, Artificial Sequence
  Description of Artificial Sequence: Synthetic oligonucleotide
cuaucagggaucgaucuca

SEQ ID NO: 17603 - RNA, 19 nt, Artificial Sequence
  Description of Artificial Sequence: Synthetic oligonucleotide
uuaacguccauagcuccau

SEQ ID NO: 17604 - RNA, 19 nt, Artificial Sequence
  Description of Artificial Sequence: Synthetic oligonucleotide
guggugguggugguggugg

SEQ ID NO: 17605 - RNA, 19 nt, Artificial Sequence
  Description of Artificial Sequence: Synthetic oligonucleotide
cggggauuggaguagacgg

SEQ ID NO: 17606 - RNA, 19 nt, Artificial Sequence
  Description of Artificial Sequence: Synthetic oligonucleotide
aucgaggucucacacucaa

SEQ ID NO: 17607 - RNA, 19 nt, Artificial Sequence
  Description of Artificial Sequence: Synthetic oligonucleotide
ugcguuuugcggagggccu

SEQ ID NO: 17608 - RNA, 19 nt, Artificial Sequence
  Description of Artificial Sequence: Synthetic oligonucleotide
uccacucgaucauaggcuu

SEQ ID NO: 17609 - RNA, 19 nt, Artificial Sequence
  Description of Artificial Sequence: Synthetic oligonucleotide
aaguagucggcuacaguau

SEQ ID NO: 17610 - RNA, 19 nt, Artificial Sequence
  Description of Artificial Sequence: Synthetic oligonucleotide
ccuucaaccaauaaggggu

SEQ ID NO: 17611 - RNA, 19 nt, Artificial Sequence
  Description of Artificial Sequence: Synthetic oligonucleotide
aguccuguuccauucccau

SEQ ID NO: 17612 - RNA, 19 nt, Artificial Sequence
  Description of Artificial Sequence: Synthetic oligonucleotide
gaccuugcaauaccuuaca

SEQ ID NO: 17613 - RNA, 19 nt, Artificial Sequence
  Description of Artificial Sequence: Synthetic oligonucleotide
acacgcaaagugaccuugc

SEQ ID NO: 17614 - RNA, 19 nt, Artificial Sequence
  Description of Artificial Sequence: Synthetic oligonucleotide
  modified_base (5)..(5): a, c, u, g, unknown or other
aaggngccuuugccuauca

SEQ ID NO: 17615 - RNA, 19 nt, Artificial Sequence
  Description of Artificial Sequence: Synthetic oligonucleotide
ugccuaucagggaucgauc

SEQ ID NO: 17616 - RNA, 19 nt, Artificial Sequence
  Description of Artificial Sequence: Synthetic oligonucleotide
ucgucagguguccuucagu

SEQ ID NO: 17617 - RNA, 19 nt, Artificial Sequence
  Description of Artificial Sequence: Synthetic oligonucleotide
guguguuaaucuccuucug

SEQ ID NO: 17618 - RNA, 19 nt, Artificial Sequence
  Description of Artificial Sequence: Synthetic oligonucleotide
guaaccaaacuguguagua

SEQ ID NO: 17619 - RNA, 19 nt, Artificial Sequence
  Description of Artificial Sequence: Synthetic oligonucleotide
uguaaugugcagggccugu

SEQ ID NO: 17620 - RNA, 19 nt, Artificial Sequence
  Description of Artificial Sequence: Synthetic oligonucleotide
accuuacaauuaguggguc

SEQ ID NO: 17621 - RNA, 19 nt, Artificial Sequence
  Description of Artificial Sequence: Synthetic oligonucleotide
uuuugcggagggccuacau

SEQ ID NO: 17622 - RNA, 19 nt, Artificial Sequence
  Description of Artificial Sequence: Synthetic oligonucleotide
acaacugacccgcgcggug

SEQ ID NO: 17623 - RNA, 19 nt, Artificial Sequence
  Description of Artificial Sequence: Synthetic oligonucleotide
gugaccuugcaauaccuua

SEQ ID NO: 17624 - RNA, 19 nt, Artificial Sequence
  Description of Artificial Sequence: Synthetic oligonucleotide
ucaaggugacgccuuuauu

SEQ ID NO: 17625 - RNA, 19 nt, Artificial Sequence
  Description of Artificial Sequence: Synthetic oligonucleotide
cggacuagaucuuacaauc

SEQ ID NO: 17626 - RNA, 19 nt, Artificial Sequence
  Description of Artificial Sequence: Synthetic oligonucleotide
gacaucuaugugcuauaaa

SEQ ID NO: 17627 - RNA, 19 nt, Artificial Sequence
  Description of Artificial Sequence: Synthetic oligonucleotide
agaccgcaugacuauaaua

SEQ ID NO: 17628 - RNA, 19 nt, Artificial Sequence
  Description of Artificial Sequence: Synthetic oligonucleotide
gaacucccgaagucaacga

SEQ ID NO: 17629 - RNA, 19 nt, Artificial Sequence
  Description of Artificial Sequence: Synthetic oligonucleotide
uacucguguuuguaccuuc

SEQ ID NO: 17630 - RNA, 19 nt, Artificial Sequence
  Description of Artificial Sequence: Synthetic oligonucleotide
aguccggacuagaucuuac

SEQ ID NO: 17631 - RNA, 19 nt, Artificial Sequence
  Description of Artificial Sequence: Synthetic oligonucleotide
ugaccuagucagccacaug

SEQ ID NO: 17632 - RNA, 19 nt, Artificial Sequence
  Description of Artificial Sequence: Synthetic oligonucleotide
aguuacaccuugugucaaa

SEQ ID NO: 17633 - RNA, 19 nt, Artificial Sequence
  Description of Artificial Sequence: Synthetic oligonucleotide
acccgcgcgguguugcuuc

SEQ ID NO: 17634 - RNA, 19 nt, Artificial Sequence
  Description of Artificial Sequence: Synthetic oligonucleotide
gugacgccuuuauucacac

SEQ ID NO: 17635 - RNA, 19 nt, Artificial Sequence
  Description of Artificial Sequence: Synthetic oligonucleotide
ugccggguucaaucgaggu

SEQ ID NO: 17636 - RNA, 19 nt, Artificial Sequence
  Description of Artificial Sequence: Synthetic oligonucleotide
uugggucugaccgggcucu

SEQ ID NO: 17637 - RNA, 19 nt, Artificial Sequence
  Description of Artificial Sequence: Synthetic oligonucleotide
  modified_base (4)..(4): a, c, u, g, unknown or other
aggngccuuugccuaucag

SEQ ID NO: 17638 - RNA, 19 nt, Artificial Sequence
  Description of Artificial Sequence: Synthetic oligonucleotide
gguucaaucgaggucucac

SEQ ID NO: 17639 - RNA, 19 nt, Artificial Sequence
  Description of Artificial Sequence: Synthetic oligonucleotide
uagcaugcuuaaugugccu

SEQ ID NO: 17640 - RNA, 19 nt, Artificial Sequence
  Description of Artificial Sequence: Synthetic oligonucleotide
acgguuaaguuaacgucca

SEQ ID NO: 17641 - RNA, 19 nt, Artificial Sequence
  Description of Artificial Sequence: Synthetic oligonucleotide
uggugcguugggucugacc

SEQ ID NO: 17642 - RNA, 19 nt, Artificial Sequence
  Description of Artificial Sequence: Synthetic oligonucleotide
uugcucgugcccgaggauc

SEQ ID NO: 17643 - RNA, 19 nt, Artificial Sequence
  Description of Artificial Sequence: Synthetic oligonucleotide
agcauaauugugaggcaaa

SEQ ID NO: 17644 - RNA, 19 nt, Artificial Sequence
  Description of Artificial Sequence: Synthetic oligonucleotide
agugucccgucccuucaga

SEQ ID NO: 17645 - RNA, 19 nt, Artificial Sequence
  Description of Artificial Sequence: Synthetic oligonucleotide
gucuuugugcagaagaaau

SEQ ID NO: 17646 - RNA, 19 nt, Artificial Sequence
  Description of Artificial Sequence: Synthetic oligonucleotide
cauaagaccgcaugacuau

SEQ ID NO: 17647 - RNA, 19 nt, Artificial Sequence
  Description of Artificial Sequence: Synthetic oligonucleotide
caacuuaaaugggaacaca

SEQ ID NO: 17648 - RNA, 19 nt, Artificial Sequence
  Description of Artificial Sequence: Synthetic oligonucleotide
aguagacgguuaaguuaac

SEQ ID NO: 17649 - RNA, 19 nt, Artificial Sequence
  Description of Artificial Sequence: Synthetic oligonucleotide
agacaucuaugugcuauaa

SEQ ID NO: 17650 - RNA, 19 nt, Artificial Sequence
  Description of Artificial Sequence: Synthetic oligonucleotide
ggauucaacaacaguucca

SEQ ID NO: 17651 - RNA, 19 nt, Artificial Sequence
  Description of Artificial Sequence: Synthetic oligonucleotide
gcgugagauucaaagagac

SEQ ID NO: 17652 - RNA, 19 nt, Artificial Sequence
  Description of Artificial Sequence: Synthetic oligonucleotide
cuuugcccucuuguagcgg

SEQ ID NO: 17653 - RNA, 19 nt, Artificial Sequence
  Description of Artificial Sequence: Synthetic oligonucleotide
uccccgccacuuagcaugc

SEQ ID NO: 17654 - RNA, 19 nt, Artificial Sequence
  Description of Artificial Sequence: Synthetic oligonucleotide
ggaucgaucucauaacgau

SEQ ID NO: 17655 - RNA, 19 nt, Artificial Sequence
  Description of Artificial Sequence: Synthetic oligonucleotide
agagaccccucggaaguug

SEQ ID NO: 17656 - RNA, 19 nt, Artificial Sequence
  Description of Artificial Sequence: Synthetic oligonucleotide
uggcacuccguuugggguu

SEQ ID NO: 17657 - RNA, 19 nt, Artificial Sequence
  Description of Artificial Sequence: Synthetic oligonucleotide
cacagcaaguccggacuag

SEQ ID NO: 17658 - RNA, 19 nt, Artificial Sequence
  Description of Artificial Sequence: Synthetic oligonucleotide
cugcuacauuauugguuac

SEQ ID NO: 17659 - RNA, 19 nt, Artificial Sequence
  Description of Artificial Sequence: Synthetic oligonucleotide
gcaaacgcauguccacaag

SEQ ID NO: 17660 - RNA, 19 nt, Artificial Sequence
  Description of Artificial Sequence: Synthetic oligonucleotide
agggccuacaugaaagguu

SEQ ID NO: 17661 - RNA, 19 nt, Artificial Sequence
  Description of Artificial Sequence: Synthetic oligonucleotide
gguuaaguuaacguccaua

SEQ ID NO: 17662 - RNA, 19 nt, Artificial Sequence
  Description of Artificial Sequence: Synthetic oligonucleotide
cagcauaauugugaggcaa

SEQ ID NO: 17663 - RNA, 19 nt, Artificial Sequence
  Description of Artificial Sequence: Synthetic oligonucleotide
guccggacuagaucuuaca

SEQ ID NO: 17664 - RNA, 19 nt, Artificial Sequence
  Description of Artificial Sequence: Synthetic oligonucleotide
uccaaggcguuagcagcca

SEQ ID NO: 17665 - RNA, 19 nt, Artificial Sequence
  Description of Artificial Sequence: Synthetic oligonucleotide
caaguguauagaggacauc

SEQ ID NO: 17666 - RNA, 19 nt, Artificial Sequence
  Description of Artificial Sequence: Synthetic oligonucleotide
aacuuucgcgugagauuca

SEQ ID NO: 17667 - RNA, 19 nt, Artificial Sequence
  Description of Artificial Sequence: Synthetic oligonucleotide
ggauugugugguuucguua

SEQ ID NO: 17668 - RNA, 19 nt, Artificial Sequence
  Description of Artificial Sequence: Synthetic oligonucleotide
cgugcccaaguguauagag

SEQ ID NO: 17669 - RNA, 19 nt, Artificial Sequence
  Description of Artificial Sequence: Synthetic oligonucleotide
cucggaaguugcaaagacu

SEQ ID NO: 17670 - RNA, 19 nt, Artificial Sequence
  Description of Artificial Sequence: Synthetic oligonucleotide
gugguggugguggugguga

SEQ ID NO: 17671 - RNA, 19 nt, Artificial Sequence
  Description of Artificial Sequence: Synthetic oligonucleotide
acuuucgcgugagauucaa

SEQ ID NO: 17672 - RNA, 19 nt, Artificial Sequence
  Description of Artificial Sequence: Synthetic oligonucleotide
  modified_base (6)..(6): a, c, u, g, unknown or other
gaccgnuaaaagcgacucu

SEQ ID NO: 17673 - RNA, 19 nt, Artificial Sequence
  Description of Artificial Sequence: Synthetic oligonucleotide
gcggggauuggaguagacg

SEQ ID NO: 17674 - RNA, 19 nt, Artificial Sequence
  Description of Artificial Sequence: Synthetic oligonucleotide
aucgucccuuucacauagc

SEQ ID NO: 17675 - RNA, 19 nt, Artificial Sequence
  Description of Artificial Sequence: Synthetic oligonucleotide
uaacguccauagcuccauu

SEQ ID NO: 17676 - RNA, 19 nt, Artificial Sequence
  Description of Artificial Sequence: Synthetic oligonucleotide
aacugacccgcgcgguguu

SEQ ID NO: 17677 - RNA, 19 nt, Artificial Sequence
  Description of Artificial Sequence: Synthetic oligonucleotide
guguuagcggaaaauuggu

SEQ ID NO: 17678 - RNA, 19 nt, Artificial Sequence
  Description of Artificial Sequence: Synthetic oligonucleotide
  modified_base (8)..(8): a, c, u, g, unknown or other
gagaccgnuaaaagcgacu

SEQ ID NO: 17679 - RNA, 19 nt, Artificial Sequence
  Description of Artificial Sequence: Synthetic oligonucleotide
cauaacgauccauccuacu

SEQ ID NO: 17680 - RNA, 19 nt, Artificial Sequence
  Description of Artificial Sequence: Synthetic oligonucleotide
  modified_base (9)..(9): a, c, u, g, unknown or other
ggagaccgnuaaaagcgac

SEQ ID NO: 17681 - RNA, 19 nt, Artificial Sequence
  Description of Artificial Sequence: Synthetic oligonucleotide
gccaaccuccauagaaucc

SEQ ID NO: 17682 - RNA, 19 nt, Artificial Sequence
  Description of Artificial Sequence: Synthetic oligonucleotide
cauggugguggugguggug

SEQ ID NO: 17683 - RNA, 19 nt, Artificial Sequence
  Description of Artificial Sequence: Synthetic oligonucleotide
ccuuacaauuaguggguca

SEQ ID NO: 17684 - RNA, 19 nt, Artificial Sequence
  Description of Artificial Sequence: Synthetic oligonucleotide
gggaucgaucucauaacga

SEQ ID NO: 17685 - RNA, 19 nt, Artificial Sequence
  Description of Artificial Sequence: Synthetic oligonucleotide
ugcuccuacuguggaccug

SEQ ID NO: 17686 - RNA, 19 nt, Artificial Sequence
  Description of Artificial Sequence: Synthetic oligonucleotide
ccgcaugacuauaauacaa

SEQ ID NO: 17687 - RNA, 19 nt, Artificial Sequence
  Description of Artificial Sequence: Synthetic oligonucleotide
caaucgucccuuucacaua

SEQ ID NO: 17688 - RNA, 19 nt, Artificial Sequence
  Description of Artificial Sequence: Synthetic oligonucleotide
  modified_base (4)..(4): a, c, u, g, unknown or other
ccgnuaaaagcgacucuga

SEQ ID NO: 17689 - RNA, 19 nt, Artificial Sequence
  Description of Artificial Sequence: Synthetic oligonucleotide
caucgcggggcugguagac

SEQ ID NO: 17690 - RNA, 19 nt, Artificial Sequence
  Description of Artificial Sequence: Synthetic oligonucleotide
ccuaucagggaucgaucuc

SEQ ID NO: 17691 - RNA, 19 nt, Artificial Sequence
  Description of Artificial Sequence: Synthetic oligonucleotide
aucagggaucgaucucaua

SEQ ID NO: 17692 - RNA, 19 nt, Artificial Sequence
  Description of Artificial Sequence: Synthetic oligonucleotide
  modified_base (8)..(8): a, c, u, g, unknown or other
ccaaaggngccuuugccua

SEQ ID NO: 17693 - RNA, 19 nt, Artificial Sequence
  Description of Artificial Sequence: Synthetic oligonucleotide
ugguggugguggugguggu

SEQ ID NO: 17694 - RNA, 19 nt, Artificial Sequence
  Description of Artificial Sequence: Synthetic oligonucleotide
gaguaugagcaggugggau

SEQ ID NO: 17695 - RNA, 19 nt, Artificial Sequence
  Description of Artificial Sequence: Synthetic oligonucleotide
gccuaucagggaucgaucu

SEQ ID NO: 17696 - RNA, 19 nt, Artificial Sequence
  Description of Artificial Sequence: Synthetic oligonucleotide
guagcgguucaguguguua

SEQ ID NO: 17697 - RNA, 19 nt, Artificial Sequence
  Description of Artificial Sequence: Synthetic oligonucleotide
guguuacgugaaggcagug

SEQ ID NO: 17698 - RNA, 19 nt, Artificial Sequence
  Description of Artificial Sequence: Synthetic oligonucleotide
  modified_base (7)..(7): a, c, u, g, unknown or other
caaaggngccuuugccuau

SEQ ID NO: 17699 - RNA, 19 nt, Artificial Sequence
  Description of Artificial Sequence: Synthetic oligonucleotide
caaggcguuagcagccacu

SEQ ID NO: 17700 - RNA, 19 nt, Artificial Sequence
  Description of Artificial Sequence: Synthetic oligonucleotide
ggccacaacugacccgcgc

SEQ ID NO: 17701 - RNA, 19 nt, Artificial Sequence
  Description of Artificial Sequence: Synthetic oligonucleotide
ugacccgcgcgguguugcu

SEQ ID NO: 17702 - RNA, 19 nt, Artificial Sequence
  Description of Artificial Sequence: Synthetic oligonucleotide
ggugaugaugcaaugcguu

SEQ ID NO: 17703 - RNA, 19 nt, Artificial Sequence
  Description of Artificial Sequence: Synthetic oligonucleotide
guaggguguacuacuuuau

SEQ ID NO: 17704 - RNA, 19 nt, Artificial Sequence
  Description of Artificial Sequence: Synthetic oligonucleotide
gcuugcuaacauguggcaa

SEQ ID NO: 17705 - RNA, 19 nt, Artificial Sequence
  Description of Artificial Sequence: Synthetic oligonucleotide
cgcaugacuauaauacaaa

SEQ ID NO: 17706 - RNA, 19 nt, Artificial Sequence
  Description of Artificial Sequence: Synthetic oligonucleotide
uggugguggugguggugau

SEQ ID NO: 17707 - RNA, 19 nt, Artificial Sequence
  Description of Artificial Sequence: Synthetic oligonucleotide
gcaaugcguuuugcggagg

SEQ ID NO: 17708 - RNA, 19 nt, Artificial Sequence
  Description of Artificial Sequence: Synthetic oligonucleotide
ugguuucguuauggaaaua

SEQ ID NO: 17709 - RNA, 19 nt, Artificial Sequence
  Description of Artificial Sequence: Synthetic oligonucleotide
gccugaacacauuuagaau

SEQ ID NO: 17710 - RNA, 19 nt, Artificial Sequence
  Description of Artificial Sequence: Synthetic oligonucleotide
uggaccugccggguucaau

SEQ ID NO: 17711 - RNA, 19 nt, Artificial Sequence
  Description of Artificial Sequence: Synthetic oligonucleotide
cucucccaauucaaccgcu

SEQ ID NO: 17712 - RNA, 19 nt, Artificial Sequence
  Description of Artificial Sequence: Synthetic oligonucleotide
ggcacuccguuugggguug

SEQ ID NO: 17713 - RNA, 19 nt, Artificial Sequence
  Description of Artificial Sequence: Synthetic oligonucleotide
cugcucaccucaggucaug

SEQ ID NO: 17714 - RNA, 19 nt, Artificial Sequence
  Description of Artificial Sequence: Synthetic oligonucleotide
ggacuagaucuuacaaucu

SEQ ID NO: 17715 - RNA, 19 nt, Artificial Sequence
  Description of Artificial Sequence: Synthetic oligonucleotide
caacgaucuugauggcacu

SEQ ID NO: 17716 - RNA, 19 nt, Artificial Sequence
  Description of Artificial Sequence: Synthetic oligonucleotide
  modified_base (3)..(3): a, c, u, g, unknown or other
cgnuaaaagcgacucugaa

SEQ ID NO: 17717 - RNA, 19 nt, Artificial Sequence
  Description of Artificial Sequence: Synthetic oligonucleotide
gcuguuacucguguuugua

SEQ ID NO: 17718 - RNA, 19 nt, Artificial Sequence
  Description of Artificial Sequence: Synthetic oligonucleotide
gguggugguggugguggug

SEQ ID NO: 17719 - RNA, 19 nt, Artificial Sequence
  Description of Artificial Sequence: Synthetic oligonucleotide
ccuugaauuagaugucaau

SEQ ID NO: 17720 - RNA, 19 nt, Artificial Sequence
  Description of Artificial Sequence: Synthetic oligonucleotide
cgcgugagauucaaagaga

SEQ ID NO: 17721 - RNA, 19 nt, Artificial Sequence
  Description of Artificial Sequence: Synthetic oligonucleotide
ggcuugauucagaaacgcu

SEQ ID NO: 17722 - RNA, 19 nt, Artificial Sequence
  Description of Artificial Sequence: Synthetic oligonucleotide
guuuugcggagggccuaca

SEQ ID NO: 17723 - RNA, 19 nt, Artificial Sequence
  Description of Artificial Sequence: Synthetic oligonucleotide
uccgaguuuuggggucaua

SEQ ID NO: 17724 - RNA, 19 nt, Artificial Sequence
  Description of Artificial Sequence: Synthetic oligonucleotide
ccaaggcguuagcagccac

SEQ ID NO: 17725 - RNA, 19 nt, Artificial Sequence
  Description of Artificial Sequence: Synthetic oligonucleotide
cuggauugugugguuucgu

SEQ ID NO: 17726 - RNA, 19 nt, Artificial Sequence
  Description of Artificial Sequence: Synthetic oligonucleotide
ccggacuagaucuuacaau

SEQ ID NO: 17727 - RNA, 19 nt, Artificial Sequence
  Description of Artificial Sequence: Synthetic oligonucleotide
caacugacccgcgcggugu

SEQ ID NO: 17728 - RNA, 19 nt, Artificial Sequence
  Description of Artificial Sequence: Synthetic oligonucleotide
ccgggcucucccacuguug

SEQ ID NO: 17729 - RNA, 19 nt, Artificial Sequence
  Description of Artificial Sequence: Synthetic oligonucleotide
cgguucaguguguuaaucu

SEQ ID NO: 17730 - RNA, 19 nt, Artificial Sequence
  Description of Artificial Sequence: Synthetic oligonucleotide
cacaacugacccgcgcggu

SEQ ID NO: 17731 - RNA, 19 nt, Artificial Sequence
  Description of Artificial Sequence: Synthetic oligonucleotide
ccggggccucuccaacagg

SEQ ID NO: 17732 - RNA, 19 nt, Artificial Sequence
  Description of Artificial Sequence: Synthetic oligonucleotide
gcucaccucaggucaugcu

SEQ ID NO: 17733 - RNA, 19 nt, Artificial Sequence
  Description of Artificial Sequence: Synthetic oligonucleotide
cccucggaaguugcaaaga

SEQ ID NO: 17734 - RNA, 19 nt, Artificial Sequence
  Description of Artificial Sequence: Synthetic oligonucleotide
ggcgcaccuggggacugug

SEQ ID NO: 17735 - RNA, 19 nt, Artificial Sequence
  Description of Artificial Sequence: Synthetic oligonucleotide
acgauccauccuacuucuu

SEQ ID NO: 17736 - RNA, 19 nt, Artificial Sequence
  Description of Artificial Sequence: Synthetic oligonucleotide
gccuguguuagcggaaaau

SEQ ID NO: 17737 - RNA, 19 nt, Artificial Sequence
  Description of Artificial Sequence: Synthetic oligonucleotide
gccagucucuuggcgggga

SEQ ID NO: 17738 - RNA, 19 nt, Artificial Sequence
  Description of Artificial Sequence: Synthetic oligonucleotide
gccacuuagcaugcuuaau

SEQ ID NO: 17739 - RNA, 19 nt, Artificial Sequence
  Description of Artificial Sequence: Synthetic oligonucleotide
gcguugggucugaccgggc

SEQ ID NO: 17740 - RNA, 19 nt, Artificial Sequence
  Description of Artificial Sequence: Synthetic oligonucleotide
ccgugcccaaguguauaga

SEQ ID NO: 17741 - RNA, 19 nt, Artificial Sequence
  Description of Artificial Sequence: Synthetic oligonucleotide
ggccuacaugaaagguugu

SEQ ID NO: 17742 - RNA, 19 nt, Artificial Sequence
  Description of Artificial Sequence: Synthetic oligonucleotide
gcucgugcccgaggaucca

SEQ ID NO: 17743 - RNA, 19 nt, Artificial Sequence
  Description of Artificial Sequence: Synthetic oligonucleotide
guggaccugccggguucaa

SEQ ID NO: 17744 - RNA, 19 nt, Artificial Sequence
  Description of Artificial Sequence: Synthetic oligonucleotide
cagucucuuggcggggauu

SEQ ID NO: 17745 - RNA, 19 nt, Artificial Sequence
  Description of Artificial Sequence: Synthetic oligonucleotide
gacccgcgcgguguugcuu

SEQ ID NO: 17746 - RNA, 19 nt, Artificial Sequence
  Description of Artificial Sequence: Synthetic oligonucleotide
gcacuccguuugggguugc

SEQ ID NO: 17747 - RNA, 19 nt, Artificial Sequence
  Description of Artificial Sequence: Synthetic oligonucleotide
cgcuguuacucguguuugu

SEQ ID NO: 17748 - RNA, 19 nt, Artificial Sequence
  Description of Artificial Sequence: Synthetic oligonucleotide
ccgcgcgguguugcuucuc

SEQ ID NO: 17749 - RNA, 19 nt, Artificial Sequence
  Description of Artificial Sequence: Synthetic oligonucleotide
cgguuaaguuaacguccau

SEQ ID NO: 17750 - RNA, 19 nt, Artificial Sequence
  Description of Artificial Sequence: Synthetic oligonucleotide
cccgcgcgguguugcuucu

SEQ ID NO: 17751 - RNA, 19 nt, Artificial Sequence
  Description of Artificial Sequence: Synthetic oligonucleotide
aaccaauauauauauauuc

SEQ ID NO: 17752 - RNA, 19 nt, Artificial Sequence
  Description of Artificial Sequence: Synthetic oligonucleotide
aaauaccugagcuagcagc

SEQ ID NO: 17753 - RNA, 19 nt, Artificial Sequence
  Description of Artificial Sequence: Synthetic oligonucleotide
auuauauugauccagccag

SEQ ID NO: 17754 - RNA, 19 nt, Artificial Sequence
  Description of Artificial Sequence: Synthetic oligonucleotide
ucuacaaugucuuauagca

SEQ ID NO: 17755 - RNA, 19 nt, Artificial Sequence
  Description of Artificial Sequence: Synthetic oligonucleotide
ucuaauuagccaaggaucg

SEQ ID NO: 17756 - RNA, 19 nt, Artificial Sequence
  Description of Artificial Sequence: Synthetic oligonucleotide
ucuuauagcacauuaaaca

SEQ ID NO: 17757 - RNA, 19 nt, Artificial Sequence
  Description of Artificial Sequence: Synthetic oligonucleotide
ucauuugauacacuaaacc

SEQ ID NO: 17758 - RNA, 19 nt, Artificial Sequence
  Description of Artificial Sequence: Synthetic oligonucleotide
agucauaugaacucuucgc

SEQ ID NO: 17759 - RNA, 19 nt, Artificial Sequence
  Description of Artificial Sequence: Synthetic oligonucleotide
aacaacaacaacaacaaca

SEQ ID NO: 17760 - RNA, 19 nt, Artificial Sequence
  Description of Artificial Sequence: Synthetic oligonucleotide
uuaacuagagagcacaacu

SEQ ID NO: 17761 - RNA, 19 nt, Artificial Sequence
  Description of Artificial Sequence: Synthetic oligonucleotide
cuauuaagaagccagcacg

SEQ ID NO: 17762 - RNA, 19 nt, Artificial Sequence
  Description of Artificial Sequence: Synthetic oligonucleotide
uuauaggcgaaacaaaacu

SEQ ID NO: 17763 - RNA, 19 nt, Artificial Sequence
  Description of Artificial Sequence: Synthetic oligonucleotide
  modified_base (14)..(14): a, c, u, g, unknown or other
aaaguucuagcuunuccug

SEQ ID NO: 17764 - RNA, 19 nt, Artificial Sequence
  Description of Artificial Sequence: Synthetic oligonucleotide
aauauauauauauucugua

SEQ ID NO: 17765 - RNA, 19 nt, Artificial Sequence
  Description of Artificial Sequence: Synthetic oligonucleotide
uauaugaucccugcuaucg

SEQ ID NO: 17766 - RNA, 19 nt, Artificial Sequence
  Description of Artificial Sequence: Synthetic oligonucleotide
aauuguguauagcucuacg

SEQ ID NO: 17767 - RNA, 19 nt, Artificial Sequence
  Description of Artificial Sequence: Synthetic oligonucleotide
caugagacugaauugaaag

SEQ ID NO: 17768 - RNA, 19 nt, Artificial Sequence
  Description of Artificial Sequence: Synthetic oligonucleotide
uguaaugaaauaccugagc

SEQ ID NO: 17769 - RNA, 19 nt, Artificial Sequence
  Description of Artificial Sequence: Synthetic oligonucleotide
aaacuuacccauguuauag

SEQ ID NO: 17770 - RNA, 19 nt, Artificial Sequence
  Description of Artificial Sequence: Synthetic oligonucleotide
ugucuauucacauuuguac

SEQ ID NO: 17771 - RNA, 19 nt, Artificial Sequence
  Description of Artificial Sequence: Synthetic oligonucleotide
uuuaaguuguuucccagug

SEQ ID NO: 17772 - RNA, 19 nt, Artificial Sequence
  Description of Artificial Sequence: Synthetic oligonucleotide
ucuauuauaggcgaaacaa

SEQ ID NO: 17773 - RNA, 19 nt, Artificial Sequence
  Description of Artificial Sequence: Synthetic oligonucleotide
aaauuaacuagagagcaca

SEQ ID NO: 17774 - RNA, 19 nt, Artificial Sequence
  Description of Artificial Sequence: Synthetic oligonucleotide
ugcgcaaggagguagaacc

SEQ ID NO: 17775 - RNA, 19 nt, Artificial Sequence
  Description of Artificial Sequence: Synthetic oligonucleotide
  modified_base (7)..(7): a, c, u, g, unknown or other
uagcuunuccuguagacug

SEQ ID NO: 17776 - RNA, 19 nt, Artificial Sequence
  Description of Artificial Sequence: Synthetic oligonucleotide
  modified_base (6)..(6): a, c, u, g, unknown or other
gaggunuucagccaauuug

SEQ ID NO: 17777 - RNA, 19 nt, Artificial Sequence
  Description of Artificial Sequence: Synthetic oligonucleotide
uucagcaucguauuuuaag

SEQ ID NO: 17778 - RNA, 19 nt, Artificial Sequence
  Description of Artificial Sequence: Synthetic oligonucleotide
gaaaccaauauauauauau

SEQ ID NO: 17779 - RNA, 19 nt, Artificial Sequence
  Description of Artificial Sequence: Synthetic oligonucleotide
auaguauguacuuacuacu

SEQ ID NO: 17780 - RNA, 19 nt, Artificial Sequence
  Description of Artificial Sequence: Synthetic oligonucleotide
uaugcaagugguaugcucu

SEQ ID NO: 17781 - RNA, 19 nt, Artificial Sequence
  Description of Artificial Sequence: Synthetic oligonucleotide
agaccuaucucacauacca

SEQ ID NO: 17782 - RNA, 19 nt, Artificial Sequence
  Description of Artificial Sequence: Synthetic oligonucleotide
aaucaaaucugcagcuugc

SEQ ID NO: 17783 - RNA, 19 nt, Artificial Sequence
  Description of Artificial Sequence: Synthetic oligonucleotide
aacacguaguaugugcggc

SEQ ID NO: 17784 - RNA, 19 nt, Artificial Sequence
  Description of Artificial Sequence: Synthetic oligonucleotide
aguaacgacaaggauguac

SEQ ID NO: 17785 - RNA, 19 nt, Artificial Sequence
  Description of Artificial Sequence: Synthetic oligonucleotide
auauauauauauucuguau

SEQ ID NO: 17786 - RNA, 19 nt, Artificial Sequence
  Description of Artificial Sequence: Synthetic oligonucleotide
acgguuuccgguuugaaug

SEQ ID NO: 17787 - RNA, 19 nt, Artificial Sequence
  Description of Artificial Sequence: Synthetic oligonucleotide
ucauauaugaucccugcua

SEQ ID NO: 17788 - RNA, 19 nt, Artificial Sequence
  Description of Artificial Sequence: Synthetic oligonucleotide
uaccauaggagaauccaag

SEQ ID NO: 17789 - RNA, 19 nt, Artificial Sequence
  Description of Artificial Sequence: Synthetic oligonucleotide
uuucuacucaacaaauagu

SEQ ID NO: 17790 - RNA, 19 nt, Artificial Sequence
  Description of Artificial Sequence: Synthetic oligonucleotide
acucggagcugucaaaucg

SEQ ID NO: 17791 - RNA, 19 nt, Artificial Sequence
  Description of Artificial Sequence: Synthetic oligonucleotide
ugucgugcaauguacauuc

SEQ ID NO: 17792 - RNA, 19 nt, Artificial Sequence
  Description of Artificial Sequence: Synthetic oligonucleotide
ucuuagucgcacuaucugc

SEQ ID NO: 17793 - RNA, 19 nt, Artificial Sequence
  Description of Artificial Sequence: Synthetic oligonucleotide
uuaaugaauggaccuaaaa

SEQ ID NO: 17794 - RNA, 19 nt, Artificial Sequence
  Description of Artificial Sequence: Synthetic oligonucleotide
aaccagaagccaccgagag

SEQ ID NO: 17795 - RNA, 19 nt, Artificial Sequence
  Description of Artificial Sequence: Synthetic oligonucleotide
guaucaacacuagaaaugc

SEQ ID NO: 17796 - RNA, 19 nt, Artificial Sequence
  Description of Artificial Sequence: Synthetic oligonucleotide
  modified_base (3)..(3): a, c, u, g, unknown or other
uunuccuguagacugcaga

SEQ ID NO: 17797 - RNA, 19 nt, Artificial Sequence
  Description of Artificial Sequence: Synthetic oligonucleotide
gaaacaacgcauucugcug

SEQ ID NO: 17798 - RNA, 19 nt, Artificial Sequence
  Description of Artificial Sequence: Synthetic oligonucleotide
guauguacuuacuacuuug

SEQ ID NO: 17799 - RNA, 19 nt, Artificial Sequence
  Description of Artificial Sequence: Synthetic oligonucleotide
cuaucucacauaccaaucc

SEQ ID NO: 17800 - RNA, 19 nt, Artificial Sequence
  Description of Artificial Sequence: Synthetic oligonucleotide
uuugccgggaugaucaaac

SEQ ID NO: 17801 - RNA, 19 nt, Artificial Sequence
  Description of Artificial Sequence: Synthetic oligonucleotide
  modified_base (9)..(9): a, c, u, g, unknown or other
ucuagcuunuccuguagac

SEQ ID NO: 17802 - RNA, 19 nt, Artificial Sequence
  Description of Artificial Sequence: Synthetic oligonucleotide
uucuuagucgcacuaucug

SEQ ID NO: 17803 - RNA, 19 nt, Artificial Sequence
  Description of Artificial Sequence: Synthetic oligonucleotide
ggcgaaacaaaacuuaccc

SEQ ID NO: 17804 - RNA, 19 nt, Artificial Sequence
  Description of Artificial Sequence: Synthetic oligonucleotide
aguucuuagucgcacuauc

SEQ ID NO: 17805 - RNA, 19 nt, Artificial Sequence
  Description of Artificial Sequence: Synthetic oligonucleotide
auuguguauagcucuacgu

SEQ ID NO: 17806 - RNA, 19 nt, Artificial Sequence
  Description of Artificial Sequence: Synthetic oligonucleotide
guuagaagcaacacucagg

SEQ ID NO: 17807 - RNA, 19 nt, Artificial Sequence
  Description of Artificial Sequence: Synthetic oligonucleotide
  modified_base (2)..(2): a, c, u, g, unknown or other
unuccuguagacugcagac

SEQ ID NO: 17808 - RNA, 19 nt, Artificial Sequence
  Description of Artificial Sequence: Synthetic oligonucleotide
aacucucgagucucuuagc

SEQ ID NO: 17809 - RNA, 19 nt, Artificial Sequence
  Description of Artificial Sequence: Synthetic oligonucleotide
ggucuuauuuaaugaaugg

SEQ ID NO: 17810 - RNA, 19 nt, Artificial Sequence
  Description of Artificial Sequence: Synthetic oligonucleotide
gaccaauugucccucacug

SEQ ID NO: 17811 - RNA, 19 nt, Artificial Sequence
  Description of Artificial Sequence: Synthetic oligonucleotide
uguacuguguuaacccuga

SEQ ID NO: 17812 - RNA, 19 nt, Artificial Sequence
  Description of Artificial Sequence: Synthetic oligonucleotide
uccgcuuguaaugaaauac

SEQ ID NO: 17813 - RNA, 19 nt, Artificial Sequence
  Description of Artificial Sequence: Synthetic oligonucleotide
ugcagaccaauuacuuugg

SEQ ID NO: 17814 - RNA, 19 nt, Artificial Sequence
  Description of Artificial Sequence: Synthetic oligonucleotide
uauaggcgaaacaaaacuu

SEQ ID NO: 17815 - RNA, 19 nt, Artificial Sequence
  Description of Artificial Sequence: Synthetic oligonucleotide
acgacaaggauguacugug

SEQ ID NO: 17816 - RNA, 19 nt, Artificial Sequence
  Description of Artificial Sequence: Synthetic oligonucleotide
agcauucaacaccacgugg

SEQ ID NO: 17817 - RNA, 19 nt, Artificial Sequence
  Description of Artificial Sequence: Synthetic oligonucleotide
auuaacuagagagcacaac

SEQ ID NO: 17818 - RNA, 19 nt, Artificial Sequence
  Description of Artificial Sequence: Synthetic oligonucleotide
acaguaacgacaaggaugu

SEQ ID NO: 17819 - RNA, 19 nt, Artificial Sequence
  Description of Artificial Sequence: Synthetic oligonucleotide
caaaaugacggcagcacug

SEQ ID NO: 17820 - RNA, 19 nt, Artificial Sequence
  Description of Artificial Sequence: Synthetic oligonucleotide
uauagcucuacguggccag

SEQ ID NO: 17821 - RNA, 19 nt, Artificial Sequence
  Description of Artificial Sequence: Synthetic oligonucleotide
acgcuaauuguguauagcu

SEQ ID NO: 17822 - RNA, 19 nt, Artificial Sequence
  Description of Artificial Sequence: Synthetic oligonucleotide
auucaaguuacuggguaac

SEQ ID NO: 17823 - RNA, 19 nt, Artificial Sequence
  Description of Artificial Sequence: Synthetic oligonucleotide
accaauauauauauauucu

SEQ ID NO: 17824 - RNA, 19 nt, Artificial Sequence
  Description of Artificial Sequence: Synthetic oligonucleotide
ucgaguuauuucuuucacc

SEQ ID NO: 17825 - RNA, 19 nt, Artificial Sequence
  Description of Artificial Sequence: Synthetic oligonucleotide
uuauagauaagugucuauu

SEQ ID NO: 17826 - RNA, 19 nt, Artificial Sequence
  Description of Artificial Sequence: Synthetic oligonucleotide
ugaaggucacuccaguaaa

SEQ ID NO: 17827 - RNA, 19 nt, Artificial Sequence
  Description of Artificial Sequence: Synthetic oligonucleotide
ggauguacuguguuaaccc

SEQ ID NO: 17828 - RNA, 19 nt, Artificial Sequence
  Description of Artificial Sequence: Synthetic oligonucleotide
guaacaacaacaacaacaa

SEQ ID NO: 17829 - RNA, 19 nt, Artificial Sequence
  Description of Artificial Sequence: Synthetic oligonucleotide
auauaugaucccugcuauc

SEQ ID NO: 17830 - RNA, 19 nt, Artificial Sequence
  Description of Artificial Sequence: Synthetic oligonucleotide
acaacaacaacaacaacaa

SEQ ID NO: 17831 - RNA, 19 nt, Artificial Sequence
  Description of Artificial Sequence: Synthetic oligonucleotide
acaacaacaacaacaacau

SEQ ID NO: 17832 - RNA, 19 nt, Artificial Sequence
  Description of Artificial Sequence: Synthetic oligonucleotide
aucuauuauaggcgaaaca

SEQ ID NO: 17833 - RNA, 19 nt, Artificial Sequence
  Description of Artificial Sequence: Synthetic oligonucleotide
ccaauauauauauauucug

SEQ ID NO: 17834 - RNA, 19 nt, Artificial Sequence
  Description of Artificial Sequence: Synthetic oligonucleotide
aaccccagaucuaggauuc

SEQ ID NO: 17835 - RNA, 19 nt, Artificial Sequence
  Description of Artificial Sequence: Synthetic oligonucleotide
uccaagacggucuuauuua

SEQ ID NO: 17836 - RNA, 19 nt, Artificial Sequence
  Description of Artificial Sequence: Synthetic oligonucleotide
guggugauaccauaggaga

SEQ ID NO: 17837 - RNA, 19 nt, Artificial Sequence
  Description of Artificial Sequence: Synthetic oligonucleotide
caccccauauuccaagacg

SEQ ID NO: 17838 - RNA, 19 nt, Artificial Sequence
  Description of Artificial Sequence: Synthetic oligonucleotide
caauauauauauauucugu

SEQ ID NO: 17839 - RNA, 19 nt, Artificial Sequence
  Description of Artificial Sequence: Synthetic oligonucleotide
auaccaauccuaagcuugc

SEQ ID NO: 17840 - RNA, 19 nt, Artificial Sequence
  Description of Artificial Sequence: Synthetic oligonucleotide
aacucagguacgguuuccg

SEQ ID NO: 17841 - RNA, 19 nt, Artificial Sequence
  Description of Artificial Sequence: Synthetic oligonucleotide
uuaugcaagugguaugcuc

SEQ ID NO: 17842 - RNA, 19 nt, Artificial Sequence
  Description of Artificial Sequence: Synthetic oligonucleotide
ggagacacgcaauuugccg

SEQ ID NO: 17843 - RNA, 19 nt, Artificial Sequence
  Description of Artificial Sequence: Synthetic oligonucleotide
ugccacgccaguaugcaug

SEQ ID NO: 17844 - RNA, 19 nt, Artificial Sequence
  Description of Artificial Sequence: Synthetic oligonucleotide
ugcaccgugucagaugagg

SEQ ID NO: 17845 - RNA, 19 nt, Artificial Sequence
  Description of Artificial Sequence: Synthetic oligonucleotide
uggcacaaguuuuauugca

SEQ ID NO: 17846 - RNA, 19 nt, Artificial Sequence
  Description of Artificial Sequence: Synthetic oligonucleotide
ugacucguaagauaugcuu

SEQ ID NO: 17847 - RNA, 19 nt, Artificial Sequence
  Description of Artificial Sequence: Synthetic oligonucleotide
aguaugugcggcaacggag

SEQ ID NO: 17848 - RNA, 19 nt, Artificial Sequence
  Description of Artificial Sequence: Synthetic oligonucleotide
agcaacuauuuccauggca

SEQ ID NO: 17849 - RNA, 19 nt, Artificial Sequence
  Description of Artificial Sequence: Synthetic oligonucleotide
agacggucuuauuuaauga

SEQ ID NO: 17850 - RNA, 19 nt, Artificial Sequence
  Description of Artificial Sequence: Synthetic oligonucleotide
aaucgauuccuagcaaacu

SEQ ID NO: 17851 - RNA, 19 nt, Artificial Sequence
  Description of Artificial Sequence: Synthetic oligonucleotide
aaaccaauauauauauauu

SEQ ID NO: 17852 - RNA, 19 nt, Artificial Sequence
  Description of Artificial Sequence: Synthetic oligonucleotide
uaguaugugcggcaacgga

SEQ ID NO: 17853 - RNA, 19 nt, Artificial Sequence
  Description of Artificial Sequence: Synthetic oligonucleotide
cuaucguccggccuuugcc

SEQ ID NO: 17854 - RNA, 19 nt, Artificial Sequence
  Description of Artificial Sequence: Synthetic oligonucleotide
acccauguuauagauaagu

SEQ ID NO: 17855 - RNA, 19 nt, Artificial Sequence
  Description of Artificial Sequence: Synthetic oligonucleotide
cagguuuguccuuaacccc

SEQ ID NO: 17856 - RNA, 19 nt, Artificial Sequence
  Description of Artificial Sequence: Synthetic oligonucleotide
ugaauggaccuaaaauguu

SEQ ID NO: 17857 - RNA, 19 nt, Artificial Sequence
  Description of Artificial Sequence: Synthetic oligonucleotide
aaccuacugaugagcagac

SEQ ID NO: 17858 - RNA, 19 nt, Artificial Sequence
  Description of Artificial Sequence: Synthetic oligonucleotide
ggagcaguuacuugguuug

SEQ ID NO: 17859 - RNA, 19 nt, Artificial Sequence
  Description of Artificial Sequence: Synthetic oligonucleotide
uggugauaccauaggagaa

SEQ ID NO: 17860 - RNA, 19 nt, Artificial Sequence
  Description of Artificial Sequence: Synthetic oligonucleotide
aggcgaaacaaaacuuacc

SEQ ID NO: 17861 - RNA, 19 nt, Artificial Sequence
  Description of Artificial Sequence: Synthetic oligonucleotide
guaaagccaguaugggaag

SEQ ID NO: 17862 - RNA, 19 nt, Artificial Sequence
  Description of Artificial Sequence: Synthetic oligonucleotide
  modified_base (5)..(5): a, c, u, g, unknown or other
aggunuucagccaauuugu

SEQ ID NO: 17863 - RNA, 19 nt, Artificial Sequence
  Description of Artificial Sequence: Synthetic oligonucleotide
cuuagucgcacuaucugca

SEQ ID NO: 17864 - RNA, 19 nt, Artificial Sequence
  Description of Artificial Sequence: Synthetic oligonucleotide
ugauuacacaugcuuucaa

SEQ ID NO: 17865 - RNA, 19 nt, Artificial Sequence
  Description of Artificial Sequence: Synthetic oligonucleotide
ucuccgauccgcuuguaau

SEQ ID NO: 17866 - RNA, 19 nt, Artificial Sequence
  Description of Artificial Sequence: Synthetic oligonucleotide
aucgauuccuagcaaacua

SEQ ID NO: 17867 - RNA, 19 nt, Artificial Sequence
  Description of Artificial Sequence: Synthetic oligonucleotide
uaacaacaacaacaacaac

SEQ ID NO: 17868 - RNA, 19 nt, Artificial Sequence
  Description of Artificial Sequence: Synthetic oligonucleotide
gaacacaugcauccgggga

SEQ ID NO: 17869 - RNA, 19 nt, Artificial Sequence
  Description of Artificial Sequence: Synthetic oligonucleotide
gucuuauuuaaugaaugga

SEQ ID NO: 17870 - RNA, 19 nt, Artificial Sequence
  Description of Artificial Sequence: Synthetic oligonucleotide
aauggaccuaaaauguuuu

SEQ ID NO: 17871 - RNA, 19 nt, Artificial Sequence
  Description of Artificial Sequence: Synthetic oligonucleotide
accgugucagaugaggaag

SEQ ID NO: 17872 - RNA, 19 nt, Artificial Sequence
  Description of Artificial Sequence: Synthetic oligonucleotide
gaggaauuauauugaucca

SEQ ID NO: 17873 - RNA, 19 nt, Artificial Sequence
  Description of Artificial Sequence: Synthetic oligonucleotide
ugccgggaugaucaaaccu

SEQ ID NO: 17874 - RNA, 19 nt, Artificial Sequence
  Description of Artificial Sequence: Synthetic oligonucleotide
ucgugggaacagcauguag

SEQ ID NO: 17875 - RNA, 19 nt, Artificial Sequence
  Description of Artificial Sequence: Synthetic oligonucleotide
cuauuauaggcgaaacaaa

SEQ ID NO: 17876 - RNA, 19 nt, Artificial Sequence
  Description of Artificial Sequence: Synthetic oligonucleotide
gguggugauaccauaggag

SEQ ID NO: 17877 - RNA, 19 nt, Artificial Sequence
  Description of Artificial Sequence: Synthetic oligonucleotide
ggagaccuaucucacauac

SEQ ID NO: 17878 - RNA, 19 nt, Artificial Sequence
  Description of Artificial Sequence: Synthetic oligonucleotide
ggacauuccccucuccacg

SEQ ID NO: 17879 - RNA, 19 nt, Artificial Sequence
  Description of Artificial Sequence: Synthetic oligonucleotide
aauuaacuagagagcacaa

SEQ ID NO: 17880 - RNA, 19 nt, Artificial Sequence
  Description of Artificial Sequence: Synthetic oligonucleotide
ucucuagcgaugacccaca

SEQ ID NO: 17881 - RNA, 19 nt, Artificial Sequence
  Description of Artificial Sequence: Synthetic oligonucleotide
  modified_base (15)..(15): a, c, u, g, unknown or other
caaaguucuagcuunuccu

SEQ ID NO: 17882 - RNA, 19 nt, Artificial Sequence
  Description of Artificial Sequence: Synthetic oligonucleotide
agaccaauugucccucacu

SEQ ID NO: 17883 - RNA, 19 nt, Artificial Sequence
  Description of Artificial Sequence: Synthetic oligonucleotide
agcaguuacuugguuugac

SEQ ID NO: 17884 - RNA, 19 nt, Artificial Sequence
  Description of Artificial Sequence: Synthetic oligonucleotide
ucauugcucaccacacguc

SEQ ID NO: 17885 - RNA, 19 nt, Artificial Sequence
  Description of Artificial Sequence: Synthetic oligonucleotide
agucgcacuaucugcauuu

SEQ ID NO: 17886 - RNA, 19 nt, Artificial Sequence
  Description of Artificial Sequence: Synthetic oligonucleotide
acaaggauguacuguguua

SEQ ID NO: 17887 - RNA, 19 nt, Artificial Sequence
  Description of Artificial Sequence: Synthetic oligonucleotide
gaagccgacacacuuugua

SEQ ID NO: 17888 - RNA, 19 nt, Artificial Sequence
  Description of Artificial Sequence: Synthetic oligonucleotide
agcuaguuccgauaucaaa

SEQ ID NO: 17889 - RNA, 19 nt, Artificial Sequence
  Description of Artificial Sequence: Synthetic oligonucleotide
uaacgacaaggauguacug

SEQ ID NO: 17890 - RNA, 19 nt, Artificial Sequence
  Description of Artificial Sequence: Synthetic oligonucleotide
agauucagauaaugaagua

SEQ ID NO: 17891 - RNA, 19 nt, Artificial Sequence
  Description of Artificial Sequence: Synthetic oligonucleotide
  modified_base (10)..(10): a, c, u, g, unknown or other
gagggaggunuucagccaa

SEQ ID NO: 17892 - RNA, 19 nt, Artificial Sequence
  Description of Artificial Sequence: Synthetic oligonucleotide
cuccaggguaacuccaaag

SEQ ID NO: 17893 - RNA, 19 nt, Artificial Sequence
  Description of Artificial Sequence: Synthetic oligonucleotide
  modified_base (6)..(6): a, c, u, g, unknown or other
agcuunuccuguagacugc

SEQ ID NO: 17894 - RNA, 19 nt, Artificial Sequence
  Description of Artificial Sequence: Synthetic oligonucleotide
guaguaugugcggcaacgg

SEQ ID NO: 17895 - RNA, 19 nt, Artificial Sequence
  Description of Artificial Sequence: Synthetic oligonucleotide
cuccgauccgcuuguaaug

SEQ ID NO: 17896 - RNA, 19 nt, Artificial Sequence
  Description of Artificial Sequence: Synthetic oligonucleotide
ccgcauaacacguaguaug

SEQ ID NO: 17897 - RNA, 19 nt, Artificial Sequence
  Description of Artificial Sequence: Synthetic oligonucleotide
ugcguagguaacugccuca

SEQ ID NO: 17898 - RNA, 19 nt, Artificial Sequence
  Description of Artificial Sequence: Synthetic oligonucleotide
accgagaguucacaugaga

SEQ ID NO: 17899 - RNA, 19 nt, Artificial Sequence
  Description of Artificial Sequence: Synthetic oligonucleotide
guaacgacaaggauguacu

SEQ ID NO: 17900 - RNA, 19 nt, Artificial Sequence
  Description of Artificial Sequence: Synthetic oligonucleotide
uuacucggagcugucaaau

SEQ ID NO: 17901 - RNA, 19 nt, Artificial Sequence
  Description of Artificial Sequence: Synthetic oligonucleotide
acguaguaugugcggcaac

SEQ ID NO: 17902 - RNA, 19 nt, Artificial Sequence
  Description of Artificial Sequence: Synthetic oligonucleotide
uccgauccgcuuguaauga

SEQ ID NO: 17903 - RNA, 19 nt, Artificial Sequence
  Description of Artificial Sequence: Synthetic oligonucleotide
uaugugcggcaacggagac

SEQ ID NO: 17904 - RNA, 19 nt, Artificial Sequence
  Description of Artificial Sequence: Synthetic oligonucleotide
cacgcuaauuguguauagc

SEQ ID NO: 17905 - RNA, 19 nt, Artificial Sequence
  Description of Artificial Sequence: Synthetic oligonucleotide
gaaaucgcucucuagcgau

SEQ ID NO: 17906 - RNA, 19 nt, Artificial Sequence
  Description of Artificial Sequence: Synthetic oligonucleotide
acacguaguaugugcggca

SEQ ID NO: 17907 - RNA, 19 nt, Artificial Sequence
  Description of Artificial Sequence: Synthetic oligonucleotide
cacgcaacccuucacuuca

SEQ ID NO: 17908 - RNA, 19 nt, Artificial Sequence
  Description of Artificial Sequence: Synthetic oligonucleotide
gauaaguaaaagccaucau

SEQ ID NO: 17909 - RNA, 19 nt, Artificial Sequence
  Description of Artificial Sequence: Synthetic oligonucleotide
ucuccgugauguuuagaau

SEQ ID NO: 17910 - RNA, 19 nt, Artificial Sequence
  Description of Artificial Sequence: Synthetic oligonucleotide
uacccauguuauagauaag

SEQ ID NO: 17911 - RNA, 19 nt, Artificial Sequence
  Description of Artificial Sequence: Synthetic oligonucleotide
agccgcauaacacguagua

SEQ ID NO: 17912 - RNA, 19 nt, Artificial Sequence
  Description of Artificial Sequence: Synthetic oligonucleotide
aucaccuauuaagaagcca

SEQ ID NO: 17913 - RNA, 19 nt, Artificial Sequence
  Description of Artificial Sequence: Synthetic oligonucleotide
auugccacgccaguaugca

SEQ ID NO: 17914 - RNA, 19 nt, Artificial Sequence
  Description of Artificial Sequence: Synthetic oligonucleotide
caaaccuacaauccgcugu

SEQ ID NO: 17915 - RNA, 19 nt, Artificial Sequence
  Description of Artificial Sequence: Synthetic oligonucleotide
caacaacaacaacaacaac

SEQ ID NO: 17916 - RNA, 19 nt, Artificial Sequence
  Description of Artificial Sequence: Synthetic oligonucleotide
cacggucuccauucgggag

SEQ ID NO: 17917 - RNA, 19 nt, Artificial Sequence
  Description of Artificial Sequence: Synthetic oligonucleotide
cuacaauccgcuguccauc

SEQ ID NO: 17918 - RNA, 19 nt, Artificial Sequence
  Description of Artificial Sequence: Synthetic oligonucleotide
uuagucgcacuaucugcau

SEQ ID NO: 17919 - RNA, 19 nt, Artificial Sequence
  Description of Artificial Sequence: Synthetic oligonucleotide
ccgcuuguaaugaaauacc

SEQ ID NO: 17920 - RNA, 19 nt, Artificial Sequence
  Description of Artificial Sequence: Synthetic oligonucleotide
caagggcuaucucuuggug

SEQ ID NO: 17921 - RNA, 19 nt, Artificial Sequence
  Description of Artificial Sequence: Synthetic oligonucleotide
uugccgggaugaucaaacc

SEQ ID NO: 17922 - RNA, 19 nt, Artificial Sequence
  Description of Artificial Sequence: Synthetic oligonucleotide
cuguuuacgaguugcucaa

SEQ ID NO: 17923 - RNA, 19 nt, Artificial Sequence
  Description of Artificial Sequence: Synthetic oligonucleotide
gcuuguaaugaaauaccug

SEQ ID NO: 17924 - RNA, 19 nt, Artificial Sequence
  Description of Artificial Sequence: Synthetic oligonucleotide
  modified_base (15)..(15): a, c, u, g, unknown or other
guuaggagggaggunuuca

SEQ ID NO: 17925 - RNA, 19 nt, Artificial Sequence
  Description of Artificial Sequence: Synthetic oligonucleotide
uguuuacgaguugcucaag

SEQ ID NO: 17926 - RNA, 19 nt, Artificial Sequence
  Description of Artificial Sequence: Synthetic oligonucleotide
ugggcugcguagguaacug

SEQ ID NO: 17927 - RNA, 19 nt, Artificial Sequence
  Description of Artificial Sequence: Synthetic oligonucleotide
aucgcucucuagcgaugac

SEQ ID NO: 17928 - RNA, 19 nt, Artificial Sequence
  Description of Artificial Sequence: Synthetic oligonucleotide
guagcacaaauuaggaaua

SEQ ID NO: 17929 - RNA, 19 nt, Artificial Sequence
  Description of Artificial Sequence: Synthetic oligonucleotide
gagaccuaucucacauacc

SEQ ID NO: 17930 - RNA, 19 nt, Artificial Sequence
  Description of Artificial Sequence: Synthetic oligonucleotide
agccgacacacuuuguauu

SEQ ID NO: 17931 - RNA, 19 nt, Artificial Sequence
  Description of Artificial Sequence: Synthetic oligonucleotide
accuacugaugagcagacc

SEQ ID NO: 17932 - RNA, 19 nt, Artificial Sequence
  Description of Artificial Sequence: Synthetic oligonucleotide
aguguuuggucgguaaauu

SEQ ID NO: 17933 - RNA, 19 nt, Artificial Sequence
  Description of Artificial Sequence: Synthetic oligonucleotide
caauguggcaucgugggaa

SEQ ID NO: 17934 - RNA, 19 nt, Artificial Sequence
  Description of Artificial Sequence: Synthetic oligonucleotide
caguuacuugguuugaccu

SEQ ID NO: 17935 - RNA, 19 nt, Artificial Sequence
  Description of Artificial Sequence: Synthetic oligonucleotide
gugucagaugaggaagacc

SEQ ID NO: 17936 - RNA, 19 nt, Artificial Sequence
  Description of Artificial Sequence: Synthetic oligonucleotide
guaugugcggcaacggaga

SEQ ID NO: 17937 - RNA, 19 nt, Artificial Sequence
  Description of Artificial Sequence: Synthetic oligonucleotide
guuuacgaguugcucaagu

SEQ ID NO: 17938 - RNA, 19 nt, Artificial Sequence
  Description of Artificial Sequence: Synthetic oligonucleotide
guuacuugguuugaccugu

SEQ ID NO: 17939 - RNA, 19 nt, Artificial Sequence
  Description of Artificial Sequence: Synthetic oligonucleotide
gccgacacacuuuguauug

SEQ ID NO: 17940 - RNA, 19 nt, Artificial Sequence
  Description of Artificial Sequence: Synthetic oligonucleotide
accaauccuaagcuugcuu

SEQ ID NO: 17941 - RNA, 19 nt, Artificial Sequence
  Description of Artificial Sequence: Synthetic oligonucleotide
uuguuacucggagcuguca

SEQ ID NO: 17942 - RNA, 19 nt, Artificial Sequence
  Description of Artificial Sequence: Synthetic oligonucleotide
acggucuuauuuaaugaau

SEQ ID NO: 17943 - RNA, 19 nt, Artificial Sequence
  Description of Artificial Sequence: Synthetic oligonucleotide
gaauggcccgaucagcacu

SEQ ID NO: 17944 - RNA, 19 nt, Artificial Sequence
  Description of Artificial Sequence: Synthetic oligonucleotide
cuucgccuuugauucugag

SEQ ID NO: 17945 - RNA, 19 nt, Artificial Sequence
  Description of Artificial Sequence: Synthetic oligonucleotide
cguaagauaugcuuccauc

SEQ ID NO: 17946 - RNA, 19 nt, Artificial Sequence
  Description of Artificial Sequence: Synthetic oligonucleotide
auaccauaggagaauccaa

SEQ ID NO: 17947 - RNA, 19 nt, Artificial Sequence
  Description of Artificial Sequence: Synthetic oligonucleotide
cugcguagguaacugccuc

SEQ ID NO: 17948 - RNA, 19 nt, Artificial Sequence
  Description of Artificial Sequence: Synthetic oligonucleotide
gaauggaccuaaaauguuu

SEQ ID NO: 17949 - RNA, 19 nt, Artificial Sequence
  Description of Artificial Sequence: Synthetic oligonucleotide
ugaagccgacacacuuugu

SEQ ID NO: 17950 - RNA, 19 nt, Artificial Sequence
  Description of Artificial Sequence: Synthetic oligonucleotide
cggucuuauuuaaugaaug

SEQ ID NO: 17951 - RNA, 19 nt, Artificial Sequence
  Description of Artificial Sequence: Synthetic oligonucleotide
guguuuggucgguaaauua

SEQ ID NO: 17952 - RNA, 19 nt, Artificial Sequence
  Description of Artificial Sequence: Synthetic oligonucleotide
gcgaaacaaaacuuaccca

SEQ ID NO: 17953 - RNA, 19 nt, Artificial Sequence
  Description of Artificial Sequence: Synthetic oligonucleotide
ugcggcaacggagaccuau

SEQ ID NO: 17954 - RNA, 19 nt, Artificial Sequence
  Description of Artificial Sequence: Synthetic oligonucleotide
gcaauguacauuccucuaa

SEQ ID NO: 17955 - RNA, 19 nt, Artificial Sequence
  Description of Artificial Sequence: Synthetic oligonucleotide
cuuugcgcaaggagguaga

SEQ ID NO: 17956 - RNA, 19 nt, Artificial Sequence
  Description of Artificial Sequence: Synthetic oligonucleotide
guuacucggagcugucaaa

SEQ ID NO: 17957 - RNA, 19 nt, Artificial Sequence
  Description of Artificial Sequence: Synthetic oligonucleotide
uccagcuaguuccgauauc

SEQ ID NO: 17958 - RNA, 19 nt, Artificial Sequence
  Description of Artificial Sequence: Synthetic oligonucleotide
aucguccggccuuugccca

SEQ ID NO: 17959 - RNA, 19 nt, Artificial Sequence
  Description of Artificial Sequence: Synthetic oligonucleotide
uagucgcacuaucugcauu

SEQ ID NO: 17960 - RNA, 19 nt, Artificial Sequence
  Description of Artificial Sequence: Synthetic oligonucleotide
gacaaggauguacuguguu

SEQ ID NO: 17961 - RNA, 19 nt, Artificial Sequence
  Description of Artificial Sequence: Synthetic oligonucleotide
auccgcuuguaaugaaaua

SEQ ID NO: 17962 - RNA, 19 nt, Artificial Sequence
  Description of Artificial Sequence: Synthetic oligonucleotide
cgcucucuagcgaugaccc

SEQ ID NO: 17963 - RNA, 19 nt, Artificial Sequence
  Description of Artificial Sequence: Synthetic oligonucleotide
guugcucaaguuggugaug

SEQ ID NO: 17964 - RNA, 19 nt, Artificial Sequence
  Description of Artificial Sequence: Synthetic oligonucleotide
cugaaugcauggcacgcaa

SEQ ID NO: 17965 - RNA, 19 nt, Artificial Sequence
  Description of Artificial Sequence: Synthetic oligonucleotide
gugucuauucacauuugua

SEQ ID NO: 17966 - RNA, 19 nt, Artificial Sequence
  Description of Artificial Sequence: Synthetic oligonucleotide
uuugcgcaaggagguagaa

SEQ ID NO: 17967 - RNA, 19 nt, Artificial Sequence
  Description of Artificial Sequence: Synthetic oligonucleotide
acuaaaccacaaugcucuu

SEQ ID NO: 17968 - RNA, 19 nt, Artificial Sequence
  Description of Artificial Sequence: Synthetic oligonucleotide
caccgagaguucacaugag

SEQ ID NO: 17969 - RNA, 19 nt, Artificial Sequence
  Description of Artificial Sequence: Synthetic oligonucleotide
acgccaguaugcaugagua

SEQ ID NO: 17970 - RNA, 19 nt, Artificial Sequence
  Description of Artificial Sequence: Synthetic oligonucleotide
  modified_base (4)..(4): a, c, u, g, unknown or other
ggunuucagccaauuuguc

SEQ ID NO: 17971 - RNA, 19 nt, Artificial Sequence
  Description of Artificial Sequence: Synthetic oligonucleotide
guucuuagucgcacuaucu

SEQ ID NO: 17972 - RNA, 19 nt, Artificial Sequence
  Description of Artificial Sequence: Synthetic oligonucleotide
cucuagcgaugacccacag

SEQ ID NO: 17973 - RNA, 19 nt, Artificial Sequence
  Description of Artificial Sequence: Synthetic oligonucleotide
  modified_base (8)..(8): a, c, u, g, unknown or other
cuagcuunuccuguagacu

SEQ ID NO: 17974 - RNA, 19 nt, Artificial Sequence
  Description of Artificial Sequence: Synthetic oligonucleotide
caaggaucgucuucauugu

SEQ ID NO: 17975 - RNA, 19 nt, Artificial Sequence
  Description of Artificial Sequence: Synthetic oligonucleotide
acacgcaauuugccgggau

SEQ ID NO: 17976 - RNA, 19 nt, Artificial Sequence
  Description of Artificial Sequence: Synthetic oligonucleotide
ggauucccaugucauaucu

SEQ ID NO: 17977 - RNA, 19 nt, Artificial Sequence
  Description of Artificial Sequence: Synthetic oligonucleotide
ccauauuccaagacggucu

SEQ ID NO: 17978 - RNA, 19 nt, Artificial Sequence
  Description of Artificial Sequence: Synthetic oligonucleotide
uucuuaggguugacuucuu

SEQ ID NO: 17979 - RNA, 19 nt, Artificial Sequence
  Description of Artificial Sequence: Synthetic oligonucleotide
agauugugugcaagaugga

SEQ ID NO: 17980 - RNA, 19 nt, Artificial Sequence
  Description of Artificial Sequence: Synthetic oligonucleotide
gcuaucguccggccuuugc

SEQ ID NO: 17981 - RNA, 19 nt, Artificial Sequence
  Description of Artificial Sequence: Synthetic oligonucleotide
auuugccgggaugaucaaa

SEQ ID NO: 17982 - RNA, 19 nt, Artificial Sequence
  Description of Artificial Sequence: Synthetic oligonucleotide
ccacacgucccuugcgucc

SEQ ID NO: 17983 - RNA, 19 nt, Artificial Sequence
  Description of Artificial Sequence: Synthetic oligonucleotide
ccuuugcgcaaggagguag

SEQ ID NO: 17984 - RNA, 19 nt, Artificial Sequence
  Description of Artificial Sequence: Synthetic oligonucleotide
cccauauuccaagacgguc

SEQ ID NO: 17985 - RNA, 19 nt, Artificial Sequence
  Description of Artificial Sequence: Synthetic oligonucleotide
cacgccaguaugcaugagu

SEQ ID NO: 17986 - RNA, 19 nt, Artificial Sequence
  Description of Artificial Sequence: Synthetic oligonucleotide
gucgugcaauguacauucc

SEQ ID NO: 17987 - RNA, 19 nt, Artificial Sequence
  Description of Artificial Sequence: Synthetic oligonucleotide
gcaauuugccgggaugauc

SEQ ID NO: 17988 - RNA, 19 nt, Artificial Sequence
  Description of Artificial Sequence: Synthetic oligonucleotide
caacaacaacaacaacaua

SEQ ID NO: 17989 - RNA, 19 nt, Artificial Sequence
  Description of Artificial Sequence: Synthetic oligonucleotide
  modified_base (7)..(7): a, c, u, g, unknown or other
ggaggunuucagccaauuu

SEQ ID NO: 17990 - RNA, 19 nt, Artificial Sequence
  Description of Artificial Sequence: Synthetic oligonucleotide
cuaauuagccaaggaucgu

SEQ ID NO: 17991 - RNA, 19 nt, Artificial Sequence
  Description of Artificial Sequence: Synthetic oligonucleotide
gccgggaugaucaaaccua

SEQ ID NO: 17992 - RNA, 19 nt, Artificial Sequence
  Description of Artificial Sequence: Synthetic oligonucleotide
gcacgcaacccuucacuuc

SEQ ID NO: 17993 - RNA, 19 nt, Artificial Sequence
  Description of Artificial Sequence: Synthetic oligonucleotide
gacacgcaauuugccggga

SEQ ID NO: 17994 - RNA, 19 nt, Artificial Sequence
  Description of Artificial Sequence: Synthetic oligonucleotide
cacguaguaugugcggcaa

SEQ ID NO: 17995 - RNA, 19 nt, Artificial Sequence
  Description of Artificial Sequence: Synthetic oligonucleotide
caagacggucuuauuuaau

SEQ ID NO: 17996 - RNA, 19 nt, Artificial Sequence
  Description of Artificial Sequence: Synthetic oligonucleotide
gcagaccaauuacuuugga

SEQ ID NO: 17997 - RNA, 19 nt, Artificial Sequence
  Description of Artificial Sequence: Synthetic oligonucleotide
ccaagacggucuuauuuaa

SEQ ID NO: 17998 - RNA, 19 nt, Artificial Sequence
  Description of Artificial Sequence: Synthetic oligonucleotide
cacacgucccuugcgucca

SEQ ID NO: 17999 - RNA, 19 nt, Artificial Sequence
  Description of Artificial Sequence: Synthetic oligonucleotide
cuccagcuaguuccgauau

SEQ ID NO: 18000 - RNA, 19 nt, Artificial Sequence
  Description of Artificial Sequence: Synthetic oligonucleotide
caguguaccaaagcgucau

SEQ ID NO: 18001 - RNA, 19 nt, Artificial Sequence
  Description of Artificial Sequence: Synthetic oligonucleotide
cagcacugagccgcauaac

SEQ ID NO: 18002 - RNA, 19 nt, Artificial Sequence
  Description of Artificial Sequence: Synthetic oligonucleotide
acgugacuucugugguaau

SEQ ID NO: 18003 - RNA, 19 nt, Artificial Sequence
  Description of Artificial Sequence: Synthetic oligonucleotide
  modified_base (9)..(9): a, c, u, g, unknown or other
agggaggunuucagccaau

SEQ ID NO: 18004 - RNA, 19 nt, Artificial Sequence
  Description of Artificial Sequence: Synthetic oligonucleotide
ugcuaucguccggccuuug

SEQ ID NO: 18005 - RNA, 19 nt, Artificial Sequence
  Description of Artificial Sequence: Synthetic oligonucleotide
gcacggucuccauucggga

SEQ ID NO: 18006 - RNA, 19 nt, Artificial Sequence
  Description of Artificial Sequence: Synthetic oligonucleotide
guacgguuuccgguuugaa

SEQ ID NO: 18007 - RNA, 19 nt, Artificial Sequence
  Description of Artificial Sequence: Synthetic oligonucleotide
gcaccgugucagaugagga

SEQ ID NO: 18008 - RNA, 19 nt, Artificial Sequence
  Description of Artificial Sequence: Synthetic oligonucleotide
cugagccgcauaacacgua

SEQ ID NO: 18009 - RNA, 19 nt, Artificial Sequence
  Description of Artificial Sequence: Synthetic oligonucleotide
cguagguaacugccucaag

SEQ ID NO: 18010 - RNA, 19 nt, Artificial Sequence
  Description of Artificial Sequence: Synthetic oligonucleotide
cgcaaggagguagaaccug

SEQ ID NO: 18011 - RNA, 19 nt, Artificial Sequence
  Description of Artificial Sequence: Synthetic oligonucleotide
cgcauaacacguaguaugu

SEQ ID NO: 18012 - RNA, 19 nt, Artificial Sequence
  Description of Artificial Sequence: Synthetic oligonucleotide
augcaccgugucagaugag

SEQ ID NO: 18013 - RNA, 19 nt, Artificial Sequence
  Description of Artificial Sequence: Synthetic oligonucleotide
gagccgcauaacacguagu

SEQ ID NO: 18014 - RNA, 19 nt, Artificial Sequence
  Description of Artificial Sequence: Synthetic oligonucleotide
gcguagguaacugccucaa

SEQ ID NO: 18015 - RNA, 19 nt, Artificial Sequence
  Description of Artificial Sequence: Synthetic oligonucleotide
cgguuuccgguuugaauga

SEQ ID NO: 18016 - RNA, 19 nt, Artificial Sequence
  Description of Artificial Sequence: Synthetic oligonucleotide
ggcacgcaacccuucacuu

SEQ ID NO: 18017 - RNA, 19 nt, Artificial Sequence
  Description of Artificial Sequence: Synthetic oligonucleotide
caguucuuagucgcacuau

SEQ ID NO: 18018 - RNA, 19 nt, Artificial Sequence
  Description of Artificial Sequence: Synthetic oligonucleotide
cgauccgcuuguaaugaaa

SEQ ID NO: 18019 - RNA, 19 nt, Artificial Sequence
  Description of Artificial Sequence: Synthetic oligonucleotide
gggcuaucucuuggugaac

SEQ ID NO: 18020 - RNA, 19 nt, Artificial Sequence
  Description of Artificial Sequence: Synthetic oligonucleotide
acgcaacccuucacuucau

SEQ ID NO: 18021 - RNA, 19 nt, Artificial Sequence
  Description of Artificial Sequence: Synthetic oligonucleotide
gucgcacuaucugcauuuu

SEQ ID NO: 18022 - RNA, 19 nt, Artificial Sequence
  Description of Artificial Sequence: Synthetic oligonucleotide
ccccauauuccaagacggu

SEQ ID NO: 18023 - RNA, 19 nt, Artificial Sequence
  Description of Artificial Sequence: Synthetic oligonucleotide
gcgcaaggagguagaaccu

SEQ ID NO: 18024 - RNA, 19 nt, Artificial Sequence
  Description of Artificial Sequence: Synthetic oligonucleotide
ccgauccgcuuguaaugaa

SEQ ID NO: 18025 - RNA, 19 nt, Artificial Sequence
  Description of Artificial Sequence: Synthetic oligonucleotide
  modified_base (8)..(8): a, c, u, g, unknown or other
gggaggunuucagccaauu

SEQ ID NO: 18026 - RNA, 19 nt, Artificial Sequence
  Description of Artificial Sequence: Synthetic oligonucleotide
caguaacgacaaggaugua

SEQ ID NO: 18027 - RNA, 19 nt, Artificial Sequence
  Description of Artificial Sequence: Synthetic oligonucleotide
gugcggcaacggagaccua

SEQ ID NO: 18028 - RNA, 19 nt, Artificial Sequence
  Description of Artificial Sequence: Synthetic oligonucleotide
agaaugagcauucugaggg

SEQ ID NO: 18029 - RNA, 19 nt, Artificial Sequence
  Description of Artificial Sequence: Synthetic oligonucleotide
uuugacgaaauuaauggcg

SEQ ID NO: 18030 - RNA, 19 nt, Artificial Sequence
  Description of Artificial Sequence: Synthetic oligonucleotide
ucaaaauccaacaaccugc

SEQ ID NO: 18031 - RNA, 19 nt, Artificial Sequence
  Description of Artificial Sequence: Synthetic oligonucleotide
aaugauacgcauuuauuug

SEQ ID NO: 18032 - RNA, 19 nt, Artificial Sequence
  Description of Artificial Sequence: Synthetic oligonucleotide
cuugaucuaacaaaggagg

SEQ ID NO: 18033 - RNA, 19 nt, Artificial Sequence
  Description of Artificial Sequence: Synthetic oligonucleotide
gauaguguaguguaagagg

SEQ ID NO: 18034 - RNA, 19 nt, Artificial Sequence
  Description of Artificial Sequence: Synthetic oligonucleotide
ucuguuaaagaguacauga

SEQ ID NO: 18035 - RNA, 19 nt, Artificial Sequence
  Description of Artificial Sequence: Synthetic oligonucleotide
uauucagugaaugagacug

SEQ ID NO: 18036 - RNA, 19 nt, Artificial Sequence
  Description of Artificial Sequence: Synthetic oligonucleotide
uaguauuagagacacgagg

SEQ ID NO: 18037 - RNA, 19 nt, Artificial Sequence
  Description of Artificial Sequence: Synthetic oligonucleotide
uggauuaucaucacuaugu

SEQ ID NO: 18038 - RNA, 19 nt, Artificial Sequence
  Description of Artificial Sequence: Synthetic oligonucleotide
aacaauugauccuugggug

SEQ ID NO: 18039 - RNA, 19 nt, Artificial Sequence
  Description of Artificial Sequence: Synthetic oligonucleotide
ugguccauuacuaaaaugu

SEQ ID NO: 18040 - RNA, 19 nt, Artificial Sequence
  Description of Artificial Sequence: Synthetic oligonucleotide
aggaaauacacccauuuuc

SEQ ID NO: 18041 - RNA, 19 nt, Artificial Sequence
  Description of Artificial Sequence: Synthetic oligonucleotide
aaaaucaugugauguacug

SEQ ID NO: 18042 - RNA, 19 nt, Artificial Sequence
  Description of Artificial Sequence: Synthetic oligonucleotide
aagaacuagucccacuugg

SEQ ID NO: 18043 - RNA, 19 nt, Artificial Sequence
  Description of Artificial Sequence: Synthetic oligonucleotide
uguaaauuaacauccuucu

SEQ ID NO: 18044 - RNA, 19 nt, Artificial Sequence
  Description of Artificial Sequence: Synthetic oligonucleotide
aaacacucaugaaauaacc

SEQ ID NO: 18045 - RNA, 19 nt, Artificial Sequence
  Description of Artificial Sequence: Synthetic oligonucleotide
aaaacagccaacagugugc

SEQ ID NO: 18046 - RNA, 19 nt, Artificial Sequence
  Description of Artificial Sequence: Synthetic oligonucleotide
uuauuuggaaguacugacg

SEQ ID NO: 18047 - RNA, 19 nt, Artificial Sequence
  Description of Artificial Sequence: Synthetic oligonucleotide
ugcacuugaucuaacaaag

SEQ ID NO: 18048 - RNA, 19 nt, Artificial Sequence
  Description of Artificial Sequence: Synthetic oligonucleotide
uuaaauuacaguacuucga

SEQ ID NO: 18049 - RNA, 19 nt, Artificial Sequence
  Description of Artificial Sequence: Synthetic oligonucleotide
agugagacguucuaguggg

SEQ ID NO: 18050 - RNA, 19 nt, Artificial Sequence
  Description of Artificial Sequence: Synthetic oligonucleotide
agaguagugucauggaucg

SEQ ID NO: 18051 - RNA, 19 nt, Artificial Sequence
  Description of Artificial Sequence: Synthetic oligonucleotide
ucugaguuauguuugaccu

SEQ ID NO: 18052 - RNA, 19 nt, Artificial Sequence
  Description of Artificial Sequence: Synthetic oligonucleotide
ugagguaacccucugaggu

SEQ ID NO: 18053 - RNA, 19 nt, Artificial Sequence
  Description of Artificial Sequence: Synthetic oligonucleotide
agaccuuaacacuugaguc

SEQ ID NO: 18054 - RNA, 19 nt, Artificial Sequence
  Description of Artificial Sequence: Synthetic oligonucleotide
aaugccgaaguaccuuucc

SEQ ID NO: 18055 - RNA, 19 nt, Artificial Sequence
  Description of Artificial Sequence: Synthetic oligonucleotide
cucacuguuaccaccaugg

SEQ ID NO: 18056 - RNA, 19 nt, Artificial Sequence
  Description of Artificial Sequence: Synthetic oligonucleotide
uuuuagaugacccaauauu

SEQ ID NO: 18057 - RNA, 19 nt, Artificial Sequence
  Description of Artificial Sequence: Synthetic oligonucleotide
uuccugaucauuuauuacc

SEQ ID NO: 18058 - RNA, 19 nt, Artificial Sequence
  Description of Artificial Sequence: Synthetic oligonucleotide
ucgaaaauaguauuagaga

SEQ ID NO: 18059 - RNA, 19 nt, Artificial Sequence
  Description of Artificial Sequence: Synthetic oligonucleotide
gaucuaacaaaggaggcgg

SEQ ID NO: 18060 - RNA, 19 nt, Artificial Sequence
  Description of Artificial Sequence: Synthetic oligonucleotide
ugaagauguaaugauacgc

SEQ ID NO: 18061 - RNA, 19 nt, Artificial Sequence
  Description of Artificial Sequence: Synthetic oligonucleotide
uaugacaaugcccaccuca

SEQ ID NO: 18062 - RNA, 19 nt, Artificial Sequence
  Description of Artificial Sequence: Synthetic oligonucleotide
augauacgcauuuauuugg

SEQ ID NO: 18063 - RNA, 19 nt, Artificial Sequence
  Description of Artificial Sequence: Synthetic oligonucleotide
ugaaugaggacagugagac

SEQ ID NO: 18064 - RNA, 19 nt, Artificial Sequence
  Description of Artificial Sequence: Synthetic oligonucleotide
uuuagaugacccaauauuu

SEQ ID NO: 18065 - RNA, 19 nt, Artificial Sequence
  Description of Artificial Sequence: Synthetic oligonucleotide
gacugaaagaccauggugc

SEQ ID NO: 18066 - RNA, 19 nt, Artificial Sequence
  Description of Artificial Sequence: Synthetic oligonucleotide
ugcauugucacuacugggc

SEQ ID NO: 18067 - RNA, 19 nt, Artificial Sequence
  Description of Artificial Sequence: Synthetic oligonucleotide
uuaugaauguacuccagga

SEQ ID NO: 18068 - RNA, 19 nt, Artificial Sequence
  Description of Artificial Sequence: Synthetic oligonucleotide
uuuauuacccaaacccuca

SEQ ID NO: 18069 - RNA, 19 nt, Artificial Sequence
  Description of Artificial Sequence: Synthetic oligonucleotide
uacccaaacccucagaaga

SEQ ID NO: 18070 - RNA, 19 nt, Artificial Sequence
  Description of Artificial Sequence: Synthetic oligonucleotide
ucaaauacggaaugaaauc

SEQ ID NO: 18071 - RNA, 19 nt, Artificial Sequence
  Description of Artificial Sequence: Synthetic oligonucleotide
gaaacuagcccguaucuug

SEQ ID NO: 18072 - RNA, 19 nt, Artificial Sequence
  Description of Artificial Sequence: Synthetic oligonucleotide
ugaguugugcuagagaacc

SEQ ID NO: 18073 - RNA, 19 nt, Artificial Sequence
  Description of Artificial Sequence: Synthetic oligonucleotide
uuaggcauuucaaaaugug

SEQ ID NO: 18074 - RNA, 19 nt, Artificial Sequence
  Description of Artificial Sequence: Synthetic oligonucleotide
uuuugacgaaauuaauggc

SEQ ID NO: 18075 - RNA, 19 nt, Artificial Sequence
  Description of Artificial Sequence: Synthetic oligonucleotide
uacgcauuuauuuggaagu

SEQ ID NO: 18076 - RNA, 19 nt, Artificial Sequence
  Description of Artificial Sequence: Synthetic oligonucleotide
uaaugauacgcauuuauuu

SEQ ID NO: 18077 - RNA, 19 nt, Artificial Sequence
  Description of Artificial Sequence: Synthetic oligonucleotide
ucacguauauauuauguuc

SEQ ID NO: 18078 - RNA, 19 nt, Artificial Sequence
  Description of Artificial Sequence: Synthetic oligonucleotide
ugggguuuccucuagauaa

SEQ ID NO: 18079 - RNA, 19 nt, Artificial Sequence
  Description of Artificial Sequence: Synthetic oligonucleotide
ugaucuaacaaaggaggcg

SEQ ID NO: 18080 - RNA, 19 nt, Artificial Sequence
  Description of Artificial Sequence: Synthetic oligonucleotide
augauuauuaauaagguuu

SEQ ID NO: 18081 - RNA, 19 nt, Artificial Sequence
  Description of Artificial Sequence: Synthetic oligonucleotide
gaccuuaacacuugagucc

SEQ ID NO: 18082 - RNA, 19 nt, Artificial Sequence
  Description of Artificial Sequence: Synthetic oligonucleotide
agggccgacacucaaaauc

SEQ ID NO: 18083 - RNA, 19 nt, Artificial Sequence
  Description of Artificial Sequence: Synthetic oligonucleotide
ucgggaaagacaaaggcaa

SEQ ID NO: 18084 - RNA, 19 nt, Artificial Sequence
  Description of Artificial Sequence: Synthetic oligonucleotide
aaacuucacguauauauua

SEQ ID NO: 18085 - RNA, 19 nt, Artificial Sequence
  Description of Artificial Sequence: Synthetic oligonucleotide
ugcuccaauaauauggggu

SEQ ID NO: 18086 - RNA, 19 nt, Artificial Sequence
  Description of Artificial Sequence: Synthetic oligonucleotide
uucgaaaggguuuuggggu

SEQ ID NO: 18087 - RNA, 19 nt, Artificial Sequence
  Description of Artificial Sequence: Synthetic oligonucleotide
uaauauggggugcuccacg

SEQ ID NO: 18088 - RNA, 19 nt, Artificial Sequence
  Description of Artificial Sequence: Synthetic oligonucleotide
uguucgggaaagacaaagg

SEQ ID NO: 18089 - RNA, 19 nt, Artificial Sequence
  Description of Artificial Sequence: Synthetic oligonucleotide
uccugaucauuuauuaccc

SEQ ID NO: 18090 - RNA, 19 nt, Artificial Sequence
  Description of Artificial Sequence: Synthetic oligonucleotide
cauucugaggggaauauug

SEQ ID NO: 18091 - RNA, 19 nt, Artificial Sequence
  Description of Artificial Sequence: Synthetic oligonucleotide
gaggcuaagauucaggaaa

SEQ ID NO: 18092 - RNA, 19 nt, Artificial Sequence
  Description of Artificial Sequence: Synthetic oligonucleotide
caauuuagagaugagguac

SEQ ID NO: 18093 - RNA, 19 nt, Artificial Sequence
  Description of Artificial Sequence: Synthetic oligonucleotide
caagagaguagugucaugg

SEQ ID NO: 18094 - RNA, 19 nt, Artificial Sequence
  Description of Artificial Sequence: Synthetic oligonucleotide
aggggaauauuguugcugg

SEQ ID NO: 18095 - RNA, 19 nt, Artificial Sequence
  Description of Artificial Sequence: Synthetic oligonucleotide
acggaaugaaaucaaauaa

SEQ ID NO: 18096 - RNA, 19 nt, Artificial Sequence
  Description of Artificial Sequence: Synthetic oligonucleotide
uagaugacccaauauuuug

SEQ ID NO: 18097 - RNA, 19 nt, Artificial Sequence
  Description of Artificial Sequence: Synthetic oligonucleotide
guugauauagggccgacac

SEQ ID NO: 18098 - RNA, 19 nt, Artificial Sequence
  Description of Artificial Sequence: Synthetic oligonucleotide
uuaaagaguacaugauugu

SEQ ID NO: 18099 - RNA, 19 nt, Artificial Sequence
  Description of Artificial Sequence: Synthetic oligonucleotide
uugaucuaacaaaggaggc

SEQ ID NO: 18100 - RNA, 19 nt, Artificial Sequence
  Description of Artificial Sequence: Synthetic oligonucleotide
augccaguaucacugaauc

SEQ ID NO: 18101 - RNA, 19 nt, Artificial Sequence
  Description of Artificial Sequence: Synthetic oligonucleotide
caccuaauggccuggaggg

SEQ ID NO: 18102 - RNA, 19 nt, Artificial Sequence
  Description of Artificial Sequence: Synthetic oligonucleotide
uucgggaaagacaaaggca

SEQ ID NO: 18103 - RNA, 19 nt, Artificial Sequence
  Description of Artificial Sequence: Synthetic oligonucleotide
agacacuccacagauaauc

SEQ ID NO: 18104 - RNA, 19 nt, Artificial Sequence
  Description of Artificial Sequence: Synthetic oligonucleotide
cagauaaucugccacuuag

SEQ ID NO: 18105 - RNA, 19 nt, Artificial Sequence
  Description of Artificial Sequence: Synthetic oligonucleotide
uguacugcguucaacuuuc

SEQ ID NO: 18106 - RNA, 19 nt, Artificial Sequence
  Description of Artificial Sequence: Synthetic oligonucleotide
uaggcauuucaaaauguga

SEQ ID NO: 18107 - RNA, 19 nt, Artificial Sequence
  Description of Artificial Sequence: Synthetic oligonucleotide
ugagcuaaccagauagugu

SEQ ID NO: 18108 - RNA, 19 nt, Artificial Sequence
  Description of Artificial Sequence: Synthetic oligonucleotide
guugaguugugcuagagaa

SEQ ID NO: 18109 - RNA, 19 nt, Artificial Sequence
  Description of Artificial Sequence: Synthetic oligonucleotide
aguauuagagacacgaggu

SEQ ID NO: 18110 - RNA, 19 nt, Artificial Sequence
  Description of Artificial Sequence: Synthetic oligonucleotide
acaggcucuaacuuuuauc

SEQ ID NO: 18111 - RNA, 19 nt, Artificial Sequence
  Description of Artificial Sequence: Synthetic oligonucleotide
auauccuacacccgaagcu

SEQ ID NO: 18112 - RNA, 19 nt, Artificial Sequence
  Description of Artificial Sequence: Synthetic oligonucleotide
cacgcuacagucaccaugc

SEQ ID NO: 18113 - RNA, 19 nt, Artificial Sequence
  Description of Artificial Sequence: Synthetic oligonucleotide
guaguaggcaucucugggg

SEQ ID NO: 18114 - RNA, 19 nt, Artificial Sequence
  Description of Artificial Sequence: Synthetic oligonucleotide
uauuagagacacgaggugu

SEQ ID NO: 18115 - RNA, 19 nt, Artificial Sequence
  Description of Artificial Sequence: Synthetic oligonucleotide
uugugcuagagaaccauga

SEQ ID NO: 18116 - RNA, 19 nt, Artificial Sequence
  Description of Artificial Sequence: Synthetic oligonucleotide
uuaauugggguggagcuca

SEQ ID NO: 18117 - RNA, 19 nt, Artificial Sequence
  Description of Artificial Sequence: Synthetic oligonucleotide
aaagaguacaugauuguau

SEQ ID NO: 18118 - RNA, 19 nt, Artificial Sequence
  Description of Artificial Sequence: Synthetic oligonucleotide
acaaguugcaacgucacca

SEQ ID NO: 18119 - RNA, 19 nt, Artificial Sequence
  Description of Artificial Sequence: Synthetic oligonucleotide
aguuauguuugaccuauga

SEQ ID NO: 18120 - RNA, 19 nt, Artificial Sequence
  Description of Artificial Sequence: Synthetic oligonucleotide
agguuagugaaggucaggg

SEQ ID NO: 18121 - RNA, 19 nt, Artificial Sequence
  Description of Artificial Sequence: Synthetic oligonucleotide
ucuagugggaagaggcuca

SEQ ID NO: 18122 - RNA, 19 nt, Artificial Sequence
  Description of Artificial Sequence: Synthetic oligonucleotide
aacuacccaacuauuaaca

SEQ ID NO: 18123 - RNA, 19 nt, Artificial Sequence
  Description of Artificial Sequence: Synthetic oligonucleotide
uuauuacccaaacccucag

SEQ ID NO: 18124 - RNA, 19 nt, Artificial Sequence
  Description of Artificial Sequence: Synthetic oligonucleotide
cgaaaauaguauuagagac

SEQ ID NO: 18125 - RNA, 19 nt, Artificial Sequence
  Description of Artificial Sequence: Synthetic oligonucleotide
uguaguaugucugcuuggc

SEQ ID NO: 18126 - RNA, 19 nt, Artificial Sequence
  Description of Artificial Sequence: Synthetic oligonucleotide
ggaacaauugauccuuggg

SEQ ID NO: 18127 - RNA, 19 nt, Artificial Sequence
  Description of Artificial Sequence: Synthetic oligonucleotide
aaacccucagaagaaguug

SEQ ID NO: 18128 - RNA, 19 nt, Artificial Sequence
  Description of Artificial Sequence: Synthetic oligonucleotide
uuagaugacccaauauuuu

SEQ ID NO: 18129 - RNA, 19 nt, Artificial Sequence
  Description of Artificial Sequence: Synthetic oligonucleotide
ugauacgcauuuauuugga

SEQ ID NO: 18130 - RNA, 19 nt, Artificial Sequence
  Description of Artificial Sequence: Synthetic oligonucleotide
ggagggugcaauuacagug

SEQ ID NO: 18131 - RNA, 19 nt, Artificial Sequence
  Description of Artificial Sequence: Synthetic oligonucleotide
gucaaagucaaauggaugu

SEQ ID NO: 18132 - RNA, 19 nt, Artificial Sequence
  Description of Artificial Sequence: Synthetic oligonucleotide
ugaguuauguuugaccuau

SEQ ID NO: 18133 - RNA, 19 nt, Artificial Sequence
  Description of Artificial Sequence: Synthetic oligonucleotide
aguuagcccugcuguaacc

SEQ ID NO: 18134 - RNA, 19 nt, Artificial Sequence
  Description of Artificial Sequence: Synthetic oligonucleotide
acugacgaaaugccgaagu

SEQ ID NO: 18135 - RNA, 19 nt, Artificial Sequence
  Description of Artificial Sequence: Synthetic oligonucleotide
cacuaugugcuucacgggc

SEQ ID NO: 18136 - RNA, 19 nt, Artificial Sequence
  Description of Artificial Sequence: Synthetic oligonucleotide
uggaugugauuauaauggc

SEQ ID NO: 18137 - RNA, 19 nt, Artificial Sequence
  Description of Artificial Sequence: Synthetic oligonucleotide
aauuuagagaugagguaca

SEQ ID NO: 18138 - RNA, 19 nt, Artificial Sequence
  Description of Artificial Sequence: Synthetic oligonucleotide
acaauugauccuugggugu

SEQ ID NO: 18139 - RNA, 19 nt, Artificial Sequence
  Description of Artificial Sequence: Synthetic oligonucleotide
gaacaauugauccuugggu

SEQ ID NO: 18140 - RNA, 19 nt, Artificial Sequence
  Description of Artificial Sequence: Synthetic oligonucleotide
ugcaacgucaccaguucca

SEQ ID NO: 18141 - RNA, 19 nt, Artificial Sequence
  Description of Artificial Sequence: Synthetic oligonucleotide
aaguguucgaggucagccu

SEQ ID NO: 18142 - RNA, 19 nt, Artificial Sequence
  Description of Artificial Sequence: Synthetic oligonucleotide
cuacguacaauuucauauc

SEQ ID NO: 18143 - RNA, 19 nt, Artificial Sequence
  Description of Artificial Sequence: Synthetic oligonucleotide
ugccgaaguaccuuuccag

SEQ ID NO: 18144 - RNA, 19 nt, Artificial Sequence
  Description of Artificial Sequence: Synthetic oligonucleotide
aguuguucgggaaagacaa

SEQ ID NO: 18145 - RNA, 19 nt, Artificial Sequence
  Description of Artificial Sequence: Synthetic oligonucleotide
cauauccuacacccgaagc

SEQ ID NO: 18146 - RNA, 19 nt, Artificial Sequence
  Description of Artificial Sequence: Synthetic oligonucleotide
cagugagacguucuagugg

SEQ ID NO: 18147 - RNA, 19 nt, Artificial Sequence
  Description of Artificial Sequence: Synthetic oligonucleotide
auggcuuacuaugacaaug

SEQ ID NO: 18148 - RNA, 19 nt, Artificial Sequence
  Description of Artificial Sequence: Synthetic oligonucleotide
ugguaaugaggagagugag

SEQ ID NO: 18149 - RNA, 19 nt, Artificial Sequence
  Description of Artificial Sequence: Synthetic oligonucleotide
augauuguauggugaauga

SEQ ID NO: 18150 - RNA, 19 nt, Artificial Sequence
  Description of Artificial Sequence: Synthetic oligonucleotide
uucacguauauauuauguu

SEQ ID NO: 18151 - RNA, 19 nt, Artificial Sequence
  Description of Artificial Sequence: Synthetic oligonucleotide
uccgugauaguugacugug

SEQ ID NO: 18152 - RNA, 19 nt, Artificial Sequence
  Description of Artificial Sequence: Synthetic oligonucleotide
caaauacggaaugaaauca

SEQ ID NO: 18153 - RNA, 19 nt, Artificial Sequence
  Description of Artificial Sequence: Synthetic oligonucleotide
gagacguucuagugggaag

SEQ ID NO: 18154 - RNA, 19 nt, Artificial Sequence
  Description of Artificial Sequence: Synthetic oligonucleotide
gaaguuguucgggaaagac

SEQ ID NO: 18155 - RNA, 19 nt, Artificial Sequence
  Description of Artificial Sequence: Synthetic oligonucleotide
gauaugguacucggcaggc

SEQ ID NO: 18156 - RNA, 19 nt, Artificial Sequence
  Description of Artificial Sequence: Synthetic oligonucleotide
ugccuagaagacaauggaa

SEQ ID NO: 18157 - RNA, 19 nt, Artificial Sequence
  Description of Artificial Sequence: Synthetic oligonucleotide
uuccuacucccaaacuacc

SEQ ID NO: 18158 - RNA, 19 nt, Artificial Sequence
  Description of Artificial Sequence: Synthetic oligonucleotide
gcuccaauaauauggggug

SEQ ID NO: 18159 - RNA, 19 nt, Artificial Sequence
  Description of Artificial Sequence: Synthetic oligonucleotide
augagcuaaccagauagug

SEQ ID NO: 18160 - RNA, 19 nt, Artificial Sequence
  Description of Artificial Sequence: Synthetic oligonucleotide
agagaguagugucauggau

SEQ ID NO: 18161 - RNA, 19 nt, Artificial Sequence
  Description of Artificial Sequence: Synthetic oligonucleotide
cuguuaauugggguggagc

SEQ ID NO: 18162 - RNA, 19 nt, Artificial Sequence
  Description of Artificial Sequence: Synthetic oligonucleotide
uugauauagggccgacacu

SEQ ID NO: 18163 - RNA, 19 nt, Artificial Sequence
  Description of Artificial Sequence: Synthetic oligonucleotide
aacuagcccguaucuugag

SEQ ID NO: 18164 - RNA, 19 nt, Artificial Sequence
  Description of Artificial Sequence: Synthetic oligonucleotide
augagguacaaaguaaaau

SEQ ID NO: 18165 - RNA, 19 nt, Artificial Sequence
  Description of Artificial Sequence: Synthetic oligonucleotide
ccuagaagacaauggaacc

SEQ ID NO: 18166 - RNA, 19 nt, Artificial Sequence
  Description of Artificial Sequence: Synthetic oligonucleotide
uugucuuaccuacguacaa

SEQ ID NO: 18167 - RNA, 19 nt, Artificial Sequence
  Description of Artificial Sequence: Synthetic oligonucleotide
aauggcgauucuaauccca

SEQ ID NO: 18168 - RNA, 19 nt, Artificial Sequence
  Description of Artificial Sequence: Synthetic oligonucleotide
aguuuuagaugacccaaua

SEQ ID NO: 18169 - RNA, 19 nt, Artificial Sequence
  Description of Artificial Sequence: Synthetic oligonucleotide
agaaccaugaaaggaccug

SEQ ID NO: 18170 - RNA, 19 nt, Artificial Sequence
  Description of Artificial Sequence: Synthetic oligonucleotide
uucauauccuacacccgaa

SEQ ID NO: 18171 - RNA, 19 nt, Artificial Sequence
  Description of Artificial Sequence: Synthetic oligonucleotide
auaguauuagagacacgag

SEQ ID NO: 18172 - RNA, 19 nt, Artificial Sequence
  Description of Artificial Sequence: Synthetic oligonucleotide
cuguaacccuaagagaggc

SEQ ID NO: 18173 - RNA, 19 nt, Artificial Sequence
  Description of Artificial Sequence: Synthetic oligonucleotide
aacuucacguauauauuau

SEQ ID NO: 18174 - RNA, 19 nt, Artificial Sequence
  Description of Artificial Sequence: Synthetic oligonucleotide
uccagcgucgcugaaccag

SEQ ID NO: 18175 - RNA, 19 nt, Artificial Sequence
  Description of Artificial Sequence: Synthetic oligonucleotide
agagacacgaggugugcca

SEQ ID NO: 18176 - RNA, 19 nt, Artificial Sequence
  Description of Artificial Sequence: Synthetic oligonucleotide
guuagugaaggucagggau

SEQ ID NO: 18177 - RNA, 19 nt, Artificial Sequence
  Description of Artificial Sequence: Synthetic oligonucleotide
gagaacuaacauucccuca

SEQ ID NO: 18178 - RNA, 19 nt, Artificial Sequence
  Description of Artificial Sequence: Synthetic oligonucleotide
uugauccuguaucauucuc

SEQ ID NO: 18179 - RNA, 19 nt, Artificial Sequence
  Description of Artificial Sequence: Synthetic oligonucleotide
ggaaaccuguccgugauag

SEQ ID NO: 18180 - RNA, 19 nt, Artificial Sequence
  Description of Artificial Sequence: Synthetic oligonucleotide
ugccacuuagugacagaag

SEQ ID NO: 18181 - RNA, 19 nt, Artificial Sequence
  Description of Artificial Sequence: Synthetic oligonucleotide
uucagaaacuagcccguau

SEQ ID NO: 18182 - RNA, 19 nt, Artificial Sequence
  Description of Artificial Sequence: Synthetic oligonucleotide
aaaugccgaaguaccuuuc

SEQ ID NO: 18183 - RNA, 19 nt, Artificial Sequence
  Description of Artificial Sequence: Synthetic oligonucleotide
gaagucgaaaauaguauua

SEQ ID NO: 18184 - RNA, 19 nt, Artificial Sequence
  Description of Artificial Sequence: Synthetic oligonucleotide
ggaauacucacuguuacca

SEQ ID NO: 18185 - RNA, 19 nt, Artificial Sequence
  Description of Artificial Sequence: Synthetic oligonucleotide
acuuaguguauugaggauu

SEQ ID NO: 18186 - RNA, 19 nt, Artificial Sequence
  Description of Artificial Sequence: Synthetic oligonucleotide
ggcacgggaggccagaaag

SEQ ID NO: 18187 - RNA, 19 nt, Artificial Sequence
  Description of Artificial Sequence: Synthetic oligonucleotide
gacucucgguucaaaauac

SEQ ID NO: 18188 - RNA, 19 nt, Artificial Sequence
  Description of Artificial Sequence: Synthetic oligonucleotide
ugccagacugaagaacuag

SEQ ID NO: 18189 - RNA, 19 nt, Artificial Sequence
  Description of Artificial Sequence: Synthetic oligonucleotide
cugaucauuuauuacccaa

SEQ ID NO: 18190 - RNA, 19 nt, Artificial Sequence
  Description of Artificial Sequence: Synthetic oligonucleotide
uguuaccaccauggaaggg

SEQ ID NO: 18191 - RNA, 19 nt, Artificial Sequence
  Description of Artificial Sequence: Synthetic oligonucleotide
ucuuaccuacguacaauuu

SEQ ID NO: 18192 - RNA, 19 nt, Artificial Sequence
  Description of Artificial Sequence: Synthetic oligonucleotide
cuucacguauauauuaugu

SEQ ID NO: 18193 - RNA, 19 nt, Artificial Sequence
  Description of Artificial Sequence: Synthetic oligonucleotide
gggguauucagugaaugag

SEQ ID NO: 18194 - RNA, 19 nt, Artificial Sequence
  Description of Artificial Sequence: Synthetic oligonucleotide
auacacccauuuucaagug

SEQ ID NO: 18195 - RNA, 19 nt, Artificial Sequence
  Description of Artificial Sequence: Synthetic oligonucleotide
uguaacccuaagagaggcu

SEQ ID NO: 18196 - RNA, 19 nt, Artificial Sequence
  Description of Artificial Sequence: Synthetic oligonucleotide
gucgcagucacaaagagau

SEQ ID NO: 18197 - RNA, 19 nt, Artificial Sequence
  Description of Artificial Sequence: Synthetic oligonucleotide
uuagagacacgaggugugc

SEQ ID NO: 18198 - RNA, 19 nt, Artificial Sequence
  Description of Artificial Sequence: Synthetic oligonucleotide
gacacgaggugugccaucc

SEQ ID NO: 18199 - RNA, 19 nt, Artificial Sequence
  Description of Artificial Sequence: Synthetic oligonucleotide
auauggggugcuccacggg

SEQ ID NO: 18200 - RNA, 19 nt, Artificial Sequence
  Description of Artificial Sequence: Synthetic oligonucleotide
ucuuugucuuaccuacgua

SEQ ID NO: 18201 - RNA, 19 nt, Artificial Sequence
  Description of Artificial Sequence: Synthetic oligonucleotide
cccacuacucaauuaaaac

SEQ ID NO: 18202 - RNA, 19 nt, Artificial Sequence
  Description of Artificial Sequence: Synthetic oligonucleotide
cuggguaacugccaucauc

SEQ ID NO: 18203 - RNA, 19 nt, Artificial Sequence
  Description of Artificial Sequence: Synthetic oligonucleotide
caggcaccgauacuucucc

SEQ ID NO: 18204 - RNA, 19 nt, Artificial Sequence
  Description of Artificial Sequence: Synthetic oligonucleotide
gacccaauauuuuguucca

SEQ ID NO: 18205 - RNA, 19 nt, Artificial Sequence
  Description of Artificial Sequence: Synthetic oligonucleotide
ugcuccacgggugaaggga

SEQ ID NO: 18206 - RNA, 19 nt, Artificial Sequence
  Description of Artificial Sequence: Synthetic oligonucleotide
ggaaccauuugguuucuac

SEQ ID NO: 18207 - RNA, 19 nt, Artificial Sequence
  Description of Artificial Sequence: Synthetic oligonucleotide
ggaugugauuauaauggcc

SEQ ID NO: 18208 - RNA, 19 nt, Artificial Sequence
  Description of Artificial Sequence: Synthetic oligonucleotide
cuagcccguaucuugagaa

SEQ ID NO: 18209 - RNA, 19 nt, Artificial Sequence
  Description of Artificial Sequence: Synthetic oligonucleotide
agacguucuagugggaaga

SEQ ID NO: 18210 - RNA, 19 nt, Artificial Sequence
  Description of Artificial Sequence: Synthetic oligonucleotide
guauugaggauuccuguua

SEQ ID NO: 18211 - RNA, 19 nt, Artificial Sequence
  Description of Artificial Sequence: Synthetic oligonucleotide
uucgaaggguugcugguuu

SEQ ID NO: 18212 - RNA, 19 nt, Artificial Sequence
  Description of Artificial Sequence: Synthetic oligonucleotide
ugagacguucuagugggaa

SEQ ID NO: 18213 - RNA, 19 nt, Artificial Sequence
  Description of Artificial Sequence: Synthetic oligonucleotide
uuagcccugcuguaacccu

SEQ ID NO: 18214 - RNA, 19 nt, Artificial Sequence
  Description of Artificial Sequence: Synthetic oligonucleotide
uagcccguaucuugagaag

SEQ ID NO: 18215 - RNA, 19 nt, Artificial Sequence
  Description of Artificial Sequence: Synthetic oligonucleotide
aguacuucgaaggguugcu

SEQ ID NO: 18216 - RNA, 19 nt, Artificial Sequence
  Description of Artificial Sequence: Synthetic oligonucleotide
ugucuuaccuacguacaau

SEQ ID NO: 18217 - RNA, 19 nt, Artificial Sequence
  Description of Artificial Sequence: Synthetic oligonucleotide
accgauacuucuccaacuu

SEQ ID NO: 18218 - RNA, 19 nt, Artificial Sequence
  Description of Artificial Sequence: Synthetic oligonucleotide
aggcucuaacuuuuaucug

SEQ ID NO: 18219 - RNA, 19 nt, Artificial Sequence
  Description of Artificial Sequence: Synthetic oligonucleotide
auacucacuguuaccacca

SEQ ID NO: 18220 - RNA, 19 nt, Artificial Sequence
  Description of Artificial Sequence: Synthetic oligonucleotide
ugaaugagacugugguuuu

SEQ ID NO: 18221 - RNA, 19 nt, Artificial Sequence
  Description of Artificial Sequence: Synthetic oligonucleotide
gugugcacgcuacagucac

SEQ ID NO: 18222 - RNA, 19 nt, Artificial Sequence
  Description of Artificial Sequence: Synthetic oligonucleotide
aacuuguuuugauccugua

SEQ ID NO: 18223 - RNA, 19 nt, Artificial Sequence
  Description of Artificial Sequence: Synthetic oligonucleotide
acguauauauuauguucua

SEQ ID NO: 18224 - RNA, 19 nt, Artificial Sequence
  Description of Artificial Sequence: Synthetic oligonucleotide
ggagauguaaugucaaagu

SEQ ID NO: 18225 - RNA, 19 nt, Artificial Sequence
  Description of Artificial Sequence: Synthetic oligonucleotide
uaccucaugucuucugcau

SEQ ID NO: 18226 - RNA, 19 nt, Artificial Sequence
  Description of Artificial Sequence: Synthetic oligonucleotide
cuccaauaauauggggugc

SEQ ID NO: 18227 - RNA, 19 nt, Artificial Sequence
  Description of Artificial Sequence: Synthetic oligonucleotide
uagagacacgaggugugcc

SEQ ID NO: 18228 - RNA, 19 nt, Artificial Sequence
  Description of Artificial Sequence: Synthetic oligonucleotide
uaaccucccaugugauaca

SEQ ID NO: 18229 - RNA, 19 nt, Artificial Sequence
  Description of Artificial Sequence: Synthetic oligonucleotide
agacccaacugcuggacua

SEQ ID NO: 18230 - RNA, 19 nt, Artificial Sequence
  Description of Artificial Sequence: Synthetic oligonucleotide
gggacuaucugcauuguca

SEQ ID NO: 18231 - RNA, 19 nt, Artificial Sequence
  Description of Artificial Sequence: Synthetic oligonucleotide
cauggaucgugcccauggc

SEQ ID NO: 18232 - RNA, 19 nt, Artificial Sequence
  Description of Artificial Sequence: Synthetic oligonucleotide
acuacucuugggacuaucu

SEQ ID NO: 18233 - RNA, 19 nt, Artificial Sequence
  Description of Artificial Sequence: Synthetic oligonucleotide
uccagucagcaccucccca

SEQ ID NO: 18234 - RNA, 19 nt, Artificial Sequence
  Description of Artificial Sequence: Synthetic oligonucleotide
ggcgggaagucgaaaauag

SEQ ID NO: 18235 - RNA, 19 nt, Artificial Sequence
  Description of Artificial Sequence: Synthetic oligonucleotide
ucgaaggguugcugguuug

SEQ ID NO: 18236 - RNA, 19 nt, Artificial Sequence
  Description of Artificial Sequence: Synthetic oligonucleotide
gacguucuagugggaagag

SEQ ID NO: 18237 - RNA, 19 nt, Artificial Sequence
  Description of Artificial Sequence: Synthetic oligonucleotide
uuccucggcaggacagacc

SEQ ID NO: 18238 - RNA, 19 nt, Artificial Sequence
  Description of Artificial Sequence: Synthetic oligonucleotide
cagaccuuaacacuugagu

SEQ ID NO: 18239 - RNA, 19 nt, Artificial Sequence
  Description of Artificial Sequence: Synthetic oligonucleotide
uggcacacauggcuuacua

SEQ ID NO: 18240 - RNA, 19 nt, Artificial Sequence
  Description of Artificial Sequence: Synthetic oligonucleotide
uucuuaucuguuggugacu

SEQ ID NO: 18241 - RNA, 19 nt, Artificial Sequence
  Description of Artificial Sequence: Synthetic oligonucleotide
gaaguccguggacugucac

SEQ ID NO: 18242 - RNA, 19 nt, Artificial Sequence
  Description of Artificial Sequence: Synthetic oligonucleotide
aggcgaaugaggaggccac

SEQ ID NO: 18243 - RNA, 19 nt, Artificial Sequence
  Description of Artificial Sequence: Synthetic oligonucleotide
ugcuaaauacaaggggcua

SEQ ID NO: 18244 - RNA, 19 nt, Artificial Sequence
  Description of Artificial Sequence: Synthetic oligonucleotide
caugauuauuaauaagguu

SEQ ID NO: 18245 - RNA, 19 nt, Artificial Sequence
  Description of Artificial Sequence: Synthetic oligonucleotide
guuuuagaugacccaauau

SEQ ID NO: 18246 - RNA, 19 nt, Artificial Sequence
  Description of Artificial Sequence: Synthetic oligonucleotide
uaauugggguggagcucag

SEQ ID NO: 18247 - RNA, 19 nt, Artificial Sequence
  Description of Artificial Sequence: Synthetic oligonucleotide
ucgaaaggguuuugggguu

SEQ ID NO: 18248 - RNA, 19 nt, Artificial Sequence
  Description of Artificial Sequence: Synthetic oligonucleotide
acagaccuuaacacuugag

SEQ ID NO: 18249 - RNA, 19 nt, Artificial Sequence
  Description of Artificial Sequence: Synthetic oligonucleotide
gcgauugugugucaguguc

SEQ ID NO: 18250 - RNA, 19 nt, Artificial Sequence
  Description of Artificial Sequence: Synthetic oligonucleotide
cagggguauucagugaaug

SEQ ID NO: 18251 - RNA, 19 nt, Artificial Sequence
  Description of Artificial Sequence: Synthetic oligonucleotide
acguucuagugggaagagg

SEQ ID NO: 18252 - RNA, 19 nt, Artificial Sequence
  Description of Artificial Sequence: Synthetic oligonucleotide
uacugacgaaaugccgaag

SEQ ID NO: 18253 - RNA, 19 nt, Artificial Sequence
  Description of Artificial Sequence: Synthetic oligonucleotide
uaccuacguacaauuucau

SEQ ID NO: 18254 - RNA, 19 nt, Artificial Sequence
  Description of Artificial Sequence: Synthetic oligonucleotide
ccuacguacaauuucauau

SEQ ID NO: 18255 - RNA, 19 nt, Artificial Sequence
  Description of Artificial Sequence: Synthetic oligonucleotide
accuacguacaauuucaua

SEQ ID NO: 18256 - RNA, 19 nt, Artificial Sequence
  Description of Artificial Sequence: Synthetic oligonucleotide
ugccucgcugacuguuagg

SEQ ID NO: 18257 - RNA, 19 nt, Artificial Sequence
  Description of Artificial Sequence: Synthetic oligonucleotide
aggggaaaccuguccguga

SEQ ID NO: 18258 - RNA, 19 nt, Artificial Sequence
  Description of Artificial Sequence: Synthetic oligonucleotide
gggccgacacucaaaaucc

SEQ ID NO: 18259 - RNA, 19 nt, Artificial Sequence
  Description of Artificial Sequence: Synthetic oligonucleotide
cuucaacaagcccagauuu

SEQ ID NO: 18260 - RNA, 19 nt, Artificial Sequence
  Description of Artificial Sequence: Synthetic oligonucleotide
ccuaugacucaaaauacaa

SEQ ID NO: 18261 - RNA, 19 nt, Artificial Sequence
  Description of Artificial Sequence: Synthetic oligonucleotide
gggucaaaaucaugugaug

SEQ ID NO: 18262 - RNA, 19 nt, Artificial Sequence
  Description of Artificial Sequence: Synthetic oligonucleotide
guacugacgaaaugccgaa

SEQ ID NO: 18263 - RNA, 19 nt, Artificial Sequence
  Description of Artificial Sequence: Synthetic oligonucleotide
cuccuaagagauacaggga

SEQ ID NO: 18264 - RNA, 19 nt, Artificial Sequence
  Description of Artificial Sequence: Synthetic oligonucleotide
gauauagggccgacacuca

SEQ ID NO: 18265 - RNA, 19 nt, Artificial Sequence
  Description of Artificial Sequence: Synthetic oligonucleotide
ucgcagucacaaagagaug

SEQ ID NO: 18266 - RNA, 19 nt, Artificial Sequence
  Description of Artificial Sequence: Synthetic oligonucleotide
gcacgcuacagucaccaug

SEQ ID NO: 18267 - RNA, 19 nt, Artificial Sequence
  Description of Artificial Sequence: Synthetic oligonucleotide
gcuguaacccuaagagagg

SEQ ID NO: 18268 - RNA, 19 nt, Artificial Sequence
  Description of Artificial Sequence: Synthetic oligonucleotide
ggcuuacuaugacaaugcc

SEQ ID NO: 18269 - RNA, 19 nt, Artificial Sequence
  Description of Artificial Sequence: Synthetic oligonucleotide
cgggaugugguugauauag

SEQ ID NO: 18270 - RNA, 19 nt, Artificial Sequence
  Description of Artificial Sequence: Synthetic oligonucleotide
ccaacaaccugcagucacc

SEQ ID NO: 18271 - RNA, 19 nt, Artificial Sequence
  Description of Artificial Sequence: Synthetic oligonucleotide
uccacgggugaagggacug

SEQ ID NO: 18272 - RNA, 19 nt, Artificial Sequence
  Description of Artificial Sequence: Synthetic oligonucleotide
agaacggaguuuggguuga

SEQ ID NO: 18273 - RNA, 19 nt, Artificial Sequence
  Description of Artificial Sequence: Synthetic oligonucleotide
agcacauaccucaugucuu

SEQ ID NO: 18274 - RNA, 19 nt, Artificial Sequence
  Description of Artificial Sequence: Synthetic oligonucleotide
cuggaucccuucacuuuug

SEQ ID NO: 18275 - RNA, 19 nt, Artificial Sequence
  Description of Artificial Sequence: Synthetic oligonucleotide
agaaguuguucgggaaaga

SEQ ID NO: 18276 - RNA, 19 nt, Artificial Sequence
  Description of Artificial Sequence: Synthetic oligonucleotide
agcuaaccagauaguguag

SEQ ID NO: 18277 - RNA, 19 nt, Artificial Sequence
  Description of Artificial Sequence: Synthetic oligonucleotide
cuacucccaaacuacccaa

SEQ ID NO: 18278 - RNA, 19 nt, Artificial Sequence
  Description of Artificial Sequence: Synthetic oligonucleotide
gguugaguugugcuagaga

SEQ ID NO: 18279 - RNA, 19 nt, Artificial Sequence
  Description of Artificial Sequence: Synthetic oligonucleotide
agguacaggcaagaaguaa

SEQ ID NO: 18280 - RNA, 19 nt, Artificial Sequence
  Description of Artificial Sequence: Synthetic oligonucleotide
uucaagugccugccacuua

SEQ ID NO: 18281 - RNA, 19 nt, Artificial Sequence
  Description of Artificial Sequence: Synthetic oligonucleotide
aaccucccaugugauacaa

SEQ ID NO: 18282 - RNA, 19 nt, Artificial Sequence
  Description of Artificial Sequence: Synthetic oligonucleotide
ggguugugaaagcagcaga

SEQ ID NO: 18283 - RNA, 19 nt, Artificial Sequence
  Description of Artificial Sequence: Synthetic oligonucleotide
cuguuaaagaguacaugau

SEQ ID NO: 18284 - RNA, 19 nt, Artificial Sequence
  Description of Artificial Sequence: Synthetic oligonucleotide
acgaggugugccauccaag

SEQ ID NO: 18285 - RNA, 19 nt, Artificial Sequence
  Description of Artificial Sequence: Synthetic oligonucleotide
acagccuuaucagcuaauu

SEQ ID NO: 18286 - RNA, 19 nt, Artificial Sequence
  Description of Artificial Sequence: Synthetic oligonucleotide
aguuagaauuuggguugug

SEQ ID NO: 18287 - RNA, 19 nt, Artificial Sequence
  Description of Artificial Sequence: Synthetic oligonucleotide
gauguacugcguucaacuu

SEQ ID NO: 18288 - RNA, 19 nt, Artificial Sequence
  Description of Artificial Sequence: Synthetic oligonucleotide
cugccucgcugacuguuag

SEQ ID NO: 18289 - RNA, 19 nt, Artificial Sequence
  Description of Artificial Sequence: Synthetic oligonucleotide
guaaugauacgcauuuauu

SEQ ID NO: 18290 - RNA, 19 nt, Artificial Sequence
  Description of Artificial Sequence: Synthetic oligonucleotide
uccuacacccgaagcucua

SEQ ID NO: 18291 - RNA, 19 nt, Artificial Sequence
  Description of Artificial Sequence: Synthetic oligonucleotide
gucuuaccuacguacaauu

SEQ ID NO: 18292 - RNA, 19 nt, Artificial Sequence
  Description of Artificial Sequence: Synthetic oligonucleotide
agcaagcaacaaggagaac

SEQ ID NO: 18293 - RNA, 19 nt, Artificial Sequence
  Description of Artificial Sequence: Synthetic oligonucleotide
gacgaaauuaauggcgauu

SEQ ID NO: 18294 - RNA, 19 nt, Artificial Sequence
  Description of Artificial Sequence: Synthetic oligonucleotide
gaguuauguuugaccuaug

SEQ ID NO: 18295 - RNA, 19 nt, Artificial Sequence
  Description of Artificial Sequence: Synthetic oligonucleotide
gcucuauuacauuugguuu

SEQ ID NO: 18296 - RNA, 19 nt, Artificial Sequence
  Description of Artificial Sequence: Synthetic oligonucleotide
cugacgaaaugccgaagua

SEQ ID NO: 18297 - RNA, 19 nt, Artificial Sequence
  Description of Artificial Sequence: Synthetic oligonucleotide
auaugguacucggcaggca

SEQ ID NO: 18298 - RNA, 19 nt, Artificial Sequence
  Description of Artificial Sequence: Synthetic oligonucleotide
cugaguuauguuugaccua

SEQ ID NO: 18299 - RNA, 19 nt, Artificial Sequence
  Description of Artificial Sequence: Synthetic oligonucleotide
ugcccgccccucuucagaa

SEQ ID NO: 18300 - RNA, 19 nt, Artificial Sequence
  Description of Artificial Sequence: Synthetic oligonucleotide
gguaaugaggagagugaga

SEQ ID NO: 18301 - RNA, 19 nt, Artificial Sequence
  Description of Artificial Sequence: Synthetic oligonucleotide
uugggacuaucugcauugu

SEQ ID NO: 18302 - RNA, 19 nt, Artificial Sequence
  Description of Artificial Sequence: Synthetic oligonucleotide
acgcauuuauuuggaagua

SEQ ID NO: 18303 - RNA, 19 nt, Artificial Sequence
  Description of Artificial Sequence: Synthetic oligonucleotide
gugcuaaauacaaggggcu

SEQ ID NO: 18304 - RNA, 19 nt, Artificial Sequence
  Description of Artificial Sequence: Synthetic oligonucleotide
acucucgguucaaaauacu

SEQ ID NO: 18305 - RNA, 19 nt, Artificial Sequence
  Description of Artificial Sequence: Synthetic oligonucleotide
ggaggcgggaagucgaaaa

SEQ ID NO: 18306 - RNA, 19 nt, Artificial Sequence
  Description of Artificial Sequence: Synthetic oligonucleotide
auggcgauucuaaucccaa

SEQ ID NO: 18307 - RNA, 19 nt, Artificial Sequence
  Description of Artificial Sequence: Synthetic oligonucleotide
gacuacucuugggacuauc

SEQ ID NO: 18308 - RNA, 19 nt, Artificial Sequence
  Description of Artificial Sequence: Synthetic oligonucleotide
ggcugccuagaagacaaug

SEQ ID NO: 18309 - RNA, 19 nt, Artificial Sequence
  Description of Artificial Sequence: Synthetic oligonucleotide
uccguccugcacaggcuau

SEQ ID NO: 18310 - RNA, 19 nt, Artificial Sequence
  Description of Artificial Sequence: Synthetic oligonucleotide
uucugguaaugaggagagu

SEQ ID NO: 18311 - RNA, 19 nt, Artificial Sequence
  Description of Artificial Sequence: Synthetic oligonucleotide
ccucccaugugauacaaua

SEQ ID NO: 18312 - RNA, 19 nt, Artificial Sequence
  Description of Artificial Sequence: Synthetic oligonucleotide
cagacuacucuugggacua

SEQ ID NO: 18313 - RNA, 19 nt, Artificial Sequence
  Description of Artificial Sequence: Synthetic oligonucleotide
gcaacaaggagaacggagu

SEQ ID NO: 18314 - RNA, 19 nt, Artificial Sequence
  Description of Artificial Sequence: Synthetic oligonucleotide
acuggguaacugccaucau

SEQ ID NO: 18315 - RNA, 19 nt, Artificial Sequence
  Description of Artificial Sequence: Synthetic oligonucleotide
gaggcgggaagucgaaaau

SEQ ID NO: 18316 - RNA, 19 nt, Artificial Sequence
  Description of Artificial Sequence: Synthetic oligonucleotide
agcgucgcugaaccaggaa

SEQ ID NO: 18317 - RNA, 19 nt, Artificial Sequence
  Description of Artificial Sequence: Synthetic oligonucleotide
uagggccgacacucaaaau

SEQ ID NO: 18318 - RNA, 19 nt, Artificial Sequence
  Description of Artificial Sequence: Synthetic oligonucleotide
aggcgggaagucgaaaaua

SEQ ID NO: 18319 - RNA, 19 nt, Artificial Sequence
  Description of Artificial Sequence: Synthetic oligonucleotide
aggcaccgauacuucucca

SEQ ID NO: 18320 - RNA, 19 nt, Artificial Sequence
  Description of Artificial Sequence: Synthetic oligonucleotide
ggagaacggaguuuggguu

SEQ ID NO: 18321 - RNA, 19 nt, Artificial Sequence
  Description of Artificial Sequence: Synthetic oligonucleotide
ggggucaaaaucaugugau

SEQ ID NO: 18322 - RNA, 19 nt, Artificial Sequence
  Description of Artificial Sequence: Synthetic oligonucleotide
ggucagccucuauuuuaug

SEQ ID NO: 18323 - RNA, 19 nt, Artificial Sequence
  Description of Artificial Sequence: Synthetic oligonucleotide
ggcaccgauacuucuccaa

SEQ ID NO: 18324 - RNA, 19 nt, Artificial Sequence
  Description of Artificial Sequence: Synthetic oligonucleotide
cgggaagucgaaaauagua

SEQ ID NO: 18325 - RNA, 19 nt, Artificial Sequence
  Description of Artificial Sequence: Synthetic oligonucleotide
caccgauacuucuccaacu

SEQ ID NO: 18326 - RNA, 19 nt, Artificial Sequence
  Description of Artificial Sequence: Synthetic oligonucleotide
caagcgauugugugucagu

SEQ ID NO: 18327 - RNA, 19 nt, Artificial Sequence
  Description of Artificial Sequence: Synthetic oligonucleotide
gguugauauagggccgaca

SEQ ID NO: 18328 - RNA, 19 nt, Artificial Sequence
  Description of Artificial Sequence: Synthetic oligonucleotide
uggugacucucgguucaaa

SEQ ID NO: 18329 - RNA, 19 nt, Artificial Sequence
  Description of Artificial Sequence: Synthetic oligonucleotide
cacuuaguguauugaggau

SEQ ID NO: 18330 - RNA, 19 nt, Artificial Sequence
  Description of Artificial Sequence: Synthetic oligonucleotide
cagcaccucugagguaacc

SEQ ID NO: 18331 - RNA, 19 nt, Artificial Sequence
  Description of Artificial Sequence: Synthetic oligonucleotide
ccugaucauuuauuaccca

SEQ ID NO: 18332 - RNA, 19 nt, Artificial Sequence
  Description of Artificial Sequence: Synthetic oligonucleotide
cacgggugaagggacugca

SEQ ID NO: 18333 - RNA, 19 nt, Artificial Sequence
  Description of Artificial Sequence: Synthetic oligonucleotide
ccaauaauauggggugcuc

SEQ ID NO: 18334 - RNA, 19 nt, Artificial Sequence
  Description of Artificial Sequence: Synthetic oligonucleotide
cccgccccucuucagaaac

SEQ ID NO: 18335 - RNA, 19 nt, Artificial Sequence
  Description of Artificial Sequence: Synthetic oligonucleotide
ccccacuacucaauuaaaa

SEQ ID NO: 18336 - RNA, 19 nt, Artificial Sequence
  Description of Artificial Sequence: Synthetic oligonucleotide
aggcacgggaggccagaaa

SEQ ID NO: 18337 - RNA, 19 nt, Artificial Sequence
  Description of Artificial Sequence: Synthetic oligonucleotide
ccuguuaauugggguggag

SEQ ID NO: 18338 - RNA, 19 nt, Artificial Sequence
  Description of Artificial Sequence: Synthetic oligonucleotide
gcaccucugagguaacccu

SEQ ID NO: 18339 - RNA, 19 nt, Artificial Sequence
  Description of Artificial Sequence: Synthetic oligonucleotide
ggagagcacugcucucuga

SEQ ID NO: 18340 - RNA, 19 nt, Artificial Sequence
  Description of Artificial Sequence: Synthetic oligonucleotide
cccguaucuugagaaggac

SEQ ID NO: 18341 - RNA, 19 nt, Artificial Sequence
  Description of Artificial Sequence: Synthetic oligonucleotide
gcuccacgggugaagggac

SEQ ID NO: 18342 - RNA, 19 nt, Artificial Sequence
  Description of Artificial Sequence: Synthetic oligonucleotide
cuucagaaacuagcccgua

SEQ ID NO: 18343 - RNA, 19 nt, Artificial Sequence
  Description of Artificial Sequence: Synthetic oligonucleotide
caacgcuuccguccguccu

SEQ ID NO: 18344 - RNA, 19 nt, Artificial Sequence
  Description of Artificial Sequence: Synthetic oligonucleotide
ccuuaacacuugaguccug

SEQ ID NO: 18345 - RNA, 19 nt, Artificial Sequence
  Description of Artificial Sequence: Synthetic oligonucleotide
acgggugaagggacugcaa

SEQ ID NO: 18346 - RNA, 19 nt, Artificial Sequence
  Description of Artificial Sequence: Synthetic oligonucleotide
ccgaagcucuauuacauuu

SEQ ID NO: 18347 - RNA, 19 nt, Artificial Sequence
  Description of Artificial Sequence: Synthetic oligonucleotide
ccguaucuugagaaggacu

SEQ ID NO: 18348 - RNA, 19 nt, Artificial Sequence
  Description of Artificial Sequence: Synthetic oligonucleotide
cagcgucgcugaaccagga

SEQ ID NO: 18349 - RNA, 19 nt, Artificial Sequence
  Description of Artificial Sequence: Synthetic oligonucleotide
gcgagaggucuuccaguca

SEQ ID NO: 18350 - RNA, 19 nt, Artificial Sequence
  Description of Artificial Sequence: Synthetic oligonucleotide
cccuaagagaggcuaagau

SEQ ID NO: 18351 - RNA, 19 nt, Artificial Sequence
  Description of Artificial Sequence: Synthetic oligonucleotide
gugagacguucuaguggga

SEQ ID NO: 18352 - RNA, 19 nt, Artificial Sequence
  Description of Artificial Sequence: Synthetic oligonucleotide
agacuacucuugggacuau

SEQ ID NO: 18353 - RNA, 19 nt, Artificial Sequence
  Description of Artificial Sequence: Synthetic oligonucleotide
ggggaauauuguugcuggu

SEQ ID NO: 18354 - RNA, 19 nt, Artificial Sequence
  Description of Artificial Sequence: Synthetic oligonucleotide
gguaacccucugaggugac

SEQ ID NO: 18355 - RNA, 19 nt, Artificial Sequence
  Description of Artificial Sequence: Synthetic oligonucleotide
ccuguccgugauaguugac

SEQ ID NO: 18356 - RNA, 19 nt, Artificial Sequence
  Description of Artificial Sequence: Synthetic oligonucleotide
accucccaugugauacaau

SEQ ID NO: 18357 - RNA, 19 nt, Artificial Sequence
  Description of Artificial Sequence: Synthetic oligonucleotide
ggccgacacucaaaaucca

SEQ ID NO: 18358 - RNA, 19 nt, Artificial Sequence
  Description of Artificial Sequence: Synthetic oligonucleotide
ccacgggugaagggacugc

SEQ ID NO: 18359 - RNA, 19 nt, Artificial Sequence
  Description of Artificial Sequence: Synthetic oligonucleotide
ccuuggcgagaggucuucc

SEQ ID NO: 18360 - RNA, 19 nt, Artificial Sequence
  Description of Artificial Sequence: Synthetic oligonucleotide
cuacacccgaagcucuauu

SEQ ID NO: 18361 - RNA, 19 nt, Artificial Sequence
  Description of Artificial Sequence: Synthetic oligonucleotide
gaguagugucauggaucgu

SEQ ID NO: 18362 - RNA, 19 nt, Artificial Sequence
  Description of Artificial Sequence: Synthetic oligonucleotide
cuucgaaggguugcugguu

SEQ ID NO: 18363 - RNA, 19 nt, Artificial Sequence
  Description of Artificial Sequence: Synthetic oligonucleotide
ggggcccuuggcgagaggu

SEQ ID NO: 18364 - RNA, 19 nt, Artificial Sequence
  Description of Artificial Sequence: Synthetic oligonucleotide
cuccacgggugaagggacu

SEQ ID NO: 18365 - RNA, 19 nt, Artificial Sequence
  Description of Artificial Sequence: Synthetic oligonucleotide
gggugucaccuaauggccu

SEQ ID NO: 18366 - RNA, 19 nt, Artificial Sequence
  Description of Artificial Sequence: Synthetic oligonucleotide
ccuggaucccuucacuuuu

SEQ ID NO: 18367 - RNA, 19 nt, Artificial Sequence
  Description of Artificial Sequence: Synthetic oligonucleotide
gcgggaagucgaaaauagu

SEQ ID NO: 18368 - RNA, 19 nt, Artificial Sequence
  Description of Artificial Sequence: Synthetic oligonucleotide
gugacccucuggacagagu

SEQ ID NO: 18369 - RNA, 19 nt, Artificial Sequence
  Description of Artificial Sequence: Synthetic oligonucleotide
cugaugagcccaggugguu

SEQ ID NO: 18370 - RNA, 19 nt, Artificial Sequence
  Description of Artificial Sequence: Synthetic oligonucleotide
ccgugauaguugacugugu

SEQ ID NO: 18371 - RNA, 19 nt, Artificial Sequence
  Description of Artificial Sequence: Synthetic oligonucleotide
gcccaccgcuccucugaca

SEQ ID NO: 18372 - RNA, 19 nt, Artificial Sequence
  Description of Artificial Sequence: Synthetic oligonucleotide
ccgggaugugguugauaua

SEQ ID NO: 18373 - RNA, 19 nt, Artificial Sequence
  Description of Artificial Sequence: Synthetic oligonucleotide
caggaucaugugguccauu

SEQ ID NO: 18374 - RNA, 19 nt, Artificial Sequence
  Description of Artificial Sequence: Synthetic oligonucleotide
ccuacacccgaagcucuau

SEQ ID NO: 18375 - RNA, 19 nt, Artificial Sequence
  Description of Artificial Sequence: Synthetic oligonucleotide
ccgccccucuucagaaacu

SEQ ID NO: 18376 - RNA, 19 nt, Artificial Sequence
  Description of Artificial Sequence: Synthetic oligonucleotide
gccugccacuuaguguauu

SEQ ID NO: 18377 - RNA, 19 nt, Artificial Sequence
  Description of Artificial Sequence: Synthetic oligonucleotide
aauacuaauagccagauac

SEQ ID NO: 18378 - RNA, 19 nt, Artificial Sequence
  Description of Artificial Sequence: Synthetic oligonucleotide
aauauauauauauauauau

SEQ ID NO: 18379 - RNA, 19 nt, Artificial Sequence
  Description of Artificial Sequence: Synthetic oligonucleotide
aaaauauauauauauauau

SEQ ID NO: 18380 - RNA, 19 nt, Artificial Sequence
  Description of Artificial Sequence: Synthetic oligonucleotide
uauauauauauauauguag

SEQ ID NO: 18381 - RNA, 19 nt, Artificial Sequence
  Description of Artificial Sequence: Synthetic oligonucleotide
uauauauauauauauaugu

SEQ ID NO: 18382 - RNA, 19 nt, Artificial Sequence
  Description of Artificial Sequence: Synthetic oligonucleotide
aauuuaaacguuaagacca

SEQ ID NO: 18383 - RNA, 19 nt, Artificial Sequence
  Description of Artificial Sequence: Synthetic oligonucleotide
uauauauauauauauauau

SEQ ID NO: 18384 - RNA, 19 nt, Artificial Sequence
  Description of Artificial Sequence: Synthetic oligonucleotide
aguaagauauuuuaaauga

SEQ ID NO: 18385 - RNA, 19 nt, Artificial Sequence
  Description of Artificial Sequence: Synthetic oligonucleotide
aauagugagcuacuauagc

SEQ ID NO: 18386 - RNA, 19 nt, Artificial Sequence
  Description of Artificial Sequence: Synthetic oligonucleotide
  modified_base (4)..(4): a, c, u, g, unknown or other
aacncuaaacauuugcaug

SEQ ID NO: 18387 - RNA, 19 nt, Artificial Sequence
  Description of Artificial Sequence: Synthetic oligonucleotide
  modified_base (7)..(7): a, c, u, g, unknown or other
agcaacncuaaacauuugc

SEQ ID NO: 18388 - RNA, 19 nt, Artificial Sequence
  Description of Artificial Sequence: Synthetic oligonucleotide
caaaucacaaaauuacucg

SEQ ID NO: 18389 - RNA, 19 nt, Artificial Sequence
  Description of Artificial Sequence: Synthetic oligonucleotide
aauuacucgauaguuauag

SEQ ID NO: 18390 - RNA, 19 nt, Artificial Sequence
  Description of Artificial Sequence: Synthetic oligonucleotide
aagauauuuuaaaugaggg

SEQ ID NO: 18391 - RNA, 19 nt, Artificial Sequence
  Description of Artificial Sequence: Synthetic oligonucleotide
aaacguuaagaccaagcac

SEQ ID NO: 18392 - RNA, 19 nt, Artificial Sequence
  Description of Artificial Sequence: Synthetic oligonucleotide
aaacacuaggcucagaaca

SEQ ID NO: 18393 - RNA, 19 nt, Artificial Sequence
  Description of Artificial Sequence: Synthetic oligonucleotide
aacuacaggguuuauaaca

SEQ ID NO: 18394 - RNA, 19 nt, Artificial Sequence
  Description of Artificial Sequence: Synthetic oligonucleotide
ucgaucaauuccaaaaggg

SEQ ID NO: 18395 - RNA, 19 nt, Artificial Sequence
  Description of Artificial Sequence: Synthetic oligonucleotide
  modified_base (7)..(7): a, c, u, g, unknown or other
uauuccncaaaauacuuga

SEQ ID NO: 18396 - RNA, 19 nt, Artificial Sequence
  Description of Artificial Sequence: Synthetic oligonucleotide
agugguacuauaaagguac

SEQ ID NO: 18397 - RNA, 19 nt, Artificial Sequence
  Description of Artificial Sequence: Synthetic oligonucleotide
aacacgggugaaucgaacc

SEQ ID NO: 18398 - RNA, 19 nt, Artificial Sequence
  Description of Artificial Sequence: Synthetic oligonucleotide
aaauacuaaagcaugcauc

SEQ ID NO: 18399 - RNA, 19 nt, Artificial Sequence
  Description of Artificial Sequence: Synthetic oligonucleotide
uuucaguacaguauuaacu

SEQ ID NO: 18400 - RNA, 19 nt, Artificial Sequence
  Description of Artificial Sequence: Synthetic oligonucleotide
agauuuauguauuagcccu

SEQ ID NO: 18401 - RNA, 19 nt, Artificial Sequence
  Description of Artificial Sequence: Synthetic oligonucleotide
uaagcguauucuaaaagag

SEQ ID NO: 18402 - RNA, 19 nt, Artificial Sequence
  Description of Artificial Sequence: Synthetic oligonucleotide
uuuauuaccucaaucugac

SEQ ID NO: 18403 - RNA, 19 nt, Artificial Sequence
  Description of Artificial Sequence: Synthetic oligonucleotide
aaucgaaccccacagguug

SEQ ID NO: 18404 - RNA, 19 nt, Artificial Sequence
  Description of Artificial Sequence: Synthetic oligonucleotide
aucuuuagcgaguacgccc

SEQ ID NO: 18405 - RNA, 19 nt, Artificial Sequence
  Description of Artificial Sequence: Synthetic oligonucleotide
aaaucacaaaauuacucga

SEQ ID NO: 18406 - RNA, 19 nt, Artificial Sequence
  Description of Artificial Sequence: Synthetic oligonucleotide
uuuguauaagcaaaacaac

SEQ ID NO: 18407 - RNA, 19 nt, Artificial Sequence
  Description of Artificial Sequence: Synthetic oligonucleotide
gaauccuucgaucaauucc

SEQ ID NO: 18408 - RNA, 19 nt, Artificial Sequence
  Description of Artificial Sequence: Synthetic oligonucleotide
aacguuaagaccaagcaca

SEQ ID NO: 18409 - RNA, 19 nt, Artificial Sequence
  Description of Artificial Sequence: Synthetic oligonucleotide
ucucauaucaaacaagcua

SEQ ID NO: 18410 - RNA, 19 nt, Artificial Sequence
  Description of Artificial Sequence: Synthetic oligonucleotide
uauauauauauauguaguc

SEQ ID NO: 18411 - RNA, 19 nt, Artificial Sequence
  Description of Artificial Sequence: Synthetic oligonucleotide
uacucgauaguuauagaag

SEQ ID NO: 18412 - RNA, 19 nt, Artificial Sequence
  Description of Artificial Sequence: Synthetic oligonucleotide
uucgaucaauuccaaaagg

SEQ ID NO: 18413 - RNA, 19 nt, Artificial Sequence
  Description of Artificial Sequence: Synthetic oligonucleotide
aauaguauaugcaagugaa

SEQ ID NO: 18414 - RNA, 19 nt, Artificial Sequence
  Description of Artificial Sequence: Synthetic oligonucleotide
uguaacuuauuugugacca

SEQ ID NO: 18415 - RNA, 19 nt, Artificial Sequence
  Description of Artificial Sequence: Synthetic oligonucleotide
aauacccgaugcuagucac

SEQ ID NO: 18416 - RNA, 19 nt, Artificial Sequence
  Description of Artificial Sequence: Synthetic oligonucleotide
aauucuaaaguccggguau

SEQ ID NO: 18417 - RNA, 19 nt, Artificial Sequence
  Description of Artificial Sequence: Synthetic oligonucleotide
uguaagcguauucuaaaag

SEQ ID NO: 18418 - RNA, 19 nt, Artificial Sequence
  Description of Artificial Sequence: Synthetic oligonucleotide
uuaauugacagaguggcug

SEQ ID NO: 18419 - RNA, 19 nt, Artificial Sequence
  Description of Artificial Sequence: Synthetic oligonucleotide
uauuagcccuguaaaauag

SEQ ID NO: 18420 - RNA, 19 nt, Artificial Sequence
  Description of Artificial Sequence: Synthetic oligonucleotide
uaugacaccguauacauuu

SEQ ID NO: 18421 - RNA, 19 nt, Artificial Sequence
  Description of Artificial Sequence: Synthetic oligonucleotide
acuauaaagguacaggaaa

SEQ ID NO: 18422 - RNA, 19 nt, Artificial Sequence
  Description of Artificial Sequence: Synthetic oligonucleotide
  modified_base (14)..(14): a, c, u, g, unknown or other
uuagguguauuccncaaaa

SEQ ID NO: 18423 - RNA, 19 nt, Artificial Sequence
  Description of Artificial Sequence: Synthetic oligonucleotide
aguaauuuagcuauggcca

SEQ ID NO: 18424 - RNA, 19 nt, Artificial Sequence
  Description of Artificial Sequence: Synthetic oligonucleotide
aaugagaugacgacaacug

SEQ ID NO: 18425 - RNA, 19 nt, Artificial Sequence
  Description of Artificial Sequence: Synthetic oligonucleotide
aaguuaugacaccguauac

SEQ ID NO: 18426 - RNA, 19 nt, Artificial Sequence
  Description of Artificial Sequence: Synthetic oligonucleotide
caguaugagacuuucuacg

SEQ ID NO: 18427 - RNA, 19 nt, Artificial Sequence
  Description of Artificial Sequence: Synthetic oligonucleotide
  modified_base (4)..(4): a, c, u, g, unknown or other
uccncaaaauacuugauuu

SEQ ID NO: 18428 - RNA, 19 nt, Artificial Sequence
  Description of Artificial Sequence: Synthetic oligonucleotide
aaauuuaccccaucaggga

SEQ ID NO: 18429 - RNA, 19 nt, Artificial Sequence
  Description of Artificial Sequence: Synthetic oligonucleotide
auagugagcuacuauagca

SEQ ID NO: 18430 - RNA, 19 nt, Artificial Sequence
  Description of Artificial Sequence: Synthetic oligonucleotide
uauuaccucaaucugacuu

SEQ ID NO: 18431 - RNA, 19 nt, Artificial Sequence
  Description of Artificial Sequence: Synthetic oligonucleotide
uacaggguuuauaacaccc

SEQ ID NO: 18432 - RNA, 19 nt, Artificial Sequence
  Description of Artificial Sequence: Synthetic oligonucleotide
aaauagugagcuacuauag

SEQ ID NO: 18433 - RNA, 19 nt, Artificial Sequence
  Description of Artificial Sequence: Synthetic oligonucleotide
aauguauaucccaaucuag

SEQ ID NO: 18434 - RNA, 19 nt, Artificial Sequence
  Description of Artificial Sequence: Synthetic oligonucleotide
  modified_base (3)..(3): a, c, u, g, unknown or other
acncuaaacauuugcaugu

SEQ ID NO: 18435 - RNA, 19 nt, Artificial Sequence
  Description of Artificial Sequence: Synthetic oligonucleotide
aguuuauuaccucaaucug

SEQ ID NO: 18436 - RNA, 19 nt, Artificial Sequence
  Description of Artificial Sequence: Synthetic oligonucleotide
auaugcuggauuucaaaag

SEQ ID NO: 18437 - RNA, 19 nt, Artificial Sequence
  Description of Artificial Sequence: Synthetic oligonucleotide
agauuaagcaaucaggcua

SEQ ID NO: 18438 - RNA, 19 nt, Artificial Sequence
  Description of Artificial Sequence: Synthetic oligonucleotide
gguaucaguauccaaaggc

SEQ ID NO: 18439 - RNA, 19 nt, Artificial Sequence
  Description of Artificial Sequence: Synthetic oligonucleotide
uugauuacaauaacucuaa

SEQ ID NO: 18440 - RNA, 19 nt, Artificial Sequence
  Description of Artificial Sequence: Synthetic oligonucleotide
aaucuuagucucauguuuc

SEQ ID NO: 18441 - RNA, 19 nt, Artificial Sequence
  Description of Artificial Sequence: Synthetic oligonucleotide
auauauauauauguaguca

SEQ ID NO: 18442 - RNA, 19 nt, Artificial Sequence
  Description of Artificial Sequence: Synthetic oligonucleotide
aaacaugccaaguaauuua

SEQ ID NO: 18443 - RNA, 19 nt, Artificial Sequence
  Description of Artificial Sequence: Synthetic oligonucleotide
aauaaccuaguuucuucug

SEQ ID NO: 18444 - RNA, 19 nt, Artificial Sequence
  Description of Artificial Sequence: Synthetic oligonucleotide
auauauauauauauguagu

SEQ ID NO: 18445 - RNA, 19 nt, Artificial Sequence
  Description of Artificial Sequence: Synthetic oligonucleotide
uacuugaaugagaugacga

SEQ ID NO: 18446 - RNA, 19 nt, Artificial Sequence
  Description of Artificial Sequence: Synthetic oligonucleotide
uuuaaaauugucuccccuc

SEQ ID NO: 18447 - RNA, 19 nt, Artificial Sequence
  Description of Artificial Sequence: Synthetic oligonucleotide
aggcgaugcaucuuuagcg

SEQ ID NO: 18448 - RNA, 19 nt, Artificial Sequence
  Description of Artificial Sequence: Synthetic oligonucleotide
ugaaucgaaccccacaggu

SEQ ID NO: 18449 - RNA, 19 nt, Artificial Sequence
  Description of Artificial Sequence: Synthetic oligonucleotide
gacgacaacugguacaaag

SEQ ID NO: 18450 - RNA, 19 nt, Artificial Sequence
  Description of Artificial Sequence: Synthetic oligonucleotide
uuacucgauaguuauagaa

SEQ ID NO: 18451 - RNA, 19 nt, Artificial Sequence
  Description of Artificial Sequence: Synthetic oligonucleotide
auugaaacggcacuuaguu

SEQ ID NO: 18452 - RNA, 19 nt, Artificial Sequence
  Description of Artificial Sequence: Synthetic oligonucleotide
uuuagguucugaacacggg

SEQ ID NO: 18453 - RNA, 19 nt, Artificial Sequence
  Description of Artificial Sequence: Synthetic oligonucleotide
aaccaaauuuaccccauca

SEQ ID NO: 18454 - RNA, 19 nt, Artificial Sequence
  Description of Artificial Sequence: Synthetic oligonucleotide
auauauauauauauauaug

SEQ ID NO: 18455 - RNA, 19 nt, Artificial Sequence
  Description of Artificial Sequence: Synthetic oligonucleotide
auauuucagaucaaagagg

SEQ ID NO: 18456 - RNA, 19 nt, Artificial Sequence
  Description of Artificial Sequence: Synthetic oligonucleotide
uucaacuauaagcauuaga

SEQ ID NO: 18457 - RNA, 19 nt, Artificial Sequence
  Description of Artificial Sequence: Synthetic oligonucleotide
uuagcccuguaaaauagug

SEQ ID NO: 18458 - RNA, 19 nt, Artificial Sequence
  Description of Artificial Sequence: Synthetic oligonucleotide
agauauuuuaaaugaggga

SEQ ID NO: 18459 - RNA, 19 nt, Artificial Sequence
  Description of Artificial Sequence: Synthetic oligonucleotide
ggagcuaucauaaugauga

SEQ ID NO: 18460 - RNA, 19 nt, Artificial Sequence
  Description of Artificial Sequence: Synthetic oligonucleotide
uaguccggcacuaagaaau

SEQ ID NO: 18461 - RNA, 19 nt, Artificial Sequence
  Description of Artificial Sequence: Synthetic oligonucleotide
auaagcaaaacaacgaagu

SEQ ID NO: 18462 - RNA, 19 nt, Artificial Sequence
  Description of Artificial Sequence: Synthetic oligonucleotide
cagauuuauguauuagccc

SEQ ID NO: 18463 - RNA, 19 nt, Artificial Sequence
  Description of Artificial Sequence: Synthetic oligonucleotide
acucgauaguuauagaaga

SEQ ID NO: 18464 - RNA, 19 nt, Artificial Sequence
  Description of Artificial Sequence: Synthetic oligonucleotide
cuauagaggaagacugugg

SEQ ID NO: 18465 - RNA, 19 nt, Artificial Sequence
  Description of Artificial Sequence: Synthetic oligonucleotide
aaauauauauauauauaua

SEQ ID NO: 18466 - RNA, 19 nt, Artificial Sequence
  Description of Artificial Sequence: Synthetic oligonucleotide
acacgggugaaucgaaccc

SEQ ID NO: 18467 - RNA, 19 nt, Artificial Sequence
  Description of Artificial Sequence: Synthetic oligonucleotide
acaaguagccuagugaaag

SEQ ID NO: 18468 - RNA, 19 nt, Artificial Sequence
  Description of Artificial Sequence: Synthetic oligonucleotide
aaugccuauucauguaacu

SEQ ID NO: 18469 - RNA, 19 nt, Artificial Sequence
  Description of Artificial Sequence: Synthetic oligonucleotide
ucggcaugaacacuggucu

SEQ ID NO: 18470 - RNA, 19 nt, Artificial Sequence
  Description of Artificial Sequence: Synthetic oligonucleotide
aguccggguauuuucugcc

SEQ ID NO: 18471 - RNA, 19 nt, Artificial Sequence
  Description of Artificial Sequence: Synthetic oligonucleotide
caacuauaagcauuagaag

SEQ ID NO: 18472 - RNA, 19 nt, Artificial Sequence
  Description of Artificial Sequence: Synthetic oligonucleotide
aagcguauucuaaaagagg

SEQ ID NO: 18473 - RNA, 19 nt, Artificial Sequence
  Description of Artificial Sequence: Synthetic oligonucleotide
guaagcguauucuaaaaga

SEQ ID NO: 18474 - RNA, 19 nt, Artificial Sequence
  Description of Artificial Sequence: Synthetic oligonucleotide
uuacucuuauaaaugggaa

SEQ ID NO: 18475 - RNA, 19 nt, Artificial Sequence
  Description of Artificial Sequence: Synthetic oligonucleotide
ucaguaugagacuuucuac

SEQ ID NO: 18476 - RNA, 19 nt, Artificial Sequence
  Description of Artificial Sequence: Synthetic oligonucleotide
gaugcuagucacuccgggg

SEQ ID NO: 18477 - RNA, 19 nt, Artificial Sequence
  Description of Artificial Sequence: Synthetic oligonucleotide
ucaauaaccuaguuucuuc

SEQ ID NO: 18478 - RNA, 19 nt, Artificial Sequence
  Description of Artificial Sequence: Synthetic oligonucleotide
auagaggaagacuguggac

SEQ ID NO: 18479 - RNA, 19 nt, Artificial Sequence
  Description of Artificial Sequence: Synthetic oligonucleotide
ucuaacccuaucaggagcu

SEQ ID NO: 18480 - RNA, 19 nt, Artificial Sequence
  Description of Artificial Sequence: Synthetic oligonucleotide
gaaguuaugacaccguaua

SEQ ID NO: 18481 - RNA, 19 nt, Artificial Sequence
  Description of Artificial Sequence: Synthetic oligonucleotide
aaaccaaauuuaccccauc

SEQ ID NO: 18482 - RNA, 19 nt, Artificial Sequence
  Description of Artificial Sequence: Synthetic oligonucleotide
uguauuagcccuguaaaau

SEQ ID NO: 18483 - RNA, 19 nt, Artificial Sequence
  Description of Artificial Sequence: Synthetic oligonucleotide
aaaaugauuguaacauuga

SEQ ID NO: 18484 - RNA, 19 nt, Artificial Sequence
  Description of Artificial Sequence: Synthetic oligonucleotide
aaagggaacccuucuuugu

SEQ ID NO: 18485 - RNA, 19 nt, Artificial Sequence
  Description of Artificial Sequence: Synthetic oligonucleotide
guaccuagaggcaagguag

SEQ ID NO: 18486 - RNA, 19 nt, Artificial Sequence
  Description of Artificial Sequence: Synthetic oligonucleotide
aauaggcuaccuaagauuu

SEQ ID NO: 18487 - RNA, 19 nt, Artificial Sequence
  Description of Artificial Sequence: Synthetic oligonucleotide
uuagccagguaucaguauc

SEQ ID NO: 18488 - RNA, 19 nt, Artificial Sequence
  Description of Artificial Sequence: Synthetic oligonucleotide
  modified_base (9)..(9): a, c, u, g, unknown or other
uguauuccncaaaauacuu

SEQ ID NO: 18489 - RNA, 19 nt, Artificial Sequence
  Description of Artificial Sequence: Synthetic oligonucleotide
ucuuuagcgaguacgcccu

SEQ ID NO: 18490 - RNA, 19 nt, Artificial Sequence
  Description of Artificial Sequence: Synthetic oligonucleotide
aaaugccuauucauguaac

SEQ ID NO: 18491 - RNA, 19 nt, Artificial Sequence
  Description of Artificial Sequence: Synthetic oligonucleotide
  modified_base (16)..(16): a, c, u, g, unknown or other
uauuagguguauuccncaa

SEQ ID NO: 18492 - RNA, 19 nt, Artificial Sequence
  Description of Artificial Sequence: Synthetic oligonucleotide
auaaacauccccaacaaua

SEQ ID NO: 18493 - RNA, 19 nt, Artificial Sequence
  Description of Artificial Sequence: Synthetic oligonucleotide
aguaugagacuuucuacga

SEQ ID NO: 18494 - RNA, 19 nt, Artificial Sequence
  Description of Artificial Sequence: Synthetic oligonucleotide
uguguaagcguauucuaaa

SEQ ID NO: 18495 - RNA, 19 nt, Artificial Sequence
  Description of Artificial Sequence: Synthetic oligonucleotide
guagaggacauggaaaugc

SEQ ID NO: 18496 - RNA, 19 nt, Artificial Sequence
  Description of Artificial Sequence: Synthetic oligonucleotide
ucgauaguuauagaagaca

SEQ ID NO: 18497 - RNA, 19 nt, Artificial Sequence
  Description of Artificial Sequence: Synthetic oligonucleotide
guaucauauaaauuucauc

SEQ ID NO: 18498 - RNA, 19 nt, Artificial Sequence
  Description of Artificial Sequence: Synthetic oligonucleotide
ucuccaguuuauuaccuca

SEQ ID NO: 18499 - RNA, 19 nt, Artificial Sequence
  Description of Artificial Sequence: Synthetic oligonucleotide
uuuagcuauggccacuguc

SEQ ID NO: 18500 - RNA, 19 nt, Artificial Sequence
  Description of Artificial Sequence: Synthetic oligonucleotide
cuggagugguacuauaaag

SEQ ID NO: 18501 - RNA, 19 nt, Artificial Sequence
  Description of Artificial Sequence: Synthetic oligonucleotide
cuaccauugaacucuccag

SEQ ID NO: 18502 - RNA, 19 nt, Artificial Sequence
  Description of Artificial Sequence: Synthetic oligonucleotide
cuaaaguccggguauuuuc

SEQ ID NO: 18503 - RNA, 19 nt, Artificial Sequence
  Description of Artificial Sequence: Synthetic oligonucleotide
acgacaacugguacaaagc

SEQ ID NO: 18504 - RNA, 19 nt, Artificial Sequence
  Description of Artificial Sequence: Synthetic oligonucleotide
ccacuuuuaacaaugggag

SEQ ID NO: 18505 - RNA, 19 nt, Artificial Sequence
  Description of Artificial Sequence: Synthetic oligonucleotide
gauaguuauagaagacagc

SEQ ID NO: 18506 - RNA, 19 nt, Artificial Sequence
  Description of Artificial Sequence: Synthetic oligonucleotide
uuuaauuccugaguggaua

SEQ ID NO: 18507 - RNA, 19 nt, Artificial Sequence
  Description of Artificial Sequence: Synthetic oligonucleotide
gaaaugguuuaauuccuga

SEQ ID NO: 18508 - RNA, 19 nt, Artificial Sequence
  Description of Artificial Sequence: Synthetic oligonucleotide
uucccuaccauugaacucu

SEQ ID NO: 18509 - RNA, 19 nt, Artificial Sequence
  Description of Artificial Sequence: Synthetic oligonucleotide
uggacuaaucaggaggucc

SEQ ID NO: 18510 - RNA, 19 nt, Artificial Sequence
  Description of Artificial Sequence: Synthetic oligonucleotide
agcguauucuaaaagaggu

SEQ ID NO: 18511 - RNA, 19 nt, Artificial Sequence
  Description of Artificial Sequence: Synthetic oligonucleotide
acaaagcaaacacuaggcu

SEQ ID NO: 18512 - RNA, 19 nt, Artificial Sequence
  Description of Artificial Sequence: Synthetic oligonucleotide
gugccuaacaaagaggcag

SEQ ID NO: 18513 - RNA, 19 nt, Artificial Sequence
  Description of Artificial Sequence: Synthetic oligonucleotide
gaugacgacaacugguaca

SEQ ID NO: 18514 - RNA, 19 nt, Artificial Sequence
  Description of Artificial Sequence: Synthetic oligonucleotide
aaacugcuaccuaaaugac

SEQ ID NO: 18515 - RNA, 19 nt, Artificial Sequence
  Description of Artificial Sequence: Synthetic oligonucleotide
acaagcuaauauuucagua

SEQ ID NO: 18516 - RNA, 19 nt, Artificial Sequence
  Description of Artificial Sequence: Synthetic oligonucleotide
agaugacgacaacugguac

SEQ ID NO: 18517 - RNA, 19 nt, Artificial Sequence
  Description of Artificial Sequence: Synthetic oligonucleotide
ugggaauacaggaauuuua

SEQ ID NO: 18518 - RNA, 19 nt, Artificial Sequence
  Description of Artificial Sequence: Synthetic oligonucleotide
ggugaaucgaaccccacag

SEQ ID NO: 18519 - RNA, 19 nt, Artificial Sequence
  Description of Artificial Sequence: Synthetic oligonucleotide
ucuuucuacuuugaccugc

SEQ ID NO: 18520 - RNA, 19 nt, Artificial Sequence
  Description of Artificial Sequence: Synthetic oligonucleotide
  modified_base (5)..(5): a, c, u, g, unknown or other
uuccncaaaauacuugauu

SEQ ID NO: 18521 - RNA, 19 nt, Artificial Sequence
  Description of Artificial Sequence: Synthetic oligonucleotide
uuagacaggaccccaguuu

SEQ ID NO: 18522 - RNA, 19 nt, Artificial Sequence
  Description of Artificial Sequence: Synthetic oligonucleotide
auacuugaaugagaugacg

SEQ ID NO: 18523 - RNA, 19 nt, Artificial Sequence
  Description of Artificial Sequence: Synthetic oligonucleotide
acuauaagcauuagaagau

SEQ ID NO: 18524 - RNA, 19 nt, Artificial Sequence
  Description of Artificial Sequence: Synthetic oligonucleotide
caauguagaguugguaggg

SEQ ID NO: 18525 - RNA, 19 nt, Artificial Sequence
  Description of Artificial Sequence: Synthetic oligonucleotide
uuuuaacaaugggaggaag

SEQ ID NO: 18526 - RNA, 19 nt, Artificial Sequence
  Description of Artificial Sequence: Synthetic oligonucleotide
  modified_base (13)..(13): a, c, u, g, unknown or other
gguacuagcaacncuaaac

SEQ ID NO: 18527 - RNA, 19 nt, Artificial Sequence
  Description of Artificial Sequence: Synthetic oligonucleotide
caauaucuagcugaugcag

SEQ ID NO: 18528 - RNA, 19 nt, Artificial Sequence
  Description of Artificial Sequence: Synthetic oligonucleotide
ugugaaguuaugacaccgu

SEQ ID NO: 18529 - RNA, 19 nt, Artificial Sequence
  Description of Artificial Sequence: Synthetic oligonucleotide
aaaccuuucuggcuggcua

SEQ ID NO: 18530 - RNA, 19 nt, Artificial Sequence
  Description of Artificial Sequence: Synthetic oligonucleotide
ucuggagugguacuauaaa

SEQ ID NO: 18531 - RNA, 19 nt, Artificial Sequence
  Description of Artificial Sequence: Synthetic oligonucleotide
gaucaauuccaaaagggaa

SEQ ID NO: 18532 - RNA, 19 nt, Artificial Sequence
  Description of Artificial Sequence: Synthetic oligonucleotide
  modified_base (12)..(12): a, c, u, g, unknown or other
agguguauuccncaaaaua

SEQ ID NO: 18533 - RNA, 19 nt, Artificial Sequence
  Description of Artificial Sequence: Synthetic oligonucleotide
acaauaguauaugcaagug

SEQ ID NO: 18534 - RNA, 19 nt, Artificial Sequence
  Description of Artificial Sequence: Synthetic oligonucleotide
gaacauaaggugccccaag

SEQ ID NO: 18535 - RNA, 19 nt, Artificial Sequence
  Description of Artificial Sequence: Synthetic oligonucleotide
auauauauauauauaugua

SEQ ID NO: 18536 - RNA, 19 nt, Artificial Sequence
  Description of Artificial Sequence: Synthetic oligonucleotide
acucuuauaaaugggaaua

SEQ ID NO: 18537 - RNA, 19 nt, Artificial Sequence
  Description of Artificial Sequence: Synthetic oligonucleotide
ucuaggagagggguagagg

SEQ ID NO: 18538 - RNA, 19 nt, Artificial Sequence
  Description of Artificial Sequence: Synthetic oligonucleotide
auauauauauauauauaua

SEQ ID NO: 18539 - RNA, 19 nt, Artificial Sequence
  Description of Artificial Sequence: Synthetic oligonucleotide
uuacauccugugaaauagc

SEQ ID NO: 18540 - RNA, 19 nt, Artificial Sequence
  Description of Artificial Sequence: Synthetic oligonucleotide
uucuguaccuagaggcaag

SEQ ID NO: 18541 - RNA, 19 nt, Artificial Sequence
  Description of Artificial Sequence: Synthetic oligonucleotide
guguuaauugacagagugg

SEQ ID NO: 18542 - RNA, 19 nt, Artificial Sequence
  Description of Artificial Sequence: Synthetic oligonucleotide
uguauuagacaggacccca

SEQ ID NO: 18543 - RNA, 19 nt, Artificial Sequence
  Description of Artificial Sequence: Synthetic oligonucleotide
ugucuggaccauuuggacu

SEQ ID NO: 18544 - RNA, 19 nt, Artificial Sequence
  Description of Artificial Sequence: Synthetic oligonucleotide
uuaggcgaugcaucuuuag

SEQ ID NO: 18545 - RNA, 19 nt, Artificial Sequence
  Description of Artificial Sequence: Synthetic oligonucleotide
guuuauuaccucaaucuga

SEQ ID NO: 18546 - RNA, 19 nt, Artificial Sequence
  Description of Artificial Sequence: Synthetic oligonucleotide
agagucaacuggcugauuu

SEQ ID NO: 18547 - RNA, 19 nt, Artificial Sequence
  Description of Artificial Sequence: Synthetic oligonucleotide
uuucgauuucucaggcuga

SEQ ID NO: 18548 - RNA, 19 nt, Artificial Sequence
  Description of Artificial Sequence: Synthetic oligonucleotide
aguaguccggcacuaagaa

SEQ ID NO: 18549 - RNA, 19 nt, Artificial Sequence
  Description of Artificial Sequence: Synthetic oligonucleotide
cucgauaguuauagaagac

SEQ ID NO: 18550 - RNA, 19 nt, Artificial Sequence
  Description of Artificial Sequence: Synthetic oligonucleotide
  modified_base (10)..(10): a, c, u, g, unknown or other
acuagcaacncuaaacauu

SEQ ID NO: 18551 - RNA, 19 nt, Artificial Sequence
  Description of Artificial Sequence: Synthetic oligonucleotide
auuaccucaaucugacuuu

SEQ ID NO: 18552 - RNA, 19 nt, Artificial Sequence
  Description of Artificial Sequence: Synthetic oligonucleotide
uagcccuguaaaauaguga

SEQ ID NO: 18553 - RNA, 19 nt, Artificial Sequence
  Description of Artificial Sequence: Synthetic oligonucleotide
aacccuaucaggagcuauc

SEQ ID NO: 18554 - RNA, 19 nt, Artificial Sequence
  Description of Artificial Sequence: Synthetic oligonucleotide
  modified_base (2)..(2): a, c, u, g, unknown or other
cncaaaauacuugauuuca

SEQ ID NO: 18555 - RNA, 19 nt, Artificial Sequence
  Description of Artificial Sequence: Synthetic oligonucleotide
aucacaaaauuacucgaua

SEQ ID NO: 18556 - RNA, 19 nt, Artificial Sequence
  Description of Artificial Sequence: Synthetic oligonucleotide
augcuagucacuccgggga

SEQ ID NO: 18557 - RNA, 19 nt, Artificial Sequence
  Description of Artificial Sequence: Synthetic oligonucleotide
uuuaaacguuaagaccaag

SEQ ID NO: 18558 - RNA, 19 nt, Artificial Sequence
  Description of Artificial Sequence: Synthetic oligonucleotide
aucaaaccuuucuggcugg

SEQ ID NO: 18559 - RNA, 19 nt, Artificial Sequence
  Description of Artificial Sequence: Synthetic oligonucleotide
gauuuauguauuagcccug

SEQ ID NO: 18560 - RNA, 19 nt, Artificial Sequence
  Description of Artificial Sequence: Synthetic oligonucleotide
uaggccgccuguauuagac

SEQ ID NO: 18561 - RNA, 19 nt, Artificial Sequence
  Description of Artificial Sequence: Synthetic oligonucleotide
ucuccccucaacaaacauc

SEQ ID NO: 18562 - RNA, 19 nt, Artificial Sequence
  Description of Artificial Sequence: Synthetic oligonucleotide
uacuaauagccagauacua

SEQ ID NO: 18563 - RNA, 19 nt, Artificial Sequence
  Description of Artificial Sequence: Synthetic oligonucleotide
ucacuuaaucuuucuacuu

SEQ ID NO: 18564 - RNA, 19 nt, Artificial Sequence
  Description of Artificial Sequence: Synthetic oligonucleotide
uggcuauuagguguauucc

SEQ ID NO: 18565 - RNA, 19 nt, Artificial Sequence
  Description of Artificial Sequence: Synthetic oligonucleotide
  modified_base (11)..(11): a, c, u, g, unknown or other
uacuagcaacncuaaacau

SEQ ID NO: 18566 - RNA, 19 nt, Artificial Sequence
  Description of Artificial Sequence: Synthetic oligonucleotide
aaguguaggcaaccccucu

SEQ ID NO: 18567 - RNA, 19 nt, Artificial Sequence
  Description of Artificial Sequence: Synthetic oligonucleotide
ucacucagugagcucugag

SEQ ID NO: 18568 - RNA, 19 nt, Artificial Sequence
  Description of Artificial Sequence: Synthetic oligonucleotide
uaauagccagauacuaaua

SEQ ID NO: 18569 - RNA, 19 nt, Artificial Sequence
  Description of Artificial Sequence: Synthetic oligonucleotide
augccuauucauguaacug

SEQ ID NO: 18570 - RNA, 19 nt, Artificial Sequence
  Description of Artificial Sequence: Synthetic oligonucleotide
aguguaggcaaccccucug

SEQ ID NO: 18571 - RNA, 19 nt, Artificial Sequence
  Description of Artificial Sequence: Synthetic oligonucleotide
uccuaguuagccagguauc

SEQ ID NO: 18572 - RNA, 19 nt, Artificial Sequence
  Description of Artificial Sequence: Synthetic oligonucleotide
ggguauacauaccucauuc

SEQ ID NO: 18573 - RNA, 19 nt, Artificial Sequence
  Description of Artificial Sequence: Synthetic oligonucleotide
gugaaucgaaccccacagg

SEQ ID NO: 18574 - RNA, 19 nt, Artificial Sequence
  Description of Artificial Sequence: Synthetic oligonucleotide
uuuagcgaguacgcccugg

SEQ ID NO: 18575 - RNA, 19 nt, Artificial Sequence
  Description of Artificial Sequence: Synthetic oligonucleotide
agcuauacuugaaugagau

SEQ ID NO: 18576 - RNA, 19 nt, Artificial Sequence
  Description of Artificial Sequence: Synthetic oligonucleotide
agccuagugaaaguuuuag

SEQ ID NO: 18577 - RNA, 19 nt, Artificial Sequence
  Description of Artificial Sequence: Synthetic oligonucleotide
acaaaccagagaaagcgca

SEQ ID NO: 18578 - RNA, 19 nt, Artificial Sequence
  Description of Artificial Sequence: Synthetic oligonucleotide
ugguuuaaguaguccggca

SEQ ID NO: 18579 - RNA, 19 nt, Artificial Sequence
  Description of Artificial Sequence: Synthetic oligonucleotide
  modified_base (8)..(8): a, c, u, g, unknown or other
guauuccncaaaauacuug

SEQ ID NO: 18580 - RNA, 19 nt, Artificial Sequence
  Description of Artificial Sequence: Synthetic oligonucleotide
guuaugacaccguauacau

SEQ ID NO: 18581 - RNA, 19 nt, Artificial Sequence
  Description of Artificial Sequence: Synthetic oligonucleotide
cgauaguuauagaagacag

SEQ ID NO: 18582 - RNA, 19 nt, Artificial Sequence
  Description of Artificial Sequence: Synthetic oligonucleotide
cucggcaugaacacugguc

SEQ ID NO: 18583 - RNA, 19 nt, Artificial Sequence
  Description of Artificial Sequence: Synthetic oligonucleotide
acuuggucguucuguacug

SEQ ID NO: 18584 - RNA, 19 nt, Artificial Sequence
  Description of Artificial Sequence: Synthetic oligonucleotide
gacaguagaggcacuagga

SEQ ID NO: 18585 - RNA, 19 nt, Artificial Sequence
  Description of Artificial Sequence: Synthetic oligonucleotide
ugcuagucacuccggggag

SEQ ID NO: 18586 - RNA, 19 nt, Artificial Sequence
  Description of Artificial Sequence: Synthetic oligonucleotide
ucuuggguagccucggcau

SEQ ID NO: 18587 - RNA, 19 nt, Artificial Sequence
  Description of Artificial Sequence: Synthetic oligonucleotide
auuacucgauaguuauaga

SEQ ID NO: 18588 - RNA, 19 nt, Artificial Sequence
  Description of Artificial Sequence: Synthetic oligonucleotide
uuucccuaccauugaacuc

SEQ ID NO: 18589 - RNA, 19 nt, Artificial Sequence
  Description of Artificial Sequence: Synthetic oligonucleotide
guaugagacuuucuacgac

SEQ ID NO: 18590 - RNA, 19 nt, Artificial Sequence
  Description of Artificial Sequence: Synthetic oligonucleotide
uuaagcaaucaggcuagca

SEQ ID NO: 18591 - RNA, 19 nt, Artificial Sequence
  Description of Artificial Sequence: Synthetic oligonucleotide
cauuuacuuaggcauuguc

SEQ ID NO: 18592 - RNA, 19 nt, Artificial Sequence
  Description of Artificial Sequence: Synthetic oligonucleotide
  modified_base (15)..(15): a, c, u, g, unknown or other
auuagguguauuccncaaa

SEQ ID NO: 18593 - RNA, 19 nt, Artificial Sequence
  Description of Artificial Sequence: Synthetic oligonucleotide
aaccuuucuggcuggcuau

SEQ ID NO: 18594 - RNA, 19 nt, Artificial Sequence
  Description of Artificial Sequence: Synthetic oligonucleotide
gguuuaaguaguccggcac

SEQ ID NO: 18595 - RNA, 19 nt, Artificial Sequence
  Description of Artificial Sequence: Synthetic oligonucleotide
uuagcgaguacgcccuggu

SEQ ID NO: 18596 - RNA, 19 nt, Artificial Sequence
  Description of Artificial Sequence: Synthetic oligonucleotide
cagguuggacauugaaaag

SEQ ID NO: 18597 - RNA, 19 nt, Artificial Sequence
  Description of Artificial Sequence: Synthetic oligonucleotide
guauuagcccuguaaaaua

SEQ ID NO: 18598 - RNA, 19 nt, Artificial Sequence
  Description of Artificial Sequence: Synthetic oligonucleotide
ugcaaugcacucucaguau

SEQ ID NO: 18599 - RNA, 19 nt, Artificial Sequence
  Description of Artificial Sequence: Synthetic oligonucleotide
ggcaauguccuaguuagcc

SEQ ID NO: 18600 - RNA, 19 nt, Artificial Sequence
  Description of Artificial Sequence: Synthetic oligonucleotide
ccaggcaauucuaaagucc

SEQ ID NO: 18601 - RNA, 19 nt, Artificial Sequence
  Description of Artificial Sequence: Synthetic oligonucleotide
  modified_base (9)..(9): a, c, u, g, unknown or other
cuagcaacncuaaacauuu

SEQ ID NO: 18602 - RNA, 19 nt, Artificial Sequence
  Description of Artificial Sequence: Synthetic oligonucleotide
ugaacacgggugaaucgaa

SEQ ID NO: 18603 - RNA, 19 nt, Artificial Sequence
  Description of Artificial Sequence: Synthetic oligonucleotide
uguaucugcuacugaccac

SEQ ID NO: 18604 - RNA, 19 nt, Artificial Sequence
  Description of Artificial Sequence: Synthetic oligonucleotide
uucuaggagagggguagag

SEQ ID NO: 18605 - RNA, 19 nt, Artificial Sequence
  Description of Artificial Sequence: Synthetic oligonucleotide
  modified_base (17)..(17): a, c, u, g, unknown or other
cuauuagguguauuccnca

SEQ ID NO: 18606 - RNA, 19 nt, Artificial Sequence
  Description of Artificial Sequence: Synthetic oligonucleotide
uuuaaguaguccggcacua

SEQ ID NO: 18607 - RNA, 19 nt, Artificial Sequence
  Description of Artificial Sequence: Synthetic oligonucleotide
auacuaauagccagauacu

SEQ ID NO: 18608 - RNA, 19 nt, Artificial Sequence
  Description of Artificial Sequence: Synthetic oligonucleotide
cuguauuagacaggacccc

SEQ ID NO: 18609 - RNA, 19 nt, Artificial Sequence
  Description of Artificial Sequence: Synthetic oligonucleotide
auuaagcaaucaggcuagc

SEQ ID NO: 18610 - RNA, 19 nt, Artificial Sequence
  Description of Artificial Sequence: Synthetic oligonucleotide
gaagaaccaccauuugaaa

SEQ ID NO: 18611 - RNA, 19 nt, Artificial Sequence
  Description of Artificial Sequence: Synthetic oligonucleotide
cacaauaguauaugcaagu

SEQ ID NO: 18612 - RNA, 19 nt, Artificial Sequence
  Description of Artificial Sequence: Synthetic oligonucleotide
ugcuacugaccacuuuuaa

SEQ ID NO: 18613 - RNA, 19 nt, Artificial Sequence
  Description of Artificial Sequence: Synthetic oligonucleotide
aaguagccuagugaaaguu

SEQ ID NO: 18614 - RNA, 19 nt, Artificial Sequence
  Description of Artificial Sequence: Synthetic oligonucleotide
uaacauugaaacggcacuu

SEQ ID NO: 18615 - RNA, 19 nt, Artificial Sequence
  Description of Artificial Sequence: Synthetic oligonucleotide
  modified_base (10)..(10): a, c, u, g, unknown or other
guguauuccncaaaauacu

SEQ ID NO: 18616 - RNA, 19 nt, Artificial Sequence
  Description of Artificial Sequence: Synthetic oligonucleotide
gccagcuacaggcaaauac

SEQ ID NO: 18617 - RNA, 19 nt, Artificial Sequence
  Description of Artificial Sequence: Synthetic oligonucleotide
gcagcacaauaguauaugc

SEQ ID NO: 18618 - RNA, 19 nt, Artificial Sequence
  Description of Artificial Sequence: Synthetic oligonucleotide
cugaacaagagucucuucu

SEQ ID NO: 18619 - RNA, 19 nt, Artificial Sequence
  Description of Artificial Sequence: Synthetic oligonucleotide
gacuuggucguucuguacu

SEQ ID NO: 18620 - RNA, 19 nt, Artificial Sequence
  Description of Artificial Sequence: Synthetic oligonucleotide
uaccuagaggcaagguagu

SEQ ID NO: 18621 - RNA, 19 nt, Artificial Sequence
  Description of Artificial Sequence: Synthetic oligonucleotide
ggaagaaccaccauuugaa

SEQ ID NO: 18622 - RNA, 19 nt, Artificial Sequence
  Description of Artificial Sequence: Synthetic oligonucleotide
aagccugccaauaccaauu

SEQ ID NO: 18623 - RNA, 19 nt, Artificial Sequence
  Description of Artificial Sequence: Synthetic oligonucleotide
gaggacauggaaaugccua

SEQ ID NO: 18624 - RNA, 19 nt, Artificial Sequence
  Description of Artificial Sequence: Synthetic oligonucleotide
aagcugggguauacauacc

SEQ ID NO: 18625 - RNA, 19 nt, Artificial Sequence
  Description of Artificial Sequence: Synthetic oligonucleotide
  modified_base (19)..(19): a, c, u, g, unknown or other
ggcuauuagguguauuccn

SEQ ID NO: 18626 - RNA, 19 nt, Artificial Sequence
  Description of Artificial Sequence: Synthetic oligonucleotide
  modified_base (14)..(14): a, c, u, g, unknown or other
agguacuagcaacncuaaa

SEQ ID NO: 18627 - RNA, 19 nt, Artificial Sequence
  Description of Artificial Sequence: Synthetic oligonucleotide
gcgcacuggagacagaggc

SEQ ID NO: 18628 - RNA, 19 nt, Artificial Sequence
  Description of Artificial Sequence: Synthetic oligonucleotide
ucuaggccgccuguauuag

SEQ ID NO: 18629 - RNA, 19 nt, Artificial Sequence
  Description of Artificial Sequence: Synthetic oligonucleotide
uuuaggcgaugcaucuuua

SEQ ID NO: 18630 - RNA, 19 nt, Artificial Sequence
  Description of Artificial Sequence: Synthetic oligonucleotide
acccgaugcuagucacucc

SEQ ID NO: 18631 - RNA, 19 nt, Artificial Sequence
  Description of Artificial Sequence: Synthetic oligonucleotide
ucggccaccgucuggcaga

SEQ ID NO: 18632 - RNA, 19 nt, Artificial Sequence
  Description of Artificial Sequence: Synthetic oligonucleotide
ggucagauuuauguauuag

SEQ ID NO: 18633 - RNA, 19 nt, Artificial Sequence
  Description of Artificial Sequence: Synthetic oligonucleotide
uuaugacaccguauacauu

SEQ ID NO: 18634 - RNA, 19 nt, Artificial Sequence
  Description of Artificial Sequence: Synthetic oligonucleotide
aggucaguuaaagauuaaa

SEQ ID NO: 18635 - RNA, 19 nt, Artificial Sequence
  Description of Artificial Sequence: Synthetic oligonucleotide
guuuaaguaguccggcacu

SEQ ID NO: 18636 - RNA, 19 nt, Artificial Sequence
  Description of Artificial Sequence: Synthetic oligonucleotide
  modified_base (8)..(8): a, c, u, g, unknown or other
uagcaacncuaaacauuug

SEQ ID NO: 18637 - RNA, 19 nt, Artificial Sequence
  Description of Artificial Sequence: Synthetic oligonucleotide
acuaaucaggagguccucu

SEQ ID NO: 18638 - RNA, 19 nt, Artificial Sequence
  Description of Artificial Sequence: Synthetic oligonucleotide
agagaccccaaggggaaag

SEQ ID NO: 18639 - RNA, 19 nt, Artificial Sequence
  Description of Artificial Sequence: Synthetic oligonucleotide
acauuauugcuuacauccu

SEQ ID NO: 18640 - RNA, 19 nt, Artificial Sequence
  Description of Artificial Sequence: Synthetic oligonucleotide
cuguguaagcguauucuaa

SEQ ID NO: 18641 - RNA, 19 nt, Artificial Sequence
  Description of Artificial Sequence: Synthetic oligonucleotide
cauguaauaaaggucaguu

SEQ ID NO: 18642 - RNA, 19 nt, Artificial Sequence
  Description of Artificial Sequence: Synthetic oligonucleotide
cacgggugaaucgaacccc

SEQ ID NO: 18643 - RNA, 19 nt, Artificial Sequence
  Description of Artificial Sequence: Synthetic oligonucleotide
cccgaugcuagucacuccg

SEQ ID NO: 18644 - RNA, 19 nt, Artificial Sequence
  Description of Artificial Sequence: Synthetic oligonucleotide
acguuaagaccaagcacag

SEQ ID NO: 18645 - RNA, 19 nt, Artificial Sequence
  Description of Artificial Sequence: Synthetic oligonucleotide
uacccgaugcuagucacuc

SEQ ID NO: 18646 - RNA, 19 nt, Artificial Sequence
  Description of Artificial Sequence: Synthetic oligonucleotide
uacugagccuauagaggaa

SEQ ID NO: 18647 - RNA, 19 nt, Artificial Sequence
  Description of Artificial Sequence: Synthetic oligonucleotide
aaaagccugccaauaccaa

SEQ ID NO: 18648 - RNA, 19 nt, Artificial Sequence
  Description of Artificial Sequence: Synthetic oligonucleotide
ucggggugauuuucuauau

SEQ ID NO: 18649 - RNA, 19 nt, Artificial Sequence
  Description of Artificial Sequence: Synthetic oligonucleotide
  modified_base (18)..(18): a, c, u, g, unknown or other
gcuauuagguguauuccnc

SEQ ID NO: 18650 - RNA, 19 nt, Artificial Sequence
  Description of Artificial Sequence: Synthetic oligonucleotide
aaauuacucgauaguuaua

SEQ ID NO: 18651 - RNA, 19 nt, Artificial Sequence
  Description of Artificial Sequence: Synthetic oligonucleotide
  modified_base (3)..(3): a, c, u, g, unknown or other
ccncaaaauacuugauuuc

SEQ ID NO: 18652 - RNA, 19 nt, Artificial Sequence
  Description of Artificial Sequence: Synthetic oligonucleotide
  modified_base (5)..(5): a, c, u, g, unknown or other
caacncuaaacauuugcau

SEQ ID NO: 18653 - RNA, 19 nt, Artificial Sequence
  Description of Artificial Sequence: Synthetic oligonucleotide
ccaguuuauuaccucaauc

SEQ ID NO: 18654 - RNA, 19 nt, Artificial Sequence
  Description of Artificial Sequence: Synthetic oligonucleotide
gcaaugcacucucaguaug

SEQ ID NO: 18655 - RNA, 19 nt, Artificial Sequence
  Description of Artificial Sequence: Synthetic oligonucleotide
caauaaccuaguuucuucu

SEQ ID NO: 18656 - RNA, 19 nt, Artificial Sequence
  Description of Artificial Sequence: Synthetic oligonucleotide
gcaucuuuagcgaguacgc

SEQ ID NO: 18657 - RNA, 19 nt, Artificial Sequence
  Description of Artificial Sequence: Synthetic oligonucleotide
guccuaguuagccagguau

SEQ ID NO: 18658 - RNA, 19 nt, Artificial Sequence
  Description of Artificial Sequence: Synthetic oligonucleotide
gaugcaucuuuagcgagua

SEQ ID NO: 18659 - RNA, 19 nt, Artificial Sequence
  Description of Artificial Sequence: Synthetic oligonucleotide
gcggcuagaacaucaauaa

SEQ ID NO: 18660 - RNA, 19 nt, Artificial Sequence
  Description of Artificial Sequence: Synthetic oligonucleotide
guaggcaaccccucuguaa

SEQ ID NO: 18661 - RNA, 19 nt, Artificial Sequence
  Description of Artificial Sequence: Synthetic oligonucleotide
  modified_base (6)..(6): a, c, u, g, unknown or other
gcaacncuaaacauuugca

SEQ ID NO: 18662 - RNA, 19 nt, Artificial Sequence
  Description of Artificial Sequence: Synthetic oligonucleotide
uuaaguaguccggcacuaa

SEQ ID NO: 18663 - RNA, 19 nt, Artificial Sequence
  Description of Artificial Sequence: Synthetic oligonucleotide
uagcgaguacgcccuggug

SEQ ID NO: 18664 - RNA, 19 nt, Artificial Sequence
  Description of Artificial Sequence: Synthetic oligonucleotide
guaucugcuacugaccacu

SEQ ID NO: 18665 - RNA, 19 nt, Artificial Sequence
  Description of Artificial Sequence: Synthetic oligonucleotide
auuagcccuguaaaauagu

SEQ ID NO: 18666 - RNA, 19 nt, Artificial Sequence
  Description of Artificial Sequence: Synthetic oligonucleotide
cugaacacgggugaaucga

SEQ ID NO: 18667 - RNA, 19 nt, Artificial Sequence
  Description of Artificial Sequence: Synthetic oligonucleotide
uggcuguguaagcguauuc

SEQ ID NO: 18668 - RNA, 19 nt, Artificial Sequence
  Description of Artificial Sequence: Synthetic oligonucleotide
ccgucuggcagacuggugc

SEQ ID NO: 18669 - RNA, 19 nt, Artificial Sequence
  Description of Artificial Sequence: Synthetic oligonucleotide
uaucaggagcuaucauaau

SEQ ID NO: 18670 - RNA, 19 nt, Artificial Sequence
  Description of Artificial Sequence: Synthetic oligonucleotide
agccucggcaugaacacug

SEQ ID NO: 18671 - RNA, 19 nt, Artificial Sequence
  Description of Artificial Sequence: Synthetic oligonucleotide
acaggguuuauaacacccu

SEQ ID NO: 18672 - RNA, 19 nt, Artificial Sequence
  Description of Artificial Sequence: Synthetic oligonucleotide
gcuauacuugaaugagaug

SEQ ID NO: 18673 - RNA, 19 nt, Artificial Sequence
  Description of Artificial Sequence: Synthetic oligonucleotide
aggcaauucuaaaguccgg

SEQ ID NO: 18674 - RNA, 19 nt, Artificial Sequence
  Description of Artificial Sequence: Synthetic oligonucleotide
gacuuucuacgacaucugu

SEQ ID NO: 18675 - RNA, 19 nt, Artificial Sequence
  Description of Artificial Sequence: Synthetic oligonucleotide
ugaaccucggggugauuuu

SEQ ID NO: 18676 - RNA, 19 nt, Artificial Sequence
  Description of Artificial Sequence: Synthetic oligonucleotide
cucggggugauuuucuaua

SEQ ID NO: 18677 - RNA, 19 nt, Artificial Sequence
  Description of Artificial Sequence: Synthetic oligonucleotide
ggcgaugcaucuuuagcga

SEQ ID NO: 18678 - RNA, 19 nt, Artificial Sequence
  Description of Artificial Sequence: Synthetic oligonucleotide
cuuggucguucuguacugc

SEQ ID NO: 18679 - RNA, 19 nt, Artificial Sequence
  Description of Artificial Sequence: Synthetic oligonucleotide
gaacacgggugaaucgaac

SEQ ID NO: 18680 - RNA, 19 nt, Artificial Sequence
  Description of Artificial Sequence: Synthetic oligonucleotide
agcccucucaucucaggaa

SEQ ID NO: 18681 - RNA, 19 nt, Artificial Sequence
  Description of Artificial Sequence: Synthetic oligonucleotide
uacgcccuggugaacuuuu

SEQ ID NO: 18682 - RNA, 19 nt, Artificial Sequence
  Description of Artificial Sequence: Synthetic oligonucleotide
uaacccuaucaggagcuau

SEQ ID NO: 18683 - RNA, 19 nt, Artificial Sequence
  Description of Artificial Sequence: Synthetic oligonucleotide
aguagccuagugaaaguuu

SEQ ID NO: 18684 - RNA, 19 nt, Artificial Sequence
  Description of Artificial Sequence: Synthetic oligonucleotide
ccuauagaggaagacugug

SEQ ID NO: 18685 - RNA, 19 nt, Artificial Sequence
  Description of Artificial Sequence: Synthetic oligonucleotide
cauugaaacggcacuuagu

SEQ ID NO: 18686 - RNA, 19 nt, Artificial Sequence
  Description of Artificial Sequence: Synthetic oligonucleotide
gcaauguccuaguuagcca

SEQ ID NO: 18687 - RNA, 19 nt, Artificial Sequence
  Description of Artificial Sequence: Synthetic oligonucleotide
aggaagacuguggacuaau

SEQ ID NO: 18688 - RNA, 19 nt, Artificial Sequence
  Description of Artificial Sequence: Synthetic oligonucleotide
  modified_base (18)..(18): a, c, u, g, unknown or other
gagcagguacuagcaacnc

SEQ ID NO: 18689 - RNA, 19 nt, Artificial Sequence
  Description of Artificial Sequence: Synthetic oligonucleotide
gaaccucggggugauuuuc

SEQ ID NO: 18690 - RNA, 19 nt, Artificial Sequence
  Description of Artificial Sequence: Synthetic oligonucleotide
gcgaugcaucuuuagcgag

SEQ ID NO: 18691 - RNA, 19 nt, Artificial Sequence
  Description of Artificial Sequence: Synthetic oligonucleotide
ccuucaacuauaagcauua

SEQ ID NO: 18692 - RNA, 19 nt, Artificial Sequence
  Description of Artificial Sequence: Synthetic oligonucleotide
caacgaaguuuaugaucuc

SEQ ID NO: 18693 - RNA, 19 nt, Artificial Sequence
  Description of Artificial Sequence: Synthetic oligonucleotide
cagcggucacacugaaaug

SEQ ID NO: 18694 - RNA, 19 nt, Artificial Sequence
  Description of Artificial Sequence: Synthetic oligonucleotide
agcuacaggcaaauacuaa

SEQ ID NO: 18695 - RNA, 19 nt, Artificial Sequence
  Description of Artificial Sequence: Synthetic oligonucleotide
cuucuguaccuagaggcaa

SEQ ID NO: 18696 - RNA, 19 nt, Artificial Sequence
  Description of Artificial Sequence: Synthetic oligonucleotide
aggcaaccccucuguaacu

SEQ ID NO: 18697 - RNA, 19 nt, Artificial Sequence
  Description of Artificial Sequence: Synthetic oligonucleotide
guaguccggcacuaagaaa

SEQ ID NO: 18698 - RNA, 19 nt, Artificial Sequence
  Description of Artificial Sequence: Synthetic oligonucleotide
cacaaguagccuagugaaa

SEQ ID NO: 18699 - RNA, 19 nt, Artificial Sequence
  Description of Artificial Sequence: Synthetic oligonucleotide
cugagccuauagaggaaga

SEQ ID NO: 18700 - RNA, 19 nt, Artificial Sequence
  Description of Artificial Sequence: Synthetic oligonucleotide
agccugccaauaccaauuu

SEQ ID NO: 18701 - RNA, 19 nt, Artificial Sequence
  Description of Artificial Sequence: Synthetic oligonucleotide
ucgaaccccacagguugga

SEQ ID NO: 18702 - RNA, 19 nt, Artificial Sequence
  Description of Artificial Sequence: Synthetic oligonucleotide
cuuuagcgaguacgcccug

SEQ ID NO: 18703 - RNA, 19 nt, Artificial Sequence
  Description of Artificial Sequence: Synthetic oligonucleotide
caccuaggaguaaacauuu

SEQ ID NO: 18704 - RNA, 19 nt, Artificial Sequence
  Description of Artificial Sequence: Synthetic oligonucleotide
caagugcccucuuuggccu

SEQ ID NO: 18705 - RNA, 19 nt, Artificial Sequence
  Description of Artificial Sequence: Synthetic oligonucleotide
gcuguguaagcguauucua

SEQ ID NO: 18706 - RNA, 19 nt, Artificial Sequence
  Description of Artificial Sequence: Synthetic oligonucleotide
caaguagccuagugaaagu

SEQ ID NO: 18707 - RNA, 19 nt, Artificial Sequence
  Description of Artificial Sequence: Synthetic oligonucleotide
caaucacacugcuuagccu

SEQ ID NO: 18708 - RNA, 19 nt, Artificial Sequence
  Description of Artificial Sequence: Synthetic oligonucleotide
acgggugaaucgaacccca

SEQ ID NO: 18709 - RNA, 19 nt, Artificial Sequence
  Description of Artificial Sequence: Synthetic oligonucleotide
aguacgcccuggugaacuu

SEQ ID NO: 18710 - RNA, 19 nt, Artificial Sequence
  Description of Artificial Sequence: Synthetic oligonucleotide
guagccuagugaaaguuuu

SEQ ID NO: 18711 - RNA, 19 nt, Artificial Sequence
  Description of Artificial Sequence: Synthetic oligonucleotide
gugcuagaagugcuuugaa

SEQ ID NO: 18712 - RNA, 19 nt, Artificial Sequence
  Description of Artificial Sequence: Synthetic oligonucleotide
uagucacuccggggaguag

SEQ ID NO: 18713 - RNA, 19 nt, Artificial Sequence
  Description of Artificial Sequence: Synthetic oligonucleotide
gggacaagaggacacuuau

SEQ ID NO: 18714 - RNA, 19 nt, Artificial Sequence
  Description of Artificial Sequence: Synthetic oligonucleotide
auacccgaugcuagucacu

SEQ ID NO: 18715 - RNA, 19 nt, Artificial Sequence
  Description of Artificial Sequence: Synthetic oligonucleotide
auaucccaaucuagaguau

SEQ ID NO: 18716 - RNA, 19 nt, Artificial Sequence
  Description of Artificial Sequence: Synthetic oligonucleotide
cgaugcuagucacuccggg

SEQ ID NO: 18717 - RNA, 19 nt, Artificial Sequence
  Description of Artificial Sequence: Synthetic oligonucleotide
cugcaccuaggaguaaaca

SEQ ID NO: 18718 - RNA, 19 nt, Artificial Sequence
  Description of Artificial Sequence: Synthetic oligonucleotide
gugguacuauaaagguaca

SEQ ID NO: 18719 - RNA, 19 nt, Artificial Sequence
  Description of Artificial Sequence: Synthetic oligonucleotide
gaaucgaaccccacagguu

SEQ ID NO: 18720 - RNA, 19 nt, Artificial Sequence
  Description of Artificial Sequence: Synthetic oligonucleotide
cuguucuaggagaggggua

SEQ ID NO: 18721 - RNA, 19 nt, Artificial Sequence
  Description of Artificial Sequence: Synthetic oligonucleotide
cauguagcuggcugcggcu

SEQ ID NO: 18722 - RNA, 19 nt, Artificial Sequence
  Description of Artificial Sequence: Synthetic oligonucleotide
gccuaacaaagaggcaggc

SEQ ID NO: 18723 - RNA, 19 nt, Artificial Sequence
  Description of Artificial Sequence: Synthetic oligonucleotide
ggcuguguaagcguauucu

SEQ ID NO: 18724 - RNA, 19 nt, Artificial Sequence
  Description of Artificial Sequence: Synthetic oligonucleotide
ggcacuaggaagccacaua

SEQ ID NO: 18725 - RNA, 19 nt, Artificial Sequence
  Description of Artificial Sequence: Synthetic oligonucleotide
auaggcuaccuaagauuuu

SEQ ID NO: 18726 - RNA, 19 nt, Artificial Sequence
  Description of Artificial Sequence: Synthetic oligonucleotide
ggacuaaucaggagguccu

SEQ ID NO: 18727 - RNA, 19 nt, Artificial Sequence
  Description of Artificial Sequence: Synthetic oligonucleotide
gccgccuguauuagacagg

SEQ ID NO: 18728 - RNA, 19 nt, Artificial Sequence
  Description of Artificial Sequence: Synthetic oligonucleotide
gggaacccuucuuuguuua

SEQ ID NO: 18729 - RNA, 19 nt, Artificial Sequence
  Description of Artificial Sequence: Synthetic oligonucleotide
cuguguuaauugacagagu

SEQ ID NO: 18730 - RNA, 19 nt, Artificial Sequence
  Description of Artificial Sequence: Synthetic oligonucleotide
gcgaguacgcccuggugaa

SEQ ID NO: 18731 - RNA, 19 nt, Artificial Sequence
  Description of Artificial Sequence: Synthetic oligonucleotide
cuagucacuccggggagua

SEQ ID NO: 18732 - RNA, 19 nt, Artificial Sequence
  Description of Artificial Sequence: Synthetic oligonucleotide
gccuagugaaaguuuuagu

SEQ ID NO: 18733 - RNA, 19 nt, Artificial Sequence
  Description of Artificial Sequence: Synthetic oligonucleotide
ggugccuaacaaagaggca

SEQ ID NO: 18734 - RNA, 19 nt, Artificial Sequence
  Description of Artificial Sequence: Synthetic oligonucleotide
ggagaguaguacuguucua

SEQ ID NO: 18735 - RNA, 19 nt, Artificial Sequence
  Description of Artificial Sequence: Synthetic oligonucleotide
cccaaucuagaguaucaua

SEQ ID NO: 18736 - RNA, 19 nt, Artificial Sequence
  Description of Artificial Sequence: Synthetic oligonucleotide
cuuccgggcacugucugcu

SEQ ID NO: 18737 - RNA, 19 nt, Artificial Sequence
  Description of Artificial Sequence: Synthetic oligonucleotide
gucguucuguacugcuggu

SEQ ID NO: 18738 - RNA, 19 nt, Artificial Sequence
  Description of Artificial Sequence: Synthetic oligonucleotide
cugcuaccuaaaugacaaa

SEQ ID NO: 18739 - RNA, 19 nt, Artificial Sequence
  Description of Artificial Sequence: Synthetic oligonucleotide
gcaccuaggaguaaacauu

SEQ ID NO: 18740 - RNA, 19 nt, Artificial Sequence
  Description of Artificial Sequence: Synthetic oligonucleotide
cccaagggugccuaacaaa

SEQ ID NO: 18741 - RNA, 19 nt, Artificial Sequence
  Description of Artificial Sequence: Synthetic oligonucleotide
accgucuggcagacuggug

SEQ ID NO: 18742 - RNA, 19 nt, Artificial Sequence
  Description of Artificial Sequence: Synthetic oligonucleotide
gcguauucuaaaagaggua

SEQ ID NO: 18743 - RNA, 19 nt, Artificial Sequence
  Description of Artificial Sequence: Synthetic oligonucleotide
gggguauacauaccucauu

SEQ ID NO: 18744 - RNA, 19 nt, Artificial Sequence
  Description of Artificial Sequence: Synthetic oligonucleotide
ccggcacuaagaaaucacu

SEQ ID NO: 18745 - RNA, 19 nt, Artificial Sequence
  Description of Artificial Sequence: Synthetic oligonucleotide
cuaacccuaucaggagcua

SEQ ID NO: 18746 - RNA, 19 nt, Artificial Sequence
  Description of Artificial Sequence: Synthetic oligonucleotide
ccccucaauuucugaguca

SEQ ID NO: 18747 - RNA, 19 nt, Artificial Sequence
  Description of Artificial Sequence: Synthetic oligonucleotide
gccuauagaggaagacugu

SEQ ID NO: 18748 - RNA, 19 nt, Artificial Sequence
  Description of Artificial Sequence: Synthetic oligonucleotide
ccauguaauaaaggucagu

SEQ ID NO: 18749 - RNA, 19 nt, Artificial Sequence
  Description of Artificial Sequence: Synthetic oligonucleotide
caccgucuggcagacuggu

SEQ ID NO: 18750 - RNA, 19 nt, Artificial Sequence
  Description of Artificial Sequence: Synthetic oligonucleotide
ggacacuuaucugggcaau

SEQ ID NO: 18751 - RNA, 19 nt, Artificial Sequence
  Description of Artificial Sequence: Synthetic oligonucleotide
cgaugcaucuuuagcgagu

SEQ ID NO: 18752 - RNA, 19 nt, Artificial Sequence
  Description of Artificial Sequence: Synthetic oligonucleotide
cgccuguauuagacaggac

SEQ ID NO: 18753 - RNA, 19 nt, Artificial Sequence
  Description of Artificial Sequence: Synthetic oligonucleotide
guacgcccuggugaacuuu

SEQ ID NO: 18754 - RNA, 19 nt, Artificial Sequence
  Description of Artificial Sequence: Synthetic oligonucleotide
cggggugauuuucuauaua

SEQ ID NO: 18755 - RNA, 19 nt, Artificial Sequence
  Description of Artificial Sequence: Synthetic oligonucleotide
cggucacacugaaaugguu

SEQ ID NO: 18756 - RNA, 19 nt, Artificial Sequence
  Description of Artificial Sequence: Synthetic oligonucleotide
cggcaugaacacuggucuu

SEQ ID NO: 18757 - RNA, 19 nt, Artificial Sequence
  Description of Artificial Sequence: Synthetic oligonucleotide
aauucgagaacauuaaccg

SEQ ID NO: 18758 - RNA, 19 nt, Artificial Sequence
  Description of Artificial Sequence: Synthetic oligonucleotide
auauauauaauauauauau

SEQ ID NO: 18759 - RNA, 19 nt, Artificial Sequence
  Description of Artificial Sequence: Synthetic oligonucleotide
uauauuaaccauaggaggg

SEQ ID NO: 18760 - RNA, 19 nt, Artificial Sequence
  Description of Artificial Sequence: Synthetic oligonucleotide
uuuaaauauauauauauaa

SEQ ID NO: 18761 - RNA, 19 nt, Artificial Sequence
  Description of Artificial Sequence: Synthetic oligonucleotide
aaugucaagaccuuggacu

SEQ ID NO: 18762 - RNA, 19 nt, Artificial Sequence
  Description of Artificial Sequence: Synthetic oligonucleotide
agagguauugggcagaacc

SEQ ID NO: 18763 - RNA, 19 nt, Artificial Sequence
  Description of Artificial Sequence: Synthetic oligonucleotide
auauauaauauauauauaa

SEQ ID NO: 18764 - RNA, 19 nt, Artificial Sequence
  Description of Artificial Sequence: Synthetic oligonucleotide
aaaguuacgguaaacuugc

SEQ ID NO: 18765 - RNA, 19 nt, Artificial Sequence
  Description of Artificial Sequence: Synthetic oligonucleotide
auuuuaaauauauauauau

SEQ ID NO: 18766 - RNA, 19 nt, Artificial Sequence
  Description of Artificial Sequence: Synthetic oligonucleotide
auauauauauaauauauau

SEQ ID NO: 18767 - RNA, 19 nt, Artificial Sequence
  Description of Artificial Sequence: Synthetic oligonucleotide
uaaauauauauauauaaua

SEQ ID NO: 18768 - RNA, 19 nt, Artificial Sequence
  Description of Artificial Sequence: Synthetic oligonucleotide
aauauauauauauaauaua

SEQ ID NO: 18769 - RNA, 19 nt, Artificial Sequence
  Description of Artificial Sequence: Synthetic oligonucleotide
aaauauauauauauaauau

SEQ ID NO: 18770 - RNA, 19 nt, Artificial Sequence
  Description of Artificial Sequence: Synthetic oligonucleotide
acuuauaacaauucgagaa

SEQ ID NO: 18771 - RNA, 19 nt, Artificial Sequence
  Description of Artificial Sequence: Synthetic oligonucleotide
auauaauauauauauaaaa

SEQ ID NO: 18772 - RNA, 19 nt, Artificial Sequence
  Description of Artificial Sequence: Synthetic oligonucleotide
uuaaauauauauauauaau

SEQ ID NO: 18773 - RNA, 19 nt, Artificial Sequence
  Description of Artificial Sequence: Synthetic oligonucleotide
ugccuaauagcucacagag

SEQ ID NO: 18774 - RNA, 19 nt, Artificial Sequence
  Description of Artificial Sequence: Synthetic oligonucleotide
aaaaccauuuggcagccuc

SEQ ID NO: 18775 - RNA, 19 nt, Artificial Sequence
  Description of Artificial Sequence: Synthetic oligonucleotide
cuucacguuacuaagggcg

SEQ ID NO: 18776 - RNA, 19 nt, Artificial Sequence
  Description of Artificial Sequence: Synthetic oligonucleotide
uauauaauauauauauaaa

SEQ ID NO: 18777 - RNA, 19 nt, Artificial Sequence
  Description of Artificial Sequence: Synthetic oligonucleotide
ugagguaaaaguuucggug

SEQ ID NO: 18778 - RNA, 19 nt, Artificial Sequence
  Description of Artificial Sequence: Synthetic oligonucleotide
aguuuaagaaaaguuacgg

SEQ ID NO: 18779 - RNA, 19 nt, Artificial Sequence
  Description of Artificial Sequence: Synthetic oligonucleotide
uucuugauaaucaggcagg

SEQ ID NO: 18780 - RNA, 19 nt, Artificial Sequence
  Description of Artificial Sequence: Synthetic oligonucleotide
aguugguuagucuuucggc

SEQ ID NO: 18781 - RNA, 19 nt, Artificial Sequence
  Description of Artificial Sequence: Synthetic oligonucleotide
caauucgagaacauuaacc

SEQ ID NO: 18782 - RNA, 19 nt, Artificial Sequence
  Description of Artificial Sequence: Synthetic oligonucleotide
uuuaccggcaugcuguggg

SEQ ID NO: 18783 - RNA, 19 nt, Artificial Sequence
  Description of Artificial Sequence: Synthetic oligonucleotide
uauauauauaauauauaua

SEQ ID NO: 18784 - RNA, 19 nt, Artificial Sequence
  Description of Artificial Sequence: Synthetic oligonucleotide
auauauauauauaauauau

SEQ ID NO: 18785 - RNA, 19 nt, Artificial Sequence
  Description of Artificial Sequence: Synthetic oligonucleotide
uggcugauaauucaccagg

SEQ ID NO: 18786 - RNA, 19 nt, Artificial Sequence
  Description of Artificial Sequence: Synthetic oligonucleotide
guuacgguaaacuugcaug

SEQ ID NO: 18787 - RNA, 19 nt, Artificial Sequence
  Description of Artificial Sequence: Synthetic oligonucleotide
uuuuaaauauauauauaua

SEQ ID NO: 18788 - RNA, 19 nt, Artificial Sequence
  Description of Artificial Sequence: Synthetic oligonucleotide
aaugcucagagcuaaucca

SEQ ID NO: 18789 - RNA, 19 nt, Artificial Sequence
  Description of Artificial Sequence: Synthetic oligonucleotide
ugugcuauuggccuucuug

SEQ ID NO: 18790 - RNA, 19 nt, Artificial Sequence
  Description of Artificial Sequence: Synthetic oligonucleotide
uauauauauauaauauaua

SEQ ID NO: 18791 - RNA, 19 nt, Artificial Sequence
  Description of Artificial Sequence: Synthetic oligonucleotide
uaacaauucgagaacauua

SEQ ID NO: 18792 - RNA, 19 nt, Artificial Sequence
  Description of Artificial Sequence: Synthetic oligonucleotide
uuaaccggauaucagcugc

SEQ ID NO: 18793 - RNA, 19 nt, Artificial Sequence
  Description of Artificial Sequence: Synthetic oligonucleotide
uaaaacuacuuacaaugga

SEQ ID NO: 18794 - RNA, 19 nt, Artificial Sequence
  Description of Artificial Sequence: Synthetic oligonucleotide
agcuugauaccccacugcc

SEQ ID NO: 18795 - RNA, 19 nt, Artificial Sequence
  Description of Artificial Sequence: Synthetic oligonucleotide
ucagagcuaauccaggcug

SEQ ID NO: 18796 - RNA, 19 nt, Artificial Sequence
  Description of Artificial Sequence: Synthetic oligonucleotide
aguuuaacaaacuggcuga

SEQ ID NO: 18797 - RNA, 19 nt, Artificial Sequence
  Description of Artificial Sequence: Synthetic oligonucleotide
uuguguaccugcauucugg

SEQ ID NO: 18798 - RNA, 19 nt, Artificial Sequence
  Description of Artificial Sequence: Synthetic oligonucleotide
aaguuuaagaaaaguuacg

SEQ ID NO: 18799 - RNA, 19 nt, Artificial Sequence
  Description of Artificial Sequence: Synthetic oligonucleotide
uauacuagaaacggcacug

SEQ ID NO: 18800 - RNA, 19 nt, Artificial Sequence
  Description of Artificial Sequence: Synthetic oligonucleotide
aaccccuuaagucuggaca

SEQ ID NO: 18801 - RNA, 19 nt, Artificial Sequence
  Description of Artificial Sequence: Synthetic oligonucleotide
agggauauacuagaaacgg

SEQ ID NO: 18802 - RNA, 19 nt, Artificial Sequence
  Description of Artificial Sequence: Synthetic oligonucleotide
cuuccuaccguuuuaacuc

SEQ ID NO: 18803 - RNA, 19 nt, Artificial Sequence
  Description of Artificial Sequence: Synthetic oligonucleotide
accguuuuaacucuguggu

SEQ ID NO: 18804 - RNA, 19 nt, Artificial Sequence
  Description of Artificial Sequence: Synthetic oligonucleotide
uaccguuuuaacucugugg

SEQ ID NO: 18805 - RNA, 19 nt, Artificial Sequence
  Description of Artificial Sequence: Synthetic oligonucleotide
ucauggaaaugccagacuc

SEQ ID NO: 18806 - RNA, 19 nt, Artificial Sequence
  Description of Artificial Sequence: Synthetic oligonucleotide
uauauauaauauauauaua

SEQ ID NO: 18807 - RNA, 19 nt, Artificial Sequence
  Description of Artificial Sequence: Synthetic oligonucleotide
gaacgaaaguauauuaacc

SEQ ID NO: 18808 - RNA, 19 nt, Artificial Sequence
  Description of Artificial Sequence: Synthetic oligonucleotide
agguaaaaguuucggugcc

SEQ ID NO: 18809 - RNA, 19 nt, Artificial Sequence
  Description of Artificial Sequence: Synthetic oligonucleotide
ggauuugagucccugagcg

SEQ ID NO: 18810 - RNA, 19 nt, Artificial Sequence
  Description of Artificial Sequence: Synthetic oligonucleotide
uguaagcgagcuaaguuac

SEQ ID NO: 18811 - RNA, 19 nt, Artificial Sequence
  Description of Artificial Sequence: Synthetic oligonucleotide
ccuaauagcucacagaggc

SEQ ID NO: 18812 - RNA, 19 nt, Artificial Sequence
  Description of Artificial Sequence: Synthetic oligonucleotide
aaguugagguaaaaguuuc

SEQ ID NO: 18813 - RNA, 19 nt, Artificial Sequence
  Description of Artificial Sequence: Synthetic oligonucleotide
agaaaaguuacgguaaacu

SEQ ID NO: 18814 - RNA, 19 nt, Artificial Sequence
  Description of Artificial Sequence: Synthetic oligonucleotide
agaaacggcacugaaaagu

SEQ ID NO: 18815 - RNA, 19 nt, Artificial Sequence
  Description of Artificial Sequence: Synthetic oligonucleotide
uggaacgaaaguauauuaa

SEQ ID NO: 18816 - RNA, 19 nt, Artificial Sequence
  Description of Artificial Sequence: Synthetic oligonucleotide
aguuucggugccccgaaac

SEQ ID NO: 18817 - RNA, 19 nt, Artificial Sequence
  Description of Artificial Sequence: Synthetic oligonucleotide
agucacagcuuaaauauuc

SEQ ID NO: 18818 - RNA, 19 nt, Artificial Sequence
  Description of Artificial Sequence: Synthetic oligonucleotide
ugggccauuagcacuaugu

SEQ ID NO: 18819 - RNA, 19 nt, Artificial Sequence
  Description of Artificial Sequence: Synthetic oligonucleotide
uacgacugcucucagcacc

SEQ ID NO: 18820 - RNA, 19 nt, Artificial Sequence
  Description of Artificial Sequence: Synthetic oligonucleotide
uauuaaagaucuaguuuaa

SEQ ID NO: 18821 - RNA, 19 nt, Artificial Sequence
  Description of Artificial Sequence: Synthetic oligonucleotide
cacagaagaaaaugucucc

SEQ ID NO: 18822 - RNA, 19 nt, Artificial Sequence
  Description of Artificial Sequence: Synthetic oligonucleotide
uuccuucacguuacuaagg

SEQ ID NO: 18823 - RNA, 19 nt, Artificial Sequence
  Description of Artificial Sequence: Synthetic oligonucleotide
acgguaaacuugcaugcac

SEQ ID NO: 18824 - RNA, 19 nt, Artificial Sequence
  Description of Artificial Sequence: Synthetic oligonucleotide
ucuguaagcgagcuaaguu

SEQ ID NO: 18825 - RNA, 19 nt, Artificial Sequence
  Description of Artificial Sequence: Synthetic oligonucleotide
uagucuuucggccaggcuu

SEQ ID NO: 18826 - RNA, 19 nt, Artificial Sequence
  Description of Artificial Sequence: Synthetic oligonucleotide
uccaaacaacuaaacugag

SEQ ID NO: 18827 - RNA, 19 nt, Artificial Sequence
  Description of Artificial Sequence: Synthetic oligonucleotide
ucuaugcaugcccaggcac

SEQ ID NO: 18828 - RNA, 19 nt, Artificial Sequence
  Description of Artificial Sequence: Synthetic oligonucleotide
gauaucagcugcgaagccc

SEQ ID NO: 18829 - RNA, 19 nt, Artificial Sequence
  Description of Artificial Sequence: Synthetic oligonucleotide
agaaguaaccugcugguua

SEQ ID NO: 18830 - RNA, 19 nt, Artificial Sequence
  Description of Artificial Sequence: Synthetic oligonucleotide
agaacggccaagcgaauug

SEQ ID NO: 18831 - RNA, 19 nt, Artificial Sequence
  Description of Artificial Sequence: Synthetic oligonucleotide
ggaacgaaaguauauuaac

SEQ ID NO: 18832 - RNA, 19 nt, Artificial Sequence
  Description of Artificial Sequence: Synthetic oligonucleotide
uuuaacagugggcuugcau

SEQ ID NO: 18833 - RNA, 19 nt, Artificial Sequence
  Description of Artificial Sequence: Synthetic oligonucleotide
cacuucccgagcuugauac

SEQ ID NO: 18834 - RNA, 19 nt, Artificial Sequence
  Description of Artificial Sequence: Synthetic oligonucleotide
aaaaguuucggugccccga

SEQ ID NO: 18835 - RNA, 19 nt, Artificial Sequence
  Description of Artificial Sequence: Synthetic oligonucleotide
aacaauucgagaacauuaa

SEQ ID NO: 18836 - RNA, 19 nt, Artificial Sequence
  Description of Artificial Sequence: Synthetic oligonucleotide
acgaaaguauauuaaccau

SEQ ID NO: 18837 - RNA, 19 nt, Artificial Sequence
  Description of Artificial Sequence: Synthetic oligonucleotide
ucacuauaggggccguggg

SEQ ID NO: 18838 - RNA, 19 nt, Artificial Sequence
  Description of Artificial Sequence: Synthetic oligonucleotide
gauauacuagaaacggcac

SEQ ID NO: 18839 - RNA, 19 nt, Artificial Sequence
  Description of Artificial Sequence: Synthetic oligonucleotide
caguuguccgcugacaucc

SEQ ID NO: 18840 - RNA, 19 nt, Artificial Sequence
  Description of Artificial Sequence: Synthetic oligonucleotide
uucacguuacuaagggcga

SEQ ID NO: 18841 - RNA, 19 nt, Artificial Sequence
  Description of Artificial Sequence: Synthetic oligonucleotide
cuaggaucgacuuuagaaa

SEQ ID NO: 18842 - RNA, 19 nt, Artificial Sequence
  Description of Artificial Sequence: Synthetic oligonucleotide
auuaaccggauaucagcug

SEQ ID NO: 18843 - RNA, 19 nt, Artificial Sequence
  Description of Artificial Sequence: Synthetic oligonucleotide
cuugacuacagggcggugg

SEQ ID NO: 18844 - RNA, 19 nt, Artificial Sequence
  Description of Artificial Sequence: Synthetic oligonucleotide
gacuccaucccgugcaacc

SEQ ID NO: 18845 - RNA, 19 nt, Artificial Sequence
  Description of Artificial Sequence: Synthetic oligonucleotide
agugucuucaccaccacgu

SEQ ID NO: 18846 - RNA, 19 nt, Artificial Sequence
  Description of Artificial Sequence: Synthetic oligonucleotide
cuucucgccaggcagccgg

SEQ ID NO: 18847 - RNA, 19 nt, Artificial Sequence
  Description of Artificial Sequence: Synthetic oligonucleotide
uaagcgagcuaaguuacac

SEQ ID NO: 18848 - RNA, 19 nt, Artificial Sequence
  Description of Artificial Sequence: Synthetic oligonucleotide
ggacugauaauacaucaac

SEQ ID NO: 18849 - RNA, 19 nt, Artificial Sequence
  Description of Artificial Sequence: Synthetic oligonucleotide
ugguuagucuuucggccag

SEQ ID NO: 18850 - RNA, 19 nt, Artificial Sequence
  Description of Artificial Sequence: Synthetic oligonucleotide
uggacugauaauacaucaa

SEQ ID NO: 18851 - RNA, 19 nt, Artificial Sequence
  Description of Artificial Sequence: Synthetic oligonucleotide
uuaucagguuagcauccca

SEQ ID NO: 18852 - RNA, 19 nt, Artificial Sequence
  Description of Artificial Sequence: Synthetic oligonucleotide
aaacaaggguaacuuuaaa

SEQ ID NO: 18853 - RNA, 19 nt, Artificial Sequence
  Description of Artificial Sequence: Synthetic oligonucleotide
auggaacgaaaguauauua

SEQ ID NO: 18854 - RNA, 19 nt, Artificial Sequence
  Description of Artificial Sequence: Synthetic oligonucleotide
ucucuucacuacuacgacu

SEQ ID NO: 18855 - RNA, 19 nt, Artificial Sequence
  Description of Artificial Sequence: Synthetic oligonucleotide
uugacuacagggcgguggu

SEQ ID NO: 18856 - RNA, 19 nt, Artificial Sequence
  Description of Artificial Sequence: Synthetic oligonucleotide
aagcgagcuaaguuacaca

SEQ ID NO: 18857 - RNA, 19 nt, Artificial Sequence
  Description of Artificial Sequence: Synthetic oligonucleotide
uggccgaugucguaggugu

SEQ ID NO: 18858 - RNA, 19 nt, Artificial Sequence
  Description of Artificial Sequence: Synthetic oligonucleotide
agacaaggcggccagcugu

SEQ ID NO: 18859 - RNA, 19 nt, Artificial Sequence
  Description of Artificial Sequence: Synthetic oligonucleotide
ggauauacuagaaacggca

SEQ ID NO: 18860 - RNA, 19 nt, Artificial Sequence
  Description of Artificial Sequence: Synthetic oligonucleotide
gcuaggaucgacuuuagaa

SEQ ID NO: 18861 - RNA, 19 nt, Artificial Sequence
  Description of Artificial Sequence: Synthetic oligonucleotide
aaaguuucggugccccgaa

SEQ ID NO: 18862 - RNA, 19 nt, Artificial Sequence
  Description of Artificial Sequence: Synthetic oligonucleotide
cuggcugauaauucaccag

SEQ ID NO: 18863 - RNA, 19 nt, Artificial Sequence
  Description of Artificial Sequence: Synthetic oligonucleotide
aacugacauuuacagggau

SEQ ID NO: 18864 - RNA, 19 nt, Artificial Sequence
  Description of Artificial Sequence: Synthetic oligonucleotide
aguuacgguaaacuugcau

SEQ ID NO: 18865 - RNA, 19 nt, Artificial Sequence
  Description of Artificial Sequence: Synthetic oligonucleotide
caaucuguaagcgagcuaa

SEQ ID NO: 18866 - RNA, 19 nt, Artificial Sequence
  Description of Artificial Sequence: Synthetic oligonucleotide
acuggcuuacaaguuuaac

SEQ ID NO: 18867 - RNA, 19 nt, Artificial Sequence
  Description of Artificial Sequence: Synthetic oligonucleotide
guucccguagugugguugg

SEQ ID NO: 18868 - RNA, 19 nt, Artificial Sequence
  Description of Artificial Sequence: Synthetic oligonucleotide
ugggagguuugauggggcg

SEQ ID NO: 18869 - RNA, 19 nt, Artificial Sequence
  Description of Artificial Sequence: Synthetic oligonucleotide
ugauggccgaugucguagg

SEQ ID NO: 18870 - RNA, 19 nt, Artificial Sequence
  Description of Artificial Sequence: Synthetic oligonucleotide
aacuuuucucccgguuaac

SEQ ID NO: 18871 - RNA, 19 nt, Artificial Sequence
  Description of Artificial Sequence: Synthetic oligonucleotide
cuugcggacucagaggagc

SEQ ID NO: 18872 - RNA, 19 nt, Artificial Sequence
  Description of Artificial Sequence: Synthetic oligonucleotide
ugugacguuugcagugaug

SEQ ID NO: 18873 - RNA, 19 nt, Artificial Sequence
  Description of Artificial Sequence: Synthetic oligonucleotide
gacgggaaccgaugugacg

SEQ ID NO: 18874 - RNA, 19 nt, Artificial Sequence
  Description of Artificial Sequence: Synthetic oligonucleotide
ucgggcuacuaccuuggcc

SEQ ID NO: 18875 - RNA, 19 nt, Artificial Sequence
  Description of Artificial Sequence: Synthetic oligonucleotide
gagcuugauaccccacugc

SEQ ID NO: 18876 - RNA, 19 nt, Artificial Sequence
  Description of Artificial Sequence: Synthetic oligonucleotide
acgggaaccgaugugacgu

SEQ ID NO: 18877 - RNA, 19 nt, Artificial Sequence
  Description of Artificial Sequence: Synthetic oligonucleotide
ucagcaccccucuuccucc

SEQ ID NO: 18878 - RNA, 19 nt, Artificial Sequence
  Description of Artificial Sequence: Synthetic oligonucleotide
aacggcacugaaaaguuua

SEQ ID NO: 18879 - RNA, 19 nt, Artificial Sequence
  Description of Artificial Sequence: Synthetic oligonucleotide
gaaccgaugugacguuugc

SEQ ID NO: 18880 - RNA, 19 nt, Artificial Sequence
  Description of Artificial Sequence: Synthetic oligonucleotide
uucggugccccgaaaccug

SEQ ID NO: 18881 - RNA, 19 nt, Artificial Sequence
  Description of Artificial Sequence: Synthetic oligonucleotide
ugccccgaaaccugcacgc

SEQ ID NO: 18882 - RNA, 19 nt, Artificial Sequence
  Description of Artificial Sequence: Synthetic oligonucleotide
cuguaagcgagcuaaguua

SEQ ID NO: 18883 - RNA, 19 nt, Artificial Sequence
  Description of Artificial Sequence: Synthetic oligonucleotide
ugaugagaacuuucuguua

SEQ ID NO: 18884 - RNA, 19 nt, Artificial Sequence
  Description of Artificial Sequence: Synthetic oligonucleotide
ucgagaacauuaaccggau

SEQ ID NO: 18885 - RNA, 19 nt, Artificial Sequence
  Description of Artificial Sequence: Synthetic oligonucleotide
gauaccccacugccuagcc

SEQ ID NO: 18886 - RNA, 19 nt, Artificial Sequence
  Description of Artificial Sequence: Synthetic oligonucleotide
uacacucacuggcacucca

SEQ ID NO: 18887 - RNA, 19 nt, Artificial Sequence
  Description of Artificial Sequence: Synthetic oligonucleotide
aauucaccaggcgucuaga

SEQ ID NO: 18888 - RNA, 19 nt, Artificial Sequence
  Description of Artificial Sequence: Synthetic oligonucleotide
uuccuaccguuuuaacucu

SEQ ID NO: 18889 - RNA, 19 nt, Artificial Sequence
  Description of Artificial Sequence: Synthetic oligonucleotide
accccuuaagucuggacaa

SEQ ID NO: 18890 - RNA, 19 nt, Artificial Sequence
  Description of Artificial Sequence: Synthetic oligonucleotide
cuugauaccccacugccua

SEQ ID NO: 18891 - RNA, 19 nt, Artificial Sequence
  Description of Artificial Sequence: Synthetic oligonucleotide
uuucggugccccgaaaccu

SEQ ID NO: 18892 - RNA, 19 nt, Artificial Sequence
  Description of Artificial Sequence: Synthetic oligonucleotide
ggucugaaccccuuaaguc

SEQ ID NO: 18893 - RNA, 19 nt, Artificial Sequence
  Description of Artificial Sequence: Synthetic oligonucleotide
aaucuguaagcgagcuaag

SEQ ID NO: 18894 - RNA, 19 nt, Artificial Sequence
  Description of Artificial Sequence: Synthetic oligonucleotide
auaucagcugcgaagcccu

SEQ ID NO: 18895 - RNA, 19 nt, Artificial Sequence
  Description of Artificial Sequence: Synthetic oligonucleotide
uuagucuuucggccaggcu

SEQ ID NO: 18896 - RNA, 19 nt, Artificial Sequence
  Description of Artificial Sequence: Synthetic oligonucleotide
cucccgucgggcuacuacc

SEQ ID NO: 18897 - RNA, 19 nt, Artificial Sequence
  Description of Artificial Sequence: Synthetic oligonucleotide
gagguauugggcagaacca

SEQ ID NO: 18898 - RNA, 19 nt, Artificial Sequence
  Description of Artificial Sequence: Synthetic oligonucleotide
accuuggacugauaauaca

SEQ ID NO: 18899 - RNA, 19 nt, Artificial Sequence
  Description of Artificial Sequence: Synthetic oligonucleotide
ucucccgucgggcuacuac

SEQ ID NO: 18900 - RNA, 19 nt, Artificial Sequence
  Description of Artificial Sequence: Synthetic oligonucleotide
aucgacuuuagaaauuuua

SEQ ID NO: 18901 - RNA, 19 nt, Artificial Sequence
  Description of Artificial Sequence: Synthetic oligonucleotide
acucaacacaaggcucugc

SEQ ID NO: 18902 - RNA, 19 nt, Artificial Sequence
  Description of Artificial Sequence: Synthetic oligonucleotide
uacuacgacugcucucagc

SEQ ID NO: 18903 - RNA, 19 nt, Artificial Sequence
  Description of Artificial Sequence: Synthetic oligonucleotide
cauuaaccggauaucagcu

SEQ ID NO: 18904 - RNA, 19 nt, Artificial Sequence
  Description of Artificial Sequence: Synthetic oligonucleotide
cagccgaguagcucgcucc

SEQ ID NO: 18905 - RNA, 19 nt, Artificial Sequence
  Description of Artificial Sequence: Synthetic oligonucleotide
auaguucaacuuccuccug

SEQ ID NO: 18906 - RNA, 19 nt, Artificial Sequence
  Description of Artificial Sequence: Synthetic oligonucleotide
cuaccguuuuaacucugug

SEQ ID NO: 18907 - RNA, 19 nt, Artificial Sequence
  Description of Artificial Sequence: Synthetic oligonucleotide
gguagaacggccaagcgaa

SEQ ID NO: 18908 - RNA, 19 nt, Artificial Sequence
  Description of Artificial Sequence: Synthetic oligonucleotide
gggacaaugggugucgcag

SEQ ID NO: 18909 - RNA, 19 nt, Artificial Sequence
  Description of Artificial Sequence: Synthetic oligonucleotide
accauaggaggggacacug

SEQ ID NO: 18910 - RNA, 19 nt, Artificial Sequence
  Description of Artificial Sequence: Synthetic oligonucleotide
aagagguauugggcagaac

SEQ ID NO: 18911 - RNA, 19 nt, Artificial Sequence
  Description of Artificial Sequence: Synthetic oligonucleotide
ugcuaggaucgacuuuaga

SEQ ID NO: 18912 - RNA, 19 nt, Artificial Sequence
  Description of Artificial Sequence: Synthetic oligonucleotide
gaccuuggacugauaauac

SEQ ID NO: 18913 - RNA, 19 nt, Artificial Sequence
  Description of Artificial Sequence: Synthetic oligonucleotide
ggagacuucggguggggag

SEQ ID NO: 18914 - RNA, 19 nt, Artificial Sequence
  Description of Artificial Sequence: Synthetic oligonucleotide
aguucccguagugugguug

SEQ ID NO: 18915 - RNA, 19 nt, Artificial Sequence
  Description of Artificial Sequence: Synthetic oligonucleotide
agucuuucggccaggcuug

SEQ ID NO: 18916 - RNA, 19 nt, Artificial Sequence
  Description of Artificial Sequence: Synthetic oligonucleotide
cuaugaggacccucugcug

SEQ ID NO: 18917 - RNA, 19 nt, Artificial Sequence
  Description of Artificial Sequence: Synthetic oligonucleotide
cugcugucggagcuggacc

SEQ ID NO: 18918 - RNA, 19 nt, Artificial Sequence
  Description of Artificial Sequence: Synthetic oligonucleotide
caggcucucugcccuaccg

SEQ ID NO: 18919 - RNA, 19 nt, Artificial Sequence
  Description of Artificial Sequence: Synthetic oligonucleotide
cucuauaccucugccccgc

SEQ ID NO: 18920 - RNA, 19 nt, Artificial Sequence
  Description of Artificial Sequence: Synthetic oligonucleotide
uccuaccguuuuaacucug

SEQ ID NO: 18921 - RNA, 19 nt, Artificial Sequence
  Description of Artificial Sequence: Synthetic oligonucleotide
gugccccgaaaccugcacg

SEQ ID NO: 18922 - RNA, 19 nt, Artificial Sequence
  Description of Artificial Sequence: Synthetic oligonucleotide
uguugaaguccugcauaca

SEQ ID NO: 18923 - RNA, 19 nt, Artificial Sequence
  Description of Artificial Sequence: Synthetic oligonucleotide
cuaauagcucacagaggca

SEQ ID NO: 18924 - RNA, 19 nt, Artificial Sequence
  Description of Artificial Sequence: Synthetic oligonucleotide
aucuguaagcgagcuaagu

SEQ ID NO: 18925 - RNA, 19 nt, Artificial Sequence
  Description of Artificial Sequence: Synthetic oligonucleotide
acguccauuuguccagcug

SEQ ID NO: 18926 - RNA, 19 nt, Artificial Sequence
  Description of Artificial Sequence: Synthetic oligonucleotide
gaaccccuuaagucuggac

SEQ ID NO: 18927 - RNA, 19 nt, Artificial Sequence
  Description of Artificial Sequence: Synthetic oligonucleotide
ggcgucuagacauggcagc

SEQ ID NO: 18928 - RNA, 19 nt, Artificial Sequence
  Description of Artificial Sequence: Synthetic oligonucleotide
ugauggcuaggcugucaug

SEQ ID NO: 18929 - RNA, 19 nt, Artificial Sequence
  Description of Artificial Sequence: Synthetic oligonucleotide
cugaaccccuuaagucugg

SEQ ID NO: 18930 - RNA, 19 nt, Artificial Sequence
  Description of Artificial Sequence: Synthetic oligonucleotide
ggcacugugccuugccuag

SEQ ID NO: 18931 - RNA, 19 nt, Artificial Sequence
  Description of Artificial Sequence: Synthetic oligonucleotide
aaccgaugugacguuugca

SEQ ID NO: 18932 - RNA, 19 nt, Artificial Sequence
  Description of Artificial Sequence: Synthetic oligonucleotide
gagacaaggcggccagcug

SEQ ID NO: 18933 - RNA, 19 nt, Artificial Sequence
  Description of Artificial Sequence: Synthetic oligonucleotide
guaguaguggacauccucu

SEQ ID NO: 18934 - RNA, 19 nt, Artificial Sequence
  Description of Artificial Sequence: Synthetic oligonucleotide
uuuaaacgucucccuugua

SEQ ID NO: 18935 - RNA, 19 nt, Artificial Sequence
  Description of Artificial Sequence: Synthetic oligonucleotide
uggguacucacggcugucc

SEQ ID NO: 18936 - RNA, 19 nt, Artificial Sequence
  Description of Artificial Sequence: Synthetic oligonucleotide
ggagacucgcuccggcugg

SEQ ID NO: 18937 - RNA, 19 nt, Artificial Sequence
  Description of Artificial Sequence: Synthetic oligonucleotide
aucugugggcuuguuauaa

SEQ ID NO: 18938 - RNA, 19 nt, Artificial Sequence
  Description of Artificial Sequence: Synthetic oligonucleotide
auacuagaaacggcacuga

SEQ ID NO: 18939 - RNA, 19 nt, Artificial Sequence
  Description of Artificial Sequence: Synthetic oligonucleotide
ucggcgugugccacgucca

SEQ ID NO: 18940 - RNA, 19 nt, Artificial Sequence
  Description of Artificial Sequence: Synthetic oligonucleotide
guaaacuugcaugcacauc

SEQ ID NO: 18941 - RNA, 19 nt, Artificial Sequence
  Description of Artificial Sequence: Synthetic oligonucleotide
aggcgucuagacauggcag

SEQ ID NO: 18942 - RNA, 19 nt, Artificial Sequence
  Description of Artificial Sequence: Synthetic oligonucleotide
uuaccggcaugcuguggga

SEQ ID NO: 18943 - RNA, 19 nt, Artificial Sequence
  Description of Artificial Sequence: Synthetic oligonucleotide
cacuacuacgacugcucuc

SEQ ID NO: 18944 - RNA, 19 nt, Artificial Sequence
  Description of Artificial Sequence: Synthetic oligonucleotide
aaccggauaucagcugcga

SEQ ID NO: 18945 - RNA, 19 nt, Artificial Sequence
  Description of Artificial Sequence: Synthetic oligonucleotide
accaggcgucuagacaugg

SEQ ID NO: 18946 - RNA, 19 nt, Artificial Sequence
  Description of Artificial Sequence: Synthetic oligonucleotide
auggcuaggcugucauggu

SEQ ID NO: 18947 - RNA, 19 nt, Artificial Sequence
  Description of Artificial Sequence: Synthetic oligonucleotide
cccgcagagagaaguaacc

SEQ ID NO: 18948 - RNA, 19 nt, Artificial Sequence
  Description of Artificial Sequence: Synthetic oligonucleotide
gggcaauaguucaacuucc

SEQ ID NO: 18949 - RNA, 19 nt, Artificial Sequence
  Description of Artificial Sequence: Synthetic oligonucleotide
ucccgucgggcuacuaccu

SEQ ID NO: 18950 - RNA, 19 nt, Artificial Sequence
  Description of Artificial Sequence: Synthetic oligonucleotide
uguccgcugacauccugua

SEQ ID NO: 18951 - RNA, 19 nt, Artificial Sequence
  Description of Artificial Sequence: Synthetic oligonucleotide
ucuauaccucugccccgcu

SEQ ID NO: 18952 - RNA, 19 nt, Artificial Sequence
  Description of Artificial Sequence: Synthetic oligonucleotide
cuauaccucugccccgcug

SEQ ID NO: 18953 - RNA, 19 nt, Artificial Sequence
  Description of Artificial Sequence: Synthetic oligonucleotide
cuacgacugcucucagcac

SEQ ID NO: 18954 - RNA, 19 nt, Artificial Sequence
  Description of Artificial Sequence: Synthetic oligonucleotide
gacguuugcagugaugguu

SEQ ID NO: 18955 - RNA, 19 nt, Artificial Sequence
  Description of Artificial Sequence: Synthetic oligonucleotide
agggacaaugggugucgca

SEQ ID NO: 18956 - RNA, 19 nt, Artificial Sequence
  Description of Artificial Sequence: Synthetic oligonucleotide
gaaacggcacugaaaaguu

SEQ ID NO: 18957 - RNA, 19 nt, Artificial Sequence
  Description of Artificial Sequence: Synthetic oligonucleotide
gaacggccaagcgaauuga

SEQ ID NO: 18958 - RNA, 19 nt, Artificial Sequence
  Description of Artificial Sequence: Synthetic oligonucleotide
aaguuucggugccccgaaa

SEQ ID NO: 18959 - RNA, 19 nt, Artificial Sequence
  Description of Artificial Sequence: Synthetic oligonucleotide
acggccaagcgaauugaug

SEQ ID NO: 18960 - RNA, 19 nt, Artificial Sequence
  Description of Artificial Sequence: Synthetic oligonucleotide
ggauaucagcugcgaagcc

SEQ ID NO: 18961 - RNA, 19 nt, Artificial Sequence
  Description of Artificial Sequence: Synthetic oligonucleotide
uagaacggccaagcgaauu

SEQ ID NO: 18962 - RNA, 19 nt, Artificial Sequence
  Description of Artificial Sequence: Synthetic oligonucleotide
ugaaccccuuaagucugga

SEQ ID NO: 18963 - RNA, 19 nt, Artificial Sequence
  Description of Artificial Sequence: Synthetic oligonucleotide
ugcccuaccggagcacagc

SEQ ID NO: 18964 - RNA, 19 nt, Artificial Sequence
  Description of Artificial Sequence: Synthetic oligonucleotide
cugcuaggaucgacuuuag

SEQ ID NO: 18965 - RNA, 19 nt, Artificial Sequence
  Description of Artificial Sequence: Synthetic oligonucleotide
agccgaguagcucgcuccu

SEQ ID NO: 18966 - RNA, 19 nt, Artificial Sequence
  Description of Artificial Sequence: Synthetic oligonucleotide
agugauggccgaugucgua

SEQ ID NO: 18967 - RNA, 19 nt, Artificial Sequence
  Description of Artificial Sequence: Synthetic oligonucleotide
ugccagccgaguagcucgc

SEQ ID NO: 18968 - RNA, 19 nt, Artificial Sequence
  Description of Artificial Sequence: Synthetic oligonucleotide
auuucccaaaugacuguaa

SEQ ID NO: 18969 - RNA, 19 nt, Artificial Sequence
  Description of Artificial Sequence: Synthetic oligonucleotide
gccuaauagcucacagagg

SEQ ID NO: 18970 - RNA, 19 nt, Artificial Sequence
  Description of Artificial Sequence: Synthetic oligonucleotide
ucccguagugugguuggcu

SEQ ID NO: 18971 - RNA, 19 nt, Artificial Sequence
  Description of Artificial Sequence: Synthetic oligonucleotide
gccgaugucguaggugugg

SEQ ID NO: 18972 - RNA, 19 nt, Artificial Sequence
  Description of Artificial Sequence: Synthetic oligonucleotide
ugaggccggcauugcaaaa

SEQ ID NO: 18973 - RNA, 19 nt, Artificial Sequence
  Description of Artificial Sequence: Synthetic oligonucleotide
uggggagaccgaggauacg

SEQ ID NO: 18974 - RNA, 19 nt, Artificial Sequence
  Description of Artificial Sequence: Synthetic oligonucleotide
cggauaucagcugcgaagc

SEQ ID NO: 18975 - RNA, 19 nt, Artificial Sequence
  Description of Artificial Sequence: Synthetic oligonucleotide
aacggccaagcgaauugau

SEQ ID NO: 18976 - RNA, 19 nt, Artificial Sequence
  Description of Artificial Sequence: Synthetic oligonucleotide
agcgagggcucccgggacu

SEQ ID NO: 18977 - RNA, 19 nt, Artificial Sequence
  Description of Artificial Sequence: Synthetic oligonucleotide
aaguuacgguaaacuugca

SEQ ID NO: 18978 - RNA, 19 nt, Artificial Sequence
  Description of Artificial Sequence: Synthetic oligonucleotide
gccauuagcacuaugucau

SEQ ID NO: 18979 - RNA, 19 nt, Artificial Sequence
  Description of Artificial Sequence: Synthetic oligonucleotide
gguuuccgugggcugacac

SEQ ID NO: 18980 - RNA, 19 nt, Artificial Sequence
  Description of Artificial Sequence: Synthetic oligonucleotide
cugcccuaccggagcacag

SEQ ID NO: 18981 - RNA, 19 nt, Artificial Sequence
  Description of Artificial Sequence: Synthetic oligonucleotide
gggacgggaaccgauguga

SEQ ID NO: 18982 - RNA, 19 nt, Artificial Sequence
  Description of Artificial Sequence: Synthetic oligonucleotide
gaguacuuccuaccguuuu

SEQ ID NO: 18983 - RNA, 19 nt, Artificial Sequence
  Description of Artificial Sequence: Synthetic oligonucleotide
agugccgcaggugcucuga

SEQ ID NO: 18984 - RNA, 19 nt, Artificial Sequence
  Description of Artificial Sequence: Synthetic oligonucleotide
augugacguuugcagugau

SEQ ID NO: 18985 - RNA, 19 nt, Artificial Sequence
  Description of Artificial Sequence: Synthetic oligonucleotide
ucuugacuacagggcggug

SEQ ID NO: 18986 - RNA, 19 nt, Artificial Sequence
  Description of Artificial Sequence: Synthetic oligonucleotide
cucggcccucucuuggguc

SEQ ID NO: 18987 - RNA, 19 nt, Artificial Sequence
  Description of Artificial Sequence: Synthetic oligonucleotide
ugcagucggcgugugccac

SEQ ID NO: 18988 - RNA, 19 nt, Artificial Sequence
  Description of Artificial Sequence: Synthetic oligonucleotide
cauggaacgaaaguauauu

SEQ ID NO: 18989 - RNA, 19 nt, Artificial Sequence
  Description of Artificial Sequence: Synthetic oligonucleotide
uaccggcaugcugugggac

SEQ ID NO: 18990 - RNA, 19 nt, Artificial Sequence
  Description of Artificial Sequence: Synthetic oligonucleotide
gccgcuguaguaguggaca

SEQ ID NO: 18991 - RNA, 19 nt, Artificial Sequence
  Description of Artificial Sequence: Synthetic oligonucleotide
ugacuacagggcgguggug

SEQ ID NO: 18992 - RNA, 19 nt, Artificial Sequence
  Description of Artificial Sequence: Synthetic oligonucleotide
uucucgccaggcagccggu

SEQ ID NO: 18993 - RNA, 19 nt, Artificial Sequence
  Description of Artificial Sequence: Synthetic oligonucleotide
gcugucaugguaggccacc

SEQ ID NO: 18994 - RNA, 19 nt, Artificial Sequence
  Description of Artificial Sequence: Synthetic oligonucleotide
agaccccaugugaaggccu

SEQ ID NO: 18995 - RNA, 19 nt, Artificial Sequence
  Description of Artificial Sequence: Synthetic oligonucleotide
guaagcgagcuaaguuaca

SEQ ID NO: 18996 - RNA, 19 nt, Artificial Sequence
  Description of Artificial Sequence: Synthetic oligonucleotide
guguucuaacagcucucaa

SEQ ID NO: 18997 - RNA, 19 nt, Artificial Sequence
  Description of Artificial Sequence: Synthetic oligonucleotide
gguuagucuuucggccagg

SEQ ID NO: 18998 - RNA, 19 nt, Artificial Sequence
  Description of Artificial Sequence: Synthetic oligonucleotide
guuaugccaguagcaggga

SEQ ID NO: 18999 - RNA, 19 nt, Artificial Sequence
  Description of Artificial Sequence: Synthetic oligonucleotide
ccuuggacugauaauacau

SEQ ID NO: 19000 - RNA, 19 nt, Artificial Sequence
  Description of Artificial Sequence: Synthetic oligonucleotide
guagugugguuggcuucag

SEQ ID NO: 19001 - RNA, 19 nt, Artificial Sequence
  Description of Artificial Sequence: Synthetic oligonucleotide
cacugugucuaugguuauc

SEQ ID NO: 19002 - RNA, 19 nt, Artificial Sequence
  Description of Artificial Sequence: Synthetic oligonucleotide
uucccguagugugguuggc

SEQ ID NO: 19003 - RNA, 19 nt, Artificial Sequence
  Description of Artificial Sequence: Synthetic oligonucleotide
ccauaggaggggacacugc

SEQ ID NO: 19004 - RNA, 19 nt, Artificial Sequence
  Description of Artificial Sequence: Synthetic oligonucleotide
caccaggcgucuagacaug

SEQ ID NO: 19005 - RNA, 19 nt, Artificial Sequence
  Description of Artificial Sequence: Synthetic oligonucleotide
auaauucaccaggcgucua

SEQ ID NO: 19006 - RNA, 19 nt, Artificial Sequence
  Description of Artificial Sequence: Synthetic oligonucleotide
gcagucggcgugugccacg

SEQ ID NO: 19007 - RNA, 19 nt, Artificial Sequence
  Description of Artificial Sequence: Synthetic oligonucleotide
ccccgcagagagaaguaac

SEQ ID NO: 19008 - RNA, 19 nt, Artificial Sequence
  Description of Artificial Sequence: Synthetic oligonucleotide
cgucgggcuacuaccuugg

SEQ ID NO: 19009 - RNA, 19 nt, Artificial Sequence
  Description of Artificial Sequence: Synthetic oligonucleotide
gagacucgcuccggcuggc

SEQ ID NO: 19010 - RNA, 19 nt, Artificial Sequence
  Description of Artificial Sequence: Synthetic oligonucleotide
ccgaggauacggcugccac

SEQ ID NO: 19011 - RNA, 19 nt, Artificial Sequence
  Description of Artificial Sequence: Synthetic oligonucleotide
gccauagggucagagaacu

SEQ ID NO: 19012 - RNA, 19 nt, Artificial Sequence
  Description of Artificial Sequence: Synthetic oligonucleotide
ggggacgggaaccgaugug

SEQ ID NO: 19013 - RNA, 19 nt, Artificial Sequence
  Description of Artificial Sequence: Synthetic oligonucleotide
caacuaaacugagcugcaa

SEQ ID NO: 19014 - RNA, 19 nt, Artificial Sequence
  Description of Artificial Sequence: Synthetic oligonucleotide
ggaucgacuuuagaaauuu

SEQ ID NO: 19015 - RNA, 19 nt, Artificial Sequence
  Description of Artificial Sequence: Synthetic oligonucleotide
ggauacggcugccacuugu

SEQ ID NO: 19016 - RNA, 19 nt, Artificial Sequence
  Description of Artificial Sequence: Synthetic oligonucleotide
ggaugaguccuuggcucug

SEQ ID NO: 19017 - RNA, 19 nt, Artificial Sequence
  Description of Artificial Sequence: Synthetic oligonucleotide
ggcugguagaacggccaag

SEQ ID NO: 19018 - RNA, 19 nt, Artificial Sequence
  Description of Artificial Sequence: Synthetic oligonucleotide
cuggguacucacggcuguc

SEQ ID NO: 19019 - RNA, 19 nt, Artificial Sequence
  Description of Artificial Sequence: Synthetic oligonucleotide
guguggucgugucugcuuu

SEQ ID NO: 19020 - RNA, 19 nt, Artificial Sequence
  Description of Artificial Sequence: Synthetic oligonucleotide
gagaaguaaccugcugguu

SEQ ID NO: 19021 - RNA, 19 nt, Artificial Sequence
  Description of Artificial Sequence: Synthetic oligonucleotide
ggcuacuaccuuggccugc

SEQ ID NO: 19022 - RNA, 19 nt, Artificial Sequence
  Description of Artificial Sequence: Synthetic oligonucleotide
gguuagcaucccaggccgc

SEQ ID NO: 19023 - RNA, 19 nt, Artificial Sequence
  Description of Artificial Sequence: Synthetic oligonucleotide
ucucccuuguagggauguu

SEQ ID NO: 19024 - RNA, 19 nt, Artificial Sequence
  Description of Artificial Sequence: Synthetic oligonucleotide
cggccaagcgaauugaugu

SEQ ID NO: 19025 - RNA, 19 nt, Artificial Sequence
  Description of Artificial Sequence: Synthetic oligonucleotide
gugccgcaggugcucugac

SEQ ID NO: 19026 - RNA, 19 nt, Artificial Sequence
  Description of Artificial Sequence: Synthetic oligonucleotide
cagugccgcaggugcucug

SEQ ID NO: 19027 - RNA, 19 nt, Artificial Sequence
  Description of Artificial Sequence: Synthetic oligonucleotide
ccagccgaguagcucgcuc

SEQ ID NO: 19028 - RNA, 19 nt, Artificial Sequence
  Description of Artificial Sequence: Synthetic oligonucleotide
gcgugugccacguccauuu

SEQ ID NO: 19029 - RNA, 19 nt, Artificial Sequence
  Description of Artificial Sequence: Synthetic oligonucleotide
agacucgcuccggcuggca

SEQ ID NO: 19030 - RNA, 19 nt, Artificial Sequence
  Description of Artificial Sequence: Synthetic oligonucleotide
cccuaccggagcacagcug

SEQ ID NO: 19031 - RNA, 19 nt, Artificial Sequence
  Description of Artificial Sequence: Synthetic oligonucleotide
gcuugauaccccacugccu

SEQ ID NO: 19032 - RNA, 19 nt, Artificial Sequence
  Description of Artificial Sequence: Synthetic oligonucleotide
ccuaccguuuuaacucugu

SEQ ID NO: 19033 - RNA, 19 nt, Artificial Sequence
  Description of Artificial Sequence: Synthetic oligonucleotide
gcuacuaccuuggccugcu

SEQ ID NO: 19034 - RNA, 19 nt, Artificial Sequence
  Description of Artificial Sequence: Synthetic oligonucleotide
ccgaugugacguuugcagu

SEQ ID NO: 19035 - RNA, 19 nt, Artificial Sequence
  Description of Artificial Sequence: Synthetic oligonucleotide
cacguccauuuguccagcu

SEQ ID NO: 19036 - RNA, 19 nt, Artificial Sequence
  Description of Artificial Sequence: Synthetic oligonucleotide
cccugagcgagggcucccg

SEQ ID NO: 19037 - RNA, 19 nt, Artificial Sequence
  Description of Artificial Sequence: Synthetic oligonucleotide
ccgugggcugacacaucug

SEQ ID NO: 19038 - RNA, 19 nt, Artificial Sequence
  Description of Artificial Sequence: Synthetic oligonucleotide
ggccgaugucguaggugug

SEQ ID NO: 19039 - RNA, 19 nt, Artificial Sequence
  Description of Artificial Sequence: Synthetic oligonucleotide
gcccuaccggagcacagcu

SEQ ID NO: 19040 - RNA, 19 nt, Artificial Sequence
  Description of Artificial Sequence: Synthetic oligonucleotide
gacgggugucugggauaca

SEQ ID NO: 19041 - RNA, 19 nt, Artificial Sequence
  Description of Artificial Sequence: Synthetic oligonucleotide
cacccuucuuuagcugucu

SEQ ID NO: 19042 - RNA, 19 nt, Artificial Sequence
  Description of Artificial Sequence: Synthetic oligonucleotide
guagaacggccaagcgaau

SEQ ID NO: 19043 - RNA, 19 nt, Artificial Sequence
  Description of Artificial Sequence: Synthetic oligonucleotide
ccgcagagagaaguaaccu

SEQ ID NO: 19044 - RNA, 19 nt, Artificial Sequence
  Description of Artificial Sequence: Synthetic oligonucleotide
ggcugcuaggaucgacuuu

SEQ ID NO: 19045 - RNA, 19 nt, Artificial Sequence
  Description of Artificial Sequence: Synthetic oligonucleotide
ccacuucccgagcuugaua

SEQ ID NO: 19046 - RNA, 19 nt, Artificial Sequence
  Description of Artificial Sequence: Synthetic oligonucleotide
cccguagugugguuggcuu

SEQ ID NO: 19047 - RNA, 19 nt, Artificial Sequence
  Description of Artificial Sequence: Synthetic oligonucleotide
cgaggauacggcugccacu

SEQ ID NO: 19048 - RNA, 19 nt, Artificial Sequence
  Description of Artificial Sequence: Synthetic oligonucleotide
cccggaggaugcugucaca

SEQ ID NO: 19049 - RNA, 19 nt, Artificial Sequence
  Description of Artificial Sequence: Synthetic oligonucleotide
gggaaccgaugugacguuu

SEQ ID NO: 19050 - RNA, 19 nt, Artificial Sequence
  Description of Artificial Sequence: Synthetic oligonucleotide
ccccuuaagucuggacaaa

SEQ ID NO: 19051 - RNA, 19 nt, Artificial Sequence
  Description of Artificial Sequence: Synthetic oligonucleotide
cuacuaccuuggccugcuu

SEQ ID NO: 19052 - RNA, 19 nt, Artificial Sequence
  Description of Artificial Sequence: Synthetic oligonucleotide
caguucccguagugugguu

SEQ ID NO: 19053 - RNA, 19 nt, Artificial Sequence
  Description of Artificial Sequence: Synthetic oligonucleotide
gccccgaaaccugcacgcu

SEQ ID NO: 19054 - RNA, 19 nt, Artificial Sequence
  Description of Artificial Sequence: Synthetic oligonucleotide
ggcgugugccacguccauu

SEQ ID NO: 19055 - RNA, 19 nt, Artificial Sequence
  Description of Artificial Sequence: Synthetic oligonucleotide
cccgucgggcuacuaccuu

SEQ ID NO: 19056 - RNA, 19 nt, Artificial Sequence
  Description of Artificial Sequence: Synthetic oligonucleotide
cgggaaccgaugugacguu

SEQ ID NO: 19057 - RNA, 19 nt, Artificial Sequence
  Description of Artificial Sequence: Synthetic oligonucleotide
aaagcuaugaacuagcugc

SEQ ID NO: 19058 - RNA, 19 nt, Artificial Sequence
  Description of Artificial Sequence: Synthetic oligonucleotide
aauaaauugcauguaaagc

SEQ ID NO: 19059 - RNA, 19 nt, Artificial Sequence
  Description of Artificial Sequence: Synthetic oligonucleotide
aaauagaauauugacacac

SEQ ID NO: 19060 - RNA, 19 nt, Artificial Sequence
  Description of Artificial Sequence: Synthetic oligonucleotide
uuagugaauaccaauauga

SEQ ID NO: 19061 - RNA, 19 nt, Artificial Sequence
  Description of Artificial Sequence: Synthetic oligonucleotide
aauaaacuauuuuaggaug

SEQ ID NO: 19062 - RNA, 19 nt, Artificial Sequence
  Description of Artificial Sequence: Synthetic oligonucleotide
aguuuuaacucccaagacc

SEQ ID NO: 19063 - RNA, 19 nt, Artificial Sequence
  Description of Artificial Sequence: Synthetic oligonucleotide
uuaauaaucagaucaggag

SEQ ID NO: 19064 - RNA, 19 nt, Artificial Sequence
  Description of Artificial Sequence: Synthetic oligonucleotide
aauaacuugaauauuuguc

SEQ ID NO: 19065 - RNA, 19 nt, Artificial Sequence
  Description of Artificial Sequence: Synthetic oligonucleotide
uaauaaucagaucaggagc

SEQ ID NO: 19066 - RNA, 19 nt, Artificial Sequence
  Description of Artificial Sequence: Synthetic oligonucleotide
auaauauagauuugucccc

SEQ ID NO: 19067 - RNA, 19 nt, Artificial Sequence
  Description of Artificial Sequence: Synthetic oligonucleotide
cuuaauuuuagguuuagug

SEQ ID NO: 19068 - RNA, 19 nt, Artificial Sequence
  Description of Artificial Sequence: Synthetic oligonucleotide
aaacuuauaucugaagugg

SEQ ID NO: 19069 - RNA, 19 nt, Artificial Sequence
  Description of Artificial Sequence: Synthetic oligonucleotide
uggaaauaaacuauuuuag

SEQ ID NO: 19070 - RNA, 19 nt, Artificial Sequence
  Description of Artificial Sequence: Synthetic oligonucleotide
uguccgguaaaacaaaagg

SEQ ID NO: 19071 - RNA, 19 nt, Artificial Sequence
  Description of Artificial Sequence: Synthetic oligonucleotide
auuuacauauugcugguac

SEQ ID NO: 19072 - RNA, 19 nt, Artificial Sequence
  Description of Artificial Sequence: Synthetic oligonucleotide
ucuauauguaguuaagcag

SEQ ID NO: 19073 - RNA, 19 nt, Artificial Sequence
  Description of Artificial Sequence: Synthetic oligonucleotide
  modified_base (19)..(19): a, c, u, g, unknown or other
uugaauauuugucaguugn

SEQ ID NO: 19074 - RNA, 19 nt, Artificial Sequence
  Description of Artificial Sequence: Synthetic oligonucleotide
aaucauaagugcuaagaug

SEQ ID NO: 19075 - RNA, 19 nt, Artificial Sequence
  Description of Artificial Sequence: Synthetic oligonucleotide
aauuaguuccccuguaauc

SEQ ID NO: 19076 - RNA, 19 nt, Artificial Sequence
  Description of Artificial Sequence: Synthetic oligonucleotide
uacuauaaaucauauagga

SEQ ID NO: 19077 - RNA, 19 nt, Artificial Sequence
  Description of Artificial Sequence: Synthetic oligonucleotide
ucaggcauacucuagacag

SEQ ID NO: 19078 - RNA, 19 nt, Artificial Sequence
  Description of Artificial Sequence: Synthetic oligonucleotide
aauaguuuggaaugguaug

SEQ ID NO: 19079 - RNA, 19 nt, Artificial Sequence
  Description of Artificial Sequence: Synthetic oligonucleotide
aaugguaugaaaucacaca

SEQ ID NO: 19080 - RNA, 19 nt, Artificial Sequence
  Description of Artificial Sequence: Synthetic oligonucleotide
uuuacauuggucauacaug

SEQ ID NO: 19081 - RNA, 19 nt, Artificial Sequence
  Description of Artificial Sequence: Synthetic oligonucleotide
aaugcugacagaucaagca

SEQ ID NO: 19082 - RNA, 19 nt, Artificial Sequence
  Description of Artificial Sequence: Synthetic oligonucleotide
agaaauugaagccacucuc

SEQ ID NO: 19083 - RNA, 19 nt, Artificial Sequence
  Description of Artificial Sequence: Synthetic oligonucleotide
uaucuuagagcaaacaagu

SEQ ID NO: 19084 - RNA, 19 nt, Artificial Sequence
  Description of Artificial Sequence: Synthetic oligonucleotide
uuacauuggucauacaugc

SEQ ID NO: 19085 - RNA, 19 nt, Artificial Sequence
  Description of Artificial Sequence: Synthetic oligonucleotide
uauuauuggugaccuaugg

SEQ ID NO: 19086 - RNA, 19 nt, Artificial Sequence
  Description of Artificial Sequence: Synthetic oligonucleotide
aauaccaugguuuauccua

SEQ ID NO: 19087 - RNA, 19 nt, Artificial Sequence
  Description of Artificial Sequence: Synthetic oligonucleotide
uuuuacacuauacagcuau

SEQ ID NO: 19088 - RNA, 19 nt, Artificial Sequence
  Description of Artificial Sequence: Synthetic oligonucleotide
auauaucugaaacuauaac

SEQ ID NO: 19089 - RNA, 19 nt, Artificial Sequence
  Description of Artificial Sequence: Synthetic oligonucleotide
cuucugauagcuaagugcc

SEQ ID NO: 19090 - RNA, 19 nt, Artificial Sequence
  Description of Artificial Sequence: Synthetic oligonucleotide
uguuuauccauauuuggca

SEQ ID NO: 19091 - RNA, 19 nt, Artificial Sequence
  Description of Artificial Sequence: Synthetic oligonucleotide
uuaaacaggagucacuggu

SEQ ID NO: 19092 - RNA, 19 nt, Artificial Sequence
  Description of Artificial Sequence: Synthetic oligonucleotide
auacaugcaggguagaguc

SEQ ID NO: 19093 - RNA, 19 nt, Artificial Sequence
  Description of Artificial Sequence: Synthetic oligonucleotide
ucuacaccaguuaggaugg

SEQ ID NO: 19094 - RNA, 19 nt, Artificial Sequence
  Description of Artificial Sequence: Synthetic oligonucleotide
aaacuaaccuugcacugac

SEQ ID NO: 19095 - RNA, 19 nt, Artificial Sequence
  Description of Artificial Sequence: Synthetic oligonucleotide
ucuaauuauccauggaagc

SEQ ID NO: 19096 - RNA, 19 nt, Artificial Sequence
  Description of Artificial Sequence: Synthetic oligonucleotide
auauaggauauccaucaac

SEQ ID NO: 19097 - RNA, 19 nt, Artificial Sequence
  Description of Artificial Sequence: Synthetic oligonucleotide
aguaucccaagucaaugcc

SEQ ID NO: 19098 - RNA, 19 nt, Artificial Sequence
  Description of Artificial Sequence: Synthetic oligonucleotide
auagccauuagaaaacacc

SEQ ID NO: 19099 - RNA, 19 nt, Artificial Sequence
  Description of Artificial Sequence: Synthetic oligonucleotide
ucaacuauagcuuauuguu

SEQ ID NO: 19100 - RNA, 19 nt, Artificial Sequence
  Description of Artificial Sequence: Synthetic oligonucleotide
  modified_base (8)..(8): a, c, u, g, unknown or other
ucaguugnuaaaccgacug

SEQ ID NO: 19101 - RNA, 19 nt, Artificial Sequence
  Description of Artificial Sequence: Synthetic oligonucleotide
aguuaagcagguuauuuag

SEQ ID NO: 19102 - RNA, 19 nt, Artificial Sequence
  Description of Artificial Sequence: Synthetic oligonucleotide
uuaauguuuagaguuuagg

SEQ ID NO: 19103 - RNA, 19 nt, Artificial Sequence
  Description of Artificial Sequence: Synthetic oligonucleotide
agaauauugacacacugaa

SEQ ID NO: 19104 - RNA, 19 nt, Artificial Sequence
  Description of Artificial Sequence: Synthetic oligonucleotide
auuuguccccauuauauag

SEQ ID NO: 19105 - RNA, 19 nt, Artificial Sequence
  Description of Artificial Sequence: Synthetic oligonucleotide
aucuauauguaguuaagca

SEQ ID NO: 19106 - RNA, 19 nt, Artificial Sequence
  Description of Artificial Sequence: Synthetic oligonucleotide
aauaaucagaucaggagca

SEQ ID NO: 19107 - RNA, 19 nt, Artificial Sequence
  Description of Artificial Sequence: Synthetic oligonucleotide
cuggauuuaauaaacuaac

SEQ ID NO: 19108 - RNA, 19 nt, Artificial Sequence
  Description of Artificial Sequence: Synthetic oligonucleotide
uauauaacaugucaugaua

SEQ ID NO: 19109 - RNA, 19 nt, Artificial Sequence
  Description of Artificial Sequence: Synthetic oligonucleotide
aguauccuuaauuuuaggu

SEQ ID NO: 19110 - RNA, 19 nt, Artificial Sequence
  Description of Artificial Sequence: Synthetic oligonucleotide
ugguuuuaaccauauaaca

SEQ ID NO: 19111 - RNA, 19 nt, Artificial Sequence
  Description of Artificial Sequence: Synthetic oligonucleotide
uuaguguccgguaaaacaa

SEQ ID NO: 19112 - RNA, 19 nt, Artificial Sequence
  Description of Artificial Sequence: Synthetic oligonucleotide
uuaguaaguguguuaagcu

SEQ ID NO: 19113 - RNA, 19 nt, Artificial Sequence
  Description of Artificial Sequence: Synthetic oligonucleotide
  modified_base (10)..(10): a, c, u, g, unknown or other
ugucaguugnuaaaccgac

SEQ ID NO: 19114 - RNA, 19 nt, Artificial Sequence
  Description of Artificial Sequence: Synthetic oligonucleotide
auaaaauccuuucaggcau

SEQ ID NO: 19115 - RNA, 19 nt, Artificial Sequence
  Description of Artificial Sequence: Synthetic oligonucleotide
uuacaaagugaacauuccc

SEQ ID NO: 19116 - RNA, 19 nt, Artificial Sequence
  Description of Artificial Sequence: Synthetic oligonucleotide
uggauuuaauaaacuaacc

SEQ ID NO: 19117 - RNA, 19 nt, Artificial Sequence
  Description of Artificial Sequence: Synthetic oligonucleotide
auauaggucauucgaaucu

SEQ ID NO: 19118 - RNA, 19 nt, Artificial Sequence
  Description of Artificial Sequence: Synthetic oligonucleotide
ucagaaugaggauagcucu

SEQ ID NO: 19119 - RNA, 19 nt, Artificial Sequence
  Description of Artificial Sequence: Synthetic oligonucleotide
acuaaccuugcacugacag

SEQ ID NO: 19120 - RNA, 19 nt, Artificial Sequence
  Description of Artificial Sequence: Synthetic oligonucleotide
cacuguacuagguaggugc

SEQ ID NO: 19121 - RNA, 19 nt, Artificial Sequence
  Description of Artificial Sequence: Synthetic oligonucleotide
acaaccuaucuaauuaucc

SEQ ID NO: 19122 - RNA, 19 nt, Artificial Sequence
  Description of Artificial Sequence: Synthetic oligonucleotide
aucauaagugcuaagaugu

SEQ ID NO: 19123 - RNA, 19 nt, Artificial Sequence
  Description of Artificial Sequence: Synthetic oligonucleotide
  modified_base (4)..(4): a, c, u, g, unknown or other
uugnuaaaccgacugucca

SEQ ID NO: 19124 - RNA, 19 nt, Artificial Sequence
  Description of Artificial Sequence: Synthetic oligonucleotide
aaagggcuaccacagcuuc

SEQ ID NO: 19125 - RNA, 19 nt, Artificial Sequence
  Description of Artificial Sequence: Synthetic oligonucleotide
accuguuaaacgcuauggc

SEQ ID NO: 19126 - RNA, 19 nt, Artificial Sequence
  Description of Artificial Sequence: Synthetic oligonucleotide
uauguaucucccaacccag

SEQ ID NO: 19127 - RNA, 19 nt, Artificial Sequence
  Description of Artificial Sequence: Synthetic oligonucleotide
aauugcucguccccuuccc

SEQ ID NO: 19128 - RNA, 19 nt, Artificial Sequence
  Description of Artificial Sequence: Synthetic oligonucleotide
ucuuagagcaaacaaguuu

SEQ ID NO: 19129 - RNA, 19 nt, Artificial Sequence
  Description of Artificial Sequence: Synthetic oligonucleotide
uaauuauccauggaagcag

SEQ ID NO: 19130 - RNA, 19 nt, Artificial Sequence
  Description of Artificial Sequence: Synthetic oligonucleotide
cugguuuuaaccauauaac

SEQ ID NO: 19131 - RNA, 19 nt, Artificial Sequence
  Description of Artificial Sequence: Synthetic oligonucleotide
auuagugaauaccaauaug

SEQ ID NO: 19132 - RNA, 19 nt, Artificial Sequence
  Description of Artificial Sequence: Synthetic oligonucleotide
auaaacuauuuuaggaugg

SEQ ID NO: 19133 - RNA, 19 nt, Artificial Sequence
  Description of Artificial Sequence: Synthetic oligonucleotide
  modified_base (14)..(14): a, c, u, g, unknown or other
uuucguacaauggnuuucc

SEQ ID NO: 19134 - RNA, 19 nt, Artificial Sequence
  Description of Artificial Sequence: Synthetic oligonucleotide
aaaauagaauauugacaca

SEQ ID NO: 19135 - RNA, 19 nt, Artificial Sequence
  Description of Artificial Sequence: Synthetic oligonucleotide
caacccuguuacuagaugg

SEQ ID NO: 19136 - RNA, 19 nt, Artificial Sequence
  Description of Artificial Sequence: Synthetic oligonucleotide
uuaagcagguuauuuagaa

SEQ ID NO: 19137 - RNA, 19 nt, Artificial Sequence
  Description of Artificial Sequence: Synthetic oligonucleotide
  modified_base (6)..(6): a, c, u, g, unknown or other
aguugnuaaaccgacuguc

SEQ ID NO: 19138 - RNA, 19 nt, Artificial Sequence
  Description of Artificial Sequence: Synthetic oligonucleotide
uauagcuuauuguuggggu

SEQ ID NO: 19139 - RNA, 19 nt, Artificial Sequence
  Description of Artificial Sequence: Synthetic oligonucleotide
uccuaguucuuugauauag

SEQ ID NO: 19140 - RNA, 19 nt, Artificial Sequence
  Description of Artificial Sequence: Synthetic oligonucleotide
aaaaugggugucuagccau

SEQ ID NO: 19141 - RNA, 19 nt, Artificial Sequence
  Description of Artificial Sequence: Synthetic oligonucleotide
auaaacuaaccuugcacug

SEQ ID NO: 19142 - RNA, 19 nt, Artificial Sequence
  Description of Artificial Sequence: Synthetic oligonucleotide
auacuauaaaucauauagg

SEQ ID NO: 19143 - RNA, 19 nt, Artificial Sequence
  Description of Artificial Sequence: Synthetic oligonucleotide
  modified_base (3)..(3): a, c, u, g, unknown or other
ugnuaaaccgacuguccag

SEQ ID NO: 19144 - RNA, 19 nt, Artificial Sequence
  Description of Artificial Sequence: Synthetic oligonucleotide
acaguucgaaacuacaggu

SEQ ID NO: 19145 - RNA, 19 nt, Artificial Sequence
  Description of Artificial Sequence: Synthetic oligonucleotide
uuuacauauugcugguacc

SEQ ID NO: 19146 - RNA, 19 nt, Artificial Sequence
  Description of Artificial Sequence: Synthetic oligonucleotide
caaaauuuuacagucugac

SEQ ID NO: 19147 - RNA, 19 nt, Artificial Sequence
  Description of Artificial Sequence: Synthetic oligonucleotide
cauagugguacaucugucc

SEQ ID NO: 19148 - RNA, 19 nt, Artificial Sequence
  Description of Artificial Sequence: Synthetic oligonucleotide
uuguuuguauguaucuccc

SEQ ID NO: 19149 - RNA, 19 nt, Artificial Sequence
  Description of Artificial Sequence: Synthetic oligonucleotide
uauccuauggugauauggu

SEQ ID NO: 19150 - RNA, 19 nt, Artificial Sequence
  Description of Artificial Sequence: Synthetic oligonucleotide
uuaaaccauuacaaaguga

SEQ ID NO: 19151 - RNA, 19 nt, Artificial Sequence
  Description of Artificial Sequence: Synthetic oligonucleotide
uggugauauggucucacag

SEQ ID NO: 19152 - RNA, 19 nt, Artificial Sequence
  Description of Artificial Sequence: Synthetic oligonucleotide
uuuaauggaaagcuuccua

SEQ ID NO: 19153 - RNA, 19 nt, Artificial Sequence
  Description of Artificial Sequence: Synthetic oligonucleotide
gucaugauaaaacaaucuc

SEQ ID NO: 19154 - RNA, 19 nt, Artificial Sequence
  Description of Artificial Sequence: Synthetic oligonucleotide
uagccauuauauuuguccc

SEQ ID NO: 19155 - RNA, 19 nt, Artificial Sequence
  Description of Artificial Sequence: Synthetic oligonucleotide
ucaucaagucugauggacc

SEQ ID NO: 19156 - RNA, 19 nt, Artificial Sequence
  Description of Artificial Sequence: Synthetic oligonucleotide
uuccuguuaaccugugggg

SEQ ID NO: 19157 - RNA, 19 nt, Artificial Sequence
  Description of Artificial Sequence: Synthetic oligonucleotide
ugucuagccauucuugccu

SEQ ID NO: 19158 - RNA, 19 nt, Artificial Sequence
  Description of Artificial Sequence: Synthetic oligonucleotide
auauauaacaugucaugau

SEQ ID NO: 19159 - RNA, 19 nt, Artificial Sequence
  Description of Artificial Sequence: Synthetic oligonucleotide
gugugguugacacacgcgg

SEQ ID NO: 19160 - RNA, 19 nt, Artificial Sequence
  Description of Artificial Sequence: Synthetic oligonucleotide
gauauaggucauucgaauc

SEQ ID NO: 19161 - RNA, 19 nt, Artificial Sequence
  Description of Artificial Sequence: Synthetic oligonucleotide
  modified_base (8)..(8): a, c, u, g, unknown or other
acaauggnuuuccuaguuc

SEQ ID NO: 19162 - RNA, 19 nt, Artificial Sequence
  Description of Artificial Sequence: Synthetic oligonucleotide
auguuacacaaaccauucc

SEQ ID NO: 19163 - RNA, 19 nt, Artificial Sequence
  Description of Artificial Sequence: Synthetic oligonucleotide
gaucaagcauaauaccaug

SEQ ID NO: 19164 - RNA, 19 nt, Artificial Sequence
  Description of Artificial Sequence: Synthetic oligonucleotide
cuggggcuugguaagaucg

SEQ ID NO: 19165 - RNA, 19 nt, Artificial Sequence
  Description of Artificial Sequence: Synthetic oligonucleotide
ugauauaggucauucgaau

SEQ ID NO: 19166 - RNA, 19 nt, Artificial Sequence
  Description of Artificial Sequence: Synthetic oligonucleotide
auauccaucaacauuacuu

SEQ ID NO: 19167 - RNA, 19 nt, Artificial Sequence
  Description of Artificial Sequence: Synthetic oligonucleotide
gugaauaccaauaugauau

SEQ ID NO: 19168 - RNA, 19 nt, Artificial Sequence
  Description of Artificial Sequence: Synthetic oligonucleotide
aucugcacaaccuaucuaa

SEQ ID NO: 19169 - RNA, 19 nt, Artificial Sequence
  Description of Artificial Sequence: Synthetic oligonucleotide
aggaaagcuagaccaauug

SEQ ID NO: 19170 - RNA, 19 nt, Artificial Sequence
  Description of Artificial Sequence: Synthetic oligonucleotide
uguuaaacgcuauggcaca

SEQ ID NO: 19171 - RNA, 19 nt, Artificial Sequence
  Description of Artificial Sequence: Synthetic oligonucleotide
gggaauuagguacaaacug

SEQ ID NO: 19172 - RNA, 19 nt, Artificial Sequence
  Description of Artificial Sequence: Synthetic oligonucleotide
aggaaagcuaugaacuagc

SEQ ID NO: 19173 - RNA, 19 nt, Artificial Sequence
  Description of Artificial Sequence: Synthetic oligonucleotide
caggguagaagcaccaacc

SEQ ID NO: 19174 - RNA, 19 nt, Artificial Sequence
  Description of Artificial Sequence: Synthetic oligonucleotide
uauccaucaacauuacuuu

SEQ ID NO: 19175 - RNA, 19 nt, Artificial Sequence
  Description of Artificial Sequence: Synthetic oligonucleotide
ucucaaacaguaccauagc

SEQ ID NO: 19176 - RNA, 19 nt, Artificial Sequence
  Description of Artificial Sequence: Synthetic oligonucleotide
uacaaugauaacucucagu

SEQ ID NO: 19177 - RNA, 19 nt, Artificial Sequence
  Description of Artificial Sequence: Synthetic oligonucleotide
uucacaagaccuguuaaac

SEQ ID NO: 19178 - RNA, 19 nt, Artificial Sequence
  Description of Artificial Sequence: Synthetic oligonucleotide
uaacaaauuuuggaguuga

SEQ ID NO: 19179 - RNA, 19 nt, Artificial Sequence
  Description of Artificial Sequence: Synthetic oligonucleotide
auaucugaaacuauaacua

SEQ ID NO: 19180 - RNA, 19 nt, Artificial Sequence
  Description of Artificial Sequence: Synthetic oligonucleotide
ucaguagcugauuuuccug

SEQ ID NO: 19181 - RNA, 19 nt, Artificial Sequence
  Description of Artificial Sequence: Synthetic oligonucleotide
aggauagcucuccuuuccc

SEQ ID NO: 19182 - RNA, 19 nt, Artificial Sequence
  Description of Artificial Sequence: Synthetic oligonucleotide
uaauauagauuugucccca

SEQ ID NO: 19183 - RNA, 19 nt, Artificial Sequence
  Description of Artificial Sequence: Synthetic oligonucleotide
uugggaauuaguuccccug

SEQ ID NO: 19184 - RNA, 19 nt, Artificial Sequence
  Description of Artificial Sequence: Synthetic oligonucleotide
uacuagauggugccuauaa

SEQ ID NO: 19185 - RNA, 19 nt, Artificial Sequence
  Description of Artificial Sequence: Synthetic oligonucleotide
uuuagguuuaguguccggu

SEQ ID NO: 19186 - RNA, 19 nt, Artificial Sequence
  Description of Artificial Sequence: Synthetic oligonucleotide
uggucauacaugcagggua

SEQ ID NO: 19187 - RNA, 19 nt, Artificial Sequence
  Description of Artificial Sequence: Synthetic oligonucleotide
cuguacaauaacuugaaua

SEQ ID NO: 19188 - RNA, 19 nt, Artificial Sequence
  Description of Artificial Sequence: Synthetic oligonucleotide
uguagagaaggggaauuag

SEQ ID NO: 19189 - RNA, 19 nt, Artificial Sequence
  Description of Artificial Sequence: Synthetic oligonucleotide
auuguuggggugaccaacc

SEQ ID NO: 19190 - RNA, 19 nt, Artificial Sequence
  Description of Artificial Sequence: Synthetic oligonucleotide
aauagaauauugacacacu

SEQ ID NO: 19191 - RNA, 19 nt, Artificial Sequence
  Description of Artificial Sequence: Synthetic oligonucleotide
agugaauaccaauaugaua

SEQ ID NO: 19192 - RNA, 19 nt, Artificial Sequence
  Description of Artificial Sequence: Synthetic oligonucleotide
  modified_base (18)..(18): a, c, u, g, unknown or other
ugaauauuugucaguugnu

SEQ ID NO: 19193 - RNA, 19 nt, Artificial Sequence
  Description of Artificial Sequence: Synthetic oligonucleotide
agaucuaaauaguuuggaa

SEQ ID NO: 19194 - RNA, 19 nt, Artificial Sequence
  Description of Artificial Sequence: Synthetic oligonucleotide
ucauguguuuacauugguc

SEQ ID NO: 19195 - RNA, 19 nt, Artificial Sequence
  Description of Artificial Sequence: Synthetic oligonucleotide
auagcuuauuguuggggug

SEQ ID NO: 19196 - RNA, 19 nt, Artificial Sequence
  Description of Artificial Sequence: Synthetic oligonucleotide
agaucggaucuccaguauc

SEQ ID NO: 19197 - RNA, 19 nt, Artificial Sequence
  Description of Artificial Sequence: Synthetic oligonucleotide
aaacaacccuguuacuaga

SEQ ID NO: 19198 - RNA, 19 nt, Artificial Sequence
  Description of Artificial Sequence: Synthetic oligonucleotide
ggaaagcuagaccaauugg

SEQ ID NO: 19199 - RNA, 19 nt, Artificial Sequence
  Description of Artificial Sequence: Synthetic oligonucleotide
agccauuuaauggaaagcu

SEQ ID NO: 19200 - RNA, 19 nt, Artificial Sequence
  Description of Artificial Sequence: Synthetic oligonucleotide
agguacucacgccaugaac

SEQ ID NO: 19201 - RNA, 19 nt, Artificial Sequence
  Description of Artificial Sequence: Synthetic oligonucleotide
uuaguaguuacugucuuua

SEQ ID NO: 19202 - RNA, 19 nt, Artificial Sequence
  Description of Artificial Sequence: Synthetic oligonucleotide
uaguguauuauuggugacc

SEQ ID NO: 19203 - RNA, 19 nt, Artificial Sequence
  Description of Artificial Sequence: Synthetic oligonucleotide
uagugaauaccaauaugau

SEQ ID NO: 19204 - RNA, 19 nt, Artificial Sequence
  Description of Artificial Sequence: Synthetic oligonucleotide
uuucuuaggcaccuuuaaa

SEQ ID NO: 19205 - RNA, 19 nt, Artificial Sequence
  Description of Artificial Sequence: Synthetic oligonucleotide
uagaucuaaauaguuugga

SEQ ID NO: 19206 - RNA, 19 nt, Artificial Sequence
  Description of Artificial Sequence: Synthetic oligonucleotide
agucugacauuucacugug

SEQ ID NO: 19207 - RNA, 19 nt, Artificial Sequence
  Description of Artificial Sequence: Synthetic oligonucleotide
ccucuauucauauuauugc

SEQ ID NO: 19208 - RNA, 19 nt, Artificial Sequence
  Description of Artificial Sequence: Synthetic oligonucleotide
cucccaagaccacugaggc

SEQ ID NO: 19209 - RNA, 19 nt, Artificial Sequence
  Description of Artificial Sequence: Synthetic oligonucleotide
gugaaaaugggugucuagc

SEQ ID NO: 19210 - RNA, 19 nt, Artificial Sequence
  Description of Artificial Sequence: Synthetic oligonucleotide
aucaagcauaauaccaugg

SEQ ID NO: 19211 - RNA, 19 nt, Artificial Sequence
  Description of Artificial Sequence: Synthetic oligonucleotide
agccugacugacaauaaac

SEQ ID NO: 19212 - RNA, 19 nt, Artificial Sequence
  Description of Artificial Sequence: Synthetic oligonucleotide
accauauaacauuccauaa

SEQ ID NO: 19213 - RNA, 19 nt, Artificial Sequence
  Description of Artificial Sequence: Synthetic oligonucleotide
ugaccuaugggauucugua

SEQ ID NO: 19214 - RNA, 19 nt, Artificial Sequence
  Description of Artificial Sequence: Synthetic oligonucleotide
acggaggagagcuuacauc

SEQ ID NO: 19215 - RNA, 19 nt, Artificial Sequence
  Description of Artificial Sequence: Synthetic oligonucleotide
gauagcucuccuuucccac

SEQ ID NO: 19216 - RNA, 19 nt, Artificial Sequence
  Description of Artificial Sequence: Synthetic oligonucleotide
uaguuaagcagguuauuua

SEQ ID NO: 19217 - RNA, 19 nt, Artificial Sequence
  Description of Artificial Sequence: Synthetic oligonucleotide
  modified_base (5)..(5): a, c, u, g, unknown or other
guugnuaaaccgacugucc

SEQ ID NO: 19218 - RNA, 19 nt, Artificial Sequence
  Description of Artificial Sequence: Synthetic oligonucleotide
cuugcuuaauuaccccagg

SEQ ID NO: 19219 - RNA, 19 nt, Artificial Sequence
  Description of Artificial Sequence: Synthetic oligonucleotide
uuuacccaguggcucacug

SEQ ID NO: 19220 - RNA, 19 nt, Artificial Sequence
  Description of Artificial Sequence: Synthetic oligonucleotide
guccgguaaaacaaaaggc

SEQ ID NO: 19221 - RNA, 19 nt, Artificial Sequence
  Description of Artificial Sequence: Synthetic oligonucleotide
caaucuuggaaucauaagu

SEQ ID NO: 19222 - RNA, 19 nt, Artificial Sequence
  Description of Artificial Sequence: Synthetic oligonucleotide
ugccauacacaguauaaua

SEQ ID NO: 19223 - RNA, 19 nt, Artificial Sequence
  Description of Artificial Sequence: Synthetic oligonucleotide
ugccuauaacuacaucagc

SEQ ID NO: 19224 - RNA, 19 nt, Artificial Sequence
  Description of Artificial Sequence: Synthetic oligonucleotide
ugauagcuaagugccauca

SEQ ID NO: 19225 - RNA, 19 nt, Artificial Sequence
  Description of Artificial Sequence: Synthetic oligonucleotide
uaagaucggaucuccagua

SEQ ID NO: 19226 - RNA, 19 nt, Artificial Sequence
  Description of Artificial Sequence: Synthetic oligonucleotide
ugccuuauuagagauuagu

SEQ ID NO: 19227 - RNA, 19 nt, Artificial Sequence
  Description of Artificial Sequence: Synthetic oligonucleotide
uuaggauggaaaggauuag

SEQ ID NO: 19228 - RNA, 19 nt, Artificial Sequence
  Description of Artificial Sequence: Synthetic oligonucleotide
aguuuaaggagagaaguua

SEQ ID NO: 19229 - RNA, 19 nt, Artificial Sequence
  Description of Artificial Sequence: Synthetic oligonucleotide
caccaacccauuuucacac

SEQ ID NO: 19230 - RNA, 19 nt, Artificial Sequence
  Description of Artificial Sequence: Synthetic oligonucleotide
uaucccaagucaaugccua

SEQ ID NO: 19231 - RNA, 19 nt, Artificial Sequence
  Description of Artificial Sequence: Synthetic oligonucleotide
  modified_base (9)..(9): a, c, u, g, unknown or other
uacaauggnuuuccuaguu

SEQ ID NO: 19232 - RNA, 19 nt, Artificial Sequence
  Description of Artificial Sequence: Synthetic oligonucleotide
uagguuuaguguccgguaa

SEQ ID NO: 19233 - RNA, 19 nt, Artificial Sequence
  Description of Artificial Sequence: Synthetic oligonucleotide
caaccuaucuaauuaucca

SEQ ID NO: 19234 - RNA, 19 nt, Artificial Sequence
  Description of Artificial Sequence: Synthetic oligonucleotide
uguuuguauguaucuccca

SEQ ID NO: 19235 - RNA, 19 nt, Artificial Sequence
  Description of Artificial Sequence: Synthetic oligonucleotide
uguaaucugacugggucaa

SEQ ID NO: 19236 - RNA, 19 nt, Artificial Sequence
  Description of Artificial Sequence: Synthetic oligonucleotide
uauuguuggggugaccaac

SEQ ID NO: 19237 - RNA, 19 nt, Artificial Sequence
  Description of Artificial Sequence: Synthetic oligonucleotide
gguguaaguuucugaaucc

SEQ ID NO: 19238 - RNA, 19 nt, Artificial Sequence
  Description of Artificial Sequence: Synthetic oligonucleotide
ugggccuuuuaguaguuac

SEQ ID NO: 19239 - RNA, 19 nt, Artificial Sequence
  Description of Artificial Sequence: Synthetic oligonucleotide
auacucuagacagaagcca

SEQ ID NO: 19240 - RNA, 19 nt, Artificial Sequence
  Description of Artificial Sequence: Synthetic oligonucleotide
ugauauggucucacaguac

SEQ ID NO: 19241 - RNA, 19 nt, Artificial Sequence
  Description of Artificial Sequence: Synthetic oligonucleotide
gugccuauaacuacaucag

SEQ ID NO: 19242 - RNA, 19 nt, Artificial Sequence
  Description of Artificial Sequence: Synthetic oligonucleotide
gaaagcuagaccaauuggu

SEQ ID NO: 19243 - RNA, 19 nt, Artificial Sequence
  Description of Artificial Sequence: Synthetic oligonucleotide
cuagauggugccuauaacu

SEQ ID NO: 19244 - RNA, 19 nt, Artificial Sequence
  Description of Artificial Sequence: Synthetic oligonucleotide
gauuagugaauaccaauau

SEQ ID NO: 19245 - RNA, 19 nt, Artificial Sequence
  Description of Artificial Sequence: Synthetic oligonucleotide
uaauaccaugguuuauccu

SEQ ID NO: 19246 - RNA, 19 nt, Artificial Sequence
  Description of Artificial Sequence: Synthetic oligonucleotide
auuaauguuuagaguuuag

SEQ ID NO: 19247 - RNA, 19 nt, Artificial Sequence
  Description of Artificial Sequence: Synthetic oligonucleotide
guacucacgccaugaacag

SEQ ID NO: 19248 - RNA, 19 nt, Artificial Sequence
  Description of Artificial Sequence: Synthetic oligonucleotide
ucugauagcuaagugccau

SEQ ID NO: 19249 - RNA, 19 nt, Artificial Sequence
  Description of Artificial Sequence: Synthetic oligonucleotide
ugguuuauccuauggugau

SEQ ID NO: 19250 - RNA, 19 nt, Artificial Sequence
  Description of Artificial Sequence: Synthetic oligonucleotide
agauuagugaauaccaaua

SEQ ID NO: 19251 - RNA, 19 nt, Artificial Sequence
  Description of Artificial Sequence: Synthetic oligonucleotide
ccuacacucuaucagaaug

SEQ ID NO: 19252 - RNA, 19 nt, Artificial Sequence
  Description of Artificial Sequence: Synthetic oligonucleotide
ccuuuuaguaguuacuguc

SEQ ID NO: 19253 - RNA, 19 nt, Artificial Sequence
  Description of Artificial Sequence: Synthetic oligonucleotide
ggaucaagguuggauaagg

SEQ ID NO: 19254 - RNA, 19 nt, Artificial Sequence
  Description of Artificial Sequence: Synthetic oligonucleotide
auaacuacuuuggcucuuc

SEQ ID NO: 19255 - RNA, 19 nt, Artificial Sequence
  Description of Artificial Sequence: Synthetic oligonucleotide
  modified_base (7)..(7): a, c, u, g, unknown or other
caauggnuuuccuaguucu

SEQ ID NO: 19256 - RNA, 19 nt, Artificial Sequence
  Description of Artificial Sequence: Synthetic oligonucleotide
uggggcuugguaagaucgg

SEQ ID NO: 19257 - RNA, 19 nt, Artificial Sequence
  Description of Artificial Sequence: Synthetic oligonucleotide
accaucacccaccaguuua

SEQ ID NO: 19258 - RNA, 19 nt, Artificial Sequence
  Description of Artificial Sequence: Synthetic oligonucleotide
cucuagacagaagccaacc

SEQ ID NO: 19259 - RNA, 19 nt, Artificial Sequence
  Description of Artificial Sequence: Synthetic oligonucleotide
agggcaaaugccaugagaa

SEQ ID NO: 19260 - RNA, 19 nt, Artificial Sequence
  Description of Artificial Sequence: Synthetic oligonucleotide
agaccuguuaaacgcuaug

SEQ ID NO: 19261 - RNA, 19 nt, Artificial Sequence
  Description of Artificial Sequence: Synthetic oligonucleotide
ggaaucauaagugcuaaga

SEQ ID NO: 19262 - RNA, 19 nt, Artificial Sequence
  Description of Artificial Sequence: Synthetic oligonucleotide
agaucaagcauaauaccau

SEQ ID NO: 19263 - RNA, 19 nt, Artificial Sequence
  Description of Artificial Sequence: Synthetic oligonucleotide
ucuguaguauuuacauauu

SEQ ID NO: 19264 - RNA, 19 nt, Artificial Sequence
  Description of Artificial Sequence: Synthetic oligonucleotide
augaacuagcugcccaucu

SEQ ID NO: 19265 - RNA, 19 nt, Artificial Sequence
  Description of Artificial Sequence: Synthetic oligonucleotide
uagaccaauuggugacagg

SEQ ID NO: 19266 - RNA, 19 nt, Artificial Sequence
  Description of Artificial Sequence: Synthetic oligonucleotide
caguauccuuaauuuuagg

SEQ ID NO: 19267 - RNA, 19 nt, Artificial Sequence
  Description of Artificial Sequence: Synthetic oligonucleotide
aagccugacugacaauaaa

SEQ ID NO: 19268 - RNA, 19 nt, Artificial Sequence
  Description of Artificial Sequence: Synthetic oligonucleotide
cacaaccuaucuaauuauc

SEQ ID NO: 19269 - RNA, 19 nt, Artificial Sequence
  Description of Artificial Sequence: Synthetic oligonucleotide
ggcucacuguacuagguag

SEQ ID NO: 19270 - RNA, 19 nt, Artificial Sequence
  Description of Artificial Sequence: Synthetic oligonucleotide
guauccuuaauuuuagguu

SEQ ID NO: 19271 - RNA, 19 nt, Artificial Sequence
  Description of Artificial Sequence: Synthetic oligonucleotide
accuaucuaauuauccaug

SEQ ID NO: 19272 - RNA, 19 nt, Artificial Sequence
  Description of Artificial Sequence: Synthetic oligonucleotide
uuguccuaccaguaauuaa

SEQ ID NO: 19273 - RNA, 19 nt, Artificial Sequence
  Description of Artificial Sequence: Synthetic oligonucleotide
gagagaagcaguaagguuu

SEQ ID NO: 19274 - RNA, 19 nt, Artificial Sequence
  Description of Artificial Sequence: Synthetic oligonucleotide
agccauuauauuuguccca

SEQ ID NO: 19275 - RNA, 19 nt, Artificial Sequence
  Description of Artificial Sequence: Synthetic oligonucleotide
gguuggauaaggaugguca

SEQ ID NO: 19276 - RNA, 19 nt, Artificial Sequence
  Description of Artificial Sequence: Synthetic oligonucleotide
uucugauagcuaagugcca

SEQ ID NO: 19277 - RNA, 19 nt, Artificial Sequence
  Description of Artificial Sequence: Synthetic oligonucleotide
uuacacuauacagcuauuu

SEQ ID NO: 19278 - RNA, 19 nt, Artificial Sequence
  Description of Artificial Sequence: Synthetic oligonucleotide
ucacgccaugaacagaaau

SEQ ID NO: 19279 - RNA, 19 nt, Artificial Sequence
  Description of Artificial Sequence: Synthetic oligonucleotide
ugacacacgcgguuucuga

SEQ ID NO: 19280 - RNA, 19 nt, Artificial Sequence
  Description of Artificial Sequence: Synthetic oligonucleotide
ugaauaccaauaugauaua

SEQ ID NO: 19281 - RNA, 19 nt, Artificial Sequence
  Description of Artificial Sequence: Synthetic oligonucleotide
uccuaucuuagagcaaaca

SEQ ID NO: 19282 - RNA, 19 nt, Artificial Sequence
  Description of Artificial Sequence: Synthetic oligonucleotide
aaaggcuuacaguccucau

SEQ ID NO: 19283 - RNA, 19 nt, Artificial Sequence
  Description of Artificial Sequence: Synthetic oligonucleotide
gguacucacgccaugaaca

SEQ ID NO: 19284 - RNA, 19 nt, Artificial Sequence
  Description of Artificial Sequence: Synthetic oligonucleotide
uuaaacgcuauggcacaug

SEQ ID NO: 19285 - RNA, 19 nt, Artificial Sequence
  Description of Artificial Sequence: Synthetic oligonucleotide
guugggauguguggugugg

SEQ ID NO: 19286 - RNA, 19 nt, Artificial Sequence
  Description of Artificial Sequence: Synthetic oligonucleotide
auauuagaaguuccauauu

SEQ ID NO: 19287 - RNA, 19 nt, Artificial Sequence
  Description of Artificial Sequence: Synthetic oligonucleotide
uaggucauucgaaucucau

SEQ ID NO: 19288 - RNA, 19 nt, Artificial Sequence
  Description of Artificial Sequence: Synthetic oligonucleotide
agaaacacauucaacuaua

SEQ ID NO: 19289 - RNA, 19 nt, Artificial Sequence
  Description of Artificial Sequence: Synthetic oligonucleotide
uuuauccuauggugauaug

SEQ ID NO: 19290 - RNA, 19 nt, Artificial Sequence
  Description of Artificial Sequence: Synthetic oligonucleotide
guagcugauuuuccuguac

SEQ ID NO: 19291 - RNA, 19 nt, Artificial Sequence
  Description of Artificial Sequence: Synthetic oligonucleotide
gacacacgcgguuucugac

SEQ ID NO: 19292 - RNA, 19 nt, Artificial Sequence
  Description of Artificial Sequence: Synthetic oligonucleotide
guaaguguguuaagcuuug

SEQ ID NO: 19293 - RNA, 19 nt, Artificial Sequence
  Description of Artificial Sequence: Synthetic oligonucleotide
ugaggauagcucuccuuuc

SEQ ID NO: 19294 - RNA, 19 nt, Artificial Sequence
  Description of Artificial Sequence: Synthetic oligonucleotide
uacaugcaggguagaguca

SEQ ID NO: 19295 - RNA, 19 nt, Artificial Sequence
  Description of Artificial Sequence: Synthetic oligonucleotide
uguuggggugaccaaccaa

SEQ ID NO: 19296 - RNA, 19 nt, Artificial Sequence
  Description of Artificial Sequence: Synthetic oligonucleotide
guauuauuggugaccuaug

SEQ ID NO: 19297 - RNA, 19 nt, Artificial Sequence
  Description of Artificial Sequence: Synthetic oligonucleotide
aacccuguuacuagauggu

SEQ ID NO: 19298 - RNA, 19 nt, Artificial Sequence
  Description of Artificial Sequence: Synthetic oligonucleotide
uuggggugaccaaccaaga

SEQ ID NO: 19299 - RNA, 19 nt, Artificial Sequence
  Description of Artificial Sequence: Synthetic oligonucleotide
uuuacacuauacagcuauu

SEQ ID NO: 19300 - RNA, 19 nt, Artificial Sequence
  Description of Artificial Sequence: Synthetic oligonucleotide
uugccuuauuagagauuag

SEQ ID NO: 19301 - RNA, 19 nt, Artificial Sequence
  Description of Artificial Sequence: Synthetic oligonucleotide
gaauuaguuccccuguaau

SEQ ID NO: 19302 - RNA, 19 nt, Artificial Sequence
  Description of Artificial Sequence: Synthetic oligonucleotide
uagagcaaacaaguuuuaa

SEQ ID NO: 19303 - RNA, 19 nt, Artificial Sequence
  Description of Artificial Sequence: Synthetic oligonucleotide
gaacuagcugcccaucuua

SEQ ID NO: 19304 - RNA, 19 nt, Artificial Sequence
  Description of Artificial Sequence: Synthetic oligonucleotide
ucgaaacuacagguuauuc

SEQ ID NO: 19305 - RNA, 19 nt, Artificial Sequence
  Description of Artificial Sequence: Synthetic oligonucleotide
  modified_base (2)..(2): a, c, u, g, unknown or other
gnuaaaccgacuguccagu

SEQ ID NO: 19306 - RNA, 19 nt, Artificial Sequence
  Description of Artificial Sequence: Synthetic oligonucleotide
ugacaggcggggaugugaa

SEQ ID NO: 19307 - RNA, 19 nt, Artificial Sequence
  Description of Artificial Sequence: Synthetic oligonucleotide
caggaauugguggaaugac

SEQ ID NO: 19308 - RNA, 19 nt, Artificial Sequence
  Description of Artificial Sequence: Synthetic oligonucleotide
aaaguacuuugagaccaau

SEQ ID NO: 19309 - RNA, 19 nt, Artificial Sequence
  Description of Artificial Sequence: Synthetic oligonucleotide
agaguuuaggaaagcuaug

SEQ ID NO: 19310 - RNA, 19 nt, Artificial Sequence
  Description of Artificial Sequence: Synthetic oligonucleotide
uaguaguuacugucuuuaa

SEQ ID NO: 19311 - RNA, 19 nt, Artificial Sequence
  Description of Artificial Sequence: Synthetic oligonucleotide
guaagaucggaucuccagu

SEQ ID NO: 19312 - RNA, 19 nt, Artificial Sequence
  Description of Artificial Sequence: Synthetic oligonucleotide
uuggauaaggauggucaaa

SEQ ID NO: 19313 - RNA, 19 nt, Artificial Sequence
  Description of Artificial Sequence: Synthetic oligonucleotide
agauuaauguuuagaguuu

SEQ ID NO: 19314 - RNA, 19 nt, Artificial Sequence
  Description of Artificial Sequence: Synthetic oligonucleotide
accuuaaguagaaaucaaa

SEQ ID NO: 19315 - RNA, 19 nt, Artificial Sequence
  Description of Artificial Sequence: Synthetic oligonucleotide
aaagccugacugacaauaa

SEQ ID NO: 19316 - RNA, 19 nt, Artificial Sequence
  Description of Artificial Sequence: Synthetic oligonucleotide
uccugaaaacccagucauc

SEQ ID NO: 19317 - RNA, 19 nt, Artificial Sequence
  Description of Artificial Sequence: Synthetic oligonucleotide
guuggauaaggauggucaa

SEQ ID NO: 19318 - RNA, 19 nt, Artificial Sequence
  Description of Artificial Sequence: Synthetic oligonucleotide
agaaggggaauuagguaca

SEQ ID NO: 19319 - RNA, 19 nt, Artificial Sequence
  Description of Artificial Sequence: Synthetic oligonucleotide
guguccgguaaaacaaaag

SEQ ID NO: 19320 - RNA, 19 nt, Artificial Sequence
  Description of Artificial Sequence: Synthetic oligonucleotide
ccuguuaaacgcuauggca

SEQ ID NO: 19321 - RNA, 19 nt, Artificial Sequence
  Description of Artificial Sequence: Synthetic oligonucleotide
uuggucauacaugcagggu

SEQ ID NO: 19322 - RNA, 19 nt, Artificial Sequence
  Description of Artificial Sequence: Synthetic oligonucleotide
gccuauaacuacaucagca

SEQ ID NO: 19323 - RNA, 19 nt, Artificial Sequence
  Description of Artificial Sequence: Synthetic oligonucleotide
uggggugaccaaccaagau

SEQ ID NO: 19324 - RNA, 19 nt, Artificial Sequence
  Description of Artificial Sequence: Synthetic oligonucleotide
gaucaagguuggauaagga

SEQ ID NO: 19325 - RNA, 19 nt, Artificial Sequence
  Description of Artificial Sequence: Synthetic oligonucleotide
  modified_base (6)..(6): a, c, u, g, unknown or other
aauggnuuuccuaguucuu

SEQ ID NO: 19326 - RNA, 19 nt, Artificial Sequence
  Description of Artificial Sequence: Synthetic oligonucleotide
caccgaucggccugggaag

SEQ ID NO: 19327 - RNA, 19 nt, Artificial Sequence
  Description of Artificial Sequence: Synthetic oligonucleotide
agcauuuguuuaauauaca

SEQ ID NO: 19328 - RNA, 19 nt, Artificial Sequence
  Description of Artificial Sequence: Synthetic oligonucleotide
aacaacccuguuacuagau

SEQ ID NO: 19329 - RNA, 19 nt, Artificial Sequence
  Description of Artificial Sequence: Synthetic oligonucleotide
uagacggaggagagcuuac

SEQ ID NO: 19330 - RNA, 19 nt, Artificial Sequence
  Description of Artificial Sequence: Synthetic oligonucleotide
cacgcgguuucugacauuc

SEQ ID NO: 19331 - RNA, 19 nt, Artificial Sequence
  Description of Artificial Sequence: Synthetic oligonucleotide
gggguaaaguuuaaggaga

SEQ ID NO: 19332 - RNA, 19 nt, Artificial Sequence
  Description of Artificial Sequence: Synthetic oligonucleotide
cccagauuagugaauacca

SEQ ID NO: 19333 - RNA, 19 nt, Artificial Sequence
  Description of Artificial Sequence: Synthetic oligonucleotide
uuaacucggaggagacaua

SEQ ID NO: 19334 - RNA, 19 nt, Artificial Sequence
  Description of Artificial Sequence: Synthetic oligonucleotide
gugcucuacaccaguuagg

SEQ ID NO: 19335 - RNA, 19 nt, Artificial Sequence
  Description of Artificial Sequence: Synthetic oligonucleotide
cccucuaacacugaaacca

SEQ ID NO: 19336 - RNA, 19 nt, Artificial Sequence
  Description of Artificial Sequence: Synthetic oligonucleotide
acaagaccuguuaaacgcu

SEQ ID NO: 19337 - RNA, 19 nt, Artificial Sequence
  Description of Artificial Sequence: Synthetic oligonucleotide
uaccucuauucauauuauu

SEQ ID NO: 19338 - RNA, 19 nt, Artificial Sequence
  Description of Artificial Sequence: Synthetic oligonucleotide
ccuauggugauauggucuc

SEQ ID NO: 19339 - RNA, 19 nt, Artificial Sequence
  Description of Artificial Sequence: Synthetic oligonucleotide
  modified_base (5)..(5): a, c, u, g, unknown or other
auggnuuuccuaguucuuu

SEQ ID NO: 19340 - RNA, 19 nt, Artificial Sequence
  Description of Artificial Sequence: Synthetic oligonucleotide
uggcuuaguaaguguguua

SEQ ID NO: 19341 - RNA, 19 nt, Artificial Sequence
  Description of Artificial Sequence: Synthetic oligonucleotide
agaccaauuuaaaccauua

SEQ ID NO: 19342 - RNA, 19 nt, Artificial Sequence
  Description of Artificial Sequence: Synthetic oligonucleotide
ucucaccauuguagagaag

SEQ ID NO: 19343 - RNA, 19 nt, Artificial Sequence
  Description of Artificial Sequence: Synthetic oligonucleotide
cauagcuuucucaccuaca

SEQ ID NO: 19344 - RNA, 19 nt, Artificial Sequence
  Description of Artificial Sequence: Synthetic oligonucleotide
auuuuaggauggaaaggau

SEQ ID NO: 19345 - RNA, 19 nt, Artificial Sequence
  Description of Artificial Sequence: Synthetic oligonucleotide
uaccaugguuuauccuaug

SEQ ID NO: 19346 - RNA, 19 nt, Artificial Sequence
  Description of Artificial Sequence: Synthetic oligonucleotide
ccuguuaaccuguggggag

SEQ ID NO: 19347 - RNA, 19 nt, Artificial Sequence
  Description of Artificial Sequence: Synthetic oligonucleotide
uucgaaacuacagguuauu

SEQ ID NO: 19348 - RNA, 19 nt, Artificial Sequence
  Description of Artificial Sequence: Synthetic oligonucleotide
ggcggggaugugaaaaugg

SEQ ID NO: 19349 - RNA, 19 nt, Artificial Sequence
  Description of Artificial Sequence: Synthetic oligonucleotide
aguagcugauuuuccugua

SEQ ID NO: 19350 - RNA, 19 nt, Artificial Sequence
  Description of Artificial Sequence: Synthetic oligonucleotide
cucaaacaguaccauagcu

SEQ ID NO: 19351 - RNA, 19 nt, Artificial Sequence
  Description of Artificial Sequence: Synthetic oligonucleotide
gagggucauuuggucaucc

SEQ ID NO: 19352 - RNA, 19 nt, Artificial Sequence
  Description of Artificial Sequence: Synthetic oligonucleotide
ccuaucuuagagcaaacaa

SEQ ID NO: 19353 - RNA, 19 nt, Artificial Sequence
  Description of Artificial Sequence: Synthetic oligonucleotide
gguuuuaaccauauaacau

SEQ ID NO: 19354 - RNA, 19 nt, Artificial Sequence
  Description of Artificial Sequence: Synthetic oligonucleotide
gcaaaugccaugagaaaca

SEQ ID NO: 19355 - RNA, 19 nt, Artificial Sequence
  Description of Artificial Sequence: Synthetic oligonucleotide
aacaccgaucggccuggga

SEQ ID NO: 19356 - RNA, 19 nt, Artificial Sequence
  Description of Artificial Sequence: Synthetic oligonucleotide
guuuauccuauggugauau

SEQ ID NO: 19357 - RNA, 19 nt, Artificial Sequence
  Description of Artificial Sequence: Synthetic oligonucleotide
guaaagcugcaguagcccu

SEQ ID NO: 19358 - RNA, 19 nt, Artificial Sequence
  Description of Artificial Sequence: Synthetic oligonucleotide
ggagcuagacggaggagag

SEQ ID NO: 19359 - RNA, 19 nt, Artificial Sequence
  Description of Artificial Sequence: Synthetic oligonucleotide
ccuaaaauacccagaaugu

SEQ ID NO: 19360 - RNA, 19 nt, Artificial Sequence
  Description of Artificial Sequence: Synthetic oligonucleotide
  modified_base (16)..(16): a, c, u, g, unknown or other
cuuuucguacaauggnuuu

SEQ ID NO: 19361 - RNA, 19 nt, Artificial Sequence
  Description of Artificial Sequence: Synthetic oligonucleotide
aagaccuguuaaacgcuau

SEQ ID NO: 19362 - RNA, 19 nt, Artificial Sequence
  Description of Artificial Sequence: Synthetic oligonucleotide
ccucccuuuucguacaaug

SEQ ID NO: 19363 - RNA, 19 nt, Artificial Sequence
  Description of Artificial Sequence: Synthetic oligonucleotide
agccucuguuccuguuaac

SEQ ID NO: 19364 - RNA, 19 nt, Artificial Sequence
  Description of Artificial Sequence: Synthetic oligonucleotide
ggaauuaguuccccuguaa

SEQ ID NO: 19365 - RNA, 19 nt, Artificial Sequence
  Description of Artificial Sequence: Synthetic oligonucleotide
acccuguuacuagauggug

SEQ ID NO: 19366 - RNA, 19 nt, Artificial Sequence
  Description of Artificial Sequence: Synthetic oligonucleotide
ggugugguugacacacgcg

SEQ ID NO: 19367 - RNA, 19 nt, Artificial Sequence
  Description of Artificial Sequence: Synthetic oligonucleotide
accuacacucuaucagaau

SEQ ID NO: 19368 - RNA, 19 nt, Artificial Sequence
  Description of Artificial Sequence: Synthetic oligonucleotide
  modified_base (3)..(3): a, c, u, g, unknown or other
ggnuuuccuaguucuuuga

SEQ ID NO: 19369 - RNA, 19 nt, Artificial Sequence
  Description of Artificial Sequence: Synthetic oligonucleotide
ugguauugccuuugcccau

SEQ ID NO: 19370 - RNA, 19 nt, Artificial Sequence
  Description of Artificial Sequence: Synthetic oligonucleotide
aguacauaagagggagcaa

SEQ ID NO: 19371 - RNA, 19 nt, Artificial Sequence
  Description of Artificial Sequence: Synthetic oligonucleotide
gccucuguuccuguuaacc

SEQ ID NO: 19372 - RNA, 19 nt, Artificial Sequence
  Description of Artificial Sequence: Synthetic oligonucleotide
cauauugcugguaccucua

SEQ ID NO: 19373 - RNA, 19 nt, Artificial Sequence
  Description of Artificial Sequence: Synthetic oligonucleotide
gcucacuguacuagguagg

SEQ ID NO: 19374 - RNA, 19 nt, Artificial Sequence
  Description of Artificial Sequence: Synthetic oligonucleotide
auacagccauuuaucagaa

SEQ ID NO: 19375 - RNA, 19 nt, Artificial Sequence
  Description of Artificial Sequence: Synthetic oligonucleotide
guaguuaagcagguuauuu

SEQ ID NO: 19376 - RNA, 19 nt, Artificial Sequence
  Description of Artificial Sequence: Synthetic oligonucleotide
cauauaggauauccaucaa

SEQ ID NO: 19377 - RNA, 19 nt, Artificial Sequence
  Description of Artificial Sequence: Synthetic oligonucleotide
gcggggaugugaaaauggg

SEQ ID NO: 19378 - RNA, 19 nt, Artificial Sequence
  Description of Artificial Sequence: Synthetic oligonucleotide
caucuaucaacaggucuga

SEQ ID NO: 19379 - RNA, 19 nt, Artificial Sequence
  Description of Artificial Sequence: Synthetic oligonucleotide
cuucccagauuagugaaua

SEQ ID NO: 19380 - RNA, 19 nt, Artificial Sequence
  Description of Artificial Sequence: Synthetic oligonucleotide
gguagaagcaccaacccau

SEQ ID NO: 19381 - RNA, 19 nt, Artificial Sequence
  Description of Artificial Sequence: Synthetic oligonucleotide
  modified_base (7)..(7): a, c, u, g, unknown or other
caguugnuaaaccgacugu

SEQ ID NO: 19382 - RNA, 19 nt, Artificial Sequence
  Description of Artificial Sequence: Synthetic oligonucleotide
uacucacgccaugaacaga

SEQ ID NO: 19383 - RNA, 19 nt, Artificial Sequence
  Description of Artificial Sequence: Synthetic oligonucleotide
aacuaaccuugcacugaca

SEQ ID NO: 19384 - RNA, 19 nt, Artificial Sequence
  Description of Artificial Sequence: Synthetic oligonucleotide
cuguccuccagagguacuc

SEQ ID NO: 19385 - RNA, 19 nt, Artificial Sequence
  Description of Artificial Sequence: Synthetic oligonucleotide
aaggggaauuagguacaaa

SEQ ID NO: 19386 - RNA, 19 nt, Artificial Sequence
  Description of Artificial Sequence: Synthetic oligonucleotide
ggauagcucuccuuuccca

SEQ ID NO: 19387 - RNA, 19 nt, Artificial Sequence
  Description of Artificial Sequence: Synthetic oligonucleotide
ucccuaggcuuccugccuu

SEQ ID NO: 19388 - RNA, 19 nt, Artificial Sequence
  Description of Artificial Sequence: Synthetic oligonucleotide
acggcugcaaucacuugga

SEQ ID NO: 19389 - RNA, 19 nt, Artificial Sequence
  Description of Artificial Sequence: Synthetic oligonucleotide
caccuacacucuaucagaa

SEQ ID NO: 19390 - RNA, 19 nt, Artificial Sequence
  Description of Artificial Sequence: Synthetic oligonucleotide
guugggaauuaguuccccu

SEQ ID NO: 19391 - RNA, 19 nt, Artificial Sequence
  Description of Artificial Sequence: Synthetic oligonucleotide
gaauugguggaaugacauu

SEQ ID NO: 19392 - RNA, 19 nt, Artificial Sequence
  Description of Artificial Sequence: Synthetic oligonucleotide
gacggaggagagcuuacau

SEQ ID NO: 19393 - RNA, 19 nt, Artificial Sequence
  Description of Artificial Sequence: Synthetic oligonucleotide
uuacuagauggugccuaua

SEQ ID NO: 19394 - RNA, 19 nt, Artificial Sequence
  Description of Artificial Sequence: Synthetic oligonucleotide
cuagacggaggagagcuua

SEQ ID NO: 19395 - RNA, 19 nt, Artificial Sequence
  Description of Artificial Sequence: Synthetic oligonucleotide
agacggaggagagcuuaca

SEQ ID NO: 19396 - RNA, 19 nt, Artificial Sequence
  Description of Artificial Sequence: Synthetic oligonucleotide
gaaggggaauuagguacaa

SEQ ID NO: 19397 - RNA, 19 nt, Artificial Sequence
  Description of Artificial Sequence: Synthetic oligonucleotide
ccgacuguccaguucugac

SEQ ID NO: 19398 - RNA, 19 nt, Artificial Sequence
  Description of Artificial Sequence: Synthetic oligonucleotide
gguugacacacgcgguuuc

SEQ ID NO: 19399 - RNA, 19 nt, Artificial Sequence
  Description of Artificial Sequence: Synthetic oligonucleotide
uuccucccuuuucguacaa

SEQ ID NO: 19400 - RNA, 19 nt, Artificial Sequence
  Description of Artificial Sequence: Synthetic oligonucleotide
ggggaauuagguacaaacu

SEQ ID NO: 19401 - RNA, 19 nt, Artificial Sequence
  Description of Artificial Sequence: Synthetic oligonucleotide
aaccgacuguccaguucug

SEQ ID NO: 19402 - RNA, 19 nt, Artificial Sequence
  Description of Artificial Sequence: Synthetic oligonucleotide
cgcgguuucugacauucag

SEQ ID NO: 19403 - RNA, 19 nt, Artificial Sequence
  Description of Artificial Sequence: Synthetic oligonucleotide
gguaaucugcacaaccuau

SEQ ID NO: 19404 - RNA, 19 nt, Artificial Sequence
  Description of Artificial Sequence: Synthetic oligonucleotide
aggcuaccaugauccuuga

SEQ ID NO: 19405 - RNA, 19 nt, Artificial Sequence
  Description of Artificial Sequence: Synthetic oligonucleotide
gcuauggcacauguuggga

SEQ ID NO: 19406 - RNA, 19 nt, Artificial Sequence
  Description of Artificial Sequence: Synthetic oligonucleotide
  modified_base (9)..(9): a, c, u, g, unknown or other
gucaguugnuaaaccgacu

SEQ ID NO: 19407 - RNA, 19 nt, Artificial Sequence
  Description of Artificial Sequence: Synthetic oligonucleotide
cucacuguacuagguaggu

SEQ ID NO: 19408 - RNA, 19 nt, Artificial Sequence
  Description of Artificial Sequence: Synthetic oligonucleotide
gggcaaaugccaugagaaa

SEQ ID NO: 19409 - RNA, 19 nt, Artificial Sequence
  Description of Artificial Sequence: Synthetic oligonucleotide
cuauggugauauggucuca

SEQ ID NO: 19410 - RNA, 19 nt, Artificial Sequence
  Description of Artificial Sequence: Synthetic oligonucleotide
gcacaaccuaucuaauuau

SEQ ID NO: 19411 - RNA, 19 nt, Artificial Sequence
  Description of Artificial Sequence: Synthetic oligonucleotide
guugacacacgcgguuucu

SEQ ID NO: 19412 - RNA, 19 nt, Artificial Sequence
  Description of Artificial Sequence: Synthetic oligonucleotide
ccccauuauauagcauuug

SEQ ID NO: 19413 - RNA, 19 nt, Artificial Sequence
  Description of Artificial Sequence: Synthetic oligonucleotide
guuaaacgcuauggcacau

SEQ ID NO: 19414 - RNA, 19 nt, Artificial Sequence
  Description of Artificial Sequence: Synthetic oligonucleotide
ggggcuugguaagaucgga

SEQ ID NO: 19415 - RNA, 19 nt, Artificial Sequence
  Description of Artificial Sequence: Synthetic oligonucleotide
  modified_base (18)..(18): a, c, u, g, unknown or other
cccuuuucguacaauggnu

SEQ ID NO: 19416 - RNA, 19 nt, Artificial Sequence
  Description of Artificial Sequence: Synthetic oligonucleotide
acacgcgguuucugacauu

SEQ ID NO: 19417 - RNA, 19 nt, Artificial Sequence
  Description of Artificial Sequence: Synthetic oligonucleotide
acgcgguuucugacauuca

SEQ ID NO: 19418 - RNA, 19 nt, Artificial Sequence
  Description of Artificial Sequence: Synthetic oligonucleotide
gggccuuuuaguaguuacu

SEQ ID NO: 19419 - RNA, 19 nt, Artificial Sequence
  Description of Artificial Sequence: Synthetic oligonucleotide
gcgguuucugacauucagu

SEQ ID NO: 19420 - RNA, 19 nt, Artificial Sequence
  Description of Artificial Sequence: Synthetic oligonucleotide
guauugccuuugcccauuu

SEQ ID NO: 19421 - RNA, 19 nt, Artificial Sequence
  Description of Artificial Sequence: Synthetic oligonucleotide
ggagggucauuuggucauc

SEQ ID NO: 19422 - RNA, 19 nt, Artificial Sequence
  Description of Artificial Sequence: Synthetic oligonucleotide
ggcacauguugggaugugu

SEQ ID NO: 19423 - RNA, 19 nt, Artificial Sequence
  Description of Artificial Sequence: Synthetic oligonucleotide
ggaugcucucacauacuau

SEQ ID NO: 19424 - RNA, 19 nt, Artificial Sequence
  Description of Artificial Sequence: Synthetic oligonucleotide
guuuacccaguggcucacu

SEQ ID NO: 19425 - RNA, 19 nt, Artificial Sequence
  Description of Artificial Sequence: Synthetic oligonucleotide
cugacagaucaagcauaau

SEQ ID NO: 19426 - RNA, 19 nt, Artificial Sequence
  Description of Artificial Sequence: Synthetic oligonucleotide
gggcuugguaagaucggau

SEQ ID NO: 19427 - RNA, 19 nt, Artificial Sequence
  Description of Artificial Sequence: Synthetic oligonucleotide
gcuagacggaggagagcuu

SEQ ID NO: 19428 - RNA, 19 nt, Artificial Sequence
  Description of Artificial Sequence: Synthetic oligonucleotide
  modified_base (1)..(1): a, c, u, g, unknown or other
nuaaaccgacuguccaguu

SEQ ID NO: 19429 - RNA, 19 nt, Artificial Sequence
  Description of Artificial Sequence: Synthetic oligonucleotide
aauaguaaagaguaaggag

SEQ ID NO: 19430 - RNA, 19 nt, Artificial Sequence
  Description of Artificial Sequence: Synthetic oligonucleotide
ugauuuaugguaaucacag

SEQ ID NO: 19431 - RNA, 19 nt, Artificial Sequence
  Description of Artificial Sequence: Synthetic oligonucleotide
aaaauguuagacugcaggg

SEQ ID NO: 19432 - RNA, 19 nt, Artificial Sequence
  Description of Artificial Sequence: Synthetic oligonucleotide
aauagcaaggcaccaagac

SEQ ID NO: 19433 - RNA, 19 nt, Artificial Sequence
  Description of Artificial Sequence: Synthetic oligonucleotide
aaugacuugaaguugagaa

SEQ ID NO: 19434 - RNA, 19 nt, Artificial Sequence
  Description of Artificial Sequence: Synthetic oligonucleotide
aaacauucagcauccgugc

SEQ ID NO: 19435 - RNA, 19 nt, Artificial Sequence
  Description of Artificial Sequence: Synthetic oligonucleotide
aauacuuccaccagcgugc

SEQ ID NO: 19436 - RNA, 19 nt, Artificial Sequence
  Description of Artificial Sequence: Synthetic oligonucleotide
uuauucagaagauaaaggu

SEQ ID NO: 19437 - RNA, 19 nt, Artificial Sequence
  Description of Artificial Sequence: Synthetic oligonucleotide
ugauuaaagacacccaccc

SEQ ID NO: 19438 - RNA, 19 nt, Artificial Sequence
  Description of Artificial Sequence: Synthetic oligonucleotide
aaauguuagacugcagggc

SEQ ID NO: 19439 - RNA, 19 nt, Artificial Sequence
  Description of Artificial Sequence: Synthetic oligonucleotide
uucaauacgaccucuaggu

SEQ ID NO: 19440 - RNA, 19 nt, Artificial Sequence
  Description of Artificial Sequence: Synthetic oligonucleotide
caucuuuccaagcagacgg

SEQ ID NO: 19441 - RNA, 19 nt, Artificial Sequence
  Description of Artificial Sequence: Synthetic oligonucleotide
uauauacacacacacacaa

SEQ ID NO: 19442 - RNA, 19 nt, Artificial Sequence
  Description of Artificial Sequence: Synthetic oligonucleotide
agaaaaggcgccuugauga

SEQ ID NO: 19443 - RNA, 19 nt, Artificial Sequence
  Description of Artificial Sequence: Synthetic oligonucleotide
auagcaaggcaccaagacc

SEQ ID NO: 19444 - RNA, 19 nt, Artificial Sequence
  Description of Artificial Sequence: Synthetic oligonucleotide
uuacuuagcucacuaacag

SEQ ID NO: 19445 - RNA, 19 nt, Artificial Sequence
  Description of Artificial Sequence: Synthetic oligonucleotide
ugaaccuggcaccaaaagg

SEQ ID NO: 19446 - RNA, 19 nt, Artificial Sequence
  Description of Artificial Sequence: Synthetic oligonucleotide
uaaaacgugucucuugugc

SEQ ID NO: 19447 - RNA, 19 nt, Artificial Sequence
  Description of Artificial Sequence: Synthetic oligonucleotide
aacccuaucuaguaucagg

SEQ ID NO: 19448 - RNA, 19 nt, Artificial Sequence
  Description of Artificial Sequence: Synthetic oligonucleotide
aauccaaccagcccauuuc

SEQ ID NO: 19449 - RNA, 19 nt, Artificial Sequence
  Description of Artificial Sequence: Synthetic oligonucleotide
aaaauuacuaaagcgugug

SEQ ID NO: 19450 - RNA, 19 nt, Artificial Sequence
  Description of Artificial Sequence: Synthetic oligonucleotide
uuacaauacagccccacag

SEQ ID NO: 19451 - RNA, 19 nt, Artificial Sequence
  Description of Artificial Sequence: Synthetic oligonucleotide
aguacuacaaacucccuug

SEQ ID NO: 19452 - RNA, 19 nt, Artificial Sequence
  Description of Artificial Sequence: Synthetic oligonucleotide
uucgguuaauaguucaugg

SEQ ID NO: 19453 - RNA, 19 nt, Artificial Sequence
  Description of Artificial Sequence: Synthetic oligonucleotide
uauacacacacacacaaau

SEQ ID NO: 19454 - RNA, 19 nt, Artificial Sequence
  Description of Artificial Sequence: Synthetic oligonucleotide
ucuaguaucaggaaugguu

SEQ ID NO: 19455 - RNA, 19 nt, Artificial Sequence
  Description of Artificial Sequence: Synthetic oligonucleotide
ggcacuuugacucugaacc

SEQ ID NO: 19456 - RNA, 19 nt, Artificial Sequence
  Description of Artificial Sequence: Synthetic oligonucleotide
uuuaucagaucguucaaca

SEQ ID NO: 19457 - RNA, 19 nt, Artificial Sequence
  Description of Artificial Sequence: Synthetic oligonucleotide
cacaauauaagucaggaga

SEQ ID NO: 19458 - RNA, 19 nt, Artificial Sequence
  Description of Artificial Sequence: Synthetic oligonucleotide
gaaugcaucugagagaaag

SEQ ID NO: 19459 - RNA, 19 nt, Artificial Sequence
  Description of Artificial Sequence: Synthetic oligonucleotide
uuuaugguaaucacagcac

SEQ ID NO: 19460 - RNA, 19 nt, Artificial Sequence
  Description of Artificial Sequence: Synthetic oligonucleotide
aucuguaugauccucgucu

SEQ ID NO: 19461 - RNA, 19 nt, Artificial Sequence
  Description of Artificial Sequence: Synthetic oligonucleotide
ugaagaguagcgcagagua

SEQ ID NO: 19462 - RNA, 19 nt, Artificial Sequence
  Description of Artificial Sequence: Synthetic oligonucleotide
auaguaaagaguaaggaga

SEQ ID NO: 19463 - RNA, 19 nt, Artificial Sequence
  Description of Artificial Sequence: Synthetic oligonucleotide
caaacauucagcauccgug

SEQ ID NO: 19464 - RNA, 19 nt, Artificial Sequence
  Description of Artificial Sequence: Synthetic oligonucleotide
aguucauggaucauuggcc

SEQ ID NO: 19465 - RNA, 19 nt, Artificial Sequence
  Description of Artificial Sequence: Synthetic oligonucleotide
agaguaaggagacugcuug

SEQ ID NO: 19466 - RNA, 19 nt, Artificial Sequence
  Description of Artificial Sequence: Synthetic oligonucleotide
agcauuuugaguucaguug

SEQ ID NO: 19467 - RNA, 19 nt, Artificial Sequence
  Description of Artificial Sequence: Synthetic oligonucleotide
uucccuagaauaauuaaaa

SEQ ID NO: 19468 - RNA, 19 nt, Artificial Sequence
  Description of Artificial Sequence: Synthetic oligonucleotide
cagauugaugcuaucaaag

SEQ ID NO: 19469 - RNA, 19 nt, Artificial Sequence
  Description of Artificial Sequence: Synthetic oligonucleotide
guuaauaguucauggauca

SEQ ID NO: 19470 - RNA, 19 nt, Artificial Sequence
  Description of Artificial Sequence: Synthetic oligonucleotide
aaaacgugucucuugugcu

SEQ ID NO: 19471 - RNA, 19 nt, Artificial Sequence
  Description of Artificial Sequence: Synthetic oligonucleotide
uaucugauacccuguaaag

SEQ ID NO: 19472 - RNA, 19 nt, Artificial Sequence
  Description of Artificial Sequence: Synthetic oligonucleotide
accaauaccgcauugcagu

SEQ ID NO: 19473 - RNA, 19 nt, Artificial Sequence
  Description of Artificial Sequence: Synthetic oligonucleotide
guaaagaguaaggagacug

SEQ ID NO: 19474 - RNA, 19 nt, Artificial Sequence
  Description of Artificial Sequence: Synthetic oligonucleotide
uaguaaagaguaaggagac

SEQ ID NO: 19475 - RNA, 19 nt, Artificial Sequence
  Description of Artificial Sequence: Synthetic oligonucleotide
auacugagcaagucucucc

SEQ ID NO: 19476 - RNA, 19 nt, Artificial Sequence
  Description of Artificial Sequence: Synthetic oligonucleotide
uuaguguauguguauacgu

SEQ ID NO: 19477 - RNA, 19 nt, Artificial Sequence
  Description of Artificial Sequence: Synthetic oligonucleotide
auuuguaacaacuguacuu

SEQ ID NO: 19478 - RNA, 19 nt, Artificial Sequence
  Description of Artificial Sequence: Synthetic oligonucleotide
uacaauacagccccacagc

SEQ ID NO: 19479 - RNA, 19 nt, Artificial Sequence
  Description of Artificial Sequence: Synthetic oligonucleotide
cacaauaucugauacccug

SEQ ID NO: 19480 - RNA, 19 nt, Artificial Sequence
  Description of Artificial Sequence: Synthetic oligonucleotide
aucagaucggcacuuugac

SEQ ID NO: 19481 - RNA, 19 nt, Artificial Sequence
  Description of Artificial Sequence: Synthetic oligonucleotide
ugaacuggauucuaucuga

SEQ ID NO: 19482 - RNA, 19 nt, Artificial Sequence
  Description of Artificial Sequence: Synthetic oligonucleotide
uccaucuguaugauccucg

SEQ ID NO: 19483 - RNA, 19 nt, Artificial Sequence
  Description of Artificial Sequence: Synthetic oligonucleotide
acaauggaaaugaaguggg

SEQ ID NO: 19484 - RNA, 19 nt, Artificial Sequence
  Description of Artificial Sequence: Synthetic oligonucleotide
ucagacuacacacaucuua

SEQ ID NO: 19485 - RNA, 19 nt, Artificial Sequence
  Description of Artificial Sequence: Synthetic oligonucleotide
uacacacacacacaaauuu

SEQ ID NO: 19486 - RNA, 19 nt, Artificial Sequence
  Description of Artificial Sequence: Synthetic oligonucleotide
ugauacccuguaaagagcu

SEQ ID NO: 19487 - RNA, 19 nt, Artificial Sequence
  Description of Artificial Sequence: Synthetic oligonucleotide
aguaaguaaauccauuguu

SEQ ID NO: 19488 - RNA, 19 nt, Artificial Sequence
  Description of Artificial Sequence: Synthetic oligonucleotide
auaagcagugcagaauagc

SEQ ID NO: 19489 - RNA, 19 nt, Artificial Sequence
  Description of Artificial Sequence: Synthetic oligonucleotide
uaacaggucuuuaaugcca

SEQ ID NO: 19490 - RNA, 19 nt, Artificial Sequence
  Description of Artificial Sequence: Synthetic oligonucleotide
aaaccuaaagagcaucuuu

SEQ ID NO: 19491 - RNA, 19 nt, Artificial Sequence
  Description of Artificial Sequence: Synthetic oligonucleotide
uguaguuaguguaugugua

SEQ ID NO: 19492 - RNA, 19 nt, Artificial Sequence
  Description of Artificial Sequence: Synthetic oligonucleotide
auaucugauacccuguaaa

SEQ ID NO: 19493 - RNA, 19 nt, Artificial Sequence
  Description of Artificial Sequence: Synthetic oligonucleotide
uauacaccgggucacagau

SEQ ID NO: 19494 - RNA, 19 nt, Artificial Sequence
  Description of Artificial Sequence: Synthetic oligonucleotide
agcagcauauccaaacgcc

SEQ ID NO: 19495 - RNA, 19 nt, Artificial Sequence
  Description of Artificial Sequence: Synthetic oligonucleotide
ccauuagagacucauaugc

SEQ ID NO: 19496 - RNA, 19 nt, Artificial Sequence
  Description of Artificial Sequence: Synthetic oligonucleotide
auaaagcggacuuuauuca

SEQ ID NO: 19497 - RNA, 19 nt, Artificial Sequence
  Description of Artificial Sequence: Synthetic oligonucleotide
gaaccauaguaucagaaaa

SEQ ID NO: 19498 - RNA, 19 nt, Artificial Sequence
  Description of Artificial Sequence: Synthetic oligonucleotide
aggaaguacuacaaacucc

SEQ ID NO: 19499 - RNA, 19 nt, Artificial Sequence
  Description of Artificial Sequence: Synthetic oligonucleotide
accaauacccucuacuaca

SEQ ID NO: 19500 - RNA, 19 nt, Artificial Sequence
  Description of Artificial Sequence: Synthetic oligonucleotide
aaauuacuaaagcguguga

SEQ ID NO: 19501 - RNA, 19 nt, Artificial Sequence
  Description of Artificial Sequence: Synthetic oligonucleotide
ucguucaacauuaaauuuu

SEQ ID NO: 19502 - RNA, 19 nt, Artificial Sequence
  Description of Artificial Sequence: Synthetic oligonucleotide
ucaaucagacauugcagca

SEQ ID NO: 19503 - RNA, 19 nt, Artificial Sequence
  Description of Artificial Sequence: Synthetic oligonucleotide
uuagucuucgaucuccguc

SEQ ID NO: 19504 - RNA, 19 nt, Artificial Sequence
  Description of Artificial Sequence: Synthetic oligonucleotide
uguaauuggugcaggcagc

SEQ ID NO: 19505 - RNA, 19 nt, Artificial Sequence
  Description of Artificial Sequence: Synthetic oligonucleotide
ccuuaaacugauuaaagac

SEQ ID NO: 19506 - RNA, 19 nt, Artificial Sequence
  Description of Artificial Sequence: Synthetic oligonucleotide
uugaugcuaucaaagcuga

SEQ ID NO: 19507 - RNA, 19 nt, Artificial Sequence
  Description of Artificial Sequence: Synthetic oligonucleotide
ugguaccagaucaagcuug

SEQ ID NO: 19508 - RNA, 19 nt, Artificial Sequence
  Description of Artificial Sequence: Synthetic oligonucleotide
uuauuuuaucagaucguuc

SEQ ID NO: 19509 - RNA, 19 nt, Artificial Sequence
  Description of Artificial Sequence: Synthetic oligonucleotide
aauguaauuggugcaggca

SEQ ID NO: 19510 - RNA, 19 nt, Artificial Sequence
  Description of Artificial Sequence: Synthetic oligonucleotide
ucuacucuggguuguacca

SEQ ID NO: 19511 - RNA, 19 nt, Artificial Sequence
  Description of Artificial Sequence: Synthetic oligonucleotide
ucggcaccggccaagacag

SEQ ID NO: 19512 - RNA, 19 nt, Artificial Sequence
  Description of Artificial Sequence: Synthetic oligonucleotide
guuaguguauguguauacg

SEQ ID NO: 19513 - RNA, 19 nt, Artificial Sequence
  Description of Artificial Sequence: Synthetic oligonucleotide
aauaccgcauugcagucaa

SEQ ID NO: 19514 - RNA, 19 nt, Artificial Sequence
  Description of Artificial Sequence: Synthetic oligonucleotide
acgguaacuacauucuuga

SEQ ID NO: 19515 - RNA, 19 nt, Artificial Sequence
  Description of Artificial Sequence: Synthetic oligonucleotide
aggcacaauaucugauacc

SEQ ID NO: 19516 - RNA, 19 nt, Artificial Sequence
  Description of Artificial Sequence: Synthetic oligonucleotide
acagacaauagguggccgg

SEQ ID NO: 19517 - RNA, 19 nt, Artificial Sequence
  Description of Artificial Sequence: Synthetic oligonucleotide
aguuguggagaaaaccuac

SEQ ID NO: 19518 - RNA, 19 nt, Artificial Sequence
  Description of Artificial Sequence: Synthetic oligonucleotide
auacccucuacuacaaugg

SEQ ID NO: 19519 - RNA, 19 nt, Artificial Sequence
  Description of Artificial Sequence: Synthetic oligonucleotide
cugcagaguauucaauacg

SEQ ID NO: 19520 - RNA, 19 nt, Artificial Sequence
  Description of Artificial Sequence: Synthetic oligonucleotide
guguuuucaagccucacuc

SEQ ID NO: 19521 - RNA, 19 nt, Artificial Sequence
  Description of Artificial Sequence: Synthetic oligonucleotide
ucgguuaauaguucaugga

SEQ ID NO: 19522 - RNA, 19 nt, Artificial Sequence
  Description of Artificial Sequence: Synthetic oligonucleotide
uguggauaccgccucacuc

SEQ ID NO: 19523 - RNA, 19 nt, Artificial Sequence
  Description of Artificial Sequence: Synthetic oligonucleotide
gcauuuugaguucaguugc

SEQ ID NO: 19524 - RNA, 19 nt, Artificial Sequence
  Description of Artificial Sequence: Synthetic oligonucleotide
agcuacuacagaugcugcg

SEQ ID NO: 19525 - RNA, 19 nt, Artificial Sequence
  Description of Artificial Sequence: Synthetic oligonucleotide
caaugguaccagaucaagc

SEQ ID NO: 19526 - RNA, 19 nt, Artificial Sequence
  Description of Artificial Sequence: Synthetic oligonucleotide
ggcacaauaucugauaccc

SEQ ID NO: 19527 - RNA, 19 nt, Artificial Sequence
  Description of Artificial Sequence: Synthetic oligonucleotide
uguaugauccucgucucca

SEQ ID NO: 19528 - RNA, 19 nt, Artificial Sequence
  Description of Artificial Sequence: Synthetic oligonucleotide
acuaacagcacugcuguug

SEQ ID NO: 19529 - RNA, 19 nt, Artificial Sequence
  Description of Artificial Sequence: Synthetic oligonucleotide
acacgcuacaacuccaucu

SEQ ID NO: 19530 - RNA, 19 nt, Artificial Sequence
  Description of Artificial Sequence: Synthetic oligonucleotide
uacuuagcucacuaacagc

SEQ ID NO: 19531 - RNA, 19 nt, Artificial Sequence
  Description of Artificial Sequence: Synthetic oligonucleotide
cguauauacacacacacac

SEQ ID NO: 19532 - RNA, 19 nt, Artificial Sequence
  Description of Artificial Sequence: Synthetic oligonucleotide
uagcucacuaacagcacug

SEQ ID NO: 19533 - RNA, 19 nt, Artificial Sequence
  Description of Artificial Sequence: Synthetic oligonucleotide
cauuacauccggguguacg

SEQ ID NO: 19534 - RNA, 19 nt, Artificial Sequence
  Description of Artificial Sequence: Synthetic oligonucleotide
aauuacagauugaugcuau

SEQ ID NO: 19535 - RNA, 19 nt, Artificial Sequence
  Description of Artificial Sequence: Synthetic oligonucleotide
caauguaauuggugcaggc

SEQ ID NO: 19536 - RNA, 19 nt, Artificial Sequence
  Description of Artificial Sequence: Synthetic oligonucleotide
cuacagaugcugcguaugg

SEQ ID NO: 19537 - RNA, 19 nt, Artificial Sequence
  Description of Artificial Sequence: Synthetic oligonucleotide
ugucucgcuaagcagccca

SEQ ID NO: 19538 - RNA, 19 nt, Artificial Sequence
  Description of Artificial Sequence: Synthetic oligonucleotide
cacaauggagccucucucc

SEQ ID NO: 19539 - RNA, 19 nt, Artificial Sequence
  Description of Artificial Sequence: Synthetic oligonucleotide
uguuuucaagccucacuca

SEQ ID NO: 19540 - RNA, 19 nt, Artificial Sequence
  Description of Artificial Sequence: Synthetic oligonucleotide
gaucguucaacauuaaauu

SEQ ID NO: 19541 - RNA, 19 nt, Artificial Sequence
  Description of Artificial Sequence: Synthetic oligonucleotide
agaccaauaccgcauugca

SEQ ID NO: 19542 - RNA, 19 nt, Artificial Sequence
  Description of Artificial Sequence: Synthetic oligonucleotide
uuuauacaccgggucacag

SEQ ID NO: 19543 - RNA, 19 nt, Artificial Sequence
  Description of Artificial Sequence: Synthetic oligonucleotide
aacgggcuuagacagggaa

SEQ ID NO: 19544 - RNA, 19 nt, Artificial Sequence
  Description of Artificial Sequence: Synthetic oligonucleotide
gauaugggacuccaucuga

SEQ ID NO: 19545 - RNA, 19 nt, Artificial Sequence
  Description of Artificial Sequence: Synthetic oligonucleotide
cauuuugaguucaguugcc

SEQ ID NO: 19546 - RNA, 19 nt, Artificial Sequence
  Description of Artificial Sequence: Synthetic oligonucleotide
gauuacaguugccucugac

SEQ ID NO: 19547 - RNA, 19 nt, Artificial Sequence
  Description of Artificial Sequence: Synthetic oligonucleotide
aguuguaguuaguguaugu

SEQ ID NO: 19548 - RNA, 19 nt, Artificial Sequence
  Description of Artificial Sequence: Synthetic oligonucleotide
aucguucaacauuaaauuu

SEQ ID NO: 19549 - RNA, 19 nt, Artificial Sequence
  Description of Artificial Sequence: Synthetic oligonucleotide
aagcggacuuuauucagaa

SEQ ID NO: 19550 - RNA, 19 nt, Artificial Sequence
  Description of Artificial Sequence: Synthetic oligonucleotide
uuauacaccgggucacaga

SEQ ID NO: 19551 - RNA, 19 nt, Artificial Sequence
  Description of Artificial Sequence: Synthetic oligonucleotide
cacaagucuccaacuaagc

SEQ ID NO: 19552 - RNA, 19 nt, Artificial Sequence
  Description of Artificial Sequence: Synthetic oligonucleotide
uuaucagaucguucaacau

SEQ ID NO: 19553 - RNA, 19 nt, Artificial Sequence
  Description of Artificial Sequence: Synthetic oligonucleotide
cugagagaaagcuuuagua

SEQ ID NO: 19554 - RNA, 19 nt, Artificial Sequence
  Description of Artificial Sequence: Synthetic oligonucleotide
ggacgauuccuguauaagc

SEQ ID NO: 19555 - RNA, 19 nt, Artificial Sequence
  Description of Artificial Sequence: Synthetic oligonucleotide
uggacgauuccuguauaag

SEQ ID NO: 19556 - RNA, 19 nt, Artificial Sequence
  Description of Artificial Sequence: Synthetic oligonucleotide
aguuuaugaaaugcaacau

SEQ ID NO: 19557 - RNA, 19 nt, Artificial Sequence
  Description of Artificial Sequence: Synthetic oligonucleotide
ucguucagauaauccacca

SEQ ID NO: 19558 - RNA, 19 nt, Artificial Sequence
  Description of Artificial Sequence: Synthetic oligonucleotide
gauuaaagacacccaccca

SEQ ID NO: 19559 - RNA, 19 nt, Artificial Sequence
  Description of Artificial Sequence: Synthetic oligonucleotide
uccggaguacauucugaag

SEQ ID NO: 19560 - RNA, 19 nt, Artificial Sequence
  Description of Artificial Sequence: Synthetic oligonucleotide
cacgcuacaacuccaucug

SEQ ID NO: 19561 - RNA, 19 nt, Artificial Sequence
  Description of Artificial Sequence: Synthetic oligonucleotide
uccuaguuacugcuuggcu

SEQ ID NO: 19562 - RNA, 19 nt, Artificial Sequence
  Description of Artificial Sequence: Synthetic oligonucleotide
gcuuacuuagcucacuaac

SEQ ID NO: 19563 - RNA, 19 nt, Artificial Sequence
  Description of Artificial Sequence: Synthetic oligonucleotide
augauccucgucuccagca

SEQ ID NO: 19564 - RNA, 19 nt, Artificial Sequence
  Description of Artificial Sequence: Synthetic oligonucleotide
gugguaucaguuuugguua

SEQ ID NO: 19565 - RNA, 19 nt, Artificial Sequence
  Description of Artificial Sequence: Synthetic oligonucleotide
aaagcggacuuuauucaga

SEQ ID NO: 19566 - RNA, 19 nt, Artificial Sequence
  Description of Artificial Sequence: Synthetic oligonucleotide
uucaauccuuggacgauuc

SEQ ID NO: 19567 - RNA, 19 nt, Artificial Sequence
  Description of Artificial Sequence: Synthetic oligonucleotide
aauacgaccucuagguauu

SEQ ID NO: 19568 - RNA, 19 nt, Artificial Sequence
  Description of Artificial Sequence: Synthetic oligonucleotide
gggagcagcucgcagaucc

SEQ ID NO: 19569 - RNA, 19 nt, Artificial Sequence
  Description of Artificial Sequence: Synthetic oligonucleotide
ucagaucggcacuuugacu

SEQ ID NO: 19570 - RNA, 19 nt, Artificial Sequence
  Description of Artificial Sequence: Synthetic oligonucleotide
cucuacuacaauggaaaug

SEQ ID NO: 19571 - RNA, 19 nt, Artificial Sequence
  Description of Artificial Sequence: Synthetic oligonucleotide
aaaggcgccuugaugaaaa

SEQ ID NO: 19572 - RNA, 19 nt, Artificial Sequence
  Description of Artificial Sequence: Synthetic oligonucleotide
accgcauugcagucaauca

SEQ ID NO: 19573 - RNA, 19 nt, Artificial Sequence
  Description of Artificial Sequence: Synthetic oligonucleotide
cauuagagacucauaugca

SEQ ID NO: 19574 - RNA, 19 nt, Artificial Sequence
  Description of Artificial Sequence: Synthetic oligonucleotide
ugcggguaacaauccuugg

SEQ ID NO: 19575 - RNA, 19 nt, Artificial Sequence
  Description of Artificial Sequence: Synthetic oligonucleotide
uacuacaaacucccuuggu

SEQ ID NO: 19576 - RNA, 19 nt, Artificial Sequence
  Description of Artificial Sequence: Synthetic oligonucleotide
aguauucaauacgaccucu

SEQ ID NO: 19577 - RNA, 19 nt, Artificial Sequence
  Description of Artificial Sequence: Synthetic oligonucleotide
cuuagcucacuaacagcac

SEQ ID NO: 19578 - RNA, 19 nt, Artificial Sequence
  Description of Artificial Sequence: Synthetic oligonucleotide
ucauuggccuagcuucuac

SEQ ID NO: 19579 - RNA, 19 nt, Artificial Sequence
  Description of Artificial Sequence: Synthetic oligonucleotide
cuguggacauucucauucc

SEQ ID NO: 19580 - RNA, 19 nt, Artificial Sequence
  Description of Artificial Sequence: Synthetic oligonucleotide
gaccaauaccgcauugcag

SEQ ID NO: 19581 - RNA, 19 nt, Artificial Sequence
  Description of Artificial Sequence: Synthetic oligonucleotide
uccguccuucgguuaauag

SEQ ID NO: 19582 - RNA, 19 nt, Artificial Sequence
  Description of Artificial Sequence: Synthetic oligonucleotide
ugaccauucgucaguguuu

SEQ ID NO: 19583 - RNA, 19 nt, Artificial Sequence
  Description of Artificial Sequence: Synthetic oligonucleotide
cuaguucuagccuccccug

SEQ ID NO: 19584 - RNA, 19 nt, Artificial Sequence
  Description of Artificial Sequence: Synthetic oligonucleotide
uugaggaauucaccaccca

SEQ ID NO: 19585 - RNA, 19 nt, Artificial Sequence
  Description of Artificial Sequence: Synthetic oligonucleotide
ucaauacgaccucuaggua

SEQ ID NO: 19586 - RNA, 19 nt, Artificial Sequence
  Description of Artificial Sequence: Synthetic oligonucleotide
acacacacacacaaauuug

SEQ ID NO: 19587 - RNA, 19 nt, Artificial Sequence
  Description of Artificial Sequence: Synthetic oligonucleotide
uuggccuagcuucuacuaa

SEQ ID NO: 19588 - RNA, 19 nt, Artificial Sequence
  Description of Artificial Sequence: Synthetic oligonucleotide
aguaaggagacugcuuggu

SEQ ID NO: 19589 - RNA, 19 nt, Artificial Sequence
  Description of Artificial Sequence: Synthetic oligonucleotide
uacccucuacuacaaugga

SEQ ID NO: 19590 - RNA, 19 nt, Artificial Sequence
  Description of Artificial Sequence: Synthetic oligonucleotide
ucgcuaagcagcccacaca

SEQ ID NO: 19591 - RNA, 19 nt, Artificial Sequence
  Description of Artificial Sequence: Synthetic oligonucleotide
aacacacgcaagguuuugu

SEQ ID NO: 19592 - RNA, 19 nt, Artificial Sequence
  Description of Artificial Sequence: Synthetic oligonucleotide
uaccaagugcaacgguaca

SEQ ID NO: 19593 - RNA, 19 nt, Artificial Sequence
  Description of Artificial Sequence: Synthetic oligonucleotide
gacgauuccuguauaagcu

SEQ ID NO: 19594 - RNA, 19 nt, Artificial Sequence
  Description of Artificial Sequence: Synthetic oligonucleotide
agagaccaauaccgcauug

SEQ ID NO: 19595 - RNA, 19 nt, Artificial Sequence
  Description of Artificial Sequence: Synthetic oligonucleotide
uggauaccgccucacucac

SEQ ID NO: 19596 - RNA, 19 nt, Artificial Sequence
  Description of Artificial Sequence: Synthetic oligonucleotide
acccuaucuaguaucagga

SEQ ID NO: 19597 - RNA, 19 nt, Artificial Sequence
  Description of Artificial Sequence: Synthetic oligonucleotide
uucgucaguguuuucccua

SEQ ID NO: 19598 - RNA, 19 nt, Artificial Sequence
  Description of Artificial Sequence: Synthetic oligonucleotide
guaugauccucgucuccag

SEQ ID NO: 19599 - RNA, 19 nt, Artificial Sequence
  Description of Artificial Sequence: Synthetic oligonucleotide
aaacacacgcaagguuuug

SEQ ID NO: 19600 - RNA, 19 nt, Artificial Sequence
  Description of Artificial Sequence: Synthetic oligonucleotide
auccggguguacguuuucc

SEQ ID NO: 19601 - RNA, 19 nt, Artificial Sequence
  Description of Artificial Sequence: Synthetic oligonucleotide
auuggccuagcuucuacua

SEQ ID NO: 19602 - RNA, 19 nt, Artificial Sequence
  Description of Artificial Sequence: Synthetic oligonucleotide
aaggcgccuugaugaaaag

SEQ ID NO: 19603 - RNA, 19 nt, Artificial Sequence
  Description of Artificial Sequence: Synthetic oligonucleotide
aggauuacaguugccucug

SEQ ID NO: 19604 - RNA, 19 nt, Artificial Sequence
  Description of Artificial Sequence: Synthetic oligonucleotide
ccuaguuacugcuuggcuc

SEQ ID NO: 19605 - RNA, 19 nt, Artificial Sequence
  Description of Artificial Sequence: Synthetic oligonucleotide
uggccuagcuucuacuaau

SEQ ID NO: 19606 - RNA, 19 nt, Artificial Sequence
  Description of Artificial Sequence: Synthetic oligonucleotide
cuuugacucugaaccuggc

SEQ ID NO: 19607 - RNA, 19 nt, Artificial Sequence
  Description of Artificial Sequence: Synthetic oligonucleotide
cuaagcccugccccaaccc

SEQ ID NO: 19608 - RNA, 19 nt, Artificial Sequence
  Description of Artificial Sequence: Synthetic oligonucleotide
guauauacacacacacaca

SEQ ID NO: 19609 - RNA, 19 nt, Artificial Sequence
  Description of Artificial Sequence: Synthetic oligonucleotide
agggaagauaauucugauu

SEQ ID NO: 19610 - RNA, 19 nt, Artificial Sequence
  Description of Artificial Sequence: Synthetic oligonucleotide
uaccgcauugcagucaauc

SEQ ID NO: 19611 - RNA, 19 nt, Artificial Sequence
  Description of Artificial Sequence: Synthetic oligonucleotide
ugcuuacuuagcucacuaa

SEQ ID NO: 19612 - RNA, 19 nt, Artificial Sequence
  Description of Artificial Sequence: Synthetic oligonucleotide
ugguucucgguguacuuua

SEQ ID NO: 19613 - RNA, 19 nt, Artificial Sequence
  Description of Artificial Sequence: Synthetic oligonucleotide
acguagcaagggucuuugc

SEQ ID NO: 19614 - RNA, 19 nt, Artificial Sequence
  Description of Artificial Sequence: Synthetic oligonucleotide
cucgcuaagcagcccacac

SEQ ID NO: 19615 - RNA, 19 nt, Artificial Sequence
  Description of Artificial Sequence: Synthetic oligonucleotide
guagcugaagguaacuaaa

SEQ ID NO: 19616 - RNA, 19 nt, Artificial Sequence
  Description of Artificial Sequence: Synthetic oligonucleotide
aacaggucuuuaaugccau

SEQ ID NO: 19617 - RNA, 19 nt, Artificial Sequence
  Description of Artificial Sequence: Synthetic oligonucleotide
acacuccucacuuccgggu

SEQ ID NO: 19618 - RNA, 19 nt, Artificial Sequence
  Description of Artificial Sequence: Synthetic oligonucleotide
gcacauguacaguaccaag

SEQ ID NO: 19619 - RNA, 19 nt, Artificial Sequence
  Description of Artificial Sequence: Synthetic oligonucleotide
guaccaagugcaacgguac

SEQ ID NO: 19620 - RNA, 19 nt, Artificial Sequence
  Description of Artificial Sequence: Synthetic oligonucleotide
ugccucugacagcuaaaac

SEQ ID NO: 19621 - RNA, 19 nt, Artificial Sequence
  Description of Artificial Sequence: Synthetic oligonucleotide
guucauggaucauuggccu

SEQ ID NO: 19622 - RNA, 19 nt, Artificial Sequence
  Description of Artificial Sequence: Synthetic oligonucleotide
cagggcaauguuugacacc

SEQ ID NO: 19623 - RNA, 19 nt, Artificial Sequence
  Description of Artificial Sequence: Synthetic oligonucleotide
aguaaagaguaaggagacu

SEQ ID NO: 19624 - RNA, 19 nt, Artificial Sequence
  Description of Artificial Sequence: Synthetic oligonucleotide
uguugucggcuguggcagg

SEQ ID NO: 19625 - RNA, 19 nt, Artificial Sequence
  Description of Artificial Sequence: Synthetic oligonucleotide
gaaaaggcgccuugaugaa

SEQ ID NO: 19626 - RNA, 19 nt, Artificial Sequence
  Description of Artificial Sequence: Synthetic oligonucleotide
acgccagcaaaucuccuaa

SEQ ID NO: 19627 - RNA, 19 nt, Artificial Sequence
  Description of Artificial Sequence: Synthetic oligonucleotide
cacuuugacucugaaccug

SEQ ID NO: 19628 - RNA, 19 nt, Artificial Sequence
  Description of Artificial Sequence: Synthetic oligonucleotide
uuaauaguucauggaucau

SEQ ID NO: 19629 - RNA, 19 nt, Artificial Sequence
  Description of Artificial Sequence: Synthetic oligonucleotide
agaucggcacuuugacucu

SEQ ID NO: 19630 - RNA, 19 nt, Artificial Sequence
  Description of Artificial Sequence: Synthetic oligonucleotide
acgauuccuguauaagcuu

SEQ ID NO: 19631 - RNA, 19 nt, Artificial Sequence
  Description of Artificial Sequence: Synthetic oligonucleotide
auccuuggacgauuccugu

SEQ ID NO: 19632 - RNA, 19 nt, Artificial Sequence
  Description of Artificial Sequence: Synthetic oligonucleotide
aaaaggcgccuugaugaaa

SEQ ID NO: 19633 - RNA, 19 nt, Artificial Sequence
  Description of Artificial Sequence: Synthetic oligonucleotide
agcggacuuuauucagaag

SEQ ID NO: 19634 - RNA, 19 nt, Artificial Sequence
  Description of Artificial Sequence: Synthetic oligonucleotide
caauacgaccucuagguau

SEQ ID NO: 19635 - RNA, 19 nt, Artificial Sequence
  Description of Artificial Sequence: Synthetic oligonucleotide
cacacacacacaaauuugu

SEQ ID NO: 19636 - RNA, 19 nt, Artificial Sequence
  Description of Artificial Sequence: Synthetic oligonucleotide
gguaccagaucaagcuugg

SEQ ID NO: 19637 - RNA, 19 nt, Artificial Sequence
  Description of Artificial Sequence: Synthetic oligonucleotide
agcgugcuaacugccauca

SEQ ID NO: 19638 - RNA, 19 nt, Artificial Sequence
  Description of Artificial Sequence: Synthetic oligonucleotide
gcggguaacaauccuuggc

SEQ ID NO: 19639 - RNA, 19 nt, Artificial Sequence
  Description of Artificial Sequence: Synthetic oligonucleotide
cacgcaagguuuuguuuuc

SEQ ID NO: 19640 - RNA, 19 nt, Artificial Sequence
  Description of Artificial Sequence: Synthetic oligonucleotide
gguuguaccagcauuacau

SEQ ID NO: 19641 - RNA, 19 nt, Artificial Sequence
  Description of Artificial Sequence: Synthetic oligonucleotide
caucagcgacaucugcagc

SEQ ID NO: 19642 - RNA, 19 nt, Artificial Sequence
  Description of Artificial Sequence: Synthetic oligonucleotide
uugccucugacagcuaaaa

SEQ ID NO: 19643 - RNA, 19 nt, Artificial Sequence
  Description of Artificial Sequence: Synthetic oligonucleotide
ccggaguacauucugaaga

SEQ ID NO: 19644 - RNA, 19 nt, Artificial Sequence
  Description of Artificial Sequence: Synthetic oligonucleotide
cuacucuggguuguaccag

SEQ ID NO: 19645 - RNA, 19 nt, Artificial Sequence
  Description of Artificial Sequence: Synthetic oligonucleotide
gcaagagaccaauaccgca

SEQ ID NO: 19646 - RNA, 19 nt, Artificial Sequence
  Description of Artificial Sequence: Synthetic oligonucleotide
acgggcacauguacaguac

SEQ ID NO: 19647 - RNA, 19 nt, Artificial Sequence
  Description of Artificial Sequence: Synthetic oligonucleotide
acgcauaagcagugcagaa

SEQ ID NO: 19648 - RNA, 19 nt, Artificial Sequence
  Description of Artificial Sequence: Synthetic oligonucleotide
cagcugaaccauaguauca

SEQ ID NO: 19649 - RNA, 19 nt, Artificial Sequence
  Description of Artificial Sequence: Synthetic oligonucleotide
aaccaaaccuaaagagcau

SEQ ID NO: 19650 - RNA, 19 nt, Artificial Sequence
  Description of Artificial Sequence: Synthetic oligonucleotide
uacauccggguguacguuu

SEQ ID NO: 19651 - RNA, 19 nt, Artificial Sequence
  Description of Artificial Sequence: Synthetic oligonucleotide
cacguagcaagggucuuug

SEQ ID NO: 19652 - RNA, 19 nt, Artificial Sequence
  Description of Artificial Sequence: Synthetic oligonucleotide
aucuccguccuucgguuaa

SEQ ID NO: 19653 - RNA, 19 nt, Artificial Sequence
  Description of Artificial Sequence: Synthetic oligonucleotide
caauggaaaugaaguggga

SEQ ID NO: 19654 - RNA, 19 nt, Artificial Sequence
  Description of Artificial Sequence: Synthetic oligonucleotide
ccacaauccaaccagccca

SEQ ID NO: 19655 - RNA, 19 nt, Artificial Sequence
  Description of Artificial Sequence: Synthetic oligonucleotide
caagagaccaauaccgcau

SEQ ID NO: 19656 - RNA, 19 nt, Artificial Sequence
  Description of Artificial Sequence: Synthetic oligonucleotide
cugccccaacccuaucuag

SEQ ID NO: 19657 - RNA, 19 nt, Artificial Sequence
  Description of Artificial Sequence: Synthetic oligonucleotide
auauacacacacacacaaa

SEQ ID NO: 19658 - RNA, 19 nt, Artificial Sequence
  Description of Artificial Sequence: Synthetic oligonucleotide
ugaugcuaucaaagcugau

SEQ ID NO: 19659 - RNA, 19 nt, Artificial Sequence
  Description of Artificial Sequence: Synthetic oligonucleotide
gcaagguuuuguuuucauc

SEQ ID NO: 19660 - RNA, 19 nt, Artificial Sequence
  Description of Artificial Sequence: Synthetic oligonucleotide
auacacacacacacaaauu

SEQ ID NO: 19661 - RNA, 19 nt, Artificial Sequence
  Description of Artificial Sequence: Synthetic oligonucleotide
cccucuacuacaauggaaa

SEQ ID NO: 19662 - RNA, 19 nt, Artificial Sequence
  Description of Artificial Sequence: Synthetic oligonucleotide
caucuguaugauccucguc

SEQ ID NO: 19663 - RNA, 19 nt, Artificial Sequence
  Description of Artificial Sequence: Synthetic oligonucleotide
gcagggcaauguuugacac

SEQ ID NO: 19664 - RNA, 19 nt, Artificial Sequence
  Description of Artificial Sequence: Synthetic oligonucleotide
ccccuaucaguccagcagc

SEQ ID NO: 19665 - RNA, 19 nt, Artificial Sequence
  Description of Artificial Sequence: Synthetic oligonucleotide
acgcuacaacuccaucugu

SEQ ID NO: 19666 - RNA, 19 nt, Artificial Sequence
  Description of Artificial Sequence: Synthetic oligonucleotide
cugcguauggacaggcaaa

SEQ ID NO: 19667 - RNA, 19 nt, Artificial Sequence
  Description of Artificial Sequence: Synthetic oligonucleotide
cucugaccauucgucagug

SEQ ID NO: 19668 - RNA, 19 nt, Artificial Sequence
  Description of Artificial Sequence: Synthetic oligonucleotide
agcauuacauccgggugua

SEQ ID NO: 19669 - RNA, 19 nt, Artificial Sequence
  Description of Artificial Sequence: Synthetic oligonucleotide
cuucuaacgggcacaugua

SEQ ID NO: 19670 - RNA, 19 nt, Artificial Sequence
  Description of Artificial Sequence: Synthetic oligonucleotide
aucuaguaucaggaauggu

SEQ ID NO: 19671 - RNA, 19 nt, Artificial Sequence
  Description of Artificial Sequence: Synthetic oligonucleotide
ggucacagaucagaucggc

SEQ ID NO: 19672 - RNA, 19 nt, Artificial Sequence
  Description of Artificial Sequence: Synthetic oligonucleotide
gggcucgaguccuaguuac

SEQ ID NO: 19673 - RNA, 19 nt, Artificial Sequence
  Description of Artificial Sequence: Synthetic oligonucleotide
cccaacccuaucuaguauc

SEQ ID NO: 19674 - RNA, 19 nt, Artificial Sequence
  Description of Artificial Sequence: Synthetic oligonucleotide
gguaacaauccuuggcacu

SEQ ID NO: 19675 - RNA, 19 nt, Artificial Sequence
  Description of Artificial Sequence: Synthetic oligonucleotide
gugcuuacuuagcucacua

SEQ ID NO: 19676 - RNA, 19 nt, Artificial Sequence
  Description of Artificial Sequence: Synthetic oligonucleotide
ccaaugguaccagaucaag

SEQ ID NO: 19677 - RNA, 19 nt, Artificial Sequence
  Description of Artificial Sequence: Synthetic oligonucleotide
cauggaucauuggccuagc

SEQ ID NO: 19678 - RNA, 19 nt, Artificial Sequence
  Description of Artificial Sequence: Synthetic oligonucleotide
caacccuaucuaguaucag

SEQ ID NO: 19679 - RNA, 19 nt, Artificial Sequence
  Description of Artificial Sequence: Synthetic oligonucleotide
ucucgcuaagcagcccaca

SEQ ID NO: 19680 - RNA, 19 nt, Artificial Sequence
  Description of Artificial Sequence: Synthetic oligonucleotide
caccauacugagcaagucu

SEQ ID NO: 19681 - RNA, 19 nt, Artificial Sequence
  Description of Artificial Sequence: Synthetic oligonucleotide
gguguacuuuauuccccug

SEQ ID NO: 19682 - RNA, 19 nt, Artificial Sequence
  Description of Artificial Sequence: Synthetic oligonucleotide
agacaauagguggccggcu

SEQ ID NO: 19683 - RNA, 19 nt, Artificial Sequence
  Description of Artificial Sequence: Synthetic oligonucleotide
cagcauuacauccgggugu

SEQ ID NO: 19684 - RNA, 19 nt, Artificial Sequence
  Description of Artificial Sequence: Synthetic oligonucleotide
gcccaggaaugguuuaaag

SEQ ID NO: 19685 - RNA, 19 nt, Artificial Sequence
  Description of Artificial Sequence: Synthetic oligonucleotide
aggaaugaucagauuguuu

SEQ ID NO: 19686 - RNA, 19 nt, Artificial Sequence
  Description of Artificial Sequence: Synthetic oligonucleotide
cuagccuccccugggaaga

SEQ ID NO: 19687 - RNA, 19 nt, Artificial Sequence
  Description of Artificial Sequence: Synthetic oligonucleotide
ggaaagcuaguucuagccu

SEQ ID NO: 19688 - RNA, 19 nt, Artificial Sequence
  Description of Artificial Sequence: Synthetic oligonucleotide
uuacauccggguguacguu

SEQ ID NO: 19689 - RNA, 19 nt, Artificial Sequence
  Description of Artificial Sequence: Synthetic oligonucleotide
gcuaguucuagccuccccu

SEQ ID NO: 19690 - RNA, 19 nt, Artificial Sequence
  Description of Artificial Sequence: Synthetic oligonucleotide
guauucaauacgaccucua

SEQ ID NO: 19691 - RNA, 19 nt, Artificial Sequence
  Description of Artificial Sequence: Synthetic oligonucleotide
gcugcguauggacaggcaa

SEQ ID NO: 19692 - RNA, 19 nt, Artificial Sequence
  Description of Artificial Sequence: Synthetic oligonucleotide
aggaacgggcuuagacagg

SEQ ID NO: 19693 - RNA, 19 nt, Artificial Sequence
  Description of Artificial Sequence: Synthetic oligonucleotide
accggccaagacaggaaag

SEQ ID NO: 19694 - RNA, 19 nt, Artificial Sequence
  Description of Artificial Sequence: Synthetic oligonucleotide
caaugacuugaaguugaga

SEQ ID NO: 19695 - RNA, 19 nt, Artificial Sequence
  Description of Artificial Sequence: Synthetic oligonucleotide
cucuuaacucguucagaua

SEQ ID NO: 19696 - RNA, 19 nt, Artificial Sequence
  Description of Artificial Sequence: Synthetic oligonucleotide
auacaccgggucacagauc

SEQ ID NO: 19697 - RNA, 19 nt, Artificial Sequence
  Description of Artificial Sequence: Synthetic oligonucleotide
cagcgugcuaacugccauc

SEQ ID NO: 19698 - RNA, 19 nt, Artificial Sequence
  Description of Artificial Sequence: Synthetic oligonucleotide
aggcgccuugaugaaaaga

SEQ ID NO: 19699 - RNA, 19 nt, Artificial Sequence
  Description of Artificial Sequence: Synthetic oligonucleotide
aucuuuccaagcagacggu

SEQ ID NO: 19700 - RNA, 19 nt, Artificial Sequence
  Description of Artificial Sequence: Synthetic oligonucleotide
ccacgcgccuucuaacggg

SEQ ID NO: 19701 - RNA, 19 nt, Artificial Sequence
  Description of Artificial Sequence: Synthetic oligonucleotide
gcaaaucuccuaaggucug

SEQ ID NO: 19702 - RNA, 19 nt, Artificial Sequence
  Description of Artificial Sequence: Synthetic oligonucleotide
gcagcauauccaaacgcca

SEQ ID NO: 19703 - RNA, 19 nt, Artificial Sequence
  Description of Artificial Sequence: Synthetic oligonucleotide
acccucuacuacaauggaa

SEQ ID NO: 19704 - RNA, 19 nt, Artificial Sequence
  Description of Artificial Sequence: Synthetic oligonucleotide
caauaccgcauugcaguca

SEQ ID NO: 19705 - RNA, 19 nt, Artificial Sequence
  Description of Artificial Sequence: Synthetic oligonucleotide
ccaauaccgcauugcaguc

SEQ ID NO: 19706 - RNA, 19 nt, Artificial Sequence
  Description of Artificial Sequence: Synthetic oligonucleotide
cacagaucagaucggcacu

SEQ ID NO: 19707 - RNA, 19 nt, Artificial Sequence
  Description of Artificial Sequence: Synthetic oligonucleotide
aagugggaauugaggguuu

SEQ ID NO: 19708 - RNA, 19 nt, Artificial Sequence
  Description of Artificial Sequence: Synthetic oligonucleotide
acgcaagguuuuguuuuca

SEQ ID NO: 19709 - RNA, 19 nt, Artificial Sequence
  Description of Artificial Sequence: Synthetic oligonucleotide
ccccacgcgccuucuaacg

SEQ ID NO: 19710 - RNA, 19 nt, Artificial Sequence
  Description of Artificial Sequence: Synthetic oligonucleotide
aaguugggcucaaguguuu

SEQ ID NO: 19711 - RNA, 19 nt, Artificial Sequence
  Description of Artificial Sequence: Synthetic oligonucleotide
gauacccuguaaagagcua

SEQ ID NO: 19712 - RNA, 19 nt, Artificial Sequence
  Description of Artificial Sequence: Synthetic oligonucleotide
cuuggacgauuccuguaua

SEQ ID NO: 19713 - RNA, 19 nt, Artificial Sequence
  Description of Artificial Sequence: Synthetic oligonucleotide
caagacccgggcuccaucu

SEQ ID NO: 19714 - RNA, 19 nt, Artificial Sequence
  Description of Artificial Sequence: Synthetic oligonucleotide
ccggguguacguuuuccug

SEQ ID NO: 19715 - RNA, 19 nt, Artificial Sequence
  Description of Artificial Sequence: Synthetic oligonucleotide
cauuggccuagcuucuacu

SEQ ID NO: 19716 - RNA, 19 nt, Artificial Sequence
  Description of Artificial Sequence: Synthetic oligonucleotide
gaucuccguccuucgguua

SEQ ID NO: 19717 - RNA, 19 nt, Artificial Sequence
  Description of Artificial Sequence: Synthetic oligonucleotide
ggguuguaccagcauuaca

SEQ ID NO: 19718 - RNA, 19 nt, Artificial Sequence
  Description of Artificial Sequence: Synthetic oligonucleotide
agucuacuuugaugcccau

SEQ ID NO: 19719 - RNA, 19 nt, Artificial Sequence
  Description of Artificial Sequence: Synthetic oligonucleotide
ggcgccuugaugaaaagau

SEQ ID NO: 19720 - RNA, 19 nt, Artificial Sequence
  Description of Artificial Sequence: Synthetic oligonucleotide
uaguuacugcuuggcucac

SEQ ID NO: 19721 - RNA, 19 nt, Artificial Sequence
  Description of Artificial Sequence: Synthetic oligonucleotide
acgugucucuugugcugca

SEQ ID NO: 19722 - RNA, 19 nt, Artificial Sequence
  Description of Artificial Sequence: Synthetic oligonucleotide
guuagucuucgaucuccgu

SEQ ID NO: 19723 - RNA, 19 nt, Artificial Sequence
  Description of Artificial Sequence: Synthetic oligonucleotide
ggaaugguuuaaaggccuc

SEQ ID NO: 19724 - RNA, 19 nt, Artificial Sequence
  Description of Artificial Sequence: Synthetic oligonucleotide
gaccauucgucaguguuuu

SEQ ID NO: 19725 - RNA, 19 nt, Artificial Sequence
  Description of Artificial Sequence: Synthetic oligonucleotide
gauccucgucuccagcaau

SEQ ID NO: 19726 - RNA, 19 nt, Artificial Sequence
  Description of Artificial Sequence: Synthetic oligonucleotide
accagcgugcuaacugcca

SEQ ID NO: 19727 - RNA, 19 nt, Artificial Sequence
  Description of Artificial Sequence: Synthetic oligonucleotide
cccacgcgccuucuaacgg

SEQ ID NO: 19728 - RNA, 19 nt, Artificial Sequence
  Description of Artificial Sequence: Synthetic oligonucleotide
gaggaaugaucagauuguu

SEQ ID NO: 19729 - RNA, 19 nt, Artificial Sequence
  Description of Artificial Sequence: Synthetic oligonucleotide
caguagcugaagguaacua

SEQ ID NO: 19730 - RNA, 19 nt, Artificial Sequence
  Description of Artificial Sequence: Synthetic oligonucleotide
caccggccaagacaggaaa

SEQ ID NO: 19731 - RNA, 19 nt, Artificial Sequence
  Description of Artificial Sequence: Synthetic oligonucleotide
cugucucgcuaagcagccc

SEQ ID NO: 19732 - RNA, 19 nt, Artificial Sequence
  Description of Artificial Sequence: Synthetic oligonucleotide
auacgcagcuucagccaga

SEQ ID NO: 19733 - RNA, 19 nt, Artificial Sequence
  Description of Artificial Sequence: Synthetic oligonucleotide
gucucgcuaagcagcccac

SEQ ID NO: 19734 - RNA, 19 nt, Artificial Sequence
  Description of Artificial Sequence: Synthetic oligonucleotide
cacaauccaaccagcccau

SEQ ID NO: 19735 - RNA, 19 nt, Artificial Sequence
  Description of Artificial Sequence: Synthetic oligonucleotide
gguguacguuuuccugauc

SEQ ID NO: 19736 - RNA, 19 nt, Artificial Sequence
  Description of Artificial Sequence: Synthetic oligonucleotide
gugcaacgguacagugaag

SEQ ID NO: 19737 - RNA, 19 nt, Artificial Sequence
  Description of Artificial Sequence: Synthetic oligonucleotide
ccacucguggcaaacccaa

SEQ ID NO: 19738 - RNA, 19 nt, Artificial Sequence
  Description of Artificial Sequence: Synthetic oligonucleotide
ggauuacaguugccucuga

SEQ ID NO: 19739 - RNA, 19 nt, Artificial Sequence
  Description of Artificial Sequence: Synthetic oligonucleotide
ccucgucuccagcaaugug

SEQ ID NO: 19740 - RNA, 19 nt, Artificial Sequence
  Description of Artificial Sequence: Synthetic oligonucleotide
gcgccuugaugaaaagauc

SEQ ID NO: 19741 - RNA, 19 nt, Artificial Sequence
  Description of Artificial Sequence: Synthetic oligonucleotide
cuucaauccuuggacgauu

SEQ ID NO: 19742 - RNA, 19 nt, Artificial Sequence
  Description of Artificial Sequence: Synthetic oligonucleotide
auacgaccucuagguauuu

SEQ ID NO: 19743 - RNA, 19 nt, Artificial Sequence
  Description of Artificial Sequence: Synthetic oligonucleotide
cccuaucuaguaucaggaa

SEQ ID NO: 19744 - RNA, 19 nt, Artificial Sequence
  Description of Artificial Sequence: Synthetic oligonucleotide
acaauccaaccagcccauu

SEQ ID NO: 19745 - RNA, 19 nt, Artificial Sequence
  Description of Artificial Sequence: Synthetic oligonucleotide
ccauucggcaccggccaag

SEQ ID NO: 19746 - RNA, 19 nt, Artificial Sequence
  Description of Artificial Sequence: Synthetic oligonucleotide
ggguguacguuuuccugau

SEQ ID NO: 19747 - RNA, 19 nt, Artificial Sequence
  Description of Artificial Sequence: Synthetic oligonucleotide
cauccgcaacagggaggcc

SEQ ID NO: 19748 - RNA, 19 nt, Artificial Sequence
  Description of Artificial Sequence: Synthetic oligonucleotide
cuagggcucgaguccuagu

SEQ ID NO: 19749 - RNA, 19 nt, Artificial Sequence
  Description of Artificial Sequence: Synthetic oligonucleotide
caauacccucuacuacaau

SEQ ID NO: 19750 - RNA, 19 nt, Artificial Sequence
  Description of Artificial Sequence: Synthetic oligonucleotide
ccaucuguaugauccucgu

SEQ ID NO: 19751 - RNA, 19 nt, Artificial Sequence
  Description of Artificial Sequence: Synthetic oligonucleotide
gcacaauaucugauacccu

SEQ ID NO: 19752 - RNA, 19 nt, Artificial Sequence
  Description of Artificial Sequence: Synthetic oligonucleotide
ccucuacuacaauggaaau

SEQ ID NO: 19753 - RNA, 19 nt, Artificial Sequence
  Description of Artificial Sequence: Synthetic oligonucleotide
cccuaagcccugccccaac

SEQ ID NO: 19754 - RNA, 19 nt, Artificial Sequence
  Description of Artificial Sequence: Synthetic oligonucleotide
ggauaccgccucacucaca

SEQ ID NO: 19755 - RNA, 19 nt, Artificial Sequence
  Description of Artificial Sequence: Synthetic oligonucleotide
auaccgcauugcagucaau

SEQ ID NO: 19756 - RNA, 19 nt, Artificial Sequence
  Description of Artificial Sequence: Synthetic oligonucleotide
gcccacguagcaagggucu

SEQ ID NO: 19757 - RNA, 19 nt, Artificial Sequence
  Description of Artificial Sequence: Synthetic oligonucleotide
cuccguccuucgguuaaua

SEQ ID NO: 19758 - RNA, 19 nt, Artificial Sequence
  Description of Artificial Sequence: Synthetic oligonucleotide
gucagacuacacacaucuu

SEQ ID NO: 19759 - RNA, 19 nt, Artificial Sequence
  Description of Artificial Sequence: Synthetic oligonucleotide
cuggcaugccaacggcauu

SEQ ID NO: 19760 - RNA, 19 nt, Artificial Sequence
  Description of Artificial Sequence: Synthetic oligonucleotide
cacaguuuucuggggcauu

SEQ ID NO: 19761 - RNA, 19 nt, Artificial Sequence
  Description of Artificial Sequence: Synthetic oligonucleotide
ccagcgugcuaacugccau

SEQ ID NO: 19762 - RNA, 19 nt, Artificial Sequence
  Description of Artificial Sequence: Synthetic oligonucleotide
gguucucgguguacuuuau

SEQ ID NO: 19763 - RNA, 19 nt, Artificial Sequence
  Description of Artificial Sequence: Synthetic oligonucleotide
ccuucaauccuuggacgau

SEQ ID NO: 19764 - RNA, 19 nt, Artificial Sequence
  Description of Artificial Sequence: Synthetic oligonucleotide
ggccuagcuucuacuaauu

SEQ ID NO: 19765 - RNA, 19 nt, Artificial Sequence
  Description of Artificial Sequence: Synthetic oligonucleotide
cgcauaagcagugcagaau

SEQ ID NO: 19766 - RNA, 19 nt, Artificial Sequence
  Description of Artificial Sequence: Synthetic oligonucleotide
cgccuucuaacgggcacau

SEQ ID NO: 19767 - RNA, 19 nt, Artificial Sequence
  Description of Artificial Sequence: Synthetic oligonucleotide
auuaacagugauuaguuac

SEQ ID NO: 19768 - RNA, 19 nt, Artificial Sequence
  Description of Artificial Sequence: Synthetic oligonucleotide
uuuguaugaaucaacacug

SEQ ID NO: 19769 - RNA, 19 nt, Artificial Sequence
  Description of Artificial Sequence: Synthetic oligonucleotide
aauacuauggcuaacccuc

SEQ ID NO: 19770 - RNA, 19 nt, Artificial Sequence
  Description of Artificial Sequence: Synthetic oligonucleotide
aguacuuagacaucauugc

SEQ ID NO: 19771 - RNA, 19 nt, Artificial Sequence
  Description of Artificial Sequence: Synthetic oligonucleotide
ucuaaaguggacuuuaggc

SEQ ID NO: 19772 - RNA, 19 nt, Artificial Sequence
  Description of Artificial Sequence: Synthetic oligonucleotide
aaacaugaaccacaaugcc

SEQ ID NO: 19773 - RNA, 19 nt, Artificial Sequence
  Description of Artificial Sequence: Synthetic oligonucleotide
uuaaccagagcaaagguca

SEQ ID NO: 19774 - RNA, 19 nt, Artificial Sequence
  Description of Artificial Sequence: Synthetic oligonucleotide
aaauaccccauacagauga

SEQ ID NO: 19775 - RNA, 19 nt, Artificial Sequence
  Description of Artificial Sequence: Synthetic oligonucleotide
auuuguaugaaucaacacu

SEQ ID NO: 19776 - RNA, 19 nt, Artificial Sequence
  Description of Artificial Sequence: Synthetic oligonucleotide
acaaacgugacguuuguac

SEQ ID NO: 19777 - RNA, 19 nt, Artificial Sequence
  Description of Artificial Sequence: Synthetic oligonucleotide
uaugaaucaacacuguaac

SEQ ID NO: 19778 - RNA, 19 nt, Artificial Sequence
  Description of Artificial Sequence: Synthetic oligonucleotide
aaaaggacaggugaacggc

SEQ ID NO: 19779 - RNA, 19 nt, Artificial Sequence
  Description of Artificial Sequence: Synthetic oligonucleotide
gaugucaucgcgcaggcgg

SEQ ID NO: 19780 - RNA, 19 nt, Artificial Sequence
  Description of Artificial Sequence: Synthetic oligonucleotide
agaauuuucuaaguguacc

SEQ ID NO: 19781 - RNA, 19 nt, Artificial Sequence
  Description of Artificial Sequence: Synthetic oligonucleotide
accaacgugacucuuuacc

SEQ ID NO: 19782 - RNA, 19 nt, Artificial Sequence
  Description of Artificial Sequence: Synthetic oligonucleotide
uacgaagugagccagguac

SEQ ID NO: 19783 - RNA, 19 nt, Artificial Sequence
  Description of Artificial Sequence: Synthetic oligonucleotide
ugacacuaaaguaacacac

SEQ ID NO: 19784 - RNA, 19 nt, Artificial Sequence
  Description of Artificial Sequence: Synthetic oligonucleotide
uccacuaguaccaauuuga

SEQ ID NO: 19785 - RNA, 19 nt, Artificial Sequence
  Description of Artificial Sequence: Synthetic oligonucleotide
aauuuguagguaauacuac

SEQ ID NO: 19786 - RNA, 19 nt, Artificial Sequence
  Description of Artificial Sequence: Synthetic oligonucleotide
aucuccuuaagccggaugg

SEQ ID NO: 19787 - RNA, 19 nt, Artificial Sequence
  Description of Artificial Sequence: Synthetic oligonucleotide
acgguaauaauccagcaug

SEQ ID NO: 19788 - RNA, 19 nt, Artificial Sequence
  Description of Artificial Sequence: Synthetic oligonucleotide
agaauacuauggcuaaccc

SEQ ID NO: 19789 - RNA, 19 nt, Artificial Sequence
  Description of Artificial Sequence: Synthetic oligonucleotide
caucugguggcaaacaugg

SEQ ID NO: 19790 - RNA, 19 nt, Artificial Sequence
  Description of Artificial Sequence: Synthetic oligonucleotide
aauuggaauacccuggauu

SEQ ID NO: 19791 - RNA, 19 nt, Artificial Sequence
  Description of Artificial Sequence: Synthetic oligonucleotide
auguguaauaaggaggacc

SEQ ID NO: 19792 - RNA, 19 nt, Artificial Sequence
  Description of Artificial Sequence: Synthetic oligonucleotide
uguucauugguucccugcg

SEQ ID NO: 19793 - RNA, 19 nt, Artificial Sequence
  Description of Artificial Sequence: Synthetic oligonucleotide
aaacgugacguuuguacag

SEQ ID NO: 19794 - RNA, 19 nt, Artificial Sequence
  Description of Artificial Sequence: Synthetic oligonucleotide
uaugcucaaagaccguugg

SEQ ID NO: 19795 - RNA, 19 nt, Artificial Sequence
  Description of Artificial Sequence: Synthetic oligonucleotide
uguaccacaauuuggcaca

SEQ ID NO: 19796 - RNA, 19 nt, Artificial Sequence
  Description of Artificial Sequence: Synthetic oligonucleotide
ucggaaacaaggcucgggg

SEQ ID NO: 19797 - RNA, 19 nt, Artificial Sequence
  Description of Artificial Sequence: Synthetic oligonucleotide
ggauauacuagccagcucc

SEQ ID NO: 19798 - RNA, 19 nt, Artificial Sequence
  Description of Artificial Sequence: Synthetic oligonucleotide
uguuacguugaacuauucc

SEQ ID NO: 19799 - RNA, 19 nt, Artificial Sequence
  Description of Artificial Sequence: Synthetic oligonucleotide
uacucgucacaucuggugg

SEQ ID NO: 19800 - RNA, 19 nt, Artificial Sequence
  Description of Artificial Sequence: Synthetic oligonucleotide
acuggcaaugguuacuaac

SEQ ID NO: 19801 - RNA, 19 nt, Artificial Sequence
  Description of Artificial Sequence: Synthetic oligonucleotide
cauguagugggacagcucc

SEQ ID NO: 19802 - RNA, 19 nt, Artificial Sequence
  Description of Artificial Sequence: Synthetic oligonucleotide
uuguagguaauacuacuca

SEQ ID NO: 19803 - RNA, 19 nt, Artificial Sequence
  Description of Artificial Sequence: Synthetic oligonucleotide
agugauuaguuacaccaag

SEQ ID NO: 19804 - RNA, 19 nt, Artificial Sequence
  Description of Artificial Sequence: Synthetic oligonucleotide
ucuacgcgaggaauuaagg

SEQ ID NO: 19805 - RNA, 19 nt, Artificial Sequence
  Description of Artificial Sequence: Synthetic oligonucleotide
cucuaaaggcuguugaacc

SEQ ID NO: 19806 - RNA, 19 nt, Artificial Sequence
  Description of Artificial Sequence: Synthetic oligonucleotide
aguuacaccaagcaagaga

SEQ ID NO: 19807 - RNA, 19 nt, Artificial Sequence
  Description of Artificial Sequence: Synthetic oligonucleotide
aacgugacucuuuacccag

SEQ ID NO: 19808 - RNA, 19 nt, Artificial Sequence
  Description of Artificial Sequence: Synthetic oligonucleotide
aaccacagcguggauauac

SEQ ID NO: 19809 - RNA, 19 nt, Artificial Sequence
  Description of Artificial Sequence: Synthetic oligonucleotide
uguuagucagucaugcuuc

SEQ ID NO: 19810 - RNA, 19 nt, Artificial Sequence
  Description of Artificial Sequence: Synthetic oligonucleotide
aagaccguuggccagggcu

SEQ ID NO: 19811 - RNA, 19 nt, Artificial Sequence
  Description of Artificial Sequence: Synthetic oligonucleotide
aauacccuggauuucuuaa

SEQ ID NO: 19812 - RNA, 19 nt, Artificial Sequence
  Description of Artificial Sequence: Synthetic oligonucleotide
aaaugcucauuccaggaaa

SEQ ID NO: 19813 - RNA, 19 nt, Artificial Sequence
  Description of Artificial Sequence: Synthetic oligonucleotide
uuuguagguaauacuacuc

SEQ ID NO: 19814 - RNA, 19 nt, Artificial Sequence
  Description of Artificial Sequence: Synthetic oligonucleotide
aacuugaggccgucuaagg

SEQ ID NO: 19815 - RNA, 19 nt, Artificial Sequence
  Description of Artificial Sequence: Synthetic oligonucleotide
agguuguagauguucauug

SEQ ID NO: 19816 - RNA, 19 nt, Artificial Sequence
  Description of Artificial Sequence: Synthetic oligonucleotide
aacugcaucuuacgucucg

SEQ ID NO: 19817 - RNA, 19 nt, Artificial Sequence
  Description of Artificial Sequence: Synthetic oligonucleotide
aaaucgacaacuguagaau

SEQ ID NO: 19818 - RNA, 19 nt, Artificial Sequence
  Description of Artificial Sequence: Synthetic oligonucleotide
gagcauguguaauaaggag

SEQ ID NO: 19819 - RNA, 19 nt, Artificial Sequence
  Description of Artificial Sequence: Synthetic oligonucleotide
agucgugcggucuacggcg

SEQ ID NO: 19820 - RNA, 19 nt, Artificial Sequence
  Description of Artificial Sequence: Synthetic oligonucleotide
ucuaaguguaccacaauuu

SEQ ID NO: 19821 - RNA, 19 nt, Artificial Sequence
  Description of Artificial Sequence: Synthetic oligonucleotide
aaaaccccagaauuggaau

SEQ ID NO: 19822 - RNA, 19 nt, Artificial Sequence
  Description of Artificial Sequence: Synthetic oligonucleotide
aacgugacguuuguacagc

SEQ ID NO: 19823 - RNA, 19 nt, Artificial Sequence
  Description of Artificial Sequence: Synthetic oligonucleotide
agcuaggacggacagcuac

SEQ ID NO: 19824 - RNA, 19 nt, Artificial Sequence
  Description of Artificial Sequence: Synthetic oligonucleotide
uugcuaaggaguuuauuga

SEQ ID NO: 19825 - RNA, 19 nt, Artificial Sequence
  Description of Artificial Sequence: Synthetic oligonucleotide
uuagcgugucccaugaagu

SEQ ID NO: 19826 - RNA, 19 nt, Artificial Sequence
  Description of Artificial Sequence: Synthetic oligonucleotide
aaccccagaauuggaauac

SEQ ID NO: 19827 - RNA, 19 nt, Artificial Sequence
  Description of Artificial Sequence: Synthetic oligonucleotide
agcaugacacgguugggcg

SEQ ID NO: 19828 - RNA, 19 nt, Artificial Sequence
  Description of Artificial Sequence: Synthetic oligonucleotide
aaaacuuggggaaugcuau

SEQ ID NO: 19829 - RNA, 19 nt, Artificial Sequence
  Description of Artificial Sequence: Synthetic oligonucleotide
aaugcucauuccaggaaac

SEQ ID NO: 19830 - RNA, 19 nt, Artificial Sequence
  Description of Artificial Sequence: Synthetic oligonucleotide
uaccccauacagaugaugu

SEQ ID NO: 19831 - RNA, 19 nt, Artificial Sequence
  Description of Artificial Sequence: Synthetic oligonucleotide
uacgcgaggaauuaaggaa

SEQ ID NO: 19832 - RNA, 19 nt, Artificial Sequence
  Description of Artificial Sequence: Synthetic oligonucleotide
ugcucaaagaccguuggcc

SEQ ID NO: 19833 - RNA, 19 nt, Artificial Sequence
  Description of Artificial Sequence: Synthetic oligonucleotide
uacgucucggcuaauuucu

SEQ ID NO: 19834 - RNA, 19 nt, Artificial Sequence
  Description of Artificial Sequence: Synthetic oligonucleotide
uauugguccuaccaacgug

SEQ ID NO: 19835 - RNA, 19 nt, Artificial Sequence
  Description of Artificial Sequence: Synthetic oligonucleotide
gaaguagacgggcuucccg

SEQ ID NO: 19836 - RNA, 19 nt, Artificial Sequence
  Description of Artificial Sequence: Synthetic oligonucleotide
cuuagcgugucccaugaag

SEQ ID NO: 19837 - RNA, 19 nt, Artificial Sequence
  Description of Artificial Sequence: Synthetic oligonucleotide
cuauuacuguuuuaaccag

SEQ ID NO: 19838 - RNA, 19 nt, Artificial Sequence
  Description of Artificial Sequence: Synthetic oligonucleotide
cuucccuacucacaggccg

SEQ ID NO: 19839 - RNA, 19 nt, Artificial Sequence
  Description of Artificial Sequence: Synthetic oligonucleotide
ugggacaccucccuuaacu

SEQ ID NO: 19840 - RNA, 19 nt, Artificial Sequence
  Description of Artificial Sequence: Synthetic oligonucleotide
cugcagucuaucuacacac

SEQ ID NO: 19841 - RNA, 19 nt, Artificial Sequence
  Description of Artificial Sequence: Synthetic oligonucleotide
uucagcgucauuguugggc

SEQ ID NO: 19842 - RNA, 19 nt, Artificial Sequence
  Description of Artificial Sequence: Synthetic oligonucleotide
auaauccagcaugacacgg

SEQ ID NO: 19843 - RNA, 19 nt, Artificial Sequence
  Description of Artificial Sequence: Synthetic oligonucleotide
uuauugguccuaccaacgu

SEQ ID NO: 19844 - RNA, 19 nt, Artificial Sequence
  Description of Artificial Sequence: Synthetic oligonucleotide
cuauggcuaacccucuucc

SEQ ID NO: 19845 - RNA, 19 nt, Artificial Sequence
  Description of Artificial Sequence: Synthetic oligonucleotide
cucuaaaguggacuuuagg

SEQ ID NO: 19846 - RNA, 19 nt, Artificial Sequence
  Description of Artificial Sequence: Synthetic oligonucleotide
uacccuggauuucuuaaug

SEQ ID NO: 19847 - RNA, 19 nt, Artificial Sequence
  Description of Artificial Sequence: Synthetic oligonucleotide
agaucaacacgccggagcu

SEQ ID NO: 19848 - RNA, 19 nt, Artificial Sequence
  Description of Artificial Sequence: Synthetic oligonucleotide
guuacaccaagcaagagaa

SEQ ID NO: 19849 - RNA, 19 nt, Artificial Sequence
  Description of Artificial Sequence: Synthetic oligonucleotide
uguugaaccacagcgugga

SEQ ID NO: 19850 - RNA, 19 nt, Artificial Sequence
  Description of Artificial Sequence: Synthetic oligonucleotide
ucggagaccgucucuacgc

SEQ ID NO: 19851 - RNA, 19 nt, Artificial Sequence
  Description of Artificial Sequence: Synthetic oligonucleotide
gcuaucacgguccuucucg

SEQ ID NO: 19852 - RNA, 19 nt, Artificial Sequence
  Description of Artificial Sequence: Synthetic oligonucleotide
aacacgccggagcuaggac

SEQ ID NO: 19853 - RNA, 19 nt, Artificial Sequence
  Description of Artificial Sequence: Synthetic oligonucleotide
ugcaucuuacgucucggcu

SEQ ID NO: 19854 - RNA, 19 nt, Artificial Sequence
  Description of Artificial Sequence: Synthetic oligonucleotide
uucucccauuaaaacuugg

SEQ ID NO: 19855 - RNA, 19 nt, Artificial Sequence
  Description of Artificial Sequence: Synthetic oligonucleotide
cacuaguaccaauuugacc

SEQ ID NO: 19856 - RNA, 19 nt, Artificial Sequence
  Description of Artificial Sequence: Synthetic oligonucleotide
cuugagcucauuccguagc

SEQ ID NO: 19857 - RNA, 19 nt, Artificial Sequence
  Description of Artificial Sequence: Synthetic oligonucleotide
cagaucaacacgccggagc

SEQ ID NO: 19858 - RNA, 19 nt, Artificial Sequence
  Description of Artificial Sequence: Synthetic oligonucleotide
auacuacucauucaauaau

SEQ ID NO: 19859 - RNA, 19 nt, Artificial Sequence
  Description of Artificial Sequence: Synthetic oligonucleotide
ucucuaaaguggacuuuag

SEQ ID NO: 19860 - RNA, 19 nt, Artificial Sequence
  Description of Artificial Sequence: Synthetic oligonucleotide
caugcauaugacuuuaaaa

SEQ ID NO: 19861 - RNA, 19 nt, Artificial Sequence
  Description of Artificial Sequence: Synthetic oligonucleotide
ucagucgugcggucuacgg

SEQ ID NO: 19862 - RNA, 19 nt, Artificial Sequence
  Description of Artificial Sequence: Synthetic oligonucleotide
uaccucauaguagucacca

SEQ ID NO: 19863 - RNA, 19 nt, Artificial Sequence
  Description of Artificial Sequence: Synthetic oligonucleotide
ucuccugacguccucggcu

SEQ ID NO: 19864 - RNA, 19 nt, Artificial Sequence
  Description of Artificial Sequence: Synthetic oligonucleotide
ucccuuaacugaugaaggc

SEQ ID NO: 19865 - RNA, 19 nt, Artificial Sequence
  Description of Artificial Sequence: Synthetic oligonucleotide
ucaagugccuauuacuguu

SEQ ID NO: 19866 - RNA, 19 nt, Artificial Sequence
  Description of Artificial Sequence: Synthetic oligonucleotide
uucaagugccuauuacugu

SEQ ID NO: 19867 - RNA, 19 nt, Artificial Sequence
  Description of Artificial Sequence: Synthetic oligonucleotide
cauggucuagcucuagcag

SEQ ID NO: 19868 - RNA, 19 nt, Artificial Sequence
  Description of Artificial Sequence: Synthetic oligonucleotide
aaaccccagaauuggaaua

SEQ ID NO: 19869 - RNA, 19 nt, Artificial Sequence
  Description of Artificial Sequence: Synthetic oligonucleotide
agcgugucccaugaagucc

SEQ ID NO: 19870 - RNA, 19 nt, Artificial Sequence
  Description of Artificial Sequence: Synthetic oligonucleotide
gccuauuacuguuuuaacc

SEQ ID NO: 19871 - RNA, 19 nt, Artificial Sequence
  Description of Artificial Sequence: Synthetic oligonucleotide
auacaguacuuagacauca

SEQ ID NO: 19872 - RNA, 19 nt, Artificial Sequence
  Description of Artificial Sequence: Synthetic oligonucleotide
aguaccaauuugaccacac

SEQ ID NO: 19873 - RNA, 19 nt, Artificial Sequence
  Description of Artificial Sequence: Synthetic oligonucleotide
ccuauuacuguuuuaacca

SEQ ID NO: 19874 - RNA, 19 nt, Artificial Sequence
  Description of Artificial Sequence: Synthetic oligonucleotide
augcucaaagaccguuggc

SEQ ID NO: 19875 - RNA, 19 nt, Artificial Sequence
  Description of Artificial Sequence: Synthetic oligonucleotide
acacgccggagcuaggacg

SEQ ID NO: 19876 - RNA, 19 nt, Artificial Sequence
  Description of Artificial Sequence: Synthetic oligonucleotide
uuguaugaaucaacacugu

SEQ ID NO: 19877 - RNA, 19 nt, Artificial Sequence
  Description of Artificial Sequence: Synthetic oligonucleotide
ucauugguucccugcgggg

SEQ ID NO: 19878 - RNA, 19 nt, Artificial Sequence
  Description of Artificial Sequence: Synthetic oligonucleotide
uuacgucucggcuaauuuc

SEQ ID NO: 19879 - RNA, 19 nt, Artificial Sequence
  Description of Artificial Sequence: Synthetic oligonucleotide
cucuacgcgaggaauuaag

SEQ ID NO: 19880 - RNA, 19 nt, Artificial Sequence
  Description of Artificial Sequence: Synthetic oligonucleotide
aaucaacacuguaacagaa

SEQ ID NO: 19881 - RNA, 19 nt, Artificial Sequence
  Description of Artificial Sequence: Synthetic oligonucleotide
aacuauuccuaagaauaau

SEQ ID NO: 19882 - RNA, 19 nt, Artificial Sequence
  Description of Artificial Sequence: Synthetic oligonucleotide
guacucgucacaucuggug

SEQ ID NO: 19883 - RNA, 19 nt, Artificial Sequence
  Description of Artificial Sequence: Synthetic oligonucleotide
uauggcuaacccucuuccc

SEQ ID NO: 19884 - RNA, 19 nt, Artificial Sequence
  Description of Artificial Sequence: Synthetic oligonucleotide
aucaacacgccggagcuag

SEQ ID NO: 19885 - RNA, 19 nt, Artificial Sequence
  Description of Artificial Sequence: Synthetic oligonucleotide
aucggagaccgucucuacg

SEQ ID NO: 19886 - RNA, 19 nt, Artificial Sequence
  Description of Artificial Sequence: Synthetic oligonucleotide
acuugaggccgucuaagga

SEQ ID NO: 19887 - RNA, 19 nt, Artificial Sequence
  Description of Artificial Sequence: Synthetic oligonucleotide
augaaucaacacuguaaca

SEQ ID NO: 19888 - RNA, 19 nt, Artificial Sequence
  Description of Artificial Sequence: Synthetic oligonucleotide
gacgucuuguuguccagug

SEQ ID NO: 19889 - RNA, 19 nt, Artificial Sequence
  Description of Artificial Sequence: Synthetic oligonucleotide
augccguguccucuaaagg

SEQ ID NO: 19890 - RNA, 19 nt, Artificial Sequence
  Description of Artificial Sequence: Synthetic oligonucleotide
ugcuuagcgugucccauga

SEQ ID NO: 19891 - RNA, 19 nt, Artificial Sequence
  Description of Artificial Sequence: Synthetic oligonucleotide
ccaacuagcucucugcugc

SEQ ID NO: 19892 - RNA, 19 nt, Artificial Sequence
  Description of Artificial Sequence: Synthetic oligonucleotide
ugaacggcgcccucggccc

SEQ ID NO: 19893 - RNA, 19 nt, Artificial Sequence
  Description of Artificial Sequence: Synthetic oligonucleotide
uuccuaugugcgcuggcug

SEQ ID NO: 19894 - RNA, 19 nt, Artificial Sequence
  Description of Artificial Sequence: Synthetic oligonucleotide
gaggccagagaacaauuuc

SEQ ID NO: 19895 - RNA, 19 nt, Artificial Sequence
  Description of Artificial Sequence: Synthetic oligonucleotide
uugugccgacgccagauca

SEQ ID NO: 19896 - RNA, 19 nt, Artificial Sequence
  Description of Artificial Sequence: Synthetic oligonucleotide
caaagaauacuauggcuaa

SEQ ID NO: 19897 - RNA, 19 nt, Artificial Sequence
  Description of Artificial Sequence: Synthetic oligonucleotide
gaauacuauggcuaacccu

SEQ ID NO: 19898 - RNA, 19 nt, Artificial Sequence
  Description of Artificial Sequence: Synthetic oligonucleotide
gugauuaguuacaccaagc

SEQ ID NO: 19899 - RNA, 19 nt, Artificial Sequence
  Description of Artificial Sequence: Synthetic oligonucleotide
aggcccauugaugucuacc

SEQ ID NO: 19900 - RNA, 19 nt, Artificial Sequence
  Description of Artificial Sequence: Synthetic oligonucleotide
aucacgguccuucucgcca

SEQ ID NO: 19901 - RNA, 19 nt, Artificial Sequence
  Description of Artificial Sequence: Synthetic oligonucleotide
uacucacaggccgacugcg

SEQ ID NO: 19902 - RNA, 19 nt, Artificial Sequence
  Description of Artificial Sequence: Synthetic oligonucleotide
uuuugugguuugugugugc

SEQ ID NO: 19903 - RNA, 19 nt, Artificial Sequence
  Description of Artificial Sequence: Synthetic oligonucleotide
gacggacagcuacaggacc

SEQ ID NO: 19904 - RNA, 19 nt, Artificial Sequence
  Description of Artificial Sequence: Synthetic oligonucleotide
uuuuccuaugugcgcuggc

SEQ ID NO: 19905 - RNA, 19 nt, Artificial Sequence
  Description of Artificial Sequence: Synthetic oligonucleotide
guucuucggccguacacag

SEQ ID NO: 19906 - RNA, 19 nt, Artificial Sequence
  Description of Artificial Sequence: Synthetic oligonucleotide
caaacgugacguuuguaca

SEQ ID NO: 19907 - RNA, 19 nt, Artificial Sequence
  Description of Artificial Sequence: Synthetic oligonucleotide
ccuuaacugaugaaggcac

SEQ ID NO: 19908 - RNA, 19 nt, Artificial Sequence
  Description of Artificial Sequence: Synthetic oligonucleotide
ugguucccaaagcacacuc

SEQ ID NO: 19909 - RNA, 19 nt, Artificial Sequence
  Description of Artificial Sequence: Synthetic oligonucleotide
cuccuugccgggucgaagc

SEQ ID NO: 19910 - RNA, 19 nt, Artificial Sequence
  Description of Artificial Sequence: Synthetic oligonucleotide
gcuaagguugucugugagg

SEQ ID NO: 19911 - RNA, 19 nt, Artificial Sequence
  Description of Artificial Sequence: Synthetic oligonucleotide
acuauuccuaagaauaaua

SEQ ID NO: 19912 - RNA, 19 nt, Artificial Sequence
  Description of Artificial Sequence: Synthetic oligonucleotide
acgcgaggaauuaaggaag

SEQ ID NO: 19913 - RNA, 19 nt, Artificial Sequence
  Description of Artificial Sequence: Synthetic oligonucleotide
uccuaugugcgcuggcugu

SEQ ID NO: 19914 - RNA, 19 nt, Artificial Sequence
  Description of Artificial Sequence: Synthetic oligonucleotide
ucuguuagucagucaugcu

SEQ ID NO: 19915 - RNA, 19 nt, Artificial Sequence
  Description of Artificial Sequence: Synthetic oligonucleotide
uugggcggucucauguugc

SEQ ID NO: 19916 - RNA, 19 nt, Artificial Sequence
  Description of Artificial Sequence: Synthetic oligonucleotide
ccaacgugacucuuuaccc

SEQ ID NO: 19917 - RNA, 19 nt, Artificial Sequence
  Description of Artificial Sequence: Synthetic oligonucleotide
ugccuauuacuguuuuaac

SEQ ID NO: 19918 - RNA, 19 nt, Artificial Sequence
  Description of Artificial Sequence: Synthetic oligonucleotide
gagaccgucucuacgcgag

SEQ ID NO: 19919 - RNA, 19 nt, Artificial Sequence
  Description of Artificial Sequence: Synthetic oligonucleotide
gccacuaugcucaaagacc

SEQ ID NO: 19920 - RNA, 19 nt, Artificial Sequence
  Description of Artificial Sequence: Synthetic oligonucleotide
agccccugaauuugcaugu

SEQ ID NO: 19921 - RNA, 19 nt, Artificial Sequence
  Description of Artificial Sequence: Synthetic oligonucleotide
uuaacugaugaaggcacua

SEQ ID NO: 19922 - RNA, 19 nt, Artificial Sequence
  Description of Artificial Sequence: Synthetic oligonucleotide
uccuuaagccggauggcau

SEQ ID NO: 19923 - RNA, 19 nt, Artificial Sequence
  Description of Artificial Sequence: Synthetic oligonucleotide
agcgcuaagguugucugug

SEQ ID NO: 19924 - RNA, 19 nt, Artificial Sequence
  Description of Artificial Sequence: Synthetic oligonucleotide
uuacucuagcagagagacc

SEQ ID NO: 19925 - RNA, 19 nt, Artificial Sequence
  Description of Artificial Sequence: Synthetic oligonucleotide
ucccaacuagcucucugcu

SEQ ID NO: 19926 - RNA, 19 nt, Artificial Sequence
  Description of Artificial Sequence: Synthetic oligonucleotide
gcguggauauacuagccag

SEQ ID NO: 19927 - RNA, 19 nt, Artificial Sequence
  Description of Artificial Sequence: Synthetic oligonucleotide
cuaucacgguccuucucgc

SEQ ID NO: 19928 - RNA, 19 nt, Artificial Sequence
  Description of Artificial Sequence: Synthetic oligonucleotide
gguacucggucucauccgg

SEQ ID NO: 19929 - RNA, 19 nt, Artificial Sequence
  Description of Artificial Sequence: Synthetic oligonucleotide
cuacgcgaggaauuaagga

SEQ ID NO: 19930 - RNA, 19 nt, Artificial Sequence
  Description of Artificial Sequence: Synthetic oligonucleotide
caaggcucggggagggugg

SEQ ID NO: 19931 - RNA, 19 nt, Artificial Sequence
  Description of Artificial Sequence: Synthetic oligonucleotide
aggucggaaacaaggcucg

SEQ ID NO: 19932 - RNA, 19 nt, Artificial Sequence
  Description of Artificial Sequence: Synthetic oligonucleotide
acgccagaucaacacgccg

SEQ ID NO: 19933 - RNA, 19 nt, Artificial Sequence
  Description of Artificial Sequence: Synthetic oligonucleotide
aacugccguucagagaucu

SEQ ID NO: 19934 - RNA, 19 nt, Artificial Sequence
  Description of Artificial Sequence: Synthetic oligonucleotide
gauguacucgucacaucug

SEQ ID NO: 19935 - RNA, 19 nt, Artificial Sequence
  Description of Artificial Sequence: Synthetic oligonucleotide
aagugccuauuacuguuuu

SEQ ID NO: 19936 - RNA, 19 nt, Artificial Sequence
  Description of Artificial Sequence: Synthetic oligonucleotide
ucgacaacuguagaauuuu

SEQ ID NO: 19937 - RNA, 19 nt, Artificial Sequence
  Description of Artificial Sequence: Synthetic oligonucleotide
gcuagccuuacucuagcag

SEQ ID NO: 19938 - RNA, 19 nt, Artificial Sequence
  Description of Artificial Sequence: Synthetic oligonucleotide
aaacuuggggaaugcuauu

SEQ ID NO: 19939 - RNA, 19 nt, Artificial Sequence
  Description of Artificial Sequence: Synthetic oligonucleotide
agccccuuggacaaaagga

SEQ ID NO: 19940 - RNA, 19 nt, Artificial Sequence
  Description of Artificial Sequence: Synthetic oligonucleotide
ugcgcaagagggaguucag

SEQ ID NO: 19941 - RNA, 19 nt, Artificial Sequence
  Description of Artificial Sequence: Synthetic oligonucleotide
acuacuggcaaugguuacu

SEQ ID NO: 19942 - RNA, 19 nt, Artificial Sequence
  Description of Artificial Sequence: Synthetic oligonucleotide
uugcuuagcgugucccaug

SEQ ID NO: 19943 - RNA, 19 nt, Artificial Sequence
  Description of Artificial Sequence: Synthetic oligonucleotide
ugguggcuagccuuacucu

SEQ ID NO: 19944 - RNA, 19 nt, Artificial Sequence
  Description of Artificial Sequence: Synthetic oligonucleotide
ugcugcgcaaugccuugag

SEQ ID NO: 19945 - RNA, 19 nt, Artificial Sequence
  Description of Artificial Sequence: Synthetic oligonucleotide
aggccagagaacaauuucu

SEQ ID NO: 19946 - RNA, 19 nt, Artificial Sequence
  Description of Artificial Sequence: Synthetic oligonucleotide
ucuccuuaagccggauggc

SEQ ID NO: 19947 - RNA, 19 nt, Artificial Sequence
  Description of Artificial Sequence: Synthetic oligonucleotide
ugcgugcugggccucacaa

SEQ ID NO: 19948 - RNA, 19 nt, Artificial Sequence
  Description of Artificial Sequence: Synthetic oligonucleotide
gucggaaacaaggcucggg

SEQ ID NO: 19949 - RNA, 19 nt, Artificial Sequence
  Description of Artificial Sequence: Synthetic oligonucleotide
uugaaccacagcguggaua

SEQ ID NO: 19950 - RNA, 19 nt, Artificial Sequence
  Description of Artificial Sequence: Synthetic oligonucleotide
guugggcucagcagugacg

SEQ ID NO: 19951 - RNA, 19 nt, Artificial Sequence
  Description of Artificial Sequence: Synthetic oligonucleotide
uagcgugucccaugaaguc

SEQ ID NO: 19952 - RNA, 19 nt, Artificial Sequence
  Description of Artificial Sequence: Synthetic oligonucleotide
acgugguacuugcaggcca

SEQ ID NO: 19953 - RNA, 19 nt, Artificial Sequence
  Description of Artificial Sequence: Synthetic oligonucleotide
acguccucggcucuucaca

SEQ ID NO: 19954 - RNA, 19 nt, Artificial Sequence
  Description of Artificial Sequence: Synthetic oligonucleotide
uagacgggcuucccggaac

SEQ ID NO: 19955 - RNA, 19 nt, Artificial Sequence
  Description of Artificial Sequence: Synthetic oligonucleotide
uccgaguaguccugaagua

SEQ ID NO: 19956 - RNA, 19 nt, Artificial Sequence
  Description of Artificial Sequence: Synthetic oligonucleotide
gugccuauuacuguuuuaa

SEQ ID NO: 19957 - RNA, 19 nt, Artificial Sequence
  Description of Artificial Sequence: Synthetic oligonucleotide
ugcuuucaagugccuauua

SEQ ID NO: 19958 - RNA, 19 nt, Artificial Sequence
  Description of Artificial Sequence: Synthetic oligonucleotide
augcgcaagagggaguuca

SEQ ID NO: 19959 - RNA, 19 nt, Artificial Sequence
  Description of Artificial Sequence: Synthetic oligonucleotide
caaucacgguucucucucc

SEQ ID NO: 19960 - RNA, 19 nt, Artificial Sequence
  Description of Artificial Sequence: Synthetic oligonucleotide
ugugccgacgccagaucaa

SEQ ID NO: 19961 - RNA, 19 nt, Artificial Sequence
  Description of Artificial Sequence: Synthetic oligonucleotide
uaugugcgcuggcugugga

SEQ ID NO: 19962 - RNA, 19 nt, Artificial Sequence
  Description of Artificial Sequence: Synthetic oligonucleotide
caacgugacucuuuaccca

SEQ ID NO: 19963 - RNA, 19 nt, Artificial Sequence
  Description of Artificial Sequence: Synthetic oligonucleotide
aagcuucgugugugcugcg

SEQ ID NO: 19964 - RNA, 19 nt, Artificial Sequence
  Description of Artificial Sequence: Synthetic oligonucleotide
ucauccgguucugucugag

SEQ ID NO: 19965 - RNA, 19 nt, Artificial Sequence
  Description of Artificial Sequence: Synthetic oligonucleotide
gucgaagccucaccugcag

SEQ ID NO: 19966 - RNA, 19 nt, Artificial Sequence
  Description of Artificial Sequence: Synthetic oligonucleotide
uccuugccgggucgaagcc

SEQ ID NO: 19967 - RNA, 19 nt, Artificial Sequence
  Description of Artificial Sequence: Synthetic oligonucleotide
gcuuucaagugccuauuac

SEQ ID NO: 19968 - RNA, 19 nt, Artificial Sequence
  Description of Artificial Sequence: Synthetic oligonucleotide
cuaggacggacagcuacag

SEQ ID NO: 19969 - RNA, 19 nt, Artificial Sequence
  Description of Artificial Sequence: Synthetic oligonucleotide
aagcagguucuucggccgu

SEQ ID NO: 19970 - RNA, 19 nt, Artificial Sequence
  Description of Artificial Sequence: Synthetic oligonucleotide
uucuucggccguacacagc

SEQ ID NO: 19971 - RNA, 19 nt, Artificial Sequence
  Description of Artificial Sequence: Synthetic oligonucleotide
cacuacuggcaaugguuac

SEQ ID NO: 19972 - RNA, 19 nt, Artificial Sequence
  Description of Artificial Sequence: Synthetic oligonucleotide
agcuucgugugugcugcgc

SEQ ID NO: 19973 - RNA, 19 nt, Artificial Sequence
  Description of Artificial Sequence: Synthetic oligonucleotide
cugccuauuguagagagcu

SEQ ID NO: 19974 - RNA, 19 nt, Artificial Sequence
  Description of Artificial Sequence: Synthetic oligonucleotide
uccucacauaguacugcuc

SEQ ID NO: 19975 - RNA, 19 nt, Artificial Sequence
  Description of Artificial Sequence: Synthetic oligonucleotide
gggucgaagccucaccugc

SEQ ID NO: 19976 - RNA, 19 nt, Artificial Sequence
  Description of Artificial Sequence: Synthetic oligonucleotide
uggcgcgcaaagaggagaa

SEQ ID NO: 19977 - RNA, 19 nt, Artificial Sequence
  Description of Artificial Sequence: Synthetic oligonucleotide
aagagggaguucagagucu

SEQ ID NO: 19978 - RNA, 19 nt, Artificial Sequence
  Description of Artificial Sequence: Synthetic oligonucleotide
caacuagcucucugcugcc

SEQ ID NO: 19979 - RNA, 19 nt, Artificial Sequence
  Description of Artificial Sequence: Synthetic oligonucleotide
cuacaucaggcugcccugg

SEQ ID NO: 19980 - RNA, 19 nt, Artificial Sequence
  Description of Artificial Sequence: Synthetic oligonucleotide
ccucacgguaauaauccag

SEQ ID NO: 19981 - RNA, 19 nt, Artificial Sequence
  Description of Artificial Sequence: Synthetic oligonucleotide
gaauacccuggauuucuua

SEQ ID NO: 19982 - RNA, 19 nt, Artificial Sequence
  Description of Artificial Sequence: Synthetic oligonucleotide
uaguaccaauuugaccaca

SEQ ID NO: 19983 - RNA, 19 nt, Artificial Sequence
  Description of Artificial Sequence: Synthetic oligonucleotide
agaccgucucuacgcgagg

SEQ ID NO: 19984 - RNA, 19 nt, Artificial Sequence
  Description of Artificial Sequence: Synthetic oligonucleotide
guagugggacagcuccuug

SEQ ID NO: 19985 - RNA, 19 nt, Artificial Sequence
  Description of Artificial Sequence: Synthetic oligonucleotide
cugcgcaaugccuugagcu

SEQ ID NO: 19986 - RNA, 19 nt, Artificial Sequence
  Description of Artificial Sequence: Synthetic oligonucleotide
agcgucauuguugggcuca

SEQ ID NO: 19987 - RNA, 19 nt, Artificial Sequence
  Description of Artificial Sequence: Synthetic oligonucleotide
gcccucacgguaauaaucc

SEQ ID NO: 19988 - RNA, 19 nt, Artificial Sequence
  Description of Artificial Sequence: Synthetic oligonucleotide
caucuuacgucucggcuaa

SEQ ID NO: 19989 - RNA, 19 nt, Artificial Sequence
  Description of Artificial Sequence: Synthetic oligonucleotide
cuaugugcgcuggcugugg

SEQ ID NO: 19990 - RNA, 19 nt, Artificial Sequence
  Description of Artificial Sequence: Synthetic oligonucleotide
gacgccagaucaacacgcc

SEQ ID NO: 19991 - RNA, 19 nt, Artificial Sequence
  Description of Artificial Sequence: Synthetic oligonucleotide
cauggcgcgcaaagaggag

SEQ ID NO: 19992 - RNA, 19 nt, Artificial Sequence
  Description of Artificial Sequence: Synthetic oligonucleotide
ucucaccggccacaucgcu

SEQ ID NO: 19993 - RNA, 19 nt, Artificial Sequence
  Description of Artificial Sequence: Synthetic oligonucleotide
acgugacguuuguacagcu

SEQ ID NO: 19994 - RNA, 19 nt, Artificial Sequence
  Description of Artificial Sequence: Synthetic oligonucleotide
uuggaauacccuggauuuc

SEQ ID NO: 19995 - RNA, 19 nt, Artificial Sequence
  Description of Artificial Sequence: Synthetic oligonucleotide
acguuuguacagcuugcuu

SEQ ID NO: 19996 - RNA, 19 nt, Artificial Sequence
  Description of Artificial Sequence: Synthetic oligonucleotide
ggcgcucguucucagacug

SEQ ID NO: 19997 - RNA, 19 nt, Artificial Sequence
  Description of Artificial Sequence: Synthetic oligonucleotide
uucggccguacacagccuu

SEQ ID NO: 19998 - RNA, 19 nt, Artificial Sequence
  Description of Artificial Sequence: Synthetic oligonucleotide
aacuagcucucugcugccu

SEQ ID NO: 19999 - RNA, 19 nt, Artificial Sequence
  Description of Artificial Sequence: Synthetic oligonucleotide
cauugcgaagcugcuucag

SEQ ID NO: 20000 - RNA, 19 nt, Artificial Sequence
  Description of Artificial Sequence: Synthetic oligonucleotide
caugaaccacaaugccgug

SEQ ID NO: 20001 - RNA, 19 nt, Artificial Sequence
  Description of Artificial Sequence: Synthetic oligonucleotide
ugcacagguugaucggaua

SEQ ID NO: 20002 - RNA, 19 nt, Artificial Sequence
  Description of Artificial Sequence: Synthetic oligonucleotide
ucuuacgucucggcuaauu

SEQ ID NO: 20003 - RNA, 19 nt, Artificial Sequence
  Description of Artificial Sequence: Synthetic oligonucleotide
gcgcgcaaagaggagaagg

SEQ ID NO: 20004 - RNA, 19 nt, Artificial Sequence
  Description of Artificial Sequence: Synthetic oligonucleotide
caggugaacggcgcccucg

SEQ ID NO: 20005 - RNA, 19 nt, Artificial Sequence
  Description of Artificial Sequence: Synthetic oligonucleotide
cacccugaccucacuuagc

SEQ ID NO: 20006 - RNA, 19 nt, Artificial Sequence
  Description of Artificial Sequence: Synthetic oligonucleotide
agugccuauuacuguuuua

SEQ ID NO: 20007 - RNA, 19 nt, Artificial Sequence
  Description of Artificial Sequence: Synthetic oligonucleotide
caaagaccguuggccaggg

SEQ ID NO: 20008 - RNA, 19 nt, Artificial Sequence
  Description of Artificial Sequence: Synthetic oligonucleotide
cucggcuaauuucucccuc

SEQ ID NO: 20009 - RNA, 19 nt, Artificial Sequence
  Description of Artificial Sequence: Synthetic oligonucleotide
aucgacaacuguagaauuu

SEQ ID NO: 20010 - RNA, 19 nt, Artificial Sequence
  Description of Artificial Sequence: Synthetic oligonucleotide
uacucggucucauccgguu

SEQ ID NO: 20011 - RNA, 19 nt, Artificial Sequence
  Description of Artificial Sequence: Synthetic oligonucleotide
uacuauggcuaacccucuu

SEQ ID NO: 20012 - RNA, 19 nt, Artificial Sequence
  Description of Artificial Sequence: Synthetic oligonucleotide
cuguuagucagucaugcuu

SEQ ID NO: 20013 - RNA, 19 nt, Artificial Sequence
  Description of Artificial Sequence: Synthetic oligonucleotide
cuccucaccugaaggucac

SEQ ID NO: 20014 - RNA, 19 nt, Artificial Sequence
  Description of Artificial Sequence: Synthetic oligonucleotide
gacguccucggcucuucac

SEQ ID NO: 20015 - RNA, 19 nt, Artificial Sequence
  Description of Artificial Sequence: Synthetic oligonucleotide
gauauacuagccagcuccu

SEQ ID NO: 20016 - RNA, 19 nt, Artificial Sequence
  Description of Artificial Sequence: Synthetic oligonucleotide
ugccgacgccagaucaaca

SEQ ID NO: 20017 - RNA, 19 nt, Artificial Sequence
  Description of Artificial Sequence: Synthetic oligonucleotide
cacggcaucggagaccguc

SEQ ID NO: 20018 - RNA, 19 nt, Artificial Sequence
  Description of Artificial Sequence: Synthetic oligonucleotide
guggauauacuagccagcu

SEQ ID NO: 20019 - RNA, 19 nt, Artificial Sequence
  Description of Artificial Sequence: Synthetic oligonucleotide
uaccaacgugacucuuuac

SEQ ID NO: 20020 - RNA, 19 nt, Artificial Sequence
  Description of Artificial Sequence: Synthetic oligonucleotide
ggcggucucauguugcaca

SEQ ID NO: 20021 - RNA, 19 nt, Artificial Sequence
  Description of Artificial Sequence: Synthetic oligonucleotide
gccuauuguagagagcuuc

SEQ ID NO: 20022 - RNA, 19 nt, Artificial Sequence
  Description of Artificial Sequence: Synthetic oligonucleotide
aauaccccauacagaugau

SEQ ID NO: 20023 - RNA, 19 nt, Artificial Sequence
  Description of Artificial Sequence: Synthetic oligonucleotide
gcuccgaguaguccugaag

SEQ ID NO: 20024 - RNA, 19 nt, Artificial Sequence
  Description of Artificial Sequence: Synthetic oligonucleotide
gguucuucggccguacaca

SEQ ID NO: 20025 - RNA, 19 nt, Artificial Sequence
  Description of Artificial Sequence: Synthetic oligonucleotide
cuaccaacgugacucuuua

SEQ ID NO: 20026 - RNA, 19 nt, Artificial Sequence
  Description of Artificial Sequence: Synthetic oligonucleotide
caccgugcgaagaguggug

SEQ ID NO: 20027 - RNA, 19 nt, Artificial Sequence
  Description of Artificial Sequence: Synthetic oligonucleotide
ugacguccucggcucuuca

SEQ ID NO: 20028 - RNA, 19 nt, Artificial Sequence
  Description of Artificial Sequence: Synthetic oligonucleotide
agcgacgcagagcgcuaag

SEQ ID NO: 20029 - RNA, 19 nt, Artificial Sequence
  Description of Artificial Sequence: Synthetic oligonucleotide
gccgacgccagaucaacac

SEQ ID NO: 20030 - RNA, 19 nt, Artificial Sequence
  Description of Artificial Sequence: Synthetic oligonucleotide
gagcaaaggucaaguuuuc

SEQ ID NO: 20031 - RNA, 19 nt, Artificial Sequence
  Description of Artificial Sequence: Synthetic oligonucleotide
cacgugguacuugcaggcc

SEQ ID NO: 20032 - RNA, 19 nt, Artificial Sequence
  Description of Artificial Sequence: Synthetic oligonucleotide
cuugugccgacgccagauc

SEQ ID NO: 20033 - RNA, 19 nt, Artificial Sequence
  Description of Artificial Sequence: Synthetic oligonucleotide
auacuauggcuaacccucu

SEQ ID NO: 20034 - RNA, 19 nt, Artificial Sequence
  Description of Artificial Sequence: Synthetic oligonucleotide
ggucucggucaccauggcc

SEQ ID NO: 20035 - RNA, 19 nt, Artificial Sequence
  Description of Artificial Sequence: Synthetic oligonucleotide
caguuugcuaaggaguuua

SEQ ID NO: 20036 - RNA, 19 nt, Artificial Sequence
  Description of Artificial Sequence: Synthetic oligonucleotide
ucucuacgcgaggaauuaa

SEQ ID NO: 20037 - RNA, 19 nt, Artificial Sequence
  Description of Artificial Sequence: Synthetic oligonucleotide
uacuggcaaugguuacuaa

SEQ ID NO: 20038 - RNA, 19 nt, Artificial Sequence
  Description of Artificial Sequence: Synthetic oligonucleotide
cucagucgugcggucuacg

SEQ ID NO: 20039 - RNA, 19 nt, Artificial Sequence
  Description of Artificial Sequence: Synthetic oligonucleotide
ccgaguaguccugaaguag

SEQ ID NO: 20040 - RNA, 19 nt, Artificial Sequence
  Description of Artificial Sequence: Synthetic oligonucleotide
accgugcgaagagugguga

SEQ ID NO: 20041 - RNA, 19 nt, Artificial Sequence
  Description of Artificial Sequence: Synthetic oligonucleotide
cuccuuaagccggauggca

SEQ ID NO: 20042 - RNA, 19 nt, Artificial Sequence
  Description of Artificial Sequence: Synthetic oligonucleotide
ugccuauuguagagagcuu

SEQ ID NO: 20043 - RNA, 19 nt, Artificial Sequence
  Description of Artificial Sequence: Synthetic oligonucleotide
cucccucaaugaagaugcc

SEQ ID NO: 20044 - RNA, 19 nt, Artificial Sequence
  Description of Artificial Sequence: Synthetic oligonucleotide
gacgcagagcgcuaagguu

SEQ ID NO: 20045 - RNA, 19 nt, Artificial Sequence
  Description of Artificial Sequence: Synthetic oligonucleotide
agguacgaagugagccagg

SEQ ID NO: 20046 - RNA, 19 nt, Artificial Sequence
  Description of Artificial Sequence: Synthetic oligonucleotide
gcgacagcucagucgugcg

SEQ ID NO: 20047 - RNA, 19 nt, Artificial Sequence
  Description of Artificial Sequence: Synthetic oligonucleotide
ggcaggagaacaugcauau

SEQ ID NO: 20048 - RNA, 19 nt, Artificial Sequence
  Description of Artificial Sequence: Synthetic oligonucleotide
acgugacucuuuacccagg

SEQ ID NO: 20049 - RNA, 19 nt, Artificial Sequence
  Description of Artificial Sequence: Synthetic oligonucleotide
ccuuaagccggauggcauc

SEQ ID NO: 20050 - RNA, 19 nt, Artificial Sequence
  Description of Artificial Sequence: Synthetic oligonucleotide
cuacuggcaaugguuacua

SEQ ID NO: 20051 - RNA, 19 nt, Artificial Sequence
  Description of Artificial Sequence: Synthetic oligonucleotide
gaccgucucuacgcgagga

SEQ ID NO: 20052 - RNA, 19 nt, Artificial Sequence
  Description of Artificial Sequence: Synthetic oligonucleotide
gguggcuagccuuacucua

SEQ ID NO: 20053 - RNA, 19 nt, Artificial Sequence
  Description of Artificial Sequence: Synthetic oligonucleotide
ggccagagaacaauuucuc

SEQ ID NO: 20054 - RNA, 19 nt, Artificial Sequence
  Description of Artificial Sequence: Synthetic oligonucleotide
cacgguucucucucccuca

SEQ ID NO: 20055 - RNA, 19 nt, Artificial Sequence
  Description of Artificial Sequence: Synthetic oligonucleotide
gacguuuguacagcuugcu

SEQ ID NO: 20056 - RNA, 19 nt, Artificial Sequence
  Description of Artificial Sequence: Synthetic oligonucleotide
ccgacgccagaucaacacg

SEQ ID NO: 20057 - RNA, 19 nt, Artificial Sequence
  Description of Artificial Sequence: Synthetic oligonucleotide
uccugacguccucggcucu

SEQ ID NO: 20058 - RNA, 19 nt, Artificial Sequence
  Description of Artificial Sequence: Synthetic oligonucleotide
acaguuugcuaaggaguuu

SEQ ID NO: 20059 - RNA, 19 nt, Artificial Sequence
  Description of Artificial Sequence: Synthetic oligonucleotide
acgucucggcuaauuucuc

SEQ ID NO: 20060 - RNA, 19 nt, Artificial Sequence
  Description of Artificial Sequence: Synthetic oligonucleotide
ucgugcggucuacggcggc

SEQ ID NO: 20061 - RNA, 19 nt, Artificial Sequence
  Description of Artificial Sequence: Synthetic oligonucleotide
cacgguaauaauccagcau

SEQ ID NO: 20062 - RNA, 19 nt, Artificial Sequence
  Description of Artificial Sequence: Synthetic oligonucleotide
cuuacgucucggcuaauuu

SEQ ID NO: 20063 - RNA, 19 nt, Artificial Sequence
  Description of Artificial Sequence: Synthetic oligonucleotide
ggcccauugaugucuaccu

SEQ ID NO: 20064 - RNA, 19 nt, Artificial Sequence
  Description of Artificial Sequence: Synthetic oligonucleotide
acgguucucucucccucaa

SEQ ID NO: 20065 - RNA, 19 nt, Artificial Sequence
  Description of Artificial Sequence: Synthetic oligonucleotide
acugccguucagagaucuc

SEQ ID NO: 20066 - RNA, 19 nt, Artificial Sequence
  Description of Artificial Sequence: Synthetic oligonucleotide
gucgugcggucuacggcgg

SEQ ID NO: 20067 - RNA, 19 nt, Artificial Sequence
  Description of Artificial Sequence: Synthetic oligonucleotide
aacggcgcccucggcccuc

SEQ ID NO: 20068 - RNA, 19 nt, Artificial Sequence
  Description of Artificial Sequence: Synthetic oligonucleotide
acgguugggcggucucaug

SEQ ID NO: 20069 - RNA, 19 nt, Artificial Sequence
  Description of Artificial Sequence: Synthetic oligonucleotide
gccgucuaaggagaccugc

SEQ ID NO: 20070 - RNA, 19 nt, Artificial Sequence
  Description of Artificial Sequence: Synthetic oligonucleotide
cgcgaggaauuaaggaagc

SEQ ID NO: 20071 - RNA, 19 nt, Artificial Sequence
  Description of Artificial Sequence: Synthetic oligonucleotide
ggcccucacgguaauaauc

SEQ ID NO: 20072 - RNA, 19 nt, Artificial Sequence
  Description of Artificial Sequence: Synthetic oligonucleotide
gcgcaaugccuugagcugc

SEQ ID NO: 20073 - RNA, 19 nt, Artificial Sequence
  Description of Artificial Sequence: Synthetic oligonucleotide
ucccuacucacaggccgac

SEQ ID NO: 20074 - RNA, 19 nt, Artificial Sequence
  Description of Artificial Sequence: Synthetic oligonucleotide
gucucuacgcgaggaauua

SEQ ID NO: 20075 - RNA, 19 nt, Artificial Sequence
  Description of Artificial Sequence: Synthetic oligonucleotide
acggcaucggagaccgucu

SEQ ID NO: 20076 - RNA, 19 nt, Artificial Sequence
  Description of Artificial Sequence: Synthetic oligonucleotide
gcugcgcaaugccuugagc

SEQ ID NO: 20077 - RNA, 19 nt, Artificial Sequence
  Description of Artificial Sequence: Synthetic oligonucleotide
gugccgacgccagaucaac

SEQ ID NO: 20078 - RNA, 19 nt, Artificial Sequence
  Description of Artificial Sequence: Synthetic oligonucleotide
ccacaauuuggcacaacaa

SEQ ID NO: 20079 - RNA, 19 nt, Artificial Sequence
  Description of Artificial Sequence: Synthetic oligonucleotide
cccaacuagcucucugcug

SEQ ID NO: 20080 - RNA, 19 nt, Artificial Sequence
  Description of Artificial Sequence: Synthetic oligonucleotide
guagacgggcuucccggaa

SEQ ID NO: 20081 - RNA, 19 nt, Artificial Sequence
  Description of Artificial Sequence: Synthetic oligonucleotide
gcgacgcagagcgcuaagg

SEQ ID NO: 20082 - RNA, 19 nt, Artificial Sequence
  Description of Artificial Sequence: Synthetic oligonucleotide
uccuuggcugggacaccuc

SEQ ID NO: 20083 - RNA, 19 nt, Artificial Sequence
  Description of Artificial Sequence: Synthetic oligonucleotide
gcuucgugugugcugcgca

SEQ ID NO: 20084 - RNA, 19 nt, Artificial Sequence
  Description of Artificial Sequence: Synthetic oligonucleotide
gcucuccuugugccgacgc

SEQ ID NO: 20085 - RNA, 19 nt, Artificial Sequence
  Description of Artificial Sequence: Synthetic oligonucleotide
gcacaaucacgguucucuc

SEQ ID NO: 20086 - RNA, 19 nt, Artificial Sequence
  Description of Artificial Sequence: Synthetic oligonucleotide
gugucucuagcgccuccuc

SEQ ID NO: 20087 - RNA, 19 nt, Artificial Sequence
  Description of Artificial Sequence: Synthetic oligonucleotide
cgucucggcuaauuucucc

SEQ ID NO: 20088 - RNA, 19 nt, Artificial Sequence
  Description of Artificial Sequence: Synthetic oligonucleotide
cccuuaacugaugaaggca

SEQ ID NO: 20089 - RNA, 19 nt, Artificial Sequence
  Description of Artificial Sequence: Synthetic oligonucleotide
gagcgcuaagguugucugu

SEQ ID NO: 20090 - RNA, 19 nt, Artificial Sequence
  Description of Artificial Sequence: Synthetic oligonucleotide
ugacacgguugggcggucu

SEQ ID NO: 20091 - RNA, 19 nt, Artificial Sequence
  Description of Artificial Sequence: Synthetic oligonucleotide
uugccgggucgaagccuca

SEQ ID NO: 20092 - RNA, 19 nt, Artificial Sequence
  Description of Artificial Sequence: Synthetic oligonucleotide
acccucuucccuacucaca

SEQ ID NO: 20093 - RNA, 19 nt, Artificial Sequence
  Description of Artificial Sequence: Synthetic oligonucleotide
guacgaagugagccaggua

SEQ ID NO: 20094 - RNA, 19 nt, Artificial Sequence
  Description of Artificial Sequence: Synthetic oligonucleotide
caacugccguucagagauc

SEQ ID NO: 20095 - RNA, 19 nt, Artificial Sequence
  Description of Artificial Sequence: Synthetic oligonucleotide
gccccugcgggucugcuca

SEQ ID NO: 20096 - RNA, 19 nt, Artificial Sequence
  Description of Artificial Sequence: Synthetic oligonucleotide
ccugaaauuaacagugauu

SEQ ID NO: 20097 - RNA, 19 nt, Artificial Sequence
  Description of Artificial Sequence: Synthetic oligonucleotide
ggucggaaacaaggcucgg

SEQ ID NO: 20098 - RNA, 19 nt, Artificial Sequence
  Description of Artificial Sequence: Synthetic oligonucleotide
ccauccgcugccgcgacag

SEQ ID NO: 20099 - RNA, 19 nt, Artificial Sequence
  Description of Artificial Sequence: Synthetic oligonucleotide
cacgguccuucucgccagc

SEQ ID NO: 20100 - RNA, 19 nt, Artificial Sequence
  Description of Artificial Sequence: Synthetic oligonucleotide
guacccgcuccuaccugug

SEQ ID NO: 20101 - RNA, 19 nt, Artificial Sequence
  Description of Artificial Sequence: Synthetic oligonucleotide
gcuaggacggacagcuaca

SEQ ID NO: 20102 - RNA, 19 nt, Artificial Sequence
  Description of Artificial Sequence: Synthetic oligonucleotide
ggagucguugauggccaug

SEQ ID NO: 20103 - RNA, 19 nt, Artificial Sequence
  Description of Artificial Sequence: Synthetic oligonucleotide
gcugccuauuguagagagc

SEQ ID NO: 20104 - RNA, 19 nt, Artificial Sequence
  Description of Artificial Sequence: Synthetic oligonucleotide
gguacccgcuccuaccugu

SEQ ID NO: 20105 - RNA, 19 nt, Artificial Sequence
  Description of Artificial Sequence: Synthetic oligonucleotide
cagcucuccuugugccgac

SEQ ID NO: 20106 - RNA, 19 nt, Artificial Sequence
  Description of Artificial Sequence: Synthetic oligonucleotide
gguacgaagugagccaggu

SEQ ID NO: 20107 - RNA, 19 nt, Artificial Sequence
  Description of Artificial Sequence: Synthetic oligonucleotide
gcccauugaugucuaccuc

SEQ ID NO: 20108 - RNA, 19 nt, Artificial Sequence
  Description of Artificial Sequence: Synthetic oligonucleotide
gcacuacuggcaaugguua

SEQ ID NO: 20109 - RNA, 19 nt, Artificial Sequence
  Description of Artificial Sequence: Synthetic oligonucleotide
augacacgguugggcgguc

SEQ ID NO: 20110 - RNA, 19 nt, Artificial Sequence
  Description of Artificial Sequence: Synthetic oligonucleotide
gccgggucgaagccucacc

SEQ ID NO: 20111 - RNA, 19 nt, Artificial Sequence
  Description of Artificial Sequence: Synthetic oligonucleotide
caugcgcaagagggaguuc

SEQ ID NO: 20112 - RNA, 19 nt, Artificial Sequence
  Description of Artificial Sequence: Synthetic oligonucleotide
caaugccguguccucuaaa

SEQ ID NO: 20113 - RNA, 19 nt, Artificial Sequence
  Description of Artificial Sequence: Synthetic oligonucleotide
cugcagcgacgcagagcgc

SEQ ID NO: 20114 - RNA, 19 nt, Artificial Sequence
  Description of Artificial Sequence: Synthetic oligonucleotide
cagagcgcuaagguugucu

SEQ ID NO: 20115 - RNA, 19 nt, Artificial Sequence
  Description of Artificial Sequence: Synthetic oligonucleotide
cugccgcgacagcucaguc

SEQ ID NO: 20116 - RNA, 19 nt, Artificial Sequence
  Description of Artificial Sequence: Synthetic oligonucleotide
ccuaugugcgcuggcugug

SEQ ID NO: 20117 - RNA, 19 nt, Artificial Sequence
  Description of Artificial Sequence: Synthetic oligonucleotide
ggcuguugaaccacagcgu

SEQ ID NO: 20118 - RNA, 19 nt, Artificial Sequence
  Description of Artificial Sequence: Synthetic oligonucleotide
ggucgaagccucaccugca

SEQ ID NO: 20119 - RNA, 19 nt, Artificial Sequence
  Description of Artificial Sequence: Synthetic oligonucleotide
gcgcuaagguugucuguga

SEQ ID NO: 20120 - RNA, 19 nt, Artificial Sequence
  Description of Artificial Sequence: Synthetic oligonucleotide
cacaagcuucgugugugcu

SEQ ID NO: 20121 - RNA, 19 nt, Artificial Sequence
  Description of Artificial Sequence: Synthetic oligonucleotide
ggcgcgcaaagaggagaag

SEQ ID NO: 20122 - RNA, 19 nt, Artificial Sequence
  Description of Artificial Sequence: Synthetic oligonucleotide
cagugacggcaucaucacu

SEQ ID NO: 20123 - RNA, 19 nt, Artificial Sequence
  Description of Artificial Sequence: Synthetic oligonucleotide
cccucacgguaauaaucca

SEQ ID NO: 20124 - RNA, 19 nt, Artificial Sequence
  Description of Artificial Sequence: Synthetic oligonucleotide
cagauauguggagcucacu

SEQ ID NO: 20125 - RNA, 19 nt, Artificial Sequence
  Description of Artificial Sequence: Synthetic oligonucleotide
gccggagcuaggacggaca

SEQ ID NO: 20126 - RNA, 19 nt, Artificial Sequence
  Description of Artificial Sequence: Synthetic oligonucleotide
ccguaggccccaucuucuc

SEQ ID NO: 20127 - RNA, 19 nt, Artificial Sequence
  Description of Artificial Sequence: Synthetic oligonucleotide
ggccgucuaaggagaccug

SEQ ID NO: 20128 - RNA, 19 nt, Artificial Sequence
  Description of Artificial Sequence: Synthetic oligonucleotide
gaaccacagcguggauaua

SEQ ID NO: 20129 - RNA, 19 nt, Artificial Sequence
  Description of Artificial Sequence: Synthetic oligonucleotide
gcucagucgugcggucuac

SEQ ID NO: 20130 - RNA, 19 nt, Artificial Sequence
  Description of Artificial Sequence: Synthetic oligonucleotide
ggggucacucaauggugau

SEQ ID NO: 20131 - RNA, 19 nt, Artificial Sequence
  Description of Artificial Sequence: Synthetic oligonucleotide
gaacggcgcccucggcccu

SEQ ID NO: 20132 - RNA, 19 nt, Artificial Sequence
  Description of Artificial Sequence: Synthetic oligonucleotide
aucuuacgucucggcuaau

SEQ ID NO: 20133 - RNA, 19 nt, Artificial Sequence
  Description of Artificial Sequence: Synthetic oligonucleotide
cgugcggucuacggcggcc

SEQ ID NO: 20134 - RNA, 19 nt, Artificial Sequence
  Description of Artificial Sequence: Synthetic oligonucleotide
gcuuagcgugucccaugaa

SEQ ID NO: 20135 - RNA, 19 nt, Artificial Sequence
  Description of Artificial Sequence: Synthetic oligonucleotide
uguggcccguaggccccau

SEQ ID NO: 20136 - RNA, 19 nt, Artificial Sequence
  Description of Artificial Sequence: Synthetic oligonucleotide
cagcgacgcagagcgcuaa

SEQ ID NO: 20137 - RNA, 19 nt, Artificial Sequence
  Description of Artificial Sequence: Synthetic oligonucleotide
ccuaccugugguccacacu

SEQ ID NO: 20138 - RNA, 19 nt, Artificial Sequence
  Description of Artificial Sequence: Synthetic oligonucleotide
gcugccgcgacagcucagu

SEQ ID NO: 20139 - RNA, 19 nt, Artificial Sequence
  Description of Artificial Sequence: Synthetic oligonucleotide
ccacggaugugaggcgcuc

SEQ ID NO: 20140 - RNA, 19 nt, Artificial Sequence
  Description of Artificial Sequence: Synthetic oligonucleotide
cgguugggcggucucaugu

SEQ ID NO: 20141 - RNA, 19 nt, Artificial Sequence
  Description of Artificial Sequence: Synthetic oligonucleotide
gccguucagagaucuccuu

SEQ ID NO: 20142 - RNA, 19 nt, Artificial Sequence
  Description of Artificial Sequence: Synthetic oligonucleotide
ccuugugccgacgccagau

SEQ ID NO: 20143 - RNA, 19 nt, Artificial Sequence
  Description of Artificial Sequence: Synthetic oligonucleotide
gccauccgcugccgcgaca

SEQ ID NO: 20144 - RNA, 19 nt, Artificial Sequence
  Description of Artificial Sequence: Synthetic oligonucleotide
gcagcgacgcagagcgcua

SEQ ID NO: 20145 - RNA, 19 nt, Artificial Sequence
  Description of Artificial Sequence: Synthetic oligonucleotide
gcgcucguucucagacuga

SEQ ID NO: 20146 - RNA, 19 nt, Artificial Sequence
  Description of Artificial Sequence: Synthetic oligonucleotide
ccgcgacagcucagucgug

SEQ ID NO: 20147 - RNA, 19 nt, Artificial Sequence
  Description of Artificial Sequence: Synthetic oligonucleotide
gccacggaugugaggcgcu

SEQ ID NO: 20148 - RNA, 19 nt, Artificial Sequence
  Description of Artificial Sequence: Synthetic oligonucleotide
ggcggccacgcuggaucuc

SEQ ID NO: 20149 - RNA, 19 nt, Artificial Sequence
  Description of Artificial Sequence: Synthetic oligonucleotide
ccgucucuacgcgaggaau

SEQ ID NO: 20150 - RNA, 19 nt, Artificial Sequence
  Description of Artificial Sequence: Synthetic oligonucleotide
cggucuacggcggccugga

SEQ ID NO: 20151 - RNA, 19 nt, Artificial Sequence
  Description of Artificial Sequence: Synthetic oligonucleotide
ccuugccgggucgaagccu

SEQ ID NO: 20152 - RNA, 19 nt, Artificial Sequence
  Description of Artificial Sequence: Synthetic oligonucleotide
gcccuaccucuguggccaa

SEQ ID NO: 20153 - RNA, 19 nt, Artificial Sequence
  Description of Artificial Sequence: Synthetic oligonucleotide
ccgugcgaagaguggugau

SEQ ID NO: 20154 - RNA, 19 nt, Artificial Sequence
  Description of Artificial Sequence: Synthetic oligonucleotide
ccuggcccucacgguaaua

SEQ ID NO: 20155 - RNA, 19 nt, Artificial Sequence
  Description of Artificial Sequence: Synthetic oligonucleotide
cccuacucacaggccgacu

SEQ ID NO: 20156 - RNA, 19 nt, Artificial Sequence
  Description of Artificial Sequence: Synthetic oligonucleotide
aaauaaaugagguugaucc

SEQ ID NO: 20157 - RNA, 19 nt, Artificial Sequence
  Description of Artificial Sequence: Synthetic oligonucleotide
uuuauuaccuccaaaaugg

SEQ ID NO: 20158 - RNA, 19 nt, Artificial Sequence
  Description of Artificial Sequence: Synthetic oligonucleotide
ugauguuugaaauaagccg

SEQ ID NO: 20159 - RNA, 19 nt, Artificial Sequence
  Description of Artificial Sequence: Synthetic oligonucleotide
uuccaauuaacuuagauac

SEQ ID NO: 20160 - RNA, 19 nt, Artificial Sequence
  Description of Artificial Sequence: Synthetic oligonucleotide
ugucauauagcauagggag

SEQ ID NO: 20161 - RNA, 19 nt, Artificial Sequence
  Description of Artificial Sequence: Synthetic oligonucleotide
aaaugguaaaauuccuccc

SEQ ID NO: 20162 - RNA, 19 nt, Artificial Sequence
  Description of Artificial Sequence: Synthetic oligonucleotide
aaagcaucagcugacaaac

SEQ ID NO: 20163 - RNA, 19 nt, Artificial Sequence
  Description of Artificial Sequence: Synthetic oligonucleotide
aucuaguuuacauauacuc

SEQ ID NO: 20164 - RNA, 19 nt, Artificial Sequence
  Description of Artificial Sequence: Synthetic oligonucleotide
uuaacccuuaaauagagug

SEQ ID NO: 20165 - RNA, 19 nt, Artificial Sequence
  Description of Artificial Sequence: Synthetic oligonucleotide
ugaaacuaaacccacuaag

SEQ ID NO: 20166 - RNA, 19 nt, Artificial Sequence
  Description of Artificial Sequence: Synthetic oligonucleotide
aaauggucuaaacugauga

SEQ ID NO: 20167 - RNA, 19 nt, Artificial Sequence
  Description of Artificial Sequence: Synthetic oligonucleotide
aauugaaucugauacauua

SEQ ID NO: 20168 - RNA, 19 nt, Artificial Sequence
  Description of Artificial Sequence: Synthetic oligonucleotide
ugaaauaagccguacaucu

SEQ ID NO: 20169 - RNA, 19 nt, Artificial Sequence
  Description of Artificial Sequence: Synthetic oligonucleotide
uguuauauacacuuauugc

SEQ ID NO: 20170 - RNA, 19 nt, Artificial Sequence
  Description of Artificial Sequence: Synthetic oligonucleotide
aauauggcgguacugagca

SEQ ID NO: 20171 - RNA, 19 nt, Artificial Sequence
  Description of Artificial Sequence: Synthetic oligonucleotide
aaaaguguuguuaagucuc

SEQ ID NO: 20172 - RNA, 19 nt, Artificial Sequence
  Description of Artificial Sequence: Synthetic oligonucleotide
aacccuuaaauagaguggc

SEQ ID NO: 20173 - RNA, 19 nt, Artificial Sequence
  Description of Artificial Sequence: Synthetic oligonucleotide
ucuaguuuacauauacucc

SEQ ID NO: 20174 - RNA, 19 nt, Artificial Sequence
  Description of Artificial Sequence: Synthetic oligonucleotide
aacgauucuacugagaacu

SEQ ID NO: 20175 - RNA, 19 nt, Artificial Sequence
  Description of Artificial Sequence: Synthetic oligonucleotide
uuggauggaauugagauag

SEQ ID NO: 20176 - RNA, 19 nt, Artificial Sequence
  Description of Artificial Sequence: Synthetic oligonucleotide
ugauacauuauauacugga

SEQ ID NO: 20177 - RNA, 19 nt, Artificial Sequence
  Description of Artificial Sequence: Synthetic oligonucleotide
ugccuuuugaacaaguacc

SEQ ID NO: 20178 - RNA, 19 nt, Artificial Sequence
  Description of Artificial Sequence: Synthetic oligonucleotide
auauuugucgaaucgaucu

SEQ ID NO: 20179 - RNA, 19 nt, Artificial Sequence
  Description of Artificial Sequence: Synthetic oligonucleotide
acuaagauuaagaugacag

SEQ ID NO: 20180 - RNA, 19 nt, Artificial Sequence
  Description of Artificial Sequence: Synthetic oligonucleotide
uggaauuuuagcauccaag

SEQ ID NO: 20181 - RNA, 19 nt, Artificial Sequence
  Description of Artificial Sequence: Synthetic oligonucleotide
uaauuuaucuaaaucucca

SEQ ID NO: 20182 - RNA, 19 nt, Artificial Sequence
  Description of Artificial Sequence: Synthetic oligonucleotide
uguggauuaacccuuaaau

SEQ ID NO: 20183 - RNA, 19 nt, Artificial Sequence
  Description of Artificial Sequence: Synthetic oligonucleotide
gaggcaugauaauaaaugg

SEQ ID NO: 20184 - RNA, 19 nt, Artificial Sequence
  Description of Artificial Sequence: Synthetic oligonucleotide
aaauccaagcauuugcugu

SEQ ID NO: 20185 - RNA, 19 nt, Artificial Sequence
  Description of Artificial Sequence: Synthetic oligonucleotide
aacaauaacugcaggcucc

SEQ ID NO: 20186 - RNA, 19 nt, Artificial Sequence
  Description of Artificial Sequence: Synthetic oligonucleotide
uuuaagccacccaugagag

SEQ ID NO: 20187 - RNA, 19 nt, Artificial Sequence
  Description of Artificial Sequence: Synthetic oligonucleotide
uaaauaccgccauauaucc

SEQ ID NO: 20188 - RNA, 19 nt, Artificial Sequence
  Description of Artificial Sequence: Synthetic oligonucleotide
aaugguaaaauuccuccca

SEQ ID NO: 20189 - RNA, 19 nt, Artificial Sequence
  Description of Artificial Sequence: Synthetic oligonucleotide
uuuucuccgggauaggacg

SEQ ID NO: 20190 - RNA, 19 nt, Artificial Sequence
  Description of Artificial Sequence: Synthetic oligonucleotide
agucaauagaaugaagccc

SEQ ID NO: 20191 - RNA, 19 nt, Artificial Sequence
  Description of Artificial Sequence: Synthetic oligonucleotide
acagaugcaacaaacggcc

SEQ ID NO: 20192 - RNA, 19 nt, Artificial Sequence
  Description of Artificial Sequence: Synthetic oligonucleotide
cuacauaaggcuuuguuug

SEQ ID NO: 20193 - RNA, 19 nt, Artificial Sequence
  Description of Artificial Sequence: Synthetic oligonucleotide
uagauuagagccucaauug

SEQ ID NO: 20194 - RNA, 19 nt, Artificial Sequence
  Description of Artificial Sequence: Synthetic oligonucleotide
uuuuauaggaaacucugau

SEQ ID NO: 20195 - RNA, 19 nt, Artificial Sequence
  Description of Artificial Sequence: Synthetic oligonucleotide
aauaccgccauauauccaa

SEQ ID NO: 20196 - RNA, 19 nt, Artificial Sequence
  Description of Artificial Sequence: Synthetic oligonucleotide
uuacauauacuccacugga

SEQ ID NO: 20197 - RNA, 19 nt, Artificial Sequence
  Description of Artificial Sequence: Synthetic oligonucleotide
aaacauagauugcaguuga

SEQ ID NO: 20198 - RNA, 19 nt, Artificial Sequence
  Description of Artificial Sequence: Synthetic oligonucleotide
ugaacgauucuacugagaa

SEQ ID NO: 20199 - RNA, 19 nt, Artificial Sequence
  Description of Artificial Sequence: Synthetic oligonucleotide
uuagauacuguuugaacga

SEQ ID NO: 20200 - RNA, 19 nt, Artificial Sequence
  Description of Artificial Sequence: Synthetic oligonucleotide
ugagucauaaaccaaccaa

SEQ ID NO: 20201 - RNA, 19 nt, Artificial Sequence
  Description of Artificial Sequence: Synthetic oligonucleotide
aaggcugugcuaaauaccg

SEQ ID NO: 20202 - RNA, 19 nt, Artificial Sequence
  Description of Artificial Sequence: Synthetic oligonucleotide
cuaaauaccgccauauauc

SEQ ID NO: 20203 - RNA, 19 nt, Artificial Sequence
  Description of Artificial Sequence: Synthetic oligonucleotide
uguuugaacgauucuacug

SEQ ID NO: 20204 - RNA, 19 nt, Artificial Sequence
  Description of Artificial Sequence: Synthetic oligonucleotide
aaacccuacaccuuaccug

SEQ ID NO: 20205 - RNA, 19 nt, Artificial Sequence
  Description of Artificial Sequence: Synthetic oligonucleotide
accggcaugaaagagaaac

SEQ ID NO: 20206 - RNA, 19 nt, Artificial Sequence
  Description of Artificial Sequence: Synthetic oligonucleotide
caauagaucaacaauggca

SEQ ID NO: 20207 - RNA, 19 nt, Artificial Sequence
  Description of Artificial Sequence: Synthetic oligonucleotide
acugcuaaaauacagcuua

SEQ ID NO: 20208 - RNA, 19 nt, Artificial Sequence
  Description of Artificial Sequence: Synthetic oligonucleotide
uccaacuaagauuaagaug

SEQ ID NO: 20209 - RNA, 19 nt, Artificial Sequence
  Description of Artificial Sequence: Synthetic oligonucleotide
uaagccacccaugagagag

SEQ ID NO: 20210 - RNA, 19 nt, Artificial Sequence
  Description of Artificial Sequence: Synthetic oligonucleotide
gauaugggcaaucacugug

SEQ ID NO: 20211 - RNA, 19 nt, Artificial Sequence
  Description of Artificial Sequence: Synthetic oligonucleotide
gaucaauggagauagaugu

SEQ ID NO: 20212 - RNA, 19 nt, Artificial Sequence
  Description of Artificial Sequence: Synthetic oligonucleotide
gaaccuaggaucaauggag

SEQ ID NO: 20213 - RNA, 19 nt, Artificial Sequence
  Description of Artificial Sequence: Synthetic oligonucleotide
ucauauagcauagggagug

SEQ ID NO: 20214 - RNA, 19 nt, Artificial Sequence
  Description of Artificial Sequence: Synthetic oligonucleotide
uuaccugcaagauuaugag

SEQ ID NO: 20215 - RNA, 19 nt, Artificial Sequence
  Description of Artificial Sequence: Synthetic oligonucleotide
aaauauggcgguacugagc

SEQ ID NO: 20216 - RNA, 19 nt, Artificial Sequence
  Description of Artificial Sequence: Synthetic oligonucleotide
uaacagacuagauuagagc

SEQ ID NO: 20217 - RNA, 19 nt, Artificial Sequence
  Description of Artificial Sequence: Synthetic oligonucleotide
uguuacuuaaaugucccag

SEQ ID NO: 20218 - RNA, 19 nt, Artificial Sequence
  Description of Artificial Sequence: Synthetic oligonucleotide
agaacuaggaagaacuagg

SEQ ID NO: 20219 - RNA, 19 nt, Artificial Sequence
  Description of Artificial Sequence: Synthetic oligonucleotide
aaaacccuacaccuuaccu

SEQ ID NO: 20220 - RNA, 19 nt, Artificial Sequence
  Description of Artificial Sequence: Synthetic oligonucleotide
auugagauagaacugguua

SEQ ID NO: 20221 - RNA, 19 nt, Artificial Sequence
  Description of Artificial Sequence: Synthetic oligonucleotide
agccaaaugguaaaauucc

SEQ ID NO: 20222 - RNA, 19 nt, Artificial Sequence
  Description of Artificial Sequence: Synthetic oligonucleotide
aacuauugguccucuucac

SEQ ID NO: 20223 - RNA, 19 nt, Artificial Sequence
  Description of Artificial Sequence: Synthetic oligonucleotide
aaacggccaccauuguucc

SEQ ID NO: 20224 - RNA, 19 nt, Artificial Sequence
  Description of Artificial Sequence: Synthetic oligonucleotide
uucuacaccaaucaucauc

SEQ ID NO: 20225 - RNA, 19 nt, Artificial Sequence
  Description of Artificial Sequence: Synthetic oligonucleotide
uacuguaucgggcauaauc

SEQ ID NO: 20226 - RNA, 19 nt, Artificial Sequence
  Description of Artificial Sequence: Synthetic oligonucleotide
ugauaauauucaaagcauc

SEQ ID NO: 20227 - RNA, 19 nt, Artificial Sequence
  Description of Artificial Sequence: Synthetic oligonucleotide
uaaacuauugguccucuuc

SEQ ID NO: 20228 - RNA, 19 nt, Artificial Sequence
  Description of Artificial Sequence: Synthetic oligonucleotide
uaaacauagauugcaguug

SEQ ID NO: 20229 - RNA, 19 nt, Artificial Sequence
  Description of Artificial Sequence: Synthetic oligonucleotide
ugagguugauccaacuaag

SEQ ID NO: 20230 - RNA, 19 nt, Artificial Sequence
  Description of Artificial Sequence: Synthetic oligonucleotide
aaagauugagccaaauggu

SEQ ID NO: 20231 - RNA, 19 nt, Artificial Sequence
  Description of Artificial Sequence: Synthetic oligonucleotide
cuaguuuacauauacucca

SEQ ID NO: 20232 - RNA, 19 nt, Artificial Sequence
  Description of Artificial Sequence: Synthetic oligonucleotide
uggaauugagauagaacug

SEQ ID NO: 20233 - RNA, 19 nt, Artificial Sequence
  Description of Artificial Sequence: Synthetic oligonucleotide
ucuacucauggaauuuuag

SEQ ID NO: 20234 - RNA, 19 nt, Artificial Sequence
  Description of Artificial Sequence: Synthetic oligonucleotide
agaugcaacaaacggccac

SEQ ID NO: 20235 - RNA, 19 nt, Artificial Sequence
  Description of Artificial Sequence: Synthetic oligonucleotide
ggugucauauagcauaggg

SEQ ID NO: 20236 - RNA, 19 nt, Artificial Sequence
  Description of Artificial Sequence: Synthetic oligonucleotide
aaccaauugcuccacacau

SEQ ID NO: 20237 - RNA, 19 nt, Artificial Sequence
  Description of Artificial Sequence: Synthetic oligonucleotide
ugugagucauaaaccaacc

SEQ ID NO: 20238 - RNA, 19 nt, Artificial Sequence
  Description of Artificial Sequence: Synthetic oligonucleotide
acagauuucggccaaguau

SEQ ID NO: 20239 - RNA, 19 nt, Artificial Sequence
  Description of Artificial Sequence: Synthetic oligonucleotide
uuuuguagguccaaagaua

SEQ ID NO: 20240 - RNA, 19 nt, Artificial Sequence
  Description of Artificial Sequence: Synthetic oligonucleotide
acaacugucaaguaacuuu

SEQ ID NO: 20241 - RNA, 19 nt, Artificial Sequence
  Description of Artificial Sequence: Synthetic oligonucleotide
auuuagcuguuacuuacag

SEQ ID NO: 20242 - RNA, 19 nt, Artificial Sequence
  Description of Artificial Sequence: Synthetic oligonucleotide
uggaacauuaaaucaggac

SEQ ID NO: 20243 - RNA, 19 nt, Artificial Sequence
  Description of Artificial Sequence: Synthetic oligonucleotide
ucuacauaaggcuuuguuu

SEQ ID NO: 20244 - RNA, 19 nt, Artificial Sequence
  Description of Artificial Sequence: Synthetic oligonucleotide
ugagagacacagcaaauau

SEQ ID NO: 20245 - RNA, 19 nt, Artificial Sequence
  Description of Artificial Sequence: Synthetic oligonucleotide
aggauuaacaaaauuaaau

SEQ ID NO: 20246 - RNA, 19 nt, Artificial Sequence
  Description of Artificial Sequence: Synthetic oligonucleotide
uccuauugcauguuccaag

SEQ ID NO: 20247 - RNA, 19 nt, Artificial Sequence
  Description of Artificial Sequence: Synthetic oligonucleotide
aacccaaugaugcuuuuau

SEQ ID NO: 20248 - RNA, 19 nt, Artificial Sequence
  Description of Artificial Sequence: Synthetic oligonucleotide
ugaccugacagauuucggc

SEQ ID NO: 20249 - RNA, 19 nt, Artificial Sequence
  Description of Artificial Sequence: Synthetic oligonucleotide
uauagaagcccuucgguau

SEQ ID NO: 20250 - RNA, 19 nt, Artificial Sequence
  Description of Artificial Sequence: Synthetic oligonucleotide
agcaacccuacucuuguac

SEQ ID NO: 20251 - RNA, 19 nt, Artificial Sequence
  Description of Artificial Sequence: Synthetic oligonucleotide
aguugggcugaccugacag

SEQ ID NO: 20252 - RNA, 19 nt, Artificial Sequence
  Description of Artificial Sequence: Synthetic oligonucleotide
uuugaacgauucuacugag

SEQ ID NO: 20253 - RNA, 19 nt, Artificial Sequence
  Description of Artificial Sequence: Synthetic oligonucleotide
ggaauugagauagaacugg

SEQ ID NO: 20254 - RNA, 19 nt, Artificial Sequence
  Description of Artificial Sequence: Synthetic oligonucleotide
aguguuaagcccaaaucuc

SEQ ID NO: 20255 - RNA, 19 nt, Artificial Sequence
  Description of Artificial Sequence: Synthetic oligonucleotide
agaaccuaggaucaaugga

SEQ ID NO: 20256 - RNA, 19 nt, Artificial Sequence
  Description of Artificial Sequence: Synthetic oligonucleotide
caaacggccaccauuguuc

SEQ ID NO: 20257 - RNA, 19 nt, Artificial Sequence
  Description of Artificial Sequence: Synthetic oligonucleotide
uugaauggagggacgacca

SEQ ID NO: 20258 - RNA, 19 nt, Artificial Sequence
  Description of Artificial Sequence: Synthetic oligonucleotide
aggcaugauaauaaauggc

SEQ ID NO: 20259 - RNA, 19 nt, Artificial Sequence
  Description of Artificial Sequence: Synthetic oligonucleotide
ucuccuaggucucugucca

SEQ ID NO: 20260 - RNA, 19 nt, Artificial Sequence
  Description of Artificial Sequence: Synthetic oligonucleotide
ugucgaaucgaucuucaaa

SEQ ID NO: 20261 - RNA, 19 nt, Artificial Sequence
  Description of Artificial Sequence: Synthetic oligonucleotide
uugagauagaacugguuaa

SEQ ID NO: 20262 - RNA, 19 nt, Artificial Sequence
  Description of Artificial Sequence: Synthetic oligonucleotide
guuucuacaccaaucauca

SEQ ID NO: 20263 - RNA, 19 nt, Artificial Sequence
  Description of Artificial Sequence: Synthetic oligonucleotide
uuaccugcagaauuuuaca

SEQ ID NO: 20264 - RNA, 19 nt, Artificial Sequence
  Description of Artificial Sequence: Synthetic oligonucleotide
aguggaacauuaaaucagg

SEQ ID NO: 20265 - RNA, 19 nt, Artificial Sequence
  Description of Artificial Sequence: Synthetic oligonucleotide
uacuccuauugcauguucc

SEQ ID NO: 20266 - RNA, 19 nt, Artificial Sequence
  Description of Artificial Sequence: Synthetic oligonucleotide
auaaggaaugccccaauaa

SEQ ID NO: 20267 - RNA, 19 nt, Artificial Sequence
  Description of Artificial Sequence: Synthetic oligonucleotide
gaccugacagauuucggcc

SEQ ID NO: 20268 - RNA, 19 nt, Artificial Sequence
  Description of Artificial Sequence: Synthetic oligonucleotide
cacacauuauccccaaggc

SEQ ID NO: 20269 - RNA, 19 nt, Artificial Sequence
  Description of Artificial Sequence: Synthetic oligonucleotide
uaaccaauugcuccacaca

SEQ ID NO: 20270 - RNA, 19 nt, Artificial Sequence
  Description of Artificial Sequence: Synthetic oligonucleotide
auaguagaucuuguaugcc

SEQ ID NO: 20271 - RNA, 19 nt, Artificial Sequence
  Description of Artificial Sequence: Synthetic oligonucleotide
ucagguaaauuaacagacu

SEQ ID NO: 20272 - RNA, 19 nt, Artificial Sequence
  Description of Artificial Sequence: Synthetic oligonucleotide
uccaaguuucccuauaguu

SEQ ID NO: 20273 - RNA, 19 nt, Artificial Sequence
  Description of Artificial Sequence: Synthetic oligonucleotide
gaaugcaguugaauggagg

SEQ ID NO: 20274 - RNA, 19 nt, Artificial Sequence
  Description of Artificial Sequence: Synthetic oligonucleotide
uguacacguuucuacauaa

SEQ ID NO: 20275 - RNA, 19 nt, Artificial Sequence
  Description of Artificial Sequence: Synthetic oligonucleotide
uaucuaguuuacauauacu

SEQ ID NO: 20276 - RNA, 19 nt, Artificial Sequence
  Description of Artificial Sequence: Synthetic oligonucleotide
agauuagagccucaauuga

SEQ ID NO: 20277 - RNA, 19 nt, Artificial Sequence
  Description of Artificial Sequence: Synthetic oligonucleotide
acagacgagaaacccaaug

SEQ ID NO: 20278 - RNA, 19 nt, Artificial Sequence
  Description of Artificial Sequence: Synthetic oligonucleotide
agcuacacgacauuauuaa

SEQ ID NO: 20279 - RNA, 19 nt, Artificial Sequence
  Description of Artificial Sequence: Synthetic oligonucleotide
ugauccaacuaagauuaag

SEQ ID NO: 20280 - RNA, 19 nt, Artificial Sequence
  Description of Artificial Sequence: Synthetic oligonucleotide
auauacuggauuucuacua

SEQ ID NO: 20281 - RNA, 19 nt, Artificial Sequence
  Description of Artificial Sequence: Synthetic oligonucleotide
gauguuugaaauaagccgu

SEQ ID NO: 20282 - RNA, 19 nt, Artificial Sequence
  Description of Artificial Sequence: Synthetic oligonucleotide
gauggaauugagauagaac

SEQ ID NO: 20283 - RNA, 19 nt, Artificial Sequence
  Description of Artificial Sequence: Synthetic oligonucleotide
ucaugcaaugguaggcgag

SEQ ID NO: 20284 - RNA, 19 nt, Artificial Sequence
  Description of Artificial Sequence: Synthetic oligonucleotide
aaauaucagagggugacuu

SEQ ID NO: 20285 - RNA, 19 nt, Artificial Sequence
  Description of Artificial Sequence: Synthetic oligonucleotide
aaucugaacuuaaaaucca

SEQ ID NO: 20286 - RNA, 19 nt, Artificial Sequence
  Description of Artificial Sequence: Synthetic oligonucleotide
gguuagauuaacaucaaca

SEQ ID NO: 20287 - RNA, 19 nt, Artificial Sequence
  Description of Artificial Sequence: Synthetic oligonucleotide
gagugcugaacucacuaug

SEQ ID NO: 20288 - RNA, 19 nt, Artificial Sequence
  Description of Artificial Sequence: Synthetic oligonucleotide
uauuaccuccaaaaugguc

SEQ ID NO: 20289 - RNA, 19 nt, Artificial Sequence
  Description of Artificial Sequence: Synthetic oligonucleotide
aaaauggucuaaacugaug

SEQ ID NO: 20290 - RNA, 19 nt, Artificial Sequence
  Description of Artificial Sequence: Synthetic oligonucleotide
uugaaacuaaacccacuaa

SEQ ID NO: 20291 - RNA, 19 nt, Artificial Sequence
  Description of Artificial Sequence: Synthetic oligonucleotide
auuugucgaaucgaucuuc

SEQ ID NO: 20292 - RNA, 19 nt, Artificial Sequence
  Description of Artificial Sequence: Synthetic oligonucleotide
caaauauggcgguacugag

SEQ ID NO: 20293 - RNA, 19 nt, Artificial Sequence
  Description of Artificial Sequence: Synthetic oligonucleotide
acuguaucgggcauaaucu

SEQ ID NO: 20294 - RNA, 19 nt, Artificial Sequence
  Description of Artificial Sequence: Synthetic oligonucleotide
gggaagauuagccauguac

SEQ ID NO: 20295 - RNA, 19 nt, Artificial Sequence
  Description of Artificial Sequence: Synthetic oligonucleotide
aauaaacuauugguccucu

SEQ ID NO: 20296 - RNA, 19 nt, Artificial Sequence
  Description of Artificial Sequence: Synthetic oligonucleotide
uggaaauagggugucauau

SEQ ID NO: 20297 - RNA, 19 nt, Artificial Sequence
  Description of Artificial Sequence: Synthetic oligonucleotide
uuauguugccccucuguga

SEQ ID NO: 20298 - RNA, 19 nt, Artificial Sequence
  Description of Artificial Sequence: Synthetic oligonucleotide
augacaucuguauuuuagu

SEQ ID NO: 20299 - RNA, 19 nt, Artificial Sequence
  Description of Artificial Sequence: Synthetic oligonucleotide
gacgagaaacccaaugaug

SEQ ID NO: 20300 - RNA, 19 nt, Artificial Sequence
  Description of Artificial Sequence: Synthetic oligonucleotide
gaugcaacaaacggccacc

SEQ ID NO: 20301 - RNA, 19 nt, Artificial Sequence
  Description of Artificial Sequence: Synthetic oligonucleotide
auguagcuauuccugaaca

SEQ ID NO: 20302 - RNA, 19 nt, Artificial Sequence
  Description of Artificial Sequence: Synthetic oligonucleotide
uagcuauuccugaacaaau

SEQ ID NO: 20303 - RNA, 19 nt, Artificial Sequence
  Description of Artificial Sequence: Synthetic oligonucleotide
acauuauauacuggauuuc

SEQ ID NO: 20304 - RNA, 19 nt, Artificial Sequence
  Description of Artificial Sequence: Synthetic oligonucleotide
ugugcaagcuccaccggca

SEQ ID NO: 20305 - RNA, 19 nt, Artificial Sequence
  Description of Artificial Sequence: Synthetic oligonucleotide
ccaaugaugcuuuuauagg

SEQ ID NO: 20306 - RNA, 19 nt, Artificial Sequence
  Description of Artificial Sequence: Synthetic oligonucleotide
acacauuauccccaaggcu

SEQ ID NO: 20307 - RNA, 19 nt, Artificial Sequence
  Description of Artificial Sequence: Synthetic oligonucleotide
guaaccaauugcuccacac

SEQ ID NO: 20308 - RNA, 19 nt, Artificial Sequence
  Description of Artificial Sequence: Synthetic oligonucleotide
uuucggccaaguauuguac

SEQ ID NO: 20309 - RNA, 19 nt, Artificial Sequence
  Description of Artificial Sequence: Synthetic oligonucleotide
aacuuaaagcuuaaagaua

SEQ ID NO: 20310 - RNA, 19 nt, Artificial Sequence
  Description of Artificial Sequence: Synthetic oligonucleotide
uagacaaauauggcgguac

SEQ ID NO: 20311 - RNA, 19 nt, Artificial Sequence
  Description of Artificial Sequence: Synthetic oligonucleotide
cacgacauuauuaauguua

SEQ ID NO: 20312 - RNA, 19 nt, Artificial Sequence
  Description of Artificial Sequence: Synthetic oligonucleotide
agguugauccaacuaagau

SEQ ID NO: 20313 - RNA, 19 nt, Artificial Sequence
  Description of Artificial Sequence: Synthetic oligonucleotide
agguaaauuaacagacuag

SEQ ID NO: 20314 - RNA, 19 nt, Artificial Sequence
  Description of Artificial Sequence: Synthetic oligonucleotide
gaguacccaguguuaagcc

SEQ ID NO: 20315 - RNA, 19 nt, Artificial Sequence
  Description of Artificial Sequence: Synthetic oligonucleotide
ccauguaaccaauugcucc

SEQ ID NO: 20316 - RNA, 19 nt, Artificial Sequence
  Description of Artificial Sequence: Synthetic oligonucleotide
aggugucuaaucaaucuuc

SEQ ID NO: 20317 - RNA, 19 nt, Artificial Sequence
  Description of Artificial Sequence: Synthetic oligonucleotide
augguauaccugaaacagc

SEQ ID NO: 20318 - RNA, 19 nt, Artificial Sequence
  Description of Artificial Sequence: Synthetic oligonucleotide
cuuugcgcacuacacacac

SEQ ID NO: 20319 - RNA, 19 nt, Artificial Sequence
  Description of Artificial Sequence: Synthetic oligonucleotide
cauuuaacacuuugcuuuc

SEQ ID NO: 20320 - RNA, 19 nt, Artificial Sequence
  Description of Artificial Sequence: Synthetic oligonucleotide
uuuacuguaucgggcauaa

SEQ ID NO: 20321 - RNA, 19 nt, Artificial Sequence
  Description of Artificial Sequence: Synthetic oligonucleotide
uacuguuugaacgauucua

SEQ ID NO: 20322 - RNA, 19 nt, Artificial Sequence
  Description of Artificial Sequence: Synthetic oligonucleotide
uccaagucaauagaaugaa

SEQ ID NO: 20323 - RNA, 19 nt, Artificial Sequence
  Description of Artificial Sequence: Synthetic oligonucleotide
agacgagaaacccaaugau

SEQ ID NO: 20324 - RNA, 19 nt, Artificial Sequence
  Description of Artificial Sequence: Synthetic oligonucleotide
uguagcuauuccugaacaa

SEQ ID NO: 20325 - RNA, 19 nt, Artificial Sequence
  Description of Artificial Sequence: Synthetic oligonucleotide
guuggaauauggccuacac

SEQ ID NO: 20326 - RNA, 19 nt, Artificial Sequence
  Description of Artificial Sequence: Synthetic oligonucleotide
aagaacuaggcuaccugug

SEQ ID NO: 20327 - RNA, 19 nt, Artificial Sequence
  Description of Artificial Sequence: Synthetic oligonucleotide
aaccccaauguuucaugca

SEQ ID NO: 20328 - RNA, 19 nt, Artificial Sequence
  Description of Artificial Sequence: Synthetic oligonucleotide
cagcauagacaaauauggc

SEQ ID NO: 20329 - RNA, 19 nt, Artificial Sequence
  Description of Artificial Sequence: Synthetic oligonucleotide
ucgggcauaaucuuuucuu

SEQ ID NO: 20330 - RNA, 19 nt, Artificial Sequence
  Description of Artificial Sequence: Synthetic oligonucleotide
acaucuugaagaaacccca

SEQ ID NO: 20331 - RNA, 19 nt, Artificial Sequence
  Description of Artificial Sequence: Synthetic oligonucleotide
guaggcgagaugugaaagc

SEQ ID NO: 20332 - RNA, 19 nt, Artificial Sequence
  Description of Artificial Sequence: Synthetic oligonucleotide
auagaagcccuucgguaug

SEQ ID NO: 20333 - RNA, 19 nt, Artificial Sequence
  Description of Artificial Sequence: Synthetic oligonucleotide
gauauuugucgaaucgauc

SEQ ID NO: 20334 - RNA, 19 nt, Artificial Sequence
  Description of Artificial Sequence: Synthetic oligonucleotide
uugaacgauucuacugaga

SEQ ID NO: 20335 - RNA, 19 nt, Artificial Sequence
  Description of Artificial Sequence: Synthetic oligonucleotide
ucugaaaacccuacaccuu

SEQ ID NO: 20336 - RNA, 19 nt, Artificial Sequence
  Description of Artificial Sequence: Synthetic oligonucleotide
uucggccaaguauuguacc

SEQ ID NO: 20337 - RNA, 19 nt, Artificial Sequence
  Description of Artificial Sequence: Synthetic oligonucleotide
gaacuaggcuaccugugac

SEQ ID NO: 20338 - RNA, 19 nt, Artificial Sequence
  Description of Artificial Sequence: Synthetic oligonucleotide
ugaaaacccuacaccuuac

SEQ ID NO: 20339 - RNA, 19 nt, Artificial Sequence
  Description of Artificial Sequence: Synthetic oligonucleotide
gaacgauucuacugagaac

SEQ ID NO: 20340 - RNA, 19 nt, Artificial Sequence
  Description of Artificial Sequence: Synthetic oligonucleotide
aguauuguaccaacaagau

SEQ ID NO: 20341 - RNA, 19 nt, Artificial Sequence
  Description of Artificial Sequence: Synthetic oligonucleotide
aagauugagccaaauggua

SEQ ID NO: 20342 - RNA, 19 nt, Artificial Sequence
  Description of Artificial Sequence: Synthetic oligonucleotide
ucggccaaguauuguacca

SEQ ID NO: 20343 - RNA, 19 nt, Artificial Sequence
  Description of Artificial Sequence: Synthetic oligonucleotide
auaucagagggugacuuga

SEQ ID NO: 20344 - RNA, 19 nt, Artificial Sequence
  Description of Artificial Sequence: Synthetic oligonucleotide
auaguccucugcauuuagc

SEQ ID NO: 20345 - RNA, 19 nt, Artificial Sequence
  Description of Artificial Sequence: Synthetic oligonucleotide
uauuugucgaaucgaucuu

SEQ ID NO: 20346 - RNA, 19 nt, Artificial Sequence
  Description of Artificial Sequence: Synthetic oligonucleotide
accgccauauauccaaagu

SEQ ID NO: 20347 - RNA, 19 nt, Artificial Sequence
  Description of Artificial Sequence: Synthetic oligonucleotide
uggaguacaaaagcccuac

SEQ ID NO: 20348 - RNA, 19 nt, Artificial Sequence
  Description of Artificial Sequence: Synthetic oligonucleotide
gacacgacaggggaaguug

SEQ ID NO: 20349 - RNA, 19 nt, Artificial Sequence
  Description of Artificial Sequence: Synthetic oligonucleotide
gacaaauauggcgguacug

SEQ ID NO: 20350 - RNA, 19 nt, Artificial Sequence
  Description of Artificial Sequence: Synthetic oligonucleotide
gaauuugcagcaacccuac

SEQ ID NO: 20351 - RNA, 19 nt, Artificial Sequence
  Description of Artificial Sequence: Synthetic oligonucleotide
gaagaacuaggcuaccugu

SEQ ID NO: 20352 - RNA, 19 nt, Artificial Sequence
  Description of Artificial Sequence: Synthetic oligonucleotide
acacguuucuacaccaauc

SEQ ID NO: 20353 - RNA, 19 nt, Artificial Sequence
  Description of Artificial Sequence: Synthetic oligonucleotide
guggauuaacccuuaaaua

SEQ ID NO: 20354 - RNA, 19 nt, Artificial Sequence
  Description of Artificial Sequence: Synthetic oligonucleotide
ugagauagaacugguuaau

SEQ ID NO: 20355 - RNA, 19 nt, Artificial Sequence
  Description of Artificial Sequence: Synthetic oligonucleotide
guaaacauagauugcaguu

SEQ ID NO: 20356 - RNA, 19 nt, Artificial Sequence
  Description of Artificial Sequence: Synthetic oligonucleotide
ucauguauagaagcccuuc

SEQ ID NO: 20357 - RNA, 19 nt, Artificial Sequence
  Description of Artificial Sequence: Synthetic oligonucleotide
cacguuucuacaccaauca

SEQ ID NO: 20358 - RNA, 19 nt, Artificial Sequence
  Description of Artificial Sequence: Synthetic oligonucleotide
caccuuaccugcaagauua

SEQ ID NO: 20359 - RNA, 19 nt, Artificial Sequence
  Description of Artificial Sequence: Synthetic oligonucleotide
ugugaggguaaguuacaaa

SEQ ID NO: 20360 - RNA, 19 nt, Artificial Sequence
  Description of Artificial Sequence: Synthetic oligonucleotide
gucgaaucgaucuucaaau

SEQ ID NO: 20361 - RNA, 19 nt, Artificial Sequence
  Description of Artificial Sequence: Synthetic oligonucleotide
uuauagaguucaccucuau

SEQ ID NO: 20362 - RNA, 19 nt, Artificial Sequence
  Description of Artificial Sequence: Synthetic oligonucleotide
acagcuacacgacauuauu

SEQ ID NO: 20363 - RNA, 19 nt, Artificial Sequence
  Description of Artificial Sequence: Synthetic oligonucleotide
aucugaacuuaaaauccag

SEQ ID NO: 20364 - RNA, 19 nt, Artificial Sequence
  Description of Artificial Sequence: Synthetic oligonucleotide
uuucuccgggauaggacga

SEQ ID NO: 20365 - RNA, 19 nt, Artificial Sequence
  Description of Artificial Sequence: Synthetic oligonucleotide
acccagguucaauauauaa

SEQ ID NO: 20366 - RNA, 19 nt, Artificial Sequence
  Description of Artificial Sequence: Synthetic oligonucleotide
agacaaauauggcgguacu

SEQ ID NO: 20367 - RNA, 19 nt, Artificial Sequence
  Description of Artificial Sequence: Synthetic oligonucleotide
acccuacucuuguacuugg

SEQ ID NO: 20368 - RNA, 19 nt, Artificial Sequence
  Description of Artificial Sequence: Synthetic oligonucleotide
aggaucaauggagauagau

SEQ ID NO: 20369 - RNA, 19 nt, Artificial Sequence
  Description of Artificial Sequence: Synthetic oligonucleotide
ggaucaauggagauagaug

SEQ ID NO: 20370 - RNA, 19 nt, Artificial Sequence
  Description of Artificial Sequence: Synthetic oligonucleotide
agauauuugucgaaucgau

SEQ ID NO: 20371 - RNA, 19 nt, Artificial Sequence
  Description of Artificial Sequence: Synthetic oligonucleotide
ggcugugcuaaauaccgcc

SEQ ID NO: 20372 - RNA, 19 nt, Artificial Sequence
  Description of Artificial Sequence: Synthetic oligonucleotide
agaccaguauaagaaguca

SEQ ID NO: 20373 - RNA, 19 nt, Artificial Sequence
  Description of Artificial Sequence: Synthetic oligonucleotide
cuagauuagagccucaauu

SEQ ID NO: 20374 - RNA, 19 nt, Artificial Sequence
  Description of Artificial Sequence: Synthetic oligonucleotide
acuagauuagagccucaau

SEQ ID NO: 20375 - RNA, 19 nt, Artificial Sequence
  Description of Artificial Sequence: Synthetic oligonucleotide
cuuuagauguuacuuaaau

SEQ ID NO: 20376 - RNA, 19 nt, Artificial Sequence
  Description of Artificial Sequence: Synthetic oligonucleotide
acgacauuauuaauguuau

SEQ ID NO: 20377 - RNA, 19 nt, Artificial Sequence
  Description of Artificial Sequence: Synthetic oligonucleotide
gcuauuccugaacaaauga

SEQ ID NO: 20378 - RNA, 19 nt, Artificial Sequence
  Description of Artificial Sequence: Synthetic oligonucleotide
caaagcaucagcugacaaa

SEQ ID NO: 20379 - RNA, 19 nt, Artificial Sequence
  Description of Artificial Sequence: Synthetic oligonucleotide
caguguuaagcccaaaucu

SEQ ID NO: 20380 - RNA, 19 nt, Artificial Sequence
  Description of Artificial Sequence: Synthetic oligonucleotide
uaugggcaaucacuguguc

SEQ ID NO: 20381 - RNA, 19 nt, Artificial Sequence
  Description of Artificial Sequence: Synthetic oligonucleotide
acaaaagcccuaccuucca

SEQ ID NO: 20382 - RNA, 19 nt, Artificial Sequence
  Description of Artificial Sequence: Synthetic oligonucleotide
auacuguuugaacgauucu

SEQ ID NO: 20383 - RNA, 19 nt, Artificial Sequence
  Description of Artificial Sequence: Synthetic oligonucleotide
cucaggugucuaaucaauc

SEQ ID NO: 20384 - RNA, 19 nt, Artificial Sequence
  Description of Artificial Sequence: Synthetic oligonucleotide
agcccuaccuuccaauuaa

SEQ ID NO: 20385 - RNA, 19 nt, Artificial Sequence
  Description of Artificial Sequence: Synthetic oligonucleotide
gaaugccccaauaaacauc

SEQ ID NO: 20386 - RNA, 19 nt, Artificial Sequence
  Description of Artificial Sequence: Synthetic oligonucleotide
uaccgccauauauccaaag

SEQ ID NO: 20387 - RNA, 19 nt, Artificial Sequence
  Description of Artificial Sequence: Synthetic oligonucleotide
agaucaccaucaugaagga

SEQ ID NO: 20388 - RNA, 19 nt, Artificial Sequence
  Description of Artificial Sequence: Synthetic oligonucleotide
gguaaguuacaaacugugc

SEQ ID NO: 20389 - RNA, 19 nt, Artificial Sequence
  Description of Artificial Sequence: Synthetic oligonucleotide
aacaaacggccaccauugu

SEQ ID NO: 20390 - RNA, 19 nt, Artificial Sequence
  Description of Artificial Sequence: Synthetic oligonucleotide
ggguaaguuacaaacugug

SEQ ID NO: 20391 - RNA, 19 nt, Artificial Sequence
  Description of Artificial Sequence: Synthetic oligonucleotide
auaagccguacaucuuugu

SEQ ID NO: 20392 - RNA, 19 nt, Artificial Sequence
  Description of Artificial Sequence: Synthetic oligonucleotide
cagacuagauuagagccuc

SEQ ID NO: 20393 - RNA, 19 nt, Artificial Sequence
  Description of Artificial Sequence: Synthetic oligonucleotide
ugagcuaguuuggggaaga

SEQ ID NO: 20394 - RNA, 19 nt, Artificial Sequence
  Description of Artificial Sequence: Synthetic oligonucleotide
ucgaacaaaggcacuuguu

SEQ ID NO: 20395 - RNA, 19 nt, Artificial Sequence
  Description of Artificial Sequence: Synthetic oligonucleotide
gcugaccugacagauuucg

SEQ ID NO: 20396 - RNA, 19 nt, Artificial Sequence
  Description of Artificial Sequence: Synthetic oligonucleotide
accucuauuuucauacugu

SEQ ID NO: 20397 - RNA, 19 nt, Artificial Sequence
  Description of Artificial Sequence: Synthetic oligonucleotide
uuggaaauagggugucaua

SEQ ID NO: 20398 - RNA, 19 nt, Artificial Sequence
  Description of Artificial Sequence: Synthetic oligonucleotide
acgaguacccaguguuaag

SEQ ID NO: 20399 - RNA, 19 nt, Artificial Sequence
  Description of Artificial Sequence: Synthetic oligonucleotide
aagcccuaccuuccaauua

SEQ ID NO: 20400 - RNA, 19 nt, Artificial Sequence
  Description of Artificial Sequence: Synthetic oligonucleotide
auguuacuuaaauguccca

SEQ ID NO: 20401 - RNA, 19 nt, Artificial Sequence
  Description of Artificial Sequence: Synthetic oligonucleotide
guagcuauuccugaacaaa

SEQ ID NO: 20402 - RNA, 19 nt, Artificial Sequence
  Description of Artificial Sequence: Synthetic oligonucleotide
gcaguguacacguuucuac

SEQ ID NO: 20403 - RNA, 19 nt, Artificial Sequence
  Description of Artificial Sequence: Synthetic oligonucleotide
agaguccuccagucaaucu

SEQ ID NO: 20404 - RNA, 19 nt, Artificial Sequence
  Description of Artificial Sequence: Synthetic oligonucleotide
gauuucuacucauggaauu

SEQ ID NO: 20405 - RNA, 19 nt, Artificial Sequence
  Description of Artificial Sequence: Synthetic oligonucleotide
auugauccccucucuguau

SEQ ID NO: 20406 - RNA, 19 nt, Artificial Sequence
  Description of Artificial Sequence: Synthetic oligonucleotide
acagacuagauuagagccu

SEQ ID NO: 20407 - RNA, 19 nt, Artificial Sequence
  Description of Artificial Sequence: Synthetic oligonucleotide
aagcagucaguaagaaccu

SEQ ID NO: 20408 - RNA, 19 nt, Artificial Sequence
  Description of Artificial Sequence: Synthetic oligonucleotide
gugucauauagcauaggga

SEQ ID NO: 20409 - RNA, 19 nt, Artificial Sequence
  Description of Artificial Sequence: Synthetic oligonucleotide
gacauccucaugccucuac

SEQ ID NO: 20410 - RNA, 19 nt, Artificial Sequence
  Description of Artificial Sequence: Synthetic oligonucleotide
auugaaucugauacauuau

SEQ ID NO: 20411 - RNA, 19 nt, Artificial Sequence
  Description of Artificial Sequence: Synthetic oligonucleotide
gugagucauaaaccaacca

SEQ ID NO: 20412 - RNA, 19 nt, Artificial Sequence
  Description of Artificial Sequence: Synthetic oligonucleotide
ccauguacuguaguaaagc

SEQ ID NO: 20413 - RNA, 19 nt, Artificial Sequence
  Description of Artificial Sequence: Synthetic oligonucleotide
acacuaagugccaggaaga

SEQ ID NO: 20414 - RNA, 19 nt, Artificial Sequence
  Description of Artificial Sequence: Synthetic oligonucleotide
agaacccagguucaauaua

SEQ ID NO: 20415 - RNA, 19 nt, Artificial Sequence
  Description of Artificial Sequence: Synthetic oligonucleotide
agauuucuacucauggaau

SEQ ID NO: 20416 - RNA, 19 nt, Artificial Sequence
  Description of Artificial Sequence: Synthetic oligonucleotide
cugaaaacccuacaccuua

SEQ ID NO: 20417 - RNA, 19 nt, Artificial Sequence
  Description of Artificial Sequence: Synthetic oligonucleotide
uuaagccacccaugagaga

SEQ ID NO: 20418 - RNA, 19 nt, Artificial Sequence
  Description of Artificial Sequence: Synthetic oligonucleotide
uccuaggucucuguccaug

SEQ ID NO: 20419 - RNA, 19 nt, Artificial Sequence
  Description of Artificial Sequence: Synthetic oligonucleotide
acaaacggccaccauuguu

SEQ ID NO: 20420 - RNA, 19 nt, Artificial Sequence
  Description of Artificial Sequence: Synthetic oligonucleotide
gaucuuguaugcccagaaa

SEQ ID NO: 20421 - RNA, 19 nt, Artificial Sequence
  Description of Artificial Sequence: Synthetic oligonucleotide
ggcaugauaauaaauggcu

SEQ ID NO: 20422 - RNA, 19 nt, Artificial Sequence
  Description of Artificial Sequence: Synthetic oligonucleotide
ucgaaucgaucuucaaauu

SEQ ID NO: 20423 - RNA, 19 nt, Artificial Sequence
  Description of Artificial Sequence: Synthetic oligonucleotide
uagcauccaaguuucccua

SEQ ID NO: 20424 - RNA, 19 nt, Artificial Sequence
  Description of Artificial Sequence: Synthetic oligonucleotide
gguaggcgagaugugaaag

SEQ ID NO: 20425 - RNA, 19 nt, Artificial Sequence
  Description of Artificial Sequence: Synthetic oligonucleotide
gcuaaauaccgccauauau

SEQ ID NO: 20426 - RNA, 19 nt, Artificial Sequence
  Description of Artificial Sequence: Synthetic oligonucleotide
agggaccuacagcuacacg

SEQ ID NO: 20427 - RNA, 19 nt, Artificial Sequence
  Description of Artificial Sequence: Synthetic oligonucleotide
aggguaaguuacaaacugu

SEQ ID NO: 20428 - RNA, 19 nt, Artificial Sequence
  Description of Artificial Sequence: Synthetic oligonucleotide
uugccuaguccaccagaac

SEQ ID NO: 20429 - RNA, 19 nt, Artificial Sequence
  Description of Artificial Sequence: Synthetic oligonucleotide
acacgacaggggaaguugg

SEQ ID NO: 20430 - RNA, 19 nt, Artificial Sequence
  Description of Artificial Sequence: Synthetic oligonucleotide
ggaagauuagccauguacu

SEQ ID NO: 20431 - RNA, 19 nt, Artificial Sequence
  Description of Artificial Sequence: Synthetic oligonucleotide
gacaugcucaacugcuaaa

SEQ ID NO: 20432 - RNA, 19 nt, Artificial Sequence
  Description of Artificial Sequence: Synthetic oligonucleotide
aaagaguccuccagucaau

SEQ ID NO: 20433 - RNA, 19 nt, Artificial Sequence
  Description of Artificial Sequence: Synthetic oligonucleotide
gagguugauccaacuaaga

SEQ ID NO: 20434 - RNA, 19 nt, Artificial Sequence
  Description of Artificial Sequence: Synthetic oligonucleotide
gaaguaugacacacacauc

SEQ ID NO: 20435 - RNA, 19 nt, Artificial Sequence
  Description of Artificial Sequence: Synthetic oligonucleotide
agaaacccaaugaugcuuu

SEQ ID NO: 20436 - RNA, 19 nt, Artificial Sequence
  Description of Artificial Sequence: Synthetic oligonucleotide
ugccccuacaauucaugua

SEQ ID NO: 20437 - RNA, 19 nt, Artificial Sequence
  Description of Artificial Sequence: Synthetic oligonucleotide
ugcgcacuacacacacaug

SEQ ID NO: 20438 - RNA, 19 nt, Artificial Sequence
  Description of Artificial Sequence: Synthetic oligonucleotide
gcauugacacgacagggga

SEQ ID NO: 20439 - RNA, 19 nt, Artificial Sequence
  Description of Artificial Sequence: Synthetic oligonucleotide
uggauggaauugagauaga

SEQ ID NO: 20440 - RNA, 19 nt, Artificial Sequence
  Description of Artificial Sequence: Synthetic oligonucleotide
uccccucucuguauauaaa

SEQ ID NO: 20441 - RNA, 19 nt, Artificial Sequence
  Description of Artificial Sequence: Synthetic oligonucleotide
ggaauuugcagcaacccua

SEQ ID NO: 20442 - RNA, 19 nt, Artificial Sequence
  Description of Artificial Sequence: Synthetic oligonucleotide
ggaaguugggcugaccuga

SEQ ID NO: 20443 - RNA, 19 nt, Artificial Sequence
  Description of Artificial Sequence: Synthetic oligonucleotide
ugucuggcauacagacuuc

SEQ ID NO: 20444 - RNA, 19 nt, Artificial Sequence
  Description of Artificial Sequence: Synthetic oligonucleotide
agauuucggccaaguauug

SEQ ID NO: 20445 - RNA, 19 nt, Artificial Sequence
  Description of Artificial Sequence: Synthetic oligonucleotide
gacagauuucggccaagua

SEQ ID NO: 20446 - RNA, 19 nt, Artificial Sequence
  Description of Artificial Sequence: Synthetic oligonucleotide
ugcaacaaacggccaccau

SEQ ID NO: 20447 - RNA, 19 nt, Artificial Sequence
  Description of Artificial Sequence: Synthetic oligonucleotide
augcacuugcuuccaucca

SEQ ID NO: 20448 - RNA, 19 nt, Artificial Sequence
  Description of Artificial Sequence: Synthetic oligonucleotide
cuucgguauguagcuauuc

SEQ ID NO: 20449 - RNA, 19 nt, Artificial Sequence
  Description of Artificial Sequence: Synthetic oligonucleotide
caugcaaugguaggcgaga

SEQ ID NO: 20450 - RNA, 19 nt, Artificial Sequence
  Description of Artificial Sequence: Synthetic oligonucleotide
gacuagauuagagccucaa

SEQ ID NO: 20451 - RNA, 19 nt, Artificial Sequence
  Description of Artificial Sequence: Synthetic oligonucleotide
gaccuacagcuacacgaca

SEQ ID NO: 20452 - RNA, 19 nt, Artificial Sequence
  Description of Artificial Sequence: Synthetic oligonucleotide
ugauccccucucuguauau

SEQ ID NO: 20453 - RNA, 19 nt, Artificial Sequence
  Description of Artificial Sequence: Synthetic oligonucleotide
accuacagcuacacgacau

SEQ ID NO: 20454 - RNA, 19 nt, Artificial Sequence
  Description of Artificial Sequence: Synthetic oligonucleotide
caaaauggucuaaacugau

SEQ ID NO: 20455 - RNA, 19 nt, Artificial Sequence
  Description of Artificial Sequence: Synthetic oligonucleotide
uuuuaccuuugcgcacuac

SEQ ID NO: 20456 - RNA, 19 nt, Artificial Sequence
  Description of Artificial Sequence: Synthetic oligonucleotide
ccaaguauuguaccaacaa

SEQ ID NO: 20457 - RNA, 19 nt, Artificial Sequence
  Description of Artificial Sequence: Synthetic oligonucleotide
guggaacauuaaaucagga

SEQ ID NO: 20458 - RNA, 19 nt, Artificial Sequence
  Description of Artificial Sequence: Synthetic oligonucleotide
ggccaaguauuguaccaac

SEQ ID NO: 20459 - RNA, 19 nt, Artificial Sequence
  Description of Artificial Sequence: Synthetic oligonucleotide
aguaugacacacacaucuu

SEQ ID NO: 20460 - RNA, 19 nt, Artificial Sequence
  Description of Artificial Sequence: Synthetic oligonucleotide
cuaggcuaccugugaccug

SEQ ID NO: 20461 - RNA, 19 nt, Artificial Sequence
  Description of Artificial Sequence: Synthetic oligonucleotide
cagcuacacgacauuauua

SEQ ID NO: 20462 - RNA, 19 nt, Artificial Sequence
  Description of Artificial Sequence: Synthetic oligonucleotide
cuuguaugcccagaaagau

SEQ ID NO: 20463 - RNA, 19 nt, Artificial Sequence
  Description of Artificial Sequence: Synthetic oligonucleotide
cauugacacgacaggggaa

SEQ ID NO: 20464 - RNA, 19 nt, Artificial Sequence
  Description of Artificial Sequence: Synthetic oligonucleotide
ugaagagagcuggucuauu

SEQ ID NO: 20465 - RNA, 19 nt, Artificial Sequence
  Description of Artificial Sequence: Synthetic oligonucleotide
ggaccuacagcuacacgac

SEQ ID NO: 20466 - RNA, 19 nt, Artificial Sequence
  Description of Artificial Sequence: Synthetic oligonucleotide
cacuucugacauccucaug

SEQ ID NO: 20467 - RNA, 19 nt, Artificial Sequence
  Description of Artificial Sequence: Synthetic oligonucleotide
ggaagugauaugggcaauc

SEQ ID NO: 20468 - RNA, 19 nt, Artificial Sequence
  Description of Artificial Sequence: Synthetic oligonucleotide
ggauggaauugagauagaa

SEQ ID NO: 20469 - RNA, 19 nt, Artificial Sequence
  Description of Artificial Sequence: Synthetic oligonucleotide
augcaacaaacggccacca

SEQ ID NO: 20470 - RNA, 19 nt, Artificial Sequence
  Description of Artificial Sequence: Synthetic oligonucleotide
cccauguaaccaauugcuc

SEQ ID NO: 20471 - RNA, 19 nt, Artificial Sequence
  Description of Artificial Sequence: Synthetic oligonucleotide
gccccuacaauucauguau

SEQ ID NO: 20472 - RNA, 19 nt, Artificial Sequence
  Description of Artificial Sequence: Synthetic oligonucleotide
ugacacgacaggggaaguu

SEQ ID NO: 20473 - RNA, 19 nt, Artificial Sequence
  Description of Artificial Sequence: Synthetic oligonucleotide
uugacacgacaggggaagu

SEQ ID NO: 20474 - RNA, 19 nt, Artificial Sequence
  Description of Artificial Sequence: Synthetic oligonucleotide
cgaguacccaguguuaagc

SEQ ID NO: 20475 - RNA, 19 nt, Artificial Sequence
  Description of Artificial Sequence: Synthetic oligonucleotide
gucauauagcauagggagu

SEQ ID NO: 20476 - RNA, 19 nt, Artificial Sequence
  Description of Artificial Sequence: Synthetic oligonucleotide
uugaugcagcagagagaaa

SEQ ID NO: 20477 - RNA, 19 nt, Artificial Sequence
  Description of Artificial Sequence: Synthetic oligonucleotide
caguugaauggagggacga

SEQ ID NO: 20478 - RNA, 19 nt, Artificial Sequence
  Description of Artificial Sequence: Synthetic oligonucleotide
accuguugacugccaugcu

SEQ ID NO: 20479 - RNA, 19 nt, Artificial Sequence
  Description of Artificial Sequence: Synthetic oligonucleotide
ggucuaaagacaucuccau

SEQ ID NO: 20480 - RNA, 19 nt, Artificial Sequence
  Description of Artificial Sequence: Synthetic oligonucleotide
gaaauaagccguacaucuu

SEQ ID NO: 20481 - RNA, 19 nt, Artificial Sequence
  Description of Artificial Sequence: Synthetic oligonucleotide
gccauauauccaaaguaaa

SEQ ID NO: 20482 - RNA, 19 nt, Artificial Sequence
  Description of Artificial Sequence: Synthetic oligonucleotide
caacaacugucaaguaacu

SEQ ID NO: 20483 - RNA, 19 nt, Artificial Sequence
  Description of Artificial Sequence: Synthetic oligonucleotide
aacccagguucaauauaua

SEQ ID NO: 20484 - RNA, 19 nt, Artificial Sequence
  Description of Artificial Sequence: Synthetic oligonucleotide
gagauagaacugguuaauu

SEQ ID NO: 20485 - RNA, 19 nt, Artificial Sequence
  Description of Artificial Sequence: Synthetic oligonucleotide
cugcauuuagcaggaagua

SEQ ID NO: 20486 - RNA, 19 nt, Artificial Sequence
  Description of Artificial Sequence: Synthetic oligonucleotide
cacgaguacccaguguuaa

SEQ ID NO: 20487 - RNA, 19 nt, Artificial Sequence
  Description of Artificial Sequence: Synthetic oligonucleotide
cgccauauauccaaaguaa

SEQ ID NO: 20488 - RNA, 19 nt, Artificial Sequence
  Description of Artificial Sequence: Synthetic oligonucleotide
gcaugauaauaaauggcua

SEQ ID NO: 20489 - RNA, 19 nt, Artificial Sequence
  Description of Artificial Sequence: Synthetic oligonucleotide
aagccacccaugagagaga

SEQ ID NO: 20490 - RNA, 19 nt, Artificial Sequence
  Description of Artificial Sequence: Synthetic oligonucleotide
gugugaggguaaguuacaa

SEQ ID NO: 20491 - RNA, 19 nt, Artificial Sequence
  Description of Artificial Sequence: Synthetic oligonucleotide
gccucaauugaaucugaua

SEQ ID NO: 20492 - RNA, 19 nt, Artificial Sequence
  Description of Artificial Sequence: Synthetic oligonucleotide
cguggggacuugaagguuc

SEQ ID NO: 20493 - RNA, 19 nt, Artificial Sequence
  Description of Artificial Sequence: Synthetic oligonucleotide
caugcucaacugcuaaaau

SEQ ID NO: 20494 - RNA, 19 nt, Artificial Sequence
  Description of Artificial Sequence: Synthetic oligonucleotide
cgauucuacugagaacuag

SEQ ID NO: 20495 - RNA, 19 nt, Artificial Sequence
  Description of Artificial Sequence: Synthetic oligonucleotide
gccaaguauuguaccaaca

SEQ ID NO: 20496 - RNA, 19 nt, Artificial Sequence
  Description of Artificial Sequence: Synthetic oligonucleotide
gguauaccugaaacagcca

SEQ ID NO: 20497 - RNA, 19 nt, Artificial Sequence
  Description of Artificial Sequence: Synthetic oligonucleotide
caggugucuaaucaaucuu

SEQ ID NO: 20498 - RNA, 19 nt, Artificial Sequence
  Description of Artificial Sequence: Synthetic oligonucleotide
gcugugcuaaauaccgcca

SEQ ID NO: 20499 - RNA, 19 nt, Artificial Sequence
  Description of Artificial Sequence: Synthetic oligonucleotide
ccgccauauauccaaagua

SEQ ID NO: 20500 - RNA, 19 nt, Artificial Sequence
  Description of Artificial Sequence: Synthetic oligonucleotide
cacacguuucuacaccaau

SEQ ID NO: 20501 - RNA, 19 nt, Artificial Sequence
  Description of Artificial Sequence: Synthetic oligonucleotide
gauccccucucuguauaua

SEQ ID NO: 20502 - RNA, 19 nt, Artificial Sequence
  Description of Artificial Sequence: Synthetic oligonucleotide
gggauaggacgaggcacag

SEQ ID NO: 20503 - RNA, 19 nt, Artificial Sequence
  Description of Artificial Sequence: Synthetic oligonucleotide
agacuagauuagagccuca

SEQ ID NO: 20504 - RNA, 19 nt, Artificial Sequence
  Description of Artificial Sequence: Synthetic oligonucleotide
gagcucaacuuagcagaaa

SEQ ID NO: 20505 - RNA, 19 nt, Artificial Sequence
  Description of Artificial Sequence: Synthetic oligonucleotide
gcucaacugcuaaaauaca

SEQ ID NO: 20506 - RNA, 19 nt, Artificial Sequence
  Description of Artificial Sequence: Synthetic oligonucleotide
auaccgccauauauccaaa

SEQ ID NO: 20507 - RNA, 19 nt, Artificial Sequence
  Description of Artificial Sequence: Synthetic oligonucleotide
cacuauguagcuggagggu

SEQ ID NO: 20508 - RNA, 19 nt, Artificial Sequence
  Description of Artificial Sequence: Synthetic oligonucleotide
cagcuuaccugcagaauuu

SEQ ID NO: 20509 - RNA, 19 nt, Artificial Sequence
  Description of Artificial Sequence: Synthetic oligonucleotide
acgauucuacugagaacua

SEQ ID NO: 20510 - RNA, 19 nt, Artificial Sequence
  Description of Artificial Sequence: Synthetic oligonucleotide
uggcgguacugagcauuga

SEQ ID NO: 20511 - RNA, 19 nt, Artificial Sequence
  Description of Artificial Sequence: Synthetic oligonucleotide
caacccuacucuuguacuu

SEQ ID NO: 20512 - RNA, 19 nt, Artificial Sequence
  Description of Artificial Sequence: Synthetic oligonucleotide
ccuuaaauagaguggcuuu

SEQ ID NO: 20513 - RNA, 19 nt, Artificial Sequence
  Description of Artificial Sequence: Synthetic oligonucleotide
ccuaguccaccagaacuuc

SEQ ID NO: 20514 - RNA, 19 nt, Artificial Sequence
  Description of Artificial Sequence: Synthetic oligonucleotide
ccguacaucuuugucuuga

SEQ ID NO: 20515 - RNA, 19 nt, Artificial Sequence
  Description of Artificial Sequence: Synthetic oligonucleotide
gcuaucuaguuuacauaua

SEQ ID NO: 20516 - RNA, 19 nt, Artificial Sequence
  Description of Artificial Sequence: Synthetic oligonucleotide
gcuguuacuuacagcauuu

SEQ ID NO: 20517 - RNA, 19 nt, Artificial Sequence
  Description of Artificial Sequence: Synthetic oligonucleotide
ccuuugcgcacuacacaca

SEQ ID NO: 20518 - RNA, 19 nt, Artificial Sequence
  Description of Artificial Sequence: Synthetic oligonucleotide
caccuauaguccucugcau

SEQ ID NO: 20519 - RNA, 19 nt, Artificial Sequence
  Description of Artificial Sequence: Synthetic oligonucleotide
cgggauaggacgaggcaca

SEQ ID NO: 20520 - RNA, 19 nt, Artificial Sequence
  Description of Artificial Sequence: Synthetic oligonucleotide
accuuaccugcaagauuau

SEQ ID NO: 20521 - RNA, 19 nt, Artificial Sequence
  Description of Artificial Sequence: Synthetic oligonucleotide
gcuuaccugcagaauuuua

SEQ ID NO: 20522 - RNA, 19 nt, Artificial Sequence
  Description of Artificial Sequence: Synthetic oligonucleotide
gcccuaagaagugcugaaa

SEQ ID NO: 20523 - RNA, 19 nt, Artificial Sequence
  Description of Artificial Sequence: Synthetic oligonucleotide
ccggcaugaaagagaaacu

SEQ ID NO: 20524 - RNA, 19 nt, Artificial Sequence
  Description of Artificial Sequence: Synthetic oligonucleotide
ccccucucuguauauaaau

SEQ ID NO: 20525 - RNA, 19 nt, Artificial Sequence
  Description of Artificial Sequence: Synthetic oligonucleotide
gcucuagaggcaugauaau

SEQ ID NO: 20526 - RNA, 19 nt, Artificial Sequence
  Description of Artificial Sequence: Synthetic oligonucleotide
gccuaguccaccagaacuu

SEQ ID NO: 20527 - RNA, 19 nt, Artificial Sequence
  Description of Artificial Sequence: Synthetic oligonucleotide
ggcugaccugacagauuuc

SEQ ID NO: 20528 - RNA, 19 nt, Artificial Sequence
  Description of Artificial Sequence: Synthetic oligonucleotide
cuccuaggucucuguccau

SEQ ID NO: 20529 - RNA, 19 nt, Artificial Sequence
  Description of Artificial Sequence: Synthetic oligonucleotide
cggccaaguauuguaccaa

SEQ ID NO: 20530 - RNA, 19 nt, Artificial Sequence
  Description of Artificial Sequence: Synthetic oligonucleotide
ccuucgguauguagcuauu

SEQ ID NO: 20531 - RNA, 19 nt, Artificial Sequence
  Description of Artificial Sequence: Synthetic oligonucleotide
ccguggggacuugaagguu

SEQ ID NO: 20532 - RNA, 19 nt, Artificial Sequence
  Description of Artificial Sequence: Synthetic oligonucleotide
agcacuauaaauuuuaggg

SEQ ID NO: 20533 - RNA, 19 nt, Artificial Sequence
  Description of Artificial Sequence: Synthetic oligonucleotide
aagggugucuauuugaugg

SEQ ID NO: 20534 - RNA, 19 nt, Artificial Sequence
  Description of Artificial Sequence: Synthetic oligonucleotide
guuacagacagauaaaagg

SEQ ID NO: 20535 - RNA, 19 nt, Artificial Sequence
  Description of Artificial Sequence: Synthetic oligonucleotide
aacuaggugauugucaucc

SEQ ID NO: 20536 - RNA, 19 nt, Artificial Sequence
  Description of Artificial Sequence: Synthetic oligonucleotide
agagcauacuuacagaagc

SEQ ID NO: 20537 - RNA, 19 nt, Artificial Sequence
  Description of Artificial Sequence: Synthetic oligonucleotide
agaaauaugacaucaaggu

SEQ ID NO: 20538 - RNA, 19 nt, Artificial Sequence
  Description of Artificial Sequence: Synthetic oligonucleotide
uuauuaucucaccacaagg

SEQ ID NO: 20539 - RNA, 19 nt, Artificial Sequence
  Description of Artificial Sequence: Synthetic oligonucleotide
aguaauuaaagcugguggg

SEQ ID NO: 20540 - RNA, 19 nt, Artificial Sequence
  Description of Artificial Sequence: Synthetic oligonucleotide
auuuaucucaccuagagau

SEQ ID NO: 20541 - RNA, 19 nt, Artificial Sequence
  Description of Artificial Sequence: Synthetic oligonucleotide
aaaguaagucaaaaggagc

SEQ ID NO: 20542 - RNA, 19 nt, Artificial Sequence
  Description of Artificial Sequence: Synthetic oligonucleotide
ucauaauuggacagaacgg

SEQ ID NO: 20543 - RNA, 19 nt, Artificial Sequence
  Description of Artificial Sequence: Synthetic oligonucleotide
uuuauuaucucaccacaag

SEQ ID NO: 20544 - RNA, 19 nt, Artificial Sequence
  Description of Artificial Sequence: Synthetic oligonucleotide
aagacucaaacucaguucu

SEQ ID NO: 20545 - RNA, 19 nt, Artificial Sequence
  Description of Artificial Sequence: Synthetic oligonucleotide
auggccauaauuuauuauc

SEQ ID NO: 20546 - RNA, 19 nt, Artificial Sequence
  Description of Artificial Sequence: Synthetic oligonucleotide
aaaaggagccuagcgaucc

SEQ ID NO: 20547 - RNA, 19 nt, Artificial Sequence
  Description of Artificial Sequence: Synthetic oligonucleotide
uuaaaucacaccacuacca

SEQ ID NO: 20548 - RNA, 19 nt, Artificial Sequence
  Description of Artificial Sequence: Synthetic oligonucleotide
accacugucaaguuucacc

SEQ ID NO: 20549 - RNA, 19 nt, Artificial Sequence
  Description of Artificial Sequence: Synthetic oligonucleotide
auaagaaacggacugcuug

SEQ ID NO: 20550 - RNA, 19 nt, Artificial Sequence
  Description of Artificial Sequence: Synthetic oligonucleotide
aagcacuuaacacugguga

SEQ ID NO: 20551 - RNA, 19 nt, Artificial Sequence
  Description of Artificial Sequence: Synthetic oligonucleotide
agagagaugcuuucuaccg

SEQ ID NO: 20552 - RNA, 19 nt, Artificial Sequence
  Description of Artificial Sequence: Synthetic oligonucleotide
uuugauggaaacguguuag

SEQ ID NO: 20553 - RNA, 19 nt, Artificial Sequence
  Description of Artificial Sequence: Synthetic oligonucleotide
uaagaaacggacugcuugg

SEQ ID NO: 20554 - RNA, 19 nt, Artificial Sequence
  Description of Artificial Sequence: Synthetic oligonucleotide
uaauuuauuaucucaccac

SEQ ID NO: 20555 - RNA, 19 nt, Artificial Sequence
  Description of Artificial Sequence: Synthetic oligonucleotide
acuaccagaugcaaaagcc

SEQ ID NO: 20556 - RNA, 19 nt, Artificial Sequence
  Description of Artificial Sequence: Synthetic oligonucleotide
uuucaaguccauuugggug

SEQ ID NO: 20557 - RNA, 19 nt, Artificial Sequence
  Description of Artificial Sequence: Synthetic oligonucleotide
auccuguagguacuuagcc

SEQ ID NO: 20558 - RNA, 19 nt, Artificial Sequence
  Description of Artificial Sequence: Synthetic oligonucleotide
aaaggcaucccuugcaagu

SEQ ID NO: 20559 - RNA, 19 nt, Artificial Sequence
  Description of Artificial Sequence: Synthetic oligonucleotide
agucaaaaggagccuagcg

SEQ ID NO: 20560 - RNA, 19 nt, Artificial Sequence
  Description of Artificial Sequence: Synthetic oligonucleotide
cauuucaaguccauuuggg

SEQ ID NO: 20561 - RNA, 19 nt, Artificial Sequence
  Description of Artificial Sequence: Synthetic oligonucleotide
ugcauuacaagaggguugg

SEQ ID NO: 20562 - RNA, 19 nt, Artificial Sequence
  Description of Artificial Sequence: Synthetic oligonucleotide
agaaaaugagauucgcuca

SEQ ID NO: 20563 - RNA, 19 nt, Artificial Sequence
  Description of Artificial Sequence: Synthetic oligonucleotide
uguauuccuaggaucaaac

SEQ ID NO: 20564 - RNA, 19 nt, Artificial Sequence
  Description of Artificial Sequence: Synthetic oligonucleotide
ugacaauuggugcacagaa

SEQ ID NO: 20565 - RNA, 19 nt, Artificial Sequence
  Description of Artificial Sequence: Synthetic oligonucleotide
ucuauuugauggaaacgug

SEQ ID NO: 20566 - RNA, 19 nt, Artificial Sequence
  Description of Artificial Sequence: Synthetic oligonucleotide
ucaaaaggagccuagcgau

SEQ ID NO: 20567 - RNA, 19 nt, Artificial Sequence
  Description of Artificial Sequence: Synthetic oligonucleotide
ucuugugugggacugcaca

SEQ ID NO: 20568 - RNA, 19 nt, Artificial Sequence
  Description of Artificial Sequence: Synthetic oligonucleotide
aggucagacacauacuaag

SEQ ID NO: 20569 - RNA, 19 nt, Artificial Sequence
  Description of Artificial Sequence: Synthetic oligonucleotide
acuagacaugcuuggcucc

SEQ ID NO: 20570 - RNA, 19 nt, Artificial Sequence
  Description of Artificial Sequence: Synthetic oligonucleotide
uugcaagugacccacuaga

SEQ ID NO: 20571 - RNA, 19 nt, Artificial Sequence
  Description of Artificial Sequence: Synthetic oligonucleotide
caagaagggcuauucaagc

SEQ ID NO: 20572 - RNA, 19 nt, Artificial Sequence
  Description of Artificial Sequence: Synthetic oligonucleotide
ucagcacuauaaauuuuag

SEQ ID NO: 20573 - RNA, 19 nt, Artificial Sequence
  Description of Artificial Sequence: Synthetic oligonucleotide
uaagacucaaacucaguuc

SEQ ID NO: 20574 - RNA, 19 nt, Artificial Sequence
  Description of Artificial Sequence: Synthetic oligonucleotide
ggagucuaaacuuggaacc

SEQ ID NO: 20575 - RNA, 19 nt, Artificial Sequence
  Description of Artificial Sequence: Synthetic oligonucleotide
aagucaaaaggagccuagc

SEQ ID NO: 20576 - RNA, 19 nt, Artificial Sequence
  Description of Artificial Sequence: Synthetic oligonucleotide
agagugaugcaguguggcc

SEQ ID NO: 20577 - RNA, 19 nt, Artificial Sequence
  Description of Artificial Sequence: Synthetic oligonucleotide
accacaaggcacaauacac

SEQ ID NO: 20578 - RNA, 19 nt, Artificial Sequence
  Description of Artificial Sequence: Synthetic oligonucleotide
gagagagaugcuuucuacc

SEQ ID NO: 20579 - RNA, 19 nt, Artificial Sequence
  Description of Artificial Sequence: Synthetic oligonucleotide
guagguccacaacaaaagg

SEQ ID NO: 20580 - RNA, 19 nt, Artificial Sequence
  Description of Artificial Sequence: Synthetic oligonucleotide
uggaaguuguuucaacccu

SEQ ID NO: 20581 - RNA, 19 nt, Artificial Sequence
  Description of Artificial Sequence: Synthetic oligonucleotide
uuccgcaacuaucaauucc

SEQ ID NO: 20582 - RNA, 19 nt, Artificial Sequence
  Description of Artificial Sequence: Synthetic oligonucleotide
gacagcgaaaucaaacaag

SEQ ID NO: 20583 - RNA, 19 nt, Artificial Sequence
  Description of Artificial Sequence: Synthetic oligonucleotide
cuuaaagggaccccuugag

SEQ ID NO: 20584 - RNA, 19 nt, Artificial Sequence
  Description of Artificial Sequence: Synthetic oligonucleotide
cagguuaccgugcagcagg

SEQ ID NO: 20585 - RNA, 19 nt, Artificial Sequence
  Description of Artificial Sequence: Synthetic oligonucleotide
ucuggcaacuaggugauug

SEQ ID NO: 20586 - RNA, 19 nt, Artificial Sequence
  Description of Artificial Sequence: Synthetic oligonucleotide
acuaagggugucuauuuga

SEQ ID NO: 20587 - RNA, 19 nt, Artificial Sequence
  Description of Artificial Sequence: Synthetic oligonucleotide
uacugccugacuccaaaag

SEQ ID NO: 20588 - RNA, 19 nt, Artificial Sequence
  Description of Artificial Sequence: Synthetic oligonucleotide
cuaccucauaauuggacag

SEQ ID NO: 20589 - RNA, 19 nt, Artificial Sequence
  Description of Artificial Sequence: Synthetic oligonucleotide
uuaugagagggccaauguc

SEQ ID NO: 20590 - RNA, 19 nt, Artificial Sequence
  Description of Artificial Sequence: Synthetic oligonucleotide
ugaaaccuacugucaaaag

SEQ ID NO: 20591 - RNA, 19 nt, Artificial Sequence
  Description of Artificial Sequence: Synthetic oligonucleotide
aaagaaucuauggauccau

SEQ ID NO: 20592 - RNA, 19 nt, Artificial Sequence
  Description of Artificial Sequence: Synthetic oligonucleotide
aacugggacgaggucagac

SEQ ID NO: 20593 - RNA, 19 nt, Artificial Sequence
  Description of Artificial Sequence: Synthetic oligonucleotide
uaaacaccauuuuaaucaa

SEQ ID NO: 20594 - RNA, 19 nt, Artificial Sequence
  Description of Artificial Sequence: Synthetic oligonucleotide
uucggagguagugugaucu

SEQ ID NO: 20595 - RNA, 19 nt, Artificial Sequence
  Description of Artificial Sequence: Synthetic oligonucleotide
uaauuggacagaacgggua

SEQ ID NO: 20596 - RNA, 19 nt, Artificial Sequence
  Description of Artificial Sequence: Synthetic oligonucleotide
gacuagacaugcuuggcuc

SEQ ID NO: 20597 - RNA, 19 nt, Artificial Sequence
  Description of Artificial Sequence: Synthetic oligonucleotide
gucaaaaggagccuagcga

SEQ ID NO: 20598 - RNA, 19 nt, Artificial Sequence
  Description of Artificial Sequence: Synthetic oligonucleotide
auagcagacagcccuauuu

SEQ ID NO: 20599 - RNA, 19 nt, Artificial Sequence
  Description of Artificial Sequence: Synthetic oligonucleotide
gauuuaucucaccuagaga

SEQ ID NO: 20600 - RNA, 19 nt, Artificial Sequence
  Description of Artificial Sequence: Synthetic oligonucleotide
uacuaagggugucuauuug

SEQ ID NO: 20601 - RNA, 19 nt, Artificial Sequence
  Description of Artificial Sequence: Synthetic oligonucleotide
cauacucuagacacccagc

SEQ ID NO: 20602 - RNA, 19 nt, Artificial Sequence
  Description of Artificial Sequence: Synthetic oligonucleotide
acuaggugauugucauccc

SEQ ID NO: 20603 - RNA, 19 nt, Artificial Sequence
  Description of Artificial Sequence: Synthetic oligonucleotide
uccuguagguacuuagcca

SEQ ID NO: 20604 - RNA, 19 nt, Artificial Sequence
  Description of Artificial Sequence: Synthetic oligonucleotide
acugccugacuccaaaaga

SEQ ID NO: 20605 - RNA, 19 nt, Artificial Sequence
  Description of Artificial Sequence: Synthetic oligonucleotide
uagccaauggcgauucaga

SEQ ID NO: 20606 - RNA, 19 nt, Artificial Sequence
  Description of Artificial Sequence: Synthetic oligonucleotide
ucgcucaaggcacacaaau

SEQ ID NO: 20607 - RNA, 19 nt, Artificial Sequence
  Description of Artificial Sequence: Synthetic oligonucleotide
gacguaaaauaaggaagag

SEQ ID NO: 20608 - RNA, 19 nt, Artificial Sequence
  Description of Artificial Sequence: Synthetic oligonucleotide
ugcacgccaucagauaugg

SEQ ID NO: 20609 - RNA, 19 nt, Artificial Sequence
  Description of Artificial Sequence: Synthetic oligonucleotide
aaucaaacaaggacuccca

SEQ ID NO: 20610 - RNA, 19 nt, Artificial Sequence
  Description of Artificial Sequence: Synthetic oligonucleotide
cuaggugauugucaucccc

SEQ ID NO: 20611 - RNA, 19 nt, Artificial Sequence
  Description of Artificial Sequence: Synthetic oligonucleotide
uucugaguagcuccaugga

SEQ ID NO: 20612 - RNA, 19 nt, Artificial Sequence
  Description of Artificial Sequence: Synthetic oligonucleotide
ugggagucuaaacuuggaa

SEQ ID NO: 20613 - RNA, 19 nt, Artificial Sequence
  Description of Artificial Sequence: Synthetic oligonucleotide
auauaaaagcaggggucac

SEQ ID NO: 20614 - RNA, 19 nt, Artificial Sequence
  Description of Artificial Sequence: Synthetic oligonucleotide
aaagggaccccuugagaau

SEQ ID NO: 20615 - RNA, 19 nt, Artificial Sequence
  Description of Artificial Sequence: Synthetic oligonucleotide
caucccuugcaagugaccc

SEQ ID NO: 20616 - RNA, 19 nt, Artificial Sequence
  Description of Artificial Sequence: Synthetic oligonucleotide
cacuaccucauaauuggac

SEQ ID NO: 20617 - RNA, 19 nt, Artificial Sequence
  Description of Artificial Sequence: Synthetic oligonucleotide
accccuuugccaccguggc

SEQ ID NO: 20618 - RNA, 19 nt, Artificial Sequence
  Description of Artificial Sequence: Synthetic oligonucleotide
uuaucucaccuagagauuu

SEQ ID NO: 20619 - RNA, 19 nt, Artificial Sequence
  Description of Artificial Sequence: Synthetic oligonucleotide
uaagggugucuauuugaug

SEQ ID NO: 20620 - RNA, 19 nt, Artificial Sequence
  Description of Artificial Sequence: Synthetic oligonucleotide
gaagggugucaagugacag

SEQ ID NO: 20621 - RNA, 19 nt, Artificial Sequence
  Description of Artificial Sequence: Synthetic oligonucleotide
uaauuaaagcuggugggau

SEQ ID NO: 20622 - RNA, 19 nt, Artificial Sequence
  Description of Artificial Sequence: Synthetic oligonucleotide
uagauccagaggacuauac

SEQ ID NO: 20623 - RNA, 19 nt, Artificial Sequence
  Description of Artificial Sequence: Synthetic oligonucleotide
cuugcaagugacccacuag

SEQ ID NO: 20624 - RNA, 19 nt, Artificial Sequence
  Description of Artificial Sequence: Synthetic oligonucleotide
aucugccuuaaagggaccc

SEQ ID NO: 20625 - RNA, 19 nt, Artificial Sequence
  Description of Artificial Sequence: Synthetic oligonucleotide
gguagguccacaacaaaag

SEQ ID NO: 20626 - RNA, 19 nt, Artificial Sequence
  Description of Artificial Sequence: Synthetic oligonucleotide
gggagucuaaacuuggaac

SEQ ID NO: 20627 - RNA, 19 nt, Artificial Sequence
  Description of Artificial Sequence: Synthetic oligonucleotide
uuuaucucaccuagagauu

SEQ ID NO: 20628 - RNA, 19 nt, Artificial Sequence
  Description of Artificial Sequence: Synthetic oligonucleotide
aguaccuugcacaggaacu

SEQ ID NO: 20629 - RNA, 19 nt, Artificial Sequence
  Description of Artificial Sequence: Synthetic oligonucleotide
acuuagccaauggcgauuc

SEQ ID NO: 20630 - RNA, 19 nt, Artificial Sequence
  Description of Artificial Sequence: Synthetic oligonucleotide
uccagaggacuauacccug

SEQ ID NO: 20631 - RNA, 19 nt, Artificial Sequence
  Description of Artificial Sequence: Synthetic oligonucleotide
gucauauauggcagcagag

SEQ ID NO: 20632 - RNA, 19 nt, Artificial Sequence
  Description of Artificial Sequence: Synthetic oligonucleotide
cuuugguagagacuuuuga

SEQ ID NO: 20633 - RNA, 19 nt, Artificial Sequence
  Description of Artificial Sequence: Synthetic oligonucleotide
gugauugucauccccagua

SEQ ID NO: 20634 - RNA, 19 nt, Artificial Sequence
  Description of Artificial Sequence: Synthetic oligonucleotide
guaauuaaagcugguggga

SEQ ID NO: 20635 - RNA, 19 nt, Artificial Sequence
  Description of Artificial Sequence: Synthetic oligonucleotide
gacaauuggugcacagaag

SEQ ID NO: 20636 - RNA, 19 nt, Artificial Sequence
  Description of Artificial Sequence: Synthetic oligonucleotide
aaggcaucccuugcaagug

SEQ ID NO: 20637 - RNA, 19 nt, Artificial Sequence
  Description of Artificial Sequence: Synthetic oligonucleotide
auacuaagggugucuauuu

SEQ ID NO: 20638 - RNA, 19 nt, Artificial Sequence
  Description of Artificial Sequence: Synthetic oligonucleotide
gagcauacuuacagaagcc

SEQ ID NO: 20639 - RNA, 19 nt, Artificial Sequence
  Description of Artificial Sequence: Synthetic oligonucleotide
agacugacauugcugcuca

SEQ ID NO: 20640 - RNA, 19 nt, Artificial Sequence
  Description of Artificial Sequence: Synthetic oligonucleotide
aagggcuauucaagcuucc

SEQ ID NO: 20641 - RNA, 19 nt, Artificial Sequence
  Description of Artificial Sequence: Synthetic oligonucleotide
cuuucuaccgcacugcugu

SEQ ID NO: 20642 - RNA, 19 nt, Artificial Sequence
  Description of Artificial Sequence: Synthetic oligonucleotide
acuucccauauaaagcuug

SEQ ID NO: 20643 - RNA, 19 nt, Artificial Sequence
  Description of Artificial Sequence: Synthetic oligonucleotide
cauagagcauacuuacaga

SEQ ID NO: 20644 - RNA, 19 nt, Artificial Sequence
  Description of Artificial Sequence: Synthetic oligonucleotide
uuggugcacagaaguaaac

SEQ ID NO: 20645 - RNA, 19 nt, Artificial Sequence
  Description of Artificial Sequence: Synthetic oligonucleotide
gguuacagacagauaaaag

SEQ ID NO: 20646 - RNA, 19 nt, Artificial Sequence
  Description of Artificial Sequence: Synthetic oligonucleotide
acugggacgaggucagaca

SEQ ID NO: 20647 - RNA, 19 nt, Artificial Sequence
  Description of Artificial Sequence: Synthetic oligonucleotide
ccauuuacagaauuggcca

SEQ ID NO: 20648 - RNA, 19 nt, Artificial Sequence
  Description of Artificial Sequence: Synthetic oligonucleotide
uuuaaucaagggugcugaa

SEQ ID NO: 20649 - RNA, 19 nt, Artificial Sequence
  Description of Artificial Sequence: Synthetic oligonucleotide
uuacagaauuggccaguac

SEQ ID NO: 20650 - RNA, 19 nt, Artificial Sequence
  Description of Artificial Sequence: Synthetic oligonucleotide
ggaacucacccaugaaucc

SEQ ID NO: 20651 - RNA, 19 nt, Artificial Sequence
  Description of Artificial Sequence: Synthetic oligonucleotide
aucauagcuuugaggcugc

SEQ ID NO: 20652 - RNA, 19 nt, Artificial Sequence
  Description of Artificial Sequence: Synthetic oligonucleotide
uucccuuaugagagggcca

SEQ ID NO: 20653 - RNA, 19 nt, Artificial Sequence
  Description of Artificial Sequence: Synthetic oligonucleotide
uaaagcuggugggauucag

SEQ ID NO: 20654 - RNA, 19 nt, Artificial Sequence
  Description of Artificial Sequence: Synthetic oligonucleotide
cuauuugauggaaacgugu

SEQ ID NO: 20655 - RNA, 19 nt, Artificial Sequence
  Description of Artificial Sequence: Synthetic oligonucleotide
cugggacgaggucagacac

SEQ ID NO: 20656 - RNA, 19 nt, Artificial Sequence
  Description of Artificial Sequence: Synthetic oligonucleotide
caguaccuugcacaggaac

SEQ ID NO: 20657 - RNA, 19 nt, Artificial Sequence
  Description of Artificial Sequence: Synthetic oligonucleotide
acggagaacccaaccuucc

SEQ ID NO: 20658 - RNA, 19 nt, Artificial Sequence
  Description of Artificial Sequence: Synthetic oligonucleotide
uacucuagacacccagcuc

SEQ ID NO: 20659 - RNA, 19 nt, Artificial Sequence
  Description of Artificial Sequence: Synthetic oligonucleotide
ggaguaauuaaagcuggug

SEQ ID NO: 20660 - RNA, 19 nt, Artificial Sequence
  Description of Artificial Sequence: Synthetic oligonucleotide
uugugggcaaccacagguc

SEQ ID NO: 20661 - RNA, 19 nt, Artificial Sequence
  Description of Artificial Sequence: Synthetic oligonucleotide
caaccgcacaaggagacag

SEQ ID NO: 20662 - RNA, 19 nt, Artificial Sequence
  Description of Artificial Sequence: Synthetic oligonucleotide
ucugccuuaaagggacccc

SEQ ID NO: 20663 - RNA, 19 nt, Artificial Sequence
  Description of Artificial Sequence: Synthetic oligonucleotide
auacauccaagaauagagu

SEQ ID NO: 20664 - RNA, 19 nt, Artificial Sequence
  Description of Artificial Sequence: Synthetic oligonucleotide
acaagacauguuugcccag

SEQ ID NO: 20665 - RNA, 19 nt, Artificial Sequence
  Description of Artificial Sequence: Synthetic oligonucleotide
agcgauccccaauauugcu

SEQ ID NO: 20666 - RNA, 19 nt, Artificial Sequence
  Description of Artificial Sequence: Synthetic oligonucleotide
gugcauuacaagaggguug

SEQ ID NO: 20667 - RNA, 19 nt, Artificial Sequence
  Description of Artificial Sequence: Synthetic oligonucleotide
caggggucacauuuacaag

SEQ ID NO: 20668 - RNA, 19 nt, Artificial Sequence
  Description of Artificial Sequence: Synthetic oligonucleotide
gguacuuagccaauggcga

SEQ ID NO: 20669 - RNA, 19 nt, Artificial Sequence
  Description of Artificial Sequence: Synthetic oligonucleotide
caaaaggagccuagcgauc

SEQ ID NO: 20670 - RNA, 19 nt, Artificial Sequence
  Description of Artificial Sequence: Synthetic oligonucleotide
ugcucucuaaguggcagcu

SEQ ID NO: 20671 - RNA, 19 nt, Artificial Sequence
  Description of Artificial Sequence: Synthetic oligonucleotide
cagugaggcggaugggucc

SEQ ID NO: 20672 - RNA, 19 nt, Artificial Sequence
  Description of Artificial Sequence: Synthetic oligonucleotide
cuaucaccuucccuuauga

SEQ ID NO: 20673 - RNA, 19 nt, Artificial Sequence
  Description of Artificial Sequence: Synthetic oligonucleotide
guaagcacaccugggacuc

SEQ ID NO: 20674 - RNA, 19 nt, Artificial Sequence
  Description of Artificial Sequence: Synthetic oligonucleotide
auccagaggacuauacccu

SEQ ID NO: 20675 - RNA, 19 nt, Artificial Sequence
  Description of Artificial Sequence: Synthetic oligonucleotide
aagccgcuaucccuucugu

SEQ ID NO: 20676 - RNA, 19 nt, Artificial Sequence
  Description of Artificial Sequence: Synthetic oligonucleotide
aaccuacugucaaaaguaa

SEQ ID NO: 20677 - RNA, 19 nt, Artificial Sequence
  Description of Artificial Sequence: Synthetic oligonucleotide
aauaggagguugggaggca

SEQ ID NO: 20678 - RNA, 19 nt, Artificial Sequence
  Description of Artificial Sequence: Synthetic oligonucleotide
accuacugucaaaaguaag

SEQ ID NO: 20679 - RNA, 19 nt, Artificial Sequence
  Description of Artificial Sequence: Synthetic oligonucleotide
gggccaaccucauagguca

SEQ ID NO: 20680 - RNA, 19 nt, Artificial Sequence
  Description of Artificial Sequence: Synthetic oligonucleotide
ggucuuagaagaagacuag

SEQ ID NO: 20681 - RNA, 19 nt, Artificial Sequence
  Description of Artificial Sequence: Synthetic oligonucleotide
agaaacggacugcuuggaa

SEQ ID NO: 20682 - RNA, 19 nt, Artificial Sequence
  Description of Artificial Sequence: Synthetic oligonucleotide
ucacacuauacugccugac

SEQ ID NO: 20683 - RNA, 19 nt, Artificial Sequence
  Description of Artificial Sequence: Synthetic oligonucleotide
aacuuaggcugcucagcua

SEQ ID NO: 20684 - RNA, 19 nt, Artificial Sequence
  Description of Artificial Sequence: Synthetic oligonucleotide
gguuuaggcuggcugguug

SEQ ID NO: 20685 - RNA, 19 nt, Artificial Sequence
  Description of Artificial Sequence: Synthetic oligonucleotide
aacuccucacucacacuug

SEQ ID NO: 20686 - RNA, 19 nt, Artificial Sequence
  Description of Artificial Sequence: Synthetic oligonucleotide
guagugugaucuccuggac

SEQ ID NO: 20687 - RNA, 19 nt, Artificial Sequence
  Description of Artificial Sequence: Synthetic oligonucleotide
acaagaggguugguaaccu

SEQ ID NO: 20688 - RNA, 19 nt, Artificial Sequence
  Description of Artificial Sequence: Synthetic oligonucleotide
ucccuuaugagagggccaa

SEQ ID NO: 20689 - RNA, 19 nt, Artificial Sequence
  Description of Artificial Sequence: Synthetic oligonucleotide
ucucaccuagagauuucau

SEQ ID NO: 20690 - RNA, 19 nt, Artificial Sequence
  Description of Artificial Sequence: Synthetic oligonucleotide
aacggacugcuuggaaaug

SEQ ID NO: 20691 - RNA, 19 nt, Artificial Sequence
  Description of Artificial Sequence: Synthetic oligonucleotide
uuuaggcuggcugguugug

SEQ ID NO: 20692 - RNA, 19 nt, Artificial Sequence
  Description of Artificial Sequence: Synthetic oligonucleotide
acauguuugcccaguggug

SEQ ID NO: 20693 - RNA, 19 nt, Artificial Sequence
  Description of Artificial Sequence: Synthetic oligonucleotide
ugggacgaggucagacaca

SEQ ID NO: 20694 - RNA, 19 nt, Artificial Sequence
  Description of Artificial Sequence: Synthetic oligonucleotide
agauucccuggugacaggu

SEQ ID NO: 20695 - RNA, 19 nt, Artificial Sequence
  Description of Artificial Sequence: Synthetic oligonucleotide
ggcugcaugaacacuggag

SEQ ID NO: 20696 - RNA, 19 nt, Artificial Sequence
  Description of Artificial Sequence: Synthetic oligonucleotide
uccauagcagacagcccua

SEQ ID NO: 20697 - RNA, 19 nt, Artificial Sequence
  Description of Artificial Sequence: Synthetic oligonucleotide
accucauaauuggacagaa

SEQ ID NO: 20698 - RNA, 19 nt, Artificial Sequence
  Description of Artificial Sequence: Synthetic oligonucleotide
gcuuacagagaaaaugaga

SEQ ID NO: 20699 - RNA, 19 nt, Artificial Sequence
  Description of Artificial Sequence: Synthetic oligonucleotide
cuuccgcaacuaucaauuc

SEQ ID NO: 20700 - RNA, 19 nt, Artificial Sequence
  Description of Artificial Sequence: Synthetic oligonucleotide
gaauuggccaguacugugu

SEQ ID NO: 20701 - RNA, 19 nt, Artificial Sequence
  Description of Artificial Sequence: Synthetic oligonucleotide
cagcgcuuuucugaguagc

SEQ ID NO: 20702 - RNA, 19 nt, Artificial Sequence
  Description of Artificial Sequence: Synthetic oligonucleotide
agccuagcgauccccaaua

SEQ ID NO: 20703 - RNA, 19 nt, Artificial Sequence
  Description of Artificial Sequence: Synthetic oligonucleotide
cuuaugagagggccaaugu

SEQ ID NO: 20704 - RNA, 19 nt, Artificial Sequence
  Description of Artificial Sequence: Synthetic oligonucleotide
gugggauucagcuggaguu

SEQ ID NO: 20705 - RNA, 19 nt, Artificial Sequence
  Description of Artificial Sequence: Synthetic oligonucleotide
uuuauccuguagguacuua

SEQ ID NO: 20706 - RNA, 19 nt, Artificial Sequence
  Description of Artificial Sequence: Synthetic oligonucleotide
augagacauacaagagcag

SEQ ID NO: 20707 - RNA, 19 nt, Artificial Sequence
  Description of Artificial Sequence: Synthetic oligonucleotide
uucgcucaaggcacacaaa

SEQ ID NO: 20708 - RNA, 19 nt, Artificial Sequence
  Description of Artificial Sequence: Synthetic oligonucleotide
acuucggagguagugugau

SEQ ID NO: 20709 - RNA, 19 nt, Artificial Sequence
  Description of Artificial Sequence: Synthetic oligonucleotide
aggugcauuacaagagggu

SEQ ID NO: 20710 - RNA, 19 nt, Artificial Sequence
  Description of Artificial Sequence: Synthetic oligonucleotide
cacuaccaacuccucacuc

SEQ ID NO: 20711 - RNA, 19 nt, Artificial Sequence
  Description of Artificial Sequence: Synthetic oligonucleotide
gugucaagugacagagggc

SEQ ID NO: 20712 - RNA, 19 nt, Artificial Sequence
  Description of Artificial Sequence: Synthetic oligonucleotide
cugcacgccaucagauaug

SEQ ID NO: 20713 - RNA, 19 nt, Artificial Sequence
  Description of Artificial Sequence: Synthetic oligonucleotide
gucuaaacuuggaaccauc

SEQ ID NO: 20714 - RNA, 19 nt, Artificial Sequence
  Description of Artificial Sequence: Synthetic oligonucleotide
auacugccugacuccaaaa

SEQ ID NO: 20715 - RNA, 19 nt, Artificial Sequence
  Description of Artificial Sequence: Synthetic oligonucleotide
cagcccacuuguaagcaca

SEQ ID NO: 20716 - RNA, 19 nt, Artificial Sequence
  Description of Artificial Sequence: Synthetic oligonucleotide
aacuucccauauaaagcuu

SEQ ID NO: 20717 - RNA, 19 nt, Artificial Sequence
  Description of Artificial Sequence: Synthetic oligonucleotide
caauggccauaauuuauua

SEQ ID NO: 20718 - RNA, 19 nt, Artificial Sequence
  Description of Artificial Sequence: Synthetic oligonucleotide
cacuagauccagaggacua

SEQ ID NO: 20719 - RNA, 19 nt, Artificial Sequence
  Description of Artificial Sequence: Synthetic oligonucleotide
uacuuagccaauggcgauu

SEQ ID NO: 20720 - RNA, 19 nt, Artificial Sequence
  Description of Artificial Sequence: Synthetic oligonucleotide
caauuggugcacagaagua

SEQ ID NO: 20721 - RNA, 19 nt, Artificial Sequence
  Description of Artificial Sequence: Synthetic oligonucleotide
auguugaguugggagggga

SEQ ID NO: 20722 - RNA, 19 nt, Artificial Sequence
  Description of Artificial Sequence: Synthetic oligonucleotide
caacuaggugauugucauc

SEQ ID NO: 20723 - RNA, 19 nt, Artificial Sequence
  Description of Artificial Sequence: Synthetic oligonucleotide
cuaagggugucuauuugau

SEQ ID NO: 20724 - RNA, 19 nt, Artificial Sequence
  Description of Artificial Sequence: Synthetic oligonucleotide
gcaacuuaggcugcucagc

SEQ ID NO: 20725 - RNA, 19 nt, Artificial Sequence
  Description of Artificial Sequence: Synthetic oligonucleotide
agccuuggcacaugaucau

SEQ ID NO: 20726 - RNA, 19 nt, Artificial Sequence
  Description of Artificial Sequence: Synthetic oligonucleotide
uccuaggaucaaacaguuu

SEQ ID NO: 20727 - RNA, 19 nt, Artificial Sequence
  Description of Artificial Sequence: Synthetic oligonucleotide
guaggcugugguagauucc

SEQ ID NO: 20728 - RNA, 19 nt, Artificial Sequence
  Description of Artificial Sequence: Synthetic oligonucleotide
agcccacuuguaagcacac

SEQ ID NO: 20729 - RNA, 19 nt, Artificial Sequence
  Description of Artificial Sequence: Synthetic oligonucleotide
cauccacggagaacccaac

SEQ ID NO: 20730 - RNA, 19 nt, Artificial Sequence
  Description of Artificial Sequence: Synthetic oligonucleotide
agcgcuuuucugaguagcu

SEQ ID NO: 20731 - RNA, 19 nt, Artificial Sequence
  Description of Artificial Sequence: Synthetic oligonucleotide
agucugcacgccaucagau

SEQ ID NO: 20732 - RNA, 19 nt, Artificial Sequence
  Description of Artificial Sequence: Synthetic oligonucleotide
ucggagguagugugaucuc

SEQ ID NO: 20733 - RNA, 19 nt, Artificial Sequence
  Description of Artificial Sequence: Synthetic oligonucleotide
auggaccagaccacuguca

SEQ ID NO: 20734 - RNA, 19 nt, Artificial Sequence
  Description of Artificial Sequence: Synthetic oligonucleotide
caacuuaggcugcucagcu

SEQ ID NO: 20735 - RNA, 19 nt, Artificial Sequence
  Description of Artificial Sequence: Synthetic oligonucleotide
ggcaacuaggugauuguca

SEQ ID NO: 20736 - RNA, 19 nt, Artificial Sequence
  Description of Artificial Sequence: Synthetic oligonucleotide
cauguuugcccaguggugu

SEQ ID NO: 20737 - RNA, 19 nt, Artificial Sequence
  Description of Artificial Sequence: Synthetic oligonucleotide
gccuuaaagggaccccuug

SEQ ID NO: 20738 - RNA, 19 nt, Artificial Sequence
  Description of Artificial Sequence: Synthetic oligonucleotide
gacucaccaugaggacucg

SEQ ID NO: 20739 - RNA, 19 nt, Artificial Sequence
  Description of Artificial Sequence: Synthetic oligonucleotide
ucgucacggccagugcugc

SEQ ID NO: 20740 - RNA, 19 nt, Artificial Sequence
  Description of Artificial Sequence: Synthetic oligonucleotide
ggacucccaacuuucaagu

SEQ ID NO: 20741 - RNA, 19 nt, Artificial Sequence
  Description of Artificial Sequence: Synthetic oligonucleotide
cauacuaagggugucuauu

SEQ ID NO: 20742 - RNA, 19 nt, Artificial Sequence
  Description of Artificial Sequence: Synthetic oligonucleotide
guugcccugucacacuaua

SEQ ID NO: 20743 - RNA, 19 nt, Artificial Sequence
  Description of Artificial Sequence: Synthetic oligonucleotide
gcaacuaggugauugucau

SEQ ID NO: 20744 - RNA, 19 nt, Artificial Sequence
  Description of Artificial Sequence: Synthetic oligonucleotide
gaacucuauccuggcucug

SEQ ID NO: 20745 - RNA, 19 nt, Artificial Sequence
  Description of Artificial Sequence: Synthetic oligonucleotide
caaccccuuugccaccgug

SEQ ID NO: 20746 - RNA, 19 nt, Artificial Sequence
  Description of Artificial Sequence: Synthetic oligonucleotide
ggcggaugggucccagucc

SEQ ID NO: 20747 - RNA, 19 nt, Artificial Sequence
  Description of Artificial Sequence: Synthetic oligonucleotide
cacacuauacugccugacu

SEQ ID NO: 20748 - RNA, 19 nt, Artificial Sequence
  Description of Artificial Sequence: Synthetic oligonucleotide
gcgcuguaggcugugguag

SEQ ID NO: 20749 - RNA, 19 nt, Artificial Sequence
  Description of Artificial Sequence: Synthetic oligonucleotide
acgaggucagacacauacu

SEQ ID NO: 20750 - RNA, 19 nt, Artificial Sequence
  Description of Artificial Sequence: Synthetic oligonucleotide
agggaccccuugagaaugg

SEQ ID NO: 20751 - RNA, 19 nt, Artificial Sequence
  Description of Artificial Sequence: Synthetic oligonucleotide
guacuuagccaauggcgau

SEQ ID NO: 20752 - RNA, 19 nt, Artificial Sequence
  Description of Artificial Sequence: Synthetic oligonucleotide
ggcuccacuugcaucaauc

SEQ ID NO: 20753 - RNA, 19 nt, Artificial Sequence
  Description of Artificial Sequence: Synthetic oligonucleotide
gaucacccaggguccuauc

SEQ ID NO: 20754 - RNA, 19 nt, Artificial Sequence
  Description of Artificial Sequence: Synthetic oligonucleotide
gguugggaggcaucuucca

SEQ ID NO: 20755 - RNA, 19 nt, Artificial Sequence
  Description of Artificial Sequence: Synthetic oligonucleotide
gggaccucaguagguagug

SEQ ID NO: 20756 - RNA, 19 nt, Artificial Sequence
  Description of Artificial Sequence: Synthetic oligonucleotide
cacauacucuagacaccca

SEQ ID NO: 20757 - RNA, 19 nt, Artificial Sequence
  Description of Artificial Sequence: Synthetic oligonucleotide
ggaccucaguagguagugg

SEQ ID NO: 20758 - RNA, 19 nt, Artificial Sequence
  Description of Artificial Sequence: Synthetic oligonucleotide
acguguuaggagagaggca

SEQ ID NO: 20759 - RNA, 19 nt, Artificial Sequence
  Description of Artificial Sequence: Synthetic oligonucleotide
cccuucuguccuuguaagc

SEQ ID NO: 20760 - RNA, 19 nt, Artificial Sequence
  Description of Artificial Sequence: Synthetic oligonucleotide
agaacgcuccgcagccuug

SEQ ID NO: 20761 - RNA, 19 nt, Artificial Sequence
  Description of Artificial Sequence: Synthetic oligonucleotide
caagugacagagggcuuca

SEQ ID NO: 20762 - RNA, 19 nt, Artificial Sequence
  Description of Artificial Sequence: Synthetic oligonucleotide
cuauacccugcagcuuuuc

SEQ ID NO: 20763 - RNA, 19 nt, Artificial Sequence
  Description of Artificial Sequence: Synthetic oligonucleotide
caccuagagauuucauuau

SEQ ID NO: 20764 - RNA, 19 nt, Artificial Sequence
  Description of Artificial Sequence: Synthetic oligonucleotide
cacacgucaguaacuuccu

SEQ ID NO: 20765 - RNA, 19 nt, Artificial Sequence
  Description of Artificial Sequence: Synthetic oligonucleotide
ggugcauuacaagaggguu

SEQ ID NO: 20766 - RNA, 19 nt, Artificial Sequence
  Description of Artificial Sequence: Synthetic oligonucleotide
gcagguuaccgugcagcag

SEQ ID NO: 20767 - RNA, 19 nt, Artificial Sequence
  Description of Artificial Sequence: Synthetic oligonucleotide
ccaccguggcuccacuugc

SEQ ID NO: 20768 - RNA, 19 nt, Artificial Sequence
  Description of Artificial Sequence: Synthetic oligonucleotide
gcuuccgcaacuaucaauu

SEQ ID NO: 20769 - RNA, 19 nt, Artificial Sequence
  Description of Artificial Sequence: Synthetic oligonucleotide
gccaauggcgauucagaua

SEQ ID NO: 20770 - RNA, 19 nt, Artificial Sequence
  Description of Artificial Sequence: Synthetic oligonucleotide
cuagauccagaggacuaua

SEQ ID NO: 20771 - RNA, 19 nt, Artificial Sequence
  Description of Artificial Sequence: Synthetic oligonucleotide
cagguuuauccuguaggua

SEQ ID NO: 20772 - RNA, 19 nt, Artificial Sequence
  Description of Artificial Sequence: Synthetic oligonucleotide
gggugucaagugacagagg

SEQ ID NO: 20773 - RNA, 19 nt, Artificial Sequence
  Description of Artificial Sequence: Synthetic oligonucleotide
ggugggaacuguauuccua

SEQ ID NO: 20774 - RNA, 19 nt, Artificial Sequence
  Description of Artificial Sequence: Synthetic oligonucleotide
agguuaccgugcagcaggu

SEQ ID NO: 20775 - RNA, 19 nt, Artificial Sequence
  Description of Artificial Sequence: Synthetic oligonucleotide
cuagacaugcuuggcuccu

SEQ ID NO: 20776 - RNA, 19 nt, Artificial Sequence
  Description of Artificial Sequence: Synthetic oligonucleotide
cugccuuaaagggaccccu

SEQ ID NO: 20777 - RNA, 19 nt, Artificial Sequence
  Description of Artificial Sequence: Synthetic oligonucleotide
ggugauugucauccccagu

SEQ ID NO: 20778 - RNA, 19 nt, Artificial Sequence
  Description of Artificial Sequence: Synthetic oligonucleotide
ccaauggccauaauuuauu

SEQ ID NO: 20779 - RNA, 19 nt, Artificial Sequence
  Description of Artificial Sequence: Synthetic oligonucleotide
cugucacacuauacugccu

SEQ ID NO: 20780 - RNA, 19 nt, Artificial Sequence
  Description of Artificial Sequence: Synthetic oligonucleotide
ggcuuccgcaacuaucaau

SEQ ID NO: 20781 - RNA, 19 nt, Artificial Sequence
  Description of Artificial Sequence: Synthetic oligonucleotide
caagggugcugaagacgua

SEQ ID NO: 20782 - RNA, 19 nt, Artificial Sequence
  Description of Artificial Sequence: Synthetic oligonucleotide
cgcaacuaucaauucccca

SEQ ID NO: 20783 - RNA, 19 nt, Artificial Sequence
  Description of Artificial Sequence: Synthetic oligonucleotide
gguuaccgugcagcaggug

SEQ ID NO: 20784 - RNA, 19 nt, Artificial Sequence
  Description of Artificial Sequence: Synthetic oligonucleotide
gggaccccuugagaauggc

SEQ ID NO: 20785 - RNA, 19 nt, Artificial Sequence
  Description of Artificial Sequence: Synthetic oligonucleotide
cagaacgcuccgcagccuu

SEQ ID NO: 20786 - RNA, 19 nt, Artificial Sequence
  Description of Artificial Sequence: Synthetic oligonucleotide
gcaaccgcacaaggagaca

SEQ ID NO: 20787 - RNA, 19 nt, Artificial Sequence
  Description of Artificial Sequence: Synthetic oligonucleotide
cuguccuuguaagcacacu

SEQ ID NO: 20788 - RNA, 19 nt, Artificial Sequence
  Description of Artificial Sequence: Synthetic oligonucleotide
ccgcacugcugucagugaa

SEQ ID NO: 20789 - RNA, 19 nt, Artificial Sequence
  Description of Artificial Sequence: Synthetic oligonucleotide
ggguugcaagcaggaguca

SEQ ID NO: 20790 - RNA, 19 nt, Artificial Sequence
  Description of Artificial Sequence: Synthetic oligonucleotide
gcaguggaagacugacauu

SEQ ID NO: 20791 - RNA, 19 nt, Artificial Sequence
  Description of Artificial Sequence: Synthetic oligonucleotide
ccacggagaacccaaccuu

SEQ ID NO: 20792 - RNA, 19 nt, Artificial Sequence
  Description of Artificial Sequence: Synthetic oligonucleotide
ggagggugucaguucuguu

SEQ ID NO: 20793 - RNA, 19 nt, Artificial Sequence
  Description of Artificial Sequence: Synthetic oligonucleotide
ccuagcgauccccaauauu

SEQ ID NO: 20794 - RNA, 19 nt, Artificial Sequence
  Description of Artificial Sequence: Synthetic oligonucleotide
cuguaggcugugguagauu

SEQ ID NO: 20795 - RNA, 19 nt, Artificial Sequence
  Description of Artificial Sequence: Synthetic oligonucleotide
gccuagcgauccccaauau

SEQ ID NO: 20796 - RNA, 19 nt, Artificial Sequence
  Description of Artificial Sequence: Synthetic oligonucleotide
gcacgccaucagauaugga

SEQ ID NO: 20797 - RNA, 19 nt, Artificial Sequence
  Description of Artificial Sequence: Synthetic oligonucleotide
gcauuacaagaggguuggu

SEQ ID NO: 20798 - RNA, 19 nt, Artificial Sequence
  Description of Artificial Sequence: Synthetic oligonucleotide
cggagaacccaaccuuccu

SEQ ID NO: 20799 - RNA, 19 nt, Artificial Sequence
  Description of Artificial Sequence: Synthetic oligonucleotide
gcagaacgcuccgcagccu

SEQ ID NO: 20800 - RNA, 19 nt, Artificial Sequence
  Description of Artificial Sequence: Synthetic oligonucleotide
gcucaucgucacggccagu

SEQ ID NO: 20801 - RNA, 19 nt, Artificial Sequence
  Description of Artificial Sequence: Synthetic oligonucleotide
aguucagcaaccuaagggc

SEQ ID NO: 20802 - RNA, 19 nt, Artificial Sequence
  Description of Artificial Sequence: Synthetic oligonucleotide
gaacccucaagauugaacg

SEQ ID NO: 20803 - RNA, 19 nt, Artificial Sequence
  Description of Artificial Sequence: Synthetic oligonucleotide
uguaauuuggaggagcugg

SEQ ID NO: 20804 - RNA, 19 nt, Artificial Sequence
  Description of Artificial Sequence: Synthetic oligonucleotide
agaaccaucuaauggggcc

SEQ ID NO: 20805 - RNA, 19 nt, Artificial Sequence
  Description of Artificial Sequence: Synthetic oligonucleotide
aagauugaacgucugagca

SEQ ID NO: 20806 - RNA, 19 nt, Artificial Sequence
  Description of Artificial Sequence: Synthetic oligonucleotide
uugaguuuguauuuagcgg

SEQ ID NO: 20807 - RNA, 19 nt, Artificial Sequence
  Description of Artificial Sequence: Synthetic oligonucleotide
uuuaugguugguugcacgg

SEQ ID NO: 20808 - RNA, 19 nt, Artificial Sequence
  Description of Artificial Sequence: Synthetic oligonucleotide
guucaaauuucccugaggc

SEQ ID NO: 20809 - RNA, 19 nt, Artificial Sequence
  Description of Artificial Sequence: Synthetic oligonucleotide
aauccuugcacgaugccgc

SEQ ID NO: 20810 - RNA, 19 nt, Artificial Sequence
  Description of Artificial Sequence: Synthetic oligonucleotide
cacuugucaauucauaugc

SEQ ID NO: 20811 - RNA, 19 nt, Artificial Sequence
  Description of Artificial Sequence: Synthetic oligonucleotide
cauaugcccaguuugacag

SEQ ID NO: 20812 - RNA, 19 nt, Artificial Sequence
  Description of Artificial Sequence: Synthetic oligonucleotide
uaggcgacggauaaugagg

SEQ ID NO: 20813 - RNA, 19 nt, Artificial Sequence
  Description of Artificial Sequence: Synthetic oligonucleotide
uagguggucaacaagacau

SEQ ID NO: 20814 - RNA, 19 nt, Artificial Sequence
  Description of Artificial Sequence: Synthetic oligonucleotide
ugugagguuggccacauac

SEQ ID NO: 20815 - RNA, 19 nt, Artificial Sequence
  Description of Artificial Sequence: Synthetic oligonucleotide
ucaagauugaacgucugag

SEQ ID NO: 20816 - RNA, 19 nt, Artificial Sequence
  Description of Artificial Sequence: Synthetic oligonucleotide
uggaaguucagcaaccuaa

SEQ ID NO: 20817 - RNA, 19 nt, Artificial Sequence
  Description of Artificial Sequence: Synthetic oligonucleotide
gacgauggaauccucguag

SEQ ID NO: 20818 - RNA, 19 nt, Artificial Sequence
  Description of Artificial Sequence: Synthetic oligonucleotide
ugagcuacagugacugagg

SEQ ID NO: 20819 - RNA, 19 nt, Artificial Sequence
  Description of Artificial Sequence: Synthetic oligonucleotide
guuaacggugcacaggcgg

SEQ ID NO: 20820 - RNA, 19 nt, Artificial Sequence
  Description of Artificial Sequence: Synthetic oligonucleotide
gaaacuacaucugugcuac

SEQ ID NO: 20821 - RNA, 19 nt, Artificial Sequence
  Description of Artificial Sequence: Synthetic oligonucleotide
uuugugguuccaucgagcc

SEQ ID NO: 20822 - RNA, 19 nt, Artificial Sequence
  Description of Artificial Sequence: Synthetic oligonucleotide
gauaguguucaucaguguc

SEQ ID NO: 20823 - RNA, 19 nt, Artificial Sequence
  Description of Artificial Sequence: Synthetic oligonucleotide
aaccuaagggccuugaguu

SEQ ID NO: 20824 - RNA, 19 nt, Artificial Sequence
  Description of Artificial Sequence: Synthetic oligonucleotide
ucucuagacaguuaaugcu

SEQ ID NO: 20825 - RNA, 19 nt, Artificial Sequence
  Description of Artificial Sequence: Synthetic oligonucleotide
cugauucugguuaaauggg

SEQ ID NO: 20826 - RNA, 19 nt, Artificial Sequence
  Description of Artificial Sequence: Synthetic oligonucleotide
agaucaaagaacccucaag

SEQ ID NO: 20827 - RNA, 19 nt, Artificial Sequence
  Description of Artificial Sequence: Synthetic oligonucleotide
ugugcuacccaucacugcu

SEQ ID NO: 20828 - RNA, 19 nt, Artificial Sequence
  Description of Artificial Sequence: Synthetic oligonucleotide
gaaguauucagagccaggc

SEQ ID NO: 20829 - RNA, 19 nt, Artificial Sequence
  Description of Artificial Sequence: Synthetic oligonucleotide
gacacugacauacccgcgg

SEQ ID NO: 20830 - RNA, 19 nt, Artificial Sequence
  Description of Artificial Sequence: Synthetic oligonucleotide
ugugguuccaucgagccug

SEQ ID NO: 20831 - RNA, 19 nt, Artificial Sequence
  Description of Artificial Sequence: Synthetic oligonucleotide
cuuguaggaaccuucacca

SEQ ID NO: 20832 - RNA, 19 nt, Artificial Sequence
  Description of Artificial Sequence: Synthetic oligonucleotide
uccucguagaucaaagaac

SEQ ID NO: 20833 - RNA, 19 nt, Artificial Sequence
  Description of Artificial Sequence: Synthetic oligonucleotide
ugguuaaauggguugggcc

SEQ ID NO: 20834 - RNA, 19 nt, Artificial Sequence
  Description of Artificial Sequence: Synthetic oligonucleotide
cuguuaacggugcacaggc

SEQ ID NO: 20835 - RNA, 19 nt, Artificial Sequence
  Description of Artificial Sequence: Synthetic oligonucleotide
ugagguauuugaagccacg

SEQ ID NO: 20836 - RNA, 19 nt, Artificial Sequence
  Description of Artificial Sequence: Synthetic oligonucleotide
uaugguugguugcacggag

SEQ ID NO: 20837 - RNA, 19 nt, Artificial Sequence
  Description of Artificial Sequence: Synthetic oligonucleotide
caagauugaacgucugagc

SEQ ID NO: 20838 - RNA, 19 nt, Artificial Sequence
  Description of Artificial Sequence: Synthetic oligonucleotide
  modified_base (7)..(7): a, c, u, g, unknown or other
ugggccncgguuuugcugc

SEQ ID NO: 20839 - RNA, 19 nt, Artificial Sequence
  Description of Artificial Sequence: Synthetic oligonucleotide
uucuugguaagguuaggug

SEQ ID NO: 20840 - RNA, 19 nt, Artificial Sequence
  Description of Artificial Sequence: Synthetic oligonucleotide
ugagcugacguccacuacu

SEQ ID NO: 20841 - RNA, 19 nt, Artificial Sequence
  Description of Artificial Sequence: Synthetic oligonucleotide
gaucacggcauccacaauc

SEQ ID NO: 20842 - RNA, 19 nt, Artificial Sequence
  Description of Artificial Sequence: Synthetic oligonucleotide
ugugacugaucugugauac

SEQ ID NO: 20843 - RNA, 19 nt, Artificial Sequence
  Description of Artificial Sequence: Synthetic oligonucleotide
cuuuaugguugguugcacg

SEQ ID NO: 20844 - RNA, 19 nt, Artificial Sequence
  Description of Artificial Sequence: Synthetic oligonucleotide
auaagggaggucauuuggc

SEQ ID NO: 20845 - RNA, 19 nt, Artificial Sequence
  Description of Artificial Sequence: Synthetic oligonucleotide
ugaacuucccacugcgaag

SEQ ID NO: 20846 - RNA, 19 nt, Artificial Sequence
  Description of Artificial Sequence: Synthetic oligonucleotide
uuagcggcggccaggaucu

SEQ ID NO: 20847 - RNA, 19 nt, Artificial Sequence
  Description of Artificial Sequence: Synthetic oligonucleotide
uugaacuucccacugcgaa

SEQ ID NO: 20848 - RNA, 19 nt, Artificial Sequence
  Description of Artificial Sequence: Synthetic oligonucleotide
gauacaguacaaggagugg

SEQ ID NO: 20849 - RNA, 19 nt, Artificial Sequence
  Description of Artificial Sequence: Synthetic oligonucleotide
uuuagcggcggccaggauc

SEQ ID NO: 20850 - RNA, 19 nt, Artificial Sequence
  Description of Artificial Sequence: Synthetic oligonucleotide
gaaguccacagguuuucgg

SEQ ID NO: 20851 - RNA, 19 nt, Artificial Sequence
  Description of Artificial Sequence: Synthetic oligonucleotide
gacauugaacuucccacug

SEQ ID NO: 20852 - RNA, 19 nt, Artificial Sequence
  Description of Artificial Sequence: Synthetic oligonucleotide
aaugagcuuucgguagccc

SEQ ID NO: 20853 - RNA, 19 nt, Artificial Sequence
  Description of Artificial Sequence: Synthetic oligonucleotide
aauccucguagaucaaaga

SEQ ID NO: 20854 - RNA, 19 nt, Artificial Sequence
  Description of Artificial Sequence: Synthetic oligonucleotide
gugacacugacauacccgc

SEQ ID NO: 20855 - RNA, 19 nt, Artificial Sequence
  Description of Artificial Sequence: Synthetic oligonucleotide
agcugauucugguuaaaug

SEQ ID NO: 20856 - RNA, 19 nt, Artificial Sequence
  Description of Artificial Sequence: Synthetic oligonucleotide
guaagauacaguacaagga

SEQ ID NO: 20857 - RNA, 19 nt, Artificial Sequence
  Description of Artificial Sequence: Synthetic oligonucleotide
agauacaguacaaggagug

SEQ ID NO: 20858 - RNA, 19 nt, Artificial Sequence
  Description of Artificial Sequence: Synthetic oligonucleotide
auugagggcugucucuagg

SEQ ID NO: 20859 - RNA, 19 nt, Artificial Sequence
  Description of Artificial Sequence: Synthetic oligonucleotide
cauuggcuuaauuuauuac

SEQ ID NO: 20860 - RNA, 19 nt, Artificial Sequence
  Description of Artificial Sequence: Synthetic oligonucleotide
gaauccucguagaucaaag

SEQ ID NO: 20861 - RNA, 19 nt, Artificial Sequence
  Description of Artificial Sequence: Synthetic oligonucleotide
uguccgaaacuacaucugu

SEQ ID NO: 20862 - RNA, 19 nt, Artificial Sequence
  Description of Artificial Sequence: Synthetic oligonucleotide
ucuaauggggccccuccug

SEQ ID NO: 20863 - RNA, 19 nt, Artificial Sequence
  Description of Artificial Sequence: Synthetic oligonucleotide
uacagguccaauccuugca

SEQ ID NO: 20864 - RNA, 19 nt, Artificial Sequence
  Description of Artificial Sequence: Synthetic oligonucleotide
agacauugaacuucccacu

SEQ ID NO: 20865 - RNA, 19 nt, Artificial Sequence
  Description of Artificial Sequence: Synthetic oligonucleotide
cuugcgguggcgagaaccg

SEQ ID NO: 20866 - RNA, 19 nt, Artificial Sequence
  Description of Artificial Sequence: Synthetic oligonucleotide
ugccguaccaacucuguga

SEQ ID NO: 20867 - RNA, 19 nt, Artificial Sequence
  Description of Artificial Sequence: Synthetic oligonucleotide
ucauaagggaggucauuug

SEQ ID NO: 20868 - RNA, 19 nt, Artificial Sequence
  Description of Artificial Sequence: Synthetic oligonucleotide
guaggcgacggauaaugag

SEQ ID NO: 20869 - RNA, 19 nt, Artificial Sequence
  Description of Artificial Sequence: Synthetic oligonucleotide
uuuagcagcaugccccggu

SEQ ID NO: 20870 - RNA, 19 nt, Artificial Sequence
  Description of Artificial Sequence: Synthetic oligonucleotide
aagauacaguacaaggagu

SEQ ID NO: 20871 - RNA, 19 nt, Artificial Sequence
  Description of Artificial Sequence: Synthetic oligonucleotide
uaggccaaacguuuguccu

SEQ ID NO: 20872 - RNA, 19 nt, Artificial Sequence
  Description of Artificial Sequence: Synthetic oligonucleotide
cuugcgagaggggaguugg

SEQ ID NO: 20873 - RNA, 19 nt, Artificial Sequence
  Description of Artificial Sequence: Synthetic oligonucleotide
uguuaacggugcacaggcg

SEQ ID NO: 20874 - RNA, 19 nt, Artificial Sequence
  Description of Artificial Sequence: Synthetic oligonucleotide
uguacuugaucacggcauc

SEQ ID NO: 20875 - RNA, 19 nt, Artificial Sequence
  Description of Artificial Sequence: Synthetic oligonucleotide
acguccacuacugcugucc

SEQ ID NO: 20876 - RNA, 19 nt, Artificial Sequence
  Description of Artificial Sequence: Synthetic oligonucleotide
  modified_base (19)..(19): a, c, u, g, unknown or other
gguuaaauggguugggccn

SEQ ID NO: 20877 - RNA, 19 nt, Artificial Sequence
  Description of Artificial Sequence: Synthetic oligonucleotide
cauagguggucaacaagac

SEQ ID NO: 20878 - RNA, 19 nt, Artificial Sequence
  Description of Artificial Sequence: Synthetic oligonucleotide
gauggaauccucguagauc

SEQ ID NO: 20879 - RNA, 19 nt, Artificial Sequence
  Description of Artificial Sequence: Synthetic oligonucleotide
uugacagcgucgagagagg

SEQ ID NO: 20880 - RNA, 19 nt, Artificial Sequence
  Description of Artificial Sequence: Synthetic oligonucleotide
cuucaguccuccucgcugc

SEQ ID NO: 20881 - RNA, 19 nt, Artificial Sequence
  Description of Artificial Sequence: Synthetic oligonucleotide
cuaauggggccccuccugg

SEQ ID NO: 20882 - RNA, 19 nt, Artificial Sequence
  Description of Artificial Sequence: Synthetic oligonucleotide
uggcuuaauuuauuacugu

SEQ ID NO: 20883 - RNA, 19 nt, Artificial Sequence
  Description of Artificial Sequence: Synthetic oligonucleotide
ugacacugacauacccgcg

SEQ ID NO: 20884 - RNA, 19 nt, Artificial Sequence
  Description of Artificial Sequence: Synthetic oligonucleotide
aacccucaagauugaacgu

SEQ ID NO: 20885 - RNA, 19 nt, Artificial Sequence
  Description of Artificial Sequence: Synthetic oligonucleotide
acggauaaugaggaugguc

SEQ ID NO: 20886 - RNA, 19 nt, Artificial Sequence
  Description of Artificial Sequence: Synthetic oligonucleotide
agaaccgcggccaaacauc

SEQ ID NO: 20887 - RNA, 19 nt, Artificial Sequence
  Description of Artificial Sequence: Synthetic oligonucleotide
uccauguccgaaacuacau

SEQ ID NO: 20888 - RNA, 19 nt, Artificial Sequence
  Description of Artificial Sequence: Synthetic oligonucleotide
guugcgggccucuucacgc

SEQ ID NO: 20889 - RNA, 19 nt, Artificial Sequence
  Description of Artificial Sequence: Synthetic oligonucleotide
auagguggucaacaagaca

SEQ ID NO: 20890 - RNA, 19 nt, Artificial Sequence
  Description of Artificial Sequence: Synthetic oligonucleotide
aaaggcucgucuugccgcu

SEQ ID NO: 20891 - RNA, 19 nt, Artificial Sequence
  Description of Artificial Sequence: Synthetic oligonucleotide
acccucaagauugaacguc

SEQ ID NO: 20892 - RNA, 19 nt, Artificial Sequence
  Description of Artificial Sequence: Synthetic oligonucleotide
cugagcuacagugacugag

SEQ ID NO: 20893 - RNA, 19 nt, Artificial Sequence
  Description of Artificial Sequence: Synthetic oligonucleotide
ucaauucauaugcccaguu

SEQ ID NO: 20894 - RNA, 19 nt, Artificial Sequence
  Description of Artificial Sequence: Synthetic oligonucleotide
agguauuugaagccacggu

SEQ ID NO: 20895 - RNA, 19 nt, Artificial Sequence
  Description of Artificial Sequence: Synthetic oligonucleotide
ugugucucugcgcaugcau

SEQ ID NO: 20896 - RNA, 19 nt, Artificial Sequence
  Description of Artificial Sequence: Synthetic oligonucleotide
  modified_base (17)..(17): a, c, u, g, unknown or other
uuaaauggguugggccncg

SEQ ID NO: 20897 - RNA, 19 nt, Artificial Sequence
  Description of Artificial Sequence: Synthetic oligonucleotide
gagcuacagugacugaggc

SEQ ID NO: 20898 - RNA, 19 nt, Artificial Sequence
  Description of Artificial Sequence: Synthetic oligonucleotide
cacgguaugcaaaguaguc

SEQ ID NO: 20899 - RNA, 19 nt, Artificial Sequence
  Description of Artificial Sequence: Synthetic oligonucleotide
uugcguuccugcucaaucu

SEQ ID NO: 20900 - RNA, 19 nt, Artificial Sequence
  Description of Artificial Sequence: Synthetic oligonucleotide
ugacgguagagcacgcgcu

SEQ ID NO: 20901 - RNA, 19 nt, Artificial Sequence
  Description of Artificial Sequence: Synthetic oligonucleotide
guagagcacgcgcugcagg

SEQ ID NO: 20902 - RNA, 19 nt, Artificial Sequence
  Description of Artificial Sequence: Synthetic oligonucleotide
gucggcucuguccaguaag

SEQ ID NO: 20903 - RNA, 19 nt, Artificial Sequence
  Description of Artificial Sequence: Synthetic oligonucleotide
uguuuguggcggcaucaca

SEQ ID NO: 20904 - RNA, 19 nt, Artificial Sequence
  Description of Artificial Sequence: Synthetic oligonucleotide
gugacgguagagcacgcgc

SEQ ID NO: 20905 - RNA, 19 nt, Artificial Sequence
  Description of Artificial Sequence: Synthetic oligonucleotide
uauuuagcggcggccagga

SEQ ID NO: 20906 - RNA, 19 nt, Artificial Sequence
  Description of Artificial Sequence: Synthetic oligonucleotide
cacaaucauguacuuccag

SEQ ID NO: 20907 - RNA, 19 nt, Artificial Sequence
  Description of Artificial Sequence: Synthetic oligonucleotide
cacgcugagcuacagugac

SEQ ID NO: 20908 - RNA, 19 nt, Artificial Sequence
  Description of Artificial Sequence: Synthetic oligonucleotide
gcuggagaucccuuguagg

SEQ ID NO: 20909 - RNA, 19 nt, Artificial Sequence
  Description of Artificial Sequence: Synthetic oligonucleotide
ucuagggcugugucucugc

SEQ ID NO: 20910 - RNA, 19 nt, Artificial Sequence
  Description of Artificial Sequence: Synthetic oligonucleotide
agcgugcccuccucgauag

SEQ ID NO: 20911 - RNA, 19 nt, Artificial Sequence
  Description of Artificial Sequence: Synthetic oligonucleotide
cauguccgaaacuacaucu

SEQ ID NO: 20912 - RNA, 19 nt, Artificial Sequence
  Description of Artificial Sequence: Synthetic oligonucleotide
  modified_base (18)..(18): a, c, u, g, unknown or other
guuaaauggguugggccnc

SEQ ID NO: 20913 - RNA, 19 nt, Artificial Sequence
  Description of Artificial Sequence: Synthetic oligonucleotide
cuggagaucccuuguagga

SEQ ID NO: 20914 - RNA, 19 nt, Artificial Sequence
  Description of Artificial Sequence: Synthetic oligonucleotide
ugugacgguagagcacgcg

SEQ ID NO: 20915 - RNA, 19 nt, Artificial Sequence
  Description of Artificial Sequence: Synthetic oligonucleotide
ugcgcaugcauaccaccac

SEQ ID NO: 20916 - RNA, 19 nt, Artificial Sequence
  Description of Artificial Sequence: Synthetic oligonucleotide
acgguaugcaaaguagucu

SEQ ID NO: 20917 - RNA, 19 nt, Artificial Sequence
  Description of Artificial Sequence: Synthetic oligonucleotide
ucgcuugccuugcacggcc

SEQ ID NO: 20918 - RNA, 19 nt, Artificial Sequence
  Description of Artificial Sequence: Synthetic oligonucleotide
uuaugguugguugcacgga

SEQ ID NO: 20919 - RNA, 19 nt, Artificial Sequence
  Description of Artificial Sequence: Synthetic oligonucleotide
guauuuagcggcggccagg

SEQ ID NO: 20920 - RNA, 19 nt, Artificial Sequence
  Description of Artificial Sequence: Synthetic oligonucleotide
uucaugccgggcaaucauc

SEQ ID NO: 20921 - RNA, 19 nt, Artificial Sequence
  Description of Artificial Sequence: Synthetic oligonucleotide
gacgguagagcacgcgcug

SEQ ID NO: 20922 - RNA, 19 nt, Artificial Sequence
  Description of Artificial Sequence: Synthetic oligonucleotide
ucccgcuugcguuugcgug

SEQ ID NO: 20923 - RNA, 19 nt, Artificial Sequence
  Description of Artificial Sequence: Synthetic oligonucleotide
guacagguccaauccuugc

SEQ ID NO: 20924 - RNA, 19 nt, Artificial Sequence
  Description of Artificial Sequence: Synthetic oligonucleotide
uccaucgagccugagguau

SEQ ID NO: 20925 - RNA, 19 nt, Artificial Sequence
  Description of Artificial Sequence: Synthetic oligonucleotide
cugguuaaauggguugggc

SEQ ID NO: 20926 - RNA, 19 nt, Artificial Sequence
  Description of Artificial Sequence: Synthetic oligonucleotide
auaaagaggucaaacucuu

SEQ ID NO: 20927 - RNA, 19 nt, Artificial Sequence
  Description of Artificial Sequence: Synthetic oligonucleotide
uuguaauuuggaggagcug

SEQ ID NO: 20928 - RNA, 19 nt, Artificial Sequence
  Description of Artificial Sequence: Synthetic oligonucleotide
ucaagcguggcuuccgcuu

SEQ ID NO: 20929 - RNA, 19 nt, Artificial Sequence
  Description of Artificial Sequence: Synthetic oligonucleotide
  modified_base (8)..(8): a, c, u, g, unknown or other
uugggccncgguuuugcug

SEQ ID NO: 20930 - RNA, 19 nt, Artificial Sequence
  Description of Artificial Sequence: Synthetic oligonucleotide
cgacggauaaugaggaugg

SEQ ID NO: 20931 - RNA, 19 nt, Artificial Sequence
  Description of Artificial Sequence: Synthetic oligonucleotide
cugacauacccgcggggcc

SEQ ID NO: 20932 - RNA, 19 nt, Artificial Sequence
  Description of Artificial Sequence: Synthetic oligonucleotide
cugugucagcuuacagugg

SEQ ID NO: 20933 - RNA, 19 nt, Artificial Sequence
  Description of Artificial Sequence: Synthetic oligonucleotide
uugugguuccaucgagccu

SEQ ID NO: 20934 - RNA, 19 nt, Artificial Sequence
  Description of Artificial Sequence: Synthetic oligonucleotide
ugccgggcaaucaucuggu

SEQ ID NO: 20935 - RNA, 19 nt, Artificial Sequence
  Description of Artificial Sequence: Synthetic oligonucleotide
ucagucaguagcacaccuu

SEQ ID NO: 20936 - RNA, 19 nt, Artificial Sequence
  Description of Artificial Sequence: Synthetic oligonucleotide
acgauggaauccucguaga

SEQ ID NO: 20937 - RNA, 19 nt, Artificial Sequence
  Description of Artificial Sequence: Synthetic oligonucleotide
acaggccuauucuucucug

SEQ ID NO: 20938 - RNA, 19 nt, Artificial Sequence
  Description of Artificial Sequence: Synthetic oligonucleotide
ucgucuugccgcuggagau

SEQ ID NO: 20939 - RNA, 19 nt, Artificial Sequence
  Description of Artificial Sequence: Synthetic oligonucleotide
ggucgcuugccuugcacgg

SEQ ID NO: 20940 - RNA, 19 nt, Artificial Sequence
  Description of Artificial Sequence: Synthetic oligonucleotide
guccaauccuugcacgaug

SEQ ID NO: 20941 - RNA, 19 nt, Artificial Sequence
  Description of Artificial Sequence: Synthetic oligonucleotide
cacugcuaagggcuacucc

SEQ ID NO: 20942 - RNA, 19 nt, Artificial Sequence
  Description of Artificial Sequence: Synthetic oligonucleotide
ugaauucgaugugcaauuc

SEQ ID NO: 20943 - RNA, 19 nt, Artificial Sequence
  Description of Artificial Sequence: Synthetic oligonucleotide
agcacggguacugagcaga

SEQ ID NO: 20944 - RNA, 19 nt, Artificial Sequence
  Description of Artificial Sequence: Synthetic oligonucleotide
ggaaguucagcaaccuaag

SEQ ID NO: 20945 - RNA, 19 nt, Artificial Sequence
  Description of Artificial Sequence: Synthetic oligonucleotide
cauaagccuccgcauucgc

SEQ ID NO: 20946 - RNA, 19 nt, Artificial Sequence
  Description of Artificial Sequence: Synthetic oligonucleotide
cucaagauugaacgucuga

SEQ ID NO: 20947 - RNA, 19 nt, Artificial Sequence
  Description of Artificial Sequence: Synthetic oligonucleotide
gauaaugaggauggucucu

SEQ ID NO: 20948 - RNA, 19 nt, Artificial Sequence
  Description of Artificial Sequence: Synthetic oligonucleotide
uaauggggccccuccuggc

SEQ ID NO: 20949 - RNA, 19 nt, Artificial Sequence
  Description of Artificial Sequence: Synthetic oligonucleotide
acgagcaugcauccacgcu

SEQ ID NO: 20950 - RNA, 19 nt, Artificial Sequence
  Description of Artificial Sequence: Synthetic oligonucleotide
aucuaauggggccccuccu

SEQ ID NO: 20951 - RNA, 19 nt, Artificial Sequence
  Description of Artificial Sequence: Synthetic oligonucleotide
gccguaccaacucugugag

SEQ ID NO: 20952 - RNA, 19 nt, Artificial Sequence
  Description of Artificial Sequence: Synthetic oligonucleotide
cauugagggcugucucuag

SEQ ID NO: 20953 - RNA, 19 nt, Artificial Sequence
  Description of Artificial Sequence: Synthetic oligonucleotide
ugacauacccgcggggccu

SEQ ID NO: 20954 - RNA, 19 nt, Artificial Sequence
  Description of Artificial Sequence: Synthetic oligonucleotide
uugcguuugcgugaggauu

SEQ ID NO: 20955 - RNA, 19 nt, Artificial Sequence
  Description of Artificial Sequence: Synthetic oligonucleotide
ggagguggaugguaccucc

SEQ ID NO: 20956 - RNA, 19 nt, Artificial Sequence
  Description of Artificial Sequence: Synthetic oligonucleotide
gauugaacgucugagcauu

SEQ ID NO: 20957 - RNA, 19 nt, Artificial Sequence
  Description of Artificial Sequence: Synthetic oligonucleotide
guccgaaacuacaucugug

SEQ ID NO: 20958 - RNA, 19 nt, Artificial Sequence
  Description of Artificial Sequence: Synthetic oligonucleotide
auguccgaaacuacaucug

SEQ ID NO: 20959 - RNA, 19 nt, Artificial Sequence
  Description of Artificial Sequence: Synthetic oligonucleotide
uggucauaagggaggucau

SEQ ID NO: 20960 - RNA, 19 nt, Artificial Sequence
  Description of Artificial Sequence: Synthetic oligonucleotide
gguaccuccaagagguccc

SEQ ID NO: 20961 - RNA, 19 nt, Artificial Sequence
  Description of Artificial Sequence: Synthetic oligonucleotide
ccgcucaguauuugcaugg

SEQ ID NO: 20962 - RNA, 19 nt, Artificial Sequence
  Description of Artificial Sequence: Synthetic oligonucleotide
gguugcgggccucuucacg

SEQ ID NO: 20963 - RNA, 19 nt, Artificial Sequence
  Description of Artificial Sequence: Synthetic oligonucleotide
ggauaaugaggauggucuc

SEQ ID NO: 20964 - RNA, 19 nt, Artificial Sequence
  Description of Artificial Sequence: Synthetic oligonucleotide
aggcauuggucgcuugccu

SEQ ID NO: 20965 - RNA, 19 nt, Artificial Sequence
  Description of Artificial Sequence: Synthetic oligonucleotide
gcgacggauaaugaggaug

SEQ ID NO: 20966 - RNA, 19 nt, Artificial Sequence
  Description of Artificial Sequence: Synthetic oligonucleotide
ggggccuauuguaauuugg

SEQ ID NO: 20967 - RNA, 19 nt, Artificial Sequence
  Description of Artificial Sequence: Synthetic oligonucleotide
ccucccauaccauggggcc

SEQ ID NO: 20968 - RNA, 19 nt, Artificial Sequence
  Description of Artificial Sequence: Synthetic oligonucleotide
cucgucuugccgcuggaga

SEQ ID NO: 20969 - RNA, 19 nt, Artificial Sequence
  Description of Artificial Sequence: Synthetic oligonucleotide
guggucaacaagacauuga

SEQ ID NO: 20970 - RNA, 19 nt, Artificial Sequence
  Description of Artificial Sequence: Synthetic oligonucleotide
ggcggcaucacaggagagg

SEQ ID NO: 20971 - RNA, 19 nt, Artificial Sequence
  Description of Artificial Sequence: Synthetic oligonucleotide
aggcgacggauaaugagga

SEQ ID NO: 20972 - RNA, 19 nt, Artificial Sequence
  Description of Artificial Sequence: Synthetic oligonucleotide
gguacagguccaauccuug

SEQ ID NO: 20973 - RNA, 19 nt, Artificial Sequence
  Description of Artificial Sequence: Synthetic oligonucleotide
cuuguguaggcgacggaua

SEQ ID NO: 20974 - RNA, 19 nt, Artificial Sequence
  Description of Artificial Sequence: Synthetic oligonucleotide
cugaauucgaugugcaauu

SEQ ID NO: 20975 - RNA, 19 nt, Artificial Sequence
  Description of Artificial Sequence: Synthetic oligonucleotide
auaagccuccgcauucgcu

SEQ ID NO: 20976 - RNA, 19 nt, Artificial Sequence
  Description of Artificial Sequence: Synthetic oligonucleotide
guaggccauuaucugagcu

SEQ ID NO: 20977 - RNA, 19 nt, Artificial Sequence
  Description of Artificial Sequence: Synthetic oligonucleotide
gggucaggacucuggaaug

SEQ ID NO: 20978 - RNA, 19 nt, Artificial Sequence
  Description of Artificial Sequence: Synthetic oligonucleotide
cauacucguccgucugcug

SEQ ID NO: 20979 - RNA, 19 nt, Artificial Sequence
  Description of Artificial Sequence: Synthetic oligonucleotide
guuaaugcugguagagacu

SEQ ID NO: 20980 - RNA, 19 nt, Artificial Sequence
  Description of Artificial Sequence: Synthetic oligonucleotide
caugccgggcaaucaucug

SEQ ID NO: 20981 - RNA, 19 nt, Artificial Sequence
  Description of Artificial Sequence: Synthetic oligonucleotide
gcgagaggggaguuggaug

SEQ ID NO: 20982 - RNA, 19 nt, Artificial Sequence
  Description of Artificial Sequence: Synthetic oligonucleotide
gagaaccgcggccaaacau

SEQ ID NO: 20983 - RNA, 19 nt, Artificial Sequence
  Description of Artificial Sequence: Synthetic oligonucleotide
aggccaaacguuuguccuu

SEQ ID NO: 20984 - RNA, 19 nt, Artificial Sequence
  Description of Artificial Sequence: Synthetic oligonucleotide
ccuugcgguggcgagaacc

SEQ ID NO: 20985 - RNA, 19 nt, Artificial Sequence
  Description of Artificial Sequence: Synthetic oligonucleotide
gccauaagccuccgcauuc

SEQ ID NO: 20986 - RNA, 19 nt, Artificial Sequence
  Description of Artificial Sequence: Synthetic oligonucleotide
gcggcaucacaggagaggc

SEQ ID NO: 20987 - RNA, 19 nt, Artificial Sequence
  Description of Artificial Sequence: Synthetic oligonucleotide
uugcgagaggggaguugga

SEQ ID NO: 20988 - RNA, 19 nt, Artificial Sequence
  Description of Artificial Sequence: Synthetic oligonucleotide
ucacugcuaagggcuacuc

SEQ ID NO: 20989 - RNA, 19 nt, Artificial Sequence
  Description of Artificial Sequence: Synthetic oligonucleotide
ggaguggacggcacgagca

SEQ ID NO: 20990 - RNA, 19 nt, Artificial Sequence
  Description of Artificial Sequence: Synthetic oligonucleotide
ugaucacggcauccacaau

SEQ ID NO: 20991 - RNA, 19 nt, Artificial Sequence
  Description of Artificial Sequence: Synthetic oligonucleotide
aucucggcugggacgugcg

SEQ ID NO: 20992 - RNA, 19 nt, Artificial Sequence
  Description of Artificial Sequence: Synthetic oligonucleotide
auacccgcggggccuguga

SEQ ID NO: 20993 - RNA, 19 nt, Artificial Sequence
  Description of Artificial Sequence: Synthetic oligonucleotide
ugggguugcgggccucuuc

SEQ ID NO: 20994 - RNA, 19 nt, Artificial Sequence
  Description of Artificial Sequence: Synthetic oligonucleotide
auggggccuauuguaauuu

SEQ ID NO: 20995 - RNA, 19 nt, Artificial Sequence
  Description of Artificial Sequence: Synthetic oligonucleotide
gcgcaugcauaccaccacc

SEQ ID NO: 20996 - RNA, 19 nt, Artificial Sequence
  Description of Artificial Sequence: Synthetic oligonucleotide
ucuucacgccggcggucca

SEQ ID NO: 20997 - RNA, 19 nt, Artificial Sequence
  Description of Artificial Sequence: Synthetic oligonucleotide
ucgcugucccgcuugcguu

SEQ ID NO: 20998 - RNA, 19 nt, Artificial Sequence
  Description of Artificial Sequence: Synthetic oligonucleotide
auuggucgcuugccuugca

SEQ ID NO: 20999 - RNA, 19 nt, Artificial Sequence
  Description of Artificial Sequence: Synthetic oligonucleotide
gucauaagggaggucauuu

SEQ ID NO: 21000 - RNA, 19 nt, Artificial Sequence
  Description of Artificial Sequence: Synthetic oligonucleotide
  modified_base (4)..(4): a, c, u, g, unknown or other
gccncgguuuugcugcccc

SEQ ID NO: 21001 - RNA, 19 nt, Artificial Sequence
  Description of Artificial Sequence: Synthetic oligonucleotide
uuccaucgagccugaggua

SEQ ID NO: 21002 - RNA, 19 nt, Artificial Sequence
  Description of Artificial Sequence: Synthetic oligonucleotide
agccuguacucuucuggua

SEQ ID NO: 21003 - RNA, 19 nt, Artificial Sequence
  Description of Artificial Sequence: Synthetic oligonucleotide
cagucucaucaucggggac

SEQ ID NO: 21004 - RNA, 19 nt, Artificial Sequence
  Description of Artificial Sequence: Synthetic oligonucleotide
cuuccgcuugggguugcgg

SEQ ID NO: 21005 - RNA, 19 nt, Artificial Sequence
  Description of Artificial Sequence: Synthetic oligonucleotide
agaaaggcucgccgcucau

SEQ ID NO: 21006 - RNA, 19 nt, Artificial Sequence
  Description of Artificial Sequence: Synthetic oligonucleotide
cuuugugcugccguaccaa

SEQ ID NO: 21007 - RNA, 19 nt, Artificial Sequence
  Description of Artificial Sequence: Synthetic oligonucleotide
gaguuuggguagaauucua

SEQ ID NO: 21008 - RNA, 19 nt, Artificial Sequence
  Description of Artificial Sequence: Synthetic oligonucleotide
gggguugcgggccucuuca

SEQ ID NO: 21009 - RNA, 19 nt, Artificial Sequence
  Description of Artificial Sequence: Synthetic oligonucleotide
ccauaagccuccgcauucg

SEQ ID NO: 21010 - RNA, 19 nt, Artificial Sequence
  Description of Artificial Sequence: Synthetic oligonucleotide
gcacgagcaugcauccacg

SEQ ID NO: 21011 - RNA, 19 nt, Artificial Sequence
  Description of Artificial Sequence: Synthetic oligonucleotide
uggggcacaaaggcucguc

SEQ ID NO: 21012 - RNA, 19 nt, Artificial Sequence
  Description of Artificial Sequence: Synthetic oligonucleotide
gugucagcuuacaguggug

SEQ ID NO: 21013 - RNA, 19 nt, Artificial Sequence
  Description of Artificial Sequence: Synthetic oligonucleotide
guuugacagcgucgagaga

SEQ ID NO: 21014 - RNA, 19 nt, Artificial Sequence
  Description of Artificial Sequence: Synthetic oligonucleotide
cagcacggguacugagcag

SEQ ID NO: 21015 - RNA, 19 nt, Artificial Sequence
  Description of Artificial Sequence: Synthetic oligonucleotide
uugcgguggcgagaaccgc

SEQ ID NO: 21016 - RNA, 19 nt, Artificial Sequence
  Description of Artificial Sequence: Synthetic oligonucleotide
gucgcuugccuugcacggc

SEQ ID NO: 21017 - RNA, 19 nt, Artificial Sequence
  Description of Artificial Sequence: Synthetic oligonucleotide
ccucgcugagcugacgucc

SEQ ID NO: 21018 - RNA, 19 nt, Artificial Sequence
  Description of Artificial Sequence: Synthetic oligonucleotide
gaaccgcggccaaacaucu

SEQ ID NO: 21019 - RNA, 19 nt, Artificial Sequence
  Description of Artificial Sequence: Synthetic oligonucleotide
caauucauaugcccaguuu

SEQ ID NO: 21020 - RNA, 19 nt, Artificial Sequence
  Description of Artificial Sequence: Synthetic oligonucleotide
ccucuuccaucaagcgugg

SEQ ID NO: 21021 - RNA, 19 nt, Artificial Sequence
  Description of Artificial Sequence: Synthetic oligonucleotide
gcccaguuugacagcgucg

SEQ ID NO: 21022 - RNA, 19 nt, Artificial Sequence
  Description of Artificial Sequence: Synthetic oligonucleotide
gucaauucauaugcccagu

SEQ ID NO: 21023 - RNA, 19 nt, Artificial Sequence
  Description of Artificial Sequence: Synthetic oligonucleotide
ggaauccucguagaucaaa

SEQ ID NO: 21024 - RNA, 19 nt, Artificial Sequence
  Description of Artificial Sequence: Synthetic oligonucleotide
ccuaagggccuugaguuca

SEQ ID NO: 21025 - RNA, 19 nt, Artificial Sequence
  Description of Artificial Sequence: Synthetic oligonucleotide
gaugcgggccucccgcagu

SEQ ID NO: 21026 - RNA, 19 nt, Artificial Sequence
  Description of Artificial Sequence: Synthetic oligonucleotide
cugcgcuuguaggccuugg

SEQ ID NO: 21027 - RNA, 19 nt, Artificial Sequence
  Description of Artificial Sequence: Synthetic oligonucleotide
ugcugcgcuuguaggccuu

SEQ ID NO: 21028 - RNA, 19 nt, Artificial Sequence
  Description of Artificial Sequence: Synthetic oligonucleotide
guuugcgugaggauuucuu

SEQ ID NO: 21029 - RNA, 19 nt, Artificial Sequence
  Description of Artificial Sequence: Synthetic oligonucleotide
cuaagggccuugaguucaa

SEQ ID NO: 21030 - RNA, 19 nt, Artificial Sequence
  Description of Artificial Sequence: Synthetic oligonucleotide
cuugcguuugcgugaggau

SEQ ID NO: 21031 - RNA, 19 nt, Artificial Sequence
  Description of Artificial Sequence: Synthetic oligonucleotide
auuuagcggcggccaggau

SEQ ID NO: 21032 - RNA, 19 nt, Artificial Sequence
  Description of Artificial Sequence: Synthetic oligonucleotide
ccacguaguguguguugag

SEQ ID NO: 21033 - RNA, 19 nt, Artificial Sequence
  Description of Artificial Sequence: Synthetic oligonucleotide
agguggccguccacgcuuc

SEQ ID NO: 21034 - RNA, 19 nt, Artificial Sequence
  Description of Artificial Sequence: Synthetic oligonucleotide
ugacugccgcuugcugcgc

SEQ ID NO: 21035 - RNA, 19 nt, Artificial Sequence
  Description of Artificial Sequence: Synthetic oligonucleotide
gaguggacggcacgagcau

SEQ ID NO: 21036 - RNA, 19 nt, Artificial Sequence
  Description of Artificial Sequence: Synthetic oligonucleotide
gcgguggcgagaaccgcgg

SEQ ID NO: 21037 - RNA, 19 nt, Artificial Sequence
  Description of Artificial Sequence: Synthetic oligonucleotide
ggacgauggaauccucgua

SEQ ID NO: 21038 - RNA, 19 nt, Artificial Sequence
  Description of Artificial Sequence: Synthetic oligonucleotide
cgaaacuacaucugugcua

SEQ ID NO: 21039 - RNA, 19 nt, Artificial Sequence
  Description of Artificial Sequence: Synthetic oligonucleotide
cauggggccuauuguaauu

SEQ ID NO: 21040 - RNA, 19 nt, Artificial Sequence
  Description of Artificial Sequence: Synthetic oligonucleotide
  modified_base (2)..(2): a, c, u, g, unknown or other
cncgguuuugcugccccaa

SEQ ID NO: 21041 - RNA, 19 nt, Artificial Sequence
  Description of Artificial Sequence: Synthetic oligonucleotide
cuccuugcgguggcgagaa

SEQ ID NO: 21042 - RNA, 19 nt, Artificial Sequence
  Description of Artificial Sequence: Synthetic oligonucleotide
ugugggccccugaccucau

SEQ ID NO: 21043 - RNA, 19 nt, Artificial Sequence
  Description of Artificial Sequence: Synthetic oligonucleotide
gcugggacgugcgccucgg

SEQ ID NO: 21044 - RNA, 19 nt, Artificial Sequence
  Description of Artificial Sequence: Synthetic oligonucleotide
gcucaguauuugcauggua

SEQ ID NO: 21045 - RNA, 19 nt, Artificial Sequence
  Description of Artificial Sequence: Synthetic oligonucleotide
  modified_base (9)..(9): a, c, u, g, unknown or other
guugggccncgguuuugcu

SEQ ID NO: 21046 - RNA, 19 nt, Artificial Sequence
  Description of Artificial Sequence: Synthetic oligonucleotide
ccguaccaacucugugagg

SEQ ID NO: 21047 - RNA, 19 nt, Artificial Sequence
  Description of Artificial Sequence: Synthetic oligonucleotide
gggacgugcgccucggggu

SEQ ID NO: 21048 - RNA, 19 nt, Artificial Sequence
  Description of Artificial Sequence: Synthetic oligonucleotide
ggaccugugucagcuuaca

SEQ ID NO: 21049 - RNA, 19 nt, Artificial Sequence
  Description of Artificial Sequence: Synthetic oligonucleotide
ggggucagaaccaucuaau

SEQ ID NO: 21050 - RNA, 19 nt, Artificial Sequence
  Description of Artificial Sequence: Synthetic oligonucleotide
ccugugacugaucugugau

SEQ ID NO: 21051 - RNA, 19 nt, Artificial Sequence
  Description of Artificial Sequence: Synthetic oligonucleotide
cccgcuugcguuugcguga

SEQ ID NO: 21052 - RNA, 19 nt, Artificial Sequence
  Description of Artificial Sequence: Synthetic oligonucleotide
cagccauaagccuccgcau

SEQ ID NO: 21053 - RNA, 19 nt, Artificial Sequence
  Description of Artificial Sequence: Synthetic oligonucleotide
gacggauaaugaggauggu

SEQ ID NO: 21054 - RNA, 19 nt, Artificial Sequence
  Description of Artificial Sequence: Synthetic oligonucleotide
gguuucggauucuuuccuu

SEQ ID NO: 21055 - RNA, 19 nt, Artificial Sequence
  Description of Artificial Sequence: Synthetic oligonucleotide
caucagugucuuggugcca

SEQ ID NO: 21056 - RNA, 19 nt, Artificial Sequence
  Description of Artificial Sequence: Synthetic oligonucleotide
cauacccgcggggccugug

SEQ ID NO: 21057 - RNA, 19 nt, Artificial Sequence
  Description of Artificial Sequence: Synthetic oligonucleotide
gugcuacccaucacugcua

SEQ ID NO: 21058 - RNA, 19 nt, Artificial Sequence
  Description of Artificial Sequence: Synthetic oligonucleotide
augccgccggugaacccca

SEQ ID NO: 21059 - RNA, 19 nt, Artificial Sequence
  Description of Artificial Sequence: Synthetic oligonucleotide
cgccggugaaccccaagug

SEQ ID NO: 21060 - RNA, 19 nt, Artificial Sequence
  Description of Artificial Sequence: Synthetic oligonucleotide
gacagcgucgagagagguu

SEQ ID NO: 21061 - RNA, 19 nt, Artificial Sequence
  Description of Artificial Sequence: Synthetic oligonucleotide
cagguggccguccacgcuu

SEQ ID NO: 21062 - RNA, 19 nt, Artificial Sequence
  Description of Artificial Sequence: Synthetic oligonucleotide
ccuugcgagaggggaguug

SEQ ID NO: 21063 - RNA, 19 nt, Artificial Sequence
  Description of Artificial Sequence: Synthetic oligonucleotide
aaccgcggccaaacaucuu

SEQ ID NO: 21064 - RNA, 19 nt, Artificial Sequence
  Description of Artificial Sequence: Synthetic oligonucleotide
ggguugcgggccucuucac

SEQ ID NO: 21065 - RNA, 19 nt, Artificial Sequence
  Description of Artificial Sequence: Synthetic oligonucleotide
cagcugauucugguuaaau

SEQ ID NO: 21066 - RNA, 19 nt, Artificial Sequence
  Description of Artificial Sequence: Synthetic oligonucleotide
  modified_base (6)..(6): a, c, u, g, unknown or other
gggccncgguuuugcugcc

SEQ ID NO: 21067 - RNA, 19 nt, Artificial Sequence
  Description of Artificial Sequence: Synthetic oligonucleotide
cuugggaaugcugguccau

SEQ ID NO: 21068 - RNA, 19 nt, Artificial Sequence
  Description of Artificial Sequence: Synthetic oligonucleotide
gcuuccgcuugggguugcg

SEQ ID NO: 21069 - RNA, 19 nt, Artificial Sequence
  Description of Artificial Sequence: Synthetic oligonucleotide
ccuuguguaggcgacggau

SEQ ID NO: 21070 - RNA, 19 nt, Artificial Sequence
  Description of Artificial Sequence: Synthetic oligonucleotide
cucccauaccauggggccu

SEQ ID NO: 21071 - RNA, 19 nt, Artificial Sequence
  Description of Artificial Sequence: Synthetic oligonucleotide
ccgcuugcguuugcgugag

SEQ ID NO: 21072 - RNA, 19 nt, Artificial Sequence
  Description of Artificial Sequence: Synthetic oligonucleotide
agcaggcgccuuggagcca

SEQ ID NO: 21073 - RNA, 19 nt, Artificial Sequence
  Description of Artificial Sequence: Synthetic oligonucleotide
cuucacgccggcgguccaa

SEQ ID NO: 21074 - RNA, 19 nt, Artificial Sequence
  Description of Artificial Sequence: Synthetic oligonucleotide
gcugcgcuuguaggccuug

SEQ ID NO: 21075 - RNA, 19 nt, Artificial Sequence
  Description of Artificial Sequence: Synthetic oligonucleotide
  modified_base (5)..(5): a, c, u, g, unknown or other
ggccncgguuuugcugccc

SEQ ID NO: 21076 - RNA, 19 nt, Artificial Sequence
  Description of Artificial Sequence: Synthetic oligonucleotide
acauacccgcggggccugu

SEQ ID NO: 21077 - RNA, 19 nt, Artificial Sequence
  Description of Artificial Sequence: Synthetic oligonucleotide
ugccgccggugaaccccaa

SEQ ID NO: 21078 - RNA, 19 nt, Artificial Sequence
  Description of Artificial Sequence: Synthetic oligonucleotide
guccacuacugcuguccuu

SEQ ID NO: 21079 - RNA, 19 nt, Artificial Sequence
  Description of Artificial Sequence: Synthetic oligonucleotide
ggucauaagggaggucauu

SEQ ID NO: 21080 - RNA, 19 nt, Artificial Sequence
  Description of Artificial Sequence: Synthetic oligonucleotide
cuugcacgaugccgccggu

SEQ ID NO: 21081 - RNA, 19 nt, Artificial Sequence
  Description of Artificial Sequence: Synthetic oligonucleotide
  modified_base (3)..(3): a, c, u, g, unknown or other
ccncgguuuugcugcccca

SEQ ID NO: 21082 - RNA, 19 nt, Artificial Sequence
  Description of Artificial Sequence: Synthetic oligonucleotide
caucgagccugagguauuu

SEQ ID NO: 21083 - RNA, 19 nt, Artificial Sequence
  Description of Artificial Sequence: Synthetic oligonucleotide
cgucuugccgcuggagauc

SEQ ID NO: 21084 - RNA, 19 nt, Artificial Sequence
  Description of Artificial Sequence: Synthetic oligonucleotide
gcguuugcgugaggauuuc

SEQ ID NO: 21085 - RNA, 19 nt, Artificial Sequence
  Description of Artificial Sequence: Synthetic oligonucleotide
ccauggggccuauuguaau

SEQ ID NO: 21086 - RNA, 19 nt, Artificial Sequence
  Description of Artificial Sequence: Synthetic oligonucleotide
ggcgacggauaaugaggau

SEQ ID NO: 21087 - RNA, 19 nt, Artificial Sequence
  Description of Artificial Sequence: Synthetic oligonucleotide
ccucuucacgccggcgguc

SEQ ID NO: 21088 - RNA, 19 nt, Artificial Sequence
  Description of Artificial Sequence: Synthetic oligonucleotide
ggcuuccgcuugggguugc

SEQ ID NO: 21089 - RNA, 19 nt, Artificial Sequence
  Description of Artificial Sequence: Synthetic oligonucleotide
cggugcacaggcggagcac

SEQ ID NO: 21090 - RNA, 19 nt, Artificial Sequence
  Description of Artificial Sequence: Synthetic oligonucleotide
cagcgucgagagagguuuu

SEQ ID NO: 21091 - RNA, 19 nt, Artificial Sequence
  Description of Artificial Sequence: Synthetic oligonucleotide
ccaucgagccugagguauu

SEQ ID NO: 21092 - RNA, 19 nt, Artificial Sequence
  Description of Artificial Sequence: Synthetic oligonucleotide
cgcuugcguuugcgugagg

SEQ ID NO: 21093 - RNA, 19 nt, Artificial Sequence
  Description of Artificial Sequence: Synthetic oligonucleotide
cugcccgggccaacaucuu

SEQ ID NO: 21094 - RNA, 19 nt, Artificial Sequence
  Description of Artificial Sequence: Synthetic oligonucleotide
uagcggcggccaggaucuu

SEQ ID NO: 21095 - RNA, 19 nt, Artificial Sequence
  Description of Artificial Sequence: Synthetic oligonucleotide
cgcucaguauuugcauggu

SEQ ID NO: 21096 - RNA, 19 nt, Artificial Sequence
  Description of Artificial Sequence: Synthetic oligonucleotide
cguuugcgugaggauuucu

SEQ ID NO: 21097 - RNA, 19 nt, Artificial Sequence
  Description of Artificial Sequence: Synthetic oligonucleotide
cggcugggacgugcgccuc

SEQ ID NO: 21098 - RNA, 19 nt, Artificial Sequence
  Description of Artificial Sequence: Synthetic oligonucleotide
aaugaguacuguuugaucc

SEQ ID NO: 21099 - RNA, 19 nt, Artificial Sequence
  Description of Artificial Sequence: Synthetic oligonucleotide
uuuaauaaagccaugaacu

SEQ ID NO: 21100 - RNA, 19 nt, Artificial Sequence
  Description of Artificial Sequence: Synthetic oligonucleotide
auuauaaugauguucuggc

SEQ ID NO: 21101 - RNA, 19 nt, Artificial Sequence
  Description of Artificial Sequence: Synthetic oligonucleotide
uuaaauguagcccaaugag

SEQ ID NO: 21102 - RNA, 19 nt, Artificial Sequence
  Description of Artificial Sequence: Synthetic oligonucleotide
uuuaacuuacacauaauac

SEQ ID NO: 21103 - RNA, 19 nt, Artificial Sequence
  Description of Artificial Sequence: Synthetic oligonucleotide
ugauuaaauaacuaguugu

SEQ ID NO: 21104 - RNA, 19 nt, Artificial Sequence
  Description of Artificial Sequence: Synthetic oligonucleotide
uauuccuagaaacugcccg

SEQ ID NO: 21105 - RNA, 19 nt, Artificial Sequence
  Description of Artificial Sequence: Synthetic oligonucleotide
aaaaucacacguuuguuca

SEQ ID NO: 21106 - RNA, 19 nt, Artificial Sequence
  Description of Artificial Sequence: Synthetic oligonucleotide
ugguuaauaaucaaauagc

SEQ ID NO: 21107 - RNA, 19 nt, Artificial Sequence
  Description of Artificial Sequence: Synthetic oligonucleotide
acauggucaggcuugaacc

SEQ ID NO: 21108 - RNA, 19 nt, Artificial Sequence
  Description of Artificial Sequence: Synthetic oligonucleotide
aaauguagcccaaugaguc

SEQ ID NO: 21109 - RNA, 19 nt, Artificial Sequence
  Description of Artificial Sequence: Synthetic oligonucleotide
uauaaugauguucuggccu

SEQ ID NO: 21110 - RNA, 19 nt, Artificial Sequence
  Description of Artificial Sequence: Synthetic oligonucleotide
agaaauuaauaggugauac

SEQ ID NO: 21111 - RNA, 19 nt, Artificial Sequence
  Description of Artificial Sequence: Synthetic oligonucleotide
ugagaauagacuaaauuaa

SEQ ID NO: 21112 - RNA, 19 nt, Artificial Sequence
  Description of Artificial Sequence: Synthetic oligonucleotide
aaagacgguaguuaggaca

SEQ ID NO: 21113 - RNA, 19 nt, Artificial Sequence
  Description of Artificial Sequence: Synthetic oligonucleotide
gaaucagauauguacaaug

SEQ ID NO: 21114 - RNA, 19 nt, Artificial Sequence
  Description of Artificial Sequence: Synthetic oligonucleotide
uuccuaauuaucaaucuug

SEQ ID NO: 21115 - RNA, 19 nt, Artificial Sequence
  Description of Artificial Sequence: Synthetic oligonucleotide
uaaagcuuaugcaaguccc

SEQ ID NO: 21116 - RNA, 19 nt, Artificial Sequence
  Description of Artificial Sequence: Synthetic oligonucleotide
uccuaauuaucaaucuugg

SEQ ID NO: 21117 - RNA, 19 nt, Artificial Sequence
  Description of Artificial Sequence: Synthetic oligonucleotide
uguaaguucaagcaucgcu

SEQ ID NO: 21118 - RNA, 19 nt, Artificial Sequence
  Description of Artificial Sequence: Synthetic oligonucleotide
caaccuacugguaacaagg

SEQ ID NO: 21119 - RNA, 19 nt, Artificial Sequence
  Description of Artificial Sequence: Synthetic oligonucleotide
ugauucaucgucauccaag

SEQ ID NO: 21120 - RNA, 19 nt, Artificial Sequence
  Description of Artificial Sequence: Synthetic oligonucleotide
auaaucaaauagcauuuuc

SEQ ID NO: 21121 - RNA, 19 nt, Artificial Sequence
  Description of Artificial Sequence: Synthetic oligonucleotide
aacccuaauaaauuauugu

SEQ ID NO: 21122 - RNA, 19 nt, Artificial Sequence
  Description of Artificial Sequence: Synthetic oligonucleotide
cuugugaucuuauauuuag

SEQ ID NO: 21123 - RNA, 19 nt, Artificial Sequence
  Description of Artificial Sequence: Synthetic oligonucleotide
gcuaauaacccuuacaggc

SEQ ID NO: 21124 - RNA, 19 nt, Artificial Sequence
  Description of Artificial Sequence: Synthetic oligonucleotide
gauugaacaaacaugguca

SEQ ID NO: 21125 - RNA, 19 nt, Artificial Sequence
  Description of Artificial Sequence: Synthetic oligonucleotide
aacggguuaaguagaaacc

SEQ ID NO: 21126 - RNA, 19 nt, Artificial Sequence
  Description of Artificial Sequence: Synthetic oligonucleotide
aaugacuaaauggccacac

SEQ ID NO: 21127 - RNA, 19 nt, Artificial Sequence
  Description of Artificial Sequence: Synthetic oligonucleotide
aauaaacuaacugagcuuu

SEQ ID NO: 21128 - RNA, 19 nt, Artificial Sequence
  Description of Artificial Sequence: Synthetic oligonucleotide
auuguugugaacucgcaug

SEQ ID NO: 21129 - RNA, 19 nt, Artificial Sequence
  Description of Artificial Sequence: Synthetic oligonucleotide
uuguugugaacucgcaugg

SEQ ID NO: 21130 - RNA, 19 nt, Artificial Sequence
  Description of Artificial Sequence: Synthetic oligonucleotide
ucuuggauuaccacuauaa

SEQ ID NO: 21131 - RNA, 19 nt, Artificial Sequence
  Description of Artificial Sequence: Synthetic oligonucleotide
cauuuaucacgacacaggg

SEQ ID NO: 21132 - RNA, 19 nt, Artificial Sequence
  Description of Artificial Sequence: Synthetic oligonucleotide
ugugaucuuauauuuagaa

SEQ ID NO: 21133 - RNA, 19 nt, Artificial Sequence
  Description of Artificial Sequence: Synthetic oligonucleotide
cuaauaacccuuacaggcg

SEQ ID NO: 21134 - RNA, 19 nt, Artificial Sequence
  Description of Artificial Sequence: Synthetic oligonucleotide
acuacuaacaguaucugag

SEQ ID NO: 21135 - RNA, 19 nt, Artificial Sequence
  Description of Artificial Sequence: Synthetic oligonucleotide
uccugaacggguuaaguag

SEQ ID NO: 21136 - RNA, 19 nt, Artificial Sequence
  Description of Artificial Sequence: Synthetic oligonucleotide
uuccauacgacuucugugc

SEQ ID NO: 21137 - RNA, 19 nt, Artificial Sequence
  Description of Artificial Sequence: Synthetic oligonucleotide
acaguuacuuuuaagcuac

SEQ ID NO: 21138 - RNA, 19 nt, Artificial Sequence
  Description of Artificial Sequence: Synthetic oligonucleotide
uuuggaguaaaauucuguc

SEQ ID NO: 21139 - RNA, 19 nt, Artificial Sequence
  Description of Artificial Sequence: Synthetic oligonucleotide
cuaucuguuucuaauguac

SEQ ID NO: 21140 - RNA, 19 nt, Artificial Sequence
  Description of Artificial Sequence: Synthetic oligonucleotide
ucauagaauguauacucug

SEQ ID NO: 21141 - RNA, 19 nt, Artificial Sequence
  Description of Artificial Sequence: Synthetic oligonucleotide
uguagguaaagguaaggcu

SEQ ID NO: 21142 - RNA, 19 nt, Artificial Sequence
  Description of Artificial Sequence: Synthetic oligonucleotide
aucgaagucgauuaaacaa

SEQ ID NO: 21143 - RNA, 19 nt, Artificial Sequence
  Description of Artificial Sequence: Synthetic oligonucleotide
augaguacuguuugauccc

SEQ ID NO: 21144 - RNA, 19 nt, Artificial Sequence
  Description of Artificial Sequence: Synthetic oligonucleotide
  modified_base (7)..(7): a, c, u, g, unknown or other
aagaaanaaacaauucuua

SEQ ID NO: 21145 - RNA, 19 nt, Artificial Sequence
  Description of Artificial Sequence: Synthetic oligonucleotide
uuggaguaaaauucugucc

SEQ ID NO: 21146 - RNA, 19 nt, Artificial Sequence
  Description of Artificial Sequence: Synthetic oligonucleotide
  modified_base (6)..(6): a, c, u, g, unknown or other
agaaanaaacaauucuuaa

SEQ ID NO: 21147 - RNA, 19 nt, Artificial Sequence
  Description of Artificial Sequence: Synthetic oligonucleotide
agaccaguuucucuaaagg

SEQ ID NO: 21148 - RNA, 19 nt, Artificial Sequence
  Description of Artificial Sequence: Synthetic oligonucleotide
uucccugucacaacaggcg

SEQ ID NO: 21149 - RNA, 19 nt, Artificial Sequence
  Description of Artificial Sequence: Synthetic oligonucleotide
aaaagacgguaguuaggac

SEQ ID NO: 21150 - RNA, 19 nt, Artificial Sequence
  Description of Artificial Sequence: Synthetic oligonucleotide
uaaaccuacauugggacug

SEQ ID NO: 21151 - RNA, 19 nt, Artificial Sequence
  Description of Artificial Sequence: Synthetic oligonucleotide
ucaagcaucgcuacauccc

SEQ ID NO: 21152 - RNA, 19 nt, Artificial Sequence
  Description of Artificial Sequence: Synthetic oligonucleotide
ugcuaauaacccuuacagg

SEQ ID NO: 21153 - RNA, 19 nt, Artificial Sequence
  Description of Artificial Sequence: Synthetic oligonucleotide
ugaagacuuucuacgacag

SEQ ID NO: 21154 - RNA, 19 nt, Artificial Sequence
  Description of Artificial Sequence: Synthetic oligonucleotide
caauauuagcacacaaggc

SEQ ID NO: 21155 - RNA, 19 nt, Artificial Sequence
  Description of Artificial Sequence: Synthetic oligonucleotide
aacaguuacuuuuaagcua

SEQ ID NO: 21156 - RNA, 19 nt, Artificial Sequence
  Description of Artificial Sequence: Synthetic oligonucleotide
acaaguuugacagucuguc

SEQ ID NO: 21157 - RNA, 19 nt, Artificial Sequence
  Description of Artificial Sequence: Synthetic oligonucleotide
caaaguuacuggaaccugg

SEQ ID NO: 21158 - RNA, 19 nt, Artificial Sequence
  Description of Artificial Sequence: Synthetic oligonucleotide
ucggaaugcagaaaugucu

SEQ ID NO: 21159 - RNA, 19 nt, Artificial Sequence
  Description of Artificial Sequence: Synthetic oligonucleotide
aaauuaugguauaaacuug

SEQ ID NO: 21160 - RNA, 19 nt, Artificial Sequence
  Description of Artificial Sequence: Synthetic oligonucleotide
uccuauacauuacaucaug

SEQ ID NO: 21161 - RNA, 19 nt, Artificial Sequence
  Description of Artificial Sequence: Synthetic oligonucleotide
uaaauaacuaguuguguua

SEQ ID NO: 21162 - RNA, 19 nt, Artificial Sequence
  Description of Artificial Sequence: Synthetic oligonucleotide
acugaagacuuucuacgac

SEQ ID NO: 21163 - RNA, 19 nt, Artificial Sequence
  Description of Artificial Sequence: Synthetic oligonucleotide
uacuuuagagccaaagcuc

SEQ ID NO: 21164 - RNA, 19 nt, Artificial Sequence
  Description of Artificial Sequence: Synthetic oligonucleotide
agugcaaccuacugguaac

SEQ ID NO: 21165 - RNA, 19 nt, Artificial Sequence
  Description of Artificial Sequence: Synthetic oligonucleotide
acggguuaaguagaaaccc

SEQ ID NO: 21166 - RNA, 19 nt, Artificial Sequence
  Description of Artificial Sequence: Synthetic oligonucleotide
agguacaagaaauaaacua

SEQ ID NO: 21167 - RNA, 19 nt, Artificial Sequence
  Description of Artificial Sequence: Synthetic oligonucleotide
cuaaagcuuaugcaagucc

SEQ ID NO: 21168 - RNA, 19 nt, Artificial Sequence
  Description of Artificial Sequence: Synthetic oligonucleotide
guagguaaagguaaggcug

SEQ ID NO: 21169 - RNA, 19 nt, Artificial Sequence
  Description of Artificial Sequence: Synthetic oligonucleotide
gguggaauaaaugauuccg

SEQ ID NO: 21170 - RNA, 19 nt, Artificial Sequence
  Description of Artificial Sequence: Synthetic oligonucleotide
guacucaccagaaacacag

SEQ ID NO: 21171 - RNA, 19 nt, Artificial Sequence
  Description of Artificial Sequence: Synthetic oligonucleotide
gauuccgucauuacggacc

SEQ ID NO: 21172 - RNA, 19 nt, Artificial Sequence
  Description of Artificial Sequence: Synthetic oligonucleotide
uguguaacuucccucgcug

SEQ ID NO: 21173 - RNA, 19 nt, Artificial Sequence
  Description of Artificial Sequence: Synthetic oligonucleotide
ugaauugaucaccugguau

SEQ ID NO: 21174 - RNA, 19 nt, Artificial Sequence
  Description of Artificial Sequence: Synthetic oligonucleotide
uuauaaugauguucuggcc

SEQ ID NO: 21175 - RNA, 19 nt, Artificial Sequence
  Description of Artificial Sequence: Synthetic oligonucleotide
uggauuauucuuucuugag

SEQ ID NO: 21176 - RNA, 19 nt, Artificial Sequence
  Description of Artificial Sequence: Synthetic oligonucleotide
aaacccuaauaaauuauug

SEQ ID NO: 21177 - RNA, 19 nt, Artificial Sequence
  Description of Artificial Sequence: Synthetic oligonucleotide
auaauuucgcauagcuucc

SEQ ID NO: 21178 - RNA, 19 nt, Artificial Sequence
  Description of Artificial Sequence: Synthetic oligonucleotide
acuuuccuaauuaucaauc

SEQ ID NO: 21179 - RNA, 19 nt, Artificial Sequence
  Description of Artificial Sequence: Synthetic oligonucleotide
ugaaugcuggcaaacauuu

SEQ ID NO: 21180 - RNA, 19 nt, Artificial Sequence
  Description of Artificial Sequence: Synthetic oligonucleotide
auuguuucggcuucuacau

SEQ ID NO: 21181 - RNA, 19 nt, Artificial Sequence
  Description of Artificial Sequence: Synthetic oligonucleotide
caaagacgaugauacaugc

SEQ ID NO: 21182 - RNA, 19 nt, Artificial Sequence
  Description of Artificial Sequence: Synthetic oligonucleotide
aaauuggacagaacauuuc

SEQ ID NO: 21183 - RNA, 19 nt, Artificial Sequence
  Description of Artificial Sequence: Synthetic oligonucleotide
uuaaccuguacuccagcca

SEQ ID NO: 21184 - RNA, 19 nt, Artificial Sequence
  Description of Artificial Sequence: Synthetic oligonucleotide
uaacuaguuguguuaauaa

SEQ ID NO: 21185 - RNA, 19 nt, Artificial Sequence
  Description of Artificial Sequence: Synthetic oligonucleotide
ggcgcaaaccuucaaaugg

SEQ ID NO: 21186 - RNA, 19 nt, Artificial Sequence
  Description of Artificial Sequence: Synthetic oligonucleotide
uuaugguauaaacuugcuc

SEQ ID NO: 21187 - RNA, 19 nt, Artificial Sequence
  Description of Artificial Sequence: Synthetic oligonucleotide
aaguuacuggaaccuggac

SEQ ID NO: 21188 - RNA, 19 nt, Artificial Sequence
  Description of Artificial Sequence: Synthetic oligonucleotide
uuacggaccaaaguuacug

SEQ ID NO: 21189 - RNA, 19 nt, Artificial Sequence
  Description of Artificial Sequence: Synthetic oligonucleotide
agugcaaccaaaguuuaag

SEQ ID NO: 21190 - RNA, 19 nt, Artificial Sequence
  Description of Artificial Sequence: Synthetic oligonucleotide
aucgcuacauccccgccgc

SEQ ID NO: 21191 - RNA, 19 nt, Artificial Sequence
  Description of Artificial Sequence: Synthetic oligonucleotide
ugaacuguuagaaucucuu

SEQ ID NO: 21192 - RNA, 19 nt, Artificial Sequence
  Description of Artificial Sequence: Synthetic oligonucleotide
cucgccaaaacuccaaccc

SEQ ID NO: 21193 - RNA, 19 nt, Artificial Sequence
  Description of Artificial Sequence: Synthetic oligonucleotide
uucaagcaucgcuacaucc

SEQ ID NO: 21194 - RNA, 19 nt, Artificial Sequence
  Description of Artificial Sequence: Synthetic oligonucleotide
uggcauuccgccauaaccu

SEQ ID NO: 21195 - RNA, 19 nt, Artificial Sequence
  Description of Artificial Sequence: Synthetic oligonucleotide
cuaucuuauugcuaauaac

SEQ ID NO: 21196 - RNA, 19 nt, Artificial Sequence
  Description of Artificial Sequence: Synthetic oligonucleotide
gucgauuaaacaaagccac

SEQ ID NO: 21197 - RNA, 19 nt, Artificial Sequence
  Description of Artificial Sequence: Synthetic oligonucleotide
aucuguucucgguuaaagg

SEQ ID NO: 21198 - RNA, 19 nt, Artificial Sequence
  Description of Artificial Sequence: Synthetic oligonucleotide
aacccuuacaggcgcacag

SEQ ID NO: 21199 - RNA, 19 nt, Artificial Sequence
  Description of Artificial Sequence: Synthetic oligonucleotide
cauucuauucugugguagg

SEQ ID NO: 21200 - RNA, 19 nt, Artificial Sequence
  Description of Artificial Sequence: Synthetic oligonucleotide
aagaaugaguacuguuuga

SEQ ID NO: 21201 - RNA, 19 nt, Artificial Sequence
  Description of Artificial Sequence: Synthetic oligonucleotide
uaccacuauaaauacauuu

SEQ ID NO: 21202 - RNA, 19 nt, Artificial Sequence
  Description of Artificial Sequence: Synthetic oligonucleotide
aaauaacuaguuguguuaa

SEQ ID NO: 21203 - RNA, 19 nt, Artificial Sequence
  Description of Artificial Sequence: Synthetic oligonucleotide
ucuguuucuaauguacugu

SEQ ID NO: 21204 - RNA, 19 nt, Artificial Sequence
  Description of Artificial Sequence: Synthetic oligonucleotide
uucuuucggacauggagug

SEQ ID NO: 21205 - RNA, 19 nt, Artificial Sequence
  Description of Artificial Sequence: Synthetic oligonucleotide
caugaacuugaacaguuac

SEQ ID NO: 21206 - RNA, 19 nt, Artificial Sequence
  Description of Artificial Sequence: Synthetic oligonucleotide
acccuaauaaauuauuguu

SEQ ID NO: 21207 - RNA, 19 nt, Artificial Sequence
  Description of Artificial Sequence: Synthetic oligonucleotide
ucugagggcuacaugggug

SEQ ID NO: 21208 - RNA, 19 nt, Artificial Sequence
  Description of Artificial Sequence: Synthetic oligonucleotide
gagucguuuagguggaggc

SEQ ID NO: 21209 - RNA, 19 nt, Artificial Sequence
  Description of Artificial Sequence: Synthetic oligonucleotide
uaccuuuuacuaaagcuua

SEQ ID NO: 21210 - RNA, 19 nt, Artificial Sequence
  Description of Artificial Sequence: Synthetic oligonucleotide
cauuacggaccaaaguuac

SEQ ID NO: 21211 - RNA, 19 nt, Artificial Sequence
  Description of Artificial Sequence: Synthetic oligonucleotide
uguucaguacucaccagaa

SEQ ID NO: 21212 - RNA, 19 nt, Artificial Sequence
  Description of Artificial Sequence: Synthetic oligonucleotide
uacuaacugucugggaucg

SEQ ID NO: 21213 - RNA, 19 nt, Artificial Sequence
  Description of Artificial Sequence: Synthetic oligonucleotide
gauucaucgucauccaaga

SEQ ID NO: 21214 - RNA, 19 nt, Artificial Sequence
  Description of Artificial Sequence: Synthetic oligonucleotide
guuuaacuuacacauaaua

SEQ ID NO: 21215 - RNA, 19 nt, Artificial Sequence
  Description of Artificial Sequence: Synthetic oligonucleotide
ucauuacggaccaaaguua

SEQ ID NO: 21216 - RNA, 19 nt, Artificial Sequence
  Description of Artificial Sequence: Synthetic oligonucleotide
ucgauuaaacaaagccacc

SEQ ID NO: 21217 - RNA, 19 nt, Artificial Sequence
  Description of Artificial Sequence: Synthetic oligonucleotide
aacacgccaaugucaucac

SEQ ID NO: 21218 - RNA, 19 nt, Artificial Sequence
  Description of Artificial Sequence: Synthetic oligonucleotide
aacuuacacauaauacaag

SEQ ID NO: 21219 - RNA, 19 nt, Artificial Sequence
  Description of Artificial Sequence: Synthetic oligonucleotide
agauagaccaguuucucua

SEQ ID NO: 21220 - RNA, 19 nt, Artificial Sequence
  Description of Artificial Sequence: Synthetic oligonucleotide
ucauuuuaauaaagccaug

SEQ ID NO: 21221 - RNA, 19 nt, Artificial Sequence
  Description of Artificial Sequence: Synthetic oligonucleotide
agucauaagacuucagcuu

SEQ ID NO: 21222 - RNA, 19 nt, Artificial Sequence
  Description of Artificial Sequence: Synthetic oligonucleotide
agucgauuaaacaaagcca

SEQ ID NO: 21223 - RNA, 19 nt, Artificial Sequence
  Description of Artificial Sequence: Synthetic oligonucleotide
agcaucgcuacauccccgc

SEQ ID NO: 21224 - RNA, 19 nt, Artificial Sequence
  Description of Artificial Sequence: Synthetic oligonucleotide
ucuacaaaauuaugguaua

SEQ ID NO: 21225 - RNA, 19 nt, Artificial Sequence
  Description of Artificial Sequence: Synthetic oligonucleotide
uuauuccuagaaacugccc

SEQ ID NO: 21226 - RNA, 19 nt, Artificial Sequence
  Description of Artificial Sequence: Synthetic oligonucleotide
augcacaggguugagacuc

SEQ ID NO: 21227 - RNA, 19 nt, Artificial Sequence
  Description of Artificial Sequence: Synthetic oligonucleotide
ccgaaauaagauaauaaac

SEQ ID NO: 21228 - RNA, 19 nt, Artificial Sequence
  Description of Artificial Sequence: Synthetic oligonucleotide
ucucgguuaaaggaggaug

SEQ ID NO: 21229 - RNA, 19 nt, Artificial Sequence
  Description of Artificial Sequence: Synthetic oligonucleotide
auuaucaaucuugggagug

SEQ ID NO: 21230 - RNA, 19 nt, Artificial Sequence
  Description of Artificial Sequence: Synthetic oligonucleotide
aacucgcauggaaauuucc

SEQ ID NO: 21231 - RNA, 19 nt, Artificial Sequence
  Description of Artificial Sequence: Synthetic oligonucleotide
aaccgaaauaagauaauaa

SEQ ID NO: 21232 - RNA, 19 nt, Artificial Sequence
  Description of Artificial Sequence: Synthetic oligonucleotide
guacuuuagagccaaagcu

SEQ ID NO: 21233 - RNA, 19 nt, Artificial Sequence
  Description of Artificial Sequence: Synthetic oligonucleotide
ggcuacaugggugagaucc

SEQ ID NO: 21234 - RNA, 19 nt, Artificial Sequence
  Description of Artificial Sequence: Synthetic oligonucleotide
guuucuaaccauccauccc

SEQ ID NO: 21235 - RNA, 19 nt, Artificial Sequence
  Description of Artificial Sequence: Synthetic oligonucleotide
acguuuguucaguacucac

SEQ ID NO: 21236 - RNA, 19 nt, Artificial Sequence
  Description of Artificial Sequence: Synthetic oligonucleotide
uacgacaggcacaggagug

SEQ ID NO: 21237 - RNA, 19 nt, Artificial Sequence
  Description of Artificial Sequence: Synthetic oligonucleotide
auauuagcacacaaggcug

SEQ ID NO: 21238 - RNA, 19 nt, Artificial Sequence
  Description of Artificial Sequence: Synthetic oligonucleotide
aauuucgcauagcuucccu

SEQ ID NO: 21239 - RNA, 19 nt, Artificial Sequence
  Description of Artificial Sequence: Synthetic oligonucleotide
gaucgaagucgauuaaaca

SEQ ID NO: 21240 - RNA, 19 nt, Artificial Sequence
  Description of Artificial Sequence: Synthetic oligonucleotide
ucccucauagaauguauac

SEQ ID NO: 21241 - RNA, 19 nt, Artificial Sequence
  Description of Artificial Sequence: Synthetic oligonucleotide
uguacuacauacugugaua

SEQ ID NO: 21242 - RNA, 19 nt, Artificial Sequence
  Description of Artificial Sequence: Synthetic oligonucleotide
acuugguuaauaaucaaau

SEQ ID NO: 21243 - RNA, 19 nt, Artificial Sequence
  Description of Artificial Sequence: Synthetic oligonucleotide
aauaacuaguuguguuaau

SEQ ID NO: 21244 - RNA, 19 nt, Artificial Sequence
  Description of Artificial Sequence: Synthetic oligonucleotide
aaaccgaaauaagauaaua

SEQ ID NO: 21245 - RNA, 19 nt, Artificial Sequence
  Description of Artificial Sequence: Synthetic oligonucleotide
ugaucacuauuuccuauuc

SEQ ID NO: 21246 - RNA, 19 nt, Artificial Sequence
  Description of Artificial Sequence: Synthetic oligonucleotide
ccuacauugggacugacac

SEQ ID NO: 21247 - RNA, 19 nt, Artificial Sequence
  Description of Artificial Sequence: Synthetic oligonucleotide
acuacauacugugauacaa

SEQ ID NO: 21248 - RNA, 19 nt, Artificial Sequence
  Description of Artificial Sequence: Synthetic oligonucleotide
cacgccaaugucaucacug

SEQ ID NO: 21249 - RNA, 19 nt, Artificial Sequence
  Description of Artificial Sequence: Synthetic oligonucleotide
acuaacaguaucugagaau

SEQ ID NO: 21250 - RNA, 19 nt, Artificial Sequence
  Description of Artificial Sequence: Synthetic oligonucleotide
gguaguuaggacaccacgg

SEQ ID NO: 21251 - RNA, 19 nt, Artificial Sequence
  Description of Artificial Sequence: Synthetic oligonucleotide
gucguuuagguggaggccg

SEQ ID NO: 21252 - RNA, 19 nt, Artificial Sequence
  Description of Artificial Sequence: Synthetic oligonucleotide
gaaugaguacuguuugauc

SEQ ID NO: 21253 - RNA, 19 nt, Artificial Sequence
  Description of Artificial Sequence: Synthetic oligonucleotide
aaacugcccguauugcaga

SEQ ID NO: 21254 - RNA, 19 nt, Artificial Sequence
  Description of Artificial Sequence: Synthetic oligonucleotide
aguuaggacaccacgguug

SEQ ID NO: 21255 - RNA, 19 nt, Artificial Sequence
  Description of Artificial Sequence: Synthetic oligonucleotide
auaaaccuacauugggacu

SEQ ID NO: 21256 - RNA, 19 nt, Artificial Sequence
  Description of Artificial Sequence: Synthetic oligonucleotide
ucccuagugagucguuuag

SEQ ID NO: 21257 - RNA, 19 nt, Artificial Sequence
  Description of Artificial Sequence: Synthetic oligonucleotide
uuaucaaucuugggagugc

SEQ ID NO: 21258 - RNA, 19 nt, Artificial Sequence
  Description of Artificial Sequence: Synthetic oligonucleotide
cuaacaguaucugagaaua

SEQ ID NO: 21259 - RNA, 19 nt, Artificial Sequence
  Description of Artificial Sequence: Synthetic oligonucleotide
guacuacauacugugauac

SEQ ID NO: 21260 - RNA, 19 nt, Artificial Sequence
  Description of Artificial Sequence: Synthetic oligonucleotide
agucguuuagguggaggcc

SEQ ID NO: 21261 - RNA, 19 nt, Artificial Sequence
  Description of Artificial Sequence: Synthetic oligonucleotide
aaauaauuucgcauagcuu

SEQ ID NO: 21262 - RNA, 19 nt, Artificial Sequence
  Description of Artificial Sequence: Synthetic oligonucleotide
gacuuucuacgacaggcac

SEQ ID NO: 21263 - RNA, 19 nt, Artificial Sequence
  Description of Artificial Sequence: Synthetic oligonucleotide
ugagucguuuagguggagg

SEQ ID NO: 21264 - RNA, 19 nt, Artificial Sequence
  Description of Artificial Sequence: Synthetic oligonucleotide
uguccauaguggauguaac

SEQ ID NO: 21265 - RNA, 19 nt, Artificial Sequence
  Description of Artificial Sequence: Synthetic oligonucleotide
auaaugauguucuggccua

SEQ ID NO: 21266 - RNA, 19 nt, Artificial Sequence
  Description of Artificial Sequence: Synthetic oligonucleotide
guguagguaaagguaaggc

SEQ ID NO: 21267 - RNA, 19 nt, Artificial Sequence
  Description of Artificial Sequence: Synthetic oligonucleotide
uccgccauaaccuggcauc

SEQ ID NO: 21268 - RNA, 19 nt, Artificial Sequence
  Description of Artificial Sequence: Synthetic oligonucleotide
uauugcuaauaacccuuac

SEQ ID NO: 21269 - RNA, 19 nt, Artificial Sequence
  Description of Artificial Sequence: Synthetic oligonucleotide
aaucacacguuuguucagu

SEQ ID NO: 21270 - RNA, 19 nt, Artificial Sequence
  Description of Artificial Sequence: Synthetic oligonucleotide
ucgucugcauccaguaaug

SEQ ID NO: 21271 - RNA, 19 nt, Artificial Sequence
  Description of Artificial Sequence: Synthetic oligonucleotide
cauuccgccauaaccuggc

SEQ ID NO: 21272 - RNA, 19 nt, Artificial Sequence
  Description of Artificial Sequence: Synthetic oligonucleotide
aggaggaugccaucacuag

SEQ ID NO: 21273 - RNA, 19 nt, Artificial Sequence
  Description of Artificial Sequence: Synthetic oligonucleotide
gguacaagaaauaaacuaa

SEQ ID NO: 21274 - RNA, 19 nt, Artificial Sequence
  Description of Artificial Sequence: Synthetic oligonucleotide
agccuuagaccaaaagaac

SEQ ID NO: 21275 - RNA, 19 nt, Artificial Sequence
  Description of Artificial Sequence: Synthetic oligonucleotide
aaacuccaacccucgcgag

SEQ ID NO: 21276 - RNA, 19 nt, Artificial Sequence
  Description of Artificial Sequence: Synthetic oligonucleotide
augccaguaacugagcaca

SEQ ID NO: 21277 - RNA, 19 nt, Artificial Sequence
  Description of Artificial Sequence: Synthetic oligonucleotide
uuauugcuaauaacccuua

SEQ ID NO: 21278 - RNA, 19 nt, Artificial Sequence
  Description of Artificial Sequence: Synthetic oligonucleotide
gguaacaagguguacuaca

SEQ ID NO: 21279 - RNA, 19 nt, Artificial Sequence
  Description of Artificial Sequence: Synthetic oligonucleotide
cucgcauggaaauuuccuc

SEQ ID NO: 21280 - RNA, 19 nt, Artificial Sequence
  Description of Artificial Sequence: Synthetic oligonucleotide
aaccacaaagauuguucau

SEQ ID NO: 21281 - RNA, 19 nt, Artificial Sequence
  Description of Artificial Sequence: Synthetic oligonucleotide
ucguaaauuuggaguaaaa

SEQ ID NO: 21282 - RNA, 19 nt, Artificial Sequence
  Description of Artificial Sequence: Synthetic oligonucleotide
uaucacgacacagggagaa

SEQ ID NO: 21283 - RNA, 19 nt, Artificial Sequence
  Description of Artificial Sequence: Synthetic oligonucleotide
ugaacucgcauggaaauuu

SEQ ID NO: 21284 - RNA, 19 nt, Artificial Sequence
  Description of Artificial Sequence: Synthetic oligonucleotide
uucucggaaugcagaaaug

SEQ ID NO: 21285 - RNA, 19 nt, Artificial Sequence
  Description of Artificial Sequence: Synthetic oligonucleotide
augguauaaacuugcucaa

SEQ ID NO: 21286 - RNA, 19 nt, Artificial Sequence
  Description of Artificial Sequence: Synthetic oligonucleotide
uccauacgacuucugugca

SEQ ID NO: 21287 - RNA, 19 nt, Artificial Sequence
  Description of Artificial Sequence: Synthetic oligonucleotide
cugguacuaacugucuggg

SEQ ID NO: 21288 - RNA, 19 nt, Artificial Sequence
  Description of Artificial Sequence: Synthetic oligonucleotide
uaacuugguuaauaaucaa

SEQ ID NO: 21289 - RNA, 19 nt, Artificial Sequence
  Description of Artificial Sequence: Synthetic oligonucleotide
gagaugaauauaaaaugcu

SEQ ID NO: 21290 - RNA, 19 nt, Artificial Sequence
  Description of Artificial Sequence: Synthetic oligonucleotide
ugaguacuguuugaucccc

SEQ ID NO: 21291 - RNA, 19 nt, Artificial Sequence
  Description of Artificial Sequence: Synthetic oligonucleotide
aaagcuuaugcaagucccu

SEQ ID NO: 21292 - RNA, 19 nt, Artificial Sequence
  Description of Artificial Sequence: Synthetic oligonucleotide
agaaugaguacuguuugau

SEQ ID NO: 21293 - RNA, 19 nt, Artificial Sequence
  Description of Artificial Sequence: Synthetic oligonucleotide
ugggaacauuccaaguuaa

SEQ ID NO: 21294 - RNA, 19 nt, Artificial Sequence
  Description of Artificial Sequence: Synthetic oligonucleotide
ucuccaaccuucucggaau

SEQ ID NO: 21295 - RNA, 19 nt, Artificial Sequence
  Description of Artificial Sequence: Synthetic oligonucleotide
ucgccaaaacuccaacccu

SEQ ID NO: 21296 - RNA, 19 nt, Artificial Sequence
  Description of Artificial Sequence: Synthetic oligonucleotide
gucauuacggaccaaaguu

SEQ ID NO: 21297 - RNA, 19 nt, Artificial Sequence
  Description of Artificial Sequence: Synthetic oligonucleotide
gcaaacauuuaucacgaca

SEQ ID NO: 21298 - RNA, 19 nt, Artificial Sequence
  Description of Artificial Sequence: Synthetic oligonucleotide
gaauguauacucugccuua

SEQ ID NO: 21299 - RNA, 19 nt, Artificial Sequence
  Description of Artificial Sequence: Synthetic oligonucleotide
aaacugacgaacaggcaaa

SEQ ID NO: 21300 - RNA, 19 nt, Artificial Sequence
  Description of Artificial Sequence: Synthetic oligonucleotide
uacuacauacugugauaca

SEQ ID NO: 21301 - RNA, 19 nt, Artificial Sequence
  Description of Artificial Sequence: Synthetic oligonucleotide
acugaacuguuagaaucuc

SEQ ID NO: 21302 - RNA, 19 nt, Artificial Sequence
  Description of Artificial Sequence: Synthetic oligonucleotide
acuaucuguuucuaaugua

SEQ ID NO: 21303 - RNA, 19 nt, Artificial Sequence
  Description of Artificial Sequence: Synthetic oligonucleotide
caacaaggugggaaacacc

SEQ ID NO: 21304 - RNA, 19 nt, Artificial Sequence
  Description of Artificial Sequence: Synthetic oligonucleotide
caucuguucucgguuaaag

SEQ ID NO: 21305 - RNA, 19 nt, Artificial Sequence
  Description of Artificial Sequence: Synthetic oligonucleotide
guaaguucaagcaucgcua

SEQ ID NO: 21306 - RNA, 19 nt, Artificial Sequence
  Description of Artificial Sequence: Synthetic oligonucleotide
guacuaacugucugggauc

SEQ ID NO: 21307 - RNA, 19 nt, Artificial Sequence
  Description of Artificial Sequence: Synthetic oligonucleotide
aauauggaauugagcagau

SEQ ID NO: 21308 - RNA, 19 nt, Artificial Sequence
  Description of Artificial Sequence: Synthetic oligonucleotide
auaacccuuacaggcgcac

SEQ ID NO: 21309 - RNA, 19 nt, Artificial Sequence
  Description of Artificial Sequence: Synthetic oligonucleotide
uucuauucugugguaggac

SEQ ID NO: 21310 - RNA, 19 nt, Artificial Sequence
  Description of Artificial Sequence: Synthetic oligonucleotide
augauuccgucauuacgga

SEQ ID NO: 21311 - RNA, 19 nt, Artificial Sequence
  Description of Artificial Sequence: Synthetic oligonucleotide
aaauaacuacuaacaguau

SEQ ID NO: 21312 - RNA, 19 nt, Artificial Sequence
  Description of Artificial Sequence: Synthetic oligonucleotide
ggcgccaucuuccacaaac

SEQ ID NO: 21313 - RNA, 19 nt, Artificial Sequence
  Description of Artificial Sequence: Synthetic oligonucleotide
agaggcgcaaaccuucaaa

SEQ ID NO: 21314 - RNA, 19 nt, Artificial Sequence
  Description of Artificial Sequence: Synthetic oligonucleotide
cuuauugcuaauaacccuu

SEQ ID NO: 21315 - RNA, 19 nt, Artificial Sequence
  Description of Artificial Sequence: Synthetic oligonucleotide
aggcgcaaaccuucaaaug

SEQ ID NO: 21316 - RNA, 19 nt, Artificial Sequence
  Description of Artificial Sequence: Synthetic oligonucleotide
ugaguuggcucugaggauu

SEQ ID NO: 21317 - RNA, 19 nt, Artificial Sequence
  Description of Artificial Sequence: Synthetic oligonucleotide
augacuaaauggccacacu

SEQ ID NO: 21318 - RNA, 19 nt, Artificial Sequence
  Description of Artificial Sequence: Synthetic oligonucleotide
uaacaagguguacuacaua

SEQ ID NO: 21319 - RNA, 19 nt, Artificial Sequence
  Description of Artificial Sequence: Synthetic oligonucleotide
aaccccuugaggacugaag

SEQ ID NO: 21320 - RNA, 19 nt, Artificial Sequence
  Description of Artificial Sequence: Synthetic oligonucleotide
auuaugguauaaacuugcu

SEQ ID NO: 21321 - RNA, 19 nt, Artificial Sequence
  Description of Artificial Sequence: Synthetic oligonucleotide
ugauuccgucauuacggac

SEQ ID NO: 21322 - RNA, 19 nt, Artificial Sequence
  Description of Artificial Sequence: Synthetic oligonucleotide
cacucguaaauuuggagua

SEQ ID NO: 21323 - RNA, 19 nt, Artificial Sequence
  Description of Artificial Sequence: Synthetic oligonucleotide
uccgucauuacggaccaaa

SEQ ID NO: 21324 - RNA, 19 nt, Artificial Sequence
  Description of Artificial Sequence: Synthetic oligonucleotide
cugaaucagauauguacaa

SEQ ID NO: 21325 - RNA, 19 nt, Artificial Sequence
  Description of Artificial Sequence: Synthetic oligonucleotide
uuuguggaguugugauaca

SEQ ID NO: 21326 - RNA, 19 nt, Artificial Sequence
  Description of Artificial Sequence: Synthetic oligonucleotide
ucgguuaaaggaggaugcc

SEQ ID NO: 21327 - RNA, 19 nt, Artificial Sequence
  Description of Artificial Sequence: Synthetic oligonucleotide
uacuccagccacauaucua

SEQ ID NO: 21328 - RNA, 19 nt, Artificial Sequence
  Description of Artificial Sequence: Synthetic oligonucleotide
ugggaaacacccuguuaaa

SEQ ID NO: 21329 - RNA, 19 nt, Artificial Sequence
  Description of Artificial Sequence: Synthetic oligonucleotide
gcagguaucugguacuaac

SEQ ID NO: 21330 - RNA, 19 nt, Artificial Sequence
  Description of Artificial Sequence: Synthetic oligonucleotide
aaccuacugguaacaaggu

SEQ ID NO: 21331 - RNA, 19 nt, Artificial Sequence
  Description of Artificial Sequence: Synthetic oligonucleotide
uguaaccaucucgaacugu

SEQ ID NO: 21332 - RNA, 19 nt, Artificial Sequence
  Description of Artificial Sequence: Synthetic oligonucleotide
cuacauacugugauacaaa

SEQ ID NO: 21333 - RNA, 19 nt, Artificial Sequence
  Description of Artificial Sequence: Synthetic oligonucleotide
aaaccuacauugggacuga

SEQ ID NO: 21334 - RNA, 19 nt, Artificial Sequence
  Description of Artificial Sequence: Synthetic oligonucleotide
acucgcauggaaauuuccu

SEQ ID NO: 21335 - RNA, 19 nt, Artificial Sequence
  Description of Artificial Sequence: Synthetic oligonucleotide
uuggacagauagaccaguu

SEQ ID NO: 21336 - RNA, 19 nt, Artificial Sequence
  Description of Artificial Sequence: Synthetic oligonucleotide
cugggaucgaagucgauua

SEQ ID NO: 21337 - RNA, 19 nt, Artificial Sequence
  Description of Artificial Sequence: Synthetic oligonucleotide
aguugugauacagggucgu

SEQ ID NO: 21338 - RNA, 19 nt, Artificial Sequence
  Description of Artificial Sequence: Synthetic oligonucleotide
uuacaggcgcacaguuugu

SEQ ID NO: 21339 - RNA, 19 nt, Artificial Sequence
  Description of Artificial Sequence: Synthetic oligonucleotide
guaguuaggacaccacggu

SEQ ID NO: 21340 - RNA, 19 nt, Artificial Sequence
  Description of Artificial Sequence: Synthetic oligonucleotide
gguacuaacugucugggau

SEQ ID NO: 21341 - RNA, 19 nt, Artificial Sequence
  Description of Artificial Sequence: Synthetic oligonucleotide
caaaccuucaaauggugau

SEQ ID NO: 21342 - RNA, 19 nt, Artificial Sequence
  Description of Artificial Sequence: Synthetic oligonucleotide
cuguacuccagccacauau

SEQ ID NO: 21343 - RNA, 19 nt, Artificial Sequence
  Description of Artificial Sequence: Synthetic oligonucleotide
auuucgcauagcuucccua

SEQ ID NO: 21344 - RNA, 19 nt, Artificial Sequence
  Description of Artificial Sequence: Synthetic oligonucleotide
guauaaacuugcucaauuu

SEQ ID NO: 21345 - RNA, 19 nt, Artificial Sequence
  Description of Artificial Sequence: Synthetic oligonucleotide
aagcuuaugcaagucccuu

SEQ ID NO: 21346 - RNA, 19 nt, Artificial Sequence
  Description of Artificial Sequence: Synthetic oligonucleotide
ggaucgaagucgauuaaac

SEQ ID NO: 21347 - RNA, 19 nt, Artificial Sequence
  Description of Artificial Sequence: Synthetic oligonucleotide
cccauuguugugaacucgc

SEQ ID NO: 21348 - RNA, 19 nt, Artificial Sequence
  Description of Artificial Sequence: Synthetic oligonucleotide
gguguguagguaaagguaa

SEQ ID NO: 21349 - RNA, 19 nt, Artificial Sequence
  Description of Artificial Sequence: Synthetic oligonucleotide
gauccccucguucuuuuaa

SEQ ID NO: 21350 - RNA, 19 nt, Artificial Sequence
  Description of Artificial Sequence: Synthetic oligonucleotide
cugggaggaaacauuccga

SEQ ID NO: 21351 - RNA, 19 nt, Artificial Sequence
  Description of Artificial Sequence: Synthetic oligonucleotide
cguuuguucaguacucacc

SEQ ID NO: 21352 - RNA, 19 nt, Artificial Sequence
  Description of Artificial Sequence: Synthetic oligonucleotide
ggaaagcucaagaaugguc

SEQ ID NO: 21353 - RNA, 19 nt, Artificial Sequence
  Description of Artificial Sequence: Synthetic oligonucleotide
ugugcaacuuuugcaugaa

SEQ ID NO: 21354 - RNA, 19 nt, Artificial Sequence
  Description of Artificial Sequence: Synthetic oligonucleotide
guaaacagacauaucaguu

SEQ ID NO: 21355 - RNA, 19 nt, Artificial Sequence
  Description of Artificial Sequence: Synthetic oligonucleotide
uuguuucggcuucuacauc

SEQ ID NO: 21356 - RNA, 19 nt, Artificial Sequence
  Description of Artificial Sequence: Synthetic oligonucleotide
ugguaacaagguguacuac

SEQ ID NO: 21357 - RNA, 19 nt, Artificial Sequence
  Description of Artificial Sequence: Synthetic oligonucleotide
uguugugaacucgcaugga

SEQ ID NO: 21358 - RNA, 19 nt, Artificial Sequence
  Description of Artificial Sequence: Synthetic oligonucleotide
ccuuaagguaaaaugcaca

SEQ ID NO: 21359 - RNA, 19 nt, Artificial Sequence
  Description of Artificial Sequence: Synthetic oligonucleotide
uuccgccauaaccuggcau

SEQ ID NO: 21360 - RNA, 19 nt, Artificial Sequence
  Description of Artificial Sequence: Synthetic oligonucleotide
ccagccuuagaccaaaaga

SEQ ID NO: 21361 - RNA, 19 nt, Artificial Sequence
  Description of Artificial Sequence: Synthetic oligonucleotide
agcuuaaccuguacuccag

SEQ ID NO: 21362 - RNA, 19 nt, Artificial Sequence
  Description of Artificial Sequence: Synthetic oligonucleotide
caugggugagauccuuuuc

SEQ ID NO: 21363 - RNA, 19 nt, Artificial Sequence
  Description of Artificial Sequence: Synthetic oligonucleotide
ugccggacccaucuccaac

SEQ ID NO: 21364 - RNA, 19 nt, Artificial Sequence
  Description of Artificial Sequence: Synthetic oligonucleotide
acuagacuguguccuuuaa

SEQ ID NO: 21365 - RNA, 19 nt, Artificial Sequence
  Description of Artificial Sequence: Synthetic oligonucleotide
gaaacccuaauaaauuauu

SEQ ID NO: 21366 - RNA, 19 nt, Artificial Sequence
  Description of Artificial Sequence: Synthetic oligonucleotide
gaggcgcaaaccuucaaau

SEQ ID NO: 21367 - RNA, 19 nt, Artificial Sequence
  Description of Artificial Sequence: Synthetic oligonucleotide
ucaguccugaacggguuaa

SEQ ID NO: 21368 - RNA, 19 nt, Artificial Sequence
  Description of Artificial Sequence: Synthetic oligonucleotide
cucucgccaaaacuccaac

SEQ ID NO: 21369 - RNA, 19 nt, Artificial Sequence
  Description of Artificial Sequence: Synthetic oligonucleotide
aagaggcgcaaaccuucaa

SEQ ID NO: 21370 - RNA, 19 nt, Artificial Sequence
  Description of Artificial Sequence: Synthetic oligonucleotide
uuauccgcuugcugaggaa

SEQ ID NO: 21371 - RNA, 19 nt, Artificial Sequence
  Description of Artificial Sequence: Synthetic oligonucleotide
acgguaguuaggacaccac

SEQ ID NO: 21372 - RNA, 19 nt, Artificial Sequence
  Description of Artificial Sequence: Synthetic oligonucleotide
ugguauaaacuugcucaau

SEQ ID NO: 21373 - RNA, 19 nt, Artificial Sequence
  Description of Artificial Sequence: Synthetic oligonucleotide
caguaucugagaauagacu

SEQ ID NO: 21374 - RNA, 19 nt, Artificial Sequence
  Description of Artificial Sequence: Synthetic oligonucleotide
guccugaacggguuaagua

SEQ ID NO: 21375 - RNA, 19 nt, Artificial Sequence
  Description of Artificial Sequence: Synthetic oligonucleotide
cauugggacugacacagua

SEQ ID NO: 21376 - RNA, 19 nt, Artificial Sequence
  Description of Artificial Sequence: Synthetic oligonucleotide
uuugauccccucguucuuu

SEQ ID NO: 21377 - RNA, 19 nt, Artificial Sequence
  Description of Artificial Sequence: Synthetic oligonucleotide
agugagucguuuaggugga

SEQ ID NO: 21378 - RNA, 19 nt, Artificial Sequence
  Description of Artificial Sequence: Synthetic oligonucleotide
gguauaaacuugcucaauu

SEQ ID NO: 21379 - RNA, 19 nt, Artificial Sequence
  Description of Artificial Sequence: Synthetic oligonucleotide
ugcaaccuacugguaacaa

SEQ ID NO: 21380 - RNA, 19 nt, Artificial Sequence
  Description of Artificial Sequence: Synthetic oligonucleotide
gugguuggacagauagacc

SEQ ID NO: 21381 - RNA, 19 nt, Artificial Sequence
  Description of Artificial Sequence: Synthetic oligonucleotide
gccacauaucuacuucuug

SEQ ID NO: 21382 - RNA, 19 nt, Artificial Sequence
  Description of Artificial Sequence: Synthetic oligonucleotide
gguaucugguacuaacugu

SEQ ID NO: 21383 - RNA, 19 nt, Artificial Sequence
  Description of Artificial Sequence: Synthetic oligonucleotide
ggcauuccgccauaaccug

SEQ ID NO: 21384 - RNA, 19 nt, Artificial Sequence
  Description of Artificial Sequence: Synthetic oligonucleotide
auuacggaccaaaguuacu

SEQ ID NO: 21385 - RNA, 19 nt, Artificial Sequence
  Description of Artificial Sequence: Synthetic oligonucleotide
caucccaaguuacagugcu

SEQ ID NO: 21386 - RNA, 19 nt, Artificial Sequence
  Description of Artificial Sequence: Synthetic oligonucleotide
acgacacagggagaaauua

SEQ ID NO: 21387 - RNA, 19 nt, Artificial Sequence
  Description of Artificial Sequence: Synthetic oligonucleotide
cuaacugucugggaucgaa

SEQ ID NO: 21388 - RNA, 19 nt, Artificial Sequence
  Description of Artificial Sequence: Synthetic oligonucleotide
gccuuaucugugcuaauga

SEQ ID NO: 21389 - RNA, 19 nt, Artificial Sequence
  Description of Artificial Sequence: Synthetic oligonucleotide
aacuucccucgcuguuugu

SEQ ID NO: 21390 - RNA, 19 nt, Artificial Sequence
  Description of Artificial Sequence: Synthetic oligonucleotide
gcuacaaaagcugggguaa

SEQ ID NO: 21391 - RNA, 19 nt, Artificial Sequence
  Description of Artificial Sequence: Synthetic oligonucleotide
cuguaaguucaagcaucgc

SEQ ID NO: 21392 - RNA, 19 nt, Artificial Sequence
  Description of Artificial Sequence: Synthetic oligonucleotide
acucguaaauuuggaguaa

SEQ ID NO: 21393 - RNA, 19 nt, Artificial Sequence
  Description of Artificial Sequence: Synthetic oligonucleotide
ccaacaaggugggaaacac

SEQ ID NO: 21394 - RNA, 19 nt, Artificial Sequence
  Description of Artificial Sequence: Synthetic oligonucleotide
gugaauugaucaccuggua

SEQ ID NO: 21395 - RNA, 19 nt, Artificial Sequence
  Description of Artificial Sequence: Synthetic oligonucleotide
guaacaagguguacuacau

SEQ ID NO: 21396 - RNA, 19 nt, Artificial Sequence
  Description of Artificial Sequence: Synthetic oligonucleotide
uccccgccgccauucaacu

SEQ ID NO: 21397 - RNA, 19 nt, Artificial Sequence
  Description of Artificial Sequence: Synthetic oligonucleotide
agcuucccuagugagucgu

SEQ ID NO: 21398 - RNA, 19 nt, Artificial Sequence
  Description of Artificial Sequence: Synthetic oligonucleotide
acacgccaaugucaucacu

SEQ ID NO: 21399 - RNA, 19 nt, Artificial Sequence
  Description of Artificial Sequence: Synthetic oligonucleotide
agcccgagugcaaccaaag

SEQ ID NO: 21400 - RNA, 19 nt, Artificial Sequence
  Description of Artificial Sequence: Synthetic oligonucleotide
cgguaguuaggacaccacg

SEQ ID NO: 21401 - RNA, 19 nt, Artificial Sequence
  Description of Artificial Sequence: Synthetic oligonucleotide
uugauccccucguucuuuu

SEQ ID NO: 21402 - RNA, 19 nt, Artificial Sequence
  Description of Artificial Sequence: Synthetic oligonucleotide
guucaguacucaccagaaa

SEQ ID NO: 21403 - RNA, 19 nt, Artificial Sequence
  Description of Artificial Sequence: Synthetic oligonucleotide
guggacgaugugacacugg

SEQ ID NO: 21404 - RNA, 19 nt, Artificial Sequence
  Description of Artificial Sequence: Synthetic oligonucleotide
gugccaugccaguaacuga

SEQ ID NO: 21405 - RNA, 19 nt, Artificial Sequence
  Description of Artificial Sequence: Synthetic oligonucleotide
acugcccauaagauauaca

SEQ ID NO: 21406 - RNA, 19 nt, Artificial Sequence
  Description of Artificial Sequence: Synthetic oligonucleotide
ccuguuaaauguaaucacu

SEQ ID NO: 21407 - RNA, 19 nt, Artificial Sequence
  Description of Artificial Sequence: Synthetic oligonucleotide
gccggacccaucuccaacc

SEQ ID NO: 21408 - RNA, 19 nt, Artificial Sequence
  Description of Artificial Sequence: Synthetic oligonucleotide
cucguaaauuuggaguaaa

SEQ ID NO: 21409 - RNA, 19 nt, Artificial Sequence
  Description of Artificial Sequence: Synthetic oligonucleotide
aaccuguacuccagccaca

SEQ ID NO: 21410 - RNA, 19 nt, Artificial Sequence
  Description of Artificial Sequence: Synthetic oligonucleotide
gcaucaggcacaucccaca

SEQ ID NO: 21411 - RNA, 19 nt, Artificial Sequence
  Description of Artificial Sequence: Synthetic oligonucleotide
ggcugccggacccaucucc

SEQ ID NO: 21412 - RNA, 19 nt, Artificial Sequence
  Description of Artificial Sequence: Synthetic oligonucleotide
uacauuguuucggcuucua

SEQ ID NO: 21413 - RNA, 19 nt, Artificial Sequence
  Description of Artificial Sequence: Synthetic oligonucleotide
ccgucauuacggaccaaag

SEQ ID NO: 21414 - RNA, 19 nt, Artificial Sequence
  Description of Artificial Sequence: Synthetic oligonucleotide
uacaggcgcacaguuugua

SEQ ID NO: 21415 - RNA, 19 nt, Artificial Sequence
  Description of Artificial Sequence: Synthetic oligonucleotide
ccugaacggguuaaguaga

SEQ ID NO: 21416 - RNA, 19 nt, Artificial Sequence
  Description of Artificial Sequence: Synthetic oligonucleotide
auguaaucacugggaacau

SEQ ID NO: 21417 - RNA, 19 nt, Artificial Sequence
  Description of Artificial Sequence: Synthetic oligonucleotide
guuuagguggaggccgcuc

SEQ ID NO: 21418 - RNA, 19 nt, Artificial Sequence
  Description of Artificial Sequence: Synthetic oligonucleotide
cucgcggaucgcugccacc

SEQ ID NO: 21419 - RNA, 19 nt, Artificial Sequence
  Description of Artificial Sequence: Synthetic oligonucleotide
cccugucacaacaggcgcc

SEQ ID NO: 21420 - RNA, 19 nt, Artificial Sequence
  Description of Artificial Sequence: Synthetic oligonucleotide
auauggaauugagcagauu

SEQ ID NO: 21421 - RNA, 19 nt, Artificial Sequence
  Description of Artificial Sequence: Synthetic oligonucleotide
acccuuacaggcgcacagu

SEQ ID NO: 21422 - RNA, 19 nt, Artificial Sequence
  Description of Artificial Sequence: Synthetic oligonucleotide
acacccuguuaaauguaau

SEQ ID NO: 21423 - RNA, 19 nt, Artificial Sequence
  Description of Artificial Sequence: Synthetic oligonucleotide
ccuagugagucguuuaggu

SEQ ID NO: 21424 - RNA, 19 nt, Artificial Sequence
  Description of Artificial Sequence: Synthetic oligonucleotide
gguguacuacauacuguga

SEQ ID NO: 21425 - RNA, 19 nt, Artificial Sequence
  Description of Artificial Sequence: Synthetic oligonucleotide
guauugcaggcaaggcaga

SEQ ID NO: 21426 - RNA, 19 nt, Artificial Sequence
  Description of Artificial Sequence: Synthetic oligonucleotide
caacaggcgccaucuucca

SEQ ID NO: 21427 - RNA, 19 nt, Artificial Sequence
  Description of Artificial Sequence: Synthetic oligonucleotide
ccaacccucgcgagauucc

SEQ ID NO: 21428 - RNA, 19 nt, Artificial Sequence
  Description of Artificial Sequence: Synthetic oligonucleotide
gggagugccaugccaguaa

SEQ ID NO: 21429 - RNA, 19 nt, Artificial Sequence
  Description of Artificial Sequence: Synthetic oligonucleotide
cacuagacuguguccuuua

SEQ ID NO: 21430 - RNA, 19 nt, Artificial Sequence
  Description of Artificial Sequence: Synthetic oligonucleotide
agccacauaucuacuucuu

SEQ ID NO: 21431 - RNA, 19 nt, Artificial Sequence
  Description of Artificial Sequence: Synthetic oligonucleotide
cucggcccugguucuggug

SEQ ID NO: 21432 - RNA, 19 nt, Artificial Sequence
  Description of Artificial Sequence: Synthetic oligonucleotide
ugcccguauugcagauuuu

SEQ ID NO: 21433 - RNA, 19 nt, Artificial Sequence
  Description of Artificial Sequence: Synthetic oligonucleotide
cugcccguauugcagauuu

SEQ ID NO: 21434 - RNA, 19 nt, Artificial Sequence
  Description of Artificial Sequence: Synthetic oligonucleotide
gggaucgaagucgauuaaa

SEQ ID NO: 21435 - RNA, 19 nt, Artificial Sequence
  Description of Artificial Sequence: Synthetic oligonucleotide
cucaguccugaacggguua

SEQ ID NO: 21436 - RNA, 19 nt, Artificial Sequence
  Description of Artificial Sequence: Synthetic oligonucleotide
cccgccgccauucaacuga

SEQ ID NO: 21437 - RNA, 19 nt, Artificial Sequence
  Description of Artificial Sequence: Synthetic oligonucleotide
ccgagugcaaccaaaguuu

SEQ ID NO: 21438 - RNA, 19 nt, Artificial Sequence
  Description of Artificial Sequence: Synthetic oligonucleotide
gcaucgcuacauccccgcc

SEQ ID NO: 21439 - RNA, 19 nt, Artificial Sequence
  Description of Artificial Sequence: Synthetic oligonucleotide
gcgcacaguuuguaaagua

SEQ ID NO: 21440 - RNA, 19 nt, Artificial Sequence
  Description of Artificial Sequence: Synthetic oligonucleotide
acauugggacugacacagu

SEQ ID NO: 21441 - RNA, 19 nt, Artificial Sequence
  Description of Artificial Sequence: Synthetic oligonucleotide
ccgcuugcugaggaacacg

SEQ ID NO: 21442 - RNA, 19 nt, Artificial Sequence
  Description of Artificial Sequence: Synthetic oligonucleotide
ccuuaucugugcuaaugau

SEQ ID NO: 21443 - RNA, 19 nt, Artificial Sequence
  Description of Artificial Sequence: Synthetic oligonucleotide
cccgagugcaaccaaaguu

SEQ ID NO: 21444 - RNA, 19 nt, Artificial Sequence
  Description of Artificial Sequence: Synthetic oligonucleotide
gugaacucgcauggaaauu

SEQ ID NO: 21445 - RNA, 19 nt, Artificial Sequence
  Description of Artificial Sequence: Synthetic oligonucleotide
gcgcaaaccuucaaauggu

SEQ ID NO: 21446 - RNA, 19 nt, Artificial Sequence
  Description of Artificial Sequence: Synthetic oligonucleotide
cucgcuguuuguguuugau

SEQ ID NO: 21447 - RNA, 19 nt, Artificial Sequence
  Description of Artificial Sequence: Synthetic oligonucleotide
gcugccggacccaucucca

SEQ ID NO: 21448 - RNA, 19 nt, Artificial Sequence
  Description of Artificial Sequence: Synthetic oligonucleotide
ccccucguucuuuuaaaua

SEQ ID NO: 21449 - RNA, 19 nt, Artificial Sequence
  Description of Artificial Sequence: Synthetic oligonucleotide
ccauacgacuucugugcaa

SEQ ID NO: 21450 - RNA, 19 nt, Artificial Sequence
  Description of Artificial Sequence: Synthetic oligonucleotide
cccucauagaauguauacu

SEQ ID NO: 21451 - RNA, 19 nt, Artificial Sequence
  Description of Artificial Sequence: Synthetic oligonucleotide
gccauucaacugaagacuu

SEQ ID NO: 21452 - RNA, 19 nt, Artificial Sequence
  Description of Artificial Sequence: Synthetic oligonucleotide
uuccgucauuacggaccaa

SEQ ID NO: 21453 - RNA, 19 nt, Artificial Sequence
  Description of Artificial Sequence: Synthetic oligonucleotide
cgucauuacggaccaaagu

SEQ ID NO: 21454 - RNA, 19 nt, Artificial Sequence
  Description of Artificial Sequence: Synthetic oligonucleotide
ggcgcacaguuuguaaagu

SEQ ID NO: 21455 - RNA, 19 nt, Artificial Sequence
  Description of Artificial Sequence: Synthetic oligonucleotide
guguggcauuccgccauaa

SEQ ID NO: 21456 - RNA, 19 nt, Artificial Sequence
  Description of Artificial Sequence: Synthetic oligonucleotide
cgagugcaaccaaaguuua

SEQ ID NO: 21457 - RNA, 19 nt, Artificial Sequence
  Description of Artificial Sequence: Synthetic oligonucleotide
gcccgagugcaaccaaagu

SEQ ID NO: 21458 - RNA, 19 nt, Artificial Sequence
  Description of Artificial Sequence: Synthetic oligonucleotide
cucggccucgcggaucgcu

SEQ ID NO: 21459 - RNA, 19 nt, Artificial Sequence
  Description of Artificial Sequence: Synthetic oligonucleotide
ccccgccgccauucaacug

SEQ ID NO: 21460 - RNA, 19 nt, Artificial Sequence
  Description of Artificial Sequence: Synthetic oligonucleotide
ccacugcccauaagauaua

SEQ ID NO: 21461 - RNA, 19 nt, Artificial Sequence
  Description of Artificial Sequence: Synthetic oligonucleotide
ccgccgccauucaacugaa

SEQ ID NO: 21462 - RNA, 19 nt, Artificial Sequence
  Description of Artificial Sequence: Synthetic oligonucleotide
ccggacccaucuccaaccu

SEQ ID NO: 21463 - RNA, 19 nt, Artificial Sequence
  Description of Artificial Sequence: Synthetic oligonucleotide
gcuucccuagugagucguu

SEQ ID NO: 21464 - RNA, 19 nt, Artificial Sequence
  Description of Artificial Sequence: Synthetic oligonucleotide
cguuuagguggaggccgcu

SEQ ID NO: 21465 - RNA, 19 nt, Artificial Sequence
  Description of Artificial Sequence: Synthetic oligonucleotide
uauagaaucagacugauug

SEQ ID NO: 21466 - RNA, 19 nt, Artificial Sequence
  Description of Artificial Sequence: Synthetic oligonucleotide
aagaguuuaaccugucgcc

SEQ ID NO: 21467 - RNA, 19 nt, Artificial Sequence
  Description of Artificial Sequence: Synthetic oligonucleotide
uauucugugaucuaaaggu

SEQ ID NO: 21468 - RNA, 19 nt, Artificial Sequence
  Description of Artificial Sequence: Synthetic oligonucleotide
aguaugguaacacaguagg

SEQ ID NO: 21469 - RNA, 19 nt, Artificial Sequence
  Description of Artificial Sequence: Synthetic oligonucleotide
acuaacaauguauuucucc

SEQ ID NO: 21470 - RNA, 19 nt, Artificial Sequence
  Description of Artificial Sequence: Synthetic oligonucleotide
auaagauucgacuugaccu

SEQ ID NO: 21471 - RNA, 19 nt, Artificial Sequence
  Description of Artificial Sequence: Synthetic oligonucleotide
uuuauguagagucauuccc

SEQ ID NO: 21472 - RNA, 19 nt, Artificial Sequence
  Description of Artificial Sequence: Synthetic oligonucleotide
uuaacgaauguuauuaaga

SEQ ID NO: 21473 - RNA, 19 nt, Artificial Sequence
  Description of Artificial Sequence: Synthetic oligonucleotide
aaccugucgccucaaaucc

SEQ ID NO: 21474 - RNA, 19 nt, Artificial Sequence
  Description of Artificial Sequence: Synthetic oligonucleotide
aucgauucuuuacaaagcc

SEQ ID NO: 21475 - RNA, 19 nt, Artificial Sequence
  Description of Artificial Sequence: Synthetic oligonucleotide
gauaaggcuaccuauauga

SEQ ID NO: 21476 - RNA, 19 nt, Artificial Sequence
  Description of Artificial Sequence: Synthetic oligonucleotide
auaaguuaaagaacuaccc

SEQ ID NO: 21477 - RNA, 19 nt, Artificial Sequence
  Description of Artificial Sequence: Synthetic oligonucleotide
ugaggcauaaguuaaagaa

SEQ ID NO: 21478 - RNA, 19 nt, Artificial Sequence
  Description of Artificial Sequence: Synthetic oligonucleotide
uguguaucaauuauuggca

SEQ ID NO: 21479 - RNA, 19 nt, Artificial Sequence
  Description of Artificial Sequence: Synthetic oligonucleotide
aauauucugugaucuaaag

SEQ ID NO: 21480 - RNA, 19 nt, Artificial Sequence
  Description of Artificial Sequence: Synthetic oligonucleotide
uuuaugaugccuaaaguau

SEQ ID NO: 21481 - RNA, 19 nt, Artificial Sequence
  Description of Artificial Sequence: Synthetic oligonucleotide
auauaguuugaccaaaucu

SEQ ID NO: 21482 - RNA, 19 nt, Artificial Sequence
  Description of Artificial Sequence: Synthetic oligonucleotide
acgaauaacacuuuuggcu

SEQ ID NO: 21483 - RNA, 19 nt, Artificial Sequence
  Description of Artificial Sequence: Synthetic oligonucleotide
uauucgauaaucaucuuuc

SEQ ID NO: 21484 - RNA, 19 nt, Artificial Sequence
  Description of Artificial Sequence: Synthetic oligonucleotide
guacgaauaacacuuuugg

SEQ ID NO: 21485 - RNA, 19 nt, Artificial Sequence
  Description of Artificial Sequence: Synthetic oligonucleotide
uucuuauaaaguaugguaa

SEQ ID NO: 21486 - RNA, 19 nt, Artificial Sequence
  Description of Artificial Sequence: Synthetic oligonucleotide
uauaagauucgacuugacc

SEQ ID NO: 21487 - RNA, 19 nt, Artificial Sequence
  Description of Artificial Sequence: Synthetic oligonucleotide
ucuucuaacuacuaagaca

SEQ ID NO: 21488 - RNA, 19 nt, Artificial Sequence
  Description of Artificial Sequence: Synthetic oligonucleotide
agaauauaaauuguguauc

SEQ ID NO: 21489 - RNA, 19 nt, Artificial Sequence
  Description of Artificial Sequence: Synthetic oligonucleotide
cuuuuagccgcuuauauuc

SEQ ID NO: 21490 - RNA, 19 nt, Artificial Sequence
  Description of Artificial Sequence: Synthetic oligonucleotide
aacacagauuaauacacca

SEQ ID NO: 21491 - RNA, 19 nt, Artificial Sequence
  Description of Artificial Sequence: Synthetic oligonucleotide
ucgauaaucaucuuucgcu

SEQ ID NO: 21492 - RNA, 19 nt, Artificial Sequence
  Description of Artificial Sequence: Synthetic oligonucleotide
uuuuaugaugccuaaagua

SEQ ID NO: 21493 - RNA, 19 nt, Artificial Sequence
  Description of Artificial Sequence: Synthetic oligonucleotide
aauaaucucugcugcgagg

SEQ ID NO: 21494 - RNA, 19 nt, Artificial Sequence
  Description of Artificial Sequence: Synthetic oligonucleotide
uaaaucuuggcucaagauc

SEQ ID NO: 21495 - RNA, 19 nt, Artificial Sequence
  Description of Artificial Sequence: Synthetic oligonucleotide
uuucuuacggaaagcaugc

SEQ ID NO: 21496 - RNA, 19 nt, Artificial Sequence
  Description of Artificial Sequence: Synthetic oligonucleotide
aauccccuaaauccugacc

SEQ ID NO: 21497 - RNA, 19 nt, Artificial Sequence
  Description of Artificial Sequence: Synthetic oligonucleotide
aucugauucuucuaacuac

SEQ ID NO: 21498 - RNA, 19 nt, Artificial Sequence
  Description of Artificial Sequence: Synthetic oligonucleotide
agaaaaucgauucuuuaca

SEQ ID NO: 21499 - RNA, 19 nt, Artificial Sequence
  Description of Artificial Sequence: Synthetic oligonucleotide
uguaauaaucucugcugcg

SEQ ID NO: 21500 - RNA, 19 nt, Artificial Sequence
  Description of Artificial Sequence: Synthetic oligonucleotide
uguauaguacaguaaauau

SEQ ID NO: 21501 - RNA, 19 nt, Artificial Sequence
  Description of Artificial Sequence: Synthetic oligonucleotide
auuaacauaggagagaaau

SEQ ID NO: 21502 - RNA, 19 nt, Artificial Sequence
  Description of Artificial Sequence: Synthetic oligonucleotide
auaaugucuacccaaacau

SEQ ID NO: 21503 - RNA, 19 nt, Artificial Sequence
  Description of Artificial Sequence: Synthetic oligonucleotide
uuuacugaaugaauccacc

SEQ ID NO: 21504 - RNA, 19 nt, Artificial Sequence
  Description of Artificial Sequence: Synthetic oligonucleotide
cuugauucuguuuaggguc

SEQ ID NO: 21505 - RNA, 19 nt, Artificial Sequence
  Description of Artificial Sequence: Synthetic oligonucleotide
auaaugacauuccacauau

SEQ ID NO: 21506 - RNA, 19 nt, Artificial Sequence
  Description of Artificial Sequence: Synthetic oligonucleotide
ucuuguacgucucaagcug

SEQ ID NO: 21507 - RNA, 19 nt, Artificial Sequence
  Description of Artificial Sequence: Synthetic oligonucleotide
uuaacaggcauucaucuau

SEQ ID NO: 21508 - RNA, 19 nt, Artificial Sequence
  Description of Artificial Sequence: Synthetic oligonucleotide
uguacgaauaacacuuuug

SEQ ID NO: 21509 - RNA, 19 nt, Artificial Sequence
  Description of Artificial Sequence: Synthetic oligonucleotide
acuacuaagacauuccaaa

SEQ ID NO: 21510 - RNA, 19 nt, Artificial Sequence
  Description of Artificial Sequence: Synthetic oligonucleotide
uaauugaagaguagcuucc

SEQ ID NO: 21511 - RNA, 19 nt, Artificial Sequence
  Description of Artificial Sequence: Synthetic oligonucleotide
uaaaucuuaaccuccaauu

SEQ ID NO: 21512 - RNA, 19 nt, Artificial Sequence
  Description of Artificial Sequence: Synthetic oligonucleotide
uuuuauguagagucauucc

SEQ ID NO: 21513 - RNA, 19 nt, Artificial Sequence
  Description of Artificial Sequence: Synthetic oligonucleotide
gaccuucuaguuuagauac

SEQ ID NO: 21514 - RNA, 19 nt, Artificial Sequence
  Description of Artificial Sequence: Synthetic oligonucleotide
uauuuagguucauuccugg

SEQ ID NO: 21515 - RNA, 19 nt, Artificial Sequence
  Description of Artificial Sequence: Synthetic oligonucleotide
auuaaaagugcguggcuag

SEQ ID NO: 21516 - RNA, 19 nt, Artificial Sequence
  Description of Artificial Sequence: Synthetic oligonucleotide
uuacgagugggguucauag

SEQ ID NO: 21517 - RNA, 19 nt, Artificial Sequence
  Description of Artificial Sequence: Synthetic oligonucleotide
cuuaacgaauguuauuaag

SEQ ID NO: 21518 - RNA, 19 nt, Artificial Sequence
  Description of Artificial Sequence: Synthetic oligonucleotide
uuuucucguugucugaacc

SEQ ID NO: 21519 - RNA, 19 nt, Artificial Sequence
  Description of Artificial Sequence: Synthetic oligonucleotide
uuuauuacgagugggguuc

SEQ ID NO: 21520 - RNA, 19 nt, Artificial Sequence
  Description of Artificial Sequence: Synthetic oligonucleotide
uuuauaagauucgacuuga

SEQ ID NO: 21521 - RNA, 19 nt, Artificial Sequence
  Description of Artificial Sequence: Synthetic oligonucleotide
uacuuuucuccucuuguag

SEQ ID NO: 21522 - RNA, 19 nt, Artificial Sequence
  Description of Artificial Sequence: Synthetic oligonucleotide
agaccauaaaguaaaggac

SEQ ID NO: 21523 - RNA, 19 nt, Artificial Sequence
  Description of Artificial Sequence: Synthetic oligonucleotide
uguuuagggucuaauguac

SEQ ID NO: 21524 - RNA, 19 nt, Artificial Sequence
  Description of Artificial Sequence: Synthetic oligonucleotide
gucugaacccucuugauug

SEQ ID NO: 21525 - RNA, 19 nt, Artificial Sequence
  Description of Artificial Sequence: Synthetic oligonucleotide
ugaugccuaaaguauaugu

SEQ ID NO: 21526 - RNA, 19 nt, Artificial Sequence
  Description of Artificial Sequence: Synthetic oligonucleotide
ugccaaaugauuugacuag

SEQ ID NO: 21527 - RNA, 19 nt, Artificial Sequence
  Description of Artificial Sequence: Synthetic oligonucleotide
uucgauaaucaucuuucgc

SEQ ID NO: 21528 - RNA, 19 nt, Artificial Sequence
  Description of Artificial Sequence: Synthetic oligonucleotide
uguagggagaguuaagaaa

SEQ ID NO: 21529 - RNA, 19 nt, Artificial Sequence
  Description of Artificial Sequence: Synthetic oligonucleotide
gguuuuaugaugccuaaag

SEQ ID NO: 21530 - RNA, 19 nt, Artificial Sequence
  Description of Artificial Sequence: Synthetic oligonucleotide
aauagaucugucauaacau

SEQ ID NO: 21531 - RNA, 19 nt, Artificial Sequence
  Description of Artificial Sequence: Synthetic oligonucleotide
ugugagaaacacuaaguau

SEQ ID NO: 21532 - RNA, 19 nt, Artificial Sequence
  Description of Artificial Sequence: Synthetic oligonucleotide
uucauuccugguuuuauga

SEQ ID NO: 21533 - RNA, 19 nt, Artificial Sequence
  Description of Artificial Sequence: Synthetic oligonucleotide
gaauguuuccucuugaagu

SEQ ID NO: 21534 - RNA, 19 nt, Artificial Sequence
  Description of Artificial Sequence: Synthetic oligonucleotide
gagagcaauuaaaagugcg

SEQ ID NO: 21535 - RNA, 19 nt, Artificial Sequence
  Description of Artificial Sequence: Synthetic oligonucleotide
aaucagacugauugagucu

SEQ ID NO: 21536 - RNA, 19 nt, Artificial Sequence
  Description of Artificial Sequence: Synthetic oligonucleotide
ugugaucuaaaggugaagu

SEQ ID NO: 21537 - RNA, 19 nt, Artificial Sequence
  Description of Artificial Sequence: Synthetic oligonucleotide
gagauugagcuucaucugc

SEQ ID NO: 21538 - RNA, 19 nt, Artificial Sequence
  Description of Artificial Sequence: Synthetic oligonucleotide
agugguuaguucaucauuc

SEQ ID NO: 21539 - RNA, 19 nt, Artificial Sequence
  Description of Artificial Sequence: Synthetic oligonucleotide
aaguuggcagucauaaauc

SEQ ID NO: 21540 - RNA, 19 nt, Artificial Sequence
  Description of Artificial Sequence: Synthetic oligonucleotide
agacauuagcuauaaagau

SEQ ID NO: 21541 - RNA, 19 nt, Artificial Sequence
  Description of Artificial Sequence: Synthetic oligonucleotide
uacgaauaacacuuuuggc

SEQ ID NO: 21542 - RNA, 19 nt, Artificial Sequence
  Description of Artificial Sequence: Synthetic oligonucleotide
aagauaaggcuaccuauau

SEQ ID NO: 21543 - RNA, 19 nt, Artificial Sequence
  Description of Artificial Sequence: Synthetic oligonucleotide
ugaucuuaacgaauguuau

SEQ ID NO: 21544 - RNA, 19 nt, Artificial Sequence
  Description of Artificial Sequence: Synthetic oligonucleotide
auucgauaaucaucuuucg

SEQ ID NO: 21545 - RNA, 19 nt, Artificial Sequence
  Description of Artificial Sequence: Synthetic oligonucleotide
ugccuaaaguauauguucu

SEQ ID NO: 21546 - RNA, 19 nt, Artificial Sequence
  Description of Artificial Sequence: Synthetic oligonucleotide
auccccuaaauccugaccu

SEQ ID NO: 21547 - RNA, 19 nt, Artificial Sequence
  Description of Artificial Sequence: Synthetic oligonucleotide
uuuagggucuaauguacga

SEQ ID NO: 21548 - RNA, 19 nt, Artificial Sequence
  Description of Artificial Sequence: Synthetic oligonucleotide
ucuaccuugcuguggcugg

SEQ ID NO: 21549 - RNA, 19 nt, Artificial Sequence
  Description of Artificial Sequence: Synthetic oligonucleotide
cacugcuauauuuagguuc

SEQ ID NO: 21550 - RNA, 19 nt, Artificial Sequence
  Description of Artificial Sequence: Synthetic oligonucleotide
ucuaacuccucacagcgua

SEQ ID NO: 21551 - RNA, 19 nt, Artificial Sequence
  Description of Artificial Sequence: Synthetic oligonucleotide
guagggagaguuaagaaac

SEQ ID NO: 21552 - RNA, 19 nt, Artificial Sequence
  Description of Artificial Sequence: Synthetic oligonucleotide
guuucuuacggaaagcaug

SEQ ID NO: 21553 - RNA, 19 nt, Artificial Sequence
  Description of Artificial Sequence: Synthetic oligonucleotide
gaacagucgaucccguucc

SEQ ID NO: 21554 - RNA, 19 nt, Artificial Sequence
  Description of Artificial Sequence: Synthetic oligonucleotide
ucgauucuuuacaaagccc

SEQ ID NO: 21555 - RNA, 19 nt, Artificial Sequence
  Description of Artificial Sequence: Synthetic oligonucleotide
uuuguauaguacaguaaau

SEQ ID NO: 21556 - RNA, 19 nt, Artificial Sequence
  Description of Artificial Sequence: Synthetic oligonucleotide
aaugaguuggagcauccuu

SEQ ID NO: 21557 - RNA, 19 nt, Artificial Sequence
  Description of Artificial Sequence: Synthetic oligonucleotide
uguaucaauuauuggcaga

SEQ ID NO: 21558 - RNA, 19 nt, Artificial Sequence
  Description of Artificial Sequence: Synthetic oligonucleotide
aguggaacagucgaucccg

SEQ ID NO: 21559 - RNA, 19 nt, Artificial Sequence
  Description of Artificial Sequence: Synthetic oligonucleotide
cauguacugaucuuaacga

SEQ ID NO: 21560 - RNA, 19 nt, Artificial Sequence
  Description of Artificial Sequence: Synthetic oligonucleotide
uguaauucguuguuggcuu

SEQ ID NO: 21561 - RNA, 19 nt, Artificial Sequence
  Description of Artificial Sequence: Synthetic oligonucleotide
auauccaauucauggcauc

SEQ ID NO: 21562 - RNA, 19 nt, Artificial Sequence
  Description of Artificial Sequence: Synthetic oligonucleotide
aaagugguuaguucaucau

SEQ ID NO: 21563 - RNA, 19 nt, Artificial Sequence
  Description of Artificial Sequence: Synthetic oligonucleotide
ugaucuaaaggugaaguua

SEQ ID NO: 21564 - RNA, 19 nt, Artificial Sequence
  Description of Artificial Sequence: Synthetic oligonucleotide
uuucucguugucugaaccc

SEQ ID NO: 21565 - RNA, 19 nt, Artificial Sequence
  Description of Artificial Sequence: Synthetic oligonucleotide
cuucuaacuacuaagacau

SEQ ID NO: 21566 - RNA, 19 nt, Artificial Sequence
  Description of Artificial Sequence: Synthetic oligonucleotide
gauaccacuuuguauagua

SEQ ID NO: 21567 - RNA, 19 nt, Artificial Sequence
  Description of Artificial Sequence: Synthetic oligonucleotide
aagcgcacuagauaccacu

SEQ ID NO: 21568 - RNA, 19 nt, Artificial Sequence
  Description of Artificial Sequence: Synthetic oligonucleotide
gagcaauuaaaagugcgug

SEQ ID NO: 21569 - RNA, 19 nt, Artificial Sequence
  Description of Artificial Sequence: Synthetic oligonucleotide
uuaugaugccuaaaguaua

SEQ ID NO: 21570 - RNA, 19 nt, Artificial Sequence
  Description of Artificial Sequence: Synthetic oligonucleotide
ugcuagaaaggacugcccu

SEQ ID NO: 21571 - RNA, 19 nt, Artificial Sequence
  Description of Artificial Sequence: Synthetic oligonucleotide
acauuagcuauaaagauua

SEQ ID NO: 21572 - RNA, 19 nt, Artificial Sequence
  Description of Artificial Sequence: Synthetic oligonucleotide
aaguaugguaacacaguag

SEQ ID NO: 21573 - RNA, 19 nt, Artificial Sequence
  Description of Artificial Sequence: Synthetic oligonucleotide
auagaaucagacugauuga

SEQ ID NO: 21574 - RNA, 19 nt, Artificial Sequence
  Description of Artificial Sequence: Synthetic oligonucleotide
aucuuaacgaauguuauua

SEQ ID NO: 21575 - RNA, 19 nt, Artificial Sequence
  Description of Artificial Sequence: Synthetic oligonucleotide
acauucuuauaaaguaugg

SEQ ID NO: 21576 - RNA, 19 nt, Artificial Sequence
  Description of Artificial Sequence: Synthetic oligonucleotide
agauugagcuucaucugcc

SEQ ID NO: 21577 - RNA, 19 nt, Artificial Sequence
  Description of Artificial Sequence: Synthetic oligonucleotide
cuaacugagucugaaguug

SEQ ID NO: 21578 - RNA, 19 nt, Artificial Sequence
  Description of Artificial Sequence: Synthetic oligonucleotide
agagauugagcuucaucug

SEQ ID NO: 21579 - RNA, 19 nt, Artificial Sequence
  Description of Artificial Sequence: Synthetic oligonucleotide
auuuucucguugucugaac

SEQ ID NO: 21580 - RNA, 19 nt, Artificial Sequence
  Description of Artificial Sequence: Synthetic oligonucleotide
aucuuaaccuccaauuguc

SEQ ID NO: 21581 - RNA, 19 nt, Artificial Sequence
  Description of Artificial Sequence: Synthetic oligonucleotide
ucuugcguagguuugcauc

SEQ ID NO: 21582 - RNA, 19 nt, Artificial Sequence
  Description of Artificial Sequence: Synthetic oligonucleotide
cauaaugucuacccaaaca

SEQ ID NO: 21583 - RNA, 19 nt, Artificial Sequence
  Description of Artificial Sequence: Synthetic oligonucleotide
ugguuaguucaucauucug

SEQ ID NO: 21584 - RNA, 19 nt, Artificial Sequence
  Description of Artificial Sequence: Synthetic oligonucleotide
uuuuauuacgagugggguu

SEQ ID NO: 21585 - RNA, 19 nt, Artificial Sequence
  Description of Artificial Sequence: Synthetic oligonucleotide
aagugguuaguucaucauu

SEQ ID NO: 21586 - RNA, 19 nt, Artificial Sequence
  Description of Artificial Sequence: Synthetic oligonucleotide
caggcauucaucuauguaa

SEQ ID NO: 21587 - RNA, 19 nt, Artificial Sequence
  Description of Artificial Sequence: Synthetic oligonucleotide
uacaaccugucucuuguac

SEQ ID NO: 21588 - RNA, 19 nt, Artificial Sequence
  Description of Artificial Sequence: Synthetic oligonucleotide
uaaggcuaccuauaugaaa

SEQ ID NO: 21589 - RNA, 19 nt, Artificial Sequence
  Description of Artificial Sequence: Synthetic oligonucleotide
uccauaaugucuacccaaa

SEQ ID NO: 21590 - RNA, 19 nt, Artificial Sequence
  Description of Artificial Sequence: Synthetic oligonucleotide
ucuaauugaagaguagcuu

SEQ ID NO: 21591 - RNA, 19 nt, Artificial Sequence
  Description of Artificial Sequence: Synthetic oligonucleotide
cauaugaggcauaaguuaa

SEQ ID NO: 21592 - RNA, 19 nt, Artificial Sequence
  Description of Artificial Sequence: Synthetic oligonucleotide
aguuggagcauccuuccga

SEQ ID NO: 21593 - RNA, 19 nt, Artificial Sequence
  Description of Artificial Sequence: Synthetic oligonucleotide
uuuauagcguucuuccauu

SEQ ID NO: 21594 - RNA, 19 nt, Artificial Sequence
  Description of Artificial Sequence: Synthetic oligonucleotide
ggcauuaacccuugagugg

SEQ ID NO: 21595 - RNA, 19 nt, Artificial Sequence
  Description of Artificial Sequence: Synthetic oligonucleotide
guaggcacgauaaagaaua

SEQ ID NO: 21596 - RNA, 19 nt, Artificial Sequence
  Description of Artificial Sequence: Synthetic oligonucleotide
guguaucaauuauuggcag

SEQ ID NO: 21597 - RNA, 19 nt, Artificial Sequence
  Description of Artificial Sequence: Synthetic oligonucleotide
aagauucgacuugaccuuc

SEQ ID NO: 21598 - RNA, 19 nt, Artificial Sequence
  Description of Artificial Sequence: Synthetic oligonucleotide
ugauuagcaucuguguaca

SEQ ID NO: 21599 - RNA, 19 nt, Artificial Sequence
  Description of Artificial Sequence: Synthetic oligonucleotide
augaguggaacagucgauc

SEQ ID NO: 21600 - RNA, 19 nt, Artificial Sequence
  Description of Artificial Sequence: Synthetic oligonucleotide
aaagauaaggcuaccuaua

SEQ ID NO: 21601 - RNA, 19 nt, Artificial Sequence
  Description of Artificial Sequence: Synthetic oligonucleotide
ucuuaacgaauguuauuaa

SEQ ID NO: 21602 - RNA, 19 nt, Artificial Sequence
  Description of Artificial Sequence: Synthetic oligonucleotide
auuaaaucugcuguccuaa

SEQ ID NO: 21603 - RNA, 19 nt, Artificial Sequence
  Description of Artificial Sequence: Synthetic oligonucleotide
uauguagagucauucccau

SEQ ID NO: 21604 - RNA, 19 nt, Artificial Sequence
  Description of Artificial Sequence: Synthetic oligonucleotide
uugggaucaaauacauaaa

SEQ ID NO: 21605 - RNA, 19 nt, Artificial Sequence
  Description of Artificial Sequence: Synthetic oligonucleotide
ucuacuugugacuguacuu

SEQ ID NO: 21606 - RNA, 19 nt, Artificial Sequence
  Description of Artificial Sequence: Synthetic oligonucleotide
auauuuagguucauuccug

SEQ ID NO: 21607 - RNA, 19 nt, Artificial Sequence
  Description of Artificial Sequence: Synthetic oligonucleotide
gucuaauguacgaauaaca

SEQ ID NO: 21608 - RNA, 19 nt, Artificial Sequence
  Description of Artificial Sequence: Synthetic oligonucleotide
ugaucacuacaggagaaac

SEQ ID NO: 21609 - RNA, 19 nt, Artificial Sequence
  Description of Artificial Sequence: Synthetic oligonucleotide
cugaucuuaacgaauguua

SEQ ID NO: 21610 - RNA, 19 nt, Artificial Sequence
  Description of Artificial Sequence: Synthetic oligonucleotide
uuuuacauguggagagcaa

SEQ ID NO: 21611 - RNA, 19 nt, Artificial Sequence
  Description of Artificial Sequence: Synthetic oligonucleotide
ucuuuuacauguggagagc

SEQ ID NO: 21612 - RNA, 19 nt, Artificial Sequence
  Description of Artificial Sequence: Synthetic oligonucleotide
uuaacccuugaguggugag

SEQ ID NO: 21613 - RNA, 19 nt, Artificial Sequence
  Description of Artificial Sequence: Synthetic oligonucleotide
guuuagggucuaauguacg

SEQ ID NO: 21614 - RNA, 19 nt, Artificial Sequence
  Description of Artificial Sequence: Synthetic oligonucleotide
gaaacauuccugaucacua

SEQ ID NO: 21615 - RNA, 19 nt, Artificial Sequence
  Description of Artificial Sequence: Synthetic oligonucleotide
uaccaauuccuggacaugu

SEQ ID NO: 21616 - RNA, 19 nt, Artificial Sequence
  Description of Artificial Sequence: Synthetic oligonucleotide
uuauaagauucgacuugac

SEQ ID NO: 21617 - RNA, 19 nt, Artificial Sequence
  Description of Artificial Sequence: Synthetic oligonucleotide
aguuaccaauuccuggaca

SEQ ID NO: 21618 - RNA, 19 nt, Artificial Sequence
  Description of Artificial Sequence: Synthetic oligonucleotide
ucuauagaaucagacugau

SEQ ID NO: 21619 - RNA, 19 nt, Artificial Sequence
  Description of Artificial Sequence: Synthetic oligonucleotide
uuacauguggagagcaauu

SEQ ID NO: 21620 - RNA, 19 nt, Artificial Sequence
  Description of Artificial Sequence: Synthetic oligonucleotide
gaguggaacagucgauccc

SEQ ID NO: 21621 - RNA, 19 nt, Artificial Sequence
  Description of Artificial Sequence: Synthetic oligonucleotide
uagggucuaauguacgaau

SEQ ID NO: 21622 - RNA, 19 nt, Artificial Sequence
  Description of Artificial Sequence: Synthetic oligonucleotide
uuaucagaugagugucuga

SEQ ID NO: 21623 - RNA, 19 nt, Artificial Sequence
  Description of Artificial Sequence: Synthetic oligonucleotide
ugucuacccaaacaucuuu

SEQ ID NO: 21624 - RNA, 19 nt, Artificial Sequence
  Description of Artificial Sequence: Synthetic oligonucleotide
aaaggugaaguuagaacua

SEQ ID NO: 21625 - RNA, 19 nt, Artificial Sequence
  Description of Artificial Sequence: Synthetic oligonucleotide
auuuagguucauuccuggu

SEQ ID NO: 21626 - RNA, 19 nt, Artificial Sequence
  Description of Artificial Sequence: Synthetic oligonucleotide
cagucgaucccguuccugc

SEQ ID NO: 21627 - RNA, 19 nt, Artificial Sequence
  Description of Artificial Sequence: Synthetic oligonucleotide
uuagccgcuuauauucaaa

SEQ ID NO: 21628 - RNA, 19 nt, Artificial Sequence
  Description of Artificial Sequence: Synthetic oligonucleotide
gccgcuuauauucaaaauc

SEQ ID NO: 21629 - RNA, 19 nt, Artificial Sequence
  Description of Artificial Sequence: Synthetic oligonucleotide
ggcacgauaaagaauauaa

SEQ ID NO: 21630 - RNA, 19 nt, Artificial Sequence
  Description of Artificial Sequence: Synthetic oligonucleotide
uccucaugugagaaacacu

SEQ ID NO: 21631 - RNA, 19 nt, Artificial Sequence
  Description of Artificial Sequence: Synthetic oligonucleotide
uggauaggaucuucuugug

SEQ ID NO: 21632 - RNA, 19 nt, Artificial Sequence
  Description of Artificial Sequence: Synthetic oligonucleotide
guaauaaucucugcugcga

SEQ ID NO: 21633 - RNA, 19 nt, Artificial Sequence
  Description of Artificial Sequence: Synthetic oligonucleotide
ugucgaagcucagaaauuu

SEQ ID NO: 21634 - RNA, 19 nt, Artificial Sequence
  Description of Artificial Sequence: Synthetic oligonucleotide
auaccacuuuguauaguac

SEQ ID NO: 21635 - RNA, 19 nt, Artificial Sequence
  Description of Artificial Sequence: Synthetic oligonucleotide
uuagggucuaauguacgaa

SEQ ID NO: 21636 - RNA, 19 nt, Artificial Sequence
  Description of Artificial Sequence: Synthetic oligonucleotide
uagccgcuuauauucaaaa

SEQ ID NO: 21637 - RNA, 19 nt, Artificial Sequence
  Description of Artificial Sequence: Synthetic oligonucleotide
gauuagcaucuguguacag

SEQ ID NO: 21638 - RNA, 19 nt, Artificial Sequence
  Description of Artificial Sequence: Synthetic oligonucleotide
auucugugaucuaaaggug

SEQ ID NO: 21639 - RNA, 19 nt, Artificial Sequence
  Description of Artificial Sequence: Synthetic oligonucleotide
agagucauucccauauugu

SEQ ID NO: 21640 - RNA, 19 nt, Artificial Sequence
  Description of Artificial Sequence: Synthetic oligonucleotide
uuuagccgcuuauauucaa

SEQ ID NO: 21641 - RNA, 19 nt, Artificial Sequence
  Description of Artificial Sequence: Synthetic oligonucleotide
ggcacuaacaauguauuuc

SEQ ID NO: 21642 - RNA, 19 nt, Artificial Sequence
  Description of Artificial Sequence: Synthetic oligonucleotide
aaagcgcacuagauaccac

SEQ ID NO: 21643 - RNA, 19 nt, Artificial Sequence
  Description of Artificial Sequence: Synthetic oligonucleotide
aaugaguggaacagucgau

SEQ ID NO: 21644 - RNA, 19 nt, Artificial Sequence
  Description of Artificial Sequence: Synthetic oligonucleotide
guuauauguaacagaagua

SEQ ID NO: 21645 - RNA, 19 nt, Artificial Sequence
  Description of Artificial Sequence: Synthetic oligonucleotide
ucugaacccucuugauuga

SEQ ID NO: 21646 - RNA, 19 nt, Artificial Sequence
  Description of Artificial Sequence: Synthetic oligonucleotide
gaguuggagcauccuuccg

SEQ ID NO: 21647 - RNA, 19 nt, Artificial Sequence
  Description of Artificial Sequence: Synthetic oligonucleotide
gacauguagggagaguuaa

SEQ ID NO: 21648 - RNA, 19 nt, Artificial Sequence
  Description of Artificial Sequence: Synthetic oligonucleotide
gauugagcuucaucugcca

SEQ ID NO: 21649 - RNA, 19 nt, Artificial Sequence
  Description of Artificial Sequence: Synthetic oligonucleotide
caaguuggcagucauaaau

SEQ ID NO: 21650 - RNA, 19 nt, Artificial Sequence
  Description of Artificial Sequence: Synthetic oligonucleotide
gucgccucaaauccccaag

SEQ ID NO: 21651 - RNA, 19 nt, Artificial Sequence
  Description of Artificial Sequence: Synthetic oligonucleotide
acaccauaaaagauuaauu

SEQ ID NO: 21652 - RNA, 19 nt, Artificial Sequence
  Description of Artificial Sequence: Synthetic oligonucleotide
uuguacgucucaagcugac

SEQ ID NO: 21653 - RNA, 19 nt, Artificial Sequence
  Description of Artificial Sequence: Synthetic oligonucleotide
cacagcguauucgauaauc

SEQ ID NO: 21654 - RNA, 19 nt, Artificial Sequence
  Description of Artificial Sequence: Synthetic oligonucleotide
uuguugugaugugaguuaa

SEQ ID NO: 21655 - RNA, 19 nt, Artificial Sequence
  Description of Artificial Sequence: Synthetic oligonucleotide
gugagaaacacuaaguauu

SEQ ID NO: 21656 - RNA, 19 nt, Artificial Sequence
  Description of Artificial Sequence: Synthetic oligonucleotide
uuaccaauuccuggacaug

SEQ ID NO: 21657 - RNA, 19 nt, Artificial Sequence
  Description of Artificial Sequence: Synthetic oligonucleotide
cguggcuagaaucugauuc

SEQ ID NO: 21658 - RNA, 19 nt, Artificial Sequence
  Description of Artificial Sequence: Synthetic oligonucleotide
acagcguauucgauaauca

SEQ ID NO: 21659 - RNA, 19 nt, Artificial Sequence
  Description of Artificial Sequence: Synthetic oligonucleotide
cauucuugcguagguuugc

SEQ ID NO: 21660 - RNA, 19 nt, Artificial Sequence
  Description of Artificial Sequence: Synthetic oligonucleotide
uacgagugggguucauaga

SEQ ID NO: 21661 - RNA, 19 nt, Artificial Sequence
  Description of Artificial Sequence: Synthetic oligonucleotide
aucagacugauugagucuu

SEQ ID NO: 21662 - RNA, 19 nt, Artificial Sequence
  Description of Artificial Sequence: Synthetic oligonucleotide
guuaccaauuccuggacau

SEQ ID NO: 21663 - RNA, 19 nt, Artificial Sequence
  Description of Artificial Sequence: Synthetic oligonucleotide
agagggcagauaaauagaa

SEQ ID NO: 21664 - RNA, 19 nt, Artificial Sequence
  Description of Artificial Sequence: Synthetic oligonucleotide
auguacgaauaacacuuuu

SEQ ID NO: 21665 - RNA, 19 nt, Artificial Sequence
  Description of Artificial Sequence: Synthetic oligonucleotide
ugauugcuuaacaggcauu

SEQ ID NO: 21666 - RNA, 19 nt, Artificial Sequence
  Description of Artificial Sequence: Synthetic oligonucleotide
guacgucucaagcugaccu

SEQ ID NO: 21667 - RNA, 19 nt, Artificial Sequence
  Description of Artificial Sequence: Synthetic oligonucleotide
ggaacagucgaucccguuc

SEQ ID NO: 21668 - RNA, 19 nt, Artificial Sequence
  Description of Artificial Sequence: Synthetic oligonucleotide
ugcaaccugcauauccaau

SEQ ID NO: 21669 - RNA, 19 nt, Artificial Sequence
  Description of Artificial Sequence: Synthetic oligonucleotide
uacgucucaagcugaccuc

SEQ ID NO: 21670 - RNA, 19 nt, Artificial Sequence
  Description of Artificial Sequence: Synthetic oligonucleotide
aaaucccuaaugggugaga

SEQ ID NO: 21671 - RNA, 19 nt, Artificial Sequence
  Description of Artificial Sequence: Synthetic oligonucleotide
aauguacgaauaacacuuu

SEQ ID NO: 21672 - RNA, 19 nt, Artificial Sequence
  Description of Artificial Sequence: Synthetic oligonucleotide
gcuagaaaggacugcccug

SEQ ID NO: 21673 - RNA, 19 nt, Artificial Sequence
  Description of Artificial Sequence: Synthetic oligonucleotide
cuguucuuaaccuaucuuu

SEQ ID NO: 21674 - RNA, 19 nt, Artificial Sequence
  Description of Artificial Sequence: Synthetic oligonucleotide
cuucuacuugugacuguac

SEQ ID NO: 21675 - RNA, 19 nt, Artificial Sequence
  Description of Artificial Sequence: Synthetic oligonucleotide
gugagaccucucuaccuug

SEQ ID NO: 21676 - RNA, 19 nt, Artificial Sequence
  Description of Artificial Sequence: Synthetic oligonucleotide
ggucuaauguacgaauaac

SEQ ID NO: 21677 - RNA, 19 nt, Artificial Sequence
  Description of Artificial Sequence: Synthetic oligonucleotide
agccgcuuauauucaaaau

SEQ ID NO: 21678 - RNA, 19 nt, Artificial Sequence
  Description of Artificial Sequence: Synthetic oligonucleotide
cauuaaaucugcuguccua

SEQ ID NO: 21679 - RNA, 19 nt, Artificial Sequence
  Description of Artificial Sequence: Synthetic oligonucleotide
auguuuuacuucauaggua

SEQ ID NO: 21680 - RNA, 19 nt, Artificial Sequence
  Description of Artificial Sequence: Synthetic oligonucleotide
agucgaucccguuccugca

SEQ ID NO: 21681 - RNA, 19 nt, Artificial Sequence
  Description of Artificial Sequence: Synthetic oligonucleotide
gcacuaacaauguauuucu

SEQ ID NO: 21682 - RNA, 19 nt, Artificial Sequence
  Description of Artificial Sequence: Synthetic oligonucleotide
gaugccuaaaguauauguu

SEQ ID NO: 21683 - RNA, 19 nt, Artificial Sequence
  Description of Artificial Sequence: Synthetic oligonucleotide
aggagacaucucuaacuau

SEQ ID NO: 21684 - RNA, 19 nt, Artificial Sequence
  Description of Artificial Sequence: Synthetic oligonucleotide
cuuaacaggcauucaucua

SEQ ID NO: 21685 - RNA, 19 nt, Artificial Sequence
  Description of Artificial Sequence: Synthetic oligonucleotide
aauucguuguuggcuucau

SEQ ID NO: 21686 - RNA, 19 nt, Artificial Sequence
  Description of Artificial Sequence: Synthetic oligonucleotide
gaucuuaacgaauguuauu

SEQ ID NO: 21687 - RNA, 19 nt, Artificial Sequence
  Description of Artificial Sequence: Synthetic oligonucleotide
acaaguuggcagucauaaa

SEQ ID NO: 21688 - RNA, 19 nt, Artificial Sequence
  Description of Artificial Sequence: Synthetic oligonucleotide
augaugccuaaaguauaug

SEQ ID NO: 21689 - RNA, 19 nt, Artificial Sequence
  Description of Artificial Sequence: Synthetic oligonucleotide
aucaaacaugacagcagga

SEQ ID NO: 21690 - RNA, 19 nt, Artificial Sequence
  Description of Artificial Sequence: Synthetic oligonucleotide
uaggcacgauaaagaauau

SEQ ID NO: 21691 - RNA, 19 nt, Artificial Sequence
  Description of Artificial Sequence: Synthetic oligonucleotide
uuauuacgagugggguuca

SEQ ID NO: 21692 - RNA, 19 nt, Artificial Sequence
  Description of Artificial Sequence: Synthetic oligonucleotide
agugcguggcuagaaucug

SEQ ID NO: 21693 - RNA, 19 nt, Artificial Sequence
  Description of Artificial Sequence: Synthetic oligonucleotide
ugcguagguuugcaucauc

SEQ ID NO: 21694 - RNA, 19 nt, Artificial Sequence
  Description of Artificial Sequence: Synthetic oligonucleotide
cauuaacccuugaguggug

SEQ ID NO: 21695 - RNA, 19 nt, Artificial Sequence
  Description of Artificial Sequence: Synthetic oligonucleotide
ugucgccucaaauccccaa

SEQ ID NO: 21696 - RNA, 19 nt, Artificial Sequence
  Description of Artificial Sequence: Synthetic oligonucleotide
gacuagugccucugccaac

SEQ ID NO: 21697 - RNA, 19 nt, Artificial Sequence
  Description of Artificial Sequence: Synthetic oligonucleotide
gcguauucgauaaucaucu

SEQ ID NO: 21698 - RNA, 19 nt, Artificial Sequence
  Description of Artificial Sequence: Synthetic oligonucleotide
uucuugcguagguuugcau

SEQ ID NO: 21699 - RNA, 19 nt, Artificial Sequence
  Description of Artificial Sequence: Synthetic oligonucleotide
uucuaacuacuaagacauu

SEQ ID NO: 21700 - RNA, 19 nt, Artificial Sequence
  Description of Artificial Sequence: Synthetic oligonucleotide
gggucuaauguacgaauaa

SEQ ID NO: 21701 - RNA, 19 nt, Artificial Sequence
  Description of Artificial Sequence: Synthetic oligonucleotide
agaaaaccuuaaauauaau

SEQ ID NO: 21702 - RNA, 19 nt, Artificial Sequence
  Description of Artificial Sequence: Synthetic oligonucleotide
cauauuguaccaggcacua

SEQ ID NO: 21703 - RNA, 19 nt, Artificial Sequence
  Description of Artificial Sequence: Synthetic oligonucleotide
uuguuaaaucuuggcucaa

SEQ ID NO: 21704 - RNA, 19 nt, Artificial Sequence
  Description of Artificial Sequence: Synthetic oligonucleotide
ucagacugauugagucuuu

SEQ ID NO: 21705 - RNA, 19 nt, Artificial Sequence
  Description of Artificial Sequence: Synthetic oligonucleotide
ucgggcugcauuagccuuu

SEQ ID NO: 21706 - RNA, 19 nt, Artificial Sequence
  Description of Artificial Sequence: Synthetic oligonucleotide
cagacugauugagucuuuc

SEQ ID NO: 21707 - RNA, 19 nt, Artificial Sequence
  Description of Artificial Sequence: Synthetic oligonucleotide
gagggcagauaaauagaaa

SEQ ID NO: 21708 - RNA, 19 nt, Artificial Sequence
  Description of Artificial Sequence: Synthetic oligonucleotide
gauucgacuugaccuucua

SEQ ID NO: 21709 - RNA, 19 nt, Artificial Sequence
  Description of Artificial Sequence: Synthetic oligonucleotide
ccgcuuauauucaaaaucu

SEQ ID NO: 21710 - RNA, 19 nt, Artificial Sequence
  Description of Artificial Sequence: Synthetic oligonucleotide
auuacgagugggguucaua

SEQ ID NO: 21711 - RNA, 19 nt, Artificial Sequence
  Description of Artificial Sequence: Synthetic oligonucleotide
cgcacuagauaccacuuug

SEQ ID NO: 21712 - RNA, 19 nt, Artificial Sequence
  Description of Artificial Sequence: Synthetic oligonucleotide
acagucgaucccguuccug

SEQ ID NO: 21713 - RNA, 19 nt, Artificial Sequence
  Description of Artificial Sequence: Synthetic oligonucleotide
agggucuaauguacgaaua

SEQ ID NO: 21714 - RNA, 19 nt, Artificial Sequence
  Description of Artificial Sequence: Synthetic oligonucleotide
uggaacagucgaucccguu

SEQ ID NO: 21715 - RNA, 19 nt, Artificial Sequence
  Description of Artificial Sequence: Synthetic oligonucleotide
cacaucaggaaggguaaaa

SEQ ID NO: 21716 - RNA, 19 nt, Artificial Sequence
  Description of Artificial Sequence: Synthetic oligonucleotide
caugagauauuuccuccau

SEQ ID NO: 21717 - RNA, 19 nt, Artificial Sequence
  Description of Artificial Sequence: Synthetic oligonucleotide
aggcacgauaaagaauaua

SEQ ID NO: 21718 - RNA, 19 nt, Artificial Sequence
  Description of Artificial Sequence: Synthetic oligonucleotide
gcauuaacccuugaguggu

SEQ ID NO: 21719 - RNA, 19 nt, Artificial Sequence
  Description of Artificial Sequence: Synthetic oligonucleotide
augucuacccaaacaucuu

SEQ ID NO: 21720 - RNA, 19 nt, Artificial Sequence
  Description of Artificial Sequence: Synthetic oligonucleotide
accuucuaguuuagauacu

SEQ ID NO: 21721 - RNA, 19 nt, Artificial Sequence
  Description of Artificial Sequence: Synthetic oligonucleotide
agcgcacuagauaccacuu

SEQ ID NO: 21722 - RNA, 19 nt, Artificial Sequence
  Description of Artificial Sequence: Synthetic oligonucleotide
gcacgauaaagaauauaaa

SEQ ID NO: 21723 - RNA, 19 nt, Artificial Sequence
  Description of Artificial Sequence: Synthetic oligonucleotide
guucacggcacagccuaga

SEQ ID NO: 21724 - RNA, 19 nt, Artificial Sequence
  Description of Artificial Sequence: Synthetic oligonucleotide
ggacuauugggaucuucua

SEQ ID NO: 21725 - RNA, 19 nt, Artificial Sequence
  Description of Artificial Sequence: Synthetic oligonucleotide
uugcguagguuugcaucau

SEQ ID NO: 21726 - RNA, 19 nt, Artificial Sequence
  Description of Artificial Sequence: Synthetic oligonucleotide
uauuacgagugggguucau

SEQ ID NO: 21727 - RNA, 19 nt, Artificial Sequence
  Description of Artificial Sequence: Synthetic oligonucleotide
gaugagugucugagaacgu

SEQ ID NO: 21728 - RNA, 19 nt, Artificial Sequence
  Description of Artificial Sequence: Synthetic oligonucleotide
gagaccucucuaccuugcu

SEQ ID NO: 21729 - RNA, 19 nt, Artificial Sequence
  Description of Artificial Sequence: Synthetic oligonucleotide
cagcguauucgauaaucau

SEQ ID NO: 21730 - RNA, 19 nt, Artificial Sequence
  Description of Artificial Sequence: Synthetic oligonucleotide
ggaaagcaugcuuuauuuu

SEQ ID NO: 21731 - RNA, 19 nt, Artificial Sequence
  Description of Artificial Sequence: Synthetic oligonucleotide
gggcagauaaauagaaaau

SEQ ID NO: 21732 - RNA, 19 nt, Artificial Sequence
  Description of Artificial Sequence: Synthetic oligonucleotide
ccucucuaccuugcugugg

SEQ ID NO: 21733 - RNA, 19 nt, Artificial Sequence
  Description of Artificial Sequence: Synthetic oligonucleotide
gggguucauagacuaauuu

SEQ ID NO: 21734 - RNA, 19 nt, Artificial Sequence
  Description of Artificial Sequence: Synthetic oligonucleotide
gugucugagaacgucuauu

SEQ ID NO: 21735 - RNA, 19 nt, Artificial Sequence
  Description of Artificial Sequence: Synthetic oligonucleotide
ggcauaaguuaaagaacua

SEQ ID NO: 21736 - RNA, 19 nt, Artificial Sequence
  Description of Artificial Sequence: Synthetic oligonucleotide
cuacaaccugucucuugua

SEQ ID NO: 21737 - RNA, 19 nt, Artificial Sequence
  Description of Artificial Sequence: Synthetic oligonucleotide
cugcccugaaccugugcua

SEQ ID NO: 21738 - RNA, 19 nt, Artificial Sequence
  Description of Artificial Sequence: Synthetic oligonucleotide
cugucgaagcucagaaauu

SEQ ID NO: 21739 - RNA, 19 nt, Artificial Sequence
  Description of Artificial Sequence: Synthetic oligonucleotide
guuuaaccugucgccucaa

SEQ ID NO: 21740 - RNA, 19 nt, Artificial Sequence
  Description of Artificial Sequence: Synthetic oligonucleotide
gcguagguuugcaucaucu

SEQ ID NO: 21741 - RNA, 19 nt, Artificial Sequence
  Description of Artificial Sequence: Synthetic oligonucleotide
cccuaaauccugaccuaaa

SEQ ID NO: 21742 - RNA, 19 nt, Artificial Sequence
  Description of Artificial Sequence: Synthetic oligonucleotide
cucgggcugcauuagccuu

SEQ ID NO: 21743 - RNA, 19 nt, Artificial Sequence
  Description of Artificial Sequence: Synthetic oligonucleotide
cguagguuugcaucaucua

SEQ ID NO: 21744 - RNA, 19 nt, Artificial Sequence
  Description of Artificial Sequence: Synthetic oligonucleotide
guggaacagucgaucccgu

SEQ ID NO: 21745 - RNA, 19 nt, Artificial Sequence
  Description of Artificial Sequence: Synthetic oligonucleotide
ccccuaaauccugaccuaa

SEQ ID NO: 21746 - RNA, 19 nt, Artificial Sequence
  Description of Artificial Sequence: Synthetic oligonucleotide
gcgcacuagauaccacuuu

SEQ ID NO: 21747 - RNA, 19 nt, Artificial Sequence
  Description of Artificial Sequence: Synthetic oligonucleotide
cgaauguuauuaagacauu

SEQ ID NO: 21748 - RNA, 19 nt, Artificial Sequence
  Description of Artificial Sequence: Synthetic oligonucleotide
gggcugcauuagccuuucu

SEQ ID NO: 21749 - RNA, 19 nt, Artificial Sequence
  Description of Artificial Sequence: Synthetic oligonucleotide
aauuuaagcaauuacccac

SEQ ID NO: 21750 - RNA, 19 nt, Artificial Sequence
  Description of Artificial Sequence: Synthetic oligonucleotide
aacauuuuauguuaacccc

SEQ ID NO: 21751 - RNA, 19 nt, Artificial Sequence
  Description of Artificial Sequence: Synthetic oligonucleotide
acuacuuagaucaagaggg

SEQ ID NO: 21752 - RNA, 19 nt, Artificial Sequence
  Description of Artificial Sequence: Synthetic oligonucleotide
uauagugugauuuuggcca

SEQ ID NO: 21753 - RNA, 19 nt, Artificial Sequence
  Description of Artificial Sequence: Synthetic oligonucleotide
auguguaauauuuuaauag

SEQ ID NO: 21754 - RNA, 19 nt, Artificial Sequence
  Description of Artificial Sequence: Synthetic oligonucleotide
cuuguauuaacucuggggc

SEQ ID NO: 21755 - RNA, 19 nt, Artificial Sequence
  Description of Artificial Sequence: Synthetic oligonucleotide
aauggacuagcauuuuccc

SEQ ID NO: 21756 - RNA, 19 nt, Artificial Sequence
  Description of Artificial Sequence: Synthetic oligonucleotide
ucuauaggcaucuugagcu

SEQ ID NO: 21757 - RNA, 19 nt, Artificial Sequence
  Description of Artificial Sequence: Synthetic oligonucleotide
aguuuauacagauugcuag

SEQ ID NO: 21758 - RNA, 19 nt, Artificial Sequence
  Description of Artificial Sequence: Synthetic oligonucleotide
auauguguugguuauguac

SEQ ID NO: 21759 - RNA, 19 nt, Artificial Sequence
  Description of Artificial Sequence: Synthetic oligonucleotide
uuaaacaacggauuacucc

SEQ ID NO: 21760 - RNA, 19 nt, Artificial Sequence
  Description of Artificial Sequence: Synthetic oligonucleotide
cucaacugaagaaagaccc

SEQ ID NO: 21761 - RNA, 19 nt, Artificial Sequence
  Description of Artificial Sequence: Synthetic oligonucleotide
uguccaacgagccagaacu

SEQ ID NO: 21762 - RNA, 19 nt, Artificial Sequence
  Description of Artificial Sequence: Synthetic oligonucleotide
uuuauguuaaccccgauuu

SEQ ID NO: 21763 - RNA, 19 nt, Artificial Sequence
  Description of Artificial Sequence: Synthetic oligonucleotide
uugacuauucaaacaaggg

SEQ ID NO: 21764 - RNA, 19 nt, Artificial Sequence
  Description of Artificial Sequence: Synthetic oligonucleotide
uuuucgauauuccagcagc

SEQ ID NO: 21765 - RNA, 19 nt, Artificial Sequence
  Description of Artificial Sequence: Synthetic oligonucleotide
cauucaucacccaagaacc

SEQ ID NO: 21766 - RNA, 19 nt, Artificial Sequence
  Description of Artificial Sequence: Synthetic oligonucleotide
uguaauauuuuaauagagu

SEQ ID NO: 21767 - RNA, 19 nt, Artificial Sequence
  Description of Artificial Sequence: Synthetic oligonucleotide
cuaugugaaguccaaaugg

SEQ ID NO: 21768 - RNA, 19 nt, Artificial Sequence
  Description of Artificial Sequence: Synthetic oligonucleotide
uaaacaacggauuacucca

SEQ ID NO: 21769 - RNA, 19 nt, Artificial Sequence
  Description of Artificial Sequence: Synthetic oligonucleotide
uuugacaagguuuagguau

SEQ ID NO: 21770 - RNA, 19 nt, Artificial Sequence
  Description of Artificial Sequence: Synthetic oligonucleotide
cugacuaaagcuuuguggc

SEQ ID NO: 21771 - RNA, 19 nt, Artificial Sequence
  Description of Artificial Sequence: Synthetic oligonucleotide
aacccugccaauuccauuc

SEQ ID NO: 21772 - RNA, 19 nt, Artificial Sequence
  Description of Artificial Sequence: Synthetic oligonucleotide
auaacgauauuuugcacuc

SEQ ID NO: 21773 - RNA, 19 nt, Artificial Sequence
  Description of Artificial Sequence: Synthetic oligonucleotide
guaccuuacauauagaaca

SEQ ID NO: 21774 - RNA, 19 nt, Artificial Sequence
  Description of Artificial Sequence: Synthetic oligonucleotide
aauuuuaggauauguguaa

SEQ ID NO: 21775 - RNA, 19 nt, Artificial Sequence
  Description of Artificial Sequence: Synthetic oligonucleotide
auaagcuaagucucuuugc

SEQ ID NO: 21776 - RNA, 19 nt, Artificial Sequence
  Description of Artificial Sequence: Synthetic oligonucleotide
uccaacuacuaucugaucu

SEQ ID NO: 21777 - RNA, 19 nt, Artificial Sequence
  Description of Artificial Sequence: Synthetic oligonucleotide
aaagcaauccaguccucac

SEQ ID NO: 21778 - RNA, 19 nt, Artificial Sequence
  Description of Artificial Sequence: Synthetic oligonucleotide
uguacguugacuauucaaa

SEQ ID NO: 21779 - RNA, 19 nt, Artificial Sequence
  Description of Artificial Sequence: Synthetic oligonucleotide
gguuacacgauccagcugg

SEQ ID NO: 21780 - RNA, 19 nt, Artificial Sequence
  Description of Artificial Sequence: Synthetic oligonucleotide
gaaauuuuaggauaugugu

SEQ ID NO: 21781 - RNA, 19 nt, Artificial Sequence
  Description of Artificial Sequence: Synthetic oligonucleotide
aagacgaucuuuggaacgc

SEQ ID NO: 21782 - RNA, 19 nt, Artificial Sequence
  Description of Artificial Sequence: Synthetic oligonucleotide
auagacaucggcaagcagg

SEQ ID NO: 21783 - RNA, 19 nt, Artificial Sequence
  Description of Artificial Sequence: Synthetic oligonucleotide
gaguuguacauacaguacc

SEQ ID NO: 21784 - RNA, 19 nt, Artificial Sequence
  Description of Artificial Sequence: Synthetic oligonucleotide
aguagauuccaauuauuug

SEQ ID NO: 21785 - RNA, 19 nt, Artificial Sequence
  Description of Artificial Sequence: Synthetic oligonucleotide
uccucuuuaaacaacggau

SEQ ID NO: 21786 - RNA, 19 nt, Artificial Sequence
  Description of Artificial Sequence: Synthetic oligonucleotide
cuuauagugugauuuuggc

SEQ ID NO: 21787 - RNA, 19 nt, Artificial Sequence
  Description of Artificial Sequence: Synthetic oligonucleotide
auauagaacaguguguuug

SEQ ID NO: 21788 - RNA, 19 nt, Artificial Sequence
  Description of Artificial Sequence: Synthetic oligonucleotide
uguucacuuguuauguaag

SEQ ID NO: 21789 - RNA, 19 nt, Artificial Sequence
  Description of Artificial Sequence: Synthetic oligonucleotide
aaauauguguugguuaugu

SEQ ID NO: 21790 - RNA, 19 nt, Artificial Sequence
  Description of Artificial Sequence: Synthetic oligonucleotide
aaucuuggcaggguaauag

SEQ ID NO: 21791 - RNA, 19 nt, Artificial Sequence
  Description of Artificial Sequence: Synthetic oligonucleotide
aguguauccaggaucaaac

SEQ ID NO: 21792 - RNA, 19 nt, Artificial Sequence
  Description of Artificial Sequence: Synthetic oligonucleotide
acaagcgucaaauccuugg

SEQ ID NO: 21793 - RNA, 19 nt, Artificial Sequence
  Description of Artificial Sequence: Synthetic oligonucleotide
ucgauauuccagcagcugc

SEQ ID NO: 21794 - RNA, 19 nt, Artificial Sequence
  Description of Artificial Sequence: Synthetic oligonucleotide
guaacgauggcuccaacgc

SEQ ID NO: 21795 - RNA, 19 nt, Artificial Sequence
  Description of Artificial Sequence: Synthetic oligonucleotide
aacgauauuuugcacucca

SEQ ID NO: 21796 - RNA, 19 nt, Artificial Sequence
  Description of Artificial Sequence: Synthetic oligonucleotide
gacuauucaaacaagggga

SEQ ID NO: 21797 - RNA, 19 nt, Artificial Sequence
  Description of Artificial Sequence: Synthetic oligonucleotide
guugacuauucaaacaagg

SEQ ID NO: 21798 - RNA, 19 nt, Artificial Sequence
  Description of Artificial Sequence: Synthetic oligonucleotide
uacuuuagucacaccauag

SEQ ID NO: 21799 - RNA, 19 nt, Artificial Sequence
  Description of Artificial Sequence: Synthetic oligonucleotide
uacauauguacguugacua

SEQ ID NO: 21800 - RNA, 19 nt, Artificial Sequence
  Description of Artificial Sequence: Synthetic oligonucleotide
aagccacuuuguuuuaagg

SEQ ID NO: 21801 - RNA, 19 nt, Artificial Sequence
  Description of Artificial Sequence: Synthetic oligonucleotide
ugguuauguacauauguac

SEQ ID NO: 21802 - RNA, 19 nt, Artificial Sequence
  Description of Artificial Sequence: Synthetic oligonucleotide
uuuaggauauguguaauau

SEQ ID NO: 21803 - RNA, 19 nt, Artificial Sequence
  Description of Artificial Sequence: Synthetic oligonucleotide
cuuuggaugccaacaaacc

SEQ ID NO: 21804 - RNA, 19 nt, Artificial Sequence
  Description of Artificial Sequence: Synthetic oligonucleotide
uauagaacaguguguuugc

SEQ ID NO: 21805 - RNA, 19 nt, Artificial Sequence
  Description of Artificial Sequence: Synthetic oligonucleotide
uggcguugcguacauacgg

SEQ ID NO: 21806 - RNA, 19 nt, Artificial Sequence
  Description of Artificial Sequence: Synthetic oligonucleotide
uuuaggugaaaucgccugc

SEQ ID NO: 21807 - RNA, 19 nt, Artificial Sequence
  Description of Artificial Sequence: Synthetic oligonucleotide
ucagcaauaagaaggucuc

SEQ ID NO: 21808 - RNA, 19 nt, Artificial Sequence
  Description of Artificial Sequence: Synthetic oligonucleotide
uaggacaacaccagcuuag

SEQ ID NO: 21809 - RNA, 19 nt, Artificial Sequence
  Description of Artificial Sequence: Synthetic oligonucleotide
gauauuuugcacuccaucu

SEQ ID NO: 21810 - RNA, 19 nt, Artificial Sequence
  Description of Artificial Sequence: Synthetic oligonucleotide
guagucuacgcacugauuc

SEQ ID NO: 21811 - RNA, 19 nt, Artificial Sequence
  Description of Artificial Sequence: Synthetic oligonucleotide
ucacuuguuauguaaguuc

SEQ ID NO: 21812 - RNA, 19 nt, Artificial Sequence
  Description of Artificial Sequence: Synthetic oligonucleotide
acauuuuauguuaaccccg

SEQ ID NO: 21813 - RNA, 19 nt, Artificial Sequence
  Description of Artificial Sequence: Synthetic oligonucleotide
uauguuaaccccgauuugu

SEQ ID NO: 21814 - RNA, 19 nt, Artificial Sequence
  Description of Artificial Sequence: Synthetic oligonucleotide
aacaacggauuacuccauc

SEQ ID NO: 21815 - RNA, 19 nt, Artificial Sequence
  Description of Artificial Sequence: Synthetic oligonucleotide
gugauauaaauauguguug

SEQ ID NO: 21816 - RNA, 19 nt, Artificial Sequence
  Description of Artificial Sequence: Synthetic oligonucleotide
uuuuauguuaaccccgauu

SEQ ID NO: 21817 - RNA, 19 nt, Artificial Sequence
  Description of Artificial Sequence: Synthetic oligonucleotide
gcuuguauuaacucugggg

SEQ ID NO: 21818 - RNA, 19 nt, Artificial Sequence
  Description of Artificial Sequence: Synthetic oligonucleotide
uuaucacggaagaaagcug

SEQ ID NO: 21819 - RNA, 19 nt, Artificial Sequence
  Description of Artificial Sequence: Synthetic oligonucleotide
uuaaccccgauuuguguag

SEQ ID NO: 21820 - RNA, 19 nt, Artificial Sequence
  Description of Artificial Sequence: Synthetic oligonucleotide
aauccacucaucguaacga

SEQ ID NO: 21821 - RNA, 19 nt, Artificial Sequence
  Description of Artificial Sequence: Synthetic oligonucleotide
uauuugguggguuucuuaa

SEQ ID NO: 21822 - RNA, 19 nt, Artificial Sequence
  Description of Artificial Sequence: Synthetic oligonucleotide
ugccauacuacugauguca

SEQ ID NO: 21823 - RNA, 19 nt, Artificial Sequence
  Description of Artificial Sequence: Synthetic oligonucleotide
aagcugaaauuuuaggaua

SEQ ID NO: 21824 - RNA, 19 nt, Artificial Sequence
  Description of Artificial Sequence: Synthetic oligonucleotide
gguuauguacauauguacg

SEQ ID NO: 21825 - RNA, 19 nt, Artificial Sequence
  Description of Artificial Sequence: Synthetic oligonucleotide
caguuuguagucuacgcac

SEQ ID NO: 21826 - RNA, 19 nt, Artificial Sequence
  Description of Artificial Sequence: Synthetic oligonucleotide
acuauucaaacaaggggac

SEQ ID NO: 21827 - RNA, 19 nt, Artificial Sequence
  Description of Artificial Sequence: Synthetic oligonucleotide
acuuuauguauggugaucu

SEQ ID NO: 21828 - RNA, 19 nt, Artificial Sequence
  Description of Artificial Sequence: Synthetic oligonucleotide
acguugacuauucaaacaa

SEQ ID NO: 21829 - RNA, 19 nt, Artificial Sequence
  Description of Artificial Sequence: Synthetic oligonucleotide
uuaagucgugcucucuuug

SEQ ID NO: 21830 - RNA, 19 nt, Artificial Sequence
  Description of Artificial Sequence: Synthetic oligonucleotide
cuuagaucaagagggagac

SEQ ID NO: 21831 - RNA, 19 nt, Artificial Sequence
  Description of Artificial Sequence: Synthetic oligonucleotide
  modified_base (4)..(4): a, c, u, g, unknown or other
agcncuuuugcugaggaca

SEQ ID NO: 21832 - RNA, 19 nt, Artificial Sequence
  Description of Artificial Sequence: Synthetic oligonucleotide
aacccauacauucuuccau

SEQ ID NO: 21833 - RNA, 19 nt, Artificial Sequence
  Description of Artificial Sequence: Synthetic oligonucleotide
ucuacgcacugauucuugg

SEQ ID NO: 21834 - RNA, 19 nt, Artificial Sequence
  Description of Artificial Sequence: Synthetic oligonucleotide
cucaucguaacgauggcuc

SEQ ID NO: 21835 - RNA, 19 nt, Artificial Sequence
  Description of Artificial Sequence: Synthetic oligonucleotide
uuauguuaaccccgauuug

SEQ ID NO: 21836 - RNA, 19 nt, Artificial Sequence
  Description of Artificial Sequence: Synthetic oligonucleotide
gucaacauuuggcacacug

SEQ ID NO: 21837 - RNA, 19 nt, Artificial Sequence
  Description of Artificial Sequence: Synthetic oligonucleotide
uuguauuaacucuggggca

SEQ ID NO: 21838 - RNA, 19 nt, Artificial Sequence
  Description of Artificial Sequence: Synthetic oligonucleotide
  modified_base (5)..(5): a, c, u, g, unknown or other
aagcncuuuugcugaggac

SEQ ID NO: 21839 - RNA, 19 nt, Artificial Sequence
  Description of Artificial Sequence: Synthetic oligonucleotide
auagacggguuacacgauc

SEQ ID NO: 21840 - RNA, 19 nt, Artificial Sequence
  Description of Artificial Sequence: Synthetic oligonucleotide
acauacggcaggcggaagg

SEQ ID NO: 21841 - RNA, 19 nt, Artificial Sequence
  Description of Artificial Sequence: Synthetic oligonucleotide
aacaagcccagagaugaag

SEQ ID NO: 21842 - RNA, 19 nt, Artificial Sequence
  Description of Artificial Sequence: Synthetic oligonucleotide
aacgauggcuccaacgcuc

SEQ ID NO: 21843 - RNA, 19 nt, Artificial Sequence
  Description of Artificial Sequence: Synthetic oligonucleotide
uagacaucggcaagcaggu

SEQ ID NO: 21844 - RNA, 19 nt, Artificial Sequence
  Description of Artificial Sequence: Synthetic oligonucleotide
cucugugagagacuggcag

SEQ ID NO: 21845 - RNA, 19 nt, Artificial Sequence
  Description of Artificial Sequence: Synthetic oligonucleotide
aaaucgccugcuccaggac

SEQ ID NO: 21846 - RNA, 19 nt, Artificial Sequence
  Description of Artificial Sequence: Synthetic oligonucleotide
uugacuauccacucagcaa

SEQ ID NO: 21847 - RNA, 19 nt, Artificial Sequence
  Description of Artificial Sequence: Synthetic oligonucleotide
uagacggguuacacgaucc

SEQ ID NO: 21848 - RNA, 19 nt, Artificial Sequence
  Description of Artificial Sequence: Synthetic oligonucleotide
caugaauucuuaucaaaga

SEQ ID NO: 21849 - RNA, 19 nt, Artificial Sequence
  Description of Artificial Sequence: Synthetic oligonucleotide
ugcccuuuucucauuauaa

SEQ ID NO: 21850 - RNA, 19 nt, Artificial Sequence
  Description of Artificial Sequence: Synthetic oligonucleotide
auauguacguugacuauuc

SEQ ID NO: 21851 - RNA, 19 nt, Artificial Sequence
  Description of Artificial Sequence: Synthetic oligonucleotide
agcauucaucaguaggauc

SEQ ID NO: 21852 - RNA, 19 nt, Artificial Sequence
  Description of Artificial Sequence: Synthetic oligonucleotide
cuaaaugaguuuauacaga

SEQ ID NO: 21853 - RNA, 19 nt, Artificial Sequence
  Description of Artificial Sequence: Synthetic oligonucleotide
ucuucuccgcucacuaugc

SEQ ID NO: 21854 - RNA, 19 nt, Artificial Sequence
  Description of Artificial Sequence: Synthetic oligonucleotide
uguaaguaguccagugccu

SEQ ID NO: 21855 - RNA, 19 nt, Artificial Sequence
  Description of Artificial Sequence: Synthetic oligonucleotide
uauacacccagaagacucu

SEQ ID NO: 21856 - RNA, 19 nt, Artificial Sequence
  Description of Artificial Sequence: Synthetic oligonucleotide
aagcugagauacaagcguc

SEQ ID NO: 21857 - RNA, 19 nt, Artificial Sequence
  Description of Artificial Sequence: Synthetic oligonucleotide
ggcuauacuuuauguaugg

SEQ ID NO: 21858 - RNA, 19 nt, Artificial Sequence
  Description of Artificial Sequence: Synthetic oligonucleotide
ugguucgagguuuagucac

SEQ ID NO: 21859 - RNA, 19 nt, Artificial Sequence
  Description of Artificial Sequence: Synthetic oligonucleotide
gccacuuuguuuuaaggag

SEQ ID NO: 21860 - RNA, 19 nt, Artificial Sequence
  Description of Artificial Sequence: Synthetic oligonucleotide
agauugcuagaacugacaa

SEQ ID NO: 21861 - RNA, 19 nt, Artificial Sequence
  Description of Artificial Sequence: Synthetic oligonucleotide
cuagcaucgucaucauccg

SEQ ID NO: 21862 - RNA, 19 nt, Artificial Sequence
  Description of Artificial Sequence: Synthetic oligonucleotide
ugaagacucuggcugacuc

SEQ ID NO: 21863 - RNA, 19 nt, Artificial Sequence
  Description of Artificial Sequence: Synthetic oligonucleotide
aaccaguaaucuuguuaag

SEQ ID NO: 21864 - RNA, 19 nt, Artificial Sequence
  Description of Artificial Sequence: Synthetic oligonucleotide
ugaaaucgccugcuccagg

SEQ ID NO: 21865 - RNA, 19 nt, Artificial Sequence
  Description of Artificial Sequence: Synthetic oligonucleotide
uuuacucuucgcugcagcu

SEQ ID NO: 21866 - RNA, 19 nt, Artificial Sequence
  Description of Artificial Sequence: Synthetic oligonucleotide
aagcgucaaauccuuggcu

SEQ ID NO: 21867 - RNA, 19 nt, Artificial Sequence
  Description of Artificial Sequence: Synthetic oligonucleotide
uuucgauauuccagcagcu

SEQ ID NO: 21868 - RNA, 19 nt, Artificial Sequence
  Description of Artificial Sequence: Synthetic oligonucleotide
aacggauuacuccaucaua

SEQ ID NO: 21869 - RNA, 19 nt, Artificial Sequence
  Description of Artificial Sequence: Synthetic oligonucleotide
uuuuaggauauguguaaua

SEQ ID NO: 21870 - RNA, 19 nt, Artificial Sequence
  Description of Artificial Sequence: Synthetic oligonucleotide
ucgauaggacaacaccagc

SEQ ID NO: 21871 - RNA, 19 nt, Artificial Sequence
  Description of Artificial Sequence: Synthetic oligonucleotide
uucuucgaaacugcuagca

SEQ ID NO: 21872 - RNA, 19 nt, Artificial Sequence
  Description of Artificial Sequence: Synthetic oligonucleotide
agugagauuuccauuguca

SEQ ID NO: 21873 - RNA, 19 nt, Artificial Sequence
  Description of Artificial Sequence: Synthetic oligonucleotide
ccacucaucguaacgaugg

SEQ ID NO: 21874 - RNA, 19 nt, Artificial Sequence
  Description of Artificial Sequence: Synthetic oligonucleotide
uguugcacugugcucuucu

SEQ ID NO: 21875 - RNA, 19 nt, Artificial Sequence
  Description of Artificial Sequence: Synthetic oligonucleotide
guacguugacuauucaaac

SEQ ID NO: 21876 - RNA, 19 nt, Artificial Sequence
  Description of Artificial Sequence: Synthetic oligonucleotide
ggcuccaacgcucaaaaug

SEQ ID NO: 21877 - RNA, 19 nt, Artificial Sequence
  Description of Artificial Sequence: Synthetic oligonucleotide
guauggugaucuuuggcac

SEQ ID NO: 21878 - RNA, 19 nt, Artificial Sequence
  Description of Artificial Sequence: Synthetic oligonucleotide
acagauugcuagaacugac

SEQ ID NO: 21879 - RNA, 19 nt, Artificial Sequence
  Description of Artificial Sequence: Synthetic oligonucleotide
guuuagguaucacaaguaa

SEQ ID NO: 21880 - RNA, 19 nt, Artificial Sequence
  Description of Artificial Sequence: Synthetic oligonucleotide
ucaucguaacgauggcucc

SEQ ID NO: 21881 - RNA, 19 nt, Artificial Sequence
  Description of Artificial Sequence: Synthetic oligonucleotide
guuagaauuccacaauugu

SEQ ID NO: 21882 - RNA, 19 nt, Artificial Sequence
  Description of Artificial Sequence: Synthetic oligonucleotide
ucauaacgauauuuugcac

SEQ ID NO: 21883 - RNA, 19 nt, Artificial Sequence
  Description of Artificial Sequence: Synthetic oligonucleotide
uccaacgcucaaaauggac

SEQ ID NO: 21884 - RNA, 19 nt, Artificial Sequence
  Description of Artificial Sequence: Synthetic oligonucleotide
ggcuaugcaagcuggaggc

SEQ ID NO: 21885 - RNA, 19 nt, Artificial Sequence
  Description of Artificial Sequence: Synthetic oligonucleotide
cauaacgauauuuugcacu

SEQ ID NO: 21886 - RNA, 19 nt, Artificial Sequence
  Description of Artificial Sequence: Synthetic oligonucleotide
uguuaaccccgauuugugu

SEQ ID NO: 21887 - RNA, 19 nt, Artificial Sequence
  Description of Artificial Sequence: Synthetic oligonucleotide
gguaucacaaguaaauaca

SEQ ID NO: 21888 - RNA, 19 nt, Artificial Sequence
  Description of Artificial Sequence: Synthetic oligonucleotide
acgcucaaaauggacuagc

SEQ ID NO: 21889 - RNA, 19 nt, Artificial Sequence
  Description of Artificial Sequence: Synthetic oligonucleotide
auaccugcgcauguggcac

SEQ ID NO: 21890 - RNA, 19 nt, Artificial Sequence
  Description of Artificial Sequence: Synthetic oligonucleotide
cucacuucccauagacggg

SEQ ID NO: 21891 - RNA, 19 nt, Artificial Sequence
  Description of Artificial Sequence: Synthetic oligonucleotide
uuaggauauguguaauauu

SEQ ID NO: 21892 - RNA, 19 nt, Artificial Sequence
  Description of Artificial Sequence: Synthetic oligonucleotide
uguuaagucgugcucucuu

SEQ ID NO: 21893 - RNA, 19 nt, Artificial Sequence
  Description of Artificial Sequence: Synthetic oligonucleotide
caggguaauagcgacaguc

SEQ ID NO: 21894 - RNA, 19 nt, Artificial Sequence
  Description of Artificial Sequence: Synthetic oligonucleotide
caaggggacgcacuuacac

SEQ ID NO: 21895 - RNA, 19 nt, Artificial Sequence
  Description of Artificial Sequence: Synthetic oligonucleotide
agacaguaggaccuaggcu

SEQ ID NO: 21896 - RNA, 19 nt, Artificial Sequence
  Description of Artificial Sequence: Synthetic oligonucleotide
uccacucaucguaacgaug

SEQ ID NO: 21897 - RNA, 19 nt, Artificial Sequence
  Description of Artificial Sequence: Synthetic oligonucleotide
ucccgcagaaguuuaaaua

SEQ ID NO: 21898 - RNA, 19 nt, Artificial Sequence
  Description of Artificial Sequence: Synthetic oligonucleotide
cauacuacugaugucacaa

SEQ ID NO: 21899 - RNA, 19 nt, Artificial Sequence
  Description of Artificial Sequence: Synthetic oligonucleotide
ucccaguaaauccacucau

SEQ ID NO: 21900 - RNA, 19 nt, Artificial Sequence
  Description of Artificial Sequence: Synthetic oligonucleotide
acgagcaccaaucuacaaa

SEQ ID NO: 21901 - RNA, 19 nt, Artificial Sequence
  Description of Artificial Sequence: Synthetic oligonucleotide
aggacuaguuuuauuuauc

SEQ ID NO: 21902 - RNA, 19 nt, Artificial Sequence
  Description of Artificial Sequence: Synthetic oligonucleotide
gguuuagucacuguuuuac

SEQ ID NO: 21903 - RNA, 19 nt, Artificial Sequence
  Description of Artificial Sequence: Synthetic oligonucleotide
ucgcaguagauuccaauua

SEQ ID NO: 21904 - RNA, 19 nt, Artificial Sequence
  Description of Artificial Sequence: Synthetic oligonucleotide
aagaugccauacuacugau

SEQ ID NO: 21905 - RNA, 19 nt, Artificial Sequence
  Description of Artificial Sequence: Synthetic oligonucleotide
gcaaguggugacuuagggg

SEQ ID NO: 21906 - RNA, 19 nt, Artificial Sequence
  Description of Artificial Sequence: Synthetic oligonucleotide
auguacguugacuauucaa

SEQ ID NO: 21907 - RNA, 19 nt, Artificial Sequence
  Description of Artificial Sequence: Synthetic oligonucleotide
caagccacuuuguuuuaag

SEQ ID NO: 21908 - RNA, 19 nt, Artificial Sequence
  Description of Artificial Sequence: Synthetic oligonucleotide
aaacuagauaugugugaua

SEQ ID NO: 21909 - RNA, 19 nt, Artificial Sequence
  Description of Artificial Sequence: Synthetic oligonucleotide
aacgcucaaaauggacuag

SEQ ID NO: 21910 - RNA, 19 nt, Artificial Sequence
  Description of Artificial Sequence: Synthetic oligonucleotide
cauuuuauguuaaccccga

SEQ ID NO: 21911 - RNA, 19 nt, Artificial Sequence
  Description of Artificial Sequence: Synthetic oligonucleotide
cacauaccugcgcaugugg

SEQ ID NO: 21912 - RNA, 19 nt, Artificial Sequence
  Description of Artificial Sequence: Synthetic oligonucleotide
uagucuacgcacugauucu

SEQ ID NO: 21913 - RNA, 19 nt, Artificial Sequence
  Description of Artificial Sequence: Synthetic oligonucleotide
guuuguagucuacgcacug

SEQ ID NO: 21914 - RNA, 19 nt, Artificial Sequence
  Description of Artificial Sequence: Synthetic oligonucleotide
uauguacguugacuauuca

SEQ ID NO: 21915 - RNA, 19 nt, Artificial Sequence
  Description of Artificial Sequence: Synthetic oligonucleotide
guaauagcgacagucuguc

SEQ ID NO: 21916 - RNA, 19 nt, Artificial Sequence
  Description of Artificial Sequence: Synthetic oligonucleotide
caauucgugauggauacca

SEQ ID NO: 21917 - RNA, 19 nt, Artificial Sequence
  Description of Artificial Sequence: Synthetic oligonucleotide
ggcaaguggugacuuaggg

SEQ ID NO: 21918 - RNA, 19 nt, Artificial Sequence
  Description of Artificial Sequence: Synthetic oligonucleotide
acuagcaguuauuuauuua

SEQ ID NO: 21919 - RNA, 19 nt, Artificial Sequence
  Description of Artificial Sequence: Synthetic oligonucleotide
gacgcacuuacacauaccu

SEQ ID NO: 21920 - RNA, 19 nt, Artificial Sequence
  Description of Artificial Sequence: Synthetic oligonucleotide
uuauuugguggguuucuua

SEQ ID NO: 21921 - RNA, 19 nt, Artificial Sequence
  Description of Artificial Sequence: Synthetic oligonucleotide
uccagcugggucgauagga

SEQ ID NO: 21922 - RNA, 19 nt, Artificial Sequence
  Description of Artificial Sequence: Synthetic oligonucleotide
uucgauauuccagcagcug

SEQ ID NO: 21923 - RNA, 19 nt, Artificial Sequence
  Description of Artificial Sequence: Synthetic oligonucleotide
aaccccgauuuguguaguc

SEQ ID NO: 21924 - RNA, 19 nt, Artificial Sequence
  Description of Artificial Sequence: Synthetic oligonucleotide
aaguguauccaggaucaaa

SEQ ID NO: 21925 - RNA, 19 nt, Artificial Sequence
  Description of Artificial Sequence: Synthetic oligonucleotide
uguuggcagaacugcuaag

SEQ ID NO: 21926 - RNA, 19 nt, Artificial Sequence
  Description of Artificial Sequence: Synthetic oligonucleotide
aggggacgcacuuacacau

SEQ ID NO: 21927 - RNA, 19 nt, Artificial Sequence
  Description of Artificial Sequence: Synthetic oligonucleotide
acauauguacguugacuau

SEQ ID NO: 21928 - RNA, 19 nt, Artificial Sequence
  Description of Artificial Sequence: Synthetic oligonucleotide
cuacgcacugauucuuggc

SEQ ID NO: 21929 - RNA, 19 nt, Artificial Sequence
  Description of Artificial Sequence: Synthetic oligonucleotide
ugcuccggaaugcuguccu

SEQ ID NO: 21930 - RNA, 19 nt, Artificial Sequence
  Description of Artificial Sequence: Synthetic oligonucleotide
uuacucuucgcugcagcug

SEQ ID NO: 21931 - RNA, 19 nt, Artificial Sequence
  Description of Artificial Sequence: Synthetic oligonucleotide
cuuguuaagucgugcucuc

SEQ ID NO: 21932 - RNA, 19 nt, Artificial Sequence
  Description of Artificial Sequence: Synthetic oligonucleotide
uacagagggcuauacuuua

SEQ ID NO: 21933 - RNA, 19 nt, Artificial Sequence
  Description of Artificial Sequence: Synthetic oligonucleotide
acggauuacuccaucauaa

SEQ ID NO: 21934 - RNA, 19 nt, Artificial Sequence
  Description of Artificial Sequence: Synthetic oligonucleotide
ugccacucaccuacacggg

SEQ ID NO: 21935 - RNA, 19 nt, Artificial Sequence
  Description of Artificial Sequence: Synthetic oligonucleotide
uccaaaugguucacuggau

SEQ ID NO: 21936 - RNA, 19 nt, Artificial Sequence
  Description of Artificial Sequence: Synthetic oligonucleotide
cuuggcaggguaauagcga

SEQ ID NO: 21937 - RNA, 19 nt, Artificial Sequence
  Description of Artificial Sequence: Synthetic oligonucleotide
cacgugguguacaggacug

SEQ ID NO: 21938 - RNA, 19 nt, Artificial Sequence
  Description of Artificial Sequence: Synthetic oligonucleotide
uacuuuauguauggugauc

SEQ ID NO: 21939 - RNA, 19 nt, Artificial Sequence
  Description of Artificial Sequence: Synthetic oligonucleotide
gggucgauaggacaacacc

SEQ ID NO: 21940 - RNA, 19 nt, Artificial Sequence
  Description of Artificial Sequence: Synthetic oligonucleotide
ugggucgauaggacaacac

SEQ ID NO: 21941 - RNA, 19 nt, Artificial Sequence
  Description of Artificial Sequence: Synthetic oligonucleotide
guuaaccccgauuugugua

SEQ ID NO: 21942 - RNA, 19 nt, Artificial Sequence
  Description of Artificial Sequence: Synthetic oligonucleotide
agucgugcucucuuugccu

SEQ ID NO: 21943 - RNA, 19 nt, Artificial Sequence
  Description of Artificial Sequence: Synthetic oligonucleotide
auaggacaacaccagcuua

SEQ ID NO: 21944 - RNA, 19 nt, Artificial Sequence
  Description of Artificial Sequence: Synthetic oligonucleotide
uauucccggaagcuggauu

SEQ ID NO: 21945 - RNA, 19 nt, Artificial Sequence
  Description of Artificial Sequence: Synthetic oligonucleotide
gagggcuauacuuuaugua

SEQ ID NO: 21946 - RNA, 19 nt, Artificial Sequence
  Description of Artificial Sequence: Synthetic oligonucleotide
guguucacuuguuauguaa

SEQ ID NO: 21947 - RNA, 19 nt, Artificial Sequence
  Description of Artificial Sequence: Synthetic oligonucleotide
gcguacauacggcaggcgg

SEQ ID NO: 21948 - RNA, 19 nt, Artificial Sequence
  Description of Artificial Sequence: Synthetic oligonucleotide
cugagaacccugccaauuc

SEQ ID NO: 21949 - RNA, 19 nt, Artificial Sequence
  Description of Artificial Sequence: Synthetic oligonucleotide
caaauccucuuuccagcag

SEQ ID NO: 21950 - RNA, 19 nt, Artificial Sequence
  Description of Artificial Sequence: Synthetic oligonucleotide
ggugcacacaacucgcacc

SEQ ID NO: 21951 - RNA, 19 nt, Artificial Sequence
  Description of Artificial Sequence: Synthetic oligonucleotide
cagagggcuauacuuuaug

SEQ ID NO: 21952 - RNA, 19 nt, Artificial Sequence
  Description of Artificial Sequence: Synthetic oligonucleotide
cagaacucgaguuuccuua

SEQ ID NO: 21953 - RNA, 19 nt, Artificial Sequence
  Description of Artificial Sequence: Synthetic oligonucleotide
aaguaaauacagagggcua

SEQ ID NO: 21954 - RNA, 19 nt, Artificial Sequence
  Description of Artificial Sequence: Synthetic oligonucleotide
cacuuacacauaccugcgc

SEQ ID NO: 21955 - RNA, 19 nt, Artificial Sequence
  Description of Artificial Sequence: Synthetic oligonucleotide
ccauagacggguuacacga

SEQ ID NO: 21956 - RNA, 19 nt, Artificial Sequence
  Description of Artificial Sequence: Synthetic oligonucleotide
cuauauaagcacaccgugu

SEQ ID NO: 21957 - RNA, 19 nt, Artificial Sequence
  Description of Artificial Sequence: Synthetic oligonucleotide
auuugguggguuucuuaaa

SEQ ID NO: 21958 - RNA, 19 nt, Artificial Sequence
  Description of Artificial Sequence: Synthetic oligonucleotide
cagauugcuagaacugaca

SEQ ID NO: 21959 - RNA, 19 nt, Artificial Sequence
  Description of Artificial Sequence: Synthetic oligonucleotide
ugggcuaauggcguugcgu

SEQ ID NO: 21960 - RNA, 19 nt, Artificial Sequence
  Description of Artificial Sequence: Synthetic oligonucleotide
agguacuuuaaaccauuuu

SEQ ID NO: 21961 - RNA, 19 nt, Artificial Sequence
  Description of Artificial Sequence: Synthetic oligonucleotide
uuucccucugaguuagcua

SEQ ID NO: 21962 - RNA, 19 nt, Artificial Sequence
  Description of Artificial Sequence: Synthetic oligonucleotide
uugcguacauacggcaggc

SEQ ID NO: 21963 - RNA, 19 nt, Artificial Sequence
  Description of Artificial Sequence: Synthetic oligonucleotide
gauaggacaacaccagcuu

SEQ ID NO: 21964 - RNA, 19 nt, Artificial Sequence
  Description of Artificial Sequence: Synthetic oligonucleotide
ucuuagcgcaggucucuca

SEQ ID NO: 21965 - RNA, 19 nt, Artificial Sequence
  Description of Artificial Sequence: Synthetic oligonucleotide
ugugagagacuggcagucc

SEQ ID NO: 21966 - RNA, 19 nt, Artificial Sequence
  Description of Artificial Sequence: Synthetic oligonucleotide
  modified_base (6)..(6): a, c, u, g, unknown or other
caagcncuuuugcugagga

SEQ ID NO: 21967 - RNA, 19 nt, Artificial Sequence
  Description of Artificial Sequence: Synthetic oligonucleotide
uguagucuacgcacugauu

SEQ ID NO: 21968 - RNA, 19 nt, Artificial Sequence
  Description of Artificial Sequence: Synthetic oligonucleotide
cugaguuagcuauguccug

SEQ ID NO: 21969 - RNA, 19 nt, Artificial Sequence
  Description of Artificial Sequence: Synthetic oligonucleotide
uguguucacuuguuaugua

SEQ ID NO: 21970 - RNA, 19 nt, Artificial Sequence
  Description of Artificial Sequence: Synthetic oligonucleotide
gaguuuauacagauugcua

SEQ ID NO: 21971 - RNA, 19 nt, Artificial Sequence
  Description of Artificial Sequence: Synthetic oligonucleotide
aggguaauagcgacagucu

SEQ ID NO: 21972 - RNA, 19 nt, Artificial Sequence
  Description of Artificial Sequence: Synthetic oligonucleotide
uucggcaagccacuuuguu

SEQ ID NO: 21973 - RNA, 19 nt, Artificial Sequence
  Description of Artificial Sequence: Synthetic oligonucleotide
auuuuauguuaaccccgau

SEQ ID NO: 21974 - RNA, 19 nt, Artificial Sequence
  Description of Artificial Sequence: Synthetic oligonucleotide
gucuaugugaaguccaaau

SEQ ID NO: 21975 - RNA, 19 nt, Artificial Sequence
  Description of Artificial Sequence: Synthetic oligonucleotide
agcugaaauuuuaggauau

SEQ ID NO: 21976 - RNA, 19 nt, Artificial Sequence
  Description of Artificial Sequence: Synthetic oligonucleotide
aaagugauuccaggacgau

SEQ ID NO: 21977 - RNA, 19 nt, Artificial Sequence
  Description of Artificial Sequence: Synthetic oligonucleotide
auuucaagaccuguacaua

SEQ ID NO: 21978 - RNA, 19 nt, Artificial Sequence
  Description of Artificial Sequence: Synthetic oligonucleotide
ggucgauaggacaacacca

SEQ ID NO: 21979 - RNA, 19 nt, Artificial Sequence
  Description of Artificial Sequence: Synthetic oligonucleotide
acucaucguaacgauggcu

SEQ ID NO: 21980 - RNA, 19 nt, Artificial Sequence
  Description of Artificial Sequence: Synthetic oligonucleotide
gcugccacucaccuacacg

SEQ ID NO: 21981 - RNA, 19 nt, Artificial Sequence
  Description of Artificial Sequence: Synthetic oligonucleotide
cuacuuagaucaagaggga

SEQ ID NO: 21982 - RNA, 19 nt, Artificial Sequence
  Description of Artificial Sequence: Synthetic oligonucleotide
guggcuaugcaagcuggag

SEQ ID NO: 21983 - RNA, 19 nt, Artificial Sequence
  Description of Artificial Sequence: Synthetic oligonucleotide
aucccgcagaaguuuaaau

SEQ ID NO: 21984 - RNA, 19 nt, Artificial Sequence
  Description of Artificial Sequence: Synthetic oligonucleotide
gccaaaugcugguuuauca

SEQ ID NO: 21985 - RNA, 19 nt, Artificial Sequence
  Description of Artificial Sequence: Synthetic oligonucleotide
gguuuaucaacaugggcgu

SEQ ID NO: 21986 - RNA, 19 nt, Artificial Sequence
  Description of Artificial Sequence: Synthetic oligonucleotide
ucccauagacggguuacac

SEQ ID NO: 21987 - RNA, 19 nt, Artificial Sequence
  Description of Artificial Sequence: Synthetic oligonucleotide
uucgagguuuagucacugu

SEQ ID NO: 21988 - RNA, 19 nt, Artificial Sequence
  Description of Artificial Sequence: Synthetic oligonucleotide
ugacaagguuuagguauca

SEQ ID NO: 21989 - RNA, 19 nt, Artificial Sequence
  Description of Artificial Sequence: Synthetic oligonucleotide
gacgaucuuuggaacgcug

SEQ ID NO: 21990 - RNA, 19 nt, Artificial Sequence
  Description of Artificial Sequence: Synthetic oligonucleotide
ugggcgucucuucuagaaa

SEQ ID NO: 21991 - RNA, 19 nt, Artificial Sequence
  Description of Artificial Sequence: Synthetic oligonucleotide
uuagaucaagagggagaca

SEQ ID NO: 21992 - RNA, 19 nt, Artificial Sequence
  Description of Artificial Sequence: Synthetic oligonucleotide
gagguuuagucacuguuuu

SEQ ID NO: 21993 - RNA, 19 nt, Artificial Sequence
  Description of Artificial Sequence: Synthetic oligonucleotide
aauucgugauggauaccau

SEQ ID NO: 21994 - RNA, 19 nt, Artificial Sequence
  Description of Artificial Sequence: Synthetic oligonucleotide
auccacucaucguaacgau

SEQ ID NO: 21995 - RNA, 19 nt, Artificial Sequence
  Description of Artificial Sequence: Synthetic oligonucleotide
auacagagggcuauacuuu

SEQ ID NO: 21996 - RNA, 19 nt, Artificial Sequence
  Description of Artificial Sequence: Synthetic oligonucleotide
ugcguacauacggcaggcg

SEQ ID NO: 21997 - RNA, 19 nt, Artificial Sequence
  Description of Artificial Sequence: Synthetic oligonucleotide
cccauagacggguuacacg

SEQ ID NO: 21998 - RNA, 19 nt, Artificial Sequence
  Description of Artificial Sequence: Synthetic oligonucleotide
ugaucccgcagaaguuuaa

SEQ ID NO: 21999 - RNA, 19 nt, Artificial Sequence
  Description of Artificial Sequence: Synthetic oligonucleotide
agacggguuacacgaucca

SEQ ID NO: 22000 - RNA, 19 nt, Artificial Sequence
  Description of Artificial Sequence: Synthetic oligonucleotide
auggcguugcguacauacg

SEQ ID NO: 22001 - RNA, 19 nt, Artificial Sequence
  Description of Artificial Sequence: Synthetic oligonucleotide
ugucuaugugaaguccaaa

SEQ ID NO: 22002 - RNA, 19 nt, Artificial Sequence
  Description of Artificial Sequence: Synthetic oligonucleotide
cacucaucguaacgauggc

SEQ ID NO: 22003 - RNA, 19 nt, Artificial Sequence
  Description of Artificial Sequence: Synthetic oligonucleotide
aaacaacggauuacuccau

SEQ ID NO: 22004 - RNA, 19 nt, Artificial Sequence
  Description of Artificial Sequence: Synthetic oligonucleotide
ggcuuuaaugugcauccuc

SEQ ID NO: 22005 - RNA, 19 nt, Artificial Sequence
  Description of Artificial Sequence: Synthetic oligonucleotide
guaggaccuaggcucaaaa

SEQ ID NO: 22006 - RNA, 19 nt, Artificial Sequence
  Description of Artificial Sequence: Synthetic oligonucleotide
gccacucaccuacacgggg

SEQ ID NO: 22007 - RNA, 19 nt, Artificial Sequence
  Description of Artificial Sequence: Synthetic oligonucleotide
aaguggugacuuaggggcu

SEQ ID NO: 22008 - RNA, 19 nt, Artificial Sequence
  Description of Artificial Sequence: Synthetic oligonucleotide
ccguguuucugucuauagg

SEQ ID NO: 22009 - RNA, 19 nt, Artificial Sequence
  Description of Artificial Sequence: Synthetic oligonucleotide
guucgagguuuagucacug

SEQ ID NO: 22010 - RNA, 19 nt, Artificial Sequence
  Description of Artificial Sequence: Synthetic oligonucleotide
acgaucuuuggaacgcugu

SEQ ID NO: 22011 - RNA, 19 nt, Artificial Sequence
  Description of Artificial Sequence: Synthetic oligonucleotide
auacggcaggcggaaggac

SEQ ID NO: 22012 - RNA, 19 nt, Artificial Sequence
  Description of Artificial Sequence: Synthetic oligonucleotide
uuguuaagucgugcucucu

SEQ ID NO: 22013 - RNA, 19 nt, Artificial Sequence
  Description of Artificial Sequence: Synthetic oligonucleotide
cuugcugcgagccuucccu

SEQ ID NO: 22014 - RNA, 19 nt, Artificial Sequence
  Description of Artificial Sequence: Synthetic oligonucleotide
cuuagcgcaggucucucaa

SEQ ID NO: 22015 - RNA, 19 nt, Artificial Sequence
  Description of Artificial Sequence: Synthetic oligonucleotide
gggacgcacuuacacauac

SEQ ID NO: 22016 - RNA, 19 nt, Artificial Sequence
  Description of Artificial Sequence: Synthetic oligonucleotide
auucaucacccaagaacca

SEQ ID NO: 22017 - RNA, 19 nt, Artificial Sequence
  Description of Artificial Sequence: Synthetic oligonucleotide
  modified_base (3)..(3): a, c, u, g, unknown or other
gcncuuuugcugaggacag

SEQ ID NO: 22018 - RNA, 19 nt, Artificial Sequence
  Description of Artificial Sequence: Synthetic oligonucleotide
cccgcagaaguuuaaauaa

SEQ ID NO: 22019 - RNA, 19 nt, Artificial Sequence
  Description of Artificial Sequence: Synthetic oligonucleotide
agguuuagucacuguuuua

SEQ ID NO: 22020 - RNA, 19 nt, Artificial Sequence
  Description of Artificial Sequence: Synthetic oligonucleotide
ugcuaaggacagcuucauu

SEQ ID NO: 22021 - RNA, 19 nt, Artificial Sequence
  Description of Artificial Sequence: Synthetic oligonucleotide
gaacaguguguuugcaaau

SEQ ID NO: 22022 - RNA, 19 nt, Artificial Sequence
  Description of Artificial Sequence: Synthetic oligonucleotide
gggcuauacuuuauguaug

SEQ ID NO: 22023 - RNA, 19 nt, Artificial Sequence
  Description of Artificial Sequence: Synthetic oligonucleotide
ggcggaaggacuccuguga

SEQ ID NO: 22024 - RNA, 19 nt, Artificial Sequence
  Description of Artificial Sequence: Synthetic oligonucleotide
aagguccggaugauguuua

SEQ ID NO: 22025 - RNA, 19 nt, Artificial Sequence
  Description of Artificial Sequence: Synthetic oligonucleotide
accccgauuuguguagucu

SEQ ID NO: 22026 - RNA, 19 nt, Artificial Sequence
  Description of Artificial Sequence: Synthetic oligonucleotide
cgauauuuugcacuccauc

SEQ ID NO: 22027 - RNA, 19 nt, Artificial Sequence
  Description of Artificial Sequence: Synthetic oligonucleotide
acucaccuacacggggcac

SEQ ID NO: 22028 - RNA, 19 nt, Artificial Sequence
  Description of Artificial Sequence: Synthetic oligonucleotide
gucuacgcacugauucuug

SEQ ID NO: 22029 - RNA, 19 nt, Artificial Sequence
  Description of Artificial Sequence: Synthetic oligonucleotide
ucgugcucucuuugccuga

SEQ ID NO: 22030 - RNA, 19 nt, Artificial Sequence
  Description of Artificial Sequence: Synthetic oligonucleotide
cugucuaugugaaguccaa

SEQ ID NO: 22031 - RNA, 19 nt, Artificial Sequence
  Description of Artificial Sequence: Synthetic oligonucleotide
acgugguguacaggacugg

SEQ ID NO: 22032 - RNA, 19 nt, Artificial Sequence
  Description of Artificial Sequence: Synthetic oligonucleotide
acgcacuuacacauaccug

SEQ ID NO: 22033 - RNA, 19 nt, Artificial Sequence
  Description of Artificial Sequence: Synthetic oligonucleotide
ccacucaccuacacggggc

SEQ ID NO: 22034 - RNA, 19 nt, Artificial Sequence
  Description of Artificial Sequence: Synthetic oligonucleotide
cacaccguguuucugucua

SEQ ID NO: 22035 - RNA, 19 nt, Artificial Sequence
  Description of Artificial Sequence: Synthetic oligonucleotide
ucguaacgauggcuccaac

SEQ ID NO: 22036 - RNA, 19 nt, Artificial Sequence
  Description of Artificial Sequence: Synthetic oligonucleotide
agucuacgcacugauucuu

SEQ ID NO: 22037 - RNA, 19 nt, Artificial Sequence
  Description of Artificial Sequence: Synthetic oligonucleotide
ggacuugcaaacagcugug

SEQ ID NO: 22038 - RNA, 19 nt, Artificial Sequence
  Description of Artificial Sequence: Synthetic oligonucleotide
gcacugauucuuggcauag

SEQ ID NO: 22039 - RNA, 19 nt, Artificial Sequence
  Description of Artificial Sequence: Synthetic oligonucleotide
cuguguucacuuguuaugu

SEQ ID NO: 22040 - RNA, 19 nt, Artificial Sequence
  Description of Artificial Sequence: Synthetic oligonucleotide
cauacggcaggcggaagga

SEQ ID NO: 22041 - RNA, 19 nt, Artificial Sequence
  Description of Artificial Sequence: Synthetic oligonucleotide
agacgaucuuuggaacgcu

SEQ ID NO: 22042 - RNA, 19 nt, Artificial Sequence
  Description of Artificial Sequence: Synthetic oligonucleotide
cucgcaguagauuccaauu

SEQ ID NO: 22043 - RNA, 19 nt, Artificial Sequence
  Description of Artificial Sequence: Synthetic oligonucleotide
gcugaaauuuuaggauaug

SEQ ID NO: 22044 - RNA, 19 nt, Artificial Sequence
  Description of Artificial Sequence: Synthetic oligonucleotide
uucuuagcgcaggucucuc

SEQ ID NO: 22045 - RNA, 19 nt, Artificial Sequence
  Description of Artificial Sequence: Synthetic oligonucleotide
gcuuuaaugugcauccucu

SEQ ID NO: 22046 - RNA, 19 nt, Artificial Sequence
  Description of Artificial Sequence: Synthetic oligonucleotide
guacauacggcaggcggaa

SEQ ID NO: 22047 - RNA, 19 nt, Artificial Sequence
  Description of Artificial Sequence: Synthetic oligonucleotide
gcuaauggcguugcguaca

SEQ ID NO: 22048 - RNA, 19 nt, Artificial Sequence
  Description of Artificial Sequence: Synthetic oligonucleotide
ggcguugcguacauacggc

SEQ ID NO: 22049 - RNA, 19 nt, Artificial Sequence
  Description of Artificial Sequence: Synthetic oligonucleotide
guuaagucgugcucucuuu

SEQ ID NO: 22050 - RNA, 19 nt, Artificial Sequence
  Description of Artificial Sequence: Synthetic oligonucleotide
ggcuaauggcguugcguac

SEQ ID NO: 22051 - RNA, 19 nt, Artificial Sequence
  Description of Artificial Sequence: Synthetic oligonucleotide
ucgaaacugcuagcaucgu

SEQ ID NO: 22052 - RNA, 19 nt, Artificial Sequence
  Description of Artificial Sequence: Synthetic oligonucleotide
uuauucccggaagcuggau

SEQ ID NO: 22053 - RNA, 19 nt, Artificial Sequence
  Description of Artificial Sequence: Synthetic oligonucleotide
cuacuagcaguuauuuauu

SEQ ID NO: 22054 - RNA, 19 nt, Artificial Sequence
  Description of Artificial Sequence: Synthetic oligonucleotide
gggugcacacaacucgcac

SEQ ID NO: 22055 - RNA, 19 nt, Artificial Sequence
  Description of Artificial Sequence: Synthetic oligonucleotide
ugcucgcaguagauuccaa

SEQ ID NO: 22056 - RNA, 19 nt, Artificial Sequence
  Description of Artificial Sequence: Synthetic oligonucleotide
cauauguacguugacuauu

SEQ ID NO: 22057 - RNA, 19 nt, Artificial Sequence
  Description of Artificial Sequence: Synthetic oligonucleotide
  modified_base (7)..(7): a, c, u, g, unknown or other
ccaagcncuuuugcugagg

SEQ ID NO: 22058 - RNA, 19 nt, Artificial Sequence
  Description of Artificial Sequence: Synthetic oligonucleotide
ccaacgcucaaaauggacu

SEQ ID NO: 22059 - RNA, 19 nt, Artificial Sequence
  Description of Artificial Sequence: Synthetic oligonucleotide
acgauauuuugcacuccau

SEQ ID NO: 22060 - RNA, 19 nt, Artificial Sequence
  Description of Artificial Sequence: Synthetic oligonucleotide
cacucaccuacacggggca

SEQ ID NO: 22061 - RNA, 19 nt, Artificial Sequence
  Description of Artificial Sequence: Synthetic oligonucleotide
ucucccggagggucccgac

SEQ ID NO: 22062 - RNA, 19 nt, Artificial Sequence
  Description of Artificial Sequence: Synthetic oligonucleotide
ggaacgcugucuaugugaa

SEQ ID NO: 22063 - RNA, 19 nt, Artificial Sequence
  Description of Artificial Sequence: Synthetic oligonucleotide
ggguuacacgauccagcug

SEQ ID NO: 22064 - RNA, 19 nt, Artificial Sequence
  Description of Artificial Sequence: Synthetic oligonucleotide
cugcuccggaaugcugucc

SEQ ID NO: 22065 - RNA, 19 nt, Artificial Sequence
  Description of Artificial Sequence: Synthetic oligonucleotide
gagaccaaaugcaguuggu

SEQ ID NO: 22066 - RNA, 19 nt, Artificial Sequence
  Description of Artificial Sequence: Synthetic oligonucleotide
gugguguguggagacuauc

SEQ ID NO: 22067 - RNA, 19 nt, Artificial Sequence
  Description of Artificial Sequence: Synthetic oligonucleotide
uagcgacagucuguccaac

SEQ ID NO: 22068 - RNA, 19 nt, Artificial Sequence
  Description of Artificial Sequence: Synthetic oligonucleotide
augaucccgcagaaguuua

SEQ ID NO: 22069 - RNA, 19 nt, Artificial Sequence
  Description of Artificial Sequence: Synthetic oligonucleotide
cugggugggcuaauggcgu

SEQ ID NO: 22070 - RNA, 19 nt, Artificial Sequence
  Description of Artificial Sequence: Synthetic oligonucleotide
aggggcuuuuauacaccca

SEQ ID NO: 22071 - RNA, 19 nt, Artificial Sequence
  Description of Artificial Sequence: Synthetic oligonucleotide
ggcuguggaaagacgaucu

SEQ ID NO: 22072 - RNA, 19 nt, Artificial Sequence
  Description of Artificial Sequence: Synthetic oligonucleotide
gacuugcaaacagcugugu

SEQ ID NO: 22073 - RNA, 19 nt, Artificial Sequence
  Description of Artificial Sequence: Synthetic oligonucleotide
cagcaauaagaaggucuca

SEQ ID NO: 22074 - RNA, 19 nt, Artificial Sequence
  Description of Artificial Sequence: Synthetic oligonucleotide
gaaccacuacuuagaucaa

SEQ ID NO: 22075 - RNA, 19 nt, Artificial Sequence
  Description of Artificial Sequence: Synthetic oligonucleotide
gccauacuacugaugucac

SEQ ID NO: 22076 - RNA, 19 nt, Artificial Sequence
  Description of Artificial Sequence: Synthetic oligonucleotide
ggacgcacuuacacauacc

SEQ ID NO: 22077 - RNA, 19 nt, Artificial Sequence
  Description of Artificial Sequence: Synthetic oligonucleotide
cugggucgauaggacaaca

SEQ ID NO: 22078 - RNA, 19 nt, Artificial Sequence
  Description of Artificial Sequence: Synthetic oligonucleotide
caccccgacagcuuuggau

SEQ ID NO: 22079 - RNA, 19 nt, Artificial Sequence
  Description of Artificial Sequence: Synthetic oligonucleotide
gcacgugguguacaggacu

SEQ ID NO: 22080 - RNA, 19 nt, Artificial Sequence
  Description of Artificial Sequence: Synthetic oligonucleotide
cccggaagcuggauucuuc

SEQ ID NO: 22081 - RNA, 19 nt, Artificial Sequence
  Description of Artificial Sequence: Synthetic oligonucleotide
cauagacggguuacacgau

SEQ ID NO: 22082 - RNA, 19 nt, Artificial Sequence
  Description of Artificial Sequence: Synthetic oligonucleotide
gcugggucgauaggacaac

SEQ ID NO: 22083 - RNA, 19 nt, Artificial Sequence
  Description of Artificial Sequence: Synthetic oligonucleotide
ccaacuacuaucugaucuu

SEQ ID NO: 22084 - RNA, 19 nt, Artificial Sequence
  Description of Artificial Sequence: Synthetic oligonucleotide
ccaauuauuugguggguuu

SEQ ID NO: 22085 - RNA, 19 nt, Artificial Sequence
  Description of Artificial Sequence: Synthetic oligonucleotide
caucggcaagcagguggug

SEQ ID NO: 22086 - RNA, 19 nt, Artificial Sequence
  Description of Artificial Sequence: Synthetic oligonucleotide
cuucggcaagccacuuugu

SEQ ID NO: 22087 - RNA, 19 nt, Artificial Sequence
  Description of Artificial Sequence: Synthetic oligonucleotide
cacugguucgagguuuagu

SEQ ID NO: 22088 - RNA, 19 nt, Artificial Sequence
  Description of Artificial Sequence: Synthetic oligonucleotide
caaguguauccaggaucaa

SEQ ID NO: 22089 - RNA, 19 nt, Artificial Sequence
  Description of Artificial Sequence: Synthetic oligonucleotide
caccguguuucugucuaua

SEQ ID NO: 22090 - RNA, 19 nt, Artificial Sequence
  Description of Artificial Sequence: Synthetic oligonucleotide
ccccgauuuguguagucua

SEQ ID NO: 22091 - RNA, 19 nt, Artificial Sequence
  Description of Artificial Sequence: Synthetic oligonucleotide
cuucuccgcucacuaugcu

SEQ ID NO: 22092 - RNA, 19 nt, Artificial Sequence
  Description of Artificial Sequence: Synthetic oligonucleotide
gcacugguucgagguuuag

SEQ ID NO: 22093 - RNA, 19 nt, Artificial Sequence
  Description of Artificial Sequence: Synthetic oligonucleotide
cggauuacuccaucauaaa

SEQ ID NO: 22094 - RNA, 19 nt, Artificial Sequence
  Description of Artificial Sequence: Synthetic oligonucleotide
ccggaugauguuuauucuu

SEQ ID NO: 22095 - RNA, 19 nt, Artificial Sequence
  Description of Artificial Sequence: Synthetic oligonucleotide
ccggaagcuggauucuucu

SEQ ID NO: 22096 - RNA, 19 nt, Artificial Sequence
  Description of Artificial Sequence: Synthetic oligonucleotide
cggaugauguuuauucuuu

SEQ ID NO: 22097 - RNA, 19 nt, Artificial Sequence
  Description of Artificial Sequence: Synthetic oligonucleotide
gggccgcaaccuguugcug

SEQ ID NO: 22098 - RNA, 19 nt, Artificial Sequence
  Description of Artificial Sequence: Synthetic oligonucleotide
ccgacagcuuuggaugcca

SEQ ID NO: 22099 - RNA, 19 nt, Artificial Sequence
  Description of Artificial Sequence: Synthetic oligonucleotide
ccgauuuguguagucuaua

SEQ ID NO: 22100 - RNA, 19 nt, Artificial Sequence
  Description of Artificial Sequence: Synthetic oligonucleotide
acgcugccacucaccuaca

SEQ ID NO: 22101 - RNA, 19 nt, Artificial Sequence
  Description of Artificial Sequence: Synthetic oligonucleotide
acgauccagcugggucgau

SEQ ID NO: 22102 - RNA, 19 nt, Artificial Sequence
  Description of Artificial Sequence: Synthetic oligonucleotide
ggggacgcacuuacacaua

SEQ ID NO: 22103 - RNA, 19 nt, Artificial Sequence
  Description of Artificial Sequence: Synthetic oligonucleotide
gguccggaugauguuuauu

SEQ ID NO: 22104 - RNA, 19 nt, Artificial Sequence
  Description of Artificial Sequence: Synthetic oligonucleotide
ccuacacggggcacacacu

SEQ ID NO: 22105 - RNA, 19 nt, Artificial Sequence
  Description of Artificial Sequence: Synthetic oligonucleotide
gcccuucggcaagccacuu

SEQ ID NO: 22106 - RNA, 19 nt, Artificial Sequence
  Description of Artificial Sequence: Synthetic oligonucleotide
aauacauauauauauauuu

SEQ ID NO: 22107 - RNA, 19 nt, Artificial Sequence
  Description of Artificial Sequence: Synthetic oligonucleotide
uguaguaccacacagggca

SEQ ID NO: 22108 - RNA, 19 nt, Artificial Sequence
  Description of Artificial Sequence: Synthetic oligonucleotide
uguguaguaccacacaggg

SEQ ID NO: 22109 - RNA, 19 nt, Artificial Sequence
  Description of Artificial Sequence: Synthetic oligonucleotide
uacgcaaaucccuauaagg

SEQ ID NO: 22110 - RNA, 19 nt, Artificial Sequence
  Description of Artificial Sequence: Synthetic oligonucleotide
aaccgugauccacagaugg

SEQ ID NO: 22111 - RNA, 19 nt, Artificial Sequence
  Description of Artificial Sequence: Synthetic oligonucleotide
agaguaaaagcaguaagcg

SEQ ID NO: 22112 - RNA, 19 nt, Artificial Sequence
  Description of Artificial Sequence: Synthetic oligonucleotide
uuugguaugugccacuaug

SEQ ID NO: 22113 - RNA, 19 nt, Artificial Sequence
  Description of Artificial Sequence: Synthetic oligonucleotide
ugggguauaauucuagggu

SEQ ID NO: 22114 - RNA, 19 nt, Artificial Sequence
  Description of Artificial Sequence: Synthetic oligonucleotide
uguuuaugaauggauuugg

SEQ ID NO: 22115 - RNA, 19 nt, Artificial Sequence
  Description of Artificial Sequence: Synthetic oligonucleotide
acauagaguagagaguacc

SEQ ID NO: 22116 - RNA, 19 nt, Artificial Sequence
  Description of Artificial Sequence: Synthetic oligonucleotide
auauauauauauuuauuuu

SEQ ID NO: 22117 - RNA, 19 nt, Artificial Sequence
  Description of Artificial Sequence: Synthetic oligonucleotide
uguuaguuacgcaaauccc

SEQ ID NO: 22118 - RNA, 19 nt, Artificial Sequence
  Description of Artificial Sequence: Synthetic oligonucleotide
uacauauauauauauuuau

SEQ ID NO: 22119 - RNA, 19 nt, Artificial Sequence
  Description of Artificial Sequence: Synthetic oligonucleotide
uauggaaagcuuaucgcug

SEQ ID NO: 22120 - RNA, 19 nt, Artificial Sequence
  Description of Artificial Sequence: Synthetic oligonucleotide
uugguaugugccacuaugg

SEQ ID NO: 22121 - RNA, 19 nt, Artificial Sequence
  Description of Artificial Sequence: Synthetic oligonucleotide
aacgaaguaugcuuuauuu

SEQ ID NO: 22122 - RNA, 19 nt, Artificial Sequence
  Description of Artificial Sequence: Synthetic oligonucleotide
uauuugaucacgagugcca

SEQ ID NO: 22123 - RNA, 19 nt, Artificial Sequence
  Description of Artificial Sequence: Synthetic oligonucleotide
ucuucgagagaggaaaacg

SEQ ID NO: 22124 - RNA, 19 nt, Artificial Sequence
  Description of Artificial Sequence: Synthetic oligonucleotide
aacaauuccgugcucgcca

SEQ ID NO: 22125 - RNA, 19 nt, Artificial Sequence
  Description of Artificial Sequence: Synthetic oligonucleotide
uuuuacguacgcagcaaag

SEQ ID NO: 22126 - RNA, 19 nt, Artificial Sequence
  Description of Artificial Sequence: Synthetic oligonucleotide
uugccuugcacauagagua

SEQ ID NO: 22127 - RNA, 19 nt, Artificial Sequence
  Description of Artificial Sequence: Synthetic oligonucleotide
acuugaccugccuaauugc

SEQ ID NO: 22128 - RNA, 19 nt, Artificial Sequence
  Description of Artificial Sequence: Synthetic oligonucleotide
uuuauuagcgguacgugua

SEQ ID NO: 22129 - RNA, 19 nt, Artificial Sequence
  Description of Artificial Sequence: Synthetic oligonucleotide
augggguauaauucuaggg

SEQ ID NO: 22130 - RNA, 19 nt, Artificial Sequence
  Description of Artificial Sequence: Synthetic oligonucleotide
acaaucacccuucgcagcg

SEQ ID NO: 22131 - RNA, 19 nt, Artificial Sequence
  Description of Artificial Sequence: Synthetic oligonucleotide
agcuuacagguuuauuagc

SEQ ID NO: 22132 - RNA, 19 nt, Artificial Sequence
  Description of Artificial Sequence: Synthetic oligonucleotide
ugaaggaauagcacagucu

SEQ ID NO: 22133 - RNA, 19 nt, Artificial Sequence
  Description of Artificial Sequence: Synthetic oligonucleotide
uuacguacgcagcaaagcu

SEQ ID NO: 22134 - RNA, 19 nt, Artificial Sequence
  Description of Artificial Sequence: Synthetic oligonucleotide
uaauacauauauauauauu

SEQ ID NO: 22135 - RNA, 19 nt, Artificial Sequence
  Description of Artificial Sequence: Synthetic oligonucleotide
agggaccugauuuggaaac

SEQ ID NO: 22136 - RNA, 19 nt, Artificial Sequence
  Description of Artificial Sequence: Synthetic oligonucleotide
gacgccaccacaaucaccc

SEQ ID NO: 22137 - RNA, 19 nt, Artificial Sequence
  Description of Artificial Sequence: Synthetic oligonucleotide
ggaaauuacacagaaggcc

SEQ ID NO: 22138 - RNA, 19 nt, Artificial Sequence
  Description of Artificial Sequence: Synthetic oligonucleotide
cauagaguagagaguaccc

SEQ ID NO: 22139 - RNA, 19 nt, Artificial Sequence
  Description of Artificial Sequence: Synthetic oligonucleotide
uuauuagcgguacguguag

SEQ ID NO: 22140 - RNA, 19 nt, Artificial Sequence
  Description of Artificial Sequence: Synthetic oligonucleotide
ucgcuucucucuauggugg

SEQ ID NO: 22141 - RNA, 19 nt, Artificial Sequence
  Description of Artificial Sequence: Synthetic oligonucleotide
cagaagccaacaaagcggg

SEQ ID NO: 22142 - RNA, 19 nt, Artificial Sequence
  Description of Artificial Sequence: Synthetic oligonucleotide
uuuagugaaacgucacuuc

SEQ ID NO: 22143 - RNA, 19 nt, Artificial Sequence
  Description of Artificial Sequence: Synthetic oligonucleotide
uguaccguugcauccuggg

SEQ ID NO: 22144 - RNA, 19 nt, Artificial Sequence
  Description of Artificial Sequence: Synthetic oligonucleotide
uuauuugaucacgagugcc

SEQ ID NO: 22145 - RNA, 19 nt, Artificial Sequence
  Description of Artificial Sequence: Synthetic oligonucleotide
uuacgcaaaucccuauaag

SEQ ID NO: 22146 - RNA, 19 nt, Artificial Sequence
  Description of Artificial Sequence: Synthetic oligonucleotide
gaucacgagugccauuugg

SEQ ID NO: 22147 - RNA, 19 nt, Artificial Sequence
  Description of Artificial Sequence: Synthetic oligonucleotide
uuuacguacgcagcaaagc

SEQ ID NO: 22148 - RNA, 19 nt, Artificial Sequence
  Description of Artificial Sequence: Synthetic oligonucleotide
auagcacagucuucgagag

SEQ ID NO: 22149 - RNA, 19 nt, Artificial Sequence
  Description of Artificial Sequence: Synthetic oligonucleotide
uuacagguuuauuagcggu

SEQ ID NO: 22150 - RNA, 19 nt, Artificial Sequence
  Description of Artificial Sequence: Synthetic oligonucleotide
ugccuaauugcugacaucu

SEQ ID NO: 22151 - RNA, 19 nt, Artificial Sequence
  Description of Artificial Sequence: Synthetic oligonucleotide
ucugucuaccuuuggacca

SEQ ID NO: 22152 - RNA, 19 nt, Artificial Sequence
  Description of Artificial Sequence: Synthetic oligonucleotide
aggaaaacgaaguaugcuu

SEQ ID NO: 22153 - RNA, 19 nt, Artificial Sequence
  Description of Artificial Sequence: Synthetic oligonucleotide
uggaccaucuuuauuccac

SEQ ID NO: 22154 - RNA, 19 nt, Artificial Sequence
  Description of Artificial Sequence: Synthetic oligonucleotide
uuuaggccccuccacagga

SEQ ID NO: 22155 - RNA, 19 nt, Artificial Sequence
  Description of Artificial Sequence: Synthetic oligonucleotide
ggaaguaagucauucaguc

SEQ ID NO: 22156 - RNA, 19 nt, Artificial Sequence
  Description of Artificial Sequence: Synthetic oligonucleotide
gaguagccgauccacaaug

SEQ ID NO: 22157 - RNA, 19 nt, Artificial Sequence
  Description of Artificial Sequence: Synthetic oligonucleotide
aaaggguccggucucuccu

SEQ ID NO: 22158 - RNA, 19 nt, Artificial Sequence
  Description of Artificial Sequence: Synthetic oligonucleotide
caugggguauaauucuagg

SEQ ID NO: 22159 - RNA, 19 nt, Artificial Sequence
  Description of Artificial Sequence: Synthetic oligonucleotide
uuaguuacgcaaaucccua

SEQ ID NO: 22160 - RNA, 19 nt, Artificial Sequence
  Description of Artificial Sequence: Synthetic oligonucleotide
gagaugggcgccauggacg

SEQ ID NO: 22161 - RNA, 19 nt, Artificial Sequence
  Description of Artificial Sequence: Synthetic oligonucleotide
agagaauuuuggucccugg

SEQ ID NO: 22162 - RNA, 19 nt, Artificial Sequence
  Description of Artificial Sequence: Synthetic oligonucleotide
uuuuagugaaacgucacuu

SEQ ID NO: 22163 - RNA, 19 nt, Artificial Sequence
  Description of Artificial Sequence: Synthetic oligonucleotide
acagguuuauuagcgguac

SEQ ID NO: 22164 - RNA, 19 nt, Artificial Sequence
  Description of Artificial Sequence: Synthetic oligonucleotide
aaagcuuaucgcugucugu

SEQ ID NO: 22165 - RNA, 19 nt, Artificial Sequence
  Description of Artificial Sequence: Synthetic oligonucleotide
cauauauauauauuuauuu

SEQ ID NO: 22166 - RNA, 19 nt, Artificial Sequence
  Description of Artificial Sequence: Synthetic oligonucleotide
cuggcguuccacuaagacc

SEQ ID NO: 22167 - RNA, 19 nt, Artificial Sequence
  Description of Artificial Sequence: Synthetic oligonucleotide
ugaccugccuaauugcuga

SEQ ID NO: 22168 - RNA, 19 nt, Artificial Sequence
  Description of Artificial Sequence: Synthetic oligonucleotide
uuuagggccggguaagccu

SEQ ID NO: 22169 - RNA, 19 nt, Artificial Sequence
  Description of Artificial Sequence: Synthetic oligonucleotide
uggccgaugauuccuggag

SEQ ID NO: 22170 - RNA, 19 nt, Artificial Sequence
  Description of Artificial Sequence: Synthetic oligonucleotide
ucgcagacagcuuccagcc

SEQ ID NO: 22171 - RNA, 19 nt, Artificial Sequence
  Description of Artificial Sequence: Synthetic oligonucleotide
uucgagagaggaaaacgaa

SEQ ID NO: 22172 - RNA, 19 nt, Artificial Sequence
  Description of Artificial Sequence: Synthetic oligonucleotide
cuacacuagaacuugaccu

SEQ ID NO: 22173 - RNA, 19 nt, Artificial Sequence
  Description of Artificial Sequence: Synthetic oligonucleotide
gaaauuacacagaaggccu

SEQ ID NO: 22174 - RNA, 19 nt, Artificial Sequence
  Description of Artificial Sequence: Synthetic oligonucleotide
ugguccuacuccuggaacc

SEQ ID NO: 22175 - RNA, 19 nt, Artificial Sequence
  Description of Artificial Sequence: Synthetic oligonucleotide
uuuugcccagguaaaccug

SEQ ID NO: 22176 - RNA, 19 nt, Artificial Sequence
  Description of Artificial Sequence: Synthetic oligonucleotide
acgagugccauuugguaug

SEQ ID NO: 22177 - RNA, 19 nt, Artificial Sequence
  Description of Artificial Sequence: Synthetic oligonucleotide
accccuagcaccuuugggu

SEQ ID NO: 22178 - RNA, 19 nt, Artificial Sequence
  Description of Artificial Sequence: Synthetic oligonucleotide
uuggcaauaacaccuucuu

SEQ ID NO: 22179 - RNA, 19 nt, Artificial Sequence
  Description of Artificial Sequence: Synthetic oligonucleotide
uucacauuugguggccugg

SEQ ID NO: 22180 - RNA, 19 nt, Artificial Sequence
  Description of Artificial Sequence: Synthetic oligonucleotide
uaccguugcauccugggau

SEQ ID NO: 22181 - RNA, 19 nt, Artificial Sequence
  Description of Artificial Sequence: Synthetic oligonucleotide
gcuuacagguuuauuagcg

SEQ ID NO: 22182 - RNA, 19 nt, Artificial Sequence
  Description of Artificial Sequence: Synthetic oligonucleotide
uagaguagagaguacccau

SEQ ID NO: 22183 - RNA, 19 nt, Artificial Sequence
  Description of Artificial Sequence: Synthetic oligonucleotide
uccggguguaccaggaaug

SEQ ID NO: 22184 - RNA, 19 nt, Artificial Sequence
  Description of Artificial Sequence: Synthetic oligonucleotide
uagcgguacguguaguaag

SEQ ID NO: 22185 - RNA, 19 nt, Artificial Sequence
  Description of Artificial Sequence: Synthetic oligonucleotide
cuaauacauauauauauau

SEQ ID NO: 22186 - RNA, 19 nt, Artificial Sequence
  Description of Artificial Sequence: Synthetic oligonucleotide
ucaccuuucggcccgucga

SEQ ID NO: 22187 - RNA, 19 nt, Artificial Sequence
  Description of Artificial Sequence: Synthetic oligonucleotide
uccaacugauccuuugggu

SEQ ID NO: 22188 - RNA, 19 nt, Artificial Sequence
  Description of Artificial Sequence: Synthetic oligonucleotide
uugaaacggacugugggcu

SEQ ID NO: 22189 - RNA, 19 nt, Artificial Sequence
  Description of Artificial Sequence: Synthetic oligonucleotide
gagaguacccaugguagag

SEQ ID NO: 22190 - RNA, 19 nt, Artificial Sequence
  Description of Artificial Sequence: Synthetic oligonucleotide
gaaggaauagcacagucuu

SEQ ID NO: 22191 - RNA, 19 nt, Artificial Sequence
  Description of Artificial Sequence: Synthetic oligonucleotide
guaagcauucgcguaguag

SEQ ID NO: 22192 - RNA, 19 nt, Artificial Sequence
  Description of Artificial Sequence: Synthetic oligonucleotide
cuccaacugauccuuuggg

SEQ ID NO: 22193 - RNA, 19 nt, Artificial Sequence
  Description of Artificial Sequence: Synthetic oligonucleotide
ugacagguugaaacggacu

SEQ ID NO: 22194 - RNA, 19 nt, Artificial Sequence
  Description of Artificial Sequence: Synthetic oligonucleotide
ucugacuaugccuggucac

SEQ ID NO: 22195 - RNA, 19 nt, Artificial Sequence
  Description of Artificial Sequence: Synthetic oligonucleotide
aaaacgaaguaugcuuuau

SEQ ID NO: 22196 - RNA, 19 nt, Artificial Sequence
  Description of Artificial Sequence: Synthetic oligonucleotide
ugaacaucucgcuucucuc

SEQ ID NO: 22197 - RNA, 19 nt, Artificial Sequence
  Description of Artificial Sequence: Synthetic oligonucleotide
gcugaaaagauggaauucc

SEQ ID NO: 22198 - RNA, 19 nt, Artificial Sequence
  Description of Artificial Sequence: Synthetic oligonucleotide
agagaggaaaacgaaguau

SEQ ID NO: 22199 - RNA, 19 nt, Artificial Sequence
  Description of Artificial Sequence: Synthetic oligonucleotide
gacaccgggaaugccaucc

SEQ ID NO: 22200 - RNA, 19 nt, Artificial Sequence
  Description of Artificial Sequence: Synthetic oligonucleotide
auacauauauauauauuua

SEQ ID NO: 22201 - RNA, 19 nt, Artificial Sequence
  Description of Artificial Sequence: Synthetic oligonucleotide
acauauauauauauuuauu

SEQ ID NO: 22202 - RNA, 19 nt, Artificial Sequence
  Description of Artificial Sequence: Synthetic oligonucleotide
uacagguuuauuagcggua

SEQ ID NO: 22203 - RNA, 19 nt, Artificial Sequence
  Description of Artificial Sequence: Synthetic oligonucleotide
ugugcgaagcuccccugcc

SEQ ID NO: 22204 - RNA, 19 nt, Artificial Sequence
  Description of Artificial Sequence: Synthetic oligonucleotide
agccgauccacaaugagga

SEQ ID NO: 22205 - RNA, 19 nt, Artificial Sequence
  Description of Artificial Sequence: Synthetic oligonucleotide
uugaucacgagugccauuu

SEQ ID NO: 22206 - RNA, 19 nt, Artificial Sequence
  Description of Artificial Sequence: Synthetic oligonucleotide
ugauccacagaugggguac

SEQ ID NO: 22207 - RNA, 19 nt, Artificial Sequence
  Description of Artificial Sequence: Synthetic oligonucleotide
uuuuggucccuggaggaca

SEQ ID NO: 22208 - RNA, 19 nt, Artificial Sequence
  Description of Artificial Sequence: Synthetic oligonucleotide
agguuuauuagcgguacgu

SEQ ID NO: 22209 - RNA, 19 nt, Artificial Sequence
  Description of Artificial Sequence: Synthetic oligonucleotide
acuuucgcagacagcuucc

SEQ ID NO: 22210 - RNA, 19 nt, Artificial Sequence
  Description of Artificial Sequence: Synthetic oligonucleotide
acgaaguaugcuuuauuua

SEQ ID NO: 22211 - RNA, 19 nt, Artificial Sequence
  Description of Artificial Sequence: Synthetic oligonucleotide
acaauuccgugcucgccag

SEQ ID NO: 22212 - RNA, 19 nt, Artificial Sequence
  Description of Artificial Sequence: Synthetic oligonucleotide
cacaaucacccuucgcagc

SEQ ID NO: 22213 - RNA, 19 nt, Artificial Sequence
  Description of Artificial Sequence: Synthetic oligonucleotide
uauggaguucucaccucac

SEQ ID NO: 22214 - RNA, 19 nt, Artificial Sequence
  Description of Artificial Sequence: Synthetic oligonucleotide
guagccgauccacaaugag

SEQ ID NO: 22215 - RNA, 19 nt, Artificial Sequence
  Description of Artificial Sequence: Synthetic oligonucleotide
guuuauuagcgguacgugu

SEQ ID NO: 22216 - RNA, 19 nt, Artificial Sequence
  Description of Artificial Sequence: Synthetic oligonucleotide
agagaguacccaugguaga

SEQ ID NO: 22217 - RNA, 19 nt, Artificial Sequence
  Description of Artificial Sequence: Synthetic oligonucleotide
caccauguugugacggcgg

SEQ ID NO: 22218 - RNA, 19 nt, Artificial Sequence
  Description of Artificial Sequence: Synthetic oligonucleotide
gucucuacacuagaacuug

SEQ ID NO: 22219 - RNA, 19 nt, Artificial Sequence
  Description of Artificial Sequence: Synthetic oligonucleotide
acagcggaucaucuguugu

SEQ ID NO: 22220 - RNA, 19 nt, Artificial Sequence
  Description of Artificial Sequence: Synthetic oligonucleotide
aggaaaccgugauccacag

SEQ ID NO: 22221 - RNA, 19 nt, Artificial Sequence
  Description of Artificial Sequence: Synthetic oligonucleotide
acgcagcaaagcuuacagg

SEQ ID NO: 22222 - RNA, 19 nt, Artificial Sequence
  Description of Artificial Sequence: Synthetic oligonucleotide
gagucugcccuccugcgac

SEQ ID NO: 22223 - RNA, 19 nt, Artificial Sequence
  Description of Artificial Sequence: Synthetic oligonucleotide
uucacgccaugacagucac

SEQ ID NO: 22224 - RNA, 19 nt, Artificial Sequence
  Description of Artificial Sequence: Synthetic oligonucleotide
aggaauacccggaaguccu

SEQ ID NO: 22225 - RNA, 19 nt, Artificial Sequence
  Description of Artificial Sequence: Synthetic oligonucleotide
aaccguuggggcacugugg

SEQ ID NO: 22226 - RNA, 19 nt, Artificial Sequence
  Description of Artificial Sequence: Synthetic oligonucleotide
guuaguuacgcaaaucccu

SEQ ID NO: 22227 - RNA, 19 nt, Artificial Sequence
  Description of Artificial Sequence: Synthetic oligonucleotide
ggcgaaguugcacacguug

SEQ ID NO: 22228 - RNA, 19 nt, Artificial Sequence
  Description of Artificial Sequence: Synthetic oligonucleotide
uagagaauuuuggucccug

SEQ ID NO: 22229 - RNA, 19 nt, Artificial Sequence
  Description of Artificial Sequence: Synthetic oligonucleotide
ucucggaccagguggucca

SEQ ID NO: 22230 - RNA, 19 nt, Artificial Sequence
  Description of Artificial Sequence: Synthetic oligonucleotide
uuagcgguacguguaguaa

SEQ ID NO: 22231 - RNA, 19 nt, Artificial Sequence
  Description of Artificial Sequence: Synthetic oligonucleotide
ugucugacuaugccugguc

SEQ ID NO: 22232 - RNA, 19 nt, Artificial Sequence
  Description of Artificial Sequence: Synthetic oligonucleotide
caggaauacccggaagucc

SEQ ID NO: 22233 - RNA, 19 nt, Artificial Sequence
  Description of Artificial Sequence: Synthetic oligonucleotide
cugucuggagggcaccacg

SEQ ID NO: 22234 - RNA, 19 nt, Artificial Sequence
  Description of Artificial Sequence: Synthetic oligonucleotide
aggaaacccucucggacca

SEQ ID NO: 22235 - RNA, 19 nt, Artificial Sequence
  Description of Artificial Sequence: Synthetic oligonucleotide
auuagcgguacguguagua

SEQ ID NO: 22236 - RNA, 19 nt, Artificial Sequence
  Description of Artificial Sequence: Synthetic oligonucleotide
gcuauuagcacagaccauc

SEQ ID NO: 22237 - RNA, 19 nt, Artificial Sequence
  Description of Artificial Sequence: Synthetic oligonucleotide
ucuaugguggcgagccaaa

SEQ ID NO: 22238 - RNA, 19 nt, Artificial Sequence
  Description of Artificial Sequence: Synthetic oligonucleotide
guaagccuugaucucccug

SEQ ID NO: 22239 - RNA, 19 nt, Artificial Sequence
  Description of Artificial Sequence: Synthetic oligonucleotide
aguuacgcaaaucccuaua

SEQ ID NO: 22240 - RNA, 19 nt, Artificial Sequence
  Description of Artificial Sequence: Synthetic oligonucleotide
acaaagcgggguguguuag

SEQ ID NO: 22241 - RNA, 19 nt, Artificial Sequence
  Description of Artificial Sequence: Synthetic oligonucleotide
uagacaccauguuuaugaa

SEQ ID NO: 22242 - RNA, 19 nt, Artificial Sequence
  Description of Artificial Sequence: Synthetic oligonucleotide
guacaugggguauaauucu

SEQ ID NO: 22243 - RNA, 19 nt, Artificial Sequence
  Description of Artificial Sequence: Synthetic oligonucleotide
uggauggccgaugauuccu

SEQ ID NO: 22244 - RNA, 19 nt, Artificial Sequence
  Description of Artificial Sequence: Synthetic oligonucleotide
uggauugcaaaaggcaauu

SEQ ID NO: 22245 - RNA, 19 nt, Artificial Sequence
  Description of Artificial Sequence: Synthetic oligonucleotide
uccccguaagccagggaca

SEQ ID NO: 22246 - RNA, 19 nt, Artificial Sequence
  Description of Artificial Sequence: Synthetic oligonucleotide
cagguuuauuagcgguacg

SEQ ID NO: 22247 - RNA, 19 nt, Artificial Sequence
  Description of Artificial Sequence: Synthetic oligonucleotide
uacguguaguaaguuuucu

SEQ ID NO: 22248 - RNA, 19 nt, Artificial Sequence
  Description of Artificial Sequence: Synthetic oligonucleotide
uggagcguggcccgugugu

SEQ ID NO: 22249 - RNA, 19 nt, Artificial Sequence
  Description of Artificial Sequence: Synthetic oligonucleotide
uuagggccggguaagccuu

SEQ ID NO: 22250 - RNA, 19 nt, Artificial Sequence
  Description of Artificial Sequence: Synthetic oligonucleotide
ugcucgccaggaaaaccug

SEQ ID NO: 22251 - RNA, 19 nt, Artificial Sequence
  Description of Artificial Sequence: Synthetic oligonucleotide
ugucaccgcucuuggaagu

SEQ ID NO: 22252 - RNA, 19 nt, Artificial Sequence
  Description of Artificial Sequence: Synthetic oligonucleotide
gcauucgcguaguaguugc

SEQ ID NO: 22253 - RNA, 19 nt, Artificial Sequence
  Description of Artificial Sequence: Synthetic oligonucleotide
gguuuauuagcgguacgug

SEQ ID NO: 22254 - RNA, 19 nt, Artificial Sequence
  Description of Artificial Sequence: Synthetic oligonucleotide
ugaucacgagugccauuug

SEQ ID NO: 22255 - RNA, 19 nt, Artificial Sequence
  Description of Artificial Sequence: Synthetic oligonucleotide
caaccguuggggcacugug

SEQ ID NO: 22256 - RNA, 19 nt, Artificial Sequence
  Description of Artificial Sequence: Synthetic oligonucleotide
uggggacuuuuagugaaac

SEQ ID NO: 22257 - RNA, 19 nt, Artificial Sequence
  Description of Artificial Sequence: Synthetic oligonucleotide
aucacgagugccauuuggu

SEQ ID NO: 22258 - RNA, 19 nt, Artificial Sequence
  Description of Artificial Sequence: Synthetic oligonucleotide
aaacgucacuucaagcaua

SEQ ID NO: 22259 - RNA, 19 nt, Artificial Sequence
  Description of Artificial Sequence: Synthetic oligonucleotide
acuuggcaacggcugacgu

SEQ ID NO: 22260 - RNA, 19 nt, Artificial Sequence
  Description of Artificial Sequence: Synthetic oligonucleotide
auuugaucacgagugccau

SEQ ID NO: 22261 - RNA, 19 nt, Artificial Sequence
  Description of Artificial Sequence: Synthetic oligonucleotide
cuuucggcccgucgauucc

SEQ ID NO: 22262 - RNA, 19 nt, Artificial Sequence
  Description of Artificial Sequence: Synthetic oligonucleotide
aaggaguagccgauccaca

SEQ ID NO: 22263 - RNA, 19 nt, Artificial Sequence
  Description of Artificial Sequence: Synthetic oligonucleotide
caacaauuccgugcucgcc

SEQ ID NO: 22264 - RNA, 19 nt, Artificial Sequence
  Description of Artificial Sequence: Synthetic oligonucleotide
uaguuacgcaaaucccuau

SEQ ID NO: 22265 - RNA, 19 nt, Artificial Sequence
  Description of Artificial Sequence: Synthetic oligonucleotide
ggccuuaguagucuuaaaa

SEQ ID NO: 22266 - RNA, 19 nt, Artificial Sequence
  Description of Artificial Sequence: Synthetic oligonucleotide
gaggaaaacgaaguaugcu

SEQ ID NO: 22267 - RNA, 19 nt, Artificial Sequence
  Description of Artificial Sequence: Synthetic oligonucleotide
agcauucgcguaguaguug

SEQ ID NO: 22268 - RNA, 19 nt, Artificial Sequence
  Description of Artificial Sequence: Synthetic oligonucleotide
cuucgcagcggccggcugc

SEQ ID NO: 22269 - RNA, 19 nt, Artificial Sequence
  Description of Artificial Sequence: Synthetic oligonucleotide
cacuucaagcauagugguc

SEQ ID NO: 22270 - RNA, 19 nt, Artificial Sequence
  Description of Artificial Sequence: Synthetic oligonucleotide
agaccuuuagggccgggua

SEQ ID NO: 22271 - RNA, 19 nt, Artificial Sequence
  Description of Artificial Sequence: Synthetic oligonucleotide
gggacuuuuagugaaacgu

SEQ ID NO: 22272 - RNA, 19 nt, Artificial Sequence
  Description of Artificial Sequence: Synthetic oligonucleotide
uauuagcgguacguguagu

SEQ ID NO: 22273 - RNA, 19 nt, Artificial Sequence
  Description of Artificial Sequence: Synthetic oligonucleotide
gaccuuuagggccggguaa

SEQ ID NO: 22274 - RNA, 19 nt, Artificial Sequence
  Description of Artificial Sequence: Synthetic oligonucleotide
gucguuauguucuucucau

SEQ ID NO: 22275 - RNA, 19 nt, Artificial Sequence
  Description of Artificial Sequence: Synthetic oligonucleotide
uguaagcauucgcguagua

SEQ ID NO: 22276 - RNA, 19 nt, Artificial Sequence
  Description of Artificial Sequence: Synthetic oligonucleotide
cucgccuuuggcuccagga

SEQ ID NO: 22277 - RNA, 19 nt, Artificial Sequence
  Description of Artificial Sequence: Synthetic oligonucleotide
accgugauccacagauggg

SEQ ID NO: 22278 - RNA, 19 nt, Artificial Sequence
  Description of Artificial Sequence: Synthetic oligonucleotide
auuugguaugugccacuau

SEQ ID NO: 22279 - RNA, 19 nt, Artificial Sequence
  Description of Artificial Sequence: Synthetic oligonucleotide
ggagaugggcgccauggac

SEQ ID NO: 22280 - RNA, 19 nt, Artificial Sequence
  Description of Artificial Sequence: Synthetic oligonucleotide
ucccuuuguaccguugcau

SEQ ID NO: 22281 - RNA, 19 nt, Artificial Sequence
  Description of Artificial Sequence: Synthetic oligonucleotide
guaagucauucagucugug

SEQ ID NO: 22282 - RNA, 19 nt, Artificial Sequence
  Description of Artificial Sequence: Synthetic oligonucleotide
ucuaggguucauugcuguu

SEQ ID NO: 22283 - RNA, 19 nt, Artificial Sequence
  Description of Artificial Sequence: Synthetic oligonucleotide
gcuaacaaaggccuuggcu

SEQ ID NO: 22284 - RNA, 19 nt, Artificial Sequence
  Description of Artificial Sequence: Synthetic oligonucleotide
aggcacuuuaugguuuuca

SEQ ID NO: 22285 - RNA, 19 nt, Artificial Sequence
  Description of Artificial Sequence: Synthetic oligonucleotide
uuugaucacgagugccauu

SEQ ID NO: 22286 - RNA, 19 nt, Artificial Sequence
  Description of Artificial Sequence: Synthetic oligonucleotide
ggacuuuuagugaaacguc

SEQ ID NO: 22287 - RNA, 19 nt, Artificial Sequence
  Description of Artificial Sequence: Synthetic oligonucleotide
gauccacagaugggguacc

SEQ ID NO: 22288 - RNA, 19 nt, Artificial Sequence
  Description of Artificial Sequence: Synthetic oligonucleotide
ccgugauccacagaugggg

SEQ ID NO: 22289 - RNA, 19 nt, Artificial Sequence
  Description of Artificial Sequence: Synthetic oligonucleotide
agcgguacguguaguaagu

SEQ ID NO: 22290 - RNA, 19 nt, Artificial Sequence
  Description of Artificial Sequence: Synthetic oligonucleotide
agggcaugaguuuguguuu

SEQ ID NO: 22291 - RNA, 19 nt, Artificial Sequence
  Description of Artificial Sequence: Synthetic oligonucleotide
aagcauucgcguaguaguu

SEQ ID NO: 22292 - RNA, 19 nt, Artificial Sequence
  Description of Artificial Sequence: Synthetic oligonucleotide
guaagccggguugaccuug

SEQ ID NO: 22293 - RNA, 19 nt, Artificial Sequence
  Description of Artificial Sequence: Synthetic oligonucleotide
uuccaaccugaugacccug

SEQ ID NO: 22294 - RNA, 19 nt, Artificial Sequence
  Description of Artificial Sequence: Synthetic oligonucleotide
gggaguagcaccauguugu

SEQ ID NO: 22295 - RNA, 19 nt, Artificial Sequence
  Description of Artificial Sequence: Synthetic oligonucleotide
uucggcccgucgauuccag

SEQ ID NO: 22296 - RNA, 19 nt, Artificial Sequence
  Description of Artificial Sequence: Synthetic oligonucleotide
acgugugugcgaagcuccc

SEQ ID NO: 22297 - RNA, 19 nt, Artificial Sequence
  Description of Artificial Sequence: Synthetic oligonucleotide
accugcuaaugaagggccg

SEQ ID NO: 22298 - RNA, 19 nt, Artificial Sequence
  Description of Artificial Sequence: Synthetic oligonucleotide
guguaguaccacacagggc

SEQ ID NO: 22299 - RNA, 19 nt, Artificial Sequence
  Description of Artificial Sequence: Synthetic oligonucleotide
auucgcguaguaguugcau

SEQ ID NO: 22300 - RNA, 19 nt, Artificial Sequence
  Description of Artificial Sequence: Synthetic oligonucleotide
ccagcuaagccagggaagc

SEQ ID NO: 22301 - RNA, 19 nt, Artificial Sequence
  Description of Artificial Sequence: Synthetic oligonucleotide
cuugaccugccuaauugcu

SEQ ID NO: 22302 - RNA, 19 nt, Artificial Sequence
  Description of Artificial Sequence: Synthetic oligonucleotide
accguugcauccugggaua

SEQ ID NO: 22303 - RNA, 19 nt, Artificial Sequence
  Description of Artificial Sequence: Synthetic oligonucleotide
cagguaagccggguugacc

SEQ ID NO: 22304 - RNA, 19 nt, Artificial Sequence
  Description of Artificial Sequence: Synthetic oligonucleotide
uagaccugacuguccuuuc

SEQ ID NO: 22305 - RNA, 19 nt, Artificial Sequence
  Description of Artificial Sequence: Synthetic oligonucleotide
ccagguaaaccuggcaugc

SEQ ID NO: 22306 - RNA, 19 nt, Artificial Sequence
  Description of Artificial Sequence: Synthetic oligonucleotide
gaaacccugugaaggaaua

SEQ ID NO: 22307 - RNA, 19 nt, Artificial Sequence
  Description of Artificial Sequence: Synthetic oligonucleotide
uuucggcccgucgauucca

SEQ ID NO: 22308 - RNA, 19 nt, Artificial Sequence
  Description of Artificial Sequence: Synthetic oligonucleotide
acguacgcagcaaagcuua

SEQ ID NO: 22309 - RNA, 19 nt, Artificial Sequence
  Description of Artificial Sequence: Synthetic oligonucleotide
aaacccucucggaccaggu

SEQ ID NO: 22310 - RNA, 19 nt, Artificial Sequence
  Description of Artificial Sequence: Synthetic oligonucleotide
cuggucacaaggaaaccgu

SEQ ID NO: 22311 - RNA, 19 nt, Artificial Sequence
  Description of Artificial Sequence: Synthetic oligonucleotide
ggguauaauucuaggguuc

SEQ ID NO: 22312 - RNA, 19 nt, Artificial Sequence
  Description of Artificial Sequence: Synthetic oligonucleotide
gcugacgugugugcgaagc

SEQ ID NO: 22313 - RNA, 19 nt, Artificial Sequence
  Description of Artificial Sequence: Synthetic oligonucleotide
aguagccgauccacaauga

SEQ ID NO: 22314 - RNA, 19 nt, Artificial Sequence
  Description of Artificial Sequence: Synthetic oligonucleotide
gcauaguggucugagucug

SEQ ID NO: 22315 - RNA, 19 nt, Artificial Sequence
  Description of Artificial Sequence: Synthetic oligonucleotide
caccacaaucacccuucgc

SEQ ID NO: 22316 - RNA, 19 nt, Artificial Sequence
  Description of Artificial Sequence: Synthetic oligonucleotide
cuaggguucauugcuguua

SEQ ID NO: 22317 - RNA, 19 nt, Artificial Sequence
  Description of Artificial Sequence: Synthetic oligonucleotide
cuuugaaccugugauuccu

SEQ ID NO: 22318 - RNA, 19 nt, Artificial Sequence
  Description of Artificial Sequence: Synthetic oligonucleotide
guugccuugcacauagagu

SEQ ID NO: 22319 - RNA, 19 nt, Artificial Sequence
  Description of Artificial Sequence: Synthetic oligonucleotide
acggcugacgugugugcga

SEQ ID NO: 22320 - RNA, 19 nt, Artificial Sequence
  Description of Artificial Sequence: Synthetic oligonucleotide
agcccaaugccagguucuc

SEQ ID NO: 22321 - RNA, 19 nt, Artificial Sequence
  Description of Artificial Sequence: Synthetic oligonucleotide
ucuccggguguaccaggaa

SEQ ID NO: 22322 - RNA, 19 nt, Artificial Sequence
  Description of Artificial Sequence: Synthetic oligonucleotide
ugcccggcaugccuuggaa

SEQ ID NO: 22323 - RNA, 19 nt, Artificial Sequence
  Description of Artificial Sequence: Synthetic oligonucleotide
caccgggaaugccauccag

SEQ ID NO: 22324 - RNA, 19 nt, Artificial Sequence
  Description of Artificial Sequence: Synthetic oligonucleotide
ucggcccgucgauuccagg

SEQ ID NO: 22325 - RNA, 19 nt, Artificial Sequence
  Description of Artificial Sequence: Synthetic oligonucleotide
gaccugccuaauugcugac

SEQ ID NO: 22326 - RNA, 19 nt, Artificial Sequence
  Description of Artificial Sequence: Synthetic oligonucleotide
accgggaaugccauccagu

SEQ ID NO: 22327 - RNA, 19 nt, Artificial Sequence
  Description of Artificial Sequence: Synthetic oligonucleotide
acaccgggaaugccaucca

SEQ ID NO: 22328 - RNA, 19 nt, Artificial Sequence
  Description of Artificial Sequence: Synthetic oligonucleotide
gguguguuaguuacgcaaa

SEQ ID NO: 22329 - RNA, 19 nt, Artificial Sequence
  Description of Artificial Sequence: Synthetic oligonucleotide
guggacagugagguacaug

SEQ ID NO: 22330 - RNA, 19 nt, Artificial Sequence
  Description of Artificial Sequence: Synthetic oligonucleotide
uggagaccuuuagggccgg

SEQ ID NO: 22331 - RNA, 19 nt, Artificial Sequence
  Description of Artificial Sequence: Synthetic oligonucleotide
gucgauuccagggaacccu

SEQ ID NO: 22332 - RNA, 19 nt, Artificial Sequence
  Description of Artificial Sequence: Synthetic oligonucleotide
acccaugguagagaauuuu

SEQ ID NO: 22333 - RNA, 19 nt, Artificial Sequence
  Description of Artificial Sequence: Synthetic oligonucleotide
cccggcaugccuuggaauc

SEQ ID NO: 22334 - RNA, 19 nt, Artificial Sequence
  Description of Artificial Sequence: Synthetic oligonucleotide
ccgggaaugccauccaguc

SEQ ID NO: 22335 - RNA, 19 nt, Artificial Sequence
  Description of Artificial Sequence: Synthetic oligonucleotide
cacgagugccauuugguau

SEQ ID NO: 22336 - RNA, 19 nt, Artificial Sequence
  Description of Artificial Sequence: Synthetic oligonucleotide
cagcuaagccagggaagcc

SEQ ID NO: 22337 - RNA, 19 nt, Artificial Sequence
  Description of Artificial Sequence: Synthetic oligonucleotide
ggugacagguugaaacgga

SEQ ID NO: 22338 - RNA, 19 nt, Artificial Sequence
  Description of Artificial Sequence: Synthetic oligonucleotide
aggccuuaguagucuuaaa

SEQ ID NO: 22339 - RNA, 19 nt, Artificial Sequence
  Description of Artificial Sequence: Synthetic oligonucleotide
gggguauaauucuaggguu

SEQ ID NO: 22340 - RNA, 19 nt, Artificial Sequence
  Description of Artificial Sequence: Synthetic oligonucleotide
accugccuaauugcugaca

SEQ ID NO: 22341 - RNA, 19 nt, Artificial Sequence
  Description of Artificial Sequence: Synthetic oligonucleotide
cucccuuuguaccguugca

SEQ ID NO: 22342 - RNA, 19 nt, Artificial Sequence
  Description of Artificial Sequence: Synthetic oligonucleotide
auuccgugcucgccaggaa

SEQ ID NO: 22343 - RNA, 19 nt, Artificial Sequence
  Description of Artificial Sequence: Synthetic oligonucleotide
uagggccggguaagccuug

SEQ ID NO: 22344 - RNA, 19 nt, Artificial Sequence
  Description of Artificial Sequence: Synthetic oligonucleotide
cucuaugguggcgagccaa

SEQ ID NO: 22345 - RNA, 19 nt, Artificial Sequence
  Description of Artificial Sequence: Synthetic oligonucleotide
cauucgcguaguaguugca

SEQ ID NO: 22346 - RNA, 19 nt, Artificial Sequence
  Description of Artificial Sequence: Synthetic oligonucleotide
ggccggguaagccuugauc

SEQ ID NO: 22347 - RNA, 19 nt, Artificial Sequence
  Description of Artificial Sequence: Synthetic oligonucleotide
ggaccaaccguuggggcac

SEQ ID NO: 22348 - RNA, 19 nt, Artificial Sequence
  Description of Artificial Sequence: Synthetic oligonucleotide
ccuuucggcccgucgauuc

SEQ ID NO: 22349 - RNA, 19 nt, Artificial Sequence
  Description of Artificial Sequence: Synthetic oligonucleotide
cugcgaccgaccuguccac

SEQ ID NO: 22350 - RNA, 19 nt, Artificial Sequence
  Description of Artificial Sequence: Synthetic oligonucleotide
cccuucauuccugguaacc

SEQ ID NO: 22351 - RNA, 19 nt, Artificial Sequence
  Description of Artificial Sequence: Synthetic oligonucleotide
ggcgucguuauguucuucu

SEQ ID NO: 22352 - RNA, 19 nt, Artificial Sequence
  Description of Artificial Sequence: Synthetic oligonucleotide
cacgguacuccuggcguuc

SEQ ID NO: 22353 - RNA, 19 nt, Artificial Sequence
  Description of Artificial Sequence: Synthetic oligonucleotide
ggccgaugauuccuggaga

SEQ ID NO: 22354 - RNA, 19 nt, Artificial Sequence
  Description of Artificial Sequence: Synthetic oligonucleotide
ccgucgauuccagggaacc

SEQ ID NO: 22355 - RNA, 19 nt, Artificial Sequence
  Description of Artificial Sequence: Synthetic oligonucleotide
uccuccgauguugcccuuc

SEQ ID NO: 22356 - RNA, 19 nt, Artificial Sequence
  Description of Artificial Sequence: Synthetic oligonucleotide
gacgugggcaugggcucug

SEQ ID NO: 22357 - RNA, 19 nt, Artificial Sequence
  Description of Artificial Sequence: Synthetic oligonucleotide
ggaaaccuguaagcccuug

SEQ ID NO: 22358 - RNA, 19 nt, Artificial Sequence
  Description of Artificial Sequence: Synthetic oligonucleotide
gagaccuuuagggccgggu

SEQ ID NO: 22359 - RNA, 19 nt, Artificial Sequence
  Description of Artificial Sequence: Synthetic oligonucleotide
cggcccgucgauuccaggg

SEQ ID NO: 22360 - RNA, 19 nt, Artificial Sequence
  Description of Artificial Sequence: Synthetic oligonucleotide
aggguucauugcuguuaaa

SEQ ID NO: 22361 - RNA, 19 nt, Artificial Sequence
  Description of Artificial Sequence: Synthetic oligonucleotide
cugcccuccugcgaccgac

SEQ ID NO: 22362 - RNA, 19 nt, Artificial Sequence
  Description of Artificial Sequence: Synthetic oligonucleotide
ggauggccgaugauuccug

SEQ ID NO: 22363 - RNA, 19 nt, Artificial Sequence
  Description of Artificial Sequence: Synthetic oligonucleotide
ugcgaccgaccuguccacu

SEQ ID NO: 22364 - RNA, 19 nt, Artificial Sequence
  Description of Artificial Sequence: Synthetic oligonucleotide
caugcccauuccuccaacu

SEQ ID NO: 22365 - RNA, 19 nt, Artificial Sequence
  Description of Artificial Sequence: Synthetic oligonucleotide
ccggguugaccuugagggc

SEQ ID NO: 22366 - RNA, 19 nt, Artificial Sequence
  Description of Artificial Sequence: Synthetic oligonucleotide
cuccuuucucuccccguaa

SEQ ID NO: 22367 - RNA, 19 nt, Artificial Sequence
  Description of Artificial Sequence: Synthetic oligonucleotide
ggguuucuuauggaguucu

SEQ ID NO: 22368 - RNA, 19 nt, Artificial Sequence
  Description of Artificial Sequence: Synthetic oligonucleotide
cgggguguguuaguuacgc

SEQ ID NO: 22369 - RNA, 19 nt, Artificial Sequence
  Description of Artificial Sequence: Synthetic oligonucleotide
ccggguguaccaggaaugc

SEQ ID NO: 22370 - RNA, 19 nt, Artificial Sequence
  Description of Artificial Sequence: Synthetic oligonucleotide
ggaaaccgugauccacaga

SEQ ID NO: 22371 - RNA, 19 nt, Artificial Sequence
  Description of Artificial Sequence: Synthetic oligonucleotide
cgggaaugccauccagucc

SEQ ID NO: 22372 - RNA, 19 nt, Artificial Sequence
  Description of Artificial Sequence: Synthetic oligonucleotide
gccuauggggccgggaguc

SEQ ID NO: 22373 - RNA, 19 nt, Artificial Sequence
  Description of Artificial Sequence: Synthetic oligonucleotide
cuaugguggcgagccaaaa

SEQ ID NO: 22374 - RNA, 19 nt, Artificial Sequence
  Description of Artificial Sequence: Synthetic oligonucleotide
cuccggguguaccaggaau

SEQ ID NO: 22375 - RNA, 19 nt, Artificial Sequence
  Description of Artificial Sequence: Synthetic oligonucleotide
ccugccgacccugggauuc

SEQ ID NO: 22376 - RNA, 19 nt, Artificial Sequence
  Description of Artificial Sequence: Synthetic oligonucleotide
guccccggagaugggcgcc

SEQ ID NO: 22377 - RNA, 19 nt, Artificial Sequence
  Description of Artificial Sequence: Synthetic oligonucleotide
ccuuuagggccggguaagc

SEQ ID NO: 22378 - RNA, 19 nt, Artificial Sequence
  Description of Artificial Sequence: Synthetic oligonucleotide
gcgaccgaccuguccacuc

SEQ ID NO: 22379 - RNA, 19 nt, Artificial Sequence
  Description of Artificial Sequence: Synthetic oligonucleotide
ccgcucguugccuugcaca

SEQ ID NO: 22380 - RNA, 19 nt, Artificial Sequence
  Description of Artificial Sequence: Synthetic oligonucleotide
uccugccgacccugggauu

SEQ ID NO: 22381 - RNA, 19 nt, Artificial Sequence
  Description of Artificial Sequence: Synthetic oligonucleotide
cccgucgauuccagggaac

SEQ ID NO: 22382 - RNA, 19 nt, Artificial Sequence
  Description of Artificial Sequence: Synthetic oligonucleotide
ggaguagccgauccacaau

SEQ ID NO: 22383 - RNA, 19 nt, Artificial Sequence
  Description of Artificial Sequence: Synthetic oligonucleotide
gcuccuggcguuccacuaa

SEQ ID NO: 22384 - RNA, 19 nt, Artificial Sequence
  Description of Artificial Sequence: Synthetic oligonucleotide
accgaccuguccacucccu

SEQ ID NO: 22385 - RNA, 19 nt, Artificial Sequence
  Description of Artificial Sequence: Synthetic oligonucleotide
gcgggguguguuaguuacg

SEQ ID NO: 22386 - RNA, 19 nt, Artificial Sequence
  Description of Artificial Sequence: Synthetic oligonucleotide
acgucacuucaagcauagu

SEQ ID NO: 22387 - RNA, 19 nt, Artificial Sequence
  Description of Artificial Sequence: Synthetic oligonucleotide
gaacuuucgcagacagcuu

SEQ ID NO: 22388 - RNA, 19 nt, Artificial Sequence
  Description of Artificial Sequence: Synthetic oligonucleotide
ccccguaagccagggacac

SEQ ID NO: 22389 - RNA, 19 nt, Artificial Sequence
  Description of Artificial Sequence: Synthetic oligonucleotide
gucaccgcucuuggaagua

SEQ ID NO: 22390 - RNA, 19 nt, Artificial Sequence
  Description of Artificial Sequence: Synthetic oligonucleotide
cuguaagcauucgcguagu

SEQ ID NO: 22391 - RNA, 19 nt, Artificial Sequence
  Description of Artificial Sequence: Synthetic oligonucleotide
gcgaaguugcacacguugu

SEQ ID NO: 22392 - RNA, 19 nt, Artificial Sequence
  Description of Artificial Sequence: Synthetic oligonucleotide
ccacguaccccuagcaccu

SEQ ID NO: 22393 - RNA, 19 nt, Artificial Sequence
  Description of Artificial Sequence: Synthetic oligonucleotide
accaaccguuggggcacug

SEQ ID NO: 22394 - RNA, 19 nt, Artificial Sequence
  Description of Artificial Sequence: Synthetic oligonucleotide
acugagccugucacaccuu

SEQ ID NO: 22395 - RNA, 19 nt, Artificial Sequence
  Description of Artificial Sequence: Synthetic oligonucleotide
aggucccgggucaccucug

SEQ ID NO: 22396 - RNA, 19 nt, Artificial Sequence
  Description of Artificial Sequence: Synthetic oligonucleotide
ggcguuccacuaagaccug

SEQ ID NO: 22397 - RNA, 19 nt, Artificial Sequence
  Description of Artificial Sequence: Synthetic oligonucleotide
cccacgguacuccuggcgu

SEQ ID NO: 22398 - RNA, 19 nt, Artificial Sequence
  Description of Artificial Sequence: Synthetic oligonucleotide
cugucuaccuuuggaccau

SEQ ID NO: 22399 - RNA, 19 nt, Artificial Sequence
  Description of Artificial Sequence: Synthetic oligonucleotide
cggguguaccaggaaugcc

SEQ ID NO: 22400 - RNA, 19 nt, Artificial Sequence
  Description of Artificial Sequence: Synthetic oligonucleotide
caccuuucggcccgucgau

SEQ ID NO: 22401 - RNA, 19 nt, Artificial Sequence
  Description of Artificial Sequence: Synthetic oligonucleotide
cccgcucguugccuugcac

SEQ ID NO: 22402 - RNA, 19 nt, Artificial Sequence
  Description of Artificial Sequence: Synthetic oligonucleotide
ggcccgcucguugccuugc

SEQ ID NO: 22403 - RNA, 19 nt, Artificial Sequence
  Description of Artificial Sequence: Synthetic oligonucleotide
gccaugacagucacauuuu

SEQ ID NO: 22404 - RNA, 19 nt, Artificial Sequence
  Description of Artificial Sequence: Synthetic oligonucleotide
ccauguugugacggcggca

SEQ ID NO: 22405 - RNA, 19 nt, Artificial Sequence
  Description of Artificial Sequence: Synthetic oligonucleotide
cgugauccacagauggggu

SEQ ID NO: 22406 - RNA, 19 nt, Artificial Sequence
  Description of Artificial Sequence: Synthetic oligonucleotide
cuguccgggaugccugcuu

SEQ ID NO: 22407 - RNA, 19 nt, Artificial Sequence
  Description of Artificial Sequence: Synthetic oligonucleotide
gggcgucguuauguucuuc

SEQ ID NO: 22408 - RNA, 19 nt, Artificial Sequence
  Description of Artificial Sequence: Synthetic oligonucleotide
cccggagaugggcgccaug

SEQ ID NO: 22409 - RNA, 19 nt, Artificial Sequence
  Description of Artificial Sequence: Synthetic oligonucleotide
cgguacguguaguaaguuu

SEQ ID NO: 22410 - RNA, 19 nt, Artificial Sequence
  Description of Artificial Sequence: Synthetic oligonucleotide
gcguggcccgugugugcuc

SEQ ID NO: 22411 - RNA, 19 nt, Artificial Sequence
  Description of Artificial Sequence: Synthetic oligonucleotide
ggcgggugcuucacacacu

SEQ ID NO: 22412 - RNA, 19 nt, Artificial Sequence
  Description of Artificial Sequence: Synthetic oligonucleotide
cguggcccgugugugcuca

SEQ ID NO: 22413 - RNA, 19 nt, Artificial Sequence
  Description of Artificial Sequence: Synthetic oligonucleotide
gcgguacguguaguaaguu

SEQ ID NO: 22414 - RNA, 19 nt, Artificial Sequence
  Description of Artificial Sequence: Synthetic oligonucleotide
gcaagccggggaggaccga

SEQ ID NO: 22415 - RNA, 19 nt, Artificial Sequence
  Description of Artificial Sequence: Synthetic oligonucleotide
ccaaccguuggggcacugu

SEQ ID NO: 22416 - RNA, 19 nt, Artificial Sequence
  Description of Artificial Sequence: Synthetic oligonucleotide
gggccggguaagccuugau

SEQ ID NO: 22417 - RNA, 19 nt, Artificial Sequence
  Description of Artificial Sequence: Synthetic oligonucleotide
cacguaccccuagcaccuu

SEQ ID NO: 22418 - RNA, 19 nt, Artificial Sequence
  Description of Artificial Sequence: Synthetic oligonucleotide
cgggcgucguuauguucuu

SEQ ID NO: 22419 - RNA, 19 nt, Artificial Sequence
  Description of Artificial Sequence: Synthetic oligonucleotide
gcccgugggcccgcucguu

SEQ ID NO: 22420 - RNA, 19 nt, Artificial Sequence
  Description of Artificial Sequence: Synthetic oligonucleotide
aauacaaucauaucuuucc

SEQ ID NO: 22421 - RNA, 19 nt, Artificial Sequence
  Description of Artificial Sequence: Synthetic oligonucleotide
aauuagaccugccagaggg

SEQ ID NO: 22422 - RNA, 19 nt, Artificial Sequence
  Description of Artificial Sequence: Synthetic oligonucleotide
aaaacacacacacacacac

SEQ ID NO: 22423 - RNA, 19 nt, Artificial Sequence
  Description of Artificial Sequence: Synthetic oligonucleotide
uauauauauauauauauac

SEQ ID NO: 22424 - RNA, 19 nt, Artificial Sequence
  Description of Artificial Sequence: Synthetic oligonucleotide
uauauauauauauacaacu

SEQ ID NO: 22425 - RNA, 19 nt, Artificial Sequence
  Description of Artificial Sequence: Synthetic oligonucleotide
uauauguauauauauauac

SEQ ID NO: 22426 - RNA, 19 nt, Artificial Sequence
  Description of Artificial Sequence: Synthetic oligonucleotide
uauauauauauauauauau

SEQ ID NO: 22427 - RNA, 19 nt, Artificial Sequence
  Description of Artificial Sequence: Synthetic oligonucleotide
uguauauauauauacacac

SEQ ID NO: 22428 - RNA, 19 nt, Artificial Sequence
  Description of Artificial Sequence: Synthetic oligonucleotide
aacacacacacacacacac

SEQ ID NO: 22429 - RNA, 19 nt, Artificial Sequence
  Description of Artificial Sequence: Synthetic oligonucleotide
uauauauauauauauacaa

SEQ ID NO: 22430 - RNA, 19 nt, Artificial Sequence
  Description of Artificial Sequence: Synthetic oligonucleotide
uauacauauauauauauau

SEQ ID NO: 22431 - RNA, 19 nt, Artificial Sequence
  Description of Artificial Sequence: Synthetic oligonucleotide
uauauauauauacacacaa

SEQ ID NO: 22432 - RNA, 19 nt, Artificial Sequence
  Description of Artificial Sequence: Synthetic oligonucleotide
ucuaaguucagauugaauc

SEQ ID NO: 22433 - RNA, 19 nt, Artificial Sequence
  Description of Artificial Sequence: Synthetic oligonucleotide
uauguauauauauauacac

SEQ ID NO: 22434 - RNA, 19 nt, Artificial Sequence
  Description of Artificial Sequence: Synthetic oligonucleotide
ucgucauugaacaagacca

SEQ ID NO: 22435 - RNA, 19 nt, Artificial Sequence
  Description of Artificial Sequence: Synthetic oligonucleotide
uauauauguauauauauau

SEQ ID NO: 22436 - RNA, 19 nt, Artificial Sequence
  Description of Artificial Sequence: Synthetic oligonucleotide
aacauguauauauauauau

SEQ ID NO: 22437 - RNA, 19 nt, Artificial Sequence
  Description of Artificial Sequence: Synthetic oligonucleotide
uauauauauauguauauau

SEQ ID NO: 22438 - RNA, 19 nt, Artificial Sequence
  Description of Artificial Sequence: Synthetic oligonucleotide
ucauguuacaaaauggagc

SEQ ID NO: 22439 - RNA, 19 nt, Artificial Sequence
  Description of Artificial Sequence: Synthetic oligonucleotide
uuaaguaccacuauacuaa

SEQ ID NO: 22440 - RNA, 19 nt, Artificial Sequence
  Description of Artificial Sequence: Synthetic oligonucleotide
cuuguaaacacacacacac

SEQ ID NO: 22441 - RNA, 19 nt, Artificial Sequence
  Description of Artificial Sequence: Synthetic oligonucleotide
aguacauauauauauauau

SEQ ID NO: 22442 - RNA, 19 nt, Artificial Sequence
  Description of Artificial Sequence: Synthetic oligonucleotide
uauauauauguauauauau

SEQ ID NO: 22443 - RNA, 19 nt, Artificial Sequence
  Description of Artificial Sequence: Synthetic oligonucleotide
uuugcuucgaaauuagacc

SEQ ID NO: 22444 - RNA, 19 nt, Artificial Sequence
  Description of Artificial Sequence: Synthetic oligonucleotide
uauauauauauauauguau

SEQ ID NO: 22445 - RNA, 19 nt, Artificial Sequence
  Description of Artificial Sequence: Synthetic oligonucleotide
agugaguuaauacauaaca

SEQ ID NO: 22446 - RNA, 19 nt, Artificial Sequence
  Description of Artificial Sequence: Synthetic oligonucleotide
agaaguuguaagcagauug

SEQ ID NO: 22447 - RNA, 19 nt, Artificial Sequence
  Description of Artificial Sequence: Synthetic oligonucleotide
uacauauauauauauauau

SEQ ID NO: 22448 - RNA, 19 nt, Artificial Sequence
  Description of Artificial Sequence: Synthetic oligonucleotide
uguaaacacacacacacac

SEQ ID NO: 22449 - RNA, 19 nt, Artificial Sequence
  Description of Artificial Sequence: Synthetic oligonucleotide
aacccgguaaaacaccacc

SEQ ID NO: 22450 - RNA, 19 nt, Artificial Sequence
  Description of Artificial Sequence: Synthetic oligonucleotide
uaaacacacacacacacac

SEQ ID NO: 22451 - RNA, 19 nt, Artificial Sequence
  Description of Artificial Sequence: Synthetic oligonucleotide
aguuacaugugccaagaac

SEQ ID NO: 22452 - RNA, 19 nt, Artificial Sequence
  Description of Artificial Sequence: Synthetic oligonucleotide
ucgaaauuagaccugccag

SEQ ID NO: 22453 - RNA, 19 nt, Artificial Sequence
  Description of Artificial Sequence: Synthetic oligonucleotide
auauauauauauauacaac

SEQ ID NO: 22454 - RNA, 19 nt, Artificial Sequence
  Description of Artificial Sequence: Synthetic oligonucleotide
aaguuauuucugccuaagc

SEQ ID NO: 22455 - RNA, 19 nt, Artificial Sequence
  Description of Artificial Sequence: Synthetic oligonucleotide
uauauauauauauguauau

SEQ ID NO: 22456 - RNA, 19 nt, Artificial Sequence
  Description of Artificial Sequence: Synthetic oligonucleotide
uauauauauauacaacuuu

SEQ ID NO: 22457 - RNA, 19 nt, Artificial Sequence
  Description of Artificial Sequence: Synthetic oligonucleotide
acacuuauagguaacuugc

SEQ ID NO: 22458 - RNA, 19 nt, Artificial Sequence
  Description of Artificial Sequence: Synthetic oligonucleotide
ggaagugccagcaagaucg

SEQ ID NO: 22459 - RNA, 19 nt, Artificial Sequence
  Description of Artificial Sequence: Synthetic oligonucleotide
ugcauaagaauacauccca

SEQ ID NO: 22460 - RNA, 19 nt, Artificial Sequence
  Description of Artificial Sequence: Synthetic oligonucleotide
uuuaaguaccacuauacua

SEQ ID NO: 22461 - RNA, 19 nt, Artificial Sequence
  Description of Artificial Sequence: Synthetic oligonucleotide
aauccagcaugagaaauac

SEQ ID NO: 22462 - RNA, 19 nt, Artificial Sequence
  Description of Artificial Sequence: Synthetic oligonucleotide
uaaugaaaugacuacgacu

SEQ ID NO: 22463 - RNA, 19 nt, Artificial Sequence
  Description of Artificial Sequence: Synthetic oligonucleotide
ugugcagcgauuuaguccu

SEQ ID NO: 22464 - RNA, 19 nt, Artificial Sequence
  Description of Artificial Sequence: Synthetic oligonucleotide
guaacuagcacggacagag

SEQ ID NO: 22465 - RNA, 19 nt, Artificial Sequence
  Description of Artificial Sequence: Synthetic oligonucleotide
aguuaaauagcaucucucu

SEQ ID NO: 22466 - RNA, 19 nt, Artificial Sequence
  Description of Artificial Sequence: Synthetic oligonucleotide
aacgaaaagguacaaguua

SEQ ID NO: 22467 - RNA, 19 nt, Artificial Sequence
  Description of Artificial Sequence: Synthetic oligonucleotide
cauauauauauauauaugu

SEQ ID NO: 22468 - RNA, 19 nt, Artificial Sequence
  Description of Artificial Sequence: Synthetic oligonucleotide
ugaguugcacauaauacaa

SEQ ID NO: 22469 - RNA, 19 nt, Artificial Sequence
  Description of Artificial Sequence: Synthetic oligonucleotide
cacacacacacacagagag

SEQ ID NO: 22470 - RNA, 19 nt, Artificial Sequence
  Description of Artificial Sequence: Synthetic oligonucleotide
agauucuucccucaaagga

SEQ ID NO: 22471 - RNA, 19 nt, Artificial Sequence
  Description of Artificial Sequence: Synthetic oligonucleotide
uugcauaagaauacauccc

SEQ ID NO: 22472 - RNA, 19 nt, Artificial Sequence
  Description of Artificial Sequence: Synthetic oligonucleotide
cauaccagaacgagcaugc

SEQ ID NO: 22473 - RNA, 19 nt, Artificial Sequence
  Description of Artificial Sequence: Synthetic oligonucleotide
uccuuauuacucaaccugc

SEQ ID NO: 22474 - RNA, 19 nt, Artificial Sequence
  Description of Artificial Sequence: Synthetic oligonucleotide
acauucguuaaguaaacgu

SEQ ID NO: 22475 - RNA, 19 nt, Artificial Sequence
  Description of Artificial Sequence: Synthetic oligonucleotide
uuaaugaaaugacuacgac

SEQ ID NO: 22476 - RNA, 19 nt, Artificial Sequence
  Description of Artificial Sequence: Synthetic oligonucleotide
acuuauagguaacuugcag

SEQ ID NO: 22477 - RNA, 19 nt, Artificial Sequence
  Description of Artificial Sequence: Synthetic oligonucleotide
ucaagguugacccaucaau

SEQ ID NO: 22478 - RNA, 19 nt, Artificial Sequence
  Description of Artificial Sequence: Synthetic oligonucleotide
uugaauccgacccuccucc

SEQ ID NO: 22479 - RNA, 19 nt, Artificial Sequence
  Description of Artificial Sequence: Synthetic oligonucleotide
uaguuauaauguaagcaac

SEQ ID NO: 22480 - RNA, 19 nt, Artificial Sequence
  Description of Artificial Sequence: Synthetic oligonucleotide
caacuaugugcucagacag

SEQ ID NO: 22481 - RNA, 19 nt, Artificial Sequence
  Description of Artificial Sequence: Synthetic oligonucleotide
aacccuagcgaugagagga

SEQ ID NO: 22482 - RNA, 19 nt, Artificial Sequence
  Description of Artificial Sequence: Synthetic oligonucleotide
agaguacauauauauauau

SEQ ID NO: 22483 - RNA, 19 nt, Artificial Sequence
  Description of Artificial Sequence: Synthetic oligonucleotide
ugauauacauauauauaua

SEQ ID NO: 22484 - RNA, 19 nt, Artificial Sequence
  Description of Artificial Sequence: Synthetic oligonucleotide
aagguugacccaucaaucu

SEQ ID NO: 22485 - RNA, 19 nt, Artificial Sequence
  Description of Artificial Sequence: Synthetic oligonucleotide
cacauuugcauaagaauac

SEQ ID NO: 22486 - RNA, 19 nt, Artificial Sequence
  Description of Artificial Sequence: Synthetic oligonucleotide
uuuccgugagcuugaaagg

SEQ ID NO: 22487 - RNA, 19 nt, Artificial Sequence
  Description of Artificial Sequence: Synthetic oligonucleotide
uguacauuaguagaguuua

SEQ ID NO: 22488 - RNA, 19 nt, Artificial Sequence
  Description of Artificial Sequence: Synthetic oligonucleotide
auauauauauauauauaca

SEQ ID NO: 22489 - RNA, 19 nt, Artificial Sequence
  Description of Artificial Sequence: Synthetic oligonucleotide
ugguuuauuucccucccag

SEQ ID NO: 22490 - RNA, 19 nt, Artificial Sequence
  Description of Artificial Sequence: Synthetic oligonucleotide
cacacagagagagagagag

SEQ ID NO: 22491 - RNA, 19 nt, Artificial Sequence
  Description of Artificial Sequence: Synthetic oligonucleotide
cuauaugcauuacaucacc

SEQ ID NO: 22492 - RNA, 19 nt, Artificial Sequence
  Description of Artificial Sequence: Synthetic oligonucleotide
ucgugcugaaauuaaggcc

SEQ ID NO: 22493 - RNA, 19 nt, Artificial Sequence
  Description of Artificial Sequence: Synthetic oligonucleotide
cauauauauauauauauau

SEQ ID NO: 22494 - RNA, 19 nt, Artificial Sequence
  Description of Artificial Sequence: Synthetic oligonucleotide
gauauacauauauauauau

SEQ ID NO: 22495 - RNA, 19 nt, Artificial Sequence
  Description of Artificial Sequence: Synthetic oligonucleotide
agagagagagaguacauau

SEQ ID NO: 22496 - RNA, 19 nt, Artificial Sequence
  Description of Artificial Sequence: Synthetic oligonucleotide
uguuugugugcaagguugg

SEQ ID NO: 22497 - RNA, 19 nt, Artificial Sequence
  Description of Artificial Sequence: Synthetic oligonucleotide
cacacacacacacacagag

SEQ ID NO: 22498 - RNA, 19 nt, Artificial Sequence
  Description of Artificial Sequence: Synthetic oligonucleotide
aaagugccuaguuucugug

SEQ ID NO: 22499 - RNA, 19 nt, Artificial Sequence
  Description of Artificial Sequence: Synthetic oligonucleotide
uuguaagcagauugugggg

SEQ ID NO: 22500 - RNA, 19 nt, Artificial Sequence
  Description of Artificial Sequence: Synthetic oligonucleotide
uuguaguuauaauguaagc

SEQ ID NO: 22501 - RNA, 19 nt, Artificial Sequence
  Description of Artificial Sequence: Synthetic oligonucleotide
guuucuauugcccaucgga

SEQ ID NO: 22502 - RNA, 19 nt, Artificial Sequence
  Description of Artificial Sequence: Synthetic oligonucleotide
cacagagagagagagagag

SEQ ID NO: 22503 - RNA, 19 nt, Artificial Sequence
  Description of Artificial Sequence: Synthetic oligonucleotide
acauauauauauauauaug

SEQ ID NO: 22504 - RNA, 19 nt, Artificial Sequence
  Description of Artificial Sequence: Synthetic oligonucleotide
cacacacacacacacacag

SEQ ID NO: 22505 - RNA, 19 nt, Artificial Sequence
  Description of Artificial Sequence: Synthetic oligonucleotide
acacugguauuuaucaacc

SEQ ID NO: 22506 - RNA, 19 nt, Artificial Sequence
  Description of Artificial Sequence: Synthetic oligonucleotide
ucugccuaagcaaaaccac

SEQ ID NO: 22507 - RNA, 19 nt, Artificial Sequence
  Description of Artificial Sequence: Synthetic oligonucleotide
aacauucguuaaguaaacg

SEQ ID NO: 22508 - RNA, 19 nt, Artificial Sequence
  Description of Artificial Sequence: Synthetic oligonucleotide
agcacauugauaggcaagg

SEQ ID NO: 22509 - RNA, 19 nt, Artificial Sequence
  Description of Artificial Sequence: Synthetic oligonucleotide
cuuauagguaacuugcaga

SEQ ID NO: 22510 - RNA, 19 nt, Artificial Sequence
  Description of Artificial Sequence: Synthetic oligonucleotide
ucuaaucauugaaaagcac

SEQ ID NO: 22511 - RNA, 19 nt, Artificial Sequence
  Description of Artificial Sequence: Synthetic oligonucleotide
aaacaguccagaaaccuca

SEQ ID NO: 22512 - RNA, 19 nt, Artificial Sequence
  Description of Artificial Sequence: Synthetic oligonucleotide
auugaauccgacccuccuc

SEQ ID NO: 22513 - RNA, 19 nt, Artificial Sequence
  Description of Artificial Sequence: Synthetic oligonucleotide
agcgauuuaguccuuuuga

SEQ ID NO: 22514 - RNA, 19 nt, Artificial Sequence
  Description of Artificial Sequence: Synthetic oligonucleotide
aauccugcaccauaaugau

SEQ ID NO: 22515 - RNA, 19 nt, Artificial Sequence
  Description of Artificial Sequence: Synthetic oligonucleotide
aacgugugcagcgauuuag

SEQ ID NO: 22516 - RNA, 19 nt, Artificial Sequence
  Description of Artificial Sequence: Synthetic oligonucleotide
acuaugugcucagacaguc

SEQ ID NO: 22517 - RNA, 19 nt, Artificial Sequence
  Description of Artificial Sequence: Synthetic oligonucleotide
cacacacacacagagagag

SEQ ID NO: 22518 - RNA, 19 nt, Artificial Sequence
  Description of Artificial Sequence: Synthetic oligonucleotide
accauuuugaugucuugug

SEQ ID NO: 22519 - RNA, 19 nt, Artificial Sequence
  Description of Artificial Sequence: Synthetic oligonucleotide
aaguuagugcugcugcugu

SEQ ID NO: 22520 - RNA, 19 nt, Artificial Sequence
  Description of Artificial Sequence: Synthetic oligonucleotide
auauauauauauauguaua

SEQ ID NO: 22521 - RNA, 19 nt, Artificial Sequence
  Description of Artificial Sequence: Synthetic oligonucleotide
auauguauauauauauaca

SEQ ID NO: 22522 - RNA, 19 nt, Artificial Sequence
  Description of Artificial Sequence: Synthetic oligonucleotide
uucguuaaguaaacguuuc

SEQ ID NO: 22523 - RNA, 19 nt, Artificial Sequence
  Description of Artificial Sequence: Synthetic oligonucleotide
gucgugcugaaauuaaggc

SEQ ID NO: 22524 - RNA, 19 nt, Artificial Sequence
  Description of Artificial Sequence: Synthetic oligonucleotide
cacacacacacacacacac

SEQ ID NO: 22525 - RNA, 19 nt, Artificial Sequence
  Description of Artificial Sequence: Synthetic oligonucleotide
aaugcucagcgagagagga

SEQ ID NO: 22526 - RNA, 19 nt, Artificial Sequence
  Description of Artificial Sequence: Synthetic oligonucleotide
ugcuaaguuauuucugccu

SEQ ID NO: 22527 - RNA, 19 nt, Artificial Sequence
  Description of Artificial Sequence: Synthetic oligonucleotide
uacaaaggguggaguaagg

SEQ ID NO: 22528 - RNA, 19 nt, Artificial Sequence
  Description of Artificial Sequence: Synthetic oligonucleotide
uaucaagaauccugcacca

SEQ ID NO: 22529 - RNA, 19 nt, Artificial Sequence
  Description of Artificial Sequence: Synthetic oligonucleotide
cuaugaacguugguaaagg

SEQ ID NO: 22530 - RNA, 19 nt, Artificial Sequence
  Description of Artificial Sequence: Synthetic oligonucleotide
ugacugaaccucuagguua

SEQ ID NO: 22531 - RNA, 19 nt, Artificial Sequence
  Description of Artificial Sequence: Synthetic oligonucleotide
ugcaccuuaagucgugcug

SEQ ID NO: 22532 - RNA, 19 nt, Artificial Sequence
  Description of Artificial Sequence: Synthetic oligonucleotide
cuccccacaagcuagaaga

SEQ ID NO: 22533 - RNA, 19 nt, Artificial Sequence
  Description of Artificial Sequence: Synthetic oligonucleotide
uguguccauguuaaaccag

SEQ ID NO: 22534 - RNA, 19 nt, Artificial Sequence
  Description of Artificial Sequence: Synthetic oligonucleotide
cuggguuaacacugcaugg

SEQ ID NO: 22535 - RNA, 19 nt, Artificial Sequence
  Description of Artificial Sequence: Synthetic oligonucleotide
agagcaucaacgugugcag

SEQ ID NO: 22536 - RNA, 19 nt, Artificial Sequence
  Description of Artificial Sequence: Synthetic oligonucleotide
ucagauugaauccgacccu

SEQ ID NO: 22537 - RNA, 19 nt, Artificial Sequence
  Description of Artificial Sequence: Synthetic oligonucleotide
uaaugcucagcgagagagg

SEQ ID NO: 22538 - RNA, 19 nt, Artificial Sequence
  Description of Artificial Sequence: Synthetic oligonucleotide
gagagcaucaacgugugca

SEQ ID NO: 22539 - RNA, 19 nt, Artificial Sequence
  Description of Artificial Sequence: Synthetic oligonucleotide
cacacacagagagagagag

SEQ ID NO: 22540 - RNA, 19 nt, Artificial Sequence
  Description of Artificial Sequence: Synthetic oligonucleotide
aggaugaaaggaugaccac

SEQ ID NO: 22541 - RNA, 19 nt, Artificial Sequence
  Description of Artificial Sequence: Synthetic oligonucleotide
uuguaaacacacacacaca

SEQ ID NO: 22542 - RNA, 19 nt, Artificial Sequence
  Description of Artificial Sequence: Synthetic oligonucleotide
gcaugagaaauacaguacc

SEQ ID NO: 22543 - RNA, 19 nt, Artificial Sequence
  Description of Artificial Sequence: Synthetic oligonucleotide
caagguugacccaucaauc

SEQ ID NO: 22544 - RNA, 19 nt, Artificial Sequence
  Description of Artificial Sequence: Synthetic oligonucleotide
agacguggaccauggacac

SEQ ID NO: 22545 - RNA, 19 nt, Artificial Sequence
  Description of Artificial Sequence: Synthetic oligonucleotide
cacacacacacacacgaag

SEQ ID NO: 22546 - RNA, 19 nt, Artificial Sequence
  Description of Artificial Sequence: Synthetic oligonucleotide
auauauauauauacaacuu

SEQ ID NO: 22547 - RNA, 19 nt, Artificial Sequence
  Description of Artificial Sequence: Synthetic oligonucleotide
auguauauauauauacaca

SEQ ID NO: 22548 - RNA, 19 nt, Artificial Sequence
  Description of Artificial Sequence: Synthetic oligonucleotide
uaugaacguugguaaagga

SEQ ID NO: 22549 - RNA, 19 nt, Artificial Sequence
  Description of Artificial Sequence: Synthetic oligonucleotide
auauauauauauauaugua

SEQ ID NO: 22550 - RNA, 19 nt, Artificial Sequence
  Description of Artificial Sequence: Synthetic oligonucleotide
agugcuaugaacguuggua

SEQ ID NO: 22551 - RNA, 19 nt, Artificial Sequence
  Description of Artificial Sequence: Synthetic oligonucleotide
auauauauauauauauaua

SEQ ID NO: 22552 - RNA, 19 nt, Artificial Sequence
  Description of Artificial Sequence: Synthetic oligonucleotide
cauguauauauauauauuu

SEQ ID NO: 22553 - RNA, 19 nt, Artificial Sequence
  Description of Artificial Sequence: Synthetic oligonucleotide
ugcucagcgagagaggagc

SEQ ID NO: 22554 - RNA, 19 nt, Artificial Sequence
  Description of Artificial Sequence: Synthetic oligonucleotide
cucuaaucauugaaaagca

SEQ ID NO: 22555 - RNA, 19 nt, Artificial Sequence
  Description of Artificial Sequence: Synthetic oligonucleotide
aacccaacaaccucuuguu

SEQ ID NO: 22556 - RNA, 19 nt, Artificial Sequence
  Description of Artificial Sequence: Synthetic oligonucleotide
auacuugagccugugagcu

SEQ ID NO: 22557 - RNA, 19 nt, Artificial Sequence
  Description of Artificial Sequence: Synthetic oligonucleotide
auauauauauauguauaua

SEQ ID NO: 22558 - RNA, 19 nt, Artificial Sequence
  Description of Artificial Sequence: Synthetic oligonucleotide
auauauauguauauauaua

SEQ ID NO: 22559 - RNA, 19 nt, Artificial Sequence
  Description of Artificial Sequence: Synthetic oligonucleotide
ugaccuguugagcuucccc

SEQ ID NO: 22560 - RNA, 19 nt, Artificial Sequence
  Description of Artificial Sequence: Synthetic oligonucleotide
ugccuaagcaaaaccacau

SEQ ID NO: 22561 - RNA, 19 nt, Artificial Sequence
  Description of Artificial Sequence: Synthetic oligonucleotide
ucguuaaguaaacguuucu

SEQ ID NO: 22562 - RNA, 19 nt, Artificial Sequence
  Description of Artificial Sequence: Synthetic oligonucleotide
auauauauauguauauaua

SEQ ID NO: 22563 - RNA, 19 nt, Artificial Sequence
  Description of Artificial Sequence: Synthetic oligonucleotide
uuaagucgugcugaaauua

SEQ ID NO: 22564 - RNA, 19 nt, Artificial Sequence
  Description of Artificial Sequence: Synthetic oligonucleotide
gaguuaaauagcaucucuc

SEQ ID NO: 22565 - RNA, 19 nt, Artificial Sequence
  Description of Artificial Sequence: Synthetic oligonucleotide
guauauauauauacacaca

SEQ ID NO: 22566 - RNA, 19 nt, Artificial Sequence
  Description of Artificial Sequence: Synthetic oligonucleotide
gagagagagagagaguaca

SEQ ID NO: 22567 - RNA, 19 nt, Artificial Sequence
  Description of Artificial Sequence: Synthetic oligonucleotide
guaguaaaggagcagggcu

SEQ ID NO: 22568 - RNA, 19 nt, Artificial Sequence
  Description of Artificial Sequence: Synthetic oligonucleotide
aaacgaaaagguacaaguu

SEQ ID NO: 22569 - RNA, 19 nt, Artificial Sequence
  Description of Artificial Sequence: Synthetic oligonucleotide
ccauaugggagucugacug

SEQ ID NO: 22570 - RNA, 19 nt, Artificial Sequence
  Description of Artificial Sequence: Synthetic oligonucleotide
guacaaaggguggaguaag

SEQ ID NO: 22571 - RNA, 19 nt, Artificial Sequence
  Description of Artificial Sequence: Synthetic oligonucleotide
agguugacccaucaaucug

SEQ ID NO: 22572 - RNA, 19 nt, Artificial Sequence
  Description of Artificial Sequence: Synthetic oligonucleotide
acauauauauauauauaua

SEQ ID NO: 22573 - RNA, 19 nt, Artificial Sequence
  Description of Artificial Sequence: Synthetic oligonucleotide
aguuucuauugcccaucgg

SEQ ID NO: 22574 - RNA, 19 nt, Artificial Sequence
  Description of Artificial Sequence: Synthetic oligonucleotide
aagugccuaguuucugugu

SEQ ID NO: 22575 - RNA, 19 nt, Artificial Sequence
  Description of Artificial Sequence: Synthetic oligonucleotide
gaacauucguuaaguaaac

SEQ ID NO: 22576 - RNA, 19 nt, Artificial Sequence
  Description of Artificial Sequence: Synthetic oligonucleotide
cagacguggaccauggaca

SEQ ID NO: 22577 - RNA, 19 nt, Artificial Sequence
  Description of Artificial Sequence: Synthetic oligonucleotide
acgcccaugcacuuuuauc

SEQ ID NO: 22578 - RNA, 19 nt, Artificial Sequence
  Description of Artificial Sequence: Synthetic oligonucleotide
cacacacacacacacacga

SEQ ID NO: 22579 - RNA, 19 nt, Artificial Sequence
  Description of Artificial Sequence: Synthetic oligonucleotide
acuacgacuucauuccuua

SEQ ID NO: 22580 - RNA, 19 nt, Artificial Sequence
  Description of Artificial Sequence: Synthetic oligonucleotide
ucucaagguugacccauca

SEQ ID NO: 22581 - RNA, 19 nt, Artificial Sequence
  Description of Artificial Sequence: Synthetic oligonucleotide
caguaacuagcacggacag

SEQ ID NO: 22582 - RNA, 19 nt, Artificial Sequence
  Description of Artificial Sequence: Synthetic oligonucleotide
cacaacccgguaaaacacc

SEQ ID NO: 22583 - RNA, 19 nt, Artificial Sequence
  Description of Artificial Sequence: Synthetic oligonucleotide
acccgguaaaacaccaccc

SEQ ID NO: 22584 - RNA, 19 nt, Artificial Sequence
  Description of Artificial Sequence: Synthetic oligonucleotide
auguauauauauauauuuu

SEQ ID NO: 22585 - RNA, 19 nt, Artificial Sequence
  Description of Artificial Sequence: Synthetic oligonucleotide
agucugacugaaccucuag

SEQ ID NO: 22586 - RNA, 19 nt, Artificial Sequence
  Description of Artificial Sequence: Synthetic oligonucleotide
cucaaccugccacaacccg

SEQ ID NO: 22587 - RNA, 19 nt, Artificial Sequence
  Description of Artificial Sequence: Synthetic oligonucleotide
auacauauauauauauaua

SEQ ID NO: 22588 - RNA, 19 nt, Artificial Sequence
  Description of Artificial Sequence: Synthetic oligonucleotide
auauacauauauauauaua

SEQ ID NO: 22589 - RNA, 19 nt, Artificial Sequence
  Description of Artificial Sequence: Synthetic oligonucleotide
gaacccuagcgaugagagg

SEQ ID NO: 22590 - RNA, 19 nt, Artificial Sequence
  Description of Artificial Sequence: Synthetic oligonucleotide
ucuccaucuaaagggagaa

SEQ ID NO: 22591 - RNA, 19 nt, Artificial Sequence
  Description of Artificial Sequence: Synthetic oligonucleotide
acaaguuagugcugcugcu

SEQ ID NO: 22592 - RNA, 19 nt, Artificial Sequence
  Description of Artificial Sequence: Synthetic oligonucleotide
auauauguauauauauaua

SEQ ID NO: 22593 - RNA, 19 nt, Artificial Sequence
  Description of Artificial Sequence: Synthetic oligonucleotide
accaguaagaugagcaacu

SEQ ID NO: 22594 - RNA, 19 nt, Artificial Sequence
  Description of Artificial Sequence: Synthetic oligonucleotide
agauugaauccgacccucc

SEQ ID NO: 22595 - RNA, 19 nt, Artificial Sequence
  Description of Artificial Sequence: Synthetic oligonucleotide
uuugcgguaccuucuguuu

SEQ ID NO: 22596 - RNA, 19 nt, Artificial Sequence
  Description of Artificial Sequence: Synthetic oligonucleotide
agagagagagagagaguac

SEQ ID NO: 22597 - RNA, 19 nt, Artificial Sequence
  Description of Artificial Sequence: Synthetic oligonucleotide
agagagcaucaacgugugc

SEQ ID NO: 22598 - RNA, 19 nt, Artificial Sequence
  Description of Artificial Sequence: Synthetic oligonucleotide
auuaaggccaagggugcag

SEQ ID NO: 22599 - RNA, 19 nt, Artificial Sequence
  Description of Artificial Sequence: Synthetic oligonucleotide
agugcggcaguugguuucc

SEQ ID NO: 22600 - RNA, 19 nt, Artificial Sequence
  Description of Artificial Sequence: Synthetic oligonucleotide
caucggaagagagaaaaga

SEQ ID NO: 22601 - RNA, 19 nt, Artificial Sequence
  Description of Artificial Sequence: Synthetic oligonucleotide
cacgaagaugaacucucag

SEQ ID NO: 22602 - RNA, 19 nt, Artificial Sequence
  Description of Artificial Sequence: Synthetic oligonucleotide
guguugagggaagaauuag

SEQ ID NO: 22603 - RNA, 19 nt, Artificial Sequence
  Description of Artificial Sequence: Synthetic oligonucleotide
auucguuaaguaaacguuu

SEQ ID NO: 22604 - RNA, 19 nt, Artificial Sequence
  Description of Artificial Sequence: Synthetic oligonucleotide
gaacgagcaugccugggca

SEQ ID NO: 22605 - RNA, 19 nt, Artificial Sequence
  Description of Artificial Sequence: Synthetic oligonucleotide
agaacacacugguauuuau

SEQ ID NO: 22606 - RNA, 19 nt, Artificial Sequence
  Description of Artificial Sequence: Synthetic oligonucleotide
acauguauauauauauauu

SEQ ID NO: 22607 - RNA, 19 nt, Artificial Sequence
  Description of Artificial Sequence: Synthetic oligonucleotide
gaguugaaaguucuaaguu

SEQ ID NO: 22608 - RNA, 19 nt, Artificial Sequence
  Description of Artificial Sequence: Synthetic oligonucleotide
ggagugaguuaauacauaa

SEQ ID NO: 22609 - RNA, 19 nt, Artificial Sequence
  Description of Artificial Sequence: Synthetic oligonucleotide
guacauauauauauauaua

SEQ ID NO: 22610 - RNA, 19 nt, Artificial Sequence
  Description of Artificial Sequence: Synthetic oligonucleotide
aaacacacacacacacaca

SEQ ID NO: 22611 - RNA, 19 nt, Artificial Sequence
  Description of Artificial Sequence: Synthetic oligonucleotide
ugcuaugaacguugguaaa

SEQ ID NO: 22612 - RNA, 19 nt, Artificial Sequence
  Description of Artificial Sequence: Synthetic oligonucleotide
uaacuagcacggacagagc

SEQ ID NO: 22613 - RNA, 19 nt, Artificial Sequence
  Description of Artificial Sequence: Synthetic oligonucleotide
cuagcgaugagaggaagca

SEQ ID NO: 22614 - RNA, 19 nt, Artificial Sequence
  Description of Artificial Sequence: Synthetic oligonucleotide
acacacacacacgaagaug

SEQ ID NO: 22615 - RNA, 19 nt, Artificial Sequence
  Description of Artificial Sequence: Synthetic oligonucleotide
aagugcuaugaacguuggu

SEQ ID NO: 22616 - RNA, 19 nt, Artificial Sequence
  Description of Artificial Sequence: Synthetic oligonucleotide
guaaaacuuaucaccugca

SEQ ID NO: 22617 - RNA, 19 nt, Artificial Sequence
  Description of Artificial Sequence: Synthetic oligonucleotide
gugaaccagugauuuuaag

SEQ ID NO: 22618 - RNA, 19 nt, Artificial Sequence
  Description of Artificial Sequence: Synthetic oligonucleotide
ugacuacgacuucauuccu

SEQ ID NO: 22619 - RNA, 19 nt, Artificial Sequence
  Description of Artificial Sequence: Synthetic oligonucleotide
gaguacauauauauauaua

SEQ ID NO: 22620 - RNA, 19 nt, Artificial Sequence
  Description of Artificial Sequence: Synthetic oligonucleotide
ugagcacacuagaggugcc

SEQ ID NO: 22621 - RNA, 19 nt, Artificial Sequence
  Description of Artificial Sequence: Synthetic oligonucleotide
auaccagaacgagcaugcc

SEQ ID NO: 22622 - RNA, 19 nt, Artificial Sequence
  Description of Artificial Sequence: Synthetic oligonucleotide
aacuaugugcucagacagu

SEQ ID NO: 22623 - RNA, 19 nt, Artificial Sequence
  Description of Artificial Sequence: Synthetic oligonucleotide
gcaacuaugugcucagaca

SEQ ID NO: 22624 - RNA, 19 nt, Artificial Sequence
  Description of Artificial Sequence: Synthetic oligonucleotide
acacacgaagaugaacucu

SEQ ID NO: 22625 - RNA, 19 nt, Artificial Sequence
  Description of Artificial Sequence: Synthetic oligonucleotide
uuacucaaccugccacaac

SEQ ID NO: 22626 - RNA, 19 nt, Artificial Sequence
  Description of Artificial Sequence: Synthetic oligonucleotide
cauucguuaaguaaacguu

SEQ ID NO: 22627 - RNA, 19 nt, Artificial Sequence
  Description of Artificial Sequence: Synthetic oligonucleotide
cacacacgaagaugaacuc

SEQ ID NO: 22628 - RNA, 19 nt, Artificial Sequence
  Description of Artificial Sequence: Synthetic oligonucleotide
acacacacacacacgaaga

SEQ ID NO: 22629 - RNA, 19 nt, Artificial Sequence
  Description of Artificial Sequence: Synthetic oligonucleotide
caacauguauauauauaua

SEQ ID NO: 22630 - RNA, 19 nt, Artificial Sequence
  Description of Artificial Sequence: Synthetic oligonucleotide
ucuucccucaaaggaaguc

SEQ ID NO: 22631 - RNA, 19 nt, Artificial Sequence
  Description of Artificial Sequence: Synthetic oligonucleotide
cagagagagagagagagua

SEQ ID NO: 22632 - RNA, 19 nt, Artificial Sequence
  Description of Artificial Sequence: Synthetic oligonucleotide
agggaacuuugcugaagug

SEQ ID NO: 22633 - RNA, 19 nt, Artificial Sequence
  Description of Artificial Sequence: Synthetic oligonucleotide
guaucuccaucuaaaggga

SEQ ID NO: 22634 - RNA, 19 nt, Artificial Sequence
  Description of Artificial Sequence: Synthetic oligonucleotide
ggaguugucagaggcacug

SEQ ID NO: 22635 - RNA, 19 nt, Artificial Sequence
  Description of Artificial Sequence: Synthetic oligonucleotide
gagugcggcaguugguuuc

SEQ ID NO: 22636 - RNA, 19 nt, Artificial Sequence
  Description of Artificial Sequence: Synthetic oligonucleotide
cagcgauuuaguccuuuug

SEQ ID NO: 22637 - RNA, 19 nt, Artificial Sequence
  Description of Artificial Sequence: Synthetic oligonucleotide
guaaacacacacacacaca

SEQ ID NO: 22638 - RNA, 19 nt, Artificial Sequence
  Description of Artificial Sequence: Synthetic oligonucleotide
gccacaacccgguaaaaca

SEQ ID NO: 22639 - RNA, 19 nt, Artificial Sequence
  Description of Artificial Sequence: Synthetic oligonucleotide
uccugcaccuuaagucgug

SEQ ID NO: 22640 - RNA, 19 nt, Artificial Sequence
  Description of Artificial Sequence: Synthetic oligonucleotide
gaugaccacauaaggaccu

SEQ ID NO: 22641 - RNA, 19 nt, Artificial Sequence
  Description of Artificial Sequence: Synthetic oligonucleotide
acacacacacacacacacg

SEQ ID NO: 22642 - RNA, 19 nt, Artificial Sequence
  Description of Artificial Sequence: Synthetic oligonucleotide
agucugucaaugaccaccu

SEQ ID NO: 22643 - RNA, 19 nt, Artificial Sequence
  Description of Artificial Sequence: Synthetic oligonucleotide
gcuuauuuguacauuagua

SEQ ID NO: 22644 - RNA, 19 nt, Artificial Sequence
  Description of Artificial Sequence: Synthetic oligonucleotide
ugaauccgacccuccuccc

SEQ ID NO: 22645 - RNA, 19 nt, Artificial Sequence
  Description of Artificial Sequence: Synthetic oligonucleotide
gauugaauccgacccuccu

SEQ ID NO: 22646 - RNA, 19 nt, Artificial Sequence
  Description of Artificial Sequence: Synthetic oligonucleotide
uaccggaucagggcagugc

SEQ ID NO: 22647 - RNA, 19 nt, Artificial Sequence
  Description of Artificial Sequence: Synthetic oligonucleotide
ucccuuuugcccucacuau

SEQ ID NO: 22648 - RNA, 19 nt, Artificial Sequence
  Description of Artificial Sequence: Synthetic oligonucleotide
gagugagauugugaagaac

SEQ ID NO: 22649 - RNA, 19 nt, Artificial Sequence
  Description of Artificial Sequence: Synthetic oligonucleotide
cauuuguaucuccaucuaa

SEQ ID NO: 22650 - RNA, 19 nt, Artificial Sequence
  Description of Artificial Sequence: Synthetic oligonucleotide
cuguaccggaucagggcag

SEQ ID NO: 22651 - RNA, 19 nt, Artificial Sequence
  Description of Artificial Sequence: Synthetic oligonucleotide
acaaugaguuaaauagcau

SEQ ID NO: 22652 - RNA, 19 nt, Artificial Sequence
  Description of Artificial Sequence: Synthetic oligonucleotide
cacuuauagguaacuugca

SEQ ID NO: 22653 - RNA, 19 nt, Artificial Sequence
  Description of Artificial Sequence: Synthetic oligonucleotide
auuacucaaccugccacaa

SEQ ID NO: 22654 - RNA, 19 nt, Artificial Sequence
  Description of Artificial Sequence: Synthetic oligonucleotide
cagauugaauccgacccuc

SEQ ID NO: 22655 - RNA, 19 nt, Artificial Sequence
  Description of Artificial Sequence: Synthetic oligonucleotide
ggaugaaaggaugaccaca

SEQ ID NO: 22656 - RNA, 19 nt, Artificial Sequence
  Description of Artificial Sequence: Synthetic oligonucleotide
acaacccgguaaaacacca

SEQ ID NO: 22657 - RNA, 19 nt, Artificial Sequence
  Description of Artificial Sequence: Synthetic oligonucleotide
gcuaaguuauuucugccua

SEQ ID NO: 22658 - RNA, 19 nt, Artificial Sequence
  Description of Artificial Sequence: Synthetic oligonucleotide
cauguuaaaccaguaagau

SEQ ID NO: 22659 - RNA, 19 nt, Artificial Sequence
  Description of Artificial Sequence: Synthetic oligonucleotide
agucgucauugaacaagac

SEQ ID NO: 22660 - RNA, 19 nt, Artificial Sequence
  Description of Artificial Sequence: Synthetic oligonucleotide
cagacaucagcgaagcccu

SEQ ID NO: 22661 - RNA, 19 nt, Artificial Sequence
  Description of Artificial Sequence: Synthetic oligonucleotide
gcaagaucggccccacugc

SEQ ID NO: 22662 - RNA, 19 nt, Artificial Sequence
  Description of Artificial Sequence: Synthetic oligonucleotide
gaauccgacccuccuccca

SEQ ID NO: 22663 - RNA, 19 nt, Artificial Sequence
  Description of Artificial Sequence: Synthetic oligonucleotide
ggagugaacagggugucac

SEQ ID NO: 22664 - RNA, 19 nt, Artificial Sequence
  Description of Artificial Sequence: Synthetic oligonucleotide
cacgccauggccuggcaca

SEQ ID NO: 22665 - RNA, 19 nt, Artificial Sequence
  Description of Artificial Sequence: Synthetic oligonucleotide
auccuauggggaucuucca

SEQ ID NO: 22666 - RNA, 19 nt, Artificial Sequence
  Description of Artificial Sequence: Synthetic oligonucleotide
aagaucggccccacugcug

SEQ ID NO: 22667 - RNA, 19 nt, Artificial Sequence
  Description of Artificial Sequence: Synthetic oligonucleotide
uaacacgccauggccuggc

SEQ ID NO: 22668 - RNA, 19 nt, Artificial Sequence
  Description of Artificial Sequence: Synthetic oligonucleotide
ccuagcgaugagaggaagc

SEQ ID NO: 22669 - RNA, 19 nt, Artificial Sequence
  Description of Artificial Sequence: Synthetic oligonucleotide
gagugguugggucugguuu

SEQ ID NO: 22670 - RNA, 19 nt, Artificial Sequence
  Description of Artificial Sequence: Synthetic oligonucleotide
cacauugauaggcaagggu

SEQ ID NO: 22671 - RNA, 19 nt, Artificial Sequence
  Description of Artificial Sequence: Synthetic oligonucleotide
gaaguacacacugguuuaa

SEQ ID NO: 22672 - RNA, 19 nt, Artificial Sequence
  Description of Artificial Sequence: Synthetic oligonucleotide
ccugccgugcaagugaacc

SEQ ID NO: 22673 - RNA, 19 nt, Artificial Sequence
  Description of Artificial Sequence: Synthetic oligonucleotide
gcaggcagaacccuagcga

SEQ ID NO: 22674 - RNA, 19 nt, Artificial Sequence
  Description of Artificial Sequence: Synthetic oligonucleotide
caacccgguaaaacaccac

SEQ ID NO: 22675 - RNA, 19 nt, Artificial Sequence
  Description of Artificial Sequence: Synthetic oligonucleotide
gagagagagagaguacaua

SEQ ID NO: 22676 - RNA, 19 nt, Artificial Sequence
  Description of Artificial Sequence: Synthetic oligonucleotide
agagagagagagaguacau

SEQ ID NO: 22677 - RNA, 19 nt, Artificial Sequence
  Description of Artificial Sequence: Synthetic oligonucleotide
cagcgaagcccuuugggaa

SEQ ID NO: 22678 - RNA, 19 nt, Artificial Sequence
  Description of Artificial Sequence: Synthetic oligonucleotide
uuaucaccugcaguuucua

SEQ ID NO: 22679 - RNA, 19 nt, Artificial Sequence
  Description of Artificial Sequence: Synthetic oligonucleotide
guucagcgcagguccaaca

SEQ ID NO: 22680 - RNA, 19 nt, Artificial Sequence
  Description of Artificial Sequence: Synthetic oligonucleotide
cagaacgagcaugccuggg

SEQ ID NO: 22681 - RNA, 19 nt, Artificial Sequence
  Description of Artificial Sequence: Synthetic oligonucleotide
acagggugucacaaugagu

SEQ ID NO: 22682 - RNA, 19 nt, Artificial Sequence
  Description of Artificial Sequence: Synthetic oligonucleotide
guaacacgccauggccugg

SEQ ID NO: 22683 - RNA, 19 nt, Artificial Sequence
  Description of Artificial Sequence: Synthetic oligonucleotide
cucagcgagagaggagcag

SEQ ID NO: 22684 - RNA, 19 nt, Artificial Sequence
  Description of Artificial Sequence: Synthetic oligonucleotide
ccaucggaagagagaaaag

SEQ ID NO: 22685 - RNA, 19 nt, Artificial Sequence
  Description of Artificial Sequence: Synthetic oligonucleotide
ggcagaacccuagcgauga

SEQ ID NO: 22686 - RNA, 19 nt, Artificial Sequence
  Description of Artificial Sequence: Synthetic oligonucleotide
acacacacacacacagaga

SEQ ID NO: 22687 - RNA, 19 nt, Artificial Sequence
  Description of Artificial Sequence: Synthetic oligonucleotide
gcggcaguugguuuccgug

SEQ ID NO: 22688 - RNA, 19 nt, Artificial Sequence
  Description of Artificial Sequence: Synthetic oligonucleotide
acagagagagagagagagu

SEQ ID NO: 22689 - RNA, 19 nt, Artificial Sequence
  Description of Artificial Sequence: Synthetic oligonucleotide
cuuaagucgugcugaaauu

SEQ ID NO: 22690 - RNA, 19 nt, Artificial Sequence
  Description of Artificial Sequence: Synthetic oligonucleotide
cgaaauuagaccugccaga

SEQ ID NO: 22691 - RNA, 19 nt, Artificial Sequence
  Description of Artificial Sequence: Synthetic oligonucleotide
agagugcggcaguugguuu

SEQ ID NO: 22692 - RNA, 19 nt, Artificial Sequence
  Description of Artificial Sequence: Synthetic oligonucleotide
aucaagaauccugcaccau

SEQ ID NO: 22693 - RNA, 19 nt, Artificial Sequence
  Description of Artificial Sequence: Synthetic oligonucleotide
ggcgcagacaucagcgaag

SEQ ID NO: 22694 - RNA, 19 nt, Artificial Sequence
  Description of Artificial Sequence: Synthetic oligonucleotide
acccaacaaccucuuguua

SEQ ID NO: 22695 - RNA, 19 nt, Artificial Sequence
  Description of Artificial Sequence: Synthetic oligonucleotide
uccgacccuccucccagaa

SEQ ID NO: 22696 - RNA, 19 nt, Artificial Sequence
  Description of Artificial Sequence: Synthetic oligonucleotide
cugccgugcaagugaacca

SEQ ID NO: 22697 - RNA, 19 nt, Artificial Sequence
  Description of Artificial Sequence: Synthetic oligonucleotide
acacacacacacacacaca

SEQ ID NO: 22698 - RNA, 19 nt, Artificial Sequence
  Description of Artificial Sequence: Synthetic oligonucleotide
caauccgagaguccugugu

SEQ ID NO: 22699 - RNA, 19 nt, Artificial Sequence
  Description of Artificial Sequence: Synthetic oligonucleotide
acgugugcagcgauuuagu

SEQ ID NO: 22700 - RNA, 19 nt, Artificial Sequence
  Description of Artificial Sequence: Synthetic oligonucleotide
acacacacacacagagaga

SEQ ID NO: 22701 - RNA, 19 nt, Artificial Sequence
  Description of Artificial Sequence: Synthetic oligonucleotide
agagaugagugggguugug

SEQ ID NO: 22702 - RNA, 19 nt, Artificial Sequence
  Description of Artificial Sequence: Synthetic oligonucleotide
acacacacacacacacaga

SEQ ID NO: 22703 - RNA, 19 nt, Artificial Sequence
  Description of Artificial Sequence: Synthetic oligonucleotide
cucaagguugacccaucaa

SEQ ID NO: 22704 - RNA, 19 nt, Artificial Sequence
  Description of Artificial Sequence: Synthetic oligonucleotide
cagaacccuagcgaugaga

SEQ ID NO: 22705 - RNA, 19 nt, Artificial Sequence
  Description of Artificial Sequence: Synthetic oligonucleotide
gguguugagggaagaauua

SEQ ID NO: 22706 - RNA, 19 nt, Artificial Sequence
  Description of Artificial Sequence: Synthetic oligonucleotide
caggcagaacccuagcgau

SEQ ID NO: 22707 - RNA, 19 nt, Artificial Sequence
  Description of Artificial Sequence: Synthetic oligonucleotide
ccuuaagucgugcugaaau

SEQ ID NO: 22708 - RNA, 19 nt, Artificial Sequence
  Description of Artificial Sequence: Synthetic oligonucleotide
acacacagagagagagaga

SEQ ID NO: 22709 - RNA, 19 nt, Artificial Sequence
  Description of Artificial Sequence: Synthetic oligonucleotide
acacagagagagagagaga

SEQ ID NO: 22710 - RNA, 19 nt, Artificial Sequence
  Description of Artificial Sequence: Synthetic oligonucleotide
ccgguuugggguuggucag

SEQ ID NO: 22711 - RNA, 19 nt, Artificial Sequence
  Description of Artificial Sequence: Synthetic oligonucleotide
cugaccuguugagcuuccc

SEQ ID NO: 22712 - RNA, 19 nt, Artificial Sequence
  Description of Artificial Sequence: Synthetic oligonucleotide
acacacacacacacacgaa

SEQ ID NO: 22713 - RNA, 19 nt, Artificial Sequence
  Description of Artificial Sequence: Synthetic oligonucleotide
cacacacacacacgaagau

SEQ ID NO: 22714 - RNA, 19 nt, Artificial Sequence
  Description of Artificial Sequence: Synthetic oligonucleotide
agcaacugaguugcacaua

SEQ ID NO: 22715 - RNA, 19 nt, Artificial Sequence
  Description of Artificial Sequence: Synthetic oligonucleotide
gcgcagacaucagcgaagc

SEQ ID NO: 22716 - RNA, 19 nt, Artificial Sequence
  Description of Artificial Sequence: Synthetic oligonucleotide
aucaacgugugcagcgauu

SEQ ID NO: 22717 - RNA, 19 nt, Artificial Sequence
  Description of Artificial Sequence: Synthetic oligonucleotide
cccaucggaagagagaaaa

SEQ ID NO: 22718 - RNA, 19 nt, Artificial Sequence
  Description of Artificial Sequence: Synthetic oligonucleotide
agaugccgguuugggguug

SEQ ID NO: 22719 - RNA, 19 nt, Artificial Sequence
  Description of Artificial Sequence: Synthetic oligonucleotide
caccuuaagucgugcugaa

SEQ ID NO: 22720 - RNA, 19 nt, Artificial Sequence
  Description of Artificial Sequence: Synthetic oligonucleotide
accuuaagucgugcugaaa

SEQ ID NO: 22721 - RNA, 19 nt, Artificial Sequence
  Description of Artificial Sequence: Synthetic oligonucleotide
aggaguugucagaggcacu

SEQ ID NO: 22722 - RNA, 19 nt, Artificial Sequence
  Description of Artificial Sequence: Synthetic oligonucleotide
aggcaauccgagaguccug

SEQ ID NO: 22723 - RNA, 19 nt, Artificial Sequence
  Description of Artificial Sequence: Synthetic oligonucleotide
cuaugggaucuggggacca

SEQ ID NO: 22724 - RNA, 19 nt, Artificial Sequence
  Description of Artificial Sequence: Synthetic oligonucleotide
gguacaaguuagugcugcu

SEQ ID NO: 22725 - RNA, 19 nt, Artificial Sequence
  Description of Artificial Sequence: Synthetic oligonucleotide
cucucaccucugguucagc

SEQ ID NO: 22726 - RNA, 19 nt, Artificial Sequence
  Description of Artificial Sequence: Synthetic oligonucleotide
gagaugccgguuugggguu

SEQ ID NO: 22727 - RNA, 19 nt, Artificial Sequence
  Description of Artificial Sequence: Synthetic oligonucleotide
gcgaacugucagcaaugca

SEQ ID NO: 22728 - RNA, 19 nt, Artificial Sequence
  Description of Artificial Sequence: Synthetic oligonucleotide
gacuacgacuucauuccuu

SEQ ID NO: 22729 - RNA, 19 nt, Artificial Sequence
  Description of Artificial Sequence: Synthetic oligonucleotide
gguucagcgcagguccaac

SEQ ID NO: 22730 - RNA, 19 nt, Artificial Sequence
  Description of Artificial Sequence: Synthetic oligonucleotide
gccuaagcaaaaccacaua

SEQ ID NO: 22731 - RNA, 19 nt, Artificial Sequence
  Description of Artificial Sequence: Synthetic oligonucleotide
agguucagcgcagguccaa

SEQ ID NO: 22732 - RNA, 19 nt, Artificial Sequence
  Description of Artificial Sequence: Synthetic oligonucleotide
ccugcaccuuaagucgugc

SEQ ID NO: 22733 - RNA, 19 nt, Artificial Sequence
  Description of Artificial Sequence: Synthetic oligonucleotide
cagcgagguguugagggaa

SEQ ID NO: 22734 - RNA, 19 nt, Artificial Sequence
  Description of Artificial Sequence: Synthetic oligonucleotide
cgaggcaauccgagagucc

SEQ ID NO: 22735 - RNA, 19 nt, Artificial Sequence
  Description of Artificial Sequence: Synthetic oligonucleotide
gcagaacccuagcgaugag

SEQ ID NO: 22736 - RNA, 19 nt, Artificial Sequence
  Description of Artificial Sequence: Synthetic oligonucleotide
acccuagcgaugagaggaa

SEQ ID NO: 22737 - RNA, 19 nt, Artificial Sequence
  Description of Artificial Sequence: Synthetic oligonucleotide
cagauuguggggagugguu

SEQ ID NO: 22738 - RNA, 19 nt, Artificial Sequence
  Description of Artificial Sequence: Synthetic oligonucleotide
ggcaauccgagaguccugu

SEQ ID NO: 22739 - RNA, 19 nt, Artificial Sequence
  Description of Artificial Sequence: Synthetic oligonucleotide
gggcaguuacaugugccaa

SEQ ID NO: 22740 - RNA, 19 nt, Artificial Sequence
  Description of Artificial Sequence: Synthetic oligonucleotide
gcagauuguggggaguggu

SEQ ID NO: 22741 - RNA, 19 nt, Artificial Sequence
  Description of Artificial Sequence: Synthetic oligonucleotide
caacgugugcagcgauuua

SEQ ID NO: 22742 - RNA, 19 nt, Artificial Sequence
  Description of Artificial Sequence: Synthetic oligonucleotide
cuccaucuaaagggagaaa

SEQ ID NO: 22743 - RNA, 19 nt, Artificial Sequence
  Description of Artificial Sequence: Synthetic oligonucleotide
gggucucccacucacuguu

SEQ ID NO: 22744 - RNA, 19 nt, Artificial Sequence
  Description of Artificial Sequence: Synthetic oligonucleotide
gugcggcaguugguuuccg

SEQ ID NO: 22745 - RNA, 19 nt, Artificial Sequence
  Description of Artificial Sequence: Synthetic oligonucleotide
ccccucaaacaucuguaaa

SEQ ID NO: 22746 - RNA, 19 nt, Artificial Sequence
  Description of Artificial Sequence: Synthetic oligonucleotide
cccuagcgaugagaggaag

SEQ ID NO: 22747 - RNA, 19 nt, Artificial Sequence
  Description of Artificial Sequence: Synthetic oligonucleotide
cccgguaaaacaccacccu

SEQ ID NO: 22748 - RNA, 19 nt, Artificial Sequence
  Description of Artificial Sequence: Synthetic oligonucleotide
gguaacuugcagagagcau

SEQ ID NO: 22749 - RNA, 19 nt, Artificial Sequence
  Description of Artificial Sequence: Synthetic oligonucleotide
ccgacccuccucccagaag

SEQ ID NO: 22750 - RNA, 19 nt, Artificial Sequence
  Description of Artificial Sequence: Synthetic oligonucleotide
gccgaggcaauccgagagu

SEQ ID NO: 22751 - RNA, 19 nt, Artificial Sequence
  Description of Artificial Sequence: Synthetic oligonucleotide
gcgcuuggguuugcugcag

SEQ ID NO: 22752 - RNA, 19 nt, Artificial Sequence
  Description of Artificial Sequence: Synthetic oligonucleotide
ggcuacugcucuaaucauu

SEQ ID NO: 22753 - RNA, 19 nt, Artificial Sequence
  Description of Artificial Sequence: Synthetic oligonucleotide
gcagcgauuuaguccuuuu

SEQ ID NO: 22754 - RNA, 19 nt, Artificial Sequence
  Description of Artificial Sequence: Synthetic oligonucleotide
ccgaagaaguggcuugagu

SEQ ID NO: 22755 - RNA, 19 nt, Artificial Sequence
  Description of Artificial Sequence: Synthetic oligonucleotide
gagugggguuguguccuau

SEQ ID NO: 22756 - RNA, 19 nt, Artificial Sequence
  Description of Artificial Sequence: Synthetic oligonucleotide
ccucacuaugcugaccugu

SEQ ID NO: 22757 - RNA, 19 nt, Artificial Sequence
  Description of Artificial Sequence: Synthetic oligonucleotide
ccugucuacuuugcuaagu

SEQ ID NO: 22758 - RNA, 19 nt, Artificial Sequence
  Description of Artificial Sequence: Synthetic oligonucleotide
ggagugguugggucugguu

SEQ ID NO: 22759 - RNA, 19 nt, Artificial Sequence
  Description of Artificial Sequence: Synthetic oligonucleotide
gcagcgguguaguguuccu

SEQ ID NO: 22760 - RNA, 19 nt, Artificial Sequence
  Description of Artificial Sequence: Synthetic oligonucleotide
gaccugccagagggcggga

SEQ ID NO: 22761 - RNA, 19 nt, Artificial Sequence
  Description of Artificial Sequence: Synthetic oligonucleotide
ccgguaaaacaccacccuu

SEQ ID NO: 22762 - RNA, 19 nt, Artificial Sequence
  Description of Artificial Sequence: Synthetic oligonucleotide
ccggccugccgugcaagug

SEQ ID NO: 22763 - RNA, 19 nt, Artificial Sequence
  Description of Artificial Sequence: Synthetic oligonucleotide
gccagccugcgaacuguca

SEQ ID NO: 22764 - RNA, 19 nt, Artificial Sequence
  Description of Artificial Sequence: Synthetic oligonucleotide
gccugccgugcaagugaac

SEQ ID NO: 22765 - RNA, 19 nt, Artificial Sequence
  Description of Artificial Sequence: Synthetic oligonucleotide
cggggcagcgguguagugu

SEQ ID NO: 22766 - RNA, 19 nt, Artificial Sequence
  Description of Artificial Sequence: Synthetic oligonucleotide
uuaacauagacgaaguggg

SEQ ID NO: 22767 - RNA, 19 nt, Artificial Sequence
  Description of Artificial Sequence: Synthetic oligonucleotide
aaaucauugacuaauacag

SEQ ID NO: 22768 - RNA, 19 nt, Artificial Sequence
  Description of Artificial Sequence: Synthetic oligonucleotide
aaagcuuagacgaaucucc

SEQ ID NO: 22769 - RNA, 19 nt, Artificial Sequence
  Description of Artificial Sequence: Synthetic oligonucleotide
gacuaaagaaauuaucacc

SEQ ID NO: 22770 - RNA, 19 nt, Artificial Sequence
  Description of Artificial Sequence: Synthetic oligonucleotide
ucguaauccauuaugaacu

SEQ ID NO: 22771 - RNA, 19 nt, Artificial Sequence
  Description of Artificial Sequence: Synthetic oligonucleotide
uuuugauccgcacugagga

SEQ ID NO: 22772 - RNA, 19 nt, Artificial Sequence
  Description of Artificial Sequence: Synthetic oligonucleotide
gauguaaagagcuggaaac

SEQ ID NO: 22773 - RNA, 19 nt, Artificial Sequence
  Description of Artificial Sequence: Synthetic oligonucleotide
ugaggugauaugaagacca

SEQ ID NO: 22774 - RNA, 19 nt, Artificial Sequence
  Description of Artificial Sequence: Synthetic oligonucleotide
aauguuaguuucuggagcu

SEQ ID NO: 22775 - RNA, 19 nt, Artificial Sequence
  Description of Artificial Sequence: Synthetic oligonucleotide
uuugguacauguagaauag

SEQ ID NO: 22776 - RNA, 19 nt, Artificial Sequence
  Description of Artificial Sequence: Synthetic oligonucleotide
cuuaauaugcaccuccugc

SEQ ID NO: 22777 - RNA, 19 nt, Artificial Sequence
  Description of Artificial Sequence: Synthetic oligonucleotide
ucagguaaauagaugaaac

SEQ ID NO: 22778 - RNA, 19 nt, Artificial Sequence
  Description of Artificial Sequence: Synthetic oligonucleotide
acucagucuaaccaagggc

SEQ ID NO: 22779 - RNA, 19 nt, Artificial Sequence
  Description of Artificial Sequence: Synthetic oligonucleotide
aaacuggccaccuacagaa

SEQ ID NO: 22780 - RNA, 19 nt, Artificial Sequence
  Description of Artificial Sequence: Synthetic oligonucleotide
acuagccucuguuuuaggc

SEQ ID NO: 22781 - RNA, 19 nt, Artificial Sequence
  Description of Artificial Sequence: Synthetic oligonucleotide
ugaugagccgcuuacaaca

SEQ ID NO: 22782 - RNA, 19 nt, Artificial Sequence
  Description of Artificial Sequence: Synthetic oligonucleotide
uuuaguuugcaauucucca

SEQ ID NO: 22783 - RNA, 19 nt, Artificial Sequence
  Description of Artificial Sequence: Synthetic oligonucleotide
gaaauuaucaccucaggua

SEQ ID NO: 22784 - RNA, 19 nt, Artificial Sequence
  Description of Artificial Sequence: Synthetic oligonucleotide
ggaccuacaaucuauaggc

SEQ ID NO: 22785 - RNA, 19 nt, Artificial Sequence
  Description of Artificial Sequence: Synthetic oligonucleotide
aacauaacgaccucuguua

SEQ ID NO: 22786 - RNA, 19 nt, Artificial Sequence
  Description of Artificial Sequence: Synthetic oligonucleotide
uguugcacauuucacauuc

SEQ ID NO: 22787 - RNA, 19 nt, Artificial Sequence
  Description of Artificial Sequence: Synthetic oligonucleotide
caaccuugaccacagaugg

SEQ ID NO: 22788 - RNA, 19 nt, Artificial Sequence
  Description of Artificial Sequence: Synthetic oligonucleotide
uuggguuuggcuuuacucc

SEQ ID NO: 22789 - RNA, 19 nt, Artificial Sequence
  Description of Artificial Sequence: Synthetic oligonucleotide
agaaauuaucaccucaggu

SEQ ID NO: 22790 - RNA, 19 nt, Artificial Sequence
  Description of Artificial Sequence: Synthetic oligonucleotide
aauuucccuagucauguca

SEQ ID NO: 22791 - RNA, 19 nt, Artificial Sequence
  Description of Artificial Sequence: Synthetic oligonucleotide
uagacgaaucuccaaauac

SEQ ID NO: 22792 - RNA, 19 nt, Artificial Sequence
  Description of Artificial Sequence: Synthetic oligonucleotide
uaucaauuuccaugugucg

SEQ ID NO: 22793 - RNA, 19 nt, Artificial Sequence
  Description of Artificial Sequence: Synthetic oligonucleotide
aauguaaucauuagcuggu

SEQ ID NO: 22794 - RNA, 19 nt, Artificial Sequence
  Description of Artificial Sequence: Synthetic oligonucleotide
acaaucuauaggccaauuc

SEQ ID NO: 22795 - RNA, 19 nt, Artificial Sequence
  Description of Artificial Sequence: Synthetic oligonucleotide
gagggauuagacuggacag

SEQ ID NO: 22796 - RNA, 19 nt, Artificial Sequence
  Description of Artificial Sequence: Synthetic oligonucleotide
uaauucaaugccaguagga

SEQ ID NO: 22797 - RNA, 19 nt, Artificial Sequence
  Description of Artificial Sequence: Synthetic oligonucleotide
uaauacagggcauuaaaua

SEQ ID NO: 22798 - RNA, 19 nt, Artificial Sequence
  Description of Artificial Sequence: Synthetic oligonucleotide
cucugugauaauucaaugc

SEQ ID NO: 22799 - RNA, 19 nt, Artificial Sequence
  Description of Artificial Sequence: Synthetic oligonucleotide
aaaccuugaggugauauga

SEQ ID NO: 22800 - RNA, 19 nt, Artificial Sequence
  Description of Artificial Sequence: Synthetic oligonucleotide
cucguaauccauuaugaac

SEQ ID NO: 22801 - RNA, 19 nt, Artificial Sequence
  Description of Artificial Sequence: Synthetic oligonucleotide
uggguaaauucucaggcca

SEQ ID NO: 22802 - RNA, 19 nt, Artificial Sequence
  Description of Artificial Sequence: Synthetic oligonucleotide
uacagggcauuaaauauga

SEQ ID NO: 22803 - RNA, 19 nt, Artificial Sequence
  Description of Artificial Sequence: Synthetic oligonucleotide
agacgaaucuccaaauacc

SEQ ID NO: 22804 - RNA, 19 nt, Artificial Sequence
  Description of Artificial Sequence: Synthetic oligonucleotide
uuaaagcuuagacgaaucu

SEQ ID NO: 22805 - RNA, 19 nt, Artificial Sequence
  Description of Artificial Sequence: Synthetic oligonucleotide
ucgaguauaguaagaggcc

SEQ ID NO: 22806 - RNA, 19 nt, Artificial Sequence
  Description of Artificial Sequence: Synthetic oligonucleotide
agaaucaucagcucgugaa

SEQ ID NO: 22807 - RNA, 19 nt, Artificial Sequence
  Description of Artificial Sequence: Synthetic oligonucleotide
uuccuuaggagccaacaug

SEQ ID NO: 22808 - RNA, 19 nt, Artificial Sequence
  Description of Artificial Sequence: Synthetic oligonucleotide
agauaagugggaccacggc

SEQ ID NO: 22809 - RNA, 19 nt, Artificial Sequence
  Description of Artificial Sequence: Synthetic oligonucleotide
uuaauggaggaucacuguc

SEQ ID NO: 22810 - RNA, 19 nt, Artificial Sequence
  Description of Artificial Sequence: Synthetic oligonucleotide
aacaugacaggugauccag

SEQ ID NO: 22811 - RNA, 19 nt, Artificial Sequence
  Description of Artificial Sequence: Synthetic oligonucleotide
uuaguuugcaauucuccac

SEQ ID NO: 22812 - RNA, 19 nt, Artificial Sequence
  Description of Artificial Sequence: Synthetic oligonucleotide
uuuugauuugggcaaaauu

SEQ ID NO: 22813 - RNA, 19 nt, Artificial Sequence
  Description of Artificial Sequence: Synthetic oligonucleotide
uguaaucauuagcugguug

SEQ ID NO: 22814 - RNA, 19 nt, Artificial Sequence
  Description of Artificial Sequence: Synthetic oligonucleotide
gacauuugguccacaaugg

SEQ ID NO: 22815 - RNA, 19 nt, Artificial Sequence
  Description of Artificial Sequence: Synthetic oligonucleotide
aaucauugacuaauacagg

SEQ ID NO: 22816 - RNA, 19 nt, Artificial Sequence
  Description of Artificial Sequence: Synthetic oligonucleotide
ccuaugagaaacaaacugg

SEQ ID NO: 22817 - RNA, 19 nt, Artificial Sequence
  Description of Artificial Sequence: Synthetic oligonucleotide
aaacaacgaccuucuugcc

SEQ ID NO: 22818 - RNA, 19 nt, Artificial Sequence
  Description of Artificial Sequence: Synthetic oligonucleotide
uggacuuacucuuccaaug

SEQ ID NO: 22819 - RNA, 19 nt, Artificial Sequence
  Description of Artificial Sequence: Synthetic oligonucleotide
aaacaccucaaggagccac

SEQ ID NO: 22820 - RNA, 19 nt, Artificial Sequence
  Description of Artificial Sequence: Synthetic oligonucleotide
uugaggcggagcuaagucg

SEQ ID NO: 22821 - RNA, 19 nt, Artificial Sequence
  Description of Artificial Sequence: Synthetic oligonucleotide
acaccugucggaaacaacg

SEQ ID NO: 22822 - RNA, 19 nt, Artificial Sequence
  Description of Artificial Sequence: Synthetic oligonucleotide
guaagacucagucuaacca

SEQ ID NO: 22823 - RNA, 19 nt, Artificial Sequence
  Description of Artificial Sequence: Synthetic oligonucleotide
uuacggucucaucagaagu

SEQ ID NO: 22824 - RNA, 19 nt, Artificial Sequence
  Description of Artificial Sequence: Synthetic oligonucleotide
caaucuauaggccaauuca

SEQ ID NO: 22825 - RNA, 19 nt, Artificial Sequence
  Description of Artificial Sequence: Synthetic oligonucleotide
acuaauacagggcauuaaa

SEQ ID NO: 22826 - RNA, 19 nt, Artificial Sequence
  Description of Artificial Sequence: Synthetic oligonucleotide
uccgcacugaggaagagcu

SEQ ID NO: 22827 - RNA, 19 nt, Artificial Sequence
  Description of Artificial Sequence: Synthetic oligonucleotide
ucuagcgucuuaauaugca

SEQ ID NO: 22828 - RNA, 19 nt, Artificial Sequence
  Description of Artificial Sequence: Synthetic oligonucleotide
uucagagguauauauacuu

SEQ ID NO: 22829 - RNA, 19 nt, Artificial Sequence
  Description of Artificial Sequence: Synthetic oligonucleotide
acucgaguauaguaagagg

SEQ ID NO: 22830 - RNA, 19 nt, Artificial Sequence
  Description of Artificial Sequence: Synthetic oligonucleotide
ucgaaaucugcacaccugu

SEQ ID NO: 22831 - RNA, 19 nt, Artificial Sequence
  Description of Artificial Sequence: Synthetic oligonucleotide
gaaaauuuucguuucccaa

SEQ ID NO: 22832 - RNA, 19 nt, Artificial Sequence
  Description of Artificial Sequence: Synthetic oligonucleotide
uaagacucagucuaaccaa

SEQ ID NO: 22833 - RNA, 19 nt, Artificial Sequence
  Description of Artificial Sequence: Synthetic oligonucleotide
ugagccgcuuacaacagca

SEQ ID NO: 22834 - RNA, 19 nt, Artificial Sequence
  Description of Artificial Sequence: Synthetic oligonucleotide
aacgaccucuguuaguaga

SEQ ID NO: 22835 - RNA, 19 nt, Artificial Sequence
  Description of Artificial Sequence: Synthetic oligonucleotide
ucucugugauaauucaaug

SEQ ID NO: 22836 - RNA, 19 nt, Artificial Sequence
  Description of Artificial Sequence: Synthetic oligonucleotide
guuuaguuugcaauucucc

SEQ ID NO: 22837 - RNA, 19 nt, Artificial Sequence
  Description of Artificial Sequence: Synthetic oligonucleotide
cuuucauuacacuccgcag

SEQ ID NO: 22838 - RNA, 19 nt, Artificial Sequence
  Description of Artificial Sequence: Synthetic oligonucleotide
uggugaaagcagaacauuc

SEQ ID NO: 22839 - RNA, 19 nt, Artificial Sequence
  Description of Artificial Sequence: Synthetic oligonucleotide
uucaguuuaguuugcaauu

SEQ ID NO: 22840 - RNA, 19 nt, Artificial Sequence
  Description of Artificial Sequence: Synthetic oligonucleotide
uagcgucuuaauaugcacc

SEQ ID NO: 22841 - RNA, 19 nt, Artificial Sequence
  Description of Artificial Sequence: Synthetic oligonucleotide
cucagucucauguggagag

SEQ ID NO: 22842 - RNA, 19 nt, Artificial Sequence
  Description of Artificial Sequence: Synthetic oligonucleotide
auuuaacauagacgaagug

SEQ ID NO: 22843 - RNA, 19 nt, Artificial Sequence
  Description of Artificial Sequence: Synthetic oligonucleotide
uuauaaaauguguggugaa

SEQ ID NO: 22844 - RNA, 19 nt, Artificial Sequence
  Description of Artificial Sequence: Synthetic oligonucleotide
aauuagcuauugcucuuca

SEQ ID NO: 22845 - RNA, 19 nt, Artificial Sequence
  Description of Artificial Sequence: Synthetic oligonucleotide
caagucuaaaccuugaggu

SEQ ID NO: 22846 - RNA, 19 nt, Artificial Sequence
  Description of Artificial Sequence: Synthetic oligonucleotide
augguuaaagcacaucaaa

SEQ ID NO: 22847 - RNA, 19 nt, Artificial Sequence
  Description of Artificial Sequence: Synthetic oligonucleotide
agcaaaagaauagagguua

SEQ ID NO: 22848 - RNA, 19 nt, Artificial Sequence
  Description of Artificial Sequence: Synthetic oligonucleotide
auagaguuacuguccucac

SEQ ID NO: 22849 - RNA, 19 nt, Artificial Sequence
  Description of Artificial Sequence: Synthetic oligonucleotide
cuuaaagcuuagacgaauc

SEQ ID NO: 22850 - RNA, 19 nt, Artificial Sequence
  Description of Artificial Sequence: Synthetic oligonucleotide
agcgucuuaauaugcaccu

SEQ ID NO: 22851 - RNA, 19 nt, Artificial Sequence
  Description of Artificial Sequence: Synthetic oligonucleotide
aaguggacaaaacgguuau

SEQ ID NO: 22852 - RNA, 19 nt, Artificial Sequence
  Description of Artificial Sequence: Synthetic oligonucleotide
cuugcaccauuucauuugg

SEQ ID NO: 22853 - RNA, 19 nt, Artificial Sequence
  Description of Artificial Sequence: Synthetic oligonucleotide
accacucgaguauaguaag

SEQ ID NO: 22854 - RNA, 19 nt, Artificial Sequence
  Description of Artificial Sequence: Synthetic oligonucleotide
aaaagggaagauagcccac

SEQ ID NO: 22855 - RNA, 19 nt, Artificial Sequence
  Description of Artificial Sequence: Synthetic oligonucleotide
gauggauugguacaagugu

SEQ ID NO: 22856 - RNA, 19 nt, Artificial Sequence
  Description of Artificial Sequence: Synthetic oligonucleotide
accuacaaucuauaggcca

SEQ ID NO: 22857 - RNA, 19 nt, Artificial Sequence
  Description of Artificial Sequence: Synthetic oligonucleotide
ugccuuucguuuuggagcc

SEQ ID NO: 22858 - RNA, 19 nt, Artificial Sequence
  Description of Artificial Sequence: Synthetic oligonucleotide
cuuacggucucaucagaag

SEQ ID NO: 22859 - RNA, 19 nt, Artificial Sequence
  Description of Artificial Sequence: Synthetic oligonucleotide
agagguucgcuguacucuc

SEQ ID NO: 22860 - RNA, 19 nt, Artificial Sequence
  Description of Artificial Sequence: Synthetic oligonucleotide
ucaguauugaguccccaau

SEQ ID NO: 22861 - RNA, 19 nt, Artificial Sequence
  Description of Artificial Sequence: Synthetic oligonucleotide
accuacagaaaguaucaca

SEQ ID NO: 22862 - RNA, 19 nt, Artificial Sequence
  Description of Artificial Sequence: Synthetic oligonucleotide
ucaauuuccaugugucgaa

SEQ ID NO: 22863 - RNA, 19 nt, Artificial Sequence
  Description of Artificial Sequence: Synthetic oligonucleotide
uucacguggaucucaccag

SEQ ID NO: 22864 - RNA, 19 nt, Artificial Sequence
  Description of Artificial Sequence: Synthetic oligonucleotide
aaucuauaggccaauucaa

SEQ ID NO: 22865 - RNA, 19 nt, Artificial Sequence
  Description of Artificial Sequence: Synthetic oligonucleotide
cugaguuccaagcuauuac

SEQ ID NO: 22866 - RNA, 19 nt, Artificial Sequence
  Description of Artificial Sequence: Synthetic oligonucleotide
uaacgcaacaggaccaggu

SEQ ID NO: 22867 - RNA, 19 nt, Artificial Sequence
  Description of Artificial Sequence: Synthetic oligonucleotide
agaaaacucaauccagaaa

SEQ ID NO: 22868 - RNA, 19 nt, Artificial Sequence
  Description of Artificial Sequence: Synthetic oligonucleotide
uaaagcuuagacgaaucuc

SEQ ID NO: 22869 - RNA, 19 nt, Artificial Sequence
  Description of Artificial Sequence: Synthetic oligonucleotide
ugaggcggagcuaagucgu

SEQ ID NO: 22870 - RNA, 19 nt, Artificial Sequence
  Description of Artificial Sequence: Synthetic oligonucleotide
auuucccuagucaugucac

SEQ ID NO: 22871 - RNA, 19 nt, Artificial Sequence
  Description of Artificial Sequence: Synthetic oligonucleotide
uccgcuuuaauggaggauc

SEQ ID NO: 22872 - RNA, 19 nt, Artificial Sequence
  Description of Artificial Sequence: Synthetic oligonucleotide
uacaguccguagaucaccc

SEQ ID NO: 22873 - RNA, 19 nt, Artificial Sequence
  Description of Artificial Sequence: Synthetic oligonucleotide
acaacgaccuucuugccau

SEQ ID NO: 22874 - RNA, 19 nt, Artificial Sequence
  Description of Artificial Sequence: Synthetic oligonucleotide
gggaccuacaaucuauagg

SEQ ID NO: 22875 - RNA, 19 nt, Artificial Sequence
  Description of Artificial Sequence: Synthetic oligonucleotide
auggauugguacaaguguc

SEQ ID NO: 22876 - RNA, 19 nt, Artificial Sequence
  Description of Artificial Sequence: Synthetic oligonucleotide
uaagucgucgagcuuuggu

SEQ ID NO: 22877 - RNA, 19 nt, Artificial Sequence
  Description of Artificial Sequence: Synthetic oligonucleotide
gcuggguaaauucucaggc

SEQ ID NO: 22878 - RNA, 19 nt, Artificial Sequence
  Description of Artificial Sequence: Synthetic oligonucleotide
caugugucgaaaucugcac

SEQ ID NO: 22879 - RNA, 19 nt, Artificial Sequence
  Description of Artificial Sequence: Synthetic oligonucleotide
accuugaggugauaugaag

SEQ ID NO: 22880 - RNA, 19 nt, Artificial Sequence
  Description of Artificial Sequence: Synthetic oligonucleotide
uuagacgaaucuccaaaua

SEQ ID NO: 22881 - RNA, 19 nt, Artificial Sequence
  Description of Artificial Sequence: Synthetic oligonucleotide
gagauaagugggaccacgg

SEQ ID NO: 22882 - RNA, 19 nt, Artificial Sequence
  Description of Artificial Sequence: Synthetic oligonucleotide
ucaacauaacgaccucugu

SEQ ID NO: 22883 - RNA, 19 nt, Artificial Sequence
  Description of Artificial Sequence: Synthetic oligonucleotide
ucuuacggucucaucagaa

SEQ ID NO: 22884 - RNA, 19 nt, Artificial Sequence
  Description of Artificial Sequence: Synthetic oligonucleotide
agucgucgagcuuugguug

SEQ ID NO: 22885 - RNA, 19 nt, Artificial Sequence
  Description of Artificial Sequence: Synthetic oligonucleotide
cuaggaacguuuucugaac

SEQ ID NO: 22886 - RNA, 19 nt, Artificial Sequence
  Description of Artificial Sequence: Synthetic oligonucleotide
uacggagcagcuaacgcaa

SEQ ID NO: 22887 - RNA, 19 nt, Artificial Sequence
  Description of Artificial Sequence: Synthetic oligonucleotide
gaccucuguuaguagaaug

SEQ ID NO: 22888 - RNA, 19 nt, Artificial Sequence
  Description of Artificial Sequence: Synthetic oligonucleotide
uccaugugucgaaaucugc

SEQ ID NO: 22889 - RNA, 19 nt, Artificial Sequence
  Description of Artificial Sequence: Synthetic oligonucleotide
aacauagacgaaguggguu

SEQ ID NO: 22890 - RNA, 19 nt, Artificial Sequence
  Description of Artificial Sequence: Synthetic oligonucleotide
accugucggaaacaacgac

SEQ ID NO: 22891 - RNA, 19 nt, Artificial Sequence
  Description of Artificial Sequence: Synthetic oligonucleotide
uugauuacaacugguggau

SEQ ID NO: 22892 - RNA, 19 nt, Artificial Sequence
  Description of Artificial Sequence: Synthetic oligonucleotide
ugcuuuaaacugacuccag

SEQ ID NO: 22893 - RNA, 19 nt, Artificial Sequence
  Description of Artificial Sequence: Synthetic oligonucleotide
uguacucucauugccuucu

SEQ ID NO: 22894 - RNA, 19 nt, Artificial Sequence
  Description of Artificial Sequence: Synthetic oligonucleotide
ucacugaguuccaagcuau

SEQ ID NO: 22895 - RNA, 19 nt, Artificial Sequence
  Description of Artificial Sequence: Synthetic oligonucleotide
ucaaguggacaaaacgguu

SEQ ID NO: 22896 - RNA, 19 nt, Artificial Sequence
  Description of Artificial Sequence: Synthetic oligonucleotide
cuuuccugcgggauacugc

SEQ ID NO: 22897 - RNA, 19 nt, Artificial Sequence
  Description of Artificial Sequence: Synthetic oligonucleotide
cucuagcgucuuaauaugc

SEQ ID NO: 22898 - RNA, 19 nt, Artificial Sequence
  Description of Artificial Sequence: Synthetic oligonucleotide
guccguagaucacccaugg

SEQ ID NO: 22899 - RNA, 19 nt, Artificial Sequence
  Description of Artificial Sequence: Synthetic oligonucleotide
gauuacaacugguggaugu

SEQ ID NO: 22900 - RNA, 19 nt, Artificial Sequence
  Description of Artificial Sequence: Synthetic oligonucleotide
agagcggaggcuuuccugu

SEQ ID NO: 22901 - RNA, 19 nt, Artificial Sequence
  Description of Artificial Sequence: Synthetic oligonucleotide
cacucgaguauaguaagag

SEQ ID NO: 22902 - RNA, 19 nt, Artificial Sequence
  Description of Artificial Sequence: Synthetic oligonucleotide
acauagacgaaguggguuu

SEQ ID NO: 22903 - RNA, 19 nt, Artificial Sequence
  Description of Artificial Sequence: Synthetic oligonucleotide
uaaucauuagcugguugcu

SEQ ID NO: 22904 - RNA, 19 nt, Artificial Sequence
  Description of Artificial Sequence: Synthetic oligonucleotide
auuugguccacaaugguua

SEQ ID NO: 22905 - RNA, 19 nt, Artificial Sequence
  Description of Artificial Sequence: Synthetic oligonucleotide
auaacgaccucuguuagua

SEQ ID NO: 22906 - RNA, 19 nt, Artificial Sequence
  Description of Artificial Sequence: Synthetic oligonucleotide
agaucacccaugguuaaag

SEQ ID NO: 22907 - RNA, 19 nt, Artificial Sequence
  Description of Artificial Sequence: Synthetic oligonucleotide
agacugaacgggcaguccu

SEQ ID NO: 22908 - RNA, 19 nt, Artificial Sequence
  Description of Artificial Sequence: Synthetic oligonucleotide
uugaggugauaugaagacc

SEQ ID NO: 22909 - RNA, 19 nt, Artificial Sequence
  Description of Artificial Sequence: Synthetic oligonucleotide
ucccuaugagaaacaaacu

SEQ ID NO: 22910 - RNA, 19 nt, Artificial Sequence
  Description of Artificial Sequence: Synthetic oligonucleotide
uggaaaagcgcaguuuagu

SEQ ID NO: 22911 - RNA, 19 nt, Artificial Sequence
  Description of Artificial Sequence: Synthetic oligonucleotide
uucaguauugaguccccaa

SEQ ID NO: 22912 - RNA, 19 nt, Artificial Sequence
  Description of Artificial Sequence: Synthetic oligonucleotide
agggacaauuuucauacuu

SEQ ID NO: 22913 - RNA, 19 nt, Artificial Sequence
  Description of Artificial Sequence: Synthetic oligonucleotide
agauggauugguacaagug

SEQ ID NO: 22914 - RNA, 19 nt, Artificial Sequence
  Description of Artificial Sequence: Synthetic oligonucleotide
aucaacauaacgaccucug

SEQ ID NO: 22915 - RNA, 19 nt, Artificial Sequence
  Description of Artificial Sequence: Synthetic oligonucleotide
gguuaaagcacaucaaaua

SEQ ID NO: 22916 - RNA, 19 nt, Artificial Sequence
  Description of Artificial Sequence: Synthetic oligonucleotide
uuacacuccgcagcugagg

SEQ ID NO: 22917 - RNA, 19 nt, Artificial Sequence
  Description of Artificial Sequence: Synthetic oligonucleotide
uggguaacacaguuuugcu

SEQ ID NO: 22918 - RNA, 19 nt, Artificial Sequence
  Description of Artificial Sequence: Synthetic oligonucleotide
gacuuacucuuccaaugac

SEQ ID NO: 22919 - RNA, 19 nt, Artificial Sequence
  Description of Artificial Sequence: Synthetic oligonucleotide
augagccgcuuacaacagc

SEQ ID NO: 22920 - RNA, 19 nt, Artificial Sequence
  Description of Artificial Sequence: Synthetic oligonucleotide
ugucaccuuugguacaugu

SEQ ID NO: 22921 - RNA, 19 nt, Artificial Sequence
  Description of Artificial Sequence: Synthetic oligonucleotide
cucagucuaaccaagggcu

SEQ ID NO: 22922 - RNA, 19 nt, Artificial Sequence
  Description of Artificial Sequence: Synthetic oligonucleotide
cacucguaauccauuauga

SEQ ID NO: 22923 - RNA, 19 nt, Artificial Sequence
  Description of Artificial Sequence: Synthetic oligonucleotide
agggaccuacaaucuauag

SEQ ID NO: 22924 - RNA, 19 nt, Artificial Sequence
  Description of Artificial Sequence: Synthetic oligonucleotide
ccaauaacaaggaauuuca

SEQ ID NO: 22925 - RNA, 19 nt, Artificial Sequence
  Description of Artificial Sequence: Synthetic oligonucleotide
agcucagucucauguggag

SEQ ID NO: 22926 - RNA, 19 nt, Artificial Sequence
  Description of Artificial Sequence: Synthetic oligonucleotide
agggcuaucuuacaacauu

SEQ ID NO: 22927 - RNA, 19 nt, Artificial Sequence
  Description of Artificial Sequence: Synthetic oligonucleotide
guugaggcggagcuaaguc

SEQ ID NO: 22928 - RNA, 19 nt, Artificial Sequence
  Description of Artificial Sequence: Synthetic oligonucleotide
aucucagguucuugagccg

SEQ ID NO: 22929 - RNA, 19 nt, Artificial Sequence
  Description of Artificial Sequence: Synthetic oligonucleotide
uguuaagugguagcaugac

SEQ ID NO: 22930 - RNA, 19 nt, Artificial Sequence
  Description of Artificial Sequence: Synthetic oligonucleotide
aggccuauugacuggaauu

SEQ ID NO: 22931 - RNA, 19 nt, Artificial Sequence
  Description of Artificial Sequence: Synthetic oligonucleotide
cauucaguauugagucccc

SEQ ID NO: 22932 - RNA, 19 nt, Artificial Sequence
  Description of Artificial Sequence: Synthetic oligonucleotide
caaaacgguuaucagggga

SEQ ID NO: 22933 - RNA, 19 nt, Artificial Sequence
  Description of Artificial Sequence: Synthetic oligonucleotide
acucguaauccauuaugaa

SEQ ID NO: 22934 - RNA, 19 nt, Artificial Sequence
  Description of Artificial Sequence: Synthetic oligonucleotide
gaagauggauugguacaag

SEQ ID NO: 22935 - RNA, 19 nt, Artificial Sequence
  Description of Artificial Sequence: Synthetic oligonucleotide
cuacaguccguagaucacc

SEQ ID NO: 22936 - RNA, 19 nt, Artificial Sequence
  Description of Artificial Sequence: Synthetic oligonucleotide
acuaggcaagaggaguuuc

SEQ ID NO: 22937 - RNA, 19 nt, Artificial Sequence
  Description of Artificial Sequence: Synthetic oligonucleotide
aggcuuacggagcagcuaa

SEQ ID NO: 22938 - RNA, 19 nt, Artificial Sequence
  Description of Artificial Sequence: Synthetic oligonucleotide
aguauaguaagaggcccca

SEQ ID NO: 22939 - RNA, 19 nt, Artificial Sequence
  Description of Artificial Sequence: Synthetic oligonucleotide
agugguagcaugacauuug

SEQ ID NO: 22940 - RNA, 19 nt, Artificial Sequence
  Description of Artificial Sequence: Synthetic oligonucleotide
uguggggcuaggaacguuu

SEQ ID NO: 22941 - RNA, 19 nt, Artificial Sequence
  Description of Artificial Sequence: Synthetic oligonucleotide
cuaauuugccuccugaaau

SEQ ID NO: 22942 - RNA, 19 nt, Artificial Sequence
  Description of Artificial Sequence: Synthetic oligonucleotide
uugacuaauacagggcauu

SEQ ID NO: 22943 - RNA, 19 nt, Artificial Sequence
  Description of Artificial Sequence: Synthetic oligonucleotide
aauacaccccagagcaucu

SEQ ID NO: 22944 - RNA, 19 nt, Artificial Sequence
  Description of Artificial Sequence: Synthetic oligonucleotide
ucaugucaccaucucuuau

SEQ ID NO: 22945 - RNA, 19 nt, Artificial Sequence
  Description of Artificial Sequence: Synthetic oligonucleotide
uccuuaaagcuuagacgaa

SEQ ID NO: 22946 - RNA, 19 nt, Artificial Sequence
  Description of Artificial Sequence: Synthetic oligonucleotide
gagagcggaggcuuuccug

SEQ ID NO: 22947 - RNA, 19 nt, Artificial Sequence
  Description of Artificial Sequence: Synthetic oligonucleotide
cuuuuggcgaugcggagca

SEQ ID NO: 22948 - RNA, 19 nt, Artificial Sequence
  Description of Artificial Sequence: Synthetic oligonucleotide
aguuugcaauucuccacgu

SEQ ID NO: 22949 - RNA, 19 nt, Artificial Sequence
  Description of Artificial Sequence: Synthetic oligonucleotide
gaugagccgcuuacaacag

SEQ ID NO: 22950 - RNA, 19 nt, Artificial Sequence
  Description of Artificial Sequence: Synthetic oligonucleotide
auccgcacugaggaagagc

SEQ ID NO: 22951 - RNA, 19 nt, Artificial Sequence
  Description of Artificial Sequence: Synthetic oligonucleotide
uaacgaccucuguuaguag

SEQ ID NO: 22952 - RNA, 19 nt, Artificial Sequence
  Description of Artificial Sequence: Synthetic oligonucleotide
gagccauuuugggagauga

SEQ ID NO: 22953 - RNA, 19 nt, Artificial Sequence
  Description of Artificial Sequence: Synthetic oligonucleotide
agcuaagucgucgagcuuu

SEQ ID NO: 22954 - RNA, 19 nt, Artificial Sequence
  Description of Artificial Sequence: Synthetic oligonucleotide
aagcuuagacgaaucucca

SEQ ID NO: 22955 - RNA, 19 nt, Artificial Sequence
  Description of Artificial Sequence: Synthetic oligonucleotide
ugauuacaacugguggaug

SEQ ID NO: 22956 - RNA, 19 nt, Artificial Sequence
  Description of Artificial Sequence: Synthetic oligonucleotide
gacgaaucuccaaauaccu

SEQ ID NO: 22957 - RNA, 19 nt, Artificial Sequence
  Description of Artificial Sequence: Synthetic oligonucleotide
ucguuucccaagucucuca

SEQ ID NO: 22958 - RNA, 19 nt, Artificial Sequence
  Description of Artificial Sequence: Synthetic oligonucleotide
caaguggacaaaacgguua

SEQ ID NO: 22959 - RNA, 19 nt, Artificial Sequence
  Description of Artificial Sequence: Synthetic oligonucleotide
uaggcaagaggaguuuccu

SEQ ID NO: 22960 - RNA, 19 nt, Artificial Sequence
  Description of Artificial Sequence: Synthetic oligonucleotide
ucgagcuuugguugucacu

SEQ ID NO: 22961 - RNA, 19 nt, Artificial Sequence
  Description of Artificial Sequence: Synthetic oligonucleotide
caugucaccaucucuuaua

SEQ ID NO: 22962 - RNA, 19 nt, Artificial Sequence
  Description of Artificial Sequence: Synthetic oligonucleotide
ucccuagccucugugcaag

SEQ ID NO: 22963 - RNA, 19 nt, Artificial Sequence
  Description of Artificial Sequence: Synthetic oligonucleotide
ccaacaugacaggugaucc

SEQ ID NO: 22964 - RNA, 19 nt, Artificial Sequence
  Description of Artificial Sequence: Synthetic oligonucleotide
ugauagaguuacuguccuc

SEQ ID NO: 22965 - RNA, 19 nt, Artificial Sequence
  Description of Artificial Sequence: Synthetic oligonucleotide
ugguagcaugacauuuggu

SEQ ID NO: 22966 - RNA, 19 nt, Artificial Sequence
  Description of Artificial Sequence: Synthetic oligonucleotide
agcuggcuagccuuuuacu

SEQ ID NO: 22967 - RNA, 19 nt, Artificial Sequence
  Description of Artificial Sequence: Synthetic oligonucleotide
gcuuagacgaaucuccaaa

SEQ ID NO: 22968 - RNA, 19 nt, Artificial Sequence
  Description of Artificial Sequence: Synthetic oligonucleotide
gucgaaaucugcacaccug

SEQ ID NO: 22969 - RNA, 19 nt, Artificial Sequence
  Description of Artificial Sequence: Synthetic oligonucleotide
ugguucaaauaaugcugaa

SEQ ID NO: 22970 - RNA, 19 nt, Artificial Sequence
  Description of Artificial Sequence: Synthetic oligonucleotide
ugacuaauacagggcauua

SEQ ID NO: 22971 - RNA, 19 nt, Artificial Sequence
  Description of Artificial Sequence: Synthetic oligonucleotide
uugccauagugugcaaaca

SEQ ID NO: 22972 - RNA, 19 nt, Artificial Sequence
  Description of Artificial Sequence: Synthetic oligonucleotide
ggggauguaaaagaucuga

SEQ ID NO: 22973 - RNA, 19 nt, Artificial Sequence
  Description of Artificial Sequence: Synthetic oligonucleotide
cccuccuuaaagcuuagac

SEQ ID NO: 22974 - RNA, 19 nt, Artificial Sequence
  Description of Artificial Sequence: Synthetic oligonucleotide
aggaacguuuucugaacuu

SEQ ID NO: 22975 - RNA, 19 nt, Artificial Sequence
  Description of Artificial Sequence: Synthetic oligonucleotide
gcuaggaacguuuucugaa

SEQ ID NO: 22976 - RNA, 19 nt, Artificial Sequence
  Description of Artificial Sequence: Synthetic oligonucleotide
ucgugaagguucuucuguu

SEQ ID NO: 22977 - RNA, 19 nt, Artificial Sequence
  Description of Artificial Sequence: Synthetic oligonucleotide
aucuauaggccaauucaaa

SEQ ID NO: 22978 - RNA, 19 nt, Artificial Sequence
  Description of Artificial Sequence: Synthetic oligonucleotide
uucguuucccaagucucuc

SEQ ID NO: 22979 - RNA, 19 nt, Artificial Sequence
  Description of Artificial Sequence: Synthetic oligonucleotide
agggauuagacuggacaga

SEQ ID NO: 22980 - RNA, 19 nt, Artificial Sequence
  Description of Artificial Sequence: Synthetic oligonucleotide
agcuuagacgaaucuccaa

SEQ ID NO: 22981 - RNA, 19 nt, Artificial Sequence
  Description of Artificial Sequence: Synthetic oligonucleotide
ugguaucucuuacggucuc

SEQ ID NO: 22982 - RNA, 19 nt, Artificial Sequence
  Description of Artificial Sequence: Synthetic oligonucleotide
gaauuucccuagucauguc

SEQ ID NO: 22983 - RNA, 19 nt, Artificial Sequence
  Description of Artificial Sequence: Synthetic oligonucleotide
gggauuagacuggacagac

SEQ ID NO: 22984 - RNA, 19 nt, Artificial Sequence
  Description of Artificial Sequence: Synthetic oligonucleotide
cuaacgcaacaggaccagg

SEQ ID NO: 22985 - RNA, 19 nt, Artificial Sequence
  Description of Artificial Sequence: Synthetic oligonucleotide
ccacucguaauccauuaug

SEQ ID NO: 22986 - RNA, 19 nt, Artificial Sequence
  Description of Artificial Sequence: Synthetic oligonucleotide
gacugaacgggcaguccug

SEQ ID NO: 22987 - RNA, 19 nt, Artificial Sequence
  Description of Artificial Sequence: Synthetic oligonucleotide
uucccuagccucugugcaa

SEQ ID NO: 22988 - RNA, 19 nt, Artificial Sequence
  Description of Artificial Sequence: Synthetic oligonucleotide
agagagcggaggcuuuccu

SEQ ID NO: 22989 - RNA, 19 nt, Artificial Sequence
  Description of Artificial Sequence: Synthetic oligonucleotide
caacaugacaggugaucca

SEQ ID NO: 22990 - RNA, 19 nt, Artificial Sequence
  Description of Artificial Sequence: Synthetic oligonucleotide
caguaagacucagucuaac

SEQ ID NO: 22991 - RNA, 19 nt, Artificial Sequence
  Description of Artificial Sequence: Synthetic oligonucleotide
aguccguagaucacccaug

SEQ ID NO: 22992 - RNA, 19 nt, Artificial Sequence
  Description of Artificial Sequence: Synthetic oligonucleotide
gcuuacggagcagcuaacg

SEQ ID NO: 22993 - RNA, 19 nt, Artificial Sequence
  Description of Artificial Sequence: Synthetic oligonucleotide
aggcggagcuaagucgucg

SEQ ID NO: 22994 - RNA, 19 nt, Artificial Sequence
  Description of Artificial Sequence: Synthetic oligonucleotide
uugggacgaggaagggcca

SEQ ID NO: 22995 - RNA, 19 nt, Artificial Sequence
  Description of Artificial Sequence: Synthetic oligonucleotide
gacuaauacagggcauuaa

SEQ ID NO: 22996 - RNA, 19 nt, Artificial Sequence
  Description of Artificial Sequence: Synthetic oligonucleotide
auacuaggcaagaggaguu

SEQ ID NO: 22997 - RNA, 19 nt, Artificial Sequence
  Description of Artificial Sequence: Synthetic oligonucleotide
uggcaucaaguggacaaaa

SEQ ID NO: 22998 - RNA, 19 nt, Artificial Sequence
  Description of Artificial Sequence: Synthetic oligonucleotide
cuuagacgaaucuccaaau

SEQ ID NO: 22999 - RNA, 19 nt, Artificial Sequence
  Description of Artificial Sequence: Synthetic oligonucleotide
ccucuagcgucuuaauaug

SEQ ID NO: 23000 - RNA, 19 nt, Artificial Sequence
  Description of Artificial Sequence: Synthetic oligonucleotide
cuucagagguauauauacu

SEQ ID NO: 23001 - RNA, 19 nt, Artificial Sequence
  Description of Artificial Sequence: Synthetic oligonucleotide
uggggcuaggaacguuuuc

SEQ ID NO: 23002 - RNA, 19 nt, Artificial Sequence
  Description of Artificial Sequence: Synthetic oligonucleotide
auucaguauugagucccca

SEQ ID NO: 23003 - RNA, 19 nt, Artificial Sequence
  Description of Artificial Sequence: Synthetic oligonucleotide
uacaaucuauaggccaauu

SEQ ID NO: 23004 - RNA, 19 nt, Artificial Sequence
  Description of Artificial Sequence: Synthetic oligonucleotide
ucggcccuccuuaaagcuu

SEQ ID NO: 23005 - RNA, 19 nt, Artificial Sequence
  Description of Artificial Sequence: Synthetic oligonucleotide
ccaagggacuccaggacac

SEQ ID NO: 23006 - RNA, 19 nt, Artificial Sequence
  Description of Artificial Sequence: Synthetic oligonucleotide
aagggaccuacaaucuaua

SEQ ID NO: 23007 - RNA, 19 nt, Artificial Sequence
  Description of Artificial Sequence: Synthetic oligonucleotide
ccaugugucgaaaucugca

SEQ ID NO: 23008 - RNA, 19 nt, Artificial Sequence
  Description of Artificial Sequence: Synthetic oligonucleotide
acugaacgggcaguccugu

SEQ ID NO: 23009 - RNA, 19 nt, Artificial Sequence
  Description of Artificial Sequence: Synthetic oligonucleotide
ggcuccgcuuuaauggagg

SEQ ID NO: 23010 - RNA, 19 nt, Artificial Sequence
  Description of Artificial Sequence: Synthetic oligonucleotide
gccgcgugaugccugauac

SEQ ID NO: 23011 - RNA, 19 nt, Artificial Sequence
  Description of Artificial Sequence: Synthetic oligonucleotide
auuccaccccugcuuugga

SEQ ID NO: 23012 - RNA, 19 nt, Artificial Sequence
  Description of Artificial Sequence: Synthetic oligonucleotide
ccuacaaucuauaggccaa

SEQ ID NO: 23013 - RNA, 19 nt, Artificial Sequence
  Description of Artificial Sequence: Synthetic oligonucleotide
gggcuaggaacguuuucug

SEQ ID NO: 23014 - RNA, 19 nt, Artificial Sequence
  Description of Artificial Sequence: Synthetic oligonucleotide
uguccgcaucucagguucu

SEQ ID NO: 23015 - RNA, 19 nt, Artificial Sequence
  Description of Artificial Sequence: Synthetic oligonucleotide
cauuugguccacaaugguu

SEQ ID NO: 23016 - RNA, 19 nt, Artificial Sequence
  Description of Artificial Sequence: Synthetic oligonucleotide
caccugucggaaacaacga

SEQ ID NO: 23017 - RNA, 19 nt, Artificial Sequence
  Description of Artificial Sequence: Synthetic oligonucleotide
cagacugaacgggcagucc

SEQ ID NO: 23018 - RNA, 19 nt, Artificial Sequence
  Description of Artificial Sequence: Synthetic oligonucleotide
gacgaggaagggccagauc

SEQ ID NO: 23019 - RNA, 19 nt, Artificial Sequence
  Description of Artificial Sequence: Synthetic oligonucleotide
cuaagucgucgagcuuugg

SEQ ID NO: 23020 - RNA, 19 nt, Artificial Sequence
  Description of Artificial Sequence: Synthetic oligonucleotide
gcuaacgcaacaggaccag

SEQ ID NO: 23021 - RNA, 19 nt, Artificial Sequence
  Description of Artificial Sequence: Synthetic oligonucleotide
uacuaggcaagaggaguuu

SEQ ID NO: 23022 - RNA, 19 nt, Artificial Sequence
  Description of Artificial Sequence: Synthetic oligonucleotide
caguggguaacacaguuuu

SEQ ID NO: 23023 - RNA, 19 nt, Artificial Sequence
  Description of Artificial Sequence: Synthetic oligonucleotide
agaggcuuacggagcagcu

SEQ ID NO: 23024 - RNA, 19 nt, Artificial Sequence
  Description of Artificial Sequence: Synthetic oligonucleotide
gcucuuuuggcgaugcgga

SEQ ID NO: 23025 - RNA, 19 nt, Artificial Sequence
  Description of Artificial Sequence: Synthetic oligonucleotide
caccuacagaaaguaucac

SEQ ID NO: 23026 - RNA, 19 nt, Artificial Sequence
  Description of Artificial Sequence: Synthetic oligonucleotide
ugucggaaacaacgaccuu

SEQ ID NO: 23027 - RNA, 19 nt, Artificial Sequence
  Description of Artificial Sequence: Synthetic oligonucleotide
ggcuaggaacguuuucuga

SEQ ID NO: 23028 - RNA, 19 nt, Artificial Sequence
  Description of Artificial Sequence: Synthetic oligonucleotide
acguggaucucaccagcuu

SEQ ID NO: 23029 - RNA, 19 nt, Artificial Sequence
  Description of Artificial Sequence: Synthetic oligonucleotide
acgaccucuguuaguagaa

SEQ ID NO: 23030 - RNA, 19 nt, Artificial Sequence
  Description of Artificial Sequence: Synthetic oligonucleotide
guuccuuaggagccaacau

SEQ ID NO: 23031 - RNA, 19 nt, Artificial Sequence
  Description of Artificial Sequence: Synthetic oligonucleotide
cucuuacggucucaucaga

SEQ ID NO: 23032 - RNA, 19 nt, Artificial Sequence
  Description of Artificial Sequence: Synthetic oligonucleotide
gcucggcccuccuuaaagc

SEQ ID NO: 23033 - RNA, 19 nt, Artificial Sequence
  Description of Artificial Sequence: Synthetic oligonucleotide
ugccgcgugaugccugaua

SEQ ID NO: 23034 - RNA, 19 nt, Artificial Sequence
  Description of Artificial Sequence: Synthetic oligonucleotide
cugcucuuuuggcgaugcg

SEQ ID NO: 23035 - RNA, 19 nt, Artificial Sequence
  Description of Artificial Sequence: Synthetic oligonucleotide
gggagaguuagaaauuaua

SEQ ID NO: 23036 - RNA, 19 nt, Artificial Sequence
  Description of Artificial Sequence: Synthetic oligonucleotide
cauaacgaccucuguuagu

SEQ ID NO: 23037 - RNA, 19 nt, Artificial Sequence
  Description of Artificial Sequence: Synthetic oligonucleotide
gucaggccuauugacugga

SEQ ID NO: 23038 - RNA, 19 nt, Artificial Sequence
  Description of Artificial Sequence: Synthetic oligonucleotide
ggagaagggcuaucuuaca

SEQ ID NO: 23039 - RNA, 19 nt, Artificial Sequence
  Description of Artificial Sequence: Synthetic oligonucleotide
gccugauacagcagugagc

SEQ ID NO: 23040 - RNA, 19 nt, Artificial Sequence
  Description of Artificial Sequence: Synthetic oligonucleotide
auacaccccagagcaucug

SEQ ID NO: 23041 - RNA, 19 nt, Artificial Sequence
  Description of Artificial Sequence: Synthetic oligonucleotide
agcccgguguacugcuaca

SEQ ID NO: 23042 - RNA, 19 nt, Artificial Sequence
  Description of Artificial Sequence: Synthetic oligonucleotide
cauuagcugguugcucuca

SEQ ID NO: 23043 - RNA, 19 nt, Artificial Sequence
  Description of Artificial Sequence: Synthetic oligonucleotide
cugcgggauacugcuggag

SEQ ID NO: 23044 - RNA, 19 nt, Artificial Sequence
  Description of Artificial Sequence: Synthetic oligonucleotide
agccgcucggcccuccuua

SEQ ID NO: 23045 - RNA, 19 nt, Artificial Sequence
  Description of Artificial Sequence: Synthetic oligonucleotide
cagagguucgcuguacucu

SEQ ID NO: 23046 - RNA, 19 nt, Artificial Sequence
  Description of Artificial Sequence: Synthetic oligonucleotide
ggaggaucacugucaccac

SEQ ID NO: 23047 - RNA, 19 nt, Artificial Sequence
  Description of Artificial Sequence: Synthetic oligonucleotide
gaggcuuacggagcagcua

SEQ ID NO: 23048 - RNA, 19 nt, Artificial Sequence
  Description of Artificial Sequence: Synthetic oligonucleotide
gcuaagucgucgagcuuug

SEQ ID NO: 23049 - RNA, 19 nt, Artificial Sequence
  Description of Artificial Sequence: Synthetic oligonucleotide
ggggcuaggaacguuuucu

SEQ ID NO: 23050 - RNA, 19 nt, Artificial Sequence
  Description of Artificial Sequence: Synthetic oligonucleotide
gcuuuccugcgggauacug

SEQ ID NO: 23051 - RNA, 19 nt, Artificial Sequence
  Description of Artificial Sequence: Synthetic oligonucleotide
caguauugaguccccaauu

SEQ ID NO: 23052 - RNA, 19 nt, Artificial Sequence
  Description of Artificial Sequence: Synthetic oligonucleotide
gagguucgcuguacucuca

SEQ ID NO: 23053 - RNA, 19 nt, Artificial Sequence
  Description of Artificial Sequence: Synthetic oligonucleotide
uugaggccgggagcuggca

SEQ ID NO: 23054 - RNA, 19 nt, Artificial Sequence
  Description of Artificial Sequence: Synthetic oligonucleotide
cucggcccuccuuaaagcu

SEQ ID NO: 23055 - RNA, 19 nt, Artificial Sequence
  Description of Artificial Sequence: Synthetic oligonucleotide
gucgucgagcuuugguugu

SEQ ID NO: 23056 - RNA, 19 nt, Artificial Sequence
  Description of Artificial Sequence: Synthetic oligonucleotide
ccaucaacauaacgaccuc

SEQ ID NO: 23057 - RNA, 19 nt, Artificial Sequence
  Description of Artificial Sequence: Synthetic oligonucleotide
gcggagcuaagucgucgag

SEQ ID NO: 23058 - RNA, 19 nt, Artificial Sequence
  Description of Artificial Sequence: Synthetic oligonucleotide
ggcggagcuaagucgucga

SEQ ID NO: 23059 - RNA, 19 nt, Artificial Sequence
  Description of Artificial Sequence: Synthetic oligonucleotide
ucgucgagcuuugguuguc

SEQ ID NO: 23060 - RNA, 19 nt, Artificial Sequence
  Description of Artificial Sequence: Synthetic oligonucleotide
gggcuuuccugcgggauac

SEQ ID NO: 23061 - RNA, 19 nt, Artificial Sequence
  Description of Artificial Sequence: Synthetic oligonucleotide
cccuagucaugucaccauc

SEQ ID NO: 23062 - RNA, 19 nt, Artificial Sequence
  Description of Artificial Sequence: Synthetic oligonucleotide
caguccguagaucacccau

SEQ ID NO: 23063 - RNA, 19 nt, Artificial Sequence
  Description of Artificial Sequence: Synthetic oligonucleotide
cugcuacaguccguagauc

SEQ ID NO: 23064 - RNA, 19 nt, Artificial Sequence
  Description of Artificial Sequence: Synthetic oligonucleotide
gguaucucuuacggucuca

SEQ ID NO: 23065 - RNA, 19 nt, Artificial Sequence
  Description of Artificial Sequence: Synthetic oligonucleotide
cugauuaggcaugcugggu

SEQ ID NO: 23066 - RNA, 19 nt, Artificial Sequence
  Description of Artificial Sequence: Synthetic oligonucleotide
gcuccgcuuuaauggagga

SEQ ID NO: 23067 - RNA, 19 nt, Artificial Sequence
  Description of Artificial Sequence: Synthetic oligonucleotide
ccaccacucgaguauagua

SEQ ID NO: 23068 - RNA, 19 nt, Artificial Sequence
  Description of Artificial Sequence: Synthetic oligonucleotide
cacguggaucucaccagcu

SEQ ID NO: 23069 - RNA, 19 nt, Artificial Sequence
  Description of Artificial Sequence: Synthetic oligonucleotide
ccgcuuuaauggaggauca

SEQ ID NO: 23070 - RNA, 19 nt, Artificial Sequence
  Description of Artificial Sequence: Synthetic oligonucleotide
ggcaaaugguucaaauaau

SEQ ID NO: 23071 - RNA, 19 nt, Artificial Sequence
  Description of Artificial Sequence: Synthetic oligonucleotide
accuugcuuuaaacugacu

SEQ ID NO: 23072 - RNA, 19 nt, Artificial Sequence
  Description of Artificial Sequence: Synthetic oligonucleotide
cagucuaaccaagggcucu

SEQ ID NO: 23073 - RNA, 19 nt, Artificial Sequence
  Description of Artificial Sequence: Synthetic oligonucleotide
gaggcggagcuaagucguc

SEQ ID NO: 23074 - RNA, 19 nt, Artificial Sequence
  Description of Artificial Sequence: Synthetic oligonucleotide
ccgcaucucagguucuuga

SEQ ID NO: 23075 - RNA, 19 nt, Artificial Sequence
  Description of Artificial Sequence: Synthetic oligonucleotide
caggccuauugacuggaau

SEQ ID NO: 23076 - RNA, 19 nt, Artificial Sequence
  Description of Artificial Sequence: Synthetic oligonucleotide
cacagcccgguguacugcu

SEQ ID NO: 23077 - RNA, 19 nt, Artificial Sequence
  Description of Artificial Sequence: Synthetic oligonucleotide
cugguggauguguggggcu

SEQ ID NO: 23078 - RNA, 19 nt, Artificial Sequence
  Description of Artificial Sequence: Synthetic oligonucleotide
gaugcggagcagccucuuu

SEQ ID NO: 23079 - RNA, 19 nt, Artificial Sequence
  Description of Artificial Sequence: Synthetic oligonucleotide
cuacaaucuauaggccaau

SEQ ID NO: 23080 - RNA, 19 nt, Artificial Sequence
  Description of Artificial Sequence: Synthetic oligonucleotide
guauaguaagaggccccau

SEQ ID NO: 23081 - RNA, 19 nt, Artificial Sequence
  Description of Artificial Sequence: Synthetic oligonucleotide
cauagacgaaguggguuuu

SEQ ID NO: 23082 - RNA, 19 nt, Artificial Sequence
  Description of Artificial Sequence: Synthetic oligonucleotide
ccgcuuagccaggugccgc

SEQ ID NO: 23083 - RNA, 19 nt, Artificial Sequence
  Description of Artificial Sequence: Synthetic oligonucleotide
gcgucuuaauaugcaccuc

SEQ ID NO: 23084 - RNA, 19 nt, Artificial Sequence
  Description of Artificial Sequence: Synthetic oligonucleotide
gccgcuuacaacagcaguu

SEQ ID NO: 23085 - RNA, 19 nt, Artificial Sequence
  Description of Artificial Sequence: Synthetic oligonucleotide
ggcuuacggagcagcuaac

SEQ ID NO: 23086 - RNA, 19 nt, Artificial Sequence
  Description of Artificial Sequence: Synthetic oligonucleotide
ccccaccacucgaguauag

SEQ ID NO: 23087 - RNA, 19 nt, Artificial Sequence
  Description of Artificial Sequence: Synthetic oligonucleotide
cacagagagcggaggcuuu

SEQ ID NO: 23088 - RNA, 19 nt, Artificial Sequence
  Description of Artificial Sequence: Synthetic oligonucleotide
cgagcuuugguugucacuu

SEQ ID NO: 23089 - RNA, 19 nt, Artificial Sequence
  Description of Artificial Sequence: Synthetic oligonucleotide
gccacucguaauccauuau

SEQ ID NO: 23090 - RNA, 19 nt, Artificial Sequence
  Description of Artificial Sequence: Synthetic oligonucleotide
cuccgcuuuaauggaggau

SEQ ID NO: 23091 - RNA, 19 nt, Artificial Sequence
  Description of Artificial Sequence: Synthetic oligonucleotide
caguccgaacauucuccuu

SEQ ID NO: 23092 - RNA, 19 nt, Artificial Sequence
  Description of Artificial Sequence: Synthetic oligonucleotide
acagcccgguguacugcua

SEQ ID NO: 23093 - RNA, 19 nt, Artificial Sequence
  Description of Artificial Sequence: Synthetic oligonucleotide
cguaauccauuaugaacuu

SEQ ID NO: 23094 - RNA, 19 nt, Artificial Sequence
  Description of Artificial Sequence: Synthetic oligonucleotide
gccuauugacuggaauuuu

SEQ ID NO: 23095 - RNA, 19 nt, Artificial Sequence
  Description of Artificial Sequence: Synthetic oligonucleotide
gccgcucggcccuccuuaa

SEQ ID NO: 23096 - RNA, 19 nt, Artificial Sequence
  Description of Artificial Sequence: Synthetic oligonucleotide
cccgguguacugcuacagu

SEQ ID NO: 23097 - RNA, 19 nt, Artificial Sequence
  Description of Artificial Sequence: Synthetic oligonucleotide
ccgcagcugaggagaggga

SEQ ID NO: 23098 - RNA, 19 nt, Artificial Sequence
  Description of Artificial Sequence: Synthetic oligonucleotide
cgggcagaagccacucgua

SEQ ID NO: 23099 - RNA, 19 nt, Artificial Sequence
  Description of Artificial Sequence: Synthetic oligonucleotide
ccgcucggcccuccuuaaa

SEQ ID NO: 23100 - RNA, 19 nt, Artificial Sequence
  Description of Artificial Sequence: Synthetic oligonucleotide
cgaccucuguuaguagaau

SEQ ID NO: 23101 - RNA, 19 nt, Artificial Sequence
  Description of Artificial Sequence: Synthetic oligonucleotide
gugccgcgugaugccugau

SEQ ID NO: 23102 - RNA, 19 nt, Artificial Sequence
  Description of Artificial Sequence: Synthetic oligonucleotide
ccgcacugaggaagagcuu

SEQ ID NO: 23103 - RNA, 19 nt, Artificial Sequence
  Description of Artificial Sequence: Synthetic oligonucleotide
cgaugcggagcagccucuu

SEQ ID NO: 23104 - RNA, 19 nt, Artificial Sequence
  Description of Artificial Sequence: Synthetic oligonucleotide
uguaugauaaauaaucucc

SEQ ID NO: 23105 - RNA, 19 nt, Artificial Sequence
  Description of Artificial Sequence: Synthetic oligonucleotide
uuuguuauuacuaagugcu

SEQ ID NO: 23106 - RNA, 19 nt, Artificial Sequence
  Description of Artificial Sequence: Synthetic oligonucleotide
gaaacuuuguauuacaggc

SEQ ID NO: 23107 - RNA, 19 nt, Artificial Sequence
  Description of Artificial Sequence: Synthetic oligonucleotide
aaauauaccaucaucauca

SEQ ID NO: 23108 - RNA, 19 nt, Artificial Sequence
  Description of Artificial Sequence: Synthetic oligonucleotide
aaugaguuaaaauuuacaa

SEQ ID NO: 23109 - RNA, 19 nt, Artificial Sequence
  Description of Artificial Sequence: Synthetic oligonucleotide
auugaaaucacuaacugac

SEQ ID NO: 23110 - RNA, 19 nt, Artificial Sequence
  Description of Artificial Sequence: Synthetic oligonucleotide
uuaauaacuuccaucauca

SEQ ID NO: 23111 - RNA, 19 nt, Artificial Sequence
  Description of Artificial Sequence: Synthetic oligonucleotide
uuuagaaacccuuuaacga

SEQ ID NO: 23112 - RNA, 19 nt, Artificial Sequence
  Description of Artificial Sequence: Synthetic oligonucleotide
ucuauagugcuuaugaaga

SEQ ID NO: 23113 - RNA, 19 nt, Artificial Sequence
  Description of Artificial Sequence: Synthetic oligonucleotide
uguucuauagugcuuauga

SEQ ID NO: 23114 - RNA, 19 nt, Artificial Sequence
  Description of Artificial Sequence: Synthetic oligonucleotide
uugaaaacggccuuuguag

SEQ ID NO: 23115 - RNA, 19 nt, Artificial Sequence
  Description of Artificial Sequence: Synthetic oligonucleotide
guaaaacacuauuacaccg

SEQ ID NO: 23116 - RNA, 19 nt, Artificial Sequence
  Description of Artificial Sequence: Synthetic oligonucleotide
ucaaucagaacuaaucgcu

SEQ ID NO: 23117 - RNA, 19 nt, Artificial Sequence
  Description of Artificial Sequence: Synthetic oligonucleotide
uuuaaucuggacaaggaaa

SEQ ID NO: 23118 - RNA, 19 nt, Artificial Sequence
  Description of Artificial Sequence: Synthetic oligonucleotide
guauuucacuaauagaggg

SEQ ID NO: 23119 - RNA, 19 nt, Artificial Sequence
  Description of Artificial Sequence: Synthetic oligonucleotide
auuucacuaauagaggggc

SEQ ID NO: 23120 - RNA, 19 nt, Artificial Sequence
  Description of Artificial Sequence: Synthetic oligonucleotide
uaaaccuacaaucuauaca

SEQ ID NO: 23121 - RNA, 19 nt, Artificial Sequence
  Description of Artificial Sequence: Synthetic oligonucleotide
auaguugagguguagacug

SEQ ID NO: 23122 - RNA, 19 nt, Artificial Sequence
  Description of Artificial Sequence: Synthetic oligonucleotide
aacaacuugaaaggagugc

SEQ ID NO: 23123 - RNA, 19 nt, Artificial Sequence
  Description of Artificial Sequence: Synthetic oligonucleotide
uauuacaggcaacauauac

SEQ ID NO: 23124 - RNA, 19 nt, Artificial Sequence
  Description of Artificial Sequence: Synthetic oligonucleotide
ucuuacucgaaucucuugc

SEQ ID NO: 23125 - RNA, 19 nt, Artificial Sequence
  Description of Artificial Sequence: Synthetic oligonucleotide
uauaauuugccugaggccu

SEQ ID NO: 23126 - RNA, 19 nt, Artificial Sequence
  Description of Artificial Sequence: Synthetic oligonucleotide
uguauuugacuauaauuug

SEQ ID NO: 23127 - RNA, 19 nt, Artificial Sequence
  Description of Artificial Sequence: Synthetic oligonucleotide
acaauacccaauuuauaac

SEQ ID NO: 23128 - RNA, 19 nt, Artificial Sequence
  Description of Artificial Sequence: Synthetic oligonucleotide
auaaccaugcauuacuucu

SEQ ID NO: 23129 - RNA, 19 nt, Artificial Sequence
  Description of Artificial Sequence: Synthetic oligonucleotide
aguauuggcccucacauug

SEQ ID NO: 23130 - RNA, 19 nt, Artificial Sequence
  Description of Artificial Sequence: Synthetic oligonucleotide
aaucuguauccuuugcauc

SEQ ID NO: 23131 - RNA, 19 nt, Artificial Sequence
  Description of Artificial Sequence: Synthetic oligonucleotide
acgucauguauuuuauugc

SEQ ID NO: 23132 - RNA, 19 nt, Artificial Sequence
  Description of Artificial Sequence: Synthetic oligonucleotide
uuagaaacccuuuaacgac

SEQ ID NO: 23133 - RNA, 19 nt, Artificial Sequence
  Description of Artificial Sequence: Synthetic oligonucleotide
aagcacuauauccuguguc

SEQ ID NO: 23134 - RNA, 19 nt, Artificial Sequence
  Description of Artificial Sequence: Synthetic oligonucleotide
uguugauauggucuaacug

SEQ ID NO: 23135 - RNA, 19 nt, Artificial Sequence
  Description of Artificial Sequence: Synthetic oligonucleotide
uguuaguuauacuaugaga

SEQ ID NO: 23136 - RNA, 19 nt, Artificial Sequence
  Description of Artificial Sequence: Synthetic oligonucleotide
ugaguaauugaaaucacua

SEQ ID NO: 23137 - RNA, 19 nt, Artificial Sequence
  Description of Artificial Sequence: Synthetic oligonucleotide
acuaagucaagguuuaaga

SEQ ID NO: 23138 - RNA, 19 nt, Artificial Sequence
  Description of Artificial Sequence: Synthetic oligonucleotide
aaagacgucauguauuuua

SEQ ID NO: 23139 - RNA, 19 nt, Artificial Sequence
  Description of Artificial Sequence: Synthetic oligonucleotide
gugaauucuguuuagggug

SEQ ID NO: 23140 - RNA, 19 nt, Artificial Sequence
  Description of Artificial Sequence: Synthetic oligonucleotide
auaaucaaugaguuguucu

SEQ ID NO: 23141 - RNA, 19 nt, Artificial Sequence
  Description of Artificial Sequence: Synthetic oligonucleotide
uucaguaauguacaaguuc

SEQ ID NO: 23142 - RNA, 19 nt, Artificial Sequence
  Description of Artificial Sequence: Synthetic oligonucleotide
uucacuguuagccucagau

SEQ ID NO: 23143 - RNA, 19 nt, Artificial Sequence
  Description of Artificial Sequence: Synthetic oligonucleotide
ucuacucuuacucgaaucu

SEQ ID NO: 23144 - RNA, 19 nt, Artificial Sequence
  Description of Artificial Sequence: Synthetic oligonucleotide
uuaugguuagagaaauuca

SEQ ID NO: 23145 - RNA, 19 nt, Artificial Sequence
  Description of Artificial Sequence: Synthetic oligonucleotide
aaauacccaaauuaugcau

SEQ ID NO: 23146 - RNA, 19 nt, Artificial Sequence
  Description of Artificial Sequence: Synthetic oligonucleotide
acuaaucgcucuucaauac

SEQ ID NO: 23147 - RNA, 19 nt, Artificial Sequence
  Description of Artificial Sequence: Synthetic oligonucleotide
aauuagauuaugauggaaa

SEQ ID NO: 23148 - RNA, 19 nt, Artificial Sequence
  Description of Artificial Sequence: Synthetic oligonucleotide
cauuauacugcagaggacc

SEQ ID NO: 23149 - RNA, 19 nt, Artificial Sequence
  Description of Artificial Sequence: Synthetic oligonucleotide
guuacuaucaauaagaguu

SEQ ID NO: 23150 - RNA, 19 nt, Artificial Sequence
  Description of Artificial Sequence: Synthetic oligonucleotide
caauaauugaucuugcaga

SEQ ID NO: 23151 - RNA, 19 nt, Artificial Sequence
  Description of Artificial Sequence: Synthetic oligonucleotide
cugauaaagaaucuguauc

SEQ ID NO: 23152 - RNA, 19 nt, Artificial Sequence
  Description of Artificial Sequence: Synthetic oligonucleotide
uuaacgacucugaagugug

SEQ ID NO: 23153 - RNA, 19 nt, Artificial Sequence
  Description of Artificial Sequence: Synthetic oligonucleotide
gacauuaaaucagaggaug

SEQ ID NO: 23154 - RNA, 19 nt, Artificial Sequence
  Description of Artificial Sequence: Synthetic oligonucleotide
agaucaucaaugcuuuuag

SEQ ID NO: 23155 - RNA, 19 nt, Artificial Sequence
  Description of Artificial Sequence: Synthetic oligonucleotide
ugaaggacuaguccgugag

SEQ ID NO: 23156 - RNA, 19 nt, Artificial Sequence
  Description of Artificial Sequence: Synthetic oligonucleotide
ucucguacaaugaugaguu

SEQ ID NO: 23157 - RNA, 19 nt, Artificial Sequence
  Description of Artificial Sequence: Synthetic oligonucleotide
cugaaaucaaucuaucauc

SEQ ID NO: 23158 - RNA, 19 nt, Artificial Sequence
  Description of Artificial Sequence: Synthetic oligonucleotide
ugauaugcuaaauccaagu

SEQ ID NO: 23159 - RNA, 19 nt, Artificial Sequence
  Description of Artificial Sequence: Synthetic oligonucleotide
guaauguacaaguuccaag

SEQ ID NO: 23160 - RNA, 19 nt, Artificial Sequence
  Description of Artificial Sequence: Synthetic oligonucleotide
uagauuaugauggaaacua

SEQ ID NO: 23161 - RNA, 19 nt, Artificial Sequence
  Description of Artificial Sequence: Synthetic oligonucleotide
aaaccaacuaaaaugaguu

SEQ ID NO: 23162 - RNA, 19 nt, Artificial Sequence
  Description of Artificial Sequence: Synthetic oligonucleotide
uguacaaguuccaagccaa

SEQ ID NO: 23163 - RNA, 19 nt, Artificial Sequence
  Description of Artificial Sequence: Synthetic oligonucleotide
uguccauuacucaaaggca

SEQ ID NO: 23164 - RNA, 19 nt, Artificial Sequence
  Description of Artificial Sequence: Synthetic oligonucleotide
ucugauguaaaugguaugu

SEQ ID NO: 23165 - RNA, 19 nt, Artificial Sequence
  Description of Artificial Sequence: Synthetic oligonucleotide
ugaaaucacuaacugacau

SEQ ID NO: 23166 - RNA, 19 nt, Artificial Sequence
  Description of Artificial Sequence: Synthetic oligonucleotide
ugguuagagaaauucauau

SEQ ID NO: 23167 - RNA, 19 nt, Artificial Sequence
  Description of Artificial Sequence: Synthetic oligonucleotide
gaaauacccacaucagcag

SEQ ID NO: 23168 - RNA, 19 nt, Artificial Sequence
  Description of Artificial Sequence: Synthetic oligonucleotide
uguaguaauuuugaugcug

SEQ ID NO: 23169 - RNA, 19 nt, Artificial Sequence
  Description of Artificial Sequence: Synthetic oligonucleotide
auguuaguuauacuaugag

SEQ ID NO: 23170 - RNA, 19 nt, Artificial Sequence
  Description of Artificial Sequence: Synthetic oligonucleotide
aucaaucuaucaucuuggc

SEQ ID NO: 23171 - RNA, 19 nt, Artificial Sequence
  Description of Artificial Sequence: Synthetic oligonucleotide
ucugauaaagaaucuguau

SEQ ID NO: 23172 - RNA, 19 nt, Artificial Sequence
  Description of Artificial Sequence: Synthetic oligonucleotide
aacuaagucaagguuuaag

SEQ ID NO: 23173 - RNA, 19 nt, Artificial Sequence
  Description of Artificial Sequence: Synthetic oligonucleotide
guaguaauuuugaugcugg

SEQ ID NO: 23174 - RNA, 19 nt, Artificial Sequence
  Description of Artificial Sequence: Synthetic oligonucleotide
gaucucaacuaagucaagg

SEQ ID NO: 23175 - RNA, 19 nt, Artificial Sequence
  Description of Artificial Sequence: Synthetic oligonucleotide
ucaaggcuaacuauugccu

SEQ ID NO: 23176 - RNA, 19 nt, Artificial Sequence
  Description of Artificial Sequence: Synthetic oligonucleotide
aagaucucaacuaagucaa

SEQ ID NO: 23177 - RNA, 19 nt, Artificial Sequence
  Description of Artificial Sequence: Synthetic oligonucleotide
aacuaaucgcucuucaaua

SEQ ID NO: 23178 - RNA, 19 nt, Artificial Sequence
  Description of Artificial Sequence: Synthetic oligonucleotide
agauagauagcucugccau

SEQ ID NO: 23179 - RNA, 19 nt, Artificial Sequence
  Description of Artificial Sequence: Synthetic oligonucleotide
ugcaaguaccaccauuugc

SEQ ID NO: 23180 - RNA, 19 nt, Artificial Sequence
  Description of Artificial Sequence: Synthetic oligonucleotide
ugagauagauagcucugcc

SEQ ID NO: 23181 - RNA, 19 nt, Artificial Sequence
  Description of Artificial Sequence: Synthetic oligonucleotide
uuuuaaccgcugcacuugg

SEQ ID NO: 23182 - RNA, 19 nt, Artificial Sequence
  Description of Artificial Sequence: Synthetic oligonucleotide
ugugagauagauagcucug

SEQ ID NO: 23183 - RNA, 19 nt, Artificial Sequence
  Description of Artificial Sequence: Synthetic oligonucleotide
ugcauuacuucuuaccccu

SEQ ID NO: 23184 - RNA, 19 nt, Artificial Sequence
  Description of Artificial Sequence: Synthetic oligonucleotide
cauuguuaugguuagagaa

SEQ ID NO: 23185 - RNA, 19 nt, Artificial Sequence
  Description of Artificial Sequence: Synthetic oligonucleotide
agugcaauauuugagcuca

SEQ ID NO: 23186 - RNA, 19 nt, Artificial Sequence
  Description of Artificial Sequence: Synthetic oligonucleotide
ucaaucuaucaucuuggca

SEQ ID NO: 23187 - RNA, 19 nt, Artificial Sequence
  Description of Artificial Sequence: Synthetic oligonucleotide
agugaacaccugcaguggc

SEQ ID NO: 23188 - RNA, 19 nt, Artificial Sequence
  Description of Artificial Sequence: Synthetic oligonucleotide
uucauauuagcagaaugcu

SEQ ID NO: 23189 - RNA, 19 nt, Artificial Sequence
  Description of Artificial Sequence: Synthetic oligonucleotide
uuugugacuaagugcaccu

SEQ ID NO: 23190 - RNA, 19 nt, Artificial Sequence
  Description of Artificial Sequence: Synthetic oligonucleotide
augguauguaguauuggcc

SEQ ID NO: 23191 - RNA, 19 nt, Artificial Sequence
  Description of Artificial Sequence: Synthetic oligonucleotide
uuucacuaauagaggggcg

SEQ ID NO: 23192 - RNA, 19 nt, Artificial Sequence
  Description of Artificial Sequence: Synthetic oligonucleotide
ugggaacaaaggcaauugg

SEQ ID NO: 23193 - RNA, 19 nt, Artificial Sequence
  Description of Artificial Sequence: Synthetic oligonucleotide
uaaaacuggccuuuuaguu

SEQ ID NO: 23194 - RNA, 19 nt, Artificial Sequence
  Description of Artificial Sequence: Synthetic oligonucleotide
uugauauggucuaacuggu

SEQ ID NO: 23195 - RNA, 19 nt, Artificial Sequence
  Description of Artificial Sequence: Synthetic oligonucleotide
uggaacguauuauuuguca

SEQ ID NO: 23196 - RNA, 19 nt, Artificial Sequence
  Description of Artificial Sequence: Synthetic oligonucleotide
uguguggacaugcaucuac

SEQ ID NO: 23197 - RNA, 19 nt, Artificial Sequence
  Description of Artificial Sequence: Synthetic oligonucleotide
acuauucugacuaggaaug

SEQ ID NO: 23198 - RNA, 19 nt, Artificial Sequence
  Description of Artificial Sequence: Synthetic oligonucleotide
uguuauuacuaagugcuac

SEQ ID NO: 23199 - RNA, 19 nt, Artificial Sequence
  Description of Artificial Sequence: Synthetic oligonucleotide
augaguuguucucuagagg

SEQ ID NO: 23200 - RNA, 19 nt, Artificial Sequence
  Description of Artificial Sequence: Synthetic oligonucleotide
uguuuauggauuccaaauu

SEQ ID NO: 23201 - RNA, 19 nt, Artificial Sequence
  Description of Artificial Sequence: Synthetic oligonucleotide
ugaaucagacauccgagau

SEQ ID NO: 23202 - RNA, 19 nt, Artificial Sequence
  Description of Artificial Sequence: Synthetic oligonucleotide
uuaaccgcugcacuuggca

SEQ ID NO: 23203 - RNA, 19 nt, Artificial Sequence
  Description of Artificial Sequence: Synthetic oligonucleotide
ugacaauaauugaucuugc

SEQ ID NO: 23204 - RNA, 19 nt, Artificial Sequence
  Description of Artificial Sequence: Synthetic oligonucleotide
gcaucaaauaaucaaugag

SEQ ID NO: 23205 - RNA, 19 nt, Artificial Sequence
  Description of Artificial Sequence: Synthetic oligonucleotide
ugaaaacggccuuuguagc

SEQ ID NO: 23206 - RNA, 19 nt, Artificial Sequence
  Description of Artificial Sequence: Synthetic oligonucleotide
guauuugacuauaauuugc

SEQ ID NO: 23207 - RNA, 19 nt, Artificial Sequence
  Description of Artificial Sequence: Synthetic oligonucleotide
cuaacuauugccuugcgua

SEQ ID NO: 23208 - RNA, 19 nt, Artificial Sequence
  Description of Artificial Sequence: Synthetic oligonucleotide
uacucuuacucgaaucucu

SEQ ID NO: 23209 - RNA, 19 nt, Artificial Sequence
  Description of Artificial Sequence: Synthetic oligonucleotide
uuauacuaugagauuucac

SEQ ID NO: 23210 - RNA, 19 nt, Artificial Sequence
  Description of Artificial Sequence: Synthetic oligonucleotide
uaaucgcucuucaauacuc

SEQ ID NO: 23211 - RNA, 19 nt, Artificial Sequence
  Description of Artificial Sequence: Synthetic oligonucleotide
aucucaacuaagucaaggu

SEQ ID NO: 23212 - RNA, 19 nt, Artificial Sequence
  Description of Artificial Sequence: Synthetic oligonucleotide
caccgacacauuuagaaac

SEQ ID NO: 23213 - RNA, 19 nt, Artificial Sequence
  Description of Artificial Sequence: Synthetic oligonucleotide
aacguauuauuugucacaa

SEQ ID NO: 23214 - RNA, 19 nt, Artificial Sequence
  Description of Artificial Sequence: Synthetic oligonucleotide
uaguccgugaguaauugaa

SEQ ID NO: 23215 - RNA, 19 nt, Artificial Sequence
  Description of Artificial Sequence: Synthetic oligonucleotide
guaucuugacuacugucag

SEQ ID NO: 23216 - RNA, 19 nt, Artificial Sequence
  Description of Artificial Sequence: Synthetic oligonucleotide
gaacguauuauuugucaca

SEQ ID NO: 23217 - RNA, 19 nt, Artificial Sequence
  Description of Artificial Sequence: Synthetic oligonucleotide
guagccuugauuugcuaag

SEQ ID NO: 23218 - RNA, 19 nt, Artificial Sequence
  Description of Artificial Sequence: Synthetic oligonucleotide
caccgagaguuauagaagc

SEQ ID NO: 23219 - RNA, 19 nt, Artificial Sequence
  Description of Artificial Sequence: Synthetic oligonucleotide
uugaaaucacuaacugaca

SEQ ID NO: 23220 - RNA, 19 nt, Artificial Sequence
  Description of Artificial Sequence: Synthetic oligonucleotide
guauuugggccaucaaugc

SEQ ID NO: 23221 - RNA, 19 nt, Artificial Sequence
  Description of Artificial Sequence: Synthetic oligonucleotide
guuaguuauacuaugagau

SEQ ID NO: 23222 - RNA, 19 nt, Artificial Sequence
  Description of Artificial Sequence: Synthetic oligonucleotide
acaacuugaaaggagugca

SEQ ID NO: 23223 - RNA, 19 nt, Artificial Sequence
  Description of Artificial Sequence: Synthetic oligonucleotide
uaguuauacuaugagauuu

SEQ ID NO: 23224 - RNA, 19 nt, Artificial Sequence
  Description of Artificial Sequence: Synthetic oligonucleotide
ugcgauuuuaaccgcugca

SEQ ID NO: 23225 - RNA, 19 nt, Artificial Sequence
  Description of Artificial Sequence: Synthetic oligonucleotide
uccugaaaucaaucuauca

SEQ ID NO: 23226 - RNA, 19 nt, Artificial Sequence
  Description of Artificial Sequence: Synthetic oligonucleotide
guaguaagggaaaugugug

SEQ ID NO: 23227 - RNA, 19 nt, Artificial Sequence
  Description of Artificial Sequence: Synthetic oligonucleotide
gucaccgagaguuauagaa

SEQ ID NO: 23228 - RNA, 19 nt, Artificial Sequence
  Description of Artificial Sequence: Synthetic oligonucleotide
aguuauacuaugagauuuc

SEQ ID NO: 23229 - RNA, 19 nt, Artificial Sequence
  Description of Artificial Sequence: Synthetic oligonucleotide
ucucaacuaagucaagguu

SEQ ID NO: 23230 - RNA, 19 nt, Artificial Sequence
  Description of Artificial Sequence: Synthetic oligonucleotide
uuuucuacucuuacucgaa

SEQ ID NO: 23231 - RNA, 19 nt, Artificial Sequence
  Description of Artificial Sequence: Synthetic oligonucleotide
ucugauugcuauugugugu

SEQ ID NO: 23232 - RNA, 19 nt, Artificial Sequence
  Description of Artificial Sequence: Synthetic oligonucleotide
gaggaggacaacugacagg

SEQ ID NO: 23233 - RNA, 19 nt, Artificial Sequence
  Description of Artificial Sequence: Synthetic oligonucleotide
auuugacuauaauuugccu

SEQ ID NO: 23234 - RNA, 19 nt, Artificial Sequence
  Description of Artificial Sequence: Synthetic oligonucleotide
augcgauuuuaaccgcugc

SEQ ID NO: 23235 - RNA, 19 nt, Artificial Sequence
  Description of Artificial Sequence: Synthetic oligonucleotide
uuaguuauacuaugagauu

SEQ ID NO: 23236 - RNA, 19 nt, Artificial Sequence
  Description of Artificial Sequence: Synthetic oligonucleotide
acuauugccuugcguacag

SEQ ID NO: 23237 - RNA, 19 nt, Artificial Sequence
  Description of Artificial Sequence: Synthetic oligonucleotide
acugugauuuucugcgcuc

SEQ ID NO: 23238 - RNA, 19 nt, Artificial Sequence
  Description of Artificial Sequence: Synthetic oligonucleotide
ucguacaaugaugaguucu

SEQ ID NO: 23239 - RNA, 19 nt, Artificial Sequence
  Description of Artificial Sequence: Synthetic oligonucleotide
ugaaguauuugggccauca

SEQ ID NO: 23240 - RNA, 19 nt, Artificial Sequence
  Description of Artificial Sequence: Synthetic oligonucleotide
cuaugagauuucacaacag

SEQ ID NO: 23241 - RNA, 19 nt, Artificial Sequence
  Description of Artificial Sequence: Synthetic oligonucleotide
ucuagagggaugccuugcc

SEQ ID NO: 23242 - RNA, 19 nt, Artificial Sequence
  Description of Artificial Sequence: Synthetic oligonucleotide
agccucagauuuuauagga

SEQ ID NO: 23243 - RNA, 19 nt, Artificial Sequence
  Description of Artificial Sequence: Synthetic oligonucleotide
aggggcucuuauuaaaucu

SEQ ID NO: 23244 - RNA, 19 nt, Artificial Sequence
  Description of Artificial Sequence: Synthetic oligonucleotide
uuacuaagugcuacaacuu

SEQ ID NO: 23245 - RNA, 19 nt, Artificial Sequence
  Description of Artificial Sequence: Synthetic oligonucleotide
acuguaggggcucuuauua

SEQ ID NO: 23246 - RNA, 19 nt, Artificial Sequence
  Description of Artificial Sequence: Synthetic oligonucleotide
uguucagaaccaacccuug

SEQ ID NO: 23247 - RNA, 19 nt, Artificial Sequence
  Description of Artificial Sequence: Synthetic oligonucleotide
aacuucucguacaaugaug

SEQ ID NO: 23248 - RNA, 19 nt, Artificial Sequence
  Description of Artificial Sequence: Synthetic oligonucleotide
ugguuuccuagcuccaugc

SEQ ID NO: 23249 - RNA, 19 nt, Artificial Sequence
  Description of Artificial Sequence: Synthetic oligonucleotide
uaaaucagaggaugaggaa

SEQ ID NO: 23250 - RNA, 19 nt, Artificial Sequence
  Description of Artificial Sequence: Synthetic oligonucleotide
aauacccaauuuauaacaa

SEQ ID NO: 23251 - RNA, 19 nt, Artificial Sequence
  Description of Artificial Sequence: Synthetic oligonucleotide
accgacacauuuagaaacc

SEQ ID NO: 23252 - RNA, 19 nt, Artificial Sequence
  Description of Artificial Sequence: Synthetic oligonucleotide
gacaauaauugaucuugca

SEQ ID NO: 23253 - RNA, 19 nt, Artificial Sequence
  Description of Artificial Sequence: Synthetic oligonucleotide
aguagcaaauguauaguca

SEQ ID NO: 23254 - RNA, 19 nt, Artificial Sequence
  Description of Artificial Sequence: Synthetic oligonucleotide
agcuguugaagacacacua

SEQ ID NO: 23255 - RNA, 19 nt, Artificial Sequence
  Description of Artificial Sequence: Synthetic oligonucleotide
uucuacucuuacucgaauc

SEQ ID NO: 23256 - RNA, 19 nt, Artificial Sequence
  Description of Artificial Sequence: Synthetic oligonucleotide
uauagugcuuaugaagaaa

SEQ ID NO: 23257 - RNA, 19 nt, Artificial Sequence
  Description of Artificial Sequence: Synthetic oligonucleotide
ucacuaauagaggggcggg

SEQ ID NO: 23258 - RNA, 19 nt, Artificial Sequence
  Description of Artificial Sequence: Synthetic oligonucleotide
cuuuucuacucuuacucga

SEQ ID NO: 23259 - RNA, 19 nt, Artificial Sequence
  Description of Artificial Sequence: Synthetic oligonucleotide
uacuaagugcuacaacuuu

SEQ ID NO: 23260 - RNA, 19 nt, Artificial Sequence
  Description of Artificial Sequence: Synthetic oligonucleotide
gagauagauagcucugcca

SEQ ID NO: 23261 - RNA, 19 nt, Artificial Sequence
  Description of Artificial Sequence: Synthetic oligonucleotide
acuauauccugugucuuug

SEQ ID NO: 23262 - RNA, 19 nt, Artificial Sequence
  Description of Artificial Sequence: Synthetic oligonucleotide
ggcuguaguaauuuugaug

SEQ ID NO: 23263 - RNA, 19 nt, Artificial Sequence
  Description of Artificial Sequence: Synthetic oligonucleotide
ugauauggucuaacuggug

SEQ ID NO: 23264 - RNA, 19 nt, Artificial Sequence
  Description of Artificial Sequence: Synthetic oligonucleotide
aacuugaaaggagugcaau

SEQ ID NO: 23265 - RNA, 19 nt, Artificial Sequence
  Description of Artificial Sequence: Synthetic oligonucleotide
aauuggugguaaaacacua

SEQ ID NO: 23266 - RNA, 19 nt, Artificial Sequence
  Description of Artificial Sequence: Synthetic oligonucleotide
uauucugacuaggaaugga

SEQ ID NO: 23267 - RNA, 19 nt, Artificial Sequence
  Description of Artificial Sequence: Synthetic oligonucleotide
uguacccuuguuacaaaua

SEQ ID NO: 23268 - RNA, 19 nt, Artificial Sequence
  Description of Artificial Sequence: Synthetic oligonucleotide
ucuaucaucuuggcaagaa

SEQ ID NO: 23269 - RNA, 19 nt, Artificial Sequence
  Description of Artificial Sequence: Synthetic oligonucleotide
aaggacuaguccgugagua

SEQ ID NO: 23270 - RNA, 19 nt, Artificial Sequence
  Description of Artificial Sequence: Synthetic oligonucleotide
agcuaguccucuaaagauc

SEQ ID NO: 23271 - RNA, 19 nt, Artificial Sequence
  Description of Artificial Sequence: Synthetic oligonucleotide
agcuaugacaauaauugau

SEQ ID NO: 23272 - RNA, 19 nt, Artificial Sequence
  Description of Artificial Sequence: Synthetic oligonucleotide
ggccgaacaaaaucaagag

SEQ ID NO: 23273 - RNA, 19 nt, Artificial Sequence
  Description of Artificial Sequence: Synthetic oligonucleotide
caaucagaacuaaucgcuc

SEQ ID NO: 23274 - RNA, 19 nt, Artificial Sequence
  Description of Artificial Sequence: Synthetic oligonucleotide
ugcuguaugcccgugcaga

SEQ ID NO: 23275 - RNA, 19 nt, Artificial Sequence
  Description of Artificial Sequence: Synthetic oligonucleotide
aacgacucugaagugugga

SEQ ID NO: 23276 - RNA, 19 nt, Artificial Sequence
  Description of Artificial Sequence: Synthetic oligonucleotide
ggggauguguauauggagg

SEQ ID NO: 23277 - RNA, 19 nt, Artificial Sequence
  Description of Artificial Sequence: Synthetic oligonucleotide
ucugggcuacaaucaaggc

SEQ ID NO: 23278 - RNA, 19 nt, Artificial Sequence
  Description of Artificial Sequence: Synthetic oligonucleotide
gccgaacaaaaucaagagg

SEQ ID NO: 23279 - RNA, 19 nt, Artificial Sequence
  Description of Artificial Sequence: Synthetic oligonucleotide
ugguucaauccuaccagaa

SEQ ID NO: 23280 - RNA, 19 nt, Artificial Sequence
  Description of Artificial Sequence: Synthetic oligonucleotide
agaacuaaucgcucuucaa

SEQ ID NO: 23281 - RNA, 19 nt, Artificial Sequence
  Description of Artificial Sequence: Synthetic oligonucleotide
guaguauuggcccucacau

SEQ ID NO: 23282 - RNA, 19 nt, Artificial Sequence
  Description of Artificial Sequence: Synthetic oligonucleotide
agcucauagccuugucuag

SEQ ID NO: 23283 - RNA, 19 nt, Artificial Sequence
  Description of Artificial Sequence: Synthetic oligonucleotide
gaacuaaucgcucuucaau

SEQ ID NO: 23284 - RNA, 19 nt, Artificial Sequence
  Description of Artificial Sequence: Synthetic oligonucleotide
gucauguguaugaaauacc

SEQ ID NO: 23285 - RNA, 19 nt, Artificial Sequence
  Description of Artificial Sequence: Synthetic oligonucleotide
ggaacguauuauuugucac

SEQ ID NO: 23286 - RNA, 19 nt, Artificial Sequence
  Description of Artificial Sequence: Synthetic oligonucleotide
gaugcgauuuuaaccgcug

SEQ ID NO: 23287 - RNA, 19 nt, Artificial Sequence
  Description of Artificial Sequence: Synthetic oligonucleotide
agaacaauggggaugugua

SEQ ID NO: 23288 - RNA, 19 nt, Artificial Sequence
  Description of Artificial Sequence: Synthetic oligonucleotide
aucuugacuacugucagua

SEQ ID NO: 23289 - RNA, 19 nt, Artificial Sequence
  Description of Artificial Sequence: Synthetic oligonucleotide
uuuaaccgcugcacuuggc

SEQ ID NO: 23290 - RNA, 19 nt, Artificial Sequence
  Description of Artificial Sequence: Synthetic oligonucleotide
uccaagcacuauauccugu

SEQ ID NO: 23291 - RNA, 19 nt, Artificial Sequence
  Description of Artificial Sequence: Synthetic oligonucleotide
auguguauauggaggcugg

SEQ ID NO: 23292 - RNA, 19 nt, Artificial Sequence
  Description of Artificial Sequence: Synthetic oligonucleotide
acuaauagaggggcgggca

SEQ ID NO: 23293 - RNA, 19 nt, Artificial Sequence
  Description of Artificial Sequence: Synthetic oligonucleotide
uucuguuuagggugccaca

SEQ ID NO: 23294 - RNA, 19 nt, Artificial Sequence
  Description of Artificial Sequence: Synthetic oligonucleotide
ucggauacuuauuuccauu

SEQ ID NO: 23295 - RNA, 19 nt, Artificial Sequence
  Description of Artificial Sequence: Synthetic oligonucleotide
ccaugcauuacuucuuacc

SEQ ID NO: 23296 - RNA, 19 nt, Artificial Sequence
  Description of Artificial Sequence: Synthetic oligonucleotide
gaacaauugcuguuauucu

SEQ ID NO: 23297 - RNA, 19 nt, Artificial Sequence
  Description of Artificial Sequence: Synthetic oligonucleotide
uaucuugacuacugucagu

SEQ ID NO: 23298 - RNA, 19 nt, Artificial Sequence
  Description of Artificial Sequence: Synthetic oligonucleotide
acuaguccgugaguaauug

SEQ ID NO: 23299 - RNA, 19 nt, Artificial Sequence
  Description of Artificial Sequence: Synthetic oligonucleotide
gauugcuauugugugugac

SEQ ID NO: 23300 - RNA, 19 nt, Artificial Sequence
  Description of Artificial Sequence: Synthetic oligonucleotide
cuaugacaauaauugaucu

SEQ ID NO: 23301 - RNA, 19 nt, Artificial Sequence
  Description of Artificial Sequence: Synthetic oligonucleotide
aagacgucauguauuuuau

SEQ ID NO: 23302 - RNA, 19 nt, Artificial Sequence
  Description of Artificial Sequence: Synthetic oligonucleotide
uuguuauuacuaagugcua

SEQ ID NO: 23303 - RNA, 19 nt, Artificial Sequence
  Description of Artificial Sequence: Synthetic oligonucleotide
ugguccaaauaaccaugca

SEQ ID NO: 23304 - RNA, 19 nt, Artificial Sequence
  Description of Artificial Sequence: Synthetic oligonucleotide
gcuuugccagcucauagcc

SEQ ID NO: 23305 - RNA, 19 nt, Artificial Sequence
  Description of Artificial Sequence: Synthetic oligonucleotide
gauaaagaaucuguauccu

SEQ ID NO: 23306 - RNA, 19 nt, Artificial Sequence
  Description of Artificial Sequence: Synthetic oligonucleotide
uucaucaagcugucuggaa

SEQ ID NO: 23307 - RNA, 19 nt, Artificial Sequence
  Description of Artificial Sequence: Synthetic oligonucleotide
cagcccuuuaucugcacac

SEQ ID NO: 23308 - RNA, 19 nt, Artificial Sequence
  Description of Artificial Sequence: Synthetic oligonucleotide
cagucaccgagaguuauag

SEQ ID NO: 23309 - RNA, 19 nt, Artificial Sequence
  Description of Artificial Sequence: Synthetic oligonucleotide
acuaucaauaagaguuugu

SEQ ID NO: 23310 - RNA, 19 nt, Artificial Sequence
  Description of Artificial Sequence: Synthetic oligonucleotide
cuacaaucaaggcuaacua

SEQ ID NO: 23311 - RNA, 19 nt, Artificial Sequence
  Description of Artificial Sequence: Synthetic oligonucleotide
ugacuauaauuugccugag

SEQ ID NO: 23312 - RNA, 19 nt, Artificial Sequence
  Description of Artificial Sequence: Synthetic oligonucleotide
uccauuacucaaaggcauu

SEQ ID NO: 23313 - RNA, 19 nt, Artificial Sequence
  Description of Artificial Sequence: Synthetic oligonucleotide
acguauuauuugucacaag

SEQ ID NO: 23314 - RNA, 19 nt, Artificial Sequence
  Description of Artificial Sequence: Synthetic oligonucleotide
aucagaacuaaucgcucuu

SEQ ID NO: 23315 - RNA, 19 nt, Artificial Sequence
  Description of Artificial Sequence: Synthetic oligonucleotide
caguacaauacccaauuua

SEQ ID NO: 23316 - RNA, 19 nt, Artificial Sequence
  Description of Artificial Sequence: Synthetic oligonucleotide
ccuuuaacgacucugaagu

SEQ ID NO: 23317 - RNA, 19 nt, Artificial Sequence
  Description of Artificial Sequence: Synthetic oligonucleotide
cagacuagcuucaacuaaa

SEQ ID NO: 23318 - RNA, 19 nt, Artificial Sequence
  Description of Artificial Sequence: Synthetic oligonucleotide
cuucucguacaaugaugag

SEQ ID NO: 23319 - RNA, 19 nt, Artificial Sequence
  Description of Artificial Sequence: Synthetic oligonucleotide
cucuuacucgaaucucuug

SEQ ID NO: 23320 - RNA, 19 nt, Artificial Sequence
  Description of Artificial Sequence: Synthetic oligonucleotide
uauguaguauuggcccuca

SEQ ID NO: 23321 - RNA, 19 nt, Artificial Sequence
  Description of Artificial Sequence: Synthetic oligonucleotide
aguuguuaaaggguuucaa

SEQ ID NO: 23322 - RNA, 19 nt, Artificial Sequence
  Description of Artificial Sequence: Synthetic oligonucleotide
auguaauucucuguaugau

SEQ ID NO: 23323 - RNA, 19 nt, Artificial Sequence
  Description of Artificial Sequence: Synthetic oligonucleotide
ucagaacuaaucgcucuuc

SEQ ID NO: 23324 - RNA, 19 nt, Artificial Sequence
  Description of Artificial Sequence: Synthetic oligonucleotide
ugucgcugaacuggagucc

SEQ ID NO: 23325 - RNA, 19 nt, Artificial Sequence
  Description of Artificial Sequence: Synthetic oligonucleotide
caaugcuguaugcccgugc

SEQ ID NO: 23326 - RNA, 19 nt, Artificial Sequence
  Description of Artificial Sequence: Synthetic oligonucleotide
ucacuguuagccucagauu

SEQ ID NO: 23327 - RNA, 19 nt, Artificial Sequence
  Description of Artificial Sequence: Synthetic oligonucleotide
augcgcacuccacguuucc

SEQ ID NO: 23328 - RNA, 19 nt, Artificial Sequence
  Description of Artificial Sequence: Synthetic oligonucleotide
ccgaguuacuguuggaacc

SEQ ID NO: 23329 - RNA, 19 nt, Artificial Sequence
  Description of Artificial Sequence: Synthetic oligonucleotide
aauuaaugaucuggauaua

SEQ ID NO: 23330 - RNA, 19 nt, Artificial Sequence
  Description of Artificial Sequence: Synthetic oligonucleotide
ggaauuaaaaggaccuuga

SEQ ID NO: 23331 - RNA, 19 nt, Artificial Sequence
  Description of Artificial Sequence: Synthetic oligonucleotide
acagagugagguaucuuga

SEQ ID NO: 23332 - RNA, 19 nt, Artificial Sequence
  Description of Artificial Sequence: Synthetic oligonucleotide
gguuuccuagcuccaugcg

SEQ ID NO: 23333 - RNA, 19 nt, Artificial Sequence
  Description of Artificial Sequence: Synthetic oligonucleotide
guacccuuguuacaaauau

SEQ ID NO: 23334 - RNA, 19 nt, Artificial Sequence
  Description of Artificial Sequence: Synthetic oligonucleotide
cuugcguacagucagucau

SEQ ID NO: 23335 - RNA, 19 nt, Artificial Sequence
  Description of Artificial Sequence: Synthetic oligonucleotide
ugauugcuauuguguguga

SEQ ID NO: 23336 - RNA, 19 nt, Artificial Sequence
  Description of Artificial Sequence: Synthetic oligonucleotide
cccuuuaacgacucugaag

SEQ ID NO: 23337 - RNA, 19 nt, Artificial Sequence
  Description of Artificial Sequence: Synthetic oligonucleotide
cuauagugcuuaugaagaa

SEQ ID NO: 23338 - RNA, 19 nt, Artificial Sequence
  Description of Artificial Sequence: Synthetic oligonucleotide
cacuauuacaccgacacau

SEQ ID NO: 23339 - RNA, 19 nt, Artificial Sequence
  Description of Artificial Sequence: Synthetic oligonucleotide
caggccggcuacuguaggg

SEQ ID NO: 23340 - RNA, 19 nt, Artificial Sequence
  Description of Artificial Sequence: Synthetic oligonucleotide
uuaccccugcaugucauuc

SEQ ID NO: 23341 - RNA, 19 nt, Artificial Sequence
  Description of Artificial Sequence: Synthetic oligonucleotide
gcuccaugcgcacuccacg

SEQ ID NO: 23342 - RNA, 19 nt, Artificial Sequence
  Description of Artificial Sequence: Synthetic oligonucleotide
uagcagaaugcuucaugua

SEQ ID NO: 23343 - RNA, 19 nt, Artificial Sequence
  Description of Artificial Sequence: Synthetic oligonucleotide
cucuagagggaugccuugc

SEQ ID NO: 23344 - RNA, 19 nt, Artificial Sequence
  Description of Artificial Sequence: Synthetic oligonucleotide
uccacggcagaugcgauuu

SEQ ID NO: 23345 - RNA, 19 nt, Artificial Sequence
  Description of Artificial Sequence: Synthetic oligonucleotide
gucaugaggaacuuugcuu

SEQ ID NO: 23346 - RNA, 19 nt, Artificial Sequence
  Description of Artificial Sequence: Synthetic oligonucleotide
uugugacuaagugcaccug

SEQ ID NO: 23347 - RNA, 19 nt, Artificial Sequence
  Description of Artificial Sequence: Synthetic oligonucleotide
cucaggguuaugauuugaa

SEQ ID NO: 23348 - RNA, 19 nt, Artificial Sequence
  Description of Artificial Sequence: Synthetic oligonucleotide
cagcucauagccuugucua

SEQ ID NO: 23349 - RNA, 19 nt, Artificial Sequence
  Description of Artificial Sequence: Synthetic oligonucleotide
augguuagagaaauucaua

SEQ ID NO: 23350 - RNA, 19 nt, Artificial Sequence
  Description of Artificial Sequence: Synthetic oligonucleotide
auggggauguguauaugga

SEQ ID NO: 23351 - RNA, 19 nt, Artificial Sequence
  Description of Artificial Sequence: Synthetic oligonucleotide
cacauugaauguaucugua

SEQ ID NO: 23352 - RNA, 19 nt, Artificial Sequence
  Description of Artificial Sequence: Synthetic oligonucleotide
augcaucucagaaauuaaa

SEQ ID NO: 23353 - RNA, 19 nt, Artificial Sequence
  Description of Artificial Sequence: Synthetic oligonucleotide
uuauacugcagaggaccau

SEQ ID NO: 23354 - RNA, 19 nt, Artificial Sequence
  Description of Artificial Sequence: Synthetic oligonucleotide
agccaacugucugaguucu

SEQ ID NO: 23355 - RNA, 19 nt, Artificial Sequence
  Description of Artificial Sequence: Synthetic oligonucleotide
uguguauauggaggcuggu

SEQ ID NO: 23356 - RNA, 19 nt, Artificial Sequence
  Description of Artificial Sequence: Synthetic oligonucleotide
auggucuaacuggugagau

SEQ ID NO: 23357 - RNA, 19 nt, Artificial Sequence
  Description of Artificial Sequence: Synthetic oligonucleotide
cacuaauagaggggcgggc

SEQ ID NO: 23358 - RNA, 19 nt, Artificial Sequence
  Description of Artificial Sequence: Synthetic oligonucleotide
agaugcgauuuuaaccgcu

SEQ ID NO: 23359 - RNA, 19 nt, Artificial Sequence
  Description of Artificial Sequence: Synthetic oligonucleotide
uagccuugauuugcuaagu

SEQ ID NO: 23360 - RNA, 19 nt, Artificial Sequence
  Description of Artificial Sequence: Synthetic oligonucleotide
acuguuggaaccagccggu

SEQ ID NO: 23361 - RNA, 19 nt, Artificial Sequence
  Description of Artificial Sequence: Synthetic oligonucleotide
uaguauuggcccucacauu

SEQ ID NO: 23362 - RNA, 19 nt, Artificial Sequence
  Description of Artificial Sequence: Synthetic oligonucleotide
cucuccugaaaucaaucua

SEQ ID NO: 23363 - RNA, 19 nt, Artificial Sequence
  Description of Artificial Sequence: Synthetic oligonucleotide
augcccgugcagaaagagg

SEQ ID NO: 23364 - RNA, 19 nt, Artificial Sequence
  Description of Artificial Sequence: Synthetic oligonucleotide
gaagacuguggaaauuccu

SEQ ID NO: 23365 - RNA, 19 nt, Artificial Sequence
  Description of Artificial Sequence: Synthetic oligonucleotide
guauguaguauuggcccuc

SEQ ID NO: 23366 - RNA, 19 nt, Artificial Sequence
  Description of Artificial Sequence: Synthetic oligonucleotide
uaagugcaccuggugagua

SEQ ID NO: 23367 - RNA, 19 nt, Artificial Sequence
  Description of Artificial Sequence: Synthetic oligonucleotide
caugcgcacuccacguuuc

SEQ ID NO: 23368 - RNA, 19 nt, Artificial Sequence
  Description of Artificial Sequence: Synthetic oligonucleotide
ccaaauaaccaugcauuac

SEQ ID NO: 23369 - RNA, 19 nt, Artificial Sequence
  Description of Artificial Sequence: Synthetic oligonucleotide
gaaagaccauuuaucuugu

SEQ ID NO: 23370 - RNA, 19 nt, Artificial Sequence
  Description of Artificial Sequence: Synthetic oligonucleotide
agucaccgagaguuauaga

SEQ ID NO: 23371 - RNA, 19 nt, Artificial Sequence
  Description of Artificial Sequence: Synthetic oligonucleotide
cuagagggaugccuugcca

SEQ ID NO: 23372 - RNA, 19 nt, Artificial Sequence
  Description of Artificial Sequence: Synthetic oligonucleotide
guccgugaguaauugaaau

SEQ ID NO: 23373 - RNA, 19 nt, Artificial Sequence
  Description of Artificial Sequence: Synthetic oligonucleotide
gugaguaauugaaaucacu

SEQ ID NO: 23374 - RNA, 19 nt, Artificial Sequence
  Description of Artificial Sequence: Synthetic oligonucleotide
cucgaggaccaucccuuug

SEQ ID NO: 23375 - RNA, 19 nt, Artificial Sequence
  Description of Artificial Sequence: Synthetic oligonucleotide
cuaaucgcucuucaauacu

SEQ ID NO: 23376 - RNA, 19 nt, Artificial Sequence
  Description of Artificial Sequence: Synthetic oligonucleotide
ccucaauaugucgaaguac

SEQ ID NO: 23377 - RNA, 19 nt, Artificial Sequence
  Description of Artificial Sequence: Synthetic oligonucleotide
augauguauuugacuauaa

SEQ ID NO: 23378 - RNA, 19 nt, Artificial Sequence
  Description of Artificial Sequence: Synthetic oligonucleotide
cuaguccgugaguaauuga

SEQ ID NO: 23379 - RNA, 19 nt, Artificial Sequence
  Description of Artificial Sequence: Synthetic oligonucleotide
cuaguccucuaaagaucuc

SEQ ID NO: 23380 - RNA, 19 nt, Artificial Sequence
  Description of Artificial Sequence: Synthetic oligonucleotide
gaggggagagaucaucaau

SEQ ID NO: 23381 - RNA, 19 nt, Artificial Sequence
  Description of Artificial Sequence: Synthetic oligonucleotide
accgagaguuauagaagcu

SEQ ID NO: 23382 - RNA, 19 nt, Artificial Sequence
  Description of Artificial Sequence: Synthetic oligonucleotide
caacuugaaaggagugcaa

SEQ ID NO: 23383 - RNA, 19 nt, Artificial Sequence
  Description of Artificial Sequence: Synthetic oligonucleotide
aguccgugaguaauugaaa

SEQ ID NO: 23384 - RNA, 19 nt, Artificial Sequence
  Description of Artificial Sequence: Synthetic oligonucleotide
ccugaaaucaaucuaucau

SEQ ID NO: 23385 - RNA, 19 nt, Artificial Sequence
  Description of Artificial Sequence: Synthetic oligonucleotide
cucguacaaugaugaguuc

SEQ ID NO: 23386 - RNA, 19 nt, Artificial Sequence
  Description of Artificial Sequence: Synthetic oligonucleotide
agaucucaacuaagucaag

SEQ ID NO: 23387 - RNA, 19 nt, Artificial Sequence
  Description of Artificial Sequence: Synthetic oligonucleotide
gcagacuugcuccucacua

SEQ ID NO: 23388 - RNA, 19 nt, Artificial Sequence
  Description of Artificial Sequence: Synthetic oligonucleotide
cacuaaggaugucauagau

SEQ ID NO: 23389 - RNA, 19 nt, Artificial Sequence
  Description of Artificial Sequence: Synthetic oligonucleotide
cuguauccuuugcaucauc

SEQ ID NO: 23390 - RNA, 19 nt, Artificial Sequence
  Description of Artificial Sequence: Synthetic oligonucleotide
gcuguugaagacacacuac

SEQ ID NO: 23391 - RNA, 19 nt, Artificial Sequence
  Description of Artificial Sequence: Synthetic oligonucleotide
uccaugcgcacuccacguu

SEQ ID NO: 23392 - RNA, 19 nt, Artificial Sequence
  Description of Artificial Sequence: Synthetic oligonucleotide
gccaggccgaacaaaauca

SEQ ID NO: 23393 - RNA, 19 nt, Artificial Sequence
  Description of Artificial Sequence: Synthetic oligonucleotide
agacuagcuucaacuaaaa

SEQ ID NO: 23394 - RNA, 19 nt, Artificial Sequence
  Description of Artificial Sequence: Synthetic oligonucleotide
gaaggacuaguccgugagu

SEQ ID NO: 23395 - RNA, 19 nt, Artificial Sequence
  Description of Artificial Sequence: Synthetic oligonucleotide
caaguaccaccauuugcua

SEQ ID NO: 23396 - RNA, 19 nt, Artificial Sequence
  Description of Artificial Sequence: Synthetic oligonucleotide
ggcuaacuauugccuugcg

SEQ ID NO: 23397 - RNA, 19 nt, Artificial Sequence
  Description of Artificial Sequence: Synthetic oligonucleotide
guacaaguuccaagccaac

SEQ ID NO: 23398 - RNA, 19 nt, Artificial Sequence
  Description of Artificial Sequence: Synthetic oligonucleotide
cuauuacaccgacacauuu

SEQ ID NO: 23399 - RNA, 19 nt, Artificial Sequence
  Description of Artificial Sequence: Synthetic oligonucleotide
uacccaaauuaugcaucuc

SEQ ID NO: 23400 - RNA, 19 nt, Artificial Sequence
  Description of Artificial Sequence: Synthetic oligonucleotide
ugcgcacuccacguuuccu

SEQ ID NO: 23401 - RNA, 19 nt, Artificial Sequence
  Description of Artificial Sequence: Synthetic oligonucleotide
gguauguaguauuggcccu

SEQ ID NO: 23402 - RNA, 19 nt, Artificial Sequence
  Description of Artificial Sequence: Synthetic oligonucleotide
cugauguaaaugguaugua

SEQ ID NO: 23403 - RNA, 19 nt, Artificial Sequence
  Description of Artificial Sequence: Synthetic oligonucleotide
ucgcugaacuggaguccga

SEQ ID NO: 23404 - RNA, 19 nt, Artificial Sequence
  Description of Artificial Sequence: Synthetic oligonucleotide
guacagugguucuuccccu

SEQ ID NO: 23405 - RNA, 19 nt, Artificial Sequence
  Description of Artificial Sequence: Synthetic oligonucleotide
ggcuguacccuuguuacaa

SEQ ID NO: 23406 - RNA, 19 nt, Artificial Sequence
  Description of Artificial Sequence: Synthetic oligonucleotide
caccaguagcaaauguaua

SEQ ID NO: 23407 - RNA, 19 nt, Artificial Sequence
  Description of Artificial Sequence: Synthetic oligonucleotide
auccacggcagaugcgauu

SEQ ID NO: 23408 - RNA, 19 nt, Artificial Sequence
  Description of Artificial Sequence: Synthetic oligonucleotide
cuggaguccgaguuacugu

SEQ ID NO: 23409 - RNA, 19 nt, Artificial Sequence
  Description of Artificial Sequence: Synthetic oligonucleotide
ccgacacauuuagaaaccc

SEQ ID NO: 23410 - RNA, 19 nt, Artificial Sequence
  Description of Artificial Sequence: Synthetic oligonucleotide
cauccgagauggagaagaa

SEQ ID NO: 23411 - RNA, 19 nt, Artificial Sequence
  Description of Artificial Sequence: Synthetic oligonucleotide
gccucaauaugucgaagua

SEQ ID NO: 23412 - RNA, 19 nt, Artificial Sequence
  Description of Artificial Sequence: Synthetic oligonucleotide
gcuaacuauugccuugcgu

SEQ ID NO: 23413 - RNA, 19 nt, Artificial Sequence
  Description of Artificial Sequence: Synthetic oligonucleotide
ccuuugcucuauaacucca

SEQ ID NO: 23414 - RNA, 19 nt, Artificial Sequence
  Description of Artificial Sequence: Synthetic oligonucleotide
caagcacuauauccugugu

SEQ ID NO: 23415 - RNA, 19 nt, Artificial Sequence
  Description of Artificial Sequence: Synthetic oligonucleotide
accauauaguugaggugua

SEQ ID NO: 23416 - RNA, 19 nt, Artificial Sequence
  Description of Artificial Sequence: Synthetic oligonucleotide
ccagacuagcuucaacuaa

SEQ ID NO: 23417 - RNA, 19 nt, Artificial Sequence
  Description of Artificial Sequence: Synthetic oligonucleotide
ggccggcuacuguaggggc

SEQ ID NO: 23418 - RNA, 19 nt, Artificial Sequence
  Description of Artificial Sequence: Synthetic oligonucleotide
cagacuugcuccucacuau

SEQ ID NO: 23419 - RNA, 19 nt, Artificial Sequence
  Description of Artificial Sequence: Synthetic oligonucleotide
accaacccuugcauuuggu

SEQ ID NO: 23420 - RNA, 19 nt, Artificial Sequence
  Description of Artificial Sequence: Synthetic oligonucleotide
gcccaucuguccauuacuc

SEQ ID NO: 23421 - RNA, 19 nt, Artificial Sequence
  Description of Artificial Sequence: Synthetic oligonucleotide
cccgacaccuccugauaug

SEQ ID NO: 23422 - RNA, 19 nt, Artificial Sequence
  Description of Artificial Sequence: Synthetic oligonucleotide
gacuaguccgugaguaauu

SEQ ID NO: 23423 - RNA, 19 nt, Artificial Sequence
  Description of Artificial Sequence: Synthetic oligonucleotide
guauuggcccucacauugu

SEQ ID NO: 23424 - RNA, 19 nt, Artificial Sequence
  Description of Artificial Sequence: Synthetic oligonucleotide
cgagaguuauagaagcugu

SEQ ID NO: 23425 - RNA, 19 nt, Artificial Sequence
  Description of Artificial Sequence: Synthetic oligonucleotide
cugcgauccugacaucacu

SEQ ID NO: 23426 - RNA, 19 nt, Artificial Sequence
  Description of Artificial Sequence: Synthetic oligonucleotide
cacggcagaugcgauuuua

SEQ ID NO: 23427 - RNA, 19 nt, Artificial Sequence
  Description of Artificial Sequence: Synthetic oligonucleotide
cgaguuacuguuggaacca

SEQ ID NO: 23428 - RNA, 19 nt, Artificial Sequence
  Description of Artificial Sequence: Synthetic oligonucleotide
caacuaagucaagguuuaa

SEQ ID NO: 23429 - RNA, 19 nt, Artificial Sequence
  Description of Artificial Sequence: Synthetic oligonucleotide
ggacuaguccgugaguaau

SEQ ID NO: 23430 - RNA, 19 nt, Artificial Sequence
  Description of Artificial Sequence: Synthetic oligonucleotide
ccggcuacuguaggggcuc

SEQ ID NO: 23431 - RNA, 19 nt, Artificial Sequence
  Description of Artificial Sequence: Synthetic oligonucleotide
ggacaacugacaggaucua

SEQ ID NO: 23432 - RNA, 19 nt, Artificial Sequence
  Description of Artificial Sequence: Synthetic oligonucleotide
aggugguguuugagcuagu

SEQ ID NO: 23433 - RNA, 19 nt, Artificial Sequence
  Description of Artificial Sequence: Synthetic oligonucleotide
gcgcacuccacguuuccuu

SEQ ID NO: 23434 - RNA, 19 nt, Artificial Sequence
  Description of Artificial Sequence: Synthetic oligonucleotide
cuguagccauuagccugaa

SEQ ID NO: 23435 - RNA, 19 nt, Artificial Sequence
  Description of Artificial Sequence: Synthetic oligonucleotide
cggccuuuguagcugacau

SEQ ID NO: 23436 - RNA, 19 nt, Artificial Sequence
  Description of Artificial Sequence: Synthetic oligonucleotide
ccaugcgcacuccacguuu

SEQ ID NO: 23437 - RNA, 19 nt, Artificial Sequence
  Description of Artificial Sequence: Synthetic oligonucleotide
gccggcuacuguaggggcu

SEQ ID NO: 23438 - RNA, 19 nt, Artificial Sequence
  Description of Artificial Sequence: Synthetic oligonucleotide
ccccgacaccuccugauau

SEQ ID NO: 23439 - RNA, 19 nt, Artificial Sequence
  Description of Artificial Sequence: Synthetic oligonucleotide
ccggucauuuggggagaca

SEQ ID NO: 23440 - RNA, 19 nt, Artificial Sequence
  Description of Artificial Sequence: Synthetic oligonucleotide
cuacaacuuugggcugguu

SEQ ID NO: 23441 - RNA, 19 nt, Artificial Sequence
  Description of Artificial Sequence: Synthetic oligonucleotide
cgcacuccacguuuccuuu

SEQ ID NO: 23442 - RNA, 19 nt, Artificial Sequence
  Description of Artificial Sequence: Synthetic oligonucleotide
ccacggcagaugcgauuuu

SEQ ID NO: 23443 - RNA, 19 nt, Artificial Sequence
  Description of Artificial Sequence: Synthetic oligonucleotide
aauaaugauaauuuaaugg

SEQ ID NO: 23444 - RNA, 19 nt, Artificial Sequence
  Description of Artificial Sequence: Synthetic oligonucleotide
aacaauaacacacacacac

SEQ ID NO: 23445 - RNA, 19 nt, Artificial Sequence
  Description of Artificial Sequence: Synthetic oligonucleotide
aaaagcuccaaucaagagg

SEQ ID NO: 23446 - RNA, 19 nt, Artificial Sequence
  Description of Artificial Sequence: Synthetic oligonucleotide
uccuauaucaucaauuagg

SEQ ID NO: 23447 - RNA, 19 nt, Artificial Sequence
  Description of Artificial Sequence: Synthetic oligonucleotide
aguacuauggacuaaacug

SEQ ID NO: 23448 - RNA, 19 nt, Artificial Sequence
  Description of Artificial Sequence: Synthetic oligonucleotide
aagacuuuugugcuaaucg

SEQ ID NO: 23449 - RNA, 19 nt, Artificial Sequence
  Description of Artificial Sequence: Synthetic oligonucleotide
uuauuuggaaucaugguag

SEQ ID NO: 23450 - RNA, 19 nt, Artificial Sequence
  Description of Artificial Sequence: Synthetic oligonucleotide
auaaugauaauuuaauggu

SEQ ID NO: 23451 - RNA, 19 nt, Artificial Sequence
  Description of Artificial Sequence: Synthetic oligonucleotide
auaacacacacacacacac

SEQ ID NO: 23452 - RNA, 19 nt, Artificial Sequence
  Description of Artificial Sequence: Synthetic oligonucleotide
guaauagacuccuaaaggg

SEQ ID NO: 23453 - RNA, 19 nt, Artificial Sequence
  Description of Artificial Sequence: Synthetic oligonucleotide
uaugcaagugagaacaagg

SEQ ID NO: 23454 - RNA, 19 nt, Artificial Sequence
  Description of Artificial Sequence: Synthetic oligonucleotide
uuaggcuugacuuggauag

SEQ ID NO: 23455 - RNA, 19 nt, Artificial Sequence
  Description of Artificial Sequence: Synthetic oligonucleotide
gaaaauuugagucucggac

SEQ ID NO: 23456 - RNA, 19 nt, Artificial Sequence
  Description of Artificial Sequence: Synthetic oligonucleotide
uaauagacuccuaaagggg

SEQ ID NO: 23457 - RNA, 19 nt, Artificial Sequence
  Description of Artificial Sequence: Synthetic oligonucleotide
aaucucacguuucugcugg

SEQ ID NO: 23458 - RNA, 19 nt, Artificial Sequence
  Description of Artificial Sequence: Synthetic oligonucleotide
ucguguacuauaaagauaa

SEQ ID NO: 23459 - RNA, 19 nt, Artificial Sequence
  Description of Artificial Sequence: Synthetic oligonucleotide
aaucuauuaauguuuagua

SEQ ID NO: 23460 - RNA, 19 nt, Artificial Sequence
  Description of Artificial Sequence: Synthetic oligonucleotide
aauagcuacauuuccacaa

SEQ ID NO: 23461 - RNA, 19 nt, Artificial Sequence
  Description of Artificial Sequence: Synthetic oligonucleotide
aaguaugcaagugagaaca

SEQ ID NO: 23462 - RNA, 19 nt, Artificial Sequence
  Description of Artificial Sequence: Synthetic oligonucleotide
aguuacauagucuaaggcu

SEQ ID NO: 23463 - RNA, 19 nt, Artificial Sequence
  Description of Artificial Sequence: Synthetic oligonucleotide
aaaucuauuaauguuuagu

SEQ ID NO: 23464 - RNA, 19 nt, Artificial Sequence
  Description of Artificial Sequence: Synthetic oligonucleotide
uuagcacaaacacuagggg

SEQ ID NO: 23465 - RNA, 19 nt, Artificial Sequence
  Description of Artificial Sequence: Synthetic oligonucleotide
auaaugaauaaugugaggu

SEQ ID NO: 23466 - RNA, 19 nt, Artificial Sequence
  Description of Artificial Sequence: Synthetic oligonucleotide
ucauaaaauuauaaagccu

SEQ ID NO: 23467 - RNA, 19 nt, Artificial Sequence
  Description of Artificial Sequence: Synthetic oligonucleotide
augcauauucuguucacgc

SEQ ID NO: 23468 - RNA, 19 nt, Artificial Sequence
  Description of Artificial Sequence: Synthetic oligonucleotide
uuuucuaccggcaggaagu

SEQ ID NO: 23469 - RNA, 19 nt, Artificial Sequence
  Description of Artificial Sequence: Synthetic oligonucleotide
cacacacacacauauaacc

SEQ ID NO: 23470 - RNA, 19 nt, Artificial Sequence
  Description of Artificial Sequence: Synthetic oligonucleotide
uguugugcuaucaagacuu

SEQ ID NO: 23471 - RNA, 19 nt, Artificial Sequence
  Description of Artificial Sequence: Synthetic oligonucleotide
ugggaauaaagaaugauuu

SEQ ID NO: 23472 - RNA, 19 nt, Artificial Sequence
  Description of Artificial Sequence: Synthetic oligonucleotide
gauaucggggcuugaaagg

SEQ ID NO: 23473 - RNA, 19 nt, Artificial Sequence
  Description of Artificial Sequence: Synthetic oligonucleotide
uaccccaucaacaaucuug

SEQ ID NO: 23474 - RNA, 19 nt, Artificial Sequence
  Description of Artificial Sequence: Synthetic oligonucleotide
ucuaaggacauuucuguca

SEQ ID NO: 23475 - RNA, 19 nt, Artificial Sequence
  Description of Artificial Sequence: Synthetic oligonucleotide
aacacacacacacacacau

SEQ ID NO: 23476 - RNA, 19 nt, Artificial Sequence
  Description of Artificial Sequence: Synthetic oligonucleotide
agucacuauaucuccuucc

SEQ ID NO: 23477 - RNA, 19 nt, Artificial Sequence
  Description of Artificial Sequence: Synthetic oligonucleotide
acaguuacauagucuaagg

SEQ ID NO: 23478 - RNA, 19 nt, Artificial Sequence
  Description of Artificial Sequence: Synthetic oligonucleotide
ugcuaaucguucaaacagg

SEQ ID NO: 23479 - RNA, 19 nt, Artificial Sequence
  Description of Artificial Sequence: Synthetic oligonucleotide
uuuuaauggauuacuucga

SEQ ID NO: 23480 - RNA, 19 nt, Artificial Sequence
  Description of Artificial Sequence: Synthetic oligonucleotide
ucagggugaauaauguacc

SEQ ID NO: 23481 - RNA, 19 nt, Artificial Sequence
  Description of Artificial Sequence: Synthetic oligonucleotide
acuucgauugaccuugguc

SEQ ID NO: 23482 - RNA, 19 nt, Artificial Sequence
  Description of Artificial Sequence: Synthetic oligonucleotide
agauaucggggcuugaaag

SEQ ID NO: 23483 - RNA, 19 nt, Artificial Sequence
  Description of Artificial Sequence: Synthetic oligonucleotide
aagacagcggccucuagug

SEQ ID NO: 23484 - RNA, 19 nt, Artificial Sequence
  Description of Artificial Sequence: Synthetic oligonucleotide
aaccuuuaaucuuuuggca

SEQ ID NO: 23485 - RNA, 19 nt, Artificial Sequence
  Description of Artificial Sequence: Synthetic oligonucleotide
aucgaugcaguccuuauug

SEQ ID NO: 23486 - RNA, 19 nt, Artificial Sequence
  Description of Artificial Sequence: Synthetic oligonucleotide
auacguaagacuuuucuaa

SEQ ID NO: 23487 - RNA, 19 nt, Artificial Sequence
  Description of Artificial Sequence: Synthetic oligonucleotide
caauaacacacacacacac

SEQ ID NO: 23488 - RNA, 19 nt, Artificial Sequence
  Description of Artificial Sequence: Synthetic oligonucleotide
uggcacaagaugauuuugg

SEQ ID NO: 23489 - RNA, 19 nt, Artificial Sequence
  Description of Artificial Sequence: Synthetic oligonucleotide
uuuggaaucaugguagcug

SEQ ID NO: 23490 - RNA, 19 nt, Artificial Sequence
  Description of Artificial Sequence: Synthetic oligonucleotide
uggaaguaacuucacgaag

SEQ ID NO: 23491 - RNA, 19 nt, Artificial Sequence
  Description of Artificial Sequence: Synthetic oligonucleotide
cuuguuguccgacacuugg

SEQ ID NO: 23492 - RNA, 19 nt, Artificial Sequence
  Description of Artificial Sequence: Synthetic oligonucleotide
cauuuuaugcugcaauagc

SEQ ID NO: 23493 - RNA, 19 nt, Artificial Sequence
  Description of Artificial Sequence: Synthetic oligonucleotide
aauggauuacuucgagucu

SEQ ID NO: 23494 - RNA, 19 nt, Artificial Sequence
  Description of Artificial Sequence: Synthetic oligonucleotide
ucaaucuuuggacugucac

SEQ ID NO: 23495 - RNA, 19 nt, Artificial Sequence
  Description of Artificial Sequence: Synthetic oligonucleotide
ugagagucacuauaucucc

SEQ ID NO: 23496 - RNA, 19 nt, Artificial Sequence
  Description of Artificial Sequence: Synthetic oligonucleotide
aggcuuagcacagugaagg

SEQ ID NO: 23497 - RNA, 19 nt, Artificial Sequence
  Description of Artificial Sequence: Synthetic oligonucleotide
uggacaaggauaaguagcu

SEQ ID NO: 23498 - RNA, 19 nt, Artificial Sequence
  Description of Artificial Sequence: Synthetic oligonucleotide
aauaguacuauggacuaaa

SEQ ID NO: 23499 - RNA, 19 nt, Artificial Sequence
  Description of Artificial Sequence: Synthetic oligonucleotide
uauguaauagacuccuaaa

SEQ ID NO: 23500 - RNA, 19 nt, Artificial Sequence
  Description of Artificial Sequence: Synthetic oligonucleotide
cuugcuucggacuagauua

SEQ ID NO: 23501 - RNA, 19 nt, Artificial Sequence
  Description of Artificial Sequence: Synthetic oligonucleotide
uuuauaccuaacuagcauu

SEQ ID NO: 23502 - RNA, 19 nt, Artificial Sequence
  Description of Artificial Sequence: Synthetic oligonucleotide
uguuugaugacaggagcgg

SEQ ID NO: 23503 - RNA, 19 nt, Artificial Sequence
  Description of Artificial Sequence: Synthetic oligonucleotide
ggaaagauccaauagcuac

SEQ ID NO: 23504 - RNA, 19 nt, Artificial Sequence
  Description of Artificial Sequence: Synthetic oligonucleotide
gcuggaaugacauuucuag

SEQ ID NO: 23505 - RNA, 19 nt, Artificial Sequence
  Description of Artificial Sequence: Synthetic oligonucleotide
aagcugcgaagacagcggc

SEQ ID NO: 23506 - RNA, 19 nt, Artificial Sequence
  Description of Artificial Sequence: Synthetic oligonucleotide
uagcacaaacacuaggggc

SEQ ID NO: 23507 - RNA, 19 nt, Artificial Sequence
  Description of Artificial Sequence: Synthetic oligonucleotide
ucggacuugugucuuaagc

SEQ ID NO: 23508 - RNA, 19 nt, Artificial Sequence
  Description of Artificial Sequence: Synthetic oligonucleotide
auuuauaccuaacuagcau

SEQ ID NO: 23509 - RNA, 19 nt, Artificial Sequence
  Description of Artificial Sequence: Synthetic oligonucleotide
aauuuauaccuaacuagca

SEQ ID NO: 23510 - RNA, 19 nt, Artificial Sequence
  Description of Artificial Sequence: Synthetic oligonucleotide
aagaguaaagaugguagcu

SEQ ID NO: 23511 - RNA, 19 nt, Artificial Sequence
  Description of Artificial Sequence: Synthetic oligonucleotide
auuucuaguuucaugaaca

SEQ ID NO: 23512 - RNA, 19 nt, Artificial Sequence
  Description of Artificial Sequence: Synthetic oligonucleotide
aauaggugcuaggaaaucu

SEQ ID NO: 23513 - RNA, 19 nt, Artificial Sequence
  Description of Artificial Sequence: Synthetic oligonucleotide
auaagcuaaaauuucuguu

SEQ ID NO: 23514 - RNA, 19 nt, Artificial Sequence
  Description of Artificial Sequence: Synthetic oligonucleotide
gacauauugaggcaaaccu

SEQ ID NO: 23515 - RNA, 19 nt, Artificial Sequence
  Description of Artificial Sequence: Synthetic oligonucleotide
aauagacuccuaaagggga

SEQ ID NO: 23516 - RNA, 19 nt, Artificial Sequence
  Description of Artificial Sequence: Synthetic oligonucleotide
ugcgcaaggcaaaugacac

SEQ ID NO: 23517 - RNA, 19 nt, Artificial Sequence
  Description of Artificial Sequence: Synthetic oligonucleotide
ucuguucacgcaauaggug

SEQ ID NO: 23518 - RNA, 19 nt, Artificial Sequence
  Description of Artificial Sequence: Synthetic oligonucleotide
uggcuauaaaucacaacca

SEQ ID NO: 23519 - RNA, 19 nt, Artificial Sequence
  Description of Artificial Sequence: Synthetic oligonucleotide
ugauugaagagcuuucuuu

SEQ ID NO: 23520 - RNA, 19 nt, Artificial Sequence
  Description of Artificial Sequence: Synthetic oligonucleotide
aaagucugguggaaguaac

SEQ ID NO: 23521 - RNA, 19 nt, Artificial Sequence
  Description of Artificial Sequence: Synthetic oligonucleotide
uaguacuauggacuaaacu

SEQ ID NO: 23522 - RNA, 19 nt, Artificial Sequence
  Description of Artificial Sequence: Synthetic oligonucleotide
uaacugcuuaaucucacgu

SEQ ID NO: 23523 - RNA, 19 nt, Artificial Sequence
  Description of Artificial Sequence: Synthetic oligonucleotide
uucggacuagauuagcaca

SEQ ID NO: 23524 - RNA, 19 nt, Artificial Sequence
  Description of Artificial Sequence: Synthetic oligonucleotide
aaggauaaguagcugcuua

SEQ ID NO: 23525 - RNA, 19 nt, Artificial Sequence
  Description of Artificial Sequence: Synthetic oligonucleotide
gaugagagucacuauaucu

SEQ ID NO: 23526 - RNA, 19 nt, Artificial Sequence
  Description of Artificial Sequence: Synthetic oligonucleotide
auagucuaaggcugaacug

SEQ ID NO: 23527 - RNA, 19 nt, Artificial Sequence
  Description of Artificial Sequence: Synthetic oligonucleotide
guacuauggacuaaacugc

SEQ ID NO: 23528 - RNA, 19 nt, Artificial Sequence
  Description of Artificial Sequence: Synthetic oligonucleotide
acgucuaguccucugugcg

SEQ ID NO: 23529 - RNA, 19 nt, Artificial Sequence
  Description of Artificial Sequence: Synthetic oligonucleotide
cuauggacuaaacugccug

SEQ ID NO: 23530 - RNA, 19 nt, Artificial Sequence
  Description of Artificial Sequence: Synthetic oligonucleotide
cacgcaauagguguaaaag

SEQ ID NO: 23531 - RNA, 19 nt, Artificial Sequence
  Description of Artificial Sequence: Synthetic oligonucleotide
cuuuacauauucccuuccc

SEQ ID NO: 23532 - RNA, 19 nt, Artificial Sequence
  Description of Artificial Sequence: Synthetic oligonucleotide
uccuugacacgucuagucc

SEQ ID NO: 23533 - RNA, 19 nt, Artificial Sequence
  Description of Artificial Sequence: Synthetic oligonucleotide
uagacaaagcagcaguuua

SEQ ID NO: 23534 - RNA, 19 nt, Artificial Sequence
  Description of Artificial Sequence: Synthetic oligonucleotide
aaucguucaaacagggaca

SEQ ID NO: 23535 - RNA, 19 nt, Artificial Sequence
  Description of Artificial Sequence: Synthetic oligonucleotide
uguugccucucuuagggga

SEQ ID NO: 23536 - RNA, 19 nt, Artificial Sequence
  Description of Artificial Sequence: Synthetic oligonucleotide
cuucgagucuucuaaggac

SEQ ID NO: 23537 - RNA, 19 nt, Artificial Sequence
  Description of Artificial Sequence: Synthetic oligonucleotide
uggaccucaaauugcauau

SEQ ID NO: 23538 - RNA, 19 nt, Artificial Sequence
  Description of Artificial Sequence: Synthetic oligonucleotide
uaccuaacuagcauuuuau

SEQ ID NO: 23539 - RNA, 19 nt, Artificial Sequence
  Description of Artificial Sequence: Synthetic oligonucleotide
aagauaucggggcuugaaa

SEQ ID NO: 23540 - RNA, 19 nt, Artificial Sequence
  Description of Artificial Sequence: Synthetic oligonucleotide
aauaacacacacacacaca

SEQ ID NO: 23541 - RNA, 19 nt, Artificial Sequence
  Description of Artificial Sequence: Synthetic oligonucleotide
guggacaaggauaaguagc

SEQ ID NO: 23542 - RNA, 19 nt, Artificial Sequence
  Description of Artificial Sequence: Synthetic oligonucleotide
cuuuucuaccggcaggaag

SEQ ID NO: 23543 - RNA, 19 nt, Artificial Sequence
  Description of Artificial Sequence: Synthetic oligonucleotide
ucuaccggcaggaagucau

SEQ ID NO: 23544 - RNA, 19 nt, Artificial Sequence
  Description of Artificial Sequence: Synthetic oligonucleotide
ucccaauugucuuuucuac

SEQ ID NO: 23545 - RNA, 19 nt, Artificial Sequence
  Description of Artificial Sequence: Synthetic oligonucleotide
agaguaaagaugguagcug

SEQ ID NO: 23546 - RNA, 19 nt, Artificial Sequence
  Description of Artificial Sequence: Synthetic oligonucleotide
caaaagcuccaaucaagag

SEQ ID NO: 23547 - RNA, 19 nt, Artificial Sequence
  Description of Artificial Sequence: Synthetic oligonucleotide
gaugugagcgacugagaug

SEQ ID NO: 23548 - RNA, 19 nt, Artificial Sequence
  Description of Artificial Sequence: Synthetic oligonucleotide
caguuacauagucuaaggc

SEQ ID NO: 23549 - RNA, 19 nt, Artificial Sequence
  Description of Artificial Sequence: Synthetic oligonucleotide
auaucggggcuugaaaggg

SEQ ID NO: 23550 - RNA, 19 nt, Artificial Sequence
  Description of Artificial Sequence: Synthetic oligonucleotide
cuucggacuagauuagcac

SEQ ID NO: 23551 - RNA, 19 nt, Artificial Sequence
  Description of Artificial Sequence: Synthetic oligonucleotide
cuacauugcaugcuaccag

SEQ ID NO: 23552 - RNA, 19 nt, Artificial Sequence
  Description of Artificial Sequence: Synthetic oligonucleotide
ugcuaucaagacuuuugug

SEQ ID NO: 23553 - RNA, 19 nt, Artificial Sequence
  Description of Artificial Sequence: Synthetic oligonucleotide
aagccuguaaaugaauaau

SEQ ID NO: 23554 - RNA, 19 nt, Artificial Sequence
  Description of Artificial Sequence: Synthetic oligonucleotide
agccuguaaaugaauaauc

SEQ ID NO: 23555 - RNA, 19 nt, Artificial Sequence
  Description of Artificial Sequence: Synthetic oligonucleotide
caaccgaagucuuauuuuc

SEQ ID NO: 23556 - RNA, 19 nt, Artificial Sequence
  Description of Artificial Sequence: Synthetic oligonucleotide
uuuugugcuaaucguucaa

SEQ ID NO: 23557 - RNA, 19 nt, Artificial Sequence
  Description of Artificial Sequence: Synthetic oligonucleotide
aacugcuuaaucucacguu

SEQ ID NO: 23558 - RNA, 19 nt, Artificial Sequence
  Description of Artificial Sequence: Synthetic oligonucleotide
gguggaaguaacuucacga

SEQ ID NO: 23559 - RNA, 19 nt, Artificial Sequence
  Description of Artificial Sequence: Synthetic oligonucleotide
uucguguacuauaaagaua

SEQ ID NO: 23560 - RNA, 19 nt, Artificial Sequence
  Description of Artificial Sequence: Synthetic oligonucleotide
uuucuaguuucaugaacaa

SEQ ID NO: 23561 - RNA, 19 nt, Artificial Sequence
  Description of Artificial Sequence: Synthetic oligonucleotide
gacacuugggauaugguaa

SEQ ID NO: 23562 - RNA, 19 nt, Artificial Sequence
  Description of Artificial Sequence: Synthetic oligonucleotide
uacguaagacuuuucuaaa

SEQ ID NO: 23563 - RNA, 19 nt, Artificial Sequence
  Description of Artificial Sequence: Synthetic oligonucleotide
accuaacuagcauuuuaug

SEQ ID NO: 23564 - RNA, 19 nt, Artificial Sequence
  Description of Artificial Sequence: Synthetic oligonucleotide
ugcaaccgaagucuuauuu

SEQ ID NO: 23565 - RNA, 19 nt, Artificial Sequence
  Description of Artificial Sequence: Synthetic oligonucleotide
ggauauaccagcucauuuc

SEQ ID NO: 23566 - RNA, 19 nt, Artificial Sequence
  Description of Artificial Sequence: Synthetic oligonucleotide
gaaguuaucagggaacacu

SEQ ID NO: 23567 - RNA, 19 nt, Artificial Sequence
  Description of Artificial Sequence: Synthetic oligonucleotide
aguuaucagggaacacucc

SEQ ID NO: 23568 - RNA, 19 nt, Artificial Sequence
  Description of Artificial Sequence: Synthetic oligonucleotide
aaagauaucggggcuugaa

SEQ ID NO: 23569 - RNA, 19 nt, Artificial Sequence
  Description of Artificial Sequence: Synthetic oligonucleotide
gucgcucaggucuucuugg

SEQ ID NO: 23570 - RNA, 19 nt, Artificial Sequence
  Description of Artificial Sequence: Synthetic oligonucleotide
uaacacacacacacacaca

SEQ ID NO: 23571 - RNA, 19 nt, Artificial Sequence
  Description of Artificial Sequence: Synthetic oligonucleotide
cuuguaauaggugcuagga

SEQ ID NO: 23572 - RNA, 19 nt, Artificial Sequence
  Description of Artificial Sequence: Synthetic oligonucleotide
ugcgcaagcgaaauguguu

SEQ ID NO: 23573 - RNA, 19 nt, Artificial Sequence
  Description of Artificial Sequence: Synthetic oligonucleotide
cacacacacacacauauaa

SEQ ID NO: 23574 - RNA, 19 nt, Artificial Sequence
  Description of Artificial Sequence: Synthetic oligonucleotide
auugaagagcuuucuuuau

SEQ ID NO: 23575 - RNA, 19 nt, Artificial Sequence
  Description of Artificial Sequence: Synthetic oligonucleotide
agcaagguuuaacuuggcu

SEQ ID NO: 23576 - RNA, 19 nt, Artificial Sequence
  Description of Artificial Sequence: Synthetic oligonucleotide
ugugcgcaagcgaaaugug

SEQ ID NO: 23577 - RNA, 19 nt, Artificial Sequence
  Description of Artificial Sequence: Synthetic oligonucleotide
acuugggauaugguaacag

SEQ ID NO: 23578 - RNA, 19 nt, Artificial Sequence
  Description of Artificial Sequence: Synthetic oligonucleotide
ucugcaaccgaagucuuau

SEQ ID NO: 23579 - RNA, 19 nt, Artificial Sequence
  Description of Artificial Sequence: Synthetic oligonucleotide
cauccuauaucaucaauua

SEQ ID NO: 23580 - RNA, 19 nt, Artificial Sequence
  Description of Artificial Sequence: Synthetic oligonucleotide
acacacacacacauauaac

SEQ ID NO: 23581 - RNA, 19 nt, Artificial Sequence
  Description of Artificial Sequence: Synthetic oligonucleotide
cgcaauagguguaaaaggc

SEQ ID NO: 23582 - RNA, 19 nt, Artificial Sequence
  Description of Artificial Sequence: Synthetic oligonucleotide
aagucaaucuuuggacugu

SEQ ID NO: 23583 - RNA, 19 nt, Artificial Sequence
  Description of Artificial Sequence: Synthetic oligonucleotide
cauagucuaaggcugaacu

SEQ ID NO: 23584 - RNA, 19 nt, Artificial Sequence
  Description of Artificial Sequence: Synthetic oligonucleotide
agacaugaguccucuacau

SEQ ID NO: 23585 - RNA, 19 nt, Artificial Sequence
  Description of Artificial Sequence: Synthetic oligonucleotide
uugcuucggacuagauuag

SEQ ID NO: 23586 - RNA, 19 nt, Artificial Sequence
  Description of Artificial Sequence: Synthetic oligonucleotide
uucuaguuucaugaacaac

SEQ ID NO: 23587 - RNA, 19 nt, Artificial Sequence
  Description of Artificial Sequence: Synthetic oligonucleotide
aacuguucguguacuauaa

SEQ ID NO: 23588 - RNA, 19 nt, Artificial Sequence
  Description of Artificial Sequence: Synthetic oligonucleotide
ccaagggauaguaaugaag

SEQ ID NO: 23589 - RNA, 19 nt, Artificial Sequence
  Description of Artificial Sequence: Synthetic oligonucleotide
uuaagggaccaccccucca

SEQ ID NO: 23590 - RNA, 19 nt, Artificial Sequence
  Description of Artificial Sequence: Synthetic oligonucleotide
gggugaauaauguaccauc

SEQ ID NO: 23591 - RNA, 19 nt, Artificial Sequence
  Description of Artificial Sequence: Synthetic oligonucleotide
acguaagacuuuucuaaau

SEQ ID NO: 23592 - RNA, 19 nt, Artificial Sequence
  Description of Artificial Sequence: Synthetic oligonucleotide
uuaacuuucuugggcugga

SEQ ID NO: 23593 - RNA, 19 nt, Artificial Sequence
  Description of Artificial Sequence: Synthetic oligonucleotide
uauugaugagagucacuau

SEQ ID NO: 23594 - RNA, 19 nt, Artificial Sequence
  Description of Artificial Sequence: Synthetic oligonucleotide
gugaauaauguaccaucuc

SEQ ID NO: 23595 - RNA, 19 nt, Artificial Sequence
  Description of Artificial Sequence: Synthetic oligonucleotide
ucacgcaauagguguaaaa

SEQ ID NO: 23596 - RNA, 19 nt, Artificial Sequence
  Description of Artificial Sequence: Synthetic oligonucleotide
acacaugggaauaaagaau

SEQ ID NO: 23597 - RNA, 19 nt, Artificial Sequence
  Description of Artificial Sequence: Synthetic oligonucleotide
aacccagugcaggaaauaa

SEQ ID NO: 23598 - RNA, 19 nt, Artificial Sequence
  Description of Artificial Sequence: Synthetic oligonucleotide
  modified_base (2)..(2): a, c, u, g, unknown or other
anagcuccuugaugaaguu

SEQ ID NO: 23599 - RNA, 19 nt, Artificial Sequence
  Description of Artificial Sequence: Synthetic oligonucleotide
cacgucuaguccucugugc

SEQ ID NO: 23600 - RNA, 19 nt, Artificial Sequence
  Description of Artificial Sequence: Synthetic oligonucleotide
acuugcuucggacuagauu

SEQ ID NO: 23601 - RNA, 19 nt, Artificial Sequence
  Description of Artificial Sequence: Synthetic oligonucleotide
gucagaguaaucaaauugu

SEQ ID NO: 23602 - RNA, 19 nt, Artificial Sequence
  Description of Artificial Sequence: Synthetic oligonucleotide
ggugcuaggaaaucucuga

SEQ ID NO: 23603 - RNA, 19 nt, Artificial Sequence
  Description of Artificial Sequence: Synthetic oligonucleotide
gaacuguucguguacuaua

SEQ ID NO: 23604 - RNA, 19 nt, Artificial Sequence
  Description of Artificial Sequence: Synthetic oligonucleotide
ucugugccucauauggaaa

SEQ ID NO: 23605 - RNA, 19 nt, Artificial Sequence
  Description of Artificial Sequence: Synthetic oligonucleotide
guggaaguaacuucacgaa

SEQ ID NO: 23606 - RNA, 19 nt, Artificial Sequence
  Description of Artificial Sequence: Synthetic oligonucleotide
cuuguagaaacccuuugcu

SEQ ID NO: 23607 - RNA, 19 nt, Artificial Sequence
  Description of Artificial Sequence: Synthetic oligonucleotide
gcauuuuaugcugcaauag

SEQ ID NO: 23608 - RNA, 19 nt, Artificial Sequence
  Description of Artificial Sequence: Synthetic oligonucleotide
ugaugcuccucagcucucg

SEQ ID NO: 23609 - RNA, 19 nt, Artificial Sequence
  Description of Artificial Sequence: Synthetic oligonucleotide
gacagcggccucuagugga

SEQ ID NO: 23610 - RNA, 19 nt, Artificial Sequence
  Description of Artificial Sequence: Synthetic oligonucleotide
aaauaguacuauggacuaa

SEQ ID NO: 23611 - RNA, 19 nt, Artificial Sequence
  Description of Artificial Sequence: Synthetic oligonucleotide
acgaaguuaucagggaaca

SEQ ID NO: 23612 - RNA, 19 nt, Artificial Sequence
  Description of Artificial Sequence: Synthetic oligonucleotide
agagucacuauaucuccuu

SEQ ID NO: 23613 - RNA, 19 nt, Artificial Sequence
  Description of Artificial Sequence: Synthetic oligonucleotide
cauugcaugcuaccagcac

SEQ ID NO: 23614 - RNA, 19 nt, Artificial Sequence
  Description of Artificial Sequence: Synthetic oligonucleotide
aucaagacuuuugugcuaa

SEQ ID NO: 23615 - RNA, 19 nt, Artificial Sequence
  Description of Artificial Sequence: Synthetic oligonucleotide
ucgaugcaguccuuauuga

SEQ ID NO: 23616 - RNA, 19 nt, Artificial Sequence
  Description of Artificial Sequence: Synthetic oligonucleotide
cuugacacgucuaguccuc

SEQ ID NO: 23617 - RNA, 19 nt, Artificial Sequence
  Description of Artificial Sequence: Synthetic oligonucleotide
cuuuugugcuaaucguuca

SEQ ID NO: 23618 - RNA, 19 nt, Artificial Sequence
  Description of Artificial Sequence: Synthetic oligonucleotide
cagagaauuggucuuaggu

SEQ ID NO: 23619 - RNA, 19 nt, Artificial Sequence
  Description of Artificial Sequence: Synthetic oligonucleotide
acaauaacacacacacaca

SEQ ID NO: 23620 - RNA, 19 nt, Artificial Sequence
  Description of Artificial Sequence: Synthetic oligonucleotide
auucuugauggguccauuu

SEQ ID NO: 23621 - RNA, 19 nt, Artificial Sequence
  Description of Artificial Sequence: Synthetic oligonucleotide
gauuacuucgagucuucua

SEQ ID NO: 23622 - RNA, 19 nt, Artificial Sequence
  Description of Artificial Sequence: Synthetic oligonucleotide
uaucaagacuuuugugcua

SEQ ID NO: 23623 - RNA, 19 nt, Artificial Sequence
  Description of Artificial Sequence: Synthetic oligonucleotide
gaccucaaauugcauaugu

SEQ ID NO: 23624 - RNA, 19 nt, Artificial Sequence
  Description of Artificial Sequence: Synthetic oligonucleotide
auuuggaaucaugguagcu

SEQ ID NO: 23625 - RNA, 19 nt, Artificial Sequence
  Description of Artificial Sequence: Synthetic oligonucleotide
gaauuggucuuagguggcc

SEQ ID NO: 23626 - RNA, 19 nt, Artificial Sequence
  Description of Artificial Sequence: Synthetic oligonucleotide
agacacuugcuucggacua

SEQ ID NO: 23627 - RNA, 19 nt, Artificial Sequence
  Description of Artificial Sequence: Synthetic oligonucleotide
cuucucgcugguuagccca

SEQ ID NO: 23628 - RNA, 19 nt, Artificial Sequence
  Description of Artificial Sequence: Synthetic oligonucleotide
ucgagucuucuaaggacau

SEQ ID NO: 23629 - RNA, 19 nt, Artificial Sequence
  Description of Artificial Sequence: Synthetic oligonucleotide
uucgauugaccuuggucuu

SEQ ID NO: 23630 - RNA, 19 nt, Artificial Sequence
  Description of Artificial Sequence: Synthetic oligonucleotide
acugucaccccugguauga

SEQ ID NO: 23631 - RNA, 19 nt, Artificial Sequence
  Description of Artificial Sequence: Synthetic oligonucleotide
ucaaagucugguggaagua

SEQ ID NO: 23632 - RNA, 19 nt, Artificial Sequence
  Description of Artificial Sequence: Synthetic oligonucleotide
ucggacucagggugaauaa

SEQ ID NO: 23633 - RNA, 19 nt, Artificial Sequence
  Description of Artificial Sequence: Synthetic oligonucleotide
auauaccagcucauuucuc

SEQ ID NO: 23634 - RNA, 19 nt, Artificial Sequence
  Description of Artificial Sequence: Synthetic oligonucleotide
gacacuugcuucggacuag

SEQ ID NO: 23635 - RNA, 19 nt, Artificial Sequence
  Description of Artificial Sequence: Synthetic oligonucleotide
cuaaucguucaaacaggga

SEQ ID NO: 23636 - RNA, 19 nt, Artificial Sequence
  Description of Artificial Sequence: Synthetic oligonucleotide
uguccgacacuugggauau

SEQ ID NO: 23637 - RNA, 19 nt, Artificial Sequence
  Description of Artificial Sequence: Synthetic oligonucleotide
agcgaaauguguuccucuu

SEQ ID NO: 23638 - RNA, 19 nt, Artificial Sequence
  Description of Artificial Sequence: Synthetic oligonucleotide
gugagagaagcugcgaaga

SEQ ID NO: 23639 - RNA, 19 nt, Artificial Sequence
  Description of Artificial Sequence: Synthetic oligonucleotide
cuccucgucugccauugag

SEQ ID NO: 23640 - RNA, 19 nt, Artificial Sequence
  Description of Artificial Sequence: Synthetic oligonucleotide
acaauacguaagacuuuuc

SEQ ID NO: 23641 - RNA, 19 nt, Artificial Sequence
  Description of Artificial Sequence: Synthetic oligonucleotide
guaaugcagaaaggcuuag

SEQ ID NO: 23642 - RNA, 19 nt, Artificial Sequence
  Description of Artificial Sequence: Synthetic oligonucleotide
gucacuauaucuccuuccu

SEQ ID NO: 23643 - RNA, 19 nt, Artificial Sequence
  Description of Artificial Sequence: Synthetic oligonucleotide
ugacacgucuaguccucug

SEQ ID NO: 23644 - RNA, 19 nt, Artificial Sequence
  Description of Artificial Sequence: Synthetic oligonucleotide
  modified_base (19)..(19): a, c, u, g, unknown or other
gaucauccgacuccccgan

SEQ ID NO: 23645 - RNA, 19 nt, Artificial Sequence
  Description of Artificial Sequence: Synthetic oligonucleotide
ggacucagggugaauaaug

SEQ ID NO: 23646 - RNA, 19 nt, Artificial Sequence
  Description of Artificial Sequence: Synthetic oligonucleotide
gagaguacacugcccgcca

SEQ ID NO: 23647 - RNA, 19 nt, Artificial Sequence
  Description of Artificial Sequence: Synthetic oligonucleotide
gggguuacaagugcgcaag

SEQ ID NO: 23648 - RNA, 19 nt, Artificial Sequence
  Description of Artificial Sequence: Synthetic oligonucleotide
gcauauucuguucacgcaa

SEQ ID NO: 23649 - RNA, 19 nt, Artificial Sequence
  Description of Artificial Sequence: Synthetic oligonucleotide
cacacacacacacacauau

SEQ ID NO: 23650 - RNA, 19 nt, Artificial Sequence
  Description of Artificial Sequence: Synthetic oligonucleotide
cacuaggggcaucugugac

SEQ ID NO: 23651 - RNA, 19 nt, Artificial Sequence
  Description of Artificial Sequence: Synthetic oligonucleotide
ggcuuagcacagugaaggg

SEQ ID NO: 23652 - RNA, 19 nt, Artificial Sequence
  Description of Artificial Sequence: Synthetic oligonucleotide
aguacacugcccgccaagu

SEQ ID NO: 23653 - RNA, 19 nt, Artificial Sequence
  Description of Artificial Sequence: Synthetic oligonucleotide
cugugaugcacaaucuucu

SEQ ID NO: 23654 - RNA, 19 nt, Artificial Sequence
  Description of Artificial Sequence: Synthetic oligonucleotide
agaugauaccacagaguca

SEQ ID NO: 23655 - RNA, 19 nt, Artificial Sequence
  Description of Artificial Sequence: Synthetic oligonucleotide
agcugcgaagacagcggcc

SEQ ID NO: 23656 - RNA, 19 nt, Artificial Sequence
  Description of Artificial Sequence: Synthetic oligonucleotide
agggugaauaauguaccau

SEQ ID NO: 23657 - RNA, 19 nt, Artificial Sequence
  Description of Artificial Sequence: Synthetic oligonucleotide
  modified_base (8)..(8): a, c, u, g, unknown or other
uccccganagcuccuugau

SEQ ID NO: 23658 - RNA, 19 nt, Artificial Sequence
  Description of Artificial Sequence: Synthetic oligonucleotide
ccuaacuguguccccaccc

SEQ ID NO: 23659 - RNA, 19 nt, Artificial Sequence
  Description of Artificial Sequence: Synthetic oligonucleotide
cuacuucgauugaccuugg

SEQ ID NO: 23660 - RNA, 19 nt, Artificial Sequence
  Description of Artificial Sequence: Synthetic oligonucleotide
caagcgaaauguguuccuc

SEQ ID NO: 23661 - RNA, 19 nt, Artificial Sequence
  Description of Artificial Sequence: Synthetic oligonucleotide
gccauuaagggaccacccc

SEQ ID NO: 23662 - RNA, 19 nt, Artificial Sequence
  Description of Artificial Sequence: Synthetic oligonucleotide
cuugggauaugguaacagu

SEQ ID NO: 23663 - RNA, 19 nt, Artificial Sequence
  Description of Artificial Sequence: Synthetic oligonucleotide
aagguuuaacuuggcugau

SEQ ID NO: 23664 - RNA, 19 nt, Artificial Sequence
  Description of Artificial Sequence: Synthetic oligonucleotide
acuauggacuaaacugccu

SEQ ID NO: 23665 - RNA, 19 nt, Artificial Sequence
  Description of Artificial Sequence: Synthetic oligonucleotide
cagggugaauaauguacca

SEQ ID NO: 23666 - RNA, 19 nt, Artificial Sequence
  Description of Artificial Sequence: Synthetic oligonucleotide
uaacuuggcugaugacaaa

SEQ ID NO: 23667 - RNA, 19 nt, Artificial Sequence
  Description of Artificial Sequence: Synthetic oligonucleotide
cucuuaggaccuuuggcua

SEQ ID NO: 23668 - RNA, 19 nt, Artificial Sequence
  Description of Artificial Sequence: Synthetic oligonucleotide
ccaucaacaaucuugcagu

SEQ ID NO: 23669 - RNA, 19 nt, Artificial Sequence
  Description of Artificial Sequence: Synthetic oligonucleotide
ugaccauuccaagcuuuuc

SEQ ID NO: 23670 - RNA, 19 nt, Artificial Sequence
  Description of Artificial Sequence: Synthetic oligonucleotide
gacacgucuaguccucugu

SEQ ID NO: 23671 - RNA, 19 nt, Artificial Sequence
  Description of Artificial Sequence: Synthetic oligonucleotide
agguuuaacuuggcugaug

SEQ ID NO: 23672 - RNA, 19 nt, Artificial Sequence
  Description of Artificial Sequence: Synthetic oligonucleotide
uacuucgauugaccuuggu

SEQ ID NO: 23673 - RNA, 19 nt, Artificial Sequence
  Description of Artificial Sequence: Synthetic oligonucleotide
gugcuaggaaaucucugaa

SEQ ID NO: 23674 - RNA, 19 nt, Artificial Sequence
  Description of Artificial Sequence: Synthetic oligonucleotide
ggucgcucaggucuucuug

SEQ ID NO: 23675 - RNA, 19 nt, Artificial Sequence
  Description of Artificial Sequence: Synthetic oligonucleotide
agccuacaucgaugcaguc

SEQ ID NO: 23676 - RNA, 19 nt, Artificial Sequence
  Description of Artificial Sequence: Synthetic oligonucleotide
cugagagguccuuguccag

SEQ ID NO: 23677 - RNA, 19 nt, Artificial Sequence
  Description of Artificial Sequence: Synthetic oligonucleotide
gacuccuaaaggggaauaa

SEQ ID NO: 23678 - RNA, 19 nt, Artificial Sequence
  Description of Artificial Sequence: Synthetic oligonucleotide
uagacuccuaaaggggaau

SEQ ID NO: 23679 - RNA, 19 nt, Artificial Sequence
  Description of Artificial Sequence: Synthetic oligonucleotide
ucauugcugcggucugaga

SEQ ID NO: 23680 - RNA, 19 nt, Artificial Sequence
  Description of Artificial Sequence: Synthetic oligonucleotide
uuucuaccggcaggaaguc

SEQ ID NO: 23681 - RNA, 19 nt, Artificial Sequence
  Description of Artificial Sequence: Synthetic oligonucleotide
  modified_base (13)..(13): a, c, u, g, unknown or other
ccgacuccccganagcucc

SEQ ID NO: 23682 - RNA, 19 nt, Artificial Sequence
  Description of Artificial Sequence: Synthetic oligonucleotide
ugccguagcuggagguaac

SEQ ID NO: 23683 - RNA, 19 nt, Artificial Sequence
  Description of Artificial Sequence: Synthetic oligonucleotide
augacacugugaauacagu

SEQ ID NO: 23684 - RNA, 19 nt, Artificial Sequence
  Description of Artificial Sequence: Synthetic oligonucleotide
uggaaguguuucuggucuu

SEQ ID NO: 23685 - RNA, 19 nt, Artificial Sequence
  Description of Artificial Sequence: Synthetic oligonucleotide
cuuuagcacaauuggcuau

SEQ ID NO: 23686 - RNA, 19 nt, Artificial Sequence
  Description of Artificial Sequence: Synthetic oligonucleotide
ggugaauaauguaccaucu

SEQ ID NO: 23687 - RNA, 19 nt, Artificial Sequence
  Description of Artificial Sequence: Synthetic oligonucleotide
ugcuaccagcacccacuga

SEQ ID NO: 23688 - RNA, 19 nt, Artificial Sequence
  Description of Artificial Sequence: Synthetic oligonucleotide
caccccugguaugagucag

SEQ ID NO: 23689 - RNA, 19 nt, Artificial Sequence
  Description of Artificial Sequence: Synthetic oligonucleotide
uuggggagucaaagauauc

SEQ ID NO: 23690 - RNA, 19 nt, Artificial Sequence
  Description of Artificial Sequence: Synthetic oligonucleotide
agaguacacugcccgccaa

SEQ ID NO: 23691 - RNA, 19 nt, Artificial Sequence
  Description of Artificial Sequence: Synthetic oligonucleotide
uugugcuaucaagacuuuu

SEQ ID NO: 23692 - RNA, 19 nt, Artificial Sequence
  Description of Artificial Sequence: Synthetic oligonucleotide
uucuaccggcaggaaguca

SEQ ID NO: 23693 - RNA, 19 nt, Artificial Sequence
  Description of Artificial Sequence: Synthetic oligonucleotide
accggcaggaagucauuuu

SEQ ID NO: 23694 - RNA, 19 nt, Artificial Sequence
  Description of Artificial Sequence: Synthetic oligonucleotide
cagugggcccacuggucgc

SEQ ID NO: 23695 - RNA, 19 nt, Artificial Sequence
  Description of Artificial Sequence: Synthetic oligonucleotide
ugcccgccaagucaaucuu

SEQ ID NO: 23696 - RNA, 19 nt, Artificial Sequence
  Description of Artificial Sequence: Synthetic oligonucleotide
gggccauuaagggaccacc

SEQ ID NO: 23697 - RNA, 19 nt, Artificial Sequence
  Description of Artificial Sequence: Synthetic oligonucleotide
  modified_base (9)..(9): a, c, u, g, unknown or other
cuccccganagcuccuuga

SEQ ID NO: 23698 - RNA, 19 nt, Artificial Sequence
  Description of Artificial Sequence: Synthetic oligonucleotide
ggaugagaaaacaguuaca

SEQ ID NO: 23699 - RNA, 19 nt, Artificial Sequence
  Description of Artificial Sequence: Synthetic oligonucleotide
caucaacaaucuugcagua

SEQ ID NO: 23700 - RNA, 19 nt, Artificial Sequence
  Description of Artificial Sequence: Synthetic oligonucleotide
ucgauugaccuuggucuua

SEQ ID NO: 23701 - RNA, 19 nt, Artificial Sequence
  Description of Artificial Sequence: Synthetic oligonucleotide
cugugcgcaagcgaaaugu

SEQ ID NO: 23702 - RNA, 19 nt, Artificial Sequence
  Description of Artificial Sequence: Synthetic oligonucleotide
aguaugcaagugagaacaa

SEQ ID NO: 23703 - RNA, 19 nt, Artificial Sequence
  Description of Artificial Sequence: Synthetic oligonucleotide
accucaaauugcauaugua

SEQ ID NO: 23704 - RNA, 19 nt, Artificial Sequence
  Description of Artificial Sequence: Synthetic oligonucleotide
ccggcaggaagucauuuuc

SEQ ID NO: 23705 - RNA, 19 nt, Artificial Sequence
  Description of Artificial Sequence: Synthetic oligonucleotide
gccucauauggaaauauua

SEQ ID NO: 23706 - RNA, 19 nt, Artificial Sequence
  Description of Artificial Sequence: Synthetic oligonucleotide
gccuguaaaugaauaaucu

SEQ ID NO: 23707 - RNA, 19 nt, Artificial Sequence
  Description of Artificial Sequence: Synthetic oligonucleotide
ggucggcuggcaaggaaag

SEQ ID NO: 23708 - RNA, 19 nt, Artificial Sequence
  Description of Artificial Sequence: Synthetic oligonucleotide
gcuucggacuagauuagca

SEQ ID NO: 23709 - RNA, 19 nt, Artificial Sequence
  Description of Artificial Sequence: Synthetic oligonucleotide
agacuccuaaaggggaaua

SEQ ID NO: 23710 - RNA, 19 nt, Artificial Sequence
  Description of Artificial Sequence: Synthetic oligonucleotide
cacaauacguaagacuuuu

SEQ ID NO: 23711 - RNA, 19 nt, Artificial Sequence
  Description of Artificial Sequence: Synthetic oligonucleotide
ggucuauucccuuccuugu

SEQ ID NO: 23712 - RNA, 19 nt, Artificial Sequence
  Description of Artificial Sequence: Synthetic oligonucleotide
gcccaagggauaguaauga

SEQ ID NO: 23713 - RNA, 19 nt, Artificial Sequence
  Description of Artificial Sequence: Synthetic oligonucleotide
agcggccucuaguggacaa

SEQ ID NO: 23714 - RNA, 19 nt, Artificial Sequence
  Description of Artificial Sequence: Synthetic oligonucleotide
cucgagcagaaaggacaag

SEQ ID NO: 23715 - RNA, 19 nt, Artificial Sequence
  Description of Artificial Sequence: Synthetic oligonucleotide
ccucuacauugcaugcuac

SEQ ID NO: 23716 - RNA, 19 nt, Artificial Sequence
  Description of Artificial Sequence: Synthetic oligonucleotide
agucucggacucaggguga

SEQ ID NO: 23717 - RNA, 19 nt, Artificial Sequence
  Description of Artificial Sequence: Synthetic oligonucleotide
uucgggacuuggggaguca

SEQ ID NO: 23718 - RNA, 19 nt, Artificial Sequence
  Description of Artificial Sequence: Synthetic oligonucleotide
cccugguaugagucagugg

SEQ ID NO: 23719 - RNA, 19 nt, Artificial Sequence
  Description of Artificial Sequence: Synthetic oligonucleotide
  modified_base (4)..(4): a, c, u, g, unknown or other
cganagcuccuugaugaag

SEQ ID NO: 23720 - RNA, 19 nt, Artificial Sequence
  Description of Artificial Sequence: Synthetic oligonucleotide
gcgcaagcgaaauguguuc

SEQ ID NO: 23721 - RNA, 19 nt, Artificial Sequence
  Description of Artificial Sequence: Synthetic oligonucleotide
uggucgcucaggucuucuu

SEQ ID NO: 23722 - RNA, 19 nt, Artificial Sequence
  Description of Artificial Sequence: Synthetic oligonucleotide
cgcaagcgaaauguguucc

SEQ ID NO: 23723 - RNA, 19 nt, Artificial Sequence
  Description of Artificial Sequence: Synthetic oligonucleotide
  modified_base (7)..(7): a, c, u, g, unknown or other
ccccganagcuccuugaug

SEQ ID NO: 23724 - RNA, 19 nt, Artificial Sequence
  Description of Artificial Sequence: Synthetic oligonucleotide
caguuuuggcucucucucu

SEQ ID NO: 23725 - RNA, 19 nt, Artificial Sequence
  Description of Artificial Sequence: Synthetic oligonucleotide
gcaaccgaagucuuauuuu

SEQ ID NO: 23726 - RNA, 19 nt, Artificial Sequence
  Description of Artificial Sequence: Synthetic oligonucleotide
acacacacacacacauaua

SEQ ID NO: 23727 - RNA, 19 nt, Artificial Sequence
  Description of Artificial Sequence: Synthetic oligonucleotide
gcugguuagcccaagggau

SEQ ID NO: 23728 - RNA, 19 nt, Artificial Sequence
  Description of Artificial Sequence: Synthetic oligonucleotide
acacacacacacacacaua

SEQ ID NO: 23729 - RNA, 19 nt, Artificial Sequence
  Description of Artificial Sequence: Synthetic oligonucleotide
cacuugggauaugguaaca

SEQ ID NO: 23730 - RNA, 19 nt, Artificial Sequence
  Description of Artificial Sequence: Synthetic oligonucleotide
ccauuaagggaccaccccu

SEQ ID NO: 23731 - RNA, 19 nt, Artificial Sequence
  Description of Artificial Sequence: Synthetic oligonucleotide
gugcgcaagcgaaaugugu

SEQ ID NO: 23732 - RNA, 19 nt, Artificial Sequence
  Description of Artificial Sequence: Synthetic oligonucleotide
caccaagacucuguauuua

SEQ ID NO: 23733 - RNA, 19 nt, Artificial Sequence
  Description of Artificial Sequence: Synthetic oligonucleotide
gcaagcgaaauguguuccu

SEQ ID NO: 23734 - RNA, 19 nt, Artificial Sequence
  Description of Artificial Sequence: Synthetic oligonucleotide
caucgaugcaguccuuauu

SEQ ID NO: 23735 - RNA, 19 nt, Artificial Sequence
  Description of Artificial Sequence: Synthetic oligonucleotide
ccccugguaugagucagug

SEQ ID NO: 23736 - RNA, 19 nt, Artificial Sequence
  Description of Artificial Sequence: Synthetic oligonucleotide
ccccuaacuguguccccac

SEQ ID NO: 23737 - RNA, 19 nt, Artificial Sequence
  Description of Artificial Sequence: Synthetic oligonucleotide
gagaaggguuggaccucaa

SEQ ID NO: 23738 - RNA, 19 nt, Artificial Sequence
  Description of Artificial Sequence: Synthetic oligonucleotide
gucucggacucagggugaa

SEQ ID NO: 23739 - RNA, 19 nt, Artificial Sequence
  Description of Artificial Sequence: Synthetic oligonucleotide
gcggccucuaguggacaag

SEQ ID NO: 23740 - RNA, 19 nt, Artificial Sequence
  Description of Artificial Sequence: Synthetic oligonucleotide
  modified_base (5)..(5): a, c, u, g, unknown or other
ccganagcuccuugaugaa

SEQ ID NO: 23741 - RNA, 19 nt, Artificial Sequence
  Description of Artificial Sequence: Synthetic oligonucleotide
ggccucuaguggacaagga

SEQ ID NO: 23742 - RNA, 19 nt, Artificial Sequence
  Description of Artificial Sequence: Synthetic oligonucleotide
gcgcaaggcaaaugacacu

SEQ ID NO: 23743 - RNA, 19 nt, Artificial Sequence
  Description of Artificial Sequence: Synthetic oligonucleotide
ccucugugcgcaagcgaaa

SEQ ID NO: 23744 - RNA, 19 nt, Artificial Sequence
  Description of Artificial Sequence: Synthetic oligonucleotide
gugguaccugcuccuuguu

SEQ ID NO: 23745 - RNA, 19 nt, Artificial Sequence
  Description of Artificial Sequence: Synthetic oligonucleotide
cuaccggcaggaagucauu

SEQ ID NO: 23746 - RNA, 19 nt, Artificial Sequence
  Description of Artificial Sequence: Synthetic oligonucleotide
cugcaaccgaagucuuauu

SEQ ID NO: 23747 - RNA, 19 nt, Artificial Sequence
  Description of Artificial Sequence: Synthetic oligonucleotide
guccgacacuugggauaug

SEQ ID NO: 23748 - RNA, 19 nt, Artificial Sequence
  Description of Artificial Sequence: Synthetic oligonucleotide
cguguacuauaaagauaaa

SEQ ID NO: 23749 - RNA, 19 nt, Artificial Sequence
  Description of Artificial Sequence: Synthetic oligonucleotide
cuaccccaucaacaaucuu

SEQ ID NO: 23750 - RNA, 19 nt, Artificial Sequence
  Description of Artificial Sequence: Synthetic oligonucleotide
gcacaauacguaagacuuu

SEQ ID NO: 23751 - RNA, 19 nt, Artificial Sequence
  Description of Artificial Sequence: Synthetic oligonucleotide
ccccaucaacaaucuugca

SEQ ID NO: 23752 - RNA, 19 nt, Artificial Sequence
  Description of Artificial Sequence: Synthetic oligonucleotide
gcgaagacagcggccucua

SEQ ID NO: 23753 - RNA, 19 nt, Artificial Sequence
  Description of Artificial Sequence: Synthetic oligonucleotide
ccccuguuuucauuugcau

SEQ ID NO: 23754 - RNA, 19 nt, Artificial Sequence
  Description of Artificial Sequence: Synthetic oligonucleotide
gccguagcuggagguaacu

SEQ ID NO: 23755 - RNA, 19 nt, Artificial Sequence
  Description of Artificial Sequence: Synthetic oligonucleotide
gcccgccaagucaaucuuu

SEQ ID NO: 23756 - RNA, 19 nt, Artificial Sequence
  Description of Artificial Sequence: Synthetic oligonucleotide
  modified_base (12)..(12): a, c, u, g, unknown or other
cgacuccccganagcuccu

SEQ ID NO: 23757 - RNA, 19 nt, Artificial Sequence
  Description of Artificial Sequence: Synthetic oligonucleotide
aaagaaacgauucccacuc

SEQ ID NO: 23758 - RNA, 19 nt, Artificial Sequence
  Description of Artificial Sequence: Synthetic oligonucleotide
uuugauacaaccaaacggc

SEQ ID NO: 23759 - RNA, 19 nt, Artificial Sequence
  Description of Artificial Sequence: Synthetic oligonucleotide
aucuaaaccauuuaguaac

SEQ ID NO: 23760 - RNA, 19 nt, Artificial Sequence
  Description of Artificial Sequence: Synthetic oligonucleotide
uuuuauacugguaacagga

SEQ ID NO: 23761 - RNA, 19 nt, Artificial Sequence
  Description of Artificial Sequence: Synthetic oligonucleotide
aucuuuauauugcauaccc

SEQ ID NO: 23762 - RNA, 19 nt, Artificial Sequence
  Description of Artificial Sequence: Synthetic oligonucleotide
aaagcuauuaagucucugg

SEQ ID NO: 23763 - RNA, 19 nt, Artificial Sequence
  Description of Artificial Sequence: Synthetic oligonucleotide
caauacuuaauccagaaag

SEQ ID NO: 23764 - RNA, 19 nt, Artificial Sequence
  Description of Artificial Sequence: Synthetic oligonucleotide
uuuauuccaauuuaaagcu

SEQ ID NO: 23765 - RNA, 19 nt, Artificial Sequence
  Description of Artificial Sequence: Synthetic oligonucleotide
aaauagcaaguccauagac

SEQ ID NO: 23766 - RNA, 19 nt, Artificial Sequence
  Description of Artificial Sequence: Synthetic oligonucleotide
cuuacuacaccauauauug

SEQ ID NO: 23767 - RNA, 19 nt, Artificial Sequence
  Description of Artificial Sequence: Synthetic oligonucleotide
auuggcaacagcuaauucg

SEQ ID NO: 23768 - RNA, 19 nt, Artificial Sequence
  Description of Artificial Sequence: Synthetic oligonucleotide
agaaauagcaaguccauag

SEQ ID NO: 23769 - RNA, 19 nt, Artificial Sequence
  Description of Artificial Sequence: Synthetic oligonucleotide
ucaaugaucacgcaaguga

SEQ ID NO: 23770 - RNA, 19 nt, Artificial Sequence
  Description of Artificial Sequence: Synthetic oligonucleotide
aacaacacagggcugucgc

SEQ ID NO: 23771 - RNA, 19 nt, Artificial Sequence
  Description of Artificial Sequence: Synthetic oligonucleotide
ucaaacuuaucucagcggc

SEQ ID NO: 23772 - RNA, 19 nt, Artificial Sequence
  Description of Artificial Sequence: Synthetic oligonucleotide
uauuauagaacuguguuga

SEQ ID NO: 23773 - RNA, 19 nt, Artificial Sequence
  Description of Artificial Sequence: Synthetic oligonucleotide
aaaacugaggaugaaucgg

SEQ ID NO: 23774 - RNA, 19 nt, Artificial Sequence
  Description of Artificial Sequence: Synthetic oligonucleotide
aagucgggagcacagacac

SEQ ID NO: 23775 - RNA, 19 nt, Artificial Sequence
  Description of Artificial Sequence: Synthetic oligonucleotide
gacgcuaaaaucaaguucc

SEQ ID NO: 23776 - RNA, 19 nt, Artificial Sequence
  Description of Artificial Sequence: Synthetic oligonucleotide
aucauaguaaagcuggguc

SEQ ID NO: 23777 - RNA, 19 nt, Artificial Sequence
  Description of Artificial Sequence: Synthetic oligonucleotide
aaguauaaggcauguucac

SEQ ID NO: 23778 - RNA, 19 nt, Artificial Sequence
  Description of Artificial Sequence: Synthetic oligonucleotide
cuuuauauugcauacccac

SEQ ID NO: 23779 - RNA, 19 nt, Artificial Sequence
  Description of Artificial Sequence: Synthetic oligonucleotide
uccuauuccaagaagagaa

SEQ ID NO: 23780 - RNA, 19 nt, Artificial Sequence
  Description of Artificial Sequence: Synthetic oligonucleotide
uaaguuuauuuucaggcca

SEQ ID NO: 23781 - RNA, 19 nt, Artificial Sequence
  Description of Artificial Sequence: Synthetic oligonucleotide
uaaaguccggaucaguuag

SEQ ID NO: 23782 - RNA, 19 nt, Artificial Sequence
  Description of Artificial Sequence: Synthetic oligonucleotide
aaaugaaagcucggaaacc

SEQ ID NO: 23783 - RNA, 19 nt, Artificial Sequence
  Description of Artificial Sequence: Synthetic oligonucleotide
aauacccgugucuuuacuc

SEQ ID NO: 23784 - RNA, 19 nt, Artificial Sequence
  Description of Artificial Sequence: Synthetic oligonucleotide
uguuauaucaccuguguau

SEQ ID NO: 23785 - RNA, 19 nt, Artificial Sequence
  Description of Artificial Sequence: Synthetic oligonucleotide
ucggacauagucaucagug

SEQ ID NO: 23786 - RNA, 19 nt, Artificial Sequence
  Description of Artificial Sequence: Synthetic oligonucleotide
uugggcauaaucuuuauau

SEQ ID NO: 23787 - RNA, 19 nt, Artificial Sequence
  Description of Artificial Sequence: Synthetic oligonucleotide
cuucaaacuuaucucagcg

SEQ ID NO: 23788 - RNA, 19 nt, Artificial Sequence
  Description of Artificial Sequence: Synthetic oligonucleotide
uucugaguagguucuaacg

SEQ ID NO: 23789 - RNA, 19 nt, Artificial Sequence
  Description of Artificial Sequence: Synthetic oligonucleotide
acuuugauacaaccaaacg

SEQ ID NO: 23790 - RNA, 19 nt, Artificial Sequence
  Description of Artificial Sequence: Synthetic oligonucleotide
ucuaccuuacaauauuggc

SEQ ID NO: 23791 - RNA, 19 nt, Artificial Sequence
  Description of Artificial Sequence: Synthetic oligonucleotide
gugauuaagagcuucaaga

SEQ ID NO: 23792 - RNA, 19 nt, Artificial Sequence
  Description of Artificial Sequence: Synthetic oligonucleotide
auugccuuauuucugagga

SEQ ID NO: 23793 - RNA, 19 nt, Artificial Sequence
  Description of Artificial Sequence: Synthetic oligonucleotide
aucacauuacuugugggcc

SEQ ID NO: 23794 - RNA, 19 nt, Artificial Sequence
  Description of Artificial Sequence: Synthetic oligonucleotide
ucugaguugcgucuguuag

SEQ ID NO: 23795 - RNA, 19 nt, Artificial Sequence
  Description of Artificial Sequence: Synthetic oligonucleotide
auucgcaggaauuugcauc

SEQ ID NO: 23796 - RNA, 19 nt, Artificial Sequence
  Description of Artificial Sequence: Synthetic oligonucleotide
aauaaugcgucaucugcca

SEQ ID NO: 23797 - RNA, 19 nt, Artificial Sequence
  Description of Artificial Sequence: Synthetic oligonucleotide
guucaugugaaauucuacc

SEQ ID NO: 23798 - RNA, 19 nt, Artificial Sequence
  Description of Artificial Sequence: Synthetic oligonucleotide
guagaauuguuauaucacc

SEQ ID NO: 23799 - RNA, 19 nt, Artificial Sequence
  Description of Artificial Sequence: Synthetic oligonucleotide
auaaagagccucgaacucc

SEQ ID NO: 23800 - RNA, 19 nt, Artificial Sequence
  Description of Artificial Sequence: Synthetic oligonucleotide
aucaccuguguauuuauuc

SEQ ID NO: 23801 - RNA, 19 nt, Artificial Sequence
  Description of Artificial Sequence: Synthetic oligonucleotide
uccaugucaggauaggaag

SEQ ID NO: 23802 - RNA, 19 nt, Artificial Sequence
  Description of Artificial Sequence: Synthetic oligonucleotide
aacugcuuuccuucuauag

SEQ ID NO: 23803 - RNA, 19 nt, Artificial Sequence
  Description of Artificial Sequence: Synthetic oligonucleotide
uauaacaugggaauaccau

SEQ ID NO: 23804 - RNA, 19 nt, Artificial Sequence
  Description of Artificial Sequence: Synthetic oligonucleotide
uguuaucuauagaagccag

SEQ ID NO: 23805 - RNA, 19 nt, Artificial Sequence
  Description of Artificial Sequence: Synthetic oligonucleotide
auauccacgacauuucuga

SEQ ID NO: 23806 - RNA, 19 nt, Artificial Sequence
  Description of Artificial Sequence: Synthetic oligonucleotide
uacuacaacagagaacacg

SEQ ID NO: 23807 - RNA, 19 nt, Artificial Sequence
  Description of Artificial Sequence: Synthetic oligonucleotide
acuuaauccagaaagugag

SEQ ID NO: 23808 - RNA, 19 nt, Artificial Sequence
  Description of Artificial Sequence: Synthetic oligonucleotide
aacgcaguuaaguuuauuu

SEQ ID NO: 23809 - RNA, 19 nt, Artificial Sequence
  Description of Artificial Sequence: Synthetic oligonucleotide
auagacuacuaauacauaa

SEQ ID NO: 23810 - RNA, 19 nt, Artificial Sequence
  Description of Artificial Sequence: Synthetic oligonucleotide
uucaaacuuaucucagcgg

SEQ ID NO: 23811 - RNA, 19 nt, Artificial Sequence
  Description of Artificial Sequence: Synthetic oligonucleotide
aaugaaagcucggaaaccu

SEQ ID NO: 23812 - RNA, 19 nt, Artificial Sequence
  Description of Artificial Sequence: Synthetic oligonucleotide
acauaauuaaucauggcca

SEQ ID NO: 23813 - RNA, 19 nt, Artificial Sequence
  Description of Artificial Sequence: Synthetic oligonucleotide
ucauaguaaagcuggguca

SEQ ID NO: 23814 - RNA, 19 nt, Artificial Sequence
  Description of Artificial Sequence: Synthetic oligonucleotide
cuuauugcggacgacauac

SEQ ID NO: 23815 - RNA, 19 nt, Artificial Sequence
  Description of Artificial Sequence: Synthetic oligonucleotide
uaggcuagaacauuucugu

SEQ ID NO: 23816 - RNA, 19 nt, Artificial Sequence
  Description of Artificial Sequence: Synthetic oligonucleotide
cuugguauggacugcauuc

SEQ ID NO: 23817 - RNA, 19 nt, Artificial Sequence
  Description of Artificial Sequence: Synthetic oligonucleotide
agaauuguuauaucaccug

SEQ ID NO: 23818 - RNA, 19 nt, Artificial Sequence
  Description of Artificial Sequence: Synthetic oligonucleotide
cauaauuaaucauggccag

SEQ ID NO: 23819 - RNA, 19 nt, Artificial Sequence
  Description of Artificial Sequence: Synthetic oligonucleotide
aagugaauggugcauuagu

SEQ ID NO: 23820 - RNA, 19 nt, Artificial Sequence
  Description of Artificial Sequence: Synthetic oligonucleotide
ugcugugcuggucauaaag

SEQ ID NO: 23821 - RNA, 19 nt, Artificial Sequence
  Description of Artificial Sequence: Synthetic oligonucleotide
auuguuauaucaccugugu

SEQ ID NO: 23822 - RNA, 19 nt, Artificial Sequence
  Description of Artificial Sequence: Synthetic oligonucleotide
auuagugaagagugucuac

SEQ ID NO: 23823 - RNA, 19 nt, Artificial Sequence
  Description of Artificial Sequence: Synthetic oligonucleotide
acgagagccauucuuaaug

SEQ ID NO: 23824 - RNA, 19 nt, Artificial Sequence
  Description of Artificial Sequence: Synthetic oligonucleotide
agugauuaagagcuucaag

SEQ ID NO: 23825 - RNA, 19 nt, Artificial Sequence
  Description of Artificial Sequence: Synthetic oligonucleotide
uugacaaguguucaauaac

SEQ ID NO: 23826 - RNA, 19 nt, Artificial Sequence
  Description of Artificial Sequence: Synthetic oligonucleotide
uauagaagccagcagcccu

SEQ ID NO: 23827 - RNA, 19 nt, Artificial Sequence
  Description of Artificial Sequence: Synthetic oligonucleotide
uaauuaaucauggccaggu

SEQ ID NO: 23828 - RNA, 19 nt, Artificial Sequence
  Description of Artificial Sequence: Synthetic oligonucleotide
uguaaaggccaguaaagaa

SEQ ID NO: 23829 - RNA, 19 nt, Artificial Sequence
  Description of Artificial Sequence: Synthetic oligonucleotide
uacuugugggccaagucag

SEQ ID NO: 23830 - RNA, 19 nt, Artificial Sequence
  Description of Artificial Sequence: Synthetic oligonucleotide
aaaacgguccuguggcguc

SEQ ID NO: 23831 - RNA, 19 nt, Artificial Sequence
  Description of Artificial Sequence: Synthetic oligonucleotide
aagaaacgauucccacucc

SEQ ID NO: 23832 - RNA, 19 nt, Artificial Sequence
  Description of Artificial Sequence: Synthetic oligonucleotide
ugacuugaauagcucgugg

SEQ ID NO: 23833 - RNA, 19 nt, Artificial Sequence
  Description of Artificial Sequence: Synthetic oligonucleotide
ugaguagguucuaacgcag

SEQ ID NO: 23834 - RNA, 19 nt, Artificial Sequence
  Description of Artificial Sequence: Synthetic oligonucleotide
uggcggauaacauagucga

SEQ ID NO: 23835 - RNA, 19 nt, Artificial Sequence
  Description of Artificial Sequence: Synthetic oligonucleotide
acaacacgaggcugcaugc

SEQ ID NO: 23836 - RNA, 19 nt, Artificial Sequence
  Description of Artificial Sequence: Synthetic oligonucleotide
uucaauaucccagacuuaa

SEQ ID NO: 23837 - RNA, 19 nt, Artificial Sequence
  Description of Artificial Sequence: Synthetic oligonucleotide
aucacuuuacacgaagguc

SEQ ID NO: 23838 - RNA, 19 nt, Artificial Sequence
  Description of Artificial Sequence: Synthetic oligonucleotide
ugaucacgcaagugaaugg

SEQ ID NO: 23839 - RNA, 19 nt, Artificial Sequence
  Description of Artificial Sequence: Synthetic oligonucleotide
auauauagcuuaauggugu

SEQ ID NO: 23840 - RNA, 19 nt, Artificial Sequence
  Description of Artificial Sequence: Synthetic oligonucleotide
uuuauacugguaacaggac

SEQ ID NO: 23841 - RNA, 19 nt, Artificial Sequence
  Description of Artificial Sequence: Synthetic oligonucleotide
uccuauuccacaguaggcc

SEQ ID NO: 23842 - RNA, 19 nt, Artificial Sequence
  Description of Artificial Sequence: Synthetic oligonucleotide
uaaauagcgggcuuccuuc

SEQ ID NO: 23843 - RNA, 19 nt, Artificial Sequence
  Description of Artificial Sequence: Synthetic oligonucleotide
ucaagacucgauguguuag

SEQ ID NO: 23844 - RNA, 19 nt, Artificial Sequence
  Description of Artificial Sequence: Synthetic oligonucleotide
ucacgcaagugaauggugc

SEQ ID NO: 23845 - RNA, 19 nt, Artificial Sequence
  Description of Artificial Sequence: Synthetic oligonucleotide
aguggcggauaacauaguc

SEQ ID NO: 23846 - RNA, 19 nt, Artificial Sequence
  Description of Artificial Sequence: Synthetic oligonucleotide
uugcauacccacucuauca

SEQ ID NO: 23847 - RNA, 19 nt, Artificial Sequence
  Description of Artificial Sequence: Synthetic oligonucleotide
ucuuuauauugcauaccca

SEQ ID NO: 23848 - RNA, 19 nt, Artificial Sequence
  Description of Artificial Sequence: Synthetic oligonucleotide
agacgauaaaccaaggucu

SEQ ID NO: 23849 - RNA, 19 nt, Artificial Sequence
  Description of Artificial Sequence: Synthetic oligonucleotide
ccagacuuaaucuugucgg

SEQ ID NO: 23850 - RNA, 19 nt, Artificial Sequence
  Description of Artificial Sequence: Synthetic oligonucleotide
guaaagcugggucacucgg

SEQ ID NO: 23851 - RNA, 19 nt, Artificial Sequence
  Description of Artificial Sequence: Synthetic oligonucleotide
gcuaauucguauaaaaccc

SEQ ID NO: 23852 - RNA, 19 nt, Artificial Sequence
  Description of Artificial Sequence: Synthetic oligonucleotide
aauccccuuguagaaaauc

SEQ ID NO: 23853 - RNA, 19 nt, Artificial Sequence
  Description of Artificial Sequence: Synthetic oligonucleotide
uucgcaggaauuugcaucu

SEQ ID NO: 23854 - RNA, 19 nt, Artificial Sequence
  Description of Artificial Sequence: Synthetic oligonucleotide
uuauagaacuguguugaug

SEQ ID NO: 23855 - RNA, 19 nt, Artificial Sequence
  Description of Artificial Sequence: Synthetic oligonucleotide
aguagguuccauaagagaa

SEQ ID NO: 23856 - RNA, 19 nt, Artificial Sequence
  Description of Artificial Sequence: Synthetic oligonucleotide
caggcuacucuucugacag

SEQ ID NO: 23857 - RNA, 19 nt, Artificial Sequence
  Description of Artificial Sequence: Synthetic oligonucleotide
cuaauuaguagaauuguua

SEQ ID NO: 23858 - RNA, 19 nt, Artificial Sequence
  Description of Artificial Sequence: Synthetic oligonucleotide
auucguauaaaacccuuaa

SEQ ID NO: 23859 - RNA, 19 nt, Artificial Sequence
  Description of Artificial Sequence: Synthetic oligonucleotide
uuuagcacgcgcauguuuu

SEQ ID NO: 23860 - RNA, 19 nt, Artificial Sequence
  Description of Artificial Sequence: Synthetic oligonucleotide
cuaggcuagaacauuucug

SEQ ID NO: 23861 - RNA, 19 nt, Artificial Sequence
  Description of Artificial Sequence: Synthetic oligonucleotide
caugcaucacuuuacacga

SEQ ID NO: 23862 - RNA, 19 nt, Artificial Sequence
  Description of Artificial Sequence: Synthetic oligonucleotide
uugauacaaccaaacggca

SEQ ID NO: 23863 - RNA, 19 nt, Artificial Sequence
  Description of Artificial Sequence: Synthetic oligonucleotide
uccucaacacagugcagcg

SEQ ID NO: 23864 - RNA, 19 nt, Artificial Sequence
  Description of Artificial Sequence: Synthetic oligonucleotide
uagcuuaauggugucacag

SEQ ID NO: 23865 - RNA, 19 nt, Artificial Sequence
  Description of Artificial Sequence: Synthetic oligonucleotide
uugcggacgacauacucgc

SEQ ID NO: 23866 - RNA, 19 nt, Artificial Sequence
  Description of Artificial Sequence: Synthetic oligonucleotide
uuaaauagcgggcuuccuu

SEQ ID NO: 23867 - RNA, 19 nt, Artificial Sequence
  Description of Artificial Sequence: Synthetic oligonucleotide
gaaauagcaaguccauaga

SEQ ID NO: 23868 - RNA, 19 nt, Artificial Sequence
  Description of Artificial Sequence: Synthetic oligonucleotide
aaugauucccucacaguca

SEQ ID NO: 23869 - RNA, 19 nt, Artificial Sequence
  Description of Artificial Sequence: Synthetic oligonucleotide
uuacuacaccauauauugc

SEQ ID NO: 23870 - RNA, 19 nt, Artificial Sequence
  Description of Artificial Sequence: Synthetic oligonucleotide
augauucccucacagucag

SEQ ID NO: 23871 - RNA, 19 nt, Artificial Sequence
  Description of Artificial Sequence: Synthetic oligonucleotide
aaacccuuaaaguccggau

SEQ ID NO: 23872 - RNA, 19 nt, Artificial Sequence
  Description of Artificial Sequence: Synthetic oligonucleotide
uccuaauuaguagaauugu

SEQ ID NO: 23873 - RNA, 19 nt, Artificial Sequence
  Description of Artificial Sequence: Synthetic oligonucleotide
agaaugugcuccguuacuc

SEQ ID NO: 23874 - RNA, 19 nt, Artificial Sequence
  Description of Artificial Sequence: Synthetic oligonucleotide
gauacaaccaaacggcacu

SEQ ID NO: 23875 - RNA, 19 nt, Artificial Sequence
  Description of Artificial Sequence: Synthetic oligonucleotide
ugugggccaagucagaauu

SEQ ID NO: 23876 - RNA, 19 nt, Artificial Sequence
  Description of Artificial Sequence: Synthetic oligonucleotide
uucguauaaaacccuuaaa

SEQ ID NO: 23877 - RNA, 19 nt, Artificial Sequence
  Description of Artificial Sequence: Synthetic oligonucleotide
aaccgcuacuacaacagag

SEQ ID NO: 23878 - RNA, 19 nt, Artificial Sequence
  Description of Artificial Sequence: Synthetic oligonucleotide
uguuagcuuugugauacag

SEQ ID NO: 23879 - RNA, 19 nt, Artificial Sequence
  Description of Artificial Sequence: Synthetic oligonucleotide
uuucaaugaucacgcaagu

SEQ ID NO: 23880 - RNA, 19 nt, Artificial Sequence
  Description of Artificial Sequence: Synthetic oligonucleotide
accgcugcuauuucaauga

SEQ ID NO: 23881 - RNA, 19 nt, Artificial Sequence
  Description of Artificial Sequence: Synthetic oligonucleotide
augaucacgcaagugaaug

SEQ ID NO: 23882 - RNA, 19 nt, Artificial Sequence
  Description of Artificial Sequence: Synthetic oligonucleotide
auugcggacgacauacucg

SEQ ID NO: 23883 - RNA, 19 nt, Artificial Sequence
  Description of Artificial Sequence: Synthetic oligonucleotide
guccauagacuacuaauac

SEQ ID NO: 23884 - RNA, 19 nt, Artificial Sequence
  Description of Artificial Sequence: Synthetic oligonucleotide
uguauagucuucugugcuc

SEQ ID NO: 23885 - RNA, 19 nt, Artificial Sequence
  Description of Artificial Sequence: Synthetic oligonucleotide
uacugguaacaggacaccg

SEQ ID NO: 23886 - RNA, 19 nt, Artificial Sequence
  Description of Artificial Sequence: Synthetic oligonucleotide
uaccacuaagucacuagac

SEQ ID NO: 23887 - RNA, 19 nt, Artificial Sequence
  Description of Artificial Sequence: Synthetic oligonucleotide
gguuuuauacugguaacag

SEQ ID NO: 23888 - RNA, 19 nt, Artificial Sequence
  Description of Artificial Sequence: Synthetic oligonucleotide
gauaacauagucgaccgcu

SEQ ID NO: 23889 - RNA, 19 nt, Artificial Sequence
  Description of Artificial Sequence: Synthetic oligonucleotide
uauugcggacgacauacuc

SEQ ID NO: 23890 - RNA, 19 nt, Artificial Sequence
  Description of Artificial Sequence: Synthetic oligonucleotide
cacaacacgaggcugcaug

SEQ ID NO: 23891 - RNA, 19 nt, Artificial Sequence
  Description of Artificial Sequence: Synthetic oligonucleotide
gaugaugguccaacaacag

SEQ ID NO: 23892 - RNA, 19 nt, Artificial Sequence
  Description of Artificial Sequence: Synthetic oligonucleotide
ucaugacgcuaaaaucaag

SEQ ID NO: 23893 - RNA, 19 nt, Artificial Sequence
  Description of Artificial Sequence: Synthetic oligonucleotide
acuggacaaguauaaggca

SEQ ID NO: 23894 - RNA, 19 nt, Artificial Sequence
  Description of Artificial Sequence: Synthetic oligonucleotide
aggaaugaaucauuugcaa

SEQ ID NO: 23895 - RNA, 19 nt, Artificial Sequence
  Description of Artificial Sequence: Synthetic oligonucleotide
gaauuguuauaucaccugu

SEQ ID NO: 23896 - RNA, 19 nt, Artificial Sequence
  Description of Artificial Sequence: Synthetic oligonucleotide
ccgauguuguuccagaucc

SEQ ID NO: 23897 - RNA, 19 nt, Artificial Sequence
  Description of Artificial Sequence: Synthetic oligonucleotide
cauaguaaagcugggucac

SEQ ID NO: 23898 - RNA, 19 nt, Artificial Sequence
  Description of Artificial Sequence: Synthetic oligonucleotide
aaauagcgggcuuccuuca

SEQ ID NO: 23899 - RNA, 19 nt, Artificial Sequence
  Description of Artificial Sequence: Synthetic oligonucleotide
gacaaauccccuuguagaa

SEQ ID NO: 23900 - RNA, 19 nt, Artificial Sequence
  Description of Artificial Sequence: Synthetic oligonucleotide
auaagagaauccauguaga

SEQ ID NO: 23901 - RNA, 19 nt, Artificial Sequence
  Description of Artificial Sequence: Synthetic oligonucleotide
auacccgugucuuuacucu

SEQ ID NO: 23902 - RNA, 19 nt, Artificial Sequence
  Description of Artificial Sequence: Synthetic oligonucleotide
cagacuuaaucuugucggc

SEQ ID NO: 23903 - RNA, 19 nt, Artificial Sequence
  Description of Artificial Sequence: Synthetic oligonucleotide
auagcucguggcauaauuc

SEQ ID NO: 23904 - RNA, 19 nt, Artificial Sequence
  Description of Artificial Sequence: Synthetic oligonucleotide
uucaaugaucacgcaagug

SEQ ID NO: 23905 - RNA, 19 nt, Artificial Sequence
  Description of Artificial Sequence: Synthetic oligonucleotide
agaauaggucuugaaggag

SEQ ID NO: 23906 - RNA, 19 nt, Artificial Sequence
  Description of Artificial Sequence: Synthetic oligonucleotide
aagccccucauugggauag

SEQ ID NO: 23907 - RNA, 19 nt, Artificial Sequence
  Description of Artificial Sequence: Synthetic oligonucleotide
gaacggguggcuuccacac

SEQ ID NO: 23908 - RNA, 19 nt, Artificial Sequence
  Description of Artificial Sequence: Synthetic oligonucleotide
uauaucaccuguguauuua

SEQ ID NO: 23909 - RNA, 19 nt, Artificial Sequence
  Description of Artificial Sequence: Synthetic oligonucleotide
caagacucgauguguuagc

SEQ ID NO: 23910 - RNA, 19 nt, Artificial Sequence
  Description of Artificial Sequence: Synthetic oligonucleotide
aacacgcuggaaaacauuu

SEQ ID NO: 23911 - RNA, 19 nt, Artificial Sequence
  Description of Artificial Sequence: Synthetic oligonucleotide
aauuaaucauggccagguu

SEQ ID NO: 23912 - RNA, 19 nt, Artificial Sequence
  Description of Artificial Sequence: Synthetic oligonucleotide
ugcauacccacucuaucau

SEQ ID NO: 23913 - RNA, 19 nt, Artificial Sequence
  Description of Artificial Sequence: Synthetic oligonucleotide
uggagcgcuuuccuucacg

SEQ ID NO: 23914 - RNA, 19 nt, Artificial Sequence
  Description of Artificial Sequence: Synthetic oligonucleotide
auguagacggcuccaguca

SEQ ID NO: 23915 - RNA, 19 nt, Artificial Sequence
  Description of Artificial Sequence: Synthetic oligonucleotide
ugaccgaguggccugugca

SEQ ID NO: 23916 - RNA, 19 nt, Artificial Sequence
  Description of Artificial Sequence: Synthetic oligonucleotide
ugggaauaccauugacaag

SEQ ID NO: 23917 - RNA, 19 nt, Artificial Sequence
  Description of Artificial Sequence: Synthetic oligonucleotide
uugacuugaauagcucgug

SEQ ID NO: 23918 - RNA, 19 nt, Artificial Sequence
  Description of Artificial Sequence: Synthetic oligonucleotide
uaaugcgucaucugccaaa

SEQ ID NO: 23919 - RNA, 19 nt, Artificial Sequence
  Description of Artificial Sequence: Synthetic oligonucleotide
cagaauaggucuugaagga

SEQ ID NO: 23920 - RNA, 19 nt, Artificial Sequence
  Description of Artificial Sequence: Synthetic oligonucleotide
agccuagugacaguucagg

SEQ ID NO: 23921 - RNA, 19 nt, Artificial Sequence
  Description of Artificial Sequence: Synthetic oligonucleotide
uuuuagcacgcgcauguuu

SEQ ID NO: 23922 - RNA, 19 nt, Artificial Sequence
  Description of Artificial Sequence: Synthetic oligonucleotide
gaagccgcuaguagguucc

SEQ ID NO: 23923 - RNA, 19 nt, Artificial Sequence
  Description of Artificial Sequence: Synthetic oligonucleotide
aagacucgauguguuagcu

SEQ ID NO: 23924 - RNA, 19 nt, Artificial Sequence
  Description of Artificial Sequence: Synthetic oligonucleotide
acgacauacucgcugcugu

SEQ ID NO: 23925 - RNA, 19 nt, Artificial Sequence
  Description of Artificial Sequence: Synthetic oligonucleotide
gcuagaacauuucuguuuc

SEQ ID NO: 23926 - RNA, 19 nt, Artificial Sequence
  Description of Artificial Sequence: Synthetic oligonucleotide
agcuucaagaaaucuguuu

SEQ ID NO: 23927 - RNA, 19 nt, Artificial Sequence
  Description of Artificial Sequence: Synthetic oligonucleotide
uuccuauuccaagaagaga

SEQ ID NO: 23928 - RNA, 19 nt, Artificial Sequence
  Description of Artificial Sequence: Synthetic oligonucleotide
gcucucuugagcucuaacc

SEQ ID NO: 23929 - RNA, 19 nt, Artificial Sequence
  Description of Artificial Sequence: Synthetic oligonucleotide
aauucaucaagggccccgu

SEQ ID NO: 23930 - RNA, 19 nt, Artificial Sequence
  Description of Artificial Sequence: Synthetic oligonucleotide
ggaucaguuagguaaaucu

SEQ ID NO: 23931 - RNA, 19 nt, Artificial Sequence
  Description of Artificial Sequence: Synthetic oligonucleotide
ucguggcauaauucgcagg

SEQ ID NO: 23932 - RNA, 19 nt, Artificial Sequence
  Description of Artificial Sequence: Synthetic oligonucleotide
cuaacccuugaccaacuuc

SEQ ID NO: 23933 - RNA, 19 nt, Artificial Sequence
  Description of Artificial Sequence: Synthetic oligonucleotide
uugggguuaaugucccaca

SEQ ID NO: 23934 - RNA, 19 nt, Artificial Sequence
  Description of Artificial Sequence: Synthetic oligonucleotide
cacgguugccacuugcuug

SEQ ID NO: 23935 - RNA, 19 nt, Artificial Sequence
  Description of Artificial Sequence: Synthetic oligonucleotide
ucagaauuccggggagacg

SEQ ID NO: 23936 - RNA, 19 nt, Artificial Sequence
  Description of Artificial Sequence: Synthetic oligonucleotide
uucugaggaucuaaaccau

SEQ ID NO: 23937 - RNA, 19 nt, Artificial Sequence
  Description of Artificial Sequence: Synthetic oligonucleotide
acgcaguuaaguuuauuuu

SEQ ID NO: 23938 - RNA, 19 nt, Artificial Sequence
  Description of Artificial Sequence: Synthetic oligonucleotide
uugguauggacugcauuca

SEQ ID NO: 23939 - RNA, 19 nt, Artificial Sequence
  Description of Artificial Sequence: Synthetic oligonucleotide
aaaguccggaucaguuagg

SEQ ID NO: 23940 - RNA, 19 nt, Artificial Sequence
  Description of Artificial Sequence: Synthetic oligonucleotide
acgagaacggguggcuucc

SEQ ID NO: 23941 - RNA, 19 nt, Artificial Sequence
  Description of Artificial Sequence: Synthetic oligonucleotide
aauuccggggagacgauaa

SEQ ID NO: 23942 - RNA, 19 nt, Artificial Sequence
  Description of Artificial Sequence: Synthetic oligonucleotide
acuacaccauauauugcag

SEQ ID NO: 23943 - RNA, 19 nt, Artificial Sequence
  Description of Artificial Sequence: Synthetic oligonucleotide
guuaccgauguuguuccag

SEQ ID NO: 23944 - RNA, 19 nt, Artificial Sequence
  Description of Artificial Sequence: Synthetic oligonucleotide
acgauucccacuccugugu

SEQ ID NO: 23945 - RNA, 19 nt, Artificial Sequence
  Description of Artificial Sequence: Synthetic oligonucleotide
guaccacuaagucacuaga

SEQ ID NO: 23946 - RNA, 19 nt, Artificial Sequence
  Description of Artificial Sequence: Synthetic oligonucleotide
aguaaucauacagcgugga

SEQ ID NO: 23947 - RNA, 19 nt, Artificial Sequence
  Description of Artificial Sequence: Synthetic oligonucleotide
aguagguucuaacgcaguu

SEQ ID NO: 23948 - RNA, 19 nt, Artificial Sequence
  Description of Artificial Sequence: Synthetic oligonucleotide
cucguggcauaauucgcag

SEQ ID NO: 23949 - RNA, 19 nt, Artificial Sequence
  Description of Artificial Sequence: Synthetic oligonucleotide
ugucuaccuauagcaacag

SEQ ID NO: 23950 - RNA, 19 nt, Artificial Sequence
  Description of Artificial Sequence: Synthetic oligonucleotide
gacauacucgcugcugugc

SEQ ID NO: 23951 - RNA, 19 nt, Artificial Sequence
  Description of Artificial Sequence: Synthetic oligonucleotide
cagaauuccggggagacga

SEQ ID NO: 23952 - RNA, 19 nt, Artificial Sequence
  Description of Artificial Sequence: Synthetic oligonucleotide
uccgucuuuucugggcucg

SEQ ID NO: 23953 - RNA, 19 nt, Artificial Sequence
  Description of Artificial Sequence: Synthetic oligonucleotide
aagugauuaagagcuucaa

SEQ ID NO: 23954 - RNA, 19 nt, Artificial Sequence
  Description of Artificial Sequence: Synthetic oligonucleotide
agaacggguggcuuccaca

SEQ ID NO: 23955 - RNA, 19 nt, Artificial Sequence
  Description of Artificial Sequence: Synthetic oligonucleotide
aaguccggaucaguuaggu

SEQ ID NO: 23956 - RNA, 19 nt, Artificial Sequence
  Description of Artificial Sequence: Synthetic oligonucleotide
gggaauaccauugacaagu

SEQ ID NO: 23957 - RNA, 19 nt, Artificial Sequence
  Description of Artificial Sequence: Synthetic oligonucleotide
ugggcauaaucuuuauauu

SEQ ID NO: 23958 - RNA, 19 nt, Artificial Sequence
  Description of Artificial Sequence: Synthetic oligonucleotide
gucuaccuauagcaacagg

SEQ ID NO: 23959 - RNA, 19 nt, Artificial Sequence
  Description of Artificial Sequence: Synthetic oligonucleotide
uccggaucaguuagguaaa

SEQ ID NO: 23960 - RNA, 19 nt, Artificial Sequence
  Description of Artificial Sequence: Synthetic oligonucleotide
acugucuacaggucacuaa

SEQ ID NO: 23961 - RNA, 19 nt, Artificial Sequence
  Description of Artificial Sequence: Synthetic oligonucleotide
auuauagaacuguguugau

SEQ ID NO: 23962 - RNA, 19 nt, Artificial Sequence
  Description of Artificial Sequence: Synthetic oligonucleotide
ggugggugagccuagugac

SEQ ID NO: 23963 - RNA, 19 nt, Artificial Sequence
  Description of Artificial Sequence: Synthetic oligonucleotide
acuuaucucagcggcacga

SEQ ID NO: 23964 - RNA, 19 nt, Artificial Sequence
  Description of Artificial Sequence: Synthetic oligonucleotide
agacuuaaucuugucggca

SEQ ID NO: 23965 - RNA, 19 nt, Artificial Sequence
  Description of Artificial Sequence: Synthetic oligonucleotide
auagcgggcuuccuucaug

SEQ ID NO: 23966 - RNA, 19 nt, Artificial Sequence
  Description of Artificial Sequence: Synthetic oligonucleotide
auggacuuaaucugaucuu

SEQ ID NO: 23967 - RNA, 19 nt, Artificial Sequence
  Description of Artificial Sequence: Synthetic oligonucleotide
aaacggcacuucaucacug

SEQ ID NO: 23968 - RNA, 19 nt, Artificial Sequence
  Description of Artificial Sequence: Synthetic oligonucleotide
uugauccucauagccugag

SEQ ID NO: 23969 - RNA, 19 nt, Artificial Sequence
  Description of Artificial Sequence: Synthetic oligonucleotide
gacucgauguguuagcuuu

SEQ ID NO: 23970 - RNA, 19 nt, Artificial Sequence
  Description of Artificial Sequence: Synthetic oligonucleotide
aguggcuuacuacaccaua

SEQ ID NO: 23971 - RNA, 19 nt, Artificial Sequence
  Description of Artificial Sequence: Synthetic oligonucleotide
gguauucaauaucccagac

SEQ ID NO: 23972 - RNA, 19 nt, Artificial Sequence
  Description of Artificial Sequence: Synthetic oligonucleotide
gcggauaacauagucgacc

SEQ ID NO: 23973 - RNA, 19 nt, Artificial Sequence
  Description of Artificial Sequence: Synthetic oligonucleotide
aaugaucacgcaagugaau

SEQ ID NO: 23974 - RNA, 19 nt, Artificial Sequence
  Description of Artificial Sequence: Synthetic oligonucleotide
uggccauauuucucauucc

SEQ ID NO: 23975 - RNA, 19 nt, Artificial Sequence
  Description of Artificial Sequence: Synthetic oligonucleotide
uggcuuacuacaccauaua

SEQ ID NO: 23976 - RNA, 19 nt, Artificial Sequence
  Description of Artificial Sequence: Synthetic oligonucleotide
uuauugcggacgacauacu

SEQ ID NO: 23977 - RNA, 19 nt, Artificial Sequence
  Description of Artificial Sequence: Synthetic oligonucleotide
cugucuacaggucacuaaa

SEQ ID NO: 23978 - RNA, 19 nt, Artificial Sequence
  Description of Artificial Sequence: Synthetic oligonucleotide
gccauauuaaauagcgggc

SEQ ID NO: 23979 - RNA, 19 nt, Artificial Sequence
  Description of Artificial Sequence: Synthetic oligonucleotide
caaacuuaucucagcggca

SEQ ID NO: 23980 - RNA, 19 nt, Artificial Sequence
  Description of Artificial Sequence: Synthetic oligonucleotide
acauuuuagcacgcgcaug

SEQ ID NO: 23981 - RNA, 19 nt, Artificial Sequence
  Description of Artificial Sequence: Synthetic oligonucleotide
cuaauucguauaaaacccu

SEQ ID NO: 23982 - RNA, 19 nt, Artificial Sequence
  Description of Artificial Sequence: Synthetic oligonucleotide
ucgaccgcuucauggagaa

SEQ ID NO: 23983 - RNA, 19 nt, Artificial Sequence
  Description of Artificial Sequence: Synthetic oligonucleotide
auauagcuuaaugguguca

SEQ ID NO: 23984 - RNA, 19 nt, Artificial Sequence
  Description of Artificial Sequence: Synthetic oligonucleotide
acaccauauauugcagaug

SEQ ID NO: 23985 - RNA, 19 nt, Artificial Sequence
  Description of Artificial Sequence: Synthetic oligonucleotide
cugauccuaauuaguagaa

SEQ ID NO: 23986 - RNA, 19 nt, Artificial Sequence
  Description of Artificial Sequence: Synthetic oligonucleotide
gcauucaagacucgaugug

SEQ ID NO: 23987 - RNA, 19 nt, Artificial Sequence
  Description of Artificial Sequence: Synthetic oligonucleotide
ugauccuaauuaguagaau

SEQ ID NO: 23988 - RNA, 19 nt, Artificial Sequence
  Description of Artificial Sequence: Synthetic oligonucleotide
acuugguauggacugcauu

SEQ ID NO: 23989 - RNA, 19 nt, Artificial Sequence
  Description of Artificial Sequence: Synthetic oligonucleotide
aucaagggccccgugcaag

SEQ ID NO: 23990 - RNA, 19 nt, Artificial Sequence
  Description of Artificial Sequence: Synthetic oligonucleotide
cucuaggcuagaacauuuc

SEQ ID NO: 23991 - RNA, 19 nt, Artificial Sequence
  Description of Artificial Sequence: Synthetic oligonucleotide
ggccauauuucucauucca

SEQ ID NO: 23992 - RNA, 19 nt, Artificial Sequence
  Description of Artificial Sequence: Synthetic oligonucleotide
cuuaucucagcggcacgag

SEQ ID NO: 23993 - RNA, 19 nt, Artificial Sequence
  Description of Artificial Sequence: Synthetic oligonucleotide
uggucauaaagagccucga

SEQ ID NO: 23994 - RNA, 19 nt, Artificial Sequence
  Description of Artificial Sequence: Synthetic oligonucleotide
gcuguuaccgauguuguuc

SEQ ID NO: 23995 - RNA, 19 nt, Artificial Sequence
  Description of Artificial Sequence: Synthetic oligonucleotide
accgcuacuacaacagaga

SEQ ID NO: 23996 - RNA, 19 nt, Artificial Sequence
  Description of Artificial Sequence: Synthetic oligonucleotide
ggaugaugguccaacaaca

SEQ ID NO: 23997 - RNA, 19 nt, Artificial Sequence
  Description of Artificial Sequence: Synthetic oligonucleotide
auacccacucuaucauagu

SEQ ID NO: 23998 - RNA, 19 nt, Artificial Sequence
  Description of Artificial Sequence: Synthetic oligonucleotide
auaaugcgucaucugccaa

SEQ ID NO: 23999 - RNA, 19 nt, Artificial Sequence
  Description of Artificial Sequence: Synthetic oligonucleotide
ggcgguuccgucuuuucug

SEQ ID NO: 24000 - RNA, 19 nt, Artificial Sequence
  Description of Artificial Sequence: Synthetic oligonucleotide
gguucuaacgcaguuaagu

SEQ ID NO: 24001 - RNA, 19 nt, Artificial Sequence
  Description of Artificial Sequence: Synthetic oligonucleotide
gguauggacugcauucaag

SEQ ID NO: 24002 - RNA, 19 nt, Artificial Sequence
  Description of Artificial Sequence: Synthetic oligonucleotide
gcggcuauccaugacauca

SEQ ID NO: 24003 - RNA, 19 nt, Artificial Sequence
  Description of Artificial Sequence: Synthetic oligonucleotide
cacgagaacggguggcuuc

SEQ ID NO: 24004 - RNA, 19 nt, Artificial Sequence
  Description of Artificial Sequence: Synthetic oligonucleotide
gaaugugcuccguuacucu

SEQ ID NO: 24005 - RNA, 19 nt, Artificial Sequence
  Description of Artificial Sequence: Synthetic oligonucleotide
cuugagagaggcuccauau

SEQ ID NO: 24006 - RNA, 19 nt, Artificial Sequence
  Description of Artificial Sequence: Synthetic oligonucleotide
aggaugaaucgguguccag

SEQ ID NO: 24007 - RNA, 19 nt, Artificial Sequence
  Description of Artificial Sequence: Synthetic oligonucleotide
gucuaugccaaagcuauua

SEQ ID NO: 24008 - RNA, 19 nt, Artificial Sequence
  Description of Artificial Sequence: Synthetic oligonucleotide
ucuaacccuugaccaacuu

SEQ ID NO: 24009 - RNA, 19 nt, Artificial Sequence
  Description of Artificial Sequence: Synthetic oligonucleotide
gaucacgcaagugaauggu

SEQ ID NO: 24010 - RNA, 19 nt, Artificial Sequence
  Description of Artificial Sequence: Synthetic oligonucleotide
agcggcacgagaacgggug

SEQ ID NO: 24011 - RNA, 19 nt, Artificial Sequence
  Description of Artificial Sequence: Synthetic oligonucleotide
aggcgguuccgucuuuucu

SEQ ID NO: 24012 - RNA, 19 nt, Artificial Sequence
  Description of Artificial Sequence: Synthetic oligonucleotide
uccaguuuauggccauauu

SEQ ID NO: 24013 - RNA, 19 nt, Artificial Sequence
  Description of Artificial Sequence: Synthetic oligonucleotide
auguguuagcuuugugaua

SEQ ID NO: 24014 - RNA, 19 nt, Artificial Sequence
  Description of Artificial Sequence: Synthetic oligonucleotide
uguuaccgauguuguucca

SEQ ID NO: 24015 - RNA, 19 nt, Artificial Sequence
  Description of Artificial Sequence: Synthetic oligonucleotide
aucacgcaagugaauggug

SEQ ID NO: 24016 - RNA, 19 nt, Artificial Sequence
  Description of Artificial Sequence: Synthetic oligonucleotide
cauagucgaccgcuucaug

SEQ ID NO: 24017 - RNA, 19 nt, Artificial Sequence
  Description of Artificial Sequence: Synthetic oligonucleotide
gagaauccauguagacggc

SEQ ID NO: 24018 - RNA, 19 nt, Artificial Sequence
  Description of Artificial Sequence: Synthetic oligonucleotide
cagggagccaacuuggggu

SEQ ID NO: 24019 - RNA, 19 nt, Artificial Sequence
  Description of Artificial Sequence: Synthetic oligonucleotide
auucaucaagggccccgug

SEQ ID NO: 24020 - RNA, 19 nt, Artificial Sequence
  Description of Artificial Sequence: Synthetic oligonucleotide
cacgcaagugaauggugca

SEQ ID NO: 24021 - RNA, 19 nt, Artificial Sequence
  Description of Artificial Sequence: Synthetic oligonucleotide
cauagacuacuaauacaua

SEQ ID NO: 24022 - RNA, 19 nt, Artificial Sequence
  Description of Artificial Sequence: Synthetic oligonucleotide
agucaggcgugagacaaau

SEQ ID NO: 24023 - RNA, 19 nt, Artificial Sequence
  Description of Artificial Sequence: Synthetic oligonucleotide
gcgguuccgucuuuucugg

SEQ ID NO: 24024 - RNA, 19 nt, Artificial Sequence
  Description of Artificial Sequence: Synthetic oligonucleotide
gagaacggguggcuuccac

SEQ ID NO: 24025 - RNA, 19 nt, Artificial Sequence
  Description of Artificial Sequence: Synthetic oligonucleotide
cccacauuuuagcacgcgc

SEQ ID NO: 24026 - RNA, 19 nt, Artificial Sequence
  Description of Artificial Sequence: Synthetic oligonucleotide
aggcuagaacauuucuguu

SEQ ID NO: 24027 - RNA, 19 nt, Artificial Sequence
  Description of Artificial Sequence: Synthetic oligonucleotide
gcagcggcuauccaugaca

SEQ ID NO: 24028 - RNA, 19 nt, Artificial Sequence
  Description of Artificial Sequence: Synthetic oligonucleotide
gacaccgcugcuauuucaa

SEQ ID NO: 24029 - RNA, 19 nt, Artificial Sequence
  Description of Artificial Sequence: Synthetic oligonucleotide
acccacucuaucauaguaa

SEQ ID NO: 24030 - RNA, 19 nt, Artificial Sequence
  Description of Artificial Sequence: Synthetic oligonucleotide
cuuaauccagaaagugagu

SEQ ID NO: 24031 - RNA, 19 nt, Artificial Sequence
  Description of Artificial Sequence: Synthetic oligonucleotide
guuauaucaccuguguauu

SEQ ID NO: 24032 - RNA, 19 nt, Artificial Sequence
  Description of Artificial Sequence: Synthetic oligonucleotide
acacgguugccacuugcuu

SEQ ID NO: 24033 - RNA, 19 nt, Artificial Sequence
  Description of Artificial Sequence: Synthetic oligonucleotide
agacucgauguguuagcuu

SEQ ID NO: 24034 - RNA, 19 nt, Artificial Sequence
  Description of Artificial Sequence: Synthetic oligonucleotide
aggaaggcgguuccgucuu

SEQ ID NO: 24035 - RNA, 19 nt, Artificial Sequence
  Description of Artificial Sequence: Synthetic oligonucleotide
ggcacccuuccaauaaugc

SEQ ID NO: 24036 - RNA, 19 nt, Artificial Sequence
  Description of Artificial Sequence: Synthetic oligonucleotide
ucuggccuuuaagccacug

SEQ ID NO: 24037 - RNA, 19 nt, Artificial Sequence
  Description of Artificial Sequence: Synthetic oligonucleotide
guccuguggcgucuaugcc

SEQ ID NO: 24038 - RNA, 19 nt, Artificial Sequence
  Description of Artificial Sequence: Synthetic oligonucleotide
uacccgugucuuuacucua

SEQ ID NO: 24039 - RNA, 19 nt, Artificial Sequence
  Description of Artificial Sequence: Synthetic oligonucleotide
cggacauagucaucagugg

SEQ ID NO: 24040 - RNA, 19 nt, Artificial Sequence
  Description of Artificial Sequence: Synthetic oligonucleotide
ggagacuggcuugaccgag

SEQ ID NO: 24041 - RNA, 19 nt, Artificial Sequence
  Description of Artificial Sequence: Synthetic oligonucleotide
cauagccugaggacucaga

SEQ ID NO: 24042 - RNA, 19 nt, Artificial Sequence
  Description of Artificial Sequence: Synthetic oligonucleotide
guuagcuuugugauacagu

SEQ ID NO: 24043 - RNA, 19 nt, Artificial Sequence
  Description of Artificial Sequence: Synthetic oligonucleotide
caaacggcacuucaucacu

SEQ ID NO: 24044 - RNA, 19 nt, Artificial Sequence
  Description of Artificial Sequence: Synthetic oligonucleotide
guaaagucgggagcacaga

SEQ ID NO: 24045 - RNA, 19 nt, Artificial Sequence
  Description of Artificial Sequence: Synthetic oligonucleotide
cuucuucguaccacuaagu

SEQ ID NO: 24046 - RNA, 19 nt, Artificial Sequence
  Description of Artificial Sequence: Synthetic oligonucleotide
auuccggggagacgauaaa

SEQ ID NO: 24047 - RNA, 19 nt, Artificial Sequence
  Description of Artificial Sequence: Synthetic oligonucleotide
auccauguagacggcucca

SEQ ID NO: 24048 - RNA, 19 nt, Artificial Sequence
  Description of Artificial Sequence: Synthetic oligonucleotide
ggacacgguugccacuugc

SEQ ID NO: 24049 - RNA, 19 nt, Artificial Sequence
  Description of Artificial Sequence: Synthetic oligonucleotide
cuucucuaggcuagaacau

SEQ ID NO: 24050 - RNA, 19 nt, Artificial Sequence
  Description of Artificial Sequence: Synthetic oligonucleotide
acucgauguguuagcuuug

SEQ ID NO: 24051 - RNA, 19 nt, Artificial Sequence
  Description of Artificial Sequence: Synthetic oligonucleotide
aguccggaucaguuaggua

SEQ ID NO: 24052 - RNA, 19 nt, Artificial Sequence
  Description of Artificial Sequence: Synthetic oligonucleotide
aaguggcggauaacauagu

SEQ ID NO: 24053 - RNA, 19 nt, Artificial Sequence
  Description of Artificial Sequence: Synthetic oligonucleotide
ucguaccacuaagucacua

SEQ ID NO: 24054 - RNA, 19 nt, Artificial Sequence
  Description of Artificial Sequence: Synthetic oligonucleotide
cuugugggccaagucagaa

SEQ ID NO: 24055 - RNA, 19 nt, Artificial Sequence
  Description of Artificial Sequence: Synthetic oligonucleotide
guugcgucuguuagggucu

SEQ ID NO: 24056 - RNA, 19 nt, Artificial Sequence
  Description of Artificial Sequence: Synthetic oligonucleotide
cguggcauaauucgcagga

SEQ ID NO: 24057 - RNA, 19 nt, Artificial Sequence
  Description of Artificial Sequence: Synthetic oligonucleotide
guagacggcuccagucaug

SEQ ID NO: 24058 - RNA, 19 nt, Artificial Sequence
  Description of Artificial Sequence: Synthetic oligonucleotide
agguucuaacgcaguuaag

SEQ ID NO: 24059 - RNA, 19 nt, Artificial Sequence
  Description of Artificial Sequence: Synthetic oligonucleotide
acgcaagugaauggugcau

SEQ ID NO: 24060 - RNA, 19 nt, Artificial Sequence
  Description of Artificial Sequence: Synthetic oligonucleotide
uaacgcaguuaaguuuauu

SEQ ID NO: 24061 - RNA, 19 nt, Artificial Sequence
  Description of Artificial Sequence: Synthetic oligonucleotide
cacauuuuagcacgcgcau

SEQ ID NO: 24062 - RNA, 19 nt, Artificial Sequence
  Description of Artificial Sequence: Synthetic oligonucleotide
ggcuuacuacaccauauau

SEQ ID NO: 24063 - RNA, 19 nt, Artificial Sequence
  Description of Artificial Sequence: Synthetic oligonucleotide
cugucaacugauccuaauu

SEQ ID NO: 24064 - RNA, 19 nt, Artificial Sequence
  Description of Artificial Sequence: Synthetic oligonucleotide
guggcuuacuacaccauau

SEQ ID NO: 24065 - RNA, 19 nt, Artificial Sequence
  Description of Artificial Sequence: Synthetic oligonucleotide
cgcuacuacaacagagaac

SEQ ID NO: 24066 - RNA, 19 nt, Artificial Sequence
  Description of Artificial Sequence: Synthetic oligonucleotide
ccgugucuuuacucuauug

SEQ ID NO: 24067 - RNA, 19 nt, Artificial Sequence
  Description of Artificial Sequence: Synthetic oligonucleotide
gcaagugaauggugcauua

SEQ ID NO: 24068 - RNA, 19 nt, Artificial Sequence
  Description of Artificial Sequence: Synthetic oligonucleotide
ucgcaggaauuugcaucug

SEQ ID NO: 24069 - RNA, 19 nt, Artificial Sequence
  Description of Artificial Sequence: Synthetic oligonucleotide
gcucguggcauaauucgca

SEQ ID NO: 24070 - RNA, 19 nt, Artificial Sequence
  Description of Artificial Sequence: Synthetic oligonucleotide
gacauugucugagguuccu

SEQ ID NO: 24071 - RNA, 19 nt, Artificial Sequence
  Description of Artificial Sequence: Synthetic oligonucleotide
gaauuccggggagacgaua

SEQ ID NO: 24072 - RNA, 19 nt, Artificial Sequence
  Description of Artificial Sequence: Synthetic oligonucleotide
ggacggugcaacaggcuac

SEQ ID NO: 24073 - RNA, 19 nt, Artificial Sequence
  Description of Artificial Sequence: Synthetic oligonucleotide
cucuugagcucuaacccuu

SEQ ID NO: 24074 - RNA, 19 nt, Artificial Sequence
  Description of Artificial Sequence: Synthetic oligonucleotide
gucgaccgcuucauggaga

SEQ ID NO: 24075 - RNA, 19 nt, Artificial Sequence
  Description of Artificial Sequence: Synthetic oligonucleotide
ggacaccgcugcuauuuca

SEQ ID NO: 24076 - RNA, 19 nt, Artificial Sequence
  Description of Artificial Sequence: Synthetic oligonucleotide
caggaaggcgguuccgucu

SEQ ID NO: 24077 - RNA, 19 nt, Artificial Sequence
  Description of Artificial Sequence: Synthetic oligonucleotide
aagccgcuaguagguucca

SEQ ID NO: 24078 - RNA, 19 nt, Artificial Sequence
  Description of Artificial Sequence: Synthetic oligonucleotide
ggcacugcgaaggggccug

SEQ ID NO: 24079 - RNA, 19 nt, Artificial Sequence
  Description of Artificial Sequence: Synthetic oligonucleotide
ccauauuaaauagcgggcu

SEQ ID NO: 24080 - RNA, 19 nt, Artificial Sequence
  Description of Artificial Sequence: Synthetic oligonucleotide
gacggugcaacaggcuacu

SEQ ID NO: 24081 - RNA, 19 nt, Artificial Sequence
  Description of Artificial Sequence: Synthetic oligonucleotide
gaguagguucuaacgcagu

SEQ ID NO: 24082 - RNA, 19 nt, Artificial Sequence
  Description of Artificial Sequence: Synthetic oligonucleotide
gcuuacuacaccauauauu

SEQ ID NO: 24083 - RNA, 19 nt, Artificial Sequence
  Description of Artificial Sequence: Synthetic oligonucleotide
cauuacuugugggccaagu

SEQ ID NO: 24084 - RNA, 19 nt, Artificial Sequence
  Description of Artificial Sequence: Synthetic oligonucleotide
acggugcaacaggcuacuc

SEQ ID NO: 24085 - RNA, 19 nt, Artificial Sequence
  Description of Artificial Sequence: Synthetic oligonucleotide
guggcauaauucgcaggaa

SEQ ID NO: 24086 - RNA, 19 nt, Artificial Sequence
  Description of Artificial Sequence: Synthetic oligonucleotide
acccgugucuuuacucuau

SEQ ID NO: 24087 - RNA, 19 nt, Artificial Sequence
  Description of Artificial Sequence: Synthetic oligonucleotide
gccgcuaguagguuccaua

SEQ ID NO: 24088 - RNA, 19 nt, Artificial Sequence
  Description of Artificial Sequence: Synthetic oligonucleotide
gaccaacuucaggcugaug

SEQ ID NO: 24089 - RNA, 19 nt, Artificial Sequence
  Description of Artificial Sequence: Synthetic oligonucleotide
agaauuccggggagacgau

SEQ ID NO: 24090 - RNA, 19 nt, Artificial Sequence
  Description of Artificial Sequence: Synthetic oligonucleotide
cucuaacccuugaccaacu

SEQ ID NO: 24091 - RNA, 19 nt, Artificial Sequence
  Description of Artificial Sequence: Synthetic oligonucleotide
ggcauaauucgcaggaauu

SEQ ID NO: 24092 - RNA, 19 nt, Artificial Sequence
  Description of Artificial Sequence: Synthetic oligonucleotide
ccgcuaguagguuccauaa

SEQ ID NO: 24093 - RNA, 19 nt, Artificial Sequence
  Description of Artificial Sequence: Synthetic oligonucleotide
ggcgucuaugccaaagcua

SEQ ID NO: 24094 - RNA, 19 nt, Artificial Sequence
  Description of Artificial Sequence: Synthetic oligonucleotide
cgcuaguagguuccauaag

SEQ ID NO: 24095 - RNA, 19 nt, Artificial Sequence
  Description of Artificial Sequence: Synthetic oligonucleotide
cugcgccucggaugugauc

SEQ ID NO: 24096 - RNA, 19 nt, Artificial Sequence
  Description of Artificial Sequence: Synthetic oligonucleotide
guggagcgcuuuccuucac

SEQ ID NO: 24097 - RNA, 19 nt, Artificial Sequence
  Description of Artificial Sequence: Synthetic oligonucleotide
gagacuggcuugaccgagu

SEQ ID NO: 24098 - RNA, 19 nt, Artificial Sequence
  Description of Artificial Sequence: Synthetic oligonucleotide
cucgauguguuagcuuugu

SEQ ID NO: 24099 - RNA, 19 nt, Artificial Sequence
  Description of Artificial Sequence: Synthetic oligonucleotide
ccgcuacuacaacagagaa

SEQ ID NO: 24100 - RNA, 19 nt, Artificial Sequence
  Description of Artificial Sequence: Synthetic oligonucleotide
gcuucuuauugcggacgac

SEQ ID NO: 24101 - RNA, 19 nt, Artificial Sequence
  Description of Artificial Sequence: Synthetic oligonucleotide
cuaacgcaguuaaguuuau

SEQ ID NO: 24102 - RNA, 19 nt, Artificial Sequence
  Description of Artificial Sequence: Synthetic oligonucleotide
gaguugcgucuguuagggu

SEQ ID NO: 24103 - RNA, 19 nt, Artificial Sequence
  Description of Artificial Sequence: Synthetic oligonucleotide
cugucgcuacauuucuuuu

SEQ ID NO: 24104 - RNA, 19 nt, Artificial Sequence
  Description of Artificial Sequence: Synthetic oligonucleotide
gaauagcucguggcauaau

SEQ ID NO: 24105 - RNA, 19 nt, Artificial Sequence
  Description of Artificial Sequence: Synthetic oligonucleotide
acugcgccucggaugugau

SEQ ID NO: 24106 - RNA, 19 nt, Artificial Sequence
  Description of Artificial Sequence: Synthetic oligonucleotide
gcguggagcauuucuguuu

SEQ ID NO: 24107 - RNA, 19 nt, Artificial Sequence
  Description of Artificial Sequence: Synthetic oligonucleotide
agccgcuaguagguuccau

SEQ ID NO: 24108 - RNA, 19 nt, Artificial Sequence
  Description of Artificial Sequence: Synthetic oligonucleotide
cggaucaguuagguaaauc

SEQ ID NO: 24109 - RNA, 19 nt, Artificial Sequence
  Description of Artificial Sequence: Synthetic oligonucleotide
caacagccaagggugcgcu

SEQ ID NO: 24110 - RNA, 19 nt, Artificial Sequence
  Description of Artificial Sequence: Synthetic oligonucleotide
gccccucauugggauagug

SEQ ID NO: 24111 - RNA, 19 nt, Artificial Sequence
  Description of Artificial Sequence: Synthetic oligonucleotide
gacaaguguucuggccuuu

SEQ ID NO: 24112 - RNA, 19 nt, Artificial Sequence
  Description of Artificial Sequence: Synthetic oligonucleotide
cuuggaccaaguggcggau

SEQ ID NO: 24113 - RNA, 19 nt, Artificial Sequence
  Description of Artificial Sequence: Synthetic oligonucleotide
agccccucauugggauagu

SEQ ID NO: 24114 - RNA, 19 nt, Artificial Sequence
  Description of Artificial Sequence: Synthetic oligonucleotide
ccccucauugggauagugu

SEQ ID NO: 24115 - RNA, 19 nt, Artificial Sequence
  Description of Artificial Sequence: Synthetic oligonucleotide
cagcggcacgagaacgggu

SEQ ID NO: 24116 - RNA, 19 nt, Artificial Sequence
  Description of Artificial Sequence: Synthetic oligonucleotide
gcgugagacaaauccccuu

SEQ ID NO: 24117 - RNA, 19 nt, Artificial Sequence
  Description of Artificial Sequence: Synthetic oligonucleotide
ccgugcaaggccgggaacu

SEQ ID NO: 24118 - RNA, 19 nt, Artificial Sequence
  Description of Artificial Sequence: Synthetic oligonucleotide
cggcuauccaugacaucaa

SEQ ID NO: 24119 - RNA, 19 nt, Artificial Sequence
  Description of Artificial Sequence: Synthetic oligonucleotide
gcuugaccgaguggccugu

SEQ ID NO: 24120 - RNA, 19 nt, Artificial Sequence
  Description of Artificial Sequence: Synthetic oligonucleotide
cgccucggaugugaucuug

SEQ ID NO: 24121 - RNA, 19 nt, Artificial Sequence
  Description of Artificial Sequence: Synthetic oligonucleotide
ggaaggcgguuccgucuuu

SEQ ID NO: 24122 - RNA, 19 nt, Artificial Sequence
  Description of Artificial Sequence: Synthetic oligonucleotide
cgcaagugaauggugcauu

SEQ ID NO: 24123 - RNA, 19 nt, Artificial Sequence
  Description of Artificial Sequence: Synthetic oligonucleotide
gcacgagaacggguggcuu

SEQ ID NO: 24124 - RNA, 19 nt, Artificial Sequence
  Description of Artificial Sequence: Synthetic oligonucleotide
cccgugucuuuacucuauu

SEQ ID NO: 24125 - RNA, 19 nt, Artificial Sequence
  Description of Artificial Sequence: Synthetic oligonucleotide
cgcuaaaaucaaguuccuu

SEQ ID NO: 24126 - RNA, 19 nt, Artificial Sequence
  Description of Artificial Sequence: Synthetic oligonucleotide
ccgcuucauggagaaaauu

SEQ ID NO: 24127 - RNA, 19 nt, Artificial Sequence
  Description of Artificial Sequence: Synthetic oligonucleotide
ccggaucaguuagguaaau

SEQ ID NO: 24128 - RNA, 19 nt, Artificial Sequence
  Description of Artificial Sequence: Synthetic oligonucleotide
gcgccucggaugugaucuu

SEQ ID NO: 24129 - RNA, 19 nt, Artificial Sequence
  Description of Artificial Sequence: Synthetic oligonucleotide
cgaccgcuucauggagaaa

SEQ ID NO: 24130 - RNA, 19 nt, Artificial Sequence
  Description of Artificial Sequence: Synthetic oligonucleotide
uuuuauauuauauauauau

SEQ ID NO: 24131 - RNA, 19 nt, Artificial Sequence
  Description of Artificial Sequence: Synthetic oligonucleotide
auauuauauauauauauag

SEQ ID NO: 24132 - RNA, 19 nt, Artificial Sequence
  Description of Artificial Sequence: Synthetic oligonucleotide
uauauauauauaauuaucu

SEQ ID NO: 24133 - RNA, 19 nt, Artificial Sequence
  Description of Artificial Sequence: Synthetic oligonucleotide
aaugcaaaguaaaaggggc

SEQ ID NO: 24134 - RNA, 19 nt, Artificial Sequence
  Description of Artificial Sequence: Synthetic oligonucleotide
acacucuaaauauugaccc

SEQ ID NO: 24135 - RNA, 19 nt, Artificial Sequence
  Description of Artificial Sequence: Synthetic oligonucleotide
uauaguuauauauauauaa

SEQ ID NO: 24136 - RNA, 19 nt, Artificial Sequence
  Description of Artificial Sequence: Synthetic oligonucleotide
uauauauauaguuauauau

SEQ ID NO: 24137 - RNA, 19 nt, Artificial Sequence
  Description of Artificial Sequence: Synthetic oligonucleotide
uauauaguuauauauauau

SEQ ID NO: 24138 - RNA, 19 nt, Artificial Sequence
  Description of Artificial Sequence: Synthetic oligonucleotide
uuauauuauauauauauau

SEQ ID NO: 24139 - RNA, 19 nt, Artificial Sequence
  Description of Artificial Sequence: Synthetic oligonucleotide
aacggaauuuauuuggaac

SEQ ID NO: 24140 - RNA, 19 nt, Artificial Sequence
  Description of Artificial Sequence: Synthetic oligonucleotide
uauauauauauauaguuau

SEQ ID NO: 24141 - RNA, 19 nt, Artificial Sequence
  Description of Artificial Sequence: Synthetic oligonucleotide
uuauauauauauaauuauc

SEQ ID NO: 24142 - RNA, 19 nt, Artificial Sequence
  Description of Artificial Sequence: Synthetic oligonucleotide
auuauauauauauauaguu

SEQ ID NO: 24143 - RNA, 19 nt, Artificial Sequence
  Description of Artificial Sequence: Synthetic oligonucleotide
uauuauauauauauauagu

SEQ ID NO: 24144 - RNA, 19 nt, Artificial Sequence
  Description of Artificial Sequence: Synthetic oligonucleotide
uauauauaguuauauauau

SEQ ID NO: 24145 - RNA, 19 nt, Artificial Sequence
  Description of Artificial Sequence: Synthetic oligonucleotide
aguauaacggaggagagac

SEQ ID NO: 24146 - RNA, 19 nt, Artificial Sequence
  Description of Artificial Sequence: Synthetic oligonucleotide
uuauauauauauauaguua

SEQ ID NO: 24147 - RNA, 19 nt, Artificial Sequence
  Description of Artificial Sequence: Synthetic oligonucleotide
ugauccuacagucugagga

SEQ ID NO: 24148 - RNA, 19 nt, Artificial Sequence
  Description of Artificial Sequence: Synthetic oligonucleotide
agucguuuaucacagcacc

SEQ ID NO: 24149 - RNA, 19 nt, Artificial Sequence
  Description of Artificial Sequence: Synthetic oligonucleotide
aggacuuccccuuaaaagg

SEQ ID NO: 24150 - RNA, 19 nt, Artificial Sequence
  Description of Artificial Sequence: Synthetic oligonucleotide
gaagguauagcccugcuug

SEQ ID NO: 24151 - RNA, 19 nt, Artificial Sequence
  Description of Artificial Sequence: Synthetic oligonucleotide
agagagaggaucuuuggac

SEQ ID NO: 24152 - RNA, 19 nt, Artificial Sequence
  Description of Artificial Sequence: Synthetic oligonucleotide
acccuuuaaacauagugac

SEQ ID NO: 24153 - RNA, 19 nt, Artificial Sequence
  Description of Artificial Sequence: Synthetic oligonucleotide
aaauccaccgugaagucgc

SEQ ID NO: 24154 - RNA, 19 nt, Artificial Sequence
  Description of Artificial Sequence: Synthetic oligonucleotide
uuaggugcagacaagaaaa

SEQ ID NO: 24155 - RNA, 19 nt, Artificial Sequence
  Description of Artificial Sequence: Synthetic oligonucleotide
guuaguccaacuaaggucg

SEQ ID NO: 24156 - RNA, 19 nt, Artificial Sequence
  Description of Artificial Sequence: Synthetic oligonucleotide
uauauuauauauauauaua

SEQ ID NO: 24157 - RNA, 19 nt, Artificial Sequence
  Description of Artificial Sequence: Synthetic oligonucleotide
uguugauucagucugacuu

SEQ ID NO: 24158 - RNA, 19 nt, Artificial Sequence
  Description of Artificial Sequence: Synthetic oligonucleotide
aagacuaaaaccccagaca

SEQ ID NO: 24159 - RNA, 19 nt, Artificial Sequence
  Description of Artificial Sequence: Synthetic oligonucleotide
aaugacgaagguauagccc

SEQ ID NO: 24160 - RNA, 19 nt, Artificial Sequence
  Description of Artificial Sequence: Synthetic oligonucleotide
aauuccgaccauuucuuuc

SEQ ID NO: 24161 - RNA, 19 nt, Artificial Sequence
  Description of Artificial Sequence: Synthetic oligonucleotide
auugacccagaauaauucc

SEQ ID NO: 24162 - RNA, 19 nt, Artificial Sequence
  Description of Artificial Sequence: Synthetic oligonucleotide
uuagcaauucgccuuagga

SEQ ID NO: 24163 - RNA, 19 nt, Artificial Sequence
  Description of Artificial Sequence: Synthetic oligonucleotide
uuaggaguuuuauuuauug

SEQ ID NO: 24164 - RNA, 19 nt, Artificial Sequence
  Description of Artificial Sequence: Synthetic oligonucleotide
uuuauugcaaccugccgag

SEQ ID NO: 24165 - RNA, 19 nt, Artificial Sequence
  Description of Artificial Sequence: Synthetic oligonucleotide
uggauaugauaccaaacag

SEQ ID NO: 24166 - RNA, 19 nt, Artificial Sequence
  Description of Artificial Sequence: Synthetic oligonucleotide
aaacaaugccacuccuugc

SEQ ID NO: 24167 - RNA, 19 nt, Artificial Sequence
  Description of Artificial Sequence: Synthetic oligonucleotide
aacucauuuaguuccauau

SEQ ID NO: 24168 - RNA, 19 nt, Artificial Sequence
  Description of Artificial Sequence: Synthetic oligonucleotide
uauauauauauaguuauau

SEQ ID NO: 24169 - RNA, 19 nt, Artificial Sequence
  Description of Artificial Sequence: Synthetic oligonucleotide
uggucugucaauuuauugc

SEQ ID NO: 24170 - RNA, 19 nt, Artificial Sequence
  Description of Artificial Sequence: Synthetic oligonucleotide
caaugugucagcuggaggc

SEQ ID NO: 24171 - RNA, 19 nt, Artificial Sequence
  Description of Artificial Sequence: Synthetic oligonucleotide
uuuauauuauauauauaua

SEQ ID NO: 24172 - RNA, 19 nt, Artificial Sequence
  Description of Artificial Sequence: Synthetic oligonucleotide
uguuaguccaacuaagguc

SEQ ID NO: 24173 - RNA, 19 nt, Artificial Sequence
  Description of Artificial Sequence: Synthetic oligonucleotide
uuuauuuggaacccguguc

SEQ ID NO: 24174 - RNA, 19 nt, Artificial Sequence
  Description of Artificial Sequence: Synthetic oligonucleotide
guauguggaaagaugaagg

SEQ ID NO: 24175 - RNA, 19 nt, Artificial Sequence
  Description of Artificial Sequence: Synthetic oligonucleotide
agcuuagaaauuucugugg

SEQ ID NO: 24176 - RNA, 19 nt, Artificial Sequence
  Description of Artificial Sequence: Synthetic oligonucleotide
uaguuauauauauauaauu

SEQ ID NO: 24177 - RNA, 19 nt, Artificial Sequence
  Description of Artificial Sequence: Synthetic oligonucleotide
uguggcuaaacucuaggcu

SEQ ID NO: 24178 - RNA, 19 nt, Artificial Sequence
  Description of Artificial Sequence: Synthetic oligonucleotide
agaucgacucuaaauaagc

SEQ ID NO: 24179 - RNA, 19 nt, Artificial Sequence
  Description of Artificial Sequence: Synthetic oligonucleotide
uguucgggcaggaaagagg

SEQ ID NO: 24180 - RNA, 19 nt, Artificial Sequence
  Description of Artificial Sequence: Synthetic oligonucleotide
uauugacccagaauaauuc

SEQ ID NO: 24181 - RNA, 19 nt, Artificial Sequence
  Description of Artificial Sequence: Synthetic oligonucleotide
cagcuauugaccaaccacg

SEQ ID NO: 24182 - RNA, 19 nt, Artificial Sequence
  Description of Artificial Sequence: Synthetic oligonucleotide
ucgacucuaaauaagcaaa

SEQ ID NO: 24183 - RNA, 19 nt, Artificial Sequence
  Description of Artificial Sequence: Synthetic oligonucleotide
uuucguaguaaaaugggua

SEQ ID NO: 24184 - RNA, 19 nt, Artificial Sequence
  Description of Artificial Sequence: Synthetic oligonucleotide
cauuagacaguacuuuugc

SEQ ID NO: 24185 - RNA, 19 nt, Artificial Sequence
  Description of Artificial Sequence: Synthetic oligonucleotide
ucuuucaagugccuuggcc

SEQ ID NO: 24186 - RNA, 19 nt, Artificial Sequence
  Description of Artificial Sequence: Synthetic oligonucleotide
uggagaucgacucuaaaua

SEQ ID NO: 24187 - RNA, 19 nt, Artificial Sequence
  Description of Artificial Sequence: Synthetic oligonucleotide
gauguuaguccaacuaagg

SEQ ID NO: 24188 - RNA, 19 nt, Artificial Sequence
  Description of Artificial Sequence: Synthetic oligonucleotide
caugucuuagcuaaucuuc

SEQ ID NO: 24189 - RNA, 19 nt, Artificial Sequence
  Description of Artificial Sequence: Synthetic oligonucleotide
acauuucguaguaaaaugg

SEQ ID NO: 24190 - RNA, 19 nt, Artificial Sequence
  Description of Artificial Sequence: Synthetic oligonucleotide
uugguuaugcaguauacau

SEQ ID NO: 24191 - RNA, 19 nt, Artificial Sequence
  Description of Artificial Sequence: Synthetic oligonucleotide
aguuauauauauauaauua

SEQ ID NO: 24192 - RNA, 19 nt, Artificial Sequence
  Description of Artificial Sequence: Synthetic oligonucleotide
aacacguaccaacacauuu

SEQ ID NO: 24193 - RNA, 19 nt, Artificial Sequence
  Description of Artificial Sequence: Synthetic oligonucleotide
ugcuaaaccagaagccuag

SEQ ID NO: 24194 - RNA, 19 nt, Artificial Sequence
  Description of Artificial Sequence: Synthetic oligonucleotide
acccagaauaauuccgacc

SEQ ID NO: 24195 - RNA, 19 nt, Artificial Sequence
  Description of Artificial Sequence: Synthetic oligonucleotide
uuugcauguaucacugaca

SEQ ID NO: 24196 - RNA, 19 nt, Artificial Sequence
  Description of Artificial Sequence: Synthetic oligonucleotide
agacauggaacaaagcuuc

SEQ ID NO: 24197 - RNA, 19 nt, Artificial Sequence
  Description of Artificial Sequence: Synthetic oligonucleotide
ucaaugugucagcuggagg

SEQ ID NO: 24198 - RNA, 19 nt, Artificial Sequence
  Description of Artificial Sequence: Synthetic oligonucleotide
aaggcuaccuaucucccug

SEQ ID NO: 24199 - RNA, 19 nt, Artificial Sequence
  Description of Artificial Sequence: Synthetic oligonucleotide
agaucgguugguuaugcag

SEQ ID NO: 24200 - RNA, 19 nt, Artificial Sequence
  Description of Artificial Sequence: Synthetic oligonucleotide
ucuguggauaaacucuccc

SEQ ID NO: 24201 - RNA, 19 nt, Artificial Sequence
  Description of Artificial Sequence: Synthetic oligonucleotide
uauugaccaaccacgucag

SEQ ID NO: 24202 - RNA, 19 nt, Artificial Sequence
  Description of Artificial Sequence: Synthetic oligonucleotide
uucguaguaaaauggguaa

SEQ ID NO: 24203 - RNA, 19 nt, Artificial Sequence
  Description of Artificial Sequence: Synthetic oligonucleotide
aguauguggaaagaugaag

SEQ ID NO: 24204 - RNA, 19 nt, Artificial Sequence
  Description of Artificial Sequence: Synthetic oligonucleotide
uccaauuaggacuuccccu

SEQ ID NO: 24205 - RNA, 19 nt, Artificial Sequence
  Description of Artificial Sequence: Synthetic oligonucleotide
cuauugaccaaccacguca

SEQ ID NO: 24206 - RNA, 19 nt, Artificial Sequence
  Description of Artificial Sequence: Synthetic oligonucleotide
auaucgcuccaacacguac

SEQ ID NO: 24207 - RNA, 19 nt, Artificial Sequence
  Description of Artificial Sequence: Synthetic oligonucleotide
uuccaauuaggacuucccc

SEQ ID NO: 24208 - RNA, 19 nt, Artificial Sequence
  Description of Artificial Sequence: Synthetic oligonucleotide
aauugcauggggauguuga

SEQ ID NO: 24209 - RNA, 19 nt, Artificial Sequence
  Description of Artificial Sequence: Synthetic oligonucleotide
ucugucaauuuauugcaac

SEQ ID NO: 24210 - RNA, 19 nt, Artificial Sequence
  Description of Artificial Sequence: Synthetic oligonucleotide
auauauauauaguuauaua

SEQ ID NO: 24211 - RNA, 19 nt, Artificial Sequence
  Description of Artificial Sequence: Synthetic oligonucleotide
uaugcuaaaccagaagccu

SEQ ID NO: 24212 - RNA, 19 nt, Artificial Sequence
  Description of Artificial Sequence: Synthetic oligonucleotide
agucugagcaugucuuagc

SEQ ID NO: 24213 - RNA, 19 nt, Artificial Sequence
  Description of Artificial Sequence: Synthetic oligonucleotide
uagcuaaucuucuguauca

SEQ ID NO: 24214 - RNA, 19 nt, Artificial Sequence
  Description of Artificial Sequence: Synthetic oligonucleotide
uaucgcuccaacacguacc

SEQ ID NO: 24215 - RNA, 19 nt, Artificial Sequence
  Description of Artificial Sequence: Synthetic oligonucleotide
gaauccuggguccugaaga

SEQ ID NO: 24216 - RNA, 19 nt, Artificial Sequence
  Description of Artificial Sequence: Synthetic oligonucleotide
uuuacagaaguuccccuaa

SEQ ID NO: 24217 - RNA, 19 nt, Artificial Sequence
  Description of Artificial Sequence: Synthetic oligonucleotide
aaugugucagcuggaggcg

SEQ ID NO: 24218 - RNA, 19 nt, Artificial Sequence
  Description of Artificial Sequence: Synthetic oligonucleotide
uggguaacggaauuuauuu

SEQ ID NO: 24219 - RNA, 19 nt, Artificial Sequence
  Description of Artificial Sequence: Synthetic oligonucleotide
ugcuaggcuauacaggccu

SEQ ID NO: 24220 - RNA, 19 nt, Artificial Sequence
  Description of Artificial Sequence: Synthetic oligonucleotide
aauaagucacuggcguuuc

SEQ ID NO: 24221 - RNA, 19 nt, Artificial Sequence
  Description of Artificial Sequence: Synthetic oligonucleotide
uaaggucgaggcuuacugg

SEQ ID NO: 24222 - RNA, 19 nt, Artificial Sequence
  Description of Artificial Sequence: Synthetic oligonucleotide
ccuuaguuaggugagaucg

SEQ ID NO: 24223 - RNA, 19 nt, Artificial Sequence
  Description of Artificial Sequence: Synthetic oligonucleotide
ugucaauuuauugcaaccu

SEQ ID NO: 24224 - RNA, 19 nt, Artificial Sequence
  Description of Artificial Sequence: Synthetic oligonucleotide
gauaaacucucccaaaggu

SEQ ID NO: 24225 - RNA, 19 nt, Artificial Sequence
  Description of Artificial Sequence: Synthetic oligonucleotide
aggugaaagaugcacaaau

SEQ ID NO: 24226 - RNA, 19 nt, Artificial Sequence
  Description of Artificial Sequence: Synthetic oligonucleotide
cuaaggucgaggcuuacug

SEQ ID NO: 24227 - RNA, 19 nt, Artificial Sequence
  Description of Artificial Sequence: Synthetic oligonucleotide
ugacccagaauaauuccga

SEQ ID NO: 24228 - RNA, 19 nt, Artificial Sequence
  Description of Artificial Sequence: Synthetic oligonucleotide
auguuaguccaacuaaggu

SEQ ID NO: 24229 - RNA, 19 nt, Artificial Sequence
  Description of Artificial Sequence: Synthetic oligonucleotide
guuauauauauauaauuau

SEQ ID NO: 24230 - RNA, 19 nt, Artificial Sequence
  Description of Artificial Sequence: Synthetic oligonucleotide
gucaauuuauugcaaccug

SEQ ID NO: 24231 - RNA, 19 nt, Artificial Sequence
  Description of Artificial Sequence: Synthetic oligonucleotide
cuuucaagugccuuggcca

SEQ ID NO: 24232 - RNA, 19 nt, Artificial Sequence
  Description of Artificial Sequence: Synthetic oligonucleotide
uaggaguuuuauuuauuga

SEQ ID NO: 24233 - RNA, 19 nt, Artificial Sequence
  Description of Artificial Sequence: Synthetic oligonucleotide
uguuagccccuccugaaga

SEQ ID NO: 24234 - RNA, 19 nt, Artificial Sequence
  Description of Artificial Sequence: Synthetic oligonucleotide
cacguaccaacacauuucg

SEQ ID NO: 24235 - RNA, 19 nt, Artificial Sequence
  Description of Artificial Sequence: Synthetic oligonucleotide
uuuauaccacgucuugcac

SEQ ID NO: 24236 - RNA, 19 nt, Artificial Sequence
  Description of Artificial Sequence: Synthetic oligonucleotide
auauauauaguuauauaua

SEQ ID NO: 24237 - RNA, 19 nt, Artificial Sequence
  Description of Artificial Sequence: Synthetic oligonucleotide
agcaagcaggcacugggac

SEQ ID NO: 24238 - RNA, 19 nt, Artificial Sequence
  Description of Artificial Sequence: Synthetic oligonucleotide
ucucccauucccaaguguc

SEQ ID NO: 24239 - RNA, 19 nt, Artificial Sequence
  Description of Artificial Sequence: Synthetic oligonucleotide
caguauagcagccucgaac

SEQ ID NO: 24240 - RNA, 19 nt, Artificial Sequence
  Description of Artificial Sequence: Synthetic oligonucleotide
guuccuagggcuguuagcc

SEQ ID NO: 24241 - RNA, 19 nt, Artificial Sequence
  Description of Artificial Sequence: Synthetic oligonucleotide
uagcaauucgccuuaggaa

SEQ ID NO: 24242 - RNA, 19 nt, Artificial Sequence
  Description of Artificial Sequence: Synthetic oligonucleotide
auuauaggucauuaauaau

SEQ ID NO: 24243 - RNA, 19 nt, Artificial Sequence
  Description of Artificial Sequence: Synthetic oligonucleotide
gaaauccaccgugaagucg

SEQ ID NO: 24244 - RNA, 19 nt, Artificial Sequence
  Description of Artificial Sequence: Synthetic oligonucleotide
uuugggaaagccugaggcu

SEQ ID NO: 24245 - RNA, 19 nt, Artificial Sequence
  Description of Artificial Sequence: Synthetic oligonucleotide
cuaccaaacacuaaugugu

SEQ ID NO: 24246 - RNA, 19 nt, Artificial Sequence
  Description of Artificial Sequence: Synthetic oligonucleotide
acuaaugugucuguaggcu

SEQ ID NO: 24247 - RNA, 19 nt, Artificial Sequence
  Description of Artificial Sequence: Synthetic oligonucleotide
gagaccgcagaccaggaac

SEQ ID NO: 24248 - RNA, 19 nt, Artificial Sequence
  Description of Artificial Sequence: Synthetic oligonucleotide
aucgacucuaaauaagcaa

SEQ ID NO: 24249 - RNA, 19 nt, Artificial Sequence
  Description of Artificial Sequence: Synthetic oligonucleotide
ugcuaucaaucuccuacag

SEQ ID NO: 24250 - RNA, 19 nt, Artificial Sequence
  Description of Artificial Sequence: Synthetic oligonucleotide
gccucuauugcuuuggcag

SEQ ID NO: 24251 - RNA, 19 nt, Artificial Sequence
  Description of Artificial Sequence: Synthetic oligonucleotide
auuagcaauucgccuuagg

SEQ ID NO: 24252 - RNA, 19 nt, Artificial Sequence
  Description of Artificial Sequence: Synthetic oligonucleotide
uauugcaaccugccgagaa

SEQ ID NO: 24253 - RNA, 19 nt, Artificial Sequence
  Description of Artificial Sequence: Synthetic oligonucleotide
gagcugcuaggcuauacag

SEQ ID NO: 24254 - RNA, 19 nt, Artificial Sequence
  Description of Artificial Sequence: Synthetic oligonucleotide
uggggacucaaccaguccu

SEQ ID NO: 24255 - RNA, 19 nt, Artificial Sequence
  Description of Artificial Sequence: Synthetic oligonucleotide
cuaaugugucuguaggcug

SEQ ID NO: 24256 - RNA, 19 nt, Artificial Sequence
  Description of Artificial Sequence: Synthetic oligonucleotide
acgauggccuuacaccuac

SEQ ID NO: 24257 - RNA, 19 nt, Artificial Sequence
  Description of Artificial Sequence: Synthetic oligonucleotide
uguccgaucuucaaugcua

SEQ ID NO: 24258 - RNA, 19 nt, Artificial Sequence
  Description of Artificial Sequence: Synthetic oligonucleotide
auaguuauauauauauaau

SEQ ID NO: 24259 - RNA, 19 nt, Artificial Sequence
  Description of Artificial Sequence: Synthetic oligonucleotide
gagaucgacucuaaauaag

SEQ ID NO: 24260 - RNA, 19 nt, Artificial Sequence
  Description of Artificial Sequence: Synthetic oligonucleotide
uggccuuacaccuacucaa

SEQ ID NO: 24261 - RNA, 19 nt, Artificial Sequence
  Description of Artificial Sequence: Synthetic oligonucleotide
gcugcuaggcuauacaggc

SEQ ID NO: 24262 - RNA, 19 nt, Artificial Sequence
  Description of Artificial Sequence: Synthetic oligonucleotide
gagagaggaucuuuggaca

SEQ ID NO: 24263 - RNA, 19 nt, Artificial Sequence
  Description of Artificial Sequence: Synthetic oligonucleotide
ucuuagcuaaucuucugua

SEQ ID NO: 24264 - RNA, 19 nt, Artificial Sequence
  Description of Artificial Sequence: Synthetic oligonucleotide
cugaggacacacauucuag

SEQ ID NO: 24265 - RNA, 19 nt, Artificial Sequence
  Description of Artificial Sequence: Synthetic oligonucleotide
agagugcaaauuugcaugu

SEQ ID NO: 24266 - RNA, 19 nt, Artificial Sequence
  Description of Artificial Sequence: Synthetic oligonucleotide
aguuugggaaagccugagg

SEQ ID NO: 24267 - RNA, 19 nt, Artificial Sequence
  Description of Artificial Sequence: Synthetic oligonucleotide
uaggaaagcccuguucggg

SEQ ID NO: 24268 - RNA, 19 nt, Artificial Sequence
  Description of Artificial Sequence: Synthetic oligonucleotide
aguccaacuaaggucgagg

SEQ ID NO: 24269 - RNA, 19 nt, Artificial Sequence
  Description of Artificial Sequence: Synthetic oligonucleotide
ugaccaaucugugugguaa

SEQ ID NO: 24270 - RNA, 19 nt, Artificial Sequence
  Description of Artificial Sequence: Synthetic oligonucleotide
cugagcaugucuuagcuaa

SEQ ID NO: 24271 - RNA, 19 nt, Artificial Sequence
  Description of Artificial Sequence: Synthetic oligonucleotide
ugcccuagagagaggaucu

SEQ ID NO: 24272 - RNA, 19 nt, Artificial Sequence
  Description of Artificial Sequence: Synthetic oligonucleotide
uugagcucaauucguugac

SEQ ID NO: 24273 - RNA, 19 nt, Artificial Sequence
  Description of Artificial Sequence: Synthetic oligonucleotide
uucuaauuauaggucauua

SEQ ID NO: 24274 - RNA, 19 nt, Artificial Sequence
  Description of Artificial Sequence: Synthetic oligonucleotide
auaccaaacagaaguacca

SEQ ID NO: 24275 - RNA, 19 nt, Artificial Sequence
  Description of Artificial Sequence: Synthetic oligonucleotide
uccuagggcuguuagcccc

SEQ ID NO: 24276 - RNA, 19 nt, Artificial Sequence
  Description of Artificial Sequence: Synthetic oligonucleotide
uuauagaguuucucucgcu

SEQ ID NO: 24277 - RNA, 19 nt, Artificial Sequence
  Description of Artificial Sequence: Synthetic oligonucleotide
gacaaucugacacccgguc

SEQ ID NO: 24278 - RNA, 19 nt, Artificial Sequence
  Description of Artificial Sequence: Synthetic oligonucleotide
agaggcacucucccggcac

SEQ ID NO: 24279 - RNA, 19 nt, Artificial Sequence
  Description of Artificial Sequence: Synthetic oligonucleotide
aaaauggguaacggaauuu

SEQ ID NO: 24280 - RNA, 19 nt, Artificial Sequence
  Description of Artificial Sequence: Synthetic oligonucleotide
uggcuaaacucuaggcuga

SEQ ID NO: 24281 - RNA, 19 nt, Artificial Sequence
  Description of Artificial Sequence: Synthetic oligonucleotide
ucgccuuaggaagaacagg

SEQ ID NO: 24282 - RNA, 19 nt, Artificial Sequence
  Description of Artificial Sequence: Synthetic oligonucleotide
uggggaacuuuuagaaaac

SEQ ID NO: 24283 - RNA, 19 nt, Artificial Sequence
  Description of Artificial Sequence: Synthetic oligonucleotide
uaacggaauuuauuuggaa

SEQ ID NO: 24284 - RNA, 19 nt, Artificial Sequence
  Description of Artificial Sequence: Synthetic oligonucleotide
guccaacuaaggucgaggc

SEQ ID NO: 24285 - RNA, 19 nt, Artificial Sequence
  Description of Artificial Sequence: Synthetic oligonucleotide
uccaacuaaggucgaggcu

SEQ ID NO: 24286 - RNA, 19 nt, Artificial Sequence
  Description of Artificial Sequence: Synthetic oligonucleotide
ugcucaacacccaggguuc

SEQ ID NO: 24287 - RNA, 19 nt, Artificial Sequence
  Description of Artificial Sequence: Synthetic oligonucleotide
uccuacagucugaggaagc

SEQ ID NO: 24288 - RNA, 19 nt, Artificial Sequence
  Description of Artificial Sequence: Synthetic oligonucleotide
ccaaccugaggaaacacgc

SEQ ID NO: 24289 - RNA, 19 nt, Artificial Sequence
  Description of Artificial Sequence: Synthetic oligonucleotide
ugacccgcaaugaugucaa

SEQ ID NO: 24290 - RNA, 19 nt, Artificial Sequence
  Description of Artificial Sequence: Synthetic oligonucleotide
aggugcagacaagaaaauc

SEQ ID NO: 24291 - RNA, 19 nt, Artificial Sequence
  Description of Artificial Sequence: Synthetic oligonucleotide
agacauaugcuccccuccu

SEQ ID NO: 24292 - RNA, 19 nt, Artificial Sequence
  Description of Artificial Sequence: Synthetic oligonucleotide
agacgacaaacaaacuuag

SEQ ID NO: 24293 - RNA, 19 nt, Artificial Sequence
  Description of Artificial Sequence: Synthetic oligonucleotide
aggacacacauucuaggaa

SEQ ID NO: 24294 - RNA, 19 nt, Artificial Sequence
  Description of Artificial Sequence: Synthetic oligonucleotide
auggccuuacaccuacuca

SEQ ID NO: 24295 - RNA, 19 nt, Artificial Sequence
  Description of Artificial Sequence: Synthetic oligonucleotide
gauggccuuacaccuacuc

SEQ ID NO: 24296 - RNA, 19 nt, Artificial Sequence
  Description of Artificial Sequence: Synthetic oligonucleotide
aacacucauuagacaguac

SEQ ID NO: 24297 - RNA, 19 nt, Artificial Sequence
  Description of Artificial Sequence: Synthetic oligonucleotide
agaguauaacggaggagag

SEQ ID NO: 24298 - RNA, 19 nt, Artificial Sequence
  Description of Artificial Sequence: Synthetic oligonucleotide
ucgcauacauucacagagu

SEQ ID NO: 24299 - RNA, 19 nt, Artificial Sequence
  Description of Artificial Sequence: Synthetic oligonucleotide
gguuaugcaguauacauau

SEQ ID NO: 24300 - RNA, 19 nt, Artificial Sequence
  Description of Artificial Sequence: Synthetic oligonucleotide
ggaauuuauuuggaacccg

SEQ ID NO: 24301 - RNA, 19 nt, Artificial Sequence
  Description of Artificial Sequence: Synthetic oligonucleotide
ugagaucgguugguuaugc

SEQ ID NO: 24302 - RNA, 19 nt, Artificial Sequence
  Description of Artificial Sequence: Synthetic oligonucleotide
gaccaaccacgucagcugc

SEQ ID NO: 24303 - RNA, 19 nt, Artificial Sequence
  Description of Artificial Sequence: Synthetic oligonucleotide
uggaacccguguccgaucu

SEQ ID NO: 24304 - RNA, 19 nt, Artificial Sequence
  Description of Artificial Sequence: Synthetic oligonucleotide
uuuugcggcugagguagcg

SEQ ID NO: 24305 - RNA, 19 nt, Artificial Sequence
  Description of Artificial Sequence: Synthetic oligonucleotide
aucgcuccaacacguacca

SEQ ID NO: 24306 - RNA, 19 nt, Artificial Sequence
  Description of Artificial Sequence: Synthetic oligonucleotide
gaucgacucuaaauaagca

SEQ ID NO: 24307 - RNA, 19 nt, Artificial Sequence
  Description of Artificial Sequence: Synthetic oligonucleotide
gacauaugcuccccuccug

SEQ ID NO: 24308 - RNA, 19 nt, Artificial Sequence
  Description of Artificial Sequence: Synthetic oligonucleotide
aucaccaagugauuuuaua

SEQ ID NO: 24309 - RNA, 19 nt, Artificial Sequence
  Description of Artificial Sequence: Synthetic oligonucleotide
uuugcucaacacccagggu

SEQ ID NO: 24310 - RNA, 19 nt, Artificial Sequence
  Description of Artificial Sequence: Synthetic oligonucleotide
ucguuuaucacagcaccau

SEQ ID NO: 24311 - RNA, 19 nt, Artificial Sequence
  Description of Artificial Sequence: Synthetic oligonucleotide
uugaucaaccucuccucuc

SEQ ID NO: 24312 - RNA, 19 nt, Artificial Sequence
  Description of Artificial Sequence: Synthetic oligonucleotide
gaaguuccccuaacugagg

SEQ ID NO: 24313 - RNA, 19 nt, Artificial Sequence
  Description of Artificial Sequence: Synthetic oligonucleotide
auucgccuuaggaagaaca

SEQ ID NO: 24314 - RNA, 19 nt, Artificial Sequence
  Description of Artificial Sequence: Synthetic oligonucleotide
ggauaugauaccaaacaga

SEQ ID NO: 24315 - RNA, 19 nt, Artificial Sequence
  Description of Artificial Sequence: Synthetic oligonucleotide
agucaguauagcagccucg

SEQ ID NO: 24316 - RNA, 19 nt, Artificial Sequence
  Description of Artificial Sequence: Synthetic oligonucleotide
aauggguaacggaauuuau

SEQ ID NO: 24317 - RNA, 19 nt, Artificial Sequence
  Description of Artificial Sequence: Synthetic oligonucleotide
agcugcuaggcuauacagg

SEQ ID NO: 24318 - RNA, 19 nt, Artificial Sequence
  Description of Artificial Sequence: Synthetic oligonucleotide
ucguaguaaaauggguaac

SEQ ID NO: 24319 - RNA, 19 nt, Artificial Sequence
  Description of Artificial Sequence: Synthetic oligonucleotide
auauauauauauaguuaua

SEQ ID NO: 24320 - RNA, 19 nt, Artificial Sequence
  Description of Artificial Sequence: Synthetic oligonucleotide
guuccccuaacugaggcac

SEQ ID NO: 24321 - RNA, 19 nt, Artificial Sequence
  Description of Artificial Sequence: Synthetic oligonucleotide
gacccagaauaauuccgac

SEQ ID NO: 24322 - RNA, 19 nt, Artificial Sequence
  Description of Artificial Sequence: Synthetic oligonucleotide
gaucuguuugcauccucga

SEQ ID NO: 24323 - RNA, 19 nt, Artificial Sequence
  Description of Artificial Sequence: Synthetic oligonucleotide
acauuagcaauucgccuua

SEQ ID NO: 24324 - RNA, 19 nt, Artificial Sequence
  Description of Artificial Sequence: Synthetic oligonucleotide
auauaguuauauauauaua

SEQ ID NO: 24325 - RNA, 19 nt, Artificial Sequence
  Description of Artificial Sequence: Synthetic oligonucleotide
cuuucgucuccauccugag

SEQ ID NO: 24326 - RNA, 19 nt, Artificial Sequence
  Description of Artificial Sequence: Synthetic oligonucleotide
ggaaugacgaagguauagc

SEQ ID NO: 24327 - RNA, 19 nt, Artificial Sequence
  Description of Artificial Sequence: Synthetic oligonucleotide
auauauaguuauauauaua

SEQ ID NO: 24328 - RNA, 19 nt, Artificial Sequence
  Description of Artificial Sequence: Synthetic oligonucleotide
agcuaaucuucuguaucag

SEQ ID NO: 24329 - RNA, 19 nt, Artificial Sequence
  Description of Artificial Sequence: Synthetic oligonucleotide
ugguagauguuaguccaac

SEQ ID NO: 24330 - RNA, 19 nt, Artificial Sequence
  Description of Artificial Sequence: Synthetic oligonucleotide
gcaaggaccaacccuuacc

SEQ ID NO: 24331 - RNA, 19 nt, Artificial Sequence
  Description of Artificial Sequence: Synthetic oligonucleotide
cuaggcuauacaggccugg

SEQ ID NO: 24332 - RNA, 19 nt, Artificial Sequence
  Description of Artificial Sequence: Synthetic oligonucleotide
uugggcgguucacacuuca

SEQ ID NO: 24333 - RNA, 19 nt, Artificial Sequence
  Description of Artificial Sequence: Synthetic oligonucleotide
ugcaaggaccaacccuuac

SEQ ID NO: 24334 - RNA, 19 nt, Artificial Sequence
  Description of Artificial Sequence: Synthetic oligonucleotide
uuuggaacccguguccgau

SEQ ID NO: 24335 - RNA, 19 nt, Artificial Sequence
  Description of Artificial Sequence: Synthetic oligonucleotide
cuaccuaucucccuggagu

SEQ ID NO: 24336 - RNA, 19 nt, Artificial Sequence
  Description of Artificial Sequence: Synthetic oligonucleotide
gcucaauucguugacaauc

SEQ ID NO: 24337 - RNA, 19 nt, Artificial Sequence
  Description of Artificial Sequence: Synthetic oligonucleotide
uuaguccaacuaaggucga

SEQ ID NO: 24338 - RNA, 19 nt, Artificial Sequence
  Description of Artificial Sequence: Synthetic oligonucleotide
uuccuuaguuaggugagau

SEQ ID NO: 24339 - RNA, 19 nt, Artificial Sequence
  Description of Artificial Sequence: Synthetic oligonucleotide
ugagcucaauucguugaca

SEQ ID NO: 24340 - RNA, 19 nt, Artificial Sequence
  Description of Artificial Sequence: Synthetic oligonucleotide
uccuuaguuaggugagauc

SEQ ID NO: 24341 - RNA, 19 nt, Artificial Sequence
  Description of Artificial Sequence: Synthetic oligonucleotide
auuuuauauuauauauaua

SEQ ID NO: 24342 - RNA, 19 nt, Artificial Sequence
  Description of Artificial Sequence: Synthetic oligonucleotide
uggcuuccaauuaggacuu

SEQ ID NO: 24343 - RNA, 19 nt, Artificial Sequence
  Description of Artificial Sequence: Synthetic oligonucleotide
aacuaaggucgaggcuuac

SEQ ID NO: 24344 - RNA, 19 nt, Artificial Sequence
  Description of Artificial Sequence: Synthetic oligonucleotide
aggcaaggcuaccuaucuc

SEQ ID NO: 24345 - RNA, 19 nt, Artificial Sequence
  Description of Artificial Sequence: Synthetic oligonucleotide
uuccuagggcuguuagccc

SEQ ID NO: 24346 - RNA, 19 nt, Artificial Sequence
  Description of Artificial Sequence: Synthetic oligonucleotide
ggcgguucacacuucagac

SEQ ID NO: 24347 - RNA, 19 nt, Artificial Sequence
  Description of Artificial Sequence: Synthetic oligonucleotide
ggguaacggaauuuauuug

SEQ ID NO: 24348 - RNA, 19 nt, Artificial Sequence
  Description of Artificial Sequence: Synthetic oligonucleotide
cacugacaaacucuggcca

SEQ ID NO: 24349 - RNA, 19 nt, Artificial Sequence
  Description of Artificial Sequence: Synthetic oligonucleotide
aggcuaccuaucucccugg

SEQ ID NO: 24350 - RNA, 19 nt, Artificial Sequence
  Description of Artificial Sequence: Synthetic oligonucleotide
ggacacacauucuaggaaa

SEQ ID NO: 24351 - RNA, 19 nt, Artificial Sequence
  Description of Artificial Sequence: Synthetic oligonucleotide
auaacggaggagagacgcg

SEQ ID NO: 24352 - RNA, 19 nt, Artificial Sequence
  Description of Artificial Sequence: Synthetic oligonucleotide
ugcuugagcucaauucguu

SEQ ID NO: 24353 - RNA, 19 nt, Artificial Sequence
  Description of Artificial Sequence: Synthetic oligonucleotide
guacgauggccuuacaccu

SEQ ID NO: 24354 - RNA, 19 nt, Artificial Sequence
  Description of Artificial Sequence: Synthetic oligonucleotide
uugguagauguuaguccaa

SEQ ID NO: 24355 - RNA, 19 nt, Artificial Sequence
  Description of Artificial Sequence: Synthetic oligonucleotide
ucaguauagcagccucgaa

SEQ ID NO: 24356 - RNA, 19 nt, Artificial Sequence
  Description of Artificial Sequence: Synthetic oligonucleotide
gaacacucauuagacagua

SEQ ID NO: 24357 - RNA, 19 nt, Artificial Sequence
  Description of Artificial Sequence: Synthetic oligonucleotide
aggacacguggaaaaggac

SEQ ID NO: 24358 - RNA, 19 nt, Artificial Sequence
  Description of Artificial Sequence: Synthetic oligonucleotide
augcaggacaaaugaacuu

SEQ ID NO: 24359 - RNA, 19 nt, Artificial Sequence
  Description of Artificial Sequence: Synthetic oligonucleotide
auuggccucagagccugcg

SEQ ID NO: 24360 - RNA, 19 nt, Artificial Sequence
  Description of Artificial Sequence: Synthetic oligonucleotide
gggucaugggagcauacug

SEQ ID NO: 24361 - RNA, 19 nt, Artificial Sequence
  Description of Artificial Sequence: Synthetic oligonucleotide
uacaccuacucaagucaau

SEQ ID NO: 24362 - RNA, 19 nt, Artificial Sequence
  Description of Artificial Sequence: Synthetic oligonucleotide
ggggcuugaagaagggugg

SEQ ID NO: 24363 - RNA, 19 nt, Artificial Sequence
  Description of Artificial Sequence: Synthetic oligonucleotide
aucuguuugcauccucgaa

SEQ ID NO: 24364 - RNA, 19 nt, Artificial Sequence
  Description of Artificial Sequence: Synthetic oligonucleotide
gacgaagguauagcccugc

SEQ ID NO: 24365 - RNA, 19 nt, Artificial Sequence
  Description of Artificial Sequence: Synthetic oligonucleotide
ggcaaugaaauggagcauc

SEQ ID NO: 24366 - RNA, 19 nt, Artificial Sequence
  Description of Artificial Sequence: Synthetic oligonucleotide
cacucuaaauauugaccca

SEQ ID NO: 24367 - RNA, 19 nt, Artificial Sequence
  Description of Artificial Sequence: Synthetic oligonucleotide
guaagugggaagggguaug

SEQ ID NO: 24368 - RNA, 19 nt, Artificial Sequence
  Description of Artificial Sequence: Synthetic oligonucleotide
gaguauaacggaggagaga

SEQ ID NO: 24369 - RNA, 19 nt, Artificial Sequence
  Description of Artificial Sequence: Synthetic oligonucleotide
cucuauugcuuuggcagug

SEQ ID NO: 24370 - RNA, 19 nt, Artificial Sequence
  Description of Artificial Sequence: Synthetic oligonucleotide
acgcgcaacggacaccaug

SEQ ID NO: 24371 - RNA, 19 nt, Artificial Sequence
  Description of Artificial Sequence: Synthetic oligonucleotide
acccgcaaugaugucaaug

SEQ ID NO: 24372 - RNA, 19 nt, Artificial Sequence
  Description of Artificial Sequence: Synthetic oligonucleotide
accauuuauaccacgucuu

SEQ ID NO: 24373 - RNA, 19 nt, Artificial Sequence
  Description of Artificial Sequence: Synthetic oligonucleotide
ugggcgguucacacuucag

SEQ ID NO: 24374 - RNA, 19 nt, Artificial Sequence
  Description of Artificial Sequence: Synthetic oligonucleotide
agccgcuagaaggaggucu

SEQ ID NO: 24375 - RNA, 19 nt, Artificial Sequence
  Description of Artificial Sequence: Synthetic oligonucleotide
gguggauaugauaccaaac

SEQ ID NO: 24376 - RNA, 19 nt, Artificial Sequence
  Description of Artificial Sequence: Synthetic oligonucleotide
gaucgguugguuaugcagu

SEQ ID NO: 24377 - RNA, 19 nt, Artificial Sequence
  Description of Artificial Sequence: Synthetic oligonucleotide
cugcuaggcuauacaggcc

SEQ ID NO: 24378 - RNA, 19 nt, Artificial Sequence
  Description of Artificial Sequence: Synthetic oligonucleotide
uccccuuaaaaggcaccag

SEQ ID NO: 24379 - RNA, 19 nt, Artificial Sequence
  Description of Artificial Sequence: Synthetic oligonucleotide
gguagcggaagacagacau

SEQ ID NO: 24380 - RNA, 19 nt, Artificial Sequence
  Description of Artificial Sequence: Synthetic oligonucleotide
aaucaccaagugauuuuau

SEQ ID NO: 24381 - RNA, 19 nt, Artificial Sequence
  Description of Artificial Sequence: Synthetic oligonucleotide
uaguccaacuaaggucgag

SEQ ID NO: 24382 - RNA, 19 nt, Artificial Sequence
  Description of Artificial Sequence: Synthetic oligonucleotide
gagcaugucuuagcuaauc

SEQ ID NO: 24383 - RNA, 19 nt, Artificial Sequence
  Description of Artificial Sequence: Synthetic oligonucleotide
guauagcagccucgaacac

SEQ ID NO: 24384 - RNA, 19 nt, Artificial Sequence
  Description of Artificial Sequence: Synthetic oligonucleotide
cauccucgaaggucaauca

SEQ ID NO: 24385 - RNA, 19 nt, Artificial Sequence
  Description of Artificial Sequence: Synthetic oligonucleotide
aagaagccgggagaguaua

SEQ ID NO: 24386 - RNA, 19 nt, Artificial Sequence
  Description of Artificial Sequence: Synthetic oligonucleotide
agcuauugaccaaccacgu

SEQ ID NO: 24387 - RNA, 19 nt, Artificial Sequence
  Description of Artificial Sequence: Synthetic oligonucleotide
gucaguauagcagccucga

SEQ ID NO: 24388 - RNA, 19 nt, Artificial Sequence
  Description of Artificial Sequence: Synthetic oligonucleotide
caccauuuauaccacgucu

SEQ ID NO: 24389 - RNA, 19 nt, Artificial Sequence
  Description of Artificial Sequence: Synthetic oligonucleotide
ggacacguggaaaaggaca

SEQ ID NO: 24390 - RNA, 19 nt, Artificial Sequence
  Description of Artificial Sequence: Synthetic oligonucleotide
ugguuaaugccagggucaa

SEQ ID NO: 24391 - RNA, 19 nt, Artificial Sequence
  Description of Artificial Sequence: Synthetic oligonucleotide
aucugccgccauccugagc

SEQ ID NO: 24392 - RNA, 19 nt, Artificial Sequence
  Description of Artificial Sequence: Synthetic oligonucleotide
aucgguugguuaugcagua

SEQ ID NO: 24393 - RNA, 19 nt, Artificial Sequence
  Description of Artificial Sequence: Synthetic oligonucleotide
caaggaccaacccuuaccu

SEQ ID NO: 24394 - RNA, 19 nt, Artificial Sequence
  Description of Artificial Sequence: Synthetic oligonucleotide
acggacaccaugaggagaa

SEQ ID NO: 24395 - RNA, 19 nt, Artificial Sequence
  Description of Artificial Sequence: Synthetic oligonucleotide
gucgaggcuuacuggcugc

SEQ ID NO: 24396 - RNA, 19 nt, Artificial Sequence
  Description of Artificial Sequence: Synthetic oligonucleotide
acuaaggucgaggcuuacu

SEQ ID NO: 24397 - RNA, 19 nt, Artificial Sequence
  Description of Artificial Sequence: Synthetic oligonucleotide
gugguaaaacucuugcuuu

SEQ ID NO: 24398 - RNA, 19 nt, Artificial Sequence
  Description of Artificial Sequence: Synthetic oligonucleotide
ugcauguaucacugacaaa

SEQ ID NO: 24399 - RNA, 19 nt, Artificial Sequence
  Description of Artificial Sequence: Synthetic oligonucleotide
gaagaccaauggaauggca

SEQ ID NO: 24400 - RNA, 19 nt, Artificial Sequence
  Description of Artificial Sequence: Synthetic oligonucleotide
cucaaccaguccucuguuc

SEQ ID NO: 24401 - RNA, 19 nt, Artificial Sequence
  Description of Artificial Sequence: Synthetic oligonucleotide
ggaggcgaagacucacucc

SEQ ID NO: 24402 - RNA, 19 nt, Artificial Sequence
  Description of Artificial Sequence: Synthetic oligonucleotide
gguugguuaugcaguauac

SEQ ID NO: 24403 - RNA, 19 nt, Artificial Sequence
  Description of Artificial Sequence: Synthetic oligonucleotide
gagaucgguugguuaugca

SEQ ID NO: 24404 - RNA, 19 nt, Artificial Sequence
  Description of Artificial Sequence: Synthetic oligonucleotide
ggguacgauggccuuacac

SEQ ID NO: 24405 - RNA, 19 nt, Artificial Sequence
  Description of Artificial Sequence: Synthetic oligonucleotide
cuuagcuaaucuucuguau

SEQ ID NO: 24406 - RNA, 19 nt, Artificial Sequence
  Description of Artificial Sequence: Synthetic oligonucleotide
agcuagggcucuuggccca

SEQ ID NO: 24407 - RNA, 19 nt, Artificial Sequence
  Description of Artificial Sequence: Synthetic oligonucleotide
guaaaauggguaacggaau

SEQ ID NO: 24408 - RNA, 19 nt, Artificial Sequence
  Description of Artificial Sequence: Synthetic oligonucleotide
uuauugcaaccugccgaga

SEQ ID NO: 24409 - RNA, 19 nt, Artificial Sequence
  Description of Artificial Sequence: Synthetic oligonucleotide
ccaugggugagaagcuagg

SEQ ID NO: 24410 - RNA, 19 nt, Artificial Sequence
  Description of Artificial Sequence: Synthetic oligonucleotide
gucguuuaucacagcacca

SEQ ID NO: 24411 - RNA, 19 nt, Artificial Sequence
  Description of Artificial Sequence: Synthetic oligonucleotide
ggucgaggcuuacuggcug

SEQ ID NO: 24412 - RNA, 19 nt, Artificial Sequence
  Description of Artificial Sequence: Synthetic oligonucleotide
acucaaccaguccucuguu

SEQ ID NO: 24413 - RNA, 19 nt, Artificial Sequence
  Description of Artificial Sequence: Synthetic oligonucleotide
cucccauucccaaguguca

SEQ ID NO: 24414 - RNA, 19 nt, Artificial Sequence
  Description of Artificial Sequence: Synthetic oligonucleotide
aaaguccaacuagcuuccu

SEQ ID NO: 24415 - RNA, 19 nt, Artificial Sequence
  Description of Artificial Sequence: Synthetic oligonucleotide
ggaggucuuuuaguccugg

SEQ ID NO: 24416 - RNA, 19 nt, Artificial Sequence
  Description of Artificial Sequence: Synthetic oligonucleotide
cauugagaccugccagguc

SEQ ID NO: 24417 - RNA, 19 nt, Artificial Sequence
  Description of Artificial Sequence: Synthetic oligonucleotide
agagaccgcagaccaggaa

SEQ ID NO: 24418 - RNA, 19 nt, Artificial Sequence
  Description of Artificial Sequence: Synthetic oligonucleotide
ccgggagaguauaacggag

SEQ ID NO: 24419 - RNA, 19 nt, Artificial Sequence
  Description of Artificial Sequence: Synthetic oligonucleotide
ucgaggcuuacuggcugcc

SEQ ID NO: 24420 - RNA, 19 nt, Artificial Sequence
  Description of Artificial Sequence: Synthetic oligonucleotide
ggacaccaugaggagaacc

SEQ ID NO: 24421 - RNA, 19 nt, Artificial Sequence
  Description of Artificial Sequence: Synthetic oligonucleotide
augcuaaaccagaagccua

SEQ ID NO: 24422 - RNA, 19 nt, Artificial Sequence
  Description of Artificial Sequence: Synthetic oligonucleotide
aggcaaguggggacucaac

SEQ ID NO: 24423 - RNA, 19 nt, Artificial Sequence
  Description of Artificial Sequence: Synthetic oligonucleotide
aggucugauccuacagucu

SEQ ID NO: 24424 - RNA, 19 nt, Artificial Sequence
  Description of Artificial Sequence: Synthetic oligonucleotide
gaaacacgcugcuccuucu

SEQ ID NO: 24425 - RNA, 19 nt, Artificial Sequence
  Description of Artificial Sequence: Synthetic oligonucleotide
gcauccucgaaggucaauc

SEQ ID NO: 24426 - RNA, 19 nt, Artificial Sequence
  Description of Artificial Sequence: Synthetic oligonucleotide
caagggcaucaucagucca

SEQ ID NO: 24427 - RNA, 19 nt, Artificial Sequence
  Description of Artificial Sequence: Synthetic oligonucleotide
cucccggcacaaucccugc

SEQ ID NO: 24428 - RNA, 19 nt, Artificial Sequence
  Description of Artificial Sequence: Synthetic oligonucleotide
cguaccaacacauuucgua

SEQ ID NO: 24429 - RNA, 19 nt, Artificial Sequence
  Description of Artificial Sequence: Synthetic oligonucleotide
gcaccauuuauaccacguc

SEQ ID NO: 24430 - RNA, 19 nt, Artificial Sequence
  Description of Artificial Sequence: Synthetic oligonucleotide
guaccaccaaaauccacau

SEQ ID NO: 24431 - RNA, 19 nt, Artificial Sequence
  Description of Artificial Sequence: Synthetic oligonucleotide
cacugagagcuugggguac

SEQ ID NO: 24432 - RNA, 19 nt, Artificial Sequence
  Description of Artificial Sequence: Synthetic oligonucleotide
ccuagaggagccuggccug

SEQ ID NO: 24433 - RNA, 19 nt, Artificial Sequence
  Description of Artificial Sequence: Synthetic oligonucleotide
gccugucuuagaauaugcc

SEQ ID NO: 24434 - RNA, 19 nt, Artificial Sequence
  Description of Artificial Sequence: Synthetic oligonucleotide
gggcgguucacacuucaga

SEQ ID NO: 24435 - RNA, 19 nt, Artificial Sequence
  Description of Artificial Sequence: Synthetic oligonucleotide
caucugccgccauccugag

SEQ ID NO: 24436 - RNA, 19 nt, Artificial Sequence
  Description of Artificial Sequence: Synthetic oligonucleotide
guagcggaagacagacauc

SEQ ID NO: 24437 - RNA, 19 nt, Artificial Sequence
  Description of Artificial Sequence: Synthetic oligonucleotide
ggucuggucugucaauuua

SEQ ID NO: 24438 - RNA, 19 nt, Artificial Sequence
  Description of Artificial Sequence: Synthetic oligonucleotide
gccgggagaguauaacgga

SEQ ID NO: 24439 - RNA, 19 nt, Artificial Sequence
  Description of Artificial Sequence: Synthetic oligonucleotide
ccguucaaugcaaaguaaa

SEQ ID NO: 24440 - RNA, 19 nt, Artificial Sequence
  Description of Artificial Sequence: Synthetic oligonucleotide
caggaaaguggggugguaa

SEQ ID NO: 24441 - RNA, 19 nt, Artificial Sequence
  Description of Artificial Sequence: Synthetic oligonucleotide
gcaaggcuaccuaucuccc

SEQ ID NO: 24442 - RNA, 19 nt, Artificial Sequence
  Description of Artificial Sequence: Synthetic oligonucleotide
gguagauguuaguccaacu

SEQ ID NO: 24443 - RNA, 19 nt, Artificial Sequence
  Description of Artificial Sequence: Synthetic oligonucleotide
cacuggcguuucuucaaca

SEQ ID NO: 24444 - RNA, 19 nt, Artificial Sequence
  Description of Artificial Sequence: Synthetic oligonucleotide
gacaggccguucaaugcaa

SEQ ID NO: 24445 - RNA, 19 nt, Artificial Sequence
  Description of Artificial Sequence: Synthetic oligonucleotide
ccuggaguuugcucagaac

SEQ ID NO: 24446 - RNA, 19 nt, Artificial Sequence
  Description of Artificial Sequence: Synthetic oligonucleotide
caacuaaggucgaggcuua

SEQ ID NO: 24447 - RNA, 19 nt, Artificial Sequence
  Description of Artificial Sequence: Synthetic oligonucleotide
cccgcaaugaugucaaugu

SEQ ID NO: 24448 - RNA, 19 nt, Artificial Sequence
  Description of Artificial Sequence: Synthetic oligonucleotide
ucgguugguuaugcaguau

SEQ ID NO: 24449 - RNA, 19 nt, Artificial Sequence
  Description of Artificial Sequence: Synthetic oligonucleotide
ugagagcuugggguacgau

SEQ ID NO: 24450 - RNA, 19 nt, Artificial Sequence
  Description of Artificial Sequence: Synthetic oligonucleotide
gggugguaagugggaaggg

SEQ ID NO: 24451 - RNA, 19 nt, Artificial Sequence
  Description of Artificial Sequence: Synthetic oligonucleotide
cuugggcgguucacacuuc

SEQ ID NO: 24452 - RNA, 19 nt, Artificial Sequence
  Description of Artificial Sequence: Synthetic oligonucleotide
cauaucgcuccaacacgua

SEQ ID NO: 24453 - RNA, 19 nt, Artificial Sequence
  Description of Artificial Sequence: Synthetic oligonucleotide
cccuaacugaggcacucug

SEQ ID NO: 24454 - RNA, 19 nt, Artificial Sequence
  Description of Artificial Sequence: Synthetic oligonucleotide
ugccccggccauucagccu

SEQ ID NO: 24455 - RNA, 19 nt, Artificial Sequence
  Description of Artificial Sequence: Synthetic oligonucleotide
cccaggguucuuuacagaa

SEQ ID NO: 24456 - RNA, 19 nt, Artificial Sequence
  Description of Artificial Sequence: Synthetic oligonucleotide
aggucgaggcuuacuggcu

SEQ ID NO: 24457 - RNA, 19 nt, Artificial Sequence
  Description of Artificial Sequence: Synthetic oligonucleotide
cguguccgaucuucaaugc

SEQ ID NO: 24458 - RNA, 19 nt, Artificial Sequence
  Description of Artificial Sequence: Synthetic oligonucleotide
gcaauucgccuuaggaaga

SEQ ID NO: 24459 - RNA, 19 nt, Artificial Sequence
  Description of Artificial Sequence: Synthetic oligonucleotide
caaccugaggaaacacgcu

SEQ ID NO: 24460 - RNA, 19 nt, Artificial Sequence
  Description of Artificial Sequence: Synthetic oligonucleotide
gcgagcuggaugugcugag

SEQ ID NO: 24461 - RNA, 19 nt, Artificial Sequence
  Description of Artificial Sequence: Synthetic oligonucleotide
caauucgccuuaggaagaa

SEQ ID NO: 24462 - RNA, 19 nt, Artificial Sequence
  Description of Artificial Sequence: Synthetic oligonucleotide
acguaccaacacauuucgu

SEQ ID NO: 24463 - RNA, 19 nt, Artificial Sequence
  Description of Artificial Sequence: Synthetic oligonucleotide
agaagccgggagaguauaa

SEQ ID NO: 24464 - RNA, 19 nt, Artificial Sequence
  Description of Artificial Sequence: Synthetic oligonucleotide
ugcauccucgaaggucaau

SEQ ID NO: 24465 - RNA, 19 nt, Artificial Sequence
  Description of Artificial Sequence: Synthetic oligonucleotide
gcagauuggaagaaacaau

SEQ ID NO: 24466 - RNA, 19 nt, Artificial Sequence
  Description of Artificial Sequence: Synthetic oligonucleotide
gaccaacccuuaccucuaa

SEQ ID NO: 24467 - RNA, 19 nt, Artificial Sequence
  Description of Artificial Sequence: Synthetic oligonucleotide
agcggaagacagacaucca

SEQ ID NO: 24468 - RNA, 19 nt, Artificial Sequence
  Description of Artificial Sequence: Synthetic oligonucleotide
cucagagggcuaugcuaaa

SEQ ID NO: 24469 - RNA, 19 nt, Artificial Sequence
  Description of Artificial Sequence: Synthetic oligonucleotide
ucccuggaguuugcucaga

SEQ ID NO: 24470 - RNA, 19 nt, Artificial Sequence
  Description of Artificial Sequence: Synthetic oligonucleotide
caccuacucaagucaauuu

SEQ ID NO: 24471 - RNA, 19 nt, Artificial Sequence
  Description of Artificial Sequence: Synthetic oligonucleotide
ccaacuaaggucgaggcuu

SEQ ID NO: 24472 - RNA, 19 nt, Artificial Sequence
  Description of Artificial Sequence: Synthetic oligonucleotide
acccggucacccagaaaga

SEQ ID NO: 24473 - RNA, 19 nt, Artificial Sequence
  Description of Artificial Sequence: Synthetic oligonucleotide
aggcgaagacucacucccu

SEQ ID NO: 24474 - RNA, 19 nt, Artificial Sequence
  Description of Artificial Sequence: Synthetic oligonucleotide
cagaauccuggguccugaa

SEQ ID NO: 24475 - RNA, 19 nt, Artificial Sequence
  Description of Artificial Sequence: Synthetic oligonucleotide
gcaagaccacagcugaaau

SEQ ID NO: 24476 - RNA, 19 nt, Artificial Sequence
  Description of Artificial Sequence: Synthetic oligonucleotide
gcgguucacacuucagacu

SEQ ID NO: 24477 - RNA, 19 nt, Artificial Sequence
  Description of Artificial Sequence: Synthetic oligonucleotide
gcgcaacggacaccaugag

SEQ ID NO: 24478 - RNA, 19 nt, Artificial Sequence
  Description of Artificial Sequence: Synthetic oligonucleotide
gcucagaaccaggcacugc

SEQ ID NO: 24479 - RNA, 19 nt, Artificial Sequence
  Description of Artificial Sequence: Synthetic oligonucleotide
cagaggcacucucccggca

SEQ ID NO: 24480 - RNA, 19 nt, Artificial Sequence
  Description of Artificial Sequence: Synthetic oligonucleotide
cccugacccgcaaugaugu

SEQ ID NO: 24481 - RNA, 19 nt, Artificial Sequence
  Description of Artificial Sequence: Synthetic oligonucleotide
ccccaaaacugagagccca

SEQ ID NO: 24482 - RNA, 19 nt, Artificial Sequence
  Description of Artificial Sequence: Synthetic oligonucleotide
ucgcuccaacacguaccaa

SEQ ID NO: 24483 - RNA, 19 nt, Artificial Sequence
  Description of Artificial Sequence: Synthetic oligonucleotide
ccauauccaugcugaggga

SEQ ID NO: 24484 - RNA, 19 nt, Artificial Sequence
  Description of Artificial Sequence: Synthetic oligonucleotide
caacacguaccaacacauu

SEQ ID NO: 24485 - RNA, 19 nt, Artificial Sequence
  Description of Artificial Sequence: Synthetic oligonucleotide
gggagacauaugcuccccu

SEQ ID NO: 24486 - RNA, 19 nt, Artificial Sequence
  Description of Artificial Sequence: Synthetic oligonucleotide
gagccugcgcagggagaga

SEQ ID NO: 24487 - RNA, 19 nt, Artificial Sequence
  Description of Artificial Sequence: Synthetic oligonucleotide
ggcgaagacucacucccuu

SEQ ID NO: 24488 - RNA, 19 nt, Artificial Sequence
  Description of Artificial Sequence: Synthetic oligonucleotide
cgaggcuuacuggcugccg

SEQ ID NO: 24489 - RNA, 19 nt, Artificial Sequence
  Description of Artificial Sequence: Synthetic oligonucleotide
gcugaccaaucuguguggu

SEQ ID NO: 24490 - RNA, 19 nt, Artificial Sequence
  Description of Artificial Sequence: Synthetic oligonucleotide
gguuaaugccagggucaaa

SEQ ID NO: 24491 - RNA, 19 nt, Artificial Sequence
  Description of Artificial Sequence: Synthetic oligonucleotide
cagccgcuagaaggagguc

SEQ ID NO: 24492 - RNA, 19 nt, Artificial Sequence
  Description of Artificial Sequence: Synthetic oligonucleotide
ccaccgugaagucgcugca

SEQ ID NO: 24493 - RNA, 19 nt, Artificial Sequence
  Description of Artificial Sequence: Synthetic oligonucleotide
cagagggucaugggagcau

SEQ ID NO: 24494 - RNA, 19 nt, Artificial Sequence
  Description of Artificial Sequence: Synthetic oligonucleotide
cgucuugcacacucgcaua

SEQ ID NO: 24495 - RNA, 19 nt, Artificial Sequence
  Description of Artificial Sequence: Synthetic oligonucleotide
gacccgcaaugaugucaau

SEQ ID NO: 24496 - RNA, 19 nt, Artificial Sequence
  Description of Artificial Sequence: Synthetic oligonucleotide
ccuagggcuguuagccccu

SEQ ID NO: 24497 - RNA, 19 nt, Artificial Sequence
  Description of Artificial Sequence: Synthetic oligonucleotide
gggguacgauggccuuaca

SEQ ID NO: 24498 - RNA, 19 nt, Artificial Sequence
  Description of Artificial Sequence: Synthetic oligonucleotide
ccggcacaaucccugcucu

SEQ ID NO: 24499 - RNA, 19 nt, Artificial Sequence
  Description of Artificial Sequence: Synthetic oligonucleotide
cgaagguauagcccugcuu

SEQ ID NO: 24500 - RNA, 19 nt, Artificial Sequence
  Description of Artificial Sequence: Synthetic oligonucleotide
cgugaagucgcugcaccau

SEQ ID NO: 24501 - RNA, 19 nt, Artificial Sequence
  Description of Artificial Sequence: Synthetic oligonucleotide
ggaacccguguccgaucuu

SEQ ID NO: 24502 - RNA, 19 nt, Artificial Sequence
  Description of Artificial Sequence: Synthetic oligonucleotide
gacgcgcaacggacaccau

SEQ ID NO: 24503 - RNA, 19 nt, Artificial Sequence
  Description of Artificial Sequence: Synthetic oligonucleotide
ccaaccacgucagcugcuu

SEQ ID NO: 24504 - RNA, 19 nt, Artificial Sequence
  Description of Artificial Sequence: Synthetic oligonucleotide
ccggccauucagccuggcu

SEQ ID NO: 24505 - RNA, 19 nt, Artificial Sequence
  Description of Artificial Sequence: Synthetic oligonucleotide
gcccuagagagaggaucuu

SEQ ID NO: 24506 - RNA, 19 nt, Artificial Sequence
  Description of Artificial Sequence: Synthetic oligonucleotide
cgauggccuuacaccuacu

SEQ ID NO: 24507 - RNA, 19 nt, Artificial Sequence
  Description of Artificial Sequence: Synthetic oligonucleotide
ucuauuuugacacagaccu

SEQ ID NO: 24508 - RNA, 19 nt, Artificial Sequence
  Description of Artificial Sequence: Synthetic oligonucleotide
aguagauuugucuagggcc

SEQ ID NO: 24509 - RNA, 19 nt, Artificial Sequence
  Description of Artificial Sequence: Synthetic oligonucleotide
uauggaagcacacugaaag

SEQ ID NO: 24510 - RNA, 19 nt, Artificial Sequence
  Description of Artificial Sequence: Synthetic oligonucleotide
aauugaaagagauuuagau

SEQ ID NO: 24511 - RNA, 19 nt, Artificial Sequence
  Description of Artificial Sequence: Synthetic oligonucleotide
uuuuacuauguucaagucg

SEQ ID NO: 24512 - RNA, 19 nt, Artificial Sequence
  Description of Artificial Sequence: Synthetic oligonucleotide
aauaauggucuuugcacgc

SEQ ID NO: 24513 - RNA, 19 nt, Artificial Sequence
  Description of Artificial Sequence: Synthetic oligonucleotide
uuuacuauguucaagucgu

SEQ ID NO: 24514 - RNA, 19 nt, Artificial Sequence
  Description of Artificial Sequence: Synthetic oligonucleotide
ucaauaaucagcauuccug

SEQ ID NO: 24515 - RNA, 19 nt, Artificial Sequence
  Description of Artificial Sequence: Synthetic oligonucleotide
acugaaaguuaccuaaacc

SEQ ID NO: 24516 - RNA, 19 nt, Artificial Sequence
  Description of Artificial Sequence: Synthetic oligonucleotide
ucaagaggaacauuugugg

SEQ ID NO: 24517 - RNA, 19 nt, Artificial Sequence
  Description of Artificial Sequence: Synthetic oligonucleotide
caugguuugaguuaacucc

SEQ ID NO: 24518 - RNA, 19 nt, Artificial Sequence
  Description of Artificial Sequence: Synthetic oligonucleotide
uuaaucaguauaaaauuga

SEQ ID NO: 24519 - RNA, 19 nt, Artificial Sequence
  Description of Artificial Sequence: Synthetic oligonucleotide
aacauuuugggagacuccc

SEQ ID NO: 24520 - RNA, 19 nt, Artificial Sequence
  Description of Artificial Sequence: Synthetic oligonucleotide
aguacggggaucuuuauuc

SEQ ID NO: 24521 - RNA, 19 nt, Artificial Sequence
  Description of Artificial Sequence: Synthetic oligonucleotide
ugcauuucgucucugaacc

SEQ ID NO: 24522 - RNA, 19 nt, Artificial Sequence
  Description of Artificial Sequence: Synthetic oligonucleotide
aauuugucaguauugcaug

SEQ ID NO: 24523 - RNA, 19 nt, Artificial Sequence
  Description of Artificial Sequence: Synthetic oligonucleotide
uguaggacugauuuaauca

SEQ ID NO: 24524 - RNA, 19 nt, Artificial Sequence
  Description of Artificial Sequence: Synthetic oligonucleotide
acaauaagcugccagucac

SEQ ID NO: 24525 - RNA, 19 nt, Artificial Sequence
  Description of Artificial Sequence: Synthetic oligonucleotide
uguuccguugguaauauca

SEQ ID NO: 24526 - RNA, 19 nt, Artificial Sequence
  Description of Artificial Sequence: Synthetic oligonucleotide
ucaauaucauccuugguac

SEQ ID NO: 24527 - RNA, 19 nt, Artificial Sequence
  Description of Artificial Sequence: Synthetic oligonucleotide
uaaccugucaaucuuauua

SEQ ID NO: 24528 - RNA, 19 nt, Artificial Sequence
  Description of Artificial Sequence: Synthetic oligonucleotide
acuaucagccaucucuugc

SEQ ID NO: 24529 - RNA, 19 nt, Artificial Sequence
  Description of Artificial Sequence: Synthetic oligonucleotide
uucgauucuuacaucaaag

SEQ ID NO: 24530 - RNA, 19 nt, Artificial Sequence
  Description of Artificial Sequence: Synthetic oligonucleotide
ucgagaauugaaaauguac

SEQ ID NO: 24531 - RNA, 19 nt, Artificial Sequence
  Description of Artificial Sequence: Synthetic oligonucleotide
uguuccaacaucacugaag

SEQ ID NO: 24532 - RNA, 19 nt, Artificial Sequence
  Description of Artificial Sequence: Synthetic oligonucleotide
uuaccuaaaccuuccagag

SEQ ID NO: 24533 - RNA, 19 nt, Artificial Sequence
  Description of Artificial Sequence: Synthetic oligonucleotide
aacuaguagauuugucuag

SEQ ID NO: 24534 - RNA, 19 nt, Artificial Sequence
  Description of Artificial Sequence: Synthetic oligonucleotide
ucgauucuuacaucaaagg

SEQ ID NO: 24535 - RNA, 19 nt, Artificial Sequence
  Description of Artificial Sequence: Synthetic oligonucleotide
aauucccgcauauggcacc

SEQ ID NO: 24536 - RNA, 19 nt, Artificial Sequence
  Description of Artificial Sequence: Synthetic oligonucleotide
uccguugguaauaucacag

SEQ ID NO: 24537 - RNA, 19 nt, Artificial Sequence
  Description of Artificial Sequence: Synthetic oligonucleotide
agagauuuagauuuguaau

SEQ ID NO: 24538 - RNA, 19 nt, Artificial Sequence
  Description of Artificial Sequence: Synthetic oligonucleotide
uaagcaaguguuuuguaca

SEQ ID NO: 24539 - RNA, 19 nt, Artificial Sequence
  Description of Artificial Sequence: Synthetic oligonucleotide
aauagcuucaagaggaaca

SEQ ID NO: 24540 - RNA, 19 nt, Artificial Sequence
  Description of Artificial Sequence: Synthetic oligonucleotide
uaugugaacuguauuuccc

SEQ ID NO: 24541 - RNA, 19 nt, Artificial Sequence
  Description of Artificial Sequence: Synthetic oligonucleotide
aaagaacccaguguagacg

SEQ ID NO: 24542 - RNA, 19 nt, Artificial Sequence
  Description of Artificial Sequence: Synthetic oligonucleotide
agagguagguaccaaggac

SEQ ID NO: 24543 - RNA, 19 nt, Artificial Sequence
  Description of Artificial Sequence: Synthetic oligonucleotide
aguaucaauaaucagcauu

SEQ ID NO: 24544 - RNA, 19 nt, Artificial Sequence
  Description of Artificial Sequence: Synthetic oligonucleotide
uauuacuugcuccacgacu

SEQ ID NO: 24545 - RNA, 19 nt, Artificial Sequence
  Description of Artificial Sequence: Synthetic oligonucleotide
aaauuugucaguauugcau

SEQ ID NO: 24546 - RNA, 19 nt, Artificial Sequence
  Description of Artificial Sequence: Synthetic oligonucleotide
acacuuauguccaucagcg

SEQ ID NO: 24547 - RNA, 19 nt, Artificial Sequence
  Description of Artificial Sequence: Synthetic oligonucleotide
uacuauuggaucucgagaa

SEQ ID NO: 24548 - RNA, 19 nt, Artificial Sequence
  Description of Artificial Sequence: Synthetic oligonucleotide
aguggauagcuuuaacuag

SEQ ID NO: 24549 - RNA, 19 nt, Artificial Sequence
  Description of Artificial Sequence: Synthetic oligonucleotide
ucauauaaccugucaaucu

SEQ ID NO: 24550 - RNA, 19 nt, Artificial Sequence
  Description of Artificial Sequence: Synthetic oligonucleotide
agacaauucuuccaguucu

SEQ ID NO: 24551 - RNA, 19 nt, Artificial Sequence
  Description of Artificial Sequence: Synthetic oligonucleotide
uccaucagcguccaaauau

SEQ ID NO: 24552 - RNA, 19 nt, Artificial Sequence
  Description of Artificial Sequence: Synthetic oligonucleotide
auuugauagcauuuagugu

SEQ ID NO: 24553 - RNA, 19 nt, Artificial Sequence
  Description of Artificial Sequence: Synthetic oligonucleotide
ucccaugugggaaaauuag

SEQ ID NO: 24554 - RNA, 19 nt, Artificial Sequence
  Description of Artificial Sequence: Synthetic oligonucleotide
agaguuuacucuagaacgc

SEQ ID NO: 24555 - RNA, 19 nt, Artificial Sequence
  Description of Artificial Sequence: Synthetic oligonucleotide
uaguagauuugucuagggc

SEQ ID NO: 24556 - RNA, 19 nt, Artificial Sequence
  Description of Artificial Sequence: Synthetic oligonucleotide
guaucaauaaucagcauuc

SEQ ID NO: 24557 - RNA, 19 nt, Artificial Sequence
  Description of Artificial Sequence: Synthetic oligonucleotide
cauacugcggaucauguuc

SEQ ID NO: 24558 - RNA, 19 nt, Artificial Sequence
  Description of Artificial Sequence: Synthetic oligonucleotide
ugugugacgcagcuuaucu

SEQ ID NO: 24559 - RNA, 19 nt, Artificial Sequence
  Description of Artificial Sequence: Synthetic oligonucleotide
aaccaguguaaguugcuug

SEQ ID NO: 24560 - RNA, 19 nt, Artificial Sequence
  Description of Artificial Sequence: Synthetic oligonucleotide
ucucagguuacugaaagac

SEQ ID NO: 24561 - RNA, 19 nt, Artificial Sequence
  Description of Artificial Sequence: Synthetic oligonucleotide
agccuuuuacucaacaugg

SEQ ID NO: 24562 - RNA, 19 nt, Artificial Sequence
  Description of Artificial Sequence: Synthetic oligonucleotide
uccaaauaugucuguuccg

SEQ ID NO: 24563 - RNA, 19 nt, Artificial Sequence
  Description of Artificial Sequence: Synthetic oligonucleotide
aacuguauguauauuuugu

SEQ ID NO: 24564 - RNA, 19 nt, Artificial Sequence
  Description of Artificial Sequence: Synthetic oligonucleotide
ugaaaguuaccuaaaccuu

SEQ ID NO: 24565 - RNA, 19 nt, Artificial Sequence
  Description of Artificial Sequence: Synthetic oligonucleotide
aguuaccuaaaccuuccag

SEQ ID NO: 24566 - RNA, 19 nt, Artificial Sequence
  Description of Artificial Sequence: Synthetic oligonucleotide
guuaccuaaaccuuccaga

SEQ ID NO: 24567 - RNA, 19 nt, Artificial Sequence
  Description of Artificial Sequence: Synthetic oligonucleotide
aauaaucagcauuccugga

SEQ ID NO: 24568 - RNA, 19 nt, Artificial Sequence
  Description of Artificial Sequence: Synthetic oligonucleotide
ggagagguaaaccagcaag

SEQ ID NO: 24569 - RNA, 19 nt, Artificial Sequence
  Description of Artificial Sequence: Synthetic oligonucleotide
ugacaauaggcccuucuac

SEQ ID NO: 24570 - RNA, 19 nt, Artificial Sequence
  Description of Artificial Sequence: Synthetic oligonucleotide
aauguccguagcuucaaaa

SEQ ID NO: 24571 - RNA, 19 nt, Artificial Sequence
  Description of Artificial Sequence: Synthetic oligonucleotide
acaacuaaaauggcaaugu

SEQ ID NO: 24572 - RNA, 19 nt, Artificial Sequence
  Description of Artificial Sequence: Synthetic oligonucleotide
uuugagugcaucgauggac

SEQ ID NO: 24573 - RNA, 19 nt, Artificial Sequence
  Description of Artificial Sequence: Synthetic oligonucleotide
ugcauaaugucaacaacua

SEQ ID NO: 24574 - RNA, 19 nt, Artificial Sequence
  Description of Artificial Sequence: Synthetic oligonucleotide
ucucgagaauugaaaaugu

SEQ ID NO: 24575 - RNA, 19 nt, Artificial Sequence
  Description of Artificial Sequence: Synthetic oligonucleotide
cucacaagaauguccguag

SEQ ID NO: 24576 - RNA, 19 nt, Artificial Sequence
  Description of Artificial Sequence: Synthetic oligonucleotide
acuuguuacuaucccaaug

SEQ ID NO: 24577 - RNA, 19 nt, Artificial Sequence
  Description of Artificial Sequence: Synthetic oligonucleotide
agcauucaaacccugcugu

SEQ ID NO: 24578 - RNA, 19 nt, Artificial Sequence
  Description of Artificial Sequence: Synthetic oligonucleotide
cugaaaguuaccuaaaccu

SEQ ID NO: 24579 - RNA, 19 nt, Artificial Sequence
  Description of Artificial Sequence: Synthetic oligonucleotide
acuaguagauuugucuagg

SEQ ID NO: 24580 - RNA, 19 nt, Artificial Sequence
  Description of Artificial Sequence: Synthetic oligonucleotide
uucugguauuacuugcucc

SEQ ID NO: 24581 - RNA, 19 nt, Artificial Sequence
  Description of Artificial Sequence: Synthetic oligonucleotide
uauuguggugcccauuccu

SEQ ID NO: 24582 - RNA, 19 nt, Artificial Sequence
  Description of Artificial Sequence: Synthetic oligonucleotide
auaaucagcauuccuggaa

SEQ ID NO: 24583 - RNA, 19 nt, Artificial Sequence
  Description of Artificial Sequence: Synthetic oligonucleotide
auagcuuuaacuaguagau

SEQ ID NO: 24584 - RNA, 19 nt, Artificial Sequence
  Description of Artificial Sequence: Synthetic oligonucleotide
aaaauguacugagggagga

SEQ ID NO: 24585 - RNA, 19 nt, Artificial Sequence
  Description of Artificial Sequence: Synthetic oligonucleotide
ugucaaaccaguguaaguu

SEQ ID NO: 24586 - RNA, 19 nt, Artificial Sequence
  Description of Artificial Sequence: Synthetic oligonucleotide
cuaguagauuugucuaggg

SEQ ID NO: 24587 - RNA, 19 nt, Artificial Sequence
  Description of Artificial Sequence: Synthetic oligonucleotide
ugaucuugcucacaagaau

SEQ ID NO: 24588 - RNA, 19 nt, Artificial Sequence
  Description of Artificial Sequence: Synthetic oligonucleotide
gaguggauagcuuuaacua

SEQ ID NO: 24589 - RNA, 19 nt, Artificial Sequence
  Description of Artificial Sequence: Synthetic oligonucleotide
uaaaggcaucgaauaaaug

SEQ ID NO: 24590 - RNA, 19 nt, Artificial Sequence
  Description of Artificial Sequence: Synthetic oligonucleotide
uguugugguguuuuccucu

SEQ ID NO: 24591 - RNA, 19 nt, Artificial Sequence
  Description of Artificial Sequence: Synthetic oligonucleotide
ucccguucgauucuuacau

SEQ ID NO: 24592 - RNA, 19 nt, Artificial Sequence
  Description of Artificial Sequence: Synthetic oligonucleotide
uauaaccugucaaucuuau

SEQ ID NO: 24593 - RNA, 19 nt, Artificial Sequence
  Description of Artificial Sequence: Synthetic oligonucleotide
agugcaggcacgcuggacu

SEQ ID NO: 24594 - RNA, 19 nt, Artificial Sequence
  Description of Artificial Sequence: Synthetic oligonucleotide
cacguaauuccuucauagg

SEQ ID NO: 24595 - RNA, 19 nt, Artificial Sequence
  Description of Artificial Sequence: Synthetic oligonucleotide
uucaagucgucguuucuca

SEQ ID NO: 24596 - RNA, 19 nt, Artificial Sequence
  Description of Artificial Sequence: Synthetic oligonucleotide
uuuugcuuggaacgcacau

SEQ ID NO: 24597 - RNA, 19 nt, Artificial Sequence
  Description of Artificial Sequence: Synthetic oligonucleotide
auagcauuuagugucugcu

SEQ ID NO: 24598 - RNA, 19 nt, Artificial Sequence
  Description of Artificial Sequence: Synthetic oligonucleotide
ugugacaauaggcccuucu

SEQ ID NO: 24599 - RNA, 19 nt, Artificial Sequence
  Description of Artificial Sequence: Synthetic oligonucleotide
auacugcggaucauguucc

SEQ ID NO: 24600 - RNA, 19 nt, Artificial Sequence
  Description of Artificial Sequence: Synthetic oligonucleotide
gauucaauugucuggggcu

SEQ ID NO: 24601 - RNA, 19 nt, Artificial Sequence
  Description of Artificial Sequence: Synthetic oligonucleotide
ugaaccagucuuugagugc

SEQ ID NO: 24602 - RNA, 19 nt, Artificial Sequence
  Description of Artificial Sequence: Synthetic oligonucleotide
aaaucacugcauacugcgg

SEQ ID NO: 24603 - RNA, 19 nt, Artificial Sequence
  Description of Artificial Sequence: Synthetic oligonucleotide
uauuacuauuggaucucga

SEQ ID NO: 24604 - RNA, 19 nt, Artificial Sequence
  Description of Artificial Sequence: Synthetic oligonucleotide
uauuuuguaaaggcaucga

SEQ ID NO: 24605 - RNA, 19 nt, Artificial Sequence
  Description of Artificial Sequence: Synthetic oligonucleotide
aagucgucguuucucaauu

SEQ ID NO: 24606 - RNA, 19 nt, Artificial Sequence
  Description of Artificial Sequence: Synthetic oligonucleotide
gucaaaccaguguaaguug

SEQ ID NO: 24607 - RNA, 19 nt, Artificial Sequence
  Description of Artificial Sequence: Synthetic oligonucleotide
uaggacugauuuaaucagu

SEQ ID NO: 24608 - RNA, 19 nt, Artificial Sequence
  Description of Artificial Sequence: Synthetic oligonucleotide
aaggcgccaaaaucaauau

SEQ ID NO: 24609 - RNA, 19 nt, Artificial Sequence
  Description of Artificial Sequence: Synthetic oligonucleotide
uuaauagcuucaagaggaa

SEQ ID NO: 24610 - RNA, 19 nt, Artificial Sequence
  Description of Artificial Sequence: Synthetic oligonucleotide
ugacgccuauuacuauugg

SEQ ID NO: 24611 - RNA, 19 nt, Artificial Sequence
  Description of Artificial Sequence: Synthetic oligonucleotide
ggaguaucaauaaucagca

SEQ ID NO: 24612 - RNA, 19 nt, Artificial Sequence
  Description of Artificial Sequence: Synthetic oligonucleotide
agcauuuagugucugcuuu

SEQ ID NO: 24613 - RNA, 19 nt, Artificial Sequence
  Description of Artificial Sequence: Synthetic oligonucleotide
ugguucuucacacguaauu

SEQ ID NO: 24614 - RNA, 19 nt, Artificial Sequence
  Description of Artificial Sequence: Synthetic oligonucleotide
uguagucuugucuguauuu

SEQ ID NO: 24615 - RNA, 19 nt, Artificial Sequence
  Description of Artificial Sequence: Synthetic oligonucleotide
uaucaauaaucagcauucc

SEQ ID NO: 24616 - RNA, 19 nt, Artificial Sequence
  Description of Artificial Sequence: Synthetic oligonucleotide
uuauggaagcacacugaaa

SEQ ID NO: 24617 - RNA, 19 nt, Artificial Sequence
  Description of Artificial Sequence: Synthetic oligonucleotide
uggaauccguacauucucu

SEQ ID NO: 24618 - RNA, 19 nt, Artificial Sequence
  Description of Artificial Sequence: Synthetic oligonucleotide
ugguaauaucacagcauaa

SEQ ID NO: 24619 - RNA, 19 nt, Artificial Sequence
  Description of Artificial Sequence: Synthetic oligonucleotide
uagacgccuggacauaaac

SEQ ID NO: 24620 - RNA, 19 nt, Artificial Sequence
  Description of Artificial Sequence: Synthetic oligonucleotide
ucccaaacauuuugggaga

SEQ ID NO: 24621 - RNA, 19 nt, Artificial Sequence
  Description of Artificial Sequence: Synthetic oligonucleotide
uugcacgcuccucaaauuc

SEQ ID NO: 24622 - RNA, 19 nt, Artificial Sequence
  Description of Artificial Sequence: Synthetic oligonucleotide
cuauuacuauuggaucucg

SEQ ID NO: 24623 - RNA, 19 nt, Artificial Sequence
  Description of Artificial Sequence: Synthetic oligonucleotide
agcacacugaaaguuaccu

SEQ ID NO: 24624 - RNA, 19 nt, Artificial Sequence
  Description of Artificial Sequence: Synthetic oligonucleotide
uuguuacuaucccaauguc

SEQ ID NO: 24625 - RNA, 19 nt, Artificial Sequence
  Description of Artificial Sequence: Synthetic oligonucleotide
agcagccaaacaguggaac

SEQ ID NO: 24626 - RNA, 19 nt, Artificial Sequence
  Description of Artificial Sequence: Synthetic oligonucleotide
gauccggccucucgguucg

SEQ ID NO: 24627 - RNA, 19 nt, Artificial Sequence
  Description of Artificial Sequence: Synthetic oligonucleotide
ugcggaucauguuccaaca

SEQ ID NO: 24628 - RNA, 19 nt, Artificial Sequence
  Description of Artificial Sequence: Synthetic oligonucleotide
uccccaucgcuugucagcg

SEQ ID NO: 24629 - RNA, 19 nt, Artificial Sequence
  Description of Artificial Sequence: Synthetic oligonucleotide
uuccguugguaauaucaca

SEQ ID NO: 24630 - RNA, 19 nt, Artificial Sequence
  Description of Artificial Sequence: Synthetic oligonucleotide
aagacucauguccgggagu

SEQ ID NO: 24631 - RNA, 19 nt, Artificial Sequence
  Description of Artificial Sequence: Synthetic oligonucleotide
acaucuauuguggugccca

SEQ ID NO: 24632 - RNA, 19 nt, Artificial Sequence
  Description of Artificial Sequence: Synthetic oligonucleotide
auguccguagcuucaaaau

SEQ ID NO: 24633 - RNA, 19 nt, Artificial Sequence
  Description of Artificial Sequence: Synthetic oligonucleotide
cagugugcaagccuuuuac

SEQ ID NO: 24634 - RNA, 19 nt, Artificial Sequence
  Description of Artificial Sequence: Synthetic oligonucleotide
ggcgccaaaaucaauauca

SEQ ID NO: 24635 - RNA, 19 nt, Artificial Sequence
  Description of Artificial Sequence: Synthetic oligonucleotide
uuccccaucgcuugucagc

SEQ ID NO: 24636 - RNA, 19 nt, Artificial Sequence
  Description of Artificial Sequence: Synthetic oligonucleotide
uaccuaaaccuuccagaga

SEQ ID NO: 24637 - RNA, 19 nt, Artificial Sequence
  Description of Artificial Sequence: Synthetic oligonucleotide
cauuucgucucugaaccag

SEQ ID NO: 24638 - RNA, 19 nt, Artificial Sequence
  Description of Artificial Sequence: Synthetic oligonucleotide
auaaacgggccuuuucuuu

SEQ ID NO: 24639 - RNA, 19 nt, Artificial Sequence
  Description of Artificial Sequence: Synthetic oligonucleotide
aaguuaccuaaaccuucca

SEQ ID NO: 24640 - RNA, 19 nt, Artificial Sequence
  Description of Artificial Sequence: Synthetic oligonucleotide
acaugugugugacgcagcu

SEQ ID NO: 24641 - RNA, 19 nt, Artificial Sequence
  Description of Artificial Sequence: Synthetic oligonucleotide
gacuccaaugcccgcucgg

SEQ ID NO: 24642 - RNA, 19 nt, Artificial Sequence
  Description of Artificial Sequence: Synthetic oligonucleotide
uaauagcuucaagaggaac

SEQ ID NO: 24643 - RNA, 19 nt, Artificial Sequence
  Description of Artificial Sequence: Synthetic oligonucleotide
aguuuacucuagaacgcuc

SEQ ID NO: 24644 - RNA, 19 nt, Artificial Sequence
  Description of Artificial Sequence: Synthetic oligonucleotide
gguauuacuugcuccacga

SEQ ID NO: 24645 - RNA, 19 nt, Artificial Sequence
  Description of Artificial Sequence: Synthetic oligonucleotide
auuacuugcuccacgacuu

SEQ ID NO: 24646 - RNA, 19 nt, Artificial Sequence
  Description of Artificial Sequence: Synthetic oligonucleotide
cugcggaucauguuccaac

SEQ ID NO: 24647 - RNA, 19 nt, Artificial Sequence
  Description of Artificial Sequence: Synthetic oligonucleotide
auacuuguuacuaucccaa

SEQ ID NO: 24648 - RNA, 19 nt, Artificial Sequence
  Description of Artificial Sequence: Synthetic oligonucleotide
agugacgccuauuacuauu

SEQ ID NO: 24649 - RNA, 19 nt, Artificial Sequence
  Description of Artificial Sequence: Synthetic oligonucleotide
gauaggagcucuuaacuuu

SEQ ID NO: 24650 - RNA, 19 nt, Artificial Sequence
  Description of Artificial Sequence: Synthetic oligonucleotide
aaaguacggggaucuuuau

SEQ ID NO: 24651 - RNA, 19 nt, Artificial Sequence
  Description of Artificial Sequence: Synthetic oligonucleotide
aaguacggggaucuuuauu

SEQ ID NO: 24652 - RNA, 19 nt, Artificial Sequence
  Description of Artificial Sequence: Synthetic oligonucleotide
gacgccuauuacuauugga

SEQ ID NO: 24653 - RNA, 19 nt, Artificial Sequence
  Description of Artificial Sequence: Synthetic oligonucleotide
agucgucguuucucaauuc

SEQ ID NO: 24654 - RNA, 19 nt, Artificial Sequence
  Description of Artificial Sequence: Synthetic oligonucleotide
gaacgcacauagguguucc

SEQ ID NO: 24655 - RNA, 19 nt, Artificial Sequence
  Description of Artificial Sequence: Synthetic oligonucleotide
uuuacucuagaacgcucuu

SEQ ID NO: 24656 - RNA, 19 nt, Artificial Sequence
  Description of Artificial Sequence: Synthetic oligonucleotide
cguaauuccuucauaggag

SEQ ID NO: 24657 - RNA, 19 nt, Artificial Sequence
  Description of Artificial Sequence: Synthetic oligonucleotide
ucgucguuucucaauucuc

SEQ ID NO: 24658 - RNA, 19 nt, Artificial Sequence
  Description of Artificial Sequence: Synthetic oligonucleotide
gguuugucuucccugaauc

SEQ ID NO: 24659 - RNA, 19 nt, Artificial Sequence
  Description of Artificial Sequence: Synthetic oligonucleotide
aggcgccaaaaucaauauc

SEQ ID NO: 24660 - RNA, 19 nt, Artificial Sequence
  Description of Artificial Sequence: Synthetic oligonucleotide
uacuucuaugugaacugua

SEQ ID NO: 24661 - RNA, 19 nt, Artificial Sequence
  Description of Artificial Sequence: Synthetic oligonucleotide
uguccgggaguaucaauaa

SEQ ID NO: 24662 - RNA, 19 nt, Artificial Sequence
  Description of Artificial Sequence: Synthetic oligonucleotide
agccaaggcgccaaaauca

SEQ ID NO: 24663 - RNA, 19 nt, Artificial Sequence
  Description of Artificial Sequence: Synthetic oligonucleotide
ucgguucggggucucacac

SEQ ID NO: 24664 - RNA, 19 nt, Artificial Sequence
  Description of Artificial Sequence: Synthetic oligonucleotide
aucagcguccaaauauguc

SEQ ID NO: 24665 - RNA, 19 nt, Artificial Sequence
  Description of Artificial Sequence: Synthetic oligonucleotide
gcauauggcaccucugaug

SEQ ID NO: 24666 - RNA, 19 nt, Artificial Sequence
  Description of Artificial Sequence: Synthetic oligonucleotide
acgccuauuacuauuggau

SEQ ID NO: 24667 - RNA, 19 nt, Artificial Sequence
  Description of Artificial Sequence: Synthetic oligonucleotide
acuauuggaucucgagaau

SEQ ID NO: 24668 - RNA, 19 nt, Artificial Sequence
  Description of Artificial Sequence: Synthetic oligonucleotide
cucaacaugguuugaguua

SEQ ID NO: 24669 - RNA, 19 nt, Artificial Sequence
  Description of Artificial Sequence: Synthetic oligonucleotide
cacauccgaaucaggacuc

SEQ ID NO: 24670 - RNA, 19 nt, Artificial Sequence
  Description of Artificial Sequence: Synthetic oligonucleotide
ugagacuucccaugccauc

SEQ ID NO: 24671 - RNA, 19 nt, Artificial Sequence
  Description of Artificial Sequence: Synthetic oligonucleotide
cucuugcgcaucccguucg

SEQ ID NO: 24672 - RNA, 19 nt, Artificial Sequence
  Description of Artificial Sequence: Synthetic oligonucleotide
gcuguguaauaccaccugc

SEQ ID NO: 24673 - RNA, 19 nt, Artificial Sequence
  Description of Artificial Sequence: Synthetic oligonucleotide
cacgacuuccacaggaaca

SEQ ID NO: 24674 - RNA, 19 nt, Artificial Sequence
  Description of Artificial Sequence: Synthetic oligonucleotide
auuugucuagggccuuucu

SEQ ID NO: 24675 - RNA, 19 nt, Artificial Sequence
  Description of Artificial Sequence: Synthetic oligonucleotide
acuucuaugugaacuguau

SEQ ID NO: 24676 - RNA, 19 nt, Artificial Sequence
  Description of Artificial Sequence: Synthetic oligonucleotide
ugagugcaucgauggacug

SEQ ID NO: 24677 - RNA, 19 nt, Artificial Sequence
  Description of Artificial Sequence: Synthetic oligonucleotide
ugguuugaguuaacuccac

SEQ ID NO: 24678 - RNA, 19 nt, Artificial Sequence
  Description of Artificial Sequence: Synthetic oligonucleotide
cuauuuugacacagaccuc

SEQ ID NO: 24679 - RNA, 19 nt, Artificial Sequence
  Description of Artificial Sequence: Synthetic oligonucleotide
uuugcuuggaacgcacaua

SEQ ID NO: 24680 - RNA, 19 nt, Artificial Sequence
  Description of Artificial Sequence: Synthetic oligonucleotide
gaucucgagaauugaaaau

SEQ ID NO: 24681 - RNA, 19 nt, Artificial Sequence
  Description of Artificial Sequence: Synthetic oligonucleotide
caucuuaguuuguucauua

SEQ ID NO: 24682 - RNA, 19 nt, Artificial Sequence
  Description of Artificial Sequence: Synthetic oligonucleotide
uugcaaagugcaugauagu

SEQ ID NO: 24683 - RNA, 19 nt, Artificial Sequence
  Description of Artificial Sequence: Synthetic oligonucleotide
aucuuaguuuguucauuaa

SEQ ID NO: 24684 - RNA, 19 nt, Artificial Sequence
  Description of Artificial Sequence: Synthetic oligonucleotide
cuaugugcuuaaacucuuc

SEQ ID NO: 24685 - RNA, 19 nt, Artificial Sequence
  Description of Artificial Sequence: Synthetic oligonucleotide
guuccguugguaauaucac

SEQ ID NO: 24686 - RNA, 19 nt, Artificial Sequence
  Description of Artificial Sequence: Synthetic oligonucleotide
cuuguacuucuaugugaac

SEQ ID NO: 24687 - RNA, 19 nt, Artificial Sequence
  Description of Artificial Sequence: Synthetic oligonucleotide
ugucuguuccguugguaau

SEQ ID NO: 24688 - RNA, 19 nt, Artificial Sequence
  Description of Artificial Sequence: Synthetic oligonucleotide
ggaucucgagaauugaaaa

SEQ ID NO: 24689 - RNA, 19 nt, Artificial Sequence
  Description of Artificial Sequence: Synthetic oligonucleotide
uuugcacgcuccucaaauu

SEQ ID NO: 24690 - RNA, 19 nt, Artificial Sequence
  Description of Artificial Sequence: Synthetic oligonucleotide
guauuacuugcuccacgac

SEQ ID NO: 24691 - RNA, 19 nt, Artificial Sequence
  Description of Artificial Sequence: Synthetic oligonucleotide
uguagacgccuggacauaa

SEQ ID NO: 24692 - RNA, 19 nt, Artificial Sequence
  Description of Artificial Sequence: Synthetic oligonucleotide
uacuuguuacuaucccaau

SEQ ID NO: 24693 - RNA, 19 nt, Artificial Sequence
  Description of Artificial Sequence: Synthetic oligonucleotide
acucucuauguuaggaagu

SEQ ID NO: 24694 - RNA, 19 nt, Artificial Sequence
  Description of Artificial Sequence: Synthetic oligonucleotide
gugacgccuauuacuauug

SEQ ID NO: 24695 - RNA, 19 nt, Artificial Sequence
  Description of Artificial Sequence: Synthetic oligonucleotide
ucgcuugucagcggcgucc

SEQ ID NO: 24696 - RNA, 19 nt, Artificial Sequence
  Description of Artificial Sequence: Synthetic oligonucleotide
ugauagcauuuagugucug

SEQ ID NO: 24697 - RNA, 19 nt, Artificial Sequence
  Description of Artificial Sequence: Synthetic oligonucleotide
gccaauguuaauucccgca

SEQ ID NO: 24698 - RNA, 19 nt, Artificial Sequence
  Description of Artificial Sequence: Synthetic oligonucleotide
ucuguuccguugguaauau

SEQ ID NO: 24699 - RNA, 19 nt, Artificial Sequence
  Description of Artificial Sequence: Synthetic oligonucleotide
ucaagucgucguuucucaa

SEQ ID NO: 24700 - RNA, 19 nt, Artificial Sequence
  Description of Artificial Sequence: Synthetic oligonucleotide
agccagcguccucaguuuc

SEQ ID NO: 24701 - RNA, 19 nt, Artificial Sequence
  Description of Artificial Sequence: Synthetic oligonucleotide
guagauuugucuagggccu

SEQ ID NO: 24702 - RNA, 19 nt, Artificial Sequence
  Description of Artificial Sequence: Synthetic oligonucleotide
cgucguuucucaauucucc

SEQ ID NO: 24703 - RNA, 19 nt, Artificial Sequence
  Description of Artificial Sequence: Synthetic oligonucleotide
caugauagugaugcucuga

SEQ ID NO: 24704 - RNA, 19 nt, Artificial Sequence
  Description of Artificial Sequence: Synthetic oligonucleotide
gugacaauaggcccuucua

SEQ ID NO: 24705 - RNA, 19 nt, Artificial Sequence
  Description of Artificial Sequence: Synthetic oligonucleotide
uggaacgcacauagguguu

SEQ ID NO: 24706 - RNA, 19 nt, Artificial Sequence
  Description of Artificial Sequence: Synthetic oligonucleotide
auaaccugucaaucuuauu

SEQ ID NO: 24707 - RNA, 19 nt, Artificial Sequence
  Description of Artificial Sequence: Synthetic oligonucleotide
gauuugucuagggccuuuc

SEQ ID NO: 24708 - RNA, 19 nt, Artificial Sequence
  Description of Artificial Sequence: Synthetic oligonucleotide
agacgccuggacauaaacu

SEQ ID NO: 24709 - RNA, 19 nt, Artificial Sequence
  Description of Artificial Sequence: Synthetic oligonucleotide
guaaaggcaucgaauaaau

SEQ ID NO: 24710 - RNA, 19 nt, Artificial Sequence
  Description of Artificial Sequence: Synthetic oligonucleotide
agauuugaggagguugaua

SEQ ID NO: 24711 - RNA, 19 nt, Artificial Sequence
  Description of Artificial Sequence: Synthetic oligonucleotide
ccaucagcguccaaauaug

SEQ ID NO: 24712 - RNA, 19 nt, Artificial Sequence
  Description of Artificial Sequence: Synthetic oligonucleotide
uuguauccccuuccuucaa

SEQ ID NO: 24713 - RNA, 19 nt, Artificial Sequence
  Description of Artificial Sequence: Synthetic oligonucleotide
cucgagaauugaaaaugua

SEQ ID NO: 24714 - RNA, 19 nt, Artificial Sequence
  Description of Artificial Sequence: Synthetic oligonucleotide
cuuugagugcaucgaugga

SEQ ID NO: 24715 - RNA, 19 nt, Artificial Sequence
  Description of Artificial Sequence: Synthetic oligonucleotide
ucucgcaucccggcucucc

SEQ ID NO: 24716 - RNA, 19 nt, Artificial Sequence
  Description of Artificial Sequence: Synthetic oligonucleotide
ggaauccguacauucucuc

SEQ ID NO: 24717 - RNA, 19 nt, Artificial Sequence
  Description of Artificial Sequence: Synthetic oligonucleotide
auguuaggaaguggcuugu

SEQ ID NO: 24718 - RNA, 19 nt, Artificial Sequence
  Description of Artificial Sequence: Synthetic oligonucleotide
gguacuguccucgcucuug

SEQ ID NO: 24719 - RNA, 19 nt, Artificial Sequence
  Description of Artificial Sequence: Synthetic oligonucleotide
cugguauuacuugcuccac

SEQ ID NO: 24720 - RNA, 19 nt, Artificial Sequence
  Description of Artificial Sequence: Synthetic oligonucleotide
gucgucguuucucaauucu

SEQ ID NO: 24721 - RNA, 19 nt, Artificial Sequence
  Description of Artificial Sequence: Synthetic oligonucleotide
gguuugaguuaacuccaca

SEQ ID NO: 24722 - RNA, 19 nt, Artificial Sequence
  Description of Artificial Sequence: Synthetic oligonucleotide
ccguugguaauaucacagc

SEQ ID NO: 24723 - RNA, 19 nt, Artificial Sequence
  Description of Artificial Sequence: Synthetic oligonucleotide
cuuugcacgcuccucaaau

SEQ ID NO: 24724 - RNA, 19 nt, Artificial Sequence
  Description of Artificial Sequence: Synthetic oligonucleotide
caauguuaauucccgcaua

SEQ ID NO: 24725 - RNA, 19 nt, Artificial Sequence
  Description of Artificial Sequence: Synthetic oligonucleotide
agaauguccguagcuucaa

SEQ ID NO: 24726 - RNA, 19 nt, Artificial Sequence
  Description of Artificial Sequence: Synthetic oligonucleotide
acgggccuuuucuuuggca

SEQ ID NO: 24727 - RNA, 19 nt, Artificial Sequence
  Description of Artificial Sequence: Synthetic oligonucleotide
ccgggaguaucaauaauca

SEQ ID NO: 24728 - RNA, 19 nt, Artificial Sequence
  Description of Artificial Sequence: Synthetic oligonucleotide
ggccaauguuaauucccgc

SEQ ID NO: 24729 - RNA, 19 nt, Artificial Sequence
  Description of Artificial Sequence: Synthetic oligonucleotide
guuaggaaguggcuuguuu

SEQ ID NO: 24730 - RNA, 19 nt, Artificial Sequence
  Description of Artificial Sequence: Synthetic oligonucleotide
aucauccuuauaagccaca

SEQ ID NO: 24731 - RNA, 19 nt, Artificial Sequence
  Description of Artificial Sequence: Synthetic oligonucleotide
ccguucgauucuuacauca

SEQ ID NO: 24732 - RNA, 19 nt, Artificial Sequence
  Description of Artificial Sequence: Synthetic oligonucleotide
gccacaaggagagguaaac

SEQ ID NO: 24733 - RNA, 19 nt, Artificial Sequence
  Description of Artificial Sequence: Synthetic oligonucleotide
ucaauugucuggggcucua

SEQ ID NO: 24734 - RNA, 19 nt, Artificial Sequence
  Description of Artificial Sequence: Synthetic oligonucleotide
cugucaaaccaguguaagu

SEQ ID NO: 24735 - RNA, 19 nt, Artificial Sequence
  Description of Artificial Sequence: Synthetic oligonucleotide
uucucgcguucuuucuuuu

SEQ ID NO: 24736 - RNA, 19 nt, Artificial Sequence
  Description of Artificial Sequence: Synthetic oligonucleotide
ccugccugugguuuauuuc

SEQ ID NO: 24737 - RNA, 19 nt, Artificial Sequence
  Description of Artificial Sequence: Synthetic oligonucleotide
cguugguaauaucacagca

SEQ ID NO: 24738 - RNA, 19 nt, Artificial Sequence
  Description of Artificial Sequence: Synthetic oligonucleotide
gaacccaguguagacgccu

SEQ ID NO: 24739 - RNA, 19 nt, Artificial Sequence
  Description of Artificial Sequence: Synthetic oligonucleotide
ccacaaggagagguaaacc

SEQ ID NO: 24740 - RNA, 19 nt, Artificial Sequence
  Description of Artificial Sequence: Synthetic oligonucleotide
gcaaugaguggauagcuuu

SEQ ID NO: 24741 - RNA, 19 nt, Artificial Sequence
  Description of Artificial Sequence: Synthetic oligonucleotide
cccaucgcuugucagcggc

SEQ ID NO: 24742 - RNA, 19 nt, Artificial Sequence
  Description of Artificial Sequence: Synthetic oligonucleotide
guacggggaucuuuauucu

SEQ ID NO: 24743 - RNA, 19 nt, Artificial Sequence
  Description of Artificial Sequence: Synthetic oligonucleotide
gcaugauagugaugcucug

SEQ ID NO: 24744 - RNA, 19 nt, Artificial Sequence
  Description of Artificial Sequence: Synthetic oligonucleotide
uccggccucucgguucggg

SEQ ID NO: 24745 - RNA, 19 nt, Artificial Sequence
  Description of Artificial Sequence: Synthetic oligonucleotide
uguuaggaaguggcuuguu

SEQ ID NO: 24746 - RNA, 19 nt, Artificial Sequence
  Description of Artificial Sequence: Synthetic oligonucleotide
acauccgaaucaggacucu

SEQ ID NO: 24747 - RNA, 19 nt, Artificial Sequence
  Description of Artificial Sequence: Synthetic oligonucleotide
caucagcguccaaauaugu

SEQ ID NO: 24748 - RNA, 19 nt, Artificial Sequence
  Description of Artificial Sequence: Synthetic oligonucleotide
cuacauguccaagcacaca

SEQ ID NO: 24749 - RNA, 19 nt, Artificial Sequence
  Description of Artificial Sequence: Synthetic oligonucleotide
uagauuugucuagggccuu

SEQ ID NO: 24750 - RNA, 19 nt, Artificial Sequence
  Description of Artificial Sequence: Synthetic oligonucleotide
cucgguucggggucucaca

SEQ ID NO: 24751 - RNA, 19 nt, Artificial Sequence
  Description of Artificial Sequence: Synthetic oligonucleotide
cauagccucccagucaucu

SEQ ID NO: 24752 - RNA, 19 nt, Artificial Sequence
  Description of Artificial Sequence: Synthetic oligonucleotide
cgccuauuacuauuggauc

SEQ ID NO: 24753 - RNA, 19 nt, Artificial Sequence
  Description of Artificial Sequence: Synthetic oligonucleotide
gaguaucaauaaucagcau

SEQ ID NO: 24754 - RNA, 19 nt, Artificial Sequence
  Description of Artificial Sequence: Synthetic oligonucleotide
gugugacgcagcuuaucua

SEQ ID NO: 24755 - RNA, 19 nt, Artificial Sequence
  Description of Artificial Sequence: Synthetic oligonucleotide
cuauuggaucucgagaauu

SEQ ID NO: 24756 - RNA, 19 nt, Artificial Sequence
  Description of Artificial Sequence: Synthetic oligonucleotide
caagucgucguuucucaau

SEQ ID NO: 24757 - RNA, 19 nt, Artificial Sequence
  Description of Artificial Sequence: Synthetic oligonucleotide
gagugcaggcacgcuggac

SEQ ID NO: 24758 - RNA, 19 nt, Artificial Sequence
  Description of Artificial Sequence: Synthetic oligonucleotide
ccaucgcuugucagcggcg

SEQ ID NO: 24759 - RNA, 19 nt, Artificial Sequence
  Description of Artificial Sequence: Synthetic oligonucleotide
cuguuccguugguaauauc

SEQ ID NO: 24760 - RNA, 19 nt, Artificial Sequence
  Description of Artificial Sequence: Synthetic oligonucleotide
aaugcccgcucggcucugu

SEQ ID NO: 24761 - RNA, 19 nt, Artificial Sequence
  Description of Artificial Sequence: Synthetic oligonucleotide
ccacgacuuccacaggaac

SEQ ID NO: 24762 - RNA, 19 nt, Artificial Sequence
  Description of Artificial Sequence: Synthetic oligonucleotide
ggaacgcacauagguguuc

SEQ ID NO: 24763 - RNA, 19 nt, Artificial Sequence
  Description of Artificial Sequence: Synthetic oligonucleotide
caguguaaguugcuugguu

SEQ ID NO: 24764 - RNA, 19 nt, Artificial Sequence
  Description of Artificial Sequence: Synthetic oligonucleotide
ccggccucucgguucgggg

SEQ ID NO: 24765 - RNA, 19 nt, Artificial Sequence
  Description of Artificial Sequence: Synthetic oligonucleotide
ccaaacuaucagccaucuc

SEQ ID NO: 24766 - RNA, 19 nt, Artificial Sequence
  Description of Artificial Sequence: Synthetic oligonucleotide
ccuuuuacucaacaugguu

SEQ ID NO: 24767 - RNA, 19 nt, Artificial Sequence
  Description of Artificial Sequence: Synthetic oligonucleotide
guagacgccuggacauaaa

SEQ ID NO: 24768 - RNA, 19 nt, Artificial Sequence
  Description of Artificial Sequence: Synthetic oligonucleotide
cauguccgggaguaucaau

SEQ ID NO: 24769 - RNA, 19 nt, Artificial Sequence
  Description of Artificial Sequence: Synthetic oligonucleotide
gcagcuuaucuaguaauuu

SEQ ID NO: 24770 - RNA, 19 nt, Artificial Sequence
  Description of Artificial Sequence: Synthetic oligonucleotide
cccguucgauucuuacauc

SEQ ID NO: 24771 - RNA, 19 nt, Artificial Sequence
  Description of Artificial Sequence: Synthetic oligonucleotide
guccgggaguaucaauaau

SEQ ID NO: 24772 - RNA, 19 nt, Artificial Sequence
  Description of Artificial Sequence: Synthetic oligonucleotide
cagcggcguccgcggaucc

SEQ ID NO: 24773 - RNA, 19 nt, Artificial Sequence
  Description of Artificial Sequence: Synthetic oligonucleotide
caucuauuguggugcccau

SEQ ID NO: 24774 - RNA, 19 nt, Artificial Sequence
  Description of Artificial Sequence: Synthetic oligonucleotide
gugacgcagcuuaucuagu

SEQ ID NO: 24775 - RNA, 19 nt, Artificial Sequence
  Description of Artificial Sequence: Synthetic oligonucleotide
caucgcuugucagcggcgu

SEQ ID NO: 24776 - RNA, 19 nt, Artificial Sequence
  Description of Artificial Sequence: Synthetic oligonucleotide
uucccgcauauggcaccuc

SEQ ID NO: 24777 - RNA, 19 nt, Artificial Sequence
  Description of Artificial Sequence: Synthetic oligonucleotide
ccgcggauccggccucucg

SEQ ID NO: 24778 - RNA, 19 nt, Artificial Sequence
  Description of Artificial Sequence: Synthetic oligonucleotide
cagugacgccuauuacuau

SEQ ID NO: 24779 - RNA, 19 nt, Artificial Sequence
  Description of Artificial Sequence: Synthetic oligonucleotide
ggcaaugaguggauagcuu

SEQ ID NO: 24780 - RNA, 19 nt, Artificial Sequence
  Description of Artificial Sequence: Synthetic oligonucleotide
gcggaucauguuccaacau

SEQ ID NO: 24781 - RNA, 19 nt, Artificial Sequence
  Description of Artificial Sequence: Synthetic oligonucleotide
auccggccucucgguucgg

SEQ ID NO: 24782 - RNA, 19 nt, Artificial Sequence
  Description of Artificial Sequence: Synthetic oligonucleotide
uccgcggauccggccucuc

SEQ ID NO: 24783 - RNA, 19 nt, Artificial Sequence
  Description of Artificial Sequence: Synthetic oligonucleotide
cucucgguucggggucuca

SEQ ID NO: 24784 - RNA, 19 nt, Artificial Sequence
  Description of Artificial Sequence: Synthetic oligonucleotide
cauccgaaucaggacucuu

SEQ ID NO: 24785 - RNA, 19 nt, Artificial Sequence
  Description of Artificial Sequence: Synthetic oligonucleotide
gcguccgcggauccggccu

SEQ ID NO: 24786 - RNA, 19 nt, Artificial Sequence
  Description of Artificial Sequence: Synthetic oligonucleotide
gcggauccggccucucggu

SEQ ID NO: 24787 - RNA, 19 nt, Artificial Sequence
  Description of Artificial Sequence: Synthetic oligonucleotide
ccuugguacuguccucgcu

SEQ ID NO: 24788 - RNA, 19 nt, Artificial Sequence
  Description of Artificial Sequence: Synthetic oligonucleotide
cgcauauggcaccucugau

SEQ ID NO: 24789 - RNA, 19 nt, Artificial Sequence
  Description of Artificial Sequence: Synthetic oligonucleotide
cguccgcggauccggccuc

SEQ ID NO: 24790 - RNA, 19 nt, Artificial Sequence
  Description of Artificial Sequence: Synthetic oligonucleotide
guccgcggauccggccucu

SEQ ID NO: 24791 - RNA, 19 nt, Artificial Sequence
  Description of Artificial Sequence: Synthetic oligonucleotide
cgcaucccguucgauucuu

SEQ ID NO: 24792 - RNA, 19 nt, Artificial Sequence
  Description of Artificial Sequence: Synthetic oligonucleotide
uguuauaaaguuaaaaggc

SEQ ID NO: 24793 - RNA, 19 nt, Artificial Sequence
  Description of Artificial Sequence: Synthetic oligonucleotide
aagagauacaaccauuccc

SEQ ID NO: 24794 - RNA, 19 nt, Artificial Sequence
  Description of Artificial Sequence: Synthetic oligonucleotide
uguuaugugguuuagauac

SEQ ID NO: 24795 - RNA, 19 nt, Artificial Sequence
  Description of Artificial Sequence: Synthetic oligonucleotide
guacaauagacuuagagcc

SEQ ID NO: 24796 - RNA, 19 nt, Artificial Sequence
  Description of Artificial Sequence: Synthetic oligonucleotide
ugugguaucauucucaagu

SEQ ID NO: 24797 - RNA, 19 nt, Artificial Sequence
  Description of Artificial Sequence: Synthetic oligonucleotide
ugguaaaucauuaucaaac

SEQ ID NO: 24798 - RNA, 19 nt, Artificial Sequence
  Description of Artificial Sequence: Synthetic oligonucleotide
aaauguuccggauuaacug

SEQ ID NO: 24799 - RNA, 19 nt, Artificial Sequence
  Description of Artificial Sequence: Synthetic oligonucleotide
ucauguaauuucuaugucg

SEQ ID NO: 24800 - RNA, 19 nt, Artificial Sequence
  Description of Artificial Sequence: Synthetic oligonucleotide
ugugaagcgauuuggauag

SEQ ID NO: 24801 - RNA, 19 nt, Artificial Sequence
  Description of Artificial Sequence: Synthetic oligonucleotide
uuaaguguagaauacugcc

SEQ ID NO: 24802 - RNA, 19 nt, Artificial Sequence
  Description of Artificial Sequence: Synthetic oligonucleotide
auacauacuuaguaaauuc

SEQ ID NO: 24803 - RNA, 19 nt, Artificial Sequence
  Description of Artificial Sequence: Synthetic oligonucleotide
uucuaaaugaaaccuucgg

SEQ ID NO: 24804 - RNA, 19 nt, Artificial Sequence
  Description of Artificial Sequence: Synthetic oligonucleotide
aacaaaacguacaggauac

SEQ ID NO: 24805 - RNA, 19 nt, Artificial Sequence
  Description of Artificial Sequence: Synthetic oligonucleotide
cauagcacuacuuuaaaac

SEQ ID NO: 24806 - RNA, 19 nt, Artificial Sequence
  Description of Artificial Sequence: Synthetic oligonucleotide
aaaccuucgguuuagaaua

SEQ ID NO: 24807 - RNA, 19 nt, Artificial Sequence
  Description of Artificial Sequence: Synthetic oligonucleotide
acaaucaucauucuagugu

SEQ ID NO: 24808 - RNA, 19 nt, Artificial Sequence
  Description of Artificial Sequence: Synthetic oligonucleotide
ucagguaacauaauuuuga

SEQ ID NO: 24809 - RNA, 19 nt, Artificial Sequence
  Description of Artificial Sequence: Synthetic oligonucleotide
aaaugugacuuguaccgac

SEQ ID NO: 24810 - RNA, 19 nt, Artificial Sequence
  Description of Artificial Sequence: Synthetic oligonucleotide
uugguuaccuucuagacga

SEQ ID NO: 24811 - RNA, 19 nt, Artificial Sequence
  Description of Artificial Sequence: Synthetic oligonucleotide
uuuaaguguagaauacugc

SEQ ID NO: 24812 - RNA, 19 nt, Artificial Sequence
  Description of Artificial Sequence: Synthetic oligonucleotide
uucgauugaagcaagugug

SEQ ID NO: 24813 - RNA, 19 nt, Artificial Sequence
  Description of Artificial Sequence: Synthetic oligonucleotide
uacaucuagaauaagcaac

SEQ ID NO: 24814 - RNA, 19 nt, Artificial Sequence
  Description of Artificial Sequence: Synthetic oligonucleotide
aguagcaucucauuaucac

SEQ ID NO: 24815 - RNA, 19 nt, Artificial Sequence
  Description of Artificial Sequence: Synthetic oligonucleotide
ucaacuaacuccaugucgu

SEQ ID NO: 24816 - RNA, 19 nt, Artificial Sequence
  Description of Artificial Sequence: Synthetic oligonucleotide
aguuagauguacuuauuag

SEQ ID NO: 24817 - RNA, 19 nt, Artificial Sequence
  Description of Artificial Sequence: Synthetic oligonucleotide
uuauuagagacuuugguuu

SEQ ID NO: 24818 - RNA, 19 nt, Artificial Sequence
  Description of Artificial Sequence: Synthetic oligonucleotide
acauaaugacaccacuugc

SEQ ID NO: 24819 - RNA, 19 nt, Artificial Sequence
  Description of Artificial Sequence: Synthetic oligonucleotide
ugaaaaccccaucacaugc

SEQ ID NO: 24820 - RNA, 19 nt, Artificial Sequence
  Description of Artificial Sequence: Synthetic oligonucleotide
uucccuagaaaccucaaug

SEQ ID NO: 24821 - RNA, 19 nt, Artificial Sequence
  Description of Artificial Sequence: Synthetic oligonucleotide
aaucagguaacauaauuuu

SEQ ID NO: 24822 - RNA, 19 nt, Artificial Sequence
  Description of Artificial Sequence: Synthetic oligonucleotide
aucaacuaacuccaugucg

SEQ ID NO: 24823 - RNA, 19 nt, Artificial Sequence
  Description of Artificial Sequence: Synthetic oligonucleotide
uacagguuaacaaacuaga

SEQ ID NO: 24824 - RNA, 19 nt, Artificial Sequence
  Description of Artificial Sequence: Synthetic oligonucleotide
ucagauaucacuugcuacu

SEQ ID NO: 24825 - RNA, 19 nt, Artificial Sequence
  Description of Artificial Sequence: Synthetic oligonucleotide
auguacaacauucccugcc

SEQ ID NO: 24826 - RNA, 19 nt, Artificial Sequence
  Description of Artificial Sequence: Synthetic oligonucleotide
uguuguacuaggaauuucu

SEQ ID NO: 24827 - RNA, 19 nt, Artificial Sequence
  Description of Artificial Sequence: Synthetic oligonucleotide
aggacuagaauauucugag

SEQ ID NO: 24828 - RNA, 19 nt, Artificial Sequence
  Description of Artificial Sequence: Synthetic oligonucleotide
auuaucacuacauuccagu

SEQ ID NO: 24829 - RNA, 19 nt, Artificial Sequence
  Description of Artificial Sequence: Synthetic oligonucleotide
cuagaaaccucaaugcggc

SEQ ID NO: 24830 - RNA, 19 nt, Artificial Sequence
  Description of Artificial Sequence: Synthetic oligonucleotide
ucgguuuagaauaaacugu

SEQ ID NO: 24831 - RNA, 19 nt, Artificial Sequence
  Description of Artificial Sequence: Synthetic oligonucleotide
auacagauguuauugauaa

SEQ ID NO: 24832 - RNA, 19 nt, Artificial Sequence
  Description of Artificial Sequence: Synthetic oligonucleotide
acuagaaaacaaaacguac

SEQ ID NO: 24833 - RNA, 19 nt, Artificial Sequence
  Description of Artificial Sequence: Synthetic oligonucleotide
ucucaagagccucaaaccc

SEQ ID NO: 24834 - RNA, 19 nt, Artificial Sequence
  Description of Artificial Sequence: Synthetic oligonucleotide
uuuuauugcucaacuucgg

SEQ ID NO: 24835 - RNA, 19 nt, Artificial Sequence
  Description of Artificial Sequence: Synthetic oligonucleotide
aaaaccccaucacaugcgg

SEQ ID NO: 24836 - RNA, 19 nt, Artificial Sequence
  Description of Artificial Sequence: Synthetic oligonucleotide
ugaacuaauuacaucuaga

SEQ ID NO: 24837 - RNA, 19 nt, Artificial Sequence
  Description of Artificial Sequence: Synthetic oligonucleotide
uuaucaaacaaacgacuac

SEQ ID NO: 24838 - RNA, 19 nt, Artificial Sequence
  Description of Artificial Sequence: Synthetic oligonucleotide
ucuaaaucauguuuucaga

SEQ ID NO: 24839 - RNA, 19 nt, Artificial Sequence
  Description of Artificial Sequence: Synthetic oligonucleotide
uguaauuucuaugucgcug

SEQ ID NO: 24840 - RNA, 19 nt, Artificial Sequence
  Description of Artificial Sequence: Synthetic oligonucleotide
uuaaagcucugucaaguca

SEQ ID NO: 24841 - RNA, 19 nt, Artificial Sequence
  Description of Artificial Sequence: Synthetic oligonucleotide
gacgggaugagccacaaac

SEQ ID NO: 24842 - RNA, 19 nt, Artificial Sequence
  Description of Artificial Sequence: Synthetic oligonucleotide
cucguuuauaccuuggcac

SEQ ID NO: 24843 - RNA, 19 nt, Artificial Sequence
  Description of Artificial Sequence: Synthetic oligonucleotide
cauuaaaucccuucugcag

SEQ ID NO: 24844 - RNA, 19 nt, Artificial Sequence
  Description of Artificial Sequence: Synthetic oligonucleotide
ucacuuacgucaauuuugc

SEQ ID NO: 24845 - RNA, 19 nt, Artificial Sequence
  Description of Artificial Sequence: Synthetic oligonucleotide
guaagaaauauaccugacc

SEQ ID NO: 24846 - RNA, 19 nt, Artificial Sequence
  Description of Artificial Sequence: Synthetic oligonucleotide
aggacauuaaccaccacac

SEQ ID NO: 24847 - RNA, 19 nt, Artificial Sequence
  Description of Artificial Sequence: Synthetic oligonucleotide
uguacaacauucccugccc

SEQ ID NO: 24848 - RNA, 19 nt, Artificial Sequence
  Description of Artificial Sequence: Synthetic oligonucleotide
aauagacuuagagccacuc

SEQ ID NO: 24849 - RNA, 19 nt, Artificial Sequence
  Description of Artificial Sequence: Synthetic oligonucleotide
cuagacgacgggaugagcc

SEQ ID NO: 24850 - RNA, 19 nt, Artificial Sequence
  Description of Artificial Sequence: Synthetic oligonucleotide
ucuccacgaaauuuuauca

SEQ ID NO: 24851 - RNA, 19 nt, Artificial Sequence
  Description of Artificial Sequence: Synthetic oligonucleotide
ccaaugugauuuuagaugg

SEQ ID NO: 24852 - RNA, 19 nt, Artificial Sequence
  Description of Artificial Sequence: Synthetic oligonucleotide
cuuagcaccuaguuggaag

SEQ ID NO: 24853 - RNA, 19 nt, Artificial Sequence
  Description of Artificial Sequence: Synthetic oligonucleotide
auuaaucgcuuccagagau

SEQ ID NO: 24854 - RNA, 19 nt, Artificial Sequence
  Description of Artificial Sequence: Synthetic oligonucleotide
guaacagggauacuuuugc

SEQ ID NO: 24855 - RNA, 19 nt, Artificial Sequence
  Description of Artificial Sequence: Synthetic oligonucleotide
ucuaucuaccugaaggcgu

SEQ ID NO: 24856 - RNA, 19 nt, Artificial Sequence
  Description of Artificial Sequence: Synthetic oligonucleotide
gaucccuaggcacucgugg

SEQ ID NO: 24857 - RNA, 19 nt, Artificial Sequence
  Description of Artificial Sequence: Synthetic oligonucleotide
uauacagauguuauugaua

SEQ ID NO: 24858 - RNA, 19 nt, Artificial Sequence
  Description of Artificial Sequence: Synthetic oligonucleotide
uguaagaaauauaccugac

SEQ ID NO: 24859 - RNA, 19 nt, Artificial Sequence
  Description of Artificial Sequence: Synthetic oligonucleotide
aaaagcgaugggauuugcc

SEQ ID NO: 24860 - RNA, 19 nt, Artificial Sequence
  Description of Artificial Sequence: Synthetic oligonucleotide
aguagauuuaguguuguca

SEQ ID NO: 24861 - RNA, 19 nt, Artificial Sequence
  Description of Artificial Sequence: Synthetic oligonucleotide
uuggaaguaaucagguaac

SEQ ID NO: 24862 - RNA, 19 nt, Artificial Sequence
  Description of Artificial Sequence: Synthetic oligonucleotide
auaaauguuccggauuaac

SEQ ID NO: 24863 - RNA, 19 nt, Artificial Sequence
  Description of Artificial Sequence: Synthetic oligonucleotide
aguguccuagaaucuaagg

SEQ ID NO: 24864 - RNA, 19 nt, Artificial Sequence
  Description of Artificial Sequence: Synthetic oligonucleotide
aaguuagauguacuuauua

SEQ ID NO: 24865 - RNA, 19 nt, Artificial Sequence
  Description of Artificial Sequence: Synthetic oligonucleotide
uugucgauaggauuccuca

SEQ ID NO: 24866 - RNA, 19 nt, Artificial Sequence
  Description of Artificial Sequence: Synthetic oligonucleotide
uugcauaccaucaccccag

SEQ ID NO: 24867 - RNA, 19 nt, Artificial Sequence
  Description of Artificial Sequence: Synthetic oligonucleotide
auuugccuacuuuacacug

SEQ ID NO: 24868 - RNA, 19 nt, Artificial Sequence
  Description of Artificial Sequence: Synthetic oligonucleotide
aaaagaccauaguaagggu

SEQ ID NO: 24869 - RNA, 19 nt, Artificial Sequence
  Description of Artificial Sequence: Synthetic oligonucleotide
uguugcuaagaucccuagg

SEQ ID NO: 24870 - RNA, 19 nt, Artificial Sequence
  Description of Artificial Sequence: Synthetic oligonucleotide
uucagauaucacuugcuac

SEQ ID NO: 24871 - RNA, 19 nt, Artificial Sequence
  Description of Artificial Sequence: Synthetic oligonucleotide
agauaucacuugcuacugc

SEQ ID NO: 24872 - RNA, 19 nt, Artificial Sequence
  Description of Artificial Sequence: Synthetic oligonucleotide
auuuucaugacuugucgau

SEQ ID NO: 24873 - RNA, 19 nt, Artificial Sequence
  Description of Artificial Sequence: Synthetic oligonucleotide
acaagagauacaaccauuc

SEQ ID NO: 24874 - RNA, 19 nt, Artificial Sequence
  Description of Artificial Sequence: Synthetic oligonucleotide
ucuuguuugaggccaagau

SEQ ID NO: 24875 - RNA, 19 nt, Artificial Sequence
  Description of Artificial Sequence: Synthetic oligonucleotide
ugaauaauuucgccauaug

SEQ ID NO: 24876 - RNA, 19 nt, Artificial Sequence
  Description of Artificial Sequence: Synthetic oligonucleotide
aaguuguucgugcaggcau

SEQ ID NO: 24877 - RNA, 19 nt, Artificial Sequence
  Description of Artificial Sequence: Synthetic oligonucleotide
uuaccuucuagacgacggg

SEQ ID NO: 24878 - RNA, 19 nt, Artificial Sequence
  Description of Artificial Sequence: Synthetic oligonucleotide
uguauucaaucaaaaugaa

SEQ ID NO: 24879 - RNA, 19 nt, Artificial Sequence
  Description of Artificial Sequence: Synthetic oligonucleotide
guuaccuucuagacgacgg

SEQ ID NO: 24880 - RNA, 19 nt, Artificial Sequence
  Description of Artificial Sequence: Synthetic oligonucleotide
ucaacuucggcaugggcac

SEQ ID NO: 24881 - RNA, 19 nt, Artificial Sequence
  Description of Artificial Sequence: Synthetic oligonucleotide
aaaauaguaguagucuuua

SEQ ID NO: 24882 - RNA, 19 nt, Artificial Sequence
  Description of Artificial Sequence: Synthetic oligonucleotide
aacauuacugucuggugua

SEQ ID NO: 24883 - RNA, 19 nt, Artificial Sequence
  Description of Artificial Sequence: Synthetic oligonucleotide
aaauugaaaucuaaaucau

SEQ ID NO: 24884 - RNA, 19 nt, Artificial Sequence
  Description of Artificial Sequence: Synthetic oligonucleotide
uaaaccauccucagggcaa

SEQ ID NO: 24885 - RNA, 19 nt, Artificial Sequence
  Description of Artificial Sequence: Synthetic oligonucleotide
cauuauucguccaacaaaa

SEQ ID NO: 24886 - RNA, 19 nt, Artificial Sequence
  Description of Artificial Sequence: Synthetic oligonucleotide
uauucgauugaagcaagug

SEQ ID NO: 24887 - RNA, 19 nt, Artificial Sequence
  Description of Artificial Sequence: Synthetic oligonucleotide
uacugccuaacucuggaga

SEQ ID NO: 24888 - RNA, 19 nt, Artificial Sequence
  Description of Artificial Sequence: Synthetic oligonucleotide
ugugguuuagauacuggau

SEQ ID NO: 24889 - RNA, 19 nt, Artificial Sequence
  Description of Artificial Sequence: Synthetic oligonucleotide
cauagcuuucauagggcgg

SEQ ID NO: 24890 - RNA, 19 nt, Artificial Sequence
  Description of Artificial Sequence: Synthetic oligonucleotide
auacagguuaacaaacuag

SEQ ID NO: 24891 - RNA, 19 nt, Artificial Sequence
  Description of Artificial Sequence: Synthetic oligonucleotide
auauaaugcucugcuauag

SEQ ID NO: 24892 - RNA, 19 nt, Artificial Sequence
  Description of Artificial Sequence: Synthetic oligonucleotide
cauaaugacaccacuugca

SEQ ID NO: 24893 - RNA, 19 nt, Artificial Sequence
  Description of Artificial Sequence: Synthetic oligonucleotide
agcgaugggauuugccuac

SEQ ID NO: 24894 - RNA, 19 nt, Artificial Sequence
  Description of Artificial Sequence: Synthetic oligonucleotide
ggagucagcauucuuuagg

SEQ ID NO: 24895 - RNA, 19 nt, Artificial Sequence
  Description of Artificial Sequence: Synthetic oligonucleotide
gugggagucacaaugagac

SEQ ID NO: 24896 - RNA, 19 nt, Artificial Sequence
  Description of Artificial Sequence: Synthetic oligonucleotide
aguauaggagcuuuucaaa

SEQ ID NO: 24897 - RNA, 19 nt, Artificial Sequence
  Description of Artificial Sequence: Synthetic oligonucleotide
guagauuuaguguugucaa

SEQ ID NO: 24898 - RNA, 19 nt, Artificial Sequence
  Description of Artificial Sequence: Synthetic oligonucleotide
aacuuuagcugcugugaca

SEQ ID NO: 24899 - RNA, 19 nt, Artificial Sequence
  Description of Artificial Sequence: Synthetic oligonucleotide
gaugccaugugcucacacc

SEQ ID NO: 24900 - RNA, 19 nt, Artificial Sequence
  Description of Artificial Sequence: Synthetic oligonucleotide
ugcuaagaucccuaggcac

SEQ ID NO: 24901 - RNA, 19 nt, Artificial Sequence
  Description of Artificial Sequence: Synthetic oligonucleotide
ucguuuauaccuuggcacu

SEQ ID NO: 24902 - RNA, 19 nt, Artificial Sequence
  Description of Artificial Sequence: Synthetic oligonucleotide
cuuguuugaggccaagauc

SEQ ID NO: 24903 - RNA, 19 nt, Artificial Sequence
  Description of Artificial Sequence: Synthetic oligonucleotide
uuaugugguuuagauacug

SEQ ID NO: 24904 - RNA, 19 nt, Artificial Sequence
  Description of Artificial Sequence: Synthetic oligonucleotide
uacaaucaucauucuagug

SEQ ID NO: 24905 - RNA, 19 nt, Artificial Sequence
  Description of Artificial Sequence: Synthetic oligonucleotide
uucuaugucgcugggaccu

SEQ ID NO: 24906 - RNA, 19 nt, Artificial Sequence
  Description of Artificial Sequence: Synthetic oligonucleotide
uuaugccauaaauauucac

SEQ ID NO: 24907 - RNA, 19 nt, Artificial Sequence
  Description of Artificial Sequence: Synthetic oligonucleotide
augcggagaaguuauaaaa

SEQ ID NO: 24908 - RNA, 19 nt, Artificial Sequence
  Description of Artificial Sequence: Synthetic oligonucleotide
augugguuuagauacugga

SEQ ID NO: 24909 - RNA, 19 nt, Artificial Sequence
  Description of Artificial Sequence: Synthetic oligonucleotide
agguucaagguauuaauuu

SEQ ID NO: 24910 - RNA, 19 nt, Artificial Sequence
  Description of Artificial Sequence: Synthetic oligonucleotide
accuuagcuaggguaaccc

SEQ ID NO: 24911 - RNA, 19 nt, Artificial Sequence
  Description of Artificial Sequence: Synthetic oligonucleotide
aaucuaaggggcaggggag

SEQ ID NO: 24912 - RNA, 19 nt, Artificial Sequence
  Description of Artificial Sequence: Synthetic oligonucleotide
ccuagaaaccucaaugcgg

SEQ ID NO: 24913 - RNA, 19 nt, Artificial Sequence
  Description of Artificial Sequence: Synthetic oligonucleotide
ucaggacauaaugacacca

SEQ ID NO: 24914 - RNA, 19 nt, Artificial Sequence
  Description of Artificial Sequence: Synthetic oligonucleotide
augucguccaaaguaauug

SEQ ID NO: 24915 - RNA, 19 nt, Artificial Sequence
  Description of Artificial Sequence: Synthetic oligonucleotide
aauaccugauccucuugau

SEQ ID NO: 24916 - RNA, 19 nt, Artificial Sequence
  Description of Artificial Sequence: Synthetic oligonucleotide
ucgcuaagcuaaaccaucc

SEQ ID NO: 24917 - RNA, 19 nt, Artificial Sequence
  Description of Artificial Sequence: Synthetic oligonucleotide
augaaaaccccaucacaug

SEQ ID NO: 24918 - RNA, 19 nt, Artificial Sequence
  Description of Artificial Sequence: Synthetic oligonucleotide
acaacauuacugucuggug

SEQ ID NO: 24919 - RNA, 19 nt, Artificial Sequence
  Description of Artificial Sequence: Synthetic oligonucleotide
uugcuaagaucccuaggca

SEQ ID NO: 24920 - RNA, 19 nt, Artificial Sequence
  Description of Artificial Sequence: Synthetic oligonucleotide
uggaagugugcacccauca

SEQ ID NO: 24921 - RNA, 19 nt, Artificial Sequence
  Description of Artificial Sequence: Synthetic oligonucleotide
aaauaguaguagucuuuaa

SEQ ID NO: 24922 - RNA, 19 nt, Artificial Sequence
  Description of Artificial Sequence: Synthetic oligonucleotide
uuaucacuacauuccaguc

SEQ ID NO: 24923 - RNA, 19 nt, Artificial Sequence
  Description of Artificial Sequence: Synthetic oligonucleotide
ugggauuugccuacuuuac

SEQ ID NO: 24924 - RNA, 19 nt, Artificial Sequence
  Description of Artificial Sequence: Synthetic oligonucleotide
cauuaaccaccacacgcgg

SEQ ID NO: 24925 - RNA, 19 nt, Artificial Sequence
  Description of Artificial Sequence: Synthetic oligonucleotide
uagaugguugcauaccauc

SEQ ID NO: 24926 - RNA, 19 nt, Artificial Sequence
  Description of Artificial Sequence: Synthetic oligonucleotide
ugucguccaaaguaauuga

SEQ ID NO: 24927 - RNA, 19 nt, Artificial Sequence
  Description of Artificial Sequence: Synthetic oligonucleotide
acaggauacauagcacuac

SEQ ID NO: 24928 - RNA, 19 nt, Artificial Sequence
  Description of Artificial Sequence: Synthetic oligonucleotide
uugccuacuuuacacugca

SEQ ID NO: 24929 - RNA, 19 nt, Artificial Sequence
  Description of Artificial Sequence: Synthetic oligonucleotide
ucgucguuccucaucaaaa

SEQ ID NO: 24930 - RNA, 19 nt, Artificial Sequence
  Description of Artificial Sequence: Synthetic oligonucleotide
uccaacgcacugaagugca

SEQ ID NO: 24931 - RNA, 19 nt, Artificial Sequence
  Description of Artificial Sequence: Synthetic oligonucleotide
acguguagauaucaucucu

SEQ ID NO: 24932 - RNA, 19 nt, Artificial Sequence
  Description of Artificial Sequence: Synthetic oligonucleotide
cuaucuaccugaaggcgug

SEQ ID NO: 24933 - RNA, 19 nt, Artificial Sequence
  Description of Artificial Sequence: Synthetic oligonucleotide
auuagagacuuugguuuac

SEQ ID NO: 24934 - RNA, 19 nt, Artificial Sequence
  Description of Artificial Sequence: Synthetic oligonucleotide
agaguucuagguaagcucu

SEQ ID NO: 24935 - RNA, 19 nt, Artificial Sequence
  Description of Artificial Sequence: Synthetic oligonucleotide
ugucgcugggaccugacuc

SEQ ID NO: 24936 - RNA, 19 nt, Artificial Sequence
  Description of Artificial Sequence: Synthetic oligonucleotide
aauguuguacuaggaauuu

SEQ ID NO: 24937 - RNA, 19 nt, Artificial Sequence
  Description of Artificial Sequence: Synthetic oligonucleotide
ugccuaacucuggagaugc

SEQ ID NO: 24938 - RNA, 19 nt, Artificial Sequence
  Description of Artificial Sequence: Synthetic oligonucleotide
aaacuauuaugaaggucug

SEQ ID NO: 24939 - RNA, 19 nt, Artificial Sequence
  Description of Artificial Sequence: Synthetic oligonucleotide
auagcuuucauagggcgga

SEQ ID NO: 24940 - RNA, 19 nt, Artificial Sequence
  Description of Artificial Sequence: Synthetic oligonucleotide
uccacgaaauuuuaucauu

SEQ ID NO: 24941 - RNA, 19 nt, Artificial Sequence
  Description of Artificial Sequence: Synthetic oligonucleotide
auagacuuagagccacucu

SEQ ID NO: 24942 - RNA, 19 nt, Artificial Sequence
  Description of Artificial Sequence: Synthetic oligonucleotide
uuggcccaaggauaaauaa

SEQ ID NO: 24943 - RNA, 19 nt, Artificial Sequence
  Description of Artificial Sequence: Synthetic oligonucleotide
aaaacguacaggauacaua

SEQ ID NO: 24944 - RNA, 19 nt, Artificial Sequence
  Description of Artificial Sequence: Synthetic oligonucleotide
gcaguaaccgcgcucgucg

SEQ ID NO: 24945 - RNA, 19 nt, Artificial Sequence
  Description of Artificial Sequence: Synthetic oligonucleotide
cucuaucuaccugaaggcg

SEQ ID NO: 24946 - RNA, 19 nt, Artificial Sequence
  Description of Artificial Sequence: Synthetic oligonucleotide
cucgcuaagcuaaaccauc

SEQ ID NO: 24947 - RNA, 19 nt, Artificial Sequence
  Description of Artificial Sequence: Synthetic oligonucleotide
agcgauuuggauagauaac

SEQ ID NO: 24948 - RNA, 19 nt, Artificial Sequence
  Description of Artificial Sequence: Synthetic oligonucleotide
cauguaaauggcuugauuu

SEQ ID NO: 24949 - RNA, 19 nt, Artificial Sequence
  Description of Artificial Sequence: Synthetic oligonucleotide
augggauuugccuacuuua

SEQ ID NO: 24950 - RNA, 19 nt, Artificial Sequence
  Description of Artificial Sequence: Synthetic oligonucleotide
ggauagauaaccuuuuaua

SEQ ID NO: 24951 - RNA, 19 nt, Artificial Sequence
  Description of Artificial Sequence: Synthetic oligonucleotide
aguaacagggauacuuuug

SEQ ID NO: 24952 - RNA, 19 nt, Artificial Sequence
  Description of Artificial Sequence: Synthetic oligonucleotide
uccaguaauuggaguauuc

SEQ ID NO: 24953 - RNA, 19 nt, Artificial Sequence
  Description of Artificial Sequence: Synthetic oligonucleotide
cuaaaugaaaccuucgguu

SEQ ID NO: 24954 - RNA, 19 nt, Artificial Sequence
  Description of Artificial Sequence: Synthetic oligonucleotide
ugugcacccaucagugcug

SEQ ID NO: 24955 - RNA, 19 nt, Artificial Sequence
  Description of Artificial Sequence: Synthetic oligonucleotide
gcgauuuggauagauaacc

SEQ ID NO: 24956 - RNA, 19 nt, Artificial Sequence
  Description of Artificial Sequence: Synthetic oligonucleotide
guugcauaccaucacccca

SEQ ID NO: 24957 - RNA, 19 nt, Artificial Sequence
  Description of Artificial Sequence: Synthetic oligonucleotide
auuaaccaccacacgcggc

SEQ ID NO: 24958 - RNA, 19 nt, Artificial Sequence
  Description of Artificial Sequence: Synthetic oligonucleotide
ugaaaccuucgguuuagaa

SEQ ID NO: 24959 - RNA, 19 nt, Artificial Sequence
  Description of Artificial Sequence: Synthetic oligonucleotide
ucuaccugaaggcguggga

SEQ ID NO: 24960 - RNA, 19 nt, Artificial Sequence
  Description of Artificial Sequence: Synthetic oligonucleotide
ccucagggcaaaauuaucc

SEQ ID NO: 24961 - RNA, 19 nt, Artificial Sequence
  Description of Artificial Sequence: Synthetic oligonucleotide
uaaguuagauguacuuauu

SEQ ID NO: 24962 - RNA, 19 nt, Artificial Sequence
  Description of Artificial Sequence: Synthetic oligonucleotide
augacuugucgauaggauu

SEQ ID NO: 24963 - RNA, 19 nt, Artificial Sequence
  Description of Artificial Sequence: Synthetic oligonucleotide
gagauacaaccauucccug

SEQ ID NO: 24964 - RNA, 19 nt, Artificial Sequence
  Description of Artificial Sequence: Synthetic oligonucleotide
auguugcuaagaucccuag

SEQ ID NO: 24965 - RNA, 19 nt, Artificial Sequence
  Description of Artificial Sequence: Synthetic oligonucleotide
guguugaccuuccagucac

SEQ ID NO: 24966 - RNA, 19 nt, Artificial Sequence
  Description of Artificial Sequence: Synthetic oligonucleotide
aucagguaacauaauuuug

SEQ ID NO: 24967 - RNA, 19 nt, Artificial Sequence
  Description of Artificial Sequence: Synthetic oligonucleotide
aggauaaauguuccggauu

SEQ ID NO: 24968 - RNA, 19 nt, Artificial Sequence
  Description of Artificial Sequence: Synthetic oligonucleotide
auguacuuauuagagacuu

SEQ ID NO: 24969 - RNA, 19 nt, Artificial Sequence
  Description of Artificial Sequence: Synthetic oligonucleotide
cacaauugauguugcuaag

SEQ ID NO: 24970 - RNA, 19 nt, Artificial Sequence
  Description of Artificial Sequence: Synthetic oligonucleotide
aagcgaugggauuugccua

SEQ ID NO: 24971 - RNA, 19 nt, Artificial Sequence
  Description of Artificial Sequence: Synthetic oligonucleotide
guagucuuuaaguguagaa

SEQ ID NO: 24972 - RNA, 19 nt, Artificial Sequence
  Description of Artificial Sequence: Synthetic oligonucleotide
acugccuaacucuggagau

SEQ ID NO: 24973 - RNA, 19 nt, Artificial Sequence
  Description of Artificial Sequence: Synthetic oligonucleotide
uguaccgacugcuggaguu

SEQ ID NO: 24974 - RNA, 19 nt, Artificial Sequence
  Description of Artificial Sequence: Synthetic oligonucleotide
ugguaucauucucaaguau

SEQ ID NO: 24975 - RNA, 19 nt, Artificial Sequence
  Description of Artificial Sequence: Synthetic oligonucleotide
cuuguuaugugguuuagau

SEQ ID NO: 24976 - RNA, 19 nt, Artificial Sequence
  Description of Artificial Sequence: Synthetic oligonucleotide
aaugugacuuguaccgacu

SEQ ID NO: 24977 - RNA, 19 nt, Artificial Sequence
  Description of Artificial Sequence: Synthetic oligonucleotide
ucugcaacguguagauauc

SEQ ID NO: 24978 - RNA, 19 nt, Artificial Sequence
  Description of Artificial Sequence: Synthetic oligonucleotide
uagacgacgggaugagcca

SEQ ID NO: 24979 - RNA, 19 nt, Artificial Sequence
  Description of Artificial Sequence: Synthetic oligonucleotide
cuuauuagagacuuugguu

SEQ ID NO: 24980 - RNA, 19 nt, Artificial Sequence
  Description of Artificial Sequence: Synthetic oligonucleotide
cuaccugaaggcgugggag

SEQ ID NO: 24981 - RNA, 19 nt, Artificial Sequence
  Description of Artificial Sequence: Synthetic oligonucleotide
gacaacauuacugucuggu

SEQ ID NO: 24982 - RNA, 19 nt, Artificial Sequence
  Description of Artificial Sequence: Synthetic oligonucleotide
uuaaucgcuuccagagauc

SEQ ID NO: 24983 - RNA, 19 nt, Artificial Sequence
  Description of Artificial Sequence: Synthetic oligonucleotide
caagugugggcuuuuggca

SEQ ID NO: 24984 - RNA, 19 nt, Artificial Sequence
  Description of Artificial Sequence: Synthetic oligonucleotide
cuugucgauaggauuccuc

SEQ ID NO: 24985 - RNA, 19 nt, Artificial Sequence
  Description of Artificial Sequence: Synthetic oligonucleotide
auucccauuauucguccaa

SEQ ID NO: 24986 - RNA, 19 nt, Artificial Sequence
  Description of Artificial Sequence: Synthetic oligonucleotide
aguguuuuaaccggguguu

SEQ ID NO: 24987 - RNA, 19 nt, Artificial Sequence
  Description of Artificial Sequence: Synthetic oligonucleotide
cccuacuucuaaaugaaac

SEQ ID NO: 24988 - RNA, 19 nt, Artificial Sequence
  Description of Artificial Sequence: Synthetic oligonucleotide
guacaguguuuuaaccggg

SEQ ID NO: 24989 - RNA, 19 nt, Artificial Sequence
  Description of Artificial Sequence: Synthetic oligonucleotide
ucguggaucgaugccaugu

SEQ ID NO: 24990 - RNA, 19 nt, Artificial Sequence
  Description of Artificial Sequence: Synthetic oligonucleotide
aaccucaaugcggcagugg

SEQ ID NO: 24991 - RNA, 19 nt, Artificial Sequence
  Description of Artificial Sequence: Synthetic oligonucleotide
uucuagacgacgggaugag

SEQ ID NO: 24992 - RNA, 19 nt, Artificial Sequence
  Description of Artificial Sequence: Synthetic oligonucleotide
cuacauuccaguccugaga

SEQ ID NO: 24993 - RNA, 19 nt, Artificial Sequence
  Description of Artificial Sequence: Synthetic oligonucleotide
auguuguacuaggaauuuc

SEQ ID NO: 24994 - RNA, 19 nt, Artificial Sequence
  Description of Artificial Sequence: Synthetic oligonucleotide
ugcaacguguagauaucau

SEQ ID NO: 24995 - RNA, 19 nt, Artificial Sequence
  Description of Artificial Sequence: Synthetic oligonucleotide
uccucauggcaaagcauaa

SEQ ID NO: 24996 - RNA, 19 nt, Artificial Sequence
  Description of Artificial Sequence: Synthetic oligonucleotide
ugucgauaggauuccucaa

SEQ ID NO: 24997 - RNA, 19 nt, Artificial Sequence
  Description of Artificial Sequence: Synthetic oligonucleotide
caaguauccacaccaaacu

SEQ ID NO: 24998 - RNA, 19 nt, Artificial Sequence
  Description of Artificial Sequence: Synthetic oligonucleotide
gacuuugguuuacagaaau

SEQ ID NO: 24999 - RNA, 19 nt, Artificial Sequence
  Description of Artificial Sequence: Synthetic oligonucleotide
uccucagggcaaaauuauc

SEQ ID NO: 25000 - RNA, 19 nt, Artificial Sequence
  Description of Artificial Sequence: Synthetic oligonucleotide
cugugaagcgauuuggaua

SEQ ID NO: 25001 - RNA, 19 nt, Artificial Sequence
  Description of Artificial Sequence: Synthetic oligonucleotide
uagggcggaaugucuauuc

SEQ ID NO: 25002 - RNA, 19 nt, Artificial Sequence
  Description of Artificial Sequence: Synthetic oligonucleotide
gagaccguuggcccaagga

SEQ ID NO: 25003 - RNA, 19 nt, Artificial Sequence
  Description of Artificial Sequence: Synthetic oligonucleotide
ugcgagagacgagagucug

SEQ ID NO: 25004 - RNA, 19 nt, Artificial Sequence
  Description of Artificial Sequence: Synthetic oligonucleotide
ugaagcgauuuggauagau

SEQ ID NO: 25005 - RNA, 19 nt, Artificial Sequence
  Description of Artificial Sequence: Synthetic oligonucleotide
aguuguucgugcaggcauc

SEQ ID NO: 25006 - RNA, 19 nt, Artificial Sequence
  Description of Artificial Sequence: Synthetic oligonucleotide
ucggagaaaucuccaguuu

SEQ ID NO: 25007 - RNA, 19 nt, Artificial Sequence
  Description of Artificial Sequence: Synthetic oligonucleotide
acucaguuuaaauguugua

SEQ ID NO: 25008 - RNA, 19 nt, Artificial Sequence
  Description of Artificial Sequence: Synthetic oligonucleotide
uccggauuaacugcagaau

SEQ ID NO: 25009 - RNA, 19 nt, Artificial Sequence
  Description of Artificial Sequence: Synthetic oligonucleotide
agaugaaaguaaauucaaa

SEQ ID NO: 25010 - RNA, 19 nt, Artificial Sequence
  Description of Artificial Sequence: Synthetic oligonucleotide
caccccagaauuuugguua

SEQ ID NO: 25011 - RNA, 19 nt, Artificial Sequence
  Description of Artificial Sequence: Synthetic oligonucleotide
gucgauaggauuccucaaa

SEQ ID NO: 25012 - RNA, 19 nt, Artificial Sequence
  Description of Artificial Sequence: Synthetic oligonucleotide
cagauaucacuugcuacug

SEQ ID NO: 25013 - RNA, 19 nt, Artificial Sequence
  Description of Artificial Sequence: Synthetic oligonucleotide
ggcucgcuaagcuaaacca

SEQ ID NO: 25014 - RNA, 19 nt, Artificial Sequence
  Description of Artificial Sequence: Synthetic oligonucleotide
gaaaccucaaugcggcagu

SEQ ID NO: 25015 - RNA, 19 nt, Artificial Sequence
  Description of Artificial Sequence: Synthetic oligonucleotide
uacugcagacuguuuguua

SEQ ID NO: 25016 - RNA, 19 nt, Artificial Sequence
  Description of Artificial Sequence: Synthetic oligonucleotide
gcugacccagcaaagaaug

SEQ ID NO: 25017 - RNA, 19 nt, Artificial Sequence
  Description of Artificial Sequence: Synthetic oligonucleotide
caucucuagaauacuggaa

SEQ ID NO: 25018 - RNA, 19 nt, Artificial Sequence
  Description of Artificial Sequence: Synthetic oligonucleotide
agcacuacuuuaaaacuuu

SEQ ID NO: 25019 - RNA, 19 nt, Artificial Sequence
  Description of Artificial Sequence: Synthetic oligonucleotide
uguccugcucauguaauuu

SEQ ID NO: 25020 - RNA, 19 nt, Artificial Sequence
  Description of Artificial Sequence: Synthetic oligonucleotide
aaaccucaaugcggcagug

SEQ ID NO: 25021 - RNA, 19 nt, Artificial Sequence
  Description of Artificial Sequence: Synthetic oligonucleotide
uacagauguuauugauaaa

SEQ ID NO: 25022 - RNA, 19 nt, Artificial Sequence
  Description of Artificial Sequence: Synthetic oligonucleotide
agucucguuuauaccuugg

SEQ ID NO: 25023 - RNA, 19 nt, Artificial Sequence
  Description of Artificial Sequence: Synthetic oligonucleotide
uccccucacaguguccuag

SEQ ID NO: 25024 - RNA, 19 nt, Artificial Sequence
  Description of Artificial Sequence: Synthetic oligonucleotide
agacgacgggaugagccac

SEQ ID NO: 25025 - RNA, 19 nt, Artificial Sequence
  Description of Artificial Sequence: Synthetic oligonucleotide
cauaccaucaccccagaau

SEQ ID NO: 25026 - RNA, 19 nt, Artificial Sequence
  Description of Artificial Sequence: Synthetic oligonucleotide
aucacaugcggagaaguua

SEQ ID NO: 25027 - RNA, 19 nt, Artificial Sequence
  Description of Artificial Sequence: Synthetic oligonucleotide
caugcggagaaguuauaaa

SEQ ID NO: 25028 - RNA, 19 nt, Artificial Sequence
  Description of Artificial Sequence: Synthetic oligonucleotide
uaucuaccugaaggcgugg

SEQ ID NO: 25029 - RNA, 19 nt, Artificial Sequence
  Description of Artificial Sequence: Synthetic oligonucleotide
ggagaaaucuccaguuuac

SEQ ID NO: 25030 - RNA, 19 nt, Artificial Sequence
  Description of Artificial Sequence: Synthetic oligonucleotide
agcgcugcugaaggagacc

SEQ ID NO: 25031 - RNA, 19 nt, Artificial Sequence
  Description of Artificial Sequence: Synthetic oligonucleotide
ucaaugcggcaguggccgg

SEQ ID NO: 25032 - RNA, 19 nt, Artificial Sequence
  Description of Artificial Sequence: Synthetic oligonucleotide
acgagagucugugaagcga

SEQ ID NO: 25033 - RNA, 19 nt, Artificial Sequence
  Description of Artificial Sequence: Synthetic oligonucleotide
aaacacaacuaaacaugua

SEQ ID NO: 25034 - RNA, 19 nt, Artificial Sequence
  Description of Artificial Sequence: Synthetic oligonucleotide
acaugcggagaaguuauaa

SEQ ID NO: 25035 - RNA, 19 nt, Artificial Sequence
  Description of Artificial Sequence: Synthetic oligonucleotide
uagaaaccucaaugcggca

SEQ ID NO: 25036 - RNA, 19 nt, Artificial Sequence
  Description of Artificial Sequence: Synthetic oligonucleotide
guacaaucaucauucuagu

SEQ ID NO: 25037 - RNA, 19 nt, Artificial Sequence
  Description of Artificial Sequence: Synthetic oligonucleotide
cuucuagacgacgggauga

SEQ ID NO: 25038 - RNA, 19 nt, Artificial Sequence
  Description of Artificial Sequence: Synthetic oligonucleotide
ucucugcuagucugggguc

SEQ ID NO: 25039 - RNA, 19 nt, Artificial Sequence
  Description of Artificial Sequence: Synthetic oligonucleotide
cuacuuuacacugcaugga

SEQ ID NO: 25040 - RNA, 19 nt, Artificial Sequence
  Description of Artificial Sequence: Synthetic oligonucleotide
gucguccaaaguaauugac

SEQ ID NO: 25041 - RNA, 19 nt, Artificial Sequence
  Description of Artificial Sequence: Synthetic oligonucleotide
ggcacucguggaucgaugc

SEQ ID NO: 25042 - RNA, 19 nt, Artificial Sequence
  Description of Artificial Sequence: Synthetic oligonucleotide
uuaugaaggucuggaucaa

SEQ ID NO: 25043 - RNA, 19 nt, Artificial Sequence
  Description of Artificial Sequence: Synthetic oligonucleotide
uuguaccgacugcuggagu

SEQ ID NO: 25044 - RNA, 19 nt, Artificial Sequence
  Description of Artificial Sequence: Synthetic oligonucleotide
ccggauuaacugcagaauc

SEQ ID NO: 25045 - RNA, 19 nt, Artificial Sequence
  Description of Artificial Sequence: Synthetic oligonucleotide
aggcuuagucacaauuucu

SEQ ID NO: 25046 - RNA, 19 nt, Artificial Sequence
  Description of Artificial Sequence: Synthetic oligonucleotide
gauguacuuauuagagacu

SEQ ID NO: 25047 - RNA, 19 nt, Artificial Sequence
  Description of Artificial Sequence: Synthetic oligonucleotide
gguuaccuucuagacgacg

SEQ ID NO: 25048 - RNA, 19 nt, Artificial Sequence
  Description of Artificial Sequence: Synthetic oligonucleotide
gacuuagagccacucuugu

SEQ ID NO: 25049 - RNA, 19 nt, Artificial Sequence
  Description of Artificial Sequence: Synthetic oligonucleotide
uugcugugcgagagacgag

SEQ ID NO: 25050 - RNA, 19 nt, Artificial Sequence
  Description of Artificial Sequence: Synthetic oligonucleotide
gaagcgauuuggauagaua

SEQ ID NO: 25051 - RNA, 19 nt, Artificial Sequence
  Description of Artificial Sequence: Synthetic oligonucleotide
cuggaagugugcacccauc

SEQ ID NO: 25052 - RNA, 19 nt, Artificial Sequence
  Description of Artificial Sequence: Synthetic oligonucleotide
uaccugacccugcuguguu

SEQ ID NO: 25053 - RNA, 19 nt, Artificial Sequence
  Description of Artificial Sequence: Synthetic oligonucleotide
cgccauaugcauuauguuc

SEQ ID NO: 25054 - RNA, 19 nt, Artificial Sequence
  Description of Artificial Sequence: Synthetic oligonucleotide
agagucugugaagcgauuu

SEQ ID NO: 25055 - RNA, 19 nt, Artificial Sequence
  Description of Artificial Sequence: Synthetic oligonucleotide
cauaugcauuauguucaac

SEQ ID NO: 25056 - RNA, 19 nt, Artificial Sequence
  Description of Artificial Sequence: Synthetic oligonucleotide
gguuuagaauaaacuguac

SEQ ID NO: 25057 - RNA, 19 nt, Artificial Sequence
  Description of Artificial Sequence: Synthetic oligonucleotide
ggccuguaagugugggugg

SEQ ID NO: 25058 - RNA, 19 nt, Artificial Sequence
  Description of Artificial Sequence: Synthetic oligonucleotide
gggcucgcuaagcuaaacc

SEQ ID NO: 25059 - RNA, 19 nt, Artificial Sequence
  Description of Artificial Sequence: Synthetic oligonucleotide
guuugcuuagcaccuaguu

SEQ ID NO: 25060 - RNA, 19 nt, Artificial Sequence
  Description of Artificial Sequence: Synthetic oligonucleotide
gaggcacccgagaggaccc

SEQ ID NO: 25061 - RNA, 19 nt, Artificial Sequence
  Description of Artificial Sequence: Synthetic oligonucleotide
ucgggcguucccacugugu

SEQ ID NO: 25062 - RNA, 19 nt, Artificial Sequence
  Description of Artificial Sequence: Synthetic oligonucleotide
cagggagaguagcaaauaa

SEQ ID NO: 25063 - RNA, 19 nt, Artificial Sequence
  Description of Artificial Sequence: Synthetic oligonucleotide
agaccauaguaaggguuca

SEQ ID NO: 25064 - RNA, 19 nt, Artificial Sequence
  Description of Artificial Sequence: Synthetic oligonucleotide
uaaccggguguugaccuuc

SEQ ID NO: 25065 - RNA, 19 nt, Artificial Sequence
  Description of Artificial Sequence: Synthetic oligonucleotide
caguguuuuaaccgggugu

SEQ ID NO: 25066 - RNA, 19 nt, Artificial Sequence
  Description of Artificial Sequence: Synthetic oligonucleotide
ccaagucucguuuauaccu

SEQ ID NO: 25067 - RNA, 19 nt, Artificial Sequence
  Description of Artificial Sequence: Synthetic oligonucleotide
uaaccgcgcucgucguucc

SEQ ID NO: 25068 - RNA, 19 nt, Artificial Sequence
  Description of Artificial Sequence: Synthetic oligonucleotide
guaaccgcgcucgucguuc

SEQ ID NO: 25069 - RNA, 19 nt, Artificial Sequence
  Description of Artificial Sequence: Synthetic oligonucleotide
uuaaccggguguugaccuu

SEQ ID NO: 25070 - RNA, 19 nt, Artificial Sequence
  Description of Artificial Sequence: Synthetic oligonucleotide
acaaaacguacaggauaca

SEQ ID NO: 25071 - RNA, 19 nt, Artificial Sequence
  Description of Artificial Sequence: Synthetic oligonucleotide
agcaccuaguuggaaguaa

SEQ ID NO: 25072 - RNA, 19 nt, Artificial Sequence
  Description of Artificial Sequence: Synthetic oligonucleotide
aaauagcagcugagugugu

SEQ ID NO: 25073 - RNA, 19 nt, Artificial Sequence
  Description of Artificial Sequence: Synthetic oligonucleotide
agggcucgcuaagcuaaac

SEQ ID NO: 25074 - RNA, 19 nt, Artificial Sequence
  Description of Artificial Sequence: Synthetic oligonucleotide
ggaucgaugccaugugcuc

SEQ ID NO: 25075 - RNA, 19 nt, Artificial Sequence
  Description of Artificial Sequence: Synthetic oligonucleotide
cuguauuccagcguucucu

SEQ ID NO: 25076 - RNA, 19 nt, Artificial Sequence
  Description of Artificial Sequence: Synthetic oligonucleotide
guaccgacugcuggaguug

SEQ ID NO: 25077 - RNA, 19 nt, Artificial Sequence
  Description of Artificial Sequence: Synthetic oligonucleotide
ugucgggcguucccacugu

SEQ ID NO: 25078 - RNA, 19 nt, Artificial Sequence
  Description of Artificial Sequence: Synthetic oligonucleotide
caugacuugucgauaggau

SEQ ID NO: 25079 - RNA, 19 nt, Artificial Sequence
  Description of Artificial Sequence: Synthetic oligonucleotide
ucuaugucgcugggaccug

SEQ ID NO: 25080 - RNA, 19 nt, Artificial Sequence
  Description of Artificial Sequence: Synthetic oligonucleotide
guuguacuaggaauuucua

SEQ ID NO: 25081 - RNA, 19 nt, Artificial Sequence
  Description of Artificial Sequence: Synthetic oligonucleotide
ugguuaccuucuagacgac

SEQ ID NO: 25082 - RNA, 19 nt, Artificial Sequence
  Description of Artificial Sequence: Synthetic oligonucleotide
acccgagaggaccccguca

SEQ ID NO: 25083 - RNA, 19 nt, Artificial Sequence
  Description of Artificial Sequence: Synthetic oligonucleotide
accuucuagacgacgggau

SEQ ID NO: 25084 - RNA, 19 nt, Artificial Sequence
  Description of Artificial Sequence: Synthetic oligonucleotide
gaccguuggcccaaggaua

SEQ ID NO: 25085 - RNA, 19 nt, Artificial Sequence
  Description of Artificial Sequence: Synthetic oligonucleotide
cugccuaacucuggagaug

SEQ ID NO: 25086 - RNA, 19 nt, Artificial Sequence
  Description of Artificial Sequence: Synthetic oligonucleotide
gagaggaccccgucacaaa

SEQ ID NO: 25087 - RNA, 19 nt, Artificial Sequence
  Description of Artificial Sequence: Synthetic oligonucleotide
cugcagacuguuuguuaca

SEQ ID NO: 25088 - RNA, 19 nt, Artificial Sequence
  Description of Artificial Sequence: Synthetic oligonucleotide
gccgcuggaagugugcacc

SEQ ID NO: 25089 - RNA, 19 nt, Artificial Sequence
  Description of Artificial Sequence: Synthetic oligonucleotide
cgauugaagcaaguguggg

SEQ ID NO: 25090 - RNA, 19 nt, Artificial Sequence
  Description of Artificial Sequence: Synthetic oligonucleotide
accguuggcccaaggauaa

SEQ ID NO: 25091 - RNA, 19 nt, Artificial Sequence
  Description of Artificial Sequence: Synthetic oligonucleotide
cucgucguuccucaucaaa

SEQ ID NO: 25092 - RNA, 19 nt, Artificial Sequence
  Description of Artificial Sequence: Synthetic oligonucleotide
ucgugucgggcguucccac

SEQ ID NO: 25093 - RNA, 19 nt, Artificial Sequence
  Description of Artificial Sequence: Synthetic oligonucleotide
cugacccagcaaagaauga

SEQ ID NO: 25094 - RNA, 19 nt, Artificial Sequence
  Description of Artificial Sequence: Synthetic oligonucleotide
uccagucacuuacgucaau

SEQ ID NO: 25095 - RNA, 19 nt, Artificial Sequence
  Description of Artificial Sequence: Synthetic oligonucleotide
cucggagaaaucuccaguu

SEQ ID NO: 25096 - RNA, 19 nt, Artificial Sequence
  Description of Artificial Sequence: Synthetic oligonucleotide
uaggcacucguggaucgau

SEQ ID NO: 25097 - RNA, 19 nt, Artificial Sequence
  Description of Artificial Sequence: Synthetic oligonucleotide
ugcucacaccagucugagu

SEQ ID NO: 25098 - RNA, 19 nt, Artificial Sequence
  Description of Artificial Sequence: Synthetic oligonucleotide
gaugagccacaaaccuuga

SEQ ID NO: 25099 - RNA, 19 nt, Artificial Sequence
  Description of Artificial Sequence: Synthetic oligonucleotide
cuccacgaaauuuuaucau

SEQ ID NO: 25100 - RNA, 19 nt, Artificial Sequence
  Description of Artificial Sequence: Synthetic oligonucleotide
ccuucuagacgacgggaug

SEQ ID NO: 25101 - RNA, 19 nt, Artificial Sequence
  Description of Artificial Sequence: Synthetic oligonucleotide
caacgcacugaagugcaga

SEQ ID NO: 25102 - RNA, 19 nt, Artificial Sequence
  Description of Artificial Sequence: Synthetic oligonucleotide
agcuaggguaacccacaua

SEQ ID NO: 25103 - RNA, 19 nt, Artificial Sequence
  Description of Artificial Sequence: Synthetic oligonucleotide
aguaaccgcgcucgucguu

SEQ ID NO: 25104 - RNA, 19 nt, Artificial Sequence
  Description of Artificial Sequence: Synthetic oligonucleotide
gucgcugggaccugacucu

SEQ ID NO: 25105 - RNA, 19 nt, Artificial Sequence
  Description of Artificial Sequence: Synthetic oligonucleotide
accgcgcucgucguuccuc

SEQ ID NO: 25106 - RNA, 19 nt, Artificial Sequence
  Description of Artificial Sequence: Synthetic oligonucleotide
agaucccuaggcacucgug

SEQ ID NO: 25107 - RNA, 19 nt, Artificial Sequence
  Description of Artificial Sequence: Synthetic oligonucleotide
gggcguucccacuguguag

SEQ ID NO: 25108 - RNA, 19 nt, Artificial Sequence
  Description of Artificial Sequence: Synthetic oligonucleotide
gccuguaaguguggguggg

SEQ ID NO: 25109 - RNA, 19 nt, Artificial Sequence
  Description of Artificial Sequence: Synthetic oligonucleotide
gggcggaaugucuauucga

SEQ ID NO: 25110 - RNA, 19 nt, Artificial Sequence
  Description of Artificial Sequence: Synthetic oligonucleotide
gcacucguggaucgaugcc

SEQ ID NO: 25111 - RNA, 19 nt, Artificial Sequence
  Description of Artificial Sequence: Synthetic oligonucleotide
aaccgcgcucgucguuccu

SEQ ID NO: 25112 - RNA, 19 nt, Artificial Sequence
  Description of Artificial Sequence: Synthetic oligonucleotide
gcucaacuucggcaugggc

SEQ ID NO: 25113 - RNA, 19 nt, Artificial Sequence
  Description of Artificial Sequence: Synthetic oligonucleotide
acauaaagccugacauauu

SEQ ID NO: 25114 - RNA, 19 nt, Artificial Sequence
  Description of Artificial Sequence: Synthetic oligonucleotide
uagcaccuaguuggaagua

SEQ ID NO: 25115 - RNA, 19 nt, Artificial Sequence
  Description of Artificial Sequence: Synthetic oligonucleotide
cccauuauucguccaacaa

SEQ ID NO: 25116 - RNA, 19 nt, Artificial Sequence
  Description of Artificial Sequence: Synthetic oligonucleotide
agcaaguauaggagcuuuu

SEQ ID NO: 25117 - RNA, 19 nt, Artificial Sequence
  Description of Artificial Sequence: Synthetic oligonucleotide
caugucguccaaaguaauu

SEQ ID NO: 25118 - RNA, 19 nt, Artificial Sequence
  Description of Artificial Sequence: Synthetic oligonucleotide
ggucgugucgggcguuccc

SEQ ID NO: 25119 - RNA, 19 nt, Artificial Sequence
  Description of Artificial Sequence: Synthetic oligonucleotide
acucguggaucgaugccau

SEQ ID NO: 25120 - RNA, 19 nt, Artificial Sequence
  Description of Artificial Sequence: Synthetic oligonucleotide
ggaaguaaucagguaacau

SEQ ID NO: 25121 - RNA, 19 nt, Artificial Sequence
  Description of Artificial Sequence: Synthetic oligonucleotide
cgguuuagaauaaacugua

SEQ ID NO: 25122 - RNA, 19 nt, Artificial Sequence
  Description of Artificial Sequence: Synthetic oligonucleotide
gucgugucgggcguuccca

SEQ ID NO: 25123 - RNA, 19 nt, Artificial Sequence
  Description of Artificial Sequence: Synthetic oligonucleotide
gcugugcgagagacgagag

SEQ ID NO: 25124 - RNA, 19 nt, Artificial Sequence
  Description of Artificial Sequence: Synthetic oligonucleotide
gucugaagacuguccacau

SEQ ID NO: 25125 - RNA, 19 nt, Artificial Sequence
  Description of Artificial Sequence: Synthetic oligonucleotide
gucgggcguucccacugug

SEQ ID NO: 25126 - RNA, 19 nt, Artificial Sequence
  Description of Artificial Sequence: Synthetic oligonucleotide
aggcacucguggaucgaug

SEQ ID NO: 25127 - RNA, 19 nt, Artificial Sequence
  Description of Artificial Sequence: Synthetic oligonucleotide
agcguucucugaagcgcug

SEQ ID NO: 25128 - RNA, 19 nt, Artificial Sequence
  Description of Artificial Sequence: Synthetic oligonucleotide
uggucgugucgggcguucc

SEQ ID NO: 25129 - RNA, 19 nt, Artificial Sequence
  Description of Artificial Sequence: Synthetic oligonucleotide
cguuuauaccuuggcacug

SEQ ID NO: 25130 - RNA, 19 nt, Artificial Sequence
  Description of Artificial Sequence: Synthetic oligonucleotide
gcguguguaaguguguccu

SEQ ID NO: 25131 - RNA, 19 nt, Artificial Sequence
  Description of Artificial Sequence: Synthetic oligonucleotide
caucacaugcggagaaguu

SEQ ID NO: 25132 - RNA, 19 nt, Artificial Sequence
  Description of Artificial Sequence: Synthetic oligonucleotide
cacccgagaggaccccguc

SEQ ID NO: 25133 - RNA, 19 nt, Artificial Sequence
  Description of Artificial Sequence: Synthetic oligonucleotide
cguguagauaucaucucua

SEQ ID NO: 25134 - RNA, 19 nt, Artificial Sequence
  Description of Artificial Sequence: Synthetic oligonucleotide
cuaugucgcugggaccuga

SEQ ID NO: 25135 - RNA, 19 nt, Artificial Sequence
  Description of Artificial Sequence: Synthetic oligonucleotide
ggcggaaugucuauucgau

SEQ ID NO: 25136 - RNA, 19 nt, Artificial Sequence
  Description of Artificial Sequence: Synthetic oligonucleotide
cuggucgugucgggcguuc

SEQ ID NO: 25137 - RNA, 19 nt, Artificial Sequence
  Description of Artificial Sequence: Synthetic oligonucleotide
ucgcugggaccugacucuu

SEQ ID NO: 25138 - RNA, 19 nt, Artificial Sequence
  Description of Artificial Sequence: Synthetic oligonucleotide
ggaccccgucacaaacugc

SEQ ID NO: 25139 - RNA, 19 nt, Artificial Sequence
  Description of Artificial Sequence: Synthetic oligonucleotide
cgauuuggauagauaaccu

SEQ ID NO: 25140 - RNA, 19 nt, Artificial Sequence
  Description of Artificial Sequence: Synthetic oligonucleotide
cugugcgagagacgagagu

SEQ ID NO: 25141 - RNA, 19 nt, Artificial Sequence
  Description of Artificial Sequence: Synthetic oligonucleotide
gcauaccaucaccccagaa

SEQ ID NO: 25142 - RNA, 19 nt, Artificial Sequence
  Description of Artificial Sequence: Synthetic oligonucleotide
cucugcuagucuggggucu

SEQ ID NO: 25143 - RNA, 19 nt, Artificial Sequence
  Description of Artificial Sequence: Synthetic oligonucleotide
gugcgagagacgagagucu

SEQ ID NO: 25144 - RNA, 19 nt, Artificial Sequence
  Description of Artificial Sequence: Synthetic oligonucleotide
ccaccuuagcuaggguaac

SEQ ID NO: 25145 - RNA, 19 nt, Artificial Sequence
  Description of Artificial Sequence: Synthetic oligonucleotide
gaguucuagguaagcucuu

SEQ ID NO: 25146 - RNA, 19 nt, Artificial Sequence
  Description of Artificial Sequence: Synthetic oligonucleotide
cagggcucgcuaagcuaaa

SEQ ID NO: 25147 - RNA, 19 nt, Artificial Sequence
  Description of Artificial Sequence: Synthetic oligonucleotide
caacuucggcaugggcaca

SEQ ID NO: 25148 - RNA, 19 nt, Artificial Sequence
  Description of Artificial Sequence: Synthetic oligonucleotide
caguaaccgcgcucgucgu

SEQ ID NO: 25149 - RNA, 19 nt, Artificial Sequence
  Description of Artificial Sequence: Synthetic oligonucleotide
gcucgcuaagcuaaaccau

SEQ ID NO: 25150 - RNA, 19 nt, Artificial Sequence
  Description of Artificial Sequence: Synthetic oligonucleotide
gcaccuaguuggaaguaau

SEQ ID NO: 25151 - RNA, 19 nt, Artificial Sequence
  Description of Artificial Sequence: Synthetic oligonucleotide
ggccaagaucugcuaugua

SEQ ID NO: 25152 - RNA, 19 nt, Artificial Sequence
  Description of Artificial Sequence: Synthetic oligonucleotide
cagcauucuuuagguucaa

SEQ ID NO: 25153 - RNA, 19 nt, Artificial Sequence
  Description of Artificial Sequence: Synthetic oligonucleotide
ccucauggcaaagcauaaa

SEQ ID NO: 25154 - RNA, 19 nt, Artificial Sequence
  Description of Artificial Sequence: Synthetic oligonucleotide
cgagagucugugaagcgau

SEQ ID NO: 25155 - RNA, 19 nt, Artificial Sequence
  Description of Artificial Sequence: Synthetic oligonucleotide
ccacaacuuguccuccggu

SEQ ID NO: 25156 - RNA, 19 nt, Artificial Sequence
  Description of Artificial Sequence: Synthetic oligonucleotide
ccgcgcucgucguuccuca

SEQ ID NO: 25157 - RNA, 19 nt, Artificial Sequence
  Description of Artificial Sequence: Synthetic oligonucleotide
cgggcguucccacugugua

SEQ ID NO: 25158 - RNA, 19 nt, Artificial Sequence
  Description of Artificial Sequence: Synthetic oligonucleotide
cugcaguaaccgcgcucgu

SEQ ID NO: 25159 - RNA, 19 nt, Artificial Sequence
  Description of Artificial Sequence: Synthetic oligonucleotide
ccgagaggaccccgucaca

SEQ ID NO: 25160 - RNA, 19 nt, Artificial Sequence
  Description of Artificial Sequence: Synthetic oligonucleotide
gcguucccacuguguaguu

SEQ ID NO: 25161 - RNA, 19 nt, Artificial Sequence
  Description of Artificial Sequence: Synthetic oligonucleotide
cgugucgggcguucccacu

SEQ ID NO: 25162 - RNA, 19 nt, Artificial Sequence
  Description of Artificial Sequence: Synthetic oligonucleotide
gcuggucgugucgggcguu

SEQ ID NO: 25163 - RNA, 19 nt, Artificial Sequence
  Description of Artificial Sequence: Synthetic oligonucleotide
acaggaauuacauagaagc

SEQ ID NO: 25164 - RNA, 19 nt, Artificial Sequence
  Description of Artificial Sequence: Synthetic oligonucleotide
ucugcauugguucuuaugg

SEQ ID NO: 25165 - RNA, 19 nt, Artificial Sequence
  Description of Artificial Sequence: Synthetic oligonucleotide
aguuguuugaaauuagggg

SEQ ID NO: 25166 - RNA, 19 nt, Artificial Sequence
  Description of Artificial Sequence: Synthetic oligonucleotide
  modified_base (3)..(3): a, c, u, g, unknown or other
ucnguuuagagucugccgg

SEQ ID NO: 25167 - RNA, 19 nt, Artificial Sequence
  Description of Artificial Sequence: Synthetic oligonucleotide
ucuaauugugaacuaaugc

SEQ ID NO: 25168 - RNA, 19 nt, Artificial Sequence
  Description of Artificial Sequence: Synthetic oligonucleotide
uggacaaacaggcaaagcc

SEQ ID NO: 25169 - RNA, 19 nt, Artificial Sequence
  Description of Artificial Sequence: Synthetic oligonucleotide
uguaccauaguuugguggg

SEQ ID NO: 25170 - RNA, 19 nt, Artificial Sequence
  Description of Artificial Sequence: Synthetic oligonucleotide
aacagauagaguugcuugg

SEQ ID NO: 25171 - RNA, 19 nt, Artificial Sequence
  Description of Artificial Sequence: Synthetic oligonucleotide
uuaacauaguaaaagcaga

SEQ ID NO: 25172 - RNA, 19 nt, Artificial Sequence
  Description of Artificial Sequence: Synthetic oligonucleotide
ugauuuauugcugucacag

SEQ ID NO: 25173 - RNA, 19 nt, Artificial Sequence
  Description of Artificial Sequence: Synthetic oligonucleotide
aaguuaaaggugaacuucc

SEQ ID NO: 25174 - RNA, 19 nt, Artificial Sequence
  Description of Artificial Sequence: Synthetic oligonucleotide
gauaagaagccaaugacug

SEQ ID NO: 25175 - RNA, 19 nt, Artificial Sequence
  Description of Artificial Sequence: Synthetic oligonucleotide
ucaagguuagcgcuggagg

SEQ ID NO: 25176 - RNA, 19 nt, Artificial Sequence
  Description of Artificial Sequence: Synthetic oligonucleotide
agauaauacaucuaaucca

SEQ ID NO: 25177 - RNA, 19 nt, Artificial Sequence
  Description of Artificial Sequence: Synthetic oligonucleotide
gaacaugacagccucgugg

SEQ ID NO: 25178 - RNA, 19 nt, Artificial Sequence
  Description of Artificial Sequence: Synthetic oligonucleotide
uaugcgaaagcacugaguc

SEQ ID NO: 25179 - RNA, 19 nt, Artificial Sequence
  Description of Artificial Sequence: Synthetic oligonucleotide
uccuagagcaguuugguag

SEQ ID NO: 25180 - RNA, 19 nt, Artificial Sequence
  Description of Artificial Sequence: Synthetic oligonucleotide
uaccuugcuguuaacauag

SEQ ID NO: 25181 - RNA, 19 nt, Artificial Sequence
  Description of Artificial Sequence: Synthetic oligonucleotide
aguuugagaguauuuacug

SEQ ID NO: 25182 - RNA, 19 nt, Artificial Sequence
  Description of Artificial Sequence: Synthetic oligonucleotide
aaaccucucagauaauaca

SEQ ID NO: 25183 - RNA, 19 nt, Artificial Sequence
  Description of Artificial Sequence: Synthetic oligonucleotide
uuguaccauaguuuggugg

SEQ ID NO: 25184 - RNA, 19 nt, Artificial Sequence
  Description of Artificial Sequence: Synthetic oligonucleotide
uaauacaucuaauccaccu

SEQ ID NO: 25185 - RNA, 19 nt, Artificial Sequence
  Description of Artificial Sequence: Synthetic oligonucleotide
uauaaacccucgaagguga

SEQ ID NO: 25186 - RNA, 19 nt, Artificial Sequence
  Description of Artificial Sequence: Synthetic oligonucleotide
auuauaaacccucgaaggu

SEQ ID NO: 25187 - RNA, 19 nt, Artificial Sequence
  Description of Artificial Sequence: Synthetic oligonucleotide
augaauaguuucugaauag

SEQ ID NO: 25188 - RNA, 19 nt, Artificial Sequence
  Description of Artificial Sequence: Synthetic oligonucleotide
auauacucauuucauccuc

SEQ ID NO: 25189 - RNA, 19 nt, Artificial Sequence
  Description of Artificial Sequence: Synthetic oligonucleotide
aguguugccguccgcaggc

SEQ ID NO: 25190 - RNA, 19 nt, Artificial Sequence
  Description of Artificial Sequence: Synthetic oligonucleotide
  modified_base (9)..(9): a, c, u, g, unknown or other
uggaggucnguuuagaguc

SEQ ID NO: 25191 - RNA, 19 nt, Artificial Sequence
  Description of Artificial Sequence: Synthetic oligonucleotide
gaguuguuugaaauuaggg

SEQ ID NO: 25192 - RNA, 19 nt, Artificial Sequence
  Description of Artificial Sequence: Synthetic oligonucleotide
agacaguacaucuuugcag

SEQ ID NO: 25193 - RNA, 19 nt, Artificial Sequence
  Description of Artificial Sequence: Synthetic oligonucleotide
guacaauucccguugacgc

SEQ ID NO: 25194 - RNA, 19 nt, Artificial Sequence
  Description of Artificial Sequence: Synthetic oligonucleotide
acaugcauacuuuaaggug

SEQ ID NO: 25195 - RNA, 19 nt, Artificial Sequence
  Description of Artificial Sequence: Synthetic oligonucleotide
aagacaguacaucuuugca

SEQ ID NO: 25196 - RNA, 19 nt, Artificial Sequence
  Description of Artificial Sequence: Synthetic oligonucleotide
uucuaguucaggcaaucug

SEQ ID NO: 25197 - RNA, 19 nt, Artificial Sequence
  Description of Artificial Sequence: Synthetic oligonucleotide
ucgucuaggaguuguauug

SEQ ID NO: 25198 - RNA, 19 nt, Artificial Sequence
  Description of Artificial Sequence: Synthetic oligonucleotide
gaaccuguugcacuuguag

SEQ ID NO: 25199 - RNA, 19 nt, Artificial Sequence
  Description of Artificial Sequence: Synthetic oligonucleotide
uuauaaacccucgaaggug

SEQ ID NO: 25200 - RNA, 19 nt, Artificial Sequence
  Description of Artificial Sequence: Synthetic oligonucleotide
ucuaaagguagucgucuag

SEQ ID NO: 25201 - RNA, 19 nt, Artificial Sequence
  Description of Artificial Sequence: Synthetic oligonucleotide
uaguuugagaguauuuacu

SEQ ID NO: 25202 - RNA, 19 nt, Artificial Sequence
  Description of Artificial Sequence: Synthetic oligonucleotide
uacuuuaaggugcgguggg

SEQ ID NO: 25203 - RNA, 19 nt, Artificial Sequence
  Description of Artificial Sequence: Synthetic oligonucleotide
uuagcuaccuugcuguuaa

SEQ ID NO: 25204 - RNA, 19 nt, Artificial Sequence
  Description of Artificial Sequence: Synthetic oligonucleotide
gacuguacaauucccguug

SEQ ID NO: 25205 - RNA, 19 nt, Artificial Sequence
  Description of Artificial Sequence: Synthetic oligonucleotide
guagucaccacagagaaga

SEQ ID NO: 25206 - RNA, 19 nt, Artificial Sequence
  Description of Artificial Sequence: Synthetic oligonucleotide
agaguaauauggcugggcu

SEQ ID NO: 25207 - RNA, 19 nt, Artificial Sequence
  Description of Artificial Sequence: Synthetic oligonucleotide
agcggguggaguuuguugg

SEQ ID NO: 25208 - RNA, 19 nt, Artificial Sequence
  Description of Artificial Sequence: Synthetic oligonucleotide
cauacuuuaaggugcggug

SEQ ID NO: 25209 - RNA, 19 nt, Artificial Sequence
  Description of Artificial Sequence: Synthetic oligonucleotide
ugggcuuucaagcuggaaa

SEQ ID NO: 25210 - RNA, 19 nt, Artificial Sequence
  Description of Artificial Sequence: Synthetic oligonucleotide
cucgacaugccuuggaaag

SEQ ID NO: 25211 - RNA, 19 nt, Artificial Sequence
  Description of Artificial Sequence: Synthetic oligonucleotide
guaauugcaauucaaucaa

SEQ ID NO: 25212 - RNA, 19 nt, Artificial Sequence
  Description of Artificial Sequence: Synthetic oligonucleotide
caagguuagcgcuggaggg

SEQ ID NO: 25213 - RNA, 19 nt, Artificial Sequence
  Description of Artificial Sequence: Synthetic oligonucleotide
  modified_base (4)..(4): a, c, u, g, unknown or other
gucnguuuagagucugccg

SEQ ID NO: 25214 - RNA, 19 nt, Artificial Sequence
  Description of Artificial Sequence: Synthetic oligonucleotide
aaucugaucgccugcuccu

SEQ ID NO: 25215 - RNA, 19 nt, Artificial Sequence
  Description of Artificial Sequence: Synthetic oligonucleotide
gaggauugaugccagugcc

SEQ ID NO: 25216 - RNA, 19 nt, Artificial Sequence
  Description of Artificial Sequence: Synthetic oligonucleotide
ucuugcgacgccuugcuca

SEQ ID NO: 25217 - RNA, 19 nt, Artificial Sequence
  Description of Artificial Sequence: Synthetic oligonucleotide
uuuauugcugucacaguau

SEQ ID NO: 25218 - RNA, 19 nt, Artificial Sequence
  Description of Artificial Sequence: Synthetic oligonucleotide
uuaucgauugcuuccaauu

SEQ ID NO: 25219 - RNA, 19 nt, Artificial Sequence
  Description of Artificial Sequence: Synthetic oligonucleotide
  modified_base (12)..(12): a, c, u, g, unknown or other
acuggugaucgnuugccgg

SEQ ID NO: 25220 - RNA, 19 nt, Artificial Sequence
  Description of Artificial Sequence: Synthetic oligonucleotide
uucccguugacgcugugcc

SEQ ID NO: 25221 - RNA, 19 nt, Artificial Sequence
  Description of Artificial Sequence: Synthetic oligonucleotide
uguuacuugaacuggcaua

SEQ ID NO: 25222 - RNA, 19 nt, Artificial Sequence
  Description of Artificial Sequence: Synthetic oligonucleotide
uguggcggaaaccucucag

SEQ ID NO: 25223 - RNA, 19 nt, Artificial Sequence
  Description of Artificial Sequence: Synthetic oligonucleotide
cuggacgucaagcaaacac

SEQ ID NO: 25224 - RNA, 19 nt, Artificial Sequence
  Description of Artificial Sequence: Synthetic oligonucleotide
auacuuuaaggugcggugg

SEQ ID NO: 25225 - RNA, 19 nt, Artificial Sequence
  Description of Artificial Sequence: Synthetic oligonucleotide
acgcagaucaagguuagcg

SEQ ID NO: 25226 - RNA, 19 nt, Artificial Sequence
  Description of Artificial Sequence: Synthetic oligonucleotide
agucaguuagaaguuggcg

SEQ ID NO: 25227 - RNA, 19 nt, Artificial Sequence
  Description of Artificial Sequence: Synthetic oligonucleotide
ucaguuagaaguuggcgua

SEQ ID NO: 25228 - RNA, 19 nt, Artificial Sequence
  Description of Artificial Sequence: Synthetic oligonucleotide
ucagguaaggguccccgcc

SEQ ID NO: 25229 - RNA, 19 nt, Artificial Sequence
  Description of Artificial Sequence: Synthetic oligonucleotide
ugacuugauguugacacca

SEQ ID NO: 25230 - RNA, 19 nt, Artificial Sequence
  Description of Artificial Sequence: Synthetic oligonucleotide
gacaaaguggugaugucug

SEQ ID NO: 25231 - RNA, 19 nt, Artificial Sequence
  Description of Artificial Sequence: Synthetic oligonucleotide
agauagaguugcuuggaga

SEQ ID NO: 25232 - RNA, 19 nt, Artificial Sequence
  Description of Artificial Sequence: Synthetic oligonucleotide
aaauuagggguggugagau

SEQ ID NO: 25233 - RNA, 19 nt, Artificial Sequence
  Description of Artificial Sequence: Synthetic oligonucleotide
uauaucggcaugccguaac

SEQ ID NO: 25234 - RNA, 19 nt, Artificial Sequence
  Description of Artificial Sequence: Synthetic oligonucleotide
cauaguuugguggguaggg

SEQ ID NO: 25235 - RNA, 19 nt, Artificial Sequence
  Description of Artificial Sequence: Synthetic oligonucleotide
aagcgaagcgggcaucauc

SEQ ID NO: 25236 - RNA, 19 nt, Artificial Sequence
  Description of Artificial Sequence: Synthetic oligonucleotide
agauucacuguacacugga

SEQ ID NO: 25237 - RNA, 19 nt, Artificial Sequence
  Description of Artificial Sequence: Synthetic oligonucleotide
uuaugcgaaagcacugagu

SEQ ID NO: 25238 - RNA, 19 nt, Artificial Sequence
  Description of Artificial Sequence: Synthetic oligonucleotide
uaauugauagaaccugguu

SEQ ID NO: 25239 - RNA, 19 nt, Artificial Sequence
  Description of Artificial Sequence: Synthetic oligonucleotide
ugugcacaugagcugccgg

SEQ ID NO: 25240 - RNA, 19 nt, Artificial Sequence
  Description of Artificial Sequence: Synthetic oligonucleotide
auaauacaucuaauccacc

SEQ ID NO: 25241 - RNA, 19 nt, Artificial Sequence
  Description of Artificial Sequence: Synthetic oligonucleotide
ugagaguugguugcaguag

SEQ ID NO: 25242 - RNA, 19 nt, Artificial Sequence
  Description of Artificial Sequence: Synthetic oligonucleotide
ugucuaaagguagucgucu

SEQ ID NO: 25243 - RNA, 19 nt, Artificial Sequence
  Description of Artificial Sequence: Synthetic oligonucleotide
agcucgugucuauaucggc

SEQ ID NO: 25244 - RNA, 19 nt, Artificial Sequence
  Description of Artificial Sequence: Synthetic oligonucleotide
agugacugcacuguccauc

SEQ ID NO: 25245 - RNA, 19 nt, Artificial Sequence
  Description of Artificial Sequence: Synthetic oligonucleotide
gaaaccucucagauaauac

SEQ ID NO: 25246 - RNA, 19 nt, Artificial Sequence
  Description of Artificial Sequence: Synthetic oligonucleotide
uaggaacuagaguaauaug

SEQ ID NO: 25247 - RNA, 19 nt, Artificial Sequence
  Description of Artificial Sequence: Synthetic oligonucleotide
uccuuaugcgaaagcacug

SEQ ID NO: 25248 - RNA, 19 nt, Artificial Sequence
  Description of Artificial Sequence: Synthetic oligonucleotide
ucuauucaguagcuggaaa

SEQ ID NO: 25249 - RNA, 19 nt, Artificial Sequence
  Description of Artificial Sequence: Synthetic oligonucleotide
aggaauuacauagaagcaa

SEQ ID NO: 25250 - RNA, 19 nt, Artificial Sequence
  Description of Artificial Sequence: Synthetic oligonucleotide
cugcggguggccaaggacg

SEQ ID NO: 25251 - RNA, 19 nt, Artificial Sequence
  Description of Artificial Sequence: Synthetic oligonucleotide
cuaucuuugucuaaaggua

SEQ ID NO: 25252 - RNA, 19 nt, Artificial Sequence
  Description of Artificial Sequence: Synthetic oligonucleotide
aggguccuaguucuguuuc

SEQ ID NO: 25253 - RNA, 19 nt, Artificial Sequence
  Description of Artificial Sequence: Synthetic oligonucleotide
ggagguguuacuugaacug

SEQ ID NO: 25254 - RNA, 19 nt, Artificial Sequence
  Description of Artificial Sequence: Synthetic oligonucleotide
auaagaagccaaugacuga

SEQ ID NO: 25255 - RNA, 19 nt, Artificial Sequence
  Description of Artificial Sequence: Synthetic oligonucleotide
uuguuaugcagaaguccug

SEQ ID NO: 25256 - RNA, 19 nt, Artificial Sequence
  Description of Artificial Sequence: Synthetic oligonucleotide
  modified_base (6)..(6): a, c, u, g, unknown or other
gaucgnuugccgguuuugg

SEQ ID NO: 25257 - RNA, 19 nt, Artificial Sequence
  Description of Artificial Sequence: Synthetic oligonucleotide
aguuacuaggauaauguaa

SEQ ID NO: 25258 - RNA, 19 nt, Artificial Sequence
  Description of Artificial Sequence: Synthetic oligonucleotide
acuucuagcacuagaguca

SEQ ID NO: 25259 - RNA, 19 nt, Artificial Sequence
  Description of Artificial Sequence: Synthetic oligonucleotide
agugaagguuucucgccuc

SEQ ID NO: 25260 - RNA, 19 nt, Artificial Sequence
  Description of Artificial Sequence: Synthetic oligonucleotide
gcagcucgugucuauaucg

SEQ ID NO: 25261 - RNA, 19 nt, Artificial Sequence
  Description of Artificial Sequence: Synthetic oligonucleotide
uguagucaccacagagaag

SEQ ID NO: 25262 - RNA, 19 nt, Artificial Sequence
  Description of Artificial Sequence: Synthetic oligonucleotide
aaguuggccuccccuuggg

SEQ ID NO: 25263 - RNA, 19 nt, Artificial Sequence
  Description of Artificial Sequence: Synthetic oligonucleotide
cuuaugcgaaagcacugag

SEQ ID NO: 25264 - RNA, 19 nt, Artificial Sequence
  Description of Artificial Sequence: Synthetic oligonucleotide
ucggaucauaaauuuaauu

SEQ ID NO: 25265 - RNA, 19 nt, Artificial Sequence
  Description of Artificial Sequence: Synthetic oligonucleotide
caucuaauccaccucccug

SEQ ID NO: 25266 - RNA, 19 nt, Artificial Sequence
  Description of Artificial Sequence: Synthetic oligonucleotide
auguugacaccagugacug

SEQ ID NO: 25267 - RNA, 19 nt, Artificial Sequence
  Description of Artificial Sequence: Synthetic oligonucleotide
uugucuaaagguagucguc

SEQ ID NO: 25268 - RNA, 19 nt, Artificial Sequence
  Description of Artificial Sequence: Synthetic oligonucleotide
guuguauuggucuuucgua

SEQ ID NO: 25269 - RNA, 19 nt, Artificial Sequence
  Description of Artificial Sequence: Synthetic oligonucleotide
uccucuagucuguagucac

SEQ ID NO: 25270 - RNA, 19 nt, Artificial Sequence
  Description of Artificial Sequence: Synthetic oligonucleotide
  modified_base (15)..(15): a, c, u, g, unknown or other
caaacuggugaucgnuugc

SEQ ID NO: 25271 - RNA, 19 nt, Artificial Sequence
  Description of Artificial Sequence: Synthetic oligonucleotide
aggccugugugucuuagug

SEQ ID NO: 25272 - RNA, 19 nt, Artificial Sequence
  Description of Artificial Sequence: Synthetic oligonucleotide
uguagcaguaauuccucua

SEQ ID NO: 25273 - RNA, 19 nt, Artificial Sequence
  Description of Artificial Sequence: Synthetic oligonucleotide
auaguugcuaccacaugag

SEQ ID NO: 25274 - RNA, 19 nt, Artificial Sequence
  Description of Artificial Sequence: Synthetic oligonucleotide
cugauugugcacaugagcu

SEQ ID NO: 25275 - RNA, 19 nt, Artificial Sequence
  Description of Artificial Sequence: Synthetic oligonucleotide
gucaguggaugagaguugg

SEQ ID NO: 25276 - RNA, 19 nt, Artificial Sequence
  Description of Artificial Sequence: Synthetic oligonucleotide
uacaauucccguugacgcu

SEQ ID NO: 25277 - RNA, 19 nt, Artificial Sequence
  Description of Artificial Sequence: Synthetic oligonucleotide
ugugugagcagagguagcu

SEQ ID NO: 25278 - RNA, 19 nt, Artificial Sequence
  Description of Artificial Sequence: Synthetic oligonucleotide
  modified_base (13)..(13): a, c, u, g, unknown or other
aacuggugaucgnuugccg

SEQ ID NO: 25279 - RNA, 19 nt, Artificial Sequence
  Description of Artificial Sequence: Synthetic oligonucleotide
uccaaacugguuaucgauu

SEQ ID NO: 25280 - RNA, 19 nt, Artificial Sequence
  Description of Artificial Sequence: Synthetic oligonucleotide
uuaugucguucagucagag

SEQ ID NO: 25281 - RNA, 19 nt, Artificial Sequence
  Description of Artificial Sequence: Synthetic oligonucleotide
ugcgacgccuugcucaagc

SEQ ID NO: 25282 - RNA, 19 nt, Artificial Sequence
  Description of Artificial Sequence: Synthetic oligonucleotide
ucuauaucggcaugccgua

SEQ ID NO: 25283 - RNA, 19 nt, Artificial Sequence
  Description of Artificial Sequence: Synthetic oligonucleotide
agacaaaguggugaugucu

SEQ ID NO: 25284 - RNA, 19 nt, Artificial Sequence
  Description of Artificial Sequence: Synthetic oligonucleotide
ugcacuaguuugugacuag

SEQ ID NO: 25285 - RNA, 19 nt, Artificial Sequence
  Description of Artificial Sequence: Synthetic oligonucleotide
aauuaccagccaaauguaa

SEQ ID NO: 25286 - RNA, 19 nt, Artificial Sequence
  Description of Artificial Sequence: Synthetic oligonucleotide
ucgauugcuuccaauucua

SEQ ID NO: 25287 - RNA, 19 nt, Artificial Sequence
  Description of Artificial Sequence: Synthetic oligonucleotide
ugcacaugagcugccgggg

SEQ ID NO: 25288 - RNA, 19 nt, Artificial Sequence
  Description of Artificial Sequence: Synthetic oligonucleotide
uacuaggauaauguaaauu

SEQ ID NO: 25289 - RNA, 19 nt, Artificial Sequence
  Description of Artificial Sequence: Synthetic oligonucleotide
gcugauugugcacaugagc

SEQ ID NO: 25290 - RNA, 19 nt, Artificial Sequence
  Description of Artificial Sequence: Synthetic oligonucleotide
ggaguuguuugaaauuagg

SEQ ID NO: 25291 - RNA, 19 nt, Artificial Sequence
  Description of Artificial Sequence: Synthetic oligonucleotide
caugccugaccucauguuc

SEQ ID NO: 25292 - RNA, 19 nt, Artificial Sequence
  Description of Artificial Sequence: Synthetic oligonucleotide
  modified_base (7)..(7): a, c, u, g, unknown or other
ugaucgnuugccgguuuug

SEQ ID NO: 25293 - RNA, 19 nt, Artificial Sequence
  Description of Artificial Sequence: Synthetic oligonucleotide
acaauucccguugacgcug

SEQ ID NO: 25294 - RNA, 19 nt, Artificial Sequence
  Description of Artificial Sequence: Synthetic oligonucleotide
aaggucaguggaugagagu

SEQ ID NO: 25295 - RNA, 19 nt, Artificial Sequence
  Description of Artificial Sequence: Synthetic oligonucleotide
acuaaugcauuggucgucu

SEQ ID NO: 25296 - RNA, 19 nt, Artificial Sequence
  Description of Artificial Sequence: Synthetic oligonucleotide
aguaauuccucuagucugu

SEQ ID NO: 25297 - RNA, 19 nt, Artificial Sequence
  Description of Artificial Sequence: Synthetic oligonucleotide
caggaauuacauagaagca

SEQ ID NO: 25298 - RNA, 19 nt, Artificial Sequence
  Description of Artificial Sequence: Synthetic oligonucleotide
ucggggagguguuacuuga

SEQ ID NO: 25299 - RNA, 19 nt, Artificial Sequence
  Description of Artificial Sequence: Synthetic oligonucleotide
cagauagaguugcuuggag

SEQ ID NO: 25300 - RNA, 19 nt, Artificial Sequence
  Description of Artificial Sequence: Synthetic oligonucleotide
aucaagguuagcgcuggag

SEQ ID NO: 25301 - RNA, 19 nt, Artificial Sequence
  Description of Artificial Sequence: Synthetic oligonucleotide
cuucuagcacuagagucag

SEQ ID NO: 25302 - RNA, 19 nt, Artificial Sequence
  Description of Artificial Sequence: Synthetic oligonucleotide
cagcucgugucuauaucgg

SEQ ID NO: 25303 - RNA, 19 nt, Artificial Sequence
  Description of Artificial Sequence: Synthetic oligonucleotide
uguaagcauccaguucuag

SEQ ID NO: 25304 - RNA, 19 nt, Artificial Sequence
  Description of Artificial Sequence: Synthetic oligonucleotide
aaggacgccucaggguugg

SEQ ID NO: 25305 - RNA, 19 nt, Artificial Sequence
  Description of Artificial Sequence: Synthetic oligonucleotide
cuagucuguagucaccaca

SEQ ID NO: 25306 - RNA, 19 nt, Artificial Sequence
  Description of Artificial Sequence: Synthetic oligonucleotide
gcggaaaccucucagauaa

SEQ ID NO: 25307 - RNA, 19 nt, Artificial Sequence
  Description of Artificial Sequence: Synthetic oligonucleotide
uauugcugucacaguauua

SEQ ID NO: 25308 - RNA, 19 nt, Artificial Sequence
  Description of Artificial Sequence: Synthetic oligonucleotide
uaugucguucagucagaga

SEQ ID NO: 25309 - RNA, 19 nt, Artificial Sequence
  Description of Artificial Sequence: Synthetic oligonucleotide
uggcggaaaccucucagau

SEQ ID NO: 25310 - RNA, 19 nt, Artificial Sequence
  Description of Artificial Sequence: Synthetic oligonucleotide
agguccuuaugcgaaagca

SEQ ID NO: 25311 - RNA, 19 nt, Artificial Sequence
  Description of Artificial Sequence: Synthetic oligonucleotide
  modified_base (5)..(5): a, c, u, g, unknown or other
aucgnuugccgguuuuggu

SEQ ID NO: 25312 - RNA, 19 nt, Artificial Sequence
  Description of Artificial Sequence: Synthetic oligonucleotide
uguuucccauuguuccuug

SEQ ID NO: 25313 - RNA, 19 nt, Artificial Sequence
  Description of Artificial Sequence: Synthetic oligonucleotide
auaucggcaugccguaacu

SEQ ID NO: 25314 - RNA, 19 nt, Artificial Sequence
  Description of Artificial Sequence: Synthetic oligonucleotide
agcgaagcgggcaucaucu

SEQ ID NO: 25315 - RNA, 19 nt, Artificial Sequence
  Description of Artificial Sequence: Synthetic oligonucleotide
cuuggccucucuugcgacg

SEQ ID NO: 25316 - RNA, 19 nt, Artificial Sequence
  Description of Artificial Sequence: Synthetic oligonucleotide
gaacuaaugcauuggucgu

SEQ ID NO: 25317 - RNA, 19 nt, Artificial Sequence
  Description of Artificial Sequence: Synthetic oligonucleotide
  modified_base (7)..(7): a, c, u, g, unknown or other
gaggucnguuuagagucug

SEQ ID NO: 25318 - RNA, 19 nt, Artificial Sequence
  Description of Artificial Sequence: Synthetic oligonucleotide
cugugcgggagauggcugg

SEQ ID NO: 25319 - RNA, 19 nt, Artificial Sequence
  Description of Artificial Sequence: Synthetic oligonucleotide
caaaguuggccuccccuug

SEQ ID NO: 25320 - RNA, 19 nt, Artificial Sequence
  Description of Artificial Sequence: Synthetic oligonucleotide
caugccguaacugcuguuc

SEQ ID NO: 25321 - RNA, 19 nt, Artificial Sequence
  Description of Artificial Sequence: Synthetic oligonucleotide
uucagguaaggguccccgc

SEQ ID NO: 25322 - RNA, 19 nt, Artificial Sequence
  Description of Artificial Sequence: Synthetic oligonucleotide
acagauagaguugcuugga

SEQ ID NO: 25323 - RNA, 19 nt, Artificial Sequence
  Description of Artificial Sequence: Synthetic oligonucleotide
acuguacaauucccguuga

SEQ ID NO: 25324 - RNA, 19 nt, Artificial Sequence
  Description of Artificial Sequence: Synthetic oligonucleotide
aacgaccuccuagagcagu

SEQ ID NO: 25325 - RNA, 19 nt, Artificial Sequence
  Description of Artificial Sequence: Synthetic oligonucleotide
ucuagucuguagucaccac

SEQ ID NO: 25326 - RNA, 19 nt, Artificial Sequence
  Description of Artificial Sequence: Synthetic oligonucleotide
cacuggacgucaagcaaac

SEQ ID NO: 25327 - RNA, 19 nt, Artificial Sequence
  Description of Artificial Sequence: Synthetic oligonucleotide
guccccgccuaccagauuc

SEQ ID NO: 25328 - RNA, 19 nt, Artificial Sequence
  Description of Artificial Sequence: Synthetic oligonucleotide
uugugcacaugagcugccg

SEQ ID NO: 25329 - RNA, 19 nt, Artificial Sequence
  Description of Artificial Sequence: Synthetic oligonucleotide
gucuauaucggcaugccgu

SEQ ID NO: 25330 - RNA, 19 nt, Artificial Sequence
  Description of Artificial Sequence: Synthetic oligonucleotide
ucgugucuauaucggcaug

SEQ ID NO: 25331 - RNA, 19 nt, Artificial Sequence
  Description of Artificial Sequence: Synthetic oligonucleotide
ucguucagucagagaacug

SEQ ID NO: 25332 - RNA, 19 nt, Artificial Sequence
  Description of Artificial Sequence: Synthetic oligonucleotide
caaacaggggaaacgaccu

SEQ ID NO: 25333 - RNA, 19 nt, Artificial Sequence
  Description of Artificial Sequence: Synthetic oligonucleotide
guaggaacuagaguaauau

SEQ ID NO: 25334 - RNA, 19 nt, Artificial Sequence
  Description of Artificial Sequence: Synthetic oligonucleotide
augcgaaagcacugaguca

SEQ ID NO: 25335 - RNA, 19 nt, Artificial Sequence
  Description of Artificial Sequence: Synthetic oligonucleotide
cacccugaggaagacgggg

SEQ ID NO: 25336 - RNA, 19 nt, Artificial Sequence
  Description of Artificial Sequence: Synthetic oligonucleotide
uuuagcuaccuugcuguua

SEQ ID NO: 25337 - RNA, 19 nt, Artificial Sequence
  Description of Artificial Sequence: Synthetic oligonucleotide
uguugccguccgcaggccc

SEQ ID NO: 25338 - RNA, 19 nt, Artificial Sequence
  Description of Artificial Sequence: Synthetic oligonucleotide
gugaacuaaugcauugguc

SEQ ID NO: 25339 - RNA, 19 nt, Artificial Sequence
  Description of Artificial Sequence: Synthetic oligonucleotide
  modified_base (5)..(5): a, c, u, g, unknown or other
ggucnguuuagagucugcc

SEQ ID NO: 25340 - RNA, 19 nt, Artificial Sequence
  Description of Artificial Sequence: Synthetic oligonucleotide
cugaggcgugaucugcugc

SEQ ID NO: 25341 - RNA, 19 nt, Artificial Sequence
  Description of Artificial Sequence: Synthetic oligonucleotide
augccaacagauagaguug

SEQ ID NO: 25342 - RNA, 19 nt, Artificial Sequence
  Description of Artificial Sequence: Synthetic oligonucleotide
  modified_base (6)..(6): a, c, u, g, unknown or other
aggucnguuuagagucugc

SEQ ID NO: 25343 - RNA, 19 nt, Artificial Sequence
  Description of Artificial Sequence: Synthetic oligonucleotide
ccagugaagguuucucgcc

SEQ ID NO: 25344 - RNA, 19 nt, Artificial Sequence
  Description of Artificial Sequence: Synthetic oligonucleotide
cucggggagguguuacuug

SEQ ID NO: 25345 - RNA, 19 nt, Artificial Sequence
  Description of Artificial Sequence: Synthetic oligonucleotide
uagagggcgggucuuucuu

SEQ ID NO: 25346 - RNA, 19 nt, Artificial Sequence
  Description of Artificial Sequence: Synthetic oligonucleotide
gauguggguuuucgaguuc

SEQ ID NO: 25347 - RNA, 19 nt, Artificial Sequence
  Description of Artificial Sequence: Synthetic oligonucleotide
acaagcuugucgaucccca

SEQ ID NO: 25348 - RNA, 19 nt, Artificial Sequence
  Description of Artificial Sequence: Synthetic oligonucleotide
gacgccuugcucaagcucu

SEQ ID NO: 25349 - RNA, 19 nt, Artificial Sequence
  Description of Artificial Sequence: Synthetic oligonucleotide
gagggcguuagcaucucca

SEQ ID NO: 25350 - RNA, 19 nt, Artificial Sequence
  Description of Artificial Sequence: Synthetic oligonucleotide
ucccggauacuggaagaca

SEQ ID NO: 25351 - RNA, 19 nt, Artificial Sequence
  Description of Artificial Sequence: Synthetic oligonucleotide
agggcguuagcaucuccaa

SEQ ID NO: 25352 - RNA, 19 nt, Artificial Sequence
  Description of Artificial Sequence: Synthetic oligonucleotide
agcugauugugcacaugag

SEQ ID NO: 25353 - RNA, 19 nt, Artificial Sequence
  Description of Artificial Sequence: Synthetic oligonucleotide
guggcggaaaccucucaga

SEQ ID NO: 25354 - RNA, 19 nt, Artificial Sequence
  Description of Artificial Sequence: Synthetic oligonucleotide
uuugcagcucgugucuaua

SEQ ID NO: 25355 - RNA, 19 nt, Artificial Sequence
  Description of Artificial Sequence: Synthetic oligonucleotide
  modified_base (2)..(2): a, c, u, g, unknown or other
gnuugccgguuuuggugca

SEQ ID NO: 25356 - RNA, 19 nt, Artificial Sequence
  Description of Artificial Sequence: Synthetic oligonucleotide
cacaguauuauuugcccau

SEQ ID NO: 25357 - RNA, 19 nt, Artificial Sequence
  Description of Artificial Sequence: Synthetic oligonucleotide
ccgguuuuggugcaucagc

SEQ ID NO: 25358 - RNA, 19 nt, Artificial Sequence
  Description of Artificial Sequence: Synthetic oligonucleotide
auaagcuacucggaucaua

SEQ ID NO: 25359 - RNA, 19 nt, Artificial Sequence
  Description of Artificial Sequence: Synthetic oligonucleotide
uaccauaguuuggugggua

SEQ ID NO: 25360 - RNA, 19 nt, Artificial Sequence
  Description of Artificial Sequence: Synthetic oligonucleotide
gaagggguuagaggaggca

SEQ ID NO: 25361 - RNA, 19 nt, Artificial Sequence
  Description of Artificial Sequence: Synthetic oligonucleotide
guuagcgcuggagggcucc

SEQ ID NO: 25362 - RNA, 19 nt, Artificial Sequence
  Description of Artificial Sequence: Synthetic oligonucleotide
  modified_base (3)..(3): a, c, u, g, unknown or other
cgnuugccgguuuuggugc

SEQ ID NO: 25363 - RNA, 19 nt, Artificial Sequence
  Description of Artificial Sequence: Synthetic oligonucleotide
gguccuuaugcgaaagcac

SEQ ID NO: 25364 - RNA, 19 nt, Artificial Sequence
  Description of Artificial Sequence: Synthetic oligonucleotide
caaggacgccucaggguug

SEQ ID NO: 25365 - RNA, 19 nt, Artificial Sequence
  Description of Artificial Sequence: Synthetic oligonucleotide
cagguaccuccugaagggg

SEQ ID NO: 25366 - RNA, 19 nt, Artificial Sequence
  Description of Artificial Sequence: Synthetic oligonucleotide
aggauugaugccagugcca

SEQ ID NO: 25367 - RNA, 19 nt, Artificial Sequence
  Description of Artificial Sequence: Synthetic oligonucleotide
ucauccccggcaucugcaa

SEQ ID NO: 25368 - RNA, 19 nt, Artificial Sequence
  Description of Artificial Sequence: Synthetic oligonucleotide
cucgaaggugacaugcaua

SEQ ID NO: 25369 - RNA, 19 nt, Artificial Sequence
  Description of Artificial Sequence: Synthetic oligonucleotide
  modified_base (10)..(10): a, c, u, g, unknown or other
uggugaucgnuugccgguu

SEQ ID NO: 25370 - RNA, 19 nt, Artificial Sequence
  Description of Artificial Sequence: Synthetic oligonucleotide
aaacgaccuccuagagcag

SEQ ID NO: 25371 - RNA, 19 nt, Artificial Sequence
  Description of Artificial Sequence: Synthetic oligonucleotide
uagucgucuaggaguugua

SEQ ID NO: 25372 - RNA, 19 nt, Artificial Sequence
  Description of Artificial Sequence: Synthetic oligonucleotide
agucgucuaggaguuguau

SEQ ID NO: 25373 - RNA, 19 nt, Artificial Sequence
  Description of Artificial Sequence: Synthetic oligonucleotide
guuaucgauugcuuccaau

SEQ ID NO: 25374 - RNA, 19 nt, Artificial Sequence
  Description of Artificial Sequence: Synthetic oligonucleotide
gcagaucaagguuagcgcu

SEQ ID NO: 25375 - RNA, 19 nt, Artificial Sequence
  Description of Artificial Sequence: Synthetic oligonucleotide
cucaucuaauugugaacua

SEQ ID NO: 25376 - RNA, 19 nt, Artificial Sequence
  Description of Artificial Sequence: Synthetic oligonucleotide
gucguucagucagagaacu

SEQ ID NO: 25377 - RNA, 19 nt, Artificial Sequence
  Description of Artificial Sequence: Synthetic oligonucleotide
ggguuccccaucugaacug

SEQ ID NO: 25378 - RNA, 19 nt, Artificial Sequence
  Description of Artificial Sequence: Synthetic oligonucleotide
gaguaauauggcugggcuu

SEQ ID NO: 25379 - RNA, 19 nt, Artificial Sequence
  Description of Artificial Sequence: Synthetic oligonucleotide
gucuaaagguagucgucua

SEQ ID NO: 25380 - RNA, 19 nt, Artificial Sequence
  Description of Artificial Sequence: Synthetic oligonucleotide
ucccguugacgcugugcca

SEQ ID NO: 25381 - RNA, 19 nt, Artificial Sequence
  Description of Artificial Sequence: Synthetic oligonucleotide
guagucgucuaggaguugu

SEQ ID NO: 25382 - RNA, 19 nt, Artificial Sequence
  Description of Artificial Sequence: Synthetic oligonucleotide
ggaacaugacagccucgug

SEQ ID NO: 25383 - RNA, 19 nt, Artificial Sequence
  Description of Artificial Sequence: Synthetic oligonucleotide
ggugcauauguagaagcaa

SEQ ID NO: 25384 - RNA, 19 nt, Artificial Sequence
  Description of Artificial Sequence: Synthetic oligonucleotide
cuugcgacgccuugcucaa

SEQ ID NO: 25385 - RNA, 19 nt, Artificial Sequence
  Description of Artificial Sequence: Synthetic oligonucleotide
cagaagcggguggaguuug

SEQ ID NO: 25386 - RNA, 19 nt, Artificial Sequence
  Description of Artificial Sequence: Synthetic oligonucleotide
cggaucauaaauuuaauuu

SEQ ID NO: 25387 - RNA, 19 nt, Artificial Sequence
  Description of Artificial Sequence: Synthetic oligonucleotide
agguagucgucuaggaguu

SEQ ID NO: 25388 - RNA, 19 nt, Artificial Sequence
  Description of Artificial Sequence: Synthetic oligonucleotide
ccauaguuugguggguagg

SEQ ID NO: 25389 - RNA, 19 nt, Artificial Sequence
  Description of Artificial Sequence: Synthetic oligonucleotide
ggaaaccucucagauaaua

SEQ ID NO: 25390 - RNA, 19 nt, Artificial Sequence
  Description of Artificial Sequence: Synthetic oligonucleotide
uucuagcacuagagucagu

SEQ ID NO: 25391 - RNA, 19 nt, Artificial Sequence
  Description of Artificial Sequence: Synthetic oligonucleotide
uugauagaaccugguucuu

SEQ ID NO: 25392 - RNA, 19 nt, Artificial Sequence
  Description of Artificial Sequence: Synthetic oligonucleotide
aucugaucgccugcuccug

SEQ ID NO: 25393 - RNA, 19 nt, Artificial Sequence
  Description of Artificial Sequence: Synthetic oligonucleotide
  modified_base (11)..(11): a, c, u, g, unknown or other
cuggugaucgnuugccggu

SEQ ID NO: 25394 - RNA, 19 nt, Artificial Sequence
  Description of Artificial Sequence: Synthetic oligonucleotide
gacgcagaucaagguuagc

SEQ ID NO: 25395 - RNA, 19 nt, Artificial Sequence
  Description of Artificial Sequence: Synthetic oligonucleotide
cgugucuauaucggcaugc

SEQ ID NO: 25396 - RNA, 19 nt, Artificial Sequence
  Description of Artificial Sequence: Synthetic oligonucleotide
ugugcgggagauggcuggu

SEQ ID NO: 25397 - RNA, 19 nt, Artificial Sequence
  Description of Artificial Sequence: Synthetic oligonucleotide
gcccauggaaucugaucgc

SEQ ID NO: 25398 - RNA, 19 nt, Artificial Sequence
  Description of Artificial Sequence: Synthetic oligonucleotide
cugcacuaguuugugacua

SEQ ID NO: 25399 - RNA, 19 nt, Artificial Sequence
  Description of Artificial Sequence: Synthetic oligonucleotide
ucgauccccagcgcucugu

SEQ ID NO: 25400 - RNA, 19 nt, Artificial Sequence
  Description of Artificial Sequence: Synthetic oligonucleotide
ggacgcagaucaagguuag

SEQ ID NO: 25401 - RNA, 19 nt, Artificial Sequence
  Description of Artificial Sequence: Synthetic oligonucleotide
agguaaggguccccgccua

SEQ ID NO: 25402 - RNA, 19 nt, Artificial Sequence
  Description of Artificial Sequence: Synthetic oligonucleotide
cccauggaaucugaucgcc

SEQ ID NO: 25403 - RNA, 19 nt, Artificial Sequence
  Description of Artificial Sequence: Synthetic oligonucleotide
gugcagaauuuuaugucgu

SEQ ID NO: 25404 - RNA, 19 nt, Artificial Sequence
  Description of Artificial Sequence: Synthetic oligonucleotide
ucgccucgacaugccuugg

SEQ ID NO: 25405 - RNA, 19 nt, Artificial Sequence
  Description of Artificial Sequence: Synthetic oligonucleotide
uugccgguuuuggugcauc

SEQ ID NO: 25406 - RNA, 19 nt, Artificial Sequence
  Description of Artificial Sequence: Synthetic oligonucleotide
cgucuaggaguuguauugg

SEQ ID NO: 25407 - RNA, 19 nt, Artificial Sequence
  Description of Artificial Sequence: Synthetic oligonucleotide
ucggcaccauggagcuccc

SEQ ID NO: 25408 - RNA, 19 nt, Artificial Sequence
  Description of Artificial Sequence: Synthetic oligonucleotide
cugaucccggauacuggaa

SEQ ID NO: 25409 - RNA, 19 nt, Artificial Sequence
  Description of Artificial Sequence: Synthetic oligonucleotide
cuagagcaguuugguagga

SEQ ID NO: 25410 - RNA, 19 nt, Artificial Sequence
  Description of Artificial Sequence: Synthetic oligonucleotide
gggguuccccaucugaacu

SEQ ID NO: 25411 - RNA, 19 nt, Artificial Sequence
  Description of Artificial Sequence: Synthetic oligonucleotide
acuggacgucaagcaaaca

SEQ ID NO: 25412 - RNA, 19 nt, Artificial Sequence
  Description of Artificial Sequence: Synthetic oligonucleotide
gguaaggguccccgccuac

SEQ ID NO: 25413 - RNA, 19 nt, Artificial Sequence
  Description of Artificial Sequence: Synthetic oligonucleotide
guugacgcugugccaacau

SEQ ID NO: 25414 - RNA, 19 nt, Artificial Sequence
  Description of Artificial Sequence: Synthetic oligonucleotide
gguaggaacuagaguaaua

SEQ ID NO: 25415 - RNA, 19 nt, Artificial Sequence
  Description of Artificial Sequence: Synthetic oligonucleotide
cucuugcgacgccuugcuc

SEQ ID NO: 25416 - RNA, 19 nt, Artificial Sequence
  Description of Artificial Sequence: Synthetic oligonucleotide
gguucagguaagggucccc

SEQ ID NO: 25417 - RNA, 19 nt, Artificial Sequence
  Description of Artificial Sequence: Synthetic oligonucleotide
gguuucaauccaucucuau

SEQ ID NO: 25418 - RNA, 19 nt, Artificial Sequence
  Description of Artificial Sequence: Synthetic oligonucleotide
ccuuaugcgaaagcacuga

SEQ ID NO: 25419 - RNA, 19 nt, Artificial Sequence
  Description of Artificial Sequence: Synthetic oligonucleotide
aguccugaguccagagguu

SEQ ID NO: 25420 - RNA, 19 nt, Artificial Sequence
  Description of Artificial Sequence: Synthetic oligonucleotide
ggcgggucuuucuuccauc

SEQ ID NO: 25421 - RNA, 19 nt, Artificial Sequence
  Description of Artificial Sequence: Synthetic oligonucleotide
ggcggaaaccucucagaua

SEQ ID NO: 25422 - RNA, 19 nt, Artificial Sequence
  Description of Artificial Sequence: Synthetic oligonucleotide
gcauugguucuuauggccu

SEQ ID NO: 25423 - RNA, 19 nt, Artificial Sequence
  Description of Artificial Sequence: Synthetic oligonucleotide
cagggacgcagaucaaggu

SEQ ID NO: 25424 - RNA, 19 nt, Artificial Sequence
  Description of Artificial Sequence: Synthetic oligonucleotide
gccuaccagauucacugua

SEQ ID NO: 25425 - RNA, 19 nt, Artificial Sequence
  Description of Artificial Sequence: Synthetic oligonucleotide
gccucgacaugccuuggaa

SEQ ID NO: 25426 - RNA, 19 nt, Artificial Sequence
  Description of Artificial Sequence: Synthetic oligonucleotide
cagguaaggguccccgccu

SEQ ID NO: 25427 - RNA, 19 nt, Artificial Sequence
  Description of Artificial Sequence: Synthetic oligonucleotide
cuauaucggcaugccguaa

SEQ ID NO: 25428 - RNA, 19 nt, Artificial Sequence
  Description of Artificial Sequence: Synthetic oligonucleotide
cuguggcggaaaccucuca

SEQ ID NO: 25429 - RNA, 19 nt, Artificial Sequence
  Description of Artificial Sequence: Synthetic oligonucleotide
acuguacacuggacgucaa

SEQ ID NO: 25430 - RNA, 19 nt, Artificial Sequence
  Description of Artificial Sequence: Synthetic oligonucleotide
  modified_base (18)..(18): a, c, u, g, unknown or other
cugcaaacuggugaucgnu

SEQ ID NO: 25431 - RNA, 19 nt, Artificial Sequence
  Description of Artificial Sequence: Synthetic oligonucleotide
uugcgacgccuugcucaag

SEQ ID NO: 25432 - RNA, 19 nt, Artificial Sequence
  Description of Artificial Sequence: Synthetic oligonucleotide
gguagucgucuaggaguug

SEQ ID NO: 25433 - RNA, 19 nt, Artificial Sequence
  Description of Artificial Sequence: Synthetic oligonucleotide
guguugccguccgcaggcc

SEQ ID NO: 25434 - RNA, 19 nt, Artificial Sequence
  Description of Artificial Sequence: Synthetic oligonucleotide
cuuuagcuaccuugcuguu

SEQ ID NO: 25435 - RNA, 19 nt, Artificial Sequence
  Description of Artificial Sequence: Synthetic oligonucleotide
ccucgacaugccuuggaaa

SEQ ID NO: 25436 - RNA, 19 nt, Artificial Sequence
  Description of Artificial Sequence: Synthetic oligonucleotide
gugacuaguuugagaguau

SEQ ID NO: 25437 - RNA, 19 nt, Artificial Sequence
  Description of Artificial Sequence: Synthetic oligonucleotide
gcggguggaguuuguugga

SEQ ID NO: 25438 - RNA, 19 nt, Artificial Sequence
  Description of Artificial Sequence: Synthetic oligonucleotide
  modified_base (8)..(8): a, c, u, g, unknown or other
gugaucgnuugccgguuuu

SEQ ID NO: 25439 - RNA, 19 nt, Artificial Sequence
  Description of Artificial Sequence: Synthetic oligonucleotide
ggcaugccguaacugcugu

SEQ ID NO: 25440 - RNA, 19 nt, Artificial Sequence
  Description of Artificial Sequence: Synthetic oligonucleotide
ccucucuugcgacgccuug

SEQ ID NO: 25441 - RNA, 19 nt, Artificial Sequence
  Description of Artificial Sequence: Synthetic oligonucleotide
guaccuccugaagggguua

SEQ ID NO: 25442 - RNA, 19 nt, Artificial Sequence
  Description of Artificial Sequence: Synthetic oligonucleotide
gaagcggguggaguuuguu

SEQ ID NO: 25443 - RNA, 19 nt, Artificial Sequence
  Description of Artificial Sequence: Synthetic oligonucleotide
cccguugacgcugugccaa

SEQ ID NO: 25444 - RNA, 19 nt, Artificial Sequence
  Description of Artificial Sequence: Synthetic oligonucleotide
gcacuaguuugugacuagu

SEQ ID NO: 25445 - RNA, 19 nt, Artificial Sequence
  Description of Artificial Sequence: Synthetic oligonucleotide
ccguugacgcugugccaac

SEQ ID NO: 25446 - RNA, 19 nt, Artificial Sequence
  Description of Artificial Sequence: Synthetic oligonucleotide
gcgaagcgggcaucaucuc

SEQ ID NO: 25447 - RNA, 19 nt, Artificial Sequence
  Description of Artificial Sequence: Synthetic oligonucleotide
  modified_base (8)..(8): a, c, u, g, unknown or other
ggaggucnguuuagagucu

SEQ ID NO: 25448 - RNA, 19 nt, Artificial Sequence
  Description of Artificial Sequence: Synthetic oligonucleotide
  modified_base (9)..(9): a, c, u, g, unknown or other
ggugaucgnuugccgguuu

SEQ ID NO: 25449 - RNA, 19 nt, Artificial Sequence
  Description of Artificial Sequence: Synthetic oligonucleotide
cauuggucgucugguuuau

SEQ ID NO: 25450 - RNA, 19 nt, Artificial Sequence
  Description of Artificial Sequence: Synthetic oligonucleotide
gggcguuagcaucuccaau

SEQ ID NO: 25451 - RNA, 19 nt, Artificial Sequence
  Description of Artificial Sequence: Synthetic oligonucleotide
gcaugccugaccucauguu

SEQ ID NO: 25452 - RNA, 19 nt, Artificial Sequence
  Description of Artificial Sequence: Synthetic oligonucleotide
gggcgggucuuucuuccau

SEQ ID NO: 25453 - RNA, 19 nt, Artificial Sequence
  Description of Artificial Sequence: Synthetic oligonucleotide
cccgccuaccagauucacu

SEQ ID NO: 25454 - RNA, 19 nt, Artificial Sequence
  Description of Artificial Sequence: Synthetic oligonucleotide
ccccgccuaccagauucac

SEQ ID NO: 25455 - RNA, 19 nt, Artificial Sequence
  Description of Artificial Sequence: Synthetic oligonucleotide
cccuuggaacuuguuauuu

SEQ ID NO: 25456 - RNA, 19 nt, Artificial Sequence
  Description of Artificial Sequence: Synthetic oligonucleotide
cuggcgguccuuggggcuu

SEQ ID NO: 25457 - RNA, 19 nt, Artificial Sequence
  Description of Artificial Sequence: Synthetic oligonucleotide
gcaugccguaacugcuguu

SEQ ID NO: 25458 - RNA, 19 nt, Artificial Sequence
  Description of Artificial Sequence: Synthetic oligonucleotide
ccucggggagguguuacuu

SEQ ID NO: 25459 - RNA, 19 nt, Artificial Sequence
  Description of Artificial Sequence: Synthetic oligonucleotide
cggaaaccucucagauaau

SEQ ID NO: 25460 - RNA, 19 nt, Artificial Sequence
  Description of Artificial Sequence: Synthetic oligonucleotide
  modified_base (1)..(1): a, c, u, g, unknown or other
nuugccgguuuuggugcau

SEQ ID NO: 25461 - RNA, 19 nt, Artificial Sequence
  Description of Artificial Sequence: Synthetic oligonucleotide
aauuacaugaauuaguauc

SEQ ID NO: 25462 - RNA, 19 nt, Artificial Sequence
  Description of Artificial Sequence: Synthetic oligonucleotide
auaaucacuauauacacac

SEQ ID NO: 25463 - RNA, 19 nt, Artificial Sequence
  Description of Artificial Sequence: Synthetic oligonucleotide
caaaauaauacgcagaggg

SEQ ID NO: 25464 - RNA, 19 nt, Artificial Sequence
  Description of Artificial Sequence: Synthetic oligonucleotide
uuagaaacaaagcaucagg

SEQ ID NO: 25465 - RNA, 19 nt, Artificial Sequence
  Description of Artificial Sequence: Synthetic oligonucleotide
uauguuucgaauacaauag

SEQ ID NO: 25466 - RNA, 19 nt, Artificial Sequence
  Description of Artificial Sequence: Synthetic oligonucleotide
acuaauaauugucaaauag

SEQ ID NO: 25467 - RNA, 19 nt, Artificial Sequence
  Description of Artificial Sequence: Synthetic oligonucleotide
uccaauaugacaccaaugc

SEQ ID NO: 25468 - RNA, 19 nt, Artificial Sequence
  Description of Artificial Sequence: Synthetic oligonucleotide
  modified_base (5)..(5): a, c, u, g, unknown or other
aauunuuugauagaagcug

SEQ ID NO: 25469 - RNA, 19 nt, Artificial Sequence
  Description of Artificial Sequence: Synthetic oligonucleotide
ucuauaaugaaugagacua

SEQ ID NO: 25470 - RNA, 19 nt, Artificial Sequence
  Description of Artificial Sequence: Synthetic oligonucleotide
acuaucauuacaugggugg

SEQ ID NO: 25471 - RNA, 19 nt, Artificial Sequence
  Description of Artificial Sequence: Synthetic oligonucleotide
uucaauaacagauugucac

SEQ ID NO: 25472 - RNA, 19 nt, Artificial Sequence
  Description of Artificial Sequence: Synthetic oligonucleotide
auuacaugaauuaguaucc

SEQ ID NO: 25473 - RNA, 19 nt, Artificial Sequence
  Description of Artificial Sequence: Synthetic oligonucleotide
agcuauacaauuucaauag

SEQ ID NO: 25474 - RNA, 19 nt, Artificial Sequence
  Description of Artificial Sequence: Synthetic oligonucleotide
agaauuuuguacaaggugg

SEQ ID NO: 25475 - RNA, 19 nt, Artificial Sequence
  Description of Artificial Sequence: Synthetic oligonucleotide
aacaggucuuguuuggccc

SEQ ID NO: 25476 - RNA, 19 nt, Artificial Sequence
  Description of Artificial Sequence: Synthetic oligonucleotide
aaggauucgcucuauuaac

SEQ ID NO: 25477 - RNA, 19 nt, Artificial Sequence
  Description of Artificial Sequence: Synthetic oligonucleotide
aaaauaauacgcagagggc

SEQ ID NO: 25478 - RNA, 19 nt, Artificial Sequence
  Description of Artificial Sequence: Synthetic oligonucleotide
ugguuuuaaauacugguca

SEQ ID NO: 25479 - RNA, 19 nt, Artificial Sequence
  Description of Artificial Sequence: Synthetic oligonucleotide
  modified_base (4)..(4): a, c, u, g, unknown or other
auunuuugauagaagcugc

SEQ ID NO: 25480 - RNA, 19 nt, Artificial Sequence
  Description of Artificial Sequence: Synthetic oligonucleotide
uuauguuucgaauacaaua

SEQ ID NO: 25481 - RNA, 19 nt, Artificial Sequence
  Description of Artificial Sequence: Synthetic oligonucleotide
uguguuuaugcugacauag

SEQ ID NO: 25482 - RNA, 19 nt, Artificial Sequence
  Description of Artificial Sequence: Synthetic oligonucleotide
cuacccauuauuuagauca

SEQ ID NO: 25483 - RNA, 19 nt, Artificial Sequence
  Description of Artificial Sequence: Synthetic oligonucleotide
aacccaacacaccuguccc

SEQ ID NO: 25484 - RNA, 19 nt, Artificial Sequence
  Description of Artificial Sequence: Synthetic oligonucleotide
uuaguauccauaaucacua

SEQ ID NO: 25485 - RNA, 19 nt, Artificial Sequence
  Description of Artificial Sequence: Synthetic oligonucleotide
uuguuauuacuuuuaauac

SEQ ID NO: 25486 - RNA, 19 nt, Artificial Sequence
  Description of Artificial Sequence: Synthetic oligonucleotide
auaacagauugucaccagc

SEQ ID NO: 25487 - RNA, 19 nt, Artificial Sequence
  Description of Artificial Sequence: Synthetic oligonucleotide
ugagcaacucacaagauau

SEQ ID NO: 25488 - RNA, 19 nt, Artificial Sequence
  Description of Artificial Sequence: Synthetic oligonucleotide
ucaucaacuaagcuguagc

SEQ ID NO: 25489 - RNA, 19 nt, Artificial Sequence
  Description of Artificial Sequence: Synthetic oligonucleotide
aaugucuuagaaucuagaa

SEQ ID NO: 25490 - RNA, 19 nt, Artificial Sequence
  Description of Artificial Sequence: Synthetic oligonucleotide
aauaugugacucauuaaag

SEQ ID NO: 25491 - RNA, 19 nt, Artificial Sequence
  Description of Artificial Sequence: Synthetic oligonucleotide
ugaauggguuaaaaggcgg

SEQ ID NO: 25492 - RNA, 19 nt, Artificial Sequence
  Description of Artificial Sequence: Synthetic oligonucleotide
uuacagguuauccugguga

SEQ ID NO: 25493 - RNA, 19 nt, Artificial Sequence
  Description of Artificial Sequence: Synthetic oligonucleotide
acucauuugauccgccugc

SEQ ID NO: 25494 - RNA, 19 nt, Artificial Sequence
  Description of Artificial Sequence: Synthetic oligonucleotide
auauuuggauacuuguauc

SEQ ID NO: 25495 - RNA, 19 nt, Artificial Sequence
  Description of Artificial Sequence: Synthetic oligonucleotide
aagcuauacaauuucaaua

SEQ ID NO: 25496 - RNA, 19 nt, Artificial Sequence
  Description of Artificial Sequence: Synthetic oligonucleotide
gagaauuacuccuuaaaga

SEQ ID NO: 25497 - RNA, 19 nt, Artificial Sequence
  Description of Artificial Sequence: Synthetic oligonucleotide
uguguagucacuuuauaaa

SEQ ID NO: 25498 - RNA, 19 nt, Artificial Sequence
  Description of Artificial Sequence: Synthetic oligonucleotide
uuagucuugcgauucauac

SEQ ID NO: 25499 - RNA, 19 nt, Artificial Sequence
  Description of Artificial Sequence: Synthetic oligonucleotide
ucuagaacacucuuguaac

SEQ ID NO: 25500 - RNA, 19 nt, Artificial Sequence
  Description of Artificial Sequence: Synthetic oligonucleotide
ucuguuaaagccaucccgu

SEQ ID NO: 25501 - RNA, 19 nt, Artificial Sequence
  Description of Artificial Sequence: Synthetic oligonucleotide
ucaauaacagauugucacc

SEQ ID NO: 25502 - RNA, 19 nt, Artificial Sequence
  Description of Artificial Sequence: Synthetic oligonucleotide
uggguuauaaaagaacacc

SEQ ID NO: 25503 - RNA, 19 nt, Artificial Sequence
  Description of Artificial Sequence: Synthetic oligonucleotide
accuaaucacauucaaucg

SEQ ID NO: 25504 - RNA, 19 nt, Artificial Sequence
  Description of Artificial Sequence: Synthetic oligonucleotide
cuucuauaaugaaugagac

SEQ ID NO: 25505 - RNA, 19 nt, Artificial Sequence
  Description of Artificial Sequence: Synthetic oligonucleotide
  modified_base (6)..(6): a, c, u, g, unknown or other
aaauunuuugauagaagcu

SEQ ID NO: 25506 - RNA, 19 nt, Artificial Sequence
  Description of Artificial Sequence: Synthetic oligonucleotide
uaucaaccuaaucacauuc

SEQ ID NO: 25507 - RNA, 19 nt, Artificial Sequence
  Description of Artificial Sequence: Synthetic oligonucleotide
uguaacugaacaagcugag

SEQ ID NO: 25508 - RNA, 19 nt, Artificial Sequence
  Description of Artificial Sequence: Synthetic oligonucleotide
uaugugacucauuaaagau

SEQ ID NO: 25509 - RNA, 19 nt, Artificial Sequence
  Description of Artificial Sequence: Synthetic oligonucleotide
uguagucacuuuauaaaac

SEQ ID NO: 25510 - RNA, 19 nt, Artificial Sequence
  Description of Artificial Sequence: Synthetic oligonucleotide
aaacgcucugagcaaacag

SEQ ID NO: 25511 - RNA, 19 nt, Artificial Sequence
  Description of Artificial Sequence: Synthetic oligonucleotide
guuaccaaucaaaaguggg

SEQ ID NO: 25512 - RNA, 19 nt, Artificial Sequence
  Description of Artificial Sequence: Synthetic oligonucleotide
ucgaauacaauagaucugu

SEQ ID NO: 25513 - RNA, 19 nt, Artificial Sequence
  Description of Artificial Sequence: Synthetic oligonucleotide
ucauacggccaauacacag

SEQ ID NO: 25514 - RNA, 19 nt, Artificial Sequence
  Description of Artificial Sequence: Synthetic oligonucleotide
gaauuaguauccauaauca

SEQ ID NO: 25515 - RNA, 19 nt, Artificial Sequence
  Description of Artificial Sequence: Synthetic oligonucleotide
uugucaaauaguuauguuu

SEQ ID NO: 25516 - RNA, 19 nt, Artificial Sequence
  Description of Artificial Sequence: Synthetic oligonucleotide
auauucuaguguuucaccu

SEQ ID NO: 25517 - RNA, 19 nt, Artificial Sequence
  Description of Artificial Sequence: Synthetic oligonucleotide
ucuaguguuucaccuguag

SEQ ID NO: 25518 - RNA, 19 nt, Artificial Sequence
  Description of Artificial Sequence: Synthetic oligonucleotide
guaucugaucuucucaucc

SEQ ID NO: 25519 - RNA, 19 nt, Artificial Sequence
  Description of Artificial Sequence: Synthetic oligonucleotide
auuaguauccauaaucacu

SEQ ID NO: 25520 - RNA, 19 nt, Artificial Sequence
  Description of Artificial Sequence: Synthetic oligonucleotide
agaacauauggcuuuacaa

SEQ ID NO: 25521 - RNA, 19 nt, Artificial Sequence
  Description of Artificial Sequence: Synthetic oligonucleotide
uccucacuuuugaagacgg

SEQ ID NO: 25522 - RNA, 19 nt, Artificial Sequence
  Description of Artificial Sequence: Synthetic oligonucleotide
uguuucgaauacaauagau

SEQ ID NO: 25523 - RNA, 19 nt, Artificial Sequence
  Description of Artificial Sequence: Synthetic oligonucleotide
ucuaaaauccacugguuua

SEQ ID NO: 25524 - RNA, 19 nt, Artificial Sequence
  Description of Artificial Sequence: Synthetic oligonucleotide
aaacgugaugucauguagg

SEQ ID NO: 25525 - RNA, 19 nt, Artificial Sequence
  Description of Artificial Sequence: Synthetic oligonucleotide
ugucauguaggcacgcugc

SEQ ID NO: 25526 - RNA, 19 nt, Artificial Sequence
  Description of Artificial Sequence: Synthetic oligonucleotide
caugccgccauucaucacg

SEQ ID NO: 25527 - RNA, 19 nt, Artificial Sequence
  Description of Artificial Sequence: Synthetic oligonucleotide
aucgucaucugauaaucag

SEQ ID NO: 25528 - RNA, 19 nt, Artificial Sequence
  Description of Artificial Sequence: Synthetic oligonucleotide
aacuauucuuacaaccauc

SEQ ID NO: 25529 - RNA, 19 nt, Artificial Sequence
  Description of Artificial Sequence: Synthetic oligonucleotide
ggagaauuacuccuuaaag

SEQ ID NO: 25530 - RNA, 19 nt, Artificial Sequence
  Description of Artificial Sequence: Synthetic oligonucleotide
ucaaauguuggccgucgag

SEQ ID NO: 25531 - RNA, 19 nt, Artificial Sequence
  Description of Artificial Sequence: Synthetic oligonucleotide
agagccgccaucaucaaac

SEQ ID NO: 25532 - RNA, 19 nt, Artificial Sequence
  Description of Artificial Sequence: Synthetic oligonucleotide
caggcuacccauuauuuag

SEQ ID NO: 25533 - RNA, 19 nt, Artificial Sequence
  Description of Artificial Sequence: Synthetic oligonucleotide
acggccaauacacagaaau

SEQ ID NO: 25534 - RNA, 19 nt, Artificial Sequence
  Description of Artificial Sequence: Synthetic oligonucleotide
ugaggugucccauguaacc

SEQ ID NO: 25535 - RNA, 19 nt, Artificial Sequence
  Description of Artificial Sequence: Synthetic oligonucleotide
  modified_base (3)..(3): a, c, u, g, unknown or other
uunuuugauagaagcugcu

SEQ ID NO: 25536 - RNA, 19 nt, Artificial Sequence
  Description of Artificial Sequence: Synthetic oligonucleotide
auuugauccgccugcaaca

SEQ ID NO: 25537 - RNA, 19 nt, Artificial Sequence
  Description of Artificial Sequence: Synthetic oligonucleotide
gucaaauaguuauguuucg

SEQ ID NO: 25538 - RNA, 19 nt, Artificial Sequence
  Description of Artificial Sequence: Synthetic oligonucleotide
aaucgaguguuccccaaca

SEQ ID NO: 25539 - RNA, 19 nt, Artificial Sequence
  Description of Artificial Sequence: Synthetic oligonucleotide
uucuaaaauccacugguuu

SEQ ID NO: 25540 - RNA, 19 nt, Artificial Sequence
  Description of Artificial Sequence: Synthetic oligonucleotide
aucugaacuauguaucacu

SEQ ID NO: 25541 - RNA, 19 nt, Artificial Sequence
  Description of Artificial Sequence: Synthetic oligonucleotide
gaggaugugaacucuagaa

SEQ ID NO: 25542 - RNA, 19 nt, Artificial Sequence
  Description of Artificial Sequence: Synthetic oligonucleotide
aaagaaacgcucugagcaa

SEQ ID NO: 25543 - RNA, 19 nt, Artificial Sequence
  Description of Artificial Sequence: Synthetic oligonucleotide
uucuauaaugaaugagacu

SEQ ID NO: 25544 - RNA, 19 nt, Artificial Sequence
  Description of Artificial Sequence: Synthetic oligonucleotide
cuaggauguguuuaugcug

SEQ ID NO: 25545 - RNA, 19 nt, Artificial Sequence
  Description of Artificial Sequence: Synthetic oligonucleotide
ucuaccguguuccucuugu

SEQ ID NO: 25546 - RNA, 19 nt, Artificial Sequence
  Description of Artificial Sequence: Synthetic oligonucleotide
caugaauuaguauccauaa

SEQ ID NO: 25547 - RNA, 19 nt, Artificial Sequence
  Description of Artificial Sequence: Synthetic oligonucleotide
ugacacccgaucaaaagaa

SEQ ID NO: 25548 - RNA, 19 nt, Artificial Sequence
  Description of Artificial Sequence: Synthetic oligonucleotide
ucuugcgauucauacggcc

SEQ ID NO: 25549 - RNA, 19 nt, Artificial Sequence
  Description of Artificial Sequence: Synthetic oligonucleotide
agucaguaaaaucuggauu

SEQ ID NO: 25550 - RNA, 19 nt, Artificial Sequence
  Description of Artificial Sequence: Synthetic oligonucleotide
uaaaaggcggaugaacuac

SEQ ID NO: 25551 - RNA, 19 nt, Artificial Sequence
  Description of Artificial Sequence: Synthetic oligonucleotide
agggacucaccucugugac

SEQ ID NO: 25552 - RNA, 19 nt, Artificial Sequence
  Description of Artificial Sequence: Synthetic oligonucleotide
ucgucaucugauaaucaga

SEQ ID NO: 25553 - RNA, 19 nt, Artificial Sequence
  Description of Artificial Sequence: Synthetic oligonucleotide
auucgcucuauuaacugac

SEQ ID NO: 25554 - RNA, 19 nt, Artificial Sequence
  Description of Artificial Sequence: Synthetic oligonucleotide
guaaaguugaugucugaca

SEQ ID NO: 25555 - RNA, 19 nt, Artificial Sequence
  Description of Artificial Sequence: Synthetic oligonucleotide
cuaauaauugucaaauagu

SEQ ID NO: 25556 - RNA, 19 nt, Artificial Sequence
  Description of Artificial Sequence: Synthetic oligonucleotide
cauuugauccgccugcaac

SEQ ID NO: 25557 - RNA, 19 nt, Artificial Sequence
  Description of Artificial Sequence: Synthetic oligonucleotide
gcucuauaaagguaggaag

SEQ ID NO: 25558 - RNA, 19 nt, Artificial Sequence
  Description of Artificial Sequence: Synthetic oligonucleotide
ugcuguacuaacacacugu

SEQ ID NO: 25559 - RNA, 19 nt, Artificial Sequence
  Description of Artificial Sequence: Synthetic oligonucleotide
uuaaaaggcggaugaacua

SEQ ID NO: 25560 - RNA, 19 nt, Artificial Sequence
  Description of Artificial Sequence: Synthetic oligonucleotide
auacgcagagggcuuuccc

SEQ ID NO: 25561 - RNA, 19 nt, Artificial Sequence
  Description of Artificial Sequence: Synthetic oligonucleotide
aucuggauugcacugacua

SEQ ID NO: 25562 - RNA, 19 nt, Artificial Sequence
  Description of Artificial Sequence: Synthetic oligonucleotide
uucaauagcaaggacucau

SEQ ID NO: 25563 - RNA, 19 nt, Artificial Sequence
  Description of Artificial Sequence: Synthetic oligonucleotide
ucaaggauucgcucuauua

SEQ ID NO: 25564 - RNA, 19 nt, Artificial Sequence
  Description of Artificial Sequence: Synthetic oligonucleotide
ugcucuauaaagguaggaa

SEQ ID NO: 25565 - RNA, 19 nt, Artificial Sequence
  Description of Artificial Sequence: Synthetic oligonucleotide
uaacacacuguugggaccc

SEQ ID NO: 25566 - RNA, 19 nt, Artificial Sequence
  Description of Artificial Sequence: Synthetic oligonucleotide
ucacauucaaucgaguguu

SEQ ID NO: 25567 - RNA, 19 nt, Artificial Sequence
  Description of Artificial Sequence: Synthetic oligonucleotide
gucgucuugaucugcaaac

SEQ ID NO: 25568 - RNA, 19 nt, Artificial Sequence
  Description of Artificial Sequence: Synthetic oligonucleotide
gauucgcucuauuaacuga

SEQ ID NO: 25569 - RNA, 19 nt, Artificial Sequence
  Description of Artificial Sequence: Synthetic oligonucleotide
aguuaccaaucaaaagugg

SEQ ID NO: 25570 - RNA, 19 nt, Artificial Sequence
  Description of Artificial Sequence: Synthetic oligonucleotide
cacggucucaguuaccuug

SEQ ID NO: 25571 - RNA, 19 nt, Artificial Sequence
  Description of Artificial Sequence: Synthetic oligonucleotide
ugacgugucgcuuggcaug

SEQ ID NO: 25572 - RNA, 19 nt, Artificial Sequence
  Description of Artificial Sequence: Synthetic oligonucleotide
cuaacacacuguugggacc

SEQ ID NO: 25573 - RNA, 19 nt, Artificial Sequence
  Description of Artificial Sequence: Synthetic oligonucleotide
acacccgaucaaaagaaac

SEQ ID NO: 25574 - RNA, 19 nt, Artificial Sequence
  Description of Artificial Sequence: Synthetic oligonucleotide
acaagguggaaaauguaug

SEQ ID NO: 25575 - RNA, 19 nt, Artificial Sequence
  Description of Artificial Sequence: Synthetic oligonucleotide
ucuguuagucuugcgauuc

SEQ ID NO: 25576 - RNA, 19 nt, Artificial Sequence
  Description of Artificial Sequence: Synthetic oligonucleotide
uauaaagguugcugguccu

SEQ ID NO: 25577 - RNA, 19 nt, Artificial Sequence
  Description of Artificial Sequence: Synthetic oligonucleotide
aacucacaagauauauuug

SEQ ID NO: 25578 - RNA, 19 nt, Artificial Sequence
  Description of Artificial Sequence: Synthetic oligonucleotide
aucgggaagaucuuugaua

SEQ ID NO: 25579 - RNA, 19 nt, Artificial Sequence
  Description of Artificial Sequence: Synthetic oligonucleotide
caagguggaaaauguauga

SEQ ID NO: 25580 - RNA, 19 nt, Artificial Sequence
  Description of Artificial Sequence: Synthetic oligonucleotide
  modified_base (2)..(2): a, c, u, g, unknown or other
unuuugauagaagcugcuc

SEQ ID NO: 25581 - RNA, 19 nt, Artificial Sequence
  Description of Artificial Sequence: Synthetic oligonucleotide
aguuauguuucgaauacaa

SEQ ID NO: 25582 - RNA, 19 nt, Artificial Sequence
  Description of Artificial Sequence: Synthetic oligonucleotide
agacaucuguuagucuugc

SEQ ID NO: 25583 - RNA, 19 nt, Artificial Sequence
  Description of Artificial Sequence: Synthetic oligonucleotide
ugagucuaagggugcacca

SEQ ID NO: 25584 - RNA, 19 nt, Artificial Sequence
  Description of Artificial Sequence: Synthetic oligonucleotide
gaauuuuguacaaggugga

SEQ ID NO: 25585 - RNA, 19 nt, Artificial Sequence
  Description of Artificial Sequence: Synthetic oligonucleotide
gaugcauucuacacuguca

SEQ ID NO: 25586 - RNA, 19 nt, Artificial Sequence
  Description of Artificial Sequence: Synthetic oligonucleotide
auguuucgaauacaauaga

SEQ ID NO: 25587 - RNA, 19 nt, Artificial Sequence
  Description of Artificial Sequence: Synthetic oligonucleotide
aggucaaccaucccugaga

SEQ ID NO: 25588 - RNA, 19 nt, Artificial Sequence
  Description of Artificial Sequence: Synthetic oligonucleotide
acaguuagcuauccucgug

SEQ ID NO: 25589 - RNA, 19 nt, Artificial Sequence
  Description of Artificial Sequence: Synthetic oligonucleotide
agucuaucauucaucuggg

SEQ ID NO: 25590 - RNA, 19 nt, Artificial Sequence
  Description of Artificial Sequence: Synthetic oligonucleotide
aauggguuaaaaggcggau

SEQ ID NO: 25591 - RNA, 19 nt, Artificial Sequence
  Description of Artificial Sequence: Synthetic oligonucleotide
gucuaugugggaugaugag

SEQ ID NO: 25592 - RNA, 19 nt, Artificial Sequence
  Description of Artificial Sequence: Synthetic oligonucleotide
ugaugucugacacccgauc

SEQ ID NO: 25593 - RNA, 19 nt, Artificial Sequence
  Description of Artificial Sequence: Synthetic oligonucleotide
agucuucgagacauucugc

SEQ ID NO: 25594 - RNA, 19 nt, Artificial Sequence
  Description of Artificial Sequence: Synthetic oligonucleotide
ugcccauuacagguuaucc

SEQ ID NO: 25595 - RNA, 19 nt, Artificial Sequence
  Description of Artificial Sequence: Synthetic oligonucleotide
aggcggaugaacuaccaaa

SEQ ID NO: 25596 - RNA, 19 nt, Artificial Sequence
  Description of Artificial Sequence: Synthetic oligonucleotide
agggccauuaacugacgug

SEQ ID NO: 25597 - RNA, 19 nt, Artificial Sequence
  Description of Artificial Sequence: Synthetic oligonucleotide
ugucgucuugaucugcaaa

SEQ ID NO: 25598 - RNA, 19 nt, Artificial Sequence
  Description of Artificial Sequence: Synthetic oligonucleotide
ucgcucccuuacuucaucg

SEQ ID NO: 25599 - RNA, 19 nt, Artificial Sequence
  Description of Artificial Sequence: Synthetic oligonucleotide
aagguggaaaauguaugaa

SEQ ID NO: 25600 - RNA, 19 nt, Artificial Sequence
  Description of Artificial Sequence: Synthetic oligonucleotide
auacggccaauacacagaa

SEQ ID NO: 25601 - RNA, 19 nt, Artificial Sequence
  Description of Artificial Sequence: Synthetic oligonucleotide
cagaccacucugaaauggc

SEQ ID NO: 25602 - RNA, 19 nt, Artificial Sequence
  Description of Artificial Sequence: Synthetic oligonucleotide
uguucgccucuccuaagga

SEQ ID NO: 25603 - RNA, 19 nt, Artificial Sequence
  Description of Artificial Sequence: Synthetic oligonucleotide
uugcgauucauacggccaa

SEQ ID NO: 25604 - RNA, 19 nt, Artificial Sequence
  Description of Artificial Sequence: Synthetic oligonucleotide
uucauacggccaauacaca

SEQ ID NO: 25605 - RNA, 19 nt, Artificial Sequence
  Description of Artificial Sequence: Synthetic oligonucleotide
aaggcuagaucuaccgugu

SEQ ID NO: 25606 - RNA, 19 nt, Artificial Sequence
  Description of Artificial Sequence: Synthetic oligonucleotide
auacuuaaaucuccaccaa

SEQ ID NO: 25607 - RNA, 19 nt, Artificial Sequence
  Description of Artificial Sequence: Synthetic oligonucleotide
ucacaggcuacccauuauu

SEQ ID NO: 25608 - RNA, 19 nt, Artificial Sequence
  Description of Artificial Sequence: Synthetic oligonucleotide
agggauguuuuggugaaug

SEQ ID NO: 25609 - RNA, 19 nt, Artificial Sequence
  Description of Artificial Sequence: Synthetic oligonucleotide
ugauagaagcugcucuaua

SEQ ID NO: 25610 - RNA, 19 nt, Artificial Sequence
  Description of Artificial Sequence: Synthetic oligonucleotide
cuugcgauucauacggcca

SEQ ID NO: 25611 - RNA, 19 nt, Artificial Sequence
  Description of Artificial Sequence: Synthetic oligonucleotide
uucgcucuauuaacugaca

SEQ ID NO: 25612 - RNA, 19 nt, Artificial Sequence
  Description of Artificial Sequence: Synthetic oligonucleotide
uacaguuagcuauccucgu

SEQ ID NO: 25613 - RNA, 19 nt, Artificial Sequence
  Description of Artificial Sequence: Synthetic oligonucleotide
agaggaugugaacucuaga

SEQ ID NO: 25614 - RNA, 19 nt, Artificial Sequence
  Description of Artificial Sequence: Synthetic oligonucleotide
cugcuguacuaacacacug

SEQ ID NO: 25615 - RNA, 19 nt, Artificial Sequence
  Description of Artificial Sequence: Synthetic oligonucleotide
aucgaguguuccccaacag

SEQ ID NO: 25616 - RNA, 19 nt, Artificial Sequence
  Description of Artificial Sequence: Synthetic oligonucleotide
auaucaaccuaaucacauu

SEQ ID NO: 25617 - RNA, 19 nt, Artificial Sequence
  Description of Artificial Sequence: Synthetic oligonucleotide
cccauuacagguuauccug

SEQ ID NO: 25618 - RNA, 19 nt, Artificial Sequence
  Description of Artificial Sequence: Synthetic oligonucleotide
ucgcucuauuaacugacau

SEQ ID NO: 25619 - RNA, 19 nt, Artificial Sequence
  Description of Artificial Sequence: Synthetic oligonucleotide
uaaagguugcugguccuga

SEQ ID NO: 25620 - RNA, 19 nt, Artificial Sequence
  Description of Artificial Sequence: Synthetic oligonucleotide
uucaaauguuggccgucga

SEQ ID NO: 25621 - RNA, 19 nt, Artificial Sequence
  Description of Artificial Sequence: Synthetic oligonucleotide
cacccgaucaaaagaaaca

SEQ ID NO: 25622 - RNA, 19 nt, Artificial Sequence
  Description of Artificial Sequence: Synthetic oligonucleotide
gcaauuucaucaacuaagc

SEQ ID NO: 25623 - RNA, 19 nt, Artificial Sequence
  Description of Artificial Sequence: Synthetic oligonucleotide
uccaaacgugaugucaugu

SEQ ID NO: 25624 - RNA, 19 nt, Artificial Sequence
  Description of Artificial Sequence: Synthetic oligonucleotide
ucuggauugcacugacuau

SEQ ID NO: 25625 - RNA, 19 nt, Artificial Sequence
  Description of Artificial Sequence: Synthetic oligonucleotide
aaaguuggcugaccaggua

SEQ ID NO: 25626 - RNA, 19 nt, Artificial Sequence
  Description of Artificial Sequence: Synthetic oligonucleotide
cugagucuaagggugcacc

SEQ ID NO: 25627 - RNA, 19 nt, Artificial Sequence
  Description of Artificial Sequence: Synthetic oligonucleotide
acggcagucucugucuugg

SEQ ID NO: 25628 - RNA, 19 nt, Artificial Sequence
  Description of Artificial Sequence: Synthetic oligonucleotide
uaugugggaugaugaguga

SEQ ID NO: 25629 - RNA, 19 nt, Artificial Sequence
  Description of Artificial Sequence: Synthetic oligonucleotide
cuguugggacccuugucag

SEQ ID NO: 25630 - RNA, 19 nt, Artificial Sequence
  Description of Artificial Sequence: Synthetic oligonucleotide
cauacggccaauacacaga

SEQ ID NO: 25631 - RNA, 19 nt, Artificial Sequence
  Description of Artificial Sequence: Synthetic oligonucleotide
cacucauuugauccgccug

SEQ ID NO: 25632 - RNA, 19 nt, Artificial Sequence
  Description of Artificial Sequence: Synthetic oligonucleotide
aagaaacgcucugagcaaa

SEQ ID NO: 25633 - RNA, 19 nt, Artificial Sequence
  Description of Artificial Sequence: Synthetic oligonucleotide
ucacucauuugauccgccu

SEQ ID NO: 25634 - RNA, 19 nt, Artificial Sequence
  Description of Artificial Sequence: Synthetic oligonucleotide
ggcuaggauguguuuaugc

SEQ ID NO: 25635 - RNA, 19 nt, Artificial Sequence
  Description of Artificial Sequence: Synthetic oligonucleotide
uuccaaacgugaugucaug

SEQ ID NO: 25636 - RNA, 19 nt, Artificial Sequence
  Description of Artificial Sequence: Synthetic oligonucleotide
aaaccucacaagguacagu

SEQ ID NO: 25637 - RNA, 19 nt, Artificial Sequence
  Description of Artificial Sequence: Synthetic oligonucleotide
cauucaucauacagggcca

SEQ ID NO: 25638 - RNA, 19 nt, Artificial Sequence
  Description of Artificial Sequence: Synthetic oligonucleotide
ggauucgcucuauuaacug

SEQ ID NO: 25639 - RNA, 19 nt, Artificial Sequence
  Description of Artificial Sequence: Synthetic oligonucleotide
ucccuuacuucaucgggaa

SEQ ID NO: 25640 - RNA, 19 nt, Artificial Sequence
  Description of Artificial Sequence: Synthetic oligonucleotide
aaggcggaugaacuaccaa

SEQ ID NO: 25641 - RNA, 19 nt, Artificial Sequence
  Description of Artificial Sequence: Synthetic oligonucleotide
auggguuaaaaggcggaug

SEQ ID NO: 25642 - RNA, 19 nt, Artificial Sequence
  Description of Artificial Sequence: Synthetic oligonucleotide
gcucccuuacuucaucggg

SEQ ID NO: 25643 - RNA, 19 nt, Artificial Sequence
  Description of Artificial Sequence: Synthetic oligonucleotide
agaaacgcucugagcaaac

SEQ ID NO: 25644 - RNA, 19 nt, Artificial Sequence
  Description of Artificial Sequence: Synthetic oligonucleotide
gugaugucauguaggcacg

SEQ ID NO: 25645 - RNA, 19 nt, Artificial Sequence
  Description of Artificial Sequence: Synthetic oligonucleotide
caguuagcuauccucguga

SEQ ID NO: 25646 - RNA, 19 nt, Artificial Sequence
  Description of Artificial Sequence: Synthetic oligonucleotide
cauuacauggguggcaaga

SEQ ID NO: 25647 - RNA, 19 nt, Artificial Sequence
  Description of Artificial Sequence: Synthetic oligonucleotide
ugugccaaccuggaagaaa

SEQ ID NO: 25648 - RNA, 19 nt, Artificial Sequence
  Description of Artificial Sequence: Synthetic oligonucleotide
acaggcuacccauuauuua

SEQ ID NO: 25649 - RNA, 19 nt, Artificial Sequence
  Description of Artificial Sequence: Synthetic oligonucleotide
auuacauggguggcaagau

SEQ ID NO: 25650 - RNA, 19 nt, Artificial Sequence
  Description of Artificial Sequence: Synthetic oligonucleotide
caugccgucguccucccuc

SEQ ID NO: 25651 - RNA, 19 nt, Artificial Sequence
  Description of Artificial Sequence: Synthetic oligonucleotide
ucgucuugaucugcaaacu

SEQ ID NO: 25652 - RNA, 19 nt, Artificial Sequence
  Description of Artificial Sequence: Synthetic oligonucleotide
guccaauaugacaccaaug

SEQ ID NO: 25653 - RNA, 19 nt, Artificial Sequence
  Description of Artificial Sequence: Synthetic oligonucleotide
gcauucuacacugucacca

SEQ ID NO: 25654 - RNA, 19 nt, Artificial Sequence
  Description of Artificial Sequence: Synthetic oligonucleotide
cuugguagcucuggguaac

SEQ ID NO: 25655 - RNA, 19 nt, Artificial Sequence
  Description of Artificial Sequence: Synthetic oligonucleotide
guggcaagaucugauguca

SEQ ID NO: 25656 - RNA, 19 nt, Artificial Sequence
  Description of Artificial Sequence: Synthetic oligonucleotide
cucggauggcuucuagaac

SEQ ID NO: 25657 - RNA, 19 nt, Artificial Sequence
  Description of Artificial Sequence: Synthetic oligonucleotide
aacugacgugucgcuuggc

SEQ ID NO: 25658 - RNA, 19 nt, Artificial Sequence
  Description of Artificial Sequence: Synthetic oligonucleotide
aggaccuaacagaacauau

SEQ ID NO: 25659 - RNA, 19 nt, Artificial Sequence
  Description of Artificial Sequence: Synthetic oligonucleotide
ucccguuugauggaugcau

SEQ ID NO: 25660 - RNA, 19 nt, Artificial Sequence
  Description of Artificial Sequence: Synthetic oligonucleotide
cuuguucgccucuccuaag

SEQ ID NO: 25661 - RNA, 19 nt, Artificial Sequence
  Description of Artificial Sequence: Synthetic oligonucleotide
agucccugcacugucuaca

SEQ ID NO: 25662 - RNA, 19 nt, Artificial Sequence
  Description of Artificial Sequence: Synthetic oligonucleotide
uuccucggauggcuucuag

SEQ ID NO: 25663 - RNA, 19 nt, Artificial Sequence
  Description of Artificial Sequence: Synthetic oligonucleotide
caaucgaguguuccccaac

SEQ ID NO: 25664 - RNA, 19 nt, Artificial Sequence
  Description of Artificial Sequence: Synthetic oligonucleotide
gcuguauccguucuuuaca

SEQ ID NO: 25665 - RNA, 19 nt, Artificial Sequence
  Description of Artificial Sequence: Synthetic oligonucleotide
ugaugucauguaggcacgc

SEQ ID NO: 25666 - RNA, 19 nt, Artificial Sequence
  Description of Artificial Sequence: Synthetic oligonucleotide
uucgagacauucugcuuuu

SEQ ID NO: 25667 - RNA, 19 nt, Artificial Sequence
  Description of Artificial Sequence: Synthetic oligonucleotide
ugcgcacuuggccucugcu

SEQ ID NO: 25668 - RNA, 19 nt, Artificial Sequence
  Description of Artificial Sequence: Synthetic oligonucleotide
cagaagauucuuuugguuu

SEQ ID NO: 25669 - RNA, 19 nt, Artificial Sequence
  Description of Artificial Sequence: Synthetic oligonucleotide
cucccuuacuucaucggga

SEQ ID NO: 25670 - RNA, 19 nt, Artificial Sequence
  Description of Artificial Sequence: Synthetic oligonucleotide
ccauuaacugacgugucgc

SEQ ID NO: 25671 - RNA, 19 nt, Artificial Sequence
  Description of Artificial Sequence: Synthetic oligonucleotide
aucuguuagucuugcgauu

SEQ ID NO: 25672 - RNA, 19 nt, Artificial Sequence
  Description of Artificial Sequence: Synthetic oligonucleotide
caggucaaccaucccugag

SEQ ID NO: 25673 - RNA, 19 nt, Artificial Sequence
  Description of Artificial Sequence: Synthetic oligonucleotide
ggaugcauucuacacuguc

SEQ ID NO: 25674 - RNA, 19 nt, Artificial Sequence
  Description of Artificial Sequence: Synthetic oligonucleotide
uagaucuaccguguuccuc

SEQ ID NO: 25675 - RNA, 19 nt, Artificial Sequence
  Description of Artificial Sequence: Synthetic oligonucleotide
gaaacgcucugagcaaaca

SEQ ID NO: 25676 - RNA, 19 nt, Artificial Sequence
  Description of Artificial Sequence: Synthetic oligonucleotide
ugguagcucuggguaaccc

SEQ ID NO: 25677 - RNA, 19 nt, Artificial Sequence
  Description of Artificial Sequence: Synthetic oligonucleotide
cauguaaccaugccgucgu

SEQ ID NO: 25678 - RNA, 19 nt, Artificial Sequence
  Description of Artificial Sequence: Synthetic oligonucleotide
ccauucaucacggucucag

SEQ ID NO: 25679 - RNA, 19 nt, Artificial Sequence
  Description of Artificial Sequence: Synthetic oligonucleotide
cccaucgacagcucugugc

SEQ ID NO: 25680 - RNA, 19 nt, Artificial Sequence
  Description of Artificial Sequence: Synthetic oligonucleotide
caucgucaucugauaauca

SEQ ID NO: 25681 - RNA, 19 nt, Artificial Sequence
  Description of Artificial Sequence: Synthetic oligonucleotide
caguccuuugcucaggacu

SEQ ID NO: 25682 - RNA, 19 nt, Artificial Sequence
  Description of Artificial Sequence: Synthetic oligonucleotide
uggaugcauucuacacugu

SEQ ID NO: 25683 - RNA, 19 nt, Artificial Sequence
  Description of Artificial Sequence: Synthetic oligonucleotide
cuauccucgugaggugucc

SEQ ID NO: 25684 - RNA, 19 nt, Artificial Sequence
  Description of Artificial Sequence: Synthetic oligonucleotide
gugcacaauacaguuagcu

SEQ ID NO: 25685 - RNA, 19 nt, Artificial Sequence
  Description of Artificial Sequence: Synthetic oligonucleotide
agcuauccucgugaggugu

SEQ ID NO: 25686 - RNA, 19 nt, Artificial Sequence
  Description of Artificial Sequence: Synthetic oligonucleotide
aucgacagcucugugccaa

SEQ ID NO: 25687 - RNA, 19 nt, Artificial Sequence
  Description of Artificial Sequence: Synthetic oligonucleotide
uucuaguguuucaccugua

SEQ ID NO: 25688 - RNA, 19 nt, Artificial Sequence
  Description of Artificial Sequence: Synthetic oligonucleotide
ccauguaaccaugccgucg

SEQ ID NO: 25689 - RNA, 19 nt, Artificial Sequence
  Description of Artificial Sequence: Synthetic oligonucleotide
gaggugacugagcccuuuc

SEQ ID NO: 25690 - RNA, 19 nt, Artificial Sequence
  Description of Artificial Sequence: Synthetic oligonucleotide
gcuaggauguguuuaugcu

SEQ ID NO: 25691 - RNA, 19 nt, Artificial Sequence
  Description of Artificial Sequence: Synthetic oligonucleotide
uugcccauuacagguuauc

SEQ ID NO: 25692 - RNA, 19 nt, Artificial Sequence
  Description of Artificial Sequence: Synthetic oligonucleotide
caacuaagcuguagcaaua

SEQ ID NO: 25693 - RNA, 19 nt, Artificial Sequence
  Description of Artificial Sequence: Synthetic oligonucleotide
caucacggucucaguuacc

SEQ ID NO: 25694 - RNA, 19 nt, Artificial Sequence
  Description of Artificial Sequence: Synthetic oligonucleotide
augccgccauucaucacgg

SEQ ID NO: 25695 - RNA, 19 nt, Artificial Sequence
  Description of Artificial Sequence: Synthetic oligonucleotide
uggcaucggcuccucugug

SEQ ID NO: 25696 - RNA, 19 nt, Artificial Sequence
  Description of Artificial Sequence: Synthetic oligonucleotide
agguaggaagcuauacaau

SEQ ID NO: 25697 - RNA, 19 nt, Artificial Sequence
  Description of Artificial Sequence: Synthetic oligonucleotide
gaggcuaggauguguuuau

SEQ ID NO: 25698 - RNA, 19 nt, Artificial Sequence
  Description of Artificial Sequence: Synthetic oligonucleotide
ugucuacagugagaagcaa

SEQ ID NO: 25699 - RNA, 19 nt, Artificial Sequence
  Description of Artificial Sequence: Synthetic oligonucleotide
cuauaaagguaggaagcua

SEQ ID NO: 25700 - RNA, 19 nt, Artificial Sequence
  Description of Artificial Sequence: Synthetic oligonucleotide
auaauacgcagagggcuuu

SEQ ID NO: 25701 - RNA, 19 nt, Artificial Sequence
  Description of Artificial Sequence: Synthetic oligonucleotide
aucuaccguguuccucuug

SEQ ID NO: 25702 - RNA, 19 nt, Artificial Sequence
  Description of Artificial Sequence: Synthetic oligonucleotide
acagucauguacacuccaa

SEQ ID NO: 25703 - RNA, 19 nt, Artificial Sequence
  Description of Artificial Sequence: Synthetic oligonucleotide
guauaccccauguagucuu

SEQ ID NO: 25704 - RNA, 19 nt, Artificial Sequence
  Description of Artificial Sequence: Synthetic oligonucleotide
aguggcggcuugguagcuc

SEQ ID NO: 25705 - RNA, 19 nt, Artificial Sequence
  Description of Artificial Sequence: Synthetic oligonucleotide
gucaaccaucccugagaug

SEQ ID NO: 25706 - RNA, 19 nt, Artificial Sequence
  Description of Artificial Sequence: Synthetic oligonucleotide
gaugccagguugugauucu

SEQ ID NO: 25707 - RNA, 19 nt, Artificial Sequence
  Description of Artificial Sequence: Synthetic oligonucleotide
gugucccauguaaccaugc

SEQ ID NO: 25708 - RNA, 19 nt, Artificial Sequence
  Description of Artificial Sequence: Synthetic oligonucleotide
uguuuccuucaugccgcca

SEQ ID NO: 25709 - RNA, 19 nt, Artificial Sequence
  Description of Artificial Sequence: Synthetic oligonucleotide
auucaucauacagggccau

SEQ ID NO: 25710 - RNA, 19 nt, Artificial Sequence
  Description of Artificial Sequence: Synthetic oligonucleotide
ggcaucggcuccucugugc

SEQ ID NO: 25711 - RNA, 19 nt, Artificial Sequence
  Description of Artificial Sequence: Synthetic oligonucleotide
uguuggccgucgagucuca

SEQ ID NO: 25712 - RNA, 19 nt, Artificial Sequence
  Description of Artificial Sequence: Synthetic oligonucleotide
cauuaacugacgugucgcu

SEQ ID NO: 25713 - RNA, 19 nt, Artificial Sequence
  Description of Artificial Sequence: Synthetic oligonucleotide
ucauguaggcacgcugcuu

SEQ ID NO: 25714 - RNA, 19 nt, Artificial Sequence
  Description of Artificial Sequence: Synthetic oligonucleotide
gcugagugacccaugccug

SEQ ID NO: 25715 - RNA, 19 nt, Artificial Sequence
  Description of Artificial Sequence: Synthetic oligonucleotide
uacggccaauacacagaaa

SEQ ID NO: 25716 - RNA, 19 nt, Artificial Sequence
  Description of Artificial Sequence: Synthetic oligonucleotide
agucucaaguaaagucagu

SEQ ID NO: 25717 - RNA, 19 nt, Artificial Sequence
  Description of Artificial Sequence: Synthetic oligonucleotide
guuagucuugcgauucaua

SEQ ID NO: 25718 - RNA, 19 nt, Artificial Sequence
  Description of Artificial Sequence: Synthetic oligonucleotide
gcuacccauuauuuagauc

SEQ ID NO: 25719 - RNA, 19 nt, Artificial Sequence
  Description of Artificial Sequence: Synthetic oligonucleotide
uccccgucugagcuggcuu

SEQ ID NO: 25720 - RNA, 19 nt, Artificial Sequence
  Description of Artificial Sequence: Synthetic oligonucleotide
guuauguuucgaauacaau

SEQ ID NO: 25721 - RNA, 19 nt, Artificial Sequence
  Description of Artificial Sequence: Synthetic oligonucleotide
gacacccgaucaaaagaaa

SEQ ID NO: 25722 - RNA, 19 nt, Artificial Sequence
  Description of Artificial Sequence: Synthetic oligonucleotide
ucgacagcucugugccaac

SEQ ID NO: 25723 - RNA, 19 nt, Artificial Sequence
  Description of Artificial Sequence: Synthetic oligonucleotide
acggucucaguuaccuugu

SEQ ID NO: 25724 - RNA, 19 nt, Artificial Sequence
  Description of Artificial Sequence: Synthetic oligonucleotide
gacucaccucugugacuug

SEQ ID NO: 25725 - RNA, 19 nt, Artificial Sequence
  Description of Artificial Sequence: Synthetic oligonucleotide
gagcugcgcacuuggccuc

SEQ ID NO: 25726 - RNA, 19 nt, Artificial Sequence
  Description of Artificial Sequence: Synthetic oligonucleotide
gaacucaucucaagcccua

SEQ ID NO: 25727 - RNA, 19 nt, Artificial Sequence
  Description of Artificial Sequence: Synthetic oligonucleotide
ugcgauucauacggccaau

SEQ ID NO: 25728 - RNA, 19 nt, Artificial Sequence
  Description of Artificial Sequence: Synthetic oligonucleotide
cugguucggggcucucuuc

SEQ ID NO: 25729 - RNA, 19 nt, Artificial Sequence
  Description of Artificial Sequence: Synthetic oligonucleotide
cgucgagucucaaguaaag

SEQ ID NO: 25730 - RNA, 19 nt, Artificial Sequence
  Description of Artificial Sequence: Synthetic oligonucleotide
ucgugaggugucccaugua

SEQ ID NO: 25731 - RNA, 19 nt, Artificial Sequence
  Description of Artificial Sequence: Synthetic oligonucleotide
aggaggcuaggauguguuu

SEQ ID NO: 25732 - RNA, 19 nt, Artificial Sequence
  Description of Artificial Sequence: Synthetic oligonucleotide
gaugucauguaggcacgcu

SEQ ID NO: 25733 - RNA, 19 nt, Artificial Sequence
  Description of Artificial Sequence: Synthetic oligonucleotide
ggcggaugaacuaccaaaa

SEQ ID NO: 25734 - RNA, 19 nt, Artificial Sequence
  Description of Artificial Sequence: Synthetic oligonucleotide
guaaggaguaaggcaucaa

SEQ ID NO: 25735 - RNA, 19 nt, Artificial Sequence
  Description of Artificial Sequence: Synthetic oligonucleotide
gucuugcgauucauacggc

SEQ ID NO: 25736 - RNA, 19 nt, Artificial Sequence
  Description of Artificial Sequence: Synthetic oligonucleotide
cuauggcugauucauucuu

SEQ ID NO: 25737 - RNA, 19 nt, Artificial Sequence
  Description of Artificial Sequence: Synthetic oligonucleotide
ucacggucucaguuaccuu

SEQ ID NO: 25738 - RNA, 19 nt, Artificial Sequence
  Description of Artificial Sequence: Synthetic oligonucleotide
guccaguauaccccaugua

SEQ ID NO: 25739 - RNA, 19 nt, Artificial Sequence
  Description of Artificial Sequence: Synthetic oligonucleotide
cuguagcaauaaauacuua

SEQ ID NO: 25740 - RNA, 19 nt, Artificial Sequence
  Description of Artificial Sequence: Synthetic oligonucleotide
gcgcacuuggccucugcug

SEQ ID NO: 25741 - RNA, 19 nt, Artificial Sequence
  Description of Artificial Sequence: Synthetic oligonucleotide
gcaucuugagagguagaca

SEQ ID NO: 25742 - RNA, 19 nt, Artificial Sequence
  Description of Artificial Sequence: Synthetic oligonucleotide
ccagucuaucauucaucug

SEQ ID NO: 25743 - RNA, 19 nt, Artificial Sequence
  Description of Artificial Sequence: Synthetic oligonucleotide
cuacagugaggcugagugu

SEQ ID NO: 25744 - RNA, 19 nt, Artificial Sequence
  Description of Artificial Sequence: Synthetic oligonucleotide
cacaggcuacccauuauuu

SEQ ID NO: 25745 - RNA, 19 nt, Artificial Sequence
  Description of Artificial Sequence: Synthetic oligonucleotide
ggucaaccaucccugagau

SEQ ID NO: 25746 - RNA, 19 nt, Artificial Sequence
  Description of Artificial Sequence: Synthetic oligonucleotide
gcuguacuaacacacuguu

SEQ ID NO: 25747 - RNA, 19 nt, Artificial Sequence
  Description of Artificial Sequence: Synthetic oligonucleotide
gucgagucucaaguaaagu

SEQ ID NO: 25748 - RNA, 19 nt, Artificial Sequence
  Description of Artificial Sequence: Synthetic oligonucleotide
cagacugccucggacaccu

SEQ ID NO: 25749 - RNA, 19 nt, Artificial Sequence
  Description of Artificial Sequence: Synthetic oligonucleotide
gccgucgagucucaaguaa

SEQ ID NO: 25750 - RNA, 19 nt, Artificial Sequence
  Description of Artificial Sequence: Synthetic oligonucleotide
caggaccuaacagaacaua

SEQ ID NO: 25751 - RNA, 19 nt, Artificial Sequence
  Description of Artificial Sequence: Synthetic oligonucleotide
gcccauuacagguuauccu

SEQ ID NO: 25752 - RNA, 19 nt, Artificial Sequence
  Description of Artificial Sequence: Synthetic oligonucleotide
cccaucgcucccuuacuuc

SEQ ID NO: 25753 - RNA, 19 nt, Artificial Sequence
  Description of Artificial Sequence: Synthetic oligonucleotide
cuagaucuaccguguuccu

SEQ ID NO: 25754 - RNA, 19 nt, Artificial Sequence
  Description of Artificial Sequence: Synthetic oligonucleotide
ccaaacgugaugucaugua

SEQ ID NO: 25755 - RNA, 19 nt, Artificial Sequence
  Description of Artificial Sequence: Synthetic oligonucleotide
guuauccuggugacagcua

SEQ ID NO: 25756 - RNA, 19 nt, Artificial Sequence
  Description of Artificial Sequence: Synthetic oligonucleotide
gugggcacgcacaggccac

SEQ ID NO: 25757 - RNA, 19 nt, Artificial Sequence
  Description of Artificial Sequence: Synthetic oligonucleotide
cugacgugucgcuuggcau

SEQ ID NO: 25758 - RNA, 19 nt, Artificial Sequence
  Description of Artificial Sequence: Synthetic oligonucleotide
ccgccugcaacaauacaga

SEQ ID NO: 25759 - RNA, 19 nt, Artificial Sequence
  Description of Artificial Sequence: Synthetic oligonucleotide
acuaagucuucgagacauu

SEQ ID NO: 25760 - RNA, 19 nt, Artificial Sequence
  Description of Artificial Sequence: Synthetic oligonucleotide
cuguuaaagccaucccguu

SEQ ID NO: 25761 - RNA, 19 nt, Artificial Sequence
  Description of Artificial Sequence: Synthetic oligonucleotide
ggagcucgugcagaauguc

SEQ ID NO: 25762 - RNA, 19 nt, Artificial Sequence
  Description of Artificial Sequence: Synthetic oligonucleotide
caguuaccuugucuguacu

SEQ ID NO: 25763 - RNA, 19 nt, Artificial Sequence
  Description of Artificial Sequence: Synthetic oligonucleotide
gcaggucaaccaucccuga

SEQ ID NO: 25764 - RNA, 19 nt, Artificial Sequence
  Description of Artificial Sequence: Synthetic oligonucleotide
ccucgugaggugucccaug

SEQ ID NO: 25765 - RNA, 19 nt, Artificial Sequence
  Description of Artificial Sequence: Synthetic oligonucleotide
ugccgccauucaucacggu

SEQ ID NO: 25766 - RNA, 19 nt, Artificial Sequence
  Description of Artificial Sequence: Synthetic oligonucleotide
cagagggcuuucccaucga

SEQ ID NO: 25767 - RNA, 19 nt, Artificial Sequence
  Description of Artificial Sequence: Synthetic oligonucleotide
ccgucgagucucaaguaaa

SEQ ID NO: 25768 - RNA, 19 nt, Artificial Sequence
  Description of Artificial Sequence: Synthetic oligonucleotide
gaucuaccguguuccucuu

SEQ ID NO: 25769 - RNA, 19 nt, Artificial Sequence
  Description of Artificial Sequence: Synthetic oligonucleotide
ccccgucugagcuggcuuc

SEQ ID NO: 25770 - RNA, 19 nt, Artificial Sequence
  Description of Artificial Sequence: Synthetic oligonucleotide
ccguucuuuacaacaugcu

SEQ ID NO: 25771 - RNA, 19 nt, Artificial Sequence
  Description of Artificial Sequence: Synthetic oligonucleotide
gcugcuguacuaacacacu

SEQ ID NO: 25772 - RNA, 19 nt, Artificial Sequence
  Description of Artificial Sequence: Synthetic oligonucleotide
ccauugggacaucaaaguu

SEQ ID NO: 25773 - RNA, 19 nt, Artificial Sequence
  Description of Artificial Sequence: Synthetic oligonucleotide
gggacucaccucugugacu

SEQ ID NO: 25774 - RNA, 19 nt, Artificial Sequence
  Description of Artificial Sequence: Synthetic oligonucleotide
ggccgucgagucucaagua

SEQ ID NO: 25775 - RNA, 19 nt, Artificial Sequence
  Description of Artificial Sequence: Synthetic oligonucleotide
gcgauucauacggccaaua

SEQ ID NO: 25776 - RNA, 19 nt, Artificial Sequence
  Description of Artificial Sequence: Synthetic oligonucleotide
cuucaaggauucgcucuau

SEQ ID NO: 25777 - RNA, 19 nt, Artificial Sequence
  Description of Artificial Sequence: Synthetic oligonucleotide
ggggagcugcgcacuuggc

SEQ ID NO: 25778 - RNA, 19 nt, Artificial Sequence
  Description of Artificial Sequence: Synthetic oligonucleotide
cuaccguguuccucuuguu

SEQ ID NO: 25779 - RNA, 19 nt, Artificial Sequence
  Description of Artificial Sequence: Synthetic oligonucleotide
cccgaucaaaagaaacauu

SEQ ID NO: 25780 - RNA, 19 nt, Artificial Sequence
  Description of Artificial Sequence: Synthetic oligonucleotide
guuggccgucgagucucaa

SEQ ID NO: 25781 - RNA, 19 nt, Artificial Sequence
  Description of Artificial Sequence: Synthetic oligonucleotide
cgcucuauuaacugacauu

SEQ ID NO: 25782 - RNA, 19 nt, Artificial Sequence
  Description of Artificial Sequence: Synthetic oligonucleotide
ccucuccuaaggagcucgu

SEQ ID NO: 25783 - RNA, 19 nt, Artificial Sequence
  Description of Artificial Sequence: Synthetic oligonucleotide
  modified_base (1)..(1): a, c, u, g, unknown or other
nuuugauagaagcugcucu

SEQ ID NO: 25784 - RNA, 19 nt, Artificial Sequence
  Description of Artificial Sequence: Synthetic oligonucleotide
auuauauauauauauaugu

SEQ ID NO: 25785 - RNA, 19 nt, Artificial Sequence
  Description of Artificial Sequence: Synthetic oligonucleotide
uguacuagggcuaacaccc

SEQ ID NO: 25786 - RNA, 19 nt, Artificial Sequence
  Description of Artificial Sequence: Synthetic oligonucleotide
aauacuaagauagauauau

SEQ ID NO: 25787 - RNA, 19 nt, Artificial Sequence
  Description of Artificial Sequence: Synthetic oligonucleotide
uauuauauauauauauaug

SEQ ID NO: 25788 - RNA, 19 nt, Artificial Sequence
  Description of Artificial Sequence: Synthetic oligonucleotide
uuauuauauauauauauau

SEQ ID NO: 25789 - RNA, 19 nt, Artificial Sequence
  Description of Artificial Sequence: Synthetic oligonucleotide
acuauguuagcccuacugc

SEQ ID NO: 25790 - RNA, 19 nt, Artificial Sequence
  Description of Artificial Sequence: Synthetic oligonucleotide
uagauagucucauauaaag

SEQ ID NO: 25791 - RNA, 19 nt, Artificial Sequence
  Description of Artificial Sequence: Synthetic oligonucleotide
uauauauauauauauguau

SEQ ID NO: 25792 - RNA, 19 nt, Artificial Sequence
  Description of Artificial Sequence: Synthetic oligonucleotide
uaacggaagacuauguuag

SEQ ID NO: 25793 - RNA, 19 nt, Artificial Sequence
  Description of Artificial Sequence: Synthetic oligonucleotide
aauguacuagggcuaacac

SEQ ID NO: 25794 - RNA, 19 nt, Artificial Sequence
  Description of Artificial Sequence: Synthetic oligonucleotide
uuacaagcaagaaacaaga

SEQ ID NO: 25795 - RNA, 19 nt, Artificial Sequence
  Description of Artificial Sequence: Synthetic oligonucleotide
cauucgggaaucuagagcc

SEQ ID NO: 25796 - RNA, 19 nt, Artificial Sequence
  Description of Artificial Sequence: Synthetic oligonucleotide
uauagugagagaccuaacc

SEQ ID NO: 25797 - RNA, 19 nt, Artificial Sequence
  Description of Artificial Sequence: Synthetic oligonucleotide
auauauugcuugcaauucc

SEQ ID NO: 25798 - RNA, 19 nt, Artificial Sequence
  Description of Artificial Sequence: Synthetic oligonucleotide
aaauugguuuucucgcccc

SEQ ID NO: 25799 - RNA, 19 nt, Artificial Sequence
  Description of Artificial Sequence: Synthetic oligonucleotide
uuuauuauauauauauaua

SEQ ID NO: 25800 - RNA, 19 nt, Artificial Sequence
  Description of Artificial Sequence: Synthetic oligonucleotide
acuacauguacguaaguuc

SEQ ID NO: 25801 - RNA, 19 nt, Artificial Sequence
  Description of Artificial Sequence: Synthetic oligonucleotide
ugucuaacuaccacuaaag

SEQ ID NO: 25802 - RNA, 19 nt, Artificial Sequence
  Description of Artificial Sequence: Synthetic oligonucleotide
uauauauauauauguauaa

SEQ ID NO: 25803 - RNA, 19 nt, Artificial Sequence
  Description of Artificial Sequence: Synthetic oligonucleotide
guauauauacuauauauaa

SEQ ID NO: 25804 - RNA, 19 nt, Artificial Sequence
  Description of Artificial Sequence: Synthetic oligonucleotide
uuauauauauauauaugua

SEQ ID NO: 25805 - RNA, 19 nt, Artificial Sequence
  Description of Artificial Sequence: Synthetic oligonucleotide
uuuaguuggcucagaacgg

SEQ ID NO: 25806 - RNA, 19 nt, Artificial Sequence
  Description of Artificial Sequence: Synthetic oligonucleotide
uggacaacgaacaaaaguu

SEQ ID NO: 25807 - RNA, 19 nt, Artificial Sequence
  Description of Artificial Sequence: Synthetic oligonucleotide
ucuaacuaccacuaaagaa

SEQ ID NO: 25808 - RNA, 19 nt, Artificial Sequence
  Description of Artificial Sequence: Synthetic oligonucleotide
auagaguauauaucuuuac

SEQ ID NO: 25809 - RNA, 19 nt, Artificial Sequence
  Description of Artificial Sequence: Synthetic oligonucleotide
cauggggucaaccaguugg

SEQ ID NO: 25810 - RNA, 19 nt, Artificial Sequence
  Description of Artificial Sequence: Synthetic oligonucleotide
uguauauauacuauauaua

SEQ ID NO: 25811 - RNA, 19 nt, Artificial Sequence
  Description of Artificial Sequence: Synthetic oligonucleotide
cuaguauaacacuacacug

SEQ ID NO: 25812 - RNA, 19 nt, Artificial Sequence
  Description of Artificial Sequence: Synthetic oligonucleotide
aaaugcggaaucaugauca

SEQ ID NO: 25813 - RNA, 19 nt, Artificial Sequence
  Description of Artificial Sequence: Synthetic oligonucleotide
cuaacuaccacuaaagaaa

SEQ ID NO: 25814 - RNA, 19 nt, Artificial Sequence
  Description of Artificial Sequence: Synthetic oligonucleotide
agagaccuaaccuacaacu

SEQ ID NO: 25815 - RNA, 19 nt, Artificial Sequence
  Description of Artificial Sequence: Synthetic oligonucleotide
guauaugccagacccaggg

SEQ ID NO: 25816 - RNA, 19 nt, Artificial Sequence
  Description of Artificial Sequence: Synthetic oligonucleotide
uucacauuaggaaaacggu

SEQ ID NO: 25817 - RNA, 19 nt, Artificial Sequence
  Description of Artificial Sequence: Synthetic oligonucleotide
uaaauugucuaacuaccac

SEQ ID NO: 25818 - RNA, 19 nt, Artificial Sequence
  Description of Artificial Sequence: Synthetic oligonucleotide
uacuaguugauacagcauc

SEQ ID NO: 25819 - RNA, 19 nt, Artificial Sequence
  Description of Artificial Sequence: Synthetic oligonucleotide
uauguaugcgucuacagua

SEQ ID NO: 25820 - RNA, 19 nt, Artificial Sequence
  Description of Artificial Sequence: Synthetic oligonucleotide
uauauauacuauauauaau

SEQ ID NO: 25821 - RNA, 19 nt, Artificial Sequence
  Description of Artificial Sequence: Synthetic oligonucleotide
uuucuacugacacggggcg

SEQ ID NO: 25822 - RNA, 19 nt, Artificial Sequence
  Description of Artificial Sequence: Synthetic oligonucleotide
aucugcuauagugagagac

SEQ ID NO: 25823 - RNA, 19 nt, Artificial Sequence
  Description of Artificial Sequence: Synthetic oligonucleotide
aguaaaguguuagcaacgc

SEQ ID NO: 25824 - RNA, 19 nt, Artificial Sequence
  Description of Artificial Sequence: Synthetic oligonucleotide
aaguuacuaguugauacag

SEQ ID NO: 25825 - RNA, 19 nt, Artificial Sequence
  Description of Artificial Sequence: Synthetic oligonucleotide
uuacaguacuguguuaugg

SEQ ID NO: 25826 - RNA, 19 nt, Artificial Sequence
  Description of Artificial Sequence: Synthetic oligonucleotide
ugcggaaucaugaucauua

SEQ ID NO: 25827 - RNA, 19 nt, Artificial Sequence
  Description of Artificial Sequence: Synthetic oligonucleotide
ugaaugaucccgaaaguau

SEQ ID NO: 25828 - RNA, 19 nt, Artificial Sequence
  Description of Artificial Sequence: Synthetic oligonucleotide
aaugaucccgaaaguaugg

SEQ ID NO: 25829 - RNA, 19 nt, Artificial Sequence
  Description of Artificial Sequence: Synthetic oligonucleotide
aaagguuacccauuucuau

SEQ ID NO: 25830 - RNA, 19 nt, Artificial Sequence
  Description of Artificial Sequence: Synthetic oligonucleotide
auagugagagaccuaaccu

SEQ ID NO: 25831 - RNA, 19 nt, Artificial Sequence
  Description of Artificial Sequence: Synthetic oligonucleotide
aacggaagacuauguuagc

SEQ ID NO: 25832 - RNA, 19 nt, Artificial Sequence
  Description of Artificial Sequence: Synthetic oligonucleotide
acuuaacugauaucacaac

SEQ ID NO: 25833 - RNA, 19 nt, Artificial Sequence
  Description of Artificial Sequence: Synthetic oligonucleotide
uacuccgguagcuaaacag

SEQ ID NO: 25834 - RNA, 19 nt, Artificial Sequence
  Description of Artificial Sequence: Synthetic oligonucleotide
aaaaccugguauguaugcg

SEQ ID NO: 25835 - RNA, 19 nt, Artificial Sequence
  Description of Artificial Sequence: Synthetic oligonucleotide
cucauuagcacauacaaua

SEQ ID NO: 25836 - RNA, 19 nt, Artificial Sequence
  Description of Artificial Sequence: Synthetic oligonucleotide
acagaucaaccuuucauug

SEQ ID NO: 25837 - RNA, 19 nt, Artificial Sequence
  Description of Artificial Sequence: Synthetic oligonucleotide
gacuauguuagcccuacug

SEQ ID NO: 25838 - RNA, 19 nt, Artificial Sequence
  Description of Artificial Sequence: Synthetic oligonucleotide
ugguuuauguguuugcuaa

SEQ ID NO: 25839 - RNA, 19 nt, Artificial Sequence
  Description of Artificial Sequence: Synthetic oligonucleotide
cuuuauuauauauauauau

SEQ ID NO: 25840 - RNA, 19 nt, Artificial Sequence
  Description of Artificial Sequence: Synthetic oligonucleotide
uuuucucgccccuaacacg

SEQ ID NO: 25841 - RNA, 19 nt, Artificial Sequence
  Description of Artificial Sequence: Synthetic oligonucleotide
ugagcuugacgucucaugu

SEQ ID NO: 25842 - RNA, 19 nt, Artificial Sequence
  Description of Artificial Sequence: Synthetic oligonucleotide
acuaguugauacagcaucc

SEQ ID NO: 25843 - RNA, 19 nt, Artificial Sequence
  Description of Artificial Sequence: Synthetic oligonucleotide
ugggguaaaugucguaggg

SEQ ID NO: 25844 - RNA, 19 nt, Artificial Sequence
  Description of Artificial Sequence: Synthetic oligonucleotide
agggcuaacacccacagua

SEQ ID NO: 25845 - RNA, 19 nt, Artificial Sequence
  Description of Artificial Sequence: Synthetic oligonucleotide
cacaacuugcgaaaugcgg

SEQ ID NO: 25846 - RNA, 19 nt, Artificial Sequence
  Description of Artificial Sequence: Synthetic oligonucleotide
ucacagauaucgacaagcc

SEQ ID NO: 25847 - RNA, 19 nt, Artificial Sequence
  Description of Artificial Sequence: Synthetic oligonucleotide
uacaguacggaaugaaggu

SEQ ID NO: 25848 - RNA, 19 nt, Artificial Sequence
  Description of Artificial Sequence: Synthetic oligonucleotide
auaguuuagauguugcaua

SEQ ID NO: 25849 - RNA, 19 nt, Artificial Sequence
  Description of Artificial Sequence: Synthetic oligonucleotide
ugaaaauguacuagggcua

SEQ ID NO: 25850 - RNA, 19 nt, Artificial Sequence
  Description of Artificial Sequence: Synthetic oligonucleotide
agguuaccaguuuauauug

SEQ ID NO: 25851 - RNA, 19 nt, Artificial Sequence
  Description of Artificial Sequence: Synthetic oligonucleotide
uacaguacuguguuauggc

SEQ ID NO: 25852 - RNA, 19 nt, Artificial Sequence
  Description of Artificial Sequence: Synthetic oligonucleotide
agccccgugaacuuuacag

SEQ ID NO: 25853 - RNA, 19 nt, Artificial Sequence
  Description of Artificial Sequence: Synthetic oligonucleotide
gugauagcccuguauaugc

SEQ ID NO: 25854 - RNA, 19 nt, Artificial Sequence
  Description of Artificial Sequence: Synthetic oligonucleotide
aaauguacuagggcuaaca

SEQ ID NO: 25855 - RNA, 19 nt, Artificial Sequence
  Description of Artificial Sequence: Synthetic oligonucleotide
uguaugcgucuacaguacg

SEQ ID NO: 25856 - RNA, 19 nt, Artificial Sequence
  Description of Artificial Sequence: Synthetic oligonucleotide
uuguuuaucuuaguggacu

SEQ ID NO: 25857 - RNA, 19 nt, Artificial Sequence
  Description of Artificial Sequence: Synthetic oligonucleotide
ucuagguuguuaaaauuua

SEQ ID NO: 25858 - RNA, 19 nt, Artificial Sequence
  Description of Artificial Sequence: Synthetic oligonucleotide
gacaacgaacaaaaguucc

SEQ ID NO: 25859 - RNA, 19 nt, Artificial Sequence
  Description of Artificial Sequence: Synthetic oligonucleotide
uuucucgccccuaacacgu

SEQ ID NO: 25860 - RNA, 19 nt, Artificial Sequence
  Description of Artificial Sequence: Synthetic oligonucleotide
acggaagacuauguuagcc

SEQ ID NO: 25861 - RNA, 19 nt, Artificial Sequence
  Description of Artificial Sequence: Synthetic oligonucleotide
uugucuaacuaccacuaaa

SEQ ID NO: 25862 - RNA, 19 nt, Artificial Sequence
  Description of Artificial Sequence: Synthetic oligonucleotide
acggaaugaagguagauuu

SEQ ID NO: 25863 - RNA, 19 nt, Artificial Sequence
  Description of Artificial Sequence: Synthetic oligonucleotide
uccuuagucaggagcauca

SEQ ID NO: 25864 - RNA, 19 nt, Artificial Sequence
  Description of Artificial Sequence: Synthetic oligonucleotide
ugcuauaaaauaacccuua

SEQ ID NO: 25865 - RNA, 19 nt, Artificial Sequence
  Description of Artificial Sequence: Synthetic oligonucleotide
uguggauuuccauucggga

SEQ ID NO: 25866 - RNA, 19 nt, Artificial Sequence
  Description of Artificial Sequence: Synthetic oligonucleotide
agugagagaccuaaccuac

SEQ ID NO: 25867 - RNA, 19 nt, Artificial Sequence
  Description of Artificial Sequence: Synthetic oligonucleotide
auaucgacaagccacucau

SEQ ID NO: 25868 - RNA, 19 nt, Artificial Sequence
  Description of Artificial Sequence: Synthetic oligonucleotide
ugagguuaccaguuuauau

SEQ ID NO: 25869 - RNA, 19 nt, Artificial Sequence
  Description of Artificial Sequence: Synthetic oligonucleotide
uuucuaucagcugacggca

SEQ ID NO: 25870 - RNA, 19 nt, Artificial Sequence
  Description of Artificial Sequence: Synthetic oligonucleotide
ugcgaaaugcggaaucaug

SEQ ID NO: 25871 - RNA, 19 nt, Artificial Sequence
  Description of Artificial Sequence: Synthetic oligonucleotide
uuguauggguaccaguaac

SEQ ID NO: 25872 - RNA, 19 nt, Artificial Sequence
  Description of Artificial Sequence: Synthetic oligonucleotide
ucuuaaucacagauaucga

SEQ ID NO: 25873 - RNA, 19 nt, Artificial Sequence
  Description of Artificial Sequence: Synthetic oligonucleotide
aucgaacugaaugaaacug

SEQ ID NO: 25874 - RNA, 19 nt, Artificial Sequence
  Description of Artificial Sequence: Synthetic oligonucleotide
auauauauauauauguaua

SEQ ID NO: 25875 - RNA, 19 nt, Artificial Sequence
  Description of Artificial Sequence: Synthetic oligonucleotide
uuagcacauacaauacuaa

SEQ ID NO: 25876 - RNA, 19 nt, Artificial Sequence
  Description of Artificial Sequence: Synthetic oligonucleotide
uagcuaaacaggagcagug

SEQ ID NO: 25877 - RNA, 19 nt, Artificial Sequence
  Description of Artificial Sequence: Synthetic oligonucleotide
auggcaaguuacuaguuga

SEQ ID NO: 25878 - RNA, 19 nt, Artificial Sequence
  Description of Artificial Sequence: Synthetic oligonucleotide
agcuaacaaguugacaaac

SEQ ID NO: 25879 - RNA, 19 nt, Artificial Sequence
  Description of Artificial Sequence: Synthetic oligonucleotide
accaaccuaaaguagaguu

SEQ ID NO: 25880 - RNA, 19 nt, Artificial Sequence
  Description of Artificial Sequence: Synthetic oligonucleotide
uuuccggggacuccaugcg

SEQ ID NO: 25881 - RNA, 19 nt, Artificial Sequence
  Description of Artificial Sequence: Synthetic oligonucleotide
uuggcuaguauaacacuac

SEQ ID NO: 25882 - RNA, 19 nt, Artificial Sequence
  Description of Artificial Sequence: Synthetic oligonucleotide
gaaaugcggaaucaugauc

SEQ ID NO: 25883 - RNA, 19 nt, Artificial Sequence
  Description of Artificial Sequence: Synthetic oligonucleotide
gaaugaucccgaaaguaug

SEQ ID NO: 25884 - RNA, 19 nt, Artificial Sequence
  Description of Artificial Sequence: Synthetic oligonucleotide
aggguugaaacagagucag

SEQ ID NO: 25885 - RNA, 19 nt, Artificial Sequence
  Description of Artificial Sequence: Synthetic oligonucleotide
auauauauauauguauaaa

SEQ ID NO: 25886 - RNA, 19 nt, Artificial Sequence
  Description of Artificial Sequence: Synthetic oligonucleotide
uauggguaccaguaacccc

SEQ ID NO: 25887 - RNA, 19 nt, Artificial Sequence
  Description of Artificial Sequence: Synthetic oligonucleotide
augggguaaaugucguagg

SEQ ID NO: 25888 - RNA, 19 nt, Artificial Sequence
  Description of Artificial Sequence: Synthetic oligonucleotide
agaacuacauguacguaag

SEQ ID NO: 25889 - RNA, 19 nt, Artificial Sequence
  Description of Artificial Sequence: Synthetic oligonucleotide
uggaggcuuacuccgguag

SEQ ID NO: 25890 - RNA, 19 nt, Artificial Sequence
  Description of Artificial Sequence: Synthetic oligonucleotide
auguacguaaguucagaca

SEQ ID NO: 25891 - RNA, 19 nt, Artificial Sequence
  Description of Artificial Sequence: Synthetic oligonucleotide
aacgcgaaugggagcaagc

SEQ ID NO: 25892 - RNA, 19 nt, Artificial Sequence
  Description of Artificial Sequence: Synthetic oligonucleotide
uguaacggaagacuauguu

SEQ ID NO: 25893 - RNA, 19 nt, Artificial Sequence
  Description of Artificial Sequence: Synthetic oligonucleotide
aaaauguacuagggcuaac

SEQ ID NO: 25894 - RNA, 19 nt, Artificial Sequence
  Description of Artificial Sequence: Synthetic oligonucleotide
ucccauuacguuugaaccu

SEQ ID NO: 25895 - RNA, 19 nt, Artificial Sequence
  Description of Artificial Sequence: Synthetic oligonucleotide
gaguuuaccuccucaggac

SEQ ID NO: 25896 - RNA, 19 nt, Artificial Sequence
  Description of Artificial Sequence: Synthetic oligonucleotide
uaguuuagauguugcauau

SEQ ID NO: 25897 - RNA, 19 nt, Artificial Sequence
  Description of Artificial Sequence: Synthetic oligonucleotide
uauguuagcccuacugcua

SEQ ID NO: 25898 - RNA, 19 nt, Artificial Sequence
  Description of Artificial Sequence: Synthetic oligonucleotide
gacaugggcgugcugcccg

SEQ ID NO: 25899 - RNA, 19 nt, Artificial Sequence
  Description of Artificial Sequence: Synthetic oligonucleotide
gauaucgacaagccacuca

SEQ ID NO: 25900 - RNA, 19 nt, Artificial Sequence
  Description of Artificial Sequence: Synthetic oligonucleotide
gagagagagagaaauccac

SEQ ID NO: 25901 - RNA, 19 nt, Artificial Sequence
  Description of Artificial Sequence: Synthetic oligonucleotide
uuguaacggaagacuaugu

SEQ ID NO: 25902 - RNA, 19 nt, Artificial Sequence
  Description of Artificial Sequence: Synthetic oligonucleotide
uggcuaguauaacacuaca

SEQ ID NO: 25903 - RNA, 19 nt, Artificial Sequence
  Description of Artificial Sequence: Synthetic oligonucleotide
acaacuugcgaaaugcgga

SEQ ID NO: 25904 - RNA, 19 nt, Artificial Sequence
  Description of Artificial Sequence: Synthetic oligonucleotide
acaccaugugaagucauuc

SEQ ID NO: 25905 - RNA, 19 nt, Artificial Sequence
  Description of Artificial Sequence: Synthetic oligonucleotide
acuccgguagcuaaacagg

SEQ ID NO: 25906 - RNA, 19 nt, Artificial Sequence
  Description of Artificial Sequence: Synthetic oligonucleotide
uuuacuucacguggugaug

SEQ ID NO: 25907 - RNA, 19 nt, Artificial Sequence
  Description of Artificial Sequence: Synthetic oligonucleotide
caaguuacuaguugauaca

SEQ ID NO: 25908 - RNA, 19 nt, Artificial Sequence
  Description of Artificial Sequence: Synthetic oligonucleotide
acaaggaguuaugcagugc

SEQ ID NO: 25909 - RNA, 19 nt, Artificial Sequence
  Description of Artificial Sequence: Synthetic oligonucleotide
ccuaacacgucccauuacg

SEQ ID NO: 25910 - RNA, 19 nt, Artificial Sequence
  Description of Artificial Sequence: Synthetic oligonucleotide
gaacuagauagucucauau

SEQ ID NO: 25911 - RNA, 19 nt, Artificial Sequence
  Description of Artificial Sequence: Synthetic oligonucleotide
uucacguggugaugaagug

SEQ ID NO: 25912 - RNA, 19 nt, Artificial Sequence
  Description of Artificial Sequence: Synthetic oligonucleotide
gggagagagagagaaaucc

SEQ ID NO: 25913 - RNA, 19 nt, Artificial Sequence
  Description of Artificial Sequence: Synthetic oligonucleotide
cucaauuacgcacaggccu

SEQ ID NO: 25914 - RNA, 19 nt, Artificial Sequence
  Description of Artificial Sequence: Synthetic oligonucleotide
guaugcgucuacaguacgg

SEQ ID NO: 25915 - RNA, 19 nt, Artificial Sequence
  Description of Artificial Sequence: Synthetic oligonucleotide
augucguagggaagggugc

SEQ ID NO: 25916 - RNA, 19 nt, Artificial Sequence
  Description of Artificial Sequence: Synthetic oligonucleotide
agagacucaauuacgcaca

SEQ ID NO: 25917 - RNA, 19 nt, Artificial Sequence
  Description of Artificial Sequence: Synthetic oligonucleotide
gacuccuuagucaggagca

SEQ ID NO: 25918 - RNA, 19 nt, Artificial Sequence
  Description of Artificial Sequence: Synthetic oligonucleotide
uguuuaucuuaguggacuu

SEQ ID NO: 25919 - RNA, 19 nt, Artificial Sequence
  Description of Artificial Sequence: Synthetic oligonucleotide
agucgcaugugccugucga

SEQ ID NO: 25920 - RNA, 19 nt, Artificial Sequence
  Description of Artificial Sequence: Synthetic oligonucleotide
acaguuugugcaauggggu

SEQ ID NO: 25921 - RNA, 19 nt, Artificial Sequence
  Description of Artificial Sequence: Synthetic oligonucleotide
gcuaguauaacacuacacu

SEQ ID NO: 25922 - RNA, 19 nt, Artificial Sequence
  Description of Artificial Sequence: Synthetic oligonucleotide
aaugcggaaucaugaucau

SEQ ID NO: 25923 - RNA, 19 nt, Artificial Sequence
  Description of Artificial Sequence: Synthetic oligonucleotide
aauuucuguuccacguaca

SEQ ID NO: 25924 - RNA, 19 nt, Artificial Sequence
  Description of Artificial Sequence: Synthetic oligonucleotide
gagagaccuaaccuacaac

SEQ ID NO: 25925 - RNA, 19 nt, Artificial Sequence
  Description of Artificial Sequence: Synthetic oligonucleotide
agcaacgcgaaugggagca

SEQ ID NO: 25926 - RNA, 19 nt, Artificial Sequence
  Description of Artificial Sequence: Synthetic oligonucleotide
cugagcuugacgucucaug

SEQ ID NO: 25927 - RNA, 19 nt, Artificial Sequence
  Description of Artificial Sequence: Synthetic oligonucleotide
agaccucacagcggaaugg

SEQ ID NO: 25928 - RNA, 19 nt, Artificial Sequence
  Description of Artificial Sequence: Synthetic oligonucleotide
gucuaacuaccacuaaaga

SEQ ID NO: 25929 - RNA, 19 nt, Artificial Sequence
  Description of Artificial Sequence: Synthetic oligonucleotide
uacggaaugaagguagauu

SEQ ID NO: 25930 - RNA, 19 nt, Artificial Sequence
  Description of Artificial Sequence: Synthetic oligonucleotide
cuagauagucucauauaaa

SEQ ID NO: 25931 - RNA, 19 nt, Artificial Sequence
  Description of Artificial Sequence: Synthetic oligonucleotide
guuagcccuacugcuaaag

SEQ ID NO: 25932 - RNA, 19 nt, Artificial Sequence
  Description of Artificial Sequence: Synthetic oligonucleotide
ugguauguaugcgucuaca

SEQ ID NO: 25933 - RNA, 19 nt, Artificial Sequence
  Description of Artificial Sequence: Synthetic oligonucleotide
agcccuguauaugccagac

SEQ ID NO: 25934 - RNA, 19 nt, Artificial Sequence
  Description of Artificial Sequence: Synthetic oligonucleotide
acaccaaccuaaaguagag

SEQ ID NO: 25935 - RNA, 19 nt, Artificial Sequence
  Description of Artificial Sequence: Synthetic oligonucleotide
ucucgccccuaacacgucc

SEQ ID NO: 25936 - RNA, 19 nt, Artificial Sequence
  Description of Artificial Sequence: Synthetic oligonucleotide
acuuuauuauauauauaua

SEQ ID NO: 25937 - RNA, 19 nt, Artificial Sequence
  Description of Artificial Sequence: Synthetic oligonucleotide
uuacuccgguagcuaaaca

SEQ ID NO: 25938 - RNA, 19 nt, Artificial Sequence
  Description of Artificial Sequence: Synthetic oligonucleotide
cuauagugagagaccuaac

SEQ ID NO: 25939 - RNA, 19 nt, Artificial Sequence
  Description of Artificial Sequence: Synthetic oligonucleotide
cuuacuccgguagcuaaac

SEQ ID NO: 25940 - RNA, 19 nt, Artificial Sequence
  Description of Artificial Sequence: Synthetic oligonucleotide
aauugauugggaggcuuuu

SEQ ID NO: 25941 - RNA, 19 nt, Artificial Sequence
  Description of Artificial Sequence: Synthetic oligonucleotide
acggggcguaaucuugaac

SEQ ID NO: 25942 - RNA, 19 nt, Artificial Sequence
  Description of Artificial Sequence: Synthetic oligonucleotide
cuucacguggugaugaagu

SEQ ID NO: 25943 - RNA, 19 nt, Artificial Sequence
  Description of Artificial Sequence: Synthetic oligonucleotide
aaagccccgugaacuuuac

SEQ ID NO: 25944 - RNA, 19 nt, Artificial Sequence
  Description of Artificial Sequence: Synthetic oligonucleotide
cuauguuagcccuacugcu

SEQ ID NO: 25945 - RNA, 19 nt, Artificial Sequence
  Description of Artificial Sequence: Synthetic oligonucleotide
gaaagguuacccauuucua

SEQ ID NO: 25946 - RNA, 19 nt, Artificial Sequence
  Description of Artificial Sequence: Synthetic oligonucleotide
gcgucuacaguacggaaug

SEQ ID NO: 25947 - RNA, 19 nt, Artificial Sequence
  Description of Artificial Sequence: Synthetic oligonucleotide
ucuacugacacggggcgua

SEQ ID NO: 25948 - RNA, 19 nt, Artificial Sequence
  Description of Artificial Sequence: Synthetic oligonucleotide
acgucucauguccuuagau

SEQ ID NO: 25949 - RNA, 19 nt, Artificial Sequence
  Description of Artificial Sequence: Synthetic oligonucleotide
ccgguagcuaaacaggagc

SEQ ID NO: 25950 - RNA, 19 nt, Artificial Sequence
  Description of Artificial Sequence: Synthetic oligonucleotide
agauaucgacaagccacuc

SEQ ID NO: 25951 - RNA, 19 nt, Artificial Sequence
  Description of Artificial Sequence: Synthetic oligonucleotide
caugcgauuccugaccuca

SEQ ID NO: 25952 - RNA, 19 nt, Artificial Sequence
  Description of Artificial Sequence: Synthetic oligonucleotide
gagggagagagagagaaau

SEQ ID NO: 25953 - RNA, 19 nt, Artificial Sequence
  Description of Artificial Sequence: Synthetic oligonucleotide
aucagauacuguguggauu

SEQ ID NO: 25954 - RNA, 19 nt, Artificial Sequence
  Description of Artificial Sequence: Synthetic oligonucleotide
agggagagagagagaaauc

SEQ ID NO: 25955 - RNA, 19 nt, Artificial Sequence
  Description of Artificial Sequence: Synthetic oligonucleotide
ccauucgggaaucuagagc

SEQ ID NO: 25956 - RNA, 19 nt, Artificial Sequence
  Description of Artificial Sequence: Synthetic oligonucleotide
ugccugucgaggcuucccu

SEQ ID NO: 25957 - RNA, 19 nt, Artificial Sequence
  Description of Artificial Sequence: Synthetic oligonucleotide
auccagcauaccuggacaa

SEQ ID NO: 25958 - RNA, 19 nt, Artificial Sequence
  Description of Artificial Sequence: Synthetic oligonucleotide
ccauucaaggggcaugagc

SEQ ID NO: 25959 - RNA, 19 nt, Artificial Sequence
  Description of Artificial Sequence: Synthetic oligonucleotide
uagcaacgcgaaugggagc

SEQ ID NO: 25960 - RNA, 19 nt, Artificial Sequence
  Description of Artificial Sequence: Synthetic oligonucleotide
gagcaagcacaacuugcga

SEQ ID NO: 25961 - RNA, 19 nt, Artificial Sequence
  Description of Artificial Sequence: Synthetic oligonucleotide
ugcucucauaacugggauu

SEQ ID NO: 25962 - RNA, 19 nt, Artificial Sequence
  Description of Artificial Sequence: Synthetic oligonucleotide
cuccgguagcuaaacagga

SEQ ID NO: 25963 - RNA, 19 nt, Artificial Sequence
  Description of Artificial Sequence: Synthetic oligonucleotide
agacucaauuacgcacagg

SEQ ID NO: 25964 - RNA, 19 nt, Artificial Sequence
  Description of Artificial Sequence: Synthetic oligonucleotide
auagcucgcuucuggccca

SEQ ID NO: 25965 - RNA, 19 nt, Artificial Sequence
  Description of Artificial Sequence: Synthetic oligonucleotide
gaucugcgugcacuuguca

SEQ ID NO: 25966 - RNA, 19 nt, Artificial Sequence
  Description of Artificial Sequence: Synthetic oligonucleotide
aggcggagcucauuuaguu

SEQ ID NO: 25967 - RNA, 19 nt, Artificial Sequence
  Description of Artificial Sequence: Synthetic oligonucleotide
ggcuaguauaacacuacac

SEQ ID NO: 25968 - RNA, 19 nt, Artificial Sequence
  Description of Artificial Sequence: Synthetic oligonucleotide
gcagugauagcccuguaua

SEQ ID NO: 25969 - RNA, 19 nt, Artificial Sequence
  Description of Artificial Sequence: Synthetic oligonucleotide
gcgaaaugcggaaucauga

SEQ ID NO: 25970 - RNA, 19 nt, Artificial Sequence
  Description of Artificial Sequence: Synthetic oligonucleotide
uggcguugugagguuacca

SEQ ID NO: 25971 - RNA, 19 nt, Artificial Sequence
  Description of Artificial Sequence: Synthetic oligonucleotide
guagcuaaacaggagcagu

SEQ ID NO: 25972 - RNA, 19 nt, Artificial Sequence
  Description of Artificial Sequence: Synthetic oligonucleotide
caucgaacugaaugaaacu

SEQ ID NO: 25973 - RNA, 19 nt, Artificial Sequence
  Description of Artificial Sequence: Synthetic oligonucleotide
uagcccuguauaugccaga

SEQ ID NO: 25974 - RNA, 19 nt, Artificial Sequence
  Description of Artificial Sequence: Synthetic oligonucleotide
gguuaccaguuuauauugc

SEQ ID NO: 25975 - RNA, 19 nt, Artificial Sequence
  Description of Artificial Sequence: Synthetic oligonucleotide
aguacggaaugaagguaga

SEQ ID NO: 25976 - RNA, 19 nt, Artificial Sequence
  Description of Artificial Sequence: Synthetic oligonucleotide
aggacuucccacaguaaau

SEQ ID NO: 25977 - RNA, 19 nt, Artificial Sequence
  Description of Artificial Sequence: Synthetic oligonucleotide
ggacaacgaacaaaaguuc

SEQ ID NO: 25978 - RNA, 19 nt, Artificial Sequence
  Description of Artificial Sequence: Synthetic oligonucleotide
aagccccgugaacuuuaca

SEQ ID NO: 25979 - RNA, 19 nt, Artificial Sequence
  Description of Artificial Sequence: Synthetic oligonucleotide
ggggcguaaucuugaacug

SEQ ID NO: 25980 - RNA, 19 nt, Artificial Sequence
  Description of Artificial Sequence: Synthetic oligonucleotide
auuuccauucgggaaucua

SEQ ID NO: 25981 - RNA, 19 nt, Artificial Sequence
  Description of Artificial Sequence: Synthetic oligonucleotide
uugcgaaaugcggaaucau

SEQ ID NO: 25982 - RNA, 19 nt, Artificial Sequence
  Description of Artificial Sequence: Synthetic oligonucleotide
ggaggcuuacuccgguagc

SEQ ID NO: 25983 - RNA, 19 nt, Artificial Sequence
  Description of Artificial Sequence: Synthetic oligonucleotide
uagaaagcucuggaaccau

SEQ ID NO: 25984 - RNA, 19 nt, Artificial Sequence
  Description of Artificial Sequence: Synthetic oligonucleotide
uguuagcccuacugcuaaa

SEQ ID NO: 25985 - RNA, 19 nt, Artificial Sequence
  Description of Artificial Sequence: Synthetic oligonucleotide
uguggacgaugaugucaca

SEQ ID NO: 25986 - RNA, 19 nt, Artificial Sequence
  Description of Artificial Sequence: Synthetic oligonucleotide
ggagagagagagaaaucca

SEQ ID NO: 25987 - RNA, 19 nt, Artificial Sequence
  Description of Artificial Sequence: Synthetic oligonucleotide
cagauaucgacaagccacu

SEQ ID NO: 25988 - RNA, 19 nt, Artificial Sequence
  Description of Artificial Sequence: Synthetic oligonucleotide
accuacaacuguacaggga

SEQ ID NO: 25989 - RNA, 19 nt, Artificial Sequence
  Description of Artificial Sequence: Synthetic oligonucleotide
gggagggagagagagagaa

SEQ ID NO: 25990 - RNA, 19 nt, Artificial Sequence
  Description of Artificial Sequence: Synthetic oligonucleotide
ggcguaaucuugaacugca

SEQ ID NO: 25991 - RNA, 19 nt, Artificial Sequence
  Description of Artificial Sequence: Synthetic oligonucleotide
uucuacugacacggggcgu

SEQ ID NO: 25992 - RNA, 19 nt, Artificial Sequence
  Description of Artificial Sequence: Synthetic oligonucleotide
ggagacuccuuagucagga

SEQ ID NO: 25993 - RNA, 19 nt, Artificial Sequence
  Description of Artificial Sequence: Synthetic oligonucleotide
acguacacaucuguucuuu

SEQ ID NO: 25994 - RNA, 19 nt, Artificial Sequence
  Description of Artificial Sequence: Synthetic oligonucleotide
caccccacucaccauagaa

SEQ ID NO: 25995 - RNA, 19 nt, Artificial Sequence
  Description of Artificial Sequence: Synthetic oligonucleotide
agacuauguuagcccuacu

SEQ ID NO: 25996 - RNA, 19 nt, Artificial Sequence
  Description of Artificial Sequence: Synthetic oligonucleotide
cccauuacguuugaaccug

SEQ ID NO: 25997 - RNA, 19 nt, Artificial Sequence
  Description of Artificial Sequence: Synthetic oligonucleotide
ucgccccuaacacguccca

SEQ ID NO: 25998 - RNA, 19 nt, Artificial Sequence
  Description of Artificial Sequence: Synthetic oligonucleotide
caacgcgaaugggagcaag

SEQ ID NO: 25999 - RNA, 19 nt, Artificial Sequence
  Description of Artificial Sequence: Synthetic oligonucleotide
cagaucaaccuuucauugu

SEQ ID NO: 26000 - RNA, 19 nt, Artificial Sequence
  Description of Artificial Sequence: Synthetic oligonucleotide
aguuuagauguugcauauu

SEQ ID NO: 26001 - RNA, 19 nt, Artificial Sequence
  Description of Artificial Sequence: Synthetic oligonucleotide
caguuugugcaauggggua

SEQ ID NO: 26002 - RNA, 19 nt, Artificial Sequence
  Description of Artificial Sequence: Synthetic oligonucleotide
aauuacgcacaggccugua

SEQ ID NO: 26003 - RNA, 19 nt, Artificial Sequence
  Description of Artificial Sequence: Synthetic oligonucleotide
cagucgcaugugccugucg

SEQ ID NO: 26004 - RNA, 19 nt, Artificial Sequence
  Description of Artificial Sequence: Synthetic oligonucleotide
ccauuucuacugacacggg

SEQ ID NO: 26005 - RNA, 19 nt, Artificial Sequence
  Description of Artificial Sequence: Synthetic oligonucleotide
aguguggcguugugagguu

SEQ ID NO: 26006 - RNA, 19 nt, Artificial Sequence
  Description of Artificial Sequence: Synthetic oligonucleotide
uucucgccccuaacacguc

SEQ ID NO: 26007 - RNA, 19 nt, Artificial Sequence
  Description of Artificial Sequence: Synthetic oligonucleotide
ggcuuacuccgguagcuaa

SEQ ID NO: 26008 - RNA, 19 nt, Artificial Sequence
  Description of Artificial Sequence: Synthetic oligonucleotide
cagugauagcccuguauau

SEQ ID NO: 26009 - RNA, 19 nt, Artificial Sequence
  Description of Artificial Sequence: Synthetic oligonucleotide
caauugauugggaggcuuu

SEQ ID NO: 26010 - RNA, 19 nt, Artificial Sequence
  Description of Artificial Sequence: Synthetic oligonucleotide
guggcguugugagguuacc

SEQ ID NO: 26011 - RNA, 19 nt, Artificial Sequence
  Description of Artificial Sequence: Synthetic oligonucleotide
gcugaaugaucccgaaagu

SEQ ID NO: 26012 - RNA, 19 nt, Artificial Sequence
  Description of Artificial Sequence: Synthetic oligonucleotide
augcggaaucaugaucauu

SEQ ID NO: 26013 - RNA, 19 nt, Artificial Sequence
  Description of Artificial Sequence: Synthetic oligonucleotide
ggcacuuacugaagaccac

SEQ ID NO: 26014 - RNA, 19 nt, Artificial Sequence
  Description of Artificial Sequence: Synthetic oligonucleotide
cggggcguaaucuugaacu

SEQ ID NO: 26015 - RNA, 19 nt, Artificial Sequence
  Description of Artificial Sequence: Synthetic oligonucleotide
cagcggaaugguuugucau

SEQ ID NO: 26016 - RNA, 19 nt, Artificial Sequence
  Description of Artificial Sequence: Synthetic oligonucleotide
cgguagcuaaacaggagca

SEQ ID NO: 26017 - RNA, 19 nt, Artificial Sequence
  Description of Artificial Sequence: Synthetic oligonucleotide
cuugacgucucauguccuu

SEQ ID NO: 26018 - RNA, 19 nt, Artificial Sequence
  Description of Artificial Sequence: Synthetic oligonucleotide
aggcuuacuccgguagcua

SEQ ID NO: 26019 - RNA, 19 nt, Artificial Sequence
  Description of Artificial Sequence: Synthetic oligonucleotide
ggccgaguucacagcauac

SEQ ID NO: 26020 - RNA, 19 nt, Artificial Sequence
  Description of Artificial Sequence: Synthetic oligonucleotide
ccccgugaacuuuacagua

SEQ ID NO: 26021 - RNA, 19 nt, Artificial Sequence
  Description of Artificial Sequence: Synthetic oligonucleotide
caggcggagcucauuuagu

SEQ ID NO: 26022 - RNA, 19 nt, Artificial Sequence
  Description of Artificial Sequence: Synthetic oligonucleotide
agggagggagagagagaga

SEQ ID NO: 26023 - RNA, 19 nt, Artificial Sequence
  Description of Artificial Sequence: Synthetic oligonucleotide
uccuuagauuuggggccuu

SEQ ID NO: 26024 - RNA, 19 nt, Artificial Sequence
  Description of Artificial Sequence: Synthetic oligonucleotide
gccccgugaacuuuacagu

SEQ ID NO: 26025 - RNA, 19 nt, Artificial Sequence
  Description of Artificial Sequence: Synthetic oligonucleotide
gcuuacuccgguagcuaaa

SEQ ID NO: 26026 - RNA, 19 nt, Artificial Sequence
  Description of Artificial Sequence: Synthetic oligonucleotide
caagucccgaggccgaguu

SEQ ID NO: 26027 - RNA, 19 nt, Artificial Sequence
  Description of Artificial Sequence: Synthetic oligonucleotide
ccgugaacuuuacaguacu

SEQ ID NO: 26028 - RNA, 19 nt, Artificial Sequence
  Description of Artificial Sequence: Synthetic oligonucleotide
gcccgagugcaccccacuc

SEQ ID NO: 26029 - RNA, 19 nt, Artificial Sequence
  Description of Artificial Sequence: Synthetic oligonucleotide
caauuacgcacaggccugu

SEQ ID NO: 26030 - RNA, 19 nt, Artificial Sequence
  Description of Artificial Sequence: Synthetic oligonucleotide
cacgucccauuacguuuga

SEQ ID NO: 26031 - RNA, 19 nt, Artificial Sequence
  Description of Artificial Sequence: Synthetic oligonucleotide
caccaaccuaaaguagagu

SEQ ID NO: 26032 - RNA, 19 nt, Artificial Sequence
  Description of Artificial Sequence: Synthetic oligonucleotide
acgucccauuacguuugaa

SEQ ID NO: 26033 - RNA, 19 nt, Artificial Sequence
  Description of Artificial Sequence: Synthetic oligonucleotide
ggagggagagagagagaaa

SEQ ID NO: 26034 - RNA, 19 nt, Artificial Sequence
  Description of Artificial Sequence: Synthetic oligonucleotide
gccgaguucacagcauacu

SEQ ID NO: 26035 - RNA, 19 nt, Artificial Sequence
  Description of Artificial Sequence: Synthetic oligonucleotide
guguggcguugugagguua

SEQ ID NO: 26036 - RNA, 19 nt, Artificial Sequence
  Description of Artificial Sequence: Synthetic oligonucleotide
ccgaaaguauggggagcug

SEQ ID NO: 26037 - RNA, 19 nt, Artificial Sequence
  Description of Artificial Sequence: Synthetic oligonucleotide
cgaaaugcggaaucaugau

SEQ ID NO: 26038 - RNA, 19 nt, Artificial Sequence
  Description of Artificial Sequence: Synthetic oligonucleotide
cccgaaaguauggggagcu

SEQ ID NO: 26039 - RNA, 19 nt, Artificial Sequence
  Description of Artificial Sequence: Synthetic oligonucleotide
gcccuacugcuaaaguggu

SEQ ID NO: 26040 - RNA, 19 nt, Artificial Sequence
  Description of Artificial Sequence: Synthetic oligonucleotide
gccaauugauugggaggcu

SEQ ID NO: 26041 - RNA, 19 nt, Artificial Sequence
  Description of Artificial Sequence: Synthetic oligonucleotide
ccggggacuccaugcgauu

SEQ ID NO: 26042 - RNA, 19 nt, Artificial Sequence
  Description of Artificial Sequence: Synthetic oligonucleotide
aauaauaauguuccuaggg

SEQ ID NO: 26043 - RNA, 19 nt, Artificial Sequence
  Description of Artificial Sequence: Synthetic oligonucleotide
aaaagaaaagaaaagaaag

SEQ ID NO: 26044 - RNA, 19 nt, Artificial Sequence
  Description of Artificial Sequence: Synthetic oligonucleotide
aagaguaaacaccauauuc

SEQ ID NO: 26045 - RNA, 19 nt, Artificial Sequence
  Description of Artificial Sequence: Synthetic oligonucleotide
ugcuuuaggacuuauaagg

SEQ ID NO: 26046 - RNA, 19 nt, Artificial Sequence
  Description of Artificial Sequence: Synthetic oligonucleotide
aaaagcuuaccauagucac

SEQ ID NO: 26047 - RNA, 19 nt, Artificial Sequence
  Description of Artificial Sequence: Synthetic oligonucleotide
uauauauuuauauauauau

SEQ ID NO: 26048 - RNA, 19 nt, Artificial Sequence
  Description of Artificial Sequence: Synthetic oligonucleotide
cuauuuaugaaugagaagc

SEQ ID NO: 26049 - RNA, 19 nt, Artificial Sequence
  Description of Artificial Sequence: Synthetic oligonucleotide
uauauauauauuuauauau

SEQ ID NO: 26050 - RNA, 19 nt, Artificial Sequence
  Description of Artificial Sequence: Synthetic oligonucleotide
aauauauauuuauauauau

SEQ ID NO: 26051 - RNA, 19 nt, Artificial Sequence
  Description of Artificial Sequence: Synthetic oligonucleotide
uuaaucgcgaucuagaacu

SEQ ID NO: 26052 - RNA, 19 nt, Artificial Sequence
  Description of Artificial Sequence: Synthetic oligonucleotide
aacacacagacacacacac

SEQ ID NO: 26053 - RNA, 19 nt, Artificial Sequence
  Description of Artificial Sequence: Synthetic oligonucleotide
uauauuuauauauauauuu

SEQ ID NO: 26054 - RNA, 19 nt, Artificial Sequence
  Description of Artificial Sequence: Synthetic oligonucleotide
uuuauauauauauuuauau

SEQ ID NO: 26055 - RNA, 19 nt, Artificial Sequence
  Description of Artificial Sequence: Synthetic oligonucleotide
aagcguuuagaccauuucc

SEQ ID NO: 26056 - RNA, 19 nt, Artificial Sequence
  Description of Artificial Sequence: Synthetic oligonucleotide
aaugguuugugccacuacg

SEQ ID NO: 26057 - RNA, 19 nt, Artificial Sequence
  Description of Artificial Sequence: Synthetic oligonucleotide
aaaacuacuucuaacuagg

SEQ ID NO: 26058 - RNA, 19 nt, Artificial Sequence
  Description of Artificial Sequence: Synthetic oligonucleotide
guuacgauaacaaacuggg

SEQ ID NO: 26059 - RNA, 19 nt, Artificial Sequence
  Description of Artificial Sequence: Synthetic oligonucleotide
gaaaagaaaagaaagaaaa

SEQ ID NO: 26060 - RNA, 19 nt, Artificial Sequence
  Description of Artificial Sequence: Synthetic oligonucleotide
uuuguuaugaggguagccg

SEQ ID NO: 26061 - RNA, 19 nt, Artificial Sequence
  Description of Artificial Sequence: Synthetic oligonucleotide
uauauauauuuauauauau

SEQ ID NO: 26062 - RNA, 19 nt, Artificial Sequence
  Description of Artificial Sequence: Synthetic oligonucleotide
uuuguaaaaggugaccacg

SEQ ID NO: 26063 - RNA, 19 nt, Artificial Sequence
  Description of Artificial Sequence: Synthetic oligonucleotide
aaaagaaaagaaagaaaag

SEQ ID NO: 26064 - RNA, 19 nt, Artificial Sequence
  Description of Artificial Sequence: Synthetic oligonucleotide
gaauguaucacgaaaagga

SEQ ID NO: 26065 - RNA, 19 nt, Artificial Sequence
  Description of Artificial Sequence: Synthetic oligonucleotide
uaaacggucuucaauccgg

SEQ ID NO: 26066 - RNA, 19 nt, Artificial Sequence
  Description of Artificial Sequence: Synthetic oligonucleotide
ugcaacuuaaugcuuuagg

SEQ ID NO: 26067 - RNA, 19 nt, Artificial Sequence
  Description of Artificial Sequence: Synthetic oligonucleotide
uucuagaccaaacagcugu

SEQ ID NO: 26068 - RNA, 19 nt, Artificial Sequence
  Description of Artificial Sequence: Synthetic oligonucleotide
agaaucaggagcuuggucu

SEQ ID NO: 26069 - RNA, 19 nt, Artificial Sequence
  Description of Artificial Sequence: Synthetic oligonucleotide
agcacuacuuguuuacugc

SEQ ID NO: 26070 - RNA, 19 nt, Artificial Sequence
  Description of Artificial Sequence: Synthetic oligonucleotide
gaaaagaaagaaaagaaaa

SEQ ID NO: 26071 - RNA, 19 nt, Artificial Sequence
  Description of Artificial Sequence: Synthetic oligonucleotide
uaauuaaucgcgaucuaga

SEQ ID NO: 26072 - RNA, 19 nt, Artificial Sequence
  Description of Artificial Sequence: Synthetic oligonucleotide
ucuacuauuuaugaaugag

SEQ ID NO: 26073 - RNA, 19 nt, Artificial Sequence
  Description of Artificial Sequence: Synthetic oligonucleotide
uuauauauauauuuauaua

SEQ ID NO: 26074 - RNA, 19 nt, Artificial Sequence
  Description of Artificial Sequence: Synthetic oligonucleotide
uaauauauauuuauauaua

SEQ ID NO: 26075 - RNA, 19 nt, Artificial Sequence
  Description of Artificial Sequence: Synthetic oligonucleotide
acuacuucuaacuaggguu

SEQ ID NO: 26076 - RNA, 19 nt, Artificial Sequence
  Description of Artificial Sequence: Synthetic oligonucleotide
uuaauuaaucgcgaucuag

SEQ ID NO: 26077 - RNA, 19 nt, Artificial Sequence
  Description of Artificial Sequence: Synthetic oligonucleotide
agcuacgccaucuucacgg

SEQ ID NO: 26078 - RNA, 19 nt, Artificial Sequence
  Description of Artificial Sequence: Synthetic oligonucleotide
uuugacgaaaagcuguugu

SEQ ID NO: 26079 - RNA, 19 nt, Artificial Sequence
  Description of Artificial Sequence: Synthetic oligonucleotide
gguaauuagaaacacuagc

SEQ ID NO: 26080 - RNA, 19 nt, Artificial Sequence
  Description of Artificial Sequence: Synthetic oligonucleotide
gaauagaucgaagccaggg

SEQ ID NO: 26081 - RNA, 19 nt, Artificial Sequence
  Description of Artificial Sequence: Synthetic oligonucleotide
auggauuuauggcauuuac

SEQ ID NO: 26082 - RNA, 19 nt, Artificial Sequence
  Description of Artificial Sequence: Synthetic oligonucleotide
cacacacacacauacacag

SEQ ID NO: 26083 - RNA, 19 nt, Artificial Sequence
  Description of Artificial Sequence: Synthetic oligonucleotide
uuaaguaggagcacuacuu

SEQ ID NO: 26084 - RNA, 19 nt, Artificial Sequence
  Description of Artificial Sequence: Synthetic oligonucleotide
gagugcagaauguaucacg

SEQ ID NO: 26085 - RNA, 19 nt, Artificial Sequence
  Description of Artificial Sequence: Synthetic oligonucleotide
auugcuaguaauugauuug

SEQ ID NO: 26086 - RNA, 19 nt, Artificial Sequence
  Description of Artificial Sequence: Synthetic oligonucleotide
uauccgguaauuagaaaca

SEQ ID NO: 26087 - RNA, 19 nt, Artificial Sequence
  Description of Artificial Sequence: Synthetic oligonucleotide
cacacagacacacacacac

SEQ ID NO: 26088 - RNA, 19 nt, Artificial Sequence
  Description of Artificial Sequence: Synthetic oligonucleotide
acuacgauggaacguggac

SEQ ID NO: 26089 - RNA, 19 nt, Artificial Sequence
  Description of Artificial Sequence: Synthetic oligonucleotide
gauuauguuauguuuccga

SEQ ID NO: 26090 - RNA, 19 nt, Artificial Sequence
  Description of Artificial Sequence: Synthetic oligonucleotide
aaugcuuaaguaggagcac

SEQ ID NO: 26091 - RNA, 19 nt, Artificial Sequence
  Description of Artificial Sequence: Synthetic oligonucleotide
ucuuaauacaugccaagau

SEQ ID NO: 26092 - RNA, 19 nt, Artificial Sequence
  Description of Artificial Sequence: Synthetic oligonucleotide
gacacacacacacacacac

SEQ ID NO: 26093 - RNA, 19 nt, Artificial Sequence
  Description of Artificial Sequence: Synthetic oligonucleotide
ugauagguggaaaacuacu

SEQ ID NO: 26094 - RNA, 19 nt, Artificial Sequence
  Description of Artificial Sequence: Synthetic oligonucleotide
agaauguaucacgaaaagg

SEQ ID NO: 26095 - RNA, 19 nt, Artificial Sequence
  Description of Artificial Sequence: Synthetic oligonucleotide
uggaacguggacaucggag

SEQ ID NO: 26096 - RNA, 19 nt, Artificial Sequence
  Description of Artificial Sequence: Synthetic oligonucleotide
uuuaggaugggaauugguu

SEQ ID NO: 26097 - RNA, 19 nt, Artificial Sequence
  Description of Artificial Sequence: Synthetic oligonucleotide
ucuaaacggucuucaaucc

SEQ ID NO: 26098 - RNA, 19 nt, Artificial Sequence
  Description of Artificial Sequence: Synthetic oligonucleotide
ucugcgauucauaacuacu

SEQ ID NO: 26099 - RNA, 19 nt, Artificial Sequence
  Description of Artificial Sequence: Synthetic oligonucleotide
cuuuacgauaacauguauc

SEQ ID NO: 26100 - RNA, 19 nt, Artificial Sequence
  Description of Artificial Sequence: Synthetic oligonucleotide
gauuugaucucggagcugc

SEQ ID NO: 26101 - RNA, 19 nt, Artificial Sequence
  Description of Artificial Sequence: Synthetic oligonucleotide
uccccuauucaauauccgg

SEQ ID NO: 26102 - RNA, 19 nt, Artificial Sequence
  Description of Artificial Sequence: Synthetic oligonucleotide
uugacguauguuucuauca

SEQ ID NO: 26103 - RNA, 19 nt, Artificial Sequence
  Description of Artificial Sequence: Synthetic oligonucleotide
auugauaucucggacccuc

SEQ ID NO: 26104 - RNA, 19 nt, Artificial Sequence
  Description of Artificial Sequence: Synthetic oligonucleotide
uuauguuauguuuccgaug

SEQ ID NO: 26105 - RNA, 19 nt, Artificial Sequence
  Description of Artificial Sequence: Synthetic oligonucleotide
agcauuuaguuuuaucgcu

SEQ ID NO: 26106 - RNA, 19 nt, Artificial Sequence
  Description of Artificial Sequence: Synthetic oligonucleotide
guagacuauacaaaaugag

SEQ ID NO: 26107 - RNA, 19 nt, Artificial Sequence
  Description of Artificial Sequence: Synthetic oligonucleotide
cacacacacacacacauac

SEQ ID NO: 26108 - RNA, 19 nt, Artificial Sequence
  Description of Artificial Sequence: Synthetic oligonucleotide
aggagcacuacuuguuuac

SEQ ID NO: 26109 - RNA, 19 nt, Artificial Sequence
  Description of Artificial Sequence: Synthetic oligonucleotide
guuuuaucgcuacugaaca

SEQ ID NO: 26110 - RNA, 19 nt, Artificial Sequence
  Description of Artificial Sequence: Synthetic oligonucleotide
cuuccccuauucaauaucc

SEQ ID NO: 26111 - RNA, 19 nt, Artificial Sequence
  Description of Artificial Sequence: Synthetic oligonucleotide
uuacgauaacaaacugggg

SEQ ID NO: 26112 - RNA, 19 nt, Artificial Sequence
  Description of Artificial Sequence: Synthetic oligonucleotide
cuauguaacugguaaaaca

SEQ ID NO: 26113 - RNA, 19 nt, Artificial Sequence
  Description of Artificial Sequence: Synthetic oligonucleotide
auuauguuauguuuccgau

SEQ ID NO: 26114 - RNA, 19 nt, Artificial Sequence
  Description of Artificial Sequence: Synthetic oligonucleotide
agcgccacaagccagacaa

SEQ ID NO: 26115 - RNA, 19 nt, Artificial Sequence
  Description of Artificial Sequence: Synthetic oligonucleotide
aucgcuacugaacauauuu

SEQ ID NO: 26116 - RNA, 19 nt, Artificial Sequence
  Description of Artificial Sequence: Synthetic oligonucleotide
auucauaacuacucagacu

SEQ ID NO: 26117 - RNA, 19 nt, Artificial Sequence
  Description of Artificial Sequence: Synthetic oligonucleotide
cacacacacacacauacac

SEQ ID NO: 26118 - RNA, 19 nt, Artificial Sequence
  Description of Artificial Sequence: Synthetic oligonucleotide
ugcgauucauaacuacuca

SEQ ID NO: 26119 - RNA, 19 nt, Artificial Sequence
  Description of Artificial Sequence: Synthetic oligonucleotide
cacacacacacacacacac

SEQ ID NO: 26120 - RNA, 19 nt, Artificial Sequence
  Description of Artificial Sequence: Synthetic oligonucleotide
cuaaacggucuucaauccg

SEQ ID NO: 26121 - RNA, 19 nt, Artificial Sequence
  Description of Artificial Sequence: Synthetic oligonucleotide
ucguuauugcuaguaauug

SEQ ID NO: 26122 - RNA, 19 nt, Artificial Sequence
  Description of Artificial Sequence: Synthetic oligonucleotide
uguagcauucuaaccgugu

SEQ ID NO: 26123 - RNA, 19 nt, Artificial Sequence
  Description of Artificial Sequence: Synthetic oligonucleotide
uuccggagaacaugaauug

SEQ ID NO: 26124 - RNA, 19 nt, Artificial Sequence
  Description of Artificial Sequence: Synthetic oligonucleotide
cagacacacacacacacac

SEQ ID NO: 26125 - RNA, 19 nt, Artificial Sequence
  Description of Artificial Sequence: Synthetic oligonucleotide
ucaaacguucauguggaug

SEQ ID NO: 26126 - RNA, 19 nt, Artificial Sequence
  Description of Artificial Sequence: Synthetic oligonucleotide
ugaaggguuugacgaaaag

SEQ ID NO: 26127 - RNA, 19 nt, Artificial Sequence
  Description of Artificial Sequence: Synthetic oligonucleotide
cagaauguaucacgaaaag

SEQ ID NO: 26128 - RNA, 19 nt, Artificial Sequence
  Description of Artificial Sequence: Synthetic oligonucleotide
cacagacacacacacacac

SEQ ID NO: 26129 - RNA, 19 nt, Artificial Sequence
  Description of Artificial Sequence: Synthetic oligonucleotide
gguuacgauaacaaacugg

SEQ ID NO: 26130 - RNA, 19 nt, Artificial Sequence
  Description of Artificial Sequence: Synthetic oligonucleotide
caaaagcuuaccauaguca

SEQ ID NO: 26131 - RNA, 19 nt, Artificial Sequence
  Description of Artificial Sequence: Synthetic oligonucleotide
uuaucgcuacugaacauau

SEQ ID NO: 26132 - RNA, 19 nt, Artificial Sequence
  Description of Artificial Sequence: Synthetic oligonucleotide
uuccccuauucaauauccg

SEQ ID NO: 26133 - RNA, 19 nt, Artificial Sequence
  Description of Artificial Sequence: Synthetic oligonucleotide
cauuucguugccaucagga

SEQ ID NO: 26134 - RNA, 19 nt, Artificial Sequence
  Description of Artificial Sequence: Synthetic oligonucleotide
uuuauggcauuuacucagu

SEQ ID NO: 26135 - RNA, 19 nt, Artificial Sequence
  Description of Artificial Sequence: Synthetic oligonucleotide
gaugggguagcucaaacgu

SEQ ID NO: 26136 - RNA, 19 nt, Artificial Sequence
  Description of Artificial Sequence: Synthetic oligonucleotide
ucaucguuauugcuaguaa

SEQ ID NO: 26137 - RNA, 19 nt, Artificial Sequence
  Description of Artificial Sequence: Synthetic oligonucleotide
aaacuacuucuaacuaggg

SEQ ID NO: 26138 - RNA, 19 nt, Artificial Sequence
  Description of Artificial Sequence: Synthetic oligonucleotide
auauauauauuuauauaua

SEQ ID NO: 26139 - RNA, 19 nt, Artificial Sequence
  Description of Artificial Sequence: Synthetic oligonucleotide
ucuagaccaaacagcugug

SEQ ID NO: 26140 - RNA, 19 nt, Artificial Sequence
  Description of Artificial Sequence: Synthetic oligonucleotide
uuuaucgcuacugaacaua

SEQ ID NO: 26141 - RNA, 19 nt, Artificial Sequence
  Description of Artificial Sequence: Synthetic oligonucleotide
cuaccccuccucaugaaag

SEQ ID NO: 26142 - RNA, 19 nt, Artificial Sequence
  Description of Artificial Sequence: Synthetic oligonucleotide
acauguaucaaaagugcca

SEQ ID NO: 26143 - RNA, 19 nt, Artificial Sequence
  Description of Artificial Sequence: Synthetic oligonucleotide
aauccggcuuugcaaagaa

SEQ ID NO: 26144 - RNA, 19 nt, Artificial Sequence
  Description of Artificial Sequence: Synthetic oligonucleotide
gucaacgcuagcuaucuga

SEQ ID NO: 26145 - RNA, 19 nt, Artificial Sequence
  Description of Artificial Sequence: Synthetic oligonucleotide
cugcgauucauaacuacuc

SEQ ID NO: 26146 - RNA, 19 nt, Artificial Sequence
  Description of Artificial Sequence: Synthetic oligonucleotide
auauauauuuauauauaua

SEQ ID NO: 26147 - RNA, 19 nt, Artificial Sequence
  Description of Artificial Sequence: Synthetic oligonucleotide
uguuauguuuccgaugaua

SEQ ID NO: 26148 - RNA, 19 nt, Artificial Sequence
  Description of Artificial Sequence: Synthetic oligonucleotide
cagacuugucuuauauuac

SEQ ID NO: 26149 - RNA, 19 nt, Artificial Sequence
  Description of Artificial Sequence: Synthetic oligonucleotide
acuacagguuacgauaaca

SEQ ID NO: 26150 - RNA, 19 nt, Artificial Sequence
  Description of Artificial Sequence: Synthetic oligonucleotide
auauauuuauauauauauu

SEQ ID NO: 26151 - RNA, 19 nt, Artificial Sequence
  Description of Artificial Sequence: Synthetic oligonucleotide
aucacgaaaaggaaauccu

SEQ ID NO: 26152 - RNA, 19 nt, Artificial Sequence
  Description of Artificial Sequence: Synthetic oligonucleotide
uuagaaacacuagcugacu

SEQ ID NO: 26153 - RNA, 19 nt, Artificial Sequence
  Description of Artificial Sequence: Synthetic oligonucleotide
gaagauuuaggaugggaau

SEQ ID NO: 26154 - RNA, 19 nt, Artificial Sequence
  Description of Artificial Sequence: Synthetic oligonucleotide
ugugccauaguuugacgua

SEQ ID NO: 26155 - RNA, 19 nt, Artificial Sequence
  Description of Artificial Sequence: Synthetic oligonucleotide
guuuccgaugauauaaaca

SEQ ID NO: 26156 - RNA, 19 nt, Artificial Sequence
  Description of Artificial Sequence: Synthetic oligonucleotide
aaagcuuaccauagucacu

SEQ ID NO: 26157 - RNA, 19 nt, Artificial Sequence
  Description of Artificial Sequence: Synthetic oligonucleotide
aaccucuugcgucugcgau

SEQ ID NO: 26158 - RNA, 19 nt, Artificial Sequence
  Description of Artificial Sequence: Synthetic oligonucleotide
agcguuuagaccauuucca

SEQ ID NO: 26159 - RNA, 19 nt, Artificial Sequence
  Description of Artificial Sequence: Synthetic oligonucleotide
agguuacgauaacaaacug

SEQ ID NO: 26160 - RNA, 19 nt, Artificial Sequence
  Description of Artificial Sequence: Synthetic oligonucleotide
uuuuaucgcuacugaacau

SEQ ID NO: 26161 - RNA, 19 nt, Artificial Sequence
  Description of Artificial Sequence: Synthetic oligonucleotide
auaacuacucagacuuguc

SEQ ID NO: 26162 - RNA, 19 nt, Artificial Sequence
  Description of Artificial Sequence: Synthetic oligonucleotide
ugacgaaaagcuguuguua

SEQ ID NO: 26163 - RNA, 19 nt, Artificial Sequence
  Description of Artificial Sequence: Synthetic oligonucleotide
caauauccgguaauuagaa

SEQ ID NO: 26164 - RNA, 19 nt, Artificial Sequence
  Description of Artificial Sequence: Synthetic oligonucleotide
gggauacccgccuugguag

SEQ ID NO: 26165 - RNA, 19 nt, Artificial Sequence
  Description of Artificial Sequence: Synthetic oligonucleotide
cugaggauacuuucucuuc

SEQ ID NO: 26166 - RNA, 19 nt, Artificial Sequence
  Description of Artificial Sequence: Synthetic oligonucleotide
uuaucgcucuucaggugga

SEQ ID NO: 26167 - RNA, 19 nt, Artificial Sequence
  Description of Artificial Sequence: Synthetic oligonucleotide
guuggcacuacagguuacg

SEQ ID NO: 26168 - RNA, 19 nt, Artificial Sequence
  Description of Artificial Sequence: Synthetic oligonucleotide
acacacacacauacacagc

SEQ ID NO: 26169 - RNA, 19 nt, Artificial Sequence
  Description of Artificial Sequence: Synthetic oligonucleotide
ugcuuaaguaggagcacua

SEQ ID NO: 26170 - RNA, 19 nt, Artificial Sequence
  Description of Artificial Sequence: Synthetic oligonucleotide
ugaagcguuuagaccauuu

SEQ ID NO: 26171 - RNA, 19 nt, Artificial Sequence
  Description of Artificial Sequence: Synthetic oligonucleotide
augauagguuugccauugg

SEQ ID NO: 26172 - RNA, 19 nt, Artificial Sequence
  Description of Artificial Sequence: Synthetic oligonucleotide
uccggagaacaugaauugc

SEQ ID NO: 26173 - RNA, 19 nt, Artificial Sequence
  Description of Artificial Sequence: Synthetic oligonucleotide
ggaauggcuaaugucauca

SEQ ID NO: 26174 - RNA, 19 nt, Artificial Sequence
  Description of Artificial Sequence: Synthetic oligonucleotide
uugauaucucggacccuca

SEQ ID NO: 26175 - RNA, 19 nt, Artificial Sequence
  Description of Artificial Sequence: Synthetic oligonucleotide
ucggucacacuacuugcaa

SEQ ID NO: 26176 - RNA, 19 nt, Artificial Sequence
  Description of Artificial Sequence: Synthetic oligonucleotide
aacguucaugucguuuucu

SEQ ID NO: 26177 - RNA, 19 nt, Artificial Sequence
  Description of Artificial Sequence: Synthetic oligonucleotide
cagguuacgauaacaaacu

SEQ ID NO: 26178 - RNA, 19 nt, Artificial Sequence
  Description of Artificial Sequence: Synthetic oligonucleotide
acgaaaagcuguuguuagu

SEQ ID NO: 26179 - RNA, 19 nt, Artificial Sequence
  Description of Artificial Sequence: Synthetic oligonucleotide
cuagggauacccgccuugg

SEQ ID NO: 26180 - RNA, 19 nt, Artificial Sequence
  Description of Artificial Sequence: Synthetic oligonucleotide
acauaauaacaagagucua

SEQ ID NO: 26181 - RNA, 19 nt, Artificial Sequence
  Description of Artificial Sequence: Synthetic oligonucleotide
uucggcuacacagguaggu

SEQ ID NO: 26182 - RNA, 19 nt, Artificial Sequence
  Description of Artificial Sequence: Synthetic oligonucleotide
aagcaccuuuacgauaaca

SEQ ID NO: 26183 - RNA, 19 nt, Artificial Sequence
  Description of Artificial Sequence: Synthetic oligonucleotide
aucguuauugcuaguaauu

SEQ ID NO: 26184 - RNA, 19 nt, Artificial Sequence
  Description of Artificial Sequence: Synthetic oligonucleotide
ugcuaguaauugauuugau

SEQ ID NO: 26185 - RNA, 19 nt, Artificial Sequence
  Description of Artificial Sequence: Synthetic oligonucleotide
ucacacuacuugcaauuuu

SEQ ID NO: 26186 - RNA, 19 nt, Artificial Sequence
  Description of Artificial Sequence: Synthetic oligonucleotide
guuaugaggguagccgggc

SEQ ID NO: 26187 - RNA, 19 nt, Artificial Sequence
  Description of Artificial Sequence: Synthetic oligonucleotide
uuccuagggauacccgccu

SEQ ID NO: 26188 - RNA, 19 nt, Artificial Sequence
  Description of Artificial Sequence: Synthetic oligonucleotide
gucauccuaauuucuuguc

SEQ ID NO: 26189 - RNA, 19 nt, Artificial Sequence
  Description of Artificial Sequence: Synthetic oligonucleotide
uagcucaaacguucaugug

SEQ ID NO: 26190 - RNA, 19 nt, Artificial Sequence
  Description of Artificial Sequence: Synthetic oligonucleotide
auaaugcugcaugauuagu

SEQ ID NO: 26191 - RNA, 19 nt, Artificial Sequence
  Description of Artificial Sequence: Synthetic oligonucleotide
ucuaaccguguaccucuga

SEQ ID NO: 26192 - RNA, 19 nt, Artificial Sequence
  Description of Artificial Sequence: Synthetic oligonucleotide
guuauguuuccgaugauau

SEQ ID NO: 26193 - RNA, 19 nt, Artificial Sequence
  Description of Artificial Sequence: Synthetic oligonucleotide
accggaaccugguuuggca

SEQ ID NO: 26194 - RNA, 19 nt, Artificial Sequence
  Description of Artificial Sequence: Synthetic oligonucleotide
cacgguggccccaacauga

SEQ ID NO: 26195 - RNA, 19 nt, Artificial Sequence
  Description of Artificial Sequence: Synthetic oligonucleotide
ugcucucucucucucucuc

SEQ ID NO: 26196 - RNA, 19 nt, Artificial Sequence
  Description of Artificial Sequence: Synthetic oligonucleotide
aagauuguguggacuguaa

SEQ ID NO: 26197 - RNA, 19 nt, Artificial Sequence
  Description of Artificial Sequence: Synthetic oligonucleotide
gugguuuaucgcucuucag

SEQ ID NO: 26198 - RNA, 19 nt, Artificial Sequence
  Description of Artificial Sequence: Synthetic oligonucleotide
auuuaggaugggaauuggu

SEQ ID NO: 26199 - RNA, 19 nt, Artificial Sequence
  Description of Artificial Sequence: Synthetic oligonucleotide
agggauacccgccuuggua

SEQ ID NO: 26200 - RNA, 19 nt, Artificial Sequence
  Description of Artificial Sequence: Synthetic oligonucleotide
acacagguagguaacacuu

SEQ ID NO: 26201 - RNA, 19 nt, Artificial Sequence
  Description of Artificial Sequence: Synthetic oligonucleotide
ggaagauuuaggaugggaa

SEQ ID NO: 26202 - RNA, 19 nt, Artificial Sequence
  Description of Artificial Sequence: Synthetic oligonucleotide
guauucagaaacgccucac

SEQ ID NO: 26203 - RNA, 19 nt, Artificial Sequence
  Description of Artificial Sequence: Synthetic oligonucleotide
acuuuaguaagcaccuuua

SEQ ID NO: 26204 - RNA, 19 nt, Artificial Sequence
  Description of Artificial Sequence: Synthetic oligonucleotide
uaauguuccuagggauacc

SEQ ID NO: 26205 - RNA, 19 nt, Artificial Sequence
  Description of Artificial Sequence: Synthetic oligonucleotide
uggcacuacagguuacgau

SEQ ID NO: 26206 - RNA, 19 nt, Artificial Sequence
  Description of Artificial Sequence: Synthetic oligonucleotide
gguuuaucgcucuucaggu

SEQ ID NO: 26207 - RNA, 19 nt, Artificial Sequence
  Description of Artificial Sequence: Synthetic oligonucleotide
ucucucucucucucucucu

SEQ ID NO: 26208 - RNA, 19 nt, Artificial Sequence
  Description of Artificial Sequence: Synthetic oligonucleotide
aggguuugacgaaaagcug

SEQ ID NO: 26209 - RNA, 19 nt, Artificial Sequence
  Description of Artificial Sequence: Synthetic oligonucleotide
guagcauucuaaccgugua

SEQ ID NO: 26210 - RNA, 19 nt, Artificial Sequence
  Description of Artificial Sequence: Synthetic oligonucleotide
agaguauaccugcuuccua

SEQ ID NO: 26211 - RNA, 19 nt, Artificial Sequence
  Description of Artificial Sequence: Synthetic oligonucleotide
caacacacagacacacaca

SEQ ID NO: 26212 - RNA, 19 nt, Artificial Sequence
  Description of Artificial Sequence: Synthetic oligonucleotide
uuggcacuacagguuacga

SEQ ID NO: 26213 - RNA, 19 nt, Artificial Sequence
  Description of Artificial Sequence: Synthetic oligonucleotide
acacacacacacauacaca

SEQ ID NO: 26214 - RNA, 19 nt, Artificial Sequence
  Description of Artificial Sequence: Synthetic oligonucleotide
cucucucucucucucucuc

SEQ ID NO: 26215 - RNA, 19 nt, Artificial Sequence
  Description of Artificial Sequence: Synthetic oligonucleotide
ccuccuacccuaaggaaug

SEQ ID NO: 26216 - RNA, 19 nt, Artificial Sequence
  Description of Artificial Sequence: Synthetic oligonucleotide
gccacuacgauggaacgug

SEQ ID NO: 26217 - RNA, 19 nt, Artificial Sequence
  Description of Artificial Sequence: Synthetic oligonucleotide
ccgguaauuagaaacacua

SEQ ID NO: 26218 - RNA, 19 nt, Artificial Sequence
  Description of Artificial Sequence: Synthetic oligonucleotide
aguuggcacuacagguuac

SEQ ID NO: 26219 - RNA, 19 nt, Artificial Sequence
  Description of Artificial Sequence: Synthetic oligonucleotide
gcuaguaauugauuugaua

SEQ ID NO: 26220 - RNA, 19 nt, Artificial Sequence
  Description of Artificial Sequence: Synthetic oligonucleotide
agccgggcuuccccuauuc

SEQ ID NO: 26221 - RNA, 19 nt, Artificial Sequence
  Description of Artificial Sequence: Synthetic oligonucleotide
cagugguaacauuguagca

SEQ ID NO: 26222 - RNA, 19 nt, Artificial Sequence
  Description of Artificial Sequence: Synthetic oligonucleotide
ggcauuuacucagugcuga

SEQ ID NO: 26223 - RNA, 19 nt, Artificial Sequence
  Description of Artificial Sequence: Synthetic oligonucleotide
cacacacacacacacacau

SEQ ID NO: 26224 - RNA, 19 nt, Artificial Sequence
  Description of Artificial Sequence: Synthetic oligonucleotide
accuuuacgauaacaugua

SEQ ID NO: 26225 - RNA, 19 nt, Artificial Sequence
  Description of Artificial Sequence: Synthetic oligonucleotide
acaucggagggagacugga

SEQ ID NO: 26226 - RNA, 19 nt, Artificial Sequence
  Description of Artificial Sequence: Synthetic oligonucleotide
ggaggggaaguguacauua

SEQ ID NO: 26227 - RNA, 19 nt, Artificial Sequence
  Description of Artificial Sequence: Synthetic oligonucleotide
agucaacgcuagcuaucug

SEQ ID NO: 26228 - RNA, 19 nt, Artificial Sequence
  Description of Artificial Sequence: Synthetic oligonucleotide
acagacacacacacacaca

SEQ ID NO: 26229 - RNA, 19 nt, Artificial Sequence
  Description of Artificial Sequence: Synthetic oligonucleotide
uaacauccaucugucccuc

SEQ ID NO: 26230 - RNA, 19 nt, Artificial Sequence
  Description of Artificial Sequence: Synthetic oligonucleotide
uaucgcuacugaacauauu

SEQ ID NO: 26231 - RNA, 19 nt, Artificial Sequence
  Description of Artificial Sequence: Synthetic oligonucleotide
cugugccauaguuugacgu

SEQ ID NO: 26232 - RNA, 19 nt, Artificial Sequence
  Description of Artificial Sequence: Synthetic oligonucleotide
gauacccgccuugguagac

SEQ ID NO: 26233 - RNA, 19 nt, Artificial Sequence
  Description of Artificial Sequence: Synthetic oligonucleotide
uagcugcucucucucucuc

SEQ ID NO: 26234 - RNA, 19 nt, Artificial Sequence
  Description of Artificial Sequence: Synthetic oligonucleotide
caucguuauugcuaguaau

SEQ ID NO: 26235 - RNA, 19 nt, Artificial Sequence
  Description of Artificial Sequence: Synthetic oligonucleotide
cgguaauuagaaacacuag

SEQ ID NO: 26236 - RNA, 19 nt, Artificial Sequence
  Description of Artificial Sequence: Synthetic oligonucleotide
agcugcucucucucucucu

SEQ ID NO: 26237 - RNA, 19 nt, Artificial Sequence
  Description of Artificial Sequence: Synthetic oligonucleotide
cagaaacgccucacugcac

SEQ ID NO: 26238 - RNA, 19 nt, Artificial Sequence
  Description of Artificial Sequence: Synthetic oligonucleotide
uacuucuaacuaggguuau

SEQ ID NO: 26239 - RNA, 19 nt, Artificial Sequence
  Description of Artificial Sequence: Synthetic oligonucleotide
gcacuacacaccaaaguca

SEQ ID NO: 26240 - RNA, 19 nt, Artificial Sequence
  Description of Artificial Sequence: Synthetic oligonucleotide
ucggcuacacagguaggua

SEQ ID NO: 26241 - RNA, 19 nt, Artificial Sequence
  Description of Artificial Sequence: Synthetic oligonucleotide
cagccuacuuugauuaugu

SEQ ID NO: 26242 - RNA, 19 nt, Artificial Sequence
  Description of Artificial Sequence: Synthetic oligonucleotide
accacgugguaacuaucuu

SEQ ID NO: 26243 - RNA, 19 nt, Artificial Sequence
  Description of Artificial Sequence: Synthetic oligonucleotide
agacacacacacacacaca

SEQ ID NO: 26244 - RNA, 19 nt, Artificial Sequence
  Description of Artificial Sequence: Synthetic oligonucleotide
ccguguaccucugaaaauc

SEQ ID NO: 26245 - RNA, 19 nt, Artificial Sequence
  Description of Artificial Sequence: Synthetic oligonucleotide
acacacacacacacauaca

SEQ ID NO: 26246 - RNA, 19 nt, Artificial Sequence
  Description of Artificial Sequence: Synthetic oligonucleotide
gaucucggagcugccagaa

SEQ ID NO: 26247 - RNA, 19 nt, Artificial Sequence
  Description of Artificial Sequence: Synthetic oligonucleotide
cacuacgauggaacgugga

SEQ ID NO: 26248 - RNA, 19 nt, Artificial Sequence
  Description of Artificial Sequence: Synthetic oligonucleotide
acaacaggugaagcguuua

SEQ ID NO: 26249 - RNA, 19 nt, Artificial Sequence
  Description of Artificial Sequence: Synthetic oligonucleotide
cugcacuacacaccaaagu

SEQ ID NO: 26250 - RNA, 19 nt, Artificial Sequence
  Description of Artificial Sequence: Synthetic oligonucleotide
acacacacacacacacaca

SEQ ID NO: 26251 - RNA, 19 nt, Artificial Sequence
  Description of Artificial Sequence: Synthetic oligonucleotide
acacagacacacacacaca

SEQ ID NO: 26252 - RNA, 19 nt, Artificial Sequence
  Description of Artificial Sequence: Synthetic oligonucleotide
cuucacgguggccccaaca

SEQ ID NO: 26253 - RNA, 19 nt, Artificial Sequence
  Description of Artificial Sequence: Synthetic oligonucleotide
uuccucuauuugccauuau

SEQ ID NO: 26254 - RNA, 19 nt, Artificial Sequence
  Description of Artificial Sequence: Synthetic oligonucleotide
cacuuauccugaaugugau

SEQ ID NO: 26255 - RNA, 19 nt, Artificial Sequence
  Description of Artificial Sequence: Synthetic oligonucleotide
cacuuuaguaagcaccuuu

SEQ ID NO: 26256 - RNA, 19 nt, Artificial Sequence
  Description of Artificial Sequence: Synthetic oligonucleotide
uccuagggauacccgccuu

SEQ ID NO: 26257 - RNA, 19 nt, Artificial Sequence
  Description of Artificial Sequence: Synthetic oligonucleotide
guagcugcucucucucucu

SEQ ID NO: 26258 - RNA, 19 nt, Artificial Sequence
  Description of Artificial Sequence: Synthetic oligonucleotide
ggguuugacgaaaagcugu

SEQ ID NO: 26259 - RNA, 19 nt, Artificial Sequence
  Description of Artificial Sequence: Synthetic oligonucleotide
gcgaucuagaacuacuuuu

SEQ ID NO: 26260 - RNA, 19 nt, Artificial Sequence
  Description of Artificial Sequence: Synthetic oligonucleotide
gcugcucucucucucucuc

SEQ ID NO: 26261 - RNA, 19 nt, Artificial Sequence
  Description of Artificial Sequence: Synthetic oligonucleotide
acacacagacacacacaca

SEQ ID NO: 26262 - RNA, 19 nt, Artificial Sequence
  Description of Artificial Sequence: Synthetic oligonucleotide
acuucuaacuaggguuauu

SEQ ID NO: 26263 - RNA, 19 nt, Artificial Sequence
  Description of Artificial Sequence: Synthetic oligonucleotide
ccacuacgauggaacgugg

SEQ ID NO: 26264 - RNA, 19 nt, Artificial Sequence
  Description of Artificial Sequence: Synthetic oligonucleotide
cuacuucggcuacacaggu

SEQ ID NO: 26265 - RNA, 19 nt, Artificial Sequence
  Description of Artificial Sequence: Synthetic oligonucleotide
ccuagggauacccgccuug

SEQ ID NO: 26266 - RNA, 19 nt, Artificial Sequence
  Description of Artificial Sequence: Synthetic oligonucleotide
acccugacgcccagaccac

SEQ ID NO: 26267 - RNA, 19 nt, Artificial Sequence
  Description of Artificial Sequence: Synthetic oligonucleotide
agucaaccauuaggaagau

SEQ ID NO: 26268 - RNA, 19 nt, Artificial Sequence
  Description of Artificial Sequence: Synthetic oligonucleotide
cauuaugagaggguccaau

SEQ ID NO: 26269 - RNA, 19 nt, Artificial Sequence
  Description of Artificial Sequence: Synthetic oligonucleotide
cuccgguagcagaguuggc

SEQ ID NO: 26270 - RNA, 19 nt, Artificial Sequence
  Description of Artificial Sequence: Synthetic oligonucleotide
gcccaugugauucgcugca

SEQ ID NO: 26271 - RNA, 19 nt, Artificial Sequence
  Description of Artificial Sequence: Synthetic oligonucleotide
ccaugugauucgcugcauc

SEQ ID NO: 26272 - RNA, 19 nt, Artificial Sequence
  Description of Artificial Sequence: Synthetic oligonucleotide
gggucgcaagggcagcgcc

SEQ ID NO: 26273 - RNA, 19 nt, Artificial Sequence
  Description of Artificial Sequence: Synthetic oligonucleotide
gcgcucacgggcauuguug

SEQ ID NO: 26274 - RNA, 19 nt, Artificial Sequence
  Description of Artificial Sequence: Synthetic oligonucleotide
ccuauucaauauccgguaa

SEQ ID NO: 26275 - RNA, 19 nt, Artificial Sequence
  Description of Artificial Sequence: Synthetic oligonucleotide
cccuauucaauauccggua

SEQ ID NO: 26276 - RNA, 19 nt, Artificial Sequence
  Description of Artificial Sequence: Synthetic oligonucleotide
caucaggacguuugcuggu

SEQ ID NO: 26277 - RNA, 19 nt, Artificial Sequence
  Description of Artificial Sequence: Synthetic oligonucleotide
ccuacccuaaggaauggcu

SEQ ID NO: 26278 - RNA, 19 nt, Artificial Sequence
  Description of Artificial Sequence: Synthetic oligonucleotide
acacacacacacacacaua

SEQ ID NO: 26279 - RNA, 19 nt, Artificial Sequence
  Description of Artificial Sequence: Synthetic oligonucleotide
ccccuauucaauauccggu

SEQ ID NO: 26280 - RNA, 19 nt, Artificial Sequence
  Description of Artificial Sequence: Synthetic oligonucleotide
caguguuuauguggguuua

SEQ ID NO: 26281 - RNA, 19 nt, Artificial Sequence
  Description of Artificial Sequence: Synthetic oligonucleotide
gcuguggaaccggaaccug

SEQ ID NO: 26282 - RNA, 19 nt, Artificial Sequence
  Description of Artificial Sequence: Synthetic oligonucleotide
ggcccaccgcaugauuccg

SEQ ID NO: 26283 - RNA, 19 nt, Artificial Sequence
  Description of Artificial Sequence: Synthetic oligonucleotide
gaggggaaguguacauuau

SEQ ID NO: 26284 - RNA, 19 nt, Artificial Sequence
  Description of Artificial Sequence: Synthetic oligonucleotide
gcguuuagaccauuuccau

SEQ ID NO: 26285 - RNA, 19 nt, Artificial Sequence
  Description of Artificial Sequence: Synthetic oligonucleotide
cccuccgguagcagaguug

SEQ ID NO: 26286 - RNA, 19 nt, Artificial Sequence
  Description of Artificial Sequence: Synthetic oligonucleotide
uagccgggcuuccccuauu

SEQ ID NO: 26287 - RNA, 19 nt, Artificial Sequence
  Description of Artificial Sequence: Synthetic oligonucleotide
ggucgcaagggcagcgcca

SEQ ID NO: 26288 - RNA, 19 nt, Artificial Sequence
  Description of Artificial Sequence: Synthetic oligonucleotide
ggagcacuacuuguuuacu

SEQ ID NO: 26289 - RNA, 19 nt, Artificial Sequence
  Description of Artificial Sequence: Synthetic oligonucleotide
cugcucucucucucucucu

SEQ ID NO: 26290 - RNA, 19 nt, Artificial Sequence
  Description of Artificial Sequence: Synthetic oligonucleotide
cauugauaucucggacccu

SEQ ID NO: 26291 - RNA, 19 nt, Artificial Sequence
  Description of Artificial Sequence: Synthetic oligonucleotide
cacagccuacuuugauuau

SEQ ID NO: 26292 - RNA, 19 nt, Artificial Sequence
  Description of Artificial Sequence: Synthetic oligonucleotide
gcuacgccaucuucacggu

SEQ ID NO: 26293 - RNA, 19 nt, Artificial Sequence
  Description of Artificial Sequence: Synthetic oligonucleotide
guggaaccggaaccugguu

SEQ ID NO: 26294 - RNA, 19 nt, Artificial Sequence
  Description of Artificial Sequence: Synthetic oligonucleotide
gcucucucucucucucucu

SEQ ID NO: 26295 - RNA, 19 nt, Artificial Sequence
  Description of Artificial Sequence: Synthetic oligonucleotide
ccuuuacgauaacauguau

SEQ ID NO: 26296 - RNA, 19 nt, Artificial Sequence
  Description of Artificial Sequence: Synthetic oligonucleotide
agguggcaacuuggacccu

SEQ ID NO: 26297 - RNA, 19 nt, Artificial Sequence
  Description of Artificial Sequence: Synthetic oligonucleotide
gcacacuacuucggcuaca

SEQ ID NO: 26298 - RNA, 19 nt, Artificial Sequence
  Description of Artificial Sequence: Synthetic oligonucleotide
ggacaacaggugaagcguu

SEQ ID NO: 26299 - RNA, 19 nt, Artificial Sequence
  Description of Artificial Sequence: Synthetic oligonucleotide
ccgcaugauuccggagaac

SEQ ID NO: 26300 - RNA, 19 nt, Artificial Sequence
  Description of Artificial Sequence: Synthetic oligonucleotide
ggccccaacaugagugaau

SEQ ID NO: 26301 - RNA, 19 nt, Artificial Sequence
  Description of Artificial Sequence: Synthetic oligonucleotide
cgggcuuccccuauucaau

SEQ ID NO: 26302 - RNA, 19 nt, Artificial Sequence
  Description of Artificial Sequence: Synthetic oligonucleotide
ccccuccgguagcagaguu

SEQ ID NO: 26303 - RNA, 19 nt, Artificial Sequence
  Description of Artificial Sequence: Synthetic oligonucleotide
aacaucacggucaaaaucc

SEQ ID NO: 26304 - RNA, 19 nt, Artificial Sequence
  Description of Artificial Sequence: Synthetic oligonucleotide
uuuaacuccauacaaaagu

SEQ ID NO: 26305 - RNA, 19 nt, Artificial Sequence
  Description of Artificial Sequence: Synthetic oligonucleotide
ugaaguaguaaccagauuc

SEQ ID NO: 26306 - RNA, 19 nt, Artificial Sequence
  Description of Artificial Sequence: Synthetic oligonucleotide
uauaucuugacccugguga

SEQ ID NO: 26307 - RNA, 19 nt, Artificial Sequence
  Description of Artificial Sequence: Synthetic oligonucleotide
agugcuguaaacugcaacc

SEQ ID NO: 26308 - RNA, 19 nt, Artificial Sequence
  Description of Artificial Sequence: Synthetic oligonucleotide
aguaguaucaauguugugg

SEQ ID NO: 26309 - RNA, 19 nt, Artificial Sequence
  Description of Artificial Sequence: Synthetic oligonucleotide
uucgcuuauguccuuaagg

SEQ ID NO: 26310 - RNA, 19 nt, Artificial Sequence
  Description of Artificial Sequence: Synthetic oligonucleotide
aaagacaccaccugguugu

SEQ ID NO: 26311 - RNA, 19 nt, Artificial Sequence
  Description of Artificial Sequence: Synthetic oligonucleotide
aggacgauauaucuugacc

SEQ ID NO: 26312 - RNA, 19 nt, Artificial Sequence
  Description of Artificial Sequence: Synthetic oligonucleotide
aguagcaguacccagucuc

SEQ ID NO: 26313 - RNA, 19 nt, Artificial Sequence
  Description of Artificial Sequence: Synthetic oligonucleotide
aguaauggggucuugauaa

SEQ ID NO: 26314 - RNA, 19 nt, Artificial Sequence
  Description of Artificial Sequence: Synthetic oligonucleotide
acuuucuacagucuugccg

SEQ ID NO: 26315 - RNA, 19 nt, Artificial Sequence
  Description of Artificial Sequence: Synthetic oligonucleotide
ucucccgacccaaugaugg

SEQ ID NO: 26316 - RNA, 19 nt, Artificial Sequence
  Description of Artificial Sequence: Synthetic oligonucleotide
uauuguuuagggcuccucc

SEQ ID NO: 26317 - RNA, 19 nt, Artificial Sequence
  Description of Artificial Sequence: Synthetic oligonucleotide
uagacuuugcaguuugccg

SEQ ID NO: 26318 - RNA, 19 nt, Artificial Sequence
  Description of Artificial Sequence: Synthetic oligonucleotide
auacggaccaaucacacca

SEQ ID NO: 26319 - RNA, 19 nt, Artificial Sequence
  Description of Artificial Sequence: Synthetic oligonucleotide
acaguuuaagccuuuggug

SEQ ID NO: 26320 - RNA, 19 nt, Artificial Sequence
  Description of Artificial Sequence: Synthetic oligonucleotide
cuuaacaucgucugcacuc

SEQ ID NO: 26321 - RNA, 19 nt, Artificial Sequence
  Description of Artificial Sequence: Synthetic oligonucleotide
uucuacuugagaaaggguu

SEQ ID NO: 26322 - RNA, 19 nt, Artificial Sequence
  Description of Artificial Sequence: Synthetic oligonucleotide
uucaaucgacguuagcagg

SEQ ID NO: 26323 - RNA, 19 nt, Artificial Sequence
  Description of Artificial Sequence: Synthetic oligonucleotide
aacaguguugccacaacgg

SEQ ID NO: 26324 - RNA, 19 nt, Artificial Sequence
  Description of Artificial Sequence: Synthetic oligonucleotide
ucauaaacggcguaauagu

SEQ ID NO: 26325 - RNA, 19 nt, Artificial Sequence
  Description of Artificial Sequence: Synthetic oligonucleotide
ucgcuuauguccuuaagga

SEQ ID NO: 26326 - RNA, 19 nt, Artificial Sequence
  Description of Artificial Sequence: Synthetic oligonucleotide
cugaucacaguucugcccg

SEQ ID NO: 26327 - RNA, 19 nt, Artificial Sequence
  Description of Artificial Sequence: Synthetic oligonucleotide
aaggauucccaccaggaau

SEQ ID NO: 26328 - RNA, 19 nt, Artificial Sequence
  Description of Artificial Sequence: Synthetic oligonucleotide
ucguacuaauucuugagcu

SEQ ID NO: 26329 - RNA, 19 nt, Artificial Sequence
  Description of Artificial Sequence: Synthetic oligonucleotide
ugugcuauugggauccgug

SEQ ID NO: 26330 - RNA, 19 nt, Artificial Sequence
  Description of Artificial Sequence: Synthetic oligonucleotide
agccaauguacccaggauc

SEQ ID NO: 26331 - RNA, 19 nt, Artificial Sequence
  Description of Artificial Sequence: Synthetic oligonucleotide
cauaacagaagcaguuacc

SEQ ID NO: 26332 - RNA, 19 nt, Artificial Sequence
  Description of Artificial Sequence: Synthetic oligonucleotide
acuuaaaccauagaagccu

SEQ ID NO: 26333 - RNA, 19 nt, Artificial Sequence
  Description of Artificial Sequence: Synthetic oligonucleotide
uguuaggaccaucuggaca

SEQ ID NO: 26334 - RNA, 19 nt, Artificial Sequence
  Description of Artificial Sequence: Synthetic oligonucleotide
uaaacggcguaauaguacu

SEQ ID NO: 26335 - RNA, 19 nt, Artificial Sequence
  Description of Artificial Sequence: Synthetic oligonucleotide
ucggcauuccacaucgggg

SEQ ID NO: 26336 - RNA, 19 nt, Artificial Sequence
  Description of Artificial Sequence: Synthetic oligonucleotide
guaguaaccggccaggcac

SEQ ID NO: 26337 - RNA, 19 nt, Artificial Sequence
  Description of Artificial Sequence: Synthetic oligonucleotide
gcacuuaaaccauagaagc

SEQ ID NO: 26338 - RNA, 19 nt, Artificial Sequence
  Description of Artificial Sequence: Synthetic oligonucleotide
ggacgauauaucuugaccc

SEQ ID NO: 26339 - RNA, 19 nt, Artificial Sequence
  Description of Artificial Sequence: Synthetic oligonucleotide
ucaccagucgcuuacagua

SEQ ID NO: 26340 - RNA, 19 nt, Artificial Sequence
  Description of Artificial Sequence: Synthetic oligonucleotide
auaaacggcguaauaguac

SEQ ID NO: 26341 - RNA, 19 nt, Artificial Sequence
  Description of Artificial Sequence: Synthetic oligonucleotide
agucguacuaauucuugag

SEQ ID NO: 26342 - RNA, 19 nt, Artificial Sequence
  Description of Artificial Sequence: Synthetic oligonucleotide
ggcacuuagaacaucacgg

SEQ ID NO: 26343 - RNA, 19 nt, Artificial Sequence
  Description of Artificial Sequence: Synthetic oligonucleotide
caccauaguauccauacug

SEQ ID NO: 26344 - RNA, 19 nt, Artificial Sequence
  Description of Artificial Sequence: Synthetic oligonucleotide
aaugagaccgccacgagaa

SEQ ID NO: 26345 - RNA, 19 nt, Artificial Sequence
  Description of Artificial Sequence: Synthetic oligonucleotide
cuggguuacaagcaagugc

SEQ ID NO: 26346 - RNA, 19 nt, Artificial Sequence
  Description of Artificial Sequence: Synthetic oligonucleotide
aacaugcaauuugucaccg

SEQ ID NO: 26347 - RNA, 19 nt, Artificial Sequence
  Description of Artificial Sequence: Synthetic oligonucleotide
cucguagcgaaucaggaug

SEQ ID NO: 26348 - RNA, 19 nt, Artificial Sequence
  Description of Artificial Sequence: Synthetic oligonucleotide
aacggcguaauaguacuuc

SEQ ID NO: 26349 - RNA, 19 nt, Artificial Sequence
  Description of Artificial Sequence: Synthetic oligonucleotide
cacuuaaaccauagaagcc

SEQ ID NO: 26350 - RNA, 19 nt, Artificial Sequence
  Description of Artificial Sequence: Synthetic oligonucleotide
uggagugcuaggcauuucc

SEQ ID NO: 26351 - RNA, 19 nt, Artificial Sequence
  Description of Artificial Sequence: Synthetic oligonucleotide
uuuacagacaucgcagcgc

SEQ ID NO: 26352 - RNA, 19 nt, Artificial Sequence
  Description of Artificial Sequence: Synthetic oligonucleotide
uggugaaguaguaaccaga

SEQ ID NO: 26353 - RNA, 19 nt, Artificial Sequence
  Description of Artificial Sequence: Synthetic oligonucleotide
ucugucucgggugagagcu

SEQ ID NO: 26354 - RNA, 19 nt, Artificial Sequence
  Description of Artificial Sequence: Synthetic oligonucleotide
ucaaucgacguuagcaggu

SEQ ID NO: 26355 - RNA, 19 nt, Artificial Sequence
  Description of Artificial Sequence: Synthetic oligonucleotide
uuaaggagcgagcggaccu

SEQ ID NO: 26356 - RNA, 19 nt, Artificial Sequence
  Description of Artificial Sequence: Synthetic oligonucleotide
augggaucgccguaguaac

SEQ ID NO: 26357 - RNA, 19 nt, Artificial Sequence
  Description of Artificial Sequence: Synthetic oligonucleotide
uacuccauggaauauggua

SEQ ID NO: 26358 - RNA, 19 nt, Artificial Sequence
  Description of Artificial Sequence: Synthetic oligonucleotide
gaagcugugucagauaauc

SEQ ID NO: 26359 - RNA, 19 nt, Artificial Sequence
  Description of Artificial Sequence: Synthetic oligonucleotide
aguuucagauucaaucgac

SEQ ID NO: 26360 - RNA, 19 nt, Artificial Sequence
  Description of Artificial Sequence: Synthetic oligonucleotide
ucuacucugucucggguga

SEQ ID NO: 26361 - RNA, 19 nt, Artificial Sequence
  Description of Artificial Sequence: Synthetic oligonucleotide
aauaugguauguugucaau

SEQ ID NO: 26362 - RNA, 19 nt, Artificial Sequence
  Description of Artificial Sequence: Synthetic oligonucleotide
ucaagcuugcugaugcgcu

SEQ ID NO: 26363 - RNA, 19 nt, Artificial Sequence
  Description of Artificial Sequence: Synthetic oligonucleotide
uuucaguacuucguuagca

SEQ ID NO: 26364 - RNA, 19 nt, Artificial Sequence
  Description of Artificial Sequence: Synthetic oligonucleotide
uguuuagggcuccuccaag

SEQ ID NO: 26365 - RNA, 19 nt, Artificial Sequence
  Description of Artificial Sequence: Synthetic oligonucleotide
gucguacuaauucuugagc

SEQ ID NO: 26366 - RNA, 19 nt, Artificial Sequence
  Description of Artificial Sequence: Synthetic oligonucleotide
uuacaguagcaguacccag

SEQ ID NO: 26367 - RNA, 19 nt, Artificial Sequence
  Description of Artificial Sequence: Synthetic oligonucleotide
accgccacgagaaauacag

SEQ ID NO: 26368 - RNA, 19 nt, Artificial Sequence
  Description of Artificial Sequence: Synthetic oligonucleotide
agauucaaucgacguuagc

SEQ ID NO: 26369 - RNA, 19 nt, Artificial Sequence
  Description of Artificial Sequence: Synthetic oligonucleotide
auuguuuagggcuccucca

SEQ ID NO: 26370 - RNA, 19 nt, Artificial Sequence
  Description of Artificial Sequence: Synthetic oligonucleotide
uucaacucuuucccggaug

SEQ ID NO: 26371 - RNA, 19 nt, Artificial Sequence
  Description of Artificial Sequence: Synthetic oligonucleotide
uagcgaaucaggaugucau

SEQ ID NO: 26372 - RNA, 19 nt, Artificial Sequence
  Description of Artificial Sequence: Synthetic oligonucleotide
acagcggggacccucaaca

SEQ ID NO: 26373 - RNA, 19 nt, Artificial Sequence
  Description of Artificial Sequence: Synthetic oligonucleotide
ugacagaucuagacuuugc

SEQ ID NO: 26374 - RNA, 19 nt, Artificial Sequence
  Description of Artificial Sequence: Synthetic oligonucleotide
uuuuggguucccuggauau

SEQ ID NO: 26375 - RNA, 19 nt, Artificial Sequence
  Description of Artificial Sequence: Synthetic oligonucleotide
gauacggaccaaucacacc

SEQ ID NO: 26376 - RNA, 19 nt, Artificial Sequence
  Description of Artificial Sequence: Synthetic oligonucleotide
auaugguauguugucaaug

SEQ ID NO: 26377 - RNA, 19 nt, Artificial Sequence
  Description of Artificial Sequence: Synthetic oligonucleotide
guaacacuauccaaggcac

SEQ ID NO: 26378 - RNA, 19 nt, Artificial Sequence
  Description of Artificial Sequence: Synthetic oligonucleotide
agcuuuacguuugaguucu

SEQ ID NO: 26379 - RNA, 19 nt, Artificial Sequence
  Description of Artificial Sequence: Synthetic oligonucleotide
guguuaugccugcacaugc

SEQ ID NO: 26380 - RNA, 19 nt, Artificial Sequence
  Description of Artificial Sequence: Synthetic oligonucleotide
guuaccacgaaccaccaua

SEQ ID NO: 26381 - RNA, 19 nt, Artificial Sequence
  Description of Artificial Sequence: Synthetic oligonucleotide
uggauguacugucuuucca

SEQ ID NO: 26382 - RNA, 19 nt, Artificial Sequence
  Description of Artificial Sequence: Synthetic oligonucleotide
guaaccagauuccaccuca

SEQ ID NO: 26383 - RNA, 19 nt, Artificial Sequence
  Description of Artificial Sequence: Synthetic oligonucleotide
gggaggacgauauaucuug

SEQ ID NO: 26384 - RNA, 19 nt, Artificial Sequence
  Description of Artificial Sequence: Synthetic oligonucleotide
aauaccccugggaucacag

SEQ ID NO: 26385 - RNA, 19 nt, Artificial Sequence
  Description of Artificial Sequence: Synthetic oligonucleotide
ucugcccgaucacauuggg

SEQ ID NO: 26386 - RNA, 19 nt, Artificial Sequence
  Description of Artificial Sequence: Synthetic oligonucleotide
auagguuuacuuuggucau

SEQ ID NO: 26387 - RNA, 19 nt, Artificial Sequence
  Description of Artificial Sequence: Synthetic oligonucleotide
uggcauggccauaacagaa

SEQ ID NO: 26388 - RNA, 19 nt, Artificial Sequence
  Description of Artificial Sequence: Synthetic oligonucleotide
cuguggugucucaauaccc

SEQ ID NO: 26389 - RNA, 19 nt, Artificial Sequence
  Description of Artificial Sequence: Synthetic oligonucleotide
aaagcacacugggcgaggg

SEQ ID NO: 26390 - RNA, 19 nt, Artificial Sequence
  Description of Artificial Sequence: Synthetic oligonucleotide
uuaccacgaaccaccauau

SEQ ID NO: 26391 - RNA, 19 nt, Artificial Sequence
  Description of Artificial Sequence: Synthetic oligonucleotide
aguacuucguuagcaacug

SEQ ID NO: 26392 - RNA, 19 nt, Artificial Sequence
  Description of Artificial Sequence: Synthetic oligonucleotide
guaguaucaauguuguggu

SEQ ID NO: 26393 - RNA, 19 nt, Artificial Sequence
  Description of Artificial Sequence: Synthetic oligonucleotide
cucggcauuccacaucggg

SEQ ID NO: 26394 - RNA, 19 nt, Artificial Sequence
  Description of Artificial Sequence: Synthetic oligonucleotide
uaguaaccagauuccaccu

SEQ ID NO: 26395 - RNA, 19 nt, Artificial Sequence
  Description of Artificial Sequence: Synthetic oligonucleotide
caggaauuguucccagagg

SEQ ID NO: 26396 - RNA, 19 nt, Artificial Sequence
  Description of Artificial Sequence: Synthetic oligonucleotide
uuaacaucgucugcacucu

SEQ ID NO: 26397 - RNA, 19 nt, Artificial Sequence
  Description of Artificial Sequence: Synthetic oligonucleotide
guuagcagguuuuggguuc

SEQ ID NO: 26398 - RNA, 19 nt, Artificial Sequence
  Description of Artificial Sequence: Synthetic oligonucleotide
cacgggagcacauucgcug

SEQ ID NO: 26399 - RNA, 19 nt, Artificial Sequence
  Description of Artificial Sequence: Synthetic oligonucleotide
ucccgauacggaccaauca

SEQ ID NO: 26400 - RNA, 19 nt, Artificial Sequence
  Description of Artificial Sequence: Synthetic oligonucleotide
ugaauucuagcugcucggc

SEQ ID NO: 26401 - RNA, 19 nt, Artificial Sequence
  Description of Artificial Sequence: Synthetic oligonucleotide
uuguuuagggcuccuccaa

SEQ ID NO: 26402 - RNA, 19 nt, Artificial Sequence
  Description of Artificial Sequence: Synthetic oligonucleotide
ggugucucaauaccccugg

SEQ ID NO: 26403 - RNA, 19 nt, Artificial Sequence
  Description of Artificial Sequence: Synthetic oligonucleotide
agcaaugagaccgccacga

SEQ ID NO: 26404 - RNA, 19 nt, Artificial Sequence
  Description of Artificial Sequence: Synthetic oligonucleotide
uauauuccgccuccccaga

SEQ ID NO: 26405 - RNA, 19 nt, Artificial Sequence
  Description of Artificial Sequence: Synthetic oligonucleotide
gaugggaucgccguaguaa

SEQ ID NO: 26406 - RNA, 19 nt, Artificial Sequence
  Description of Artificial Sequence: Synthetic oligonucleotide
ucgggugagagcugauugc

SEQ ID NO: 26407 - RNA, 19 nt, Artificial Sequence
  Description of Artificial Sequence: Synthetic oligonucleotide
ucggcuucguagauguagu

SEQ ID NO: 26408 - RNA, 19 nt, Artificial Sequence
  Description of Artificial Sequence: Synthetic oligonucleotide
caugguagaaauccaugca

SEQ ID NO: 26409 - RNA, 19 nt, Artificial Sequence
  Description of Artificial Sequence: Synthetic oligonucleotide
uguggcucguagcgaauca

SEQ ID NO: 26410 - RNA, 19 nt, Artificial Sequence
  Description of Artificial Sequence: Synthetic oligonucleotide
cucgggugagagcugauug

SEQ ID NO: 26411 - RNA, 19 nt, Artificial Sequence
  Description of Artificial Sequence: Synthetic oligonucleotide
gcaguuaccacgaaccacc

SEQ ID NO: 26412 - RNA, 19 nt, Artificial Sequence
  Description of Artificial Sequence: Synthetic oligonucleotide
ugucaccggccacugacca

SEQ ID NO: 26413 - RNA, 19 nt, Artificial Sequence
  Description of Artificial Sequence: Synthetic oligonucleotide
ugucgcaggcuucuggauc

SEQ ID NO: 26414 - RNA, 19 nt, Artificial Sequence
  Description of Artificial Sequence: Synthetic oligonucleotide
acgggagcacauucgcugg

SEQ ID NO: 26415 - RNA, 19 nt, Artificial Sequence
  Description of Artificial Sequence: Synthetic oligonucleotide
cucggcuucguagauguag

SEQ ID NO: 26416 - RNA, 19 nt, Artificial Sequence
  Description of Artificial Sequence: Synthetic oligonucleotide
gaggacgauauaucuugac

SEQ ID NO: 26417 - RNA, 19 nt, Artificial Sequence
  Description of Artificial Sequence: Synthetic oligonucleotide
ugccggccaaucaugugag

SEQ ID NO: 26418 - RNA, 19 nt, Artificial Sequence
  Description of Artificial Sequence: Synthetic oligonucleotide
ucgcuccaacaucaaaucu

SEQ ID NO: 26419 - RNA, 19 nt, Artificial Sequence
  Description of Artificial Sequence: Synthetic oligonucleotide
uaguaaccggccaggcacc

SEQ ID NO: 26420 - RNA, 19 nt, Artificial Sequence
  Description of Artificial Sequence: Synthetic oligonucleotide
ggcgcuaugggccacggug

SEQ ID NO: 26421 - RNA, 19 nt, Artificial Sequence
  Description of Artificial Sequence: Synthetic oligonucleotide
ugcuguggagugcuaggca

SEQ ID NO: 26422 - RNA, 19 nt, Artificial Sequence
  Description of Artificial Sequence: Synthetic oligonucleotide
aaugagcguguagggguuc

SEQ ID NO: 26423 - RNA, 19 nt, Artificial Sequence
  Description of Artificial Sequence: Synthetic oligonucleotide
cacuuagaacaucacgguc

SEQ ID NO: 26424 - RNA, 19 nt, Artificial Sequence
  Description of Artificial Sequence: Synthetic oligonucleotide
cuuacaguagcaguaccca

SEQ ID NO: 26425 - RNA, 19 nt, Artificial Sequence
  Description of Artificial Sequence: Synthetic oligonucleotide
gaacugggacucucgcucc

SEQ ID NO: 26426 - RNA, 19 nt, Artificial Sequence
  Description of Artificial Sequence: Synthetic oligonucleotide
gaauccucggaacagcuau

SEQ ID NO: 26427 - RNA, 19 nt, Artificial Sequence
  Description of Artificial Sequence: Synthetic oligonucleotide
cagaucuagacuuugcagu

SEQ ID NO: 26428 - RNA, 19 nt, Artificial Sequence
  Description of Artificial Sequence: Synthetic oligonucleotide
cacaacggcugcugguugg

SEQ ID NO: 26429 - RNA, 19 nt, Artificial Sequence
  Description of Artificial Sequence: Synthetic oligonucleotide
gagaaauacaguguauggu

SEQ ID NO: 26430 - RNA, 19 nt, Artificial Sequence
  Description of Artificial Sequence: Synthetic oligonucleotide
cauaucauaaacggcguaa

SEQ ID NO: 26431 - RNA, 19 nt, Artificial Sequence
  Description of Artificial Sequence: Synthetic oligonucleotide
gacgauauaucuugacccu

SEQ ID NO: 26432 - RNA, 19 nt, Artificial Sequence
  Description of Artificial Sequence: Synthetic oligonucleotide
aacggcugcugguuggaau

SEQ ID NO: 26433 - RNA, 19 nt, Artificial Sequence
  Description of Artificial Sequence: Synthetic oligonucleotide
uugucaccggccacugacc

SEQ ID NO: 26434 - RNA, 19 nt, Artificial Sequence
  Description of Artificial Sequence: Synthetic oligonucleotide
ggagguguuccacagguca

SEQ ID NO: 26435 - RNA, 19 nt, Artificial Sequence
  Description of Artificial Sequence: Synthetic oligonucleotide
cgcuguauggugaugacag

SEQ ID NO: 26436 - RNA, 19 nt, Artificial Sequence
  Description of Artificial Sequence: Synthetic oligonucleotide
cagauucaaucgacguuag

SEQ ID NO: 26437 - RNA, 19 nt, Artificial Sequence
  Description of Artificial Sequence: Synthetic oligonucleotide
uuagcagguuuuggguucc

SEQ ID NO: 26438 - RNA, 19 nt, Artificial Sequence
  Description of Artificial Sequence: Synthetic oligonucleotide
acggcguaauaguacuucu

SEQ ID NO: 26439 - RNA, 19 nt, Artificial Sequence
  Description of Artificial Sequence: Synthetic oligonucleotide
guuacaagcaagugcugua

SEQ ID NO: 26440 - RNA, 19 nt, Artificial Sequence
  Description of Artificial Sequence: Synthetic oligonucleotide
uugcaagcacaugauuuac

SEQ ID NO: 26441 - RNA, 19 nt, Artificial Sequence
  Description of Artificial Sequence: Synthetic oligonucleotide
aacaucgucugcacucugu

SEQ ID NO: 26442 - RNA, 19 nt, Artificial Sequence
  Description of Artificial Sequence: Synthetic oligonucleotide
ugggaucgccguaguaacc

SEQ ID NO: 26443 - RNA, 19 nt, Artificial Sequence
  Description of Artificial Sequence: Synthetic oligonucleotide
agauccgcacuauccucag

SEQ ID NO: 26444 - RNA, 19 nt, Artificial Sequence
  Description of Artificial Sequence: Synthetic oligonucleotide
cagcuuuacguuugaguuc

SEQ ID NO: 26445 - RNA, 19 nt, Artificial Sequence
  Description of Artificial Sequence: Synthetic oligonucleotide
cuacuugagccaucuuuuc

SEQ ID NO: 26446 - RNA, 19 nt, Artificial Sequence
  Description of Artificial Sequence: Synthetic oligonucleotide
ggcuucguagauguagugg

SEQ ID NO: 26447 - RNA, 19 nt, Artificial Sequence
  Description of Artificial Sequence: Synthetic oligonucleotide
gagcacauucgcuggcaug

SEQ ID NO: 26448 - RNA, 19 nt, Artificial Sequence
  Description of Artificial Sequence: Synthetic oligonucleotide
gaacucauugcaggauggc

SEQ ID NO: 26449 - RNA, 19 nt, Artificial Sequence
  Description of Artificial Sequence: Synthetic oligonucleotide
uggauaucaucaucagcuu

SEQ ID NO: 26450 - RNA, 19 nt, Artificial Sequence
  Description of Artificial Sequence: Synthetic oligonucleotide
uccgaagcccggcaugcac

SEQ ID NO: 26451 - RNA, 19 nt, Artificial Sequence
  Description of Artificial Sequence: Synthetic oligonucleotide
aaucgacguuagcagguuu

SEQ ID NO: 26452 - RNA, 19 nt, Artificial Sequence
  Description of Artificial Sequence: Synthetic oligonucleotide
acgauauaucuugacccug

SEQ ID NO: 26453 - RNA, 19 nt, Artificial Sequence
  Description of Artificial Sequence: Synthetic oligonucleotide
uccgggucgcuguauggug

SEQ ID NO: 26454 - RNA, 19 nt, Artificial Sequence
  Description of Artificial Sequence: Synthetic oligonucleotide
ucgacguuagcagguuuug

SEQ ID NO: 26455 - RNA, 19 nt, Artificial Sequence
  Description of Artificial Sequence: Synthetic oligonucleotide
uaacaucgucugcacucug

SEQ ID NO: 26456 - RNA, 19 nt, Artificial Sequence
  Description of Artificial Sequence: Synthetic oligonucleotide
cauggcaaaucaugguaga

SEQ ID NO: 26457 - RNA, 19 nt, Artificial Sequence
  Description of Artificial Sequence: Synthetic oligonucleotide
uacggaccaaucacaccac

SEQ ID NO: 26458 - RNA, 19 nt, Artificial Sequence
  Description of Artificial Sequence: Synthetic oligonucleotide
guaauggggucuugauaac

SEQ ID NO: 26459 - RNA, 19 nt, Artificial Sequence
  Description of Artificial Sequence: Synthetic oligonucleotide
uguccagauccgcacuauc

SEQ ID NO: 26460 - RNA, 19 nt, Artificial Sequence
  Description of Artificial Sequence: Synthetic oligonucleotide
uucgcuggcauggccauaa

SEQ ID NO: 26461 - RNA, 19 nt, Artificial Sequence
  Description of Artificial Sequence: Synthetic oligonucleotide
ucggaacagcuauuguuua

SEQ ID NO: 26462 - RNA, 19 nt, Artificial Sequence
  Description of Artificial Sequence: Synthetic oligonucleotide
gacacugacaaggcugaca

SEQ ID NO: 26463 - RNA, 19 nt, Artificial Sequence
  Description of Artificial Sequence: Synthetic oligonucleotide
cacauucgcuggcauggcc

SEQ ID NO: 26464 - RNA, 19 nt, Artificial Sequence
  Description of Artificial Sequence: Synthetic oligonucleotide
ucauugcuuaagccccagu

SEQ ID NO: 26465 - RNA, 19 nt, Artificial Sequence
  Description of Artificial Sequence: Synthetic oligonucleotide
agguuuuggguucccugga

SEQ ID NO: 26466 - RNA, 19 nt, Artificial Sequence
  Description of Artificial Sequence: Synthetic oligonucleotide
guguccugugguauagucc

SEQ ID NO: 26467 - RNA, 19 nt, Artificial Sequence
  Description of Artificial Sequence: Synthetic oligonucleotide
cgauauaucuugacccugg

SEQ ID NO: 26468 - RNA, 19 nt, Artificial Sequence
  Description of Artificial Sequence: Synthetic oligonucleotide
gacccaaugaugggaucgc

SEQ ID NO: 26469 - RNA, 19 nt, Artificial Sequence
  Description of Artificial Sequence: Synthetic oligonucleotide
agcguguagggguucucca

SEQ ID NO: 26470 - RNA, 19 nt, Artificial Sequence
  Description of Artificial Sequence: Synthetic oligonucleotide
accauaucauaaacggcgu

SEQ ID NO: 26471 - RNA, 19 nt, Artificial Sequence
  Description of Artificial Sequence: Synthetic oligonucleotide
caaugagaccgccacgaga

SEQ ID NO: 26472 - RNA, 19 nt, Artificial Sequence
  Description of Artificial Sequence: Synthetic oligonucleotide
caccagucgcuuacaguag

SEQ ID NO: 26473 - RNA, 19 nt, Artificial Sequence
  Description of Artificial Sequence: Synthetic oligonucleotide
ugcacagcucacaguuuaa

SEQ ID NO: 26474 - RNA, 19 nt, Artificial Sequence
  Description of Artificial Sequence: Synthetic oligonucleotide
ugucucgggugagagcuga

SEQ ID NO: 26475 - RNA, 19 nt, Artificial Sequence
  Description of Artificial Sequence: Synthetic oligonucleotide
gauauaucuugacccuggu

SEQ ID NO: 26476 - RNA, 19 nt, Artificial Sequence
  Description of Artificial Sequence: Synthetic oligonucleotide
cagucguacuaauucuuga

SEQ ID NO: 26477 - RNA, 19 nt, Artificial Sequence
  Description of Artificial Sequence: Synthetic oligonucleotide
gaucgccguaguaaccggc

SEQ ID NO: 26478 - RNA, 19 nt, Artificial Sequence
  Description of Artificial Sequence: Synthetic oligonucleotide
ucgcuguauggugaugaca

SEQ ID NO: 26479 - RNA, 19 nt, Artificial Sequence
  Description of Artificial Sequence: Synthetic oligonucleotide
cucccgacccaaugauggg

SEQ ID NO: 26480 - RNA, 19 nt, Artificial Sequence
  Description of Artificial Sequence: Synthetic oligonucleotide
guagcgaaucaggauguca

SEQ ID NO: 26481 - RNA, 19 nt, Artificial Sequence
  Description of Artificial Sequence: Synthetic oligonucleotide
cccgauacggaccaaucac

SEQ ID NO: 26482 - RNA, 19 nt, Artificial Sequence
  Description of Artificial Sequence: Synthetic oligonucleotide
ucgccguaguaaccggcca

SEQ ID NO: 26483 - RNA, 19 nt, Artificial Sequence
  Description of Artificial Sequence: Synthetic oligonucleotide
gucgcuuacaguagcagua

SEQ ID NO: 26484 - RNA, 19 nt, Artificial Sequence
  Description of Artificial Sequence: Synthetic oligonucleotide
ggcguaauaguacuucucu

SEQ ID NO: 26485 - RNA, 19 nt, Artificial Sequence
  Description of Artificial Sequence: Synthetic oligonucleotide
gcagcuuuacguuugaguu

SEQ ID NO: 26486 - RNA, 19 nt, Artificial Sequence
  Description of Artificial Sequence: Synthetic oligonucleotide
caggacauccugagcguuc

SEQ ID NO: 26487 - RNA, 19 nt, Artificial Sequence
  Description of Artificial Sequence: Synthetic oligonucleotide
caauguacccaggaucaca

SEQ ID NO: 26488 - RNA, 19 nt, Artificial Sequence
  Description of Artificial Sequence: Synthetic oligonucleotide
cucugucucgggugagagc

SEQ ID NO: 26489 - RNA, 19 nt, Artificial Sequence
  Description of Artificial Sequence: Synthetic oligonucleotide
aggauugcaagcacaugau

SEQ ID NO: 26490 - RNA, 19 nt, Artificial Sequence
  Description of Artificial Sequence: Synthetic oligonucleotide
cccgaguacccucuggugc

SEQ ID NO: 26491 - RNA, 19 nt, Artificial Sequence
  Description of Artificial Sequence: Synthetic oligonucleotide
caguaguaucaauguugug

SEQ ID NO: 26492 - RNA, 19 nt, Artificial Sequence
  Description of Artificial Sequence: Synthetic oligonucleotide
guuuuggguucccuggaua

SEQ ID NO: 26493 - RNA, 19 nt, Artificial Sequence
  Description of Artificial Sequence: Synthetic oligonucleotide
aggacauccugagcguucu

SEQ ID NO: 26494 - RNA, 19 nt, Artificial Sequence
  Description of Artificial Sequence: Synthetic oligonucleotide
ccagucguacuaauucuug

SEQ ID NO: 26495 - RNA, 19 nt, Artificial Sequence
  Description of Artificial Sequence: Synthetic oligonucleotide
cucggaacagcuauuguuu

SEQ ID NO: 26496 - RNA, 19 nt, Artificial Sequence
  Description of Artificial Sequence: Synthetic oligonucleotide
gcgaaucaggaugucauac

SEQ ID NO: 26497 - RNA, 19 nt, Artificial Sequence
  Description of Artificial Sequence: Synthetic oligonucleotide
cgccacgagaaauacagug

SEQ ID NO: 26498 - RNA, 19 nt, Artificial Sequence
  Description of Artificial Sequence: Synthetic oligonucleotide
ggaucgccguaguaaccgg

SEQ ID NO: 26499 - RNA, 19 nt, Artificial Sequence
  Description of Artificial Sequence: Synthetic oligonucleotide
cuggucacacugugguguc

SEQ ID NO: 26500 - RNA, 19 nt, Artificial Sequence
  Description of Artificial Sequence: Synthetic oligonucleotide
guggcucguagcgaaucag

SEQ ID NO: 26501 - RNA, 19 nt, Artificial Sequence
  Description of Artificial Sequence: Synthetic oligonucleotide
gugagagcugauugcucca

SEQ ID NO: 26502 - RNA, 19 nt, Artificial Sequence
  Description of Artificial Sequence: Synthetic oligonucleotide
gucgcuguauggugaugac

SEQ ID NO: 26503 - RNA, 19 nt, Artificial Sequence
  Description of Artificial Sequence: Synthetic oligonucleotide
guacuaauucuugagcuuu

SEQ ID NO: 26504 - RNA, 19 nt, Artificial Sequence
  Description of Artificial Sequence: Synthetic oligonucleotide
gcguaauaguacuucucuc

SEQ ID NO: 26505 - RNA, 19 nt, Artificial Sequence
  Description of Artificial Sequence: Synthetic oligonucleotide
aguacccucuggugcacuu

SEQ ID NO: 26506 - RNA, 19 nt, Artificial Sequence
  Description of Artificial Sequence: Synthetic oligonucleotide
ugccaggcgcuaugggcca

SEQ ID NO: 26507 - RNA, 19 nt, Artificial Sequence
  Description of Artificial Sequence: Synthetic oligonucleotide
aucgacguuagcagguuuu

SEQ ID NO: 26508 - RNA, 19 nt, Artificial Sequence
  Description of Artificial Sequence: Synthetic oligonucleotide
gaugcgcugggaggcguug

SEQ ID NO: 26509 - RNA, 19 nt, Artificial Sequence
  Description of Artificial Sequence: Synthetic oligonucleotide
agcggaccucuccuuccag

SEQ ID NO: 26510 - RNA, 19 nt, Artificial Sequence
  Description of Artificial Sequence: Synthetic oligonucleotide
ggcgaacuggcguccacug

SEQ ID NO: 26511 - RNA, 19 nt, Artificial Sequence
  Description of Artificial Sequence: Synthetic oligonucleotide
ccguggacuggucacacug

SEQ ID NO: 26512 - RNA, 19 nt, Artificial Sequence
  Description of Artificial Sequence: Synthetic oligonucleotide
ggucgcuguauggugauga

SEQ ID NO: 26513 - RNA, 19 nt, Artificial Sequence
  Description of Artificial Sequence: Synthetic oligonucleotide
cgauacggaccaaucacac

SEQ ID NO: 26514 - RNA, 19 nt, Artificial Sequence
  Description of Artificial Sequence: Synthetic oligonucleotide
aaacggcguaauaguacuu

SEQ ID NO: 26515 - RNA, 19 nt, Artificial Sequence
  Description of Artificial Sequence: Synthetic oligonucleotide
gcaaugagaccgccacgag

SEQ ID NO: 26516 - RNA, 19 nt, Artificial Sequence
  Description of Artificial Sequence: Synthetic oligonucleotide
cacggugaccagaccacca

SEQ ID NO: 26517 - RNA, 19 nt, Artificial Sequence
  Description of Artificial Sequence: Synthetic oligonucleotide
gagcggaccucuccuucca

SEQ ID NO: 26518 - RNA, 19 nt, Artificial Sequence
  Description of Artificial Sequence: Synthetic oligonucleotide
aucucccgacccaaugaug

SEQ ID NO: 26519 - RNA, 19 nt, Artificial Sequence
  Description of Artificial Sequence: Synthetic oligonucleotide
cgacccaaugaugggaucg

SEQ ID NO: 26520 - RNA, 19 nt, Artificial Sequence
  Description of Artificial Sequence: Synthetic oligonucleotide
caauuugucaccggccacu

SEQ ID NO: 26521 - RNA, 19 nt, Artificial Sequence
  Description of Artificial Sequence: Synthetic oligonucleotide
cuguggcucguagcgaauc

SEQ ID NO: 26522 - RNA, 19 nt, Artificial Sequence
  Description of Artificial Sequence: Synthetic oligonucleotide
guauugggugcacacugau

SEQ ID NO: 26523 - RNA, 19 nt, Artificial Sequence
  Description of Artificial Sequence: Synthetic oligonucleotide
ggucucccgauacggacca

SEQ ID NO: 26524 - RNA, 19 nt, Artificial Sequence
  Description of Artificial Sequence: Synthetic oligonucleotide
gguuacaagcaagugcugu

SEQ ID NO: 26525 - RNA, 19 nt, Artificial Sequence
  Description of Artificial Sequence: Synthetic oligonucleotide
augagcguguagggguucu

SEQ ID NO: 26526 - RNA, 19 nt, Artificial Sequence
  Description of Artificial Sequence: Synthetic oligonucleotide
aguaaccggccaggcaccu

SEQ ID NO: 26527 - RNA, 19 nt, Artificial Sequence
  Description of Artificial Sequence: Synthetic oligonucleotide
auacuccauggaauauggu

SEQ ID NO: 26528 - RNA, 19 nt, Artificial Sequence
  Description of Artificial Sequence: Synthetic oligonucleotide
gcccgaucacauugggaag

SEQ ID NO: 26529 - RNA, 19 nt, Artificial Sequence
  Description of Artificial Sequence: Synthetic oligonucleotide
agcagguuuuggguucccu

SEQ ID NO: 26530 - RNA, 19 nt, Artificial Sequence
  Description of Artificial Sequence: Synthetic oligonucleotide
auccucggcuucguagaug

SEQ ID NO: 26531 - RNA, 19 nt, Artificial Sequence
  Description of Artificial Sequence: Synthetic oligonucleotide
ugaugcgcugggaggcguu

SEQ ID NO: 26532 - RNA, 19 nt, Artificial Sequence
  Description of Artificial Sequence: Synthetic oligonucleotide
ccaaaaucugagggauugc

SEQ ID NO: 26533 - RNA, 19 nt, Artificial Sequence
  Description of Artificial Sequence: Synthetic oligonucleotide
cugagcguucugcuuagcu

SEQ ID NO: 26534 - RNA, 19 nt, Artificial Sequence
  Description of Artificial Sequence: Synthetic oligonucleotide
ccgauacggaccaaucaca

SEQ ID NO: 26535 - RNA, 19 nt, Artificial Sequence
  Description of Artificial Sequence: Synthetic oligonucleotide
agaauccucggaacagcua

SEQ ID NO: 26536 - RNA, 19 nt, Artificial Sequence
  Description of Artificial Sequence: Synthetic oligonucleotide
uccgguagcuguggcucgu

SEQ ID NO: 26537 - RNA, 19 nt, Artificial Sequence
  Description of Artificial Sequence: Synthetic oligonucleotide
ucuuuccgggucgcuguau

SEQ ID NO: 26538 - RNA, 19 nt, Artificial Sequence
  Description of Artificial Sequence: Synthetic oligonucleotide
cugcccgaucacauuggga

SEQ ID NO: 26539 - RNA, 19 nt, Artificial Sequence
  Description of Artificial Sequence: Synthetic oligonucleotide
gagcgagcggaccucuccu

SEQ ID NO: 26540 - RNA, 19 nt, Artificial Sequence
  Description of Artificial Sequence: Synthetic oligonucleotide
ccacgagaaauacagugua

SEQ ID NO: 26541 - RNA, 19 nt, Artificial Sequence
  Description of Artificial Sequence: Synthetic oligonucleotide
aucuuuccgggucgcugua

SEQ ID NO: 26542 - RNA, 19 nt, Artificial Sequence
  Description of Artificial Sequence: Synthetic oligonucleotide
cacggucucccgauacgga

SEQ ID NO: 26543 - RNA, 19 nt, Artificial Sequence
  Description of Artificial Sequence: Synthetic oligonucleotide
cacgagaaauacaguguau

SEQ ID NO: 26544 - RNA, 19 nt, Artificial Sequence
  Description of Artificial Sequence: Synthetic oligonucleotide
gcacugaccaguggcuuug

SEQ ID NO: 26545 - RNA, 19 nt, Artificial Sequence
  Description of Artificial Sequence: Synthetic oligonucleotide
agcgagcggaccucuccuu

SEQ ID NO: 26546 - RNA, 19 nt, Artificial Sequence
  Description of Artificial Sequence: Synthetic oligonucleotide
agucucugaucugcuugau

SEQ ID NO: 26547 - RNA, 19 nt, Artificial Sequence
  Description of Artificial Sequence: Synthetic oligonucleotide
gaccgccacgagaaauaca

SEQ ID NO: 26548 - RNA, 19 nt, Artificial Sequence
  Description of Artificial Sequence: Synthetic oligonucleotide
ucgcuggcauggccauaac

SEQ ID NO: 26549 - RNA, 19 nt, Artificial Sequence
  Description of Artificial Sequence: Synthetic oligonucleotide
ccgaguacccucuggugca

SEQ ID NO: 26550 - RNA, 19 nt, Artificial Sequence
  Description of Artificial Sequence: Synthetic oligonucleotide
caggcgcuaugggccacgg

SEQ ID NO: 26551 - RNA, 19 nt, Artificial Sequence
  Description of Artificial Sequence: Synthetic oligonucleotide
cauugcaggauggcccaaa

SEQ ID NO: 26552 - RNA, 19 nt, Artificial Sequence
  Description of Artificial Sequence: Synthetic oligonucleotide
cggucucccgauacggacc

SEQ ID NO: 26553 - RNA, 19 nt, Artificial Sequence
  Description of Artificial Sequence: Synthetic oligonucleotide
aggcgugccuguuccucuu

SEQ ID NO: 26554 - RNA, 19 nt, Artificial Sequence
  Description of Artificial Sequence: Synthetic oligonucleotide
ggguuacaagcaagugcug

SEQ ID NO: 26555 - RNA, 19 nt, Artificial Sequence
  Description of Artificial Sequence: Synthetic oligonucleotide
gcaugacucacagccgguc

SEQ ID NO: 26556 - RNA, 19 nt, Artificial Sequence
  Description of Artificial Sequence: Synthetic oligonucleotide
caaugagcguguagggguu

SEQ ID NO: 26557 - RNA, 19 nt, Artificial Sequence
  Description of Artificial Sequence: Synthetic oligonucleotide
gauccgcacuauccucagu

SEQ ID NO: 26558 - RNA, 19 nt, Artificial Sequence
  Description of Artificial Sequence: Synthetic oligonucleotide
ggccauaacagaagcaguu

SEQ ID NO: 26559 - RNA, 19 nt, Artificial Sequence
  Description of Artificial Sequence: Synthetic oligonucleotide
cauucgcuggcauggccau

SEQ ID NO: 26560 - RNA, 19 nt, Artificial Sequence
  Description of Artificial Sequence: Synthetic oligonucleotide
cagugaucucccgacccaa

SEQ ID NO: 26561 - RNA, 19 nt, Artificial Sequence
  Description of Artificial Sequence: Synthetic oligonucleotide
cccgaucacauugggaaga

SEQ ID NO: 26562 - RNA, 19 nt, Artificial Sequence
  Description of Artificial Sequence: Synthetic oligonucleotide
cgacguuagcagguuuugg

SEQ ID NO: 26563 - RNA, 19 nt, Artificial Sequence
  Description of Artificial Sequence: Synthetic oligonucleotide
gaagcccggcaugcacuga

SEQ ID NO: 26564 - RNA, 19 nt, Artificial Sequence
  Description of Artificial Sequence: Synthetic oligonucleotide
aggcgcuaugggccacggu

SEQ ID NO: 26565 - RNA, 19 nt, Artificial Sequence
  Description of Artificial Sequence: Synthetic oligonucleotide
gcgagcggaccucuccuuc

SEQ ID NO: 26566 - RNA, 19 nt, Artificial Sequence
  Description of Artificial Sequence: Synthetic oligonucleotide
ccacaacggcugcugguug

SEQ ID NO: 26567 - RNA, 19 nt, Artificial Sequence
  Description of Artificial Sequence: Synthetic oligonucleotide
cugcuuagcuucgucugcu

SEQ ID NO: 26568 - RNA, 19 nt, Artificial Sequence
  Description of Artificial Sequence: Synthetic oligonucleotide
ccaauguacccaggaucac

SEQ ID NO: 26569 - RNA, 19 nt, Artificial Sequence
  Description of Artificial Sequence: Synthetic oligonucleotide
gcucguagcgaaucaggau

SEQ ID NO: 26570 - RNA, 19 nt, Artificial Sequence
  Description of Artificial Sequence: Synthetic oligonucleotide
ccucggaacagcuauuguu

SEQ ID NO: 26571 - RNA, 19 nt, Artificial Sequence
  Description of Artificial Sequence: Synthetic oligonucleotide
ggauccgugguggaggcau

SEQ ID NO: 26572 - RNA, 19 nt, Artificial Sequence
  Description of Artificial Sequence: Synthetic oligonucleotide
ccguaguaaccggccaggc

SEQ ID NO: 26573 - RNA, 19 nt, Artificial Sequence
  Description of Artificial Sequence: Synthetic oligonucleotide
gcacauucgcuggcauggc

SEQ ID NO: 26574 - RNA, 19 nt, Artificial Sequence
  Description of Artificial Sequence: Synthetic oligonucleotide
gcgagggaggacgauauau

SEQ ID NO: 26575 - RNA, 19 nt, Artificial Sequence
  Description of Artificial Sequence: Synthetic oligonucleotide
cguaguaaccggccaggca

SEQ ID NO: 26576 - RNA, 19 nt, Artificial Sequence
  Description of Artificial Sequence: Synthetic oligonucleotide
gcgcuaugggccacgguga

SEQ ID NO: 26577 - RNA, 19 nt, Artificial Sequence
  Description of Artificial Sequence: Synthetic oligonucleotide
ccauaucauaaacggcgua

SEQ ID NO: 26578 - RNA, 19 nt, Artificial Sequence
  Description of Artificial Sequence: Synthetic oligonucleotide
uuccgaccuucagcagguc

SEQ ID NO: 26579 - RNA, 19 nt, Artificial Sequence
  Description of Artificial Sequence: Synthetic oligonucleotide
ccgggucgcuguaugguga

SEQ ID NO: 26580 - RNA, 19 nt, Artificial Sequence
  Description of Artificial Sequence: Synthetic oligonucleotide
auucgcuggcauggccaua

SEQ ID NO: 26581 - RNA, 19 nt, Artificial Sequence
  Description of Artificial Sequence: Synthetic oligonucleotide
ccgacccaaugaugggauc

SEQ ID NO: 26582 - RNA, 19 nt, Artificial Sequence
  Description of Artificial Sequence: Synthetic oligonucleotide
cgcuccaacaucaaaucuu

SEQ ID NO: 26583 - RNA, 19 nt, Artificial Sequence
  Description of Artificial Sequence: Synthetic oligonucleotide
caaucgacguuagcagguu

SEQ ID NO: 26584 - RNA, 19 nt, Artificial Sequence
  Description of Artificial Sequence: Synthetic oligonucleotide
cguacuaauucuugagcuu

SEQ ID NO: 26585 - RNA, 19 nt, Artificial Sequence
  Description of Artificial Sequence: Synthetic oligonucleotide
cgggagcacauucgcuggc

SEQ ID NO: 26586 - RNA, 19 nt, Artificial Sequence
  Description of Artificial Sequence: Synthetic oligonucleotide
cugugugguacaggcacuu

SEQ ID NO: 26587 - RNA, 19 nt, Artificial Sequence
  Description of Artificial Sequence: Synthetic oligonucleotide
gggucgcuguauggugaug

SEQ ID NO: 26588 - RNA, 19 nt, Artificial Sequence
  Description of Artificial Sequence: Synthetic oligonucleotide
gcggaccucuccuuccagu

SEQ ID NO: 26589 - RNA, 19 nt, Artificial Sequence
  Description of Artificial Sequence: Synthetic oligonucleotide
cgcuggcauggccauaaca

SEQ ID NO: 26590 - RNA, 19 nt, Artificial Sequence
  Description of Artificial Sequence: Synthetic oligonucleotide
cugugcuauugggauccgu

SEQ ID NO: 26591 - RNA, 19 nt, Artificial Sequence
  Description of Artificial Sequence: Synthetic oligonucleotide
caacggcugcugguuggaa

SEQ ID NO: 26592 - RNA, 19 nt, Artificial Sequence
  Description of Artificial Sequence: Synthetic oligonucleotide
ccugagcguucugcuuagc

SEQ ID NO: 26593 - RNA, 19 nt, Artificial Sequence
  Description of Artificial Sequence: Synthetic oligonucleotide
ccggccacugaccagcaau

SEQ ID NO: 26594 - RNA, 19 nt, Artificial Sequence
  Description of Artificial Sequence: Synthetic oligonucleotide
gccacaacggcugcugguu

SEQ ID NO: 26595 - RNA, 19 nt, Artificial Sequence
  Description of Artificial Sequence: Synthetic oligonucleotide
ggcgagggaggacgauaua

SEQ ID NO: 26596 - RNA, 19 nt, Artificial Sequence
  Description of Artificial Sequence: Synthetic oligonucleotide
gauccgugguggaggcauu

SEQ ID NO: 26597 - RNA, 19 nt, Artificial Sequence
  Description of Artificial Sequence: Synthetic oligonucleotide
caccaucuagagccuucuu

SEQ ID NO: 26598 - RNA, 19 nt, Artificial Sequence
  Description of Artificial Sequence: Synthetic oligonucleotide
ccacgggagcacauucgcu

SEQ ID NO: 26599 - RNA, 19 nt, Artificial Sequence
  Description of Artificial Sequence: Synthetic oligonucleotide
cgaguacccucuggugcac

SEQ ID NO: 26600 - RNA, 19 nt, Artificial Sequence
  Description of Artificial Sequence: Synthetic oligonucleotide
gggauccgugguggaggca

SEQ ID NO: 26601 - RNA, 19 nt, Artificial Sequence
  Description of Artificial Sequence: Synthetic oligonucleotide
guaaccggccaggcaccuu

SEQ ID NO: 26602 - RNA, 19 nt, Artificial Sequence
  Description of Artificial Sequence: Synthetic oligonucleotide
gucucccgauacggaccaa

SEQ ID NO: 26603 - RNA, 19 nt, Artificial Sequence
  Description of Artificial Sequence: Synthetic oligonucleotide
ccuggcgaacuggcgucca

SEQ ID NO: 26604 - RNA, 19 nt, Artificial Sequence
  Description of Artificial Sequence: Synthetic oligonucleotide
gucucgggugagagcugau

SEQ ID NO: 26605 - RNA, 19 nt, Artificial Sequence
  Description of Artificial Sequence: Synthetic oligonucleotide
ccgccacgagaaauacagu

SEQ ID NO: 26606 - RNA, 19 nt, Artificial Sequence
  Description of Artificial Sequence: Synthetic oligonucleotide
cccgccugacauucccagu

SEQ ID NO: 26607 - RNA, 19 nt, Artificial Sequence
  Description of Artificial Sequence: Synthetic oligonucleotide
gcuguggcucguagcgaau

SEQ ID NO: 26608 - RNA, 19 nt, Artificial Sequence
  Description of Artificial Sequence: Synthetic oligonucleotide
cgggucgcuguauggugau

SEQ ID NO: 26609 - RNA, 19 nt, Artificial Sequence
  Description of Artificial Sequence: Synthetic oligonucleotide
auaaguuacacacauaccc

SEQ ID NO: 26610 - RNA, 19 nt, Artificial Sequence
  Description of Artificial Sequence: Synthetic oligonucleotide
augauaaauuaucauaugc

SEQ ID NO: 26611 - RNA, 19 nt, Artificial Sequence
  Description of Artificial Sequence: Synthetic oligonucleotide
auauguugaaguuagaaug

SEQ ID NO: 26612 - RNA, 19 nt, Artificial Sequence
  Description of Artificial Sequence: Synthetic oligonucleotide
aguuguacaauuuaauguc

SEQ ID NO: 26613 - RNA, 19 nt, Artificial Sequence
  Description of Artificial Sequence: Synthetic oligonucleotide
aacuaauacucucaggauc

SEQ ID NO: 26614 - RNA, 19 nt, Artificial Sequence
  Description of Artificial Sequence: Synthetic oligonucleotide
uuuguacugacacaguggg

SEQ ID NO: 26615 - RNA, 19 nt, Artificial Sequence
  Description of Artificial Sequence: Synthetic oligonucleotide
aaguuguacaauuuaaugu

SEQ ID NO: 26616 - RNA, 19 nt, Artificial Sequence
  Description of Artificial Sequence: Synthetic oligonucleotide
uucaugagaccucacaugg

SEQ ID NO: 26617 - RNA, 19 nt, Artificial Sequence
  Description of Artificial Sequence: Synthetic oligonucleotide
acuuugaacaaccccagcc

SEQ ID NO: 26618 - RNA, 19 nt, Artificial Sequence
  Description of Artificial Sequence: Synthetic oligonucleotide
aaguguaggaauguguugc

SEQ ID NO: 26619 - RNA, 19 nt, Artificial Sequence
  Description of Artificial Sequence: Synthetic oligonucleotide
cuaacuaacguaauaaaac

SEQ ID NO: 26620 - RNA, 19 nt, Artificial Sequence
  Description of Artificial Sequence: Synthetic oligonucleotide
uacgugacagcuuaggugg

SEQ ID NO: 26621 - RNA, 19 nt, Artificial Sequence
  Description of Artificial Sequence: Synthetic oligonucleotide
aagacauaaacucuaguga

SEQ ID NO: 26622 - RNA, 19 nt, Artificial Sequence
  Description of Artificial Sequence: Synthetic oligonucleotide
uugcauguuaguaauacag

SEQ ID NO: 26623 - RNA, 19 nt, Artificial Sequence
  Description of Artificial Sequence: Synthetic oligonucleotide
ugauaaauuaucauaugcu

SEQ ID NO: 26624 - RNA, 19 nt, Artificial Sequence
  Description of Artificial Sequence: Synthetic oligonucleotide
auaaacggaagucaucugg

SEQ ID NO: 26625 - RNA, 19 nt, Artificial Sequence
  Description of Artificial Sequence: Synthetic oligonucleotide
uuaacauauucccaaaggu

SEQ ID NO: 26626 - RNA, 19 nt, Artificial Sequence
  Description of Artificial Sequence: Synthetic oligonucleotide
caaaguugaacaaaucugc

SEQ ID NO: 26627 - RNA, 19 nt, Artificial Sequence
  Description of Artificial Sequence: Synthetic oligonucleotide
guuaguaauacagugcugg

SEQ ID NO: 26628 - RNA, 19 nt, Artificial Sequence
  Description of Artificial Sequence: Synthetic oligonucleotide
aaacauagggcauguuuac

SEQ ID NO: 26629 - RNA, 19 nt, Artificial Sequence
  Description of Artificial Sequence: Synthetic oligonucleotide
aaauaucaggucacaaucc

SEQ ID NO: 26630 - RNA, 19 nt, Artificial Sequence
  Description of Artificial Sequence: Synthetic oligonucleotide
uguaacaucaacaggcgcu

SEQ ID NO: 26631 - RNA, 19 nt, Artificial Sequence
  Description of Artificial Sequence: Synthetic oligonucleotide
uuuacauggacauuauaac

SEQ ID NO: 26632 - RNA, 19 nt, Artificial Sequence
  Description of Artificial Sequence: Synthetic oligonucleotide
gaggacguuauauugaaug

SEQ ID NO: 26633 - RNA, 19 nt, Artificial Sequence
  Description of Artificial Sequence: Synthetic oligonucleotide
agacauaaacucuagugag

SEQ ID NO: 26634 - RNA, 19 nt, Artificial Sequence
  Description of Artificial Sequence: Synthetic oligonucleotide
uuuaugauugguuuuaauu

SEQ ID NO: 26635 - RNA, 19 nt, Artificial Sequence
  Description of Artificial Sequence: Synthetic oligonucleotide
cagguuacaaccaggaggg

SEQ ID NO: 26636 - RNA, 19 nt, Artificial Sequence
  Description of Artificial Sequence: Synthetic oligonucleotide
uauugagacaaacuaauua

SEQ ID NO: 26637 - RNA, 19 nt, Artificial Sequence
  Description of Artificial Sequence: Synthetic oligonucleotide
uguuacaugacaccuugcc

SEQ ID NO: 26638 - RNA, 19 nt, Artificial Sequence
  Description of Artificial Sequence: Synthetic oligonucleotide
uuuuguauaaugacacaca

SEQ ID NO: 26639 - RNA, 19 nt, Artificial Sequence
  Description of Artificial Sequence: Synthetic oligonucleotide
aaaccaacgaaguucggcu

SEQ ID NO: 26640 - RNA, 19 nt, Artificial Sequence
  Description of Artificial Sequence: Synthetic oligonucleotide
aaugguugaaaccaacgaa

SEQ ID NO: 26641 - RNA, 19 nt, Artificial Sequence
  Description of Artificial Sequence: Synthetic oligonucleotide
auacuguuuaccaaggugg

SEQ ID NO: 26642 - RNA, 19 nt, Artificial Sequence
  Description of Artificial Sequence: Synthetic oligonucleotide
uuguaacaaagucauagcu

SEQ ID NO: 26643 - RNA, 19 nt, Artificial Sequence
  Description of Artificial Sequence: Synthetic oligonucleotide
uguaucuauuuacucauac

SEQ ID NO: 26644 - RNA, 19 nt, Artificial Sequence
  Description of Artificial Sequence: Synthetic oligonucleotide
uguacagggauaaagcauc

SEQ ID NO: 26645 - RNA, 19 nt, Artificial Sequence
  Description of Artificial Sequence: Synthetic oligonucleotide
aacguaauaaaaccuccca

SEQ ID NO: 26646 - RNA, 19 nt, Artificial Sequence
  Description of Artificial Sequence: Synthetic oligonucleotide
aguaauacagugcugguau

SEQ ID NO: 26647 - RNA, 19 nt, Artificial Sequence
  Description of Artificial Sequence: Synthetic oligonucleotide
uauauguugaaguuagaau

SEQ ID NO: 26648 - RNA, 19 nt, Artificial Sequence
  Description of Artificial Sequence: Synthetic oligonucleotide
cuaacguaauaaaaccucc

SEQ ID NO: 26649 - RNA, 19 nt, Artificial Sequence
  Description of Artificial Sequence: Synthetic oligonucleotide
uucuuaagugaauagagua

SEQ ID NO: 26650 - RNA, 19 nt, Artificial Sequence
  Description of Artificial Sequence: Synthetic oligonucleotide
gugacuguugacaagaugc

SEQ ID NO: 26651 - RNA, 19 nt, Artificial Sequence
  Description of Artificial Sequence: Synthetic oligonucleotide
uugaauggaguagugagag

SEQ ID NO: 26652 - RNA, 19 nt, Artificial Sequence
  Description of Artificial Sequence: Synthetic oligonucleotide
aaugucauaggcgugggca

SEQ ID NO: 26653 - RNA, 19 nt, Artificial Sequence
  Description of Artificial Sequence: Synthetic oligonucleotide
guuucuaccguauguacag

SEQ ID NO: 26654 - RNA, 19 nt, Artificial Sequence
  Description of Artificial Sequence: Synthetic oligonucleotide
ucugcuaguguuuacaaua

SEQ ID NO: 26655 - RNA, 19 nt, Artificial Sequence
  Description of Artificial Sequence: Synthetic oligonucleotide
uccuaagucaguugcagcc

SEQ ID NO: 26656 - RNA, 19 nt, Artificial Sequence
  Description of Artificial Sequence: Synthetic oligonucleotide
acuaacguaauaaaaccuc

SEQ ID NO: 26657 - RNA, 19 nt, Artificial Sequence
  Description of Artificial Sequence: Synthetic oligonucleotide
acauguuuuacgugacagc

SEQ ID NO: 26658 - RNA, 19 nt, Artificial Sequence
  Description of Artificial Sequence: Synthetic oligonucleotide
gauaaggggaaccaccgug

SEQ ID NO: 26659 - RNA, 19 nt, Artificial Sequence
  Description of Artificial Sequence: Synthetic oligonucleotide
aggacguuauauugaaugg

SEQ ID NO: 26660 - RNA, 19 nt, Artificial Sequence
  Description of Artificial Sequence: Synthetic oligonucleotide
aaguuagaaugauaaauua

SEQ ID NO: 26661 - RNA, 19 nt, Artificial Sequence
  Description of Artificial Sequence: Synthetic oligonucleotide
gguauuuugauguuuguac

SEQ ID NO: 26662 - RNA, 19 nt, Artificial Sequence
  Description of Artificial Sequence: Synthetic oligonucleotide
aaaguguaggaauguguug

SEQ ID NO: 26663 - RNA, 19 nt, Artificial Sequence
  Description of Artificial Sequence: Synthetic oligonucleotide
uuucguccgaaugagacag

SEQ ID NO: 26664 - RNA, 19 nt, Artificial Sequence
  Description of Artificial Sequence: Synthetic oligonucleotide
uuacgugacagcuuaggug

SEQ ID NO: 26665 - RNA, 19 nt, Artificial Sequence
  Description of Artificial Sequence: Synthetic oligonucleotide
augcaagguauuuugaugu

SEQ ID NO: 26666 - RNA, 19 nt, Artificial Sequence
  Description of Artificial Sequence: Synthetic oligonucleotide
caaaccaggacccacuggc

SEQ ID NO: 26667 - RNA, 19 nt, Artificial Sequence
  Description of Artificial Sequence: Synthetic oligonucleotide
uuacuaacuaacguaauaa

SEQ ID NO: 26668 - RNA, 19 nt, Artificial Sequence
  Description of Artificial Sequence: Synthetic oligonucleotide
uauauugaauggaguagug

SEQ ID NO: 26669 - RNA, 19 nt, Artificial Sequence
  Description of Artificial Sequence: Synthetic oligonucleotide
guuauauugaauggaguag

SEQ ID NO: 26670 - RNA, 19 nt, Artificial Sequence
  Description of Artificial Sequence: Synthetic oligonucleotide
uuauauugaauggaguagu

SEQ ID NO: 26671 - RNA, 19 nt, Artificial Sequence
  Description of Artificial Sequence: Synthetic oligonucleotide
uaacguaauaaaaccuccc

SEQ ID NO: 26672 - RNA, 19 nt, Artificial Sequence
  Description of Artificial Sequence: Synthetic oligonucleotide
aaauggguuuuaugauugg

SEQ ID NO: 26673 - RNA, 19 nt, Artificial Sequence
  Description of Artificial Sequence: Synthetic oligonucleotide
augguaagucauccggucc

SEQ ID NO: 26674 - RNA, 19 nt, Artificial Sequence
  Description of Artificial Sequence: Synthetic oligonucleotide
cacaugguaagucauccgg

SEQ ID NO: 26675 - RNA, 19 nt, Artificial Sequence
  Description of Artificial Sequence: Synthetic oligonucleotide
ucugcguacauagaaaccu

SEQ ID NO: 26676 - RNA, 19 nt, Artificial Sequence
  Description of Artificial Sequence: Synthetic oligonucleotide
uuaucauaugcuuugcaua

SEQ ID NO: 26677 - RNA, 19 nt, Artificial Sequence
  Description of Artificial Sequence: Synthetic oligonucleotide
uuuuacgugacagcuuagg

SEQ ID NO: 26678 - RNA, 19 nt, Artificial Sequence
  Description of Artificial Sequence: Synthetic oligonucleotide
cauccuaccuaguuagugg

SEQ ID NO: 26679 - RNA, 19 nt, Artificial Sequence
  Description of Artificial Sequence: Synthetic oligonucleotide
aacggaagucaucugguga

SEQ ID NO: 26680 - RNA, 19 nt, Artificial Sequence
  Description of Artificial Sequence: Synthetic oligonucleotide
gcuacuauccuguuuaagc

SEQ ID NO: 26681 - RNA, 19 nt, Artificial Sequence
  Description of Artificial Sequence: Synthetic oligonucleotide
uuacuggguuucuugacag

SEQ ID NO: 26682 - RNA, 19 nt, Artificial Sequence
  Description of Artificial Sequence: Synthetic oligonucleotide
ugccgaucugauaaagggg

SEQ ID NO: 26683 - RNA, 19 nt, Artificial Sequence
  Description of Artificial Sequence: Synthetic oligonucleotide
uuuacgugacagcuuaggu

SEQ ID NO: 26684 - RNA, 19 nt, Artificial Sequence
  Description of Artificial Sequence: Synthetic oligonucleotide
ucaacgugcacaucacugc

SEQ ID NO: 26685 - RNA, 19 nt, Artificial Sequence
  Description of Artificial Sequence: Synthetic oligonucleotide
uauugagaggagcagcuaa

SEQ ID NO: 26686 - RNA, 19 nt, Artificial Sequence
  Description of Artificial Sequence: Synthetic oligonucleotide
auuaaacuaauguggucca

SEQ ID NO: 26687 - RNA, 19 nt, Artificial Sequence
  Description of Artificial Sequence: Synthetic oligonucleotide
ugcccuauguucauugggc

SEQ ID NO: 26688 - RNA, 19 nt, Artificial Sequence
  Description of Artificial Sequence: Synthetic oligonucleotide
aacuaacguaauaaaaccu

SEQ ID NO: 26689 - RNA, 19 nt, Artificial Sequence
  Description of Artificial Sequence: Synthetic oligonucleotide
accaacgaaguucggcugc

SEQ ID NO: 26690 - RNA, 19 nt, Artificial Sequence
  Description of Artificial Sequence: Synthetic oligonucleotide
uuuuacacuagguacuauu

SEQ ID NO: 26691 - RNA, 19 nt, Artificial Sequence
  Description of Artificial Sequence: Synthetic oligonucleotide
uaguuagugguuagaauaa

SEQ ID NO: 26692 - RNA, 19 nt, Artificial Sequence
  Description of Artificial Sequence: Synthetic oligonucleotide
acaaacauagggcauguuu

SEQ ID NO: 26693 - RNA, 19 nt, Artificial Sequence
  Description of Artificial Sequence: Synthetic oligonucleotide
gaaaccaacgaaguucggc

SEQ ID NO: 26694 - RNA, 19 nt, Artificial Sequence
  Description of Artificial Sequence: Synthetic oligonucleotide
aaagcacaugucucaacgu

SEQ ID NO: 26695 - RNA, 19 nt, Artificial Sequence
  Description of Artificial Sequence: Synthetic oligonucleotide
auugaagcaaaaugcuacu

SEQ ID NO: 26696 - RNA, 19 nt, Artificial Sequence
  Description of Artificial Sequence: Synthetic oligonucleotide
acuaauacucucaggaucu

SEQ ID NO: 26697 - RNA, 19 nt, Artificial Sequence
  Description of Artificial Sequence: Synthetic oligonucleotide
cuagugagcaucuaacaca

SEQ ID NO: 26698 - RNA, 19 nt, Artificial Sequence
  Description of Artificial Sequence: Synthetic oligonucleotide
cucaacgugcacaucacug

SEQ ID NO: 26699 - RNA, 19 nt, Artificial Sequence
  Description of Artificial Sequence: Synthetic oligonucleotide
acauaaacucuagugagca

SEQ ID NO: 26700 - RNA, 19 nt, Artificial Sequence
  Description of Artificial Sequence: Synthetic oligonucleotide
cuagguacuauuuauuuua

SEQ ID NO: 26701 - RNA, 19 nt, Artificial Sequence
  Description of Artificial Sequence: Synthetic oligonucleotide
aaacggaagucaucuggug

SEQ ID NO: 26702 - RNA, 19 nt, Artificial Sequence
  Description of Artificial Sequence: Synthetic oligonucleotide
gaggucauggauaauggac

SEQ ID NO: 26703 - RNA, 19 nt, Artificial Sequence
  Description of Artificial Sequence: Synthetic oligonucleotide
cucucaggaucuuaugacc

SEQ ID NO: 26704 - RNA, 19 nt, Artificial Sequence
  Description of Artificial Sequence: Synthetic oligonucleotide
caucugcguacauagaaac

SEQ ID NO: 26705 - RNA, 19 nt, Artificial Sequence
  Description of Artificial Sequence: Synthetic oligonucleotide
acacauaaugaucuacaga

SEQ ID NO: 26706 - RNA, 19 nt, Artificial Sequence
  Description of Artificial Sequence: Synthetic oligonucleotide
cuauauugagaggagcagc

SEQ ID NO: 26707 - RNA, 19 nt, Artificial Sequence
  Description of Artificial Sequence: Synthetic oligonucleotide
uuugaacaaccccagccaa

SEQ ID NO: 26708 - RNA, 19 nt, Artificial Sequence
  Description of Artificial Sequence: Synthetic oligonucleotide
acucuagugagcaucuaac

SEQ ID NO: 26709 - RNA, 19 nt, Artificial Sequence
  Description of Artificial Sequence: Synthetic oligonucleotide
gggugugcuauauucaccg

SEQ ID NO: 26710 - RNA, 19 nt, Artificial Sequence
  Description of Artificial Sequence: Synthetic oligonucleotide
uccggcuaagaaacaaaag

SEQ ID NO: 26711 - RNA, 19 nt, Artificial Sequence
  Description of Artificial Sequence: Synthetic oligonucleotide
uguuuuguauaaugacaca

SEQ ID NO: 26712 - RNA, 19 nt, Artificial Sequence
  Description of Artificial Sequence: Synthetic oligonucleotide
aaaccgauuuucaacugug

SEQ ID NO: 26713 - RNA, 19 nt, Artificial Sequence
  Description of Artificial Sequence: Synthetic oligonucleotide
uaucaggucacaaucccua

SEQ ID NO: 26714 - RNA, 19 nt, Artificial Sequence
  Description of Artificial Sequence: Synthetic oligonucleotide
acaauaagauuuaaacugu

SEQ ID NO: 26715 - RNA, 19 nt, Artificial Sequence
  Description of Artificial Sequence: Synthetic oligonucleotide
agcagauacaaguuguuuu

SEQ ID NO: 26716 - RNA, 19 nt, Artificial Sequence
  Description of Artificial Sequence: Synthetic oligonucleotide
gguaucaccuuucccauag

SEQ ID NO: 26717 - RNA, 19 nt, Artificial Sequence
  Description of Artificial Sequence: Synthetic oligonucleotide
ugagaggagcagcuaaugu

SEQ ID NO: 26718 - RNA, 19 nt, Artificial Sequence
  Description of Artificial Sequence: Synthetic oligonucleotide
acaguaaaagguaaaugca

SEQ ID NO: 26719 - RNA, 19 nt, Artificial Sequence
  Description of Artificial Sequence: Synthetic oligonucleotide
ccuagagcaagcauaacag

SEQ ID NO: 26720 - RNA, 19 nt, Artificial Sequence
  Description of Artificial Sequence: Synthetic oligonucleotide
cagggauaaagcauccggc

SEQ ID NO: 26721 - RNA, 19 nt, Artificial Sequence
  Description of Artificial Sequence: Synthetic oligonucleotide
ccggcuaagaaacaaaagc

SEQ ID NO: 26722 - RNA, 19 nt, Artificial Sequence
  Description of Artificial Sequence: Synthetic oligonucleotide
gacauaaacucuagugagc

SEQ ID NO: 26723 - RNA, 19 nt, Artificial Sequence
  Description of Artificial Sequence: Synthetic oligonucleotide
caagcagcgagcccuagag

SEQ ID NO: 26724 - RNA, 19 nt, Artificial Sequence
  Description of Artificial Sequence: Synthetic oligonucleotide
uauucaccggggcaguuac

SEQ ID NO: 26725 - RNA, 19 nt, Artificial Sequence
  Description of Artificial Sequence: Synthetic oligonucleotide
cacauguuuuacgugacag

SEQ ID NO: 26726 - RNA, 19 nt, Artificial Sequence
  Description of Artificial Sequence: Synthetic oligonucleotide
uauaaacggaagucaucug

SEQ ID NO: 26727 - RNA, 19 nt, Artificial Sequence
  Description of Artificial Sequence: Synthetic oligonucleotide
agggauaaagcauccggcu

SEQ ID NO: 26728 - RNA, 19 nt, Artificial Sequence
  Description of Artificial Sequence: Synthetic oligonucleotide
aaccaacgaaguucggcug

SEQ ID NO: 26729 - RNA, 19 nt, Artificial Sequence
  Description of Artificial Sequence: Synthetic oligonucleotide
gaugcccuauguucauugg

SEQ ID NO: 26730 - RNA, 19 nt, Artificial Sequence
  Description of Artificial Sequence: Synthetic oligonucleotide
aaucccuauuauauguuga

SEQ ID NO: 26731 - RNA, 19 nt, Artificial Sequence
  Description of Artificial Sequence: Synthetic oligonucleotide
cugguuauauuaacugcac

SEQ ID NO: 26732 - RNA, 19 nt, Artificial Sequence
  Description of Artificial Sequence: Synthetic oligonucleotide
aaauugaagcaaaaugcua

SEQ ID NO: 26733 - RNA, 19 nt, Artificial Sequence
  Description of Artificial Sequence: Synthetic oligonucleotide
augcccuauguucauuggg

SEQ ID NO: 26734 - RNA, 19 nt, Artificial Sequence
  Description of Artificial Sequence: Synthetic oligonucleotide
caaucccuauuauauguug

SEQ ID NO: 26735 - RNA, 19 nt, Artificial Sequence
  Description of Artificial Sequence: Synthetic oligonucleotide
auaaggggaaccaccgugg

SEQ ID NO: 26736 - RNA, 19 nt, Artificial Sequence
  Description of Artificial Sequence: Synthetic oligonucleotide
gaaugcacauguuuuacgu

SEQ ID NO: 26737 - RNA, 19 nt, Artificial Sequence
  Description of Artificial Sequence: Synthetic oligonucleotide
agcgaugguggagauaagg

SEQ ID NO: 26738 - RNA, 19 nt, Artificial Sequence
  Description of Artificial Sequence: Synthetic oligonucleotide
uguuuagcugccgaucuga

SEQ ID NO: 26739 - RNA, 19 nt, Artificial Sequence
  Description of Artificial Sequence: Synthetic oligonucleotide
uucuacacuagcucucagu

SEQ ID NO: 26740 - RNA, 19 nt, Artificial Sequence
  Description of Artificial Sequence: Synthetic oligonucleotide
gaucuuaugaccacgcugu

SEQ ID NO: 26741 - RNA, 19 nt, Artificial Sequence
  Description of Artificial Sequence: Synthetic oligonucleotide
acguaauaaaaccucccaa

SEQ ID NO: 26742 - RNA, 19 nt, Artificial Sequence
  Description of Artificial Sequence: Synthetic oligonucleotide
acacaguaaaagguaaaug

SEQ ID NO: 26743 - RNA, 19 nt, Artificial Sequence
  Description of Artificial Sequence: Synthetic oligonucleotide
caaacauagggcauguuua

SEQ ID NO: 26744 - RNA, 19 nt, Artificial Sequence
  Description of Artificial Sequence: Synthetic oligonucleotide
ugggguauaaacggaaguc

SEQ ID NO: 26745 - RNA, 19 nt, Artificial Sequence
  Description of Artificial Sequence: Synthetic oligonucleotide
acuagguacuauuuauuuu

SEQ ID NO: 26746 - RNA, 19 nt, Artificial Sequence
  Description of Artificial Sequence: Synthetic oligonucleotide
uucguggcguaccaugugu

SEQ ID NO: 26747 - RNA, 19 nt, Artificial Sequence
  Description of Artificial Sequence: Synthetic oligonucleotide
auacccuacuuugaacaac

SEQ ID NO: 26748 - RNA, 19 nt, Artificial Sequence
  Description of Artificial Sequence: Synthetic oligonucleotide
ccuaucacaucccagugcc

SEQ ID NO: 26749 - RNA, 19 nt, Artificial Sequence
  Description of Artificial Sequence: Synthetic oligonucleotide
gcuaaugucauaggcgugg

SEQ ID NO: 26750 - RNA, 19 nt, Artificial Sequence
  Description of Artificial Sequence: Synthetic oligonucleotide
aucugcguacauagaaacc

SEQ ID NO: 26751 - RNA, 19 nt, Artificial Sequence
  Description of Artificial Sequence: Synthetic oligonucleotide
uggugauguaugcugcacu

SEQ ID NO: 26752 - RNA, 19 nt, Artificial Sequence
  Description of Artificial Sequence: Synthetic oligonucleotide
ggaucuuaugaccacgcug

SEQ ID NO: 26753 - RNA, 19 nt, Artificial Sequence
  Description of Artificial Sequence: Synthetic oligonucleotide
uuaaacuaaugugguccag

SEQ ID NO: 26754 - RNA, 19 nt, Artificial Sequence
  Description of Artificial Sequence: Synthetic oligonucleotide
uggcguaccaugugugucc

SEQ ID NO: 26755 - RNA, 19 nt, Artificial Sequence
  Description of Artificial Sequence: Synthetic oligonucleotide
caugguaagucauccgguc

SEQ ID NO: 26756 - RNA, 19 nt, Artificial Sequence
  Description of Artificial Sequence: Synthetic oligonucleotide
guauaaacggaagucaucu

SEQ ID NO: 26757 - RNA, 19 nt, Artificial Sequence
  Description of Artificial Sequence: Synthetic oligonucleotide
uccguagucugucuuuggu

SEQ ID NO: 26758 - RNA, 19 nt, Artificial Sequence
  Description of Artificial Sequence: Synthetic oligonucleotide
ugaaaccaacgaaguucgg

SEQ ID NO: 26759 - RNA, 19 nt, Artificial Sequence
  Description of Artificial Sequence: Synthetic oligonucleotide
ggauuaucuaauacaacug

SEQ ID NO: 26760 - RNA, 19 nt, Artificial Sequence
  Description of Artificial Sequence: Synthetic oligonucleotide
agcuucuuaagugaauaga

SEQ ID NO: 26761 - RNA, 19 nt, Artificial Sequence
  Description of Artificial Sequence: Synthetic oligonucleotide
auccuaccuaguuaguggu

SEQ ID NO: 26762 - RNA, 19 nt, Artificial Sequence
  Description of Artificial Sequence: Synthetic oligonucleotide
cuggccuguguuuggagcc

SEQ ID NO: 26763 - RNA, 19 nt, Artificial Sequence
  Description of Artificial Sequence: Synthetic oligonucleotide
caaugguugaaaccaacga

SEQ ID NO: 26764 - RNA, 19 nt, Artificial Sequence
  Description of Artificial Sequence: Synthetic oligonucleotide
acaaaccgauuuucaacug

SEQ ID NO: 26765 - RNA, 19 nt, Artificial Sequence
  Description of Artificial Sequence: Synthetic oligonucleotide
ugcugguauugacagguaa

SEQ ID NO: 26766 - RNA, 19 nt, Artificial Sequence
  Description of Artificial Sequence: Synthetic oligonucleotide
ugcguacauagaaaccuuc

SEQ ID NO: 26767 - RNA, 19 nt, Artificial Sequence
  Description of Artificial Sequence: Synthetic oligonucleotide
gaaguuagaaugauaaauu

SEQ ID NO: 26768 - RNA, 19 nt, Artificial Sequence
  Description of Artificial Sequence: Synthetic oligonucleotide
gaguagugagagucacagg

SEQ ID NO: 26769 - RNA, 19 nt, Artificial Sequence
  Description of Artificial Sequence: Synthetic oligonucleotide
cuguugacaagaugcccgc

SEQ ID NO: 26770 - RNA, 19 nt, Artificial Sequence
  Description of Artificial Sequence: Synthetic oligonucleotide
uugacuugguuaacuuuaa

SEQ ID NO: 26771 - RNA, 19 nt, Artificial Sequence
  Description of Artificial Sequence: Synthetic oligonucleotide
uccugcuaaacagaaaguu

SEQ ID NO: 26772 - RNA, 19 nt, Artificial Sequence
  Description of Artificial Sequence: Synthetic oligonucleotide
uuccugcuaaacagaaagu

SEQ ID NO: 26773 - RNA, 19 nt, Artificial Sequence
  Description of Artificial Sequence: Synthetic oligonucleotide
aagguaaaugcaggccaag

SEQ ID NO: 26774 - RNA, 19 nt, Artificial Sequence
  Description of Artificial Sequence: Synthetic oligonucleotide
ccagacgucacagaggacg

SEQ ID NO: 26775 - RNA, 19 nt, Artificial Sequence
  Description of Artificial Sequence: Synthetic oligonucleotide
guaacaucaacaggcgcug

SEQ ID NO: 26776 - RNA, 19 nt, Artificial Sequence
  Description of Artificial Sequence: Synthetic oligonucleotide
uaucacaucccagugccuc

SEQ ID NO: 26777 - RNA, 19 nt, Artificial Sequence
  Description of Artificial Sequence: Synthetic oligonucleotide
cuuacuggguuucuugaca

SEQ ID NO: 26778 - RNA, 19 nt, Artificial Sequence
  Description of Artificial Sequence: Synthetic oligonucleotide
caugagcccuuccaguagc

SEQ ID NO: 26779 - RNA, 19 nt, Artificial Sequence
  Description of Artificial Sequence: Synthetic oligonucleotide
cuuacuaacuaacguaaua

SEQ ID NO: 26780 - RNA, 19 nt, Artificial Sequence
  Description of Artificial Sequence: Synthetic oligonucleotide
aggucauggauaauggacu

SEQ ID NO: 26781 - RNA, 19 nt, Artificial Sequence
  Description of Artificial Sequence: Synthetic oligonucleotide
acaugucucaacgugcaca

SEQ ID NO: 26782 - RNA, 19 nt, Artificial Sequence
  Description of Artificial Sequence: Synthetic oligonucleotide
cagggugugcuauauucac

SEQ ID NO: 26783 - RNA, 19 nt, Artificial Sequence
  Description of Artificial Sequence: Synthetic oligonucleotide
uuccuaagcuuuauauaua

SEQ ID NO: 26784 - RNA, 19 nt, Artificial Sequence
  Description of Artificial Sequence: Synthetic oligonucleotide
gggaaaugaauacacagua

SEQ ID NO: 26785 - RNA, 19 nt, Artificial Sequence
  Description of Artificial Sequence: Synthetic oligonucleotide
uuucuaccguauguacagg

SEQ ID NO: 26786 - RNA, 19 nt, Artificial Sequence
  Description of Artificial Sequence: Synthetic oligonucleotide
cuaccuaguuagugguuag

SEQ ID NO: 26787 - RNA, 19 nt, Artificial Sequence
  Description of Artificial Sequence: Synthetic oligonucleotide
uugaacaaccccagccaaa

SEQ ID NO: 26788 - RNA, 19 nt, Artificial Sequence
  Description of Artificial Sequence: Synthetic oligonucleotide
auuaucuaauacaacuguu

SEQ ID NO: 26789 - RNA, 19 nt, Artificial Sequence
  Description of Artificial Sequence: Synthetic oligonucleotide
cacauacccuacuuugaac

SEQ ID NO: 26790 - RNA, 19 nt, Artificial Sequence
  Description of Artificial Sequence: Synthetic oligonucleotide
uccgaaugagacagcuugu

SEQ ID NO: 26791 - RNA, 19 nt, Artificial Sequence
  Description of Artificial Sequence: Synthetic oligonucleotide
guugaaugcacauguuuua

SEQ ID NO: 26792 - RNA, 19 nt, Artificial Sequence
  Description of Artificial Sequence: Synthetic oligonucleotide
cuccuaagucaguugcagc

SEQ ID NO: 26793 - RNA, 19 nt, Artificial Sequence
  Description of Artificial Sequence: Synthetic oligonucleotide
gaggauuaucuaauacaac

SEQ ID NO: 26794 - RNA, 19 nt, Artificial Sequence
  Description of Artificial Sequence: Synthetic oligonucleotide
ucucaacgugcacaucacu

SEQ ID NO: 26795 - RNA, 19 nt, Artificial Sequence
  Description of Artificial Sequence: Synthetic oligonucleotide
agcuuuugguuucuaccgu

SEQ ID NO: 26796 - RNA, 19 nt, Artificial Sequence
  Description of Artificial Sequence: Synthetic oligonucleotide
cauugggcugguuauauua

SEQ ID NO: 26797 - RNA, 19 nt, Artificial Sequence
  Description of Artificial Sequence: Synthetic oligonucleotide
cuaaugucauaggcguggg

SEQ ID NO: 26798 - RNA, 19 nt, Artificial Sequence
  Description of Artificial Sequence: Synthetic oligonucleotide
cacaaucccuauuauaugu

SEQ ID NO: 26799 - RNA, 19 nt, Artificial Sequence
  Description of Artificial Sequence: Synthetic oligonucleotide
ugucugaaccaugaaggau

SEQ ID NO: 26800 - RNA, 19 nt, Artificial Sequence
  Description of Artificial Sequence: Synthetic oligonucleotide
gguugacugggguagucag

SEQ ID NO: 26801 - RNA, 19 nt, Artificial Sequence
  Description of Artificial Sequence: Synthetic oligonucleotide
augaagcaugcagauagcu

SEQ ID NO: 26802 - RNA, 19 nt, Artificial Sequence
  Description of Artificial Sequence: Synthetic oligonucleotide
uucauugggcugguuauau

SEQ ID NO: 26803 - RNA, 19 nt, Artificial Sequence
  Description of Artificial Sequence: Synthetic oligonucleotide
cucuagugagcaucuaaca

SEQ ID NO: 26804 - RNA, 19 nt, Artificial Sequence
  Description of Artificial Sequence: Synthetic oligonucleotide
uuacaggaugcccuauguu

SEQ ID NO: 26805 - RNA, 19 nt, Artificial Sequence
  Description of Artificial Sequence: Synthetic oligonucleotide
uguccguagucugucuuug

SEQ ID NO: 26806 - RNA, 19 nt, Artificial Sequence
  Description of Artificial Sequence: Synthetic oligonucleotide
uaguaauacagugcuggua

SEQ ID NO: 26807 - RNA, 19 nt, Artificial Sequence
  Description of Artificial Sequence: Synthetic oligonucleotide
auucuacacuagcucucag

SEQ ID NO: 26808 - RNA, 19 nt, Artificial Sequence
  Description of Artificial Sequence: Synthetic oligonucleotide
cuuugcccgagacaccaac

SEQ ID NO: 26809 - RNA, 19 nt, Artificial Sequence
  Description of Artificial Sequence: Synthetic oligonucleotide
ggucauggauaauggacug

SEQ ID NO: 26810 - RNA, 19 nt, Artificial Sequence
  Description of Artificial Sequence: Synthetic oligonucleotide
ugaauggaguagugagagu

SEQ ID NO: 26811 - RNA, 19 nt, Artificial Sequence
  Description of Artificial Sequence: Synthetic oligonucleotide
guagugagagucacaggug

SEQ ID NO: 26812 - RNA, 19 nt, Artificial Sequence
  Description of Artificial Sequence: Synthetic oligonucleotide
ggugauguaugcugcacuc

SEQ ID NO: 26813 - RNA, 19 nt, Artificial Sequence
  Description of Artificial Sequence: Synthetic oligonucleotide
auguuacaugacaccuugc

SEQ ID NO: 26814 - RNA, 19 nt, Artificial Sequence
  Description of Artificial Sequence: Synthetic oligonucleotide
guuacaugacaccuugccu

SEQ ID NO: 26815 - RNA, 19 nt, Artificial Sequence
  Description of Artificial Sequence: Synthetic oligonucleotide
uuuagcugccgaucugaua

SEQ ID NO: 26816 - RNA, 19 nt, Artificial Sequence
  Description of Artificial Sequence: Synthetic oligonucleotide
guucaucggagaugugaug

SEQ ID NO: 26817 - RNA, 19 nt, Artificial Sequence
  Description of Artificial Sequence: Synthetic oligonucleotide
uguguccguagucugucuu

SEQ ID NO: 26818 - RNA, 19 nt, Artificial Sequence
  Description of Artificial Sequence: Synthetic oligonucleotide
ggaugcccuauguucauug

SEQ ID NO: 26819 - RNA, 19 nt, Artificial Sequence
  Description of Artificial Sequence: Synthetic oligonucleotide
cuucuuaagugaauagagu

SEQ ID NO: 26820 - RNA, 19 nt, Artificial Sequence
  Description of Artificial Sequence: Synthetic oligonucleotide
aggaucuuaugaccacgcu

SEQ ID NO: 26821 - RNA, 19 nt, Artificial Sequence
  Description of Artificial Sequence: Synthetic oligonucleotide
ucgcuccuguuuacaauga

SEQ ID NO: 26822 - RNA, 19 nt, Artificial Sequence
  Description of Artificial Sequence: Synthetic oligonucleotide
cacacauacccuacuuuga

SEQ ID NO: 26823 - RNA, 19 nt, Artificial Sequence
  Description of Artificial Sequence: Synthetic oligonucleotide
guaucaccuuucccauagg

SEQ ID NO: 26824 - RNA, 19 nt, Artificial Sequence
  Description of Artificial Sequence: Synthetic oligonucleotide
gugcuauauucaccggggc

SEQ ID NO: 26825 - RNA, 19 nt, Artificial Sequence
  Description of Artificial Sequence: Synthetic oligonucleotide
accguauguacagggauaa

SEQ ID NO: 26826 - RNA, 19 nt, Artificial Sequence
  Description of Artificial Sequence: Synthetic oligonucleotide
ugauggcguaaagaggauc

SEQ ID NO: 26827 - RNA, 19 nt, Artificial Sequence
  Description of Artificial Sequence: Synthetic oligonucleotide
acguuauauugaauggagu

SEQ ID NO: 26828 - RNA, 19 nt, Artificial Sequence
  Description of Artificial Sequence: Synthetic oligonucleotide
aaugcaggccaagcagcga

SEQ ID NO: 26829 - RNA, 19 nt, Artificial Sequence
  Description of Artificial Sequence: Synthetic oligonucleotide
agguauuuugauguuugua

SEQ ID NO: 26830 - RNA, 19 nt, Artificial Sequence
  Description of Artificial Sequence: Synthetic oligonucleotide
ugcaagguauuuugauguu

SEQ ID NO: 26831 - RNA, 19 nt, Artificial Sequence
  Description of Artificial Sequence: Synthetic oligonucleotide
uugcugcugcugcugcugc

SEQ ID NO: 26832 - RNA, 19 nt, Artificial Sequence
  Description of Artificial Sequence: Synthetic oligonucleotide
cagaggacguuauauugaa

SEQ ID NO: 26833 - RNA, 19 nt, Artificial Sequence
  Description of Artificial Sequence: Synthetic oligonucleotide
cuuggggcaagaaaggcau

SEQ ID NO: 26834 - RNA, 19 nt, Artificial Sequence
  Description of Artificial Sequence: Synthetic oligonucleotide
ggugugcuauauucaccgg

SEQ ID NO: 26835 - RNA, 19 nt, Artificial Sequence
  Description of Artificial Sequence: Synthetic oligonucleotide
acguggcuuuauuauugca

SEQ ID NO: 26836 - RNA, 19 nt, Artificial Sequence
  Description of Artificial Sequence: Synthetic oligonucleotide
ggguuugacauagucccag

SEQ ID NO: 26837 - RNA, 19 nt, Artificial Sequence
  Description of Artificial Sequence: Synthetic oligonucleotide
cugcuaguguuuacaauaa

SEQ ID NO: 26838 - RNA, 19 nt, Artificial Sequence
  Description of Artificial Sequence: Synthetic oligonucleotide
ggugucguagcagccgugg

SEQ ID NO: 26839 - RNA, 19 nt, Artificial Sequence
  Description of Artificial Sequence: Synthetic oligonucleotide
uuaaaccauccaccuugua

SEQ ID NO: 26840 - RNA, 19 nt, Artificial Sequence
  Description of Artificial Sequence: Synthetic oligonucleotide
cuuagguggucaggccugg

SEQ ID NO: 26841 - RNA, 19 nt, Artificial Sequence
  Description of Artificial Sequence: Synthetic oligonucleotide
auugagaggagcagcuaau

SEQ ID NO: 26842 - RNA, 19 nt, Artificial Sequence
  Description of Artificial Sequence: Synthetic oligonucleotide
uaccuaguuagugguuaga

SEQ ID NO: 26843 - RNA, 19 nt, Artificial Sequence
  Description of Artificial Sequence: Synthetic oligonucleotide
uaagucaguugcagccuuu

SEQ ID NO: 26844 - RNA, 19 nt, Artificial Sequence
  Description of Artificial Sequence: Synthetic oligonucleotide
ugcccgcaaugguugaaac

SEQ ID NO: 26845 - RNA, 19 nt, Artificial Sequence
  Description of Artificial Sequence: Synthetic oligonucleotide
cagguuaaaccauccaccu

SEQ ID NO: 26846 - RNA, 19 nt, Artificial Sequence
  Description of Artificial Sequence: Synthetic oligonucleotide
cauacccuacuuugaacaa

SEQ ID NO: 26847 - RNA, 19 nt, Artificial Sequence
  Description of Artificial Sequence: Synthetic oligonucleotide
cacaacguggcuuuauuau

SEQ ID NO: 26848 - RNA, 19 nt, Artificial Sequence
  Description of Artificial Sequence: Synthetic oligonucleotide
cccuacuuugaacaacccc

SEQ ID NO: 26849 - RNA, 19 nt, Artificial Sequence
  Description of Artificial Sequence: Synthetic oligonucleotide
guugcugcugcugcugcug

SEQ ID NO: 26850 - RNA, 19 nt, Artificial Sequence
  Description of Artificial Sequence: Synthetic oligonucleotide
cacgcuguagccugaggga

SEQ ID NO: 26851 - RNA, 19 nt, Artificial Sequence
  Description of Artificial Sequence: Synthetic oligonucleotide
gggguauaaacggaaguca

SEQ ID NO: 26852 - RNA, 19 nt, Artificial Sequence
  Description of Artificial Sequence: Synthetic oligonucleotide
agcugccgaucugauaaag

SEQ ID NO: 26853 - RNA, 19 nt, Artificial Sequence
  Description of Artificial Sequence: Synthetic oligonucleotide
cucaugcucauugcagcug

SEQ ID NO: 26854 - RNA, 19 nt, Artificial Sequence
  Description of Artificial Sequence: Synthetic oligonucleotide
gguauaaacggaagucauc

SEQ ID NO: 26855 - RNA, 19 nt, Artificial Sequence
  Description of Artificial Sequence: Synthetic oligonucleotide
gagcccuagagcaagcaua

SEQ ID NO: 26856 - RNA, 19 nt, Artificial Sequence
  Description of Artificial Sequence: Synthetic oligonucleotide
uguugacaagaugcccgca

SEQ ID NO: 26857 - RNA, 19 nt, Artificial Sequence
  Description of Artificial Sequence: Synthetic oligonucleotide
agguuaaaccauccaccuu

SEQ ID NO: 26858 - RNA, 19 nt, Artificial Sequence
  Description of Artificial Sequence: Synthetic oligonucleotide
ggacguuauauugaaugga

SEQ ID NO: 26859 - RNA, 19 nt, Artificial Sequence
  Description of Artificial Sequence: Synthetic oligonucleotide
aagucaguugcagccuuuu

SEQ ID NO: 26860 - RNA, 19 nt, Artificial Sequence
  Description of Artificial Sequence: Synthetic oligonucleotide
ccuagaacuguuuuguaua

SEQ ID NO: 26861 - RNA, 19 nt, Artificial Sequence
  Description of Artificial Sequence: Synthetic oligonucleotide
cuucguggcguaccaugug

SEQ ID NO: 26862 - RNA, 19 nt, Artificial Sequence
  Description of Artificial Sequence: Synthetic oligonucleotide
auccggcuaagaaacaaaa

SEQ ID NO: 26863 - RNA, 19 nt, Artificial Sequence
  Description of Artificial Sequence: Synthetic oligonucleotide
ggaauguguugccuuccug

SEQ ID NO: 26864 - RNA, 19 nt, Artificial Sequence
  Description of Artificial Sequence: Synthetic oligonucleotide
gguuucuaccguauguaca

SEQ ID NO: 26865 - RNA, 19 nt, Artificial Sequence
  Description of Artificial Sequence: Synthetic oligonucleotide
cagauguuacaugacaccu

SEQ ID NO: 26866 - RNA, 19 nt, Artificial Sequence
  Description of Artificial Sequence: Synthetic oligonucleotide
ggcauguuuacauggacau

SEQ ID NO: 26867 - RNA, 19 nt, Artificial Sequence
  Description of Artificial Sequence: Synthetic oligonucleotide
uguugccuuccugcuaaac

SEQ ID NO: 26868 - RNA, 19 nt, Artificial Sequence
  Description of Artificial Sequence: Synthetic oligonucleotide
gugccgauugaggugguac

SEQ ID NO: 26869 - RNA, 19 nt, Artificial Sequence
  Description of Artificial Sequence: Synthetic oligonucleotide
gccuaucacaucccagugc

SEQ ID NO: 26870 - RNA, 19 nt, Artificial Sequence
  Description of Artificial Sequence: Synthetic oligonucleotide
gcugccgaucugauaaagg

SEQ ID NO: 26871 - RNA, 19 nt, Artificial Sequence
  Description of Artificial Sequence: Synthetic oligonucleotide
ggcgcugauugggagagag

SEQ ID NO: 26872 - RNA, 19 nt, Artificial Sequence
  Description of Artificial Sequence: Synthetic oligonucleotide
uuggagccugccugugcgc

SEQ ID NO: 26873 - RNA, 19 nt, Artificial Sequence
  Description of Artificial Sequence: Synthetic oligonucleotide
caaaccgauuuucaacugu

SEQ ID NO: 26874 - RNA, 19 nt, Artificial Sequence
  Description of Artificial Sequence: Synthetic oligonucleotide
uccuaccuaguuagugguu

SEQ ID NO: 26875 - RNA, 19 nt, Artificial Sequence
  Description of Artificial Sequence: Synthetic oligonucleotide
acaaucccuauuauauguu

SEQ ID NO: 26876 - RNA, 19 nt, Artificial Sequence
  Description of Artificial Sequence: Synthetic oligonucleotide
ucguagcagccguggaggu

SEQ ID NO: 26877 - RNA, 19 nt, Artificial Sequence
  Description of Artificial Sequence: Synthetic oligonucleotide
cacuagguacuauuuauuu

SEQ ID NO: 26878 - RNA, 19 nt, Artificial Sequence
  Description of Artificial Sequence: Synthetic oligonucleotide
agguugacugggguaguca

SEQ ID NO: 26879 - RNA, 19 nt, Artificial Sequence
  Description of Artificial Sequence: Synthetic oligonucleotide
acacuagguacuauuuauu

SEQ ID NO: 26880 - RNA, 19 nt, Artificial Sequence
  Description of Artificial Sequence: Synthetic oligonucleotide
agcccuagagcaagcauaa

SEQ ID NO: 26881 - RNA, 19 nt, Artificial Sequence
  Description of Artificial Sequence: Synthetic oligonucleotide
cugugacuggguuugacau

SEQ ID NO: 26882 - RNA, 19 nt, Artificial Sequence
  Description of Artificial Sequence: Synthetic oligonucleotide
gugaugccuccuucaugag

SEQ ID NO: 26883 - RNA, 19 nt, Artificial Sequence
  Description of Artificial Sequence: Synthetic oligonucleotide
cuugaagcgcugguuacaa

SEQ ID NO: 26884 - RNA, 19 nt, Artificial Sequence
  Description of Artificial Sequence: Synthetic oligonucleotide
ugucagauuugaggauuau

SEQ ID NO: 26885 - RNA, 19 nt, Artificial Sequence
  Description of Artificial Sequence: Synthetic oligonucleotide
ggccuaucacaucccagug

SEQ ID NO: 26886 - RNA, 19 nt, Artificial Sequence
  Description of Artificial Sequence: Synthetic oligonucleotide
cacaugucucaacgugcac

SEQ ID NO: 26887 - RNA, 19 nt, Artificial Sequence
  Description of Artificial Sequence: Synthetic oligonucleotide
agcuaaugucauaggcgug

SEQ ID NO: 26888 - RNA, 19 nt, Artificial Sequence
  Description of Artificial Sequence: Synthetic oligonucleotide
cccgcaaugguugaaacca

SEQ ID NO: 26889 - RNA, 19 nt, Artificial Sequence
  Description of Artificial Sequence: Synthetic oligonucleotide
cuuugcaauggccuacccu

SEQ ID NO: 26890 - RNA, 19 nt, Artificial Sequence
  Description of Artificial Sequence: Synthetic oligonucleotide
auaaagcauccggcuaaga

SEQ ID NO: 26891 - RNA, 19 nt, Artificial Sequence
  Description of Artificial Sequence: Synthetic oligonucleotide
cuaaugugguccagugaua

SEQ ID NO: 26892 - RNA, 19 nt, Artificial Sequence
  Description of Artificial Sequence: Synthetic oligonucleotide
auauugagaggagcagcua

SEQ ID NO: 26893 - RNA, 19 nt, Artificial Sequence
  Description of Artificial Sequence: Synthetic oligonucleotide
caggcgugguucuucuuga

SEQ ID NO: 26894 - RNA, 19 nt, Artificial Sequence
  Description of Artificial Sequence: Synthetic oligonucleotide
agcgagcccuagagcaagc

SEQ ID NO: 26895 - RNA, 19 nt, Artificial Sequence
  Description of Artificial Sequence: Synthetic oligonucleotide
ccguagucugucuuuggug

SEQ ID NO: 26896 - RNA, 19 nt, Artificial Sequence
  Description of Artificial Sequence: Synthetic oligonucleotide
cagcgagcccuagagcaag

SEQ ID NO: 26897 - RNA, 19 nt, Artificial Sequence
  Description of Artificial Sequence: Synthetic oligonucleotide
ccucauugcuauauugaga

SEQ ID NO: 26898 - RNA, 19 nt, Artificial Sequence
  Description of Artificial Sequence: Synthetic oligonucleotide
cugcugcugcugcugcugc

SEQ ID NO: 26899 - RNA, 19 nt, Artificial Sequence
  Description of Artificial Sequence: Synthetic oligonucleotide
cccuauguucauugggcug

SEQ ID NO: 26900 - RNA, 19 nt, Artificial Sequence
  Description of Artificial Sequence: Synthetic oligonucleotide
ggugguacacaucccggaa

SEQ ID NO: 26901 - RNA, 19 nt, Artificial Sequence
  Description of Artificial Sequence: Synthetic oligonucleotide
gacacaacguggcuuuauu

SEQ ID NO: 26902 - RNA, 19 nt, Artificial Sequence
  Description of Artificial Sequence: Synthetic oligonucleotide
ccagcgaugguggagauaa

SEQ ID NO: 26903 - RNA, 19 nt, Artificial Sequence
  Description of Artificial Sequence: Synthetic oligonucleotide
aucuuaugaccacgcugua

SEQ ID NO: 26904 - RNA, 19 nt, Artificial Sequence
  Description of Artificial Sequence: Synthetic oligonucleotide
gcccgcaaugguugaaacc

SEQ ID NO: 26905 - RNA, 19 nt, Artificial Sequence
  Description of Artificial Sequence: Synthetic oligonucleotide
agcaugcagauagcugccu

SEQ ID NO: 26906 - RNA, 19 nt, Artificial Sequence
  Description of Artificial Sequence: Synthetic oligonucleotide
ccuauuauauguugaaguu

SEQ ID NO: 26907 - RNA, 19 nt, Artificial Sequence
  Description of Artificial Sequence: Synthetic oligonucleotide
acgcuguagccugagggaa

SEQ ID NO: 26908 - RNA, 19 nt, Artificial Sequence
  Description of Artificial Sequence: Synthetic oligonucleotide
cuacacuagcucucagucu

SEQ ID NO: 26909 - RNA, 19 nt, Artificial Sequence
  Description of Artificial Sequence: Synthetic oligonucleotide
gcuuagguggucaggccug

SEQ ID NO: 26910 - RNA, 19 nt, Artificial Sequence
  Description of Artificial Sequence: Synthetic oligonucleotide
ugcugcugcugcugcugcu

SEQ ID NO: 26911 - RNA, 19 nt, Artificial Sequence
  Description of Artificial Sequence: Synthetic oligonucleotide
uagcugccgaucugauaaa

SEQ ID NO: 26912 - RNA, 19 nt, Artificial Sequence
  Description of Artificial Sequence: Synthetic oligonucleotide
gcgcagaccugacuucucc

SEQ ID NO: 26913 - RNA, 19 nt, Artificial Sequence
  Description of Artificial Sequence: Synthetic oligonucleotide
cgaaguucggcugcugucc

SEQ ID NO: 26914 - RNA, 19 nt, Artificial Sequence
  Description of Artificial Sequence: Synthetic oligonucleotide
ggcguaccauguguguccg

SEQ ID NO: 26915 - RNA, 19 nt, Artificial Sequence
  Description of Artificial Sequence: Synthetic oligonucleotide
ccucacaugguaagucauc

SEQ ID NO: 26916 - RNA, 19 nt, Artificial Sequence
  Description of Artificial Sequence: Synthetic oligonucleotide
ggguuuagaacuucagguu

SEQ ID NO: 26917 - RNA, 19 nt, Artificial Sequence
  Description of Artificial Sequence: Synthetic oligonucleotide
ggcgugguucuucuugaca

SEQ ID NO: 26918 - RNA, 19 nt, Artificial Sequence
  Description of Artificial Sequence: Synthetic oligonucleotide
gucggugccuucaacacau

SEQ ID NO: 26919 - RNA, 19 nt, Artificial Sequence
  Description of Artificial Sequence: Synthetic oligonucleotide
agcacaccuuaggagggaa

SEQ ID NO: 26920 - RNA, 19 nt, Artificial Sequence
  Description of Artificial Sequence: Synthetic oligonucleotide
ccgaaugagacagcuugug

SEQ ID NO: 26921 - RNA, 19 nt, Artificial Sequence
  Description of Artificial Sequence: Synthetic oligonucleotide
agaggacguuauauugaau

SEQ ID NO: 26922 - RNA, 19 nt, Artificial Sequence
  Description of Artificial Sequence: Synthetic oligonucleotide
ccgucggugccuucaacac

SEQ ID NO: 26923 - RNA, 19 nt, Artificial Sequence
  Description of Artificial Sequence: Synthetic oligonucleotide
cuccuucaugagaccucac

SEQ ID NO: 26924 - RNA, 19 nt, Artificial Sequence
  Description of Artificial Sequence: Synthetic oligonucleotide
auguaucuauuuacucaua

SEQ ID NO: 26925 - RNA, 19 nt, Artificial Sequence
  Description of Artificial Sequence: Synthetic oligonucleotide
gugucguagcagccgugga

SEQ ID NO: 26926 - RNA, 19 nt, Artificial Sequence
  Description of Artificial Sequence: Synthetic oligonucleotide
gcacauguuuuacgugaca

SEQ ID NO: 26927 - RNA, 19 nt, Artificial Sequence
  Description of Artificial Sequence: Synthetic oligonucleotide
gcuaaacagaaaguuccua

SEQ ID NO: 26928 - RNA, 19 nt, Artificial Sequence
  Description of Artificial Sequence: Synthetic oligonucleotide
gcuaacaggguuucugauu

SEQ ID NO: 26929 - RNA, 19 nt, Artificial Sequence
  Description of Artificial Sequence: Synthetic oligonucleotide
acacuagcucucagucugu

SEQ ID NO: 26930 - RNA, 19 nt, Artificial Sequence
  Description of Artificial Sequence: Synthetic oligonucleotide
gguucaucggagaugugau

SEQ ID NO: 26931 - RNA, 19 nt, Artificial Sequence
  Description of Artificial Sequence: Synthetic oligonucleotide
gcugcugcugcugcugcug

SEQ ID NO: 26932 - RNA, 19 nt, Artificial Sequence
  Description of Artificial Sequence: Synthetic oligonucleotide
ccgauuuucaacuguggau

SEQ ID NO: 26933 - RNA, 19 nt, Artificial Sequence
  Description of Artificial Sequence: Synthetic oligonucleotide
ggguauaaacggaagucau

SEQ ID NO: 26934 - RNA, 19 nt, Artificial Sequence
  Description of Artificial Sequence: Synthetic oligonucleotide
ugcugcugcugcugcuguu

SEQ ID NO: 26935 - RNA, 19 nt, Artificial Sequence
  Description of Artificial Sequence: Synthetic oligonucleotide
ggcguaaagaggaucugau

SEQ ID NO: 26936 - RNA, 19 nt, Artificial Sequence
  Description of Artificial Sequence: Synthetic oligonucleotide
ggguuuucuuugcccgaga

SEQ ID NO: 26937 - RNA, 19 nt, Artificial Sequence
  Description of Artificial Sequence: Synthetic oligonucleotide
cugcguacauagaaaccuu

SEQ ID NO: 26938 - RNA, 19 nt, Artificial Sequence
  Description of Artificial Sequence: Synthetic oligonucleotide
cuaucacaucccagugccu

SEQ ID NO: 26939 - RNA, 19 nt, Artificial Sequence
  Description of Artificial Sequence: Synthetic oligonucleotide
guguccguagucugucuuu

SEQ ID NO: 26940 - RNA, 19 nt, Artificial Sequence
  Description of Artificial Sequence: Synthetic oligonucleotide
aggaugcccuauguucauu

SEQ ID NO: 26941 - RNA, 19 nt, Artificial Sequence
  Description of Artificial Sequence: Synthetic oligonucleotide
ugggguagucaggguuaaa

SEQ ID NO: 26942 - RNA, 19 nt, Artificial Sequence
  Description of Artificial Sequence: Synthetic oligonucleotide
gcccuauguucauugggcu

SEQ ID NO: 26943 - RNA, 19 nt, Artificial Sequence
  Description of Artificial Sequence: Synthetic oligonucleotide
gcuccuguuuacaaugaau

SEQ ID NO: 26944 - RNA, 19 nt, Artificial Sequence
  Description of Artificial Sequence: Synthetic oligonucleotide
ggacccacuggccuguguu

SEQ ID NO: 26945 - RNA, 19 nt, Artificial Sequence
  Description of Artificial Sequence: Synthetic oligonucleotide
gcguaaagaggaucugauu

SEQ ID NO: 26946 - RNA, 19 nt, Artificial Sequence
  Description of Artificial Sequence: Synthetic oligonucleotide
ccgauugaggugguacaca

SEQ ID NO: 26947 - RNA, 19 nt, Artificial Sequence
  Description of Artificial Sequence: Synthetic oligonucleotide
ccuucguggcguaccaugu

SEQ ID NO: 26948 - RNA, 19 nt, Artificial Sequence
  Description of Artificial Sequence: Synthetic oligonucleotide
cccagccaaauugaagcaa

SEQ ID NO: 26949 - RNA, 19 nt, Artificial Sequence
  Description of Artificial Sequence: Synthetic oligonucleotide
ccuaagucaguugcagccu

SEQ ID NO: 26950 - RNA, 19 nt, Artificial Sequence
  Description of Artificial Sequence: Synthetic oligonucleotide
gcgagcccuagagcaagca

SEQ ID NO: 26951 - RNA, 19 nt, Artificial Sequence
  Description of Artificial Sequence: Synthetic oligonucleotide
cugcugcugcugcugcugu

SEQ ID NO: 26952 - RNA, 19 nt, Artificial Sequence
  Description of Artificial Sequence: Synthetic oligonucleotide
ccgcaaugguugaaaccaa

SEQ ID NO: 26953 - RNA, 19 nt, Artificial Sequence
  Description of Artificial Sequence: Synthetic oligonucleotide
cgucggugccuucaacaca

SEQ ID NO: 26954 - RNA, 19 nt, Artificial Sequence
  Description of Artificial Sequence: Synthetic oligonucleotide
gcccuagagcaagcauaac

SEQ ID NO: 26955 - RNA, 19 nt, Artificial Sequence
  Description of Artificial Sequence: Synthetic oligonucleotide
gccugccugugcgcagacc

SEQ ID NO: 26956 - RNA, 19 nt, Artificial Sequence
  Description of Artificial Sequence: Synthetic oligonucleotide
cguggagguuuggcacagg

SEQ ID NO: 26957 - RNA, 19 nt, Artificial Sequence
  Description of Artificial Sequence: Synthetic oligonucleotide
ccguauguacagggauaaa

SEQ ID NO: 26958 - RNA, 19 nt, Artificial Sequence
  Description of Artificial Sequence: Synthetic oligonucleotide
aauauuaugacccacaaga

SEQ ID NO: 26959 - RNA, 19 nt, Artificial Sequence
  Description of Artificial Sequence: Synthetic oligonucleotide
aaugggaguuaacagaggc

SEQ ID NO: 26960 - RNA, 19 nt, Artificial Sequence
  Description of Artificial Sequence: Synthetic oligonucleotide
aucaauuccaucuauuggc

SEQ ID NO: 26961 - RNA, 19 nt, Artificial Sequence
  Description of Artificial Sequence: Synthetic oligonucleotide
ucuauuggcucacagaucc

SEQ ID NO: 26962 - RNA, 19 nt, Artificial Sequence
  Description of Artificial Sequence: Synthetic oligonucleotide
ucaauaaacaaacuugcug

SEQ ID NO: 26963 - RNA, 19 nt, Artificial Sequence
  Description of Artificial Sequence: Synthetic oligonucleotide
uacgucaguauucagaucc

SEQ ID NO: 26964 - RNA, 19 nt, Artificial Sequence
  Description of Artificial Sequence: Synthetic oligonucleotide
aaggauugagcaaaguucc

SEQ ID NO: 26965 - RNA, 19 nt, Artificial Sequence
  Description of Artificial Sequence: Synthetic oligonucleotide
augauggaaggauauaagc

SEQ ID NO: 26966 - RNA, 19 nt, Artificial Sequence
  Description of Artificial Sequence: Synthetic oligonucleotide
aacgauacaagcugggcuc

SEQ ID NO: 26967 - RNA, 19 nt, Artificial Sequence
  Description of Artificial Sequence: Synthetic oligonucleotide
ucuaacuauaucuaauccc

SEQ ID NO: 26968 - RNA, 19 nt, Artificial Sequence
  Description of Artificial Sequence: Synthetic oligonucleotide
uguaccauaaaggugagug

SEQ ID NO: 26969 - RNA, 19 nt, Artificial Sequence
  Description of Artificial Sequence: Synthetic oligonucleotide
ucuguuggaauuacaaucc

SEQ ID NO: 26970 - RNA, 19 nt, Artificial Sequence
  Description of Artificial Sequence: Synthetic oligonucleotide
ugugaaaucuauuuauuca

SEQ ID NO: 26971 - RNA, 19 nt, Artificial Sequence
  Description of Artificial Sequence: Synthetic oligonucleotide
augaacucuaaauugagug

SEQ ID NO: 26972 - RNA, 19 nt, Artificial Sequence
  Description of Artificial Sequence: Synthetic oligonucleotide
aaauguaccgguaaaagca

SEQ ID NO: 26973 - RNA, 19 nt, Artificial Sequence
  Description of Artificial Sequence: Synthetic oligonucleotide
ugaacucuaaauugagugg

SEQ ID NO: 26974 - RNA, 19 nt, Artificial Sequence
  Description of Artificial Sequence: Synthetic oligonucleotide
gaugcaaugucuaaugucc

SEQ ID NO: 26975 - RNA, 19 nt, Artificial Sequence
  Description of Artificial Sequence: Synthetic oligonucleotide
ucacauaucaaccagccau

SEQ ID NO: 26976 - RNA, 19 nt, Artificial Sequence
  Description of Artificial Sequence: Synthetic oligonucleotide
uauaucuaaucccuuuuag

SEQ ID NO: 26977 - RNA, 19 nt, Artificial Sequence
  Description of Artificial Sequence: Synthetic oligonucleotide
ugucuaauguccaugguca

SEQ ID NO: 26978 - RNA, 19 nt, Artificial Sequence
  Description of Artificial Sequence: Synthetic oligonucleotide
agugagauuugacccaucc

SEQ ID NO: 26979 - RNA, 19 nt, Artificial Sequence
  Description of Artificial Sequence: Synthetic oligonucleotide
uguuugguaauguaauucc

SEQ ID NO: 26980 - RNA, 19 nt, Artificial Sequence
  Description of Artificial Sequence: Synthetic oligonucleotide
agcuauuugagauacguca

SEQ ID NO: 26981 - RNA, 19 nt, Artificial Sequence
  Description of Artificial Sequence: Synthetic oligonucleotide
caauuguugagucaaauuc

SEQ ID NO: 26982 - RNA, 19 nt, Artificial Sequence
  Description of Artificial Sequence: Synthetic oligonucleotide
auaucauucggccacaggu

SEQ ID NO: 26983 - RNA, 19 nt, Artificial Sequence
  Description of Artificial Sequence: Synthetic oligonucleotide
uucagcacguuuaauagga

SEQ ID NO: 26984 - RNA, 19 nt, Artificial Sequence
  Description of Artificial Sequence: Synthetic oligonucleotide
aauguuaggucaaaguaug

SEQ ID NO: 26985 - RNA, 19 nt, Artificial Sequence
  Description of Artificial Sequence: Synthetic oligonucleotide
uguugguucaacaaccaga

SEQ ID NO: 26986 - RNA, 19 nt, Artificial Sequence
  Description of Artificial Sequence: Synthetic oligonucleotide
uaaugguagaacauuuagc

SEQ ID NO: 26987 - RNA, 19 nt, Artificial Sequence
  Description of Artificial Sequence: Synthetic oligonucleotide
ugcgacuacgacauguugg

SEQ ID NO: 26988 - RNA, 19 nt, Artificial Sequence
  Description of Artificial Sequence: Synthetic oligonucleotide
acuacgacauguuggcucc

SEQ ID NO: 26989 - RNA, 19 nt, Artificial Sequence
  Description of Artificial Sequence: Synthetic oligonucleotide
uaucaaccagccaucauag

SEQ ID NO: 26990 - RNA, 19 nt, Artificial Sequence
  Description of Artificial Sequence: Synthetic oligonucleotide
acugcaacgauacaagcug

SEQ ID NO: 26991 - RNA, 19 nt, Artificial Sequence
  Description of Artificial Sequence: Synthetic oligonucleotide
aauuacaauccucucaguu

SEQ ID NO: 26992 - RNA, 19 nt, Artificial Sequence
  Description of Artificial Sequence: Synthetic oligonucleotide
aaaaugcccauaucuaagu

SEQ ID NO: 26993 - RNA, 19 nt, Artificial Sequence
  Description of Artificial Sequence: Synthetic oligonucleotide
guagcaaagacuugaaaac

SEQ ID NO: 26994 - RNA, 19 nt, Artificial Sequence
  Description of Artificial Sequence: Synthetic oligonucleotide
aagguccggauuuaaaucu

SEQ ID NO: 26995 - RNA, 19 nt, Artificial Sequence
  Description of Artificial Sequence: Synthetic oligonucleotide
aaccguacauacuguuugc

SEQ ID NO: 26996 - RNA, 19 nt, Artificial Sequence
  Description of Artificial Sequence: Synthetic oligonucleotide
cuaaugguagaacauuuag

SEQ ID NO: 26997 - RNA, 19 nt, Artificial Sequence
  Description of Artificial Sequence: Synthetic oligonucleotide
uauuaaccucuucugaaug

SEQ ID NO: 26998 - RNA, 19 nt, Artificial Sequence
  Description of Artificial Sequence: Synthetic oligonucleotide
ucgauaguuaaauuguccu

SEQ ID NO: 26999 - RNA, 19 nt, Artificial Sequence
  Description of Artificial Sequence: Synthetic oligonucleotide
aagaauaucagggucaauu

SEQ ID NO: 27000 - RNA, 19 nt, Artificial Sequence
  Description of Artificial Sequence: Synthetic oligonucleotide
uguugaacaaguucagaca

SEQ ID NO: 27001 - RNA, 19 nt, Artificial Sequence
  Description of Artificial Sequence: Synthetic oligonucleotide
uuuaauaggaaugggaguu

SEQ ID NO: 27002 - RNA, 19 nt, Artificial Sequence
  Description of Artificial Sequence: Synthetic oligonucleotide
uuauccauagggcaacgug

SEQ ID NO: 27003 - RNA, 19 nt, Artificial Sequence
  Description of Artificial Sequence: Synthetic oligonucleotide
ucuauuaaccucuucugaa

SEQ ID NO: 27004 - RNA, 19 nt, Artificial Sequence
  Description of Artificial Sequence: Synthetic oligonucleotide
agucgaccuaucuuggacc

SEQ ID NO: 27005 - RNA, 19 nt, Artificial Sequence
  Description of Artificial Sequence: Synthetic oligonucleotide
uccuguuguauaaaucucc

SEQ ID NO: 27006 - RNA, 19 nt, Artificial Sequence
  Description of Artificial Sequence: Synthetic oligonucleotide
uccaaaucaauucccgagc

SEQ ID NO: 27007 - RNA, 19 nt, Artificial Sequence
  Description of Artificial Sequence: Synthetic oligonucleotide
uguuagaacucccacuaga

SEQ ID NO: 27008 - RNA, 19 nt, Artificial Sequence
  Description of Artificial Sequence: Synthetic oligonucleotide
aaaguguucgcucaauguu

SEQ ID NO: 27009 - RNA, 19 nt, Artificial Sequence
  Description of Artificial Sequence: Synthetic oligonucleotide
auuucaagcaguuuguaua

SEQ ID NO: 27010 - RNA, 19 nt, Artificial Sequence
  Description of Artificial Sequence: Synthetic oligonucleotide
ggaauuacaauccucucag

SEQ ID NO: 27011 - RNA, 19 nt, Artificial Sequence
  Description of Artificial Sequence: Synthetic oligonucleotide
ucuaccaauuuccggaucu

SEQ ID NO: 27012 - RNA, 19 nt, Artificial Sequence
  Description of Artificial Sequence: Synthetic oligonucleotide
ugcuguaggaaaaucccag

SEQ ID NO: 27013 - RNA, 19 nt, Artificial Sequence
  Description of Artificial Sequence: Synthetic oligonucleotide
aguuucggcauguuggauc

SEQ ID NO: 27014 - RNA, 19 nt, Artificial Sequence
  Description of Artificial Sequence: Synthetic oligonucleotide
uaauugaaucuguaucucc

SEQ ID NO: 27015 - RNA, 19 nt, Artificial Sequence
  Description of Artificial Sequence: Synthetic oligonucleotide
caucacauaucauucggcc

SEQ ID NO: 27016 - RNA, 19 nt, Artificial Sequence
  Description of Artificial Sequence: Synthetic oligonucleotide
aauguaccgguaaaagcac

SEQ ID NO: 27017 - RNA, 19 nt, Artificial Sequence
  Description of Artificial Sequence: Synthetic oligonucleotide
ucuaaauugaguggaguca

SEQ ID NO: 27018 - RNA, 19 nt, Artificial Sequence
  Description of Artificial Sequence: Synthetic oligonucleotide
gauauaagcuguugaaauc

SEQ ID NO: 27019 - RNA, 19 nt, Artificial Sequence
  Description of Artificial Sequence: Synthetic oligonucleotide
uauccauagggcaacgugu

SEQ ID NO: 27020 - RNA, 19 nt, Artificial Sequence
  Description of Artificial Sequence: Synthetic oligonucleotide
cauuucacggggaaggaag

SEQ ID NO: 27021 - RNA, 19 nt, Artificial Sequence
  Description of Artificial Sequence: Synthetic oligonucleotide
ugauccgaaagaaucuggc

SEQ ID NO: 27022 - RNA, 19 nt, Artificial Sequence
  Description of Artificial Sequence: Synthetic oligonucleotide
cauguuuggaacgaguagc

SEQ ID NO: 27023 - RNA, 19 nt, Artificial Sequence
  Description of Artificial Sequence: Synthetic oligonucleotide
uccagauuggugcuauuag

SEQ ID NO: 27024 - RNA, 19 nt, Artificial Sequence
  Description of Artificial Sequence: Synthetic oligonucleotide
uugauccgaaagaaucugg

SEQ ID NO: 27025 - RNA, 19 nt, Artificial Sequence
  Description of Artificial Sequence: Synthetic oligonucleotide
ugguuuggcauaaaaucug

SEQ ID NO: 27026 - RNA, 19 nt, Artificial Sequence
  Description of Artificial Sequence: Synthetic oligonucleotide
gaaaacguaaggaauguga

SEQ ID NO: 27027 - RNA, 19 nt, Artificial Sequence
  Description of Artificial Sequence: Synthetic oligonucleotide
aggaaaaucccaggcaacc

SEQ ID NO: 27028 - RNA, 19 nt, Artificial Sequence
  Description of Artificial Sequence: Synthetic oligonucleotide
ugugauacugaugaacucu

SEQ ID NO: 27029 - RNA, 19 nt, Artificial Sequence
  Description of Artificial Sequence: Synthetic oligonucleotide
uaaaguguucgcucaaugu

SEQ ID NO: 27030 - RNA, 19 nt, Artificial Sequence
  Description of Artificial Sequence: Synthetic oligonucleotide
guuucggcauguuggaucg

SEQ ID NO: 27031 - RNA, 19 nt, Artificial Sequence
  Description of Artificial Sequence: Synthetic oligonucleotide
ugaucguccacccaucagu

SEQ ID NO: 27032 - RNA, 19 nt, Artificial Sequence
  Description of Artificial Sequence: Synthetic oligonucleotide
uuuggcagguuaaauauuu

SEQ ID NO: 27033 - RNA, 19 nt, Artificial Sequence
  Description of Artificial Sequence: Synthetic oligonucleotide
ggugucgauaguuaaauug

SEQ ID NO: 27034 - RNA, 19 nt, Artificial Sequence
  Description of Artificial Sequence: Synthetic oligonucleotide
aguaugagacaccuguuca

SEQ ID NO: 27035 - RNA, 19 nt, Artificial Sequence
  Description of Artificial Sequence: Synthetic oligonucleotide
aacauccaucauuguaacg

SEQ ID NO: 27036 - RNA, 19 nt, Artificial Sequence
  Description of Artificial Sequence: Synthetic oligonucleotide
aaugugaguaugagacacc

SEQ ID NO: 27037 - RNA, 19 nt, Artificial Sequence
  Description of Artificial Sequence: Synthetic oligonucleotide
uuugggcugauucaaccca

SEQ ID NO: 27038 - RNA, 19 nt, Artificial Sequence
  Description of Artificial Sequence: Synthetic oligonucleotide
ucugauguugguucaacaa

SEQ ID NO: 27039 - RNA, 19 nt, Artificial Sequence
  Description of Artificial Sequence: Synthetic oligonucleotide
aacuauaucuaaucccuuu

SEQ ID NO: 27040 - RNA, 19 nt, Artificial Sequence
  Description of Artificial Sequence: Synthetic oligonucleotide
auuucugccgaguaucuga

SEQ ID NO: 27041 - RNA, 19 nt, Artificial Sequence
  Description of Artificial Sequence: Synthetic oligonucleotide
cuauuuauucaguaaguga

SEQ ID NO: 27042 - RNA, 19 nt, Artificial Sequence
  Description of Artificial Sequence: Synthetic oligonucleotide
gaaguaaaguguucgcuca

SEQ ID NO: 27043 - RNA, 19 nt, Artificial Sequence
  Description of Artificial Sequence: Synthetic oligonucleotide
auaggaaugggaguuaaca

SEQ ID NO: 27044 - RNA, 19 nt, Artificial Sequence
  Description of Artificial Sequence: Synthetic oligonucleotide
uacugcaacgauacaagcu

SEQ ID NO: 27045 - RNA, 19 nt, Artificial Sequence
  Description of Artificial Sequence: Synthetic oligonucleotide
ucgagugcgacuacgacau

SEQ ID NO: 27046 - RNA, 19 nt, Artificial Sequence
  Description of Artificial Sequence: Synthetic oligonucleotide
uggaacgaguagcugaaca

SEQ ID NO: 27047 - RNA, 19 nt, Artificial Sequence
  Description of Artificial Sequence: Synthetic oligonucleotide
auaacuggcgaagagcuug

SEQ ID NO: 27048 - RNA, 19 nt, Artificial Sequence
  Description of Artificial Sequence: Synthetic oligonucleotide
gugcuauuaguauuuauca

SEQ ID NO: 27049 - RNA, 19 nt, Artificial Sequence
  Description of Artificial Sequence: Synthetic oligonucleotide
agauuugacccauccugac

SEQ ID NO: 27050 - RNA, 19 nt, Artificial Sequence
  Description of Artificial Sequence: Synthetic oligonucleotide
caaucaacauuacugcaac

SEQ ID NO: 27051 - RNA, 19 nt, Artificial Sequence
  Description of Artificial Sequence: Synthetic oligonucleotide
uuuggaacgaguagcugaa

SEQ ID NO: 27052 - RNA, 19 nt, Artificial Sequence
  Description of Artificial Sequence: Synthetic oligonucleotide
ugagauacgucaguauuca

SEQ ID NO: 27053 - RNA, 19 nt, Artificial Sequence
  Description of Artificial Sequence: Synthetic oligonucleotide
ucaacauuacugcaacgau

SEQ ID NO: 27054 - RNA, 19 nt, Artificial Sequence
  Description of Artificial Sequence: Synthetic oligonucleotide
cuaacuauaucuaaucccu

SEQ ID NO: 27055 - RNA, 19 nt, Artificial Sequence
  Description of Artificial Sequence: Synthetic oligonucleotide
acuagacuccacaaaacuc

SEQ ID NO: 27056 - RNA, 19 nt, Artificial Sequence
  Description of Artificial Sequence: Synthetic oligonucleotide
ucuaaagcaacucguugua

SEQ ID NO: 27057 - RNA, 19 nt, Artificial Sequence
  Description of Artificial Sequence: Synthetic oligonucleotide
auuaaccucuucugaaugu

SEQ ID NO: 27058 - RNA, 19 nt, Artificial Sequence
  Description of Artificial Sequence: Synthetic oligonucleotide
auuguaacgggaguuguug

SEQ ID NO: 27059 - RNA, 19 nt, Artificial Sequence
  Description of Artificial Sequence: Synthetic oligonucleotide
aggguaauccuggggaucc

SEQ ID NO: 27060 - RNA, 19 nt, Artificial Sequence
  Description of Artificial Sequence: Synthetic oligonucleotide
guuuggaacgaguagcuga

SEQ ID NO: 27061 - RNA, 19 nt, Artificial Sequence
  Description of Artificial Sequence: Synthetic oligonucleotide
aaaaucugcuugucaggca

SEQ ID NO: 27062 - RNA, 19 nt, Artificial Sequence
  Description of Artificial Sequence: Synthetic oligonucleotide
aaaugaaggggaaggcguc

SEQ ID NO: 27063 - RNA, 19 nt, Artificial Sequence
  Description of Artificial Sequence: Synthetic oligonucleotide
aaaccaagccuccagcaua

SEQ ID NO: 27064 - RNA, 19 nt, Artificial Sequence
  Description of Artificial Sequence: Synthetic oligonucleotide
cuguaggaaaaucccaggc

SEQ ID NO: 27065 - RNA, 19 nt, Artificial Sequence
  Description of Artificial Sequence: Synthetic oligonucleotide
uccaucuauuggcucacag

SEQ ID NO: 27066 - RNA, 19 nt, Artificial Sequence
  Description of Artificial Sequence: Synthetic oligonucleotide
uuaugacccacaagaauau

SEQ ID NO: 27067 - RNA, 19 nt, Artificial Sequence
  Description of Artificial Sequence: Synthetic oligonucleotide
caaccguacauacuguuug

SEQ ID NO: 27068 - RNA, 19 nt, Artificial Sequence
  Description of Artificial Sequence: Synthetic oligonucleotide
uggugaagccuuacaauca

SEQ ID NO: 27069 - RNA, 19 nt, Artificial Sequence
  Description of Artificial Sequence: Synthetic oligonucleotide
uaccauaaaggugaguggu

SEQ ID NO: 27070 - RNA, 19 nt, Artificial Sequence
  Description of Artificial Sequence: Synthetic oligonucleotide
aauccuagcaaaguucuuu

SEQ ID NO: 27071 - RNA, 19 nt, Artificial Sequence
  Description of Artificial Sequence: Synthetic oligonucleotide
uugguuguauggaucuuca

SEQ ID NO: 27072 - RNA, 19 nt, Artificial Sequence
  Description of Artificial Sequence: Synthetic oligonucleotide
uguuggaauuacaauccuc

SEQ ID NO: 27073 - RNA, 19 nt, Artificial Sequence
  Description of Artificial Sequence: Synthetic oligonucleotide
aguauguaaaaugugcuuu

SEQ ID NO: 27074 - RNA, 19 nt, Artificial Sequence
  Description of Artificial Sequence: Synthetic oligonucleotide
gaacgaguagcugaacaag

SEQ ID NO: 27075 - RNA, 19 nt, Artificial Sequence
  Description of Artificial Sequence: Synthetic oligonucleotide
aacguguacaugagguagg

SEQ ID NO: 27076 - RNA, 19 nt, Artificial Sequence
  Description of Artificial Sequence: Synthetic oligonucleotide
agcacguuuaauaggaaug

SEQ ID NO: 27077 - RNA, 19 nt, Artificial Sequence
  Description of Artificial Sequence: Synthetic oligonucleotide
gaaugauggaaggauauaa

SEQ ID NO: 27078 - RNA, 19 nt, Artificial Sequence
  Description of Artificial Sequence: Synthetic oligonucleotide
guaaaguguucgcucaaug

SEQ ID NO: 27079 - RNA, 19 nt, Artificial Sequence
  Description of Artificial Sequence: Synthetic oligonucleotide
cuccgcucuaccaauuucc

SEQ ID NO: 27080 - RNA, 19 nt, Artificial Sequence
  Description of Artificial Sequence: Synthetic oligonucleotide
guauguaaaaugugcuuuc

SEQ ID NO: 27081 - RNA, 19 nt, Artificial Sequence
  Description of Artificial Sequence: Synthetic oligonucleotide
acaaauauuaugacccaca

SEQ ID NO: 27082 - RNA, 19 nt, Artificial Sequence
  Description of Artificial Sequence: Synthetic oligonucleotide
ugucgauaguuaaauuguc

SEQ ID NO: 27083 - RNA, 19 nt, Artificial Sequence
  Description of Artificial Sequence: Synthetic oligonucleotide
ugcuauuaguauuuaucau

SEQ ID NO: 27084 - RNA, 19 nt, Artificial Sequence
  Description of Artificial Sequence: Synthetic oligonucleotide
caagguccggauuuaaauc

SEQ ID NO: 27085 - RNA, 19 nt, Artificial Sequence
  Description of Artificial Sequence: Synthetic oligonucleotide
acuauaucuaaucccuuuu

SEQ ID NO: 27086 - RNA, 19 nt, Artificial Sequence
  Description of Artificial Sequence: Synthetic oligonucleotide
cguuuaauaggaaugggag

SEQ ID NO: 27087 - RNA, 19 nt, Artificial Sequence
  Description of Artificial Sequence: Synthetic oligonucleotide
cauaucuaaguuuggaucu

SEQ ID NO: 27088 - RNA, 19 nt, Artificial Sequence
  Description of Artificial Sequence: Synthetic oligonucleotide
agccuuacaaucaacauua

SEQ ID NO: 27089 - RNA, 19 nt, Artificial Sequence
  Description of Artificial Sequence: Synthetic oligonucleotide
gacauaauguucccagcga

SEQ ID NO: 27090 - RNA, 19 nt, Artificial Sequence
  Description of Artificial Sequence: Synthetic oligonucleotide
guuugggcugauucaaccc

SEQ ID NO: 27091 - RNA, 19 nt, Artificial Sequence
  Description of Artificial Sequence: Synthetic oligonucleotide
gugaguaugagacaccugu

SEQ ID NO: 27092 - RNA, 19 nt, Artificial Sequence
  Description of Artificial Sequence: Synthetic oligonucleotide
ccuaucuuggaccaguaag

SEQ ID NO: 27093 - RNA, 19 nt, Artificial Sequence
  Description of Artificial Sequence: Synthetic oligonucleotide
cuauguaaagggaaaacgu

SEQ ID NO: 27094 - RNA, 19 nt, Artificial Sequence
  Description of Artificial Sequence: Synthetic oligonucleotide
aaaugcccauaucuaaguu

SEQ ID NO: 27095 - RNA, 19 nt, Artificial Sequence
  Description of Artificial Sequence: Synthetic oligonucleotide
gucgauaguuaaauugucc

SEQ ID NO: 27096 - RNA, 19 nt, Artificial Sequence
  Description of Artificial Sequence: Synthetic oligonucleotide
agauacgucaguauucaga

SEQ ID NO: 27097 - RNA, 19 nt, Artificial Sequence
  Description of Artificial Sequence: Synthetic oligonucleotide
aacucuaaauugaguggag

SEQ ID NO: 27098 - RNA, 19 nt, Artificial Sequence
  Description of Artificial Sequence: Synthetic oligonucleotide
aguauuuaucauaauugaa

SEQ ID NO: 27099 - RNA, 19 nt, Artificial Sequence
  Description of Artificial Sequence: Synthetic oligonucleotide
uaucuuggaccaguaagga

SEQ ID NO: 27100 - RNA, 19 nt, Artificial Sequence
  Description of Artificial Sequence: Synthetic oligonucleotide
accaaucucuucuaacuau

SEQ ID NO: 27101 - RNA, 19 nt, Artificial Sequence
  Description of Artificial Sequence: Synthetic oligonucleotide
ugucaggcacaauauaguu

SEQ ID NO: 27102 - RNA, 19 nt, Artificial Sequence
  Description of Artificial Sequence: Synthetic oligonucleotide
guuugguaauguaauuccc

SEQ ID NO: 27103 - RNA, 19 nt, Artificial Sequence
  Description of Artificial Sequence: Synthetic oligonucleotide
uggagucaaguccuagcca

SEQ ID NO: 27104 - RNA, 19 nt, Artificial Sequence
  Description of Artificial Sequence: Synthetic oligonucleotide
uguuuaauugaugcaugaa

SEQ ID NO: 27105 - RNA, 19 nt, Artificial Sequence
  Description of Artificial Sequence: Synthetic oligonucleotide
uauugggugucgauaguua

SEQ ID NO: 27106 - RNA, 19 nt, Artificial Sequence
  Description of Artificial Sequence: Synthetic oligonucleotide
agcucacauggguuugggc

SEQ ID NO: 27107 - RNA, 19 nt, Artificial Sequence
  Description of Artificial Sequence: Synthetic oligonucleotide
auguugguucaacaaccag

SEQ ID NO: 27108 - RNA, 19 nt, Artificial Sequence
  Description of Artificial Sequence: Synthetic oligonucleotide
aacuuugcacacauuaauu

SEQ ID NO: 27109 - RNA, 19 nt, Artificial Sequence
  Description of Artificial Sequence: Synthetic oligonucleotide
guuggaucgccucagucga

SEQ ID NO: 27110 - RNA, 19 nt, Artificial Sequence
  Description of Artificial Sequence: Synthetic oligonucleotide
cauaucauucggccacagg

SEQ ID NO: 27111 - RNA, 19 nt, Artificial Sequence
  Description of Artificial Sequence: Synthetic oligonucleotide
cugcaacgauacaagcugg

SEQ ID NO: 27112 - RNA, 19 nt, Artificial Sequence
  Description of Artificial Sequence: Synthetic oligonucleotide
ccauaucuaaguuuggauc

SEQ ID NO: 27113 - RNA, 19 nt, Artificial Sequence
  Description of Artificial Sequence: Synthetic oligonucleotide
ucugaucguccacccauca

SEQ ID NO: 27114 - RNA, 19 nt, Artificial Sequence
  Description of Artificial Sequence: Synthetic oligonucleotide
acguguacaugagguaggc

SEQ ID NO: 27115 - RNA, 19 nt, Artificial Sequence
  Description of Artificial Sequence: Synthetic oligonucleotide
ugugaguaugagacaccug

SEQ ID NO: 27116 - RNA, 19 nt, Artificial Sequence
  Description of Artificial Sequence: Synthetic oligonucleotide
augacccacaagaauauca

SEQ ID NO: 27117 - RNA, 19 nt, Artificial Sequence
  Description of Artificial Sequence: Synthetic oligonucleotide
uuuucuccgcucuaccaau

SEQ ID NO: 27118 - RNA, 19 nt, Artificial Sequence
  Description of Artificial Sequence: Synthetic oligonucleotide
auguuagaacucccacuag

SEQ ID NO: 27119 - RNA, 19 nt, Artificial Sequence
  Description of Artificial Sequence: Synthetic oligonucleotide
aaacuguguuuaauugaug

SEQ ID NO: 27120 - RNA, 19 nt, Artificial Sequence
  Description of Artificial Sequence: Synthetic oligonucleotide
auucccgagccuucaaaga

SEQ ID NO: 27121 - RNA, 19 nt, Artificial Sequence
  Description of Artificial Sequence: Synthetic oligonucleotide
cacguuuaauaggaauggg

SEQ ID NO: 27122 - RNA, 19 nt, Artificial Sequence
  Description of Artificial Sequence: Synthetic oligonucleotide
accaauuuccggaucucuc

SEQ ID NO: 27123 - RNA, 19 nt, Artificial Sequence
  Description of Artificial Sequence: Synthetic oligonucleotide
acgauacaagcugggcucc

SEQ ID NO: 27124 - RNA, 19 nt, Artificial Sequence
  Description of Artificial Sequence: Synthetic oligonucleotide
acauucuauguaaagggaa

SEQ ID NO: 27125 - RNA, 19 nt, Artificial Sequence
  Description of Artificial Sequence: Synthetic oligonucleotide
uugggugucgauaguuaaa

SEQ ID NO: 27126 - RNA, 19 nt, Artificial Sequence
  Description of Artificial Sequence: Synthetic oligonucleotide
augugaguaugagacaccu

SEQ ID NO: 27127 - RNA, 19 nt, Artificial Sequence
  Description of Artificial Sequence: Synthetic oligonucleotide
cuguuguauaaaucuccac

SEQ ID NO: 27128 - RNA, 19 nt, Artificial Sequence
  Description of Artificial Sequence: Synthetic oligonucleotide
ucccgagccuucaaagaca

SEQ ID NO: 27129 - RNA, 19 nt, Artificial Sequence
  Description of Artificial Sequence: Synthetic oligonucleotide
auuuauccauagggcaacg

SEQ ID NO: 27130 - RNA, 19 nt, Artificial Sequence
  Description of Artificial Sequence: Synthetic oligonucleotide
ugggugucgauaguuaaau

SEQ ID NO: 27131 - RNA, 19 nt, Artificial Sequence
  Description of Artificial Sequence: Synthetic oligonucleotide
cacaaauauuaugacccac

SEQ ID NO: 27132 - RNA, 19 nt, Artificial Sequence
  Description of Artificial Sequence: Synthetic oligonucleotide
gagauacgucaguauucag

SEQ ID NO: 27133 - RNA, 19 nt, Artificial Sequence
  Description of Artificial Sequence: Synthetic oligonucleotide
gucgagugcgacuacgaca

SEQ ID NO: 27134 - RNA, 19 nt, Artificial Sequence
  Description of Artificial Sequence: Synthetic oligonucleotide
cauaggcccucugaguugc

SEQ ID NO: 27135 - RNA, 19 nt, Artificial Sequence
  Description of Artificial Sequence: Synthetic oligonucleotide
gaucguccacccaucagug

SEQ ID NO: 27136 - RNA, 19 nt, Artificial Sequence
  Description of Artificial Sequence: Synthetic oligonucleotide
ugccgaguaucugacuucc

SEQ ID NO: 27137 - RNA, 19 nt, Artificial Sequence
  Description of Artificial Sequence: Synthetic oligonucleotide
uaacuauaucuaaucccuu

SEQ ID NO: 27138 - RNA, 19 nt, Artificial Sequence
  Description of Artificial Sequence: Synthetic oligonucleotide
gcuauuugagauacgucag

SEQ ID NO: 27139 - RNA, 19 nt, Artificial Sequence
  Description of Artificial Sequence: Synthetic oligonucleotide
uuguauuuauugguaucuc

SEQ ID NO: 27140 - RNA, 19 nt, Artificial Sequence
  Description of Artificial Sequence: Synthetic oligonucleotide
cucuaaagcaacucguugu

SEQ ID NO: 27141 - RNA, 19 nt, Artificial Sequence
  Description of Artificial Sequence: Synthetic oligonucleotide
ugaguaugagacaccuguu

SEQ ID NO: 27142 - RNA, 19 nt, Artificial Sequence
  Description of Artificial Sequence: Synthetic oligonucleotide
uuguaugcaucagaaucuc

SEQ ID NO: 27143 - RNA, 19 nt, Artificial Sequence
  Description of Artificial Sequence: Synthetic oligonucleotide
uguuuggaacgaguagcug

SEQ ID NO: 27144 - RNA, 19 nt, Artificial Sequence
  Description of Artificial Sequence: Synthetic oligonucleotide
cuauuggcucacagauccg

SEQ ID NO: 27145 - RNA, 19 nt, Artificial Sequence
  Description of Artificial Sequence: Synthetic oligonucleotide
uccggauuuaaaucuuguu

SEQ ID NO: 27146 - RNA, 19 nt, Artificial Sequence
  Description of Artificial Sequence: Synthetic oligonucleotide
aauggugucccggcuuuga

SEQ ID NO: 27147 - RNA, 19 nt, Artificial Sequence
  Description of Artificial Sequence: Synthetic oligonucleotide
ccucagucgaccuaucuug

SEQ ID NO: 27148 - RNA, 19 nt, Artificial Sequence
  Description of Artificial Sequence: Synthetic oligonucleotide
ugcugcaauuguugaguca

SEQ ID NO: 27149 - RNA, 19 nt, Artificial Sequence
  Description of Artificial Sequence: Synthetic oligonucleotide
uuaauaggaaugggaguua

SEQ ID NO: 27150 - RNA, 19 nt, Artificial Sequence
  Description of Artificial Sequence: Synthetic oligonucleotide
aaggcgucgagugcgacua

SEQ ID NO: 27151 - RNA, 19 nt, Artificial Sequence
  Description of Artificial Sequence: Synthetic oligonucleotide
ugucaaugccuuguuaauu

SEQ ID NO: 27152 - RNA, 19 nt, Artificial Sequence
  Description of Artificial Sequence: Synthetic oligonucleotide
gcgacuacgacauguuggc

SEQ ID NO: 27153 - RNA, 19 nt, Artificial Sequence
  Description of Artificial Sequence: Synthetic oligonucleotide
ucuccgcucuaccaauuuc

SEQ ID NO: 27154 - RNA, 19 nt, Artificial Sequence
  Description of Artificial Sequence: Synthetic oligonucleotide
uuuauccauagggcaacgu

SEQ ID NO: 27155 - RNA, 19 nt, Artificial Sequence
  Description of Artificial Sequence: Synthetic oligonucleotide
uucauuucacggggaagga

SEQ ID NO: 27156 - RNA, 19 nt, Artificial Sequence
  Description of Artificial Sequence: Synthetic oligonucleotide
ucaggguaauccuggggau

SEQ ID NO: 27157 - RNA, 19 nt, Artificial Sequence
  Description of Artificial Sequence: Synthetic oligonucleotide
ucagucgaccuaucuugga

SEQ ID NO: 27158 - RNA, 19 nt, Artificial Sequence
  Description of Artificial Sequence: Synthetic oligonucleotide
gguaucaacacagguggug

SEQ ID NO: 27159 - RNA, 19 nt, Artificial Sequence
  Description of Artificial Sequence: Synthetic oligonucleotide
cagauuuguuccaacaggu

SEQ ID NO: 27160 - RNA, 19 nt, Artificial Sequence
  Description of Artificial Sequence: Synthetic oligonucleotide
accgguaaaagcacagcug

SEQ ID NO: 27161 - RNA, 19 nt, Artificial Sequence
  Description of Artificial Sequence: Synthetic oligonucleotide
cuuccggccuccuugagaa

SEQ ID NO: 27162 - RNA, 19 nt, Artificial Sequence
  Description of Artificial Sequence: Synthetic oligonucleotide
gguuguauggaucuucaua

SEQ ID NO: 27163 - RNA, 19 nt, Artificial Sequence
  Description of Artificial Sequence: Synthetic oligonucleotide
uccauagggcaacguguac

SEQ ID NO: 27164 - RNA, 19 nt, Artificial Sequence
  Description of Artificial Sequence: Synthetic oligonucleotide
uggguuugggcugauucaa

SEQ ID NO: 27165 - RNA, 19 nt, Artificial Sequence
  Description of Artificial Sequence: Synthetic oligonucleotide
caccuguucaguguuggac

SEQ ID NO: 27166 - RNA, 19 nt, Artificial Sequence
  Description of Artificial Sequence: Synthetic oligonucleotide
auguuuggaacgaguagcu

SEQ ID NO: 27167 - RNA, 19 nt, Artificial Sequence
  Description of Artificial Sequence: Synthetic oligonucleotide
uggaucgccucagucgacc

SEQ ID NO: 27168 - RNA, 19 nt, Artificial Sequence
  Description of Artificial Sequence: Synthetic oligonucleotide
acggggaaggaaguaaagu

SEQ ID NO: 27169 - RNA, 19 nt, Artificial Sequence
  Description of Artificial Sequence: Synthetic oligonucleotide
gguuuggcauaaaaucugc

SEQ ID NO: 27170 - RNA, 19 nt, Artificial Sequence
  Description of Artificial Sequence: Synthetic oligonucleotide
uuugacccauccugacaga

SEQ ID NO: 27171 - RNA, 19 nt, Artificial Sequence
  Description of Artificial Sequence: Synthetic oligonucleotide
cucguuguacuguuguaaa

SEQ ID NO: 27172 - RNA, 19 nt, Artificial Sequence
  Description of Artificial Sequence: Synthetic oligonucleotide
augacauaggacacuguau

SEQ ID NO: 27173 - RNA, 19 nt, Artificial Sequence
  Description of Artificial Sequence: Synthetic oligonucleotide
caugaacacaacaugcaau

SEQ ID NO: 27174 - RNA, 19 nt, Artificial Sequence
  Description of Artificial Sequence: Synthetic oligonucleotide
acguaaggaaugugaguau

SEQ ID NO: 27175 - RNA, 19 nt, Artificial Sequence
  Description of Artificial Sequence: Synthetic oligonucleotide
ggaacgaguagcugaacaa

SEQ ID NO: 27176 - RNA, 19 nt, Artificial Sequence
  Description of Artificial Sequence: Synthetic oligonucleotide
accauaaaggugaguggug

SEQ ID NO: 27177 - RNA, 19 nt, Artificial Sequence
  Description of Artificial Sequence: Synthetic oligonucleotide
guugagucaaauucuucau

SEQ ID NO: 27178 - RNA, 19 nt, Artificial Sequence
  Description of Artificial Sequence: Synthetic oligonucleotide
gggcaaaaugcccauaucu

SEQ ID NO: 27179 - RNA, 19 nt, Artificial Sequence
  Description of Artificial Sequence: Synthetic oligonucleotide
uggaccaguaaggaacuuu

SEQ ID NO: 27180 - RNA, 19 nt, Artificial Sequence
  Description of Artificial Sequence: Synthetic oligonucleotide
acgucacacggcuccccac

SEQ ID NO: 27181 - RNA, 19 nt, Artificial Sequence
  Description of Artificial Sequence: Synthetic oligonucleotide
ucggcauguuggaucgccu

SEQ ID NO: 27182 - RNA, 19 nt, Artificial Sequence
  Description of Artificial Sequence: Synthetic oligonucleotide
caacgauacaagcugggcu

SEQ ID NO: 27183 - RNA, 19 nt, Artificial Sequence
  Description of Artificial Sequence: Synthetic oligonucleotide
gagcuauuugagauacguc

SEQ ID NO: 27184 - RNA, 19 nt, Artificial Sequence
  Description of Artificial Sequence: Synthetic oligonucleotide
auuucacggggaaggaagu

SEQ ID NO: 27185 - RNA, 19 nt, Artificial Sequence
  Description of Artificial Sequence: Synthetic oligonucleotide
cuauuaaccucuucugaau

SEQ ID NO: 27186 - RNA, 19 nt, Artificial Sequence
  Description of Artificial Sequence: Synthetic oligonucleotide
uucuccgcucuaccaauuu

SEQ ID NO: 27187 - RNA, 19 nt, Artificial Sequence
  Description of Artificial Sequence: Synthetic oligonucleotide
uaugacccacaagaauauc

SEQ ID NO: 27188 - RNA, 19 nt, Artificial Sequence
  Description of Artificial Sequence: Synthetic oligonucleotide
acauuacugcaacgauaca

SEQ ID NO: 27189 - RNA, 19 nt, Artificial Sequence
  Description of Artificial Sequence: Synthetic oligonucleotide
accuagcagaucauccuug

SEQ ID NO: 27190 - RNA, 19 nt, Artificial Sequence
  Description of Artificial Sequence: Synthetic oligonucleotide
gcucacauggguuugggcu

SEQ ID NO: 27191 - RNA, 19 nt, Artificial Sequence
  Description of Artificial Sequence: Synthetic oligonucleotide
ccucuaaagcaacucguug

SEQ ID NO: 27192 - RNA, 19 nt, Artificial Sequence
  Description of Artificial Sequence: Synthetic oligonucleotide
cauaaaggugaguggugaa

SEQ ID NO: 27193 - RNA, 19 nt, Artificial Sequence
  Description of Artificial Sequence: Synthetic oligonucleotide
acauaucauucggccacag

SEQ ID NO: 27194 - RNA, 19 nt, Artificial Sequence
  Description of Artificial Sequence: Synthetic oligonucleotide
gugcgacuacgacauguug

SEQ ID NO: 27195 - RNA, 19 nt, Artificial Sequence
  Description of Artificial Sequence: Synthetic oligonucleotide
cgauaguuaaauuguccug

SEQ ID NO: 27196 - RNA, 19 nt, Artificial Sequence
  Description of Artificial Sequence: Synthetic oligonucleotide
cacagauccgagccacaac

SEQ ID NO: 27197 - RNA, 19 nt, Artificial Sequence
  Description of Artificial Sequence: Synthetic oligonucleotide
cuuggacaagucuacugcu

SEQ ID NO: 27198 - RNA, 19 nt, Artificial Sequence
  Description of Artificial Sequence: Synthetic oligonucleotide
accguacauacuguuugcu

SEQ ID NO: 27199 - RNA, 19 nt, Artificial Sequence
  Description of Artificial Sequence: Synthetic oligonucleotide
aaguuucggcauguuggau

SEQ ID NO: 27200 - RNA, 19 nt, Artificial Sequence
  Description of Artificial Sequence: Synthetic oligonucleotide
ggugaagccuuacaaucaa

SEQ ID NO: 27201 - RNA, 19 nt, Artificial Sequence
  Description of Artificial Sequence: Synthetic oligonucleotide
guuggacuuugaacaauuc

SEQ ID NO: 27202 - RNA, 19 nt, Artificial Sequence
  Description of Artificial Sequence: Synthetic oligonucleotide
ggagcuauuugagauacgu

SEQ ID NO: 27203 - RNA, 19 nt, Artificial Sequence
  Description of Artificial Sequence: Synthetic oligonucleotide
ugguuguauggaucuucau

SEQ ID NO: 27204 - RNA, 19 nt, Artificial Sequence
  Description of Artificial Sequence: Synthetic oligonucleotide
cugccgaguaucugacuuc

SEQ ID NO: 27205 - RNA, 19 nt, Artificial Sequence
  Description of Artificial Sequence: Synthetic oligonucleotide
accuaucuuggaccaguaa

SEQ ID NO: 27206 - RNA, 19 nt, Artificial Sequence
  Description of Artificial Sequence: Synthetic oligonucleotide
aucgccucagucgaccuau

SEQ ID NO: 27207 - RNA, 19 nt, Artificial Sequence
  Description of Artificial Sequence: Synthetic oligonucleotide
gaauuacaauccucucagu

SEQ ID NO: 27208 - RNA, 19 nt, Artificial Sequence
  Description of Artificial Sequence: Synthetic oligonucleotide
aucguccacccaucagugu

SEQ ID NO: 27209 - RNA, 19 nt, Artificial Sequence
  Description of Artificial Sequence: Synthetic oligonucleotide
aguguucgcucaauguuuu

SEQ ID NO: 27210 - RNA, 19 nt, Artificial Sequence
  Description of Artificial Sequence: Synthetic oligonucleotide
uuucacggggaaggaagua

SEQ ID NO: 27211 - RNA, 19 nt, Artificial Sequence
  Description of Artificial Sequence: Synthetic oligonucleotide
auguuaggucaaaguaugu

SEQ ID NO: 27212 - RNA, 19 nt, Artificial Sequence
  Description of Artificial Sequence: Synthetic oligonucleotide
uuggaucgccucagucgac

SEQ ID NO: 27213 - RNA, 19 nt, Artificial Sequence
  Description of Artificial Sequence: Synthetic oligonucleotide
ccguacauacuguuugcug

SEQ ID NO: 27214 - RNA, 19 nt, Artificial Sequence
  Description of Artificial Sequence: Synthetic oligonucleotide
gcaacgauacaagcugggc

SEQ ID NO: 27215 - RNA, 19 nt, Artificial Sequence
  Description of Artificial Sequence: Synthetic oligonucleotide
gagugcgacuacgacaugu

SEQ ID NO: 27216 - RNA, 19 nt, Artificial Sequence
  Description of Artificial Sequence: Synthetic oligonucleotide
agauuuguuccaacaggua

SEQ ID NO: 27217 - RNA, 19 nt, Artificial Sequence
  Description of Artificial Sequence: Synthetic oligonucleotide
ucgaccuaucuuggaccag

SEQ ID NO: 27218 - RNA, 19 nt, Artificial Sequence
  Description of Artificial Sequence: Synthetic oligonucleotide
cauagggcaacguguacau

SEQ ID NO: 27219 - RNA, 19 nt, Artificial Sequence
  Description of Artificial Sequence: Synthetic oligonucleotide
ggcaacguguacaugaggu

SEQ ID NO: 27220 - RNA, 19 nt, Artificial Sequence
  Description of Artificial Sequence: Synthetic oligonucleotide
cuaccaauuuccggaucuc

SEQ ID NO: 27221 - RNA, 19 nt, Artificial Sequence
  Description of Artificial Sequence: Synthetic oligonucleotide
auguaccgguaaaagcaca

SEQ ID NO: 27222 - RNA, 19 nt, Artificial Sequence
  Description of Artificial Sequence: Synthetic oligonucleotide
gaccaccaaguagagcauc

SEQ ID NO: 27223 - RNA, 19 nt, Artificial Sequence
  Description of Artificial Sequence: Synthetic oligonucleotide
gugaagccuuacaaucaac

SEQ ID NO: 27224 - RNA, 19 nt, Artificial Sequence
  Description of Artificial Sequence: Synthetic oligonucleotide
gugagauuugacccauccu

SEQ ID NO: 27225 - RNA, 19 nt, Artificial Sequence
  Description of Artificial Sequence: Synthetic oligonucleotide
accucuaaagcaacucguu

SEQ ID NO: 27226 - RNA, 19 nt, Artificial Sequence
  Description of Artificial Sequence: Synthetic oligonucleotide
guagccacuccaggacaag

SEQ ID NO: 27227 - RNA, 19 nt, Artificial Sequence
  Description of Artificial Sequence: Synthetic oligonucleotide
auccauagggcaacgugua

SEQ ID NO: 27228 - RNA, 19 nt, Artificial Sequence
  Description of Artificial Sequence: Synthetic oligonucleotide
ucccaggcaaccguacaua

SEQ ID NO: 27229 - RNA, 19 nt, Artificial Sequence
  Description of Artificial Sequence: Synthetic oligonucleotide
gaaggcgucgagugcgacu

SEQ ID NO: 27230 - RNA, 19 nt, Artificial Sequence
  Description of Artificial Sequence: Synthetic oligonucleotide
uacgacauguuggcuccuc

SEQ ID NO: 27231 - RNA, 19 nt, Artificial Sequence
  Description of Artificial Sequence: Synthetic oligonucleotide
uuggaacgaguagcugaac

SEQ ID NO: 27232 - RNA, 19 nt, Artificial Sequence
  Description of Artificial Sequence: Synthetic oligonucleotide
ggucuaaguacagcuuuca

SEQ ID NO: 27233 - RNA, 19 nt, Artificial Sequence
  Description of Artificial Sequence: Synthetic oligonucleotide
agugcgacuacgacauguu

SEQ ID NO: 27234 - RNA, 19 nt, Artificial Sequence
  Description of Artificial Sequence: Synthetic oligonucleotide
guccagauuggugcuauua

SEQ ID NO: 27235 - RNA, 19 nt, Artificial Sequence
  Description of Artificial Sequence: Synthetic oligonucleotide
ggcgucgagugcgacuacg

SEQ ID NO: 27236 - RNA, 19 nt, Artificial Sequence
  Description of Artificial Sequence: Synthetic oligonucleotide
acgucaguauucagauccu

SEQ ID NO: 27237 - RNA, 19 nt, Artificial Sequence
  Description of Artificial Sequence: Synthetic oligonucleotide
cagcacguuuaauaggaau

SEQ ID NO: 27238 - RNA, 19 nt, Artificial Sequence
  Description of Artificial Sequence: Synthetic oligonucleotide
aggcgucgagugcgacuac

SEQ ID NO: 27239 - RNA, 19 nt, Artificial Sequence
  Description of Artificial Sequence: Synthetic oligonucleotide
ccggcucccaaguuucggc

SEQ ID NO: 27240 - RNA, 19 nt, Artificial Sequence
  Description of Artificial Sequence: Synthetic oligonucleotide
accuuccggccuccuugag

SEQ ID NO: 27241 - RNA, 19 nt, Artificial Sequence
  Description of Artificial Sequence: Synthetic oligonucleotide
gugcauaggcccucugagu

SEQ ID NO: 27242 - RNA, 19 nt, Artificial Sequence
  Description of Artificial Sequence: Synthetic oligonucleotide
acgggaguuguuguuucuu

SEQ ID NO: 27243 - RNA, 19 nt, Artificial Sequence
  Description of Artificial Sequence: Synthetic oligonucleotide
gcgauguuagugaucugca

SEQ ID NO: 27244 - RNA, 19 nt, Artificial Sequence
  Description of Artificial Sequence: Synthetic oligonucleotide
gcaacguguacaugaggua

SEQ ID NO: 27245 - RNA, 19 nt, Artificial Sequence
  Description of Artificial Sequence: Synthetic oligonucleotide
gaucgccucagucgaccua

SEQ ID NO: 27246 - RNA, 19 nt, Artificial Sequence
  Description of Artificial Sequence: Synthetic oligonucleotide
cccucgaaugugaaagaca

SEQ ID NO: 27247 - RNA, 19 nt, Artificial Sequence
  Description of Artificial Sequence: Synthetic oligonucleotide
cacauaucauucggccaca

SEQ ID NO: 27248 - RNA, 19 nt, Artificial Sequence
  Description of Artificial Sequence: Synthetic oligonucleotide
ccauagggcaacguguaca

SEQ ID NO: 27249 - RNA, 19 nt, Artificial Sequence
  Description of Artificial Sequence: Synthetic oligonucleotide
cuggcacgucacacggcuc

SEQ ID NO: 27250 - RNA, 19 nt, Artificial Sequence
  Description of Artificial Sequence: Synthetic oligonucleotide
ggaguuaacagaggcuccu

SEQ ID NO: 27251 - RNA, 19 nt, Artificial Sequence
  Description of Artificial Sequence: Synthetic oligonucleotide
gccauguuuggaacgagua

SEQ ID NO: 27252 - RNA, 19 nt, Artificial Sequence
  Description of Artificial Sequence: Synthetic oligonucleotide
guccggauuuaaaucuugu

SEQ ID NO: 27253 - RNA, 19 nt, Artificial Sequence
  Description of Artificial Sequence: Synthetic oligonucleotide
ccagauuggugcuauuagu

SEQ ID NO: 27254 - RNA, 19 nt, Artificial Sequence
  Description of Artificial Sequence: Synthetic oligonucleotide
ccgaguaucugacuuccaa

SEQ ID NO: 27255 - RNA, 19 nt, Artificial Sequence
  Description of Artificial Sequence: Synthetic oligonucleotide
gaccuaucuuggaccagua

SEQ ID NO: 27256 - RNA, 19 nt, Artificial Sequence
  Description of Artificial Sequence: Synthetic oligonucleotide
uuggaccaguaaggaacuu

SEQ ID NO: 27257 - RNA, 19 nt, Artificial Sequence
  Description of Artificial Sequence: Synthetic oligonucleotide
cacacggcuccccacucua

SEQ ID NO: 27258 - RNA, 19 nt, Artificial Sequence
  Description of Artificial Sequence: Synthetic oligonucleotide
gcgguggcauuucugccga

SEQ ID NO: 27259 - RNA, 19 nt, Artificial Sequence
  Description of Artificial Sequence: Synthetic oligonucleotide
ucgccucagucgaccuauc

SEQ ID NO: 27260 - RNA, 19 nt, Artificial Sequence
  Description of Artificial Sequence: Synthetic oligonucleotide
ccccucgaaugugaaagac

SEQ ID NO: 27261 - RNA, 19 nt, Artificial Sequence
  Description of Artificial Sequence: Synthetic oligonucleotide
ggguuugggcugauucaac

SEQ ID NO: 27262 - RNA, 19 nt, Artificial Sequence
  Description of Artificial Sequence: Synthetic oligonucleotide
ucccggcuuugauccgaaa

SEQ ID NO: 27263 - RNA, 19 nt, Artificial Sequence
  Description of Artificial Sequence: Synthetic oligonucleotide
caccuagcagaucauccuu

SEQ ID NO: 27264 - RNA, 19 nt, Artificial Sequence
  Description of Artificial Sequence: Synthetic oligonucleotide
ggcaaccguacauacuguu

SEQ ID NO: 27265 - RNA, 19 nt, Artificial Sequence
  Description of Artificial Sequence: Synthetic oligonucleotide
cgucgagugcgacuacgac

SEQ ID NO: 27266 - RNA, 19 nt, Artificial Sequence
  Description of Artificial Sequence: Synthetic oligonucleotide
cacuccggcucccaaguuu

SEQ ID NO: 27267 - RNA, 19 nt, Artificial Sequence
  Description of Artificial Sequence: Synthetic oligonucleotide
ggaaggcgucgagugcgac

SEQ ID NO: 27268 - RNA, 19 nt, Artificial Sequence
  Description of Artificial Sequence: Synthetic oligonucleotide
gcgucgagugcgacuacga

SEQ ID NO: 27269 - RNA, 19 nt, Artificial Sequence
  Description of Artificial Sequence: Synthetic oligonucleotide
ggaucgccucagucgaccu

SEQ ID NO: 27270 - RNA, 19 nt, Artificial Sequence
  Description of Artificial Sequence: Synthetic oligonucleotide
gggugucgauaguuaaauu

SEQ ID NO: 27271 - RNA, 19 nt, Artificial Sequence
  Description of Artificial Sequence: Synthetic oligonucleotide
gggaaggcgucgagugcga

SEQ ID NO: 27272 - RNA, 19 nt, Artificial Sequence
  Description of Artificial Sequence: Synthetic oligonucleotide
gucccggcuuugauccgaa

SEQ ID NO: 27273 - RNA, 19 nt, Artificial Sequence
  Description of Artificial Sequence: Synthetic oligonucleotide
gccgaguaucugacuucca

SEQ ID NO: 27274 - RNA, 19 nt, Artificial Sequence
  Description of Artificial Sequence: Synthetic oligonucleotide
cuacgacauguuggcuccu

SEQ ID NO: 27275 - RNA, 19 nt, Artificial Sequence
  Description of Artificial Sequence: Synthetic oligonucleotide
cgaccuaucuuggaccagu

SEQ ID NO: 27276 - RNA, 19 nt, Artificial Sequence
  Description of Artificial Sequence: Synthetic oligonucleotide
cgagugcgacuacgacaug

SEQ ID NO: 27277 - RNA, 19 nt, Artificial Sequence
  Description of Artificial Sequence: Synthetic oligonucleotide
ccgaaagaaucuggccaau

SEQ ID NO: 27278 - RNA, 19 nt, Artificial Sequence
  Description of Artificial Sequence: Synthetic oligonucleotide
cgacuacgacauguuggcu

SEQ ID NO: 27279 - RNA, 19 nt, Artificial Sequence
  Description of Artificial Sequence: Synthetic oligonucleotide
cguccagauuggugcuauu

SEQ ID NO: 27280 - RNA, 19 nt, Artificial Sequence
  Description of Artificial Sequence: Synthetic oligonucleotide
aauuaguuagcauuuaacc

SEQ ID NO: 27281 - RNA, 19 nt, Artificial Sequence
  Description of Artificial Sequence: Synthetic oligonucleotide
aaaguuuaacgauugaaag

SEQ ID NO: 27282 - RNA, 19 nt, Artificial Sequence
  Description of Artificial Sequence: Synthetic oligonucleotide
ucaacuacacuuaucauag

SEQ ID NO: 27283 - RNA, 19 nt, Artificial Sequence
  Description of Artificial Sequence: Synthetic oligonucleotide
auuauaacaucuuacagca

SEQ ID NO: 27284 - RNA, 19 nt, Artificial Sequence
  Description of Artificial Sequence: Synthetic oligonucleotide
uauuucgugaaguuuaccg

SEQ ID NO: 27285 - RNA, 19 nt, Artificial Sequence
  Description of Artificial Sequence: Synthetic oligonucleotide
ucucaguacauucaaauag

SEQ ID NO: 27286 - RNA, 19 nt, Artificial Sequence
  Description of Artificial Sequence: Synthetic oligonucleotide
aacuacacuuaucauaggg

SEQ ID NO: 27287 - RNA, 19 nt, Artificial Sequence
  Description of Artificial Sequence: Synthetic oligonucleotide
ucucauugcaaucucacgg

SEQ ID NO: 27288 - RNA, 19 nt, Artificial Sequence
  Description of Artificial Sequence: Synthetic oligonucleotide
uuagacgaaauucucauug

SEQ ID NO: 27289 - RNA, 19 nt, Artificial Sequence
  Description of Artificial Sequence: Synthetic oligonucleotide
auaaauugcaccuaucuca

SEQ ID NO: 27290 - RNA, 19 nt, Artificial Sequence
  Description of Artificial Sequence: Synthetic oligonucleotide
aauguuuagaguaacacca

SEQ ID NO: 27291 - RNA, 19 nt, Artificial Sequence
  Description of Artificial Sequence: Synthetic oligonucleotide
aaagaaaccucguaggcug

SEQ ID NO: 27292 - RNA, 19 nt, Artificial Sequence
  Description of Artificial Sequence: Synthetic oligonucleotide
aaguuuaccgucuucuuuc

SEQ ID NO: 27293 - RNA, 19 nt, Artificial Sequence
  Description of Artificial Sequence: Synthetic oligonucleotide
uguaaucuuauuaucgugc

SEQ ID NO: 27294 - RNA, 19 nt, Artificial Sequence
  Description of Artificial Sequence: Synthetic oligonucleotide
aacaaugcaccuaauaaac

SEQ ID NO: 27295 - RNA, 19 nt, Artificial Sequence
  Description of Artificial Sequence: Synthetic oligonucleotide
gauugaaagagucugguac

SEQ ID NO: 27296 - RNA, 19 nt, Artificial Sequence
  Description of Artificial Sequence: Synthetic oligonucleotide
aacaaauuagcuguaaucu

SEQ ID NO: 27297 - RNA, 19 nt, Artificial Sequence
  Description of Artificial Sequence: Synthetic oligonucleotide
uacgacaucgugcucaucg

SEQ ID NO: 27298 - RNA, 19 nt, Artificial Sequence
  Description of Artificial Sequence: Synthetic oligonucleotide
aacaccuguauucaaauga

SEQ ID NO: 27299 - RNA, 19 nt, Artificial Sequence
  Description of Artificial Sequence: Synthetic oligonucleotide
aguuuaacgauugaaagag

SEQ ID NO: 27300 - RNA, 19 nt, Artificial Sequence
  Description of Artificial Sequence: Synthetic oligonucleotide
uguagugcggugaugagag

SEQ ID NO: 27301 - RNA, 19 nt, Artificial Sequence
  Description of Artificial Sequence: Synthetic oligonucleotide
aaaguacccacuccaauag

SEQ ID NO: 27302 - RNA, 19 nt, Artificial Sequence
  Description of Artificial Sequence: Synthetic oligonucleotide
aaguaauguacuuaguuau

SEQ ID NO: 27303 - RNA, 19 nt, Artificial Sequence
  Description of Artificial Sequence: Synthetic oligonucleotide
agcauuuaaccugagauac

SEQ ID NO: 27304 - RNA, 19 nt, Artificial Sequence
  Description of Artificial Sequence: Synthetic oligonucleotide
auuaguuagcauuuaaccu

SEQ ID NO: 27305 - RNA, 19 nt, Artificial Sequence
  Description of Artificial Sequence: Synthetic oligonucleotide
ugacaauggaauaaauugc

SEQ ID NO: 27306 - RNA, 19 nt, Artificial Sequence
  Description of Artificial Sequence: Synthetic oligonucleotide
cuaagaaggugucagaaag

SEQ ID NO: 27307 - RNA, 19 nt, Artificial Sequence
  Description of Artificial Sequence: Synthetic oligonucleotide
aaaguaauguacuuaguua

SEQ ID NO: 27308 - RNA, 19 nt, Artificial Sequence
  Description of Artificial Sequence: Synthetic oligonucleotide
aaguuuaacgauugaaaga

SEQ ID NO: 27309 - RNA, 19 nt, Artificial Sequence
  Description of Artificial Sequence: Synthetic oligonucleotide
uuuaacgauugaaagaguc

SEQ ID NO: 27310 - RNA, 19 nt, Artificial Sequence
  Description of Artificial Sequence: Synthetic oligonucleotide
cagguuacgacacugaaag

SEQ ID NO: 27311 - RNA, 19 nt, Artificial Sequence
  Description of Artificial Sequence: Synthetic oligonucleotide
aaucuuauuaucgugcaca

SEQ ID NO: 27312 - RNA, 19 nt, Artificial Sequence
  Description of Artificial Sequence: Synthetic oligonucleotide
acgguuaucaucuugcaug

SEQ ID NO: 27313 - RNA, 19 nt, Artificial Sequence
  Description of Artificial Sequence: Synthetic oligonucleotide
uggcacgugagcuagaaag

SEQ ID NO: 27314 - RNA, 19 nt, Artificial Sequence
  Description of Artificial Sequence: Synthetic oligonucleotide
uaaccugagauacagucug

SEQ ID NO: 27315 - RNA, 19 nt, Artificial Sequence
  Description of Artificial Sequence: Synthetic oligonucleotide
uaauuaguuagcauuuaac

SEQ ID NO: 27316 - RNA, 19 nt, Artificial Sequence
  Description of Artificial Sequence: Synthetic oligonucleotide
guagagucggacuuuaugc

SEQ ID NO: 27317 - RNA, 19 nt, Artificial Sequence
  Description of Artificial Sequence: Synthetic oligonucleotide
aaaguaaggaagucagagu

SEQ ID NO: 27318 - RNA, 19 nt, Artificial Sequence
  Description of Artificial Sequence: Synthetic oligonucleotide
ucagcguaagugaagaagu

SEQ ID NO: 27319 - RNA, 19 nt, Artificial Sequence
  Description of Artificial Sequence: Synthetic oligonucleotide
gguaccguaauccacaacc

SEQ ID NO: 27320 - RNA, 19 nt, Artificial Sequence
  Description of Artificial Sequence: Synthetic oligonucleotide
uuuagaguaacaccaccac

SEQ ID NO: 27321 - RNA, 19 nt, Artificial Sequence
  Description of Artificial Sequence: Synthetic oligonucleotide
acaucuuacagcauuuuac

SEQ ID NO: 27322 - RNA, 19 nt, Artificial Sequence
  Description of Artificial Sequence: Synthetic oligonucleotide
ggugacuucgcuuagauuc

SEQ ID NO: 27323 - RNA, 19 nt, Artificial Sequence
  Description of Artificial Sequence: Synthetic oligonucleotide
ucagaauagacccucccac

SEQ ID NO: 27324 - RNA, 19 nt, Artificial Sequence
  Description of Artificial Sequence: Synthetic oligonucleotide
auagugaucgucucgguca

SEQ ID NO: 27325 - RNA, 19 nt, Artificial Sequence
  Description of Artificial Sequence: Synthetic oligonucleotide
agucaagagguucauuggg

SEQ ID NO: 27326 - RNA, 19 nt, Artificial Sequence
  Description of Artificial Sequence: Synthetic oligonucleotide
uuuuaaacauauggguagg

SEQ ID NO: 27327 - RNA, 19 nt, Artificial Sequence
  Description of Artificial Sequence: Synthetic oligonucleotide
uuugcgaagauggacacca

SEQ ID NO: 27328 - RNA, 19 nt, Artificial Sequence
  Description of Artificial Sequence: Synthetic oligonucleotide
agaauuucagcacgugggg

SEQ ID NO: 27329 - RNA, 19 nt, Artificial Sequence
  Description of Artificial Sequence: Synthetic oligonucleotide
uguagagucggacuuuaug

SEQ ID NO: 27330 - RNA, 19 nt, Artificial Sequence
  Description of Artificial Sequence: Synthetic oligonucleotide
aaacuuacuuaucuuguau

SEQ ID NO: 27331 - RNA, 19 nt, Artificial Sequence
  Description of Artificial Sequence: Synthetic oligonucleotide
uagaaacuuccauugacug

SEQ ID NO: 27332 - RNA, 19 nt, Artificial Sequence
  Description of Artificial Sequence: Synthetic oligonucleotide
ggcguaaggagacauaugg

SEQ ID NO: 27333 - RNA, 19 nt, Artificial Sequence
  Description of Artificial Sequence: Synthetic oligonucleotide
uguuuagaguaacaccacc

SEQ ID NO: 27334 - RNA, 19 nt, Artificial Sequence
  Description of Artificial Sequence: Synthetic oligonucleotide
uagagucggacuuuaugcg

SEQ ID NO: 27335 - RNA, 19 nt, Artificial Sequence
  Description of Artificial Sequence: Synthetic oligonucleotide
auaaucagaaugaaagcag

SEQ ID NO: 27336 - RNA, 19 nt, Artificial Sequence
  Description of Artificial Sequence: Synthetic oligonucleotide
uaauguacuuaguuauugc

SEQ ID NO: 27337 - RNA, 19 nt, Artificial Sequence
  Description of Artificial Sequence: Synthetic oligonucleotide
uggauguacgacaucgugc

SEQ ID NO: 27338 - RNA, 19 nt, Artificial Sequence
  Description of Artificial Sequence: Synthetic oligonucleotide
uugcaugagucuucgaucc

SEQ ID NO: 27339 - RNA, 19 nt, Artificial Sequence
  Description of Artificial Sequence: Synthetic oligonucleotide
gcuagaauaacacucuaag

SEQ ID NO: 27340 - RNA, 19 nt, Artificial Sequence
  Description of Artificial Sequence: Synthetic oligonucleotide
gacugccccgauuugaacg

SEQ ID NO: 27341 - RNA, 19 nt, Artificial Sequence
  Description of Artificial Sequence: Synthetic oligonucleotide
aucuuauuaucgugcacac

SEQ ID NO: 27342 - RNA, 19 nt, Artificial Sequence
  Description of Artificial Sequence: Synthetic oligonucleotide
gcgcagauuaaccagaugg

SEQ ID NO: 27343 - RNA, 19 nt, Artificial Sequence
  Description of Artificial Sequence: Synthetic oligonucleotide
uuagaguaacaccaccaca

SEQ ID NO: 27344 - RNA, 19 nt, Artificial Sequence
  Description of Artificial Sequence: Synthetic oligonucleotide
uacuaaaccagguuacgac

SEQ ID NO: 27345 - RNA, 19 nt, Artificial Sequence
  Description of Artificial Sequence: Synthetic oligonucleotide
ugugaguaaacagcuggcg

SEQ ID NO: 27346 - RNA, 19 nt, Artificial Sequence
  Description of Artificial Sequence: Synthetic oligonucleotide
aggguaacugacuggacuc

SEQ ID NO: 27347 - RNA, 19 nt, Artificial Sequence
  Description of Artificial Sequence: Synthetic oligonucleotide
uuaaccugagauacagucu

SEQ ID NO: 27348 - RNA, 19 nt, Artificial Sequence
  Description of Artificial Sequence: Synthetic oligonucleotide
gaaaaguuuugguacugac

SEQ ID NO: 27349 - RNA, 19 nt, Artificial Sequence
  Description of Artificial Sequence: Synthetic oligonucleotide
uucagaauagacccuccca

SEQ ID NO: 27350 - RNA, 19 nt, Artificial Sequence
  Description of Artificial Sequence: Synthetic oligonucleotide
aguuugcgaagauggacac

SEQ ID NO: 27351 - RNA, 19 nt, Artificial Sequence
  Description of Artificial Sequence: Synthetic oligonucleotide
uauuaucgugcacaccuug

SEQ ID NO: 27352 - RNA, 19 nt, Artificial Sequence
  Description of Artificial Sequence: Synthetic oligonucleotide
aaggauuguagaccacgag

SEQ ID NO: 27353 - RNA, 19 nt, Artificial Sequence
  Description of Artificial Sequence: Synthetic oligonucleotide
ugaaaucguucuuggauca

SEQ ID NO: 27354 - RNA, 19 nt, Artificial Sequence
  Description of Artificial Sequence: Synthetic oligonucleotide
ucucguguguuacaaaauc

SEQ ID NO: 27355 - RNA, 19 nt, Artificial Sequence
  Description of Artificial Sequence: Synthetic oligonucleotide
uucucauugcaaucucacg

SEQ ID NO: 27356 - RNA, 19 nt, Artificial Sequence
  Description of Artificial Sequence: Synthetic oligonucleotide
aacuugcacucugugauuc

SEQ ID NO: 27357 - RNA, 19 nt, Artificial Sequence
  Description of Artificial Sequence: Synthetic oligonucleotide
acuacacuuaucauagggg

SEQ ID NO: 27358 - RNA, 19 nt, Artificial Sequence
  Description of Artificial Sequence: Synthetic oligonucleotide
acuaaaccagguuacgaca

SEQ ID NO: 27359 - RNA, 19 nt, Artificial Sequence
  Description of Artificial Sequence: Synthetic oligonucleotide
aacuuacuuaucuuguauu

SEQ ID NO: 27360 - RNA, 19 nt, Artificial Sequence
  Description of Artificial Sequence: Synthetic oligonucleotide
cuuauuaucgugcacaccu

SEQ ID NO: 27361 - RNA, 19 nt, Artificial Sequence
  Description of Artificial Sequence: Synthetic oligonucleotide
ugucguucaauacuucuuc

SEQ ID NO: 27362 - RNA, 19 nt, Artificial Sequence
  Description of Artificial Sequence: Synthetic oligonucleotide
ucaucggguaaacauuggc

SEQ ID NO: 27363 - RNA, 19 nt, Artificial Sequence
  Description of Artificial Sequence: Synthetic oligonucleotide
aaaaccccucucuugauuu

SEQ ID NO: 27364 - RNA, 19 nt, Artificial Sequence
  Description of Artificial Sequence: Synthetic oligonucleotide
auuucgugaaguuuaccgu

SEQ ID NO: 27365 - RNA, 19 nt, Artificial Sequence
  Description of Artificial Sequence: Synthetic oligonucleotide
uuaucgugcacaccuugcc

SEQ ID NO: 27366 - RNA, 19 nt, Artificial Sequence
  Description of Artificial Sequence: Synthetic oligonucleotide
auuagagaucuuauauuac

SEQ ID NO: 27367 - RNA, 19 nt, Artificial Sequence
  Description of Artificial Sequence: Synthetic oligonucleotide
uucaguaucaugggaagga

SEQ ID NO: 27368 - RNA, 19 nt, Artificial Sequence
  Description of Artificial Sequence: Synthetic oligonucleotide
ugagcuacacaaauggauu

SEQ ID NO: 27369 - RNA, 19 nt, Artificial Sequence
  Description of Artificial Sequence: Synthetic oligonucleotide
ggguauuuauuuuagacga

SEQ ID NO: 27370 - RNA, 19 nt, Artificial Sequence
  Description of Artificial Sequence: Synthetic oligonucleotide
acuuaaaaguccugugaug

SEQ ID NO: 27371 - RNA, 19 nt, Artificial Sequence
  Description of Artificial Sequence: Synthetic oligonucleotide
cuuauacacuuucaucccc

SEQ ID NO: 27372 - RNA, 19 nt, Artificial Sequence
  Description of Artificial Sequence: Synthetic oligonucleotide
uugaaagagucugguaccg

SEQ ID NO: 27373 - RNA, 19 nt, Artificial Sequence
  Description of Artificial Sequence: Synthetic oligonucleotide
gucacguucucacaguagc

SEQ ID NO: 27374 - RNA, 19 nt, Artificial Sequence
  Description of Artificial Sequence: Synthetic oligonucleotide
auauuugaacaaugcaccu

SEQ ID NO: 27375 - RNA, 19 nt, Artificial Sequence
  Description of Artificial Sequence: Synthetic oligonucleotide
uugcaccuaucucacauug

SEQ ID NO: 27376 - RNA, 19 nt, Artificial Sequence
  Description of Artificial Sequence: Synthetic oligonucleotide
uuucgugaaguuuaccguc

SEQ ID NO: 27377 - RNA, 19 nt, Artificial Sequence
  Description of Artificial Sequence: Synthetic oligonucleotide
ucguucuuggaucacucca

SEQ ID NO: 27378 - RNA, 19 nt, Artificial Sequence
  Description of Artificial Sequence: Synthetic oligonucleotide
agcagcauauuuuaauuaa

SEQ ID NO: 27379 - RNA, 19 nt, Artificial Sequence
  Description of Artificial Sequence: Synthetic oligonucleotide
aacgauugaaagagucugg

SEQ ID NO: 27380 - RNA, 19 nt, Artificial Sequence
  Description of Artificial Sequence: Synthetic oligonucleotide
ugacaaaggccugugaaga

SEQ ID NO: 27381 - RNA, 19 nt, Artificial Sequence
  Description of Artificial Sequence: Synthetic oligonucleotide
cuaaaccagguuacgacac

SEQ ID NO: 27382 - RNA, 19 nt, Artificial Sequence
  Description of Artificial Sequence: Synthetic oligonucleotide
ucugucuacuccgucauug

SEQ ID NO: 27383 - RNA, 19 nt, Artificial Sequence
  Description of Artificial Sequence: Synthetic oligonucleotide
ucaaaucugacagucaguu

SEQ ID NO: 27384 - RNA, 19 nt, Artificial Sequence
  Description of Artificial Sequence: Synthetic oligonucleotide
uuuacugugcacuguugac

SEQ ID NO: 27385 - RNA, 19 nt, Artificial Sequence
  Description of Artificial Sequence: Synthetic oligonucleotide
uacuguugaaugacuauaa

SEQ ID NO: 27386 - RNA, 19 nt, Artificial Sequence
  Description of Artificial Sequence: Synthetic oligonucleotide
acgaaauucucauugcaau

SEQ ID NO: 27387 - RNA, 19 nt, Artificial Sequence
  Description of Artificial Sequence: Synthetic oligonucleotide
guaccuaaaauggaauugc

SEQ ID NO: 27388 - RNA, 19 nt, Artificial Sequence
  Description of Artificial Sequence: Synthetic oligonucleotide
auugugcgcagauuaacca

SEQ ID NO: 27389 - RNA, 19 nt, Artificial Sequence
  Description of Artificial Sequence: Synthetic oligonucleotide
acguaaaguacccacucca

SEQ ID NO: 27390 - RNA, 19 nt, Artificial Sequence
  Description of Artificial Sequence: Synthetic oligonucleotide
ugaaacagaucagaacgug

SEQ ID NO: 27391 - RNA, 19 nt, Artificial Sequence
  Description of Artificial Sequence: Synthetic oligonucleotide
uagacgaaauucucauugc

SEQ ID NO: 27392 - RNA, 19 nt, Artificial Sequence
  Description of Artificial Sequence: Synthetic oligonucleotide
ugugcgcagauuaaccaga

SEQ ID NO: 27393 - RNA, 19 nt, Artificial Sequence
  Description of Artificial Sequence: Synthetic oligonucleotide
aagcggaugcggaaugugc

SEQ ID NO: 27394 - RNA, 19 nt, Artificial Sequence
  Description of Artificial Sequence: Synthetic oligonucleotide
uugaacaaugcaccuaaua

SEQ ID NO: 27395 - RNA, 19 nt, Artificial Sequence
  Description of Artificial Sequence: Synthetic oligonucleotide
acaaccacccagucuuucg

SEQ ID NO: 27396 - RNA, 19 nt, Artificial Sequence
  Description of Artificial Sequence: Synthetic oligonucleotide
acacuuaucauagggguug

SEQ ID NO: 27397 - RNA, 19 nt, Artificial Sequence
  Description of Artificial Sequence: Synthetic oligonucleotide
ucaccuuaagcggaugcgg

SEQ ID NO: 27398 - RNA, 19 nt, Artificial Sequence
  Description of Artificial Sequence: Synthetic oligonucleotide
ugagcugcgagcaguguga

SEQ ID NO: 27399 - RNA, 19 nt, Artificial Sequence
  Description of Artificial Sequence: Synthetic oligonucleotide
cacgaaaacguuuggaaca

SEQ ID NO: 27400 - RNA, 19 nt, Artificial Sequence
  Description of Artificial Sequence: Synthetic oligonucleotide
uuggaacauaucuuuagua

SEQ ID NO: 27401 - RNA, 19 nt, Artificial Sequence
  Description of Artificial Sequence: Synthetic oligonucleotide
uaucgugcacaccuugccc

SEQ ID NO: 27402 - RNA, 19 nt, Artificial Sequence
  Description of Artificial Sequence: Synthetic oligonucleotide
aaccguuuuggaaagcaug

SEQ ID NO: 27403 - RNA, 19 nt, Artificial Sequence
  Description of Artificial Sequence: Synthetic oligonucleotide
gaucucguguguuacaaaa

SEQ ID NO: 27404 - RNA, 19 nt, Artificial Sequence
  Description of Artificial Sequence: Synthetic oligonucleotide
aaucaacuacacuuaucau

SEQ ID NO: 27405 - RNA, 19 nt, Artificial Sequence
  Description of Artificial Sequence: Synthetic oligonucleotide
aguuuaccgucuucuuucg

SEQ ID NO: 27406 - RNA, 19 nt, Artificial Sequence
  Description of Artificial Sequence: Synthetic oligonucleotide
ucuaagaaggugucagaaa

SEQ ID NO: 27407 - RNA, 19 nt, Artificial Sequence
  Description of Artificial Sequence: Synthetic oligonucleotide
accguuuuggaaagcaugg

SEQ ID NO: 27408 - RNA, 19 nt, Artificial Sequence
  Description of Artificial Sequence: Synthetic oligonucleotide
uggagaacuggcaaucaaa

SEQ ID NO: 27409 - RNA, 19 nt, Artificial Sequence
  Description of Artificial Sequence: Synthetic oligonucleotide
uugguacaacuucuugucc

SEQ ID NO: 27410 - RNA, 19 nt, Artificial Sequence
  Description of Artificial Sequence: Synthetic oligonucleotide
agauugguacaacuucuug

SEQ ID NO: 27411 - RNA, 19 nt, Artificial Sequence
  Description of Artificial Sequence: Synthetic oligonucleotide
uaaucuuauuaucgugcac

SEQ ID NO: 27412 - RNA, 19 nt, Artificial Sequence
  Description of Artificial Sequence: Synthetic oligonucleotide
ggaugguugaggaaggacg

SEQ ID NO: 27413 - RNA, 19 nt, Artificial Sequence
  Description of Artificial Sequence: Synthetic oligonucleotide
cuuuaugcgacacguguuc

SEQ ID NO: 27414 - RNA, 19 nt, Artificial Sequence
  Description of Artificial Sequence: Synthetic oligonucleotide
uuaagaugggguugagagu

SEQ ID NO: 27415 - RNA, 19 nt, Artificial Sequence
  Description of Artificial Sequence: Synthetic oligonucleotide
accuaucucacauugucaa

SEQ ID NO: 27416 - RNA, 19 nt, Artificial Sequence
  Description of Artificial Sequence: Synthetic oligonucleotide
ugaguuugcgaagauggac

SEQ ID NO: 27417 - RNA, 19 nt, Artificial Sequence
  Description of Artificial Sequence: Synthetic oligonucleotide
uuaaacauauggguaggaa

SEQ ID NO: 27418 - RNA, 19 nt, Artificial Sequence
  Description of Artificial Sequence: Synthetic oligonucleotide
cuauccauccguuuguaga

SEQ ID NO: 27419 - RNA, 19 nt, Artificial Sequence
  Description of Artificial Sequence: Synthetic oligonucleotide
gacguaaaguacccacucc

SEQ ID NO: 27420 - RNA, 19 nt, Artificial Sequence
  Description of Artificial Sequence: Synthetic oligonucleotide
cuucgcuuagauucugggc

SEQ ID NO: 27421 - RNA, 19 nt, Artificial Sequence
  Description of Artificial Sequence: Synthetic oligonucleotide
agggcugucguucaauacu

SEQ ID NO: 27422 - RNA, 19 nt, Artificial Sequence
  Description of Artificial Sequence: Synthetic oligonucleotide
aaaccccucucuugauuuc

SEQ ID NO: 27423 - RNA, 19 nt, Artificial Sequence
  Description of Artificial Sequence: Synthetic oligonucleotide
auuuuagacgaaauucuca

SEQ ID NO: 27424 - RNA, 19 nt, Artificial Sequence
  Description of Artificial Sequence: Synthetic oligonucleotide
auucuauccauccguuugu

SEQ ID NO: 27425 - RNA, 19 nt, Artificial Sequence
  Description of Artificial Sequence: Synthetic oligonucleotide
agaaacuuacuuaucuugu

SEQ ID NO: 27426 - RNA, 19 nt, Artificial Sequence
  Description of Artificial Sequence: Synthetic oligonucleotide
ucggacuuuaugcgacacg

SEQ ID NO: 27427 - RNA, 19 nt, Artificial Sequence
  Description of Artificial Sequence: Synthetic oligonucleotide
guaucaugggaaggaaugg

SEQ ID NO: 27428 - RNA, 19 nt, Artificial Sequence
  Description of Artificial Sequence: Synthetic oligonucleotide
uugcucguaauuccuguac

SEQ ID NO: 27429 - RNA, 19 nt, Artificial Sequence
  Description of Artificial Sequence: Synthetic oligonucleotide
ucucggucagcguaaguga

SEQ ID NO: 27430 - RNA, 19 nt, Artificial Sequence
  Description of Artificial Sequence: Synthetic oligonucleotide
uugugguaccuaaaaugga

SEQ ID NO: 27431 - RNA, 19 nt, Artificial Sequence
  Description of Artificial Sequence: Synthetic oligonucleotide
aauggccuggacguaaagu

SEQ ID NO: 27432 - RNA, 19 nt, Artificial Sequence
  Description of Artificial Sequence: Synthetic oligonucleotide
aucggguaaacauuggcuu

SEQ ID NO: 27433 - RNA, 19 nt, Artificial Sequence
  Description of Artificial Sequence: Synthetic oligonucleotide
uagcauuuaaccugagaua

SEQ ID NO: 27434 - RNA, 19 nt, Artificial Sequence
  Description of Artificial Sequence: Synthetic oligonucleotide
aggauucgaaacaaauuag

SEQ ID NO: 27435 - RNA, 19 nt, Artificial Sequence
  Description of Artificial Sequence: Synthetic oligonucleotide
ugcgacacguguucaaaga

SEQ ID NO: 27436 - RNA, 19 nt, Artificial Sequence
  Description of Artificial Sequence: Synthetic oligonucleotide
aagcuaaaguaauguacuu

SEQ ID NO: 27437 - RNA, 19 nt, Artificial Sequence
  Description of Artificial Sequence: Synthetic oligonucleotide
auucaguaucaugggaagg

SEQ ID NO: 27438 - RNA, 19 nt, Artificial Sequence
  Description of Artificial Sequence: Synthetic oligonucleotide
ucagccuugugugaacuug

SEQ ID NO: 27439 - RNA, 19 nt, Artificial Sequence
  Description of Artificial Sequence: Synthetic oligonucleotide
gaaaccguuuuggaaagca

SEQ ID NO: 27440 - RNA, 19 nt, Artificial Sequence
  Description of Artificial Sequence: Synthetic oligonucleotide
guuuagaguaacaccacca

SEQ ID NO: 27441 - RNA, 19 nt, Artificial Sequence
  Description of Artificial Sequence: Synthetic oligonucleotide
caccacacgaaaacguuug

SEQ ID NO: 27442 - RNA, 19 nt, Artificial Sequence
  Description of Artificial Sequence: Synthetic oligonucleotide
ugcgaagauggacaccacu

SEQ ID NO: 27443 - RNA, 19 nt, Artificial Sequence
  Description of Artificial Sequence: Synthetic oligonucleotide
aguugcucguaauuccugu

SEQ ID NO: 27444 - RNA, 19 nt, Artificial Sequence
  Description of Artificial Sequence: Synthetic oligonucleotide
accacccagucuuucgacg

SEQ ID NO: 27445 - RNA, 19 nt, Artificial Sequence
  Description of Artificial Sequence: Synthetic oligonucleotide
agagcggucaaaccagagu

SEQ ID NO: 27446 - RNA, 19 nt, Artificial Sequence
  Description of Artificial Sequence: Synthetic oligonucleotide
agagucggacuuuaugcga

SEQ ID NO: 27447 - RNA, 19 nt, Artificial Sequence
  Description of Artificial Sequence: Synthetic oligonucleotide
aguacccacuccaauagug

SEQ ID NO: 27448 - RNA, 19 nt, Artificial Sequence
  Description of Artificial Sequence: Synthetic oligonucleotide
gguaccuaaaauggaauug

SEQ ID NO: 27449 - RNA, 19 nt, Artificial Sequence
  Description of Artificial Sequence: Synthetic oligonucleotide
agauaauacuaaaccaggu

SEQ ID NO: 27450 - RNA, 19 nt, Artificial Sequence
  Description of Artificial Sequence: Synthetic oligonucleotide
auguuuagaguaacaccac

SEQ ID NO: 27451 - RNA, 19 nt, Artificial Sequence
  Description of Artificial Sequence: Synthetic oligonucleotide
gugaucgucucggucagcg

SEQ ID NO: 27452 - RNA, 19 nt, Artificial Sequence
  Description of Artificial Sequence: Synthetic oligonucleotide
aacguuuggaacauaucuu

SEQ ID NO: 27453 - RNA, 19 nt, Artificial Sequence
  Description of Artificial Sequence: Synthetic oligonucleotide
auguacgacaucgugcuca

SEQ ID NO: 27454 - RNA, 19 nt, Artificial Sequence
  Description of Artificial Sequence: Synthetic oligonucleotide
uuauuccaucaguucacac

SEQ ID NO: 27455 - RNA, 19 nt, Artificial Sequence
  Description of Artificial Sequence: Synthetic oligonucleotide
auacagucuguugagggcu

SEQ ID NO: 27456 - RNA, 19 nt, Artificial Sequence
  Description of Artificial Sequence: Synthetic oligonucleotide
uuuuacuagacugguuuua

SEQ ID NO: 27457 - RNA, 19 nt, Artificial Sequence
  Description of Artificial Sequence: Synthetic oligonucleotide
gaugguugaggaaggacga

SEQ ID NO: 27458 - RNA, 19 nt, Artificial Sequence
  Description of Artificial Sequence: Synthetic oligonucleotide
cuuaagcggaugcggaaug

SEQ ID NO: 27459 - RNA, 19 nt, Artificial Sequence
  Description of Artificial Sequence: Synthetic oligonucleotide
acgacaucgugcucaucgg

SEQ ID NO: 27460 - RNA, 19 nt, Artificial Sequence
  Description of Artificial Sequence: Synthetic oligonucleotide
cuggauguacgacaucgug

SEQ ID NO: 27461 - RNA, 19 nt, Artificial Sequence
  Description of Artificial Sequence: Synthetic oligonucleotide
uggcacguuguagagucgg

SEQ ID NO: 27462 - RNA, 19 nt, Artificial Sequence
  Description of Artificial Sequence: Synthetic oligonucleotide
gucucggucagcguaagug

SEQ ID NO: 27463 - RNA, 19 nt, Artificial Sequence
  Description of Artificial Sequence: Synthetic oligonucleotide
uacacuuaucauagggguu

SEQ ID NO: 27464 - RNA, 19 nt, Artificial Sequence
  Description of Artificial Sequence: Synthetic oligonucleotide
auacuaaaccagguuacga

SEQ ID NO: 27465 - RNA, 19 nt, Artificial Sequence
  Description of Artificial Sequence: Synthetic oligonucleotide
ucaagcgcgauuccaugau

SEQ ID NO: 27466 - RNA, 19 nt, Artificial Sequence
  Description of Artificial Sequence: Synthetic oligonucleotide
accacacgaaaacguuugg

SEQ ID NO: 27467 - RNA, 19 nt, Artificial Sequence
  Description of Artificial Sequence: Synthetic oligonucleotide
ucguucaauacuucuucau

SEQ ID NO: 27468 - RNA, 19 nt, Artificial Sequence
  Description of Artificial Sequence: Synthetic oligonucleotide
aauugaacaguugcucgua

SEQ ID NO: 27469 - RNA, 19 nt, Artificial Sequence
  Description of Artificial Sequence: Synthetic oligonucleotide
gaaagagucugguaccgua

SEQ ID NO: 27470 - RNA, 19 nt, Artificial Sequence
  Description of Artificial Sequence: Synthetic oligonucleotide
uuauuucgugaaguuuacc

SEQ ID NO: 27471 - RNA, 19 nt, Artificial Sequence
  Description of Artificial Sequence: Synthetic oligonucleotide
guggggagaguucuugacc

SEQ ID NO: 27472 - RNA, 19 nt, Artificial Sequence
  Description of Artificial Sequence: Synthetic oligonucleotide
ucuuauuaucgugcacacc

SEQ ID NO: 27473 - RNA, 19 nt, Artificial Sequence
  Description of Artificial Sequence: Synthetic oligonucleotide
uuuagacgaaauucucauu

SEQ ID NO: 27474 - RNA, 19 nt, Artificial Sequence
  Description of Artificial Sequence: Synthetic oligonucleotide
uuuaugcgacacguguuca

SEQ ID NO: 27475 - RNA, 19 nt, Artificial Sequence
  Description of Artificial Sequence: Synthetic oligonucleotide
uccuguacugcagauccca

SEQ ID NO: 27476 - RNA, 19 nt, Artificial Sequence
  Description of Artificial Sequence: Synthetic oligonucleotide
uucuagguugaaucuggaa

SEQ ID NO: 27477 - RNA, 19 nt, Artificial Sequence
  Description of Artificial Sequence: Synthetic oligonucleotide
ccgauuugaacguccacgg

SEQ ID NO: 27478 - RNA, 19 nt, Artificial Sequence
  Description of Artificial Sequence: Synthetic oligonucleotide
cuacacuuaucauaggggu

SEQ ID NO: 27479 - RNA, 19 nt, Artificial Sequence
  Description of Artificial Sequence: Synthetic oligonucleotide
cucaucggguaaacauugg

SEQ ID NO: 27480 - RNA, 19 nt, Artificial Sequence
  Description of Artificial Sequence: Synthetic oligonucleotide
augcgacacguguucaaag

SEQ ID NO: 27481 - RNA, 19 nt, Artificial Sequence
  Description of Artificial Sequence: Synthetic oligonucleotide
agcguaagugaagaagucu

SEQ ID NO: 27482 - RNA, 19 nt, Artificial Sequence
  Description of Artificial Sequence: Synthetic oligonucleotide
aaccucguaggcugcuugu

SEQ ID NO: 27483 - RNA, 19 nt, Artificial Sequence
  Description of Artificial Sequence: Synthetic oligonucleotide
ucuaucccuggcacguugu

SEQ ID NO: 27484 - RNA, 19 nt, Artificial Sequence
  Description of Artificial Sequence: Synthetic oligonucleotide
uuacuagacugguuuuaaa

SEQ ID NO: 27485 - RNA, 19 nt, Artificial Sequence
  Description of Artificial Sequence: Synthetic oligonucleotide
acugccccgauuugaacgu

SEQ ID NO: 27486 - RNA, 19 nt, Artificial Sequence
  Description of Artificial Sequence: Synthetic oligonucleotide
acgauugaaagagucuggu

SEQ ID NO: 27487 - RNA, 19 nt, Artificial Sequence
  Description of Artificial Sequence: Synthetic oligonucleotide
agaaaccguuuuggaaagc

SEQ ID NO: 27488 - RNA, 19 nt, Artificial Sequence
  Description of Artificial Sequence: Synthetic oligonucleotide
auagugguucuuuguggga

SEQ ID NO: 27489 - RNA, 19 nt, Artificial Sequence
  Description of Artificial Sequence: Synthetic oligonucleotide
aaagagucugguaccguaa

SEQ ID NO: 27490 - RNA, 19 nt, Artificial Sequence
  Description of Artificial Sequence: Synthetic oligonucleotide
uaucccuggcacguuguag

SEQ ID NO: 27491 - RNA, 19 nt, Artificial Sequence
  Description of Artificial Sequence: Synthetic oligonucleotide
aaggccugugaagacauuu

SEQ ID NO: 27492 - RNA, 19 nt, Artificial Sequence
  Description of Artificial Sequence: Synthetic oligonucleotide
gucuacuccgucauuguac

SEQ ID NO: 27493 - RNA, 19 nt, Artificial Sequence
  Description of Artificial Sequence: Synthetic oligonucleotide
uaaucagccuugugugaac

SEQ ID NO: 27494 - RNA, 19 nt, Artificial Sequence
  Description of Artificial Sequence: Synthetic oligonucleotide
uuauuaucgugcacaccuu

SEQ ID NO: 27495 - RNA, 19 nt, Artificial Sequence
  Description of Artificial Sequence: Synthetic oligonucleotide
agacugccccgauuugaac

SEQ ID NO: 27496 - RNA, 19 nt, Artificial Sequence
  Description of Artificial Sequence: Synthetic oligonucleotide
uuaugcgacacguguucaa

SEQ ID NO: 27497 - RNA, 19 nt, Artificial Sequence
  Description of Artificial Sequence: Synthetic oligonucleotide
uuacagcccucaaugcaaa

SEQ ID NO: 27498 - RNA, 19 nt, Artificial Sequence
  Description of Artificial Sequence: Synthetic oligonucleotide
uacccaaccccugccacag

SEQ ID NO: 27499 - RNA, 19 nt, Artificial Sequence
  Description of Artificial Sequence: Synthetic oligonucleotide
ugcggugaugagagaaacu

SEQ ID NO: 27500 - RNA, 19 nt, Artificial Sequence
  Description of Artificial Sequence: Synthetic oligonucleotide
acgggcuuuccugaguccg

SEQ ID NO: 27501 - RNA, 19 nt, Artificial Sequence
  Description of Artificial Sequence: Synthetic oligonucleotide
agucuuucgacggucccug

SEQ ID NO: 27502 - RNA, 19 nt, Artificial Sequence
  Description of Artificial Sequence: Synthetic oligonucleotide
augaaacagaucagaacgu

SEQ ID NO: 27503 - RNA, 19 nt, Artificial Sequence
  Description of Artificial Sequence: Synthetic oligonucleotide
uucgacggucccuguaaug

SEQ ID NO: 27504 - RNA, 19 nt, Artificial Sequence
  Description of Artificial Sequence: Synthetic oligonucleotide
ugcaccuaucucacauugu

SEQ ID NO: 27505 - RNA, 19 nt, Artificial Sequence
  Description of Artificial Sequence: Synthetic oligonucleotide
ugccccgauuugaacgucc

SEQ ID NO: 27506 - RNA, 19 nt, Artificial Sequence
  Description of Artificial Sequence: Synthetic oligonucleotide
uaugcgacacguguucaaa

SEQ ID NO: 27507 - RNA, 19 nt, Artificial Sequence
  Description of Artificial Sequence: Synthetic oligonucleotide
caacuacacuuaucauagg

SEQ ID NO: 27508 - RNA, 19 nt, Artificial Sequence
  Description of Artificial Sequence: Synthetic oligonucleotide
gaauuucagcacgugggga

SEQ ID NO: 27509 - RNA, 19 nt, Artificial Sequence
  Description of Artificial Sequence: Synthetic oligonucleotide
gaucgucucggucagcgua

SEQ ID NO: 27510 - RNA, 19 nt, Artificial Sequence
  Description of Artificial Sequence: Synthetic oligonucleotide
ugcgcagauuaaccagaug

SEQ ID NO: 27511 - RNA, 19 nt, Artificial Sequence
  Description of Artificial Sequence: Synthetic oligonucleotide
gcacucaguuguauuaugg

SEQ ID NO: 27512 - RNA, 19 nt, Artificial Sequence
  Description of Artificial Sequence: Synthetic oligonucleotide
uggaugguugaggaaggac

SEQ ID NO: 27513 - RNA, 19 nt, Artificial Sequence
  Description of Artificial Sequence: Synthetic oligonucleotide
uuggaucucguguguuaca

SEQ ID NO: 27514 - RNA, 19 nt, Artificial Sequence
  Description of Artificial Sequence: Synthetic oligonucleotide
gagucggacuuuaugcgac

SEQ ID NO: 27515 - RNA, 19 nt, Artificial Sequence
  Description of Artificial Sequence: Synthetic oligonucleotide
aacuggaucuucacuuuaa

SEQ ID NO: 27516 - RNA, 19 nt, Artificial Sequence
  Description of Artificial Sequence: Synthetic oligonucleotide
uguacgacaucgugcucau

SEQ ID NO: 27517 - RNA, 19 nt, Artificial Sequence
  Description of Artificial Sequence: Synthetic oligonucleotide
gguuacgacacugaaagua

SEQ ID NO: 27518 - RNA, 19 nt, Artificial Sequence
  Description of Artificial Sequence: Synthetic oligonucleotide
ugcaugagucuucgaucca

SEQ ID NO: 27519 - RNA, 19 nt, Artificial Sequence
  Description of Artificial Sequence: Synthetic oligonucleotide
ucucuaugguuauggcauc

SEQ ID NO: 27520 - RNA, 19 nt, Artificial Sequence
  Description of Artificial Sequence: Synthetic oligonucleotide
cccgauuugaacguccacg

SEQ ID NO: 27521 - RNA, 19 nt, Artificial Sequence
  Description of Artificial Sequence: Synthetic oligonucleotide
gagggcugucguucaauac

SEQ ID NO: 27522 - RNA, 19 nt, Artificial Sequence
  Description of Artificial Sequence: Synthetic oligonucleotide
uuaagcggaugcggaaugu

SEQ ID NO: 27523 - RNA, 19 nt, Artificial Sequence
  Description of Artificial Sequence: Synthetic oligonucleotide
agcacguggggagaguucu

SEQ ID NO: 27524 - RNA, 19 nt, Artificial Sequence
  Description of Artificial Sequence: Synthetic oligonucleotide
ucggacaaagggcgggcgu

SEQ ID NO: 27525 - RNA, 19 nt, Artificial Sequence
  Description of Artificial Sequence: Synthetic oligonucleotide
gacccaugccucuacugga

SEQ ID NO: 27526 - RNA, 19 nt, Artificial Sequence
  Description of Artificial Sequence: Synthetic oligonucleotide
agcgcgauuccaugauucu

SEQ ID NO: 27527 - RNA, 19 nt, Artificial Sequence
  Description of Artificial Sequence: Synthetic oligonucleotide
ggauguacgacaucgugcu

SEQ ID NO: 27528 - RNA, 19 nt, Artificial Sequence
  Description of Artificial Sequence: Synthetic oligonucleotide
ucuuucgacggucccugua

SEQ ID NO: 27529 - RNA, 19 nt, Artificial Sequence
  Description of Artificial Sequence: Synthetic oligonucleotide
guaaucagccuugugugaa

SEQ ID NO: 27530 - RNA, 19 nt, Artificial Sequence
  Description of Artificial Sequence: Synthetic oligonucleotide
uacuuaguuauugcacgua

SEQ ID NO: 27531 - RNA, 19 nt, Artificial Sequence
  Description of Artificial Sequence: Synthetic oligonucleotide
uuucgacggucccuguaau

SEQ ID NO: 27532 - RNA, 19 nt, Artificial Sequence
  Description of Artificial Sequence: Synthetic oligonucleotide
caguugcucguaauuccug

SEQ ID NO: 27533 - RNA, 19 nt, Artificial Sequence
  Description of Artificial Sequence: Synthetic oligonucleotide
cagcguaagugaagaaguc

SEQ ID NO: 27534 - RNA, 19 nt, Artificial Sequence
  Description of Artificial Sequence: Synthetic oligonucleotide
agaaaguacccaaccccug

SEQ ID NO: 27535 - RNA, 19 nt, Artificial Sequence
  Description of Artificial Sequence: Synthetic oligonucleotide
caucggguaaacauuggcu

SEQ ID NO: 27536 - RNA, 19 nt, Artificial Sequence
  Description of Artificial Sequence: Synthetic oligonucleotide
aaccagguuacgacacuga

SEQ ID NO: 27537 - RNA, 19 nt, Artificial Sequence
  Description of Artificial Sequence: Synthetic oligonucleotide
acgaaaacguuuggaacau

SEQ ID NO: 27538 - RNA, 19 nt, Artificial Sequence
  Description of Artificial Sequence: Synthetic oligonucleotide
aguaauguacuuaguuauu

SEQ ID NO: 27539 - RNA, 19 nt, Artificial Sequence
  Description of Artificial Sequence: Synthetic oligonucleotide
ggucccuguaauggcaucg

SEQ ID NO: 27540 - RNA, 19 nt, Artificial Sequence
  Description of Artificial Sequence: Synthetic oligonucleotide
aggccugugaagacauuuc

SEQ ID NO: 27541 - RNA, 19 nt, Artificial Sequence
  Description of Artificial Sequence: Synthetic oligonucleotide
caugccucuacuggagaac

SEQ ID NO: 27542 - RNA, 19 nt, Artificial Sequence
  Description of Artificial Sequence: Synthetic oligonucleotide
uaccgucuucuuucguucu

SEQ ID NO: 27543 - RNA, 19 nt, Artificial Sequence
  Description of Artificial Sequence: Synthetic oligonucleotide
cucaagcgcgauuccauga

SEQ ID NO: 27544 - RNA, 19 nt, Artificial Sequence
  Description of Artificial Sequence: Synthetic oligonucleotide
cuuucgacggucccuguaa

SEQ ID NO: 27545 - RNA, 19 nt, Artificial Sequence
  Description of Artificial Sequence: Synthetic oligonucleotide
accuuaagcggaugcggaa

SEQ ID NO: 27546 - RNA, 19 nt, Artificial Sequence
  Description of Artificial Sequence: Synthetic oligonucleotide
uugagggauugcacuuuuc

SEQ ID NO: 27547 - RNA, 19 nt, Artificial Sequence
  Description of Artificial Sequence: Synthetic oligonucleotide
cacucggacaaagggcggg

SEQ ID NO: 27548 - RNA, 19 nt, Artificial Sequence
  Description of Artificial Sequence: Synthetic oligonucleotide
cacguguucaaagaagcaa

SEQ ID NO: 27549 - RNA, 19 nt, Artificial Sequence
  Description of Artificial Sequence: Synthetic oligonucleotide
cuacuguugaaugacuaua

SEQ ID NO: 27550 - RNA, 19 nt, Artificial Sequence
  Description of Artificial Sequence: Synthetic oligonucleotide
caccuaucucacauuguca

SEQ ID NO: 27551 - RNA, 19 nt, Artificial Sequence
  Description of Artificial Sequence: Synthetic oligonucleotide
agucggacuuuaugcgaca

SEQ ID NO: 27552 - RNA, 19 nt, Artificial Sequence
  Description of Artificial Sequence: Synthetic oligonucleotide
gccuuuacccaucuuugac

SEQ ID NO: 27553 - RNA, 19 nt, Artificial Sequence
  Description of Artificial Sequence: Synthetic oligonucleotide
guacuuaguuauugcacgu

SEQ ID NO: 27554 - RNA, 19 nt, Artificial Sequence
  Description of Artificial Sequence: Synthetic oligonucleotide
gcucaucggguaaacauug

SEQ ID NO: 27555 - RNA, 19 nt, Artificial Sequence
  Description of Artificial Sequence: Synthetic oligonucleotide
guacaugggcuagaauaac

SEQ ID NO: 27556 - RNA, 19 nt, Artificial Sequence
  Description of Artificial Sequence: Synthetic oligonucleotide
ggguugagaguucauguaa

SEQ ID NO: 27557 - RNA, 19 nt, Artificial Sequence
  Description of Artificial Sequence: Synthetic oligonucleotide
agcggaugcggaaugugcu

SEQ ID NO: 27558 - RNA, 19 nt, Artificial Sequence
  Description of Artificial Sequence: Synthetic oligonucleotide
ccacccagucuuucgacgg

SEQ ID NO: 27559 - RNA, 19 nt, Artificial Sequence
  Description of Artificial Sequence: Synthetic oligonucleotide
caccuuaagcggaugcgga

SEQ ID NO: 27560 - RNA, 19 nt, Artificial Sequence
  Description of Artificial Sequence: Synthetic oligonucleotide
guaaaguacccacuccaau

SEQ ID NO: 27561 - RNA, 19 nt, Artificial Sequence
  Description of Artificial Sequence: Synthetic oligonucleotide
gcguaagugaagaagucuc

SEQ ID NO: 27562 - RNA, 19 nt, Artificial Sequence
  Description of Artificial Sequence: Synthetic oligonucleotide
uuguccuucuagguugaau

SEQ ID NO: 27563 - RNA, 19 nt, Artificial Sequence
  Description of Artificial Sequence: Synthetic oligonucleotide
ugguaccguaauccacaac

SEQ ID NO: 27564 - RNA, 19 nt, Artificial Sequence
  Description of Artificial Sequence: Synthetic oligonucleotide
agcuagaaagaaaccucgu

SEQ ID NO: 27565 - RNA, 19 nt, Artificial Sequence
  Description of Artificial Sequence: Synthetic oligonucleotide
guaccguaauccacaacca

SEQ ID NO: 27566 - RNA, 19 nt, Artificial Sequence
  Description of Artificial Sequence: Synthetic oligonucleotide
agguuacgacacugaaagu

SEQ ID NO: 27567 - RNA, 19 nt, Artificial Sequence
  Description of Artificial Sequence: Synthetic oligonucleotide
guuugcgaagauggacacc

SEQ ID NO: 27568 - RNA, 19 nt, Artificial Sequence
  Description of Artificial Sequence: Synthetic oligonucleotide
acccagucuuucgacgguc

SEQ ID NO: 27569 - RNA, 19 nt, Artificial Sequence
  Description of Artificial Sequence: Synthetic oligonucleotide
acuuuaugcgacacguguu

SEQ ID NO: 27570 - RNA, 19 nt, Artificial Sequence
  Description of Artificial Sequence: Synthetic oligonucleotide
auuucuaggcagacauuaa

SEQ ID NO: 27571 - RNA, 19 nt, Artificial Sequence
  Description of Artificial Sequence: Synthetic oligonucleotide
cacguucucacaguagcca

SEQ ID NO: 27572 - RNA, 19 nt, Artificial Sequence
  Description of Artificial Sequence: Synthetic oligonucleotide
gaaggguaacugacuggac

SEQ ID NO: 27573 - RNA, 19 nt, Artificial Sequence
  Description of Artificial Sequence: Synthetic oligonucleotide
agggguucucuaugguuau

SEQ ID NO: 27574 - RNA, 19 nt, Artificial Sequence
  Description of Artificial Sequence: Synthetic oligonucleotide
gcuagaaagaaaccucgua

SEQ ID NO: 27575 - RNA, 19 nt, Artificial Sequence
  Description of Artificial Sequence: Synthetic oligonucleotide
cuacuccgucauuguacag

SEQ ID NO: 27576 - RNA, 19 nt, Artificial Sequence
  Description of Artificial Sequence: Synthetic oligonucleotide
cagcccucaagcgcgauuc

SEQ ID NO: 27577 - RNA, 19 nt, Artificial Sequence
  Description of Artificial Sequence: Synthetic oligonucleotide
ugaucgucucggucagcgu

SEQ ID NO: 27578 - RNA, 19 nt, Artificial Sequence
  Description of Artificial Sequence: Synthetic oligonucleotide
uuguagagucggacuuuau

SEQ ID NO: 27579 - RNA, 19 nt, Artificial Sequence
  Description of Artificial Sequence: Synthetic oligonucleotide
gacggucccuguaauggca

SEQ ID NO: 27580 - RNA, 19 nt, Artificial Sequence
  Description of Artificial Sequence: Synthetic oligonucleotide
acguggggagaguucuuga

SEQ ID NO: 27581 - RNA, 19 nt, Artificial Sequence
  Description of Artificial Sequence: Synthetic oligonucleotide
acacguguucaaagaagca

SEQ ID NO: 27582 - RNA, 19 nt, Artificial Sequence
  Description of Artificial Sequence: Synthetic oligonucleotide
cuggcacguuguagagucg

SEQ ID NO: 27583 - RNA, 19 nt, Artificial Sequence
  Description of Artificial Sequence: Synthetic oligonucleotide
cguucuuggaucacuccag

SEQ ID NO: 27584 - RNA, 19 nt, Artificial Sequence
  Description of Artificial Sequence: Synthetic oligonucleotide
cugaguagccuuuacccau

SEQ ID NO: 27585 - RNA, 19 nt, Artificial Sequence
  Description of Artificial Sequence: Synthetic oligonucleotide
cacgugagcuagaaagaaa

SEQ ID NO: 27586 - RNA, 19 nt, Artificial Sequence
  Description of Artificial Sequence: Synthetic oligonucleotide
uucuauccauccguuugua

SEQ ID NO: 27587 - RNA, 19 nt, Artificial Sequence
  Description of Artificial Sequence: Synthetic oligonucleotide
cucggacaaagggcgggcg

SEQ ID NO: 27588 - RNA, 19 nt, Artificial Sequence
  Description of Artificial Sequence: Synthetic oligonucleotide
uugcgaagauggacaccac

SEQ ID NO: 27589 - RNA, 19 nt, Artificial Sequence
  Description of Artificial Sequence: Synthetic oligonucleotide
cacguggggagaguucuug

SEQ ID NO: 27590 - RNA, 19 nt, Artificial Sequence
  Description of Artificial Sequence: Synthetic oligonucleotide
aguuucaccuuaagcggau

SEQ ID NO: 27591 - RNA, 19 nt, Artificial Sequence
  Description of Artificial Sequence: Synthetic oligonucleotide
uugaacguccacgggcuuu

SEQ ID NO: 27592 - RNA, 19 nt, Artificial Sequence
  Description of Artificial Sequence: Synthetic oligonucleotide
gaugcggaaugugcugauc

SEQ ID NO: 27593 - RNA, 19 nt, Artificial Sequence
  Description of Artificial Sequence: Synthetic oligonucleotide
ucgugcacaccuugcccaa

SEQ ID NO: 27594 - RNA, 19 nt, Artificial Sequence
  Description of Artificial Sequence: Synthetic oligonucleotide
ggaauaaauugcaccuauc

SEQ ID NO: 27595 - RNA, 19 nt, Artificial Sequence
  Description of Artificial Sequence: Synthetic oligonucleotide
cgacacguguucaaagaag

SEQ ID NO: 27596 - RNA, 19 nt, Artificial Sequence
  Description of Artificial Sequence: Synthetic oligonucleotide
cacguuguagagucggacu

SEQ ID NO: 27597 - RNA, 19 nt, Artificial Sequence
  Description of Artificial Sequence: Synthetic oligonucleotide
aucucguguguuacaaaau

SEQ ID NO: 27598 - RNA, 19 nt, Artificial Sequence
  Description of Artificial Sequence: Synthetic oligonucleotide
cacgggcuuuccugagucc

SEQ ID NO: 27599 - RNA, 19 nt, Artificial Sequence
  Description of Artificial Sequence: Synthetic oligonucleotide
ggcaaucaaacccuuuccu

SEQ ID NO: 27600 - RNA, 19 nt, Artificial Sequence
  Description of Artificial Sequence: Synthetic oligonucleotide
cucggucagcguaagugaa

SEQ ID NO: 27601 - RNA, 19 nt, Artificial Sequence
  Description of Artificial Sequence: Synthetic oligonucleotide
agugcggugaugagagaaa

SEQ ID NO: 27602 - RNA, 19 nt, Artificial Sequence
  Description of Artificial Sequence: Synthetic oligonucleotide
cugcaccuuuauuucguga

SEQ ID NO: 27603 - RNA, 19 nt, Artificial Sequence
  Description of Artificial Sequence: Synthetic oligonucleotide
ggggugagugcaucaagga

SEQ ID NO: 27604 - RNA, 19 nt, Artificial Sequence
  Description of Artificial Sequence: Synthetic oligonucleotide
cagacugccccgauuugaa

SEQ ID NO: 27605 - RNA, 19 nt, Artificial Sequence
  Description of Artificial Sequence: Synthetic oligonucleotide
gagcugcgagcagugugag

SEQ ID NO: 27606 - RNA, 19 nt, Artificial Sequence
  Description of Artificial Sequence: Synthetic oligonucleotide
auaagcccagagcggucaa

SEQ ID NO: 27607 - RNA, 19 nt, Artificial Sequence
  Description of Artificial Sequence: Synthetic oligonucleotide
gucggacuuuaugcgacac

SEQ ID NO: 27608 - RNA, 19 nt, Artificial Sequence
  Description of Artificial Sequence: Synthetic oligonucleotide
cucaaaucugacagucagu

SEQ ID NO: 27609 - RNA, 19 nt, Artificial Sequence
  Description of Artificial Sequence: Synthetic oligonucleotide
gcguaaggagacauauggc

SEQ ID NO: 27610 - RNA, 19 nt, Artificial Sequence
  Description of Artificial Sequence: Synthetic oligonucleotide
ucgucucggucagcguaag

SEQ ID NO: 27611 - RNA, 19 nt, Artificial Sequence
  Description of Artificial Sequence: Synthetic oligonucleotide
cauagccagagaauucaau

SEQ ID NO: 27612 - RNA, 19 nt, Artificial Sequence
  Description of Artificial Sequence: Synthetic oligonucleotide
gugugagccggugcucugc

SEQ ID NO: 27613 - RNA, 19 nt, Artificial Sequence
  Description of Artificial Sequence: Synthetic oligonucleotide
cuaagaucuuauacacuuu

SEQ ID NO: 27614 - RNA, 19 nt, Artificial Sequence
  Description of Artificial Sequence: Synthetic oligonucleotide
agaacguggccagcauuau

SEQ ID NO: 27615 - RNA, 19 nt, Artificial Sequence
  Description of Artificial Sequence: Synthetic oligonucleotide
gcggaugcggaaugugcug

SEQ ID NO: 27616 - RNA, 19 nt, Artificial Sequence
  Description of Artificial Sequence: Synthetic oligonucleotide
cacaaccacccagucuuuc

SEQ ID NO: 27617 - RNA, 19 nt, Artificial Sequence
  Description of Artificial Sequence: Synthetic oligonucleotide
cagcucgacagcgggugag

SEQ ID NO: 27618 - RNA, 19 nt, Artificial Sequence
  Description of Artificial Sequence: Synthetic oligonucleotide
aucgugcucaucggguaaa

SEQ ID NO: 27619 - RNA, 19 nt, Artificial Sequence
  Description of Artificial Sequence: Synthetic oligonucleotide
ggcacgugagcuagaaaga

SEQ ID NO: 27620 - RNA, 19 nt, Artificial Sequence
  Description of Artificial Sequence: Synthetic oligonucleotide
gcgacacguguucaaagaa

SEQ ID NO: 27621 - RNA, 19 nt, Artificial Sequence
  Description of Artificial Sequence: Synthetic oligonucleotide
cugguaccguaauccacaa

SEQ ID NO: 27622 - RNA, 19 nt, Artificial Sequence
  Description of Artificial Sequence: Synthetic oligonucleotide
caucgugcucaucggguaa

SEQ ID NO: 27623 - RNA, 19 nt, Artificial Sequence
  Description of Artificial Sequence: Synthetic oligonucleotide
ggacuuuaugcgacacgug

SEQ ID NO: 27624 - RNA, 19 nt, Artificial Sequence
  Description of Artificial Sequence: Synthetic oligonucleotide
ccagucuuucgacgguccc

SEQ ID NO: 27625 - RNA, 19 nt, Artificial Sequence
  Description of Artificial Sequence: Synthetic oligonucleotide
gcacguuguagagucggac

SEQ ID NO: 27626 - RNA, 19 nt, Artificial Sequence
  Description of Artificial Sequence: Synthetic oligonucleotide
ccagaagcuaaaguaaugu

SEQ ID NO: 27627 - RNA, 19 nt, Artificial Sequence
  Description of Artificial Sequence: Synthetic oligonucleotide
gucucucuuauuugugguu

SEQ ID NO: 27628 - RNA, 19 nt, Artificial Sequence
  Description of Artificial Sequence: Synthetic oligonucleotide
guagaccacgagguaccuc

SEQ ID NO: 27629 - RNA, 19 nt, Artificial Sequence
  Description of Artificial Sequence: Synthetic oligonucleotide
ccagguuacgacacugaaa

SEQ ID NO: 27630 - RNA, 19 nt, Artificial Sequence
  Description of Artificial Sequence: Synthetic oligonucleotide
ccacgggcuuuccugaguc

SEQ ID NO: 27631 - RNA, 19 nt, Artificial Sequence
  Description of Artificial Sequence: Synthetic oligonucleotide
guagugcggugaugagaga

SEQ ID NO: 27632 - RNA, 19 nt, Artificial Sequence
  Description of Artificial Sequence: Synthetic oligonucleotide
ggaucacuccagacugccc

SEQ ID NO: 27633 - RNA, 19 nt, Artificial Sequence
  Description of Artificial Sequence: Synthetic oligonucleotide
guuuaccgucuucuuucgu

SEQ ID NO: 27634 - RNA, 19 nt, Artificial Sequence
  Description of Artificial Sequence: Synthetic oligonucleotide
gcacgugagcuagaaagaa

SEQ ID NO: 27635 - RNA, 19 nt, Artificial Sequence
  Description of Artificial Sequence: Synthetic oligonucleotide
gguacaacuucuuguccuu

SEQ ID NO: 27636 - RNA, 19 nt, Artificial Sequence
  Description of Artificial Sequence: Synthetic oligonucleotide
cacgguuaucaucuugcau

SEQ ID NO: 27637 - RNA, 19 nt, Artificial Sequence
  Description of Artificial Sequence: Synthetic oligonucleotide
ccugaguaguugagcagga

SEQ ID NO: 27638 - RNA, 19 nt, Artificial Sequence
  Description of Artificial Sequence: Synthetic oligonucleotide
ggaucucguguguuacaaa

SEQ ID NO: 27639 - RNA, 19 nt, Artificial Sequence
  Description of Artificial Sequence: Synthetic oligonucleotide
gguugagaguucauguaau

SEQ ID NO: 27640 - RNA, 19 nt, Artificial Sequence
  Description of Artificial Sequence: Synthetic oligonucleotide
acggucccuguaauggcau

SEQ ID NO: 27641 - RNA, 19 nt, Artificial Sequence
  Description of Artificial Sequence: Synthetic oligonucleotide
gggcguaaggagacauaug

SEQ ID NO: 27642 - RNA, 19 nt, Artificial Sequence
  Description of Artificial Sequence: Synthetic oligonucleotide
cugaguaguugagcaggaa

SEQ ID NO: 27643 - RNA, 19 nt, Artificial Sequence
  Description of Artificial Sequence: Synthetic oligonucleotide
guagaauggccuggacgua

SEQ ID NO: 27644 - RNA, 19 nt, Artificial Sequence
  Description of Artificial Sequence: Synthetic oligonucleotide
cguaaaguacccacuccaa

SEQ ID NO: 27645 - RNA, 19 nt, Artificial Sequence
  Description of Artificial Sequence: Synthetic oligonucleotide
cccuucccaaacaguaaca

SEQ ID NO: 27646 - RNA, 19 nt, Artificial Sequence
  Description of Artificial Sequence: Synthetic oligonucleotide
ggucagcguaagugaagaa

SEQ ID NO: 27647 - RNA, 19 nt, Artificial Sequence
  Description of Artificial Sequence: Synthetic oligonucleotide
cgugaaguuuaccgucuuc

SEQ ID NO: 27648 - RNA, 19 nt, Artificial Sequence
  Description of Artificial Sequence: Synthetic oligonucleotide
ggauugcacuuuuccacau

SEQ ID NO: 27649 - RNA, 19 nt, Artificial Sequence
  Description of Artificial Sequence: Synthetic oligonucleotide
cagucuuucgacggucccu

SEQ ID NO: 27650 - RNA, 19 nt, Artificial Sequence
  Description of Artificial Sequence: Synthetic oligonucleotide
gaugggguugagaguucau

SEQ ID NO: 27651 - RNA, 19 nt, Artificial Sequence
  Description of Artificial Sequence: Synthetic oligonucleotide
gaaaccucguaggcugcuu

SEQ ID NO: 27652 - RNA, 19 nt, Artificial Sequence
  Description of Artificial Sequence: Synthetic oligonucleotide
gcauuuuacugugcacugu

SEQ ID NO: 27653 - RNA, 19 nt, Artificial Sequence
  Description of Artificial Sequence: Synthetic oligonucleotide
ggacugagcugcgagcagu

SEQ ID NO: 27654 - RNA, 19 nt, Artificial Sequence
  Description of Artificial Sequence: Synthetic oligonucleotide
cugccccgauuugaacguc

SEQ ID NO: 27655 - RNA, 19 nt, Artificial Sequence
  Description of Artificial Sequence: Synthetic oligonucleotide
ggcacguuguagagucgga

SEQ ID NO: 27656 - RNA, 19 nt, Artificial Sequence
  Description of Artificial Sequence: Synthetic oligonucleotide
ggcugucguucaauacuuc

SEQ ID NO: 27657 - RNA, 19 nt, Artificial Sequence
  Description of Artificial Sequence: Synthetic oligonucleotide
cgauugaaagagucuggua

SEQ ID NO: 27658 - RNA, 19 nt, Artificial Sequence
  Description of Artificial Sequence: Synthetic oligonucleotide
ccccgauuugaacguccac

SEQ ID NO: 27659 - RNA, 19 nt, Artificial Sequence
  Description of Artificial Sequence: Synthetic oligonucleotide
cggacuuuaugcgacacgu

SEQ ID NO: 27660 - RNA, 19 nt, Artificial Sequence
  Description of Artificial Sequence: Synthetic oligonucleotide
caagcgcgauuccaugauu

SEQ ID NO: 27661 - RNA, 19 nt, Artificial Sequence
  Description of Artificial Sequence: Synthetic oligonucleotide
cgcgauuccaugauucuau

SEQ ID NO: 27662 - RNA, 19 nt, Artificial Sequence
  Description of Artificial Sequence: Synthetic oligonucleotide
cggucagcguaagugaaga

SEQ ID NO: 27663 - RNA, 19 nt, Artificial Sequence
  Description of Artificial Sequence: Synthetic oligonucleotide
cacccagucuuucgacggu

SEQ ID NO: 27664 - RNA, 19 nt, Artificial Sequence
  Description of Artificial Sequence: Synthetic oligonucleotide
gcucgacagcgggugagga

SEQ ID NO: 27665 - RNA, 19 nt, Artificial Sequence
  Description of Artificial Sequence: Synthetic oligonucleotide
gucuuucgacggucccugu

SEQ ID NO: 27666 - RNA, 19 nt, Artificial Sequence
  Description of Artificial Sequence: Synthetic oligonucleotide
guacgacaucgugcucauc

SEQ ID NO: 27667 - RNA, 19 nt, Artificial Sequence
  Description of Artificial Sequence: Synthetic oligonucleotide
gcgcgauuccaugauucua

SEQ ID NO: 27668 - RNA, 19 nt, Artificial Sequence
  Description of Artificial Sequence: Synthetic oligonucleotide
ccuuaagcggaugcggaau

SEQ ID NO: 27669 - RNA, 19 nt, Artificial Sequence
  Description of Artificial Sequence: Synthetic oligonucleotide
cggucccuguaauggcauc

SEQ ID NO: 27670 - RNA, 19 nt, Artificial Sequence
  Description of Artificial Sequence: Synthetic oligonucleotide
cacuccagacugccccgau

SEQ ID NO: 27671 - RNA, 19 nt, Artificial Sequence
  Description of Artificial Sequence: Synthetic oligonucleotide
cgggcguaaggagacauau

SEQ ID NO: 27672 - RNA, 19 nt, Artificial Sequence
  Description of Artificial Sequence: Synthetic oligonucleotide
gcagcccucaagcgcgauu

SEQ ID NO: 27673 - RNA, 19 nt, Artificial Sequence
  Description of Artificial Sequence: Synthetic oligonucleotide
gcgggcguaaggagacaua

SEQ ID NO: 27674 - RNA, 19 nt, Artificial Sequence
  Description of Artificial Sequence: Synthetic oligonucleotide
gcgagcagugugagccggu

SEQ ID NO: 27675 - RNA, 19 nt, Artificial Sequence
  Description of Artificial Sequence: Synthetic oligonucleotide
cuucuccgcugcggcugcu

SEQ ID NO: 27676 - RNA, 19 nt, Artificial Sequence
  Description of Artificial Sequence: Synthetic oligonucleotide
cguuguagagucggacuuu

SEQ ID NO: 27677 - RNA, 19 nt, Artificial Sequence
  Description of Artificial Sequence: Synthetic oligonucleotide
gcacguggggagaguucuu

SEQ ID NO: 27678 - RNA, 19 nt, Artificial Sequence
  Description of Artificial Sequence: Synthetic oligonucleotide
cgucucggucagcguaagu

SEQ ID NO: 27679 - RNA, 19 nt, Artificial Sequence
  Description of Artificial Sequence: Synthetic oligonucleotide
auugaagcuuuucagaagc

SEQ ID NO: 27680 - RNA, 19 nt, Artificial Sequence
  Description of Artificial Sequence: Synthetic oligonucleotide
aacuaauucaaagguagcc

SEQ ID NO: 27681 - RNA, 19 nt, Artificial Sequence
  Description of Artificial Sequence: Synthetic oligonucleotide
aaugcaauaucguccuccc

SEQ ID NO: 27682 - RNA, 19 nt, Artificial Sequence
  Description of Artificial Sequence: Synthetic oligonucleotide
aaauuuuggcccauggugc

SEQ ID NO: 27683 - RNA, 19 nt, Artificial Sequence
  Description of Artificial Sequence: Synthetic oligonucleotide
gaaucuagccuccaggugg

SEQ ID NO: 27684 - RNA, 19 nt, Artificial Sequence
  Description of Artificial Sequence: Synthetic oligonucleotide
uuagaucauugcaaaaggg

SEQ ID NO: 27685 - RNA, 19 nt, Artificial Sequence
  Description of Artificial Sequence: Synthetic oligonucleotide
guaggaacuaauucaaagg

SEQ ID NO: 27686 - RNA, 19 nt, Artificial Sequence
  Description of Artificial Sequence: Synthetic oligonucleotide
aguaggaacuaauucaaag

SEQ ID NO: 27687 - RNA, 19 nt, Artificial Sequence
  Description of Artificial Sequence: Synthetic oligonucleotide
aguuguugcauuugcauuc

SEQ ID NO: 27688 - RNA, 19 nt, Artificial Sequence
  Description of Artificial Sequence: Synthetic oligonucleotide
guuagaucauugcaaaagg

SEQ ID NO: 27689 - RNA, 19 nt, Artificial Sequence
  Description of Artificial Sequence: Synthetic oligonucleotide
uauaguaucgggaauccgu

SEQ ID NO: 27690 - RNA, 19 nt, Artificial Sequence
  Description of Artificial Sequence: Synthetic oligonucleotide
aguguuaacucuuggaucu

SEQ ID NO: 27691 - RNA, 19 nt, Artificial Sequence
  Description of Artificial Sequence: Synthetic oligonucleotide
aguacaaugacagaaacau

SEQ ID NO: 27692 - RNA, 19 nt, Artificial Sequence
  Description of Artificial Sequence: Synthetic oligonucleotide
uaggaacuaauucaaaggu

SEQ ID NO: 27693 - RNA, 19 nt, Artificial Sequence
  Description of Artificial Sequence: Synthetic oligonucleotide
ucaagguuaaguuccaaga

SEQ ID NO: 27694 - RNA, 19 nt, Artificial Sequence
  Description of Artificial Sequence: Synthetic oligonucleotide
aacuaggacacaacgacac

SEQ ID NO: 27695 - RNA, 19 nt, Artificial Sequence
  Description of Artificial Sequence: Synthetic oligonucleotide
agagaauucauauagcgua

SEQ ID NO: 27696 - RNA, 19 nt, Artificial Sequence
  Description of Artificial Sequence: Synthetic oligonucleotide
uguaucaaguguuaacucu

SEQ ID NO: 27697 - RNA, 19 nt, Artificial Sequence
  Description of Artificial Sequence: Synthetic oligonucleotide
ugaccaauacaccagggca

SEQ ID NO: 27698 - RNA, 19 nt, Artificial Sequence
  Description of Artificial Sequence: Synthetic oligonucleotide
gagguaacaaguauugggg

SEQ ID NO: 27699 - RNA, 19 nt, Artificial Sequence
  Description of Artificial Sequence: Synthetic oligonucleotide
ugccguuagcuucagacgg

SEQ ID NO: 27700 - RNA, 19 nt, Artificial Sequence
  Description of Artificial Sequence: Synthetic oligonucleotide
cauauugcugucuagagga

SEQ ID NO: 27701 - RNA, 19 nt, Artificial Sequence
  Description of Artificial Sequence: Synthetic oligonucleotide
aauucauauagcguauuug

SEQ ID NO: 27702 - RNA, 19 nt, Artificial Sequence
  Description of Artificial Sequence: Synthetic oligonucleotide
caaaagacagcgaugauca

SEQ ID NO: 27703 - RNA, 19 nt, Artificial Sequence
  Description of Artificial Sequence: Synthetic oligonucleotide
ugugcuguaauagaugaug

SEQ ID NO: 27704 - RNA, 19 nt, Artificial Sequence
  Description of Artificial Sequence: Synthetic oligonucleotide
uguaucucugcauucacgu

SEQ ID NO: 27705 - RNA, 19 nt, Artificial Sequence
  Description of Artificial Sequence: Synthetic oligonucleotide
acuaagauagacaugccag

SEQ ID NO: 27706 - RNA, 19 nt, Artificial Sequence
  Description of Artificial Sequence: Synthetic oligonucleotide
uuuagguccuucauuaguc

SEQ ID NO: 27707 - RNA, 19 nt, Artificial Sequence
  Description of Artificial Sequence: Synthetic oligonucleotide
acaaaagacagcgaugauc

SEQ ID NO: 27708 - RNA, 19 nt, Artificial Sequence
  Description of Artificial Sequence: Synthetic oligonucleotide
cuaagauagacaugccagg

SEQ ID NO: 27709 - RNA, 19 nt, Artificial Sequence
  Description of Artificial Sequence: Synthetic oligonucleotide
aaugcccuaaacaucuaac

SEQ ID NO: 27710 - RNA, 19 nt, Artificial Sequence
  Description of Artificial Sequence: Synthetic oligonucleotide
uguauuggauuuccaauac

SEQ ID NO: 27711 - RNA, 19 nt, Artificial Sequence
  Description of Artificial Sequence: Synthetic oligonucleotide
cuugccguuagcuucagac

SEQ ID NO: 27712 - RNA, 19 nt, Artificial Sequence
  Description of Artificial Sequence: Synthetic oligonucleotide
cauagcuacucucagaguc

SEQ ID NO: 27713 - RNA, 19 nt, Artificial Sequence
  Description of Artificial Sequence: Synthetic oligonucleotide
auagauaggaggucccggg

SEQ ID NO: 27714 - RNA, 19 nt, Artificial Sequence
  Description of Artificial Sequence: Synthetic oligonucleotide
aaccaccuaucguacaggg

SEQ ID NO: 27715 - RNA, 19 nt, Artificial Sequence
  Description of Artificial Sequence: Synthetic oligonucleotide
aguaucagucaugacaggg

SEQ ID NO: 27716 - RNA, 19 nt, Artificial Sequence
  Description of Artificial Sequence: Synthetic oligonucleotide
acuauuaugguccuugguu

SEQ ID NO: 27717 - RNA, 19 nt, Artificial Sequence
  Description of Artificial Sequence: Synthetic oligonucleotide
uccaaagagaacuuacgac

SEQ ID NO: 27718 - RNA, 19 nt, Artificial Sequence
  Description of Artificial Sequence: Synthetic oligonucleotide
aguaugguguaucaagugu

SEQ ID NO: 27719 - RNA, 19 nt, Artificial Sequence
  Description of Artificial Sequence: Synthetic oligonucleotide
aaacaucuaacauguucug

SEQ ID NO: 27720 - RNA, 19 nt, Artificial Sequence
  Description of Artificial Sequence: Synthetic oligonucleotide
uggauuaacagcuggcaga

SEQ ID NO: 27721 - RNA, 19 nt, Artificial Sequence
  Description of Artificial Sequence: Synthetic oligonucleotide
caaagagaacuuacgacag

SEQ ID NO: 27722 - RNA, 19 nt, Artificial Sequence
  Description of Artificial Sequence: Synthetic oligonucleotide
uucacuauuaugguccuug

SEQ ID NO: 27723 - RNA, 19 nt, Artificial Sequence
  Description of Artificial Sequence: Synthetic oligonucleotide
ucaaagguagccccaugag

SEQ ID NO: 27724 - RNA, 19 nt, Artificial Sequence
  Description of Artificial Sequence: Synthetic oligonucleotide
auggaugugccaaugggcc

SEQ ID NO: 27725 - RNA, 19 nt, Artificial Sequence
  Description of Artificial Sequence: Synthetic oligonucleotide
accaaaaccaccuaucgua

SEQ ID NO: 27726 - RNA, 19 nt, Artificial Sequence
  Description of Artificial Sequence: Synthetic oligonucleotide
ggaacuaauucaaagguag

SEQ ID NO: 27727 - RNA, 19 nt, Artificial Sequence
  Description of Artificial Sequence: Synthetic oligonucleotide
aguugcuaugcagugacac

SEQ ID NO: 27728 - RNA, 19 nt, Artificial Sequence
  Description of Artificial Sequence: Synthetic oligonucleotide
auacuuaugggagccauuc

SEQ ID NO: 27729 - RNA, 19 nt, Artificial Sequence
  Description of Artificial Sequence: Synthetic oligonucleotide
cagcaaugcaauaucgucc

SEQ ID NO: 27730 - RNA, 19 nt, Artificial Sequence
  Description of Artificial Sequence: Synthetic oligonucleotide
agucuuacacuuuucauua

SEQ ID NO: 27731 - RNA, 19 nt, Artificial Sequence
  Description of Artificial Sequence: Synthetic oligonucleotide
acuacagaaaaggccaaac

SEQ ID NO: 27732 - RNA, 19 nt, Artificial Sequence
  Description of Artificial Sequence: Synthetic oligonucleotide
ucauauagcguauuugguu

SEQ ID NO: 27733 - RNA, 19 nt, Artificial Sequence
  Description of Artificial Sequence: Synthetic oligonucleotide
aguuuuacagcaucaacua

SEQ ID NO: 27734 - RNA, 19 nt, Artificial Sequence
  Description of Artificial Sequence: Synthetic oligonucleotide
gaugaucacaaccaccaca

SEQ ID NO: 27735 - RNA, 19 nt, Artificial Sequence
  Description of Artificial Sequence: Synthetic oligonucleotide
uuuacucacaacugucaca

SEQ ID NO: 27736 - RNA, 19 nt, Artificial Sequence
  Description of Artificial Sequence: Synthetic oligonucleotide
uucauauagcguauuuggu

SEQ ID NO: 27737 - RNA, 19 nt, Artificial Sequence
  Description of Artificial Sequence: Synthetic oligonucleotide
aauccguaaucuucuggug

SEQ ID NO: 27738 - RNA, 19 nt, Artificial Sequence
  Description of Artificial Sequence: Synthetic oligonucleotide
ucguacucuguacaauucc

SEQ ID NO: 27739 - RNA, 19 nt, Artificial Sequence
  Description of Artificial Sequence: Synthetic oligonucleotide
ugucuacacuccauaaaug

SEQ ID NO: 27740 - RNA, 19 nt, Artificial Sequence
  Description of Artificial Sequence: Synthetic oligonucleotide
uugcccuuauacuuauggg

SEQ ID NO: 27741 - RNA, 19 nt, Artificial Sequence
  Description of Artificial Sequence: Synthetic oligonucleotide
uuguacuugguguuugcug

SEQ ID NO: 27742 - RNA, 19 nt, Artificial Sequence
  Description of Artificial Sequence: Synthetic oligonucleotide
uuagguguucugaacugca

SEQ ID NO: 27743 - RNA, 19 nt, Artificial Sequence
  Description of Artificial Sequence: Synthetic oligonucleotide
uguucagaagcgugugggg

SEQ ID NO: 27744 - RNA, 19 nt, Artificial Sequence
  Description of Artificial Sequence: Synthetic oligonucleotide
uguauaguaucgggaaucc

SEQ ID NO: 27745 - RNA, 19 nt, Artificial Sequence
  Description of Artificial Sequence: Synthetic oligonucleotide
gaaggaaugcccuaaacau

SEQ ID NO: 27746 - RNA, 19 nt, Artificial Sequence
  Description of Artificial Sequence: Synthetic oligonucleotide
ugaggguuagucuuacacu

SEQ ID NO: 27747 - RNA, 19 nt, Artificial Sequence
  Description of Artificial Sequence: Synthetic oligonucleotide
agauagacaugccaggaaa

SEQ ID NO: 27748 - RNA, 19 nt, Artificial Sequence
  Description of Artificial Sequence: Synthetic oligonucleotide
guugugauggcauuuaggu

SEQ ID NO: 27749 - RNA, 19 nt, Artificial Sequence
  Description of Artificial Sequence: Synthetic oligonucleotide
ugcguaaucucacuggcua

SEQ ID NO: 27750 - RNA, 19 nt, Artificial Sequence
  Description of Artificial Sequence: Synthetic oligonucleotide
ggaguaucagucaugacag

SEQ ID NO: 27751 - RNA, 19 nt, Artificial Sequence
  Description of Artificial Sequence: Synthetic oligonucleotide
gacaugaccaauacaccag

SEQ ID NO: 27752 - RNA, 19 nt, Artificial Sequence
  Description of Artificial Sequence: Synthetic oligonucleotide
auguucagaagcguguggg

SEQ ID NO: 27753 - RNA, 19 nt, Artificial Sequence
  Description of Artificial Sequence: Synthetic oligonucleotide
uaagauagacaugccagga

SEQ ID NO: 27754 - RNA, 19 nt, Artificial Sequence
  Description of Artificial Sequence: Synthetic oligonucleotide
uaguaugguguaucaagug

SEQ ID NO: 27755 - RNA, 19 nt, Artificial Sequence
  Description of Artificial Sequence: Synthetic oligonucleotide
ucacuauuaugguccuugg

SEQ ID NO: 27756 - RNA, 19 nt, Artificial Sequence
  Description of Artificial Sequence: Synthetic oligonucleotide
agggauuuauaaccagauc

SEQ ID NO: 27757 - RNA, 19 nt, Artificial Sequence
  Description of Artificial Sequence: Synthetic oligonucleotide
uuagucuuacacuuuucau

SEQ ID NO: 27758 - RNA, 19 nt, Artificial Sequence
  Description of Artificial Sequence: Synthetic oligonucleotide
aaagcacaaugguugucca

SEQ ID NO: 27759 - RNA, 19 nt, Artificial Sequence
  Description of Artificial Sequence: Synthetic oligonucleotide
gacuguauaguaucgggaa

SEQ ID NO: 27760 - RNA, 19 nt, Artificial Sequence
  Description of Artificial Sequence: Synthetic oligonucleotide
agcacaaugguuguccaag

SEQ ID NO: 27761 - RNA, 19 nt, Artificial Sequence
  Description of Artificial Sequence: Synthetic oligonucleotide
aagauagacaugccaggaa

SEQ ID NO: 27762 - RNA, 19 nt, Artificial Sequence
  Description of Artificial Sequence: Synthetic oligonucleotide
ucgggaauccguaaucuuc

SEQ ID NO: 27763 - RNA, 19 nt, Artificial Sequence
  Description of Artificial Sequence: Synthetic oligonucleotide
ugucuagaggagagguggg

SEQ ID NO: 27764 - RNA, 19 nt, Artificial Sequence
  Description of Artificial Sequence: Synthetic oligonucleotide
ugcccuaaacaucuaacau

SEQ ID NO: 27765 - RNA, 19 nt, Artificial Sequence
  Description of Artificial Sequence: Synthetic oligonucleotide
aaacaagccaacccaucaa

SEQ ID NO: 27766 - RNA, 19 nt, Artificial Sequence
  Description of Artificial Sequence: Synthetic oligonucleotide
aggaguucuauuuggaaua

SEQ ID NO: 27767 - RNA, 19 nt, Artificial Sequence
  Description of Artificial Sequence: Synthetic oligonucleotide
gacacaaaauuuuggccca

SEQ ID NO: 27768 - RNA, 19 nt, Artificial Sequence
  Description of Artificial Sequence: Synthetic oligonucleotide
ugaggaaucuagccuccag

SEQ ID NO: 27769 - RNA, 19 nt, Artificial Sequence
  Description of Artificial Sequence: Synthetic oligonucleotide
ucauucuaaauaggguuug

SEQ ID NO: 27770 - RNA, 19 nt, Artificial Sequence
  Description of Artificial Sequence: Synthetic oligonucleotide
ucauagauaggaggucccg

SEQ ID NO: 27771 - RNA, 19 nt, Artificial Sequence
  Description of Artificial Sequence: Synthetic oligonucleotide
cauagcaauucuguggcag

SEQ ID NO: 27772 - RNA, 19 nt, Artificial Sequence
  Description of Artificial Sequence: Synthetic oligonucleotide
ucuuccaccggacuguaua

SEQ ID NO: 27773 - RNA, 19 nt, Artificial Sequence
  Description of Artificial Sequence: Synthetic oligonucleotide
aggaaucuagccuccaggu

SEQ ID NO: 27774 - RNA, 19 nt, Artificial Sequence
  Description of Artificial Sequence: Synthetic oligonucleotide
aggguuaucgagggaaugg

SEQ ID NO: 27775 - RNA, 19 nt, Artificial Sequence
  Description of Artificial Sequence: Synthetic oligonucleotide
aaaccaccuaucguacagg

SEQ ID NO: 27776 - RNA, 19 nt, Artificial Sequence
  Description of Artificial Sequence: Synthetic oligonucleotide
ucguacagggauuuauaac

SEQ ID NO: 27777 - RNA, 19 nt, Artificial Sequence
  Description of Artificial Sequence: Synthetic oligonucleotide
accaauacaccagggcagc

SEQ ID NO: 27778 - RNA, 19 nt, Artificial Sequence
  Description of Artificial Sequence: Synthetic oligonucleotide
ugguguaucaaguguuaac

SEQ ID NO: 27779 - RNA, 19 nt, Artificial Sequence
  Description of Artificial Sequence: Synthetic oligonucleotide
ucaucaagcuguugugaug

SEQ ID NO: 27780 - RNA, 19 nt, Artificial Sequence
  Description of Artificial Sequence: Synthetic oligonucleotide
gaccaauacaccagggcag

SEQ ID NO: 27781 - RNA, 19 nt, Artificial Sequence
  Description of Artificial Sequence: Synthetic oligonucleotide
augcccuaaacaucuaaca

SEQ ID NO: 27782 - RNA, 19 nt, Artificial Sequence
  Description of Artificial Sequence: Synthetic oligonucleotide
uacgccggguacaaaagac

SEQ ID NO: 27783 - RNA, 19 nt, Artificial Sequence
  Description of Artificial Sequence: Synthetic oligonucleotide
aaagucccgauggaggcug

SEQ ID NO: 27784 - RNA, 19 nt, Artificial Sequence
  Description of Artificial Sequence: Synthetic oligonucleotide
uguaaccuguaaucuugcc

SEQ ID NO: 27785 - RNA, 19 nt, Artificial Sequence
  Description of Artificial Sequence: Synthetic oligonucleotide
auaacccauguucaagggu

SEQ ID NO: 27786 - RNA, 19 nt, Artificial Sequence
  Description of Artificial Sequence: Synthetic oligonucleotide
aagccuuacgggcaccaca

SEQ ID NO: 27787 - RNA, 19 nt, Artificial Sequence
  Description of Artificial Sequence: Synthetic oligonucleotide
agucauguaucucugcauu

SEQ ID NO: 27788 - RNA, 19 nt, Artificial Sequence
  Description of Artificial Sequence: Synthetic oligonucleotide
gauguuggucuuccaccgg

SEQ ID NO: 27789 - RNA, 19 nt, Artificial Sequence
  Description of Artificial Sequence: Synthetic oligonucleotide
ugauguaaccuguaaucuu

SEQ ID NO: 27790 - RNA, 19 nt, Artificial Sequence
  Description of Artificial Sequence: Synthetic oligonucleotide
agguaacaaguauuggggu

SEQ ID NO: 27791 - RNA, 19 nt, Artificial Sequence
  Description of Artificial Sequence: Synthetic oligonucleotide
aaccagugaccaaauagcu

SEQ ID NO: 27792 - RNA, 19 nt, Artificial Sequence
  Description of Artificial Sequence: Synthetic oligonucleotide
uaggguauuuacugguggu

SEQ ID NO: 27793 - RNA, 19 nt, Artificial Sequence
  Description of Artificial Sequence: Synthetic oligonucleotide
uaucguacagggauuuaua

SEQ ID NO: 27794 - RNA, 19 nt, Artificial Sequence
  Description of Artificial Sequence: Synthetic oligonucleotide
ugagaguuucgagggauug

SEQ ID NO: 27795 - RNA, 19 nt, Artificial Sequence
  Description of Artificial Sequence: Synthetic oligonucleotide
aguaucgggaauccguaau

SEQ ID NO: 27796 - RNA, 19 nt, Artificial Sequence
  Description of Artificial Sequence: Synthetic oligonucleotide
ucucguacucuguacaauu

SEQ ID NO: 27797 - RNA, 19 nt, Artificial Sequence
  Description of Artificial Sequence: Synthetic oligonucleotide
aucguacagggauuuauaa

SEQ ID NO: 27798 - RNA, 19 nt, Artificial Sequence
  Description of Artificial Sequence: Synthetic oligonucleotide
cauagauaggaggucccgg

SEQ ID NO: 27799 - RNA, 19 nt, Artificial Sequence
  Description of Artificial Sequence: Synthetic oligonucleotide
uagacaugccaggaaagga

SEQ ID NO: 27800 - RNA, 19 nt, Artificial Sequence
  Description of Artificial Sequence: Synthetic oligonucleotide
aauuccgccuuugauggau

SEQ ID NO: 27801 - RNA, 19 nt, Artificial Sequence
  Description of Artificial Sequence: Synthetic oligonucleotide
cuguauaguaucgggaauc

SEQ ID NO: 27802 - RNA, 19 nt, Artificial Sequence
  Description of Artificial Sequence: Synthetic oligonucleotide
uguuccgaacagauucugu

SEQ ID NO: 27803 - RNA, 19 nt, Artificial Sequence
  Description of Artificial Sequence: Synthetic oligonucleotide
uguaugaauuccgccuuug

SEQ ID NO: 27804 - RNA, 19 nt, Artificial Sequence
  Description of Artificial Sequence: Synthetic oligonucleotide
augcaauaucguccucccc

SEQ ID NO: 27805 - RNA, 19 nt, Artificial Sequence
  Description of Artificial Sequence: Synthetic oligonucleotide
gaugaugccugaggguuag

SEQ ID NO: 27806 - RNA, 19 nt, Artificial Sequence
  Description of Artificial Sequence: Synthetic oligonucleotide
aacuuacgacagcagcaca

SEQ ID NO: 27807 - RNA, 19 nt, Artificial Sequence
  Description of Artificial Sequence: Synthetic oligonucleotide
uuauacuuaugggagccau

SEQ ID NO: 27808 - RNA, 19 nt, Artificial Sequence
  Description of Artificial Sequence: Synthetic oligonucleotide
agaguuucgagggauugga

SEQ ID NO: 27809 - RNA, 19 nt, Artificial Sequence
  Description of Artificial Sequence: Synthetic oligonucleotide
ugguacgccggguacaaaa

SEQ ID NO: 27810 - RNA, 19 nt, Artificial Sequence
  Description of Artificial Sequence: Synthetic oligonucleotide
uaucgggaauccguaaucu

SEQ ID NO: 27811 - RNA, 19 nt, Artificial Sequence
  Description of Artificial Sequence: Synthetic oligonucleotide
ggugagaggugguacgccg

SEQ ID NO: 27812 - RNA, 19 nt, Artificial Sequence
  Description of Artificial Sequence: Synthetic oligonucleotide
aggguauuuacuggugguc

SEQ ID NO: 27813 - RNA, 19 nt, Artificial Sequence
  Description of Artificial Sequence: Synthetic oligonucleotide
cuuccaccggacuguauag

SEQ ID NO: 27814 - RNA, 19 nt, Artificial Sequence
  Description of Artificial Sequence: Synthetic oligonucleotide
ccggguacaaaagacagcg

SEQ ID NO: 27815 - RNA, 19 nt, Artificial Sequence
  Description of Artificial Sequence: Synthetic oligonucleotide
cauccggugaccaacuaga

SEQ ID NO: 27816 - RNA, 19 nt, Artificial Sequence
  Description of Artificial Sequence: Synthetic oligonucleotide
gcccuaaacaucuaacaug

SEQ ID NO: 27817 - RNA, 19 nt, Artificial Sequence
  Description of Artificial Sequence: Synthetic oligonucleotide
ugggcacuaaucacaggcu

SEQ ID NO: 27818 - RNA, 19 nt, Artificial Sequence
  Description of Artificial Sequence: Synthetic oligonucleotide
agggucauagauaggaggu

SEQ ID NO: 27819 - RNA, 19 nt, Artificial Sequence
  Description of Artificial Sequence: Synthetic oligonucleotide
acuguauaguaucgggaau

SEQ ID NO: 27820 - RNA, 19 nt, Artificial Sequence
  Description of Artificial Sequence: Synthetic oligonucleotide
gugaccaacuagaaaagca

SEQ ID NO: 27821 - RNA, 19 nt, Artificial Sequence
  Description of Artificial Sequence: Synthetic oligonucleotide
cagucuguuucccacaaca

SEQ ID NO: 27822 - RNA, 19 nt, Artificial Sequence
  Description of Artificial Sequence: Synthetic oligonucleotide
uacuuaugggagccauuca

SEQ ID NO: 27823 - RNA, 19 nt, Artificial Sequence
  Description of Artificial Sequence: Synthetic oligonucleotide
guuucgagggauuggagua

SEQ ID NO: 27824 - RNA, 19 nt, Artificial Sequence
  Description of Artificial Sequence: Synthetic oligonucleotide
gauuggaguaucagucaug

SEQ ID NO: 27825 - RNA, 19 nt, Artificial Sequence
  Description of Artificial Sequence: Synthetic oligonucleotide
aggaguuagaucauugcaa

SEQ ID NO: 27826 - RNA, 19 nt, Artificial Sequence
  Description of Artificial Sequence: Synthetic oligonucleotide
guacuugguguuugcuggg

SEQ ID NO: 27827 - RNA, 19 nt, Artificial Sequence
  Description of Artificial Sequence: Synthetic oligonucleotide
auguaucucugcauucacg

SEQ ID NO: 27828 - RNA, 19 nt, Artificial Sequence
  Description of Artificial Sequence: Synthetic oligonucleotide
agccuuacgggcaccacac

SEQ ID NO: 27829 - RNA, 19 nt, Artificial Sequence
  Description of Artificial Sequence: Synthetic oligonucleotide
guguaucaaguguuaacuc

SEQ ID NO: 27830 - RNA, 19 nt, Artificial Sequence
  Description of Artificial Sequence: Synthetic oligonucleotide
auaaccagauccaaacaaa

SEQ ID NO: 27831 - RNA, 19 nt, Artificial Sequence
  Description of Artificial Sequence: Synthetic oligonucleotide
aguucacuauuaugguccu

SEQ ID NO: 27832 - RNA, 19 nt, Artificial Sequence
  Description of Artificial Sequence: Synthetic oligonucleotide
gaaccagcagucaaauguc

SEQ ID NO: 27833 - RNA, 19 nt, Artificial Sequence
  Description of Artificial Sequence: Synthetic oligonucleotide
cugagguaacaaguauugg

SEQ ID NO: 27834 - RNA, 19 nt, Artificial Sequence
  Description of Artificial Sequence: Synthetic oligonucleotide
ugcuguaauagaugaugua

SEQ ID NO: 27835 - RNA, 19 nt, Artificial Sequence
  Description of Artificial Sequence: Synthetic oligonucleotide
acgucugugcuguaauaga

SEQ ID NO: 27836 - RNA, 19 nt, Artificial Sequence
  Description of Artificial Sequence: Synthetic oligonucleotide
guauaguaucgggaauccg

SEQ ID NO: 27837 - RNA, 19 nt, Artificial Sequence
  Description of Artificial Sequence: Synthetic oligonucleotide
guaucgggaauccguaauc

SEQ ID NO: 27838 - RNA, 19 nt, Artificial Sequence
  Description of Artificial Sequence: Synthetic oligonucleotide
guaauagaugauguaaccu

SEQ ID NO: 27839 - RNA, 19 nt, Artificial Sequence
  Description of Artificial Sequence: Synthetic oligonucleotide
aaaguguauuggauuucca

SEQ ID NO: 27840 - RNA, 19 nt, Artificial Sequence
  Description of Artificial Sequence: Synthetic oligonucleotide
uauacuuaugggagccauu

SEQ ID NO: 27841 - RNA, 19 nt, Artificial Sequence
  Description of Artificial Sequence: Synthetic oligonucleotide
agguuaaguuccaagacuu

SEQ ID NO: 27842 - RNA, 19 nt, Artificial Sequence
  Description of Artificial Sequence: Synthetic oligonucleotide
cucguacucuguacaauuc

SEQ ID NO: 27843 - RNA, 19 nt, Artificial Sequence
  Description of Artificial Sequence: Synthetic oligonucleotide
cucuguaugaauuccgccu

SEQ ID NO: 27844 - RNA, 19 nt, Artificial Sequence
  Description of Artificial Sequence: Synthetic oligonucleotide
ggaguuagaucauugcaaa

SEQ ID NO: 27845 - RNA, 19 nt, Artificial Sequence
  Description of Artificial Sequence: Synthetic oligonucleotide
gaaugcccuaaacaucuaa

SEQ ID NO: 27846 - RNA, 19 nt, Artificial Sequence
  Description of Artificial Sequence: Synthetic oligonucleotide
caaugaggaaugagagcug

SEQ ID NO: 27847 - RNA, 19 nt, Artificial Sequence
  Description of Artificial Sequence: Synthetic oligonucleotide
gucauguaucucugcauuc

SEQ ID NO: 27848 - RNA, 19 nt, Artificial Sequence
  Description of Artificial Sequence: Synthetic oligonucleotide
uccaccggacuguauagua

SEQ ID NO: 27849 - RNA, 19 nt, Artificial Sequence
  Description of Artificial Sequence: Synthetic oligonucleotide
cuacuaucucuguccuccg

SEQ ID NO: 27850 - RNA, 19 nt, Artificial Sequence
  Description of Artificial Sequence: Synthetic oligonucleotide
ugaggguuaucgagggaau

SEQ ID NO: 27851 - RNA, 19 nt, Artificial Sequence
  Description of Artificial Sequence: Synthetic oligonucleotide
acuaggacacaacgacaca

SEQ ID NO: 27852 - RNA, 19 nt, Artificial Sequence
  Description of Artificial Sequence: Synthetic oligonucleotide
uacgggcaccacaccaucc

SEQ ID NO: 27853 - RNA, 19 nt, Artificial Sequence
  Description of Artificial Sequence: Synthetic oligonucleotide
cauauagcguauuugguuu

SEQ ID NO: 27854 - RNA, 19 nt, Artificial Sequence
  Description of Artificial Sequence: Synthetic oligonucleotide
augguuuaguuuccagaaa

SEQ ID NO: 27855 - RNA, 19 nt, Artificial Sequence
  Description of Artificial Sequence: Synthetic oligonucleotide
caucacagagaauucauau

SEQ ID NO: 27856 - RNA, 19 nt, Artificial Sequence
  Description of Artificial Sequence: Synthetic oligonucleotide
auagcuacucucagagucu

SEQ ID NO: 27857 - RNA, 19 nt, Artificial Sequence
  Description of Artificial Sequence: Synthetic oligonucleotide
ugggaacaaccacuggcau

SEQ ID NO: 27858 - RNA, 19 nt, Artificial Sequence
  Description of Artificial Sequence: Synthetic oligonucleotide
gaguuagaucauugcaaaa

SEQ ID NO: 27859 - RNA, 19 nt, Artificial Sequence
  Description of Artificial Sequence: Synthetic oligonucleotide
auuuacugguggucugcgu

SEQ ID NO: 27860 - RNA, 19 nt, Artificial Sequence
  Description of Artificial Sequence: Synthetic oligonucleotide
auauagcguauuugguuuu

SEQ ID NO: 27861 - RNA, 19 nt, Artificial Sequence
  Description of Artificial Sequence: Synthetic oligonucleotide
gauccuaggucuggcaauc

SEQ ID NO: 27862 - RNA, 19 nt, Artificial Sequence
  Description of Artificial Sequence: Synthetic oligonucleotide
ugguagcaccuucagcguc

SEQ ID NO: 27863 - RNA, 19 nt, Artificial Sequence
  Description of Artificial Sequence: Synthetic oligonucleotide
gauuaacagcuggcagagg

SEQ ID NO: 27864 - RNA, 19 nt, Artificial Sequence
  Description of Artificial Sequence: Synthetic oligonucleotide
ucgagggauuggaguauca

SEQ ID NO: 27865 - RNA, 19 nt, Artificial Sequence
  Description of Artificial Sequence: Synthetic oligonucleotide
gaagggcgaacgugggcug

SEQ ID NO: 27866 - RNA, 19 nt, Artificial Sequence
  Description of Artificial Sequence: Synthetic oligonucleotide
gaauucauauagcguauuu

SEQ ID NO: 27867 - RNA, 19 nt, Artificial Sequence
  Description of Artificial Sequence: Synthetic oligonucleotide
accggacuguauaguaucg

SEQ ID NO: 27868 - RNA, 19 nt, Artificial Sequence
  Description of Artificial Sequence: Synthetic oligonucleotide
agcguccugaugaucagug

SEQ ID NO: 27869 - RNA, 19 nt, Artificial Sequence
  Description of Artificial Sequence: Synthetic oligonucleotide
ccaguugcuaugcagugac

SEQ ID NO: 27870 - RNA, 19 nt, Artificial Sequence
  Description of Artificial Sequence: Synthetic oligonucleotide
uaguaucgggaauccguaa

SEQ ID NO: 27871 - RNA, 19 nt, Artificial Sequence
  Description of Artificial Sequence: Synthetic oligonucleotide
acccaagcccaauuuacuu

SEQ ID NO: 27872 - RNA, 19 nt, Artificial Sequence
  Description of Artificial Sequence: Synthetic oligonucleotide
gaggguuaucgagggaaug

SEQ ID NO: 27873 - RNA, 19 nt, Artificial Sequence
  Description of Artificial Sequence: Synthetic oligonucleotide
ccuaggucuggcaaucggc

SEQ ID NO: 27874 - RNA, 19 nt, Artificial Sequence
  Description of Artificial Sequence: Synthetic oligonucleotide
auuaguccuuccagauggg

SEQ ID NO: 27875 - RNA, 19 nt, Artificial Sequence
  Description of Artificial Sequence: Synthetic oligonucleotide
uugagaguuucgagggauu

SEQ ID NO: 27876 - RNA, 19 nt, Artificial Sequence
  Description of Artificial Sequence: Synthetic oligonucleotide
gguaggcuaggguauuuac

SEQ ID NO: 27877 - RNA, 19 nt, Artificial Sequence
  Description of Artificial Sequence: Synthetic oligonucleotide
agccaacccaucaauggug

SEQ ID NO: 27878 - RNA, 19 nt, Artificial Sequence
  Description of Artificial Sequence: Synthetic oligonucleotide
ggaaucuagccuccaggug

SEQ ID NO: 27879 - RNA, 19 nt, Artificial Sequence
  Description of Artificial Sequence: Synthetic oligonucleotide
aggcuuuagguguucugaa

SEQ ID NO: 27880 - RNA, 19 nt, Artificial Sequence
  Description of Artificial Sequence: Synthetic oligonucleotide
guucagaagcgugugggga

SEQ ID NO: 27881 - RNA, 19 nt, Artificial Sequence
  Description of Artificial Sequence: Synthetic oligonucleotide
ccaaaaccaccuaucguac

SEQ ID NO: 27882 - RNA, 19 nt, Artificial Sequence
  Description of Artificial Sequence: Synthetic oligonucleotide
ucccgauggaggcuguuuu

SEQ ID NO: 27883 - RNA, 19 nt, Artificial Sequence
  Description of Artificial Sequence: Synthetic oligonucleotide
gcgaugaucacaaccacca

SEQ ID NO: 27884 - RNA, 19 nt, Artificial Sequence
  Description of Artificial Sequence: Synthetic oligonucleotide
uauagcguauuugguuuua

SEQ ID NO: 27885 - RNA, 19 nt, Artificial Sequence
  Description of Artificial Sequence: Synthetic oligonucleotide
guaguaugguguaucaagu

SEQ ID NO: 27886 - RNA, 19 nt, Artificial Sequence
  Description of Artificial Sequence: Synthetic oligonucleotide
ggauuuguuggggaagaug

SEQ ID NO: 27887 - RNA, 19 nt, Artificial Sequence
  Description of Artificial Sequence: Synthetic oligonucleotide
auaguaucgggaauccgua

SEQ ID NO: 27888 - RNA, 19 nt, Artificial Sequence
  Description of Artificial Sequence: Synthetic oligonucleotide
ccaagcccaauuuacuuuc

SEQ ID NO: 27889 - RNA, 19 nt, Artificial Sequence
  Description of Artificial Sequence: Synthetic oligonucleotide
ggucugcguaaucucacug

SEQ ID NO: 27890 - RNA, 19 nt, Artificial Sequence
  Description of Artificial Sequence: Synthetic oligonucleotide
uggcaaucggcuuccuuuu

SEQ ID NO: 27891 - RNA, 19 nt, Artificial Sequence
  Description of Artificial Sequence: Synthetic oligonucleotide
agccccucuauuuccuagu

SEQ ID NO: 27892 - RNA, 19 nt, Artificial Sequence
  Description of Artificial Sequence: Synthetic oligonucleotide
cauuggagguuuguaguca

SEQ ID NO: 27893 - RNA, 19 nt, Artificial Sequence
  Description of Artificial Sequence: Synthetic oligonucleotide
agacagcgaugaucacaac

SEQ ID NO: 27894 - RNA, 19 nt, Artificial Sequence
  Description of Artificial Sequence: Synthetic oligonucleotide
cauccuuagguggagaagu

SEQ ID NO: 27895 - RNA, 19 nt, Artificial Sequence
  Description of Artificial Sequence: Synthetic oligonucleotide
ccucuguaugaauuccgcc

SEQ ID NO: 27896 - RNA, 19 nt, Artificial Sequence
  Description of Artificial Sequence: Synthetic oligonucleotide
gguagcaccuucagcgucc

SEQ ID NO: 27897 - RNA, 19 nt, Artificial Sequence
  Description of Artificial Sequence: Synthetic oligonucleotide
aucgggaauccguaaucuu

SEQ ID NO: 27898 - RNA, 19 nt, Artificial Sequence
  Description of Artificial Sequence: Synthetic oligonucleotide
aagcguguggggaagccuu

SEQ ID NO: 27899 - RNA, 19 nt, Artificial Sequence
  Description of Artificial Sequence: Synthetic oligonucleotide
ugaucacaaccaccacaau

SEQ ID NO: 27900 - RNA, 19 nt, Artificial Sequence
  Description of Artificial Sequence: Synthetic oligonucleotide
ggcuuuagguguucugaac

SEQ ID NO: 27901 - RNA, 19 nt, Artificial Sequence
  Description of Artificial Sequence: Synthetic oligonucleotide
ccgccuuugauggauauug

SEQ ID NO: 27902 - RNA, 19 nt, Artificial Sequence
  Description of Artificial Sequence: Synthetic oligonucleotide
guacgccggguacaaaaga

SEQ ID NO: 27903 - RNA, 19 nt, Artificial Sequence
  Description of Artificial Sequence: Synthetic oligonucleotide
uucgagggauuggaguauc

SEQ ID NO: 27904 - RNA, 19 nt, Artificial Sequence
  Description of Artificial Sequence: Synthetic oligonucleotide
cagggauuuauaaccagau

SEQ ID NO: 27905 - RNA, 19 nt, Artificial Sequence
  Description of Artificial Sequence: Synthetic oligonucleotide
auccuaggucuggcaaucg

SEQ ID NO: 27906 - RNA, 19 nt, Artificial Sequence
  Description of Artificial Sequence: Synthetic oligonucleotide
ggcauaggaggccggcucc

SEQ ID NO: 27907 - RNA, 19 nt, Artificial Sequence
  Description of Artificial Sequence: Synthetic oligonucleotide
guaaucucacuggcuauaa

SEQ ID NO: 27908 - RNA, 19 nt, Artificial Sequence
  Description of Artificial Sequence: Synthetic oligonucleotide
gguacgccggguacaaaag

SEQ ID NO: 27909 - RNA, 19 nt, Artificial Sequence
  Description of Artificial Sequence: Synthetic oligonucleotide
gagaauucauauagcguau

SEQ ID NO: 27910 - RNA, 19 nt, Artificial Sequence
  Description of Artificial Sequence: Synthetic oligonucleotide
uccuuccuaaagucccgau

SEQ ID NO: 27911 - RNA, 19 nt, Artificial Sequence
  Description of Artificial Sequence: Synthetic oligonucleotide
gaugaucagugcagcaugu

SEQ ID NO: 27912 - RNA, 19 nt, Artificial Sequence
  Description of Artificial Sequence: Synthetic oligonucleotide
ggauugcuggcacagcaaa

SEQ ID NO: 27913 - RNA, 19 nt, Artificial Sequence
  Description of Artificial Sequence: Synthetic oligonucleotide
ucuugccguuagcuucaga

SEQ ID NO: 27914 - RNA, 19 nt, Artificial Sequence
  Description of Artificial Sequence: Synthetic oligonucleotide
ggacuguauaguaucggga

SEQ ID NO: 27915 - RNA, 19 nt, Artificial Sequence
  Description of Artificial Sequence: Synthetic oligonucleotide
auagcguauuugguuuuaa

SEQ ID NO: 27916 - RNA, 19 nt, Artificial Sequence
  Description of Artificial Sequence: Synthetic oligonucleotide
uuccaccggacuguauagu

SEQ ID NO: 27917 - RNA, 19 nt, Artificial Sequence
  Description of Artificial Sequence: Synthetic oligonucleotide
aguuguccgcccauguaau

SEQ ID NO: 27918 - RNA, 19 nt, Artificial Sequence
  Description of Artificial Sequence: Synthetic oligonucleotide
gaauuccgccuuugaugga

SEQ ID NO: 27919 - RNA, 19 nt, Artificial Sequence
  Description of Artificial Sequence: Synthetic oligonucleotide
gcuaggguauuuacuggug

SEQ ID NO: 27920 - RNA, 19 nt, Artificial Sequence
  Description of Artificial Sequence: Synthetic oligonucleotide
accuaucguacagggauuu

SEQ ID NO: 27921 - RNA, 19 nt, Artificial Sequence
  Description of Artificial Sequence: Synthetic oligonucleotide
ccauaaguaaguggaacca

SEQ ID NO: 27922 - RNA, 19 nt, Artificial Sequence
  Description of Artificial Sequence: Synthetic oligonucleotide
aagggcgaacgugggcugu

SEQ ID NO: 27923 - RNA, 19 nt, Artificial Sequence
  Description of Artificial Sequence: Synthetic oligonucleotide
gccaaugggccaugggcug

SEQ ID NO: 27924 - RNA, 19 nt, Artificial Sequence
  Description of Artificial Sequence: Synthetic oligonucleotide
accagugaccaaauagcuu

SEQ ID NO: 27925 - RNA, 19 nt, Artificial Sequence
  Description of Artificial Sequence: Synthetic oligonucleotide
gaugugccaaugggccaug

SEQ ID NO: 27926 - RNA, 19 nt, Artificial Sequence
  Description of Artificial Sequence: Synthetic oligonucleotide
ggaaaauauaagacaugua

SEQ ID NO: 27927 - RNA, 19 nt, Artificial Sequence
  Description of Artificial Sequence: Synthetic oligonucleotide
caguguggacacuccaaaa

SEQ ID NO: 27928 - RNA, 19 nt, Artificial Sequence
  Description of Artificial Sequence: Synthetic oligonucleotide
gaagccuuacgggcaccac

SEQ ID NO: 27929 - RNA, 19 nt, Artificial Sequence
  Description of Artificial Sequence: Synthetic oligonucleotide
cuugagaguuucgagggau

SEQ ID NO: 27930 - RNA, 19 nt, Artificial Sequence
  Description of Artificial Sequence: Synthetic oligonucleotide
uggugccauccggugacca

SEQ ID NO: 27931 - RNA, 19 nt, Artificial Sequence
  Description of Artificial Sequence: Synthetic oligonucleotide
guaccaaggcccugaggua

SEQ ID NO: 27932 - RNA, 19 nt, Artificial Sequence
  Description of Artificial Sequence: Synthetic oligonucleotide
ggcuaggguauuuacuggu

SEQ ID NO: 27933 - RNA, 19 nt, Artificial Sequence
  Description of Artificial Sequence: Synthetic oligonucleotide
caguuugcacuucuugccu

SEQ ID NO: 27934 - RNA, 19 nt, Artificial Sequence
  Description of Artificial Sequence: Synthetic oligonucleotide
acacaaaauuuuggcccau

SEQ ID NO: 27935 - RNA, 19 nt, Artificial Sequence
  Description of Artificial Sequence: Synthetic oligonucleotide
ggauuggaguaucagucau

SEQ ID NO: 27936 - RNA, 19 nt, Artificial Sequence
  Description of Artificial Sequence: Synthetic oligonucleotide
accaccuaucguacaggga

SEQ ID NO: 27937 - RNA, 19 nt, Artificial Sequence
  Description of Artificial Sequence: Synthetic oligonucleotide
ccaccuaucguacagggau

SEQ ID NO: 27938 - RNA, 19 nt, Artificial Sequence
  Description of Artificial Sequence: Synthetic oligonucleotide
cacuauuaugguccuuggu

SEQ ID NO: 27939 - RNA, 19 nt, Artificial Sequence
  Description of Artificial Sequence: Synthetic oligonucleotide
gccuuugauggauauugcu

SEQ ID NO: 27940 - RNA, 19 nt, Artificial Sequence
  Description of Artificial Sequence: Synthetic oligonucleotide
gggaacaaccacuggcaua

SEQ ID NO: 27941 - RNA, 19 nt, Artificial Sequence
  Description of Artificial Sequence: Synthetic oligonucleotide
ggguauuuacugguggucu

SEQ ID NO: 27942 - RNA, 19 nt, Artificial Sequence
  Description of Artificial Sequence: Synthetic oligonucleotide
ugguucuacuuggcaucac

SEQ ID NO: 27943 - RNA, 19 nt, Artificial Sequence
  Description of Artificial Sequence: Synthetic oligonucleotide
ccucaccuuccaaagagaa

SEQ ID NO: 27944 - RNA, 19 nt, Artificial Sequence
  Description of Artificial Sequence: Synthetic oligonucleotide
ugcugauccuaaggcuuua

SEQ ID NO: 27945 - RNA, 19 nt, Artificial Sequence
  Description of Artificial Sequence: Synthetic oligonucleotide
cacucauuggagguuugua

SEQ ID NO: 27946 - RNA, 19 nt, Artificial Sequence
  Description of Artificial Sequence: Synthetic oligonucleotide
ggaggcugccaguucacua

SEQ ID NO: 27947 - RNA, 19 nt, Artificial Sequence
  Description of Artificial Sequence: Synthetic oligonucleotide
uccgccuuugauggauauu

SEQ ID NO: 27948 - RNA, 19 nt, Artificial Sequence
  Description of Artificial Sequence: Synthetic oligonucleotide
gcgaacgugggcuguggga

SEQ ID NO: 27949 - RNA, 19 nt, Artificial Sequence
  Description of Artificial Sequence: Synthetic oligonucleotide
caguugcuaugcagugaca

SEQ ID NO: 27950 - RNA, 19 nt, Artificial Sequence
  Description of Artificial Sequence: Synthetic oligonucleotide
ccacccugcacuuucugaa

SEQ ID NO: 27951 - RNA, 19 nt, Artificial Sequence
  Description of Artificial Sequence: Synthetic oligonucleotide
gccggguacaaaagacagc

SEQ ID NO: 27952 - RNA, 19 nt, Artificial Sequence
  Description of Artificial Sequence: Synthetic oligonucleotide
ggcaaucggcuuccuuuuc

SEQ ID NO: 27953 - RNA, 19 nt, Artificial Sequence
  Description of Artificial Sequence: Synthetic oligonucleotide
gucuuacacuuuucauuau

SEQ ID NO: 27954 - RNA, 19 nt, Artificial Sequence
  Description of Artificial Sequence: Synthetic oligonucleotide
cgccuuugauggauauugc

SEQ ID NO: 27955 - RNA, 19 nt, Artificial Sequence
  Description of Artificial Sequence: Synthetic oligonucleotide
gguguuccgaacagauucu

SEQ ID NO: 27956 - RNA, 19 nt, Artificial Sequence
  Description of Artificial Sequence: Synthetic oligonucleotide
ggugguacgccggguacaa

SEQ ID NO: 27957 - RNA, 19 nt, Artificial Sequence
  Description of Artificial Sequence: Synthetic oligonucleotide
cugugcuguaauagaugau

SEQ ID NO: 27958 - RNA, 19 nt, Artificial Sequence
  Description of Artificial Sequence: Synthetic oligonucleotide
gcaaugcaauaucguccuc

SEQ ID NO: 27959 - RNA, 19 nt, Artificial Sequence
  Description of Artificial Sequence: Synthetic oligonucleotide
gccuuacgggcaccacacc

SEQ ID NO: 27960 - RNA, 19 nt, Artificial Sequence
  Description of Artificial Sequence: Synthetic oligonucleotide
cgaugaucacaaccaccac

SEQ ID NO: 27961 - RNA, 19 nt, Artificial Sequence
  Description of Artificial Sequence: Synthetic oligonucleotide
ccaacccaucaaugguguc

SEQ ID NO: 27962 - RNA, 19 nt, Artificial Sequence
  Description of Artificial Sequence: Synthetic oligonucleotide
cacugaccacaaagugaaa

SEQ ID NO: 27963 - RNA, 19 nt, Artificial Sequence
  Description of Artificial Sequence: Synthetic oligonucleotide
gguuaucgagggaauggau

SEQ ID NO: 27964 - RNA, 19 nt, Artificial Sequence
  Description of Artificial Sequence: Synthetic oligonucleotide
ccgaacagauucuguggaa

SEQ ID NO: 27965 - RNA, 19 nt, Artificial Sequence
  Description of Artificial Sequence: Synthetic oligonucleotide
cuguaugaauuccgccuuu

SEQ ID NO: 27966 - RNA, 19 nt, Artificial Sequence
  Description of Artificial Sequence: Synthetic oligonucleotide
cucucguacucuguacaau

SEQ ID NO: 27967 - RNA, 19 nt, Artificial Sequence
  Description of Artificial Sequence: Synthetic oligonucleotide
ccauagcaauucuguggca

SEQ ID NO: 27968 - RNA, 19 nt, Artificial Sequence
  Description of Artificial Sequence: Synthetic oligonucleotide
caccuaucguacagggauu

SEQ ID NO: 27969 - RNA, 19 nt, Artificial Sequence
  Description of Artificial Sequence: Synthetic oligonucleotide
gccguuagcuucagacgga

SEQ ID NO: 27970 - RNA, 19 nt, Artificial Sequence
  Description of Artificial Sequence: Synthetic oligonucleotide
gcguaaucucacuggcuau

SEQ ID NO: 27971 - RNA, 19 nt, Artificial Sequence
  Description of Artificial Sequence: Synthetic oligonucleotide
agucccgauggaggcuguu

SEQ ID NO: 27972 - RNA, 19 nt, Artificial Sequence
  Description of Artificial Sequence: Synthetic oligonucleotide
ggagaaagucaggccuuua

SEQ ID NO: 27973 - RNA, 19 nt, Artificial Sequence
  Description of Artificial Sequence: Synthetic oligonucleotide
gcguguggggaagccuuac

SEQ ID NO: 27974 - RNA, 19 nt, Artificial Sequence
  Description of Artificial Sequence: Synthetic oligonucleotide
cguaaucucacuggcuaua

SEQ ID NO: 27975 - RNA, 19 nt, Artificial Sequence
  Description of Artificial Sequence: Synthetic oligonucleotide
ggaaugcccuaaacaucua

SEQ ID NO: 27976 - RNA, 19 nt, Artificial Sequence
  Description of Artificial Sequence: Synthetic oligonucleotide
cagggaguuguccgcccau

SEQ ID NO: 27977 - RNA, 19 nt, Artificial Sequence
  Description of Artificial Sequence: Synthetic oligonucleotide
ccaccggacuguauaguau

SEQ ID NO: 27978 - RNA, 19 nt, Artificial Sequence
  Description of Artificial Sequence: Synthetic oligonucleotide
cggguacaaaagacagcga

SEQ ID NO: 27979 - RNA, 19 nt, Artificial Sequence
  Description of Artificial Sequence: Synthetic oligonucleotide
gugguacgccggguacaaa

SEQ ID NO: 27980 - RNA, 19 nt, Artificial Sequence
  Description of Artificial Sequence: Synthetic oligonucleotide
gccauccggugaccaacua

SEQ ID NO: 27981 - RNA, 19 nt, Artificial Sequence
  Description of Artificial Sequence: Synthetic oligonucleotide
ccuaucguacagggauuua

SEQ ID NO: 27982 - RNA, 19 nt, Artificial Sequence
  Description of Artificial Sequence: Synthetic oligonucleotide
guccgcccauguaauccuu

SEQ ID NO: 27983 - RNA, 19 nt, Artificial Sequence
  Description of Artificial Sequence: Synthetic oligonucleotide
ccaugccuuuugaguuccu

SEQ ID NO: 27984 - RNA, 19 nt, Artificial Sequence
  Description of Artificial Sequence: Synthetic oligonucleotide
aauucggaugccuuggggc

SEQ ID NO: 27985 - RNA, 19 nt, Artificial Sequence
  Description of Artificial Sequence: Synthetic oligonucleotide
agagaguaaaaguuaaugg

SEQ ID NO: 27986 - RNA, 19 nt, Artificial Sequence
  Description of Artificial Sequence: Synthetic oligonucleotide
agugaaguaacggagauac

SEQ ID NO: 27987 - RNA, 19 nt, Artificial Sequence
  Description of Artificial Sequence: Synthetic oligonucleotide
aauaucuggauuucgccag

SEQ ID NO: 27988 - RNA, 19 nt, Artificial Sequence
  Description of Artificial Sequence: Synthetic oligonucleotide
uaaacguucaaaugaacag

SEQ ID NO: 27989 - RNA, 19 nt, Artificial Sequence
  Description of Artificial Sequence: Synthetic oligonucleotide
aaacguucaaaugaacagc

SEQ ID NO: 27990 - RNA, 19 nt, Artificial Sequence
  Description of Artificial Sequence: Synthetic oligonucleotide
uggguaaacguucaaauga

SEQ ID NO: 27991 - RNA, 19 nt, Artificial Sequence
  Description of Artificial Sequence: Synthetic oligonucleotide
uguucaaacccucuccggg

SEQ ID NO: 27992 - RNA, 19 nt, Artificial Sequence
  Description of Artificial Sequence: Synthetic oligonucleotide
aaugcucggacuuuggcca

SEQ ID NO: 27993 - RNA, 19 nt, Artificial Sequence
  Description of Artificial Sequence: Synthetic oligonucleotide
gagaguaaaaguuaaugga

SEQ ID NO: 27994 - RNA, 19 nt, Artificial Sequence
  Description of Artificial Sequence: Synthetic oligonucleotide
uauugguuaaguuccacca

SEQ ID NO: 27995 - RNA, 19 nt, Artificial Sequence
  Description of Artificial Sequence: Synthetic oligonucleotide
uguguuuacacuagcuaag

SEQ ID NO: 27996 - RNA, 19 nt, Artificial Sequence
  Description of Artificial Sequence: Synthetic oligonucleotide
acuagcuaaggauuguuuc

SEQ ID NO: 27997 - RNA, 19 nt, Artificial Sequence
  Description of Artificial Sequence: Synthetic oligonucleotide
aagcuguugugauacaaag

SEQ ID NO: 27998 - RNA, 19 nt, Artificial Sequence
  Description of Artificial Sequence: Synthetic oligonucleotide
aaacccguagaugucaaac

SEQ ID NO: 27999 - RNA, 19 nt, Artificial Sequence
  Description of Artificial Sequence: Synthetic oligonucleotide
uuaguuugggucaucugcc

SEQ ID NO: 28000 - RNA, 19 nt, Artificial Sequence
  Description of Artificial Sequence: Synthetic oligonucleotide
aaagcauggggagacgugg

SEQ ID NO: 28001 - RNA, 19 nt, Artificial Sequence
  Description of Artificial Sequence: Synthetic oligonucleotide
ucagagacgggcuuagucc

SEQ ID NO: 28002 - RNA, 19 nt, Artificial Sequence
  Description of Artificial Sequence: Synthetic oligonucleotide
gaggguauaguccacuuug

SEQ ID NO: 28003 - RNA, 19 nt, Artificial Sequence
  Description of Artificial Sequence: Synthetic oligonucleotide
uauugagaagaccggacug

SEQ ID NO: 28004 - RNA, 19 nt, Artificial Sequence
  Description of Artificial Sequence: Synthetic oligonucleotide
aucaaggauaguucgagug

SEQ ID NO: 28005 - RNA, 19 nt, Artificial Sequence
  Description of Artificial Sequence: Synthetic oligonucleotide
ugagugauggucaaggcua

SEQ ID NO: 28006 - RNA, 19 nt, Artificial Sequence
  Description of Artificial Sequence: Synthetic oligonucleotide
uaauaagugaagcaacuuu

SEQ ID NO: 28007 - RNA, 19 nt, Artificial Sequence
  Description of Artificial Sequence: Synthetic oligonucleotide
aacauaacauggcuaacau

SEQ ID NO: 28008 - RNA, 19 nt, Artificial Sequence
  Description of Artificial Sequence: Synthetic oligonucleotide
cuagcuaaggauuguuucc

SEQ ID NO: 28009 - RNA, 19 nt, Artificial Sequence
  Description of Artificial Sequence: Synthetic oligonucleotide
aguccauuccuccauagug

SEQ ID NO: 28010 - RNA, 19 nt, Artificial Sequence
  Description of Artificial Sequence: Synthetic oligonucleotide
uggaguauaguagauuugc

SEQ ID NO: 28011 - RNA, 19 nt, Artificial Sequence
  Description of Artificial Sequence: Synthetic oligonucleotide
uguuguugggcagaguccg

SEQ ID NO: 28012 - RNA, 19 nt, Artificial Sequence
  Description of Artificial Sequence: Synthetic oligonucleotide
auaguagauuugcaggguc

SEQ ID NO: 28013 - RNA, 19 nt, Artificial Sequence
  Description of Artificial Sequence: Synthetic oligonucleotide
guaacggagauacuugaag

SEQ ID NO: 28014 - RNA, 19 nt, Artificial Sequence
  Description of Artificial Sequence: Synthetic oligonucleotide
aguacuuacuuucuaccug

SEQ ID NO: 28015 - RNA, 19 nt, Artificial Sequence
  Description of Artificial Sequence: Synthetic oligonucleotide
acuagaauacuuugccauc

SEQ ID NO: 28016 - RNA, 19 nt, Artificial Sequence
  Description of Artificial Sequence: Synthetic oligonucleotide
uaaagguauuaacaauuga

SEQ ID NO: 28017 - RNA, 19 nt, Artificial Sequence
  Description of Artificial Sequence: Synthetic oligonucleotide
uaacggagauacuugaaga

SEQ ID NO: 28018 - RNA, 19 nt, Artificial Sequence
  Description of Artificial Sequence: Synthetic oligonucleotide
ucucuaagugguaggcucg

SEQ ID NO: 28019 - RNA, 19 nt, Artificial Sequence
  Description of Artificial Sequence: Synthetic oligonucleotide
acaauguuuucucaugaca

SEQ ID NO: 28020 - RNA, 19 nt, Artificial Sequence
  Description of Artificial Sequence: Synthetic oligonucleotide
cugacgagacaccagaaag

SEQ ID NO: 28021 - RNA, 19 nt, Artificial Sequence
  Description of Artificial Sequence: Synthetic oligonucleotide
auauaaagguauuaacaau

SEQ ID NO: 28022 - RNA, 19 nt, Artificial Sequence
  Description of Artificial Sequence: Synthetic oligonucleotide
ugacaaccacccaucaggg

SEQ ID NO: 28023 - RNA, 19 nt, Artificial Sequence
  Description of Artificial Sequence: Synthetic oligonucleotide
uucagagaguaaaaguuaa

SEQ ID NO: 28024 - RNA, 19 nt, Artificial Sequence
  Description of Artificial Sequence: Synthetic oligonucleotide
ucccucauaaaggaaagag

SEQ ID NO: 28025 - RNA, 19 nt, Artificial Sequence
  Description of Artificial Sequence: Synthetic oligonucleotide
ugacgagacaccagaaagc

SEQ ID NO: 28026 - RNA, 19 nt, Artificial Sequence
  Description of Artificial Sequence: Synthetic oligonucleotide
agugagugauggucaaggc

SEQ ID NO: 28027 - RNA, 19 nt, Artificial Sequence
  Description of Artificial Sequence: Synthetic oligonucleotide
gauaguucgagugaaguaa

SEQ ID NO: 28028 - RNA, 19 nt, Artificial Sequence
  Description of Artificial Sequence: Synthetic oligonucleotide
acagucuagaugcugaaaa

SEQ ID NO: 28029 - RNA, 19 nt, Artificial Sequence
  Description of Artificial Sequence: Synthetic oligonucleotide
auauugagaagaccggacu

SEQ ID NO: 28030 - RNA, 19 nt, Artificial Sequence
  Description of Artificial Sequence: Synthetic oligonucleotide
ggcaaaacggaaaauaacc

SEQ ID NO: 28031 - RNA, 19 nt, Artificial Sequence
  Description of Artificial Sequence: Synthetic oligonucleotide
aacguucaaaugaacagca

SEQ ID NO: 28032 - RNA, 19 nt, Artificial Sequence
  Description of Artificial Sequence: Synthetic oligonucleotide
gauaguccauuuaaggcug

SEQ ID NO: 28033 - RNA, 19 nt, Artificial Sequence
  Description of Artificial Sequence: Synthetic oligonucleotide
uaugacaucccugguaggc

SEQ ID NO: 28034 - RNA, 19 nt, Artificial Sequence
  Description of Artificial Sequence: Synthetic oligonucleotide
cauauugagaagaccggac

SEQ ID NO: 28035 - RNA, 19 nt, Artificial Sequence
  Description of Artificial Sequence: Synthetic oligonucleotide
uccagacuagaauacuuug

SEQ ID NO: 28036 - RNA, 19 nt, Artificial Sequence
  Description of Artificial Sequence: Synthetic oligonucleotide
uuuggagcggugcucgugc

SEQ ID NO: 28037 - RNA, 19 nt, Artificial Sequence
  Description of Artificial Sequence: Synthetic oligonucleotide
agacacgcugcccucacac

SEQ ID NO: 28038 - RNA, 19 nt, Artificial Sequence
  Description of Artificial Sequence: Synthetic oligonucleotide
aguucgagugaaguaacgg

SEQ ID NO: 28039 - RNA, 19 nt, Artificial Sequence
  Description of Artificial Sequence: Synthetic oligonucleotide
ugugaugcaugugacaccu

SEQ ID NO: 28040 - RNA, 19 nt, Artificial Sequence
  Description of Artificial Sequence: Synthetic oligonucleotide
caaugcucggacuuuggcc

SEQ ID NO: 28041 - RNA, 19 nt, Artificial Sequence
  Description of Artificial Sequence: Synthetic oligonucleotide
guaaaggagggccacugcc

SEQ ID NO: 28042 - RNA, 19 nt, Artificial Sequence
  Description of Artificial Sequence: Synthetic oligonucleotide
gaauucggaugccuugggg

SEQ ID NO: 28043 - RNA, 19 nt, Artificial Sequence
  Description of Artificial Sequence: Synthetic oligonucleotide
aggcuuaaugaaugccugc

SEQ ID NO: 28044 - RNA, 19 nt, Artificial Sequence
  Description of Artificial Sequence: Synthetic oligonucleotide
auaaagguauuaacaauug

SEQ ID NO: 28045 - RNA, 19 nt, Artificial Sequence
  Description of Artificial Sequence: Synthetic oligonucleotide
uaguucgagugaaguaacg

SEQ ID NO: 28046 - RNA, 19 nt, Artificial Sequence
  Description of Artificial Sequence: Synthetic oligonucleotide
cuaaauauagagaccagcu

SEQ ID NO: 28047 - RNA, 19 nt, Artificial Sequence
  Description of Artificial Sequence: Synthetic oligonucleotide
uuguucaaacccucuccgg

SEQ ID NO: 28048 - RNA, 19 nt, Artificial Sequence
  Description of Artificial Sequence: Synthetic oligonucleotide
guaaacguucaaaugaaca

SEQ ID NO: 28049 - RNA, 19 nt, Artificial Sequence
  Description of Artificial Sequence: Synthetic oligonucleotide
guaagauaguccauuuaag

SEQ ID NO: 28050 - RNA, 19 nt, Artificial Sequence
  Description of Artificial Sequence: Synthetic oligonucleotide
uggcucguaaaauacuugu

SEQ ID NO: 28051 - RNA, 19 nt, Artificial Sequence
  Description of Artificial Sequence: Synthetic oligonucleotide
guagugugcccucaugucc

SEQ ID NO: 28052 - RNA, 19 nt, Artificial Sequence
  Description of Artificial Sequence: Synthetic oligonucleotide
ucauauugagaagaccgga

SEQ ID NO: 28053 - RNA, 19 nt, Artificial Sequence
  Description of Artificial Sequence: Synthetic oligonucleotide
uggaauucggaugccuugg

SEQ ID NO: 28054 - RNA, 19 nt, Artificial Sequence
  Description of Artificial Sequence: Synthetic oligonucleotide
ucgagugaaguaacggaga

SEQ ID NO: 28055 - RNA, 19 nt, Artificial Sequence
  Description of Artificial Sequence: Synthetic oligonucleotide
ugugacggucgacacacca

SEQ ID NO: 28056 - RNA, 19 nt, Artificial Sequence
  Description of Artificial Sequence: Synthetic oligonucleotide
uuagcgguaccugccacgg

SEQ ID NO: 28057 - RNA, 19 nt, Artificial Sequence
  Description of Artificial Sequence: Synthetic oligonucleotide
uaccugaaaugagacaaag

SEQ ID NO: 28058 - RNA, 19 nt, Artificial Sequence
  Description of Artificial Sequence: Synthetic oligonucleotide
gucauauugagaagaccgg

SEQ ID NO: 28059 - RNA, 19 nt, Artificial Sequence
  Description of Artificial Sequence: Synthetic oligonucleotide
aaccaacucagccauucaa

SEQ ID NO: 28060 - RNA, 19 nt, Artificial Sequence
  Description of Artificial Sequence: Synthetic oligonucleotide
ucuucguagagcagagagu

SEQ ID NO: 28061 - RNA, 19 nt, Artificial Sequence
  Description of Artificial Sequence: Synthetic oligonucleotide
ggguggauuaggaagacgg

SEQ ID NO: 28062 - RNA, 19 nt, Artificial Sequence
  Description of Artificial Sequence: Synthetic oligonucleotide
ugacggucgacacaccacu

SEQ ID NO: 28063 - RNA, 19 nt, Artificial Sequence
  Description of Artificial Sequence: Synthetic oligonucleotide
cuggguaaacguucaaaug

SEQ ID NO: 28064 - RNA, 19 nt, Artificial Sequence
  Description of Artificial Sequence: Synthetic oligonucleotide
agagcauaccaucucccug

SEQ ID NO: 28065 - RNA, 19 nt, Artificial Sequence
  Description of Artificial Sequence: Synthetic oligonucleotide
auaguucgagugaaguaac

SEQ ID NO: 28066 - RNA, 19 nt, Artificial Sequence
  Description of Artificial Sequence: Synthetic oligonucleotide
acagcaaccgagcuacugu

SEQ ID NO: 28067 - RNA, 19 nt, Artificial Sequence
  Description of Artificial Sequence: Synthetic oligonucleotide
guuagcgguaccugccacg

SEQ ID NO: 28068 - RNA, 19 nt, Artificial Sequence
  Description of Artificial Sequence: Synthetic oligonucleotide
caauaucuggauuucgcca

SEQ ID NO: 28069 - RNA, 19 nt, Artificial Sequence
  Description of Artificial Sequence: Synthetic oligonucleotide
aauaaccucccuuguucaa

SEQ ID NO: 28070 - RNA, 19 nt, Artificial Sequence
  Description of Artificial Sequence: Synthetic oligonucleotide
agccucuaucuucaaggac

SEQ ID NO: 28071 - RNA, 19 nt, Artificial Sequence
  Description of Artificial Sequence: Synthetic oligonucleotide
aaggacuucccugaacaga

SEQ ID NO: 28072 - RNA, 19 nt, Artificial Sequence
  Description of Artificial Sequence: Synthetic oligonucleotide
uccaaugcucggacuuugg

SEQ ID NO: 28073 - RNA, 19 nt, Artificial Sequence
  Description of Artificial Sequence: Synthetic oligonucleotide
guucgagugaaguaacgga

SEQ ID NO: 28074 - RNA, 19 nt, Artificial Sequence
  Description of Artificial Sequence: Synthetic oligonucleotide
acgcaggaaauccucucgg

SEQ ID NO: 28075 - RNA, 19 nt, Artificial Sequence
  Description of Artificial Sequence: Synthetic oligonucleotide
ggguuuuguacccuuguag

SEQ ID NO: 28076 - RNA, 19 nt, Artificial Sequence
  Description of Artificial Sequence: Synthetic oligonucleotide
ucguaaaauacuugucaua

SEQ ID NO: 28077 - RNA, 19 nt, Artificial Sequence
  Description of Artificial Sequence: Synthetic oligonucleotide
agaauacuuugccaucaga

SEQ ID NO: 28078 - RNA, 19 nt, Artificial Sequence
  Description of Artificial Sequence: Synthetic oligonucleotide
uugucauauugagaagacc

SEQ ID NO: 28079 - RNA, 19 nt, Artificial Sequence
  Description of Artificial Sequence: Synthetic oligonucleotide
ugggcagacgcuguaaaca

SEQ ID NO: 28080 - RNA, 19 nt, Artificial Sequence
  Description of Artificial Sequence: Synthetic oligonucleotide
agcgguaccugccacggug

SEQ ID NO: 28081 - RNA, 19 nt, Artificial Sequence
  Description of Artificial Sequence: Synthetic oligonucleotide
ucgaguucugccacuggga

SEQ ID NO: 28082 - RNA, 19 nt, Artificial Sequence
  Description of Artificial Sequence: Synthetic oligonucleotide
aacagcaaccgagcuacug

SEQ ID NO: 28083 - RNA, 19 nt, Artificial Sequence
  Description of Artificial Sequence: Synthetic oligonucleotide
uuccagacuagaauacuuu

SEQ ID NO: 28084 - RNA, 19 nt, Artificial Sequence
  Description of Artificial Sequence: Synthetic oligonucleotide
ugggcgaagacacgcugcc

SEQ ID NO: 28085 - RNA, 19 nt, Artificial Sequence
  Description of Artificial Sequence: Synthetic oligonucleotide
agccgaaugagcuccuucu

SEQ ID NO: 28086 - RNA, 19 nt, Artificial Sequence
  Description of Artificial Sequence: Synthetic oligonucleotide
gauuaggaagacggcacug

SEQ ID NO: 28087 - RNA, 19 nt, Artificial Sequence
  Description of Artificial Sequence: Synthetic oligonucleotide
uccggagagcauaccaucu

SEQ ID NO: 28088 - RNA, 19 nt, Artificial Sequence
  Description of Artificial Sequence: Synthetic oligonucleotide
gaagacggcacugugcaga

SEQ ID NO: 28089 - RNA, 19 nt, Artificial Sequence
  Description of Artificial Sequence: Synthetic oligonucleotide
acuggcgaggcaccaauca

SEQ ID NO: 28090 - RNA, 19 nt, Artificial Sequence
  Description of Artificial Sequence: Synthetic oligonucleotide
aguccuaaacccguagaug

SEQ ID NO: 28091 - RNA, 19 nt, Artificial Sequence
  Description of Artificial Sequence: Synthetic oligonucleotide
gcucguaaaauacuuguca

SEQ ID NO: 28092 - RNA, 19 nt, Artificial Sequence
  Description of Artificial Sequence: Synthetic oligonucleotide
aucgcuaaccagcucgccu

SEQ ID NO: 28093 - RNA, 19 nt, Artificial Sequence
  Description of Artificial Sequence: Synthetic oligonucleotide
gcuagaaguagcacuagag

SEQ ID NO: 28094 - RNA, 19 nt, Artificial Sequence
  Description of Artificial Sequence: Synthetic oligonucleotide
acacagauaaccaaaucua

SEQ ID NO: 28095 - RNA, 19 nt, Artificial Sequence
  Description of Artificial Sequence: Synthetic oligonucleotide
auuugcagggucaaacacu

SEQ ID NO: 28096 - RNA, 19 nt, Artificial Sequence
  Description of Artificial Sequence: Synthetic oligonucleotide
aggauaguucgagugaagu

SEQ ID NO: 28097 - RNA, 19 nt, Artificial Sequence
  Description of Artificial Sequence: Synthetic oligonucleotide
guccuaaacccguagaugu

SEQ ID NO: 28098 - RNA, 19 nt, Artificial Sequence
  Description of Artificial Sequence: Synthetic oligonucleotide
auuuggacccacacacugg

SEQ ID NO: 28099 - RNA, 19 nt, Artificial Sequence
  Description of Artificial Sequence: Synthetic oligonucleotide
aaccucauacacugggcua

SEQ ID NO: 28100 - RNA, 19 nt, Artificial Sequence
  Description of Artificial Sequence: Synthetic oligonucleotide
acggucgacacaccacuuc

SEQ ID NO: 28101 - RNA, 19 nt, Artificial Sequence
  Description of Artificial Sequence: Synthetic oligonucleotide
ggagggaacuguaacuugg

SEQ ID NO: 28102 - RNA, 19 nt, Artificial Sequence
  Description of Artificial Sequence: Synthetic oligonucleotide
accaacucagccauucaag

SEQ ID NO: 28103 - RNA, 19 nt, Artificial Sequence
  Description of Artificial Sequence: Synthetic oligonucleotide
cucagagacgggcuuaguc

SEQ ID NO: 28104 - RNA, 19 nt, Artificial Sequence
  Description of Artificial Sequence: Synthetic oligonucleotide
uggcucaaaucacucgagu

SEQ ID NO: 28105 - RNA, 19 nt, Artificial Sequence
  Description of Artificial Sequence: Synthetic oligonucleotide
agggcuaugcuuuguugca

SEQ ID NO: 28106 - RNA, 19 nt, Artificial Sequence
  Description of Artificial Sequence: Synthetic oligonucleotide
gagauacuugaagauggac

SEQ ID NO: 28107 - RNA, 19 nt, Artificial Sequence
  Description of Artificial Sequence: Synthetic oligonucleotide
auuaggaagacggcacugu

SEQ ID NO: 28108 - RNA, 19 nt, Artificial Sequence
  Description of Artificial Sequence: Synthetic oligonucleotide
gacguuagcgguaccugcc

SEQ ID NO: 28109 - RNA, 19 nt, Artificial Sequence
  Description of Artificial Sequence: Synthetic oligonucleotide
agugagaccacgguccagu

SEQ ID NO: 28110 - RNA, 19 nt, Artificial Sequence
  Description of Artificial Sequence: Synthetic oligonucleotide
caacauaacauggcuaaca

SEQ ID NO: 28111 - RNA, 19 nt, Artificial Sequence
  Description of Artificial Sequence: Synthetic oligonucleotide
ccagacuagaauacuuugc

SEQ ID NO: 28112 - RNA, 19 nt, Artificial Sequence
  Description of Artificial Sequence: Synthetic oligonucleotide
acaguccugcgacucucac

SEQ ID NO: 28113 - RNA, 19 nt, Artificial Sequence
  Description of Artificial Sequence: Synthetic oligonucleotide
uuuagccuguccagcucca

SEQ ID NO: 28114 - RNA, 19 nt, Artificial Sequence
  Description of Artificial Sequence: Synthetic oligonucleotide
acgguggccggucuuaagu

SEQ ID NO: 28115 - RNA, 19 nt, Artificial Sequence
  Description of Artificial Sequence: Synthetic oligonucleotide
cuaugacaucccugguagg

SEQ ID NO: 28116 - RNA, 19 nt, Artificial Sequence
  Description of Artificial Sequence: Synthetic oligonucleotide
ggucuaaaaguucccacuc

SEQ ID NO: 28117 - RNA, 19 nt, Artificial Sequence
  Description of Artificial Sequence: Synthetic oligonucleotide
uccuaaacccguagauguc

SEQ ID NO: 28118 - RNA, 19 nt, Artificial Sequence
  Description of Artificial Sequence: Synthetic oligonucleotide
aaccgagcuacuguucagu

SEQ ID NO: 28119 - RNA, 19 nt, Artificial Sequence
  Description of Artificial Sequence: Synthetic oligonucleotide
gagcauaccaucucccugu

SEQ ID NO: 28120 - RNA, 19 nt, Artificial Sequence
  Description of Artificial Sequence: Synthetic oligonucleotide
ucaacauaacauggcuaac

SEQ ID NO: 28121 - RNA, 19 nt, Artificial Sequence
  Description of Artificial Sequence: Synthetic oligonucleotide
ggugugacggucgacacac

SEQ ID NO: 28122 - RNA, 19 nt, Artificial Sequence
  Description of Artificial Sequence: Synthetic oligonucleotide
acgcuuaggauugagcaaa

SEQ ID NO: 28123 - RNA, 19 nt, Artificial Sequence
  Description of Artificial Sequence: Synthetic oligonucleotide
cuucccugaacagacccac

SEQ ID NO: 28124 - RNA, 19 nt, Artificial Sequence
  Description of Artificial Sequence: Synthetic oligonucleotide
uggauuucgccaggagaag

SEQ ID NO: 28125 - RNA, 19 nt, Artificial Sequence
  Description of Artificial Sequence: Synthetic oligonucleotide
uggccggucuuaagucugg

SEQ ID NO: 28126 - RNA, 19 nt, Artificial Sequence
  Description of Artificial Sequence: Synthetic oligonucleotide
ccgggcuucaagaaggaag

SEQ ID NO: 28127 - RNA, 19 nt, Artificial Sequence
  Description of Artificial Sequence: Synthetic oligonucleotide
gucgacacaccacuuccac

SEQ ID NO: 28128 - RNA, 19 nt, Artificial Sequence
  Description of Artificial Sequence: Synthetic oligonucleotide
cgugcagugacacagauaa

SEQ ID NO: 28129 - RNA, 19 nt, Artificial Sequence
  Description of Artificial Sequence: Synthetic oligonucleotide
ggauuucgccaggagaagg

SEQ ID NO: 28130 - RNA, 19 nt, Artificial Sequence
  Description of Artificial Sequence: Synthetic oligonucleotide
ucgcuaaccagcucgccuu

SEQ ID NO: 28131 - RNA, 19 nt, Artificial Sequence
  Description of Artificial Sequence: Synthetic oligonucleotide
ugcaaucgaggcagcuucu

SEQ ID NO: 28132 - RNA, 19 nt, Artificial Sequence
  Description of Artificial Sequence: Synthetic oligonucleotide
uggugugacggucgacaca

SEQ ID NO: 28133 - RNA, 19 nt, Artificial Sequence
  Description of Artificial Sequence: Synthetic oligonucleotide
uugguuguaaaggcaugaa

SEQ ID NO: 28134 - RNA, 19 nt, Artificial Sequence
  Description of Artificial Sequence: Synthetic oligonucleotide
agcuaaggauuguuuccga

SEQ ID NO: 28135 - RNA, 19 nt, Artificial Sequence
  Description of Artificial Sequence: Synthetic oligonucleotide
gacgggcuuaguccuuugc

SEQ ID NO: 28136 - RNA, 19 nt, Artificial Sequence
  Description of Artificial Sequence: Synthetic oligonucleotide
agcuuaguuugggucaucu

SEQ ID NO: 28137 - RNA, 19 nt, Artificial Sequence
  Description of Artificial Sequence: Synthetic oligonucleotide
uuggagcggugcucgugcg

SEQ ID NO: 28138 - RNA, 19 nt, Artificial Sequence
  Description of Artificial Sequence: Synthetic oligonucleotide
cuccggagagcauaccauc

SEQ ID NO: 28139 - RNA, 19 nt, Artificial Sequence
  Description of Artificial Sequence: Synthetic oligonucleotide
ggaauucggaugccuuggg

SEQ ID NO: 28140 - RNA, 19 nt, Artificial Sequence
  Description of Artificial Sequence: Synthetic oligonucleotide
gguucuugagcuccggaga

SEQ ID NO: 28141 - RNA, 19 nt, Artificial Sequence
  Description of Artificial Sequence: Synthetic oligonucleotide
caaggugggcgaagacacg

SEQ ID NO: 28142 - RNA, 19 nt, Artificial Sequence
  Description of Artificial Sequence: Synthetic oligonucleotide
aggccgaaccucuccagcu

SEQ ID NO: 28143 - RNA, 19 nt, Artificial Sequence
  Description of Artificial Sequence: Synthetic oligonucleotide
auaaccucccuuguucaaa

SEQ ID NO: 28144 - RNA, 19 nt, Artificial Sequence
  Description of Artificial Sequence: Synthetic oligonucleotide
auggcuagaaguagcacua

SEQ ID NO: 28145 - RNA, 19 nt, Artificial Sequence
  Description of Artificial Sequence: Synthetic oligonucleotide
gaagaccggucauggaaaa

SEQ ID NO: 28146 - RNA, 19 nt, Artificial Sequence
  Description of Artificial Sequence: Synthetic oligonucleotide
ucuaagugguaggcucgcc

SEQ ID NO: 28147 - RNA, 19 nt, Artificial Sequence
  Description of Artificial Sequence: Synthetic oligonucleotide
ggcgcgugcagugacacag

SEQ ID NO: 28148 - RNA, 19 nt, Artificial Sequence
  Description of Artificial Sequence: Synthetic oligonucleotide
cggucuuaagucuggaacc

SEQ ID NO: 28149 - RNA, 19 nt, Artificial Sequence
  Description of Artificial Sequence: Synthetic oligonucleotide
acgaugcugacgagacacc

SEQ ID NO: 28150 - RNA, 19 nt, Artificial Sequence
  Description of Artificial Sequence: Synthetic oligonucleotide
caaccgagcuacuguucag

SEQ ID NO: 28151 - RNA, 19 nt, Artificial Sequence
  Description of Artificial Sequence: Synthetic oligonucleotide
ugguaggcucgccgguucc

SEQ ID NO: 28152 - RNA, 19 nt, Artificial Sequence
  Description of Artificial Sequence: Synthetic oligonucleotide
ugcugacgagacaccagaa

SEQ ID NO: 28153 - RNA, 19 nt, Artificial Sequence
  Description of Artificial Sequence: Synthetic oligonucleotide
cuggugugacggucgacac

SEQ ID NO: 28154 - RNA, 19 nt, Artificial Sequence
  Description of Artificial Sequence: Synthetic oligonucleotide
aagacacgcugcccucaca

SEQ ID NO: 28155 - RNA, 19 nt, Artificial Sequence
  Description of Artificial Sequence: Synthetic oligonucleotide
auggcucaaaucacucgag

SEQ ID NO: 28156 - RNA, 19 nt, Artificial Sequence
  Description of Artificial Sequence: Synthetic oligonucleotide
ggcuaugcuuuguugcaug

SEQ ID NO: 28157 - RNA, 19 nt, Artificial Sequence
  Description of Artificial Sequence: Synthetic oligonucleotide
gguaaaggagggccacugc

SEQ ID NO: 28158 - RNA, 19 nt, Artificial Sequence
  Description of Artificial Sequence: Synthetic oligonucleotide
gguagugugcccucauguc

SEQ ID NO: 28159 - RNA, 19 nt, Artificial Sequence
  Description of Artificial Sequence: Synthetic oligonucleotide
acguuagcgguaccugcca

SEQ ID NO: 28160 - RNA, 19 nt, Artificial Sequence
  Description of Artificial Sequence: Synthetic oligonucleotide
cuggaguaauguuuguugu

SEQ ID NO: 28161 - RNA, 19 nt, Artificial Sequence
  Description of Artificial Sequence: Synthetic oligonucleotide
cucuaagugguaggcucgc

SEQ ID NO: 28162 - RNA, 19 nt, Artificial Sequence
  Description of Artificial Sequence: Synthetic oligonucleotide
agaucccucucucuccuuu

SEQ ID NO: 28163 - RNA, 19 nt, Artificial Sequence
  Description of Artificial Sequence: Synthetic oligonucleotide
uggcuagaaguagcacuag

SEQ ID NO: 28164 - RNA, 19 nt, Artificial Sequence
  Description of Artificial Sequence: Synthetic oligonucleotide
guggcucguaaaauacuug

SEQ ID NO: 28165 - RNA, 19 nt, Artificial Sequence
  Description of Artificial Sequence: Synthetic oligonucleotide
ccucaaaccaccauccuaa

SEQ ID NO: 28166 - RNA, 19 nt, Artificial Sequence
  Description of Artificial Sequence: Synthetic oligonucleotide
cagaggcaugccuggaguc

SEQ ID NO: 28167 - RNA, 19 nt, Artificial Sequence
  Description of Artificial Sequence: Synthetic oligonucleotide
gguaauaagugaagcaacu

SEQ ID NO: 28168 - RNA, 19 nt, Artificial Sequence
  Description of Artificial Sequence: Synthetic oligonucleotide
aguaacggagauacuugaa

SEQ ID NO: 28169 - RNA, 19 nt, Artificial Sequence
  Description of Artificial Sequence: Synthetic oligonucleotide
ugggaccccuggcugauuu

SEQ ID NO: 28170 - RNA, 19 nt, Artificial Sequence
  Description of Artificial Sequence: Synthetic oligonucleotide
uucggaugccuuggggcug

SEQ ID NO: 28171 - RNA, 19 nt, Artificial Sequence
  Description of Artificial Sequence: Synthetic oligonucleotide
gcaaccgagcuacuguuca

SEQ ID NO: 28172 - RNA, 19 nt, Artificial Sequence
  Description of Artificial Sequence: Synthetic oligonucleotide
ucacucgaguucugccacu

SEQ ID NO: 28173 - RNA, 19 nt, Artificial Sequence
  Description of Artificial Sequence: Synthetic oligonucleotide
cuaaacccguagaugucaa

SEQ ID NO: 28174 - RNA, 19 nt, Artificial Sequence
  Description of Artificial Sequence: Synthetic oligonucleotide
gguggauuaggaagacggc

SEQ ID NO: 28175 - RNA, 19 nt, Artificial Sequence
  Description of Artificial Sequence: Synthetic oligonucleotide
accgugggccuugaagaag

SEQ ID NO: 28176 - RNA, 19 nt, Artificial Sequence
  Description of Artificial Sequence: Synthetic oligonucleotide
cuuuggagcggugcucgug

SEQ ID NO: 28177 - RNA, 19 nt, Artificial Sequence
  Description of Artificial Sequence: Synthetic oligonucleotide
accgagcuacuguucaguu

SEQ ID NO: 28178 - RNA, 19 nt, Artificial Sequence
  Description of Artificial Sequence: Synthetic oligonucleotide
ccgugggccuugaagaagc

SEQ ID NO: 28179 - RNA, 19 nt, Artificial Sequence
  Description of Artificial Sequence: Synthetic oligonucleotide
ucccugacguuagcgguac

SEQ ID NO: 28180 - RNA, 19 nt, Artificial Sequence
  Description of Artificial Sequence: Synthetic oligonucleotide
uggggagacguggaguaua

SEQ ID NO: 28181 - RNA, 19 nt, Artificial Sequence
  Description of Artificial Sequence: Synthetic oligonucleotide
gagaaggcuagcaggacau

SEQ ID NO: 28182 - RNA, 19 nt, Artificial Sequence
  Description of Artificial Sequence: Synthetic oligonucleotide
ggugggcgaagacacgcug

SEQ ID NO: 28183 - RNA, 19 nt, Artificial Sequence
  Description of Artificial Sequence: Synthetic oligonucleotide
guccaaugcucggacuuug

SEQ ID NO: 28184 - RNA, 19 nt, Artificial Sequence
  Description of Artificial Sequence: Synthetic oligonucleotide
ggcgaggcaccaaucaggc

SEQ ID NO: 28185 - RNA, 19 nt, Artificial Sequence
  Description of Artificial Sequence: Synthetic oligonucleotide
gccucuaucuucaaggacu

SEQ ID NO: 28186 - RNA, 19 nt, Artificial Sequence
  Description of Artificial Sequence: Synthetic oligonucleotide
gugacggucgacacaccac

SEQ ID NO: 28187 - RNA, 19 nt, Artificial Sequence
  Description of Artificial Sequence: Synthetic oligonucleotide
auaccugaaaugagacaaa

SEQ ID NO: 28188 - RNA, 19 nt, Artificial Sequence
  Description of Artificial Sequence: Synthetic oligonucleotide
cacucgaguucugccacug

SEQ ID NO: 28189 - RNA, 19 nt, Artificial Sequence
  Description of Artificial Sequence: Synthetic oligonucleotide
gaggggcgcgugcagugac

SEQ ID NO: 28190 - RNA, 19 nt, Artificial Sequence
  Description of Artificial Sequence: Synthetic oligonucleotide
guaauaagugaagcaacuu

SEQ ID NO: 28191 - RNA, 19 nt, Artificial Sequence
  Description of Artificial Sequence: Synthetic oligonucleotide
ggguaaacguucaaaugaa

SEQ ID NO: 28192 - RNA, 19 nt, Artificial Sequence
  Description of Artificial Sequence: Synthetic oligonucleotide
agggacgcuuaggauugag

SEQ ID NO: 28193 - RNA, 19 nt, Artificial Sequence
  Description of Artificial Sequence: Synthetic oligonucleotide
agacuaucuuuuagccugu

SEQ ID NO: 28194 - RNA, 19 nt, Artificial Sequence
  Description of Artificial Sequence: Synthetic oligonucleotide
cagagacgggcuuaguccu

SEQ ID NO: 28195 - RNA, 19 nt, Artificial Sequence
  Description of Artificial Sequence: Synthetic oligonucleotide
gaagaccggacugucugcu

SEQ ID NO: 28196 - RNA, 19 nt, Artificial Sequence
  Description of Artificial Sequence: Synthetic oligonucleotide
agacgggcuuaguccuuug

SEQ ID NO: 28197 - RNA, 19 nt, Artificial Sequence
  Description of Artificial Sequence: Synthetic oligonucleotide
acguggaguauaguagauu

SEQ ID NO: 28198 - RNA, 19 nt, Artificial Sequence
  Description of Artificial Sequence: Synthetic oligonucleotide
caucgcuaaccagcucgcc

SEQ ID NO: 28199 - RNA, 19 nt, Artificial Sequence
  Description of Artificial Sequence: Synthetic oligonucleotide
aggacggaaggaugacauu

SEQ ID NO: 28200 - RNA, 19 nt, Artificial Sequence
  Description of Artificial Sequence: Synthetic oligonucleotide
gugguaggcucgccgguuc

SEQ ID NO: 28201 - RNA, 19 nt, Artificial Sequence
  Description of Artificial Sequence: Synthetic oligonucleotide
cggagagcauaccaucucc

SEQ ID NO: 28202 - RNA, 19 nt, Artificial Sequence
  Description of Artificial Sequence: Synthetic oligonucleotide
cacacuuuggagcggugcu

SEQ ID NO: 28203 - RNA, 19 nt, Artificial Sequence
  Description of Artificial Sequence: Synthetic oligonucleotide
ggaagacggcacugugcag

SEQ ID NO: 28204 - RNA, 19 nt, Artificial Sequence
  Description of Artificial Sequence: Synthetic oligonucleotide
cacgguggccggucuuaag

SEQ ID NO: 28205 - RNA, 19 nt, Artificial Sequence
  Description of Artificial Sequence: Synthetic oligonucleotide
ggaagaccggucauggaaa

SEQ ID NO: 28206 - RNA, 19 nt, Artificial Sequence
  Description of Artificial Sequence: Synthetic oligonucleotide
caucaaggauaguucgagu

SEQ ID NO: 28207 - RNA, 19 nt, Artificial Sequence
  Description of Artificial Sequence: Synthetic oligonucleotide
ugcucggacuuuggccacc

SEQ ID NO: 28208 - RNA, 19 nt, Artificial Sequence
  Description of Artificial Sequence: Synthetic oligonucleotide
ggcucguaaaauacuuguc

SEQ ID NO: 28209 - RNA, 19 nt, Artificial Sequence
  Description of Artificial Sequence: Synthetic oligonucleotide
gacuaucuuuuagccuguc

SEQ ID NO: 28210 - RNA, 19 nt, Artificial Sequence
  Description of Artificial Sequence: Synthetic oligonucleotide
gggacgcuuaggauugagc

SEQ ID NO: 28211 - RNA, 19 nt, Artificial Sequence
  Description of Artificial Sequence: Synthetic oligonucleotide
gggguggauuaggaagacg

SEQ ID NO: 28212 - RNA, 19 nt, Artificial Sequence
  Description of Artificial Sequence: Synthetic oligonucleotide
auaccaccagaaaccaguu

SEQ ID NO: 28213 - RNA, 19 nt, Artificial Sequence
  Description of Artificial Sequence: Synthetic oligonucleotide
cucaaaccaccauccuaaa

SEQ ID NO: 28214 - RNA, 19 nt, Artificial Sequence
  Description of Artificial Sequence: Synthetic oligonucleotide
ccuaaacccguagauguca

SEQ ID NO: 28215 - RNA, 19 nt, Artificial Sequence
  Description of Artificial Sequence: Synthetic oligonucleotide
ggcagaguccgcaacaggu

SEQ ID NO: 28216 - RNA, 19 nt, Artificial Sequence
  Description of Artificial Sequence: Synthetic oligonucleotide
cggucgacacaccacuucc

SEQ ID NO: 28217 - RNA, 19 nt, Artificial Sequence
  Description of Artificial Sequence: Synthetic oligonucleotide
ggauuaggaagacggcacu

SEQ ID NO: 28218 - RNA, 19 nt, Artificial Sequence
  Description of Artificial Sequence: Synthetic oligonucleotide
gguaggcucgccgguuccg

SEQ ID NO: 28219 - RNA, 19 nt, Artificial Sequence
  Description of Artificial Sequence: Synthetic oligonucleotide
uaggcucgccgguuccgaa

SEQ ID NO: 28220 - RNA, 19 nt, Artificial Sequence
  Description of Artificial Sequence: Synthetic oligonucleotide
ccgagcuacuguucaguug

SEQ ID NO: 28221 - RNA, 19 nt, Artificial Sequence
  Description of Artificial Sequence: Synthetic oligonucleotide
aggcucgccgguuccgaau

SEQ ID NO: 28222 - RNA, 19 nt, Artificial Sequence
  Description of Artificial Sequence: Synthetic oligonucleotide
ggguauaguccacuuugua

SEQ ID NO: 28223 - RNA, 19 nt, Artificial Sequence
  Description of Artificial Sequence: Synthetic oligonucleotide
cuaaccagcucgccuuugu

SEQ ID NO: 28224 - RNA, 19 nt, Artificial Sequence
  Description of Artificial Sequence: Synthetic oligonucleotide
cucgccgguuccgaaucug

SEQ ID NO: 28225 - RNA, 19 nt, Artificial Sequence
  Description of Artificial Sequence: Synthetic oligonucleotide
uagcgguaccugccacggu

SEQ ID NO: 28226 - RNA, 19 nt, Artificial Sequence
  Description of Artificial Sequence: Synthetic oligonucleotide
gguuccgaaucuggcgcag

SEQ ID NO: 28227 - RNA, 19 nt, Artificial Sequence
  Description of Artificial Sequence: Synthetic oligonucleotide
ggcucaaaucacucgaguu

SEQ ID NO: 28228 - RNA, 19 nt, Artificial Sequence
  Description of Artificial Sequence: Synthetic oligonucleotide
uccgggcuucaagaaggaa

SEQ ID NO: 28229 - RNA, 19 nt, Artificial Sequence
  Description of Artificial Sequence: Synthetic oligonucleotide
ggugcucgugcggaaugcc

SEQ ID NO: 28230 - RNA, 19 nt, Artificial Sequence
  Description of Artificial Sequence: Synthetic oligonucleotide
ccgaaugagcuccuucuga

SEQ ID NO: 28231 - RNA, 19 nt, Artificial Sequence
  Description of Artificial Sequence: Synthetic oligonucleotide
ugaccagaugaggcuuaau

SEQ ID NO: 28232 - RNA, 19 nt, Artificial Sequence
  Description of Artificial Sequence: Synthetic oligonucleotide
cacuagcuaaggauuguuu

SEQ ID NO: 28233 - RNA, 19 nt, Artificial Sequence
  Description of Artificial Sequence: Synthetic oligonucleotide
aggggcaugggagggcaaa

SEQ ID NO: 28234 - RNA, 19 nt, Artificial Sequence
  Description of Artificial Sequence: Synthetic oligonucleotide
ccuggugugacggucgaca

SEQ ID NO: 28235 - RNA, 19 nt, Artificial Sequence
  Description of Artificial Sequence: Synthetic oligonucleotide
acgagacaccagaaagcau

SEQ ID NO: 28236 - RNA, 19 nt, Artificial Sequence
  Description of Artificial Sequence: Synthetic oligonucleotide
uucagaccgugggccuuga

SEQ ID NO: 28237 - RNA, 19 nt, Artificial Sequence
  Description of Artificial Sequence: Synthetic oligonucleotide
cucauacacugggcuagca

SEQ ID NO: 28238 - RNA, 19 nt, Artificial Sequence
  Description of Artificial Sequence: Synthetic oligonucleotide
ggcucgccgguuccgaauc

SEQ ID NO: 28239 - RNA, 19 nt, Artificial Sequence
  Description of Artificial Sequence: Synthetic oligonucleotide
ggagcaagcucuggaagua

SEQ ID NO: 28240 - RNA, 19 nt, Artificial Sequence
  Description of Artificial Sequence: Synthetic oligonucleotide
gcuaaggauuguuuccgau

SEQ ID NO: 28241 - RNA, 19 nt, Artificial Sequence
  Description of Artificial Sequence: Synthetic oligonucleotide
aggugggcgaagacacgcu

SEQ ID NO: 28242 - RNA, 19 nt, Artificial Sequence
  Description of Artificial Sequence: Synthetic oligonucleotide
gguggccggucuuaagucu

SEQ ID NO: 28243 - RNA, 19 nt, Artificial Sequence
  Description of Artificial Sequence: Synthetic oligonucleotide
guaggcucgccgguuccga

SEQ ID NO: 28244 - RNA, 19 nt, Artificial Sequence
  Description of Artificial Sequence: Synthetic oligonucleotide
ccggagagcauaccaucuc

SEQ ID NO: 28245 - RNA, 19 nt, Artificial Sequence
  Description of Artificial Sequence: Synthetic oligonucleotide
gguggcucguaaaauacuu

SEQ ID NO: 28246 - RNA, 19 nt, Artificial Sequence
  Description of Artificial Sequence: Synthetic oligonucleotide
ggacuucccugaacagacc

SEQ ID NO: 28247 - RNA, 19 nt, Artificial Sequence
  Description of Artificial Sequence: Synthetic oligonucleotide
gggacaguccuaaacccgu

SEQ ID NO: 28248 - RNA, 19 nt, Artificial Sequence
  Description of Artificial Sequence: Synthetic oligonucleotide
ggaaagagucccauauuuu

SEQ ID NO: 28249 - RNA, 19 nt, Artificial Sequence
  Description of Artificial Sequence: Synthetic oligonucleotide
gaccacgguccaguucaga

SEQ ID NO: 28250 - RNA, 19 nt, Artificial Sequence
  Description of Artificial Sequence: Synthetic oligonucleotide
ugccacgguggccggucuu

SEQ ID NO: 28251 - RNA, 19 nt, Artificial Sequence
  Description of Artificial Sequence: Synthetic oligonucleotide
gcgaagacacgcugcccuc

SEQ ID NO: 28252 - RNA, 19 nt, Artificial Sequence
  Description of Artificial Sequence: Synthetic oligonucleotide
ggucgacacaccacuucca

SEQ ID NO: 28253 - RNA, 19 nt, Artificial Sequence
  Description of Artificial Sequence: Synthetic oligonucleotide
caguucagaccgugggccu

SEQ ID NO: 28254 - RNA, 19 nt, Artificial Sequence
  Description of Artificial Sequence: Synthetic oligonucleotide
gcaaucgaggcagcuucuc

SEQ ID NO: 28255 - RNA, 19 nt, Artificial Sequence
  Description of Artificial Sequence: Synthetic oligonucleotide
ccucauacacugggcuagc

SEQ ID NO: 28256 - RNA, 19 nt, Artificial Sequence
  Description of Artificial Sequence: Synthetic oligonucleotide
ggcucucaaccugcagagc

SEQ ID NO: 28257 - RNA, 19 nt, Artificial Sequence
  Description of Artificial Sequence: Synthetic oligonucleotide
gcuaaccagcucgccuuug

SEQ ID NO: 28258 - RNA, 19 nt, Artificial Sequence
  Description of Artificial Sequence: Synthetic oligonucleotide
agagacgggcuuaguccuu

SEQ ID NO: 28259 - RNA, 19 nt, Artificial Sequence
  Description of Artificial Sequence: Synthetic oligonucleotide
caccaaccuguugaggccu

SEQ ID NO: 28260 - RNA, 19 nt, Artificial Sequence
  Description of Artificial Sequence: Synthetic oligonucleotide
gagcggugcucgugcggaa

SEQ ID NO: 28261 - RNA, 19 nt, Artificial Sequence
  Description of Artificial Sequence: Synthetic oligonucleotide
gcuagcauccagccucuau

SEQ ID NO: 28262 - RNA, 19 nt, Artificial Sequence
  Description of Artificial Sequence: Synthetic oligonucleotide
gccggucuuaagucuggaa

SEQ ID NO: 28263 - RNA, 19 nt, Artificial Sequence
  Description of Artificial Sequence: Synthetic oligonucleotide
cguuagcgguaccugccac

SEQ ID NO: 28264 - RNA, 19 nt, Artificial Sequence
  Description of Artificial Sequence: Synthetic oligonucleotide
gagacgggcuuaguccuuu

SEQ ID NO: 28265 - RNA, 19 nt, Artificial Sequence
  Description of Artificial Sequence: Synthetic oligonucleotide
gggcgaagacacgcugccc

SEQ ID NO: 28266 - RNA, 19 nt, Artificial Sequence
  Description of Artificial Sequence: Synthetic oligonucleotide
gccccgagaacagcaguga

SEQ ID NO: 28267 - RNA, 19 nt, Artificial Sequence
  Description of Artificial Sequence: Synthetic oligonucleotide
cucagccauucaagugcua

SEQ ID NO: 28268 - RNA, 19 nt, Artificial Sequence
  Description of Artificial Sequence: Synthetic oligonucleotide
gcgaggcaccaaucaggca

SEQ ID NO: 28269 - RNA, 19 nt, Artificial Sequence
  Description of Artificial Sequence: Synthetic oligonucleotide
ccugacguuagcgguaccu

SEQ ID NO: 28270 - RNA, 19 nt, Artificial Sequence
  Description of Artificial Sequence: Synthetic oligonucleotide
gacggucgacacaccacuu

SEQ ID NO: 28271 - RNA, 19 nt, Artificial Sequence
  Description of Artificial Sequence: Synthetic oligonucleotide
ggacaguccuaaacccgua

SEQ ID NO: 28272 - RNA, 19 nt, Artificial Sequence
  Description of Artificial Sequence: Synthetic oligonucleotide
ccacagcgagcacaguucu

SEQ ID NO: 28273 - RNA, 19 nt, Artificial Sequence
  Description of Artificial Sequence: Synthetic oligonucleotide
gcuccggagagcauaccau

SEQ ID NO: 28274 - RNA, 19 nt, Artificial Sequence
  Description of Artificial Sequence: Synthetic oligonucleotide
cgguccaguucagaccgug

SEQ ID NO: 28275 - RNA, 19 nt, Artificial Sequence
  Description of Artificial Sequence: Synthetic oligonucleotide
cucggacuuuggccaccaa

SEQ ID NO: 28276 - RNA, 19 nt, Artificial Sequence
  Description of Artificial Sequence: Synthetic oligonucleotide
gcucauuaccccacugcuu

SEQ ID NO: 28277 - RNA, 19 nt, Artificial Sequence
  Description of Artificial Sequence: Synthetic oligonucleotide
accacccaucagggacgcu

SEQ ID NO: 28278 - RNA, 19 nt, Artificial Sequence
  Description of Artificial Sequence: Synthetic oligonucleotide
ccacgaugcugacgagaca

SEQ ID NO: 28279 - RNA, 19 nt, Artificial Sequence
  Description of Artificial Sequence: Synthetic oligonucleotide
cucgugcggaaugccugcu

SEQ ID NO: 28280 - RNA, 19 nt, Artificial Sequence
  Description of Artificial Sequence: Synthetic oligonucleotide
gggcgcgugcagugacaca

SEQ ID NO: 28281 - RNA, 19 nt, Artificial Sequence
  Description of Artificial Sequence: Synthetic oligonucleotide
cagggacgcuuaggauuga

SEQ ID NO: 28282 - RNA, 19 nt, Artificial Sequence
  Description of Artificial Sequence: Synthetic oligonucleotide
cccugacguuagcgguacc

SEQ ID NO: 28283 - RNA, 19 nt, Artificial Sequence
  Description of Artificial Sequence: Synthetic oligonucleotide
gggcuaugcuuuguugcau

SEQ ID NO: 28284 - RNA, 19 nt, Artificial Sequence
  Description of Artificial Sequence: Synthetic oligonucleotide
gccacgguggccggucuua

SEQ ID NO: 28285 - RNA, 19 nt, Artificial Sequence
  Description of Artificial Sequence: Synthetic oligonucleotide
gcucgccgguuccgaaucu

SEQ ID NO: 28286 - RNA, 19 nt, Artificial Sequence
  Description of Artificial Sequence: Synthetic oligonucleotide
gccgcucguugagcucgcc

SEQ ID NO: 28287 - RNA, 19 nt, Artificial Sequence
  Description of Artificial Sequence: Synthetic oligonucleotide
ccacgguggccggucuuaa

SEQ ID NO: 28288 - RNA, 19 nt, Artificial Sequence
  Description of Artificial Sequence: Synthetic oligonucleotide
cugggaccccuggcugauu

SEQ ID NO: 28289 - RNA, 19 nt, Artificial Sequence
  Description of Artificial Sequence: Synthetic oligonucleotide
cgcuaaccagcucgccuuu

SEQ ID NO: 28290 - RNA, 19 nt, Artificial Sequence
  Description of Artificial Sequence: Synthetic oligonucleotide
auaugaaccaauaagagcc

SEQ ID NO: 28291 - RNA, 19 nt, Artificial Sequence
  Description of Artificial Sequence: Synthetic oligonucleotide
aagaguaaagccuaagcgg

SEQ ID NO: 28292 - RNA, 19 nt, Artificial Sequence
  Description of Artificial Sequence: Synthetic oligonucleotide
uuuauguugacucagggcu

SEQ ID NO: 28293 - RNA, 19 nt, Artificial Sequence
  Description of Artificial Sequence: Synthetic oligonucleotide
uaucugaucuauuauagcg

SEQ ID NO: 28294 - RNA, 19 nt, Artificial Sequence
  Description of Artificial Sequence: Synthetic oligonucleotide
aaaacucgacuauaugucc

SEQ ID NO: 28295 - RNA, 19 nt, Artificial Sequence
  Description of Artificial Sequence: Synthetic oligonucleotide
aauaguuuugacuuuaaaa

SEQ ID NO: 28296 - RNA, 19 nt, Artificial Sequence
  Description of Artificial Sequence: Synthetic oligonucleotide
uuuauacucaauauugugc

SEQ ID NO: 28297 - RNA, 19 nt, Artificial Sequence
  Description of Artificial Sequence: Synthetic oligonucleotide
uugugaauuaccaaaauac

SEQ ID NO: 28298 - RNA, 19 nt, Artificial Sequence
  Description of Artificial Sequence: Synthetic oligonucleotide
uucauaugaaccaauaaga

SEQ ID NO: 28299 - RNA, 19 nt, Artificial Sequence
  Description of Artificial Sequence: Synthetic oligonucleotide
aguaaugugaggucgaauc

SEQ ID NO: 28300 - RNA, 19 nt, Artificial Sequence
  Description of Artificial Sequence: Synthetic oligonucleotide
aggaccaucauucugacag

SEQ ID NO: 28301 - RNA, 19 nt, Artificial Sequence
  Description of Artificial Sequence: Synthetic oligonucleotide
aauuuauguugacucaggg

SEQ ID NO: 28302 - RNA, 19 nt, Artificial Sequence
  Description of Artificial Sequence: Synthetic oligonucleotide
ucuacaggggacaaaaugc

SEQ ID NO: 28303 - RNA, 19 nt, Artificial Sequence
  Description of Artificial Sequence: Synthetic oligonucleotide
auuuauguugacucagggc

SEQ ID NO: 28304 - RNA, 19 nt, Artificial Sequence
  Description of Artificial Sequence: Synthetic oligonucleotide
uagaauaugccuaaaagua

SEQ ID NO: 28305 - RNA, 19 nt, Artificial Sequence
  Description of Artificial Sequence: Synthetic oligonucleotide
uauauugccagguuaaagu

SEQ ID NO: 28306 - RNA, 19 nt, Artificial Sequence
  Description of Artificial Sequence: Synthetic oligonucleotide
aacauguccacgaauacgg

SEQ ID NO: 28307 - RNA, 19 nt, Artificial Sequence
  Description of Artificial Sequence: Synthetic oligonucleotide
aaauacaaaucuccauccg

SEQ ID NO: 28308 - RNA, 19 nt, Artificial Sequence
  Description of Artificial Sequence: Synthetic oligonucleotide
caagaguaaagccuaagcg

SEQ ID NO: 28309 - RNA, 19 nt, Artificial Sequence
  Description of Artificial Sequence: Synthetic oligonucleotide
uuauacucaauauugugcu

SEQ ID NO: 28310 - RNA, 19 nt, Artificial Sequence
  Description of Artificial Sequence: Synthetic oligonucleotide
uugaauuguguuuugauaa

SEQ ID NO: 28311 - RNA, 19 nt, Artificial Sequence
  Description of Artificial Sequence: Synthetic oligonucleotide
ucccauauguauauuuucg

SEQ ID NO: 28312 - RNA, 19 nt, Artificial Sequence
  Description of Artificial Sequence: Synthetic oligonucleotide
aaucaggacugcuagagga

SEQ ID NO: 28313 - RNA, 19 nt, Artificial Sequence
  Description of Artificial Sequence: Synthetic oligonucleotide
agugggucaacauaaaugu

SEQ ID NO: 28314 - RNA, 19 nt, Artificial Sequence
  Description of Artificial Sequence: Synthetic oligonucleotide
aauacggguagccagggcu

SEQ ID NO: 28315 - RNA, 19 nt, Artificial Sequence
  Description of Artificial Sequence: Synthetic oligonucleotide
uauauuuucgaagaguagu

SEQ ID NO: 28316 - RNA, 19 nt, Artificial Sequence
  Description of Artificial Sequence: Synthetic oligonucleotide
uacuacgaaauuagcaagg

SEQ ID NO: 28317 - RNA, 19 nt, Artificial Sequence
  Description of Artificial Sequence: Synthetic oligonucleotide
cauaugaaccaauaagagc

SEQ ID NO: 28318 - RNA, 19 nt, Artificial Sequence
  Description of Artificial Sequence: Synthetic oligonucleotide
accaaggaaaguuacuacg

SEQ ID NO: 28319 - RNA, 19 nt, Artificial Sequence
  Description of Artificial Sequence: Synthetic oligonucleotide
aaccaaggaaaguuacuac

SEQ ID NO: 28320 - RNA, 19 nt, Artificial Sequence
  Description of Artificial Sequence: Synthetic oligonucleotide
auuguuauaaugucuuaug

SEQ ID NO: 28321 - RNA, 19 nt, Artificial Sequence
  Description of Artificial Sequence: Synthetic oligonucleotide
agaacuauaauucuaugua

SEQ ID NO: 28322 - RNA, 19 nt, Artificial Sequence
  Description of Artificial Sequence: Synthetic oligonucleotide
uguuauuguuauaaugucu

SEQ ID NO: 28323 - RNA, 19 nt, Artificial Sequence
  Description of Artificial Sequence: Synthetic oligonucleotide
ugucaguccuccuaaaugc

SEQ ID NO: 28324 - RNA, 19 nt, Artificial Sequence
  Description of Artificial Sequence: Synthetic oligonucleotide
ucgaagaguaguaauguga

SEQ ID NO: 28325 - RNA, 19 nt, Artificial Sequence
  Description of Artificial Sequence: Synthetic oligonucleotide
aacucauuacaauaaguau

SEQ ID NO: 28326 - RNA, 19 nt, Artificial Sequence
  Description of Artificial Sequence: Synthetic oligonucleotide
ucuauuauagcggagccga

SEQ ID NO: 28327 - RNA, 19 nt, Artificial Sequence
  Description of Artificial Sequence: Synthetic oligonucleotide
aaccuguugugcuaugggg

SEQ ID NO: 28328 - RNA, 19 nt, Artificial Sequence
  Description of Artificial Sequence: Synthetic oligonucleotide
aagccuaagcgguuucugc

SEQ ID NO: 28329 - RNA, 19 nt, Artificial Sequence
  Description of Artificial Sequence: Synthetic oligonucleotide
uuaucauacagauuugcuc

SEQ ID NO: 28330 - RNA, 19 nt, Artificial Sequence
  Description of Artificial Sequence: Synthetic oligonucleotide
cuuccaauaaccgacugcg

SEQ ID NO: 28331 - RNA, 19 nt, Artificial Sequence
  Description of Artificial Sequence: Synthetic oligonucleotide
ucgacuauaugucccauca

SEQ ID NO: 28332 - RNA, 19 nt, Artificial Sequence
  Description of Artificial Sequence: Synthetic oligonucleotide
ugugcuaugggguuguaga

SEQ ID NO: 28333 - RNA, 19 nt, Artificial Sequence
  Description of Artificial Sequence: Synthetic oligonucleotide
aaacgcagaauaaaccgac

SEQ ID NO: 28334 - RNA, 19 nt, Artificial Sequence
  Description of Artificial Sequence: Synthetic oligonucleotide
uccaauaaccgacugcggc

SEQ ID NO: 28335 - RNA, 19 nt, Artificial Sequence
  Description of Artificial Sequence: Synthetic oligonucleotide
uauaaugucuuauguccag

SEQ ID NO: 28336 - RNA, 19 nt, Artificial Sequence
  Description of Artificial Sequence: Synthetic oligonucleotide
ugauaguuugugaauuacc

SEQ ID NO: 28337 - RNA, 19 nt, Artificial Sequence
  Description of Artificial Sequence: Synthetic oligonucleotide
aaacucgacuauauguccc

SEQ ID NO: 28338 - RNA, 19 nt, Artificial Sequence
  Description of Artificial Sequence: Synthetic oligonucleotide
acaucaacgugaaagacuc

SEQ ID NO: 28339 - RNA, 19 nt, Artificial Sequence
  Description of Artificial Sequence: Synthetic oligonucleotide
gugaggucgaaucuuaugc

SEQ ID NO: 28340 - RNA, 19 nt, Artificial Sequence
  Description of Artificial Sequence: Synthetic oligonucleotide
aaauuuauguugacucagg

SEQ ID NO: 28341 - RNA, 19 nt, Artificial Sequence
  Description of Artificial Sequence: Synthetic oligonucleotide
acuuucugaaccgagugac

SEQ ID NO: 28342 - RNA, 19 nt, Artificial Sequence
  Description of Artificial Sequence: Synthetic oligonucleotide
ucugaucuauuauagcgga

SEQ ID NO: 28343 - RNA, 19 nt, Artificial Sequence
  Description of Artificial Sequence: Synthetic oligonucleotide
agauuguugggaaauguac

SEQ ID NO: 28344 - RNA, 19 nt, Artificial Sequence
  Description of Artificial Sequence: Synthetic oligonucleotide
ugauccagauccuagcaug

SEQ ID NO: 28345 - RNA, 19 nt, Artificial Sequence
  Description of Artificial Sequence: Synthetic oligonucleotide
ucuaggauacgcugaauga

SEQ ID NO: 28346 - RNA, 19 nt, Artificial Sequence
  Description of Artificial Sequence: Synthetic oligonucleotide
uguacaaccaaggaaaguu

SEQ ID NO: 28347 - RNA, 19 nt, Artificial Sequence
  Description of Artificial Sequence: Synthetic oligonucleotide
cuaaugggagaacaugucc

SEQ ID NO: 28348 - RNA, 19 nt, Artificial Sequence
  Description of Artificial Sequence: Synthetic oligonucleotide
uuugacccugaaaccaugg

SEQ ID NO: 28349 - RNA, 19 nt, Artificial Sequence
  Description of Artificial Sequence: Synthetic oligonucleotide
acuacgaaauuagcaaggc

SEQ ID NO: 28350 - RNA, 19 nt, Artificial Sequence
  Description of Artificial Sequence: Synthetic oligonucleotide
gaguaguaaugugaggucg

SEQ ID NO: 28351 - RNA, 19 nt, Artificial Sequence
  Description of Artificial Sequence: Synthetic oligonucleotide
auugccagggacauuauag

SEQ ID NO: 28352 - RNA, 19 nt, Artificial Sequence
  Description of Artificial Sequence: Synthetic oligonucleotide
agcuaaacagacuggaagu

SEQ ID NO: 28353 - RNA, 19 nt, Artificial Sequence
  Description of Artificial Sequence: Synthetic oligonucleotide
aagugaauguccuggaguu

SEQ ID NO: 28354 - RNA, 19 nt, Artificial Sequence
  Description of Artificial Sequence: Synthetic oligonucleotide
gaaaacucgacuauauguc

SEQ ID NO: 28355 - RNA, 19 nt, Artificial Sequence
  Description of Artificial Sequence: Synthetic oligonucleotide
ugggaaguaugaaucagga

SEQ ID NO: 28356 - RNA, 19 nt, Artificial Sequence
  Description of Artificial Sequence: Synthetic oligonucleotide
gaauaugcaaucaugcuaa

SEQ ID NO: 28357 - RNA, 19 nt, Artificial Sequence
  Description of Artificial Sequence: Synthetic oligonucleotide
ugaagguuggggaagcggu

SEQ ID NO: 28358 - RNA, 19 nt, Artificial Sequence
  Description of Artificial Sequence: Synthetic oligonucleotide
aaaccgacacuuccucaac

SEQ ID NO: 28359 - RNA, 19 nt, Artificial Sequence
  Description of Artificial Sequence: Synthetic oligonucleotide
ugagaaaacucgacuauau

SEQ ID NO: 28360 - RNA, 19 nt, Artificial Sequence
  Description of Artificial Sequence: Synthetic oligonucleotide
gaacauguccacgaauacg

SEQ ID NO: 28361 - RNA, 19 nt, Artificial Sequence
  Description of Artificial Sequence: Synthetic oligonucleotide
acuucuguauaacauaguu

SEQ ID NO: 28362 - RNA, 19 nt, Artificial Sequence
  Description of Artificial Sequence: Synthetic oligonucleotide
gaaucagugugacugagaa

SEQ ID NO: 28363 - RNA, 19 nt, Artificial Sequence
  Description of Artificial Sequence: Synthetic oligonucleotide
uccagauccuagcaugucc

SEQ ID NO: 28364 - RNA, 19 nt, Artificial Sequence
  Description of Artificial Sequence: Synthetic oligonucleotide
uacaaccaaggaaaguuac

SEQ ID NO: 28365 - RNA, 19 nt, Artificial Sequence
  Description of Artificial Sequence: Synthetic oligonucleotide
uaggauacgcugaaugacu

SEQ ID NO: 28366 - RNA, 19 nt, Artificial Sequence
  Description of Artificial Sequence: Synthetic oligonucleotide
uggaguagcucucucuagc

SEQ ID NO: 28367 - RNA, 19 nt, Artificial Sequence
  Description of Artificial Sequence: Synthetic oligonucleotide
auaugcuucccauauguau

SEQ ID NO: 28368 - RNA, 19 nt, Artificial Sequence
  Description of Artificial Sequence: Synthetic oligonucleotide
uuggguuagaaagcuagag

SEQ ID NO: 28369 - RNA, 19 nt, Artificial Sequence
  Description of Artificial Sequence: Synthetic oligonucleotide
augauaguuugugaauuac

SEQ ID NO: 28370 - RNA, 19 nt, Artificial Sequence
  Description of Artificial Sequence: Synthetic oligonucleotide
acgauuuuaauuauacaca

SEQ ID NO: 28371 - RNA, 19 nt, Artificial Sequence
  Description of Artificial Sequence: Synthetic oligonucleotide
aguccuccuaaaugcaaac

SEQ ID NO: 28372 - RNA, 19 nt, Artificial Sequence
  Description of Artificial Sequence: Synthetic oligonucleotide
gaaaguuacuacgaaauua

SEQ ID NO: 28373 - RNA, 19 nt, Artificial Sequence
  Description of Artificial Sequence: Synthetic oligonucleotide
gguaaucaaaucucagucc

SEQ ID NO: 28374 - RNA, 19 nt, Artificial Sequence
  Description of Artificial Sequence: Synthetic oligonucleotide
auuuucgaagaguaguaau

SEQ ID NO: 28375 - RNA, 19 nt, Artificial Sequence
  Description of Artificial Sequence: Synthetic oligonucleotide
uaucaggaagacuggguug

SEQ ID NO: 28376 - RNA, 19 nt, Artificial Sequence
  Description of Artificial Sequence: Synthetic oligonucleotide
gaaucaggacugcuagagg

SEQ ID NO: 28377 - RNA, 19 nt, Artificial Sequence
  Description of Artificial Sequence: Synthetic oligonucleotide
gaauguuggguuagaaagc

SEQ ID NO: 28378 - RNA, 19 nt, Artificial Sequence
  Description of Artificial Sequence: Synthetic oligonucleotide
uaaaccgacacuuccucaa

SEQ ID NO: 28379 - RNA, 19 nt, Artificial Sequence
  Description of Artificial Sequence: Synthetic oligonucleotide
aacucgacuauauguccca

SEQ ID NO: 28380 - RNA, 19 nt, Artificial Sequence
  Description of Artificial Sequence: Synthetic oligonucleotide
guuagaaagcuagaguaac

SEQ ID NO: 28381 - RNA, 19 nt, Artificial Sequence
  Description of Artificial Sequence: Synthetic oligonucleotide
auacucaauauugugcucu

SEQ ID NO: 28382 - RNA, 19 nt, Artificial Sequence
  Description of Artificial Sequence: Synthetic oligonucleotide
cuagaauaugccuaaaagu

SEQ ID NO: 28383 - RNA, 19 nt, Artificial Sequence
  Description of Artificial Sequence: Synthetic oligonucleotide
ugugaggucgaaucuuaug

SEQ ID NO: 28384 - RNA, 19 nt, Artificial Sequence
  Description of Artificial Sequence: Synthetic oligonucleotide
cauauacaggcauucugug

SEQ ID NO: 28385 - RNA, 19 nt, Artificial Sequence
  Description of Artificial Sequence: Synthetic oligonucleotide
ugaggucgaaucuuaugca

SEQ ID NO: 28386 - RNA, 19 nt, Artificial Sequence
  Description of Artificial Sequence: Synthetic oligonucleotide
agaguaaagccuaagcggu

SEQ ID NO: 28387 - RNA, 19 nt, Artificial Sequence
  Description of Artificial Sequence: Synthetic oligonucleotide
uccuacuuauguaucuacu

SEQ ID NO: 28388 - RNA, 19 nt, Artificial Sequence
  Description of Artificial Sequence: Synthetic oligonucleotide
aacccauucuuuaaacaug

SEQ ID NO: 28389 - RNA, 19 nt, Artificial Sequence
  Description of Artificial Sequence: Synthetic oligonucleotide
caaguggcuggauuuaaug

SEQ ID NO: 28390 - RNA, 19 nt, Artificial Sequence
  Description of Artificial Sequence: Synthetic oligonucleotide
ucuaucagguuccuacuua

SEQ ID NO: 28391 - RNA, 19 nt, Artificial Sequence
  Description of Artificial Sequence: Synthetic oligonucleotide
gauuguugggaaauguaca

SEQ ID NO: 28392 - RNA, 19 nt, Artificial Sequence
  Description of Artificial Sequence: Synthetic oligonucleotide
gauauaccgaccacuacca

SEQ ID NO: 28393 - RNA, 19 nt, Artificial Sequence
  Description of Artificial Sequence: Synthetic oligonucleotide
uguuaucucaaaucauuuu

SEQ ID NO: 28394 - RNA, 19 nt, Artificial Sequence
  Description of Artificial Sequence: Synthetic oligonucleotide
cuacuggagcuaaacagac

SEQ ID NO: 28395 - RNA, 19 nt, Artificial Sequence
  Description of Artificial Sequence: Synthetic oligonucleotide
acaaaucuccauccguucu

SEQ ID NO: 28396 - RNA, 19 nt, Artificial Sequence
  Description of Artificial Sequence: Synthetic oligonucleotide
aacuuacaccuaccccuac

SEQ ID NO: 28397 - RNA, 19 nt, Artificial Sequence
  Description of Artificial Sequence: Synthetic oligonucleotide
guuaaagugggcagggaug

SEQ ID NO: 28398 - RNA, 19 nt, Artificial Sequence
  Description of Artificial Sequence: Synthetic oligonucleotide
aggaaaguuacuacgaaau

SEQ ID NO: 28399 - RNA, 19 nt, Artificial Sequence
  Description of Artificial Sequence: Synthetic oligonucleotide
cuuacaccuaccccuacac

SEQ ID NO: 28400 - RNA, 19 nt, Artificial Sequence
  Description of Artificial Sequence: Synthetic oligonucleotide
gauccuagcauguccauua

SEQ ID NO: 28401 - RNA, 19 nt, Artificial Sequence
  Description of Artificial Sequence: Synthetic oligonucleotide
ugcugaugaaucaguguga

SEQ ID NO: 28402 - RNA, 19 nt, Artificial Sequence
  Description of Artificial Sequence: Synthetic oligonucleotide
auguauauuuucgaagagu

SEQ ID NO: 28403 - RNA, 19 nt, Artificial Sequence
  Description of Artificial Sequence: Synthetic oligonucleotide
uaagugggucaacauaaau

SEQ ID NO: 28404 - RNA, 19 nt, Artificial Sequence
  Description of Artificial Sequence: Synthetic oligonucleotide
ggguugauagcacaaacac

SEQ ID NO: 28405 - RNA, 19 nt, Artificial Sequence
  Description of Artificial Sequence: Synthetic oligonucleotide
ugaauuguguuuugauaau

SEQ ID NO: 28406 - RNA, 19 nt, Artificial Sequence
  Description of Artificial Sequence: Synthetic oligonucleotide
uuccaauaaccgacugcgg

SEQ ID NO: 28407 - RNA, 19 nt, Artificial Sequence
  Description of Artificial Sequence: Synthetic oligonucleotide
aguauaugcuucccauaug

SEQ ID NO: 28408 - RNA, 19 nt, Artificial Sequence
  Description of Artificial Sequence: Synthetic oligonucleotide
aucuauuauagcggagccg

SEQ ID NO: 28409 - RNA, 19 nt, Artificial Sequence
  Description of Artificial Sequence: Synthetic oligonucleotide
uauuauagcggagccgaga

SEQ ID NO: 28410 - RNA, 19 nt, Artificial Sequence
  Description of Artificial Sequence: Synthetic oligonucleotide
ugggguuguagaccuacca

SEQ ID NO: 28411 - RNA, 19 nt, Artificial Sequence
  Description of Artificial Sequence: Synthetic oligonucleotide
auacccugacuucaguuga

SEQ ID NO: 28412 - RNA, 19 nt, Artificial Sequence
  Description of Artificial Sequence: Synthetic oligonucleotide
aauaaccgacugcggccgg

SEQ ID NO: 28413 - RNA, 19 nt, Artificial Sequence
  Description of Artificial Sequence: Synthetic oligonucleotide
cuaggauacgcugaaugac

SEQ ID NO: 28414 - RNA, 19 nt, Artificial Sequence
  Description of Artificial Sequence: Synthetic oligonucleotide
aaagccuaagcgguuucug

SEQ ID NO: 28415 - RNA, 19 nt, Artificial Sequence
  Description of Artificial Sequence: Synthetic oligonucleotide
ugcacaauacccugacuuc

SEQ ID NO: 28416 - RNA, 19 nt, Artificial Sequence
  Description of Artificial Sequence: Synthetic oligonucleotide
uuccuacuuauguaucuac

SEQ ID NO: 28417 - RNA, 19 nt, Artificial Sequence
  Description of Artificial Sequence: Synthetic oligonucleotide
caguaugugacuaacauuu

SEQ ID NO: 28418 - RNA, 19 nt, Artificial Sequence
  Description of Artificial Sequence: Synthetic oligonucleotide
cuaaauaccaucugucgcu

SEQ ID NO: 28419 - RNA, 19 nt, Artificial Sequence
  Description of Artificial Sequence: Synthetic oligonucleotide
uauaccgaccacuaccauu

SEQ ID NO: 28420 - RNA, 19 nt, Artificial Sequence
  Description of Artificial Sequence: Synthetic oligonucleotide
uacgcugaaugacucugca

SEQ ID NO: 28421 - RNA, 19 nt, Artificial Sequence
  Description of Artificial Sequence: Synthetic oligonucleotide
uggcguaagugaauguccu

SEQ ID NO: 28422 - RNA, 19 nt, Artificial Sequence
  Description of Artificial Sequence: Synthetic oligonucleotide
caauaaccgacugcggccg

SEQ ID NO: 28423 - RNA, 19 nt, Artificial Sequence
  Description of Artificial Sequence: Synthetic oligonucleotide
uauuuucgaagaguaguaa

SEQ ID NO: 28424 - RNA, 19 nt, Artificial Sequence
  Description of Artificial Sequence: Synthetic oligonucleotide
uacaaaucuccauccguuc

SEQ ID NO: 28425 - RNA, 19 nt, Artificial Sequence
  Description of Artificial Sequence: Synthetic oligonucleotide
ucgguauuuugcuucugcu

SEQ ID NO: 28426 - RNA, 19 nt, Artificial Sequence
  Description of Artificial Sequence: Synthetic oligonucleotide
aggaauguuggguuagaaa

SEQ ID NO: 28427 - RNA, 19 nt, Artificial Sequence
  Description of Artificial Sequence: Synthetic oligonucleotide
uccacgaauacggguagcc

SEQ ID NO: 28428 - RNA, 19 nt, Artificial Sequence
  Description of Artificial Sequence: Synthetic oligonucleotide
uauacucaauauugugcuc

SEQ ID NO: 28429 - RNA, 19 nt, Artificial Sequence
  Description of Artificial Sequence: Synthetic oligonucleotide
uggauuuaauggccucacc

SEQ ID NO: 28430 - RNA, 19 nt, Artificial Sequence
  Description of Artificial Sequence: Synthetic oligonucleotide
agcgguuguuccugaaauc

SEQ ID NO: 28431 - RNA, 19 nt, Artificial Sequence
  Description of Artificial Sequence: Synthetic oligonucleotide
auaaaccgacacuuccuca

SEQ ID NO: 28432 - RNA, 19 nt, Artificial Sequence
  Description of Artificial Sequence: Synthetic oligonucleotide
auauaaaccuguugugcua

SEQ ID NO: 28433 - RNA, 19 nt, Artificial Sequence
  Description of Artificial Sequence: Synthetic oligonucleotide
aaauguacauaaggccgcu

SEQ ID NO: 28434 - RNA, 19 nt, Artificial Sequence
  Description of Artificial Sequence: Synthetic oligonucleotide
accgacugcggccggaggg

SEQ ID NO: 28435 - RNA, 19 nt, Artificial Sequence
  Description of Artificial Sequence: Synthetic oligonucleotide
agaauaugccuaaaaguau

SEQ ID NO: 28436 - RNA, 19 nt, Artificial Sequence
  Description of Artificial Sequence: Synthetic oligonucleotide
ggguuagaaagcuagagua

SEQ ID NO: 28437 - RNA, 19 nt, Artificial Sequence
  Description of Artificial Sequence: Synthetic oligonucleotide
auaugccuaaaaguaucag

SEQ ID NO: 28438 - RNA, 19 nt, Artificial Sequence
  Description of Artificial Sequence: Synthetic oligonucleotide
uauaugcuucccauaugua

SEQ ID NO: 28439 - RNA, 19 nt, Artificial Sequence
  Description of Artificial Sequence: Synthetic oligonucleotide
uuauguugacucagggcua

SEQ ID NO: 28440 - RNA, 19 nt, Artificial Sequence
  Description of Artificial Sequence: Synthetic oligonucleotide
uaaggccgcuuguaaaugu

SEQ ID NO: 28441 - RNA, 19 nt, Artificial Sequence
  Description of Artificial Sequence: Synthetic oligonucleotide
acauacuagaagauggaau

SEQ ID NO: 28442 - RNA, 19 nt, Artificial Sequence
  Description of Artificial Sequence: Synthetic oligonucleotide
acauaaggccgcuuguaaa

SEQ ID NO: 28443 - RNA, 19 nt, Artificial Sequence
  Description of Artificial Sequence: Synthetic oligonucleotide
uggcuacuggagcuaaaca

SEQ ID NO: 28444 - RNA, 19 nt, Artificial Sequence
  Description of Artificial Sequence: Synthetic oligonucleotide
gauuugcucuuacuuggga

SEQ ID NO: 28445 - RNA, 19 nt, Artificial Sequence
  Description of Artificial Sequence: Synthetic oligonucleotide
auacuagaagauggaauca

SEQ ID NO: 28446 - RNA, 19 nt, Artificial Sequence
  Description of Artificial Sequence: Synthetic oligonucleotide
aagauuguugggaaaugua

SEQ ID NO: 28447 - RNA, 19 nt, Artificial Sequence
  Description of Artificial Sequence: Synthetic oligonucleotide
acuuacaccuaccccuaca

SEQ ID NO: 28448 - RNA, 19 nt, Artificial Sequence
  Description of Artificial Sequence: Synthetic oligonucleotide
acgaauacggguagccagg

SEQ ID NO: 28449 - RNA, 19 nt, Artificial Sequence
  Description of Artificial Sequence: Synthetic oligonucleotide
cacuauauugccagguuaa

SEQ ID NO: 28450 - RNA, 19 nt, Artificial Sequence
  Description of Artificial Sequence: Synthetic oligonucleotide
uaugcacaauacccugacu

SEQ ID NO: 28451 - RNA, 19 nt, Artificial Sequence
  Description of Artificial Sequence: Synthetic oligonucleotide
aaugugaggucgaaucuua

SEQ ID NO: 28452 - RNA, 19 nt, Artificial Sequence
  Description of Artificial Sequence: Synthetic oligonucleotide
acuucaguugaaagugauc

SEQ ID NO: 28453 - RNA, 19 nt, Artificial Sequence
  Description of Artificial Sequence: Synthetic oligonucleotide
auaccaucugucgcucagc

SEQ ID NO: 28454 - RNA, 19 nt, Artificial Sequence
  Description of Artificial Sequence: Synthetic oligonucleotide
uugagaaaacucgacuaua

SEQ ID NO: 28455 - RNA, 19 nt, Artificial Sequence
  Description of Artificial Sequence: Synthetic oligonucleotide
ccaauaaccgacugcggcc

SEQ ID NO: 28456 - RNA, 19 nt, Artificial Sequence
  Description of Artificial Sequence: Synthetic oligonucleotide
uguugacucagggcuaaca

SEQ ID NO: 28457 - RNA, 19 nt, Artificial Sequence
  Description of Artificial Sequence: Synthetic oligonucleotide
auauugugcucugauugcu

SEQ ID NO: 28458 - RNA, 19 nt, Artificial Sequence
  Description of Artificial Sequence: Synthetic oligonucleotide
acugaacguaaguggguca

SEQ ID NO: 28459 - RNA, 19 nt, Artificial Sequence
  Description of Artificial Sequence: Synthetic oligonucleotide
auauuuucgaagaguagua

SEQ ID NO: 28460 - RNA, 19 nt, Artificial Sequence
  Description of Artificial Sequence: Synthetic oligonucleotide
uacuaugaaaacgcagaau

SEQ ID NO: 28461 - RNA, 19 nt, Artificial Sequence
  Description of Artificial Sequence: Synthetic oligonucleotide
cuaacucauuacaauaagu

SEQ ID NO: 28462 - RNA, 19 nt, Artificial Sequence
  Description of Artificial Sequence: Synthetic oligonucleotide
gcguaagugaauguccugg

SEQ ID NO: 28463 - RNA, 19 nt, Artificial Sequence
  Description of Artificial Sequence: Synthetic oligonucleotide
cugauaggucuccacucag

SEQ ID NO: 28464 - RNA, 19 nt, Artificial Sequence
  Description of Artificial Sequence: Synthetic oligonucleotide
gaacguaagugggucaaca

SEQ ID NO: 28465 - RNA, 19 nt, Artificial Sequence
  Description of Artificial Sequence: Synthetic oligonucleotide
guggcguaagugaaugucc

SEQ ID NO: 28466 - RNA, 19 nt, Artificial Sequence
  Description of Artificial Sequence: Synthetic oligonucleotide
auaccgaccacuaccauuu

SEQ ID NO: 28467 - RNA, 19 nt, Artificial Sequence
  Description of Artificial Sequence: Synthetic oligonucleotide
acguaagugggucaacaua

SEQ ID NO: 28468 - RNA, 19 nt, Artificial Sequence
  Description of Artificial Sequence: Synthetic oligonucleotide
cugaagguuggggaagcgg

SEQ ID NO: 28469 - RNA, 19 nt, Artificial Sequence
  Description of Artificial Sequence: Synthetic oligonucleotide
uggaagugccuccaugauu

SEQ ID NO: 28470 - RNA, 19 nt, Artificial Sequence
  Description of Artificial Sequence: Synthetic oligonucleotide
uacuggagcuaaacagacu

SEQ ID NO: 28471 - RNA, 19 nt, Artificial Sequence
  Description of Artificial Sequence: Synthetic oligonucleotide
ccuaacucauuacaauaag

SEQ ID NO: 28472 - RNA, 19 nt, Artificial Sequence
  Description of Artificial Sequence: Synthetic oligonucleotide
augaaccaauaagagccag

SEQ ID NO: 28473 - RNA, 19 nt, Artificial Sequence
  Description of Artificial Sequence: Synthetic oligonucleotide
gacugcuagaggaggauuc

SEQ ID NO: 28474 - RNA, 19 nt, Artificial Sequence
  Description of Artificial Sequence: Synthetic oligonucleotide
gggguuguagaccuaccag

SEQ ID NO: 28475 - RNA, 19 nt, Artificial Sequence
  Description of Artificial Sequence: Synthetic oligonucleotide
ucucuacuacauugcuggc

SEQ ID NO: 28476 - RNA, 19 nt, Artificial Sequence
  Description of Artificial Sequence: Synthetic oligonucleotide
cuauuauagcggagccgag

SEQ ID NO: 28477 - RNA, 19 nt, Artificial Sequence
  Description of Artificial Sequence: Synthetic oligonucleotide
cuuagacaaacugguccag

SEQ ID NO: 28478 - RNA, 19 nt, Artificial Sequence
  Description of Artificial Sequence: Synthetic oligonucleotide
aacuucuguauaacauagu

SEQ ID NO: 28479 - RNA, 19 nt, Artificial Sequence
  Description of Artificial Sequence: Synthetic oligonucleotide
acaguacucuucuguacaa

SEQ ID NO: 28480 - RNA, 19 nt, Artificial Sequence
  Description of Artificial Sequence: Synthetic oligonucleotide
cacucaagaguaaagccua

SEQ ID NO: 28481 - RNA, 19 nt, Artificial Sequence
  Description of Artificial Sequence: Synthetic oligonucleotide
ucaguccaauacuuucuau

SEQ ID NO: 28482 - RNA, 19 nt, Artificial Sequence
  Description of Artificial Sequence: Synthetic oligonucleotide
gaacuaucaguucacuuuu

SEQ ID NO: 28483 - RNA, 19 nt, Artificial Sequence
  Description of Artificial Sequence: Synthetic oligonucleotide
guaaugugaggucgaaucu

SEQ ID NO: 28484 - RNA, 19 nt, Artificial Sequence
  Description of Artificial Sequence: Synthetic oligonucleotide
caguugauuguuaaucugu

SEQ ID NO: 28485 - RNA, 19 nt, Artificial Sequence
  Description of Artificial Sequence: Synthetic oligonucleotide
agggcuaauuucugaucca

SEQ ID NO: 28486 - RNA, 19 nt, Artificial Sequence
  Description of Artificial Sequence: Synthetic oligonucleotide
gaaucuuaugcaugauuau

SEQ ID NO: 28487 - RNA, 19 nt, Artificial Sequence
  Description of Artificial Sequence: Synthetic oligonucleotide
aaacuuacaccuaccccua

SEQ ID NO: 28488 - RNA, 19 nt, Artificial Sequence
  Description of Artificial Sequence: Synthetic oligonucleotide
acaaccaaggaaaguuacu

SEQ ID NO: 28489 - RNA, 19 nt, Artificial Sequence
  Description of Artificial Sequence: Synthetic oligonucleotide
ugucgcucagcuggaguag

SEQ ID NO: 28490 - RNA, 19 nt, Artificial Sequence
  Description of Artificial Sequence: Synthetic oligonucleotide
aggguugaauauaauuuau

SEQ ID NO: 28491 - RNA, 19 nt, Artificial Sequence
  Description of Artificial Sequence: Synthetic oligonucleotide
auaagagccaggacuuaga

SEQ ID NO: 28492 - RNA, 19 nt, Artificial Sequence
  Description of Artificial Sequence: Synthetic oligonucleotide
cacugaacguaaguggguc

SEQ ID NO: 28493 - RNA, 19 nt, Artificial Sequence
  Description of Artificial Sequence: Synthetic oligonucleotide
ggauucaguuccaaguaac

SEQ ID NO: 28494 - RNA, 19 nt, Artificial Sequence
  Description of Artificial Sequence: Synthetic oligonucleotide
gcuaaacagacuggaagug

SEQ ID NO: 28495 - RNA, 19 nt, Artificial Sequence
  Description of Artificial Sequence: Synthetic oligonucleotide
cucgacuauaugucccauc

SEQ ID NO: 28496 - RNA, 19 nt, Artificial Sequence
  Description of Artificial Sequence: Synthetic oligonucleotide
gaccaucauucugacagca

SEQ ID NO: 28497 - RNA, 19 nt, Artificial Sequence
  Description of Artificial Sequence: Synthetic oligonucleotide
auggaagugccuccaugau

SEQ ID NO: 28498 - RNA, 19 nt, Artificial Sequence
  Description of Artificial Sequence: Synthetic oligonucleotide
caucaacgugaaagacucc

SEQ ID NO: 28499 - RNA, 19 nt, Artificial Sequence
  Description of Artificial Sequence: Synthetic oligonucleotide
cacugggaaguaugaauca

SEQ ID NO: 28500 - RNA, 19 nt, Artificial Sequence
  Description of Artificial Sequence: Synthetic oligonucleotide
cugcugaucagaagaaaua

SEQ ID NO: 28501 - RNA, 19 nt, Artificial Sequence
  Description of Artificial Sequence: Synthetic oligonucleotide
gaaagacuccugacacccc

SEQ ID NO: 28502 - RNA, 19 nt, Artificial Sequence
  Description of Artificial Sequence: Synthetic oligonucleotide
ggugcugcagagauauacc

SEQ ID NO: 28503 - RNA, 19 nt, Artificial Sequence
  Description of Artificial Sequence: Synthetic oligonucleotide
accgaccacuaccauuugu

SEQ ID NO: 28504 - RNA, 19 nt, Artificial Sequence
  Description of Artificial Sequence: Synthetic oligonucleotide
aggccgcuuguaaauguac

SEQ ID NO: 28505 - RNA, 19 nt, Artificial Sequence
  Description of Artificial Sequence: Synthetic oligonucleotide
cuugagaaaacucgacuau

SEQ ID NO: 28506 - RNA, 19 nt, Artificial Sequence
  Description of Artificial Sequence: Synthetic oligonucleotide
ccaaggaaaguuacuacga

SEQ ID NO: 28507 - RNA, 19 nt, Artificial Sequence
  Description of Artificial Sequence: Synthetic oligonucleotide
acuauauugccagguuaaa

SEQ ID NO: 28508 - RNA, 19 nt, Artificial Sequence
  Description of Artificial Sequence: Synthetic oligonucleotide
cauaaggccgcuuguaaau

SEQ ID NO: 28509 - RNA, 19 nt, Artificial Sequence
  Description of Artificial Sequence: Synthetic oligonucleotide
gcuacuggagcuaaacaga

SEQ ID NO: 28510 - RNA, 19 nt, Artificial Sequence
  Description of Artificial Sequence: Synthetic oligonucleotide
caccuaccccuacacacac

SEQ ID NO: 28511 - RNA, 19 nt, Artificial Sequence
  Description of Artificial Sequence: Synthetic oligonucleotide
gaggucgaaucuuaugcau

SEQ ID NO: 28512 - RNA, 19 nt, Artificial Sequence
  Description of Artificial Sequence: Synthetic oligonucleotide
ugaacguaagugggucaac

SEQ ID NO: 28513 - RNA, 19 nt, Artificial Sequence
  Description of Artificial Sequence: Synthetic oligonucleotide
caguauaugcuucccauau

SEQ ID NO: 28514 - RNA, 19 nt, Artificial Sequence
  Description of Artificial Sequence: Synthetic oligonucleotide
cacuuucugaaccgaguga

SEQ ID NO: 28515 - RNA, 19 nt, Artificial Sequence
  Description of Artificial Sequence: Synthetic oligonucleotide
gggaaguaugaaucaggac

SEQ ID NO: 28516 - RNA, 19 nt, Artificial Sequence
  Description of Artificial Sequence: Synthetic oligonucleotide
gguccagaaacaaucuaca

SEQ ID NO: 28517 - RNA, 19 nt, Artificial Sequence
  Description of Artificial Sequence: Synthetic oligonucleotide
uaaccgacugcggccggag

SEQ ID NO: 28518 - RNA, 19 nt, Artificial Sequence
  Description of Artificial Sequence: Synthetic oligonucleotide
cucuacuacauugcuggca

SEQ ID NO: 28519 - RNA, 19 nt, Artificial Sequence
  Description of Artificial Sequence: Synthetic oligonucleotide
ccuguacaaccaaggaaag

SEQ ID NO: 28520 - RNA, 19 nt, Artificial Sequence
  Description of Artificial Sequence: Synthetic oligonucleotide
uacccugacuucaguugaa

SEQ ID NO: 28521 - RNA, 19 nt, Artificial Sequence
  Description of Artificial Sequence: Synthetic oligonucleotide
ccgaccacuaccauuuguc

SEQ ID NO: 28522 - RNA, 19 nt, Artificial Sequence
  Description of Artificial Sequence: Synthetic oligonucleotide
gguggcguaagugaauguc

SEQ ID NO: 28523 - RNA, 19 nt, Artificial Sequence
  Description of Artificial Sequence: Synthetic oligonucleotide
agcacgggaggcaugagua

SEQ ID NO: 28524 - RNA, 19 nt, Artificial Sequence
  Description of Artificial Sequence: Synthetic oligonucleotide
cguaagugggucaacauaa

SEQ ID NO: 28525 - RNA, 19 nt, Artificial Sequence
  Description of Artificial Sequence: Synthetic oligonucleotide
aauguacauaaggccgcuu

SEQ ID NO: 28526 - RNA, 19 nt, Artificial Sequence
  Description of Artificial Sequence: Synthetic oligonucleotide
gcacugggaaguaugaauc

SEQ ID NO: 28527 - RNA, 19 nt, Artificial Sequence
  Description of Artificial Sequence: Synthetic oligonucleotide
auauaccgaccacuaccau

SEQ ID NO: 28528 - RNA, 19 nt, Artificial Sequence
  Description of Artificial Sequence: Synthetic oligonucleotide
gccuaagcgguuucugccc

SEQ ID NO: 28529 - RNA, 19 nt, Artificial Sequence
  Description of Artificial Sequence: Synthetic oligonucleotide
cugguucauacuucugaaa

SEQ ID NO: 28530 - RNA, 19 nt, Artificial Sequence
  Description of Artificial Sequence: Synthetic oligonucleotide
aagucacaucacauuuaaa

SEQ ID NO: 28531 - RNA, 19 nt, Artificial Sequence
  Description of Artificial Sequence: Synthetic oligonucleotide
cauacugauccuguaccaa

SEQ ID NO: 28532 - RNA, 19 nt, Artificial Sequence
  Description of Artificial Sequence: Synthetic oligonucleotide
guagaccuaccagacugca

SEQ ID NO: 28533 - RNA, 19 nt, Artificial Sequence
  Description of Artificial Sequence: Synthetic oligonucleotide
cuaucagguuccuacuuau

SEQ ID NO: 28534 - RNA, 19 nt, Artificial Sequence
  Description of Artificial Sequence: Synthetic oligonucleotide
gguuaaagugggcagggau

SEQ ID NO: 28535 - RNA, 19 nt, Artificial Sequence
  Description of Artificial Sequence: Synthetic oligonucleotide
aaggccgcuuguaaaugua

SEQ ID NO: 28536 - RNA, 19 nt, Artificial Sequence
  Description of Artificial Sequence: Synthetic oligonucleotide
cuacgaaauuagcaaggcu

SEQ ID NO: 28537 - RNA, 19 nt, Artificial Sequence
  Description of Artificial Sequence: Synthetic oligonucleotide
ggcguaagugaauguccug

SEQ ID NO: 28538 - RNA, 19 nt, Artificial Sequence
  Description of Artificial Sequence: Synthetic oligonucleotide
cugaacguaagugggucaa

SEQ ID NO: 28539 - RNA, 19 nt, Artificial Sequence
  Description of Artificial Sequence: Synthetic oligonucleotide
auguugacucagggcuaac

SEQ ID NO: 28540 - RNA, 19 nt, Artificial Sequence
  Description of Artificial Sequence: Synthetic oligonucleotide
guaguaaugugaggucgaa

SEQ ID NO: 28541 - RNA, 19 nt, Artificial Sequence
  Description of Artificial Sequence: Synthetic oligonucleotide
guuccuacuuauguaucua

SEQ ID NO: 28542 - RNA, 19 nt, Artificial Sequence
  Description of Artificial Sequence: Synthetic oligonucleotide
aguaugugacuaacauuuu

SEQ ID NO: 28543 - RNA, 19 nt, Artificial Sequence
  Description of Artificial Sequence: Synthetic oligonucleotide
uaagcgguuucugcccaau

SEQ ID NO: 28544 - RNA, 19 nt, Artificial Sequence
  Description of Artificial Sequence: Synthetic oligonucleotide
agauccuagcauguccauu

SEQ ID NO: 28545 - RNA, 19 nt, Artificial Sequence
  Description of Artificial Sequence: Synthetic oligonucleotide
cugaaccgagugacagcug

SEQ ID NO: 28546 - RNA, 19 nt, Artificial Sequence
  Description of Artificial Sequence: Synthetic oligonucleotide
cucagcacgggaggcauga

SEQ ID NO: 28547 - RNA, 19 nt, Artificial Sequence
  Description of Artificial Sequence: Synthetic oligonucleotide
acaaguggcuggauuuaau

SEQ ID NO: 28548 - RNA, 19 nt, Artificial Sequence
  Description of Artificial Sequence: Synthetic oligonucleotide
gucgcucagcuggaguagc

SEQ ID NO: 28549 - RNA, 19 nt, Artificial Sequence
  Description of Artificial Sequence: Synthetic oligonucleotide
gggucaacauaaauguuua

SEQ ID NO: 28550 - RNA, 19 nt, Artificial Sequence
  Description of Artificial Sequence: Synthetic oligonucleotide
agugaauguccuggaguuu

SEQ ID NO: 28551 - RNA, 19 nt, Artificial Sequence
  Description of Artificial Sequence: Synthetic oligonucleotide
ugauggcgguggcguaagu

SEQ ID NO: 28552 - RNA, 19 nt, Artificial Sequence
  Description of Artificial Sequence: Synthetic oligonucleotide
auaaccgacugcggccgga

SEQ ID NO: 28553 - RNA, 19 nt, Artificial Sequence
  Description of Artificial Sequence: Synthetic oligonucleotide
ccuaccccuacacacacaa

SEQ ID NO: 28554 - RNA, 19 nt, Artificial Sequence
  Description of Artificial Sequence: Synthetic oligonucleotide
ggaaaguuacuacgaaauu

SEQ ID NO: 28555 - RNA, 19 nt, Artificial Sequence
  Description of Artificial Sequence: Synthetic oligonucleotide
uacggguagccagggcuaa

SEQ ID NO: 28556 - RNA, 19 nt, Artificial Sequence
  Description of Artificial Sequence: Synthetic oligonucleotide
auacggguagccagggcua

SEQ ID NO: 28557 - RNA, 19 nt, Artificial Sequence
  Description of Artificial Sequence: Synthetic oligonucleotide
ggccaguauaugcuuccca

SEQ ID NO: 28558 - RNA, 19 nt, Artificial Sequence
  Description of Artificial Sequence: Synthetic oligonucleotide
ggcuaacaccuuuccucug

SEQ ID NO: 28559 - RNA, 19 nt, Artificial Sequence
  Description of Artificial Sequence: Synthetic oligonucleotide
gcucgaugcacuucgguau

SEQ ID NO: 28560 - RNA, 19 nt, Artificial Sequence
  Description of Artificial Sequence: Synthetic oligonucleotide
caaaucuccauccguucuu

SEQ ID NO: 28561 - RNA, 19 nt, Artificial Sequence
  Description of Artificial Sequence: Synthetic oligonucleotide
uggccucaccaaggaaugu

SEQ ID NO: 28562 - RNA, 19 nt, Artificial Sequence
  Description of Artificial Sequence: Synthetic oligonucleotide
acucgacuauaugucccau

SEQ ID NO: 28563 - RNA, 19 nt, Artificial Sequence
  Description of Artificial Sequence: Synthetic oligonucleotide
caucauauacaggcauucu

SEQ ID NO: 28564 - RNA, 19 nt, Artificial Sequence
  Description of Artificial Sequence: Synthetic oligonucleotide
guccacgaauacggguagc

SEQ ID NO: 28565 - RNA, 19 nt, Artificial Sequence
  Description of Artificial Sequence: Synthetic oligonucleotide
gcgguuguuccugaaaucu

SEQ ID NO: 28566 - RNA, 19 nt, Artificial Sequence
  Description of Artificial Sequence: Synthetic oligonucleotide
augugaggucgaaucuuau

SEQ ID NO: 28567 - RNA, 19 nt, Artificial Sequence
  Description of Artificial Sequence: Synthetic oligonucleotide
acucuacaggggacaaaau

SEQ ID NO: 28568 - RNA, 19 nt, Artificial Sequence
  Description of Artificial Sequence: Synthetic oligonucleotide
gggcuaauuucugauccaa

SEQ ID NO: 28569 - RNA, 19 nt, Artificial Sequence
  Description of Artificial Sequence: Synthetic oligonucleotide
cuaagcgguuucugcccaa

SEQ ID NO: 28570 - RNA, 19 nt, Artificial Sequence
  Description of Artificial Sequence: Synthetic oligonucleotide
cgacuauaugucccaucag

SEQ ID NO: 28571 - RNA, 19 nt, Artificial Sequence
  Description of Artificial Sequence: Synthetic oligonucleotide
gugcucgaugcacuucggu

SEQ ID NO: 28572 - RNA, 19 nt, Artificial Sequence
  Description of Artificial Sequence: Synthetic oligonucleotide
ccgauaggcccuagaucug

SEQ ID NO: 28573 - RNA, 19 nt, Artificial Sequence
  Description of Artificial Sequence: Synthetic oligonucleotide
cagggcuaacaccuuuccu

SEQ ID NO: 28574 - RNA, 19 nt, Artificial Sequence
  Description of Artificial Sequence: Synthetic oligonucleotide
ggguaaggucugcucugca

SEQ ID NO: 28575 - RNA, 19 nt, Artificial Sequence
  Description of Artificial Sequence: Synthetic oligonucleotide
cuacugugacagggacaug

SEQ ID NO: 28576 - RNA, 19 nt, Artificial Sequence
  Description of Artificial Sequence: Synthetic oligonucleotide
accuaccccuacacacaca

SEQ ID NO: 28577 - RNA, 19 nt, Artificial Sequence
  Description of Artificial Sequence: Synthetic oligonucleotide
ggggauacaguuacaucau

SEQ ID NO: 28578 - RNA, 19 nt, Artificial Sequence
  Description of Artificial Sequence: Synthetic oligonucleotide
cagacuggaagugcucgau

SEQ ID NO: 28579 - RNA, 19 nt, Artificial Sequence
  Description of Artificial Sequence: Synthetic oligonucleotide
gugggucaacauaaauguu

SEQ ID NO: 28580 - RNA, 19 nt, Artificial Sequence
  Description of Artificial Sequence: Synthetic oligonucleotide
ccuccgauaggcccuagau

SEQ ID NO: 28581 - RNA, 19 nt, Artificial Sequence
  Description of Artificial Sequence: Synthetic oligonucleotide
gcacugaacguaagugggu

SEQ ID NO: 28582 - RNA, 19 nt, Artificial Sequence
  Description of Artificial Sequence: Synthetic oligonucleotide
cuaccccuacacacacaau

SEQ ID NO: 28583 - RNA, 19 nt, Artificial Sequence
  Description of Artificial Sequence: Synthetic oligonucleotide
gggcagggauguaaaugua

SEQ ID NO: 28584 - RNA, 19 nt, Artificial Sequence
  Description of Artificial Sequence: Synthetic oligonucleotide
ggccucaccaaggaauguu

SEQ ID NO: 28585 - RNA, 19 nt, Artificial Sequence
  Description of Artificial Sequence: Synthetic oligonucleotide
gcacuucgguauuuugcuu

SEQ ID NO: 28586 - RNA, 19 nt, Artificial Sequence
  Description of Artificial Sequence: Synthetic oligonucleotide
ggcccuagaucugggcugu

SEQ ID NO: 28587 - RNA, 19 nt, Artificial Sequence
  Description of Artificial Sequence: Synthetic oligonucleotide
gcggccggagggcaugaua

SEQ ID NO: 28588 - RNA, 19 nt, Artificial Sequence
  Description of Artificial Sequence: Synthetic oligonucleotide
ggacugcuagaggaggauu

SEQ ID NO: 28589 - RNA, 19 nt, Artificial Sequence
  Description of Artificial Sequence: Synthetic oligonucleotide
caccucuaucagguuccua

SEQ ID NO: 28590 - RNA, 19 nt, Artificial Sequence
  Description of Artificial Sequence: Synthetic oligonucleotide
gcuggcuacuggagcuaaa

SEQ ID NO: 28591 - RNA, 19 nt, Artificial Sequence
  Description of Artificial Sequence: Synthetic oligonucleotide
gguccuccgauaggcccua

SEQ ID NO: 28592 - RNA, 19 nt, Artificial Sequence
  Description of Artificial Sequence: Synthetic oligonucleotide
cggccggagggcaugauau

SEQ ID NO: 28593 - RNA, 19 nt, Artificial Sequence
  Description of Artificial Sequence: Synthetic oligonucleotide
ggcgguggcguaagugaau

SEQ ID NO: 28594 - RNA, 19 nt, Artificial Sequence
  Description of Artificial Sequence: Synthetic oligonucleotide
ccacucuacaggggacaaa

SEQ ID NO: 28595 - RNA, 19 nt, Artificial Sequence
  Description of Artificial Sequence: Synthetic oligonucleotide
gggccgaugcagggaaguu

SEQ ID NO: 28596 - RNA, 19 nt, Artificial Sequence
  Description of Artificial Sequence: Synthetic oligonucleotide
cgguggcguaagugaaugu

SEQ ID NO: 28597 - RNA, 19 nt, Artificial Sequence
  Description of Artificial Sequence: Synthetic oligonucleotide
cccuagaucugggcuguuu

SEQ ID NO: 28598 - RNA, 19 nt, Artificial Sequence
  Description of Artificial Sequence: Synthetic oligonucleotide
cgacugcggccggagggca

SEQ ID NO: 28599 - RNA, 19 nt, Artificial Sequence
  Description of Artificial Sequence: Synthetic oligonucleotide
aagauguugagacaguucc

SEQ ID NO: 28600 - RNA, 19 nt, Artificial Sequence
  Description of Artificial Sequence: Synthetic oligonucleotide
uccgauuuuaacaugaggg

SEQ ID NO: 28601 - RNA, 19 nt, Artificial Sequence
  Description of Artificial Sequence: Synthetic oligonucleotide
uacuauaugauuaauuuug

SEQ ID NO: 28602 - RNA, 19 nt, Artificial Sequence
  Description of Artificial Sequence: Synthetic oligonucleotide
uuaaauaacagucuaggaa

SEQ ID NO: 28603 - RNA, 19 nt, Artificial Sequence
  Description of Artificial Sequence: Synthetic oligonucleotide
aacgccaucaaccaaaaca

SEQ ID NO: 28604 - RNA, 19 nt, Artificial Sequence
  Description of Artificial Sequence: Synthetic oligonucleotide
uauaaaaccugacaccagg

SEQ ID NO: 28605 - RNA, 19 nt, Artificial Sequence
  Description of Artificial Sequence: Synthetic oligonucleotide
ucugcuaacgccaucaacc

SEQ ID NO: 28606 - RNA, 19 nt, Artificial Sequence
  Description of Artificial Sequence: Synthetic oligonucleotide
auuuauaggccuuacuaac

SEQ ID NO: 28607 - RNA, 19 nt, Artificial Sequence
  Description of Artificial Sequence: Synthetic oligonucleotide
aauauuaggcaaacguucc

SEQ ID NO: 28608 - RNA, 19 nt, Artificial Sequence
  Description of Artificial Sequence: Synthetic oligonucleotide
uuuagaaucugcuaacgcc

SEQ ID NO: 28609 - RNA, 19 nt, Artificial Sequence
  Description of Artificial Sequence: Synthetic oligonucleotide
uaauguuaaggguaagucg

SEQ ID NO: 28610 - RNA, 19 nt, Artificial Sequence
  Description of Artificial Sequence: Synthetic oligonucleotide
uuuuguucuaccaugaguu

SEQ ID NO: 28611 - RNA, 19 nt, Artificial Sequence
  Description of Artificial Sequence: Synthetic oligonucleotide
cuauucauggcauagccag

SEQ ID NO: 28612 - RNA, 19 nt, Artificial Sequence
  Description of Artificial Sequence: Synthetic oligonucleotide
  modified_base (4)..(4): a, c, u, g, unknown or other
uacnuaaauucccacaggu

SEQ ID NO: 28613 - RNA, 19 nt, Artificial Sequence
  Description of Artificial Sequence: Synthetic oligonucleotide
uugauuguagccaaagaga

SEQ ID NO: 28614 - RNA, 19 nt, Artificial Sequence
  Description of Artificial Sequence: Synthetic oligonucleotide
aauacaccucacuggagac

SEQ ID NO: 28615 - RNA, 19 nt, Artificial Sequence
  Description of Artificial Sequence: Synthetic oligonucleotide
aaggcaguauacaauaaac

SEQ ID NO: 28616 - RNA, 19 nt, Artificial Sequence
  Description of Artificial Sequence: Synthetic oligonucleotide
uuagaaucugcuaacgcca

SEQ ID NO: 28617 - RNA, 19 nt, Artificial Sequence
  Description of Artificial Sequence: Synthetic oligonucleotide
uguccgaacacaaaugggc

SEQ ID NO: 28618 - RNA, 19 nt, Artificial Sequence
  Description of Artificial Sequence: Synthetic oligonucleotide
ugcauaucuauucauggca

SEQ ID NO: 28619 - RNA, 19 nt, Artificial Sequence
  Description of Artificial Sequence: Synthetic oligonucleotide
uuaaggguaagucggagac

SEQ ID NO: 28620 - RNA, 19 nt, Artificial Sequence
  Description of Artificial Sequence: Synthetic oligonucleotide
uugauagcuuuauauacag

SEQ ID NO: 28621 - RNA, 19 nt, Artificial Sequence
  Description of Artificial Sequence: Synthetic oligonucleotide
aagucggagacuuagacuu

SEQ ID NO: 28622 - RNA, 19 nt, Artificial Sequence
  Description of Artificial Sequence: Synthetic oligonucleotide
acggauguaaaaugguccc

SEQ ID NO: 28623 - RNA, 19 nt, Artificial Sequence
  Description of Artificial Sequence: Synthetic oligonucleotide
ugggacaugauaugaaucc

SEQ ID NO: 28624 - RNA, 19 nt, Artificial Sequence
  Description of Artificial Sequence: Synthetic oligonucleotide
agauaaaccuucugugccc

SEQ ID NO: 28625 - RNA, 19 nt, Artificial Sequence
  Description of Artificial Sequence: Synthetic oligonucleotide
aaaaccugacaccaggagu

SEQ ID NO: 28626 - RNA, 19 nt, Artificial Sequence
  Description of Artificial Sequence: Synthetic oligonucleotide
uuuuagaaucugcuaacgc

SEQ ID NO: 28627 - RNA, 19 nt, Artificial Sequence
  Description of Artificial Sequence: Synthetic oligonucleotide
uaugcuuacagcugcaaga

SEQ ID NO: 28628 - RNA, 19 nt, Artificial Sequence
  Description of Artificial Sequence: Synthetic oligonucleotide
ucacaaguuagauaucuug

SEQ ID NO: 28629 - RNA, 19 nt, Artificial Sequence
  Description of Artificial Sequence: Synthetic oligonucleotide
aggccaauaacaguaaugg

SEQ ID NO: 28630 - RNA, 19 nt, Artificial Sequence
  Description of Artificial Sequence: Synthetic oligonucleotide
augcauaucuauucauggc

SEQ ID NO: 28631 - RNA, 19 nt, Artificial Sequence
  Description of Artificial Sequence: Synthetic oligonucleotide
acagucuaggaaauaaacc

SEQ ID NO: 28632 - RNA, 19 nt, Artificial Sequence
  Description of Artificial Sequence: Synthetic oligonucleotide
aaagagauaucuucccaga

SEQ ID NO: 28633 - RNA, 19 nt, Artificial Sequence
  Description of Artificial Sequence: Synthetic oligonucleotide
aggacaaacauugauagcu

SEQ ID NO: 28634 - RNA, 19 nt, Artificial Sequence
  Description of Artificial Sequence: Synthetic oligonucleotide
uuuauaggccuuacuaaca

SEQ ID NO: 28635 - RNA, 19 nt, Artificial Sequence
  Description of Artificial Sequence: Synthetic oligonucleotide
ugauuguagccaaagagau

SEQ ID NO: 28636 - RNA, 19 nt, Artificial Sequence
  Description of Artificial Sequence: Synthetic oligonucleotide
uccaucuuagucaaggcaa

SEQ ID NO: 28637 - RNA, 19 nt, Artificial Sequence
  Description of Artificial Sequence: Synthetic oligonucleotide
aaagaggcgaagacggccc

SEQ ID NO: 28638 - RNA, 19 nt, Artificial Sequence
  Description of Artificial Sequence: Synthetic oligonucleotide
ucuuuaggaaugcuaguca

SEQ ID NO: 28639 - RNA, 19 nt, Artificial Sequence
  Description of Artificial Sequence: Synthetic oligonucleotide
  modified_base (6)..(6): a, c, u, g, unknown or other
gguacnuaaauucccacag

SEQ ID NO: 28640 - RNA, 19 nt, Artificial Sequence
  Description of Artificial Sequence: Synthetic oligonucleotide
uaugagucugacuuggaac

SEQ ID NO: 28641 - RNA, 19 nt, Artificial Sequence
  Description of Artificial Sequence: Synthetic oligonucleotide
acauuuauaggccuuacua

SEQ ID NO: 28642 - RNA, 19 nt, Artificial Sequence
  Description of Artificial Sequence: Synthetic oligonucleotide
accuuuauuguuuccgagg

SEQ ID NO: 28643 - RNA, 19 nt, Artificial Sequence
  Description of Artificial Sequence: Synthetic oligonucleotide
aacgaccucacuguggagg

SEQ ID NO: 28644 - RNA, 19 nt, Artificial Sequence
  Description of Artificial Sequence: Synthetic oligonucleotide
agugaugcuagagcaagcc

SEQ ID NO: 28645 - RNA, 19 nt, Artificial Sequence
  Description of Artificial Sequence: Synthetic oligonucleotide
uccaauaugcuuacagcug

SEQ ID NO: 28646 - RNA, 19 nt, Artificial Sequence
  Description of Artificial Sequence: Synthetic oligonucleotide
uguuaaacauauugagcgc

SEQ ID NO: 28647 - RNA, 19 nt, Artificial Sequence
  Description of Artificial Sequence: Synthetic oligonucleotide
uccgcagcaagaauuaugu

SEQ ID NO: 28648 - RNA, 19 nt, Artificial Sequence
  Description of Artificial Sequence: Synthetic oligonucleotide
aaacaguuuuguucuacca

SEQ ID NO: 28649 - RNA, 19 nt, Artificial Sequence
  Description of Artificial Sequence: Synthetic oligonucleotide
uauaucaauuaucuauaaa

SEQ ID NO: 28650 - RNA, 19 nt, Artificial Sequence
  Description of Artificial Sequence: Synthetic oligonucleotide
gauaacuccguuccacucc

SEQ ID NO: 28651 - RNA, 19 nt, Artificial Sequence
  Description of Artificial Sequence: Synthetic oligonucleotide
  modified_base (11)..(11): a, c, u, g, unknown or other
acaucgguacnuaaauucc

SEQ ID NO: 28652 - RNA, 19 nt, Artificial Sequence
  Description of Artificial Sequence: Synthetic oligonucleotide
ggagacuuagacuucauug

SEQ ID NO: 28653 - RNA, 19 nt, Artificial Sequence
  Description of Artificial Sequence: Synthetic oligonucleotide
  modified_base (10)..(10): a, c, u, g, unknown or other
caucgguacnuaaauuccc

SEQ ID NO: 28654 - RNA, 19 nt, Artificial Sequence
  Description of Artificial Sequence: Synthetic oligonucleotide
uuuuccuaugcugaagugc

SEQ ID NO: 28655 - RNA, 19 nt, Artificial Sequence
  Description of Artificial Sequence: Synthetic oligonucleotide
uuauaaaaccugacaccag

SEQ ID NO: 28656 - RNA, 19 nt, Artificial Sequence
  Description of Artificial Sequence: Synthetic oligonucleotide
ucggaauuccaccauugcc

SEQ ID NO: 28657 - RNA, 19 nt, Artificial Sequence
  Description of Artificial Sequence: Synthetic oligonucleotide
acuuagacuucauuguaug

SEQ ID NO: 28658 - RNA, 19 nt, Artificial Sequence
  Description of Artificial Sequence: Synthetic oligonucleotide
aguauggugauccuuuuau

SEQ ID NO: 28659 - RNA, 19 nt, Artificial Sequence
  Description of Artificial Sequence: Synthetic oligonucleotide
ugagggauucacuagcaga

SEQ ID NO: 28660 - RNA, 19 nt, Artificial Sequence
  Description of Artificial Sequence: Synthetic oligonucleotide
ucaggguuaaucgaucugc

SEQ ID NO: 28661 - RNA, 19 nt, Artificial Sequence
  Description of Artificial Sequence: Synthetic oligonucleotide
auauuaggcaaacguuccg

SEQ ID NO: 28662 - RNA, 19 nt, Artificial Sequence
  Description of Artificial Sequence: Synthetic oligonucleotide
caucaaagauggaaggagc

SEQ ID NO: 28663 - RNA, 19 nt, Artificial Sequence
  Description of Artificial Sequence: Synthetic oligonucleotide
agaccuauuaguugggaga

SEQ ID NO: 28664 - RNA, 19 nt, Artificial Sequence
  Description of Artificial Sequence: Synthetic oligonucleotide
ugcgucagaacaaaacaac

SEQ ID NO: 28665 - RNA, 19 nt, Artificial Sequence
  Description of Artificial Sequence: Synthetic oligonucleotide
uauugagcgcagaugauau

SEQ ID NO: 28666 - RNA, 19 nt, Artificial Sequence
  Description of Artificial Sequence: Synthetic oligonucleotide
aagccauugcaucguguac

SEQ ID NO: 28667 - RNA, 19 nt, Artificial Sequence
  Description of Artificial Sequence: Synthetic oligonucleotide
uucugaacuacuuguggug

SEQ ID NO: 28668 - RNA, 19 nt, Artificial Sequence
  Description of Artificial Sequence: Synthetic oligonucleotide
auaucuauucauggcauag

SEQ ID NO: 28669 - RNA, 19 nt, Artificial Sequence
  Description of Artificial Sequence: Synthetic oligonucleotide
caaaauacgccuuucugca

SEQ ID NO: 28670 - RNA, 19 nt, Artificial Sequence
  Description of Artificial Sequence: Synthetic oligonucleotide
guugauacuacccaucuua

SEQ ID NO: 28671 - RNA, 19 nt, Artificial Sequence
  Description of Artificial Sequence: Synthetic oligonucleotide
uucuuauaggagcauguuc

SEQ ID NO: 28672 - RNA, 19 nt, Artificial Sequence
  Description of Artificial Sequence: Synthetic oligonucleotide
gacugaauggaauucaaua

SEQ ID NO: 28673 - RNA, 19 nt, Artificial Sequence
  Description of Artificial Sequence: Synthetic oligonucleotide
gauacuacccaucuuagau

SEQ ID NO: 28674 - RNA, 19 nt, Artificial Sequence
  Description of Artificial Sequence: Synthetic oligonucleotide
cucaaacuuaaccuagaag

SEQ ID NO: 28675 - RNA, 19 nt, Artificial Sequence
  Description of Artificial Sequence: Synthetic oligonucleotide
uuaguucaugaguauggug

SEQ ID NO: 28676 - RNA, 19 nt, Artificial Sequence
  Description of Artificial Sequence: Synthetic oligonucleotide
uaggcaaacguuccgcagc

SEQ ID NO: 28677 - RNA, 19 nt, Artificial Sequence
  Description of Artificial Sequence: Synthetic oligonucleotide
uguucucggaauuccacca

SEQ ID NO: 28678 - RNA, 19 nt, Artificial Sequence
  Description of Artificial Sequence: Synthetic oligonucleotide
aguugaucaccuuuauugu

SEQ ID NO: 28679 - RNA, 19 nt, Artificial Sequence
  Description of Artificial Sequence: Synthetic oligonucleotide
ucaauauggcacucaguug

SEQ ID NO: 28680 - RNA, 19 nt, Artificial Sequence
  Description of Artificial Sequence: Synthetic oligonucleotide
  modified_base (5)..(5): a, c, u, g, unknown or other
guacnuaaauucccacagg

SEQ ID NO: 28681 - RNA, 19 nt, Artificial Sequence
  Description of Artificial Sequence: Synthetic oligonucleotide
agauaacuccguuccacuc

SEQ ID NO: 28682 - RNA, 19 nt, Artificial Sequence
  Description of Artificial Sequence: Synthetic oligonucleotide
acuuggaacguucccgagg

SEQ ID NO: 28683 - RNA, 19 nt, Artificial Sequence
  Description of Artificial Sequence: Synthetic oligonucleotide
agucaaggcaaugaugguc

SEQ ID NO: 28684 - RNA, 19 nt, Artificial Sequence
  Description of Artificial Sequence: Synthetic oligonucleotide
uauuaggcaaacguuccgc

SEQ ID NO: 28685 - RNA, 19 nt, Artificial Sequence
  Description of Artificial Sequence: Synthetic oligonucleotide
uuaaugguucugugagggg

SEQ ID NO: 28686 - RNA, 19 nt, Artificial Sequence
  Description of Artificial Sequence: Synthetic oligonucleotide
uucggcaucacagcgagcu

SEQ ID NO: 28687 - RNA, 19 nt, Artificial Sequence
  Description of Artificial Sequence: Synthetic oligonucleotide
uaaguguuguaauguuaag

SEQ ID NO: 28688 - RNA, 19 nt, Artificial Sequence
  Description of Artificial Sequence: Synthetic oligonucleotide
  modified_base (2)..(2): a, c, u, g, unknown or other
cnuaaauucccacaggugu

SEQ ID NO: 28689 - RNA, 19 nt, Artificial Sequence
  Description of Artificial Sequence: Synthetic oligonucleotide
uggaacguucccgaggagg

SEQ ID NO: 28690 - RNA, 19 nt, Artificial Sequence
  Description of Artificial Sequence: Synthetic oligonucleotide
ugcaucguguacuaugccu

SEQ ID NO: 28691 - RNA, 19 nt, Artificial Sequence
  Description of Artificial Sequence: Synthetic oligonucleotide
guaagucggagacuuagac

SEQ ID NO: 28692 - RNA, 19 nt, Artificial Sequence
  Description of Artificial Sequence: Synthetic oligonucleotide
uaagucggagacuuagacu

SEQ ID NO: 28693 - RNA, 19 nt, Artificial Sequence
  Description of Artificial Sequence: Synthetic oligonucleotide
uuuauccccacccgugaug

SEQ ID NO: 28694 - RNA, 19 nt, Artificial Sequence
  Description of Artificial Sequence: Synthetic oligonucleotide
ucacggauguaaaaugguc

SEQ ID NO: 28695 - RNA, 19 nt, Artificial Sequence
  Description of Artificial Sequence: Synthetic oligonucleotide
ugcggagagggcuucagug

SEQ ID NO: 28696 - RNA, 19 nt, Artificial Sequence
  Description of Artificial Sequence: Synthetic oligonucleotide
aagagauaucuucccagaa

SEQ ID NO: 28697 - RNA, 19 nt, Artificial Sequence
  Description of Artificial Sequence: Synthetic oligonucleotide
gaccuauuaguugggagag

SEQ ID NO: 28698 - RNA, 19 nt, Artificial Sequence
  Description of Artificial Sequence: Synthetic oligonucleotide
cuucaccaccaaaauacgc

SEQ ID NO: 28699 - RNA, 19 nt, Artificial Sequence
  Description of Artificial Sequence: Synthetic oligonucleotide
auugauagcuuuauauaca

SEQ ID NO: 28700 - RNA, 19 nt, Artificial Sequence
  Description of Artificial Sequence: Synthetic oligonucleotide
uuccgcagcaagaauuaug

SEQ ID NO: 28701 - RNA, 19 nt, Artificial Sequence
  Description of Artificial Sequence: Synthetic oligonucleotide
cugacuuggaacguucccg

SEQ ID NO: 28702 - RNA, 19 nt, Artificial Sequence
  Description of Artificial Sequence: Synthetic oligonucleotide
guuugggacacaucugagc

SEQ ID NO: 28703 - RNA, 19 nt, Artificial Sequence
  Description of Artificial Sequence: Synthetic oligonucleotide
uuguaugaugcacggacau

SEQ ID NO: 28704 - RNA, 19 nt, Artificial Sequence
  Description of Artificial Sequence: Synthetic oligonucleotide
ugaacaacguggaggggac

SEQ ID NO: 28705 - RNA, 19 nt, Artificial Sequence
  Description of Artificial Sequence: Synthetic oligonucleotide
auacaggacaaacauugau

SEQ ID NO: 28706 - RNA, 19 nt, Artificial Sequence
  Description of Artificial Sequence: Synthetic oligonucleotide
uguuccauguuugggacac

SEQ ID NO: 28707 - RNA, 19 nt, Artificial Sequence
  Description of Artificial Sequence: Synthetic oligonucleotide
aaaccugacaccaggaguu

SEQ ID NO: 28708 - RNA, 19 nt, Artificial Sequence
  Description of Artificial Sequence: Synthetic oligonucleotide
  modified_base (15)..(15): a, c, u, g, unknown or other
ugucacaucgguacnuaaa

SEQ ID NO: 28709 - RNA, 19 nt, Artificial Sequence
  Description of Artificial Sequence: Synthetic oligonucleotide
agguguugugguuagggga

SEQ ID NO: 28710 - RNA, 19 nt, Artificial Sequence
  Description of Artificial Sequence: Synthetic oligonucleotide
ugacauguacauuccaaua

SEQ ID NO: 28711 - RNA, 19 nt, Artificial Sequence
  Description of Artificial Sequence: Synthetic oligonucleotide
uggggucguaaucaucucc

SEQ ID NO: 28712 - RNA, 19 nt, Artificial Sequence
  Description of Artificial Sequence: Synthetic oligonucleotide
auuaggcaaacguuccgca

SEQ ID NO: 28713 - RNA, 19 nt, Artificial Sequence
  Description of Artificial Sequence: Synthetic oligonucleotide
uuauccccacccgugaugc

SEQ ID NO: 28714 - RNA, 19 nt, Artificial Sequence
  Description of Artificial Sequence: Synthetic oligonucleotide
cauuuauaggccuuacuaa

SEQ ID NO: 28715 - RNA, 19 nt, Artificial Sequence
  Description of Artificial Sequence: Synthetic oligonucleotide
gaagacacccucccaucag

SEQ ID NO: 28716 - RNA, 19 nt, Artificial Sequence
  Description of Artificial Sequence: Synthetic oligonucleotide
uguuuccgaggccauaauc

SEQ ID NO: 28717 - RNA, 19 nt, Artificial Sequence
  Description of Artificial Sequence: Synthetic oligonucleotide
uguuaaggguaagucggag

SEQ ID NO: 28718 - RNA, 19 nt, Artificial Sequence
  Description of Artificial Sequence: Synthetic oligonucleotide
uaucuauucauggcauagc

SEQ ID NO: 28719 - RNA, 19 nt, Artificial Sequence
  Description of Artificial Sequence: Synthetic oligonucleotide
cuguccgaacacaaauggg

SEQ ID NO: 28720 - RNA, 19 nt, Artificial Sequence
  Description of Artificial Sequence: Synthetic oligonucleotide
ugcaagguguugugguuag

SEQ ID NO: 28721 - RNA, 19 nt, Artificial Sequence
  Description of Artificial Sequence: Synthetic oligonucleotide
acgggcuagaccuauuagu

SEQ ID NO: 28722 - RNA, 19 nt, Artificial Sequence
  Description of Artificial Sequence: Synthetic oligonucleotide
auaacuccguuccacuccu

SEQ ID NO: 28723 - RNA, 19 nt, Artificial Sequence
  Description of Artificial Sequence: Synthetic oligonucleotide
uauaggccuuacuaacaca

SEQ ID NO: 28724 - RNA, 19 nt, Artificial Sequence
  Description of Artificial Sequence: Synthetic oligonucleotide
ugauacuacccaucuuaga

SEQ ID NO: 28725 - RNA, 19 nt, Artificial Sequence
  Description of Artificial Sequence: Synthetic oligonucleotide
augcuagucauucuuugaa

SEQ ID NO: 28726 - RNA, 19 nt, Artificial Sequence
  Description of Artificial Sequence: Synthetic oligonucleotide
auagcuuuauauacagugu

SEQ ID NO: 28727 - RNA, 19 nt, Artificial Sequence
  Description of Artificial Sequence: Synthetic oligonucleotide
aucauucuugcacugugaa

SEQ ID NO: 28728 - RNA, 19 nt, Artificial Sequence
  Description of Artificial Sequence: Synthetic oligonucleotide
aaaauacgccuuucugcau

SEQ ID NO: 28729 - RNA, 19 nt, Artificial Sequence
  Description of Artificial Sequence: Synthetic oligonucleotide
uccgaacacaaaugggcug

SEQ ID NO: 28730 - RNA, 19 nt, Artificial Sequence
  Description of Artificial Sequence: Synthetic oligonucleotide
uuauccugagcagaguuua

SEQ ID NO: 28731 - RNA, 19 nt, Artificial Sequence
  Description of Artificial Sequence: Synthetic oligonucleotide
ugauagcuuuauauacagu

SEQ ID NO: 28732 - RNA, 19 nt, Artificial Sequence
  Description of Artificial Sequence: Synthetic oligonucleotide
uuuccgaggccauaaucaa

SEQ ID NO: 28733 - RNA, 19 nt, Artificial Sequence
  Description of Artificial Sequence: Synthetic oligonucleotide
auugggccgugacugaaug

SEQ ID NO: 28734 - RNA, 19 nt, Artificial Sequence
  Description of Artificial Sequence: Synthetic oligonucleotide
acuauaugauuaauuuugu

SEQ ID NO: 28735 - RNA, 19 nt, Artificial Sequence
  Description of Artificial Sequence: Synthetic oligonucleotide
  modified_base (3)..(3): a, c, u, g, unknown or other
acnuaaauucccacaggug

SEQ ID NO: 28736 - RNA, 19 nt, Artificial Sequence
  Description of Artificial Sequence: Synthetic oligonucleotide
uggcuucgcuuuuauguag

SEQ ID NO: 28737 - RNA, 19 nt, Artificial Sequence
  Description of Artificial Sequence: Synthetic oligonucleotide
cauuuccggcuuauuuugg

SEQ ID NO: 28738 - RNA, 19 nt, Artificial Sequence
  Description of Artificial Sequence: Synthetic oligonucleotide
aucuuagucaaggcaauga

SEQ ID NO: 28739 - RNA, 19 nt, Artificial Sequence
  Description of Artificial Sequence: Synthetic oligonucleotide
caucaugacaugcauugca

SEQ ID NO: 28740 - RNA, 19 nt, Artificial Sequence
  Description of Artificial Sequence: Synthetic oligonucleotide
gagaggcgauuccacgugg

SEQ ID NO: 28741 - RNA, 19 nt, Artificial Sequence
  Description of Artificial Sequence: Synthetic oligonucleotide
gaaaggggcuguccgaaca

SEQ ID NO: 28742 - RNA, 19 nt, Artificial Sequence
  Description of Artificial Sequence: Synthetic oligonucleotide
ucggcgucuugcuucagug

SEQ ID NO: 28743 - RNA, 19 nt, Artificial Sequence
  Description of Artificial Sequence: Synthetic oligonucleotide
aaacguuccgcagcaagaa

SEQ ID NO: 28744 - RNA, 19 nt, Artificial Sequence
  Description of Artificial Sequence: Synthetic oligonucleotide
ugaauggccggugcugcgg

SEQ ID NO: 28745 - RNA, 19 nt, Artificial Sequence
  Description of Artificial Sequence: Synthetic oligonucleotide
ugagcccuagacacaucag

SEQ ID NO: 28746 - RNA, 19 nt, Artificial Sequence
  Description of Artificial Sequence: Synthetic oligonucleotide
uugagcgcagaugauauuu

SEQ ID NO: 28747 - RNA, 19 nt, Artificial Sequence
  Description of Artificial Sequence: Synthetic oligonucleotide
aucaggguuaaucgaucug

SEQ ID NO: 28748 - RNA, 19 nt, Artificial Sequence
  Description of Artificial Sequence: Synthetic oligonucleotide
ucgagaccaagcuucugac

SEQ ID NO: 28749 - RNA, 19 nt, Artificial Sequence
  Description of Artificial Sequence: Synthetic oligonucleotide
caugacaugcauugcagaa

SEQ ID NO: 28750 - RNA, 19 nt, Artificial Sequence
  Description of Artificial Sequence: Synthetic oligonucleotide
agaaucugcuaacgccauc

SEQ ID NO: 28751 - RNA, 19 nt, Artificial Sequence
  Description of Artificial Sequence: Synthetic oligonucleotide
uacuacaggcuaucuuggc

SEQ ID NO: 28752 - RNA, 19 nt, Artificial Sequence
  Description of Artificial Sequence: Synthetic oligonucleotide
agacuuagacuucauugua

SEQ ID NO: 28753 - RNA, 19 nt, Artificial Sequence
  Description of Artificial Sequence: Synthetic oligonucleotide
guagcgacacuuguauucc

SEQ ID NO: 28754 - RNA, 19 nt, Artificial Sequence
  Description of Artificial Sequence: Synthetic oligonucleotide
auaggccuuacuaacacaa

SEQ ID NO: 28755 - RNA, 19 nt, Artificial Sequence
  Description of Artificial Sequence: Synthetic oligonucleotide
  modified_base (8)..(8): a, c, u, g, unknown or other
ucgguacnuaaauucccac

SEQ ID NO: 28756 - RNA, 19 nt, Artificial Sequence
  Description of Artificial Sequence: Synthetic oligonucleotide
ugggccgugacugaaugga

SEQ ID NO: 28757 - RNA, 19 nt, Artificial Sequence
  Description of Artificial Sequence: Synthetic oligonucleotide
auacuacccaucuuagaua

SEQ ID NO: 28758 - RNA, 19 nt, Artificial Sequence
  Description of Artificial Sequence: Synthetic oligonucleotide
caccuuuauuguuuccgag

SEQ ID NO: 28759 - RNA, 19 nt, Artificial Sequence
  Description of Artificial Sequence: Synthetic oligonucleotide
aacaacguggaggggacau

SEQ ID NO: 28760 - RNA, 19 nt, Artificial Sequence
  Description of Artificial Sequence: Synthetic oligonucleotide
uuuuauccccacccgugau

SEQ ID NO: 28761 - RNA, 19 nt, Artificial Sequence
  Description of Artificial Sequence: Synthetic oligonucleotide
  modified_base (14)..(14): a, c, u, g, unknown or other
gucacaucgguacnuaaau

SEQ ID NO: 28762 - RNA, 19 nt, Artificial Sequence
  Description of Artificial Sequence: Synthetic oligonucleotide
aaacucgccgacagcacug

SEQ ID NO: 28763 - RNA, 19 nt, Artificial Sequence
  Description of Artificial Sequence: Synthetic oligonucleotide
aggguuaaucgaucugcug

SEQ ID NO: 28764 - RNA, 19 nt, Artificial Sequence
  Description of Artificial Sequence: Synthetic oligonucleotide
  modified_base (13)..(13): a, c, u, g, unknown or other
ucacaucgguacnuaaauu

SEQ ID NO: 28765 - RNA, 19 nt, Artificial Sequence
  Description of Artificial Sequence: Synthetic oligonucleotide
aggaaaucugucacaucgg

SEQ ID NO: 28766 - RNA, 19 nt, Artificial Sequence
  Description of Artificial Sequence: Synthetic oligonucleotide
aggccuuacuaacacaauu

SEQ ID NO: 28767 - RNA, 19 nt, Artificial Sequence
  Description of Artificial Sequence: Synthetic oligonucleotide
ucguguacuaugccuucgu

SEQ ID NO: 28768 - RNA, 19 nt, Artificial Sequence
  Description of Artificial Sequence: Synthetic oligonucleotide
aggagcgugggagauuggg

SEQ ID NO: 28769 - RNA, 19 nt, Artificial Sequence
  Description of Artificial Sequence: Synthetic oligonucleotide
ucauucuugcacugugaau

SEQ ID NO: 28770 - RNA, 19 nt, Artificial Sequence
  Description of Artificial Sequence: Synthetic oligonucleotide
uggcuuaggagaugaugac

SEQ ID NO: 28771 - RNA, 19 nt, Artificial Sequence
  Description of Artificial Sequence: Synthetic oligonucleotide
cuucgcuuuuauguagacc

SEQ ID NO: 28772 - RNA, 19 nt, Artificial Sequence
  Description of Artificial Sequence: Synthetic oligonucleotide
uuuguuucucguuguccau

SEQ ID NO: 28773 - RNA, 19 nt, Artificial Sequence
  Description of Artificial Sequence: Synthetic oligonucleotide
ucguaaucaucuccuuguc

SEQ ID NO: 28774 - RNA, 19 nt, Artificial Sequence
  Description of Artificial Sequence: Synthetic oligonucleotide
guacuugaaguacagacuu

SEQ ID NO: 28775 - RNA, 19 nt, Artificial Sequence
  Description of Artificial Sequence: Synthetic oligonucleotide
uugcaucguguacuaugcc

SEQ ID NO: 28776 - RNA, 19 nt, Artificial Sequence
  Description of Artificial Sequence: Synthetic oligonucleotide
agcuuuauauacaguguga

SEQ ID NO: 28777 - RNA, 19 nt, Artificial Sequence
  Description of Artificial Sequence: Synthetic oligonucleotide
uugggccgugacugaaugg

SEQ ID NO: 28778 - RNA, 19 nt, Artificial Sequence
  Description of Artificial Sequence: Synthetic oligonucleotide
gcagcaagaauuauguaca

SEQ ID NO: 28779 - RNA, 19 nt, Artificial Sequence
  Description of Artificial Sequence: Synthetic oligonucleotide
aucugcguaggaguugauc

SEQ ID NO: 28780 - RNA, 19 nt, Artificial Sequence
  Description of Artificial Sequence: Synthetic oligonucleotide
uuauuguuuccgaggccau

SEQ ID NO: 28781 - RNA, 19 nt, Artificial Sequence
  Description of Artificial Sequence: Synthetic oligonucleotide
auauugagcgcagaugaua

SEQ ID NO: 28782 - RNA, 19 nt, Artificial Sequence
  Description of Artificial Sequence: Synthetic oligonucleotide
agaucugcguaggaguuga

SEQ ID NO: 28783 - RNA, 19 nt, Artificial Sequence
  Description of Artificial Sequence: Synthetic oligonucleotide
ugggagauugggccgugac

SEQ ID NO: 28784 - RNA, 19 nt, Artificial Sequence
  Description of Artificial Sequence: Synthetic oligonucleotide
agggcaagcagugcucuuc

SEQ ID NO: 28785 - RNA, 19 nt, Artificial Sequence
  Description of Artificial Sequence: Synthetic oligonucleotide
auuguaugaugcacggaca

SEQ ID NO: 28786 - RNA, 19 nt, Artificial Sequence
  Description of Artificial Sequence: Synthetic oligonucleotide
aacguuccgcagcaagaau

SEQ ID NO: 28787 - RNA, 19 nt, Artificial Sequence
  Description of Artificial Sequence: Synthetic oligonucleotide
gacuuggaacguucccgag

SEQ ID NO: 28788 - RNA, 19 nt, Artificial Sequence
  Description of Artificial Sequence: Synthetic oligonucleotide
  modified_base (9)..(9): a, c, u, g, unknown or other
aucgguacnuaaauuccca

SEQ ID NO: 28789 - RNA, 19 nt, Artificial Sequence
  Description of Artificial Sequence: Synthetic oligonucleotide
cagaaagccacuaaguguu

SEQ ID NO: 28790 - RNA, 19 nt, Artificial Sequence
  Description of Artificial Sequence: Synthetic oligonucleotide
ugaccuacugugggaaucu

SEQ ID NO: 28791 - RNA, 19 nt, Artificial Sequence
  Description of Artificial Sequence: Synthetic oligonucleotide
caauaacaguaauggccac

SEQ ID NO: 28792 - RNA, 19 nt, Artificial Sequence
  Description of Artificial Sequence: Synthetic oligonucleotide
acgggugggucuuacuaca

SEQ ID NO: 28793 - RNA, 19 nt, Artificial Sequence
  Description of Artificial Sequence: Synthetic oligonucleotide
ggaucauuauaaaaccuga

SEQ ID NO: 28794 - RNA, 19 nt, Artificial Sequence
  Description of Artificial Sequence: Synthetic oligonucleotide
uguugauacuacccaucuu

SEQ ID NO: 28795 - RNA, 19 nt, Artificial Sequence
  Description of Artificial Sequence: Synthetic oligonucleotide
aggcaaacguuccgcagca

SEQ ID NO: 28796 - RNA, 19 nt, Artificial Sequence
  Description of Artificial Sequence: Synthetic oligonucleotide
guaugagucugacuuggaa

SEQ ID NO: 28797 - RNA, 19 nt, Artificial Sequence
  Description of Artificial Sequence: Synthetic oligonucleotide
uagauauaucugguccaug

SEQ ID NO: 28798 - RNA, 19 nt, Artificial Sequence
  Description of Artificial Sequence: Synthetic oligonucleotide
aaacaccucacaaguuaga

SEQ ID NO: 28799 - RNA, 19 nt, Artificial Sequence
  Description of Artificial Sequence: Synthetic oligonucleotide
aucguguacuaugccuucg

SEQ ID NO: 28800 - RNA, 19 nt, Artificial Sequence
  Description of Artificial Sequence: Synthetic oligonucleotide
gucugcgucagaacaaaac

SEQ ID NO: 28801 - RNA, 19 nt, Artificial Sequence
  Description of Artificial Sequence: Synthetic oligonucleotide
ccuuucauccaccaaugac

SEQ ID NO: 28802 - RNA, 19 nt, Artificial Sequence
  Description of Artificial Sequence: Synthetic oligonucleotide
uuccgaggccauaaucaaa

SEQ ID NO: 28803 - RNA, 19 nt, Artificial Sequence
  Description of Artificial Sequence: Synthetic oligonucleotide
cugagcccuagacacauca

SEQ ID NO: 28804 - RNA, 19 nt, Artificial Sequence
  Description of Artificial Sequence: Synthetic oligonucleotide
cacgggugggucuuacuac

SEQ ID NO: 28805 - RNA, 19 nt, Artificial Sequence
  Description of Artificial Sequence: Synthetic oligonucleotide
ucaugaguauggugauccu

SEQ ID NO: 28806 - RNA, 19 nt, Artificial Sequence
  Description of Artificial Sequence: Synthetic oligonucleotide
acacgggugggucuuacua

SEQ ID NO: 28807 - RNA, 19 nt, Artificial Sequence
  Description of Artificial Sequence: Synthetic oligonucleotide
cuucaacgaccucacugug

SEQ ID NO: 28808 - RNA, 19 nt, Artificial Sequence
  Description of Artificial Sequence: Synthetic oligonucleotide
caccacacgggcuagaccu

SEQ ID NO: 28809 - RNA, 19 nt, Artificial Sequence
  Description of Artificial Sequence: Synthetic oligonucleotide
cugucggagacaccauuug

SEQ ID NO: 28810 - RNA, 19 nt, Artificial Sequence
  Description of Artificial Sequence: Synthetic oligonucleotide
ggguuaaucgaucugcugu

SEQ ID NO: 28811 - RNA, 19 nt, Artificial Sequence
  Description of Artificial Sequence: Synthetic oligonucleotide
acaaacauugauagcuuua

SEQ ID NO: 28812 - RNA, 19 nt, Artificial Sequence
  Description of Artificial Sequence: Synthetic oligonucleotide
cauagacaagacuuuauuu

SEQ ID NO: 28813 - RNA, 19 nt, Artificial Sequence
  Description of Artificial Sequence: Synthetic oligonucleotide
uuuugggccuggugugucu

SEQ ID NO: 28814 - RNA, 19 nt, Artificial Sequence
  Description of Artificial Sequence: Synthetic oligonucleotide
gaagcggcaugcuucugaa

SEQ ID NO: 28815 - RNA, 19 nt, Artificial Sequence
  Description of Artificial Sequence: Synthetic oligonucleotide
cuuaagcauagacaagacu

SEQ ID NO: 28816 - RNA, 19 nt, Artificial Sequence
  Description of Artificial Sequence: Synthetic oligonucleotide
ggguaagucggagacuuag

SEQ ID NO: 28817 - RNA, 19 nt, Artificial Sequence
  Description of Artificial Sequence: Synthetic oligonucleotide
gaucucggagaucugcgua

SEQ ID NO: 28818 - RNA, 19 nt, Artificial Sequence
  Description of Artificial Sequence: Synthetic oligonucleotide
uauccugagcagaguuuaa

SEQ ID NO: 28819 - RNA, 19 nt, Artificial Sequence
  Description of Artificial Sequence: Synthetic oligonucleotide
ugcuaacgccaucaaccaa

SEQ ID NO: 28820 - RNA, 19 nt, Artificial Sequence
  Description of Artificial Sequence: Synthetic oligonucleotide
augacaugcauugcagaaa

SEQ ID NO: 28821 - RNA, 19 nt, Artificial Sequence
  Description of Artificial Sequence: Synthetic oligonucleotide
cugcuaacgccaucaacca

SEQ ID NO: 28822 - RNA, 19 nt, Artificial Sequence
  Description of Artificial Sequence: Synthetic oligonucleotide
caucguguacuaugccuuc

SEQ ID NO: 28823 - RNA, 19 nt, Artificial Sequence
  Description of Artificial Sequence: Synthetic oligonucleotide
ccgacagcacuguaagugg

SEQ ID NO: 28824 - RNA, 19 nt, Artificial Sequence
  Description of Artificial Sequence: Synthetic oligonucleotide
aaccugacaccaggaguug

SEQ ID NO: 28825 - RNA, 19 nt, Artificial Sequence
  Description of Artificial Sequence: Synthetic oligonucleotide
uaggccuuacuaacacaau

SEQ ID NO: 28826 - RNA, 19 nt, Artificial Sequence
  Description of Artificial Sequence: Synthetic oligonucleotide
gagaucugcguaggaguug

SEQ ID NO: 28827 - RNA, 19 nt, Artificial Sequence
  Description of Artificial Sequence: Synthetic oligonucleotide
ggcuucggauuuuccaucc

SEQ ID NO: 28828 - RNA, 19 nt, Artificial Sequence
  Description of Artificial Sequence: Synthetic oligonucleotide
cuuuaggaaugcuagucau

SEQ ID NO: 28829 - RNA, 19 nt, Artificial Sequence
  Description of Artificial Sequence: Synthetic oligonucleotide
uuggaacguucccgaggag

SEQ ID NO: 28830 - RNA, 19 nt, Artificial Sequence
  Description of Artificial Sequence: Synthetic oligonucleotide
agaacgcacagugaugcua

SEQ ID NO: 28831 - RNA, 19 nt, Artificial Sequence
  Description of Artificial Sequence: Synthetic oligonucleotide
uggggaguucagaucugaa

SEQ ID NO: 28832 - RNA, 19 nt, Artificial Sequence
  Description of Artificial Sequence: Synthetic oligonucleotide
cuggaucauuauaaaaccu

SEQ ID NO: 28833 - RNA, 19 nt, Artificial Sequence
  Description of Artificial Sequence: Synthetic oligonucleotide
uguaugaugcacggacauu

SEQ ID NO: 28834 - RNA, 19 nt, Artificial Sequence
  Description of Artificial Sequence: Synthetic oligonucleotide
auggguguccacacgggug

SEQ ID NO: 28835 - RNA, 19 nt, Artificial Sequence
  Description of Artificial Sequence: Synthetic oligonucleotide
ugcacaugucgucggcguc

SEQ ID NO: 28836 - RNA, 19 nt, Artificial Sequence
  Description of Artificial Sequence: Synthetic oligonucleotide
gacaaacauugauagcuuu

SEQ ID NO: 28837 - RNA, 19 nt, Artificial Sequence
  Description of Artificial Sequence: Synthetic oligonucleotide
acaacugcccacagcagau

SEQ ID NO: 28838 - RNA, 19 nt, Artificial Sequence
  Description of Artificial Sequence: Synthetic oligonucleotide
uaacgccaucaaccaaaac

SEQ ID NO: 28839 - RNA, 19 nt, Artificial Sequence
  Description of Artificial Sequence: Synthetic oligonucleotide
agcauagacaagacuuuau

SEQ ID NO: 28840 - RNA, 19 nt, Artificial Sequence
  Description of Artificial Sequence: Synthetic oligonucleotide
augucgucggcgucuugcu

SEQ ID NO: 28841 - RNA, 19 nt, Artificial Sequence
  Description of Artificial Sequence: Synthetic oligonucleotide
uggucccguucuuauccug

SEQ ID NO: 28842 - RNA, 19 nt, Artificial Sequence
  Description of Artificial Sequence: Synthetic oligonucleotide
uagcgacacuuguauucca

SEQ ID NO: 28843 - RNA, 19 nt, Artificial Sequence
  Description of Artificial Sequence: Synthetic oligonucleotide
ucgucggcgucuugcuuca

SEQ ID NO: 28844 - RNA, 19 nt, Artificial Sequence
  Description of Artificial Sequence: Synthetic oligonucleotide
gaagacggcccuggcacac

SEQ ID NO: 28845 - RNA, 19 nt, Artificial Sequence
  Description of Artificial Sequence: Synthetic oligonucleotide
aaggggcuguccgaacaca

SEQ ID NO: 28846 - RNA, 19 nt, Artificial Sequence
  Description of Artificial Sequence: Synthetic oligonucleotide
cacuguaaguggaauacau

SEQ ID NO: 28847 - RNA, 19 nt, Artificial Sequence
  Description of Artificial Sequence: Synthetic oligonucleotide
gcucacgcgcccaucaggg

SEQ ID NO: 28848 - RNA, 19 nt, Artificial Sequence
  Description of Artificial Sequence: Synthetic oligonucleotide
uucuaccaugaguuugguu

SEQ ID NO: 28849 - RNA, 19 nt, Artificial Sequence
  Description of Artificial Sequence: Synthetic oligonucleotide
auggucccguucuuauccu

SEQ ID NO: 28850 - RNA, 19 nt, Artificial Sequence
  Description of Artificial Sequence: Synthetic oligonucleotide
gaauggccggugcugcgga

SEQ ID NO: 28851 - RNA, 19 nt, Artificial Sequence
  Description of Artificial Sequence: Synthetic oligonucleotide
gcauccgauuuuaacauga

SEQ ID NO: 28852 - RNA, 19 nt, Artificial Sequence
  Description of Artificial Sequence: Synthetic oligonucleotide
gcuaacgccaucaaccaaa

SEQ ID NO: 28853 - RNA, 19 nt, Artificial Sequence
  Description of Artificial Sequence: Synthetic oligonucleotide
ucgcuuuuauguagaccuu

SEQ ID NO: 28854 - RNA, 19 nt, Artificial Sequence
  Description of Artificial Sequence: Synthetic oligonucleotide
cuaacgccaucaaccaaaa

SEQ ID NO: 28855 - RNA, 19 nt, Artificial Sequence
  Description of Artificial Sequence: Synthetic oligonucleotide
agucggagacuuagacuuc

SEQ ID NO: 28856 - RNA, 19 nt, Artificial Sequence
  Description of Artificial Sequence: Synthetic oligonucleotide
gugaccuacugugggaauc

SEQ ID NO: 28857 - RNA, 19 nt, Artificial Sequence
  Description of Artificial Sequence: Synthetic oligonucleotide
aacucgccgacagcacugu

SEQ ID NO: 28858 - RNA, 19 nt, Artificial Sequence
  Description of Artificial Sequence: Synthetic oligonucleotide
guugaucaccuuuauuguu

SEQ ID NO: 28859 - RNA, 19 nt, Artificial Sequence
  Description of Artificial Sequence: Synthetic oligonucleotide
auugagcgcagaugauauu

SEQ ID NO: 28860 - RNA, 19 nt, Artificial Sequence
  Description of Artificial Sequence: Synthetic oligonucleotide
uuguccggcuucggcauca

SEQ ID NO: 28861 - RNA, 19 nt, Artificial Sequence
  Description of Artificial Sequence: Synthetic oligonucleotide
gcuagaccuauuaguuggg

SEQ ID NO: 28862 - RNA, 19 nt, Artificial Sequence
  Description of Artificial Sequence: Synthetic oligonucleotide
acguuccgcagcaagaauu

SEQ ID NO: 28863 - RNA, 19 nt, Artificial Sequence
  Description of Artificial Sequence: Synthetic oligonucleotide
caucacaagugcugucgga

SEQ ID NO: 28864 - RNA, 19 nt, Artificial Sequence
  Description of Artificial Sequence: Synthetic oligonucleotide
guacuaugccuucgugcca

SEQ ID NO: 28865 - RNA, 19 nt, Artificial Sequence
  Description of Artificial Sequence: Synthetic oligonucleotide
aggugcaauguuaaacaua

SEQ ID NO: 28866 - RNA, 19 nt, Artificial Sequence
  Description of Artificial Sequence: Synthetic oligonucleotide
gcaauuguacaggauuaca

SEQ ID NO: 28867 - RNA, 19 nt, Artificial Sequence
  Description of Artificial Sequence: Synthetic oligonucleotide
gucggagacuuagacuuca

SEQ ID NO: 28868 - RNA, 19 nt, Artificial Sequence
  Description of Artificial Sequence: Synthetic oligonucleotide
cucgccgacagcacuguaa

SEQ ID NO: 28869 - RNA, 19 nt, Artificial Sequence
  Description of Artificial Sequence: Synthetic oligonucleotide
ggaacguucccgaggagga

SEQ ID NO: 28870 - RNA, 19 nt, Artificial Sequence
  Description of Artificial Sequence: Synthetic oligonucleotide
ucggagacuuagacuucau

SEQ ID NO: 28871 - RNA, 19 nt, Artificial Sequence
  Description of Artificial Sequence: Synthetic oligonucleotide
ccuucgugccacagaaaag

SEQ ID NO: 28872 - RNA, 19 nt, Artificial Sequence
  Description of Artificial Sequence: Synthetic oligonucleotide
cagcauccgauuuuaacau

SEQ ID NO: 28873 - RNA, 19 nt, Artificial Sequence
  Description of Artificial Sequence: Synthetic oligonucleotide
cuauuaguugggagagucu

SEQ ID NO: 28874 - RNA, 19 nt, Artificial Sequence
  Description of Artificial Sequence: Synthetic oligonucleotide
agcucucuggggucguaau

SEQ ID NO: 28875 - RNA, 19 nt, Artificial Sequence
  Description of Artificial Sequence: Synthetic oligonucleotide
caucaggguuaaucgaucu

SEQ ID NO: 28876 - RNA, 19 nt, Artificial Sequence
  Description of Artificial Sequence: Synthetic oligonucleotide
cuaugccuucgugccacag

SEQ ID NO: 28877 - RNA, 19 nt, Artificial Sequence
  Description of Artificial Sequence: Synthetic oligonucleotide
gcucaaacuuaaccuagaa

SEQ ID NO: 28878 - RNA, 19 nt, Artificial Sequence
  Description of Artificial Sequence: Synthetic oligonucleotide
ggagcgugggagauugggc

SEQ ID NO: 28879 - RNA, 19 nt, Artificial Sequence
  Description of Artificial Sequence: Synthetic oligonucleotide
uccacaccccagagcgaac

SEQ ID NO: 28880 - RNA, 19 nt, Artificial Sequence
  Description of Artificial Sequence: Synthetic oligonucleotide
gcaguagcgacacuuguau

SEQ ID NO: 28881 - RNA, 19 nt, Artificial Sequence
  Description of Artificial Sequence: Synthetic oligonucleotide
agcgacacuuguauuccaa

SEQ ID NO: 28882 - RNA, 19 nt, Artificial Sequence
  Description of Artificial Sequence: Synthetic oligonucleotide
agauugggccgugacugaa

SEQ ID NO: 28883 - RNA, 19 nt, Artificial Sequence
  Description of Artificial Sequence: Synthetic oligonucleotide
acuaugccuucgugccaca

SEQ ID NO: 28884 - RNA, 19 nt, Artificial Sequence
  Description of Artificial Sequence: Synthetic oligonucleotide
gaccuacugugggaaucug

SEQ ID NO: 28885 - RNA, 19 nt, Artificial Sequence
  Description of Artificial Sequence: Synthetic oligonucleotide
ccccagagcgaacucuucc

SEQ ID NO: 28886 - RNA, 19 nt, Artificial Sequence
  Description of Artificial Sequence: Synthetic oligonucleotide
agaggagcguggagaacca

SEQ ID NO: 28887 - RNA, 19 nt, Artificial Sequence
  Description of Artificial Sequence: Synthetic oligonucleotide
gcuucgcuuuuauguagac

SEQ ID NO: 28888 - RNA, 19 nt, Artificial Sequence
  Description of Artificial Sequence: Synthetic oligonucleotide
accuauuaguugggagagu

SEQ ID NO: 28889 - RNA, 19 nt, Artificial Sequence
  Description of Artificial Sequence: Synthetic oligonucleotide
agaggcgauuccacguggu

SEQ ID NO: 28890 - RNA, 19 nt, Artificial Sequence
  Description of Artificial Sequence: Synthetic oligonucleotide
ccguucuuauccugagcag

SEQ ID NO: 28891 - RNA, 19 nt, Artificial Sequence
  Description of Artificial Sequence: Synthetic oligonucleotide
ggucuuacuacaggcuauc

SEQ ID NO: 28892 - RNA, 19 nt, Artificial Sequence
  Description of Artificial Sequence: Synthetic oligonucleotide
uaccaugaguuugguucuc

SEQ ID NO: 28893 - RNA, 19 nt, Artificial Sequence
  Description of Artificial Sequence: Synthetic oligonucleotide
ccggcuucggcaucacagc

SEQ ID NO: 28894 - RNA, 19 nt, Artificial Sequence
  Description of Artificial Sequence: Synthetic oligonucleotide
gcauagacaagacuuuauu

SEQ ID NO: 28895 - RNA, 19 nt, Artificial Sequence
  Description of Artificial Sequence: Synthetic oligonucleotide
ggaaaggggcuguccgaac

SEQ ID NO: 28896 - RNA, 19 nt, Artificial Sequence
  Description of Artificial Sequence: Synthetic oligonucleotide
caggguuaaucgaucugcu

SEQ ID NO: 28897 - RNA, 19 nt, Artificial Sequence
  Description of Artificial Sequence: Synthetic oligonucleotide
aggauccuuugguccuggu

SEQ ID NO: 28898 - RNA, 19 nt, Artificial Sequence
  Description of Artificial Sequence: Synthetic oligonucleotide
gcuucuuauaggagcaugu

SEQ ID NO: 28899 - RNA, 19 nt, Artificial Sequence
  Description of Artificial Sequence: Synthetic oligonucleotide
guagccaaagagauaucuu

SEQ ID NO: 28900 - RNA, 19 nt, Artificial Sequence
  Description of Artificial Sequence: Synthetic oligonucleotide
ccguuccacuccuggaccc

SEQ ID NO: 28901 - RNA, 19 nt, Artificial Sequence
  Description of Artificial Sequence: Synthetic oligonucleotide
gcuuauuuugggugaugcu

SEQ ID NO: 28902 - RNA, 19 nt, Artificial Sequence
  Description of Artificial Sequence: Synthetic oligonucleotide
ggcgaagacggcccuggca

SEQ ID NO: 28903 - RNA, 19 nt, Artificial Sequence
  Description of Artificial Sequence: Synthetic oligonucleotide
gaacaacguggaggggaca

SEQ ID NO: 28904 - RNA, 19 nt, Artificial Sequence
  Description of Artificial Sequence: Synthetic oligonucleotide
gguccugaucaagaacgca

SEQ ID NO: 28905 - RNA, 19 nt, Artificial Sequence
  Description of Artificial Sequence: Synthetic oligonucleotide
cucggagaucugcguagga

SEQ ID NO: 28906 - RNA, 19 nt, Artificial Sequence
  Description of Artificial Sequence: Synthetic oligonucleotide
guucucggaauuccaccau

SEQ ID NO: 28907 - RNA, 19 nt, Artificial Sequence
  Description of Artificial Sequence: Synthetic oligonucleotide
gcgacacuuguauuccaaa

SEQ ID NO: 28908 - RNA, 19 nt, Artificial Sequence
  Description of Artificial Sequence: Synthetic oligonucleotide
ggugauccuuuuauaucaa

SEQ ID NO: 28909 - RNA, 19 nt, Artificial Sequence
  Description of Artificial Sequence: Synthetic oligonucleotide
cacgcgcccaucaggguua

SEQ ID NO: 28910 - RNA, 19 nt, Artificial Sequence
  Description of Artificial Sequence: Synthetic oligonucleotide
agcacauuuccggcuuauu

SEQ ID NO: 28911 - RNA, 19 nt, Artificial Sequence
  Description of Artificial Sequence: Synthetic oligonucleotide
cucaguugaucaccuuuau

SEQ ID NO: 28912 - RNA, 19 nt, Artificial Sequence
  Description of Artificial Sequence: Synthetic oligonucleotide
acucaguauugcacuucau

SEQ ID NO: 28913 - RNA, 19 nt, Artificial Sequence
  Description of Artificial Sequence: Synthetic oligonucleotide
acaacguggaggggacauu

SEQ ID NO: 28914 - RNA, 19 nt, Artificial Sequence
  Description of Artificial Sequence: Synthetic oligonucleotide
ggccuuacuaacacaauuu

SEQ ID NO: 28915 - RNA, 19 nt, Artificial Sequence
  Description of Artificial Sequence: Synthetic oligonucleotide
cuucuuauaggagcauguu

SEQ ID NO: 28916 - RNA, 19 nt, Artificial Sequence
  Description of Artificial Sequence: Synthetic oligonucleotide
gcaagguguugugguuagg

SEQ ID NO: 28917 - RNA, 19 nt, Artificial Sequence
  Description of Artificial Sequence: Synthetic oligonucleotide
gaacuacuugugguggguu

SEQ ID NO: 28918 - RNA, 19 nt, Artificial Sequence
  Description of Artificial Sequence: Synthetic oligonucleotide
cgcuuuuauguagaccuuc

SEQ ID NO: 28919 - RNA, 19 nt, Artificial Sequence
  Description of Artificial Sequence: Synthetic oligonucleotide
ggagaccuaaauucuucuu

SEQ ID NO: 28920 - RNA, 19 nt, Artificial Sequence
  Description of Artificial Sequence: Synthetic oligonucleotide
guuaggggacagugaccua

SEQ ID NO: 28921 - RNA, 19 nt, Artificial Sequence
  Description of Artificial Sequence: Synthetic oligonucleotide
gauugggccgugacugaau

SEQ ID NO: 28922 - RNA, 19 nt, Artificial Sequence
  Description of Artificial Sequence: Synthetic oligonucleotide
accgcagguugccccuuua

SEQ ID NO: 28923 - RNA, 19 nt, Artificial Sequence
  Description of Artificial Sequence: Synthetic oligonucleotide
guugugguuaggggacagu

SEQ ID NO: 28924 - RNA, 19 nt, Artificial Sequence
  Description of Artificial Sequence: Synthetic oligonucleotide
ccgaggccauaaucaaauc

SEQ ID NO: 28925 - RNA, 19 nt, Artificial Sequence
  Description of Artificial Sequence: Synthetic oligonucleotide
acucgccgacagcacugua

SEQ ID NO: 28926 - RNA, 19 nt, Artificial Sequence
  Description of Artificial Sequence: Synthetic oligonucleotide
gaccucaacuuugcagcau

SEQ ID NO: 28927 - RNA, 19 nt, Artificial Sequence
  Description of Artificial Sequence: Synthetic oligonucleotide
gcaucguguacuaugccuu

SEQ ID NO: 28928 - RNA, 19 nt, Artificial Sequence
  Description of Artificial Sequence: Synthetic oligonucleotide
acuacccaucuuagauaua

SEQ ID NO: 28929 - RNA, 19 nt, Artificial Sequence
  Description of Artificial Sequence: Synthetic oligonucleotide
cguuccgcagcaagaauua

SEQ ID NO: 28930 - RNA, 19 nt, Artificial Sequence
  Description of Artificial Sequence: Synthetic oligonucleotide
aggguaagucggagacuua

SEQ ID NO: 28931 - RNA, 19 nt, Artificial Sequence
  Description of Artificial Sequence: Synthetic oligonucleotide
caguagcgacacuuguauu

SEQ ID NO: 28932 - RNA, 19 nt, Artificial Sequence
  Description of Artificial Sequence: Synthetic oligonucleotide
gcacaugucgucggcgucu

SEQ ID NO: 28933 - RNA, 19 nt, Artificial Sequence
  Description of Artificial Sequence: Synthetic oligonucleotide
cacacgggugggucuuacu

SEQ ID NO: 28934 - RNA, 19 nt, Artificial Sequence
  Description of Artificial Sequence: Synthetic oligonucleotide
guuccgcagcaagaauuau

SEQ ID NO: 28935 - RNA, 19 nt, Artificial Sequence
  Description of Artificial Sequence: Synthetic oligonucleotide
cccacccgugaugcaauug

SEQ ID NO: 28936 - RNA, 19 nt, Artificial Sequence
  Description of Artificial Sequence: Synthetic oligonucleotide
cucacgcgcccaucagggu

SEQ ID NO: 28937 - RNA, 19 nt, Artificial Sequence
  Description of Artificial Sequence: Synthetic oligonucleotide
cccgaggaggaucaaguuu

SEQ ID NO: 28938 - RNA, 19 nt, Artificial Sequence
  Description of Artificial Sequence: Synthetic oligonucleotide
ggcaagcagugcucuucgu

SEQ ID NO: 28939 - RNA, 19 nt, Artificial Sequence
  Description of Artificial Sequence: Synthetic oligonucleotide
gggucguaaucaucuccuu

SEQ ID NO: 28940 - RNA, 19 nt, Artificial Sequence
  Description of Artificial Sequence: Synthetic oligonucleotide
gaucugcguaggaguugau

SEQ ID NO: 28941 - RNA, 19 nt, Artificial Sequence
  Description of Artificial Sequence: Synthetic oligonucleotide
cgaagacggcccuggcaca

SEQ ID NO: 28942 - RNA, 19 nt, Artificial Sequence
  Description of Artificial Sequence: Synthetic oligonucleotide
ggcaaacguuccgcagcaa

SEQ ID NO: 28943 - RNA, 19 nt, Artificial Sequence
  Description of Artificial Sequence: Synthetic oligonucleotide
cacacgggcuagaccuauu

SEQ ID NO: 28944 - RNA, 19 nt, Artificial Sequence
  Description of Artificial Sequence: Synthetic oligonucleotide
acgcgcccaucaggguuaa

SEQ ID NO: 28945 - RNA, 19 nt, Artificial Sequence
  Description of Artificial Sequence: Synthetic oligonucleotide
ccgcagcaagaauuaugua

SEQ ID NO: 28946 - RNA, 19 nt, Artificial Sequence
  Description of Artificial Sequence: Synthetic oligonucleotide
cgauuccacgugguccuga

SEQ ID NO: 28947 - RNA, 19 nt, Artificial Sequence
  Description of Artificial Sequence: Synthetic oligonucleotide
cggagacuuagacuucauu

SEQ ID NO: 28948 - RNA, 19 nt, Artificial Sequence
  Description of Artificial Sequence: Synthetic oligonucleotide
caccgcagguugccccuuu

SEQ ID NO: 28949 - RNA, 19 nt, Artificial Sequence
  Description of Artificial Sequence: Synthetic oligonucleotide
ccggcuuauuuugggugau

SEQ ID NO: 28950 - RNA, 19 nt, Artificial Sequence
  Description of Artificial Sequence: Synthetic oligonucleotide
ccacacgggcuagaccuau

SEQ ID NO: 28951 - RNA, 19 nt, Artificial Sequence
  Description of Artificial Sequence: Synthetic oligonucleotide
ccauugcaucguguacuau

SEQ ID NO: 28952 - RNA, 19 nt, Artificial Sequence
  Description of Artificial Sequence: Synthetic oligonucleotide
ccccacccgugaugcaauu

SEQ ID NO: 28953 - RNA, 19 nt, Artificial Sequence
  Description of Artificial Sequence: Synthetic oligonucleotide
gcaccgcagguugccccuu

SEQ ID NO: 28954 - RNA, 19 nt, Artificial Sequence
  Description of Artificial Sequence: Synthetic oligonucleotide
cgcgcccaucaggguuaau

SEQ ID NO: 28955 - RNA, 19 nt, Artificial Sequence
  Description of Artificial Sequence: Synthetic oligonucleotide
auauauaauauauauauac

SEQ ID NO: 28956 - RNA, 19 nt, Artificial Sequence
  Description of Artificial Sequence: Synthetic oligonucleotide
uuaauuggaaucaagauug

SEQ ID NO: 28957 - RNA, 19 nt, Artificial Sequence
  Description of Artificial Sequence: Synthetic oligonucleotide
auauaugagauccacaccc

SEQ ID NO: 28958 - RNA, 19 nt, Artificial Sequence
  Description of Artificial Sequence: Synthetic oligonucleotide
auauaauauauauauacac

SEQ ID NO: 28959 - RNA, 19 nt, Artificial Sequence
  Description of Artificial Sequence: Synthetic oligonucleotide
aauuacgugagcuuuaauc

SEQ ID NO: 28960 - RNA, 19 nt, Artificial Sequence
  Description of Artificial Sequence: Synthetic oligonucleotide
aagguuaggaaccaguggc

SEQ ID NO: 28961 - RNA, 19 nt, Artificial Sequence
  Description of Artificial Sequence: Synthetic oligonucleotide
auauauaugagauccacac

SEQ ID NO: 28962 - RNA, 19 nt, Artificial Sequence
  Description of Artificial Sequence: Synthetic oligonucleotide
aauaaugacuagcaaaauc

SEQ ID NO: 28963 - RNA, 19 nt, Artificial Sequence
  Description of Artificial Sequence: Synthetic oligonucleotide
auuaccaacagauagcuag

SEQ ID NO: 28964 - RNA, 19 nt, Artificial Sequence
  Description of Artificial Sequence: Synthetic oligonucleotide
agaaauauaacaaucucgc

SEQ ID NO: 28965 - RNA, 19 nt, Artificial Sequence
  Description of Artificial Sequence: Synthetic oligonucleotide
uauaauauauauauacaca

SEQ ID NO: 28966 - RNA, 19 nt, Artificial Sequence
  Description of Artificial Sequence: Synthetic oligonucleotide
aaaacaaucccugugauca

SEQ ID NO: 28967 - RNA, 19 nt, Artificial Sequence
  Description of Artificial Sequence: Synthetic oligonucleotide
uucaguauuaccaacagau

SEQ ID NO: 28968 - RNA, 19 nt, Artificial Sequence
  Description of Artificial Sequence: Synthetic oligonucleotide
uauauaauauauauauaca

SEQ ID NO: 28969 - RNA, 19 nt, Artificial Sequence
  Description of Artificial Sequence: Synthetic oligonucleotide
uuauuaauuggaaucaaga

SEQ ID NO: 28970 - RNA, 19 nt, Artificial Sequence
  Description of Artificial Sequence: Synthetic oligonucleotide
uauggauaagcacagcagg

SEQ ID NO: 28971 - RNA, 19 nt, Artificial Sequence
  Description of Artificial Sequence: Synthetic oligonucleotide
aaagguacccuauuccagg

SEQ ID NO: 28972 - RNA, 19 nt, Artificial Sequence
  Description of Artificial Sequence: Synthetic oligonucleotide
cagaaauauaacaaucucg

SEQ ID NO: 28973 - RNA, 19 nt, Artificial Sequence
  Description of Artificial Sequence: Synthetic oligonucleotide
auuuagacauuugacacgc

SEQ ID NO: 28974 - RNA, 19 nt, Artificial Sequence
  Description of Artificial Sequence: Synthetic oligonucleotide
aucuauauauaauauauau

SEQ ID NO: 28975 - RNA, 19 nt, Artificial Sequence
  Description of Artificial Sequence: Synthetic oligonucleotide
caggcauugacauauacgc

SEQ ID NO: 28976 - RNA, 19 nt, Artificial Sequence
  Description of Artificial Sequence: Synthetic oligonucleotide
cacaauagcauguugcacg

SEQ ID NO: 28977 - RNA, 19 nt, Artificial Sequence
  Description of Artificial Sequence: Synthetic oligonucleotide
agacauuugacacgcgucc

SEQ ID NO: 28978 - RNA, 19 nt, Artificial Sequence
  Description of Artificial Sequence: Synthetic oligonucleotide
auuacgugagcuuuaauca

SEQ ID NO: 28979 - RNA, 19 nt, Artificial Sequence
  Description of Artificial Sequence: Synthetic oligonucleotide
uguagaauuuucuagcuaa

SEQ ID NO: 28980 - RNA, 19 nt, Artificial Sequence
  Description of Artificial Sequence: Synthetic oligonucleotide
ucaauuaucaugucuauuu

SEQ ID NO: 28981 - RNA, 19 nt, Artificial Sequence
  Description of Artificial Sequence: Synthetic oligonucleotide
aaaguuucaugcaaacugg

SEQ ID NO: 28982 - RNA, 19 nt, Artificial Sequence
  Description of Artificial Sequence: Synthetic oligonucleotide
uuauggauaagcacagcag

SEQ ID NO: 28983 - RNA, 19 nt, Artificial Sequence
  Description of Artificial Sequence: Synthetic oligonucleotide
cuauauauaauauauauau

SEQ ID NO: 28984 - RNA, 19 nt, Artificial Sequence
  Description of Artificial Sequence: Synthetic oligonucleotide
agaaacaccugucacagug

SEQ ID NO: 28985 - RNA, 19 nt, Artificial Sequence
  Description of Artificial Sequence: Synthetic oligonucleotide
aauacagcuuauacaaugg

SEQ ID NO: 28986 - RNA, 19 nt, Artificial Sequence
  Description of Artificial Sequence: Synthetic oligonucleotide
uccaugauguuucauaagu

SEQ ID NO: 28987 - RNA, 19 nt, Artificial Sequence
  Description of Artificial Sequence: Synthetic oligonucleotide
aguauuaccaacagauagc

SEQ ID NO: 28988 - RNA, 19 nt, Artificial Sequence
  Description of Artificial Sequence: Synthetic oligonucleotide
auuaauuggaaucaagauu

SEQ ID NO: 28989 - RNA, 19 nt, Artificial Sequence
  Description of Artificial Sequence: Synthetic oligonucleotide
auaccccuguauuugaccc

SEQ ID NO: 28990 - RNA, 19 nt, Artificial Sequence
  Description of Artificial Sequence: Synthetic oligonucleotide
auuguggaggaucuuaaag

SEQ ID NO: 28991 - RNA, 19 nt, Artificial Sequence
  Description of Artificial Sequence: Synthetic oligonucleotide
ucuauauauaauauauaua

SEQ ID NO: 28992 - RNA, 19 nt, Artificial Sequence
  Description of Artificial Sequence: Synthetic oligonucleotide
aauaagagagacauagcug

SEQ ID NO: 28993 - RNA, 19 nt, Artificial Sequence
  Description of Artificial Sequence: Synthetic oligonucleotide
uauuaauuggaaucaagau

SEQ ID NO: 28994 - RNA, 19 nt, Artificial Sequence
  Description of Artificial Sequence: Synthetic oligonucleotide
uucauaagugagacgagcc

SEQ ID NO: 28995 - RNA, 19 nt, Artificial Sequence
  Description of Artificial Sequence: Synthetic oligonucleotide
uucgugaacaaucuguagu

SEQ ID NO: 28996 - RNA, 19 nt, Artificial Sequence
  Description of Artificial Sequence: Synthetic oligonucleotide
agauauuccaguaaggcug

SEQ ID NO: 28997 - RNA, 19 nt, Artificial Sequence
  Description of Artificial Sequence: Synthetic oligonucleotide
uacuuaauggaauuguuau

SEQ ID NO: 28998 - RNA, 19 nt, Artificial Sequence
  Description of Artificial Sequence: Synthetic oligonucleotide
aauggguuacaaaugagcu

SEQ ID NO: 28999 - RNA, 19 nt, Artificial Sequence
  Description of Artificial Sequence: Synthetic oligonucleotide
uauauaugagauccacacc

SEQ ID NO: 29000 - RNA, 19 nt, Artificial Sequence
  Description of Artificial Sequence: Synthetic oligonucleotide
uucaggaaaugauugguug

SEQ ID NO: 29001 - RNA, 19 nt, Artificial Sequence
  Description of Artificial Sequence: Synthetic oligonucleotide
uuucccuauuuuaacacug

SEQ ID NO: 29002 - RNA, 19 nt, Artificial Sequence
  Description of Artificial Sequence: Synthetic oligonucleotide
acauauacgcacccagccc

SEQ ID NO: 29003 - RNA, 19 nt, Artificial Sequence
  Description of Artificial Sequence: Synthetic oligonucleotide
agagccgagaaguagcccg

SEQ ID NO: 29004 - RNA, 19 nt, Artificial Sequence
  Description of Artificial Sequence: Synthetic oligonucleotide
ugaucuguacaauugugca

SEQ ID NO: 29005 - RNA, 19 nt, Artificial Sequence
  Description of Artificial Sequence: Synthetic oligonucleotide
gaugcuacacauugggagc

SEQ ID NO: 29006 - RNA, 19 nt, Artificial Sequence
  Description of Artificial Sequence: Synthetic oligonucleotide
guaaauuuggucgugggug

SEQ ID NO: 29007 - RNA, 19 nt, Artificial Sequence
  Description of Artificial Sequence: Synthetic oligonucleotide
uauauauaauauauauaua

SEQ ID NO: 29008 - RNA, 19 nt, Artificial Sequence
  Description of Artificial Sequence: Synthetic oligonucleotide
gaagguuaggaaccagugg

SEQ ID NO: 29009 - RNA, 19 nt, Artificial Sequence
  Description of Artificial Sequence: Synthetic oligonucleotide
gaaucaagauuggagaccc

SEQ ID NO: 29010 - RNA, 19 nt, Artificial Sequence
  Description of Artificial Sequence: Synthetic oligonucleotide
aaaagcugggagaaucuac

SEQ ID NO: 29011 - RNA, 19 nt, Artificial Sequence
  Description of Artificial Sequence: Synthetic oligonucleotide
gacauauacgcacccagcc

SEQ ID NO: 29012 - RNA, 19 nt, Artificial Sequence
  Description of Artificial Sequence: Synthetic oligonucleotide
cuuggaauacuccucacac

SEQ ID NO: 29013 - RNA, 19 nt, Artificial Sequence
  Description of Artificial Sequence: Synthetic oligonucleotide
aucagagguaaauuugguc

SEQ ID NO: 29014 - RNA, 19 nt, Artificial Sequence
  Description of Artificial Sequence: Synthetic oligonucleotide
ugcgguaugccaauuccgg

SEQ ID NO: 29015 - RNA, 19 nt, Artificial Sequence
  Description of Artificial Sequence: Synthetic oligonucleotide
uuagacauuugacacgcgu

SEQ ID NO: 29016 - RNA, 19 nt, Artificial Sequence
  Description of Artificial Sequence: Synthetic oligonucleotide
acauacagucaucccaccc

SEQ ID NO: 29017 - RNA, 19 nt, Artificial Sequence
  Description of Artificial Sequence: Synthetic oligonucleotide
aaacaccugucacagugag

SEQ ID NO: 29018 - RNA, 19 nt, Artificial Sequence
  Description of Artificial Sequence: Synthetic oligonucleotide
accgaaaaugucuucagca

SEQ ID NO: 29019 - RNA, 19 nt, Artificial Sequence
  Description of Artificial Sequence: Synthetic oligonucleotide
aguacguugaugugcuuuc

SEQ ID NO: 29020 - RNA, 19 nt, Artificial Sequence
  Description of Artificial Sequence: Synthetic oligonucleotide
cauauacgcacccagcccc

SEQ ID NO: 29021 - RNA, 19 nt, Artificial Sequence
  Description of Artificial Sequence: Synthetic oligonucleotide
ugcaaaacgccacucacaa

SEQ ID NO: 29022 - RNA, 19 nt, Artificial Sequence
  Description of Artificial Sequence: Synthetic oligonucleotide
cuaauguggcauuagacca

SEQ ID NO: 29023 - RNA, 19 nt, Artificial Sequence
  Description of Artificial Sequence: Synthetic oligonucleotide
gaagauagcguuccaacuc

SEQ ID NO: 29024 - RNA, 19 nt, Artificial Sequence
  Description of Artificial Sequence: Synthetic oligonucleotide
agagccuuaauuaagcaug

SEQ ID NO: 29025 - RNA, 19 nt, Artificial Sequence
  Description of Artificial Sequence: Synthetic oligonucleotide
uaugaaggucaacagugca

SEQ ID NO: 29026 - RNA, 19 nt, Artificial Sequence
  Description of Artificial Sequence: Synthetic oligonucleotide
ugugaguacguugaugugc

SEQ ID NO: 29027 - RNA, 19 nt, Artificial Sequence
  Description of Artificial Sequence: Synthetic oligonucleotide
uguagagaaauguauucau

SEQ ID NO: 29028 - RNA, 19 nt, Artificial Sequence
  Description of Artificial Sequence: Synthetic oligonucleotide
aggucaacagugcauuaac

SEQ ID NO: 29029 - RNA, 19 nt, Artificial Sequence
  Description of Artificial Sequence: Synthetic oligonucleotide
cuugcaguuauuugcuacc

SEQ ID NO: 29030 - RNA, 19 nt, Artificial Sequence
  Description of Artificial Sequence: Synthetic oligonucleotide
agaaacaucagcugucuau

SEQ ID NO: 29031 - RNA, 19 nt, Artificial Sequence
  Description of Artificial Sequence: Synthetic oligonucleotide
ugauccacccgacugagaa

SEQ ID NO: 29032 - RNA, 19 nt, Artificial Sequence
  Description of Artificial Sequence: Synthetic oligonucleotide
ucauaagugagacgagcca

SEQ ID NO: 29033 - RNA, 19 nt, Artificial Sequence
  Description of Artificial Sequence: Synthetic oligonucleotide
ucuuacuuaauggaauugu

SEQ ID NO: 29034 - RNA, 19 nt, Artificial Sequence
  Description of Artificial Sequence: Synthetic oligonucleotide
uuagauaacagggugcuua

SEQ ID NO: 29035 - RNA, 19 nt, Artificial Sequence
  Description of Artificial Sequence: Synthetic oligonucleotide
aagagccuuaauuaagcau

SEQ ID NO: 29036 - RNA, 19 nt, Artificial Sequence
  Description of Artificial Sequence: Synthetic oligonucleotide
gugaacaaucuguaguucc

SEQ ID NO: 29037 - RNA, 19 nt, Artificial Sequence
  Description of Artificial Sequence: Synthetic oligonucleotide
aaaccuuugugugugugug

SEQ ID NO: 29038 - RNA, 19 nt, Artificial Sequence
  Description of Artificial Sequence: Synthetic oligonucleotide
accuauuugucauugugga

SEQ ID NO: 29039 - RNA, 19 nt, Artificial Sequence
  Description of Artificial Sequence: Synthetic oligonucleotide
gcaggugaaaguuucaugc

SEQ ID NO: 29040 - RNA, 19 nt, Artificial Sequence
  Description of Artificial Sequence: Synthetic oligonucleotide
cucgcugucgggaaaacag

SEQ ID NO: 29041 - RNA, 19 nt, Artificial Sequence
  Description of Artificial Sequence: Synthetic oligonucleotide
uaucuauauauaauauaua

SEQ ID NO: 29042 - RNA, 19 nt, Artificial Sequence
  Description of Artificial Sequence: Synthetic oligonucleotide
ucugguuaauucaucacuu

SEQ ID NO: 29043 - RNA, 19 nt, Artificial Sequence
  Description of Artificial Sequence: Synthetic oligonucleotide
ugguugucaacucaucccu

SEQ ID NO: 29044 - RNA, 19 nt, Artificial Sequence
  Description of Artificial Sequence: Synthetic oligonucleotide
aacaccgaaaaugucuuca

SEQ ID NO: 29045 - RNA, 19 nt, Artificial Sequence
  Description of Artificial Sequence: Synthetic oligonucleotide
acgguuucuaagcuuagug

SEQ ID NO: 29046 - RNA, 19 nt, Artificial Sequence
  Description of Artificial Sequence: Synthetic oligonucleotide
ggaauuguuauggauaagc

SEQ ID NO: 29047 - RNA, 19 nt, Artificial Sequence
  Description of Artificial Sequence: Synthetic oligonucleotide
ccuaauguggcauuagacc

SEQ ID NO: 29048 - RNA, 19 nt, Artificial Sequence
  Description of Artificial Sequence: Synthetic oligonucleotide
uauuugucauuguggagga

SEQ ID NO: 29049 - RNA, 19 nt, Artificial Sequence
  Description of Artificial Sequence: Synthetic oligonucleotide
cuuaacacucaccacuaug

SEQ ID NO: 29050 - RNA, 19 nt, Artificial Sequence
  Description of Artificial Sequence: Synthetic oligonucleotide
guauacuuucaguauuacc

SEQ ID NO: 29051 - RNA, 19 nt, Artificial Sequence
  Description of Artificial Sequence: Synthetic oligonucleotide
ugacauauacgcacccagc

SEQ ID NO: 29052 - RNA, 19 nt, Artificial Sequence
  Description of Artificial Sequence: Synthetic oligonucleotide
ucaacaggguggaauagaa

SEQ ID NO: 29053 - RNA, 19 nt, Artificial Sequence
  Description of Artificial Sequence: Synthetic oligonucleotide
uuucgugaacaaucuguag

SEQ ID NO: 29054 - RNA, 19 nt, Artificial Sequence
  Description of Artificial Sequence: Synthetic oligonucleotide
uauaagggaaaaugaccac

SEQ ID NO: 29055 - RNA, 19 nt, Artificial Sequence
  Description of Artificial Sequence: Synthetic oligonucleotide
aaacaauuacgugagcuuu

SEQ ID NO: 29056 - RNA, 19 nt, Artificial Sequence
  Description of Artificial Sequence: Synthetic oligonucleotide
aaagcugggagaaucuaca

SEQ ID NO: 29057 - RNA, 19 nt, Artificial Sequence
  Description of Artificial Sequence: Synthetic oligonucleotide
agaaguagcccguuucgug

SEQ ID NO: 29058 - RNA, 19 nt, Artificial Sequence
  Description of Artificial Sequence: Synthetic oligonucleotide
auacuccucacacacaaaa

SEQ ID NO: 29059 - RNA, 19 nt, Artificial Sequence
  Description of Artificial Sequence: Synthetic oligonucleotide
cauaagugagacgagccag

SEQ ID NO: 29060 - RNA, 19 nt, Artificial Sequence
  Description of Artificial Sequence: Synthetic oligonucleotide
caaagguacccuauuccag

SEQ ID NO: 29061 - RNA, 19 nt, Artificial Sequence
  Description of Artificial Sequence: Synthetic oligonucleotide
acauucuauagcugcacca

SEQ ID NO: 29062 - RNA, 19 nt, Artificial Sequence
  Description of Artificial Sequence: Synthetic oligonucleotide
ugcaugagaaaacgguuuc

SEQ ID NO: 29063 - RNA, 19 nt, Artificial Sequence
  Description of Artificial Sequence: Synthetic oligonucleotide
uuugacacgcguccaauuu

SEQ ID NO: 29064 - RNA, 19 nt, Artificial Sequence
  Description of Artificial Sequence: Synthetic oligonucleotide
agagagacauagcugcaug

SEQ ID NO: 29065 - RNA, 19 nt, Artificial Sequence
  Description of Artificial Sequence: Synthetic oligonucleotide
gguggaauagaaucaacac

SEQ ID NO: 29066 - RNA, 19 nt, Artificial Sequence
  Description of Artificial Sequence: Synthetic oligonucleotide
ggcauugacauauacgcac

SEQ ID NO: 29067 - RNA, 19 nt, Artificial Sequence
  Description of Artificial Sequence: Synthetic oligonucleotide
cuuugugugugugugaguc

SEQ ID NO: 29068 - RNA, 19 nt, Artificial Sequence
  Description of Artificial Sequence: Synthetic oligonucleotide
ugggagaaucuacaugcug

SEQ ID NO: 29069 - RNA, 19 nt, Artificial Sequence
  Description of Artificial Sequence: Synthetic oligonucleotide
ugauugguugucaacucau

SEQ ID NO: 29070 - RNA, 19 nt, Artificial Sequence
  Description of Artificial Sequence: Synthetic oligonucleotide
ugaacagaauguacuugcu

SEQ ID NO: 29071 - RNA, 19 nt, Artificial Sequence
  Description of Artificial Sequence: Synthetic oligonucleotide
acguugaugugcuuucaag

SEQ ID NO: 29072 - RNA, 19 nt, Artificial Sequence
  Description of Artificial Sequence: Synthetic oligonucleotide
gaauuguuauggauaagca

SEQ ID NO: 29073 - RNA, 19 nt, Artificial Sequence
  Description of Artificial Sequence: Synthetic oligonucleotide
uaugccgcuucugacauga

SEQ ID NO: 29074 - RNA, 19 nt, Artificial Sequence
  Description of Artificial Sequence: Synthetic oligonucleotide
aucccacccauuaacauuc

SEQ ID NO: 29075 - RNA, 19 nt, Artificial Sequence
  Description of Artificial Sequence: Synthetic oligonucleotide
uuagaccaguaauuuccag

SEQ ID NO: 29076 - RNA, 19 nt, Artificial Sequence
  Description of Artificial Sequence: Synthetic oligonucleotide
uagcauguugcacggggag

SEQ ID NO: 29077 - RNA, 19 nt, Artificial Sequence
  Description of Artificial Sequence: Synthetic oligonucleotide
uccgggaaaguacuccuug

SEQ ID NO: 29078 - RNA, 19 nt, Artificial Sequence
  Description of Artificial Sequence: Synthetic oligonucleotide
uuuccugaacugacuaaga

SEQ ID NO: 29079 - RNA, 19 nt, Artificial Sequence
  Description of Artificial Sequence: Synthetic oligonucleotide
ugucggguuggaaaagaca

SEQ ID NO: 29080 - RNA, 19 nt, Artificial Sequence
  Description of Artificial Sequence: Synthetic oligonucleotide
caucgauguacccuccucc

SEQ ID NO: 29081 - RNA, 19 nt, Artificial Sequence
  Description of Artificial Sequence: Synthetic oligonucleotide
auggauaagcacagcaggg

SEQ ID NO: 29082 - RNA, 19 nt, Artificial Sequence
  Description of Artificial Sequence: Synthetic oligonucleotide
accgguaugcuuccggaag

SEQ ID NO: 29083 - RNA, 19 nt, Artificial Sequence
  Description of Artificial Sequence: Synthetic oligonucleotide
uuuagacauuugacacgcg

SEQ ID NO: 29084 - RNA, 19 nt, Artificial Sequence
  Description of Artificial Sequence: Synthetic oligonucleotide
ucgcugucgggaaaacagg

SEQ ID NO: 29085 - RNA, 19 nt, Artificial Sequence
  Description of Artificial Sequence: Synthetic oligonucleotide
ugcuaugccgcuucugaca

SEQ ID NO: 29086 - RNA, 19 nt, Artificial Sequence
  Description of Artificial Sequence: Synthetic oligonucleotide
ugacacgcguccaauuucu

SEQ ID NO: 29087 - RNA, 19 nt, Artificial Sequence
  Description of Artificial Sequence: Synthetic oligonucleotide
cauaccccuguauuugacc

SEQ ID NO: 29088 - RNA, 19 nt, Artificial Sequence
  Description of Artificial Sequence: Synthetic oligonucleotide
agccccauaguugagaaga

SEQ ID NO: 29089 - RNA, 19 nt, Artificial Sequence
  Description of Artificial Sequence: Synthetic oligonucleotide
guccucaaggcauaaauaa

SEQ ID NO: 29090 - RNA, 19 nt, Artificial Sequence
  Description of Artificial Sequence: Synthetic oligonucleotide
cuuagugguuugauccacc

SEQ ID NO: 29091 - RNA, 19 nt, Artificial Sequence
  Description of Artificial Sequence: Synthetic oligonucleotide
uucccuauuuuaacacuga

SEQ ID NO: 29092 - RNA, 19 nt, Artificial Sequence
  Description of Artificial Sequence: Synthetic oligonucleotide
ggaucagagguaaauuugg

SEQ ID NO: 29093 - RNA, 19 nt, Artificial Sequence
  Description of Artificial Sequence: Synthetic oligonucleotide
uguuuaccuucuuacuuaa

SEQ ID NO: 29094 - RNA, 19 nt, Artificial Sequence
  Description of Artificial Sequence: Synthetic oligonucleotide
ucaacucaucccuuggaau

SEQ ID NO: 29095 - RNA, 19 nt, Artificial Sequence
  Description of Artificial Sequence: Synthetic oligonucleotide
ucaguauuaccaacagaua

SEQ ID NO: 29096 - RNA, 19 nt, Artificial Sequence
  Description of Artificial Sequence: Synthetic oligonucleotide
auguuucauaagugagacg

SEQ ID NO: 29097 - RNA, 19 nt, Artificial Sequence
  Description of Artificial Sequence: Synthetic oligonucleotide
uuggaauacuccucacaca

SEQ ID NO: 29098 - RNA, 19 nt, Artificial Sequence
  Description of Artificial Sequence: Synthetic oligonucleotide
uacuuucaguauuaccaac

SEQ ID NO: 29099 - RNA, 19 nt, Artificial Sequence
  Description of Artificial Sequence: Synthetic oligonucleotide
ugucugguuaauucaucac

SEQ ID NO: 29100 - RNA, 19 nt, Artificial Sequence
  Description of Artificial Sequence: Synthetic oligonucleotide
uggcauuagaccaguaauu

SEQ ID NO: 29101 - RNA, 19 nt, Artificial Sequence
  Description of Artificial Sequence: Synthetic oligonucleotide
uuugugugugugugagucc

SEQ ID NO: 29102 - RNA, 19 nt, Artificial Sequence
  Description of Artificial Sequence: Synthetic oligonucleotide
uagauaacagggugcuuac

SEQ ID NO: 29103 - RNA, 19 nt, Artificial Sequence
  Description of Artificial Sequence: Synthetic oligonucleotide
gagcccacgcaauauuuug

SEQ ID NO: 29104 - RNA, 19 nt, Artificial Sequence
  Description of Artificial Sequence: Synthetic oligonucleotide
acuggauggcgcugcaauc

SEQ ID NO: 29105 - RNA, 19 nt, Artificial Sequence
  Description of Artificial Sequence: Synthetic oligonucleotide
aauaaaagauaaagccuuu

SEQ ID NO: 29106 - RNA, 19 nt, Artificial Sequence
  Description of Artificial Sequence: Synthetic oligonucleotide
uugagaagauucccuguuc

SEQ ID NO: 29107 - RNA, 19 nt, Artificial Sequence
  Description of Artificial Sequence: Synthetic oligonucleotide
guuaggaaccaguggcgag

SEQ ID NO: 29108 - RNA, 19 nt, Artificial Sequence
  Description of Artificial Sequence: Synthetic oligonucleotide
uugugugugugugagucca

SEQ ID NO: 29109 - RNA, 19 nt, Artificial Sequence
  Description of Artificial Sequence: Synthetic oligonucleotide
ugucuugccaggccuaaau

SEQ ID NO: 29110 - RNA, 19 nt, Artificial Sequence
  Description of Artificial Sequence: Synthetic oligonucleotide
ucaugguagcagaauuagu

SEQ ID NO: 29111 - RNA, 19 nt, Artificial Sequence
  Description of Artificial Sequence: Synthetic oligonucleotide
cacauucuauagcugcacc

SEQ ID NO: 29112 - RNA, 19 nt, Artificial Sequence
  Description of Artificial Sequence: Synthetic oligonucleotide
auacaguacaaugccaggu

SEQ ID NO: 29113 - RNA, 19 nt, Artificial Sequence
  Description of Artificial Sequence: Synthetic oligonucleotide
ucaagauuggagacccgau

SEQ ID NO: 29114 - RNA, 19 nt, Artificial Sequence
  Description of Artificial Sequence: Synthetic oligonucleotide
cacggcaaaaggcucuggg

SEQ ID NO: 29115 - RNA, 19 nt, Artificial Sequence
  Description of Artificial Sequence: Synthetic oligonucleotide
aaaccagaauuaguccuca

SEQ ID NO: 29116 - RNA, 19 nt, Artificial Sequence
  Description of Artificial Sequence: Synthetic oligonucleotide
cuguguagccaguaaaaca

SEQ ID NO: 29117 - RNA, 19 nt, Artificial Sequence
  Description of Artificial Sequence: Synthetic oligonucleotide
acagcggacugacugcaag

SEQ ID NO: 29118 - RNA, 19 nt, Artificial Sequence
  Description of Artificial Sequence: Synthetic oligonucleotide
gaaguggcaucgauguacc

SEQ ID NO: 29119 - RNA, 19 nt, Artificial Sequence
  Description of Artificial Sequence: Synthetic oligonucleotide
uggcgcugcaaucggacgc

SEQ ID NO: 29120 - RNA, 19 nt, Artificial Sequence
  Description of Artificial Sequence: Synthetic oligonucleotide
uugacacgcguccaauuuc

SEQ ID NO: 29121 - RNA, 19 nt, Artificial Sequence
  Description of Artificial Sequence: Synthetic oligonucleotide
cugcgguaugccaauuccg

SEQ ID NO: 29122 - RNA, 19 nt, Artificial Sequence
  Description of Artificial Sequence: Synthetic oligonucleotide
uuucuaagcuuagugguuu

SEQ ID NO: 29123 - RNA, 19 nt, Artificial Sequence
  Description of Artificial Sequence: Synthetic oligonucleotide
guugacaugucaaaggagu

SEQ ID NO: 29124 - RNA, 19 nt, Artificial Sequence
  Description of Artificial Sequence: Synthetic oligonucleotide
ugggugaaaguuccucaga

SEQ ID NO: 29125 - RNA, 19 nt, Artificial Sequence
  Description of Artificial Sequence: Synthetic oligonucleotide
aucaagauuggagacccga

SEQ ID NO: 29126 - RNA, 19 nt, Artificial Sequence
  Description of Artificial Sequence: Synthetic oligonucleotide
auacacccuacacugcaca

SEQ ID NO: 29127 - RNA, 19 nt, Artificial Sequence
  Description of Artificial Sequence: Synthetic oligonucleotide
uugacaugucaaaggaguu

SEQ ID NO: 29128 - RNA, 19 nt, Artificial Sequence
  Description of Artificial Sequence: Synthetic oligonucleotide
agcggacugacugcaagcg

SEQ ID NO: 29129 - RNA, 19 nt, Artificial Sequence
  Description of Artificial Sequence: Synthetic oligonucleotide
gguacucaaaacuuggugu

SEQ ID NO: 29130 - RNA, 19 nt, Artificial Sequence
  Description of Artificial Sequence: Synthetic oligonucleotide
uacgugagcuuuaaucauu

SEQ ID NO: 29131 - RNA, 19 nt, Artificial Sequence
  Description of Artificial Sequence: Synthetic oligonucleotide
accuuugugugugugugag

SEQ ID NO: 29132 - RNA, 19 nt, Artificial Sequence
  Description of Artificial Sequence: Synthetic oligonucleotide
cacgcguccaauuucuuca

SEQ ID NO: 29133 - RNA, 19 nt, Artificial Sequence
  Description of Artificial Sequence: Synthetic oligonucleotide
aucgauguacccuccuccu

SEQ ID NO: 29134 - RNA, 19 nt, Artificial Sequence
  Description of Artificial Sequence: Synthetic oligonucleotide
aaggucucuaaaagagucu

SEQ ID NO: 29135 - RNA, 19 nt, Artificial Sequence
  Description of Artificial Sequence: Synthetic oligonucleotide
aaccuuuguguguguguga

SEQ ID NO: 29136 - RNA, 19 nt, Artificial Sequence
  Description of Artificial Sequence: Synthetic oligonucleotide
caugguagcagaauuaguu

SEQ ID NO: 29137 - RNA, 19 nt, Artificial Sequence
  Description of Artificial Sequence: Synthetic oligonucleotide
ugccaaacaaaagugcauu

SEQ ID NO: 29138 - RNA, 19 nt, Artificial Sequence
  Description of Artificial Sequence: Synthetic oligonucleotide
ggaaucaagauuggagacc

SEQ ID NO: 29139 - RNA, 19 nt, Artificial Sequence
  Description of Artificial Sequence: Synthetic oligonucleotide
auaugagauccacacccaa

SEQ ID NO: 29140 - RNA, 19 nt, Artificial Sequence
  Description of Artificial Sequence: Synthetic oligonucleotide
agccuaauguggcauuaga

SEQ ID NO: 29141 - RNA, 19 nt, Artificial Sequence
  Description of Artificial Sequence: Synthetic oligonucleotide
cacuucgaaccuucccugg

SEQ ID NO: 29142 - RNA, 19 nt, Artificial Sequence
  Description of Artificial Sequence: Synthetic oligonucleotide
uggucgugggugaaaguuc

SEQ ID NO: 29143 - RNA, 19 nt, Artificial Sequence
  Description of Artificial Sequence: Synthetic oligonucleotide
aaaacgccacucacaaccu

SEQ ID NO: 29144 - RNA, 19 nt, Artificial Sequence
  Description of Artificial Sequence: Synthetic oligonucleotide
agguuaggaaccaguggcg

SEQ ID NO: 29145 - RNA, 19 nt, Artificial Sequence
  Description of Artificial Sequence: Synthetic oligonucleotide
auggcgcugcaaucggacg

SEQ ID NO: 29146 - RNA, 19 nt, Artificial Sequence
  Description of Artificial Sequence: Synthetic oligonucleotide
aaguagcccguuucgugaa

SEQ ID NO: 29147 - RNA, 19 nt, Artificial Sequence
  Description of Artificial Sequence: Synthetic oligonucleotide
aguagcccguuucgugaac

SEQ ID NO: 29148 - RNA, 19 nt, Artificial Sequence
  Description of Artificial Sequence: Synthetic oligonucleotide
aaacagggaggagagcgau

SEQ ID NO: 29149 - RNA, 19 nt, Artificial Sequence
  Description of Artificial Sequence: Synthetic oligonucleotide
aacgguuucuaagcuuagu

SEQ ID NO: 29150 - RNA, 19 nt, Artificial Sequence
  Description of Artificial Sequence: Synthetic oligonucleotide
guauuaccaacagauagcu

SEQ ID NO: 29151 - RNA, 19 nt, Artificial Sequence
  Description of Artificial Sequence: Synthetic oligonucleotide
acuucgaaccuucccuggu

SEQ ID NO: 29152 - RNA, 19 nt, Artificial Sequence
  Description of Artificial Sequence: Synthetic oligonucleotide
ugugugugugugaguccag

SEQ ID NO: 29153 - RNA, 19 nt, Artificial Sequence
  Description of Artificial Sequence: Synthetic oligonucleotide
auuugaccccacagaaggg

SEQ ID NO: 29154 - RNA, 19 nt, Artificial Sequence
  Description of Artificial Sequence: Synthetic oligonucleotide
ugcaaucggacgccggguc

SEQ ID NO: 29155 - RNA, 19 nt, Artificial Sequence
  Description of Artificial Sequence: Synthetic oligonucleotide
agcauaucaagugcuugga

SEQ ID NO: 29156 - RNA, 19 nt, Artificial Sequence
  Description of Artificial Sequence: Synthetic oligonucleotide
ugacaugucaaaggaguuu

SEQ ID NO: 29157 - RNA, 19 nt, Artificial Sequence
  Description of Artificial Sequence: Synthetic oligonucleotide
cuguuuaccuucuuacuua

SEQ ID NO: 29158 - RNA, 19 nt, Artificial Sequence
  Description of Artificial Sequence: Synthetic oligonucleotide
ucgaaccuucccuggugag

SEQ ID NO: 29159 - RNA, 19 nt, Artificial Sequence
  Description of Artificial Sequence: Synthetic oligonucleotide
cuucgaaccuucccuggug

SEQ ID NO: 29160 - RNA, 19 nt, Artificial Sequence
  Description of Artificial Sequence: Synthetic oligonucleotide
aucaacaggguggaauaga

SEQ ID NO: 29161 - RNA, 19 nt, Artificial Sequence
  Description of Artificial Sequence: Synthetic oligonucleotide
acauuugacacgcguccaa

SEQ ID NO: 29162 - RNA, 19 nt, Artificial Sequence
  Description of Artificial Sequence: Synthetic oligonucleotide
ggccuaaauggcuuaagga

SEQ ID NO: 29163 - RNA, 19 nt, Artificial Sequence
  Description of Artificial Sequence: Synthetic oligonucleotide
gcugcaaucggacgccggg

SEQ ID NO: 29164 - RNA, 19 nt, Artificial Sequence
  Description of Artificial Sequence: Synthetic oligonucleotide
gucaacucaucccuuggaa

SEQ ID NO: 29165 - RNA, 19 nt, Artificial Sequence
  Description of Artificial Sequence: Synthetic oligonucleotide
agagguaaauuuggucgug

SEQ ID NO: 29166 - RNA, 19 nt, Artificial Sequence
  Description of Artificial Sequence: Synthetic oligonucleotide
ugguuugauccacccgacu

SEQ ID NO: 29167 - RNA, 19 nt, Artificial Sequence
  Description of Artificial Sequence: Synthetic oligonucleotide
ugcucacggcaaaaggcuc

SEQ ID NO: 29168 - RNA, 19 nt, Artificial Sequence
  Description of Artificial Sequence: Synthetic oligonucleotide
accaguggcgaggcgaguc

SEQ ID NO: 29169 - RNA, 19 nt, Artificial Sequence
  Description of Artificial Sequence: Synthetic oligonucleotide
auccacccgacugagaaaa

SEQ ID NO: 29170 - RNA, 19 nt, Artificial Sequence
  Description of Artificial Sequence: Synthetic oligonucleotide
ggugcuaugccgcuucuga

SEQ ID NO: 29171 - RNA, 19 nt, Artificial Sequence
  Description of Artificial Sequence: Synthetic oligonucleotide
augcucacggcaaaaggcu

SEQ ID NO: 29172 - RNA, 19 nt, Artificial Sequence
  Description of Artificial Sequence: Synthetic oligonucleotide
guugcauaaggcaccauua

SEQ ID NO: 29173 - RNA, 19 nt, Artificial Sequence
  Description of Artificial Sequence: Synthetic oligonucleotide
gaacugacuaagacuucac

SEQ ID NO: 29174 - RNA, 19 nt, Artificial Sequence
  Description of Artificial Sequence: Synthetic oligonucleotide
uuagccuaauguggcauua

SEQ ID NO: 29175 - RNA, 19 nt, Artificial Sequence
  Description of Artificial Sequence: Synthetic oligonucleotide
auuugacacgcguccaauu

SEQ ID NO: 29176 - RNA, 19 nt, Artificial Sequence
  Description of Artificial Sequence: Synthetic oligonucleotide
cagcggacugacugcaagc

SEQ ID NO: 29177 - RNA, 19 nt, Artificial Sequence
  Description of Artificial Sequence: Synthetic oligonucleotide
acgugagcuuuaaucauug

SEQ ID NO: 29178 - RNA, 19 nt, Artificial Sequence
  Description of Artificial Sequence: Synthetic oligonucleotide
uauuccaggcuugccaaua

SEQ ID NO: 29179 - RNA, 19 nt, Artificial Sequence
  Description of Artificial Sequence: Synthetic oligonucleotide
ccaugauguuucauaagug

SEQ ID NO: 29180 - RNA, 19 nt, Artificial Sequence
  Description of Artificial Sequence: Synthetic oligonucleotide
uacacauugggagcacauc

SEQ ID NO: 29181 - RNA, 19 nt, Artificial Sequence
  Description of Artificial Sequence: Synthetic oligonucleotide
cagucgguaauagauccuc

SEQ ID NO: 29182 - RNA, 19 nt, Artificial Sequence
  Description of Artificial Sequence: Synthetic oligonucleotide
ugcugcgguaugccaauuc

SEQ ID NO: 29183 - RNA, 19 nt, Artificial Sequence
  Description of Artificial Sequence: Synthetic oligonucleotide
guuggucucuaaguuauaa

SEQ ID NO: 29184 - RNA, 19 nt, Artificial Sequence
  Description of Artificial Sequence: Synthetic oligonucleotide
cuaugcugcgguaugccaa

SEQ ID NO: 29185 - RNA, 19 nt, Artificial Sequence
  Description of Artificial Sequence: Synthetic oligonucleotide
cacauugggagcacaucca

SEQ ID NO: 29186 - RNA, 19 nt, Artificial Sequence
  Description of Artificial Sequence: Synthetic oligonucleotide
ucgccacuacccuugucac

SEQ ID NO: 29187 - RNA, 19 nt, Artificial Sequence
  Description of Artificial Sequence: Synthetic oligonucleotide
ggagaaucuacaugcugga

SEQ ID NO: 29188 - RNA, 19 nt, Artificial Sequence
  Description of Artificial Sequence: Synthetic oligonucleotide
gaaaacgguuucuaagcuu

SEQ ID NO: 29189 - RNA, 19 nt, Artificial Sequence
  Description of Artificial Sequence: Synthetic oligonucleotide
caaucggacgccggguccg

SEQ ID NO: 29190 - RNA, 19 nt, Artificial Sequence
  Description of Artificial Sequence: Synthetic oligonucleotide
uacccuauuccaggcuugc

SEQ ID NO: 29191 - RNA, 19 nt, Artificial Sequence
  Description of Artificial Sequence: Synthetic oligonucleotide
aaauuuggucgugggugaa

SEQ ID NO: 29192 - RNA, 19 nt, Artificial Sequence
  Description of Artificial Sequence: Synthetic oligonucleotide
guuucgugaacaaucugua

SEQ ID NO: 29193 - RNA, 19 nt, Artificial Sequence
  Description of Artificial Sequence: Synthetic oligonucleotide
ccuauuugucauuguggag

SEQ ID NO: 29194 - RNA, 19 nt, Artificial Sequence
  Description of Artificial Sequence: Synthetic oligonucleotide
aaaugacggaggagcucag

SEQ ID NO: 29195 - RNA, 19 nt, Artificial Sequence
  Description of Artificial Sequence: Synthetic oligonucleotide
aaacgccacucacaaccuu

SEQ ID NO: 29196 - RNA, 19 nt, Artificial Sequence
  Description of Artificial Sequence: Synthetic oligonucleotide
acugaauccuauagcugcu

SEQ ID NO: 29197 - RNA, 19 nt, Artificial Sequence
  Description of Artificial Sequence: Synthetic oligonucleotide
gucggagcagaaacugucc

SEQ ID NO: 29198 - RNA, 19 nt, Artificial Sequence
  Description of Artificial Sequence: Synthetic oligonucleotide
gccaauuccgggaaaguac

SEQ ID NO: 29199 - RNA, 19 nt, Artificial Sequence
  Description of Artificial Sequence: Synthetic oligonucleotide
ucgugggugaaaguuccuc

SEQ ID NO: 29200 - RNA, 19 nt, Artificial Sequence
  Description of Artificial Sequence: Synthetic oligonucleotide
aaucggacgccggguccgg

SEQ ID NO: 29201 - RNA, 19 nt, Artificial Sequence
  Description of Artificial Sequence: Synthetic oligonucleotide
caauuccgggaaaguacuc

SEQ ID NO: 29202 - RNA, 19 nt, Artificial Sequence
  Description of Artificial Sequence: Synthetic oligonucleotide
ugcgcaugcucacggcaaa

SEQ ID NO: 29203 - RNA, 19 nt, Artificial Sequence
  Description of Artificial Sequence: Synthetic oligonucleotide
gcgguaugccaauuccggg

SEQ ID NO: 29204 - RNA, 19 nt, Artificial Sequence
  Description of Artificial Sequence: Synthetic oligonucleotide
gcauugacauauacgcacc

SEQ ID NO: 29205 - RNA, 19 nt, Artificial Sequence
  Description of Artificial Sequence: Synthetic oligonucleotide
guugagaagauucccuguu

SEQ ID NO: 29206 - RNA, 19 nt, Artificial Sequence
  Description of Artificial Sequence: Synthetic oligonucleotide
ggcaccgguaugcuuccgg

SEQ ID NO: 29207 - RNA, 19 nt, Artificial Sequence
  Description of Artificial Sequence: Synthetic oligonucleotide
gugcuaugccgcuucugac

SEQ ID NO: 29208 - RNA, 19 nt, Artificial Sequence
  Description of Artificial Sequence: Synthetic oligonucleotide
agucucaugguagcagaau

SEQ ID NO: 29209 - RNA, 19 nt, Artificial Sequence
  Description of Artificial Sequence: Synthetic oligonucleotide
uuuagauaacagggugcuu

SEQ ID NO: 29210 - RNA, 19 nt, Artificial Sequence
  Description of Artificial Sequence: Synthetic oligonucleotide
uguuggucucuaaguuaua

SEQ ID NO: 29211 - RNA, 19 nt, Artificial Sequence
  Description of Artificial Sequence: Synthetic oligonucleotide
ccugaacugacuaagacuu

SEQ ID NO: 29212 - RNA, 19 nt, Artificial Sequence
  Description of Artificial Sequence: Synthetic oligonucleotide
ucacggcaaaaggcucugg

SEQ ID NO: 29213 - RNA, 19 nt, Artificial Sequence
  Description of Artificial Sequence: Synthetic oligonucleotide
ggugaaaguuucaugcaaa

SEQ ID NO: 29214 - RNA, 19 nt, Artificial Sequence
  Description of Artificial Sequence: Synthetic oligonucleotide
gguaaauuuggucgugggu

SEQ ID NO: 29215 - RNA, 19 nt, Artificial Sequence
  Description of Artificial Sequence: Synthetic oligonucleotide
aggcauugacauauacgca

SEQ ID NO: 29216 - RNA, 19 nt, Artificial Sequence
  Description of Artificial Sequence: Synthetic oligonucleotide
gccuaauguggcauuagac

SEQ ID NO: 29217 - RNA, 19 nt, Artificial Sequence
  Description of Artificial Sequence: Synthetic oligonucleotide
ggacuagaagaaaucuuca

SEQ ID NO: 29218 - RNA, 19 nt, Artificial Sequence
  Description of Artificial Sequence: Synthetic oligonucleotide
gguaugccaauuccgggaa

SEQ ID NO: 29219 - RNA, 19 nt, Artificial Sequence
  Description of Artificial Sequence: Synthetic oligonucleotide
cgguaauagauccucaaca

SEQ ID NO: 29220 - RNA, 19 nt, Artificial Sequence
  Description of Artificial Sequence: Synthetic oligonucleotide
uuccgggaaaguacuccuu

SEQ ID NO: 29221 - RNA, 19 nt, Artificial Sequence
  Description of Artificial Sequence: Synthetic oligonucleotide
cauuguggaggaucuuaaa

SEQ ID NO: 29222 - RNA, 19 nt, Artificial Sequence
  Description of Artificial Sequence: Synthetic oligonucleotide
guacccuauuccaggcuug

SEQ ID NO: 29223 - RNA, 19 nt, Artificial Sequence
  Description of Artificial Sequence: Synthetic oligonucleotide
gagcuagaaugauuuuggu

SEQ ID NO: 29224 - RNA, 19 nt, Artificial Sequence
  Description of Artificial Sequence: Synthetic oligonucleotide
gugcauuaacagcuagaaa

SEQ ID NO: 29225 - RNA, 19 nt, Artificial Sequence
  Description of Artificial Sequence: Synthetic oligonucleotide
ggcauaaauaagagagaca

SEQ ID NO: 29226 - RNA, 19 nt, Artificial Sequence
  Description of Artificial Sequence: Synthetic oligonucleotide
aaacuuuccugcagccguu

SEQ ID NO: 29227 - RNA, 19 nt, Artificial Sequence
  Description of Artificial Sequence: Synthetic oligonucleotide
cacccuacacugcacaaua

SEQ ID NO: 29228 - RNA, 19 nt, Artificial Sequence
  Description of Artificial Sequence: Synthetic oligonucleotide
gugaguacguugaugugcu

SEQ ID NO: 29229 - RNA, 19 nt, Artificial Sequence
  Description of Artificial Sequence: Synthetic oligonucleotide
agauaacagggugcuuaca

SEQ ID NO: 29230 - RNA, 19 nt, Artificial Sequence
  Description of Artificial Sequence: Synthetic oligonucleotide
agacgagccagcacaaguu

SEQ ID NO: 29231 - RNA, 19 nt, Artificial Sequence
  Description of Artificial Sequence: Synthetic oligonucleotide
caaaccuuugugugugugu

SEQ ID NO: 29232 - RNA, 19 nt, Artificial Sequence
  Description of Artificial Sequence: Synthetic oligonucleotide
gauccacccgacugagaaa

SEQ ID NO: 29233 - RNA, 19 nt, Artificial Sequence
  Description of Artificial Sequence: Synthetic oligonucleotide
caugucggguuggaaaaga

SEQ ID NO: 29234 - RNA, 19 nt, Artificial Sequence
  Description of Artificial Sequence: Synthetic oligonucleotide
cacuaugggguccugaguu

SEQ ID NO: 29235 - RNA, 19 nt, Artificial Sequence
  Description of Artificial Sequence: Synthetic oligonucleotide
uagcccguuucgugaacaa

SEQ ID NO: 29236 - RNA, 19 nt, Artificial Sequence
  Description of Artificial Sequence: Synthetic oligonucleotide
accaaugggaucagaggua

SEQ ID NO: 29237 - RNA, 19 nt, Artificial Sequence
  Description of Artificial Sequence: Synthetic oligonucleotide
guugcacggggagugucac

SEQ ID NO: 29238 - RNA, 19 nt, Artificial Sequence
  Description of Artificial Sequence: Synthetic oligonucleotide
cagugcgcaugcucacggc

SEQ ID NO: 29239 - RNA, 19 nt, Artificial Sequence
  Description of Artificial Sequence: Synthetic oligonucleotide
cagaguuuaggcuguuggu

SEQ ID NO: 29240 - RNA, 19 nt, Artificial Sequence
  Description of Artificial Sequence: Synthetic oligonucleotide
ggacagguacuccccuugc

SEQ ID NO: 29241 - RNA, 19 nt, Artificial Sequence
  Description of Artificial Sequence: Synthetic oligonucleotide
auggccaaagguacccuau

SEQ ID NO: 29242 - RNA, 19 nt, Artificial Sequence
  Description of Artificial Sequence: Synthetic oligonucleotide
gcuguuggucucuaaguua

SEQ ID NO: 29243 - RNA, 19 nt, Artificial Sequence
  Description of Artificial Sequence: Synthetic oligonucleotide
guagcccguuucgugaaca

SEQ ID NO: 29244 - RNA, 19 nt, Artificial Sequence
  Description of Artificial Sequence: Synthetic oligonucleotide
agccuuaauuaagcaugca

SEQ ID NO: 29245 - RNA, 19 nt, Artificial Sequence
  Description of Artificial Sequence: Synthetic oligonucleotide
acucaucccuuggaauacu

SEQ ID NO: 29246 - RNA, 19 nt, Artificial Sequence
  Description of Artificial Sequence: Synthetic oligonucleotide
ggcugaaaguaaaaugcaa

SEQ ID NO: 29247 - RNA, 19 nt, Artificial Sequence
  Description of Artificial Sequence: Synthetic oligonucleotide
auauacgcacccagcccca

SEQ ID NO: 29248 - RNA, 19 nt, Artificial Sequence
  Description of Artificial Sequence: Synthetic oligonucleotide
ucccacccauuaacauucu

SEQ ID NO: 29249 - RNA, 19 nt, Artificial Sequence
  Description of Artificial Sequence: Synthetic oligonucleotide
ugcuacacauugggagcac

SEQ ID NO: 29250 - RNA, 19 nt, Artificial Sequence
  Description of Artificial Sequence: Synthetic oligonucleotide
gugguuugauccacccgac

SEQ ID NO: 29251 - RNA, 19 nt, Artificial Sequence
  Description of Artificial Sequence: Synthetic oligonucleotide
ggucaacagugcauuaaca

SEQ ID NO: 29252 - RNA, 19 nt, Artificial Sequence
  Description of Artificial Sequence: Synthetic oligonucleotide
ccacuucgaaccuucccug

SEQ ID NO: 29253 - RNA, 19 nt, Artificial Sequence
  Description of Artificial Sequence: Synthetic oligonucleotide
gcccguuucgugaacaauc

SEQ ID NO: 29254 - RNA, 19 nt, Artificial Sequence
  Description of Artificial Sequence: Synthetic oligonucleotide
cagagccgagaaguagccc

SEQ ID NO: 29255 - RNA, 19 nt, Artificial Sequence
  Description of Artificial Sequence: Synthetic oligonucleotide
gagaaguagcccguuucgu

SEQ ID NO: 29256 - RNA, 19 nt, Artificial Sequence
  Description of Artificial Sequence: Synthetic oligonucleotide
uauacgcacccagccccac

SEQ ID NO: 29257 - RNA, 19 nt, Artificial Sequence
  Description of Artificial Sequence: Synthetic oligonucleotide
gcaaaccuuugugugugug

SEQ ID NO: 29258 - RNA, 19 nt, Artificial Sequence
  Description of Artificial Sequence: Synthetic oligonucleotide
ccgagaaguagcccguuuc

SEQ ID NO: 29259 - RNA, 19 nt, Artificial Sequence
  Description of Artificial Sequence: Synthetic oligonucleotide
gaguacguugaugugcuuu

SEQ ID NO: 29260 - RNA, 19 nt, Artificial Sequence
  Description of Artificial Sequence: Synthetic oligonucleotide
caccauuaugaaggucaac

SEQ ID NO: 29261 - RNA, 19 nt, Artificial Sequence
  Description of Artificial Sequence: Synthetic oligonucleotide
cuaugccgcuucugacaug

SEQ ID NO: 29262 - RNA, 19 nt, Artificial Sequence
  Description of Artificial Sequence: Synthetic oligonucleotide
gcaucgauguacccuccuc

SEQ ID NO: 29263 - RNA, 19 nt, Artificial Sequence
  Description of Artificial Sequence: Synthetic oligonucleotide
guuucuaagcuuagugguu

SEQ ID NO: 29264 - RNA, 19 nt, Artificial Sequence
  Description of Artificial Sequence: Synthetic oligonucleotide
guacguugaugugcuuuca

SEQ ID NO: 29265 - RNA, 19 nt, Artificial Sequence
  Description of Artificial Sequence: Synthetic oligonucleotide
ggaggaucuuaaagaggug

SEQ ID NO: 29266 - RNA, 19 nt, Artificial Sequence
  Description of Artificial Sequence: Synthetic oligonucleotide
ccauaccccuguauuugac

SEQ ID NO: 29267 - RNA, 19 nt, Artificial Sequence
  Description of Artificial Sequence: Synthetic oligonucleotide
gcaaaacgccacucacaac

SEQ ID NO: 29268 - RNA, 19 nt, Artificial Sequence
  Description of Artificial Sequence: Synthetic oligonucleotide
ugaguacguugaugugcuu

SEQ ID NO: 29269 - RNA, 19 nt, Artificial Sequence
  Description of Artificial Sequence: Synthetic oligonucleotide
aggcaucgccacuacccuu

SEQ ID NO: 29270 - RNA, 19 nt, Artificial Sequence
  Description of Artificial Sequence: Synthetic oligonucleotide
guaugccaauuccgggaaa

SEQ ID NO: 29271 - RNA, 19 nt, Artificial Sequence
  Description of Artificial Sequence: Synthetic oligonucleotide
ggcgcugcaaucggacgcc

SEQ ID NO: 29272 - RNA, 19 nt, Artificial Sequence
  Description of Artificial Sequence: Synthetic oligonucleotide
agcuuacucuuaggugaga

SEQ ID NO: 29273 - RNA, 19 nt, Artificial Sequence
  Description of Artificial Sequence: Synthetic oligonucleotide
acgagccagcacaaguuuu

SEQ ID NO: 29274 - RNA, 19 nt, Artificial Sequence
  Description of Artificial Sequence: Synthetic oligonucleotide
agcccguuucgugaacaau

SEQ ID NO: 29275 - RNA, 19 nt, Artificial Sequence
  Description of Artificial Sequence: Synthetic oligonucleotide
gcaccgguaugcuuccgga

SEQ ID NO: 29276 - RNA, 19 nt, Artificial Sequence
  Description of Artificial Sequence: Synthetic oligonucleotide
ggagagcgaucaggagucg

SEQ ID NO: 29277 - RNA, 19 nt, Artificial Sequence
  Description of Artificial Sequence: Synthetic oligonucleotide
gcuaugccgcuucugacau

SEQ ID NO: 29278 - RNA, 19 nt, Artificial Sequence
  Description of Artificial Sequence: Synthetic oligonucleotide
ccuacaggauucagcccuc

SEQ ID NO: 29279 - RNA, 19 nt, Artificial Sequence
  Description of Artificial Sequence: Synthetic oligonucleotide
uggcaccgguaugcuuccg

SEQ ID NO: 29280 - RNA, 19 nt, Artificial Sequence
  Description of Artificial Sequence: Synthetic oligonucleotide
cgguaugccaauuccggga

SEQ ID NO: 29281 - RNA, 19 nt, Artificial Sequence
  Description of Artificial Sequence: Synthetic oligonucleotide
agggucacccaaacaccau

SEQ ID NO: 29282 - RNA, 19 nt, Artificial Sequence
  Description of Artificial Sequence: Synthetic oligonucleotide
cccuuaacacucaccacua

SEQ ID NO: 29283 - RNA, 19 nt, Artificial Sequence
  Description of Artificial Sequence: Synthetic oligonucleotide
gcuacacauugggagcaca

SEQ ID NO: 29284 - RNA, 19 nt, Artificial Sequence
  Description of Artificial Sequence: Synthetic oligonucleotide
cauuugacacgcguccaau

SEQ ID NO: 29285 - RNA, 19 nt, Artificial Sequence
  Description of Artificial Sequence: Synthetic oligonucleotide
ccaugucggguuggaaaag

SEQ ID NO: 29286 - RNA, 19 nt, Artificial Sequence
  Description of Artificial Sequence: Synthetic oligonucleotide
ccgggagcgcaggugaaag

SEQ ID NO: 29287 - RNA, 19 nt, Artificial Sequence
  Description of Artificial Sequence: Synthetic oligonucleotide
cccuuggaauacuccucac

SEQ ID NO: 29288 - RNA, 19 nt, Artificial Sequence
  Description of Artificial Sequence: Synthetic oligonucleotide
gcauaucaagugcuuggau

SEQ ID NO: 29289 - RNA, 19 nt, Artificial Sequence
  Description of Artificial Sequence: Synthetic oligonucleotide
gccgcuucugacaugacuu

SEQ ID NO: 29290 - RNA, 19 nt, Artificial Sequence
  Description of Artificial Sequence: Synthetic oligonucleotide
gcuuacucuuaggugagau

SEQ ID NO: 29291 - RNA, 19 nt, Artificial Sequence
  Description of Artificial Sequence: Synthetic oligonucleotide
augccgcuucugacaugac

SEQ ID NO: 29292 - RNA, 19 nt, Artificial Sequence
  Description of Artificial Sequence: Synthetic oligonucleotide
cuauuccaggcuugccaau

SEQ ID NO: 29293 - RNA, 19 nt, Artificial Sequence
  Description of Artificial Sequence: Synthetic oligonucleotide
cccguuucgugaacaaucu

SEQ ID NO: 29294 - RNA, 19 nt, Artificial Sequence
  Description of Artificial Sequence: Synthetic oligonucleotide
augcaccgugggugcuaug

SEQ ID NO: 29295 - RNA, 19 nt, Artificial Sequence
  Description of Artificial Sequence: Synthetic oligonucleotide
cauccaugucggguuggaa

SEQ ID NO: 29296 - RNA, 19 nt, Artificial Sequence
  Description of Artificial Sequence: Synthetic oligonucleotide
ggcugacacguagcagggc

SEQ ID NO: 29297 - RNA, 19 nt, Artificial Sequence
  Description of Artificial Sequence: Synthetic oligonucleotide
caauuacgugagcuuuaau

SEQ ID NO: 29298 - RNA, 19 nt, Artificial Sequence
  Description of Artificial Sequence: Synthetic oligonucleotide
acgccggguccggacccuc

SEQ ID NO: 29299 - RNA, 19 nt, Artificial Sequence
  Description of Artificial Sequence: Synthetic oligonucleotide
cccacgcaauauuuugcaa

SEQ ID NO: 29300 - RNA, 19 nt, Artificial Sequence
  Description of Artificial Sequence: Synthetic oligonucleotide
gcugucuaugcugcgguau

SEQ ID NO: 29301 - RNA, 19 nt, Artificial Sequence
  Description of Artificial Sequence: Synthetic oligonucleotide
gcucacggcaaaaggcucu

SEQ ID NO: 29302 - RNA, 19 nt, Artificial Sequence
  Description of Artificial Sequence: Synthetic oligonucleotide
caucacccauaccccugua

SEQ ID NO: 29303 - RNA, 19 nt, Artificial Sequence
  Description of Artificial Sequence: Synthetic oligonucleotide
gcgcugcaaucggacgccg

SEQ ID NO: 29304 - RNA, 19 nt, Artificial Sequence
  Description of Artificial Sequence: Synthetic oligonucleotide
cugcaaucggacgccgggu

SEQ ID NO: 29305 - RNA, 19 nt, Artificial Sequence
  Description of Artificial Sequence: Synthetic oligonucleotide
aucggacgccggguccgga

SEQ ID NO: 29306 - RNA, 19 nt, Artificial Sequence
  Description of Artificial Sequence: Synthetic oligonucleotide
gccguugaaguggcaucga

SEQ ID NO: 29307 - RNA, 19 nt, Artificial Sequence
  Description of Artificial Sequence: Synthetic oligonucleotide
caugcaccgugggugcuau

SEQ ID NO: 29308 - RNA, 19 nt, Artificial Sequence
  Description of Artificial Sequence: Synthetic oligonucleotide
ccgguaugcuuccggaagu

SEQ ID NO: 29309 - RNA, 19 nt, Artificial Sequence
  Description of Artificial Sequence: Synthetic oligonucleotide
ccaguaaaacaagcuacuu

SEQ ID NO: 29310 - RNA, 19 nt, Artificial Sequence
  Description of Artificial Sequence: Synthetic oligonucleotide
ccucgcugucgggaaaaca

SEQ ID NO: 29311 - RNA, 19 nt, Artificial Sequence
  Description of Artificial Sequence: Synthetic oligonucleotide
ccuuugugugugugugagu

SEQ ID NO: 29312 - RNA, 19 nt, Artificial Sequence
  Description of Artificial Sequence: Synthetic oligonucleotide
gcgccgagcccacgcaaua

SEQ ID NO: 29313 - RNA, 19 nt, Artificial Sequence
  Description of Artificial Sequence: Synthetic oligonucleotide
ccuuaacacucaccacuau

SEQ ID NO: 29314 - RNA, 19 nt, Artificial Sequence
  Description of Artificial Sequence: Synthetic oligonucleotide
ggggcugaucagagagucu

SEQ ID NO: 29315 - RNA, 19 nt, Artificial Sequence
  Description of Artificial Sequence: Synthetic oligonucleotide
ccguugaaguggcaucgau

SEQ ID NO: 29316 - RNA, 19 nt, Artificial Sequence
  Description of Artificial Sequence: Synthetic oligonucleotide
gcgugucuugccaggccua

SEQ ID NO: 29317 - RNA, 19 nt, Artificial Sequence
  Description of Artificial Sequence: Synthetic oligonucleotide
gcgcgccgagcccacgcaa

SEQ ID NO: 29318 - RNA, 19 nt, Artificial Sequence
  Description of Artificial Sequence: Synthetic oligonucleotide
cgccggguccggacccucc

SEQ ID NO: 29319 - RNA, 19 nt, Artificial Sequence
  Description of Artificial Sequence: Synthetic oligonucleotide
cccaagcauuuagacauuu

SEQ ID NO: 29320 - RNA, 19 nt, Artificial Sequence
  Description of Artificial Sequence: Synthetic oligonucleotide
gccccauaguugagaagau

SEQ ID NO: 29321 - RNA, 19 nt, Artificial Sequence
  Description of Artificial Sequence: Synthetic oligonucleotide
ccaugcaccgugggugcua

SEQ ID NO: 29322 - RNA, 19 nt, Artificial Sequence
  Description of Artificial Sequence: Synthetic oligonucleotide
gcccaagcauuuagacauu

SEQ ID NO: 29323 - RNA, 19 nt, Artificial Sequence
  Description of Artificial Sequence: Synthetic oligonucleotide
ccggaagugucugguuaau

SEQ ID NO: 29324 - RNA, 19 nt, Artificial Sequence
  Description of Artificial Sequence: Synthetic oligonucleotide
cgcgccgagcccacgcaau

SEQ ID NO: 29325 - RNA, 19 nt, Artificial Sequence
  Description of Artificial Sequence: Synthetic oligonucleotide
cgccgagcccacgcaauau

SEQ ID NO: 29326 - RNA, 19 nt, Artificial Sequence
  Description of Artificial Sequence: Synthetic oligonucleotide
aaguuuuagagguagcugg

SEQ ID NO: 29327 - RNA, 19 nt, Artificial Sequence
  Description of Artificial Sequence: Synthetic oligonucleotide
aaaagcucgucauggagcc

SEQ ID NO: 29328 - RNA, 19 nt, Artificial Sequence
  Description of Artificial Sequence: Synthetic oligonucleotide
aagaggacuaucaucagcc

SEQ ID NO: 29329 - RNA, 19 nt, Artificial Sequence
  Description of Artificial Sequence: Synthetic oligonucleotide
ugagagauaaaacagggaa

SEQ ID NO: 29330 - RNA, 19 nt, Artificial Sequence
  Description of Artificial Sequence: Synthetic oligonucleotide
aguguuaggaaccugaagu

SEQ ID NO: 29331 - RNA, 19 nt, Artificial Sequence
  Description of Artificial Sequence: Synthetic oligonucleotide
uacaaaacgauagaaauga

SEQ ID NO: 29332 - RNA, 19 nt, Artificial Sequence
  Description of Artificial Sequence: Synthetic oligonucleotide
auagcauagaaccucgaac

SEQ ID NO: 29333 - RNA, 19 nt, Artificial Sequence
  Description of Artificial Sequence: Synthetic oligonucleotide
acuuucguuggacagaagg

SEQ ID NO: 29334 - RNA, 19 nt, Artificial Sequence
  Description of Artificial Sequence: Synthetic oligonucleotide
agauucaaguuuuagaggu

SEQ ID NO: 29335 - RNA, 19 nt, Artificial Sequence
  Description of Artificial Sequence: Synthetic oligonucleotide
ugaauagggaauaaauaca

SEQ ID NO: 29336 - RNA, 19 nt, Artificial Sequence
  Description of Artificial Sequence: Synthetic oligonucleotide
ugaggaacagacuucaccc

SEQ ID NO: 29337 - RNA, 19 nt, Artificial Sequence
  Description of Artificial Sequence: Synthetic oligonucleotide
ucucguuuagaaacgacag

SEQ ID NO: 29338 - RNA, 19 nt, Artificial Sequence
  Description of Artificial Sequence: Synthetic oligonucleotide
ucuugugaaccacauaggc

SEQ ID NO: 29339 - RNA, 19 nt, Artificial Sequence
  Description of Artificial Sequence: Synthetic oligonucleotide
cuuuauagcgucaucaguc

SEQ ID NO: 29340 - RNA, 19 nt, Artificial Sequence
  Description of Artificial Sequence: Synthetic oligonucleotide
ugaaacaaacggcuaauca

SEQ ID NO: 29341 - RNA, 19 nt, Artificial Sequence
  Description of Artificial Sequence: Synthetic oligonucleotide
aggacuuagcccuugacag

SEQ ID NO: 29342 - RNA, 19 nt, Artificial Sequence
  Description of Artificial Sequence: Synthetic oligonucleotide
gaaucuuacagugacgcag

SEQ ID NO: 29343 - RNA, 19 nt, Artificial Sequence
  Description of Artificial Sequence: Synthetic oligonucleotide
uguaaacuggaacaguccu

SEQ ID NO: 29344 - RNA, 19 nt, Artificial Sequence
  Description of Artificial Sequence: Synthetic oligonucleotide
accgcuuacaucuuuacug

SEQ ID NO: 29345 - RNA, 19 nt, Artificial Sequence
  Description of Artificial Sequence: Synthetic oligonucleotide
aauagcuccccuuucuugu

SEQ ID NO: 29346 - RNA, 19 nt, Artificial Sequence
  Description of Artificial Sequence: Synthetic oligonucleotide
  modified_base (3)..(3): a, c, u, g, unknown or other
aanagggccaugaugacca

SEQ ID NO: 29347 - RNA, 19 nt, Artificial Sequence
  Description of Artificial Sequence: Synthetic oligonucleotide
aaucuuacagugacgcagc

SEQ ID NO: 29348 - RNA, 19 nt, Artificial Sequence
  Description of Artificial Sequence: Synthetic oligonucleotide
gacaggacgagccuggugc

SEQ ID NO: 29349 - RNA, 19 nt, Artificial Sequence
  Description of Artificial Sequence: Synthetic oligonucleotide
aaacaaacggcuaaucaug

SEQ ID NO: 29350 - RNA, 19 nt, Artificial Sequence
  Description of Artificial Sequence: Synthetic oligonucleotide
uagagaaucccagaucugg

SEQ ID NO: 29351 - RNA, 19 nt, Artificial Sequence
  Description of Artificial Sequence: Synthetic oligonucleotide
cuugguaugcuccucgucc

SEQ ID NO: 29352 - RNA, 19 nt, Artificial Sequence
  Description of Artificial Sequence: Synthetic oligonucleotide
  modified_base (6)..(6): a, c, u, g, unknown or other
augaanagggccaugauga

SEQ ID NO: 29353 - RNA, 19 nt, Artificial Sequence
  Description of Artificial Sequence: Synthetic oligonucleotide
  modified_base (7)..(7): a, c, u, g, unknown or other
caugaanagggccaugaug

SEQ ID NO: 29354 - RNA, 19 nt, Artificial Sequence
  Description of Artificial Sequence: Synthetic oligonucleotide
agugaaucgggcuucuguc

SEQ ID NO: 29355 - RNA, 19 nt, Artificial Sequence
  Description of Artificial Sequence: Synthetic oligonucleotide
aacaagccuuuauagcguc

SEQ ID NO: 29356 - RNA, 19 nt, Artificial Sequence
  Description of Artificial Sequence: Synthetic oligonucleotide
aaaccgcuuacaucuuuac

SEQ ID NO: 29357 - RNA, 19 nt, Artificial Sequence
  Description of Artificial Sequence: Synthetic oligonucleotide
uacgagugcaauuaagaac

SEQ ID NO: 29358 - RNA, 19 nt, Artificial Sequence
  Description of Artificial Sequence: Synthetic oligonucleotide
cuugugaaccacauaggcc

SEQ ID NO: 29359 - RNA, 19 nt, Artificial Sequence
  Description of Artificial Sequence: Synthetic oligonucleotide
cauagaccgaccaaggcac

SEQ ID NO: 29360 - RNA, 19 nt, Artificial Sequence
  Description of Artificial Sequence: Synthetic oligonucleotide
ucuuacgagugcaauuaag

SEQ ID NO: 29361 - RNA, 19 nt, Artificial Sequence
  Description of Artificial Sequence: Synthetic oligonucleotide
uggaucucguuuagaaacg

SEQ ID NO: 29362 - RNA, 19 nt, Artificial Sequence
  Description of Artificial Sequence: Synthetic oligonucleotide
ucacgaaucaggucccugg

SEQ ID NO: 29363 - RNA, 19 nt, Artificial Sequence
  Description of Artificial Sequence: Synthetic oligonucleotide
auuaauagcuccccuuucu

SEQ ID NO: 29364 - RNA, 19 nt, Artificial Sequence
  Description of Artificial Sequence: Synthetic oligonucleotide
uguuaacugcacagcauag

SEQ ID NO: 29365 - RNA, 19 nt, Artificial Sequence
  Description of Artificial Sequence: Synthetic oligonucleotide
uuuauaguaaugguucccu

SEQ ID NO: 29366 - RNA, 19 nt, Artificial Sequence
  Description of Artificial Sequence: Synthetic oligonucleotide
acgagugcaauuaagaaca

SEQ ID NO: 29367 - RNA, 19 nt, Artificial Sequence
  Description of Artificial Sequence: Synthetic oligonucleotide
aacgcugaccacuggacug

SEQ ID NO: 29368 - RNA, 19 nt, Artificial Sequence
  Description of Artificial Sequence: Synthetic oligonucleotide
aagugaaacaaacggcuaa

SEQ ID NO: 29369 - RNA, 19 nt, Artificial Sequence
  Description of Artificial Sequence: Synthetic oligonucleotide
aagugaaucgggcuucugu

SEQ ID NO: 29370 - RNA, 19 nt, Artificial Sequence
  Description of Artificial Sequence: Synthetic oligonucleotide
uuugcuucggaggucagcc

SEQ ID NO: 29371 - RNA, 19 nt, Artificial Sequence
  Description of Artificial Sequence: Synthetic oligonucleotide
augucgcugauucucacuc

SEQ ID NO: 29372 - RNA, 19 nt, Artificial Sequence
  Description of Artificial Sequence: Synthetic oligonucleotide
ugcgaucauuccaacacag

SEQ ID NO: 29373 - RNA, 19 nt, Artificial Sequence
  Description of Artificial Sequence: Synthetic oligonucleotide
ucgaacuuucguuggacag

SEQ ID NO: 29374 - RNA, 19 nt, Artificial Sequence
  Description of Artificial Sequence: Synthetic oligonucleotide
aaacggcuaaucaugaacu

SEQ ID NO: 29375 - RNA, 19 nt, Artificial Sequence
  Description of Artificial Sequence: Synthetic oligonucleotide
aauuuugaugcagccuccg

SEQ ID NO: 29376 - RNA, 19 nt, Artificial Sequence
  Description of Artificial Sequence: Synthetic oligonucleotide
ugcgacaaaagauccacac

SEQ ID NO: 29377 - RNA, 19 nt, Artificial Sequence
  Description of Artificial Sequence: Synthetic oligonucleotide
accauagaccgaccaaggc

SEQ ID NO: 29378 - RNA, 19 nt, Artificial Sequence
  Description of Artificial Sequence: Synthetic oligonucleotide
cuuacagugacgcagcaga

SEQ ID NO: 29379 - RNA, 19 nt, Artificial Sequence
  Description of Artificial Sequence: Synthetic oligonucleotide
cucguccagaauuuggagg

SEQ ID NO: 29380 - RNA, 19 nt, Artificial Sequence
  Description of Artificial Sequence: Synthetic oligonucleotide
ucuuaaggaccagaggaag

SEQ ID NO: 29381 - RNA, 19 nt, Artificial Sequence
  Description of Artificial Sequence: Synthetic oligonucleotide
ugcgugaucaucaggcaca

SEQ ID NO: 29382 - RNA, 19 nt, Artificial Sequence
  Description of Artificial Sequence: Synthetic oligonucleotide
gaugacguacuccuuuccc

SEQ ID NO: 29383 - RNA, 19 nt, Artificial Sequence
  Description of Artificial Sequence: Synthetic oligonucleotide
cuuacgagugcaauuaaga

SEQ ID NO: 29384 - RNA, 19 nt, Artificial Sequence
  Description of Artificial Sequence: Synthetic oligonucleotide
ucguccagaauuuggaggu

SEQ ID NO: 29385 - RNA, 19 nt, Artificial Sequence
  Description of Artificial Sequence: Synthetic oligonucleotide
ucuagucuucugcaguuca

SEQ ID NO: 29386 - RNA, 19 nt, Artificial Sequence
  Description of Artificial Sequence: Synthetic oligonucleotide
ucgaacaucggacccggag

SEQ ID NO: 29387 - RNA, 19 nt, Artificial Sequence
  Description of Artificial Sequence: Synthetic oligonucleotide
uccacuaccugucccuggg

SEQ ID NO: 29388 - RNA, 19 nt, Artificial Sequence
  Description of Artificial Sequence: Synthetic oligonucleotide
aagguuauuucucccuccu

SEQ ID NO: 29389 - RNA, 19 nt, Artificial Sequence
  Description of Artificial Sequence: Synthetic oligonucleotide
cagugagcuguacaaaacg

SEQ ID NO: 29390 - RNA, 19 nt, Artificial Sequence
  Description of Artificial Sequence: Synthetic oligonucleotide
aggccgaugucgcugauuc

SEQ ID NO: 29391 - RNA, 19 nt, Artificial Sequence
  Description of Artificial Sequence: Synthetic oligonucleotide
uguguguccucucuagaga

SEQ ID NO: 29392 - RNA, 19 nt, Artificial Sequence
  Description of Artificial Sequence: Synthetic oligonucleotide
aaugucuagguggucagga

SEQ ID NO: 29393 - RNA, 19 nt, Artificial Sequence
  Description of Artificial Sequence: Synthetic oligonucleotide
gaauagggaauaaauacaa

SEQ ID NO: 29394 - RNA, 19 nt, Artificial Sequence
  Description of Artificial Sequence: Synthetic oligonucleotide
aaucagcaaccugagguag

SEQ ID NO: 29395 - RNA, 19 nt, Artificial Sequence
  Description of Artificial Sequence: Synthetic oligonucleotide
gauaauuccaccagacgga

SEQ ID NO: 29396 - RNA, 19 nt, Artificial Sequence
  Description of Artificial Sequence: Synthetic oligonucleotide
gaacaucggacccggagcc

SEQ ID NO: 29397 - RNA, 19 nt, Artificial Sequence
  Description of Artificial Sequence: Synthetic oligonucleotide
ugaugugcgagaggaacgg

SEQ ID NO: 29398 - RNA, 19 nt, Artificial Sequence
  Description of Artificial Sequence: Synthetic oligonucleotide
aacuuacuacaccagugaa

SEQ ID NO: 29399 - RNA, 19 nt, Artificial Sequence
  Description of Artificial Sequence: Synthetic oligonucleotide
ugccaccgaacucuggacg

SEQ ID NO: 29400 - RNA, 19 nt, Artificial Sequence
  Description of Artificial Sequence: Synthetic oligonucleotide
agaacugcaaagaggauga

SEQ ID NO: 29401 - RNA, 19 nt, Artificial Sequence
  Description of Artificial Sequence: Synthetic oligonucleotide
agaaugucuagguggucag

SEQ ID NO: 29402 - RNA, 19 nt, Artificial Sequence
  Description of Artificial Sequence: Synthetic oligonucleotide
uaaggcgacagaaugucua

SEQ ID NO: 29403 - RNA, 19 nt, Artificial Sequence
  Description of Artificial Sequence: Synthetic oligonucleotide
agaaccucgaacuuucguu

SEQ ID NO: 29404 - RNA, 19 nt, Artificial Sequence
  Description of Artificial Sequence: Synthetic oligonucleotide
guucccugaaccucuuacg

SEQ ID NO: 29405 - RNA, 19 nt, Artificial Sequence
  Description of Artificial Sequence: Synthetic oligonucleotide
guuaacugcacagcauagg

SEQ ID NO: 29406 - RNA, 19 nt, Artificial Sequence
  Description of Artificial Sequence: Synthetic oligonucleotide
ugcuucggaggucagccag

SEQ ID NO: 29407 - RNA, 19 nt, Artificial Sequence
  Description of Artificial Sequence: Synthetic oligonucleotide
ugugcgagaggaacggaga

SEQ ID NO: 29408 - RNA, 19 nt, Artificial Sequence
  Description of Artificial Sequence: Synthetic oligonucleotide
uucggaaaagcucgucaug

SEQ ID NO: 29409 - RNA, 19 nt, Artificial Sequence
  Description of Artificial Sequence: Synthetic oligonucleotide
gaggagacugacaugagga

SEQ ID NO: 29410 - RNA, 19 nt, Artificial Sequence
  Description of Artificial Sequence: Synthetic oligonucleotide
uuacagugacgcagcagag

SEQ ID NO: 29411 - RNA, 19 nt, Artificial Sequence
  Description of Artificial Sequence: Synthetic oligonucleotide
uccccaacugagaaguugu

SEQ ID NO: 29412 - RNA, 19 nt, Artificial Sequence
  Description of Artificial Sequence: Synthetic oligonucleotide
gaggacuuagcccuugaca

SEQ ID NO: 29413 - RNA, 19 nt, Artificial Sequence
  Description of Artificial Sequence: Synthetic oligonucleotide
cuggugcgacaaaagaucc

SEQ ID NO: 29414 - RNA, 19 nt, Artificial Sequence
  Description of Artificial Sequence: Synthetic oligonucleotide
agaaacgacagcaggagga

SEQ ID NO: 29415 - RNA, 19 nt, Artificial Sequence
  Description of Artificial Sequence: Synthetic oligonucleotide
cuagaggacggaacgcugc

SEQ ID NO: 29416 - RNA, 19 nt, Artificial Sequence
  Description of Artificial Sequence: Synthetic oligonucleotide
aacgaccagcuagaggacg

SEQ ID NO: 29417 - RNA, 19 nt, Artificial Sequence
  Description of Artificial Sequence: Synthetic oligonucleotide
guagacaccauagaccgac

SEQ ID NO: 29418 - RNA, 19 nt, Artificial Sequence
  Description of Artificial Sequence: Synthetic oligonucleotide
uuccucucacuucagaauu

SEQ ID NO: 29419 - RNA, 19 nt, Artificial Sequence
  Description of Artificial Sequence: Synthetic oligonucleotide
aagaucccugcgaucauuc

SEQ ID NO: 29420 - RNA, 19 nt, Artificial Sequence
  Description of Artificial Sequence: Synthetic oligonucleotide
ugaaccucuuacgagugca

SEQ ID NO: 29421 - RNA, 19 nt, Artificial Sequence
  Description of Artificial Sequence: Synthetic oligonucleotide
aaccugcacaaguuggccu

SEQ ID NO: 29422 - RNA, 19 nt, Artificial Sequence
  Description of Artificial Sequence: Synthetic oligonucleotide
aaccgcuuacaucuuuacu

SEQ ID NO: 29423 - RNA, 19 nt, Artificial Sequence
  Description of Artificial Sequence: Synthetic oligonucleotide
uucccgguaucucauuucu

SEQ ID NO: 29424 - RNA, 19 nt, Artificial Sequence
  Description of Artificial Sequence: Synthetic oligonucleotide
aggacuaucaucagcccag

SEQ ID NO: 29425 - RNA, 19 nt, Artificial Sequence
  Description of Artificial Sequence: Synthetic oligonucleotide
uggacgugugggaucaggc

SEQ ID NO: 29426 - RNA, 19 nt, Artificial Sequence
  Description of Artificial Sequence: Synthetic oligonucleotide
acagaagugaaucgggcuu

SEQ ID NO: 29427 - RNA, 19 nt, Artificial Sequence
  Description of Artificial Sequence: Synthetic oligonucleotide
gagaauucacggugcucgg

SEQ ID NO: 29428 - RNA, 19 nt, Artificial Sequence
  Description of Artificial Sequence: Synthetic oligonucleotide
acuuacuacaccagugaag

SEQ ID NO: 29429 - RNA, 19 nt, Artificial Sequence
  Description of Artificial Sequence: Synthetic oligonucleotide
aacaaacggcuaaucauga

SEQ ID NO: 29430 - RNA, 19 nt, Artificial Sequence
  Description of Artificial Sequence: Synthetic oligonucleotide
ugauucucacuccaucaau

SEQ ID NO: 29431 - RNA, 19 nt, Artificial Sequence
  Description of Artificial Sequence: Synthetic oligonucleotide
augucuagguggucaggac

SEQ ID NO: 29432 - RNA, 19 nt, Artificial Sequence
  Description of Artificial Sequence: Synthetic oligonucleotide
ggaucaguaagucugucuc

SEQ ID NO: 29433 - RNA, 19 nt, Artificial Sequence
  Description of Artificial Sequence: Synthetic oligonucleotide
augacguacuccuuuccca

SEQ ID NO: 29434 - RNA, 19 nt, Artificial Sequence
  Description of Artificial Sequence: Synthetic oligonucleotide
ugaaucgggcuucugucuc

SEQ ID NO: 29435 - RNA, 19 nt, Artificial Sequence
  Description of Artificial Sequence: Synthetic oligonucleotide
uaaaccgcuuacaucuuua

SEQ ID NO: 29436 - RNA, 19 nt, Artificial Sequence
  Description of Artificial Sequence: Synthetic oligonucleotide
ugauaccuguguagaaacu

SEQ ID NO: 29437 - RNA, 19 nt, Artificial Sequence
  Description of Artificial Sequence: Synthetic oligonucleotide
uccauuaauagcuccccuu

SEQ ID NO: 29438 - RNA, 19 nt, Artificial Sequence
  Description of Artificial Sequence: Synthetic oligonucleotide
ggugcuuggaagugguccg

SEQ ID NO: 29439 - RNA, 19 nt, Artificial Sequence
  Description of Artificial Sequence: Synthetic oligonucleotide
gaggaacggagacugugug

SEQ ID NO: 29440 - RNA, 19 nt, Artificial Sequence
  Description of Artificial Sequence: Synthetic oligonucleotide
uggacaccuggaaagccca

SEQ ID NO: 29441 - RNA, 19 nt, Artificial Sequence
  Description of Artificial Sequence: Synthetic oligonucleotide
agaauucacggugcucggc

SEQ ID NO: 29442 - RNA, 19 nt, Artificial Sequence
  Description of Artificial Sequence: Synthetic oligonucleotide
ucucgaacaucggacccgg

SEQ ID NO: 29443 - RNA, 19 nt, Artificial Sequence
  Description of Artificial Sequence: Synthetic oligonucleotide
agagguagcugggcaauac

SEQ ID NO: 29444 - RNA, 19 nt, Artificial Sequence
  Description of Artificial Sequence: Synthetic oligonucleotide
aauagggaauaaauacaau

SEQ ID NO: 29445 - RNA, 19 nt, Artificial Sequence
  Description of Artificial Sequence: Synthetic oligonucleotide
  modified_base (16)..(16): a, c, u, g, unknown or other
cacguucagcaugaanagg

SEQ ID NO: 29446 - RNA, 19 nt, Artificial Sequence
  Description of Artificial Sequence: Synthetic oligonucleotide
uguuaggaaccugaaguau

SEQ ID NO: 29447 - RNA, 19 nt, Artificial Sequence
  Description of Artificial Sequence: Synthetic oligonucleotide
aggcccuguaugcuggacg

SEQ ID NO: 29448 - RNA, 19 nt, Artificial Sequence
  Description of Artificial Sequence: Synthetic oligonucleotide
gucauguaggagaaaaguc

SEQ ID NO: 29449 - RNA, 19 nt, Artificial Sequence
  Description of Artificial Sequence: Synthetic oligonucleotide
agcaccgugaaacgaccag

SEQ ID NO: 29450 - RNA, 19 nt, Artificial Sequence
  Description of Artificial Sequence: Synthetic oligonucleotide
cacugaacaggacuggcuc

SEQ ID NO: 29451 - RNA, 19 nt, Artificial Sequence
  Description of Artificial Sequence: Synthetic oligonucleotide
  modified_base (9)..(9): a, c, u, g, unknown or other
guucccgcncccuugcuug

SEQ ID NO: 29452 - RNA, 19 nt, Artificial Sequence
  Description of Artificial Sequence: Synthetic oligonucleotide
uggugguauuuucccuugg

SEQ ID NO: 29453 - RNA, 19 nt, Artificial Sequence
  Description of Artificial Sequence: Synthetic oligonucleotide
uccuaaggauccuucggaa

SEQ ID NO: 29454 - RNA, 19 nt, Artificial Sequence
  Description of Artificial Sequence: Synthetic oligonucleotide
agaaucuuacagugacgca

SEQ ID NO: 29455 - RNA, 19 nt, Artificial Sequence
  Description of Artificial Sequence: Synthetic oligonucleotide
cuguccgucccacaaugcc

SEQ ID NO: 29456 - RNA, 19 nt, Artificial Sequence
  Description of Artificial Sequence: Synthetic oligonucleotide
cuuaaggaccagaggaaga

SEQ ID NO: 29457 - RNA, 19 nt, Artificial Sequence
  Description of Artificial Sequence: Synthetic oligonucleotide
ggagacaauguguagaacu

SEQ ID NO: 29458 - RNA, 19 nt, Artificial Sequence
  Description of Artificial Sequence: Synthetic oligonucleotide
gacgugugggaucaggcaa

SEQ ID NO: 29459 - RNA, 19 nt, Artificial Sequence
  Description of Artificial Sequence: Synthetic oligonucleotide
aacggagacugugugguau

SEQ ID NO: 29460 - RNA, 19 nt, Artificial Sequence
  Description of Artificial Sequence: Synthetic oligonucleotide
cuccggauaauuccaccag

SEQ ID NO: 29461 - RNA, 19 nt, Artificial Sequence
  Description of Artificial Sequence: Synthetic oligonucleotide
ccagcuagaggacggaacg

SEQ ID NO: 29462 - RNA, 19 nt, Artificial Sequence
  Description of Artificial Sequence: Synthetic oligonucleotide
auaggccacugauacauuu

SEQ ID NO: 29463 - RNA, 19 nt, Artificial Sequence
  Description of Artificial Sequence: Synthetic oligonucleotide
acgaaucaggucccuggag

SEQ ID NO: 29464 - RNA, 19 nt, Artificial Sequence
  Description of Artificial Sequence: Synthetic oligonucleotide
agacaccauagaccgacca

SEQ ID NO: 29465 - RNA, 19 nt, Artificial Sequence
  Description of Artificial Sequence: Synthetic oligonucleotide
agaaggaccgauggggugu

SEQ ID NO: 29466 - RNA, 19 nt, Artificial Sequence
  Description of Artificial Sequence: Synthetic oligonucleotide
agcccuagugcagugagcu

SEQ ID NO: 29467 - RNA, 19 nt, Artificial Sequence
  Description of Artificial Sequence: Synthetic oligonucleotide
acuucacccauggaggacu

SEQ ID NO: 29468 - RNA, 19 nt, Artificial Sequence
  Description of Artificial Sequence: Synthetic oligonucleotide
auggggcuccuaaggaucc

SEQ ID NO: 29469 - RNA, 19 nt, Artificial Sequence
  Description of Artificial Sequence: Synthetic oligonucleotide
guaugggacacugggagca

SEQ ID NO: 29470 - RNA, 19 nt, Artificial Sequence
  Description of Artificial Sequence: Synthetic oligonucleotide
uguagacaccauagaccga

SEQ ID NO: 29471 - RNA, 19 nt, Artificial Sequence
  Description of Artificial Sequence: Synthetic oligonucleotide
accgauggggugucaaacu

SEQ ID NO: 29472 - RNA, 19 nt, Artificial Sequence
  Description of Artificial Sequence: Synthetic oligonucleotide
uggugcgacaaaagaucca

SEQ ID NO: 29473 - RNA, 19 nt, Artificial Sequence
  Description of Artificial Sequence: Synthetic oligonucleotide
cccgguaucucauuucugc

SEQ ID NO: 29474 - RNA, 19 nt, Artificial Sequence
  Description of Artificial Sequence: Synthetic oligonucleotide
ccuggugcgacaaaagauc

SEQ ID NO: 29475 - RNA, 19 nt, Artificial Sequence
  Description of Artificial Sequence: Synthetic oligonucleotide
ccgugaaacgaccagcuag

SEQ ID NO: 29476 - RNA, 19 nt, Artificial Sequence
  Description of Artificial Sequence: Synthetic oligonucleotide
  modified_base (10)..(10): a, c, u, g, unknown or other
uguucccgcncccuugcuu

SEQ ID NO: 29477 - RNA, 19 nt, Artificial Sequence
  Description of Artificial Sequence: Synthetic oligonucleotide
agggcguagaugcuggcau

SEQ ID NO: 29478 - RNA, 19 nt, Artificial Sequence
  Description of Artificial Sequence: Synthetic oligonucleotide
cucucgaacaucggacccg

SEQ ID NO: 29479 - RNA, 19 nt, Artificial Sequence
  Description of Artificial Sequence: Synthetic oligonucleotide
gaaguaugggacacuggga

SEQ ID NO: 29480 - RNA, 19 nt, Artificial Sequence
  Description of Artificial Sequence: Synthetic oligonucleotide
guaucucauuucugcauuc

SEQ ID NO: 29481 - RNA, 19 nt, Artificial Sequence
  Description of Artificial Sequence: Synthetic oligonucleotide
augccagucuaacuguaaa

SEQ ID NO: 29482 - RNA, 19 nt, Artificial Sequence
  Description of Artificial Sequence: Synthetic oligonucleotide
auuuggaggugagaaugca

SEQ ID NO: 29483 - RNA, 19 nt, Artificial Sequence
  Description of Artificial Sequence: Synthetic oligonucleotide
gacggaacgcugccuuucc

SEQ ID NO: 29484 - RNA, 19 nt, Artificial Sequence
  Description of Artificial Sequence: Synthetic oligonucleotide
aaagcucgucauggagccg

SEQ ID NO: 29485 - RNA, 19 nt, Artificial Sequence
  Description of Artificial Sequence: Synthetic oligonucleotide
cugcgugaucaucaggcac

SEQ ID NO: 29486 - RNA, 19 nt, Artificial Sequence
  Description of Artificial Sequence: Synthetic oligonucleotide
gacaccauagaccgaccaa

SEQ ID NO: 29487 - RNA, 19 nt, Artificial Sequence
  Description of Artificial Sequence: Synthetic oligonucleotide
uagacaccauagaccgacc

SEQ ID NO: 29488 - RNA, 19 nt, Artificial Sequence
  Description of Artificial Sequence: Synthetic oligonucleotide
ggugcgacaaaagauccac

SEQ ID NO: 29489 - RNA, 19 nt, Artificial Sequence
  Description of Artificial Sequence: Synthetic oligonucleotide
gccuuuauagcgucaucag

SEQ ID NO: 29490 - RNA, 19 nt, Artificial Sequence
  Description of Artificial Sequence: Synthetic oligonucleotide
cuguuaacugcacagcaua

SEQ ID NO: 29491 - RNA, 19 nt, Artificial Sequence
  Description of Artificial Sequence: Synthetic oligonucleotide
cagaaugucuaggugguca

SEQ ID NO: 29492 - RNA, 19 nt, Artificial Sequence
  Description of Artificial Sequence: Synthetic oligonucleotide
agcauagaaccucgaacuu

SEQ ID NO: 29493 - RNA, 19 nt, Artificial Sequence
  Description of Artificial Sequence: Synthetic oligonucleotide
acggcuaaucaugaacugu

SEQ ID NO: 29494 - RNA, 19 nt, Artificial Sequence
  Description of Artificial Sequence: Synthetic oligonucleotide
gaccgaccaaggcacugag

SEQ ID NO: 29495 - RNA, 19 nt, Artificial Sequence
  Description of Artificial Sequence: Synthetic oligonucleotide
cauagcauagaaccucgaa

SEQ ID NO: 29496 - RNA, 19 nt, Artificial Sequence
  Description of Artificial Sequence: Synthetic oligonucleotide
agcuagaggacggaacgcu

SEQ ID NO: 29497 - RNA, 19 nt, Artificial Sequence
  Description of Artificial Sequence: Synthetic oligonucleotide
acgaccagcuagaggacgg

SEQ ID NO: 29498 - RNA, 19 nt, Artificial Sequence
  Description of Artificial Sequence: Synthetic oligonucleotide
caaccugcacaaguuggcc

SEQ ID NO: 29499 - RNA, 19 nt, Artificial Sequence
  Description of Artificial Sequence: Synthetic oligonucleotide
aggcuauauacagagucau

SEQ ID NO: 29500 - RNA, 19 nt, Artificial Sequence
  Description of Artificial Sequence: Synthetic oligonucleotide
uccugauaccuguguagaa

SEQ ID NO: 29501 - RNA, 19 nt, Artificial Sequence
  Description of Artificial Sequence: Synthetic oligonucleotide
cacggguaugcucucgaac

SEQ ID NO: 29502 - RNA, 19 nt, Artificial Sequence
  Description of Artificial Sequence: Synthetic oligonucleotide
augcuggacgugaugugcg

SEQ ID NO: 29503 - RNA, 19 nt, Artificial Sequence
  Description of Artificial Sequence: Synthetic oligonucleotide
gacggaagagggccauccc

SEQ ID NO: 29504 - RNA, 19 nt, Artificial Sequence
  Description of Artificial Sequence: Synthetic oligonucleotide
accucuuacgagugcaauu

SEQ ID NO: 29505 - RNA, 19 nt, Artificial Sequence
  Description of Artificial Sequence: Synthetic oligonucleotide
gaccgauggggugucaaac

SEQ ID NO: 29506 - RNA, 19 nt, Artificial Sequence
  Description of Artificial Sequence: Synthetic oligonucleotide
cagaaggaccgauggggug

SEQ ID NO: 29507 - RNA, 19 nt, Artificial Sequence
  Description of Artificial Sequence: Synthetic oligonucleotide
gaucaguaagucugucucu

SEQ ID NO: 29508 - RNA, 19 nt, Artificial Sequence
  Description of Artificial Sequence: Synthetic oligonucleotide
aaccucuuacgagugcaau

SEQ ID NO: 29509 - RNA, 19 nt, Artificial Sequence
  Description of Artificial Sequence: Synthetic oligonucleotide
guaaugguucccugaaccu

SEQ ID NO: 29510 - RNA, 19 nt, Artificial Sequence
  Description of Artificial Sequence: Synthetic oligonucleotide
uguguccucucuagagaau

SEQ ID NO: 29511 - RNA, 19 nt, Artificial Sequence
  Description of Artificial Sequence: Synthetic oligonucleotide
ucccgguaucucauuucug

SEQ ID NO: 29512 - RNA, 19 nt, Artificial Sequence
  Description of Artificial Sequence: Synthetic oligonucleotide
agagaaucccagaucuggu

SEQ ID NO: 29513 - RNA, 19 nt, Artificial Sequence
  Description of Artificial Sequence: Synthetic oligonucleotide
auagaaccucgaacuuucg

SEQ ID NO: 29514 - RNA, 19 nt, Artificial Sequence
  Description of Artificial Sequence: Synthetic oligonucleotide
cugggaaccaacuggccaa

SEQ ID NO: 29515 - RNA, 19 nt, Artificial Sequence
  Description of Artificial Sequence: Synthetic oligonucleotide
gaaucgggcuucugucuca

SEQ ID NO: 29516 - RNA, 19 nt, Artificial Sequence
  Description of Artificial Sequence: Synthetic oligonucleotide
uugugacuucugugaacca

SEQ ID NO: 29517 - RNA, 19 nt, Artificial Sequence
  Description of Artificial Sequence: Synthetic oligonucleotide
ugcgagaggaacggagacu

SEQ ID NO: 29518 - RNA, 19 nt, Artificial Sequence
  Description of Artificial Sequence: Synthetic oligonucleotide
cucgaacuuucguuggaca

SEQ ID NO: 29519 - RNA, 19 nt, Artificial Sequence
  Description of Artificial Sequence: Synthetic oligonucleotide
aacccuucgcagggaggcg

SEQ ID NO: 29520 - RNA, 19 nt, Artificial Sequence
  Description of Artificial Sequence: Synthetic oligonucleotide
aauaaaccgcuuacaucuu

SEQ ID NO: 29521 - RNA, 19 nt, Artificial Sequence
  Description of Artificial Sequence: Synthetic oligonucleotide
auggagaguuugcuucgga

SEQ ID NO: 29522 - RNA, 19 nt, Artificial Sequence
  Description of Artificial Sequence: Synthetic oligonucleotide
aucuuacagugacgcagca

SEQ ID NO: 29523 - RNA, 19 nt, Artificial Sequence
  Description of Artificial Sequence: Synthetic oligonucleotide
gcgagaggaacggagacug

SEQ ID NO: 29524 - RNA, 19 nt, Artificial Sequence
  Description of Artificial Sequence: Synthetic oligonucleotide
uaugggacacugggagcag

SEQ ID NO: 29525 - RNA, 19 nt, Artificial Sequence
  Description of Artificial Sequence: Synthetic oligonucleotide
ggaacgcugccuuuccuac

SEQ ID NO: 29526 - RNA, 19 nt, Artificial Sequence
  Description of Artificial Sequence: Synthetic oligonucleotide
gugcgagaggaacggagac

SEQ ID NO: 29527 - RNA, 19 nt, Artificial Sequence
  Description of Artificial Sequence: Synthetic oligonucleotide
cagucuggaucucguuuag

SEQ ID NO: 29528 - RNA, 19 nt, Artificial Sequence
  Description of Artificial Sequence: Synthetic oligonucleotide
uagaccgaccaaggcacug

SEQ ID NO: 29529 - RNA, 19 nt, Artificial Sequence
  Description of Artificial Sequence: Synthetic oligonucleotide
cacccauggaggacuuagc

SEQ ID NO: 29530 - RNA, 19 nt, Artificial Sequence
  Description of Artificial Sequence: Synthetic oligonucleotide
uucuguacccggggcuggg

SEQ ID NO: 29531 - RNA, 19 nt, Artificial Sequence
  Description of Artificial Sequence: Synthetic oligonucleotide
ccggauaauuccaccagac

SEQ ID NO: 29532 - RNA, 19 nt, Artificial Sequence
  Description of Artificial Sequence: Synthetic oligonucleotide
agaacugugugcaggcgau

SEQ ID NO: 29533 - RNA, 19 nt, Artificial Sequence
  Description of Artificial Sequence: Synthetic oligonucleotide
gugaaacaaacggcuaauc

SEQ ID NO: 29534 - RNA, 19 nt, Artificial Sequence
  Description of Artificial Sequence: Synthetic oligonucleotide
ggacuuagcccuugacagc

SEQ ID NO: 29535 - RNA, 19 nt, Artificial Sequence
  Description of Artificial Sequence: Synthetic oligonucleotide
aggcgaugggcaaugguca

SEQ ID NO: 29536 - RNA, 19 nt, Artificial Sequence
  Description of Artificial Sequence: Synthetic oligonucleotide
uccugccaccgaacucugg

SEQ ID NO: 29537 - RNA, 19 nt, Artificial Sequence
  Description of Artificial Sequence: Synthetic oligonucleotide
gcuaaggcgacagaauguc

SEQ ID NO: 29538 - RNA, 19 nt, Artificial Sequence
  Description of Artificial Sequence: Synthetic oligonucleotide
cuugacuuucuaacggccu

SEQ ID NO: 29539 - RNA, 19 nt, Artificial Sequence
  Description of Artificial Sequence: Synthetic oligonucleotide
cagaggagacugacaugag

SEQ ID NO: 29540 - RNA, 19 nt, Artificial Sequence
  Description of Artificial Sequence: Synthetic oligonucleotide
ucuguacccggggcugggg

SEQ ID NO: 29541 - RNA, 19 nt, Artificial Sequence
  Description of Artificial Sequence: Synthetic oligonucleotide
agcuccugauaccugugua

SEQ ID NO: 29542 - RNA, 19 nt, Artificial Sequence
  Description of Artificial Sequence: Synthetic oligonucleotide
aucggacccggagccaaac

SEQ ID NO: 29543 - RNA, 19 nt, Artificial Sequence
  Description of Artificial Sequence: Synthetic oligonucleotide
augaacaucucggccugga

SEQ ID NO: 29544 - RNA, 19 nt, Artificial Sequence
  Description of Artificial Sequence: Synthetic oligonucleotide
acgcugccuuuccuacagc

SEQ ID NO: 29545 - RNA, 19 nt, Artificial Sequence
  Description of Artificial Sequence: Synthetic oligonucleotide
uguacccggggcuggggau

SEQ ID NO: 29546 - RNA, 19 nt, Artificial Sequence
  Description of Artificial Sequence: Synthetic oligonucleotide
cugccaccgaacucuggac

SEQ ID NO: 29547 - RNA, 19 nt, Artificial Sequence
  Description of Artificial Sequence: Synthetic oligonucleotide
cagugacgcagcagagccc

SEQ ID NO: 29548 - RNA, 19 nt, Artificial Sequence
  Description of Artificial Sequence: Synthetic oligonucleotide
uacugcauguggggaguug

SEQ ID NO: 29549 - RNA, 19 nt, Artificial Sequence
  Description of Artificial Sequence: Synthetic oligonucleotide
cuucuguacccggggcugg

SEQ ID NO: 29550 - RNA, 19 nt, Artificial Sequence
  Description of Artificial Sequence: Synthetic oligonucleotide
accgaccaaggcacugagc

SEQ ID NO: 29551 - RNA, 19 nt, Artificial Sequence
  Description of Artificial Sequence: Synthetic oligonucleotide
cgaacaucggacccggagc

SEQ ID NO: 29552 - RNA, 19 nt, Artificial Sequence
  Description of Artificial Sequence: Synthetic oligonucleotide
aucccugcgaucauuccaa

SEQ ID NO: 29553 - RNA, 19 nt, Artificial Sequence
  Description of Artificial Sequence: Synthetic oligonucleotide
cuccugauaccuguguaga

SEQ ID NO: 29554 - RNA, 19 nt, Artificial Sequence
  Description of Artificial Sequence: Synthetic oligonucleotide
aacaucggacccggagcca

SEQ ID NO: 29555 - RNA, 19 nt, Artificial Sequence
  Description of Artificial Sequence: Synthetic oligonucleotide
cccuugacaaagacaacuc

SEQ ID NO: 29556 - RNA, 19 nt, Artificial Sequence
  Description of Artificial Sequence: Synthetic oligonucleotide
cagcuagaggacggaacgc

SEQ ID NO: 29557 - RNA, 19 nt, Artificial Sequence
  Description of Artificial Sequence: Synthetic oligonucleotide
gcgacaaaagauccacaca

SEQ ID NO: 29558 - RNA, 19 nt, Artificial Sequence
  Description of Artificial Sequence: Synthetic oligonucleotide
ugacccugguuuggggccc

SEQ ID NO: 29559 - RNA, 19 nt, Artificial Sequence
  Description of Artificial Sequence: Synthetic oligonucleotide
acaaaacgauagaaaugaa

SEQ ID NO: 29560 - RNA, 19 nt, Artificial Sequence
  Description of Artificial Sequence: Synthetic oligonucleotide
agaccgaccaaggcacuga

SEQ ID NO: 29561 - RNA, 19 nt, Artificial Sequence
  Description of Artificial Sequence: Synthetic oligonucleotide
cagcugcgugaucaucagg

SEQ ID NO: 29562 - RNA, 19 nt, Artificial Sequence
  Description of Artificial Sequence: Synthetic oligonucleotide
ccugaaccucuuacgagug

SEQ ID NO: 29563 - RNA, 19 nt, Artificial Sequence
  Description of Artificial Sequence: Synthetic oligonucleotide
ggcguagaugcuggcauag

SEQ ID NO: 29564 - RNA, 19 nt, Artificial Sequence
  Description of Artificial Sequence: Synthetic oligonucleotide
acggccuugcucucuggaa

SEQ ID NO: 29565 - RNA, 19 nt, Artificial Sequence
  Description of Artificial Sequence: Synthetic oligonucleotide
aacuuucguuggacagaag

SEQ ID NO: 29566 - RNA, 19 nt, Artificial Sequence
  Description of Artificial Sequence: Synthetic oligonucleotide
cacgaaucaggucccugga

SEQ ID NO: 29567 - RNA, 19 nt, Artificial Sequence
  Description of Artificial Sequence: Synthetic oligonucleotide
ccuccauuaauagcucccc

SEQ ID NO: 29568 - RNA, 19 nt, Artificial Sequence
  Description of Artificial Sequence: Synthetic oligonucleotide
cagccuccggauaauucca

SEQ ID NO: 29569 - RNA, 19 nt, Artificial Sequence
  Description of Artificial Sequence: Synthetic oligonucleotide
ccauggaggacuuagcccu

SEQ ID NO: 29570 - RNA, 19 nt, Artificial Sequence
  Description of Artificial Sequence: Synthetic oligonucleotide
ggacccggagccaaacaag

SEQ ID NO: 29571 - RNA, 19 nt, Artificial Sequence
  Description of Artificial Sequence: Synthetic oligonucleotide
uucuaacggccuugcucuc

SEQ ID NO: 29572 - RNA, 19 nt, Artificial Sequence
  Description of Artificial Sequence: Synthetic oligonucleotide
ggacgugugggaucaggca

SEQ ID NO: 29573 - RNA, 19 nt, Artificial Sequence
  Description of Artificial Sequence: Synthetic oligonucleotide
ggacgugaugugcgagagg

SEQ ID NO: 29574 - RNA, 19 nt, Artificial Sequence
  Description of Artificial Sequence: Synthetic oligonucleotide
gagggcguagaugcuggca

SEQ ID NO: 29575 - RNA, 19 nt, Artificial Sequence
  Description of Artificial Sequence: Synthetic oligonucleotide
acggaacgcugccuuuccu

SEQ ID NO: 29576 - RNA, 19 nt, Artificial Sequence
  Description of Artificial Sequence: Synthetic oligonucleotide
acggagacugugugguauu

SEQ ID NO: 29577 - RNA, 19 nt, Artificial Sequence
  Description of Artificial Sequence: Synthetic oligonucleotide
gcagugagcuguacaaaac

SEQ ID NO: 29578 - RNA, 19 nt, Artificial Sequence
  Description of Artificial Sequence: Synthetic oligonucleotide
caaacaugcuaaggcgaca

SEQ ID NO: 29579 - RNA, 19 nt, Artificial Sequence
  Description of Artificial Sequence: Synthetic oligonucleotide
caucucggccuggaauggc

SEQ ID NO: 29580 - RNA, 19 nt, Artificial Sequence
  Description of Artificial Sequence: Synthetic oligonucleotide
gaugugcgagaggaacgga

SEQ ID NO: 29581 - RNA, 19 nt, Artificial Sequence
  Description of Artificial Sequence: Synthetic oligonucleotide
acgcugaccacuggacuga

SEQ ID NO: 29582 - RNA, 19 nt, Artificial Sequence
  Description of Artificial Sequence: Synthetic oligonucleotide
  modified_base (3)..(3): a, c, u, g, unknown or other
gcncccuugcuugauccag

SEQ ID NO: 29583 - RNA, 19 nt, Artificial Sequence
  Description of Artificial Sequence: Synthetic oligonucleotide
uccuucggaaaagcucguc

SEQ ID NO: 29584 - RNA, 19 nt, Artificial Sequence
  Description of Artificial Sequence: Synthetic oligonucleotide
gcaccgugaaacgaccagc

SEQ ID NO: 29585 - RNA, 19 nt, Artificial Sequence
  Description of Artificial Sequence: Synthetic oligonucleotide
cgauggggugucaaacucc

SEQ ID NO: 29586 - RNA, 19 nt, Artificial Sequence
  Description of Artificial Sequence: Synthetic oligonucleotide
  modified_base (8)..(8): a, c, u, g, unknown or other
uucccgcncccuugcuuga

SEQ ID NO: 29587 - RNA, 19 nt, Artificial Sequence
  Description of Artificial Sequence: Synthetic oligonucleotide
cucagaugccagucuaacu

SEQ ID NO: 29588 - RNA, 19 nt, Artificial Sequence
  Description of Artificial Sequence: Synthetic oligonucleotide
gguaucucauuucugcauu

SEQ ID NO: 29589 - RNA, 19 nt, Artificial Sequence
  Description of Artificial Sequence: Synthetic oligonucleotide
accgugaaacgaccagcua

SEQ ID NO: 29590 - RNA, 19 nt, Artificial Sequence
  Description of Artificial Sequence: Synthetic oligonucleotide
  modified_base (5)..(5): a, c, u, g, unknown or other
ccgcncccuugcuugaucc

SEQ ID NO: 29591 - RNA, 19 nt, Artificial Sequence
  Description of Artificial Sequence: Synthetic oligonucleotide
gaaccucuuacgagugcaa

SEQ ID NO: 29592 - RNA, 19 nt, Artificial Sequence
  Description of Artificial Sequence: Synthetic oligonucleotide
gccagucuaacuguaaacu

SEQ ID NO: 29593 - RNA, 19 nt, Artificial Sequence
  Description of Artificial Sequence: Synthetic oligonucleotide
caccgugaaacgaccagcu

SEQ ID NO: 29594 - RNA, 19 nt, Artificial Sequence
  Description of Artificial Sequence: Synthetic oligonucleotide
ucccugcgaucauuccaac

SEQ ID NO: 29595 - RNA, 19 nt, Artificial Sequence
  Description of Artificial Sequence: Synthetic oligonucleotide
cgugaaacgaccagcuaga

SEQ ID NO: 29596 - RNA, 19 nt, Artificial Sequence
  Description of Artificial Sequence: Synthetic oligonucleotide
cucuuacgagugcaauuaa

SEQ ID NO: 29597 - RNA, 19 nt, Artificial Sequence
  Description of Artificial Sequence: Synthetic oligonucleotide
gcuagaggacggaacgcug

SEQ ID NO: 29598 - RNA, 19 nt, Artificial Sequence
  Description of Artificial Sequence: Synthetic oligonucleotide
ggucaggacaugcaacgcu

SEQ ID NO: 29599 - RNA, 19 nt, Artificial Sequence
  Description of Artificial Sequence: Synthetic oligonucleotide
ccuccggauaauuccacca

SEQ ID NO: 29600 - RNA, 19 nt, Artificial Sequence
  Description of Artificial Sequence: Synthetic oligonucleotide
gccuccggauaauuccacc

SEQ ID NO: 29601 - RNA, 19 nt, Artificial Sequence
  Description of Artificial Sequence: Synthetic oligonucleotide
cuaaggcgacagaaugucu

SEQ ID NO: 29602 - RNA, 19 nt, Artificial Sequence
  Description of Artificial Sequence: Synthetic oligonucleotide
ccgauggggugucaaacuc

SEQ ID NO: 29603 - RNA, 19 nt, Artificial Sequence
  Description of Artificial Sequence: Synthetic oligonucleotide
ggaucucguuuagaaacga

SEQ ID NO: 29604 - RNA, 19 nt, Artificial Sequence
  Description of Artificial Sequence: Synthetic oligonucleotide
acgugugggaucaggcaaa

SEQ ID NO: 29605 - RNA, 19 nt, Artificial Sequence
  Description of Artificial Sequence: Synthetic oligonucleotide
gcuucggaggucagccagg

SEQ ID NO: 29606 - RNA, 19 nt, Artificial Sequence
  Description of Artificial Sequence: Synthetic oligonucleotide
aguuugcuucggaggucag

SEQ ID NO: 29607 - RNA, 19 nt, Artificial Sequence
  Description of Artificial Sequence: Synthetic oligonucleotide
cccuguccgucccacaaug

SEQ ID NO: 29608 - RNA, 19 nt, Artificial Sequence
  Description of Artificial Sequence: Synthetic oligonucleotide
auagaccgaccaaggcacu

SEQ ID NO: 29609 - RNA, 19 nt, Artificial Sequence
  Description of Artificial Sequence: Synthetic oligonucleotide
aggucucuuuacaguacaa

SEQ ID NO: 29610 - RNA, 19 nt, Artificial Sequence
  Description of Artificial Sequence: Synthetic oligonucleotide
ccuguccgucccacaaugc

SEQ ID NO: 29611 - RNA, 19 nt, Artificial Sequence
  Description of Artificial Sequence: Synthetic oligonucleotide
ggagagcgcaccgcacggg

SEQ ID NO: 29612 - RNA, 19 nt, Artificial Sequence
  Description of Artificial Sequence: Synthetic oligonucleotide
aggaccgauggggugucaa

SEQ ID NO: 29613 - RNA, 19 nt, Artificial Sequence
  Description of Artificial Sequence: Synthetic oligonucleotide
accgaacucuggacgugug

SEQ ID NO: 29614 - RNA, 19 nt, Artificial Sequence
  Description of Artificial Sequence: Synthetic oligonucleotide
ccucuuacgagugcaauua

SEQ ID NO: 29615 - RNA, 19 nt, Artificial Sequence
  Description of Artificial Sequence: Synthetic oligonucleotide
gaagggguccagauuugau

SEQ ID NO: 29616 - RNA, 19 nt, Artificial Sequence
  Description of Artificial Sequence: Synthetic oligonucleotide
gugcgacaaaagauccaca

SEQ ID NO: 29617 - RNA, 19 nt, Artificial Sequence
  Description of Artificial Sequence: Synthetic oligonucleotide
gacgagccuggugcgacaa

SEQ ID NO: 29618 - RNA, 19 nt, Artificial Sequence
  Description of Artificial Sequence: Synthetic oligonucleotide
gagcgcaccgcacggguau

SEQ ID NO: 29619 - RNA, 19 nt, Artificial Sequence
  Description of Artificial Sequence: Synthetic oligonucleotide
gaccagcuagaggacggaa

SEQ ID NO: 29620 - RNA, 19 nt, Artificial Sequence
  Description of Artificial Sequence: Synthetic oligonucleotide
ccucgaacuuucguuggac

SEQ ID NO: 29621 - RNA, 19 nt, Artificial Sequence
  Description of Artificial Sequence: Synthetic oligonucleotide
gguccagauuugaucugac

SEQ ID NO: 29622 - RNA, 19 nt, Artificial Sequence
  Description of Artificial Sequence: Synthetic oligonucleotide
gaagaucccugcgaucauu

SEQ ID NO: 29623 - RNA, 19 nt, Artificial Sequence
  Description of Artificial Sequence: Synthetic oligonucleotide
ccgguaucucauuucugca

SEQ ID NO: 29624 - RNA, 19 nt, Artificial Sequence
  Description of Artificial Sequence: Synthetic oligonucleotide
cccugaaccucuuacgagu

SEQ ID NO: 29625 - RNA, 19 nt, Artificial Sequence
  Description of Artificial Sequence: Synthetic oligonucleotide
ccuuuauagcgucaucagu

SEQ ID NO: 29626 - RNA, 19 nt, Artificial Sequence
  Description of Artificial Sequence: Synthetic oligonucleotide
gcucuaacauaaacaguua

SEQ ID NO: 29627 - RNA, 19 nt, Artificial Sequence
  Description of Artificial Sequence: Synthetic oligonucleotide
ggacggaacgcugccuuuc

SEQ ID NO: 29628 - RNA, 19 nt, Artificial Sequence
  Description of Artificial Sequence: Synthetic oligonucleotide
  modified_base (7)..(7): a, c, u, g, unknown or other
ucccgcncccuugcuugau

SEQ ID NO: 29629 - RNA, 19 nt, Artificial Sequence
  Description of Artificial Sequence: Synthetic oligonucleotide
gcgaugggcaauggucagc

SEQ ID NO: 29630 - RNA, 19 nt, Artificial Sequence
  Description of Artificial Sequence: Synthetic oligonucleotide
ggaccgauggggugucaaa

SEQ ID NO: 29631 - RNA, 19 nt, Artificial Sequence
  Description of Artificial Sequence: Synthetic oligonucleotide
gcgaucauuccaacacaga

SEQ ID NO: 29632 - RNA, 19 nt, Artificial Sequence
  Description of Artificial Sequence: Synthetic oligonucleotide
  modified_base (2)..(2): a, c, u, g, unknown or other
cncccuugcuugauccagu

SEQ ID NO: 29633 - RNA, 19 nt, Artificial Sequence
  Description of Artificial Sequence: Synthetic oligonucleotide
ccgaugucgcugauucuca

SEQ ID NO: 29634 - RNA, 19 nt, Artificial Sequence
  Description of Artificial Sequence: Synthetic oligonucleotide
ccgcuuacaucuuuacugu

SEQ ID NO: 29635 - RNA, 19 nt, Artificial Sequence
  Description of Artificial Sequence: Synthetic oligonucleotide
acgagccuggugcgacaaa

SEQ ID NO: 29636 - RNA, 19 nt, Artificial Sequence
  Description of Artificial Sequence: Synthetic oligonucleotide
acccaagcuaugggcccca

SEQ ID NO: 29637 - RNA, 19 nt, Artificial Sequence
  Description of Artificial Sequence: Synthetic oligonucleotide
cuggaauggcaggcgcaca

SEQ ID NO: 29638 - RNA, 19 nt, Artificial Sequence
  Description of Artificial Sequence: Synthetic oligonucleotide
agcgcaccgcacggguaug

SEQ ID NO: 29639 - RNA, 19 nt, Artificial Sequence
  Description of Artificial Sequence: Synthetic oligonucleotide
aggcgcacauccacuucau

SEQ ID NO: 29640 - RNA, 19 nt, Artificial Sequence
  Description of Artificial Sequence: Synthetic oligonucleotide
cccggagccaaacaagccu

SEQ ID NO: 29641 - RNA, 19 nt, Artificial Sequence
  Description of Artificial Sequence: Synthetic oligonucleotide
ccccaagggagagcgcacc

SEQ ID NO: 29642 - RNA, 19 nt, Artificial Sequence
  Description of Artificial Sequence: Synthetic oligonucleotide
cucgaacaucggacccgga

SEQ ID NO: 29643 - RNA, 19 nt, Artificial Sequence
  Description of Artificial Sequence: Synthetic oligonucleotide
gccuggugcgacaaaagau

SEQ ID NO: 29644 - RNA, 19 nt, Artificial Sequence
  Description of Artificial Sequence: Synthetic oligonucleotide
agagcgcaccgcacgggua

SEQ ID NO: 29645 - RNA, 19 nt, Artificial Sequence
  Description of Artificial Sequence: Synthetic oligonucleotide
cccugcgaucauuccaaca

SEQ ID NO: 29646 - RNA, 19 nt, Artificial Sequence
  Description of Artificial Sequence: Synthetic oligonucleotide
ccgcuccccaacugagaag

SEQ ID NO: 29647 - RNA, 19 nt, Artificial Sequence
  Description of Artificial Sequence: Synthetic oligonucleotide
  modified_base (19)..(19): a, c, u, g, unknown or other
gcccacguucagcaugaan

SEQ ID NO: 29648 - RNA, 19 nt, Artificial Sequence
  Description of Artificial Sequence: Synthetic oligonucleotide
ggacgagccuggugcgaca

SEQ ID NO: 29649 - RNA, 19 nt, Artificial Sequence
  Description of Artificial Sequence: Synthetic oligonucleotide
cugcaaaggcuucccggau

SEQ ID NO: 29650 - RNA, 19 nt, Artificial Sequence
  Description of Artificial Sequence: Synthetic oligonucleotide
cugagaaguuguccccauu

SEQ ID NO: 29651 - RNA, 19 nt, Artificial Sequence
  Description of Artificial Sequence: Synthetic oligonucleotide
gcacggguaugcucucgaa

SEQ ID NO: 29652 - RNA, 19 nt, Artificial Sequence
  Description of Artificial Sequence: Synthetic oligonucleotide
cggacccggagccaaacaa

SEQ ID NO: 29653 - RNA, 19 nt, Artificial Sequence
  Description of Artificial Sequence: Synthetic oligonucleotide
cggcuaaucaugaacuguu

SEQ ID NO: 29654 - RNA, 19 nt, Artificial Sequence
  Description of Artificial Sequence: Synthetic oligonucleotide
  modified_base (6)..(6): a, c, u, g, unknown or other
cccgcncccuugcuugauc

SEQ ID NO: 29655 - RNA, 19 nt, Artificial Sequence
  Description of Artificial Sequence: Synthetic oligonucleotide
gcgcaccgcacggguaugc

SEQ ID NO: 29656 - RNA, 19 nt, Artificial Sequence
  Description of Artificial Sequence: Synthetic oligonucleotide
cggaacgcugccuuuccua

SEQ ID NO: 29657 - RNA, 19 nt, Artificial Sequence
  Description of Artificial Sequence: Synthetic oligonucleotide
ccgcacggguaugcucucg

SEQ ID NO: 29658 - RNA, 19 nt, Artificial Sequence
  Description of Artificial Sequence: Synthetic oligonucleotide
cacugggagcagucuggau

SEQ ID NO: 29659 - RNA, 19 nt, Artificial Sequence
  Description of Artificial Sequence: Synthetic oligonucleotide
ccggagccaaacaagccuu

SEQ ID NO: 29660 - RNA, 19 nt, Artificial Sequence
  Description of Artificial Sequence: Synthetic oligonucleotide
cgcacggguaugcucucga

SEQ ID NO: 29661 - RNA, 19 nt, Artificial Sequence
  Description of Artificial Sequence: Synthetic oligonucleotide
  modified_base (4)..(4): a, c, u, g, unknown or other
cgcncccuugcuugaucca

SEQ ID NO: 29662 - RNA, 19 nt, Artificial Sequence
  Description of Artificial Sequence: Synthetic oligonucleotide
cgcuuacaucuuuacugua

SEQ ID NO: 29663 - RNA, 19 nt, Artificial Sequence
  Description of Artificial Sequence: Synthetic oligonucleotide
gcguagaugcuggcauagu

SEQ ID NO: 29664 - RNA, 19 nt, Artificial Sequence
  Description of Artificial Sequence: Synthetic oligonucleotide
gcccaugcaagaggacuau

SEQ ID NO: 29665 - RNA, 19 nt, Artificial Sequence
  Description of Artificial Sequence: Synthetic oligonucleotide
caggcggaggagccuuguu

SEQ ID NO: 29666 - RNA, 19 nt, Artificial Sequence
  Description of Artificial Sequence: Synthetic oligonucleotide
cgugugggaucaggcaaaa

SEQ ID NO: 29667 - RNA, 19 nt, Artificial Sequence
  Description of Artificial Sequence: Synthetic oligonucleotide
caggccgaugucgcugauu

SEQ ID NO: 29668 - RNA, 19 nt, Artificial Sequence
  Description of Artificial Sequence: Synthetic oligonucleotide
cgaccagcuagaggacgga

SEQ ID NO: 29669 - RNA, 19 nt, Artificial Sequence
  Description of Artificial Sequence: Synthetic oligonucleotide
gauauauauauauauauag

SEQ ID NO: 29670 - RNA, 19 nt, Artificial Sequence
  Description of Artificial Sequence: Synthetic oligonucleotide
aaaaccuuauaauacgacc

SEQ ID NO: 29671 - RNA, 19 nt, Artificial Sequence
  Description of Artificial Sequence: Synthetic oligonucleotide
uauauauauauauagauac

SEQ ID NO: 29672 - RNA, 19 nt, Artificial Sequence
  Description of Artificial Sequence: Synthetic oligonucleotide
ucuauaauguaacauagag

SEQ ID NO: 29673 - RNA, 19 nt, Artificial Sequence
  Description of Artificial Sequence: Synthetic oligonucleotide
aauacgaccucuuugaaca

SEQ ID NO: 29674 - RNA, 19 nt, Artificial Sequence
  Description of Artificial Sequence: Synthetic oligonucleotide
uuauauuacagcagguugg

SEQ ID NO: 29675 - RNA, 19 nt, Artificial Sequence
  Description of Artificial Sequence: Synthetic oligonucleotide
uauauauauauauauagau

SEQ ID NO: 29676 - RNA, 19 nt, Artificial Sequence
  Description of Artificial Sequence: Synthetic oligonucleotide
uauauauguauauauauaa

SEQ ID NO: 29677 - RNA, 19 nt, Artificial Sequence
  Description of Artificial Sequence: Synthetic oligonucleotide
aaaugucgcauucaguguc

SEQ ID NO: 29678 - RNA, 19 nt, Artificial Sequence
  Description of Artificial Sequence: Synthetic oligonucleotide
cuacaauacgcuuuaaugc

SEQ ID NO: 29679 - RNA, 19 nt, Artificial Sequence
  Description of Artificial Sequence: Synthetic oligonucleotide
uccuuaauauauaacaagu

SEQ ID NO: 29680 - RNA, 19 nt, Artificial Sequence
  Description of Artificial Sequence: Synthetic oligonucleotide
uccguuaaaagugagaaca

SEQ ID NO: 29681 - RNA, 19 nt, Artificial Sequence
  Description of Artificial Sequence: Synthetic oligonucleotide
uauguuagucuauuguuag

SEQ ID NO: 29682 - RNA, 19 nt, Artificial Sequence
  Description of Artificial Sequence: Synthetic oligonucleotide
uugagauauauauauauau

SEQ ID NO: 29683 - RNA, 19 nt, Artificial Sequence
  Description of Artificial Sequence: Synthetic oligonucleotide
aaauaguaaagugagugga

SEQ ID NO: 29684 - RNA, 19 nt, Artificial Sequence
  Description of Artificial Sequence: Synthetic oligonucleotide
ugcuaaaauagucucuaag

SEQ ID NO: 29685 - RNA, 19 nt, Artificial Sequence
  Description of Artificial Sequence: Synthetic oligonucleotide
uauauauauauagauacau

SEQ ID NO: 29686 - RNA, 19 nt, Artificial Sequence
  Description of Artificial Sequence: Synthetic oligonucleotide
aaccuuauaauacgaccuc

SEQ ID NO: 29687 - RNA, 19 nt, Artificial Sequence
  Description of Artificial Sequence: Synthetic oligonucleotide
accauauauuauaacagcc

SEQ ID NO: 29688 - RNA, 19 nt, Artificial Sequence
  Description of Artificial Sequence: Synthetic oligonucleotide
uaucaaauagccguguuug

SEQ ID NO: 29689 - RNA, 19 nt, Artificial Sequence
  Description of Artificial Sequence: Synthetic oligonucleotide
auauccacacuacaauacg

SEQ ID NO: 29690 - RNA, 19 nt, Artificial Sequence
  Description of Artificial Sequence: Synthetic oligonucleotide
uaacauagagagucuaugc

SEQ ID NO: 29691 - RNA, 19 nt, Artificial Sequence
  Description of Artificial Sequence: Synthetic oligonucleotide
aucuaacucauggugaggc

SEQ ID NO: 29692 - RNA, 19 nt, Artificial Sequence
  Description of Artificial Sequence: Synthetic oligonucleotide
aaaccuuauaauacgaccu

SEQ ID NO: 29693 - RNA, 19 nt, Artificial Sequence
  Description of Artificial Sequence: Synthetic oligonucleotide
ugagauauauauauauaua

SEQ ID NO: 29694 - RNA, 19 nt, Artificial Sequence
  Description of Artificial Sequence: Synthetic oligonucleotide
uagacuugcauccuauuac

SEQ ID NO: 29695 - RNA, 19 nt, Artificial Sequence
  Description of Artificial Sequence: Synthetic oligonucleotide
uuauaacagccaaauguca

SEQ ID NO: 29696 - RNA, 19 nt, Artificial Sequence
  Description of Artificial Sequence: Synthetic oligonucleotide
uauuaagcuaaggugacac

SEQ ID NO: 29697 - RNA, 19 nt, Artificial Sequence
  Description of Artificial Sequence: Synthetic oligonucleotide
ucaugguauuauauacacg

SEQ ID NO: 29698 - RNA, 19 nt, Artificial Sequence
  Description of Artificial Sequence: Synthetic oligonucleotide
gagauauauauauauauau

SEQ ID NO: 29699 - RNA, 19 nt, Artificial Sequence
  Description of Artificial Sequence: Synthetic oligonucleotide
uggaacguuucguaguggg

SEQ ID NO: 29700 - RNA, 19 nt, Artificial Sequence
  Description of Artificial Sequence: Synthetic oligonucleotide
ugucacuucuauaauguaa

SEQ ID NO: 29701 - RNA, 19 nt, Artificial Sequence
  Description of Artificial Sequence: Synthetic oligonucleotide
auauauauauauauauaga

SEQ ID NO: 29702 - RNA, 19 nt, Artificial Sequence
  Description of Artificial Sequence: Synthetic oligonucleotide
ucuguugccgaccuauuac

SEQ ID NO: 29703 - RNA, 19 nt, Artificial Sequence
  Description of Artificial Sequence: Synthetic oligonucleotide
aacguuucguagugggauc

SEQ ID NO: 29704 - RNA, 19 nt, Artificial Sequence
  Description of Artificial Sequence: Synthetic oligonucleotide
uucgguugagcacuguagc

SEQ ID NO: 29705 - RNA, 19 nt, Artificial Sequence
  Description of Artificial Sequence: Synthetic oligonucleotide
uccuauuacauauggaauu

SEQ ID NO: 29706 - RNA, 19 nt, Artificial Sequence
  Description of Artificial Sequence: Synthetic oligonucleotide
uuuaccggggucgugcugg

SEQ ID NO: 29707 - RNA, 19 nt, Artificial Sequence
  Description of Artificial Sequence: Synthetic oligonucleotide
ugcacgacgaggaaaugca

SEQ ID NO: 29708 - RNA, 19 nt, Artificial Sequence
  Description of Artificial Sequence: Synthetic oligonucleotide
uucacuagguauuaagcua

SEQ ID NO: 29709 - RNA, 19 nt, Artificial Sequence
  Description of Artificial Sequence: Synthetic oligonucleotide
uuagucuauuguuaguaaa

SEQ ID NO: 29710 - RNA, 19 nt, Artificial Sequence
  Description of Artificial Sequence: Synthetic oligonucleotide
guaccuaacugccugggag

SEQ ID NO: 29711 - RNA, 19 nt, Artificial Sequence
  Description of Artificial Sequence: Synthetic oligonucleotide
aauaggagugcagcaguuc

SEQ ID NO: 29712 - RNA, 19 nt, Artificial Sequence
  Description of Artificial Sequence: Synthetic oligonucleotide
agacaauaccuucugauua

SEQ ID NO: 29713 - RNA, 19 nt, Artificial Sequence
  Description of Artificial Sequence: Synthetic oligonucleotide
caccgauaaacauuuuacc

SEQ ID NO: 29714 - RNA, 19 nt, Artificial Sequence
  Description of Artificial Sequence: Synthetic oligonucleotide
aguauacuaaugguuagcu

SEQ ID NO: 29715 - RNA, 19 nt, Artificial Sequence
  Description of Artificial Sequence: Synthetic oligonucleotide
aaggccguugcaaucaaag

SEQ ID NO: 29716 - RNA, 19 nt, Artificial Sequence
  Description of Artificial Sequence: Synthetic oligonucleotide
ucuugggcugugcacgacg

SEQ ID NO: 29717 - RNA, 19 nt, Artificial Sequence
  Description of Artificial Sequence: Synthetic oligonucleotide
uuaucaaauagccguguuu

SEQ ID NO: 29718 - RNA, 19 nt, Artificial Sequence
  Description of Artificial Sequence: Synthetic oligonucleotide
uguaacauagagagucuau

SEQ ID NO: 29719 - RNA, 19 nt, Artificial Sequence
  Description of Artificial Sequence: Synthetic oligonucleotide
uuaagcuaaggugacacua

SEQ ID NO: 29720 - RNA, 19 nt, Artificial Sequence
  Description of Artificial Sequence: Synthetic oligonucleotide
cauauauauguauauauau

SEQ ID NO: 29721 - RNA, 19 nt, Artificial Sequence
  Description of Artificial Sequence: Synthetic oligonucleotide
ggccguugcaaucaaaggg

SEQ ID NO: 29722 - RNA, 19 nt, Artificial Sequence
  Description of Artificial Sequence: Synthetic oligonucleotide
auauauauauauauagaua

SEQ ID NO: 29723 - RNA, 19 nt, Artificial Sequence
  Description of Artificial Sequence: Synthetic oligonucleotide
uguaguuaauggaauucua

SEQ ID NO: 29724 - RNA, 19 nt, Artificial Sequence
  Description of Artificial Sequence: Synthetic oligonucleotide
auccguuaaaagugagaac

SEQ ID NO: 29725 - RNA, 19 nt, Artificial Sequence
  Description of Artificial Sequence: Synthetic oligonucleotide
guaacauagagagucuaug

SEQ ID NO: 29726 - RNA, 19 nt, Artificial Sequence
  Description of Artificial Sequence: Synthetic oligonucleotide
agauaacccuccuacaaau

SEQ ID NO: 29727 - RNA, 19 nt, Artificial Sequence
  Description of Artificial Sequence: Synthetic oligonucleotide
gaauuaugguugauccccg

SEQ ID NO: 29728 - RNA, 19 nt, Artificial Sequence
  Description of Artificial Sequence: Synthetic oligonucleotide
aaucgucuuggaaucuaac

SEQ ID NO: 29729 - RNA, 19 nt, Artificial Sequence
  Description of Artificial Sequence: Synthetic oligonucleotide
aauuaugguugauccccga

SEQ ID NO: 29730 - RNA, 19 nt, Artificial Sequence
  Description of Artificial Sequence: Synthetic oligonucleotide
ggaccauauauuauaacag

SEQ ID NO: 29731 - RNA, 19 nt, Artificial Sequence
  Description of Artificial Sequence: Synthetic oligonucleotide
uaauuccccacuccggagu

SEQ ID NO: 29732 - RNA, 19 nt, Artificial Sequence
  Description of Artificial Sequence: Synthetic oligonucleotide
auauauauauauagauaca

SEQ ID NO: 29733 - RNA, 19 nt, Artificial Sequence
  Description of Artificial Sequence: Synthetic oligonucleotide
uagcuaggagcgaauccgg

SEQ ID NO: 29734 - RNA, 19 nt, Artificial Sequence
  Description of Artificial Sequence: Synthetic oligonucleotide
uagcuagaccauaacauuu

SEQ ID NO: 29735 - RNA, 19 nt, Artificial Sequence
  Description of Artificial Sequence: Synthetic oligonucleotide
uguaaaggccguugcaauc

SEQ ID NO: 29736 - RNA, 19 nt, Artificial Sequence
  Description of Artificial Sequence: Synthetic oligonucleotide
auauauauguauauauaua

SEQ ID NO: 29737 - RNA, 19 nt, Artificial Sequence
  Description of Artificial Sequence: Synthetic oligonucleotide
caguguucgcagauaaccc

SEQ ID NO: 29738 - RNA, 19 nt, Artificial Sequence
  Description of Artificial Sequence: Synthetic oligonucleotide
uguucgcagauaacccucc

SEQ ID NO: 29739 - RNA, 19 nt, Artificial Sequence
  Description of Artificial Sequence: Synthetic oligonucleotide
cuagguauuaagcuaaggu

SEQ ID NO: 29740 - RNA, 19 nt, Artificial Sequence
  Description of Artificial Sequence: Synthetic oligonucleotide
uucguagugggaucucuca

SEQ ID NO: 29741 - RNA, 19 nt, Artificial Sequence
  Description of Artificial Sequence: Synthetic oligonucleotide
agauauauauauauauaua

SEQ ID NO: 29742 - RNA, 19 nt, Artificial Sequence
  Description of Artificial Sequence: Synthetic oligonucleotide
uccaaaugauagagagaag

SEQ ID NO: 29743 - RNA, 19 nt, Artificial Sequence
  Description of Artificial Sequence: Synthetic oligonucleotide
uguugccgaccuauuacca

SEQ ID NO: 29744 - RNA, 19 nt, Artificial Sequence
  Description of Artificial Sequence: Synthetic oligonucleotide
agucccuagcccucguuuc

SEQ ID NO: 29745 - RNA, 19 nt, Artificial Sequence
  Description of Artificial Sequence: Synthetic oligonucleotide
aagaugcuuuugcgcuacc

SEQ ID NO: 29746 - RNA, 19 nt, Artificial Sequence
  Description of Artificial Sequence: Synthetic oligonucleotide
uaugccguggccgaagccu

SEQ ID NO: 29747 - RNA, 19 nt, Artificial Sequence
  Description of Artificial Sequence: Synthetic oligonucleotide
auauauguauauauauaaa

SEQ ID NO: 29748 - RNA, 19 nt, Artificial Sequence
  Description of Artificial Sequence: Synthetic oligonucleotide
acuagguauuaagcuaagg

SEQ ID NO: 29749 - RNA, 19 nt, Artificial Sequence
  Description of Artificial Sequence: Synthetic oligonucleotide
uagagaucggcggcgacag

SEQ ID NO: 29750 - RNA, 19 nt, Artificial Sequence
  Description of Artificial Sequence: Synthetic oligonucleotide
caaauuggcuagcccacgc

SEQ ID NO: 29751 - RNA, 19 nt, Artificial Sequence
  Description of Artificial Sequence: Synthetic oligonucleotide
gaaugucuauguuagucua

SEQ ID NO: 29752 - RNA, 19 nt, Artificial Sequence
  Description of Artificial Sequence: Synthetic oligonucleotide
aggccguugcaaucaaagg

SEQ ID NO: 29753 - RNA, 19 nt, Artificial Sequence
  Description of Artificial Sequence: Synthetic oligonucleotide
uuaucuacacuugcugggu

SEQ ID NO: 29754 - RNA, 19 nt, Artificial Sequence
  Description of Artificial Sequence: Synthetic oligonucleotide
cuugagauauauauauaua

SEQ ID NO: 29755 - RNA, 19 nt, Artificial Sequence
  Description of Artificial Sequence: Synthetic oligonucleotide
auuaagcuaaggugacacu

SEQ ID NO: 29756 - RNA, 19 nt, Artificial Sequence
  Description of Artificial Sequence: Synthetic oligonucleotide
auauauaaaccgaaagguu

SEQ ID NO: 29757 - RNA, 19 nt, Artificial Sequence
  Description of Artificial Sequence: Synthetic oligonucleotide
guagugggaucucucauga

SEQ ID NO: 29758 - RNA, 19 nt, Artificial Sequence
  Description of Artificial Sequence: Synthetic oligonucleotide
cugccugggagcaacuccc

SEQ ID NO: 29759 - RNA, 19 nt, Artificial Sequence
  Description of Artificial Sequence: Synthetic oligonucleotide
gugcuaaugcgguucuuag

SEQ ID NO: 29760 - RNA, 19 nt, Artificial Sequence
  Description of Artificial Sequence: Synthetic oligonucleotide
accuaaacaaaggaccacu

SEQ ID NO: 29761 - RNA, 19 nt, Artificial Sequence
  Description of Artificial Sequence: Synthetic oligonucleotide
cacgacgaggaaaugcaac

SEQ ID NO: 29762 - RNA, 19 nt, Artificial Sequence
  Description of Artificial Sequence: Synthetic oligonucleotide
auucgguugagcacuguag

SEQ ID NO: 29763 - RNA, 19 nt, Artificial Sequence
  Description of Artificial Sequence: Synthetic oligonucleotide
acauauauauguauauaua

SEQ ID NO: 29764 - RNA, 19 nt, Artificial Sequence
  Description of Artificial Sequence: Synthetic oligonucleotide
uaaugccaccuauugaguu

SEQ ID NO: 29765 - RNA, 19 nt, Artificial Sequence
  Description of Artificial Sequence: Synthetic oligonucleotide
gaggaccauauauuauaac

SEQ ID NO: 29766 - RNA, 19 nt, Artificial Sequence
  Description of Artificial Sequence: Synthetic oligonucleotide
cauccguuaaaagugagaa

SEQ ID NO: 29767 - RNA, 19 nt, Artificial Sequence
  Description of Artificial Sequence: Synthetic oligonucleotide
gaggggucgguuuuaauua

SEQ ID NO: 29768 - RNA, 19 nt, Artificial Sequence
  Description of Artificial Sequence: Synthetic oligonucleotide
aacauuuuaccggggucgu

SEQ ID NO: 29769 - RNA, 19 nt, Artificial Sequence
  Description of Artificial Sequence: Synthetic oligonucleotide
cacuuauguaauuccccac

SEQ ID NO: 29770 - RNA, 19 nt, Artificial Sequence
  Description of Artificial Sequence: Synthetic oligonucleotide
caaaugauagagagaagua

SEQ ID NO: 29771 - RNA, 19 nt, Artificial Sequence
  Description of Artificial Sequence: Synthetic oligonucleotide
caggguaccuaacugccug

SEQ ID NO: 29772 - RNA, 19 nt, Artificial Sequence
  Description of Artificial Sequence: Synthetic oligonucleotide
uagccucggccauagguug

SEQ ID NO: 29773 - RNA, 19 nt, Artificial Sequence
  Description of Artificial Sequence: Synthetic oligonucleotide
auacgcuuuaaugccaccu

SEQ ID NO: 29774 - RNA, 19 nt, Artificial Sequence
  Description of Artificial Sequence: Synthetic oligonucleotide
ugaaacgcuuagacuugca

SEQ ID NO: 29775 - RNA, 19 nt, Artificial Sequence
  Description of Artificial Sequence: Synthetic oligonucleotide
aagucccuagcccucguuu

SEQ ID NO: 29776 - RNA, 19 nt, Artificial Sequence
  Description of Artificial Sequence: Synthetic oligonucleotide
guaaaggccguugcaauca

SEQ ID NO: 29777 - RNA, 19 nt, Artificial Sequence
  Description of Artificial Sequence: Synthetic oligonucleotide
auaauacgaccucuuugaa

SEQ ID NO: 29778 - RNA, 19 nt, Artificial Sequence
  Description of Artificial Sequence: Synthetic oligonucleotide
uggcugaccuucaauuaaa

SEQ ID NO: 29779 - RNA, 19 nt, Artificial Sequence
  Description of Artificial Sequence: Synthetic oligonucleotide
uaucuacacuugcuggguc

SEQ ID NO: 29780 - RNA, 19 nt, Artificial Sequence
  Description of Artificial Sequence: Synthetic oligonucleotide
auauauuauaacagccaaa

SEQ ID NO: 29781 - RNA, 19 nt, Artificial Sequence
  Description of Artificial Sequence: Synthetic oligonucleotide
gaagaugcuuuugcgcuac

SEQ ID NO: 29782 - RNA, 19 nt, Artificial Sequence
  Description of Artificial Sequence: Synthetic oligonucleotide
ugauccccgagaggggucg

SEQ ID NO: 29783 - RNA, 19 nt, Artificial Sequence
  Description of Artificial Sequence: Synthetic oligonucleotide
aaugucuauguuagucuau

SEQ ID NO: 29784 - RNA, 19 nt, Artificial Sequence
  Description of Artificial Sequence: Synthetic oligonucleotide
uugccgaccuauuaccaau

SEQ ID NO: 29785 - RNA, 19 nt, Artificial Sequence
  Description of Artificial Sequence: Synthetic oligonucleotide
gcuaggagcgaauccgggg

SEQ ID NO: 29786 - RNA, 19 nt, Artificial Sequence
  Description of Artificial Sequence: Synthetic oligonucleotide
ccacaugaaacgcuuagac

SEQ ID NO: 29787 - RNA, 19 nt, Artificial Sequence
  Description of Artificial Sequence: Synthetic oligonucleotide
accuuauaauacgaccucu

SEQ ID NO: 29788 - RNA, 19 nt, Artificial Sequence
  Description of Artificial Sequence: Synthetic oligonucleotide
cuaaugcgguucuuagguc

SEQ ID NO: 29789 - RNA, 19 nt, Artificial Sequence
  Description of Artificial Sequence: Synthetic oligonucleotide
auuuuaccggggucgugcu

SEQ ID NO: 29790 - RNA, 19 nt, Artificial Sequence
  Description of Artificial Sequence: Synthetic oligonucleotide
aggaccacucagaaacuuc

SEQ ID NO: 29791 - RNA, 19 nt, Artificial Sequence
  Description of Artificial Sequence: Synthetic oligonucleotide
auacgaccucuuugaacag

SEQ ID NO: 29792 - RNA, 19 nt, Artificial Sequence
  Description of Artificial Sequence: Synthetic oligonucleotide
gcuaaugcgguucuuaggu

SEQ ID NO: 29793 - RNA, 19 nt, Artificial Sequence
  Description of Artificial Sequence: Synthetic oligonucleotide
auagccguguuugaauuau

SEQ ID NO: 29794 - RNA, 19 nt, Artificial Sequence
  Description of Artificial Sequence: Synthetic oligonucleotide
gacgaaaccgaagccucug

SEQ ID NO: 29795 - RNA, 19 nt, Artificial Sequence
  Description of Artificial Sequence: Synthetic oligonucleotide
gcuugagauauauauauau

SEQ ID NO: 29796 - RNA, 19 nt, Artificial Sequence
  Description of Artificial Sequence: Synthetic oligonucleotide
uucgcagauaacccuccua

SEQ ID NO: 29797 - RNA, 19 nt, Artificial Sequence
  Description of Artificial Sequence: Synthetic oligonucleotide
guguuugaauuaugguuga

SEQ ID NO: 29798 - RNA, 19 nt, Artificial Sequence
  Description of Artificial Sequence: Synthetic oligonucleotide
acaauacgcuuuaaugcca

SEQ ID NO: 29799 - RNA, 19 nt, Artificial Sequence
  Description of Artificial Sequence: Synthetic oligonucleotide
gaucggcggcgacaggucc

SEQ ID NO: 29800 - RNA, 19 nt, Artificial Sequence
  Description of Artificial Sequence: Synthetic oligonucleotide
acgcuuuaaugccaccuau

SEQ ID NO: 29801 - RNA, 19 nt, Artificial Sequence
  Description of Artificial Sequence: Synthetic oligonucleotide
gugcacgacgaggaaaugc

SEQ ID NO: 29802 - RNA, 19 nt, Artificial Sequence
  Description of Artificial Sequence: Synthetic oligonucleotide
uucgcccagucuugccugg

SEQ ID NO: 29803 - RNA, 19 nt, Artificial Sequence
  Description of Artificial Sequence: Synthetic oligonucleotide
uaaaggccguugcaaucaa

SEQ ID NO: 29804 - RNA, 19 nt, Artificial Sequence
  Description of Artificial Sequence: Synthetic oligonucleotide
cuagcccacgcuacucaag

SEQ ID NO: 29805 - RNA, 19 nt, Artificial Sequence
  Description of Artificial Sequence: Synthetic oligonucleotide
agggccguagagaucggcg

SEQ ID NO: 29806 - RNA, 19 nt, Artificial Sequence
  Description of Artificial Sequence: Synthetic oligonucleotide
cuagaccauaacauuugaa

SEQ ID NO: 29807 - RNA, 19 nt, Artificial Sequence
  Description of Artificial Sequence: Synthetic oligonucleotide
aagcgggcgcgccaaaauu

SEQ ID NO: 29808 - RNA, 19 nt, Artificial Sequence
  Description of Artificial Sequence: Synthetic oligonucleotide
gcuaaggugacacuagacu

SEQ ID NO: 29809 - RNA, 19 nt, Artificial Sequence
  Description of Artificial Sequence: Synthetic oligonucleotide
gcuuaagugugugcuaaag

SEQ ID NO: 29810 - RNA, 19 nt, Artificial Sequence
  Description of Artificial Sequence: Synthetic oligonucleotide
uagccguguuugaauuaug

SEQ ID NO: 29811 - RNA, 19 nt, Artificial Sequence
  Description of Artificial Sequence: Synthetic oligonucleotide
agcgggcgcgccaaaauuc

SEQ ID NO: 29812 - RNA, 19 nt, Artificial Sequence
  Description of Artificial Sequence: Synthetic oligonucleotide
cacuccggaguccuggcug

SEQ ID NO: 29813 - RNA, 19 nt, Artificial Sequence
  Description of Artificial Sequence: Synthetic oligonucleotide
ggagaguaacaucaccauc

SEQ ID NO: 29814 - RNA, 19 nt, Artificial Sequence
  Description of Artificial Sequence: Synthetic oligonucleotide
aaggaccacucagaaacuu

SEQ ID NO: 29815 - RNA, 19 nt, Artificial Sequence
  Description of Artificial Sequence: Synthetic oligonucleotide
uacgaccucuuugaacaga

SEQ ID NO: 29816 - RNA, 19 nt, Artificial Sequence
  Description of Artificial Sequence: Synthetic oligonucleotide
ccuauuacauauggaauuc

SEQ ID NO: 29817 - RNA, 19 nt, Artificial Sequence
  Description of Artificial Sequence: Synthetic oligonucleotide
gauuaucaaauagccgugu

SEQ ID NO: 29818 - RNA, 19 nt, Artificial Sequence
  Description of Artificial Sequence: Synthetic oligonucleotide
uguagcuauucaggacuga

SEQ ID NO: 29819 - RNA, 19 nt, Artificial Sequence
  Description of Artificial Sequence: Synthetic oligonucleotide
cauagguugccacaaaguu

SEQ ID NO: 29820 - RNA, 19 nt, Artificial Sequence
  Description of Artificial Sequence: Synthetic oligonucleotide
gaacguuucguagugggau

SEQ ID NO: 29821 - RNA, 19 nt, Artificial Sequence
  Description of Artificial Sequence: Synthetic oligonucleotide
cagauaacccuccuacaaa

SEQ ID NO: 29822 - RNA, 19 nt, Artificial Sequence
  Description of Artificial Sequence: Synthetic oligonucleotide
gggccguagagaucggcgg

SEQ ID NO: 29823 - RNA, 19 nt, Artificial Sequence
  Description of Artificial Sequence: Synthetic oligonucleotide
ugggucugcgaaggugacg

SEQ ID NO: 29824 - RNA, 19 nt, Artificial Sequence
  Description of Artificial Sequence: Synthetic oligonucleotide
guaguuaauggaauucuau

SEQ ID NO: 29825 - RNA, 19 nt, Artificial Sequence
  Description of Artificial Sequence: Synthetic oligonucleotide
ccguuaaaagugagaacag

SEQ ID NO: 29826 - RNA, 19 nt, Artificial Sequence
  Description of Artificial Sequence: Synthetic oligonucleotide
cacaugaaacgcuuagacu

SEQ ID NO: 29827 - RNA, 19 nt, Artificial Sequence
  Description of Artificial Sequence: Synthetic oligonucleotide
uuaccggggucgugcuggg

SEQ ID NO: 29828 - RNA, 19 nt, Artificial Sequence
  Description of Artificial Sequence: Synthetic oligonucleotide
ccgcacaucacaacucugc

SEQ ID NO: 29829 - RNA, 19 nt, Artificial Sequence
  Description of Artificial Sequence: Synthetic oligonucleotide
agcuaggagcgaauccggg

SEQ ID NO: 29830 - RNA, 19 nt, Artificial Sequence
  Description of Artificial Sequence: Synthetic oligonucleotide
accuucugauuaucaaaua

SEQ ID NO: 29831 - RNA, 19 nt, Artificial Sequence
  Description of Artificial Sequence: Synthetic oligonucleotide
guugccgaccuauuaccaa

SEQ ID NO: 29832 - RNA, 19 nt, Artificial Sequence
  Description of Artificial Sequence: Synthetic oligonucleotide
ccuaaacaaaggaccacuc

SEQ ID NO: 29833 - RNA, 19 nt, Artificial Sequence
  Description of Artificial Sequence: Synthetic oligonucleotide
uuucuguugccgaccuauu

SEQ ID NO: 29834 - RNA, 19 nt, Artificial Sequence
  Description of Artificial Sequence: Synthetic oligonucleotide
agcccacgcuacucaagag

SEQ ID NO: 29835 - RNA, 19 nt, Artificial Sequence
  Description of Artificial Sequence: Synthetic oligonucleotide
ugcgguucuuaggucuacc

SEQ ID NO: 29836 - RNA, 19 nt, Artificial Sequence
  Description of Artificial Sequence: Synthetic oligonucleotide
ugccgaccuauuaccaaua

SEQ ID NO: 29837 - RNA, 19 nt, Artificial Sequence
  Description of Artificial Sequence: Synthetic oligonucleotide
aaauucgguugagcacugu

SEQ ID NO: 29838 - RNA, 19 nt, Artificial Sequence
  Description of Artificial Sequence: Synthetic oligonucleotide
acguuucguagugggaucu

SEQ ID NO: 29839 - RNA, 19 nt, Artificial Sequence
  Description of Artificial Sequence: Synthetic oligonucleotide
aggggucgguuuuaauuau

SEQ ID NO: 29840 - RNA, 19 nt, Artificial Sequence
  Description of Artificial Sequence: Synthetic oligonucleotide
cuagcuagaccauaacauu

SEQ ID NO: 29841 - RNA, 19 nt, Artificial Sequence
  Description of Artificial Sequence: Synthetic oligonucleotide
cuugggcugugcacgacga

SEQ ID NO: 29842 - RNA, 19 nt, Artificial Sequence
  Description of Artificial Sequence: Synthetic oligonucleotide
cagggugcuaaugcgguuc

SEQ ID NO: 29843 - RNA, 19 nt, Artificial Sequence
  Description of Artificial Sequence: Synthetic oligonucleotide
gagcgaauccgggguagcc

SEQ ID NO: 29844 - RNA, 19 nt, Artificial Sequence
  Description of Artificial Sequence: Synthetic oligonucleotide
uugauccccgagagggguc

SEQ ID NO: 29845 - RNA, 19 nt, Artificial Sequence
  Description of Artificial Sequence: Synthetic oligonucleotide
uaggagcgaauccggggua

SEQ ID NO: 29846 - RNA, 19 nt, Artificial Sequence
  Description of Artificial Sequence: Synthetic oligonucleotide
guguucgcagauaacccuc

SEQ ID NO: 29847 - RNA, 19 nt, Artificial Sequence
  Description of Artificial Sequence: Synthetic oligonucleotide
cuaggagcgaauccggggu

SEQ ID NO: 29848 - RNA, 19 nt, Artificial Sequence
  Description of Artificial Sequence: Synthetic oligonucleotide
aggagcgaauccgggguag

SEQ ID NO: 29849 - RNA, 19 nt, Artificial Sequence
  Description of Artificial Sequence: Synthetic oligonucleotide
cuaugccguggccgaagcc

SEQ ID NO: 29850 - RNA, 19 nt, Artificial Sequence
  Description of Artificial Sequence: Synthetic oligonucleotide
caaucgucuuggaaucuaa

SEQ ID NO: 29851 - RNA, 19 nt, Artificial Sequence
  Description of Artificial Sequence: Synthetic oligonucleotide
agcgaauccgggguagccu

SEQ ID NO: 29852 - RNA, 19 nt, Artificial Sequence
  Description of Artificial Sequence: Synthetic oligonucleotide
gauaacccuccuacaaaua

SEQ ID NO: 29853 - RNA, 19 nt, Artificial Sequence
  Description of Artificial Sequence: Synthetic oligonucleotide
acgaccucuuugaacagaa

SEQ ID NO: 29854 - RNA, 19 nt, Artificial Sequence
  Description of Artificial Sequence: Synthetic oligonucleotide
agaucggcggcgacagguc

SEQ ID NO: 29855 - RNA, 19 nt, Artificial Sequence
  Description of Artificial Sequence: Synthetic oligonucleotide
gcaaauuggcuagcccacg

SEQ ID NO: 29856 - RNA, 19 nt, Artificial Sequence
  Description of Artificial Sequence: Synthetic oligonucleotide
uugcgcuaccauguccaug

SEQ ID NO: 29857 - RNA, 19 nt, Artificial Sequence
  Description of Artificial Sequence: Synthetic oligonucleotide
gcuaagucccuagcccucg

SEQ ID NO: 29858 - RNA, 19 nt, Artificial Sequence
  Description of Artificial Sequence: Synthetic oligonucleotide
ugugcacgacgaggaaaug

SEQ ID NO: 29859 - RNA, 19 nt, Artificial Sequence
  Description of Artificial Sequence: Synthetic oligonucleotide
augcgguucuuaggucuac

SEQ ID NO: 29860 - RNA, 19 nt, Artificial Sequence
  Description of Artificial Sequence: Synthetic oligonucleotide
agccauagcuaggagcgaa

SEQ ID NO: 29861 - RNA, 19 nt, Artificial Sequence
  Description of Artificial Sequence: Synthetic oligonucleotide
agagaucggcggcgacagg

SEQ ID NO: 29862 - RNA, 19 nt, Artificial Sequence
  Description of Artificial Sequence: Synthetic oligonucleotide
cugcuuaagugugugcuaa

SEQ ID NO: 29863 - RNA, 19 nt, Artificial Sequence
  Description of Artificial Sequence: Synthetic oligonucleotide
ccauuuguaaaggccguug

SEQ ID NO: 29864 - RNA, 19 nt, Artificial Sequence
  Description of Artificial Sequence: Synthetic oligonucleotide
cgaccuauuaccaauauuu

SEQ ID NO: 29865 - RNA, 19 nt, Artificial Sequence
  Description of Artificial Sequence: Synthetic oligonucleotide
cagucagugaacggcagaa

SEQ ID NO: 29866 - RNA, 19 nt, Artificial Sequence
  Description of Artificial Sequence: Synthetic oligonucleotide
guauacuaaugguuagcuu

SEQ ID NO: 29867 - RNA, 19 nt, Artificial Sequence
  Description of Artificial Sequence: Synthetic oligonucleotide
gguugauccccgagagggg

SEQ ID NO: 29868 - RNA, 19 nt, Artificial Sequence
  Description of Artificial Sequence: Synthetic oligonucleotide
cccacgcuacucaagagca

SEQ ID NO: 29869 - RNA, 19 nt, Artificial Sequence
  Description of Artificial Sequence: Synthetic oligonucleotide
cugugcacgacgaggaaau

SEQ ID NO: 29870 - RNA, 19 nt, Artificial Sequence
  Description of Artificial Sequence: Synthetic oligonucleotide
caccuauugaguuguacuu

SEQ ID NO: 29871 - RNA, 19 nt, Artificial Sequence
  Description of Artificial Sequence: Synthetic oligonucleotide
agucguuggcgcugcccga

SEQ ID NO: 29872 - RNA, 19 nt, Artificial Sequence
  Description of Artificial Sequence: Synthetic oligonucleotide
aaaggccguugcaaucaaa

SEQ ID NO: 29873 - RNA, 19 nt, Artificial Sequence
  Description of Artificial Sequence: Synthetic oligonucleotide
gcgcuaagaguggaguucc

SEQ ID NO: 29874 - RNA, 19 nt, Artificial Sequence
  Description of Artificial Sequence: Synthetic oligonucleotide
ggguaccuaacugccuggg

SEQ ID NO: 29875 - RNA, 19 nt, Artificial Sequence
  Description of Artificial Sequence: Synthetic oligonucleotide
agucagugaacggcagaau

SEQ ID NO: 29876 - RNA, 19 nt, Artificial Sequence
  Description of Artificial Sequence: Synthetic oligonucleotide
gucgcauucagugucucau

SEQ ID NO: 29877 - RNA, 19 nt, Artificial Sequence
  Description of Artificial Sequence: Synthetic oligonucleotide
guagcuauucaggacugau

SEQ ID NO: 29878 - RNA, 19 nt, Artificial Sequence
  Description of Artificial Sequence: Synthetic oligonucleotide
gaccuauuaccaauauuuu

SEQ ID NO: 29879 - RNA, 19 nt, Artificial Sequence
  Description of Artificial Sequence: Synthetic oligonucleotide
cuggcagggccguagagau

SEQ ID NO: 29880 - RNA, 19 nt, Artificial Sequence
  Description of Artificial Sequence: Synthetic oligonucleotide
guugauccccgagaggggu

SEQ ID NO: 29881 - RNA, 19 nt, Artificial Sequence
  Description of Artificial Sequence: Synthetic oligonucleotide
gguaccuaacugccuggga

SEQ ID NO: 29882 - RNA, 19 nt, Artificial Sequence
  Description of Artificial Sequence: Synthetic oligonucleotide
gcaacggaagcaccugcuc

SEQ ID NO: 29883 - RNA, 19 nt, Artificial Sequence
  Description of Artificial Sequence: Synthetic oligonucleotide
gcgaauccgggguagccuc

SEQ ID NO: 29884 - RNA, 19 nt, Artificial Sequence
  Description of Artificial Sequence: Synthetic oligonucleotide
gaagcgggcgcgccaaaau

SEQ ID NO: 29885 - RNA, 19 nt, Artificial Sequence
  Description of Artificial Sequence: Synthetic oligonucleotide
ggugcuaaugcgguucuua

SEQ ID NO: 29886 - RNA, 19 nt, Artificial Sequence
  Description of Artificial Sequence: Synthetic oligonucleotide
gcgggcgcgccaaaauucg

SEQ ID NO: 29887 - RNA, 19 nt, Artificial Sequence
  Description of Artificial Sequence: Synthetic oligonucleotide
gauccccgagaggggucgg

SEQ ID NO: 29888 - RNA, 19 nt, Artificial Sequence
  Description of Artificial Sequence: Synthetic oligonucleotide
acgcuuagacuugcauccu

SEQ ID NO: 29889 - RNA, 19 nt, Artificial Sequence
  Description of Artificial Sequence: Synthetic oligonucleotide
gcgcgccaaaauucgguug

SEQ ID NO: 29890 - RNA, 19 nt, Artificial Sequence
  Description of Artificial Sequence: Synthetic oligonucleotide
gcauccguuaaaagugaga

SEQ ID NO: 29891 - RNA, 19 nt, Artificial Sequence
  Description of Artificial Sequence: Synthetic oligonucleotide
cagggccguagagaucggc

SEQ ID NO: 29892 - RNA, 19 nt, Artificial Sequence
  Description of Artificial Sequence: Synthetic oligonucleotide
agcccucguuuccacuaaa

SEQ ID NO: 29893 - RNA, 19 nt, Artificial Sequence
  Description of Artificial Sequence: Synthetic oligonucleotide
aggugacacuagacuaagu

SEQ ID NO: 29894 - RNA, 19 nt, Artificial Sequence
  Description of Artificial Sequence: Synthetic oligonucleotide
gccaccuauugaguuguac

SEQ ID NO: 29895 - RNA, 19 nt, Artificial Sequence
  Description of Artificial Sequence: Synthetic oligonucleotide
cguuaaaagugagaacaga

SEQ ID NO: 29896 - RNA, 19 nt, Artificial Sequence
  Description of Artificial Sequence: Synthetic oligonucleotide
guucgcagauaacccuccu

SEQ ID NO: 29897 - RNA, 19 nt, Artificial Sequence
  Description of Artificial Sequence: Synthetic oligonucleotide
ggagcgaauccgggguagc

SEQ ID NO: 29898 - RNA, 19 nt, Artificial Sequence
  Description of Artificial Sequence: Synthetic oligonucleotide
ugccaccuauugaguugua

SEQ ID NO: 29899 - RNA, 19 nt, Artificial Sequence
  Description of Artificial Sequence: Synthetic oligonucleotide
cgcgccaaaauucgguuga

SEQ ID NO: 29900 - RNA, 19 nt, Artificial Sequence
  Description of Artificial Sequence: Synthetic oligonucleotide
ggcuaagucccuagcccuc

SEQ ID NO: 29901 - RNA, 19 nt, Artificial Sequence
  Description of Artificial Sequence: Synthetic oligonucleotide
cccgcacaucacaacucug

SEQ ID NO: 29902 - RNA, 19 nt, Artificial Sequence
  Description of Artificial Sequence: Synthetic oligonucleotide
gcgccaaaauucgguugag

SEQ ID NO: 29903 - RNA, 19 nt, Artificial Sequence
  Description of Artificial Sequence: Synthetic oligonucleotide
gcuuagacuugcauccuau

SEQ ID NO: 29904 - RNA, 19 nt, Artificial Sequence
  Description of Artificial Sequence: Synthetic oligonucleotide
ccauaagccgcugcuggga

SEQ ID NO: 29905 - RNA, 19 nt, Artificial Sequence
  Description of Artificial Sequence: Synthetic oligonucleotide
auccccgagaggggucggu

SEQ ID NO: 29906 - RNA, 19 nt, Artificial Sequence
  Description of Artificial Sequence: Synthetic oligonucleotide
cuaagucccuagcccucgu

SEQ ID NO: 29907 - RNA, 19 nt, Artificial Sequence
  Description of Artificial Sequence: Synthetic oligonucleotide
ggcgcgccaaaauucgguu

SEQ ID NO: 29908 - RNA, 19 nt, Artificial Sequence
  Description of Artificial Sequence: Synthetic oligonucleotide
cccggaaauggaauccuau

SEQ ID NO: 29909 - RNA, 19 nt, Artificial Sequence
  Description of Artificial Sequence: Synthetic oligonucleotide
gcacgacgaggaaaugcaa

SEQ ID NO: 29910 - RNA, 19 nt, Artificial Sequence
  Description of Artificial Sequence: Synthetic oligonucleotide
gccgaccuauuaccaauau

SEQ ID NO: 29911 - RNA, 19 nt, Artificial Sequence
  Description of Artificial Sequence: Synthetic oligonucleotide
gggcgcgccaaaauucggu

SEQ ID NO: 29912 - RNA, 19 nt, Artificial Sequence
  Description of Artificial Sequence: Synthetic oligonucleotide
ggggaagcgggcgcgccaa

SEQ ID NO: 29913 - RNA, 19 nt, Artificial Sequence
  Description of Artificial Sequence: Synthetic oligonucleotide
ccuagcccucguuuccacu

SEQ ID NO: 29914 - RNA, 19 nt, Artificial Sequence
  Description of Artificial Sequence: Synthetic oligonucleotide
ccgaccuauuaccaauauu

SEQ ID NO: 29915 - RNA, 19 nt, Artificial Sequence
  Description of Artificial Sequence: Synthetic oligonucleotide
cagcuaugccguggccgaa

SEQ ID NO: 29916 - RNA, 19 nt, Artificial Sequence
  Description of Artificial Sequence: Synthetic oligonucleotide
ccguagagaucggcggcga

SEQ ID NO: 29917 - RNA, 19 nt, Artificial Sequence
  Description of Artificial Sequence: Synthetic oligonucleotide
cgcuaagaguggaguucca

SEQ ID NO: 29918 - RNA, 19 nt, Artificial Sequence
  Description of Artificial Sequence: Synthetic oligonucleotide
ccgcgccggguuggagccu

SEQ ID NO: 29919 - RNA, 19 nt, Artificial Sequence
  Description of Artificial Sequence: Synthetic oligonucleotide
auauauauauauuuuaacc

SEQ ID NO: 29920 - RNA, 19 nt, Artificial Sequence
  Description of Artificial Sequence: Synthetic oligonucleotide
aauaacgucagaaugacgc

SEQ ID NO: 29921 - RNA, 19 nt, Artificial Sequence
  Description of Artificial Sequence: Synthetic oligonucleotide
auuagauuaugauaaaacc

SEQ ID NO: 29922 - RNA, 19 nt, Artificial Sequence
  Description of Artificial Sequence: Synthetic oligonucleotide
auaauagggacucacaugg

SEQ ID NO: 29923 - RNA, 19 nt, Artificial Sequence
  Description of Artificial Sequence: Synthetic oligonucleotide
auaacguuaaucuacuuac

SEQ ID NO: 29924 - RNA, 19 nt, Artificial Sequence
  Description of Artificial Sequence: Synthetic oligonucleotide
auaaauacgucccauauug

SEQ ID NO: 29925 - RNA, 19 nt, Artificial Sequence
  Description of Artificial Sequence: Synthetic oligonucleotide
uauauauauauauauauau

SEQ ID NO: 29926 - RNA, 19 nt, Artificial Sequence
  Description of Artificial Sequence: Synthetic oligonucleotide
aguguuagaguacagcugc

SEQ ID NO: 29927 - RNA, 19 nt, Artificial Sequence
  Description of Artificial Sequence: Synthetic oligonucleotide
auaguaaacacgcccaugc

SEQ ID NO: 29928 - RNA, 19 nt, Artificial Sequence
  Description of Artificial Sequence: Synthetic oligonucleotide
aagccuauguaguaaaugg

SEQ ID NO: 29929 - RNA, 19 nt, Artificial Sequence
  Description of Artificial Sequence: Synthetic oligonucleotide
aacguaauaaauacguccc

SEQ ID NO: 29930 - RNA, 19 nt, Artificial Sequence
  Description of Artificial Sequence: Synthetic oligonucleotide
aacguuaaucuacuuacac

SEQ ID NO: 29931 - RNA, 19 nt, Artificial Sequence
  Description of Artificial Sequence: Synthetic oligonucleotide
uauauauauauauauauuu

SEQ ID NO: 29932 - RNA, 19 nt, Artificial Sequence
  Description of Artificial Sequence: Synthetic oligonucleotide
auaaaucucagugauaacg

SEQ ID NO: 29933 - RNA, 19 nt, Artificial Sequence
  Description of Artificial Sequence: Synthetic oligonucleotide
caaauacucacucugaacc

SEQ ID NO: 29934 - RNA, 19 nt, Artificial Sequence
  Description of Artificial Sequence: Synthetic oligonucleotide
uccagauauaguaagagga

SEQ ID NO: 29935 - RNA, 19 nt, Artificial Sequence
  Description of Artificial Sequence: Synthetic oligonucleotide
uauucaguggccuagggcc

SEQ ID NO: 29936 - RNA, 19 nt, Artificial Sequence
  Description of Artificial Sequence: Synthetic oligonucleotide
aaauacgucccauauuguc

SEQ ID NO: 29937 - RNA, 19 nt, Artificial Sequence
  Description of Artificial Sequence: Synthetic oligonucleotide
ucuuuaacccagaugagag

SEQ ID NO: 29938 - RNA, 19 nt, Artificial Sequence
  Description of Artificial Sequence: Synthetic oligonucleotide
agcaauagcauauauauau

SEQ ID NO: 29939 - RNA, 19 nt, Artificial Sequence
  Description of Artificial Sequence: Synthetic oligonucleotide
aagggaacaaucuaguaga

SEQ ID NO: 29940 - RNA, 19 nt, Artificial Sequence
  Description of Artificial Sequence: Synthetic oligonucleotide
ugaauuacccguaagaaua

SEQ ID NO: 29941 - RNA, 19 nt, Artificial Sequence
  Description of Artificial Sequence: Synthetic oligonucleotide
aauacgucccauauugucc

SEQ ID NO: 29942 - RNA, 19 nt, Artificial Sequence
  Description of Artificial Sequence: Synthetic oligonucleotide
aaacaggcaauacauuggg

SEQ ID NO: 29943 - RNA, 19 nt, Artificial Sequence
  Description of Artificial Sequence: Synthetic oligonucleotide
uauauauauauauuuuaac

SEQ ID NO: 29944 - RNA, 19 nt, Artificial Sequence
  Description of Artificial Sequence: Synthetic oligonucleotide
gaugacuacauuuuaguac

SEQ ID NO: 29945 - RNA, 19 nt, Artificial Sequence
  Description of Artificial Sequence: Synthetic oligonucleotide
auagcauauauauauauau

SEQ ID NO: 29946 - RNA, 19 nt, Artificial Sequence
  Description of Artificial Sequence: Synthetic oligonucleotide
uagguuaacuucuaaaaug

SEQ ID NO: 29947 - RNA, 19 nt, Artificial Sequence
  Description of Artificial Sequence: Synthetic oligonucleotide
ucucuaguggauaugguag

SEQ ID NO: 29948 - RNA, 19 nt, Artificial Sequence
  Description of Artificial Sequence: Synthetic oligonucleotide
agugauaacguuaaucuac

SEQ ID NO: 29949 - RNA, 19 nt, Artificial Sequence
  Description of Artificial Sequence: Synthetic oligonucleotide
uauauauauauauauuuua

SEQ ID NO: 29950 - RNA, 19 nt, Artificial Sequence
  Description of Artificial Sequence: Synthetic oligonucleotide
ucagauaacucucuaguca

SEQ ID NO: 29951 - RNA, 19 nt, Artificial Sequence
  Description of Artificial Sequence: Synthetic oligonucleotide
uguaaagacagcgaaaugu

SEQ ID NO: 29952 - RNA, 19 nt, Artificial Sequence
  Description of Artificial Sequence: Synthetic oligonucleotide
caacguaauaaauacgucc

SEQ ID NO: 29953 - RNA, 19 nt, Artificial Sequence
  Description of Artificial Sequence: Synthetic oligonucleotide
guaguaaauggguaguugg

SEQ ID NO: 29954 - RNA, 19 nt, Artificial Sequence
  Description of Artificial Sequence: Synthetic oligonucleotide
uauuuugugauguagcaaa

SEQ ID NO: 29955 - RNA, 19 nt, Artificial Sequence
  Description of Artificial Sequence: Synthetic oligonucleotide
uguuaaguaaguuucugac

SEQ ID NO: 29956 - RNA, 19 nt, Artificial Sequence
  Description of Artificial Sequence: Synthetic oligonucleotide
agcauauauauauauauau

SEQ ID NO: 29957 - RNA, 19 nt, Artificial Sequence
  Description of Artificial Sequence: Synthetic oligonucleotide
uuaaaggaagaaauggagu

SEQ ID NO: 29958 - RNA, 19 nt, Artificial Sequence
  Description of Artificial Sequence: Synthetic oligonucleotide
aagauacgcuuauagaaug

SEQ ID NO: 29959 - RNA, 19 nt, Artificial Sequence
  Description of Artificial Sequence: Synthetic oligonucleotide
gaaccggaaauacugaacc

SEQ ID NO: 29960 - RNA, 19 nt, Artificial Sequence
  Description of Artificial Sequence: Synthetic oligonucleotide
agaaaacuguuguuaaggg

SEQ ID NO: 29961 - RNA, 19 nt, Artificial Sequence
  Description of Artificial Sequence: Synthetic oligonucleotide
ucuaguagaauaagacaag

SEQ ID NO: 29962 - RNA, 19 nt, Artificial Sequence
  Description of Artificial Sequence: Synthetic oligonucleotide
uagccauauauuaaagucc

SEQ ID NO: 29963 - RNA, 19 nt, Artificial Sequence
  Description of Artificial Sequence: Synthetic oligonucleotide
aaauagccaagcccuauag

SEQ ID NO: 29964 - RNA, 19 nt, Artificial Sequence
  Description of Artificial Sequence: Synthetic oligonucleotide
uucauaaaucucuagugga

SEQ ID NO: 29965 - RNA, 19 nt, Artificial Sequence
  Description of Artificial Sequence: Synthetic oligonucleotide
aaaaucacccacaaacguc

SEQ ID NO: 29966 - RNA, 19 nt, Artificial Sequence
  Description of Artificial Sequence: Synthetic oligonucleotide
aaaacuguuguuaagggaa

SEQ ID NO: 29967 - RNA, 19 nt, Artificial Sequence
  Description of Artificial Sequence: Synthetic oligonucleotide
agcccuauagaacuagggc

SEQ ID NO: 29968 - RNA, 19 nt, Artificial Sequence
  Description of Artificial Sequence: Synthetic oligonucleotide
uguguuaaaucucauguua

SEQ ID NO: 29969 - RNA, 19 nt, Artificial Sequence
  Description of Artificial Sequence: Synthetic oligonucleotide
augugaaggaaccacagug

SEQ ID NO: 29970 - RNA, 19 nt, Artificial Sequence
  Description of Artificial Sequence: Synthetic oligonucleotide
uauaauagggacucacaug

SEQ ID NO: 29971 - RNA, 19 nt, Artificial Sequence
  Description of Artificial Sequence: Synthetic oligonucleotide
  modified_base (11)..(11): a, c, u, g, unknown or other
uuuauaugcunuggcaugg

SEQ ID NO: 29972 - RNA, 19 nt, Artificial Sequence
  Description of Artificial Sequence: Synthetic oligonucleotide
aaucacuaauuaaacacag

SEQ ID NO: 29973 - RNA, 19 nt, Artificial Sequence
  Description of Artificial Sequence: Synthetic oligonucleotide
ugacagucuaagcaaagcc

SEQ ID NO: 29974 - RNA, 19 nt, Artificial Sequence
  Description of Artificial Sequence: Synthetic oligonucleotide
cauaguuccugacagauuc

SEQ ID NO: 29975 - RNA, 19 nt, Artificial Sequence
  Description of Artificial Sequence: Synthetic oligonucleotide
uacauaguaaacacgccca

SEQ ID NO: 29976 - RNA, 19 nt, Artificial Sequence
  Description of Artificial Sequence: Synthetic oligonucleotide
acaaaucuugaauuacccg

SEQ ID NO: 29977 - RNA, 19 nt, Artificial Sequence
  Description of Artificial Sequence: Synthetic oligonucleotide
uuacaaugcuuacagagaa

SEQ ID NO: 29978 - RNA, 19 nt, Artificial Sequence
  Description of Artificial Sequence: Synthetic oligonucleotide
uguacguggaucuauguaa

SEQ ID NO: 29979 - RNA, 19 nt, Artificial Sequence
  Description of Artificial Sequence: Synthetic oligonucleotide
ugcaucaaaauauuguaaa

SEQ ID NO: 29980 - RNA, 19 nt, Artificial Sequence
  Description of Artificial Sequence: Synthetic oligonucleotide
aauagggacucacauggcu

SEQ ID NO: 29981 - RNA, 19 nt, Artificial Sequence
  Description of Artificial Sequence: Synthetic oligonucleotide
gauugauguaagaagcggg

SEQ ID NO: 29982 - RNA, 19 nt, Artificial Sequence
  Description of Artificial Sequence: Synthetic oligonucleotide
cuauguaguaaauggguag

SEQ ID NO: 29983 - RNA, 19 nt, Artificial Sequence
  Description of Artificial Sequence: Synthetic oligonucleotide
aaucuacuuacacucagau

SEQ ID NO: 29984 - RNA, 19 nt, Artificial Sequence
  Description of Artificial Sequence: Synthetic oligonucleotide
guucaagauacgcuuauag

SEQ ID NO: 29985 - RNA, 19 nt, Artificial Sequence
  Description of Artificial Sequence: Synthetic oligonucleotide
cuacuuuggagauaacuag

SEQ ID NO: 29986 - RNA, 19 nt, Artificial Sequence
  Description of Artificial Sequence: Synthetic oligonucleotide
uacgcuuauagaaugguaa

SEQ ID NO: 29987 - RNA, 19 nt, Artificial Sequence
  Description of Artificial Sequence: Synthetic oligonucleotide
agacauauacaugugauca

SEQ ID NO: 29988 - RNA, 19 nt, Artificial Sequence
  Description of Artificial Sequence: Synthetic oligonucleotide
aaauggucaacguaauaaa

SEQ ID NO: 29989 - RNA, 19 nt, Artificial Sequence
  Description of Artificial Sequence: Synthetic oligonucleotide
auacaggacgaaaagaggg

SEQ ID NO: 29990 - RNA, 19 nt, Artificial Sequence
  Description of Artificial Sequence: Synthetic oligonucleotide
aaacccgguaucuauaaau

SEQ ID NO: 29991 - RNA, 19 nt, Artificial Sequence
  Description of Artificial Sequence: Synthetic oligonucleotide
caucaguuacuaaaggagc

SEQ ID NO: 29992 - RNA, 19 nt, Artificial Sequence
  Description of Artificial Sequence: Synthetic oligonucleotide
aguuuaguauuugcaaggc

SEQ ID NO: 29993 - RNA, 19 nt, Artificial Sequence
  Description of Artificial Sequence: Synthetic oligonucleotide
ugauaaaaccauaaagcuu

SEQ ID NO: 29994 - RNA, 19 nt, Artificial Sequence
  Description of Artificial Sequence: Synthetic oligonucleotide
  modified_base (12)..(12): a, c, u, g, unknown or other
cuuuauaugcunuggcaug

SEQ ID NO: 29995 - RNA, 19 nt, Artificial Sequence
  Description of Artificial Sequence: Synthetic oligonucleotide
gagaguuccuacuuuggag

SEQ ID NO: 29996 - RNA, 19 nt, Artificial Sequence
  Description of Artificial Sequence: Synthetic oligonucleotide
uucaagauacgcuuauaga

SEQ ID NO: 29997 - RNA, 19 nt, Artificial Sequence
  Description of Artificial Sequence: Synthetic oligonucleotide
aguacaagaauuugaucca

SEQ ID NO: 29998 - RNA, 19 nt, Artificial Sequence
  Description of Artificial Sequence: Synthetic oligonucleotide
auagccaagcccuauagaa

SEQ ID NO: 29999 - RNA, 19 nt, Artificial Sequence
  Description of Artificial Sequence: Synthetic oligonucleotide
aauaaauacgucccauauu

SEQ ID NO: 30000 - RNA, 19 nt, Artificial Sequence
  Description of Artificial Sequence: Synthetic oligonucleotide
cagacauucgcucuguaag

SEQ ID NO: 30001 - RNA, 19 nt, Artificial Sequence
  Description of Artificial Sequence: Synthetic oligonucleotide
gaaauggucaacguaauaa

SEQ ID NO: 30002 - RNA, 19 nt, Artificial Sequence
  Description of Artificial Sequence: Synthetic oligonucleotide
agagggagagcacaagcgg

SEQ ID NO: 30003 - RNA, 19 nt, Artificial Sequence
  Description of Artificial Sequence: Synthetic oligonucleotide
guaaauggguaguuggcag

SEQ ID NO: 30004 - RNA, 19 nt, Artificial Sequence
  Description of Artificial Sequence: Synthetic oligonucleotide
cauauauauauauauauau

SEQ ID NO: 30005 - RNA, 19 nt, Artificial Sequence
  Description of Artificial Sequence: Synthetic oligonucleotide
gaauuugauccaaugggag

SEQ ID NO: 30006 - RNA, 19 nt, Artificial Sequence
  Description of Artificial Sequence: Synthetic oligonucleotide
ucuggucuaucccauguug

SEQ ID NO: 30007 - RNA, 19 nt, Artificial Sequence
  Description of Artificial Sequence: Synthetic oligonucleotide
agagguaugaagucaugug

SEQ ID NO: 30008 - RNA, 19 nt, Artificial Sequence
  Description of Artificial Sequence: Synthetic oligonucleotide
ugaaaagagguaugaaguc

SEQ ID NO: 30009 - RNA, 19 nt, Artificial Sequence
  Description of Artificial Sequence: Synthetic oligonucleotide
auugauguaagaagcgggg

SEQ ID NO: 30010 - RNA, 19 nt, Artificial Sequence
  Description of Artificial Sequence: Synthetic oligonucleotide
  modified_base (9)..(9): a, c, u, g, unknown or other
uauaugcunuggcauggcc

SEQ ID NO: 30011 - RNA, 19 nt, Artificial Sequence
  Description of Artificial Sequence: Synthetic oligonucleotide
uuaauugaccuugacuucu

SEQ ID NO: 30012 - RNA, 19 nt, Artificial Sequence
  Description of Artificial Sequence: Synthetic oligonucleotide
aacaaagccuauuuucuua

SEQ ID NO: 30013 - RNA, 19 nt, Artificial Sequence
  Description of Artificial Sequence: Synthetic oligonucleotide
ucaaaauguuccaggguga

SEQ ID NO: 30014 - RNA, 19 nt, Artificial Sequence
  Description of Artificial Sequence: Synthetic oligonucleotide
gauaacguuaaucuacuua

SEQ ID NO: 30015 - RNA, 19 nt, Artificial Sequence
  Description of Artificial Sequence: Synthetic oligonucleotide
aggauugauuagcauuuac

SEQ ID NO: 30016 - RNA, 19 nt, Artificial Sequence
  Description of Artificial Sequence: Synthetic oligonucleotide
ggaauuauuaacccagaug

SEQ ID NO: 30017 - RNA, 19 nt, Artificial Sequence
  Description of Artificial Sequence: Synthetic oligonucleotide
agcgaaauguaacuggggu

SEQ ID NO: 30018 - RNA, 19 nt, Artificial Sequence
  Description of Artificial Sequence: Synthetic oligonucleotide
auauccagccccauuuucc

SEQ ID NO: 30019 - RNA, 19 nt, Artificial Sequence
  Description of Artificial Sequence: Synthetic oligonucleotide
acaaacgucuucucagauc

SEQ ID NO: 30020 - RNA, 19 nt, Artificial Sequence
  Description of Artificial Sequence: Synthetic oligonucleotide
auauauauauauauuuuaa

SEQ ID NO: 30021 - RNA, 19 nt, Artificial Sequence
  Description of Artificial Sequence: Synthetic oligonucleotide
agaauagaaucucugguua

SEQ ID NO: 30022 - RNA, 19 nt, Artificial Sequence
  Description of Artificial Sequence: Synthetic oligonucleotide
cagauaacucucuagucac

SEQ ID NO: 30023 - RNA, 19 nt, Artificial Sequence
  Description of Artificial Sequence: Synthetic oligonucleotide
uuggcuauaauagggacuc

SEQ ID NO: 30024 - RNA, 19 nt, Artificial Sequence
  Description of Artificial Sequence: Synthetic oligonucleotide
uuuaauugaccuugacuuc

SEQ ID NO: 30025 - RNA, 19 nt, Artificial Sequence
  Description of Artificial Sequence: Synthetic oligonucleotide
ucuagggcagauuuuccug

SEQ ID NO: 30026 - RNA, 19 nt, Artificial Sequence
  Description of Artificial Sequence: Synthetic oligonucleotide
uugaauuacccguaagaau

SEQ ID NO: 30027 - RNA, 19 nt, Artificial Sequence
  Description of Artificial Sequence: Synthetic oligonucleotide
ugugagagcauuugguaaa

SEQ ID NO: 30028 - RNA, 19 nt, Artificial Sequence
  Description of Artificial Sequence: Synthetic oligonucleotide
auagaaucucugguuaaac

SEQ ID NO: 30029 - RNA, 19 nt, Artificial Sequence
  Description of Artificial Sequence: Synthetic oligonucleotide
uuggagauaacuagggcuu

SEQ ID NO: 30030 - RNA, 19 nt, Artificial Sequence
  Description of Artificial Sequence: Synthetic oligonucleotide
ugcuuguaaaguuuaguau

SEQ ID NO: 30031 - RNA, 19 nt, Artificial Sequence
  Description of Artificial Sequence: Synthetic oligonucleotide
aguuacucuuguccaaauc

SEQ ID NO: 30032 - RNA, 19 nt, Artificial Sequence
  Description of Artificial Sequence: Synthetic oligonucleotide
ggucuuaaaagcaacuuag

SEQ ID NO: 30033 - RNA, 19 nt, Artificial Sequence
  Description of Artificial Sequence: Synthetic oligonucleotide
auaaaucucuaguggauau

SEQ ID NO: 30034 - RNA, 19 nt, Artificial Sequence
  Description of Artificial Sequence: Synthetic oligonucleotide
aauagcauauauauauaua

SEQ ID NO: 30035 - RNA, 19 nt, Artificial Sequence
  Description of Artificial Sequence: Synthetic oligonucleotide
uaacugggguauuagauua

SEQ ID NO: 30036 - RNA, 19 nt, Artificial Sequence
  Description of Artificial Sequence: Synthetic oligonucleotide
auuugauccaaugggaggu

SEQ ID NO: 30037 - RNA, 19 nt, Artificial Sequence
  Description of Artificial Sequence: Synthetic oligonucleotide
ugacucuuaauuucaccca

SEQ ID NO: 30038 - RNA, 19 nt, Artificial Sequence
  Description of Artificial Sequence: Synthetic oligonucleotide
uuacccguaagaauagaau

SEQ ID NO: 30039 - RNA, 19 nt, Artificial Sequence
  Description of Artificial Sequence: Synthetic oligonucleotide
uguccuaguguagugacga

SEQ ID NO: 30040 - RNA, 19 nt, Artificial Sequence
  Description of Artificial Sequence: Synthetic oligonucleotide
acguuaaucuacuuacacu

SEQ ID NO: 30041 - RNA, 19 nt, Artificial Sequence
  Description of Artificial Sequence: Synthetic oligonucleotide
uuugccuugaagucccgca

SEQ ID NO: 30042 - RNA, 19 nt, Artificial Sequence
  Description of Artificial Sequence: Synthetic oligonucleotide
ugggguauuagauuaugau

SEQ ID NO: 30043 - RNA, 19 nt, Artificial Sequence
  Description of Artificial Sequence: Synthetic oligonucleotide
ucaacguaauaaauacguc

SEQ ID NO: 30044 - RNA, 19 nt, Artificial Sequence
  Description of Artificial Sequence: Synthetic oligonucleotide
caaugggaggucuuuguag

SEQ ID NO: 30045 - RNA, 19 nt, Artificial Sequence
  Description of Artificial Sequence: Synthetic oligonucleotide
uagcauauauauauauaua

SEQ ID NO: 30046 - RNA, 19 nt, Artificial Sequence
  Description of Artificial Sequence: Synthetic oligonucleotide
aauagauuccaaauccuua

SEQ ID NO: 30047 - RNA, 19 nt, Artificial Sequence
  Description of Artificial Sequence: Synthetic oligonucleotide
ggaaccacagugcugauac

SEQ ID NO: 30048 - RNA, 19 nt, Artificial Sequence
  Description of Artificial Sequence: Synthetic oligonucleotide
ucaguuacuaaaggagcag

SEQ ID NO: 30049 - RNA, 19 nt, Artificial Sequence
  Description of Artificial Sequence: Synthetic oligonucleotide
gauaugguagaugacuaca

SEQ ID NO: 30050 - RNA, 19 nt, Artificial Sequence
  Description of Artificial Sequence: Synthetic oligonucleotide
uuaaaacaaguauggcuuc

SEQ ID NO: 30051 - RNA, 19 nt, Artificial Sequence
  Description of Artificial Sequence: Synthetic oligonucleotide
auauauauauauauauuuu

SEQ ID NO: 30052 - RNA, 19 nt, Artificial Sequence
  Description of Artificial Sequence: Synthetic oligonucleotide
agcggaaauauuucaggug

SEQ ID NO: 30053 - RNA, 19 nt, Artificial Sequence
  Description of Artificial Sequence: Synthetic oligonucleotide
uccugcauuccacacaaaa

SEQ ID NO: 30054 - RNA, 19 nt, Artificial Sequence
  Description of Artificial Sequence: Synthetic oligonucleotide
cucgagacaaucuccacuc

SEQ ID NO: 30055 - RNA, 19 nt, Artificial Sequence
  Description of Artificial Sequence: Synthetic oligonucleotide
cuaaggucucaacaguuac

SEQ ID NO: 30056 - RNA, 19 nt, Artificial Sequence
  Description of Artificial Sequence: Synthetic oligonucleotide
cauguguuaaaucucaugu

SEQ ID NO: 30057 - RNA, 19 nt, Artificial Sequence
  Description of Artificial Sequence: Synthetic oligonucleotide
acauaggcuaucugagguc

SEQ ID NO: 30058 - RNA, 19 nt, Artificial Sequence
  Description of Artificial Sequence: Synthetic oligonucleotide
aguauucaguggccuaggg

SEQ ID NO: 30059 - RNA, 19 nt, Artificial Sequence
  Description of Artificial Sequence: Synthetic oligonucleotide
ugguagaugacuacauuuu

SEQ ID NO: 30060 - RNA, 19 nt, Artificial Sequence
  Description of Artificial Sequence: Synthetic oligonucleotide
cuauaaauuuuccauggaa

SEQ ID NO: 30061 - RNA, 19 nt, Artificial Sequence
  Description of Artificial Sequence: Synthetic oligonucleotide
aauagaaucucugguuaaa

SEQ ID NO: 30062 - RNA, 19 nt, Artificial Sequence
  Description of Artificial Sequence: Synthetic oligonucleotide
ucguuaucaauuucuuuaa

SEQ ID NO: 30063 - RNA, 19 nt, Artificial Sequence
  Description of Artificial Sequence: Synthetic oligonucleotide
cuuuccuauggaacagggg

SEQ ID NO: 30064 - RNA, 19 nt, Artificial Sequence
  Description of Artificial Sequence: Synthetic oligonucleotide
cauaggcuaucugaggucc

SEQ ID NO: 30065 - RNA, 19 nt, Artificial Sequence
  Description of Artificial Sequence: Synthetic oligonucleotide
aguuacuaaaggagcaguc

SEQ ID NO: 30066 - RNA, 19 nt, Artificial Sequence
  Description of Artificial Sequence: Synthetic oligonucleotide
aggaauaacgucagaauga

SEQ ID NO: 30067 - RNA, 19 nt, Artificial Sequence
  Description of Artificial Sequence: Synthetic oligonucleotide
auauauauauauauauaua

SEQ ID NO: 30068 - RNA, 19 nt, Artificial Sequence
  Description of Artificial Sequence: Synthetic oligonucleotide
ugauguaagaagcgggguu

SEQ ID NO: 30069 - RNA, 19 nt, Artificial Sequence
  Description of Artificial Sequence: Synthetic oligonucleotide
auauauauauauauauauu

SEQ ID NO: 30070 - RNA, 19 nt, Artificial Sequence
  Description of Artificial Sequence: Synthetic oligonucleotide
accgauggcaguguuagag

SEQ ID NO: 30071 - RNA, 19 nt, Artificial Sequence
  Description of Artificial Sequence: Synthetic oligonucleotide
cuuguccuaguguagugac

SEQ ID NO: 30072 - RNA, 19 nt, Artificial Sequence
  Description of Artificial Sequence: Synthetic oligonucleotide
cuaggucccuaaaugaauc

SEQ ID NO: 30073 - RNA, 19 nt, Artificial Sequence
  Description of Artificial Sequence: Synthetic oligonucleotide
uuguccuaguguagugacg

SEQ ID NO: 30074 - RNA, 19 nt, Artificial Sequence
  Description of Artificial Sequence: Synthetic oligonucleotide
uccuacuuuggagauaacu

SEQ ID NO: 30075 - RNA, 19 nt, Artificial Sequence
  Description of Artificial Sequence: Synthetic oligonucleotide
auagaacuagggccaggac

SEQ ID NO: 30076 - RNA, 19 nt, Artificial Sequence
  Description of Artificial Sequence: Synthetic oligonucleotide
guggccuagggccugagcc

SEQ ID NO: 30077 - RNA, 19 nt, Artificial Sequence
  Description of Artificial Sequence: Synthetic oligonucleotide
uccaucuacuguaaaucuc

SEQ ID NO: 30078 - RNA, 19 nt, Artificial Sequence
  Description of Artificial Sequence: Synthetic oligonucleotide
uaaauacgucccauauugu

SEQ ID NO: 30079 - RNA, 19 nt, Artificial Sequence
  Description of Artificial Sequence: Synthetic oligonucleotide
guauucaguggccuagggc

SEQ ID NO: 30080 - RNA, 19 nt, Artificial Sequence
  Description of Artificial Sequence: Synthetic oligonucleotide
agugacgauagauggcaug

SEQ ID NO: 30081 - RNA, 19 nt, Artificial Sequence
  Description of Artificial Sequence: Synthetic oligonucleotide
acuacgcuguagcugccac

SEQ ID NO: 30082 - RNA, 19 nt, Artificial Sequence
  Description of Artificial Sequence: Synthetic oligonucleotide
cucagugauaacguuaauc

SEQ ID NO: 30083 - RNA, 19 nt, Artificial Sequence
  Description of Artificial Sequence: Synthetic oligonucleotide
agagaguuccuacuuugga

SEQ ID NO: 30084 - RNA, 19 nt, Artificial Sequence
  Description of Artificial Sequence: Synthetic oligonucleotide
ccuaguguagugacgauag

SEQ ID NO: 30085 - RNA, 19 nt, Artificial Sequence
  Description of Artificial Sequence: Synthetic oligonucleotide
auuaacccagauguugcuc

SEQ ID NO: 30086 - RNA, 19 nt, Artificial Sequence
  Description of Artificial Sequence: Synthetic oligonucleotide
agaaugaucuuagaugaau

SEQ ID NO: 30087 - RNA, 19 nt, Artificial Sequence
  Description of Artificial Sequence: Synthetic oligonucleotide
ucguaucuauggcagcagc

SEQ ID NO: 30088 - RNA, 19 nt, Artificial Sequence
  Description of Artificial Sequence: Synthetic oligonucleotide
ggguauuagauuaugauaa

SEQ ID NO: 30089 - RNA, 19 nt, Artificial Sequence
  Description of Artificial Sequence: Synthetic oligonucleotide
auaacgucagaaugacgca

SEQ ID NO: 30090 - RNA, 19 nt, Artificial Sequence
  Description of Artificial Sequence: Synthetic oligonucleotide
uacacucugccauugcuau

SEQ ID NO: 30091 - RNA, 19 nt, Artificial Sequence
  Description of Artificial Sequence: Synthetic oligonucleotide
  modified_base (10)..(10): a, c, u, g, unknown or other
uuauaugcunuggcauggc

SEQ ID NO: 30092 - RNA, 19 nt, Artificial Sequence
  Description of Artificial Sequence: Synthetic oligonucleotide
uuaagggaacaaucuagua

SEQ ID NO: 30093 - RNA, 19 nt, Artificial Sequence
  Description of Artificial Sequence: Synthetic oligonucleotide
agccauauauuaaagucca

SEQ ID NO: 30094 - RNA, 19 nt, Artificial Sequence
  Description of Artificial Sequence: Synthetic oligonucleotide
ugugaguccugcgucacug

SEQ ID NO: 30095 - RNA, 19 nt, Artificial Sequence
  Description of Artificial Sequence: Synthetic oligonucleotide
aggacgaaaagagggcugg

SEQ ID NO: 30096 - RNA, 19 nt, Artificial Sequence
  Description of Artificial Sequence: Synthetic oligonucleotide
uuguucgcuuuucaacaug

SEQ ID NO: 30097 - RNA, 19 nt, Artificial Sequence
  Description of Artificial Sequence: Synthetic oligonucleotide
uucuuuccuauggaacagg

SEQ ID NO: 30098 - RNA, 19 nt, Artificial Sequence
  Description of Artificial Sequence: Synthetic oligonucleotide
aaucucagugauaacguua

SEQ ID NO: 30099 - RNA, 19 nt, Artificial Sequence
  Description of Artificial Sequence: Synthetic oligonucleotide
uaguguagugacgauagau

SEQ ID NO: 30100 - RNA, 19 nt, Artificial Sequence
  Description of Artificial Sequence: Synthetic oligonucleotide
ugaaaacaacagucaggcc

SEQ ID NO: 30101 - RNA, 19 nt, Artificial Sequence
  Description of Artificial Sequence: Synthetic oligonucleotide
agacauucgcucuguaaga

SEQ ID NO: 30102 - RNA, 19 nt, Artificial Sequence
  Description of Artificial Sequence: Synthetic oligonucleotide
aucucuaguggauauggua

SEQ ID NO: 30103 - RNA, 19 nt, Artificial Sequence
  Description of Artificial Sequence: Synthetic oligonucleotide
acagggguuugucacucuc

SEQ ID NO: 30104 - RNA, 19 nt, Artificial Sequence
  Description of Artificial Sequence: Synthetic oligonucleotide
aggaccucuaacuccuuug

SEQ ID NO: 30105 - RNA, 19 nt, Artificial Sequence
  Description of Artificial Sequence: Synthetic oligonucleotide
cauuaugcagaaucaacaa

SEQ ID NO: 30106 - RNA, 19 nt, Artificial Sequence
  Description of Artificial Sequence: Synthetic oligonucleotide
agucacgagagucuccgcu

SEQ ID NO: 30107 - RNA, 19 nt, Artificial Sequence
  Description of Artificial Sequence: Synthetic oligonucleotide
gaaaacccgguaucuauaa

SEQ ID NO: 30108 - RNA, 19 nt, Artificial Sequence
  Description of Artificial Sequence: Synthetic oligonucleotide
agauacgcuuauagaaugg

SEQ ID NO: 30109 - RNA, 19 nt, Artificial Sequence
  Description of Artificial Sequence: Synthetic oligonucleotide
  modified_base (3)..(3): a, c, u, g, unknown or other
cunuggcauggccaguugc

SEQ ID NO: 30110 - RNA, 19 nt, Artificial Sequence
  Description of Artificial Sequence: Synthetic oligonucleotide
aggcgguuaaaacaaguau

SEQ ID NO: 30111 - RNA, 19 nt, Artificial Sequence
  Description of Artificial Sequence: Synthetic oligonucleotide
agccuauguaguaaauggg

SEQ ID NO: 30112 - RNA, 19 nt, Artificial Sequence
  Description of Artificial Sequence: Synthetic oligonucleotide
uccuguacguggaucuaug

SEQ ID NO: 30113 - RNA, 19 nt, Artificial Sequence
  Description of Artificial Sequence: Synthetic oligonucleotide
gaauagaaucucugguuaa

SEQ ID NO: 30114 - RNA, 19 nt, Artificial Sequence
  Description of Artificial Sequence: Synthetic oligonucleotide
agguaugaagucaugugug

SEQ ID NO: 30115 - RNA, 19 nt, Artificial Sequence
  Description of Artificial Sequence: Synthetic oligonucleotide
agacaaagcaauagcauau

SEQ ID NO: 30116 - RNA, 19 nt, Artificial Sequence
  Description of Artificial Sequence: Synthetic oligonucleotide
ggcgguuaaaacaaguaug

SEQ ID NO: 30117 - RNA, 19 nt, Artificial Sequence
  Description of Artificial Sequence: Synthetic oligonucleotide
uaguaaacacgcccaugcu

SEQ ID NO: 30118 - RNA, 19 nt, Artificial Sequence
  Description of Artificial Sequence: Synthetic oligonucleotide
cuugaauuacccguaagaa

SEQ ID NO: 30119 - RNA, 19 nt, Artificial Sequence
  Description of Artificial Sequence: Synthetic oligonucleotide
gcggcaauugcucaagugc

SEQ ID NO: 30120 - RNA, 19 nt, Artificial Sequence
  Description of Artificial Sequence: Synthetic oligonucleotide
caagcccuauagaacuagg

SEQ ID NO: 30121 - RNA, 19 nt, Artificial Sequence
  Description of Artificial Sequence: Synthetic oligonucleotide
aaaacccgguaucuauaaa

SEQ ID NO: 30122 - RNA, 19 nt, Artificial Sequence
  Description of Artificial Sequence: Synthetic oligonucleotide
acguaauaaauacguccca

SEQ ID NO: 30123 - RNA, 19 nt, Artificial Sequence
  Description of Artificial Sequence: Synthetic oligonucleotide
agaaugacgcacugacgca

SEQ ID NO: 30124 - RNA, 19 nt, Artificial Sequence
  Description of Artificial Sequence: Synthetic oligonucleotide
uguuagaguacagcugcac

SEQ ID NO: 30125 - RNA, 19 nt, Artificial Sequence
  Description of Artificial Sequence: Synthetic oligonucleotide
uaggucccuaaaugaauca

SEQ ID NO: 30126 - RNA, 19 nt, Artificial Sequence
  Description of Artificial Sequence: Synthetic oligonucleotide
acgauagauggcaugucuc

SEQ ID NO: 30127 - RNA, 19 nt, Artificial Sequence
  Description of Artificial Sequence: Synthetic oligonucleotide
ugcgucacugccaggaaua

SEQ ID NO: 30128 - RNA, 19 nt, Artificial Sequence
  Description of Artificial Sequence: Synthetic oligonucleotide
uucucguuaucaauuucuu

SEQ ID NO: 30129 - RNA, 19 nt, Artificial Sequence
  Description of Artificial Sequence: Synthetic oligonucleotide
  modified_base (8)..(8): a, c, u, g, unknown or other
auaugcunuggcauggcca

SEQ ID NO: 30130 - RNA, 19 nt, Artificial Sequence
  Description of Artificial Sequence: Synthetic oligonucleotide
gacauauacaugugaucaa

SEQ ID NO: 30131 - RNA, 19 nt, Artificial Sequence
  Description of Artificial Sequence: Synthetic oligonucleotide
gaaugacgcacugacgcac

SEQ ID NO: 30132 - RNA, 19 nt, Artificial Sequence
  Description of Artificial Sequence: Synthetic oligonucleotide
aauuacccguaagaauaga

SEQ ID NO: 30133 - RNA, 19 nt, Artificial Sequence
  Description of Artificial Sequence: Synthetic oligonucleotide
agaacuagggccaggacua

SEQ ID NO: 30134 - RNA, 19 nt, Artificial Sequence
  Description of Artificial Sequence: Synthetic oligonucleotide
uugauguaagaagcggggu

SEQ ID NO: 30135 - RNA, 19 nt, Artificial Sequence
  Description of Artificial Sequence: Synthetic oligonucleotide
gacauucgcucuguaagac

SEQ ID NO: 30136 - RNA, 19 nt, Artificial Sequence
  Description of Artificial Sequence: Synthetic oligonucleotide
ucuccgcugaccaccgaug

SEQ ID NO: 30137 - RNA, 19 nt, Artificial Sequence
  Description of Artificial Sequence: Synthetic oligonucleotide
acgagagucuccgcugacc

SEQ ID NO: 30138 - RNA, 19 nt, Artificial Sequence
  Description of Artificial Sequence: Synthetic oligonucleotide
uccaacugguuuguucaag

SEQ ID NO: 30139 - RNA, 19 nt, Artificial Sequence
  Description of Artificial Sequence: Synthetic oligonucleotide
auagggacucacauggcug

SEQ ID NO: 30140 - RNA, 19 nt, Artificial Sequence
  Description of Artificial Sequence: Synthetic oligonucleotide
uaucccauguuguucgcuu

SEQ ID NO: 30141 - RNA, 19 nt, Artificial Sequence
  Description of Artificial Sequence: Synthetic oligonucleotide
acauaguaaacacgcccau

SEQ ID NO: 30142 - RNA, 19 nt, Artificial Sequence
  Description of Artificial Sequence: Synthetic oligonucleotide
ucucguuaucaauuucuuu

SEQ ID NO: 30143 - RNA, 19 nt, Artificial Sequence
  Description of Artificial Sequence: Synthetic oligonucleotide
uguguggcagaaguguaaa

SEQ ID NO: 30144 - RNA, 19 nt, Artificial Sequence
  Description of Artificial Sequence: Synthetic oligonucleotide
cacaagaauauugccacca

SEQ ID NO: 30145 - RNA, 19 nt, Artificial Sequence
  Description of Artificial Sequence: Synthetic oligonucleotide
caacccuuccucagucacg

SEQ ID NO: 30146 - RNA, 19 nt, Artificial Sequence
  Description of Artificial Sequence: Synthetic oligonucleotide
cagucuaagcaaagccaag

SEQ ID NO: 30147 - RNA, 19 nt, Artificial Sequence
  Description of Artificial Sequence: Synthetic oligonucleotide
ugguugcauuauuuuauau

SEQ ID NO: 30148 - RNA, 19 nt, Artificial Sequence
  Description of Artificial Sequence: Synthetic oligonucleotide
gacgauagauggcaugucu

SEQ ID NO: 30149 - RNA, 19 nt, Artificial Sequence
  Description of Artificial Sequence: Synthetic oligonucleotide
auggcaguguuagaguaca

SEQ ID NO: 30150 - RNA, 19 nt, Artificial Sequence
  Description of Artificial Sequence: Synthetic oligonucleotide
caauagcauauauauauau

SEQ ID NO: 30151 - RNA, 19 nt, Artificial Sequence
  Description of Artificial Sequence: Synthetic oligonucleotide
auuacccguaagaauagaa

SEQ ID NO: 30152 - RNA, 19 nt, Artificial Sequence
  Description of Artificial Sequence: Synthetic oligonucleotide
auucgaguguugugguuga

SEQ ID NO: 30153 - RNA, 19 nt, Artificial Sequence
  Description of Artificial Sequence: Synthetic oligonucleotide
aucucagugauaacguuaa

SEQ ID NO: 30154 - RNA, 19 nt, Artificial Sequence
  Description of Artificial Sequence: Synthetic oligonucleotide
gauggcaguguuagaguac

SEQ ID NO: 30155 - RNA, 19 nt, Artificial Sequence
  Description of Artificial Sequence: Synthetic oligonucleotide
aacccgguaucuauaaauu

SEQ ID NO: 30156 - RNA, 19 nt, Artificial Sequence
  Description of Artificial Sequence: Synthetic oligonucleotide
ucucuagaugaggcaaccc

SEQ ID NO: 30157 - RNA, 19 nt, Artificial Sequence
  Description of Artificial Sequence: Synthetic oligonucleotide
aaucucuaguggauauggu

SEQ ID NO: 30158 - RNA, 19 nt, Artificial Sequence
  Description of Artificial Sequence: Synthetic oligonucleotide
ucuaguggauaugguagau

SEQ ID NO: 30159 - RNA, 19 nt, Artificial Sequence
  Description of Artificial Sequence: Synthetic oligonucleotide
auauuguccacacgccguu

SEQ ID NO: 30160 - RNA, 19 nt, Artificial Sequence
  Description of Artificial Sequence: Synthetic oligonucleotide
uugcuuguccuaguguagu

SEQ ID NO: 30161 - RNA, 19 nt, Artificial Sequence
  Description of Artificial Sequence: Synthetic oligonucleotide
cuuuaacccagaugagaga

SEQ ID NO: 30162 - RNA, 19 nt, Artificial Sequence
  Description of Artificial Sequence: Synthetic oligonucleotide
acugggguauuagauuaug

SEQ ID NO: 30163 - RNA, 19 nt, Artificial Sequence
  Description of Artificial Sequence: Synthetic oligonucleotide
caggacgaaaagagggcug

SEQ ID NO: 30164 - RNA, 19 nt, Artificial Sequence
  Description of Artificial Sequence: Synthetic oligonucleotide
gggguauuagauuaugaua

SEQ ID NO: 30165 - RNA, 19 nt, Artificial Sequence
  Description of Artificial Sequence: Synthetic oligonucleotide
caagauacgcuuauagaau

SEQ ID NO: 30166 - RNA, 19 nt, Artificial Sequence
  Description of Artificial Sequence: Synthetic oligonucleotide
aaugacgcacugacgcacu

SEQ ID NO: 30167 - RNA, 19 nt, Artificial Sequence
  Description of Artificial Sequence: Synthetic oligonucleotide
ucgagacaaucuccacuca

SEQ ID NO: 30168 - RNA, 19 nt, Artificial Sequence
  Description of Artificial Sequence: Synthetic oligonucleotide
acaagcggcaauugcucaa

SEQ ID NO: 30169 - RNA, 19 nt, Artificial Sequence
  Description of Artificial Sequence: Synthetic oligonucleotide
cucuaguggauaugguaga

SEQ ID NO: 30170 - RNA, 19 nt, Artificial Sequence
  Description of Artificial Sequence: Synthetic oligonucleotide
ggauaugguagaugacuac

SEQ ID NO: 30171 - RNA, 19 nt, Artificial Sequence
  Description of Artificial Sequence: Synthetic oligonucleotide
ucugguggccuaaggucuc

SEQ ID NO: 30172 - RNA, 19 nt, Artificial Sequence
  Description of Artificial Sequence: Synthetic oligonucleotide
gauacgcuuauagaauggu

SEQ ID NO: 30173 - RNA, 19 nt, Artificial Sequence
  Description of Artificial Sequence: Synthetic oligonucleotide
uccuaguguagugacgaua

SEQ ID NO: 30174 - RNA, 19 nt, Artificial Sequence
  Description of Artificial Sequence: Synthetic oligonucleotide
ccacuguguaauucgagug

SEQ ID NO: 30175 - RNA, 19 nt, Artificial Sequence
  Description of Artificial Sequence: Synthetic oligonucleotide
ccgguaucuauaaauuuuc

SEQ ID NO: 30176 - RNA, 19 nt, Artificial Sequence
  Description of Artificial Sequence: Synthetic oligonucleotide
caagcggcaauugcucaag

SEQ ID NO: 30177 - RNA, 19 nt, Artificial Sequence
  Description of Artificial Sequence: Synthetic oligonucleotide
accggaaauacugaaccuu

SEQ ID NO: 30178 - RNA, 19 nt, Artificial Sequence
  Description of Artificial Sequence: Synthetic oligonucleotide
ugauaacguuaaucuacuu

SEQ ID NO: 30179 - RNA, 19 nt, Artificial Sequence
  Description of Artificial Sequence: Synthetic oligonucleotide
ccuacuuuggagauaacua

SEQ ID NO: 30180 - RNA, 19 nt, Artificial Sequence
  Description of Artificial Sequence: Synthetic oligonucleotide
gcaguguuagaguacagcu

SEQ ID NO: 30181 - RNA, 19 nt, Artificial Sequence
  Description of Artificial Sequence: Synthetic oligonucleotide
uccuauggaacagggguuu

SEQ ID NO: 30182 - RNA, 19 nt, Artificial Sequence
  Description of Artificial Sequence: Synthetic oligonucleotide
uuugauccaaugggagguc

SEQ ID NO: 30183 - RNA, 19 nt, Artificial Sequence
  Description of Artificial Sequence: Synthetic oligonucleotide
gagaucucaucauguguua

SEQ ID NO: 30184 - RNA, 19 nt, Artificial Sequence
  Description of Artificial Sequence: Synthetic oligonucleotide
aguugugcuuguguuuaca

SEQ ID NO: 30185 - RNA, 19 nt, Artificial Sequence
  Description of Artificial Sequence: Synthetic oligonucleotide
aggucucaacaguuacucu

SEQ ID NO: 30186 - RNA, 19 nt, Artificial Sequence
  Description of Artificial Sequence: Synthetic oligonucleotide
ggcaguguuagaguacagc

SEQ ID NO: 30187 - RNA, 19 nt, Artificial Sequence
  Description of Artificial Sequence: Synthetic oligonucleotide
guaacugggguauuagauu

SEQ ID NO: 30188 - RNA, 19 nt, Artificial Sequence
  Description of Artificial Sequence: Synthetic oligonucleotide
cucuagaugaggcaacccu

SEQ ID NO: 30189 - RNA, 19 nt, Artificial Sequence
  Description of Artificial Sequence: Synthetic oligonucleotide
cugagcuucccuucacuga

SEQ ID NO: 30190 - RNA, 19 nt, Artificial Sequence
  Description of Artificial Sequence: Synthetic oligonucleotide
ggcuauaauagggacucac

SEQ ID NO: 30191 - RNA, 19 nt, Artificial Sequence
  Description of Artificial Sequence: Synthetic oligonucleotide
gcauauauauauauauaua

SEQ ID NO: 30192 - RNA, 19 nt, Artificial Sequence
  Description of Artificial Sequence: Synthetic oligonucleotide
uguucaagauacgcuuaua

SEQ ID NO: 30193 - RNA, 19 nt, Artificial Sequence
  Description of Artificial Sequence: Synthetic oligonucleotide
gauguaagaagcgggguuu

SEQ ID NO: 30194 - RNA, 19 nt, Artificial Sequence
  Description of Artificial Sequence: Synthetic oligonucleotide
gaaugaucuuagaugaauu

SEQ ID NO: 30195 - RNA, 19 nt, Artificial Sequence
  Description of Artificial Sequence: Synthetic oligonucleotide
gucguaucuauggcagcag

SEQ ID NO: 30196 - RNA, 19 nt, Artificial Sequence
  Description of Artificial Sequence: Synthetic oligonucleotide
cuacaccuccauaaucuaa

SEQ ID NO: 30197 - RNA, 19 nt, Artificial Sequence
  Description of Artificial Sequence: Synthetic oligonucleotide
ccaguaacgaacugcagaa

SEQ ID NO: 30198 - RNA, 19 nt, Artificial Sequence
  Description of Artificial Sequence: Synthetic oligonucleotide
  modified_base (5)..(5): a, c, u, g, unknown or other
ugcunuggcauggccaguu

SEQ ID NO: 30199 - RNA, 19 nt, Artificial Sequence
  Description of Artificial Sequence: Synthetic oligonucleotide
uagugacgauagauggcau

SEQ ID NO: 30200 - RNA, 19 nt, Artificial Sequence
  Description of Artificial Sequence: Synthetic oligonucleotide
uaguugugcuuguguuuac

SEQ ID NO: 30201 - RNA, 19 nt, Artificial Sequence
  Description of Artificial Sequence: Synthetic oligonucleotide
cccuauagaacuagggcca

SEQ ID NO: 30202 - RNA, 19 nt, Artificial Sequence
  Description of Artificial Sequence: Synthetic oligonucleotide
ugacuacgcuguagcugcc

SEQ ID NO: 30203 - RNA, 19 nt, Artificial Sequence
  Description of Artificial Sequence: Synthetic oligonucleotide
uguaagaagcgggguuuau

SEQ ID NO: 30204 - RNA, 19 nt, Artificial Sequence
  Description of Artificial Sequence: Synthetic oligonucleotide
uggagauaacuagggcuuc

SEQ ID NO: 30205 - RNA, 19 nt, Artificial Sequence
  Description of Artificial Sequence: Synthetic oligonucleotide
caguaacgaacugcagaag

SEQ ID NO: 30206 - RNA, 19 nt, Artificial Sequence
  Description of Artificial Sequence: Synthetic oligonucleotide
augacgcacugacgcacug

SEQ ID NO: 30207 - RNA, 19 nt, Artificial Sequence
  Description of Artificial Sequence: Synthetic oligonucleotide
agaaaacccgguaucuaua

SEQ ID NO: 30208 - RNA, 19 nt, Artificial Sequence
  Description of Artificial Sequence: Synthetic oligonucleotide
ucucagugauaacguuaau

SEQ ID NO: 30209 - RNA, 19 nt, Artificial Sequence
  Description of Artificial Sequence: Synthetic oligonucleotide
gagagucuccgcugaccac

SEQ ID NO: 30210 - RNA, 19 nt, Artificial Sequence
  Description of Artificial Sequence: Synthetic oligonucleotide
acucuuaauuucacccaga

SEQ ID NO: 30211 - RNA, 19 nt, Artificial Sequence
  Description of Artificial Sequence: Synthetic oligonucleotide
gugauaacguuaaucuacu

SEQ ID NO: 30212 - RNA, 19 nt, Artificial Sequence
  Description of Artificial Sequence: Synthetic oligonucleotide
gugacgauagauggcaugu

SEQ ID NO: 30213 - RNA, 19 nt, Artificial Sequence
  Description of Artificial Sequence: Synthetic oligonucleotide
cugaagcugacuacgcugu

SEQ ID NO: 30214 - RNA, 19 nt, Artificial Sequence
  Description of Artificial Sequence: Synthetic oligonucleotide
uuccuguacguggaucuau

SEQ ID NO: 30215 - RNA, 19 nt, Artificial Sequence
  Description of Artificial Sequence: Synthetic oligonucleotide
agauaacucucuagucaca

SEQ ID NO: 30216 - RNA, 19 nt, Artificial Sequence
  Description of Artificial Sequence: Synthetic oligonucleotide
gucuagggcagauuuuccu

SEQ ID NO: 30217 - RNA, 19 nt, Artificial Sequence
  Description of Artificial Sequence: Synthetic oligonucleotide
cacaagcggcaauugcuca

SEQ ID NO: 30218 - RNA, 19 nt, Artificial Sequence
  Description of Artificial Sequence: Synthetic oligonucleotide
gccaagggaaacugaguac

SEQ ID NO: 30219 - RNA, 19 nt, Artificial Sequence
  Description of Artificial Sequence: Synthetic oligonucleotide
caggacuacuucaaauaua

SEQ ID NO: 30220 - RNA, 19 nt, Artificial Sequence
  Description of Artificial Sequence: Synthetic oligonucleotide
ugacgauagauggcauguc

SEQ ID NO: 30221 - RNA, 19 nt, Artificial Sequence
  Description of Artificial Sequence: Synthetic oligonucleotide
gcuauaauagggacucaca

SEQ ID NO: 30222 - RNA, 19 nt, Artificial Sequence
  Description of Artificial Sequence: Synthetic oligonucleotide
ggcuuaguauuuauagcca

SEQ ID NO: 30223 - RNA, 19 nt, Artificial Sequence
  Description of Artificial Sequence: Synthetic oligonucleotide
ugaagacgcugaguagaaa

SEQ ID NO: 30224 - RNA, 19 nt, Artificial Sequence
  Description of Artificial Sequence: Synthetic oligonucleotide
cuagggccaggacuacuuc

SEQ ID NO: 30225 - RNA, 19 nt, Artificial Sequence
  Description of Artificial Sequence: Synthetic oligonucleotide
ccagauauaguaagaggaa

SEQ ID NO: 30226 - RNA, 19 nt, Artificial Sequence
  Description of Artificial Sequence: Synthetic oligonucleotide
guugcucauagcucuugua

SEQ ID NO: 30227 - RNA, 19 nt, Artificial Sequence
  Description of Artificial Sequence: Synthetic oligonucleotide
auacgcuuauagaauggua

SEQ ID NO: 30228 - RNA, 19 nt, Artificial Sequence
  Description of Artificial Sequence: Synthetic oligonucleotide
cuguacguggaucuaugua

SEQ ID NO: 30229 - RNA, 19 nt, Artificial Sequence
  Description of Artificial Sequence: Synthetic oligonucleotide
ugacgcacugacgcacuga

SEQ ID NO: 30230 - RNA, 19 nt, Artificial Sequence
  Description of Artificial Sequence: Synthetic oligonucleotide
cgguaucuauaaauuuucc

SEQ ID NO: 30231 - RNA, 19 nt, Artificial Sequence
  Description of Artificial Sequence: Synthetic oligonucleotide
gacgcacugacgcacugau

SEQ ID NO: 30232 - RNA, 19 nt, Artificial Sequence
  Description of Artificial Sequence: Synthetic oligonucleotide
gaguuccuacuuuggagau

SEQ ID NO: 30233 - RNA, 19 nt, Artificial Sequence
  Description of Artificial Sequence: Synthetic oligonucleotide
cuggucuaucccauguugu

SEQ ID NO: 30234 - RNA, 19 nt, Artificial Sequence
  Description of Artificial Sequence: Synthetic oligonucleotide
gagauaacuagggcuucua

SEQ ID NO: 30235 - RNA, 19 nt, Artificial Sequence
  Description of Artificial Sequence: Synthetic oligonucleotide
cuucaugcuauaaggcuuu

SEQ ID NO: 30236 - RNA, 19 nt, Artificial Sequence
  Description of Artificial Sequence: Synthetic oligonucleotide
cagauauaguaagaggaau

SEQ ID NO: 30237 - RNA, 19 nt, Artificial Sequence
  Description of Artificial Sequence: Synthetic oligonucleotide
augaaucaugaagcauuau

SEQ ID NO: 30238 - RNA, 19 nt, Artificial Sequence
  Description of Artificial Sequence: Synthetic oligonucleotide
cuaguguagugacgauaga

SEQ ID NO: 30239 - RNA, 19 nt, Artificial Sequence
  Description of Artificial Sequence: Synthetic oligonucleotide
cccguaagaauagaaucuc

SEQ ID NO: 30240 - RNA, 19 nt, Artificial Sequence
  Description of Artificial Sequence: Synthetic oligonucleotide
gcgaaauguaacuggggua

SEQ ID NO: 30241 - RNA, 19 nt, Artificial Sequence
  Description of Artificial Sequence: Synthetic oligonucleotide
uggcggggaccaaguuucc

SEQ ID NO: 30242 - RNA, 19 nt, Artificial Sequence
  Description of Artificial Sequence: Synthetic oligonucleotide
gcuuaguauuuauagccau

SEQ ID NO: 30243 - RNA, 19 nt, Artificial Sequence
  Description of Artificial Sequence: Synthetic oligonucleotide
gaacuagggccaggacuac

SEQ ID NO: 30244 - RNA, 19 nt, Artificial Sequence
  Description of Artificial Sequence: Synthetic oligonucleotide
uuccuacuuuggagauaac

SEQ ID NO: 30245 - RNA, 19 nt, Artificial Sequence
  Description of Artificial Sequence: Synthetic oligonucleotide
uggcuauaauagggacuca

SEQ ID NO: 30246 - RNA, 19 nt, Artificial Sequence
  Description of Artificial Sequence: Synthetic oligonucleotide
ccaagcccuauagaacuag

SEQ ID NO: 30247 - RNA, 19 nt, Artificial Sequence
  Description of Artificial Sequence: Synthetic oligonucleotide
aguuccuacuuuggagaua

SEQ ID NO: 30248 - RNA, 19 nt, Artificial Sequence
  Description of Artificial Sequence: Synthetic oligonucleotide
gacuacgcuguagcugcca

SEQ ID NO: 30249 - RNA, 19 nt, Artificial Sequence
  Description of Artificial Sequence: Synthetic oligonucleotide
cacgagagucuccgcugac

SEQ ID NO: 30250 - RNA, 19 nt, Artificial Sequence
  Description of Artificial Sequence: Synthetic oligonucleotide
ggucuggauugauguaaga

SEQ ID NO: 30251 - RNA, 19 nt, Artificial Sequence
  Description of Artificial Sequence: Synthetic oligonucleotide
ccuauagaacuagggccag

SEQ ID NO: 30252 - RNA, 19 nt, Artificial Sequence
  Description of Artificial Sequence: Synthetic oligonucleotide
gcacaagcggcaauugcuc

SEQ ID NO: 30253 - RNA, 19 nt, Artificial Sequence
  Description of Artificial Sequence: Synthetic oligonucleotide
guguuagaguacagcugca

SEQ ID NO: 30254 - RNA, 19 nt, Artificial Sequence
  Description of Artificial Sequence: Synthetic oligonucleotide
caacugguuuguucaagau

SEQ ID NO: 30255 - RNA, 19 nt, Artificial Sequence
  Description of Artificial Sequence: Synthetic oligonucleotide
uucaugcuauaaggcuuuu

SEQ ID NO: 30256 - RNA, 19 nt, Artificial Sequence
  Description of Artificial Sequence: Synthetic oligonucleotide
ccuaaggucucaacaguua

SEQ ID NO: 30257 - RNA, 19 nt, Artificial Sequence
  Description of Artificial Sequence: Synthetic oligonucleotide
cuauggaacagggguuugu

SEQ ID NO: 30258 - RNA, 19 nt, Artificial Sequence
  Description of Artificial Sequence: Synthetic oligonucleotide
gcuucaugcuauaaggcuu

SEQ ID NO: 30259 - RNA, 19 nt, Artificial Sequence
  Description of Artificial Sequence: Synthetic oligonucleotide
gucuccgcugaccaccgau

SEQ ID NO: 30260 - RNA, 19 nt, Artificial Sequence
  Description of Artificial Sequence: Synthetic oligonucleotide
  modified_base (6)..(6): a, c, u, g, unknown or other
augcunuggcauggccagu

SEQ ID NO: 30261 - RNA, 19 nt, Artificial Sequence
  Description of Artificial Sequence: Synthetic oligonucleotide
cgagagucuccgcugacca

SEQ ID NO: 30262 - RNA, 19 nt, Artificial Sequence
  Description of Artificial Sequence: Synthetic oligonucleotide
cuacgcuguagcugccacu

SEQ ID NO: 30263 - RNA, 19 nt, Artificial Sequence
  Description of Artificial Sequence: Synthetic oligonucleotide
gcggggaccaaguuucccu

SEQ ID NO: 30264 - RNA, 19 nt, Artificial Sequence
  Description of Artificial Sequence: Synthetic oligonucleotide
cgaaauguaacugggguau

SEQ ID NO: 30265 - RNA, 19 nt, Artificial Sequence
  Description of Artificial Sequence: Synthetic oligonucleotide
ccaggacuacuucaaauau

SEQ ID NO: 30266 - RNA, 19 nt, Artificial Sequence
  Description of Artificial Sequence: Synthetic oligonucleotide
ggagauaacuagggcuucu

SEQ ID NO: 30267 - RNA, 19 nt, Artificial Sequence
  Description of Artificial Sequence: Synthetic oligonucleotide
ggcggggaccaaguuuccc

SEQ ID NO: 30268 - RNA, 19 nt, Artificial Sequence
  Description of Artificial Sequence: Synthetic oligonucleotide
ccuauggaacagggguuug

SEQ ID NO: 30269 - RNA, 19 nt, Artificial Sequence
  Description of Artificial Sequence: Synthetic oligonucleotide
caggauugauuagcauuua

SEQ ID NO: 30270 - RNA, 19 nt, Artificial Sequence
  Description of Artificial Sequence: Synthetic oligonucleotide
cuaucccauguuguucgcu

SEQ ID NO: 30271 - RNA, 19 nt, Artificial Sequence
  Description of Artificial Sequence: Synthetic oligonucleotide
ccaaugggaggucuuugua

SEQ ID NO: 30272 - RNA, 19 nt, Artificial Sequence
  Description of Artificial Sequence: Synthetic oligonucleotide
cugcgucacugccaggaau

SEQ ID NO: 30273 - RNA, 19 nt, Artificial Sequence
  Description of Artificial Sequence: Synthetic oligonucleotide
ccggaaauacugaaccuuu

SEQ ID NO: 30274 - RNA, 19 nt, Artificial Sequence
  Description of Artificial Sequence: Synthetic oligonucleotide
cugguggccuaaggucuca

SEQ ID NO: 30275 - RNA, 19 nt, Artificial Sequence
  Description of Artificial Sequence: Synthetic oligonucleotide
guccuaguguagugacgau

SEQ ID NO: 30276 - RNA, 19 nt, Artificial Sequence
  Description of Artificial Sequence: Synthetic oligonucleotide
ccgauggcaguguuagagu

SEQ ID NO: 30277 - RNA, 19 nt, Artificial Sequence
  Description of Artificial Sequence: Synthetic oligonucleotide
gaccaccgauggcaguguu

SEQ ID NO: 30278 - RNA, 19 nt, Artificial Sequence
  Description of Artificial Sequence: Synthetic oligonucleotide
ccaagccuauguaguaaau

SEQ ID NO: 30279 - RNA, 19 nt, Artificial Sequence
  Description of Artificial Sequence: Synthetic oligonucleotide
aaaugcaugaugcuuaacc

SEQ ID NO: 30280 - RNA, 19 nt, Artificial Sequence
  Description of Artificial Sequence: Synthetic oligonucleotide
aaugauaccugcucgaacc

SEQ ID NO: 30281 - RNA, 19 nt, Artificial Sequence
  Description of Artificial Sequence: Synthetic oligonucleotide
ucuuauuccagcaauacgg

SEQ ID NO: 30282 - RNA, 19 nt, Artificial Sequence
  Description of Artificial Sequence: Synthetic oligonucleotide
aauauauauauauauguau

SEQ ID NO: 30283 - RNA, 19 nt, Artificial Sequence
  Description of Artificial Sequence: Synthetic oligonucleotide
ugaauauauauauauaugu

SEQ ID NO: 30284 - RNA, 19 nt, Artificial Sequence
  Description of Artificial Sequence: Synthetic oligonucleotide
guuucaauaaccuugcuag

SEQ ID NO: 30285 - RNA, 19 nt, Artificial Sequence
  Description of Artificial Sequence: Synthetic oligonucleotide
cuccauagcaauuagaagg

SEQ ID NO: 30286 - RNA, 19 nt, Artificial Sequence
  Description of Artificial Sequence: Synthetic oligonucleotide
gaagcaugcacuuaucucg

SEQ ID NO: 30287 - RNA, 19 nt, Artificial Sequence
  Description of Artificial Sequence: Synthetic oligonucleotide
gguuuuagcaaauagaccc

SEQ ID NO: 30288 - RNA, 19 nt, Artificial Sequence
  Description of Artificial Sequence: Synthetic oligonucleotide
uauauauauauauguaucu

SEQ ID NO: 30289 - RNA, 19 nt, Artificial Sequence
  Description of Artificial Sequence: Synthetic oligonucleotide
agugaauauauauauauau

SEQ ID NO: 30290 - RNA, 19 nt, Artificial Sequence
  Description of Artificial Sequence: Synthetic oligonucleotide
ugaugcuuaacccuaacug

SEQ ID NO: 30291 - RNA, 19 nt, Artificial Sequence
  Description of Artificial Sequence: Synthetic oligonucleotide
uuuucuaccguugauacug

SEQ ID NO: 30292 - RNA, 19 nt, Artificial Sequence
  Description of Artificial Sequence: Synthetic oligonucleotide
agagugagcacuaaggggc

SEQ ID NO: 30293 - RNA, 19 nt, Artificial Sequence
  Description of Artificial Sequence: Synthetic oligonucleotide
auauauauauauauguauc

SEQ ID NO: 30294 - RNA, 19 nt, Artificial Sequence
  Description of Artificial Sequence: Synthetic oligonucleotide
aauuagaagguacaccaga

SEQ ID NO: 30295 - RNA, 19 nt, Artificial Sequence
  Description of Artificial Sequence: Synthetic oligonucleotide
ugaaucgagauacaaagaa

SEQ ID NO: 30296 - RNA, 19 nt, Artificial Sequence
  Description of Artificial Sequence: Synthetic oligonucleotide
cuuugcuaccauaugaagg

SEQ ID NO: 30297 - RNA, 19 nt, Artificial Sequence
  Description of Artificial Sequence: Synthetic oligonucleotide
aaauagaccccucuccaag

SEQ ID NO: 30298 - RNA, 19 nt, Artificial Sequence
  Description of Artificial Sequence: Synthetic oligonucleotide
aacccuauggucuggauga

SEQ ID NO: 30299 - RNA, 19 nt, Artificial Sequence
  Description of Artificial Sequence: Synthetic oligonucleotide
uaacuaacacgucauaugu

SEQ ID NO: 30300 - RNA, 19 nt, Artificial Sequence
  Description of Artificial Sequence: Synthetic oligonucleotide
acguaaggaaccgagagcc

SEQ ID NO: 30301 - RNA, 19 nt, Artificial Sequence
  Description of Artificial Sequence: Synthetic oligonucleotide
gucauaacgucuaugauag

SEQ ID NO: 30302 - RNA, 19 nt, Artificial Sequence
  Description of Artificial Sequence: Synthetic oligonucleotide
uacucugucguauauauuc

SEQ ID NO: 30303 - RNA, 19 nt, Artificial Sequence
  Description of Artificial Sequence: Synthetic oligonucleotide
ucgaaugaggucaaugacc

SEQ ID NO: 30304 - RNA, 19 nt, Artificial Sequence
  Description of Artificial Sequence: Synthetic oligonucleotide
uauuugagcaagucuauca

SEQ ID NO: 30305 - RNA, 19 nt, Artificial Sequence
  Description of Artificial Sequence: Synthetic oligonucleotide
uauucgaucgagcuucucc

SEQ ID NO: 30306 - RNA, 19 nt, Artificial Sequence
  Description of Artificial Sequence: Synthetic oligonucleotide
auagcgaggacgcagagca

SEQ ID NO: 30307 - RNA, 19 nt, Artificial Sequence
  Description of Artificial Sequence: Synthetic oligonucleotide
aacggcuaucaucugacuc

SEQ ID NO: 30308 - RNA, 19 nt, Artificial Sequence
  Description of Artificial Sequence: Synthetic oligonucleotide
aaagcuaacaggaaccuca

SEQ ID NO: 30309 - RNA, 19 nt, Artificial Sequence
  Description of Artificial Sequence: Synthetic oligonucleotide
agcgaugaaacauugacaa

SEQ ID NO: 30310 - RNA, 19 nt, Artificial Sequence
  Description of Artificial Sequence: Synthetic oligonucleotide
uauuauucugaugccacgg

SEQ ID NO: 30311 - RNA, 19 nt, Artificial Sequence
  Description of Artificial Sequence: Synthetic oligonucleotide
aaaugagcccggcagagca

SEQ ID NO: 30312 - RNA, 19 nt, Artificial Sequence
  Description of Artificial Sequence: Synthetic oligonucleotide
aguucgaguuucaauaacc

SEQ ID NO: 30313 - RNA, 19 nt, Artificial Sequence
  Description of Artificial Sequence: Synthetic oligonucleotide
uuuacucugucguauauau

SEQ ID NO: 30314 - RNA, 19 nt, Artificial Sequence
  Description of Artificial Sequence: Synthetic oligonucleotide
aaugguugcccgaagcucg

SEQ ID NO: 30315 - RNA, 19 nt, Artificial Sequence
  Description of Artificial Sequence: Synthetic oligonucleotide
acuaauggugcccaaauaa

SEQ ID NO: 30316 - RNA, 19 nt, Artificial Sequence
  Description of Artificial Sequence: Synthetic oligonucleotide
gaauacugggccugaauag

SEQ ID NO: 30317 - RNA, 19 nt, Artificial Sequence
  Description of Artificial Sequence: Synthetic oligonucleotide
agucaccauaagcagagac

SEQ ID NO: 30318 - RNA, 19 nt, Artificial Sequence
  Description of Artificial Sequence: Synthetic oligonucleotide
uuuguauccagaagucacc

SEQ ID NO: 30319 - RNA, 19 nt, Artificial Sequence
  Description of Artificial Sequence: Synthetic oligonucleotide
ugucguauauauucaaacu

SEQ ID NO: 30320 - RNA, 19 nt, Artificial Sequence
  Description of Artificial Sequence: Synthetic oligonucleotide
acggaucucaguucgaauc

SEQ ID NO: 30321 - RNA, 19 nt, Artificial Sequence
  Description of Artificial Sequence: Synthetic oligonucleotide
cuaccguugauacuguagg

SEQ ID NO: 30322 - RNA, 19 nt, Artificial Sequence
  Description of Artificial Sequence: Synthetic oligonucleotide
guaacuaacacgucauaug

SEQ ID NO: 30323 - RNA, 19 nt, Artificial Sequence
  Description of Artificial Sequence: Synthetic oligonucleotide
caagagugagcacuaaggg

SEQ ID NO: 30324 - RNA, 19 nt, Artificial Sequence
  Description of Artificial Sequence: Synthetic oligonucleotide
aaagcaguugaacugcaaa

SEQ ID NO: 30325 - RNA, 19 nt, Artificial Sequence
  Description of Artificial Sequence: Synthetic oligonucleotide
acuguuggauaaaaugucc

SEQ ID NO: 30326 - RNA, 19 nt, Artificial Sequence
  Description of Artificial Sequence: Synthetic oligonucleotide
aaacccuauggucuggaug

SEQ ID NO: 30327 - RNA, 19 nt, Artificial Sequence
  Description of Artificial Sequence: Synthetic oligonucleotide
caauacggaucucaguucg

SEQ ID NO: 30328 - RNA, 19 nt, Artificial Sequence
  Description of Artificial Sequence: Synthetic oligonucleotide
aacauugacaaguuaucuu

SEQ ID NO: 30329 - RNA, 19 nt, Artificial Sequence
  Description of Artificial Sequence: Synthetic oligonucleotide
agcaauagcaacagccucc

SEQ ID NO: 30330 - RNA, 19 nt, Artificial Sequence
  Description of Artificial Sequence: Synthetic oligonucleotide
aaucuaccuucagaagucc

SEQ ID NO: 30331 - RNA, 19 nt, Artificial Sequence
  Description of Artificial Sequence: Synthetic oligonucleotide
caugacaagugucuguuag

SEQ ID NO: 30332 - RNA, 19 nt, Artificial Sequence
  Description of Artificial Sequence: Synthetic oligonucleotide
ucgaucgcuuucuucaggg

SEQ ID NO: 30333 - RNA, 19 nt, Artificial Sequence
  Description of Artificial Sequence: Synthetic oligonucleotide
agcaauacggaucucaguu

SEQ ID NO: 30334 - RNA, 19 nt, Artificial Sequence
  Description of Artificial Sequence: Synthetic oligonucleotide
aagaccgguaaguccuggc

SEQ ID NO: 30335 - RNA, 19 nt, Artificial Sequence
  Description of Artificial Sequence: Synthetic oligonucleotide
aacacgucauauguggaag

SEQ ID NO: 30336 - RNA, 19 nt, Artificial Sequence
  Description of Artificial Sequence: Synthetic oligonucleotide
aagcgaagcauagauuuag

SEQ ID NO: 30337 - RNA, 19 nt, Artificial Sequence
  Description of Artificial Sequence: Synthetic oligonucleotide
agaccgguaaguccuggcc

SEQ ID NO: 30338 - RNA, 19 nt, Artificial Sequence
  Description of Artificial Sequence: Synthetic oligonucleotide
cucuaaaccagaaucccug

SEQ ID NO: 30339 - RNA, 19 nt, Artificial Sequence
  Description of Artificial Sequence: Synthetic oligonucleotide
gugaauauauauauauaug

SEQ ID NO: 30340 - RNA, 19 nt, Artificial Sequence
  Description of Artificial Sequence: Synthetic oligonucleotide
aguucgauggugauaagag

SEQ ID NO: 30341 - RNA, 19 nt, Artificial Sequence
  Description of Artificial Sequence: Synthetic oligonucleotide
uuuaauuaauggagucaca

SEQ ID NO: 30342 - RNA, 19 nt, Artificial Sequence
  Description of Artificial Sequence: Synthetic oligonucleotide
acuauuaacaacggcauaa

SEQ ID NO: 30343 - RNA, 19 nt, Artificial Sequence
  Description of Artificial Sequence: Synthetic oligonucleotide
accugaaugauaccugcuc

SEQ ID NO: 30344 - RNA, 19 nt, Artificial Sequence
  Description of Artificial Sequence: Synthetic oligonucleotide
uuaucucggaaaauaugcu

SEQ ID NO: 30345 - RNA, 19 nt, Artificial Sequence
  Description of Artificial Sequence: Synthetic oligonucleotide
ugaauagauacaguaucca

SEQ ID NO: 30346 - RNA, 19 nt, Artificial Sequence
  Description of Artificial Sequence: Synthetic oligonucleotide
gaacuuacggcgaugcugc

SEQ ID NO: 30347 - RNA, 19 nt, Artificial Sequence
  Description of Artificial Sequence: Synthetic oligonucleotide
aacaacggcauaaugugca

SEQ ID NO: 30348 - RNA, 19 nt, Artificial Sequence
  Description of Artificial Sequence: Synthetic oligonucleotide
uaacgucuaugauaggaug

SEQ ID NO: 30349 - RNA, 19 nt, Artificial Sequence
  Description of Artificial Sequence: Synthetic oligonucleotide
aacacacucggguaggcau

SEQ ID NO: 30350 - RNA, 19 nt, Artificial Sequence
  Description of Artificial Sequence: Synthetic oligonucleotide
gaaguaauggucaggguuc

SEQ ID NO: 30351 - RNA, 19 nt, Artificial Sequence
  Description of Artificial Sequence: Synthetic oligonucleotide
uuuucgaaccacaccuuga

SEQ ID NO: 30352 - RNA, 19 nt, Artificial Sequence
  Description of Artificial Sequence: Synthetic oligonucleotide
agguuuuagcaaauagacc

SEQ ID NO: 30353 - RNA, 19 nt, Artificial Sequence
  Description of Artificial Sequence: Synthetic oligonucleotide
uguaacuaacacgucauau

SEQ ID NO: 30354 - RNA, 19 nt, Artificial Sequence
  Description of Artificial Sequence: Synthetic oligonucleotide
gaauauauauauauaugua

SEQ ID NO: 30355 - RNA, 19 nt, Artificial Sequence
  Description of Artificial Sequence: Synthetic oligonucleotide
ugacauauuccccggcgug

SEQ ID NO: 30356 - RNA, 19 nt, Artificial Sequence
  Description of Artificial Sequence: Synthetic oligonucleotide
acggcuaucaucugacuca

SEQ ID NO: 30357 - RNA, 19 nt, Artificial Sequence
  Description of Artificial Sequence: Synthetic oligonucleotide
cuaggugggaauacuacuc

SEQ ID NO: 30358 - RNA, 19 nt, Artificial Sequence
  Description of Artificial Sequence: Synthetic oligonucleotide
cagagguuuuagcaaauag

SEQ ID NO: 30359 - RNA, 19 nt, Artificial Sequence
  Description of Artificial Sequence: Synthetic oligonucleotide
aacguggcguaaaucuacc

SEQ ID NO: 30360 - RNA, 19 nt, Artificial Sequence
  Description of Artificial Sequence: Synthetic oligonucleotide
ucugucguauauauucaaa

SEQ ID NO: 30361 - RNA, 19 nt, Artificial Sequence
  Description of Artificial Sequence: Synthetic oligonucleotide
aaaauaugcucugguagaa

SEQ ID NO: 30362 - RNA, 19 nt, Artificial Sequence
  Description of Artificial Sequence: Synthetic oligonucleotide
caagugaauauauauauau

SEQ ID NO: 30363 - RNA, 19 nt, Artificial Sequence
  Description of Artificial Sequence: Synthetic oligonucleotide
ccaagagugagcacuaagg

SEQ ID NO: 30364 - RNA, 19 nt, Artificial Sequence
  Description of Artificial Sequence: Synthetic oligonucleotide
auauguuguccaccaggcg

SEQ ID NO: 30365 - RNA, 19 nt, Artificial Sequence
  Description of Artificial Sequence: Synthetic oligonucleotide
uggcacguaaggaaccgag

SEQ ID NO: 30366 - RNA, 19 nt, Artificial Sequence
  Description of Artificial Sequence: Synthetic oligonucleotide
uaccgugacagcuggagcu

SEQ ID NO: 30367 - RNA, 19 nt, Artificial Sequence
  Description of Artificial Sequence: Synthetic oligonucleotide
ggccauaagaagcuggucc

SEQ ID NO: 30368 - RNA, 19 nt, Artificial Sequence
  Description of Artificial Sequence: Synthetic oligonucleotide
uucaugagcccgucaauac

SEQ ID NO: 30369 - RNA, 19 nt, Artificial Sequence
  Description of Artificial Sequence: Synthetic oligonucleotide
auauuccccggcgugaggg

SEQ ID NO: 30370 - RNA, 19 nt, Artificial Sequence
  Description of Artificial Sequence: Synthetic oligonucleotide
cauaacgucuaugauagga

SEQ ID NO: 30371 - RNA, 19 nt, Artificial Sequence
  Description of Artificial Sequence: Synthetic oligonucleotide
auuauucugaugccacgga

SEQ ID NO: 30372 - RNA, 19 nt, Artificial Sequence
  Description of Artificial Sequence: Synthetic oligonucleotide
aaaaguggcucggcccagc

SEQ ID NO: 30373 - RNA, 19 nt, Artificial Sequence
  Description of Artificial Sequence: Synthetic oligonucleotide
ugcuuaacccuaacuggug

SEQ ID NO: 30374 - RNA, 19 nt, Artificial Sequence
  Description of Artificial Sequence: Synthetic oligonucleotide
uuaggaucccacagcuuug

SEQ ID NO: 30375 - RNA, 19 nt, Artificial Sequence
  Description of Artificial Sequence: Synthetic oligonucleotide
auauauauauauguaucuu

SEQ ID NO: 30376 - RNA, 19 nt, Artificial Sequence
  Description of Artificial Sequence: Synthetic oligonucleotide
ggcguuuauagcgaggacg

SEQ ID NO: 30377 - RNA, 19 nt, Artificial Sequence
  Description of Artificial Sequence: Synthetic oligonucleotide
aauggccaaucgaaugagg

SEQ ID NO: 30378 - RNA, 19 nt, Artificial Sequence
  Description of Artificial Sequence: Synthetic oligonucleotide
uaacacgucauauguggaa

SEQ ID NO: 30379 - RNA, 19 nt, Artificial Sequence
  Description of Artificial Sequence: Synthetic oligonucleotide
guggcguaaaucuaccuuc

SEQ ID NO: 30380 - RNA, 19 nt, Artificial Sequence
  Description of Artificial Sequence: Synthetic oligonucleotide
acguguuacuacugaggac

SEQ ID NO: 30381 - RNA, 19 nt, Artificial Sequence
  Description of Artificial Sequence: Synthetic oligonucleotide
uaguucgaguuucaauaac

SEQ ID NO: 30382 - RNA, 19 nt, Artificial Sequence
  Description of Artificial Sequence: Synthetic oligonucleotide
accagaacggugccugacg

SEQ ID NO: 30383 - RNA, 19 nt, Artificial Sequence
  Description of Artificial Sequence: Synthetic oligonucleotide
uguggcacguaaggaaccg

SEQ ID NO: 30384 - RNA, 19 nt, Artificial Sequence
  Description of Artificial Sequence: Synthetic oligonucleotide
ucaaagcuaacaggaaccu

SEQ ID NO: 30385 - RNA, 19 nt, Artificial Sequence
  Description of Artificial Sequence: Synthetic oligonucleotide
cuuaacccuaacuggugac

SEQ ID NO: 30386 - RNA, 19 nt, Artificial Sequence
  Description of Artificial Sequence: Synthetic oligonucleotide
ucauggcgauccaugaggu

SEQ ID NO: 30387 - RNA, 19 nt, Artificial Sequence
  Description of Artificial Sequence: Synthetic oligonucleotide
cugguauuauucugaugcc

SEQ ID NO: 30388 - RNA, 19 nt, Artificial Sequence
  Description of Artificial Sequence: Synthetic oligonucleotide
ggugacauauuccccggcg

SEQ ID NO: 30389 - RNA, 19 nt, Artificial Sequence
  Description of Artificial Sequence: Synthetic oligonucleotide
aacuuacggcgaugcugcc

SEQ ID NO: 30390 - RNA, 19 nt, Artificial Sequence
  Description of Artificial Sequence: Synthetic oligonucleotide
uucgaucgagcuucuccgg

SEQ ID NO: 30391 - RNA, 19 nt, Artificial Sequence
  Description of Artificial Sequence: Synthetic oligonucleotide
cauuuaauuaauggaguca

SEQ ID NO: 30392 - RNA, 19 nt, Artificial Sequence
  Description of Artificial Sequence: Synthetic oligonucleotide
caauaaccuugcuagcaug

SEQ ID NO: 30393 - RNA, 19 nt, Artificial Sequence
  Description of Artificial Sequence: Synthetic oligonucleotide
aagugaauauauauauaua

SEQ ID NO: 30394 - RNA, 19 nt, Artificial Sequence
  Description of Artificial Sequence: Synthetic oligonucleotide
uaguucgauggugauaaga

SEQ ID NO: 30395 - RNA, 19 nt, Artificial Sequence
  Description of Artificial Sequence: Synthetic oligonucleotide
aacuaauggugcccaaaua

SEQ ID NO: 30396 - RNA, 19 nt, Artificial Sequence
  Description of Artificial Sequence: Synthetic oligonucleotide
uuguauccagaagucacca

SEQ ID NO: 30397 - RNA, 19 nt, Artificial Sequence
  Description of Artificial Sequence: Synthetic oligonucleotide
uuaacccuaacuggugaca

SEQ ID NO: 30398 - RNA, 19 nt, Artificial Sequence
  Description of Artificial Sequence: Synthetic oligonucleotide
cacguaaggaaccgagagc

SEQ ID NO: 30399 - RNA, 19 nt, Artificial Sequence
  Description of Artificial Sequence: Synthetic oligonucleotide
agcgcagucuguaacuaac

SEQ ID NO: 30400 - RNA, 19 nt, Artificial Sequence
  Description of Artificial Sequence: Synthetic oligonucleotide
gaagcuaccgugacagcug

SEQ ID NO: 30401 - RNA, 19 nt, Artificial Sequence
  Description of Artificial Sequence: Synthetic oligonucleotide
uggcguaaaucuaccuuca

SEQ ID NO: 30402 - RNA, 19 nt, Artificial Sequence
  Description of Artificial Sequence: Synthetic oligonucleotide
uaauggagucacagcaaaa

SEQ ID NO: 30403 - RNA, 19 nt, Artificial Sequence
  Description of Artificial Sequence: Synthetic oligonucleotide
accgguaaguccuggccag

SEQ ID NO: 30404 - RNA, 19 nt, Artificial Sequence
  Description of Artificial Sequence: Synthetic oligonucleotide
aacgcccggcgacggacgc

SEQ ID NO: 30405 - RNA, 19 nt, Artificial Sequence
  Description of Artificial Sequence: Synthetic oligonucleotide
aggugggaauacuacucag

SEQ ID NO: 30406 - RNA, 19 nt, Artificial Sequence
  Description of Artificial Sequence: Synthetic oligonucleotide
caaucgaaugaggucaaug

SEQ ID NO: 30407 - RNA, 19 nt, Artificial Sequence
  Description of Artificial Sequence: Synthetic oligonucleotide
acuuacggcgaugcugccc

SEQ ID NO: 30408 - RNA, 19 nt, Artificial Sequence
  Description of Artificial Sequence: Synthetic oligonucleotide
gaacguggcguaaaucuac

SEQ ID NO: 30409 - RNA, 19 nt, Artificial Sequence
  Description of Artificial Sequence: Synthetic oligonucleotide
uacucaguagaguuuucua

SEQ ID NO: 30410 - RNA, 19 nt, Artificial Sequence
  Description of Artificial Sequence: Synthetic oligonucleotide
cacguguuacuacugagga

SEQ ID NO: 30411 - RNA, 19 nt, Artificial Sequence
  Description of Artificial Sequence: Synthetic oligonucleotide
auuagaagguacaccagaa

SEQ ID NO: 30412 - RNA, 19 nt, Artificial Sequence
  Description of Artificial Sequence: Synthetic oligonucleotide
agcgaagcauagauuuagc

SEQ ID NO: 30413 - RNA, 19 nt, Artificial Sequence
  Description of Artificial Sequence: Synthetic oligonucleotide
cccgucaauacacacacag

SEQ ID NO: 30414 - RNA, 19 nt, Artificial Sequence
  Description of Artificial Sequence: Synthetic oligonucleotide
ucgaaucucggggucacug

SEQ ID NO: 30415 - RNA, 19 nt, Artificial Sequence
  Description of Artificial Sequence: Synthetic oligonucleotide
acgguuggcccuauggaac

SEQ ID NO: 30416 - RNA, 19 nt, Artificial Sequence
  Description of Artificial Sequence: Synthetic oligonucleotide
uggcagaaugcuggaacgg

SEQ ID NO: 30417 - RNA, 19 nt, Artificial Sequence
  Description of Artificial Sequence: Synthetic oligonucleotide
agaacggugccugacgaca

SEQ ID NO: 30418 - RNA, 19 nt, Artificial Sequence
  Description of Artificial Sequence: Synthetic oligonucleotide
aacgccuccauagcaauua

SEQ ID NO: 30419 - RNA, 19 nt, Artificial Sequence
  Description of Artificial Sequence: Synthetic oligonucleotide
ugaaugauaccugcucgaa

SEQ ID NO: 30420 - RNA, 19 nt, Artificial Sequence
  Description of Artificial Sequence: Synthetic oligonucleotide
uagcaauuagaagguacac

SEQ ID NO: 30421 - RNA, 19 nt, Artificial Sequence
  Description of Artificial Sequence: Synthetic oligonucleotide
cuuacggcgaugcugccca

SEQ ID NO: 30422 - RNA, 19 nt, Artificial Sequence
  Description of Artificial Sequence: Synthetic oligonucleotide
auaacgucuaugauaggau

SEQ ID NO: 30423 - RNA, 19 nt, Artificial Sequence
  Description of Artificial Sequence: Synthetic oligonucleotide
ugccacguguuacuacuga

SEQ ID NO: 30424 - RNA, 19 nt, Artificial Sequence
  Description of Artificial Sequence: Synthetic oligonucleotide
cacgucugguauuauucug

SEQ ID NO: 30425 - RNA, 19 nt, Artificial Sequence
  Description of Artificial Sequence: Synthetic oligonucleotide
gucguauauauucaaacuu

SEQ ID NO: 30426 - RNA, 19 nt, Artificial Sequence
  Description of Artificial Sequence: Synthetic oligonucleotide
ugagcccgucaauacacac

SEQ ID NO: 30427 - RNA, 19 nt, Artificial Sequence
  Description of Artificial Sequence: Synthetic oligonucleotide
accgcauagaaugucaguu

SEQ ID NO: 30428 - RNA, 19 nt, Artificial Sequence
  Description of Artificial Sequence: Synthetic oligonucleotide
uauuccccggcgugagggg

SEQ ID NO: 30429 - RNA, 19 nt, Artificial Sequence
  Description of Artificial Sequence: Synthetic oligonucleotide
cagauaggcgccuauucga

SEQ ID NO: 30430 - RNA, 19 nt, Artificial Sequence
  Description of Artificial Sequence: Synthetic oligonucleotide
ucgaucgagcuucuccggu

SEQ ID NO: 30431 - RNA, 19 nt, Artificial Sequence
  Description of Artificial Sequence: Synthetic oligonucleotide
uuuggaacuuacggcgaug

SEQ ID NO: 30432 - RNA, 19 nt, Artificial Sequence
  Description of Artificial Sequence: Synthetic oligonucleotide
augcuuaacccuaacuggu

SEQ ID NO: 30433 - RNA, 19 nt, Artificial Sequence
  Description of Artificial Sequence: Synthetic oligonucleotide
uggccaaucgaaugagguc

SEQ ID NO: 30434 - RNA, 19 nt, Artificial Sequence
  Description of Artificial Sequence: Synthetic oligonucleotide
aacccguggggaauccuuc

SEQ ID NO: 30435 - RNA, 19 nt, Artificial Sequence
  Description of Artificial Sequence: Synthetic oligonucleotide
ccagauaggcgccuauucg

SEQ ID NO: 30436 - RNA, 19 nt, Artificial Sequence
  Description of Artificial Sequence: Synthetic oligonucleotide
cuguggcacguaaggaacc

SEQ ID NO: 30437 - RNA, 19 nt, Artificial Sequence
  Description of Artificial Sequence: Synthetic oligonucleotide
guuacuacugaggacugaa

SEQ ID NO: 30438 - RNA, 19 nt, Artificial Sequence
  Description of Artificial Sequence: Synthetic oligonucleotide
gaccgguaaguccuggcca

SEQ ID NO: 30439 - RNA, 19 nt, Artificial Sequence
  Description of Artificial Sequence: Synthetic oligonucleotide
uuucgaugcuacagucuuc

SEQ ID NO: 30440 - RNA, 19 nt, Artificial Sequence
  Description of Artificial Sequence: Synthetic oligonucleotide
uccaagcgaagcauagauu

SEQ ID NO: 30441 - RNA, 19 nt, Artificial Sequence
  Description of Artificial Sequence: Synthetic oligonucleotide
acccuaacuggugacauau

SEQ ID NO: 30442 - RNA, 19 nt, Artificial Sequence
  Description of Artificial Sequence: Synthetic oligonucleotide
gauaggcgccuauucgauc

SEQ ID NO: 30443 - RNA, 19 nt, Artificial Sequence
  Description of Artificial Sequence: Synthetic oligonucleotide
acauauuccccggcgugag

SEQ ID NO: 30444 - RNA, 19 nt, Artificial Sequence
  Description of Artificial Sequence: Synthetic oligonucleotide
cagcgaugaaacauugaca

SEQ ID NO: 30445 - RNA, 19 nt, Artificial Sequence
  Description of Artificial Sequence: Synthetic oligonucleotide
acgucuaugauaggauggu

SEQ ID NO: 30446 - RNA, 19 nt, Artificial Sequence
  Description of Artificial Sequence: Synthetic oligonucleotide
agaaucccugaacuucuaa

SEQ ID NO: 30447 - RNA, 19 nt, Artificial Sequence
  Description of Artificial Sequence: Synthetic oligonucleotide
agaaugcuggaacggcuau

SEQ ID NO: 30448 - RNA, 19 nt, Artificial Sequence
  Description of Artificial Sequence: Synthetic oligonucleotide
agagccagcgauguguaaa

SEQ ID NO: 30449 - RNA, 19 nt, Artificial Sequence
  Description of Artificial Sequence: Synthetic oligonucleotide
aaagcgcagucuguaacua

SEQ ID NO: 30450 - RNA, 19 nt, Artificial Sequence
  Description of Artificial Sequence: Synthetic oligonucleotide
aagcgcagucuguaacuaa

SEQ ID NO: 30451 - RNA, 19 nt, Artificial Sequence
  Description of Artificial Sequence: Synthetic oligonucleotide
gguugcccgaagcucgucg

SEQ ID NO: 30452 - RNA, 19 nt, Artificial Sequence
  Description of Artificial Sequence: Synthetic oligonucleotide
aguggauguuccaaacaca

SEQ ID NO: 30453 - RNA, 19 nt, Artificial Sequence
  Description of Artificial Sequence: Synthetic oligonucleotide
agacaccguaccuuucggu

SEQ ID NO: 30454 - RNA, 19 nt, Artificial Sequence
  Description of Artificial Sequence: Synthetic oligonucleotide
gcguuuauagcgaggacgc

SEQ ID NO: 30455 - RNA, 19 nt, Artificial Sequence
  Description of Artificial Sequence: Synthetic oligonucleotide
cacugaaucgagauacaaa

SEQ ID NO: 30456 - RNA, 19 nt, Artificial Sequence
  Description of Artificial Sequence: Synthetic oligonucleotide
aauacggaucucaguucga

SEQ ID NO: 30457 - RNA, 19 nt, Artificial Sequence
  Description of Artificial Sequence: Synthetic oligonucleotide
ggccaaucgaaugagguca

SEQ ID NO: 30458 - RNA, 19 nt, Artificial Sequence
  Description of Artificial Sequence: Synthetic oligonucleotide
auaaccuugcuagcaugcu

SEQ ID NO: 30459 - RNA, 19 nt, Artificial Sequence
  Description of Artificial Sequence: Synthetic oligonucleotide
acgucugguauuauucuga

SEQ ID NO: 30460 - RNA, 19 nt, Artificial Sequence
  Description of Artificial Sequence: Synthetic oligonucleotide
uaggcauggcgacccgagc

SEQ ID NO: 30461 - RNA, 19 nt, Artificial Sequence
  Description of Artificial Sequence: Synthetic oligonucleotide
cacgucauauguggaagac

SEQ ID NO: 30462 - RNA, 19 nt, Artificial Sequence
  Description of Artificial Sequence: Synthetic oligonucleotide
aagcucgucguuaacuguu

SEQ ID NO: 30463 - RNA, 19 nt, Artificial Sequence
  Description of Artificial Sequence: Synthetic oligonucleotide
gagugagggaacaaucuua

SEQ ID NO: 30464 - RNA, 19 nt, Artificial Sequence
  Description of Artificial Sequence: Synthetic oligonucleotide
uuacucugucguauauauu

SEQ ID NO: 30465 - RNA, 19 nt, Artificial Sequence
  Description of Artificial Sequence: Synthetic oligonucleotide
gccuauucgaucgagcuuc

SEQ ID NO: 30466 - RNA, 19 nt, Artificial Sequence
  Description of Artificial Sequence: Synthetic oligonucleotide
acucugucguauauauuca

SEQ ID NO: 30467 - RNA, 19 nt, Artificial Sequence
  Description of Artificial Sequence: Synthetic oligonucleotide
cucggguaggcauggcgac

SEQ ID NO: 30468 - RNA, 19 nt, Artificial Sequence
  Description of Artificial Sequence: Synthetic oligonucleotide
ccagcaauacggaucucag

SEQ ID NO: 30469 - RNA, 19 nt, Artificial Sequence
  Description of Artificial Sequence: Synthetic oligonucleotide
ugcacuuaucucggaaaau

SEQ ID NO: 30470 - RNA, 19 nt, Artificial Sequence
  Description of Artificial Sequence: Synthetic oligonucleotide
auggucuaagugcgcaaaa

SEQ ID NO: 30471 - RNA, 19 nt, Artificial Sequence
  Description of Artificial Sequence: Synthetic oligonucleotide
aacccuaacuggugacaua

SEQ ID NO: 30472 - RNA, 19 nt, Artificial Sequence
  Description of Artificial Sequence: Synthetic oligonucleotide
gggacggacugguacuggg

SEQ ID NO: 30473 - RNA, 19 nt, Artificial Sequence
  Description of Artificial Sequence: Synthetic oligonucleotide
uccggugcagacaccgcau

SEQ ID NO: 30474 - RNA, 19 nt, Artificial Sequence
  Description of Artificial Sequence: Synthetic oligonucleotide
cugacucacaaaguugaga

SEQ ID NO: 30475 - RNA, 19 nt, Artificial Sequence
  Description of Artificial Sequence: Synthetic oligonucleotide
gcguaaaucuaccuucaga

SEQ ID NO: 30476 - RNA, 19 nt, Artificial Sequence
  Description of Artificial Sequence: Synthetic oligonucleotide
gaccgcggaacgcccggcg

SEQ ID NO: 30477 - RNA, 19 nt, Artificial Sequence
  Description of Artificial Sequence: Synthetic oligonucleotide
guccaagcgaagcauagau

SEQ ID NO: 30478 - RNA, 19 nt, Artificial Sequence
  Description of Artificial Sequence: Synthetic oligonucleotide
gcaagucuaucaugaagca

SEQ ID NO: 30479 - RNA, 19 nt, Artificial Sequence
  Description of Artificial Sequence: Synthetic oligonucleotide
gaagcucgucguuaacugu

SEQ ID NO: 30480 - RNA, 19 nt, Artificial Sequence
  Description of Artificial Sequence: Synthetic oligonucleotide
guucgaguuucaauaaccu

SEQ ID NO: 30481 - RNA, 19 nt, Artificial Sequence
  Description of Artificial Sequence: Synthetic oligonucleotide
gacuucggaagcaugcacu

SEQ ID NO: 30482 - RNA, 19 nt, Artificial Sequence
  Description of Artificial Sequence: Synthetic oligonucleotide
acguggcguaaaucuaccu

SEQ ID NO: 30483 - RNA, 19 nt, Artificial Sequence
  Description of Artificial Sequence: Synthetic oligonucleotide
cacgguuggcccuauggaa

SEQ ID NO: 30484 - RNA, 19 nt, Artificial Sequence
  Description of Artificial Sequence: Synthetic oligonucleotide
caucgaccgcggaacgccc

SEQ ID NO: 30485 - RNA, 19 nt, Artificial Sequence
  Description of Artificial Sequence: Synthetic oligonucleotide
uccauuccguuggugucga

SEQ ID NO: 30486 - RNA, 19 nt, Artificial Sequence
  Description of Artificial Sequence: Synthetic oligonucleotide
cagaacggugccugacgac

SEQ ID NO: 30487 - RNA, 19 nt, Artificial Sequence
  Description of Artificial Sequence: Synthetic oligonucleotide
gagcccgucaauacacaca

SEQ ID NO: 30488 - RNA, 19 nt, Artificial Sequence
  Description of Artificial Sequence: Synthetic oligonucleotide
ggcguaaaucuaccuucag

SEQ ID NO: 30489 - RNA, 19 nt, Artificial Sequence
  Description of Artificial Sequence: Synthetic oligonucleotide
gccguucccggacucagag

SEQ ID NO: 30490 - RNA, 19 nt, Artificial Sequence
  Description of Artificial Sequence: Synthetic oligonucleotide
agucuaucaugaagcaaau

SEQ ID NO: 30491 - RNA, 19 nt, Artificial Sequence
  Description of Artificial Sequence: Synthetic oligonucleotide
agauaggcgccuauucgau

SEQ ID NO: 30492 - RNA, 19 nt, Artificial Sequence
  Description of Artificial Sequence: Synthetic oligonucleotide
cuacugaggacugaagggu

SEQ ID NO: 30493 - RNA, 19 nt, Artificial Sequence
  Description of Artificial Sequence: Synthetic oligonucleotide
guacccgcugccaccgagg

SEQ ID NO: 30494 - RNA, 19 nt, Artificial Sequence
  Description of Artificial Sequence: Synthetic oligonucleotide
ucucauagacagggacgga

SEQ ID NO: 30495 - RNA, 19 nt, Artificial Sequence
  Description of Artificial Sequence: Synthetic oligonucleotide
ggugagcuccaguauuuga

SEQ ID NO: 30496 - RNA, 19 nt, Artificial Sequence
  Description of Artificial Sequence: Synthetic oligonucleotide
guuuuacucugucguauau

SEQ ID NO: 30497 - RNA, 19 nt, Artificial Sequence
  Description of Artificial Sequence: Synthetic oligonucleotide
uuggcccuauggaaccuuu

SEQ ID NO: 30498 - RNA, 19 nt, Artificial Sequence
  Description of Artificial Sequence: Synthetic oligonucleotide
cagaaugcuggaacggcua

SEQ ID NO: 30499 - RNA, 19 nt, Artificial Sequence
  Description of Artificial Sequence: Synthetic oligonucleotide
ggaaccuuuagcagcaaua

SEQ ID NO: 30500 - RNA, 19 nt, Artificial Sequence
  Description of Artificial Sequence: Synthetic oligonucleotide
cgaagcucgucguuaacug

SEQ ID NO: 30501 - RNA, 19 nt, Artificial Sequence
  Description of Artificial Sequence: Synthetic oligonucleotide
caagcgaagcauagauuua

SEQ ID NO: 30502 - RNA, 19 nt, Artificial Sequence
  Description of Artificial Sequence: Synthetic oligonucleotide
caagucuaucaugaagcaa

SEQ ID NO: 30503 - RNA, 19 nt, Artificial Sequence
  Description of Artificial Sequence: Synthetic oligonucleotide
acggacugguacugggcau

SEQ ID NO: 30504 - RNA, 19 nt, Artificial Sequence
  Description of Artificial Sequence: Synthetic oligonucleotide
ccaagcgaagcauagauuu

SEQ ID NO: 30505 - RNA, 19 nt, Artificial Sequence
  Description of Artificial Sequence: Synthetic oligonucleotide
gcccagauauaugugucug

SEQ ID NO: 30506 - RNA, 19 nt, Artificial Sequence
  Description of Artificial Sequence: Synthetic oligonucleotide
cuccggugcagacaccgca

SEQ ID NO: 30507 - RNA, 19 nt, Artificial Sequence
  Description of Artificial Sequence: Synthetic oligonucleotide
augggcaccuaggugggaa

SEQ ID NO: 30508 - RNA, 19 nt, Artificial Sequence
  Description of Artificial Sequence: Synthetic oligonucleotide
ugaccgcugguaguccggu

SEQ ID NO: 30509 - RNA, 19 nt, Artificial Sequence
  Description of Artificial Sequence: Synthetic oligonucleotide
uacggcgaugcugcccaug

SEQ ID NO: 30510 - RNA, 19 nt, Artificial Sequence
  Description of Artificial Sequence: Synthetic oligonucleotide
aucgaccgcggaacgcccg

SEQ ID NO: 30511 - RNA, 19 nt, Artificial Sequence
  Description of Artificial Sequence: Synthetic oligonucleotide
guaccuuucggugcuccaa

SEQ ID NO: 30512 - RNA, 19 nt, Artificial Sequence
  Description of Artificial Sequence: Synthetic oligonucleotide
cuacucaguagaguuuucu

SEQ ID NO: 30513 - RNA, 19 nt, Artificial Sequence
  Description of Artificial Sequence: Synthetic oligonucleotide
accgcggaacgcccggcga

SEQ ID NO: 30514 - RNA, 19 nt, Artificial Sequence
  Description of Artificial Sequence: Synthetic oligonucleotide
caccuaggugggaauacua

SEQ ID NO: 30515 - RNA, 19 nt, Artificial Sequence
  Description of Artificial Sequence: Synthetic oligonucleotide
cuucuccggugcagacacc

SEQ ID NO: 30516 - RNA, 19 nt, Artificial Sequence
  Description of Artificial Sequence: Synthetic oligonucleotide
guucccggacucagaggag

SEQ ID NO: 30517 - RNA, 19 nt, Artificial Sequence
  Description of Artificial Sequence: Synthetic oligonucleotide
cguucccggacucagagga

SEQ ID NO: 30518 - RNA, 19 nt, Artificial Sequence
  Description of Artificial Sequence: Synthetic oligonucleotide
ccucacaacaaaugaacgu

SEQ ID NO: 30519 - RNA, 19 nt, Artificial Sequence
  Description of Artificial Sequence: Synthetic oligonucleotide
cguguuacuacugaggacu

SEQ ID NO: 30520 - RNA, 19 nt, Artificial Sequence
  Description of Artificial Sequence: Synthetic oligonucleotide
ccgagcaucuagguguccc

SEQ ID NO: 30521 - RNA, 19 nt, Artificial Sequence
  Description of Artificial Sequence: Synthetic oligonucleotide
gaaugccugccacguguua

SEQ ID NO: 30522 - RNA, 19 nt, Artificial Sequence
  Description of Artificial Sequence: Synthetic oligonucleotide
gaacggcuaucaucugacu

SEQ ID NO: 30523 - RNA, 19 nt, Artificial Sequence
  Description of Artificial Sequence: Synthetic oligonucleotide
ugccagauaggcgccuauu

SEQ ID NO: 30524 - RNA, 19 nt, Artificial Sequence
  Description of Artificial Sequence: Synthetic oligonucleotide
guugcccgaagcucgucgu

SEQ ID NO: 30525 - RNA, 19 nt, Artificial Sequence
  Description of Artificial Sequence: Synthetic oligonucleotide
uucgaaucucggggucacu

SEQ ID NO: 30526 - RNA, 19 nt, Artificial Sequence
  Description of Artificial Sequence: Synthetic oligonucleotide
aggcgccuauucgaucgag

SEQ ID NO: 30527 - RNA, 19 nt, Artificial Sequence
  Description of Artificial Sequence: Synthetic oligonucleotide
gcgugaggggaagcuaccg

SEQ ID NO: 30528 - RNA, 19 nt, Artificial Sequence
  Description of Artificial Sequence: Synthetic oligonucleotide
ggacggacugguacugggc

SEQ ID NO: 30529 - RNA, 19 nt, Artificial Sequence
  Description of Artificial Sequence: Synthetic oligonucleotide
cuuuggaacuuacggcgau

SEQ ID NO: 30530 - RNA, 19 nt, Artificial Sequence
  Description of Artificial Sequence: Synthetic oligonucleotide
cagacaccgcauagaaugu

SEQ ID NO: 30531 - RNA, 19 nt, Artificial Sequence
  Description of Artificial Sequence: Synthetic oligonucleotide
cuauucgaucgagcuucuc

SEQ ID NO: 30532 - RNA, 19 nt, Artificial Sequence
  Description of Artificial Sequence: Synthetic oligonucleotide
cugaugccacggagcuuug

SEQ ID NO: 30533 - RNA, 19 nt, Artificial Sequence
  Description of Artificial Sequence: Synthetic oligonucleotide
gcgccuauucgaucgagcu

SEQ ID NO: 30534 - RNA, 19 nt, Artificial Sequence
  Description of Artificial Sequence: Synthetic oligonucleotide
ggcgccuauucgaucgagc

SEQ ID NO: 30535 - RNA, 19 nt, Artificial Sequence
  Description of Artificial Sequence: Synthetic oligonucleotide
cuaugauaggaugguguau

SEQ ID NO: 30536 - RNA, 19 nt, Artificial Sequence
  Description of Artificial Sequence: Synthetic oligonucleotide
cagcaauacggaucucagu

SEQ ID NO: 30537 - RNA, 19 nt, Artificial Sequence
  Description of Artificial Sequence: Synthetic oligonucleotide
ccagaacggugccugacga

SEQ ID NO: 30538 - RNA, 19 nt, Artificial Sequence
  Description of Artificial Sequence: Synthetic oligonucleotide
gggaagcuaccgugacagc

SEQ ID NO: 30539 - RNA, 19 nt, Artificial Sequence
  Description of Artificial Sequence: Synthetic oligonucleotide
agcucgucguuaacuguuu

SEQ ID NO: 30540 - RNA, 19 nt, Artificial Sequence
  Description of Artificial Sequence: Synthetic oligonucleotide
cgaucgagcuucuccggug

SEQ ID NO: 30541 - RNA, 19 nt, Artificial Sequence
  Description of Artificial Sequence: Synthetic oligonucleotide
guggcacguaaggaaccga

SEQ ID NO: 30542 - RNA, 19 nt, Artificial Sequence
  Description of Artificial Sequence: Synthetic oligonucleotide
ggcgugaggggaagcuacc

SEQ ID NO: 30543 - RNA, 19 nt, Artificial Sequence
  Description of Artificial Sequence: Synthetic oligonucleotide
ccguucccggacucagagg

SEQ ID NO: 30544 - RNA, 19 nt, Artificial Sequence
  Description of Artificial Sequence: Synthetic oligonucleotide
gaacccguggggaauccuu

SEQ ID NO: 30545 - RNA, 19 nt, Artificial Sequence
  Description of Artificial Sequence: Synthetic oligonucleotide
ggucuggcgggucugcccu

SEQ ID NO: 30546 - RNA, 19 nt, Artificial Sequence
  Description of Artificial Sequence: Synthetic oligonucleotide
ccauaguucgaguuucaau

SEQ ID NO: 30547 - RNA, 19 nt, Artificial Sequence
  Description of Artificial Sequence: Synthetic oligonucleotide
gaacggugccugacgacau

SEQ ID NO: 30548 - RNA, 19 nt, Artificial Sequence
  Description of Artificial Sequence: Synthetic oligonucleotide
ccguugauacuguaggaau

SEQ ID NO: 30549 - RNA, 19 nt, Artificial Sequence
  Description of Artificial Sequence: Synthetic oligonucleotide
caucccgucucaggacaca

SEQ ID NO: 30550 - RNA, 19 nt, Artificial Sequence
  Description of Artificial Sequence: Synthetic oligonucleotide
ccuuucgaugcuacagucu

SEQ ID NO: 30551 - RNA, 19 nt, Artificial Sequence
  Description of Artificial Sequence: Synthetic oligonucleotide
gaccgcugguaguccggua

SEQ ID NO: 30552 - RNA, 19 nt, Artificial Sequence
  Description of Artificial Sequence: Synthetic oligonucleotide
ccauaugaaggaacuugau

SEQ ID NO: 30553 - RNA, 19 nt, Artificial Sequence
  Description of Artificial Sequence: Synthetic oligonucleotide
caaucacaagacgucucuu

SEQ ID NO: 30554 - RNA, 19 nt, Artificial Sequence
  Description of Artificial Sequence: Synthetic oligonucleotide
gccaaucgaaugaggucaa

SEQ ID NO: 30555 - RNA, 19 nt, Artificial Sequence
  Description of Artificial Sequence: Synthetic oligonucleotide
cccagauauaugugucugu

SEQ ID NO: 30556 - RNA, 19 nt, Artificial Sequence
  Description of Artificial Sequence: Synthetic oligonucleotide
cggcauaaugugcaagcaa

SEQ ID NO: 30557 - RNA, 19 nt, Artificial Sequence
  Description of Artificial Sequence: Synthetic oligonucleotide
cauggcgauccaugagguu

SEQ ID NO: 30558 - RNA, 19 nt, Artificial Sequence
  Description of Artificial Sequence: Synthetic oligonucleotide
ccccuagcugacugacauc

SEQ ID NO: 30559 - RNA, 19 nt, Artificial Sequence
  Description of Artificial Sequence: Synthetic oligonucleotide
caacgccuccauagcaauu

SEQ ID NO: 30560 - RNA, 19 nt, Artificial Sequence
  Description of Artificial Sequence: Synthetic oligonucleotide
ccgaagcucgucguuaacu

SEQ ID NO: 30561 - RNA, 19 nt, Artificial Sequence
  Description of Artificial Sequence: Synthetic oligonucleotide
guaguccgguagguuacuu

SEQ ID NO: 30562 - RNA, 19 nt, Artificial Sequence
  Description of Artificial Sequence: Synthetic oligonucleotide
cguggcguaaaucuaccuu

SEQ ID NO: 30563 - RNA, 19 nt, Artificial Sequence
  Description of Artificial Sequence: Synthetic oligonucleotide
guuuccggaugggcaccua

SEQ ID NO: 30564 - RNA, 19 nt, Artificial Sequence
  Description of Artificial Sequence: Synthetic oligonucleotide
gggcaccuaggugggaaua

SEQ ID NO: 30565 - RNA, 19 nt, Artificial Sequence
  Description of Artificial Sequence: Synthetic oligonucleotide
gccugacgacaucucugcu

SEQ ID NO: 30566 - RNA, 19 nt, Artificial Sequence
  Description of Artificial Sequence: Synthetic oligonucleotide
ggaaugccugccacguguu

SEQ ID NO: 30567 - RNA, 19 nt, Artificial Sequence
  Description of Artificial Sequence: Synthetic oligonucleotide
cguuuauagcgaggacgca

SEQ ID NO: 30568 - RNA, 19 nt, Artificial Sequence
  Description of Artificial Sequence: Synthetic oligonucleotide
gcgccgaccgcagcaucga

SEQ ID NO: 30569 - RNA, 19 nt, Artificial Sequence
  Description of Artificial Sequence: Synthetic oligonucleotide
ccguuggugucgaucgcuu

SEQ ID NO: 30570 - RNA, 19 nt, Artificial Sequence
  Description of Artificial Sequence: Synthetic oligonucleotide
cgccgaccgcagcaucgac

SEQ ID NO: 30571 - RNA, 19 nt, Artificial Sequence
  Description of Artificial Sequence: Synthetic oligonucleotide
ccaaguccccuagcugacu

SEQ ID NO: 30572 - RNA, 19 nt, Artificial Sequence
  Description of Artificial Sequence: Synthetic oligonucleotide
ccuaggcgacugucagccu

SEQ ID NO: 30573 - RNA, 19 nt, Artificial Sequence
  Description of Artificial Sequence: Synthetic oligonucleotide
cccuaacuggugacauauu

SEQ ID NO: 30574 - RNA, 19 nt, Artificial Sequence
  Description of Artificial Sequence: Synthetic oligonucleotide
cgccguucccggacucaga

SEQ ID NO: 30575 - RNA, 19 nt, Artificial Sequence
  Description of Artificial Sequence: Synthetic oligonucleotide
cgccuauucgaucgagcuu

SEQ ID NO: 30576 - RNA, 19 nt, Artificial Sequence
  Description of Artificial Sequence: Synthetic oligonucleotide
cgaacccguggggaauccu

SEQ ID NO: 30577 - RNA, 19 nt, Artificial Sequence
  Description of Artificial Sequence: Synthetic oligonucleotide
aauagugcaagacauuucc

SEQ ID NO: 30578 - RNA, 19 nt, Artificial Sequence
  Description of Artificial Sequence: Synthetic oligonucleotide
agaaacaagauaaauaagc

SEQ ID NO: 30579 - RNA, 19 nt, Artificial Sequence
  Description of Artificial Sequence: Synthetic oligonucleotide
uuaacuagcaaacagucca

SEQ ID NO: 30580 - RNA, 19 nt, Artificial Sequence
  Description of Artificial Sequence: Synthetic oligonucleotide
uguuauuucguucauaacu

SEQ ID NO: 30581 - RNA, 19 nt, Artificial Sequence
  Description of Artificial Sequence: Synthetic oligonucleotide
uuacuaaucuuaaagauac

SEQ ID NO: 30582 - RNA, 19 nt, Artificial Sequence
  Description of Artificial Sequence: Synthetic oligonucleotide
auuugugguauguaaaggc

SEQ ID NO: 30583 - RNA, 19 nt, Artificial Sequence
  Description of Artificial Sequence: Synthetic oligonucleotide
aauagugucauaaggauag

SEQ ID NO: 30584 - RNA, 19 nt, Artificial Sequence
  Description of Artificial Sequence: Synthetic oligonucleotide
uuuucuauaccuacuaaag

SEQ ID NO: 30585 - RNA, 19 nt, Artificial Sequence
  Description of Artificial Sequence: Synthetic oligonucleotide
aauuuuacccauauugccc

SEQ ID NO: 30586 - RNA, 19 nt, Artificial Sequence
  Description of Artificial Sequence: Synthetic oligonucleotide
aauguuugcaugaacuucc

SEQ ID NO: 30587 - RNA, 19 nt, Artificial Sequence
  Description of Artificial Sequence: Synthetic oligonucleotide
auugcuuaaagauucaugu

SEQ ID NO: 30588 - RNA, 19 nt, Artificial Sequence
  Description of Artificial Sequence: Synthetic oligonucleotide
gauucgaaguuccacaacg

SEQ ID NO: 30589 - RNA, 19 nt, Artificial Sequence
  Description of Artificial Sequence: Synthetic oligonucleotide
aauaucuuggauuggaaau

SEQ ID NO: 30590 - RNA, 19 nt, Artificial Sequence
  Description of Artificial Sequence: Synthetic oligonucleotide
ugaugaauacauaacaagu

SEQ ID NO: 30591 - RNA, 19 nt, Artificial Sequence
  Description of Artificial Sequence: Synthetic oligonucleotide
acuguuagacagcaaaccc

SEQ ID NO: 30592 - RNA, 19 nt, Artificial Sequence
  Description of Artificial Sequence: Synthetic oligonucleotide
caaaguauaauauugccuc

SEQ ID NO: 30593 - RNA, 19 nt, Artificial Sequence
  Description of Artificial Sequence: Synthetic oligonucleotide
aagagcgucauaguaagcg

SEQ ID NO: 30594 - RNA, 19 nt, Artificial Sequence
  Description of Artificial Sequence: Synthetic oligonucleotide
agauaaaaugcccucauca

SEQ ID NO: 30595 - RNA, 19 nt, Artificial Sequence
  Description of Artificial Sequence: Synthetic oligonucleotide
ugucaaucaauguuaauga

SEQ ID NO: 30596 - RNA, 19 nt, Artificial Sequence
  Description of Artificial Sequence: Synthetic oligonucleotide
uugcaauagugucauaagg

SEQ ID NO: 30597 - RNA, 19 nt, Artificial Sequence
  Description of Artificial Sequence: Synthetic oligonucleotide
agaucugauauacacugac

SEQ ID NO: 30598 - RNA, 19 nt, Artificial Sequence
  Description of Artificial Sequence: Synthetic oligonucleotide
aagucgagaacucuuacga

SEQ ID NO: 30599 - RNA, 19 nt, Artificial Sequence
  Description of Artificial Sequence: Synthetic oligonucleotide
aacgaaacauaucauugug

SEQ ID NO: 30600 - RNA, 19 nt, Artificial Sequence
  Description of Artificial Sequence: Synthetic oligonucleotide
ucaauuuaacugauaacca

SEQ ID NO: 30601 - RNA, 19 nt, Artificial Sequence
  Description of Artificial Sequence: Synthetic oligonucleotide
ugcaauagugucauaagga

SEQ ID NO: 30602 - RNA, 19 nt, Artificial Sequence
  Description of Artificial Sequence: Synthetic oligonucleotide
gauaacgaauuauucuccg

SEQ ID NO: 30603 - RNA, 19 nt, Artificial Sequence
  Description of Artificial Sequence: Synthetic oligonucleotide
ugcuuaaagauucauguaa

SEQ ID NO: 30604 - RNA, 19 nt, Artificial Sequence
  Description of Artificial Sequence: Synthetic oligonucleotide
gaccguuccaaucauagag

SEQ ID NO: 30605 - RNA, 19 nt, Artificial Sequence
  Description of Artificial Sequence: Synthetic oligonucleotide
uuaaaaguccacaguacug

SEQ ID NO: 30606 - RNA, 19 nt, Artificial Sequence
  Description of Artificial Sequence: Synthetic oligonucleotide
uauaaugcuuauuaacaca

SEQ ID NO: 30607 - RNA, 19 nt, Artificial Sequence
  Description of Artificial Sequence: Synthetic oligonucleotide
aacaguggaacuucaacga

SEQ ID NO: 30608 - RNA, 19 nt, Artificial Sequence
  Description of Artificial Sequence: Synthetic oligonucleotide
caauucauaacuacacugc

SEQ ID NO: 30609 - RNA, 19 nt, Artificial Sequence
  Description of Artificial Sequence: Synthetic oligonucleotide
ucuauaccuacuaaagcca

SEQ ID NO: 30610 - RNA, 19 nt, Artificial Sequence
  Description of Artificial Sequence: Synthetic oligonucleotide
uguuaaugacuucagagua

SEQ ID NO: 30611 - RNA, 19 nt, Artificial Sequence
  Description of Artificial Sequence: Synthetic oligonucleotide
ugugguguauaucauuuug

SEQ ID NO: 30612 - RNA, 19 nt, Artificial Sequence
  Description of Artificial Sequence: Synthetic oligonucleotide
ucaaguacuguacauuaga

SEQ ID NO: 30613 - RNA, 19 nt, Artificial Sequence
  Description of Artificial Sequence: Synthetic oligonucleotide
uuuauauggguuacagggc

SEQ ID NO: 30614 - RNA, 19 nt, Artificial Sequence
  Description of Artificial Sequence: Synthetic oligonucleotide
uacucaagagggcaagucg

SEQ ID NO: 30615 - RNA, 19 nt, Artificial Sequence
  Description of Artificial Sequence: Synthetic oligonucleotide
augugacuaaaauaaaaug

SEQ ID NO: 30616 - RNA, 19 nt, Artificial Sequence
  Description of Artificial Sequence: Synthetic oligonucleotide
uagagaguuuaagauaugg

SEQ ID NO: 30617 - RNA, 19 nt, Artificial Sequence
  Description of Artificial Sequence: Synthetic oligonucleotide
cugaauggcucuuagcucc

SEQ ID NO: 30618 - RNA, 19 nt, Artificial Sequence
  Description of Artificial Sequence: Synthetic oligonucleotide
acaaacuauucucuacugg

SEQ ID NO: 30619 - RNA, 19 nt, Artificial Sequence
  Description of Artificial Sequence: Synthetic oligonucleotide
ugaguuagguaccacugcc

SEQ ID NO: 30620 - RNA, 19 nt, Artificial Sequence
  Description of Artificial Sequence: Synthetic oligonucleotide
acgaauuuucguaugacac

SEQ ID NO: 30621 - RNA, 19 nt, Artificial Sequence
  Description of Artificial Sequence: Synthetic oligonucleotide
gaauuccugccauaaaacc

SEQ ID NO: 30622 - RNA, 19 nt, Artificial Sequence
  Description of Artificial Sequence: Synthetic oligonucleotide
uaacgaauuauucuccggu

SEQ ID NO: 30623 - RNA, 19 nt, Artificial Sequence
  Description of Artificial Sequence: Synthetic oligonucleotide
aaaucuuaagagcugccau

SEQ ID NO: 30624 - RNA, 19 nt, Artificial Sequence
  Description of Artificial Sequence: Synthetic oligonucleotide
auauaugcaauagugcaag

SEQ ID NO: 30625 - RNA, 19 nt, Artificial Sequence
  Description of Artificial Sequence: Synthetic oligonucleotide
agcugaauggcucuuagcu

SEQ ID NO: 30626 - RNA, 19 nt, Artificial Sequence
  Description of Artificial Sequence: Synthetic oligonucleotide
aaaccuguguaaauacucg

SEQ ID NO: 30627 - RNA, 19 nt, Artificial Sequence
  Description of Artificial Sequence: Synthetic oligonucleotide
agggcaauaucuuggauug

SEQ ID NO: 30628 - RNA, 19 nt, Artificial Sequence
  Description of Artificial Sequence: Synthetic oligonucleotide
ugcaaauugaaugacaguu

SEQ ID NO: 30629 - RNA, 19 nt, Artificial Sequence
  Description of Artificial Sequence: Synthetic oligonucleotide
agagcgucauaguaagcgc

SEQ ID NO: 30630 - RNA, 19 nt, Artificial Sequence
  Description of Artificial Sequence: Synthetic oligonucleotide
agaaacucugcucacagaa

SEQ ID NO: 30631 - RNA, 19 nt, Artificial Sequence
  Description of Artificial Sequence: Synthetic oligonucleotide
auaacaguaaugaugauua

SEQ ID NO: 30632 - RNA, 19 nt, Artificial Sequence
  Description of Artificial Sequence: Synthetic oligonucleotide
auaacgaauuauucuccgg

SEQ ID NO: 30633 - RNA, 19 nt, Artificial Sequence
  Description of Artificial Sequence: Synthetic oligonucleotide
aauugcuuaaagauucaug

SEQ ID NO: 30634 - RNA, 19 nt, Artificial Sequence
  Description of Artificial Sequence: Synthetic oligonucleotide
uacauaacaaguuucuguu

SEQ ID NO: 30635 - RNA, 19 nt, Artificial Sequence
  Description of Artificial Sequence: Synthetic oligonucleotide
uuaagcgcacuucuccccg

SEQ ID NO: 30636 - RNA, 19 nt, Artificial Sequence
  Description of Artificial Sequence: Synthetic oligonucleotide
aaaagggacaaaauguuaa

SEQ ID NO: 30637 - RNA, 19 nt, Artificial Sequence
  Description of Artificial Sequence: Synthetic oligonucleotide
auaugcaauagugcaagac

SEQ ID NO: 30638 - RNA, 19 nt, Artificial Sequence
  Description of Artificial Sequence: Synthetic oligonucleotide
gaugacuauccggauaacg

SEQ ID NO: 30639 - RNA, 19 nt, Artificial Sequence
  Description of Artificial Sequence: Synthetic oligonucleotide
aagcugaauggcucuuagc

SEQ ID NO: 30640 - RNA, 19 nt, Artificial Sequence
  Description of Artificial Sequence: Synthetic oligonucleotide
gcaaauaacaguaaugaug

SEQ ID NO: 30641 - RNA, 19 nt, Artificial Sequence
  Description of Artificial Sequence: Synthetic oligonucleotide
ugcaauuaagauucucuga

SEQ ID NO: 30642 - RNA, 19 nt, Artificial Sequence
  Description of Artificial Sequence: Synthetic oligonucleotide
cauaucauugugaacauaa

SEQ ID NO: 30643 - RNA, 19 nt, Artificial Sequence
  Description of Artificial Sequence: Synthetic oligonucleotide
cauuguuuucuauaccuac

SEQ ID NO: 30644 - RNA, 19 nt, Artificial Sequence
  Description of Artificial Sequence: Synthetic oligonucleotide
ucaccauguaaacuucucc

SEQ ID NO: 30645 - RNA, 19 nt, Artificial Sequence
  Description of Artificial Sequence: Synthetic oligonucleotide
cuucagaguacccggauag

SEQ ID NO: 30646 - RNA, 19 nt, Artificial Sequence
  Description of Artificial Sequence: Synthetic oligonucleotide
uccaacauuuugcagcugu

SEQ ID NO: 30647 - RNA, 19 nt, Artificial Sequence
  Description of Artificial Sequence: Synthetic oligonucleotide
augacacucacugaaguuc

SEQ ID NO: 30648 - RNA, 19 nt, Artificial Sequence
  Description of Artificial Sequence: Synthetic oligonucleotide
aguaguuuauuguuuuagu

SEQ ID NO: 30649 - RNA, 19 nt, Artificial Sequence
  Description of Artificial Sequence: Synthetic oligonucleotide
guaguuuauuguuuuaguc

SEQ ID NO: 30650 - RNA, 19 nt, Artificial Sequence
  Description of Artificial Sequence: Synthetic oligonucleotide
aaaccuuagccuuccaaaa

SEQ ID NO: 30651 - RNA, 19 nt, Artificial Sequence
  Description of Artificial Sequence: Synthetic oligonucleotide
uggaacuucaacgacgcug

SEQ ID NO: 30652 - RNA, 19 nt, Artificial Sequence
  Description of Artificial Sequence: Synthetic oligonucleotide
gaaaagcugaugacuaucc

SEQ ID NO: 30653 - RNA, 19 nt, Artificial Sequence
  Description of Artificial Sequence: Synthetic oligonucleotide
auaguaagcgcuguuagca

SEQ ID NO: 30654 - RNA, 19 nt, Artificial Sequence
  Description of Artificial Sequence: Synthetic oligonucleotide
ucuaggucguuguucacgc

SEQ ID NO: 30655 - RNA, 19 nt, Artificial Sequence
  Description of Artificial Sequence: Synthetic oligonucleotide
aacuauucucuacuggaaa

SEQ ID NO: 30656 - RNA, 19 nt, Artificial Sequence
  Description of Artificial Sequence: Synthetic oligonucleotide
agccagauaaccuuugcca

SEQ ID NO: 30657 - RNA, 19 nt, Artificial Sequence
  Description of Artificial Sequence: Synthetic oligonucleotide
uuaagagcugccauucuuc

SEQ ID NO: 30658 - RNA, 19 nt, Artificial Sequence
  Description of Artificial Sequence: Synthetic oligonucleotide
ucaguucaagaauugugca

SEQ ID NO: 30659 - RNA, 19 nt, Artificial Sequence
  Description of Artificial Sequence: Synthetic oligonucleotide
uuaguccaaacacauuuaa

SEQ ID NO: 30660 - RNA, 19 nt, Artificial Sequence
  Description of Artificial Sequence: Synthetic oligonucleotide
cuccccgaaacauaauugg

SEQ ID NO: 30661 - RNA, 19 nt, Artificial Sequence
  Description of Artificial Sequence: Synthetic oligonucleotide
ucuuacgauaccgagccgc

SEQ ID NO: 30662 - RNA, 19 nt, Artificial Sequence
  Description of Artificial Sequence: Synthetic oligonucleotide
gaugaguuagguaccacug

SEQ ID NO: 30663 - RNA, 19 nt, Artificial Sequence
  Description of Artificial Sequence: Synthetic oligonucleotide
gaauuuucguaugacacuc

SEQ ID NO: 30664 - RNA, 19 nt, Artificial Sequence
  Description of Artificial Sequence: Synthetic oligonucleotide
aaucuuaagagcugccauu

SEQ ID NO: 30665 - RNA, 19 nt, Artificial Sequence
  Description of Artificial Sequence: Synthetic oligonucleotide
ucugcguccacaaaauaua

SEQ ID NO: 30666 - RNA, 19 nt, Artificial Sequence
  Description of Artificial Sequence: Synthetic oligonucleotide
gcguccacaaaauauaugc

SEQ ID NO: 30667 - RNA, 19 nt, Artificial Sequence
  Description of Artificial Sequence: Synthetic oligonucleotide
uggaauauuugcagucuug

SEQ ID NO: 30668 - RNA, 19 nt, Artificial Sequence
  Description of Artificial Sequence: Synthetic oligonucleotide
uauaccuacuaaagccaag

SEQ ID NO: 30669 - RNA, 19 nt, Artificial Sequence
  Description of Artificial Sequence: Synthetic oligonucleotide
aggaauuccugccauaaaa

SEQ ID NO: 30670 - RNA, 19 nt, Artificial Sequence
  Description of Artificial Sequence: Synthetic oligonucleotide
aguaugaacuucaaguacu

SEQ ID NO: 30671 - RNA, 19 nt, Artificial Sequence
  Description of Artificial Sequence: Synthetic oligonucleotide
ugcuaucaugucaagugug

SEQ ID NO: 30672 - RNA, 19 nt, Artificial Sequence
  Description of Artificial Sequence: Synthetic oligonucleotide
uauuucguucauaacuaaa

SEQ ID NO: 30673 - RNA, 19 nt, Artificial Sequence
  Description of Artificial Sequence: Synthetic oligonucleotide
gggaauaauaaccaaagaa

SEQ ID NO: 30674 - RNA, 19 nt, Artificial Sequence
  Description of Artificial Sequence: Synthetic oligonucleotide
uuuaagcgcacuucucccc

SEQ ID NO: 30675 - RNA, 19 nt, Artificial Sequence
  Description of Artificial Sequence: Synthetic oligonucleotide
cauaacuacacugcacagg

SEQ ID NO: 30676 - RNA, 19 nt, Artificial Sequence
  Description of Artificial Sequence: Synthetic oligonucleotide
augaccugcacaaccacgc

SEQ ID NO: 30677 - RNA, 19 nt, Artificial Sequence
  Description of Artificial Sequence: Synthetic oligonucleotide
uguauuucguuuuccuuaa

SEQ ID NO: 30678 - RNA, 19 nt, Artificial Sequence
  Description of Artificial Sequence: Synthetic oligonucleotide
uggaaugauguguuguaga

SEQ ID NO: 30679 - RNA, 19 nt, Artificial Sequence
  Description of Artificial Sequence: Synthetic oligonucleotide
caguggaacuucaacgacg

SEQ ID NO: 30680 - RNA, 19 nt, Artificial Sequence
  Description of Artificial Sequence: Synthetic oligonucleotide
agccacuuauuucaaagca

SEQ ID NO: 30681 - RNA, 19 nt, Artificial Sequence
  Description of Artificial Sequence: Synthetic oligonucleotide
uucaaaugaccugaauuca

SEQ ID NO: 30682 - RNA, 19 nt, Artificial Sequence
  Description of Artificial Sequence: Synthetic oligonucleotide
aggggaauaauaaccaaag

SEQ ID NO: 30683 - RNA, 19 nt, Artificial Sequence
  Description of Artificial Sequence: Synthetic oligonucleotide
gacgaauuuucguaugaca

SEQ ID NO: 30684 - RNA, 19 nt, Artificial Sequence
  Description of Artificial Sequence: Synthetic oligonucleotide
ugucaaguguguauuucgu

SEQ ID NO: 30685 - RNA, 19 nt, Artificial Sequence
  Description of Artificial Sequence: Synthetic oligonucleotide
auaaugcuuauuaacacau

SEQ ID NO: 30686 - RNA, 19 nt, Artificial Sequence
  Description of Artificial Sequence: Synthetic oligonucleotide
uccggauaacgaauuauuc

SEQ ID NO: 30687 - RNA, 19 nt, Artificial Sequence
  Description of Artificial Sequence: Synthetic oligonucleotide
ggaagagcgucauaguaag

SEQ ID NO: 30688 - RNA, 19 nt, Artificial Sequence
  Description of Artificial Sequence: Synthetic oligonucleotide
ugauauacacugaccguuc

SEQ ID NO: 30689 - RNA, 19 nt, Artificial Sequence
  Description of Artificial Sequence: Synthetic oligonucleotide
aacgaauuauucuccgguu

SEQ ID NO: 30690 - RNA, 19 nt, Artificial Sequence
  Description of Artificial Sequence: Synthetic oligonucleotide
ucacgaucacgcaucauuc

SEQ ID NO: 30691 - RNA, 19 nt, Artificial Sequence
  Description of Artificial Sequence: Synthetic oligonucleotide
gugguguauaucauuuugg

SEQ ID NO: 30692 - RNA, 19 nt, Artificial Sequence
  Description of Artificial Sequence: Synthetic oligonucleotide
cauauugcccagcugaaca

SEQ ID NO: 30693 - RNA, 19 nt, Artificial Sequence
  Description of Artificial Sequence: Synthetic oligonucleotide
cacgugacaagaaagggga

SEQ ID NO: 30694 - RNA, 19 nt, Artificial Sequence
  Description of Artificial Sequence: Synthetic oligonucleotide
uaaagaugguaaucauugu

SEQ ID NO: 30695 - RNA, 19 nt, Artificial Sequence
  Description of Artificial Sequence: Synthetic oligonucleotide
uuguuguagagaguuuaag

SEQ ID NO: 30696 - RNA, 19 nt, Artificial Sequence
  Description of Artificial Sequence: Synthetic oligonucleotide
aacgaaaagcugaugacua

SEQ ID NO: 30697 - RNA, 19 nt, Artificial Sequence
  Description of Artificial Sequence: Synthetic oligonucleotide
uaggucguuguucacgcac

SEQ ID NO: 30698 - RNA, 19 nt, Artificial Sequence
  Description of Artificial Sequence: Synthetic oligonucleotide
uuguuaagguuugugugug

SEQ ID NO: 30699 - RNA, 19 nt, Artificial Sequence
  Description of Artificial Sequence: Synthetic oligonucleotide
aaccuuagccuuccaaaau

SEQ ID NO: 30700 - RNA, 19 nt, Artificial Sequence
  Description of Artificial Sequence: Synthetic oligonucleotide
accguuccaaucauagagc

SEQ ID NO: 30701 - RNA, 19 nt, Artificial Sequence
  Description of Artificial Sequence: Synthetic oligonucleotide
auuucguucauaacuaaau

SEQ ID NO: 30702 - RNA, 19 nt, Artificial Sequence
  Description of Artificial Sequence: Synthetic oligonucleotide
cuaguaugaacuucaagua

SEQ ID NO: 30703 - RNA, 19 nt, Artificial Sequence
  Description of Artificial Sequence: Synthetic oligonucleotide
uacgauaccgagccgcuaa

SEQ ID NO: 30704 - RNA, 19 nt, Artificial Sequence
  Description of Artificial Sequence: Synthetic oligonucleotide
uaccgagccgcuaaaucug

SEQ ID NO: 30705 - RNA, 19 nt, Artificial Sequence
  Description of Artificial Sequence: Synthetic oligonucleotide
ucuggaauauuugcagucu

SEQ ID NO: 30706 - RNA, 19 nt, Artificial Sequence
  Description of Artificial Sequence: Synthetic oligonucleotide
uacacugaccguuccaauc

SEQ ID NO: 30707 - RNA, 19 nt, Artificial Sequence
  Description of Artificial Sequence: Synthetic oligonucleotide
augacuauccggauaacga

SEQ ID NO: 30708 - RNA, 19 nt, Artificial Sequence
  Description of Artificial Sequence: Synthetic oligonucleotide
uuauuucguucauaacuaa

SEQ ID NO: 30709 - RNA, 19 nt, Artificial Sequence
  Description of Artificial Sequence: Synthetic oligonucleotide
uuaacaugggguggaauuc

SEQ ID NO: 30710 - RNA, 19 nt, Artificial Sequence
  Description of Artificial Sequence: Synthetic oligonucleotide
agcuagaaacucugcucac

SEQ ID NO: 30711 - RNA, 19 nt, Artificial Sequence
  Description of Artificial Sequence: Synthetic oligonucleotide
gucaaucaauguuaaugac

SEQ ID NO: 30712 - RNA, 19 nt, Artificial Sequence
  Description of Artificial Sequence: Synthetic oligonucleotide
cugugucacauuccaaagc

SEQ ID NO: 30713 - RNA, 19 nt, Artificial Sequence
  Description of Artificial Sequence: Synthetic oligonucleotide
aacgacgcuguccugugaa

SEQ ID NO: 30714 - RNA, 19 nt, Artificial Sequence
  Description of Artificial Sequence: Synthetic oligonucleotide
aaacuagauucuaccagca

SEQ ID NO: 30715 - RNA, 19 nt, Artificial Sequence
  Description of Artificial Sequence: Synthetic oligonucleotide
ugcguccacaaaauauaug

SEQ ID NO: 30716 - RNA, 19 nt, Artificial Sequence
  Description of Artificial Sequence: Synthetic oligonucleotide
gguauugauucgaaguucc

SEQ ID NO: 30717 - RNA, 19 nt, Artificial Sequence
  Description of Artificial Sequence: Synthetic oligonucleotide
caugacgaauuuucguaug

SEQ ID NO: 30718 - RNA, 19 nt, Artificial Sequence
  Description of Artificial Sequence: Synthetic oligonucleotide
auauugccucacaaacucc

SEQ ID NO: 30719 - RNA, 19 nt, Artificial Sequence
  Description of Artificial Sequence: Synthetic oligonucleotide
aacuagauucuaccagcau

SEQ ID NO: 30720 - RNA, 19 nt, Artificial Sequence
  Description of Artificial Sequence: Synthetic oligonucleotide
uugccauaacaguuuauau

SEQ ID NO: 30721 - RNA, 19 nt, Artificial Sequence
  Description of Artificial Sequence: Synthetic oligonucleotide
acgaucacgcaucauucca

SEQ ID NO: 30722 - RNA, 19 nt, Artificial Sequence
  Description of Artificial Sequence: Synthetic oligonucleotide
acaugacgaauuuucguau

SEQ ID NO: 30723 - RNA, 19 nt, Artificial Sequence
  Description of Artificial Sequence: Synthetic oligonucleotide
gcucauuacauuaccagag

SEQ ID NO: 30724 - RNA, 19 nt, Artificial Sequence
  Description of Artificial Sequence: Synthetic oligonucleotide
uaugacacucacugaaguu

SEQ ID NO: 30725 - RNA, 19 nt, Artificial Sequence
  Description of Artificial Sequence: Synthetic oligonucleotide
auaacaguuuauauggguu

SEQ ID NO: 30726 - RNA, 19 nt, Artificial Sequence
  Description of Artificial Sequence: Synthetic oligonucleotide
aaacacgaugaguuaggua

SEQ ID NO: 30727 - RNA, 19 nt, Artificial Sequence
  Description of Artificial Sequence: Synthetic oligonucleotide
uauaugcaauagugcaaga

SEQ ID NO: 30728 - RNA, 19 nt, Artificial Sequence
  Description of Artificial Sequence: Synthetic oligonucleotide
cucuaguaugaacuucaag

SEQ ID NO: 30729 - RNA, 19 nt, Artificial Sequence
  Description of Artificial Sequence: Synthetic oligonucleotide
uuguuauuucguucauaac

SEQ ID NO: 30730 - RNA, 19 nt, Artificial Sequence
  Description of Artificial Sequence: Synthetic oligonucleotide
aauacucgggagcuuuauu

SEQ ID NO: 30731 - RNA, 19 nt, Artificial Sequence
  Description of Artificial Sequence: Synthetic oligonucleotide
auauacacugaccguucca

SEQ ID NO: 30732 - RNA, 19 nt, Artificial Sequence
  Description of Artificial Sequence: Synthetic oligonucleotide
cuuagcuccaauuuuguau

SEQ ID NO: 30733 - RNA, 19 nt, Artificial Sequence
  Description of Artificial Sequence: Synthetic oligonucleotide
gauucuaccagcauauaau

SEQ ID NO: 30734 - RNA, 19 nt, Artificial Sequence
  Description of Artificial Sequence: Synthetic oligonucleotide
cacagcuuaaagaaaggaa

SEQ ID NO: 30735 - RNA, 19 nt, Artificial Sequence
  Description of Artificial Sequence: Synthetic oligonucleotide
cugaugacuauccggauaa

SEQ ID NO: 30736 - RNA, 19 nt, Artificial Sequence
  Description of Artificial Sequence: Synthetic oligonucleotide
uugcuuaaagauucaugua

SEQ ID NO: 30737 - RNA, 19 nt, Artificial Sequence
  Description of Artificial Sequence: Synthetic oligonucleotide
agagaguuuaagauauggu

SEQ ID NO: 30738 - RNA, 19 nt, Artificial Sequence
  Description of Artificial Sequence: Synthetic oligonucleotide
uguccacuguuagacagca

SEQ ID NO: 30739 - RNA, 19 nt, Artificial Sequence
  Description of Artificial Sequence: Synthetic oligonucleotide
cucaagagggcaagucgag

SEQ ID NO: 30740 - RNA, 19 nt, Artificial Sequence
  Description of Artificial Sequence: Synthetic oligonucleotide
caauagugcaagacauuuc

SEQ ID NO: 30741 - RNA, 19 nt, Artificial Sequence
  Description of Artificial Sequence: Synthetic oligonucleotide
guaugaacuucaaguacug

SEQ ID NO: 30742 - RNA, 19 nt, Artificial Sequence
  Description of Artificial Sequence: Synthetic oligonucleotide
cacaugacgaauuuucgua

SEQ ID NO: 30743 - RNA, 19 nt, Artificial Sequence
  Description of Artificial Sequence: Synthetic oligonucleotide
acccggauagugcauuuug

SEQ ID NO: 30744 - RNA, 19 nt, Artificial Sequence
  Description of Artificial Sequence: Synthetic oligonucleotide
cauuagucacaggaagagc

SEQ ID NO: 30745 - RNA, 19 nt, Artificial Sequence
  Description of Artificial Sequence: Synthetic oligonucleotide
acgaauuauucuccgguua

SEQ ID NO: 30746 - RNA, 19 nt, Artificial Sequence
  Description of Artificial Sequence: Synthetic oligonucleotide
cagcuagaaacucugcuca

SEQ ID NO: 30747 - RNA, 19 nt, Artificial Sequence
  Description of Artificial Sequence: Synthetic oligonucleotide
cacgaucacgcaucauucc

SEQ ID NO: 30748 - RNA, 19 nt, Artificial Sequence
  Description of Artificial Sequence: Synthetic oligonucleotide
aggucguuguucacgcacc

SEQ ID NO: 30749 - RNA, 19 nt, Artificial Sequence
  Description of Artificial Sequence: Synthetic oligonucleotide
acaacguucccgaaacuca

SEQ ID NO: 30750 - RNA, 19 nt, Artificial Sequence
  Description of Artificial Sequence: Synthetic oligonucleotide
gacagacaauaauccagca

SEQ ID NO: 30751 - RNA, 19 nt, Artificial Sequence
  Description of Artificial Sequence: Synthetic oligonucleotide
ugcgccugauaucccugcg

SEQ ID NO: 30752 - RNA, 19 nt, Artificial Sequence
  Description of Artificial Sequence: Synthetic oligonucleotide
ugacgaauuuucguaugac

SEQ ID NO: 30753 - RNA, 19 nt, Artificial Sequence
  Description of Artificial Sequence: Synthetic oligonucleotide
uauccggauaacgaauuau

SEQ ID NO: 30754 - RNA, 19 nt, Artificial Sequence
  Description of Artificial Sequence: Synthetic oligonucleotide
gggacaaaauguuaaaagu

SEQ ID NO: 30755 - RNA, 19 nt, Artificial Sequence
  Description of Artificial Sequence: Synthetic oligonucleotide
cauaacaguuuauaugggu

SEQ ID NO: 30756 - RNA, 19 nt, Artificial Sequence
  Description of Artificial Sequence: Synthetic oligonucleotide
ggauaacgaauuauucucc

SEQ ID NO: 30757 - RNA, 19 nt, Artificial Sequence
  Description of Artificial Sequence: Synthetic oligonucleotide
aauuuucguaugacacuca

SEQ ID NO: 30758 - RNA, 19 nt, Artificial Sequence
  Description of Artificial Sequence: Synthetic oligonucleotide
agcgcuguuagcauucucu

SEQ ID NO: 30759 - RNA, 19 nt, Artificial Sequence
  Description of Artificial Sequence: Synthetic oligonucleotide
agagggcaagucgagaacu

SEQ ID NO: 30760 - RNA, 19 nt, Artificial Sequence
  Description of Artificial Sequence: Synthetic oligonucleotide
aaucugcguccacaaaaua

SEQ ID NO: 30761 - RNA, 19 nt, Artificial Sequence
  Description of Artificial Sequence: Synthetic oligonucleotide
gucgagaacucuuacgaua

SEQ ID NO: 30762 - RNA, 19 nt, Artificial Sequence
  Description of Artificial Sequence: Synthetic oligonucleotide
cuggaaugauguguuguag

SEQ ID NO: 30763 - RNA, 19 nt, Artificial Sequence
  Description of Artificial Sequence: Synthetic oligonucleotide
cagcuguuuggcuucgcag

SEQ ID NO: 30764 - RNA, 19 nt, Artificial Sequence
  Description of Artificial Sequence: Synthetic oligonucleotide
aaauacucgggagcuuuau

SEQ ID NO: 30765 - RNA, 19 nt, Artificial Sequence
  Description of Artificial Sequence: Synthetic oligonucleotide
aguaagcgcuguuagcauu

SEQ ID NO: 30766 - RNA, 19 nt, Artificial Sequence
  Description of Artificial Sequence: Synthetic oligonucleotide
uccaauaguugagaaccaa

SEQ ID NO: 30767 - RNA, 19 nt, Artificial Sequence
  Description of Artificial Sequence: Synthetic oligonucleotide
ucuuagcuccaauuuugua

SEQ ID NO: 30768 - RNA, 19 nt, Artificial Sequence
  Description of Artificial Sequence: Synthetic oligonucleotide
agaacucuuacgauaccga

SEQ ID NO: 30769 - RNA, 19 nt, Artificial Sequence
  Description of Artificial Sequence: Synthetic oligonucleotide
acguucccgaaacucauaa

SEQ ID NO: 30770 - RNA, 19 nt, Artificial Sequence
  Description of Artificial Sequence: Synthetic oligonucleotide
ugacaagaaaggggaauaa

SEQ ID NO: 30771 - RNA, 19 nt, Artificial Sequence
  Description of Artificial Sequence: Synthetic oligonucleotide
cacaacguucccgaaacuc

SEQ ID NO: 30772 - RNA, 19 nt, Artificial Sequence
  Description of Artificial Sequence: Synthetic oligonucleotide
ugaccguuccaaucauaga

SEQ ID NO: 30773 - RNA, 19 nt, Artificial Sequence
  Description of Artificial Sequence: Synthetic oligonucleotide
guuacuggaaccugcuaua

SEQ ID NO: 30774 - RNA, 19 nt, Artificial Sequence
  Description of Artificial Sequence: Synthetic oligonucleotide
aucugcguccacaaaauau

SEQ ID NO: 30775 - RNA, 19 nt, Artificial Sequence
  Description of Artificial Sequence: Synthetic oligonucleotide
caugagaggguucuucuaa

SEQ ID NO: 30776 - RNA, 19 nt, Artificial Sequence
  Description of Artificial Sequence: Synthetic oligonucleotide
agguucaugagaggguucu

SEQ ID NO: 30777 - RNA, 19 nt, Artificial Sequence
  Description of Artificial Sequence: Synthetic oligonucleotide
cggauaacgaauuauucuc

SEQ ID NO: 30778 - RNA, 19 nt, Artificial Sequence
  Description of Artificial Sequence: Synthetic oligonucleotide
ggaauuccugccauaaaac

SEQ ID NO: 30779 - RNA, 19 nt, Artificial Sequence
  Description of Artificial Sequence: Synthetic oligonucleotide
gaauuauucuccgguuauc

SEQ ID NO: 30780 - RNA, 19 nt, Artificial Sequence
  Description of Artificial Sequence: Synthetic oligonucleotide
aggaagagcgucauaguaa

SEQ ID NO: 30781 - RNA, 19 nt, Artificial Sequence
  Description of Artificial Sequence: Synthetic oligonucleotide
augaggcaaguugccaacg

SEQ ID NO: 30782 - RNA, 19 nt, Artificial Sequence
  Description of Artificial Sequence: Synthetic oligonucleotide
uaguaagcgcuguuagcau

SEQ ID NO: 30783 - RNA, 19 nt, Artificial Sequence
  Description of Artificial Sequence: Synthetic oligonucleotide
uucaagaauugugcaaauu

SEQ ID NO: 30784 - RNA, 19 nt, Artificial Sequence
  Description of Artificial Sequence: Synthetic oligonucleotide
gaugucgucccagacuuaa

SEQ ID NO: 30785 - RNA, 19 nt, Artificial Sequence
  Description of Artificial Sequence: Synthetic oligonucleotide
agucgagaacucuuacgau

SEQ ID NO: 30786 - RNA, 19 nt, Artificial Sequence
  Description of Artificial Sequence: Synthetic oligonucleotide
augagaggguucuucuaaa

SEQ ID NO: 30787 - RNA, 19 nt, Artificial Sequence
  Description of Artificial Sequence: Synthetic oligonucleotide
uguacucaagagggcaagu

SEQ ID NO: 30788 - RNA, 19 nt, Artificial Sequence
  Description of Artificial Sequence: Synthetic oligonucleotide
acgaaaagcugaugacuau

SEQ ID NO: 30789 - RNA, 19 nt, Artificial Sequence
  Description of Artificial Sequence: Synthetic oligonucleotide
ccaacgaaaagcugaugac

SEQ ID NO: 30790 - RNA, 19 nt, Artificial Sequence
  Description of Artificial Sequence: Synthetic oligonucleotide
aggagugaaaccaggucgu

SEQ ID NO: 30791 - RNA, 19 nt, Artificial Sequence
  Description of Artificial Sequence: Synthetic oligonucleotide
ggccuaguauuuaagacca

SEQ ID NO: 30792 - RNA, 19 nt, Artificial Sequence
  Description of Artificial Sequence: Synthetic oligonucleotide
uaacacuuugugguguaua

SEQ ID NO: 30793 - RNA, 19 nt, Artificial Sequence
  Description of Artificial Sequence: Synthetic oligonucleotide
gaccugcacaaccacgcca

SEQ ID NO: 30794 - RNA, 19 nt, Artificial Sequence
  Description of Artificial Sequence: Synthetic oligonucleotide
ucgcucaagguugcgugag

SEQ ID NO: 30795 - RNA, 19 nt, Artificial Sequence
  Description of Artificial Sequence: Synthetic oligonucleotide
aguuuggauaaaagcuuca

SEQ ID NO: 30796 - RNA, 19 nt, Artificial Sequence
  Description of Artificial Sequence: Synthetic oligonucleotide
aucacgcaucauuccacca

SEQ ID NO: 30797 - RNA, 19 nt, Artificial Sequence
  Description of Artificial Sequence: Synthetic oligonucleotide
guguguugagcagccagcc

SEQ ID NO: 30798 - RNA, 19 nt, Artificial Sequence
  Description of Artificial Sequence: Synthetic oligonucleotide
ccguuccaaucauagagcc

SEQ ID NO: 30799 - RNA, 19 nt, Artificial Sequence
  Description of Artificial Sequence: Synthetic oligonucleotide
gggaggaguguguugagca

SEQ ID NO: 30800 - RNA, 19 nt, Artificial Sequence
  Description of Artificial Sequence: Synthetic oligonucleotide
caguucaagaauugugcaa

SEQ ID NO: 30801 - RNA, 19 nt, Artificial Sequence
  Description of Artificial Sequence: Synthetic oligonucleotide
caugugauguuuuaauguu

SEQ ID NO: 30802 - RNA, 19 nt, Artificial Sequence
  Description of Artificial Sequence: Synthetic oligonucleotide
gcaaacaguccaauaguug

SEQ ID NO: 30803 - RNA, 19 nt, Artificial Sequence
  Description of Artificial Sequence: Synthetic oligonucleotide
acgccaucgcucaagguug

SEQ ID NO: 30804 - RNA, 19 nt, Artificial Sequence
  Description of Artificial Sequence: Synthetic oligonucleotide
agaugucaaucaauguuaa

SEQ ID NO: 30805 - RNA, 19 nt, Artificial Sequence
  Description of Artificial Sequence: Synthetic oligonucleotide
acgaugaguuagguaccac

SEQ ID NO: 30806 - RNA, 19 nt, Artificial Sequence
  Description of Artificial Sequence: Synthetic oligonucleotide
gcggccuuccaucugcccg

SEQ ID NO: 30807 - RNA, 19 nt, Artificial Sequence
  Description of Artificial Sequence: Synthetic oligonucleotide
gaguuagguaccacugcca

SEQ ID NO: 30808 - RNA, 19 nt, Artificial Sequence
  Description of Artificial Sequence: Synthetic oligonucleotide
gaagagcgucauaguaagc

SEQ ID NO: 30809 - RNA, 19 nt, Artificial Sequence
  Description of Artificial Sequence: Synthetic oligonucleotide
guccucgaggagugaaacc

SEQ ID NO: 30810 - RNA, 19 nt, Artificial Sequence
  Description of Artificial Sequence: Synthetic oligonucleotide
gcauccauuuuacuaaucu

SEQ ID NO: 30811 - RNA, 19 nt, Artificial Sequence
  Description of Artificial Sequence: Synthetic oligonucleotide
acgcaucauuccaccaccc

SEQ ID NO: 30812 - RNA, 19 nt, Artificial Sequence
  Description of Artificial Sequence: Synthetic oligonucleotide
ggcaauaucuuggauugga

SEQ ID NO: 30813 - RNA, 19 nt, Artificial Sequence
  Description of Artificial Sequence: Synthetic oligonucleotide
agcgucauaguaagcgcug

SEQ ID NO: 30814 - RNA, 19 nt, Artificial Sequence
  Description of Artificial Sequence: Synthetic oligonucleotide
auaucauugugaacauaaa

SEQ ID NO: 30815 - RNA, 19 nt, Artificial Sequence
  Description of Artificial Sequence: Synthetic oligonucleotide
acuauccggauaacgaauu

SEQ ID NO: 30816 - RNA, 19 nt, Artificial Sequence
  Description of Artificial Sequence: Synthetic oligonucleotide
agguugcgugagcauccac

SEQ ID NO: 30817 - RNA, 19 nt, Artificial Sequence
  Description of Artificial Sequence: Synthetic oligonucleotide
acgacgcuguccugugaag

SEQ ID NO: 30818 - RNA, 19 nt, Artificial Sequence
  Description of Artificial Sequence: Synthetic oligonucleotide
gugacaagaaaggggaaua

SEQ ID NO: 30819 - RNA, 19 nt, Artificial Sequence
  Description of Artificial Sequence: Synthetic oligonucleotide
uucagaguacccggauagu

SEQ ID NO: 30820 - RNA, 19 nt, Artificial Sequence
  Description of Artificial Sequence: Synthetic oligonucleotide
gcugaauggcucuuagcuc

SEQ ID NO: 30821 - RNA, 19 nt, Artificial Sequence
  Description of Artificial Sequence: Synthetic oligonucleotide
ggucacauguauuuauacu

SEQ ID NO: 30822 - RNA, 19 nt, Artificial Sequence
  Description of Artificial Sequence: Synthetic oligonucleotide
gauaucccugcggucguca

SEQ ID NO: 30823 - RNA, 19 nt, Artificial Sequence
  Description of Artificial Sequence: Synthetic oligonucleotide
gagccgcuaaaucuggccu

SEQ ID NO: 30824 - RNA, 19 nt, Artificial Sequence
  Description of Artificial Sequence: Synthetic oligonucleotide
ggggaauaauaaccaaaga

SEQ ID NO: 30825 - RNA, 19 nt, Artificial Sequence
  Description of Artificial Sequence: Synthetic oligonucleotide
cugcgccugauaucccugc

SEQ ID NO: 30826 - RNA, 19 nt, Artificial Sequence
  Description of Artificial Sequence: Synthetic oligonucleotide
ccugaauucagugggcaug

SEQ ID NO: 30827 - RNA, 19 nt, Artificial Sequence
  Description of Artificial Sequence: Synthetic oligonucleotide
cuaugccauuagucacagg

SEQ ID NO: 30828 - RNA, 19 nt, Artificial Sequence
  Description of Artificial Sequence: Synthetic oligonucleotide
cucuuacgauaccgagccg

SEQ ID NO: 30829 - RNA, 19 nt, Artificial Sequence
  Description of Artificial Sequence: Synthetic oligonucleotide
ccuguguaaauacucggga

SEQ ID NO: 30830 - RNA, 19 nt, Artificial Sequence
  Description of Artificial Sequence: Synthetic oligonucleotide
accgagccgcuaaaucugg

SEQ ID NO: 30831 - RNA, 19 nt, Artificial Sequence
  Description of Artificial Sequence: Synthetic oligonucleotide
cguaugacacucacugaag

SEQ ID NO: 30832 - RNA, 19 nt, Artificial Sequence
  Description of Artificial Sequence: Synthetic oligonucleotide
gcaagucgagaacucuuac

SEQ ID NO: 30833 - RNA, 19 nt, Artificial Sequence
  Description of Artificial Sequence: Synthetic oligonucleotide
aguacccggauagugcauu

SEQ ID NO: 30834 - RNA, 19 nt, Artificial Sequence
  Description of Artificial Sequence: Synthetic oligonucleotide
gacaagaaaggggaauaau

SEQ ID NO: 30835 - RNA, 19 nt, Artificial Sequence
  Description of Artificial Sequence: Synthetic oligonucleotide
ccauguuaacuaacaagca

SEQ ID NO: 30836 - RNA, 19 nt, Artificial Sequence
  Description of Artificial Sequence: Synthetic oligonucleotide
ggucguuguucacgcaccc

SEQ ID NO: 30837 - RNA, 19 nt, Artificial Sequence
  Description of Artificial Sequence: Synthetic oligonucleotide
agccgcuaaaucuggccua

SEQ ID NO: 30838 - RNA, 19 nt, Artificial Sequence
  Description of Artificial Sequence: Synthetic oligonucleotide
gcggucgucaccaccaccc

SEQ ID NO: 30839 - RNA, 19 nt, Artificial Sequence
  Description of Artificial Sequence: Synthetic oligonucleotide
ugccaacgaaaagcugaug

SEQ ID NO: 30840 - RNA, 19 nt, Artificial Sequence
  Description of Artificial Sequence: Synthetic oligonucleotide
cuuacgauaccgagccgcu

SEQ ID NO: 30841 - RNA, 19 nt, Artificial Sequence
  Description of Artificial Sequence: Synthetic oligonucleotide
gcgccugauaucccugcgg

SEQ ID NO: 30842 - RNA, 19 nt, Artificial Sequence
  Description of Artificial Sequence: Synthetic oligonucleotide
agcaaacccaugaccugca

SEQ ID NO: 30843 - RNA, 19 nt, Artificial Sequence
  Description of Artificial Sequence: Synthetic oligonucleotide
gagcgucauaguaagcgcu

SEQ ID NO: 30844 - RNA, 19 nt, Artificial Sequence
  Description of Artificial Sequence: Synthetic oligonucleotide
acgauaccgagccgcuaaa

SEQ ID NO: 30845 - RNA, 19 nt, Artificial Sequence
  Description of Artificial Sequence: Synthetic oligonucleotide
cacgccaucgcucaagguu

SEQ ID NO: 30846 - RNA, 19 nt, Artificial Sequence
  Description of Artificial Sequence: Synthetic oligonucleotide
gaucaccagcaagacugga

SEQ ID NO: 30847 - RNA, 19 nt, Artificial Sequence
  Description of Artificial Sequence: Synthetic oligonucleotide
cuauccggauaacgaauua

SEQ ID NO: 30848 - RNA, 19 nt, Artificial Sequence
  Description of Artificial Sequence: Synthetic oligonucleotide
aacguucccgaaacucaua

SEQ ID NO: 30849 - RNA, 19 nt, Artificial Sequence
  Description of Artificial Sequence: Synthetic oligonucleotide
cacgaugaguuagguacca

SEQ ID NO: 30850 - RNA, 19 nt, Artificial Sequence
  Description of Artificial Sequence: Synthetic oligonucleotide
ccggauaacgaauuauucu

SEQ ID NO: 30851 - RNA, 19 nt, Artificial Sequence
  Description of Artificial Sequence: Synthetic oligonucleotide
gcuagaaacucugcucaca

SEQ ID NO: 30852 - RNA, 19 nt, Artificial Sequence
  Description of Artificial Sequence: Synthetic oligonucleotide
ugaauucagugggcauguc

SEQ ID NO: 30853 - RNA, 19 nt, Artificial Sequence
  Description of Artificial Sequence: Synthetic oligonucleotide
ggugaauagucaccaugua

SEQ ID NO: 30854 - RNA, 19 nt, Artificial Sequence
  Description of Artificial Sequence: Synthetic oligonucleotide
uuacgauaccgagccgcua

SEQ ID NO: 30855 - RNA, 19 nt, Artificial Sequence
  Description of Artificial Sequence: Synthetic oligonucleotide
cacuucuccccgaaacaua

SEQ ID NO: 30856 - RNA, 19 nt, Artificial Sequence
  Description of Artificial Sequence: Synthetic oligonucleotide
gugaagcggccuuccaucu

SEQ ID NO: 30857 - RNA, 19 nt, Artificial Sequence
  Description of Artificial Sequence: Synthetic oligonucleotide
cgaucacgcaucauuccac

SEQ ID NO: 30858 - RNA, 19 nt, Artificial Sequence
  Description of Artificial Sequence: Synthetic oligonucleotide
gccgcuaaaucuggccuag

SEQ ID NO: 30859 - RNA, 19 nt, Artificial Sequence
  Description of Artificial Sequence: Synthetic oligonucleotide
ugauaucccugcggucguc

SEQ ID NO: 30860 - RNA, 19 nt, Artificial Sequence
  Description of Artificial Sequence: Synthetic oligonucleotide
gcucaagguugcgugagca

SEQ ID NO: 30861 - RNA, 19 nt, Artificial Sequence
  Description of Artificial Sequence: Synthetic oligonucleotide
cuaggucguuguucacgca

SEQ ID NO: 30862 - RNA, 19 nt, Artificial Sequence
  Description of Artificial Sequence: Synthetic oligonucleotide
caacguucccgaaacucau

SEQ ID NO: 30863 - RNA, 19 nt, Artificial Sequence
  Description of Artificial Sequence: Synthetic oligonucleotide
gggcaauaucuuggauugg

SEQ ID NO: 30864 - RNA, 19 nt, Artificial Sequence
  Description of Artificial Sequence: Synthetic oligonucleotide
cugcguccacaaaauauau

SEQ ID NO: 30865 - RNA, 19 nt, Artificial Sequence
  Description of Artificial Sequence: Synthetic oligonucleotide
uacccggauagugcauuuu

SEQ ID NO: 30866 - RNA, 19 nt, Artificial Sequence
  Description of Artificial Sequence: Synthetic oligonucleotide
gaacugguucagagucauc

SEQ ID NO: 30867 - RNA, 19 nt, Artificial Sequence
  Description of Artificial Sequence: Synthetic oligonucleotide
cgucccagacuuaaauuca

SEQ ID NO: 30868 - RNA, 19 nt, Artificial Sequence
  Description of Artificial Sequence: Synthetic oligonucleotide
ggcaagucgagaacucuua

SEQ ID NO: 30869 - RNA, 19 nt, Artificial Sequence
  Description of Artificial Sequence: Synthetic oligonucleotide
ccaaucauagagccagaua

SEQ ID NO: 30870 - RNA, 19 nt, Artificial Sequence
  Description of Artificial Sequence: Synthetic oligonucleotide
ccaauaguugagaaccaau

SEQ ID NO: 30871 - RNA, 19 nt, Artificial Sequence
  Description of Artificial Sequence: Synthetic oligonucleotide
cacugcgccugauaucccu

SEQ ID NO: 30872 - RNA, 19 nt, Artificial Sequence
  Description of Artificial Sequence: Synthetic oligonucleotide
acgugacaagaaaggggaa

SEQ ID NO: 30873 - RNA, 19 nt, Artificial Sequence
  Description of Artificial Sequence: Synthetic oligonucleotide
cgaauuuucguaugacacu

SEQ ID NO: 30874 - RNA, 19 nt, Artificial Sequence
  Description of Artificial Sequence: Synthetic oligonucleotide
cugauaucccugcggucgu

SEQ ID NO: 30875 - RNA, 19 nt, Artificial Sequence
  Description of Artificial Sequence: Synthetic oligonucleotide
gccuaguauuuaagaccag

SEQ ID NO: 30876 - RNA, 19 nt, Artificial Sequence
  Description of Artificial Sequence: Synthetic oligonucleotide
caacgacgcuguccuguga

SEQ ID NO: 30877 - RNA, 19 nt, Artificial Sequence
  Description of Artificial Sequence: Synthetic oligonucleotide
gaccucgaucacugcgccu

SEQ ID NO: 30878 - RNA, 19 nt, Artificial Sequence
  Description of Artificial Sequence: Synthetic oligonucleotide
augucgucccagacuuaaa

SEQ ID NO: 30879 - RNA, 19 nt, Artificial Sequence
  Description of Artificial Sequence: Synthetic oligonucleotide
ccgagccgcuaaaucuggc

SEQ ID NO: 30880 - RNA, 19 nt, Artificial Sequence
  Description of Artificial Sequence: Synthetic oligonucleotide
gcuccucuaugccauuagu

SEQ ID NO: 30881 - RNA, 19 nt, Artificial Sequence
  Description of Artificial Sequence: Synthetic oligonucleotide
cgaugaguuagguaccacu

SEQ ID NO: 30882 - RNA, 19 nt, Artificial Sequence
  Description of Artificial Sequence: Synthetic oligonucleotide
cuucaacccuuggcuguga

SEQ ID NO: 30883 - RNA, 19 nt, Artificial Sequence
  Description of Artificial Sequence: Synthetic oligonucleotide
cuccgguuaucagagucau

SEQ ID NO: 30884 - RNA, 19 nt, Artificial Sequence
  Description of Artificial Sequence: Synthetic oligonucleotide
guacccggauagugcauuu

SEQ ID NO: 30885 - RNA, 19 nt, Artificial Sequence
  Description of Artificial Sequence: Synthetic oligonucleotide
ccggauagugcauuuugau

SEQ ID NO: 30886 - RNA, 19 nt, Artificial Sequence
  Description of Artificial Sequence: Synthetic oligonucleotide
cccugcggucgucaccacc

SEQ ID NO: 30887 - RNA, 19 nt, Artificial Sequence
  Description of Artificial Sequence: Synthetic oligonucleotide
gucguuguucacgcacccu

SEQ ID NO: 30888 - RNA, 19 nt, Artificial Sequence
  Description of Artificial Sequence: Synthetic oligonucleotide
cugcagacaucaguaguuu

SEQ ID NO: 30889 - RNA, 19 nt, Artificial Sequence
  Description of Artificial Sequence: Synthetic oligonucleotide
ucccugcggucgucaccac

SEQ ID NO: 30890 - RNA, 19 nt, Artificial Sequence
  Description of Artificial Sequence: Synthetic oligonucleotide
agaugucgucccagacuua

SEQ ID NO: 30891 - RNA, 19 nt, Artificial Sequence
  Description of Artificial Sequence: Synthetic oligonucleotide
cgcucaagguugcgugagc

SEQ ID NO: 30892 - RNA, 19 nt, Artificial Sequence
  Description of Artificial Sequence: Synthetic oligonucleotide
gaguacccggauagugcau

SEQ ID NO: 30893 - RNA, 19 nt, Artificial Sequence
  Description of Artificial Sequence: Synthetic oligonucleotide
ccagauaaccuuugccauu

SEQ ID NO: 30894 - RNA, 19 nt, Artificial Sequence
  Description of Artificial Sequence: Synthetic oligonucleotide
cgcuaaaucuggccuagua

SEQ ID NO: 30895 - RNA, 19 nt, Artificial Sequence
  Description of Artificial Sequence: Synthetic oligonucleotide
gcgcuguuagcauucucuu

SEQ ID NO: 30896 - RNA, 19 nt, Artificial Sequence
  Description of Artificial Sequence: Synthetic oligonucleotide
cgccaucgcucaagguugc

SEQ ID NO: 30897 - RNA, 19 nt, Artificial Sequence
  Description of Artificial Sequence: Synthetic oligonucleotide
gcgucauaguaagcgcugu

SEQ ID NO: 30898 - RNA, 19 nt, Artificial Sequence
  Description of Artificial Sequence: Synthetic oligonucleotide
cgccugauaucccugcggu

SEQ ID NO: 30899 - RNA, 19 nt, Artificial Sequence
  Description of Artificial Sequence: Synthetic oligonucleotide
cgauaccgagccgcuaaau

SEQ ID NO: 30900 - RNA, 19 nt, Artificial Sequence
  Description of Artificial Sequence: Synthetic oligonucleotide
ccgcuaaaucuggccuagu

SEQ ID NO: 30901 - RNA, 19 nt, Artificial Sequence
  Description of Artificial Sequence: Synthetic oligonucleotide
aacuacuaaauccacaagc

SEQ ID NO: 30902 - RNA, 19 nt, Artificial Sequence
  Description of Artificial Sequence: Synthetic oligonucleotide
aaugauuuaggguuagguc

SEQ ID NO: 30903 - RNA, 19 nt, Artificial Sequence
  Description of Artificial Sequence: Synthetic oligonucleotide
aaaaucgaaugucauaguc

SEQ ID NO: 30904 - RNA, 19 nt, Artificial Sequence
  Description of Artificial Sequence: Synthetic oligonucleotide
accugauaaacuuaggugg

SEQ ID NO: 30905 - RNA, 19 nt, Artificial Sequence
  Description of Artificial Sequence: Synthetic oligonucleotide
uauaaagauaggagaaugg

SEQ ID NO: 30906 - RNA, 19 nt, Artificial Sequence
  Description of Artificial Sequence: Synthetic oligonucleotide
aaacccaucaugguaaccc

SEQ ID NO: 30907 - RNA, 19 nt, Artificial Sequence
  Description of Artificial Sequence: Synthetic oligonucleotide
aguaagacaugauucauuc

SEQ ID NO: 30908 - RNA, 19 nt, Artificial Sequence
  Description of Artificial Sequence: Synthetic oligonucleotide
gaugaacugaauuuggaag

SEQ ID NO: 30909 - RNA, 19 nt, Artificial Sequence
  Description of Artificial Sequence: Synthetic oligonucleotide
aauuacaacucugagagca

SEQ ID NO: 30910 - RNA, 19 nt, Artificial Sequence
  Description of Artificial Sequence: Synthetic oligonucleotide
agaaauagugucccaauac

SEQ ID NO: 30911 - RNA, 19 nt, Artificial Sequence
  Description of Artificial Sequence: Synthetic oligonucleotide
ugauaaaguuacuaaagcc

SEQ ID NO: 30912 - RNA, 19 nt, Artificial Sequence
  Description of Artificial Sequence: Synthetic oligonucleotide
guaaaaucgaaugucauag

SEQ ID NO: 30913 - RNA, 19 nt, Artificial Sequence
  Description of Artificial Sequence: Synthetic oligonucleotide
aguaucaccgauuuaaacu

SEQ ID NO: 30914 - RNA, 19 nt, Artificial Sequence
  Description of Artificial Sequence: Synthetic oligonucleotide
aacacacacacaaacacac

SEQ ID NO: 30915 - RNA, 19 nt, Artificial Sequence
  Description of Artificial Sequence: Synthetic oligonucleotide
agaacugauaguuucccac

SEQ ID NO: 30916 - RNA, 19 nt, Artificial Sequence
  Description of Artificial Sequence: Synthetic oligonucleotide
uuaggguuaggucaguaag

SEQ ID NO: 30917 - RNA, 19 nt, Artificial Sequence
  Description of Artificial Sequence: Synthetic oligonucleotide
uaucuuugaucuuuagugg

SEQ ID NO: 30918 - RNA, 19 nt, Artificial Sequence
  Description of Artificial Sequence: Synthetic oligonucleotide
ucaugaucaaucaugacau

SEQ ID NO: 30919 - RNA, 19 nt, Artificial Sequence
  Description of Artificial Sequence: Synthetic oligonucleotide
ucgacugguggucauaucg

SEQ ID NO: 30920 - RNA, 19 nt, Artificial Sequence
  Description of Artificial Sequence: Synthetic oligonucleotide
ugaaguaucgggaagcaac

SEQ ID NO: 30921 - RNA, 19 nt, Artificial Sequence
  Description of Artificial Sequence: Synthetic oligonucleotide
auuacuguugggcaccagc

SEQ ID NO: 30922 - RNA, 19 nt, Artificial Sequence
  Description of Artificial Sequence: Synthetic oligonucleotide
cacuagauggcauauaaag

SEQ ID NO: 30923 - RNA, 19 nt, Artificial Sequence
  Description of Artificial Sequence: Synthetic oligonucleotide
ugaaacguggaucuaauuc

SEQ ID NO: 30924 - RNA, 19 nt, Artificial Sequence
  Description of Artificial Sequence: Synthetic oligonucleotide
uuuaucauuacauucgcua

SEQ ID NO: 30925 - RNA, 19 nt, Artificial Sequence
  Description of Artificial Sequence: Synthetic oligonucleotide
cauauaaaucuucuguucc

SEQ ID NO: 30926 - RNA, 19 nt, Artificial Sequence
  Description of Artificial Sequence: Synthetic oligonucleotide
aguuguuacucuguaaacc

SEQ ID NO: 30927 - RNA, 19 nt, Artificial Sequence
  Description of Artificial Sequence: Synthetic oligonucleotide
caagcaacgguucagacac

SEQ ID NO: 30928 - RNA, 19 nt, Artificial Sequence
  Description of Artificial Sequence: Synthetic oligonucleotide
aaaucagccuauuauaauu

SEQ ID NO: 30929 - RNA, 19 nt, Artificial Sequence
  Description of Artificial Sequence: Synthetic oligonucleotide
auucgcuaaagccaccacc

SEQ ID NO: 30930 - RNA, 19 nt, Artificial Sequence
  Description of Artificial Sequence: Synthetic oligonucleotide
ugcauaauccccaugcugu

SEQ ID NO: 30931 - RNA, 19 nt, Artificial Sequence
  Description of Artificial Sequence: Synthetic oligonucleotide
acuaagacagauccaccgc

SEQ ID NO: 30932 - RNA, 19 nt, Artificial Sequence
  Description of Artificial Sequence: Synthetic oligonucleotide
accgauuuaaacuaaacua

SEQ ID NO: 30933 - RNA, 19 nt, Artificial Sequence
  Description of Artificial Sequence: Synthetic oligonucleotide
ucuugauguaacuaagaca

SEQ ID NO: 30934 - RNA, 19 nt, Artificial Sequence
  Description of Artificial Sequence: Synthetic oligonucleotide
uggaauaacccauggacgc

SEQ ID NO: 30935 - RNA, 19 nt, Artificial Sequence
  Description of Artificial Sequence: Synthetic oligonucleotide
gaaacguggaucuaauuca

SEQ ID NO: 30936 - RNA, 19 nt, Artificial Sequence
  Description of Artificial Sequence: Synthetic oligonucleotide
aguaucgggaagcaacucg

SEQ ID NO: 30937 - RNA, 19 nt, Artificial Sequence
  Description of Artificial Sequence: Synthetic oligonucleotide
aaaguuacuaaagccaaga

SEQ ID NO: 30938 - RNA, 19 nt, Artificial Sequence
  Description of Artificial Sequence: Synthetic oligonucleotide
caaaggauccuuaaucccc

SEQ ID NO: 30939 - RNA, 19 nt, Artificial Sequence
  Description of Artificial Sequence: Synthetic oligonucleotide
ucuaaccuuguauaaauaa

SEQ ID NO: 30940 - RNA, 19 nt, Artificial Sequence
  Description of Artificial Sequence: Synthetic oligonucleotide
aauagugucccaauacaag

SEQ ID NO: 30941 - RNA, 19 nt, Artificial Sequence
  Description of Artificial Sequence: Synthetic oligonucleotide
aacgguucagacacggugc

SEQ ID NO: 30942 - RNA, 19 nt, Artificial Sequence
  Description of Artificial Sequence: Synthetic oligonucleotide
auuaugggguuucacaucu

SEQ ID NO: 30943 - RNA, 19 nt, Artificial Sequence
  Description of Artificial Sequence: Synthetic oligonucleotide
  modified_base (3)..(3): a, c, u, g, unknown or other
agnucuggcaguuacugug

SEQ ID NO: 30944 - RNA, 19 nt, Artificial Sequence
  Description of Artificial Sequence: Synthetic oligonucleotide
ugaucuacaaccuuccuuu

SEQ ID NO: 30945 - RNA, 19 nt, Artificial Sequence
  Description of Artificial Sequence: Synthetic oligonucleotide
cuggaauaacccauggacg

SEQ ID NO: 30946 - RNA, 19 nt, Artificial Sequence
  Description of Artificial Sequence: Synthetic oligonucleotide
uguguguuaacaucugugu

SEQ ID NO: 30947 - RNA, 19 nt, Artificial Sequence
  Description of Artificial Sequence: Synthetic oligonucleotide
uauuucacgcuuaauuuuc

SEQ ID NO: 30948 - RNA, 19 nt, Artificial Sequence
  Description of Artificial Sequence: Synthetic oligonucleotide
auaauccccaugcugugac

SEQ ID NO: 30949 - RNA, 19 nt, Artificial Sequence
  Description of Artificial Sequence: Synthetic oligonucleotide
ucggacauuauauucuuga

SEQ ID NO: 30950 - RNA, 19 nt, Artificial Sequence
  Description of Artificial Sequence: Synthetic oligonucleotide
ggcuuaugaaucuauaaag

SEQ ID NO: 30951 - RNA, 19 nt, Artificial Sequence
  Description of Artificial Sequence: Synthetic oligonucleotide
uuuaggcccuaaaauaugu

SEQ ID NO: 30952 - RNA, 19 nt, Artificial Sequence
  Description of Artificial Sequence: Synthetic oligonucleotide
aaugcagacacaggaagug

SEQ ID NO: 30953 - RNA, 19 nt, Artificial Sequence
  Description of Artificial Sequence: Synthetic oligonucleotide
caaaucacgauccagugca

SEQ ID NO: 30954 - RNA, 19 nt, Artificial Sequence
  Description of Artificial Sequence: Synthetic oligonucleotide
aaaucgaaugucauagucu

SEQ ID NO: 30955 - RNA, 19 nt, Artificial Sequence
  Description of Artificial Sequence: Synthetic oligonucleotide
aaggcuuaugaaucuauaa

SEQ ID NO: 30956 - RNA, 19 nt, Artificial Sequence
  Description of Artificial Sequence: Synthetic oligonucleotide
uuaucauuacauucgcuaa

SEQ ID NO: 30957 - RNA, 19 nt, Artificial Sequence
  Description of Artificial Sequence: Synthetic oligonucleotide
aaaauaucguugaaacgug

SEQ ID NO: 30958 - RNA, 19 nt, Artificial Sequence
  Description of Artificial Sequence: Synthetic oligonucleotide
agguuugaaugugagacac

SEQ ID NO: 30959 - RNA, 19 nt, Artificial Sequence
  Description of Artificial Sequence: Synthetic oligonucleotide
uaugucuuagucauaccaa

SEQ ID NO: 30960 - RNA, 19 nt, Artificial Sequence
  Description of Artificial Sequence: Synthetic oligonucleotide
uuauccuauccccaauccc

SEQ ID NO: 30961 - RNA, 19 nt, Artificial Sequence
  Description of Artificial Sequence: Synthetic oligonucleotide
augauucauucagaaaagc

SEQ ID NO: 30962 - RNA, 19 nt, Artificial Sequence
  Description of Artificial Sequence: Synthetic oligonucleotide
aaauaucguugaaacgugg

SEQ ID NO: 30963 - RNA, 19 nt, Artificial Sequence
  Description of Artificial Sequence: Synthetic oligonucleotide
uaaggaugcuccauggccu

SEQ ID NO: 30964 - RNA, 19 nt, Artificial Sequence
  Description of Artificial Sequence: Synthetic oligonucleotide
ugucauagucuguuaaugu

SEQ ID NO: 30965 - RNA, 19 nt, Artificial Sequence
  Description of Artificial Sequence: Synthetic oligonucleotide
agaacuuuacacagggaac

SEQ ID NO: 30966 - RNA, 19 nt, Artificial Sequence
  Description of Artificial Sequence: Synthetic oligonucleotide
uacaccaaagaauuccaac

SEQ ID NO: 30967 - RNA, 19 nt, Artificial Sequence
  Description of Artificial Sequence: Synthetic oligonucleotide
aacucauucuagccugguc

SEQ ID NO: 30968 - RNA, 19 nt, Artificial Sequence
  Description of Artificial Sequence: Synthetic oligonucleotide
agucggguagacuuuuaac

SEQ ID NO: 30969 - RNA, 19 nt, Artificial Sequence
  Description of Artificial Sequence: Synthetic oligonucleotide
cuaagacagauccaccgcc

SEQ ID NO: 30970 - RNA, 19 nt, Artificial Sequence
  Description of Artificial Sequence: Synthetic oligonucleotide
aguaccaugggucgaacga

SEQ ID NO: 30971 - RNA, 19 nt, Artificial Sequence
  Description of Artificial Sequence: Synthetic oligonucleotide
auuaugcccaguaacuaac

SEQ ID NO: 30972 - RNA, 19 nt, Artificial Sequence
  Description of Artificial Sequence: Synthetic oligonucleotide
ugaugaacugaauuuggaa

SEQ ID NO: 30973 - RNA, 19 nt, Artificial Sequence
  Description of Artificial Sequence: Synthetic oligonucleotide
  modified_base (5)..(5): a, c, u, g, unknown or other
gaagnucuggcaguuacug

SEQ ID NO: 30974 - RNA, 19 nt, Artificial Sequence
  Description of Artificial Sequence: Synthetic oligonucleotide
caccugauaaacuuaggug

SEQ ID NO: 30975 - RNA, 19 nt, Artificial Sequence
  Description of Artificial Sequence: Synthetic oligonucleotide
aaacuggcgacuuauccua

SEQ ID NO: 30976 - RNA, 19 nt, Artificial Sequence
  Description of Artificial Sequence: Synthetic oligonucleotide
ucuaugaugccaugugaga

SEQ ID NO: 30977 - RNA, 19 nt, Artificial Sequence
  Description of Artificial Sequence: Synthetic oligonucleotide
caugguaugggcuguaguc

SEQ ID NO: 30978 - RNA, 19 nt, Artificial Sequence
  Description of Artificial Sequence: Synthetic oligonucleotide
aacccauggacgcaguccu

SEQ ID NO: 30979 - RNA, 19 nt, Artificial Sequence
  Description of Artificial Sequence: Synthetic oligonucleotide
uucccaucgcuuacgagag

SEQ ID NO: 30980 - RNA, 19 nt, Artificial Sequence
  Description of Artificial Sequence: Synthetic oligonucleotide
gguaaguuaauuaaauuca

SEQ ID NO: 30981 - RNA, 19 nt, Artificial Sequence
  Description of Artificial Sequence: Synthetic oligonucleotide
caccaacugaucauaauug

SEQ ID NO: 30982 - RNA, 19 nt, Artificial Sequence
  Description of Artificial Sequence: Synthetic oligonucleotide
agacuuuaggcccuaaaau

SEQ ID NO: 30983 - RNA, 19 nt, Artificial Sequence
  Description of Artificial Sequence: Synthetic oligonucleotide
acauuaugggguuucacau

SEQ ID NO: 30984 - RNA, 19 nt, Artificial Sequence
  Description of Artificial Sequence: Synthetic oligonucleotide
aaaucuaaccuuguauaaa

SEQ ID NO: 30985 - RNA, 19 nt, Artificial Sequence
  Description of Artificial Sequence: Synthetic oligonucleotide
gcuggaauaacccauggac

SEQ ID NO: 30986 - RNA, 19 nt, Artificial Sequence
  Description of Artificial Sequence: Synthetic oligonucleotide
uaugggguuucacaucucu

SEQ ID NO: 30987 - RNA, 19 nt, Artificial Sequence
  Description of Artificial Sequence: Synthetic oligonucleotide
aucauuacauucgcuaaag

SEQ ID NO: 30988 - RNA, 19 nt, Artificial Sequence
  Description of Artificial Sequence: Synthetic oligonucleotide
guucccaucgcuuacgaga

SEQ ID NO: 30989 - RNA, 19 nt, Artificial Sequence
  Description of Artificial Sequence: Synthetic oligonucleotide
gucggguagacuuuuaaca

SEQ ID NO: 30990 - RNA, 19 nt, Artificial Sequence
  Description of Artificial Sequence: Synthetic oligonucleotide
gacuuuaggcccuaaaaua

SEQ ID NO: 30991 - RNA, 19 nt, Artificial Sequence
  Description of Artificial Sequence: Synthetic oligonucleotide
aauaucguugaaacgugga

SEQ ID NO: 30992 - RNA, 19 nt, Artificial Sequence
  Description of Artificial Sequence: Synthetic oligonucleotide
aggguuaggucaguaagac

SEQ ID NO: 30993 - RNA, 19 nt, Artificial Sequence
  Description of Artificial Sequence: Synthetic oligonucleotide
cauaaacugcaucucuagc

SEQ ID NO: 30994 - RNA, 19 nt, Artificial Sequence
  Description of Artificial Sequence: Synthetic oligonucleotide
ucauuacauucgcuaaagc

SEQ ID NO: 30995 - RNA, 19 nt, Artificial Sequence
  Description of Artificial Sequence: Synthetic oligonucleotide
uagucauauaaaucuucug

SEQ ID NO: 30996 - RNA, 19 nt, Artificial Sequence
  Description of Artificial Sequence: Synthetic oligonucleotide
ugauaguuucccacaauua

SEQ ID NO: 30997 - RNA, 19 nt, Artificial Sequence
  Description of Artificial Sequence: Synthetic oligonucleotide
aguggugaugaacugaauu

SEQ ID NO: 30998 - RNA, 19 nt, Artificial Sequence
  Description of Artificial Sequence: Synthetic oligonucleotide
ucgggaagcaacucggaca

SEQ ID NO: 30999 - RNA, 19 nt, Artificial Sequence
  Description of Artificial Sequence: Synthetic oligonucleotide
agauaggagaauggggaac

SEQ ID NO: 31000 - RNA, 19 nt, Artificial Sequence
  Description of Artificial Sequence: Synthetic oligonucleotide
cuuaagagugcuagcauga

SEQ ID NO: 31001 - RNA, 19 nt, Artificial Sequence
  Description of Artificial Sequence: Synthetic oligonucleotide
aagauaggagaauggggaa

SEQ ID NO: 31002 - RNA, 19 nt, Artificial Sequence
  Description of Artificial Sequence: Synthetic oligonucleotide
aaguuacuaaagccaagau

SEQ ID NO: 31003 - RNA, 19 nt, Artificial Sequence
  Description of Artificial Sequence: Synthetic oligonucleotide
uuauaaucucuggaggaga

SEQ ID NO: 31004 - RNA, 19 nt, Artificial Sequence
  Description of Artificial Sequence: Synthetic oligonucleotide
ugaauuuggaaggggagaa

SEQ ID NO: 31005 - RNA, 19 nt, Artificial Sequence
  Description of Artificial Sequence: Synthetic oligonucleotide
gacaaaacguucccaucgc

SEQ ID NO: 31006 - RNA, 19 nt, Artificial Sequence
  Description of Artificial Sequence: Synthetic oligonucleotide
aaacacacacacaaacaca

SEQ ID NO: 31007 - RNA, 19 nt, Artificial Sequence
  Description of Artificial Sequence: Synthetic oligonucleotide
ucaccgauuuaaacuaaac

SEQ ID NO: 31008 - RNA, 19 nt, Artificial Sequence
  Description of Artificial Sequence: Synthetic oligonucleotide
gacacaauuacaacucuga

SEQ ID NO: 31009 - RNA, 19 nt, Artificial Sequence
  Description of Artificial Sequence: Synthetic oligonucleotide
guaacugccaacacagccc

SEQ ID NO: 31010 - RNA, 19 nt, Artificial Sequence
  Description of Artificial Sequence: Synthetic oligonucleotide
aacugauaguuucccacaa

SEQ ID NO: 31011 - RNA, 19 nt, Artificial Sequence
  Description of Artificial Sequence: Synthetic oligonucleotide
cuuuaggcccuaaaauaug

SEQ ID NO: 31012 - RNA, 19 nt, Artificial Sequence
  Description of Artificial Sequence: Synthetic oligonucleotide
uuaggucaguaagacauga

SEQ ID NO: 31013 - RNA, 19 nt, Artificial Sequence
  Description of Artificial Sequence: Synthetic oligonucleotide
aaacuuagguggcuggauu

SEQ ID NO: 31014 - RNA, 19 nt, Artificial Sequence
  Description of Artificial Sequence: Synthetic oligonucleotide
uuccccugccuaauuuucg

SEQ ID NO: 31015 - RNA, 19 nt, Artificial Sequence
  Description of Artificial Sequence: Synthetic oligonucleotide
gaauaacccauggacgcag

SEQ ID NO: 31016 - RNA, 19 nt, Artificial Sequence
  Description of Artificial Sequence: Synthetic oligonucleotide
auuauauucuugaccagga

SEQ ID NO: 31017 - RNA, 19 nt, Artificial Sequence
  Description of Artificial Sequence: Synthetic oligonucleotide
ugagaaauagugucccaau

SEQ ID NO: 31018 - RNA, 19 nt, Artificial Sequence
  Description of Artificial Sequence: Synthetic oligonucleotide
uaaaaucgaaugucauagu

SEQ ID NO: 31019 - RNA, 19 nt, Artificial Sequence
  Description of Artificial Sequence: Synthetic oligonucleotide
guaucgggaagcaacucgg

SEQ ID NO: 31020 - RNA, 19 nt, Artificial Sequence
  Description of Artificial Sequence: Synthetic oligonucleotide
aauacagagcugaugguuu

SEQ ID NO: 31021 - RNA, 19 nt, Artificial Sequence
  Description of Artificial Sequence: Synthetic oligonucleotide
guaaugaaacaagaggaga

SEQ ID NO: 31022 - RNA, 19 nt, Artificial Sequence
  Description of Artificial Sequence: Synthetic oligonucleotide
acauuauauucuugaccag

SEQ ID NO: 31023 - RNA, 19 nt, Artificial Sequence
  Description of Artificial Sequence: Synthetic oligonucleotide
caacgguucagacacggug

SEQ ID NO: 31024 - RNA, 19 nt, Artificial Sequence
  Description of Artificial Sequence: Synthetic oligonucleotide
cuaaccuuguauaaauaaa

SEQ ID NO: 31025 - RNA, 19 nt, Artificial Sequence
  Description of Artificial Sequence: Synthetic oligonucleotide
cugucugcaagucggguag

SEQ ID NO: 31026 - RNA, 19 nt, Artificial Sequence
  Description of Artificial Sequence: Synthetic oligonucleotide
  modified_base (16)..(16): a, c, u, g, unknown or other
acuugauguuugaagnucu

SEQ ID NO: 31027 - RNA, 19 nt, Artificial Sequence
  Description of Artificial Sequence: Synthetic oligonucleotide
augucauagucuguuaaug

SEQ ID NO: 31028 - RNA, 19 nt, Artificial Sequence
  Description of Artificial Sequence: Synthetic oligonucleotide
ggaucugucugcaagucgg

SEQ ID NO: 31029 - RNA, 19 nt, Artificial Sequence
  Description of Artificial Sequence: Synthetic oligonucleotide
augagguaauuuacaacac

SEQ ID NO: 31030 - RNA, 19 nt, Artificial Sequence
  Description of Artificial Sequence: Synthetic oligonucleotide
  modified_base (6)..(6): a, c, u, g, unknown or other
ugaagnucuggcaguuacu

SEQ ID NO: 31031 - RNA, 19 nt, Artificial Sequence
  Description of Artificial Sequence: Synthetic oligonucleotide
acuagauggcauauaaaga

SEQ ID NO: 31032 - RNA, 19 nt, Artificial Sequence
  Description of Artificial Sequence: Synthetic oligonucleotide
cacuaucagcucuuguacc

SEQ ID NO: 31033 - RNA, 19 nt, Artificial Sequence
  Description of Artificial Sequence: Synthetic oligonucleotide
augucuuagucauaccaau

SEQ ID NO: 31034 - RNA, 19 nt, Artificial Sequence
  Description of Artificial Sequence: Synthetic oligonucleotide
uuuagcugucccuaugguu

SEQ ID NO: 31035 - RNA, 19 nt, Artificial Sequence
  Description of Artificial Sequence: Synthetic oligonucleotide
aggucaguaagacaugauu

SEQ ID NO: 31036 - RNA, 19 nt, Artificial Sequence
  Description of Artificial Sequence: Synthetic oligonucleotide
agugagccucgacuggugg

SEQ ID NO: 31037 - RNA, 19 nt, Artificial Sequence
  Description of Artificial Sequence: Synthetic oligonucleotide
auaccaauuacaauacaau

SEQ ID NO: 31038 - RNA, 19 nt, Artificial Sequence
  Description of Artificial Sequence: Synthetic oligonucleotide
ucgcuuacgagagugucug

SEQ ID NO: 31039 - RNA, 19 nt, Artificial Sequence
  Description of Artificial Sequence: Synthetic oligonucleotide
acaggcgcaagcugcauca

SEQ ID NO: 31040 - RNA, 19 nt, Artificial Sequence
  Description of Artificial Sequence: Synthetic oligonucleotide
ucacccguuagcucuuaag

SEQ ID NO: 31041 - RNA, 19 nt, Artificial Sequence
  Description of Artificial Sequence: Synthetic oligonucleotide
uguaguccccucagguuug

SEQ ID NO: 31042 - RNA, 19 nt, Artificial Sequence
  Description of Artificial Sequence: Synthetic oligonucleotide
agauccaccgccaccagag

SEQ ID NO: 31043 - RNA, 19 nt, Artificial Sequence
  Description of Artificial Sequence: Synthetic oligonucleotide
ugccuaauuuucgaacaag

SEQ ID NO: 31044 - RNA, 19 nt, Artificial Sequence
  Description of Artificial Sequence: Synthetic oligonucleotide
agcguccucuacuuuauca

SEQ ID NO: 31045 - RNA, 19 nt, Artificial Sequence
  Description of Artificial Sequence: Synthetic oligonucleotide
aucccaauacucucggggu

SEQ ID NO: 31046 - RNA, 19 nt, Artificial Sequence
  Description of Artificial Sequence: Synthetic oligonucleotide
uccacauauccaaacuaua

SEQ ID NO: 31047 - RNA, 19 nt, Artificial Sequence
  Description of Artificial Sequence: Synthetic oligonucleotide
ugguaacccucacagcaca

SEQ ID NO: 31048 - RNA, 19 nt, Artificial Sequence
  Description of Artificial Sequence: Synthetic oligonucleotide
cuuaaaucuaaccuuguau

SEQ ID NO: 31049 - RNA, 19 nt, Artificial Sequence
  Description of Artificial Sequence: Synthetic oligonucleotide
uaaucccaauacucucggg

SEQ ID NO: 31050 - RNA, 19 nt, Artificial Sequence
  Description of Artificial Sequence: Synthetic oligonucleotide
acuuuaggcccuaaaauau

SEQ ID NO: 31051 - RNA, 19 nt, Artificial Sequence
  Description of Artificial Sequence: Synthetic oligonucleotide
gugcauaauccccaugcug

SEQ ID NO: 31052 - RNA, 19 nt, Artificial Sequence
  Description of Artificial Sequence: Synthetic oligonucleotide
acuuaaaucuaaccuugua

SEQ ID NO: 31053 - RNA, 19 nt, Artificial Sequence
  Description of Artificial Sequence: Synthetic oligonucleotide
aaguaucgggaagcaacuc

SEQ ID NO: 31054 - RNA, 19 nt, Artificial Sequence
  Description of Artificial Sequence: Synthetic oligonucleotide
gcaugaaacuuauauggac

SEQ ID NO: 31055 - RNA, 19 nt, Artificial Sequence
  Description of Artificial Sequence: Synthetic oligonucleotide
aagucggguagacuuuuaa

SEQ ID NO: 31056 - RNA, 19 nt, Artificial Sequence
  Description of Artificial Sequence: Synthetic oligonucleotide
agcaacgguucagacacgg

SEQ ID NO: 31057 - RNA, 19 nt, Artificial Sequence
  Description of Artificial Sequence: Synthetic oligonucleotide
  modified_base (15)..(15): a, c, u, g, unknown or other
cuugauguuugaagnucug

SEQ ID NO: 31058 - RNA, 19 nt, Artificial Sequence
  Description of Artificial Sequence: Synthetic oligonucleotide
ugucuuagucauaccaauu

SEQ ID NO: 31059 - RNA, 19 nt, Artificial Sequence
  Description of Artificial Sequence: Synthetic oligonucleotide
uccucuacuuuaucauuac

SEQ ID NO: 31060 - RNA, 19 nt, Artificial Sequence
  Description of Artificial Sequence: Synthetic oligonucleotide
uccccugaguuaugaaaag

SEQ ID NO: 31061 - RNA, 19 nt, Artificial Sequence
  Description of Artificial Sequence: Synthetic oligonucleotide
ucccuaugguugagaaagg

SEQ ID NO: 31062 - RNA, 19 nt, Artificial Sequence
  Description of Artificial Sequence: Synthetic oligonucleotide
ucacuagauggcauauaaa

SEQ ID NO: 31063 - RNA, 19 nt, Artificial Sequence
  Description of Artificial Sequence: Synthetic oligonucleotide
gucuuagucauaccaauua

SEQ ID NO: 31064 - RNA, 19 nt, Artificial Sequence
  Description of Artificial Sequence: Synthetic oligonucleotide
cauuaugggguuucacauc

SEQ ID NO: 31065 - RNA, 19 nt, Artificial Sequence
  Description of Artificial Sequence: Synthetic oligonucleotide
agcacaguuaugucuuagu

SEQ ID NO: 31066 - RNA, 19 nt, Artificial Sequence
  Description of Artificial Sequence: Synthetic oligonucleotide
uguaaacccugacccuccc

SEQ ID NO: 31067 - RNA, 19 nt, Artificial Sequence
  Description of Artificial Sequence: Synthetic oligonucleotide
cucacuagauggcauauaa

SEQ ID NO: 31068 - RNA, 19 nt, Artificial Sequence
  Description of Artificial Sequence: Synthetic oligonucleotide
gggaacuuaaaucuaaccu

SEQ ID NO: 31069 - RNA, 19 nt, Artificial Sequence
  Description of Artificial Sequence: Synthetic oligonucleotide
gacagauccaccgccacca

SEQ ID NO: 31070 - RNA, 19 nt, Artificial Sequence
  Description of Artificial Sequence: Synthetic oligonucleotide
cucaccccucccaacaggc

SEQ ID NO: 31071 - RNA, 19 nt, Artificial Sequence
  Description of Artificial Sequence: Synthetic oligonucleotide
agugcuagcaugaaacuua

SEQ ID NO: 31072 - RNA, 19 nt, Artificial Sequence
  Description of Artificial Sequence: Synthetic oligonucleotide
cuguaaacccugacccucc

SEQ ID NO: 31073 - RNA, 19 nt, Artificial Sequence
  Description of Artificial Sequence: Synthetic oligonucleotide
ucaguaagacaugauucau

SEQ ID NO: 31074 - RNA, 19 nt, Artificial Sequence
  Description of Artificial Sequence: Synthetic oligonucleotide
acaccuggugcuuucggcu

SEQ ID NO: 31075 - RNA, 19 nt, Artificial Sequence
  Description of Artificial Sequence: Synthetic oligonucleotide
aacuuaaaucuaaccuugu

SEQ ID NO: 31076 - RNA, 19 nt, Artificial Sequence
  Description of Artificial Sequence: Synthetic oligonucleotide
ggucaguaagacaugauuc

SEQ ID NO: 31077 - RNA, 19 nt, Artificial Sequence
  Description of Artificial Sequence: Synthetic oligonucleotide
acaaaacguucccaucgcu

SEQ ID NO: 31078 - RNA, 19 nt, Artificial Sequence
  Description of Artificial Sequence: Synthetic oligonucleotide
ugaaguguucucaccccuc

SEQ ID NO: 31079 - RNA, 19 nt, Artificial Sequence
  Description of Artificial Sequence: Synthetic oligonucleotide
ggggaacuaagacuuuagg

SEQ ID NO: 31080 - RNA, 19 nt, Artificial Sequence
  Description of Artificial Sequence: Synthetic oligonucleotide
aagcuacauuuuauaaucu

SEQ ID NO: 31081 - RNA, 19 nt, Artificial Sequence
  Description of Artificial Sequence: Synthetic oligonucleotide
ccugauaaacuuagguggc

SEQ ID NO: 31082 - RNA, 19 nt, Artificial Sequence
  Description of Artificial Sequence: Synthetic oligonucleotide
gagacgcuuuggcuugugg

SEQ ID NO: 31083 - RNA, 19 nt, Artificial Sequence
  Description of Artificial Sequence: Synthetic oligonucleotide
gcuagcaugaaacuuauau

SEQ ID NO: 31084 - RNA, 19 nt, Artificial Sequence
  Description of Artificial Sequence: Synthetic oligonucleotide
gagaaauagugucccaaua

SEQ ID NO: 31085 - RNA, 19 nt, Artificial Sequence
  Description of Artificial Sequence: Synthetic oligonucleotide
uggcgacuuauccuauccc

SEQ ID NO: 31086 - RNA, 19 nt, Artificial Sequence
  Description of Artificial Sequence: Synthetic oligonucleotide
uaucaccgauuuaaacuaa

SEQ ID NO: 31087 - RNA, 19 nt, Artificial Sequence
  Description of Artificial Sequence: Synthetic oligonucleotide
ggcgacuuauccuaucccc

SEQ ID NO: 31088 - RNA, 19 nt, Artificial Sequence
  Description of Artificial Sequence: Synthetic oligonucleotide
aacuaagacuuuaggcccu

SEQ ID NO: 31089 - RNA, 19 nt, Artificial Sequence
  Description of Artificial Sequence: Synthetic oligonucleotide
cacacacacaaacacacaa

SEQ ID NO: 31090 - RNA, 19 nt, Artificial Sequence
  Description of Artificial Sequence: Synthetic oligonucleotide
uggacaaaacguucccauc

SEQ ID NO: 31091 - RNA, 19 nt, Artificial Sequence
  Description of Artificial Sequence: Synthetic oligonucleotide
uuacgagagugucugccua

SEQ ID NO: 31092 - RNA, 19 nt, Artificial Sequence
  Description of Artificial Sequence: Synthetic oligonucleotide
ugucugccuaaaauaucgu

SEQ ID NO: 31093 - RNA, 19 nt, Artificial Sequence
  Description of Artificial Sequence: Synthetic oligonucleotide
ucuguguuguuuacauguu

SEQ ID NO: 31094 - RNA, 19 nt, Artificial Sequence
  Description of Artificial Sequence: Synthetic oligonucleotide
aaacguggaucuaauucaa

SEQ ID NO: 31095 - RNA, 19 nt, Artificial Sequence
  Description of Artificial Sequence: Synthetic oligonucleotide
acuggcgacuuauccuauc

SEQ ID NO: 31096 - RNA, 19 nt, Artificial Sequence
  Description of Artificial Sequence: Synthetic oligonucleotide
cacuguggacaaaacguuc

SEQ ID NO: 31097 - RNA, 19 nt, Artificial Sequence
  Description of Artificial Sequence: Synthetic oligonucleotide
agcaugaaacuuauaugga

SEQ ID NO: 31098 - RNA, 19 nt, Artificial Sequence
  Description of Artificial Sequence: Synthetic oligonucleotide
caguaccaugggucgaacg

SEQ ID NO: 31099 - RNA, 19 nt, Artificial Sequence
  Description of Artificial Sequence: Synthetic oligonucleotide
ucauaucgcaggagcuugu

SEQ ID NO: 31100 - RNA, 19 nt, Artificial Sequence
  Description of Artificial Sequence: Synthetic oligonucleotide
ggguucgugacacaggguc

SEQ ID NO: 31101 - RNA, 19 nt, Artificial Sequence
  Description of Artificial Sequence: Synthetic oligonucleotide
aaaggcuuaugaaucuaua

SEQ ID NO: 31102 - RNA, 19 nt, Artificial Sequence
  Description of Artificial Sequence: Synthetic oligonucleotide
gaucugucugcaagucggg

SEQ ID NO: 31103 - RNA, 19 nt, Artificial Sequence
  Description of Artificial Sequence: Synthetic oligonucleotide
gacugguggucauaucgca

SEQ ID NO: 31104 - RNA, 19 nt, Artificial Sequence
  Description of Artificial Sequence: Synthetic oligonucleotide
uugggaccaccucucaaau

SEQ ID NO: 31105 - RNA, 19 nt, Artificial Sequence
  Description of Artificial Sequence: Synthetic oligonucleotide
ggcgcaagcugcaucaagg

SEQ ID NO: 31106 - RNA, 19 nt, Artificial Sequence
  Description of Artificial Sequence: Synthetic oligonucleotide
ggaacuuaaaucuaaccuu

SEQ ID NO: 31107 - RNA, 19 nt, Artificial Sequence
  Description of Artificial Sequence: Synthetic oligonucleotide
cacccguuagcucuuaaga

SEQ ID NO: 31108 - RNA, 19 nt, Artificial Sequence
  Description of Artificial Sequence: Synthetic oligonucleotide
ccgauuuaaacuaaacuaa

SEQ ID NO: 31109 - RNA, 19 nt, Artificial Sequence
  Description of Artificial Sequence: Synthetic oligonucleotide
ucccaauacucucgggguc

SEQ ID NO: 31110 - RNA, 19 nt, Artificial Sequence
  Description of Artificial Sequence: Synthetic oligonucleotide
uuaauccccagagacgcuu

SEQ ID NO: 31111 - RNA, 19 nt, Artificial Sequence
  Description of Artificial Sequence: Synthetic oligonucleotide
cacaucacccguuagcucu

SEQ ID NO: 31112 - RNA, 19 nt, Artificial Sequence
  Description of Artificial Sequence: Synthetic oligonucleotide
aucagccuauuauaauuuu

SEQ ID NO: 31113 - RNA, 19 nt, Artificial Sequence
  Description of Artificial Sequence: Synthetic oligonucleotide
gaaccuuggcuauccucac

SEQ ID NO: 31114 - RNA, 19 nt, Artificial Sequence
  Description of Artificial Sequence: Synthetic oligonucleotide
cuaugaugccaugugagaa

SEQ ID NO: 31115 - RNA, 19 nt, Artificial Sequence
  Description of Artificial Sequence: Synthetic oligonucleotide
gaagucuguguuguuuaca

SEQ ID NO: 31116 - RNA, 19 nt, Artificial Sequence
  Description of Artificial Sequence: Synthetic oligonucleotide
agucuuuuagcugucccua

SEQ ID NO: 31117 - RNA, 19 nt, Artificial Sequence
  Description of Artificial Sequence: Synthetic oligonucleotide
ccguuagcucuuaagagug

SEQ ID NO: 31118 - RNA, 19 nt, Artificial Sequence
  Description of Artificial Sequence: Synthetic oligonucleotide
uauuuuccccugccuaauu

SEQ ID NO: 31119 - RNA, 19 nt, Artificial Sequence
  Description of Artificial Sequence: Synthetic oligonucleotide
guuaggucaguaagacaug

SEQ ID NO: 31120 - RNA, 19 nt, Artificial Sequence
  Description of Artificial Sequence: Synthetic oligonucleotide
uacgagagugucugccuaa

SEQ ID NO: 31121 - RNA, 19 nt, Artificial Sequence
  Description of Artificial Sequence: Synthetic oligonucleotide
ccaucuaagugucuuguuc

SEQ ID NO: 31122 - RNA, 19 nt, Artificial Sequence
  Description of Artificial Sequence: Synthetic oligonucleotide
ccuuugauaagcuacauuu

SEQ ID NO: 31123 - RNA, 19 nt, Artificial Sequence
  Description of Artificial Sequence: Synthetic oligonucleotide
aucauaaacugcaucucua

SEQ ID NO: 31124 - RNA, 19 nt, Artificial Sequence
  Description of Artificial Sequence: Synthetic oligonucleotide
uugaaacguggaucuaauu

SEQ ID NO: 31125 - RNA, 19 nt, Artificial Sequence
  Description of Artificial Sequence: Synthetic oligonucleotide
auccccugaguuaugaaaa

SEQ ID NO: 31126 - RNA, 19 nt, Artificial Sequence
  Description of Artificial Sequence: Synthetic oligonucleotide
uaccaggugugaugaguga

SEQ ID NO: 31127 - RNA, 19 nt, Artificial Sequence
  Description of Artificial Sequence: Synthetic oligonucleotide
caccgauuuaaacuaaacu

SEQ ID NO: 31128 - RNA, 19 nt, Artificial Sequence
  Description of Artificial Sequence: Synthetic oligonucleotide
ccaggugugaugagugagg

SEQ ID NO: 31129 - RNA, 19 nt, Artificial Sequence
  Description of Artificial Sequence: Synthetic oligonucleotide
ugucccuaugguugagaaa

SEQ ID NO: 31130 - RNA, 19 nt, Artificial Sequence
  Description of Artificial Sequence: Synthetic oligonucleotide
gccauaacaagagaacuga

SEQ ID NO: 31131 - RNA, 19 nt, Artificial Sequence
  Description of Artificial Sequence: Synthetic oligonucleotide
gugaugaacugaauuugga

SEQ ID NO: 31132 - RNA, 19 nt, Artificial Sequence
  Description of Artificial Sequence: Synthetic oligonucleotide
cacccagcgagaacuuuac

SEQ ID NO: 31133 - RNA, 19 nt, Artificial Sequence
  Description of Artificial Sequence: Synthetic oligonucleotide
ucugcaagucggguagacu

SEQ ID NO: 31134 - RNA, 19 nt, Artificial Sequence
  Description of Artificial Sequence: Synthetic oligonucleotide
uggacgcaguccuggagaa

SEQ ID NO: 31135 - RNA, 19 nt, Artificial Sequence
  Description of Artificial Sequence: Synthetic oligonucleotide
gugagccugccagaggucc

SEQ ID NO: 31136 - RNA, 19 nt, Artificial Sequence
  Description of Artificial Sequence: Synthetic oligonucleotide
uuggcacgggucccgacau

SEQ ID NO: 31137 - RNA, 19 nt, Artificial Sequence
  Description of Artificial Sequence: Synthetic oligonucleotide
ugagccucgacuggugguc

SEQ ID NO: 31138 - RNA, 19 nt, Artificial Sequence
  Description of Artificial Sequence: Synthetic oligonucleotide
aggcgcaagcugcaucaag

SEQ ID NO: 31139 - RNA, 19 nt, Artificial Sequence
  Description of Artificial Sequence: Synthetic oligonucleotide
uaauccccaugcugugaca

SEQ ID NO: 31140 - RNA, 19 nt, Artificial Sequence
  Description of Artificial Sequence: Synthetic oligonucleotide
cacauaugaaggacaaagu

SEQ ID NO: 31141 - RNA, 19 nt, Artificial Sequence
  Description of Artificial Sequence: Synthetic oligonucleotide
gcuuacgagagugucugcc

SEQ ID NO: 31142 - RNA, 19 nt, Artificial Sequence
  Description of Artificial Sequence: Synthetic oligonucleotide
caucgcuuacgagaguguc

SEQ ID NO: 31143 - RNA, 19 nt, Artificial Sequence
  Description of Artificial Sequence: Synthetic oligonucleotide
uuaugggguuucacaucuc

SEQ ID NO: 31144 - RNA, 19 nt, Artificial Sequence
  Description of Artificial Sequence: Synthetic oligonucleotide
auucaacuccccaaacaau

SEQ ID NO: 31145 - RNA, 19 nt, Artificial Sequence
  Description of Artificial Sequence: Synthetic oligonucleotide
ggcaucccaagggaguugg

SEQ ID NO: 31146 - RNA, 19 nt, Artificial Sequence
  Description of Artificial Sequence: Synthetic oligonucleotide
agucaaggagggaaaguau

SEQ ID NO: 31147 - RNA, 19 nt, Artificial Sequence
  Description of Artificial Sequence: Synthetic oligonucleotide
acacacacaaacacacaaa

SEQ ID NO: 31148 - RNA, 19 nt, Artificial Sequence
  Description of Artificial Sequence: Synthetic oligonucleotide
aucgcuuacgagagugucu

SEQ ID NO: 31149 - RNA, 19 nt, Artificial Sequence
  Description of Artificial Sequence: Synthetic oligonucleotide
cuuggcacgggucccgaca

SEQ ID NO: 31150 - RNA, 19 nt, Artificial Sequence
  Description of Artificial Sequence: Synthetic oligonucleotide
uggccacaucacccguuag

SEQ ID NO: 31151 - RNA, 19 nt, Artificial Sequence
  Description of Artificial Sequence: Synthetic oligonucleotide
ucccgacaugucagacagg

SEQ ID NO: 31152 - RNA, 19 nt, Artificial Sequence
  Description of Artificial Sequence: Synthetic oligonucleotide
ggauuacaguggaaagucc

SEQ ID NO: 31153 - RNA, 19 nt, Artificial Sequence
  Description of Artificial Sequence: Synthetic oligonucleotide
ccugccuaauuuucgaaca

SEQ ID NO: 31154 - RNA, 19 nt, Artificial Sequence
  Description of Artificial Sequence: Synthetic oligonucleotide
augugacucauaaucccaa

SEQ ID NO: 31155 - RNA, 19 nt, Artificial Sequence
  Description of Artificial Sequence: Synthetic oligonucleotide
cuuacgagagugucugccu

SEQ ID NO: 31156 - RNA, 19 nt, Artificial Sequence
  Description of Artificial Sequence: Synthetic oligonucleotide
gggcauacaagaaucaagu

SEQ ID NO: 31157 - RNA, 19 nt, Artificial Sequence
  Description of Artificial Sequence: Synthetic oligonucleotide
acguucccaucgcuuacga

SEQ ID NO: 31158 - RNA, 19 nt, Artificial Sequence
  Description of Artificial Sequence: Synthetic oligonucleotide
acgggucccgacaugucag

SEQ ID NO: 31159 - RNA, 19 nt, Artificial Sequence
  Description of Artificial Sequence: Synthetic oligonucleotide
cugucccuaugguugagaa

SEQ ID NO: 31160 - RNA, 19 nt, Artificial Sequence
  Description of Artificial Sequence: Synthetic oligonucleotide
ucuagcacaccuggugcuu

SEQ ID NO: 31161 - RNA, 19 nt, Artificial Sequence
  Description of Artificial Sequence: Synthetic oligonucleotide
ggcauuagcguccucuacu

SEQ ID NO: 31162 - RNA, 19 nt, Artificial Sequence
  Description of Artificial Sequence: Synthetic oligonucleotide
cuuaaggaucugucugcaa

SEQ ID NO: 31163 - RNA, 19 nt, Artificial Sequence
  Description of Artificial Sequence: Synthetic oligonucleotide
aaaucacgauccagugcaa

SEQ ID NO: 31164 - RNA, 19 nt, Artificial Sequence
  Description of Artificial Sequence: Synthetic oligonucleotide
cucauucuagccugguccu

SEQ ID NO: 31165 - RNA, 19 nt, Artificial Sequence
  Description of Artificial Sequence: Synthetic oligonucleotide
aggagagcauaagauccaa

SEQ ID NO: 31166 - RNA, 19 nt, Artificial Sequence
  Description of Artificial Sequence: Synthetic oligonucleotide
aauggggaacuaagacuuu

SEQ ID NO: 31167 - RNA, 19 nt, Artificial Sequence
  Description of Artificial Sequence: Synthetic oligonucleotide
cauaauccccaugcuguga

SEQ ID NO: 31168 - RNA, 19 nt, Artificial Sequence
  Description of Artificial Sequence: Synthetic oligonucleotide
cuggcauguuggaugaacu

SEQ ID NO: 31169 - RNA, 19 nt, Artificial Sequence
  Description of Artificial Sequence: Synthetic oligonucleotide
gcacacuagggcauacaag

SEQ ID NO: 31170 - RNA, 19 nt, Artificial Sequence
  Description of Artificial Sequence: Synthetic oligonucleotide
cacgggucccgacauguca

SEQ ID NO: 31171 - RNA, 19 nt, Artificial Sequence
  Description of Artificial Sequence: Synthetic oligonucleotide
cuaacaaggugcugguuuu

SEQ ID NO: 31172 - RNA, 19 nt, Artificial Sequence
  Description of Artificial Sequence: Synthetic oligonucleotide
gcuaacaaggugcugguuu

SEQ ID NO: 31173 - RNA, 19 nt, Artificial Sequence
  Description of Artificial Sequence: Synthetic oligonucleotide
acacacacacaaacacaca

SEQ ID NO: 31174 - RNA, 19 nt, Artificial Sequence
  Description of Artificial Sequence: Synthetic oligonucleotide
  modified_base (2)..(2): a, c, u, g, unknown or other
gnucuggcaguuacugugu

SEQ ID NO: 31175 - RNA, 19 nt, Artificial Sequence
  Description of Artificial Sequence: Synthetic oligonucleotide
gguuugaaugugagacacc

SEQ ID NO: 31176 - RNA, 19 nt, Artificial Sequence
  Description of Artificial Sequence: Synthetic oligonucleotide
cccacaauuacaggucuac

SEQ ID NO: 31177 - RNA, 19 nt, Artificial Sequence
  Description of Artificial Sequence: Synthetic oligonucleotide
guaauguggggagagcaau

SEQ ID NO: 31178 - RNA, 19 nt, Artificial Sequence
  Description of Artificial Sequence: Synthetic oligonucleotide
aucgaaugucauagucugu

SEQ ID NO: 31179 - RNA, 19 nt, Artificial Sequence
  Description of Artificial Sequence: Synthetic oligonucleotide
cgauccagugcaaacauaa

SEQ ID NO: 31180 - RNA, 19 nt, Artificial Sequence
  Description of Artificial Sequence: Synthetic oligonucleotide
ugcuagcaugaaacuuaua

SEQ ID NO: 31181 - RNA, 19 nt, Artificial Sequence
  Description of Artificial Sequence: Synthetic oligonucleotide
ggcauacaagaaucaagua

SEQ ID NO: 31182 - RNA, 19 nt, Artificial Sequence
  Description of Artificial Sequence: Synthetic oligonucleotide
cuguaguccccucagguuu

SEQ ID NO: 31183 - RNA, 19 nt, Artificial Sequence
  Description of Artificial Sequence: Synthetic oligonucleotide
cccaucgcuuacgagagug

SEQ ID NO: 31184 - RNA, 19 nt, Artificial Sequence
  Description of Artificial Sequence: Synthetic oligonucleotide
ugucugcaagucggguaga

SEQ ID NO: 31185 - RNA, 19 nt, Artificial Sequence
  Description of Artificial Sequence: Synthetic oligonucleotide
gacuuauccuauccccaau

SEQ ID NO: 31186 - RNA, 19 nt, Artificial Sequence
  Description of Artificial Sequence: Synthetic oligonucleotide
ggucccgacaugucagaca

SEQ ID NO: 31187 - RNA, 19 nt, Artificial Sequence
  Description of Artificial Sequence: Synthetic oligonucleotide
gucugcaagucggguagac

SEQ ID NO: 31188 - RNA, 19 nt, Artificial Sequence
  Description of Artificial Sequence: Synthetic oligonucleotide
caauuacaggucuaccauu

SEQ ID NO: 31189 - RNA, 19 nt, Artificial Sequence
  Description of Artificial Sequence: Synthetic oligonucleotide
aacuggcgacuuauccuau

SEQ ID NO: 31190 - RNA, 19 nt, Artificial Sequence
  Description of Artificial Sequence: Synthetic oligonucleotide
cuauccccaaucccugcaa

SEQ ID NO: 31191 - RNA, 19 nt, Artificial Sequence
  Description of Artificial Sequence: Synthetic oligonucleotide
caguaagacaugauucauu

SEQ ID NO: 31192 - RNA, 19 nt, Artificial Sequence
  Description of Artificial Sequence: Synthetic oligonucleotide
ccacaauuacaggucuacc

SEQ ID NO: 31193 - RNA, 19 nt, Artificial Sequence
  Description of Artificial Sequence: Synthetic oligonucleotide
cagacacaauuacaacucu

SEQ ID NO: 31194 - RNA, 19 nt, Artificial Sequence
  Description of Artificial Sequence: Synthetic oligonucleotide
ggguuaggucaguaagaca

SEQ ID NO: 31195 - RNA, 19 nt, Artificial Sequence
  Description of Artificial Sequence: Synthetic oligonucleotide
ucccaucgcuuacgagagu

SEQ ID NO: 31196 - RNA, 19 nt, Artificial Sequence
  Description of Artificial Sequence: Synthetic oligonucleotide
acuaagacuuuaggcccua

SEQ ID NO: 31197 - RNA, 19 nt, Artificial Sequence
  Description of Artificial Sequence: Synthetic oligonucleotide
ccucucagacacaauuaca

SEQ ID NO: 31198 - RNA, 19 nt, Artificial Sequence
  Description of Artificial Sequence: Synthetic oligonucleotide
ggcagcuacuguaaugaaa

SEQ ID NO: 31199 - RNA, 19 nt, Artificial Sequence
  Description of Artificial Sequence: Synthetic oligonucleotide
auaggagaauggggaacua

SEQ ID NO: 31200 - RNA, 19 nt, Artificial Sequence
  Description of Artificial Sequence: Synthetic oligonucleotide
guaacccucacagcacacu

SEQ ID NO: 31201 - RNA, 19 nt, Artificial Sequence
  Description of Artificial Sequence: Synthetic oligonucleotide
gcgacuuauccuaucccca

SEQ ID NO: 31202 - RNA, 19 nt, Artificial Sequence
  Description of Artificial Sequence: Synthetic oligonucleotide
cguuagcucuuaagagugc

SEQ ID NO: 31203 - RNA, 19 nt, Artificial Sequence
  Description of Artificial Sequence: Synthetic oligonucleotide
guucagacacggugcuucu

SEQ ID NO: 31204 - RNA, 19 nt, Artificial Sequence
  Description of Artificial Sequence: Synthetic oligonucleotide
gcgcaagcugcaucaagga

SEQ ID NO: 31205 - RNA, 19 nt, Artificial Sequence
  Description of Artificial Sequence: Synthetic oligonucleotide
cccguuagcucuuaagagu

SEQ ID NO: 31206 - RNA, 19 nt, Artificial Sequence
  Description of Artificial Sequence: Synthetic oligonucleotide
gguaacccucacagcacac

SEQ ID NO: 31207 - RNA, 19 nt, Artificial Sequence
  Description of Artificial Sequence: Synthetic oligonucleotide
cuuaauccccagagacgcu

SEQ ID NO: 31208 - RNA, 19 nt, Artificial Sequence
  Description of Artificial Sequence: Synthetic oligonucleotide
ggagagcaauguggagagg

SEQ ID NO: 31209 - RNA, 19 nt, Artificial Sequence
  Description of Artificial Sequence: Synthetic oligonucleotide
gcaacucggacauuauauu

SEQ ID NO: 31210 - RNA, 19 nt, Artificial Sequence
  Description of Artificial Sequence: Synthetic oligonucleotide
ggucugaagcacaguaugu

SEQ ID NO: 31211 - RNA, 19 nt, Artificial Sequence
  Description of Artificial Sequence: Synthetic oligonucleotide
cacggugcuucugaagugu

SEQ ID NO: 31212 - RNA, 19 nt, Artificial Sequence
  Description of Artificial Sequence: Synthetic oligonucleotide
agccucgacugguggucau

SEQ ID NO: 31213 - RNA, 19 nt, Artificial Sequence
  Description of Artificial Sequence: Synthetic oligonucleotide
caagucggguagacuuuua

SEQ ID NO: 31214 - RNA, 19 nt, Artificial Sequence
  Description of Artificial Sequence: Synthetic oligonucleotide
gcauuagcguccucuacuu

SEQ ID NO: 31215 - RNA, 19 nt, Artificial Sequence
  Description of Artificial Sequence: Synthetic oligonucleotide
caugaucaaucaugacauu

SEQ ID NO: 31216 - RNA, 19 nt, Artificial Sequence
  Description of Artificial Sequence: Synthetic oligonucleotide
gugcuagcaugaaacuuau

SEQ ID NO: 31217 - RNA, 19 nt, Artificial Sequence
  Description of Artificial Sequence: Synthetic oligonucleotide
gucgaacgaggggaguaua

SEQ ID NO: 31218 - RNA, 19 nt, Artificial Sequence
  Description of Artificial Sequence: Synthetic oligonucleotide
cccgacaugucagacaggu

SEQ ID NO: 31219 - RNA, 19 nt, Artificial Sequence
  Description of Artificial Sequence: Synthetic oligonucleotide
gguucgugacacagggucu

SEQ ID NO: 31220 - RNA, 19 nt, Artificial Sequence
  Description of Artificial Sequence: Synthetic oligonucleotide
cguugaaacguggaucuaa

SEQ ID NO: 31221 - RNA, 19 nt, Artificial Sequence
  Description of Artificial Sequence: Synthetic oligonucleotide
gcuguaguccccucagguu

SEQ ID NO: 31222 - RNA, 19 nt, Artificial Sequence
  Description of Artificial Sequence: Synthetic oligonucleotide
gccccagucuauuagccuu

SEQ ID NO: 31223 - RNA, 19 nt, Artificial Sequence
  Description of Artificial Sequence: Synthetic oligonucleotide
cccagucuauuagccuuag

SEQ ID NO: 31224 - RNA, 19 nt, Artificial Sequence
  Description of Artificial Sequence: Synthetic oligonucleotide
gggucccgacaugucagac

SEQ ID NO: 31225 - RNA, 19 nt, Artificial Sequence
  Description of Artificial Sequence: Synthetic oligonucleotide
cgaacaagcugguagucau

SEQ ID NO: 31226 - RNA, 19 nt, Artificial Sequence
  Description of Artificial Sequence: Synthetic oligonucleotide
aacugccaacacagcccuu

SEQ ID NO: 31227 - RNA, 19 nt, Artificial Sequence
  Description of Artificial Sequence: Synthetic oligonucleotide
gggucgaacgaggggagua

SEQ ID NO: 31228 - RNA, 19 nt, Artificial Sequence
  Description of Artificial Sequence: Synthetic oligonucleotide
cgacuuauccuauccccaa

SEQ ID NO: 31229 - RNA, 19 nt, Artificial Sequence
  Description of Artificial Sequence: Synthetic oligonucleotide
cagcuaagccccagucuau

SEQ ID NO: 31230 - RNA, 19 nt, Artificial Sequence
  Description of Artificial Sequence: Synthetic oligonucleotide
cgcuuacgagagugucugc

SEQ ID NO: 31231 - RNA, 19 nt, Artificial Sequence
  Description of Artificial Sequence: Synthetic oligonucleotide
cgggaagcaacucggacau

SEQ ID NO: 31232 - RNA, 19 nt, Artificial Sequence
  Description of Artificial Sequence: Synthetic oligonucleotide
ccaugguaugggcuguagu

SEQ ID NO: 31233 - RNA, 19 nt, Artificial Sequence
  Description of Artificial Sequence: Synthetic oligonucleotide
cccuaugguugagaaaggu

SEQ ID NO: 31234 - RNA, 19 nt, Artificial Sequence
  Description of Artificial Sequence: Synthetic oligonucleotide
cccaguaccaugggucgaa

SEQ ID NO: 31235 - RNA, 19 nt, Artificial Sequence
  Description of Artificial Sequence: Synthetic oligonucleotide
ccccagucuauuagccuua

SEQ ID NO: 31236 - RNA, 19 nt, Artificial Sequence
  Description of Artificial Sequence: Synthetic oligonucleotide
gcaagucggguagacuuuu

SEQ ID NO: 31237 - RNA, 19 nt, Artificial Sequence
  Description of Artificial Sequence: Synthetic oligonucleotide
ccaccuugauaaaguuacu

SEQ ID NO: 31238 - RNA, 19 nt, Artificial Sequence
  Description of Artificial Sequence: Synthetic oligonucleotide
caggcgcaagcugcaucaa

SEQ ID NO: 31239 - RNA, 19 nt, Artificial Sequence
  Description of Artificial Sequence: Synthetic oligonucleotide
gcccaguaccaugggucga

SEQ ID NO: 31240 - RNA, 19 nt, Artificial Sequence
  Description of Artificial Sequence: Synthetic oligonucleotide
caucacccguuagcucuua

SEQ ID NO: 31241 - RNA, 19 nt, Artificial Sequence
  Description of Artificial Sequence: Synthetic oligonucleotide
gcaacgguucagacacggu

SEQ ID NO: 31242 - RNA, 19 nt, Artificial Sequence
  Description of Artificial Sequence: Synthetic oligonucleotide
caacaggcgcaagcugcau

SEQ ID NO: 31243 - RNA, 19 nt, Artificial Sequence
  Description of Artificial Sequence: Synthetic oligonucleotide
ccucgacugguggucauau

SEQ ID NO: 31244 - RNA, 19 nt, Artificial Sequence
  Description of Artificial Sequence: Synthetic oligonucleotide
gccucgacugguggucaua

SEQ ID NO: 31245 - RNA, 19 nt, Artificial Sequence
  Description of Artificial Sequence: Synthetic oligonucleotide
cgggucccgacaugucaga

SEQ ID NO: 31246 - RNA, 19 nt, Artificial Sequence
  Description of Artificial Sequence: Synthetic oligonucleotide
ccgacaugucagacagguu

SEQ ID NO: 31247 - RNA, 19 nt, Artificial Sequence
  Description of Artificial Sequence: Synthetic oligonucleotide
ccgccaccagagcuggaau

SEQ ID NO: 31248 - RNA, 19 nt, Artificial Sequence
  Description of Artificial Sequence: Synthetic oligonucleotide
ccccucccaacaggcgcaa

SEQ ID NO: 31249 - RNA, 19 nt, Artificial Sequence
  Description of Artificial Sequence: Synthetic oligonucleotide
aauuauacagguuacaucc

SEQ ID NO: 31250 - RNA, 19 nt, Artificial Sequence
  Description of Artificial Sequence: Synthetic oligonucleotide
aauuagacgguccagaucc

SEQ ID NO: 31251 - RNA, 19 nt, Artificial Sequence
  Description of Artificial Sequence: Synthetic oligonucleotide
ucuauaaucaugauaaaca

SEQ ID NO: 31252 - RNA, 19 nt, Artificial Sequence
  Description of Artificial Sequence: Synthetic oligonucleotide
aaugcuaugaugaggagcc

SEQ ID NO: 31253 - RNA, 19 nt, Artificial Sequence
  Description of Artificial Sequence: Synthetic oligonucleotide
  modified_base (7)..(7): a, c, u, g, unknown or other
uuaaagnggaugcugaaga

SEQ ID NO: 31254 - RNA, 19 nt, Artificial Sequence
  Description of Artificial Sequence: Synthetic oligonucleotide
ugagaagugagauagauuc

SEQ ID NO: 31255 - RNA, 19 nt, Artificial Sequence
  Description of Artificial Sequence: Synthetic oligonucleotide
uucacaacgaccaucaucu

SEQ ID NO: 31256 - RNA, 19 nt, Artificial Sequence
  Description of Artificial Sequence: Synthetic oligonucleotide
acgaccaucaucuuuacac

SEQ ID NO: 31257 - RNA, 19 nt, Artificial Sequence
  Description of Artificial Sequence: Synthetic oligonucleotide
ucaaauaauuaauagcacc

SEQ ID NO: 31258 - RNA, 19 nt, Artificial Sequence
  Description of Artificial Sequence: Synthetic oligonucleotide
aaucagagggacuagcuag

SEQ ID NO: 31259 - RNA, 19 nt, Artificial Sequence
  Description of Artificial Sequence: Synthetic oligonucleotide
uguuaaaggcuauauauga

SEQ ID NO: 31260 - RNA, 19 nt, Artificial Sequence
  Description of Artificial Sequence: Synthetic oligonucleotide
  modified_base (4)..(4): a, c, u, g, unknown or other
aagnggaugcugaagaugg

SEQ ID NO: 31261 - RNA, 19 nt, Artificial Sequence
  Description of Artificial Sequence: Synthetic oligonucleotide
aaagugguuggucucacag

SEQ ID NO: 31262 - RNA, 19 nt, Artificial Sequence
  Description of Artificial Sequence: Synthetic oligonucleotide
auagguaucaucuuguaaa

SEQ ID NO: 31263 - RNA, 19 nt, Artificial Sequence
  Description of Artificial Sequence: Synthetic oligonucleotide
guuacacugacauggacgg

SEQ ID NO: 31264 - RNA, 19 nt, Artificial Sequence
  Description of Artificial Sequence: Synthetic oligonucleotide
gauuauacgccucaguuga

SEQ ID NO: 31265 - RNA, 19 nt, Artificial Sequence
  Description of Artificial Sequence: Synthetic oligonucleotide
uaugucucgguuauagucc

SEQ ID NO: 31266 - RNA, 19 nt, Artificial Sequence
  Description of Artificial Sequence: Synthetic oligonucleotide
aaaggcuauauaugaaucu

SEQ ID NO: 31267 - RNA, 19 nt, Artificial Sequence
  Description of Artificial Sequence: Synthetic oligonucleotide
auacagguuacauccagac

SEQ ID NO: 31268 - RNA, 19 nt, Artificial Sequence
  Description of Artificial Sequence: Synthetic oligonucleotide
aauacugagcgacagccgu

SEQ ID NO: 31269 - RNA, 19 nt, Artificial Sequence
  Description of Artificial Sequence: Synthetic oligonucleotide
ugaaaguguaaucuuugug

SEQ ID NO: 31270 - RNA, 19 nt, Artificial Sequence
  Description of Artificial Sequence: Synthetic oligonucleotide
cuucccugcauucacaacg

SEQ ID NO: 31271 - RNA, 19 nt, Artificial Sequence
  Description of Artificial Sequence: Synthetic oligonucleotide
aaggcuauauaugaaucuc

SEQ ID NO: 31272 - RNA, 19 nt, Artificial Sequence
  Description of Artificial Sequence: Synthetic oligonucleotide
uuauacagguuacauccag

SEQ ID NO: 31273 - RNA, 19 nt, Artificial Sequence
  Description of Artificial Sequence: Synthetic oligonucleotide
uauacuccaacagcuagcg

SEQ ID NO: 31274 - RNA, 19 nt, Artificial Sequence
  Description of Artificial Sequence: Synthetic oligonucleotide
auucacaacgaccaucauc

SEQ ID NO: 31275 - RNA, 19 nt, Artificial Sequence
  Description of Artificial Sequence: Synthetic oligonucleotide
acagguuacauccagacuu

SEQ ID NO: 31276 - RNA, 19 nt, Artificial Sequence
  Description of Artificial Sequence: Synthetic oligonucleotide
agcgauuucccacgaagcc

SEQ ID NO: 31277 - RNA, 19 nt, Artificial Sequence
  Description of Artificial Sequence: Synthetic oligonucleotide
uucaaauaauuaauagcac

SEQ ID NO: 31278 - RNA, 19 nt, Artificial Sequence
  Description of Artificial Sequence: Synthetic oligonucleotide
ugagcgauugacacauugg

SEQ ID NO: 31279 - RNA, 19 nt, Artificial Sequence
  Description of Artificial Sequence: Synthetic oligonucleotide
aagccuacuaggaaaugcc

SEQ ID NO: 31280 - RNA, 19 nt, Artificial Sequence
  Description of Artificial Sequence: Synthetic oligonucleotide
cucaguugaagucucauug

SEQ ID NO: 31281 - RNA, 19 nt, Artificial Sequence
  Description of Artificial Sequence: Synthetic oligonucleotide
ucuauaguauuccggauau

SEQ ID NO: 31282 - RNA, 19 nt, Artificial Sequence
  Description of Artificial Sequence: Synthetic oligonucleotide
cuagccgguaacaagcugg

SEQ ID NO: 31283 - RNA, 19 nt, Artificial Sequence
  Description of Artificial Sequence: Synthetic oligonucleotide
ugaccaauaccuuuggcac

SEQ ID NO: 31284 - RNA, 19 nt, Artificial Sequence
  Description of Artificial Sequence: Synthetic oligonucleotide
agagcgauuguagaaauag

SEQ ID NO: 31285 - RNA, 19 nt, Artificial Sequence
  Description of Artificial Sequence: Synthetic oligonucleotide
agcggugugaaauacugag

SEQ ID NO: 31286 - RNA, 19 nt, Artificial Sequence
  Description of Artificial Sequence: Synthetic oligonucleotide
uuuguuaaggcggcgaggc

SEQ ID NO: 31287 - RNA, 19 nt, Artificial Sequence
  Description of Artificial Sequence: Synthetic oligonucleotide
ucagcuaugguccgguuga

SEQ ID NO: 31288 - RNA, 19 nt, Artificial Sequence
  Description of Artificial Sequence: Synthetic oligonucleotide
guuuauggcguucugcaag

SEQ ID NO: 31289 - RNA, 19 nt, Artificial Sequence
  Description of Artificial Sequence: Synthetic oligonucleotide
ucagccaagaucccggucu

SEQ ID NO: 31290 - RNA, 19 nt, Artificial Sequence
  Description of Artificial Sequence: Synthetic oligonucleotide
uuaaucagagggacuagcu

SEQ ID NO: 31291 - RNA, 19 nt, Artificial Sequence
  Description of Artificial Sequence: Synthetic oligonucleotide
gauagauucugcgguaagg

SEQ ID NO: 31292 - RNA, 19 nt, Artificial Sequence
  Description of Artificial Sequence: Synthetic oligonucleotide
  modified_base (8)..(8): a, c, u, g, unknown or other
uuuaaagnggaugcugaag

SEQ ID NO: 31293 - RNA, 19 nt, Artificial Sequence
  Description of Artificial Sequence: Synthetic oligonucleotide
ugccauucuaggaggaccg

SEQ ID NO: 31294 - RNA, 19 nt, Artificial Sequence
  Description of Artificial Sequence: Synthetic oligonucleotide
cuaugucucgguuauaguc

SEQ ID NO: 31295 - RNA, 19 nt, Artificial Sequence
  Description of Artificial Sequence: Synthetic oligonucleotide
cugcaaucggcuaauuugg

SEQ ID NO: 31296 - RNA, 19 nt, Artificial Sequence
  Description of Artificial Sequence: Synthetic oligonucleotide
gaggaggcuacuaacagag

SEQ ID NO: 31297 - RNA, 19 nt, Artificial Sequence
  Description of Artificial Sequence: Synthetic oligonucleotide
gacccaauggaugauggcg

SEQ ID NO: 31298 - RNA, 19 nt, Artificial Sequence
  Description of Artificial Sequence: Synthetic oligonucleotide
uuaucauucacacgucuau

SEQ ID NO: 31299 - RNA, 19 nt, Artificial Sequence
  Description of Artificial Sequence: Synthetic oligonucleotide
accgggaauauuuacauaa

SEQ ID NO: 31300 - RNA, 19 nt, Artificial Sequence
  Description of Artificial Sequence: Synthetic oligonucleotide
  modified_base (5)..(5): a, c, u, g, unknown or other
aaagnggaugcugaagaug

SEQ ID NO: 31301 - RNA, 19 nt, Artificial Sequence
  Description of Artificial Sequence: Synthetic oligonucleotide
aaucaauugcucgguacuc

SEQ ID NO: 31302 - RNA, 19 nt, Artificial Sequence
  Description of Artificial Sequence: Synthetic oligonucleotide
caugaaaguguaaucuuug

SEQ ID NO: 31303 - RNA, 19 nt, Artificial Sequence
  Description of Artificial Sequence: Synthetic oligonucleotide
gagcgauugacacauuggc

SEQ ID NO: 31304 - RNA, 19 nt, Artificial Sequence
  Description of Artificial Sequence: Synthetic oligonucleotide
uuuauggcguucugcaagc

SEQ ID NO: 31305 - RNA, 19 nt, Artificial Sequence
  Description of Artificial Sequence: Synthetic oligonucleotide
cucaaugcuaugaugagga

SEQ ID NO: 31306 - RNA, 19 nt, Artificial Sequence
  Description of Artificial Sequence: Synthetic oligonucleotide
ucugucacuucugcgaagg

SEQ ID NO: 31307 - RNA, 19 nt, Artificial Sequence
  Description of Artificial Sequence: Synthetic oligonucleotide
aauugcucgguacucucca

SEQ ID NO: 31308 - RNA, 19 nt, Artificial Sequence
  Description of Artificial Sequence: Synthetic oligonucleotide
ucaaucaauugcucgguac

SEQ ID NO: 31309 - RNA, 19 nt, Artificial Sequence
  Description of Artificial Sequence: Synthetic oligonucleotide
ugcauaguguuaaaggcua

SEQ ID NO: 31310 - RNA, 19 nt, Artificial Sequence
  Description of Artificial Sequence: Synthetic oligonucleotide
ugcacugucccauagggau

SEQ ID NO: 31311 - RNA, 19 nt, Artificial Sequence
  Description of Artificial Sequence: Synthetic oligonucleotide
acaguuggaaucaaaagga

SEQ ID NO: 31312 - RNA, 19 nt, Artificial Sequence
  Description of Artificial Sequence: Synthetic oligonucleotide
ucucaaugcuaugaugagg

SEQ ID NO: 31313 - RNA, 19 nt, Artificial Sequence
  Description of Artificial Sequence: Synthetic oligonucleotide
cuuagagccacguucucug

SEQ ID NO: 31314 - RNA, 19 nt, Artificial Sequence
  Description of Artificial Sequence: Synthetic oligonucleotide
uaugcagacugcuauucac

SEQ ID NO: 31315 - RNA, 19 nt, Artificial Sequence
  Description of Artificial Sequence: Synthetic oligonucleotide
cucuauaaucaugauaaac

SEQ ID NO: 31316 - RNA, 19 nt, Artificial Sequence
  Description of Artificial Sequence: Synthetic oligonucleotide
ugugcuagcaagaggggaa

SEQ ID NO: 31317 - RNA, 19 nt, Artificial Sequence
  Description of Artificial Sequence: Synthetic oligonucleotide
aauggaugauggcggucgg

SEQ ID NO: 31318 - RNA, 19 nt, Artificial Sequence
  Description of Artificial Sequence: Synthetic oligonucleotide
gaagccuacuaggaaaugc

SEQ ID NO: 31319 - RNA, 19 nt, Artificial Sequence
  Description of Artificial Sequence: Synthetic oligonucleotide
uauuaggucaaaacccuuu

SEQ ID NO: 31320 - RNA, 19 nt, Artificial Sequence
  Description of Artificial Sequence: Synthetic oligonucleotide
agcgacagccguuugccac

SEQ ID NO: 31321 - RNA, 19 nt, Artificial Sequence
  Description of Artificial Sequence: Synthetic oligonucleotide
  modified_base (9)..(9): a, c, u, g, unknown or other
uuuuaaagnggaugcugaa

SEQ ID NO: 31322 - RNA, 19 nt, Artificial Sequence
  Description of Artificial Sequence: Synthetic oligonucleotide
aggauuugaaauaaaaguu

SEQ ID NO: 31323 - RNA, 19 nt, Artificial Sequence
  Description of Artificial Sequence: Synthetic oligonucleotide
aagcagauuauacgccuca

SEQ ID NO: 31324 - RNA, 19 nt, Artificial Sequence
  Description of Artificial Sequence: Synthetic oligonucleotide
uucuuguaagguauuucgu

SEQ ID NO: 31325 - RNA, 19 nt, Artificial Sequence
  Description of Artificial Sequence: Synthetic oligonucleotide
ugcgaagguucuuucagca

SEQ ID NO: 31326 - RNA, 19 nt, Artificial Sequence
  Description of Artificial Sequence: Synthetic oligonucleotide
uacacugacauggacggca

SEQ ID NO: 31327 - RNA, 19 nt, Artificial Sequence
  Description of Artificial Sequence: Synthetic oligonucleotide
uucagcuaugguccgguug

SEQ ID NO: 31328 - RNA, 19 nt, Artificial Sequence
  Description of Artificial Sequence: Synthetic oligonucleotide
uuugcaccggucacaguag

SEQ ID NO: 31329 - RNA, 19 nt, Artificial Sequence
  Description of Artificial Sequence: Synthetic oligonucleotide
ucccauagggauugcaggc

SEQ ID NO: 31330 - RNA, 19 nt, Artificial Sequence
  Description of Artificial Sequence: Synthetic oligonucleotide
aaagcagauuauacgccuc

SEQ ID NO: 31331 - RNA, 19 nt, Artificial Sequence
  Description of Artificial Sequence: Synthetic oligonucleotide
gugucuuagagccacguuc

SEQ ID NO: 31332 - RNA, 19 nt, Artificial Sequence
  Description of Artificial Sequence: Synthetic oligonucleotide
uuguaagguauuucguccu

SEQ ID NO: 31333 - RNA, 19 nt, Artificial Sequence
  Description of Artificial Sequence: Synthetic oligonucleotide
auacgccucaguugaaguc

SEQ ID NO: 31334 - RNA, 19 nt, Artificial Sequence
  Description of Artificial Sequence: Synthetic oligonucleotide
agugcugaccagugaugcc

SEQ ID NO: 31335 - RNA, 19 nt, Artificial Sequence
  Description of Artificial Sequence: Synthetic oligonucleotide
ucgagcuaggaguuggucu

SEQ ID NO: 31336 - RNA, 19 nt, Artificial Sequence
  Description of Artificial Sequence: Synthetic oligonucleotide
ggcuaauuuggcuaugcag

SEQ ID NO: 31337 - RNA, 19 nt, Artificial Sequence
  Description of Artificial Sequence: Synthetic oligonucleotide
cagacacucgcacuguccg

SEQ ID NO: 31338 - RNA, 19 nt, Artificial Sequence
  Description of Artificial Sequence: Synthetic oligonucleotide
cuuaaucagagggacuagc

SEQ ID NO: 31339 - RNA, 19 nt, Artificial Sequence
  Description of Artificial Sequence: Synthetic oligonucleotide
caaugcuaugaugaggagc

SEQ ID NO: 31340 - RNA, 19 nt, Artificial Sequence
  Description of Artificial Sequence: Synthetic oligonucleotide
uuauacgccucaguugaag

SEQ ID NO: 31341 - RNA, 19 nt, Artificial Sequence
  Description of Artificial Sequence: Synthetic oligonucleotide
agcauuuuacagcagccau

SEQ ID NO: 31342 - RNA, 19 nt, Artificial Sequence
  Description of Artificial Sequence: Synthetic oligonucleotide
uauacgccucaguugaagu

SEQ ID NO: 31343 - RNA, 19 nt, Artificial Sequence
  Description of Artificial Sequence: Synthetic oligonucleotide
ucugcgguaaggugguuga

SEQ ID NO: 31344 - RNA, 19 nt, Artificial Sequence
  Description of Artificial Sequence: Synthetic oligonucleotide
cauuuguuaaggcggcgag

SEQ ID NO: 31345 - RNA, 19 nt, Artificial Sequence
  Description of Artificial Sequence: Synthetic oligonucleotide
ccucauaucuucccgaagg

SEQ ID NO: 31346 - RNA, 19 nt, Artificial Sequence
  Description of Artificial Sequence: Synthetic oligonucleotide
guacgacucuggcugagcg

SEQ ID NO: 31347 - RNA, 19 nt, Artificial Sequence
  Description of Artificial Sequence: Synthetic oligonucleotide
agauuacuggaacuauaca

SEQ ID NO: 31348 - RNA, 19 nt, Artificial Sequence
  Description of Artificial Sequence: Synthetic oligonucleotide
uagcuagucagcacagaac

SEQ ID NO: 31349 - RNA, 19 nt, Artificial Sequence
  Description of Artificial Sequence: Synthetic oligonucleotide
cuaugaggcucucuaacuc

SEQ ID NO: 31350 - RNA, 19 nt, Artificial Sequence
  Description of Artificial Sequence: Synthetic oligonucleotide
  modified_base (6)..(6): a, c, u, g, unknown or other
uaaagnggaugcugaagau

SEQ ID NO: 31351 - RNA, 19 nt, Artificial Sequence
  Description of Artificial Sequence: Synthetic oligonucleotide
cuguuuauggcguucugca

SEQ ID NO: 31352 - RNA, 19 nt, Artificial Sequence
  Description of Artificial Sequence: Synthetic oligonucleotide
uacagguuacauccagacu

SEQ ID NO: 31353 - RNA, 19 nt, Artificial Sequence
  Description of Artificial Sequence: Synthetic oligonucleotide
acauaacugcacucuuauc

SEQ ID NO: 31354 - RNA, 19 nt, Artificial Sequence
  Description of Artificial Sequence: Synthetic oligonucleotide
guauuucguccuuucuuag

SEQ ID NO: 31355 - RNA, 19 nt, Artificial Sequence
  Description of Artificial Sequence: Synthetic oligonucleotide
augaguggaagagagacuu

SEQ ID NO: 31356 - RNA, 19 nt, Artificial Sequence
  Description of Artificial Sequence: Synthetic oligonucleotide
ugguugacaugaguggaag

SEQ ID NO: 31357 - RNA, 19 nt, Artificial Sequence
  Description of Artificial Sequence: Synthetic oligonucleotide
ucaaugcuaugaugaggag

SEQ ID NO: 31358 - RNA, 19 nt, Artificial Sequence
  Description of Artificial Sequence: Synthetic oligonucleotide
ugcaaucggcuaauuuggc

SEQ ID NO: 31359 - RNA, 19 nt, Artificial Sequence
  Description of Artificial Sequence: Synthetic oligonucleotide
acugaccaguuuuggaugu

SEQ ID NO: 31360 - RNA, 19 nt, Artificial Sequence
  Description of Artificial Sequence: Synthetic oligonucleotide
ggacacgugaggcagacac

SEQ ID NO: 31361 - RNA, 19 nt, Artificial Sequence
  Description of Artificial Sequence: Synthetic oligonucleotide
uuuggcuaugcagacugcu

SEQ ID NO: 31362 - RNA, 19 nt, Artificial Sequence
  Description of Artificial Sequence: Synthetic oligonucleotide
ugcagacugcuauucacuc

SEQ ID NO: 31363 - RNA, 19 nt, Artificial Sequence
  Description of Artificial Sequence: Synthetic oligonucleotide
cguuacacugacauggacg

SEQ ID NO: 31364 - RNA, 19 nt, Artificial Sequence
  Description of Artificial Sequence: Synthetic oligonucleotide
aguguccuauacuccaaca

SEQ ID NO: 31365 - RNA, 19 nt, Artificial Sequence
  Description of Artificial Sequence: Synthetic oligonucleotide
ucuaugucucgguuauagu

SEQ ID NO: 31366 - RNA, 19 nt, Artificial Sequence
  Description of Artificial Sequence: Synthetic oligonucleotide
gucacuucugcgaagguuc

SEQ ID NO: 31367 - RNA, 19 nt, Artificial Sequence
  Description of Artificial Sequence: Synthetic oligonucleotide
agcaaccuuauccucacua

SEQ ID NO: 31368 - RNA, 19 nt, Artificial Sequence
  Description of Artificial Sequence: Synthetic oligonucleotide
aaggcggcgaggcacuuaa

SEQ ID NO: 31369 - RNA, 19 nt, Artificial Sequence
  Description of Artificial Sequence: Synthetic oligonucleotide
uuauuaggucaaaacccuu

SEQ ID NO: 31370 - RNA, 19 nt, Artificial Sequence
  Description of Artificial Sequence: Synthetic oligonucleotide
cagacauucucccgucagg

SEQ ID NO: 31371 - RNA, 19 nt, Artificial Sequence
  Description of Artificial Sequence: Synthetic oligonucleotide
accggucacaguagaagcc

SEQ ID NO: 31372 - RNA, 19 nt, Artificial Sequence
  Description of Artificial Sequence: Synthetic oligonucleotide
auugcucgguacucuccac

SEQ ID NO: 31373 - RNA, 19 nt, Artificial Sequence
  Description of Artificial Sequence: Synthetic oligonucleotide
acaacgaccaucaucuuua

SEQ ID NO: 31374 - RNA, 19 nt, Artificial Sequence
  Description of Artificial Sequence: Synthetic oligonucleotide
acccaauggaugauggcgg

SEQ ID NO: 31375 - RNA, 19 nt, Artificial Sequence
  Description of Artificial Sequence: Synthetic oligonucleotide
gcuggaguggcgcugaccc

SEQ ID NO: 31376 - RNA, 19 nt, Artificial Sequence
  Description of Artificial Sequence: Synthetic oligonucleotide
cggugugaaauacugagcg

SEQ ID NO: 31377 - RNA, 19 nt, Artificial Sequence
  Description of Artificial Sequence: Synthetic oligonucleotide
ccgaagguccucauaaucc

SEQ ID NO: 31378 - RNA, 19 nt, Artificial Sequence
  Description of Artificial Sequence: Synthetic oligonucleotide
ucucaaucaauugcucggu

SEQ ID NO: 31379 - RNA, 19 nt, Artificial Sequence
  Description of Artificial Sequence: Synthetic oligonucleotide
gugagauagauucugcggu

SEQ ID NO: 31380 - RNA, 19 nt, Artificial Sequence
  Description of Artificial Sequence: Synthetic oligonucleotide
cacuucagacauucucccg

SEQ ID NO: 31381 - RNA, 19 nt, Artificial Sequence
  Description of Artificial Sequence: Synthetic oligonucleotide
agcgauuguagaaauaguu

SEQ ID NO: 31382 - RNA, 19 nt, Artificial Sequence
  Description of Artificial Sequence: Synthetic oligonucleotide
uguuuauggcguucugcaa

SEQ ID NO: 31383 - RNA, 19 nt, Artificial Sequence
  Description of Artificial Sequence: Synthetic oligonucleotide
acccaauuauacagguuac

SEQ ID NO: 31384 - RNA, 19 nt, Artificial Sequence
  Description of Artificial Sequence: Synthetic oligonucleotide
ggcuauauaugaaucucag

SEQ ID NO: 31385 - RNA, 19 nt, Artificial Sequence
  Description of Artificial Sequence: Synthetic oligonucleotide
aacgaccaucaucuuuaca

SEQ ID NO: 31386 - RNA, 19 nt, Artificial Sequence
  Description of Artificial Sequence: Synthetic oligonucleotide
uuccggauauucugcaauc

SEQ ID NO: 31387 - RNA, 19 nt, Artificial Sequence
  Description of Artificial Sequence: Synthetic oligonucleotide
agcucgagcuaggaguugg

SEQ ID NO: 31388 - RNA, 19 nt, Artificial Sequence
  Description of Artificial Sequence: Synthetic oligonucleotide
uccccuguacgacucuggc

SEQ ID NO: 31389 - RNA, 19 nt, Artificial Sequence
  Description of Artificial Sequence: Synthetic oligonucleotide
ccuuacucuauaaucauga

SEQ ID NO: 31390 - RNA, 19 nt, Artificial Sequence
  Description of Artificial Sequence: Synthetic oligonucleotide
aucaugucggcuucagcaa

SEQ ID NO: 31391 - RNA, 19 nt, Artificial Sequence
  Description of Artificial Sequence: Synthetic oligonucleotide
uguaagguauuucguccuu

SEQ ID NO: 31392 - RNA, 19 nt, Artificial Sequence
  Description of Artificial Sequence: Synthetic oligonucleotide
cugcgaagguucuuucagc

SEQ ID NO: 31393 - RNA, 19 nt, Artificial Sequence
  Description of Artificial Sequence: Synthetic oligonucleotide
uaucauucacacgucuauc

SEQ ID NO: 31394 - RNA, 19 nt, Artificial Sequence
  Description of Artificial Sequence: Synthetic oligonucleotide
aguuggaaucaaaaggaaa

SEQ ID NO: 31395 - RNA, 19 nt, Artificial Sequence
  Description of Artificial Sequence: Synthetic oligonucleotide
ugcgguaaggugguugaca

SEQ ID NO: 31396 - RNA, 19 nt, Artificial Sequence
  Description of Artificial Sequence: Synthetic oligonucleotide
uguuuugcuugcccucccu

SEQ ID NO: 31397 - RNA, 19 nt, Artificial Sequence
  Description of Artificial Sequence: Synthetic oligonucleotide
uacagauuacuggaacuau

SEQ ID NO: 31398 - RNA, 19 nt, Artificial Sequence
  Description of Artificial Sequence: Synthetic oligonucleotide
caauuagacgguccagauc

SEQ ID NO: 31399 - RNA, 19 nt, Artificial Sequence
  Description of Artificial Sequence: Synthetic oligonucleotide
gucaauuagacgguccaga

SEQ ID NO: 31400 - RNA, 19 nt, Artificial Sequence
  Description of Artificial Sequence: Synthetic oligonucleotide
gacuagcuagucagcacag

SEQ ID NO: 31401 - RNA, 19 nt, Artificial Sequence
  Description of Artificial Sequence: Synthetic oligonucleotide
cuagcuagucagcacagaa

SEQ ID NO: 31402 - RNA, 19 nt, Artificial Sequence
  Description of Artificial Sequence: Synthetic oligonucleotide
aagguucuuucagcauccg

SEQ ID NO: 31403 - RNA, 19 nt, Artificial Sequence
  Description of Artificial Sequence: Synthetic oligonucleotide
guuauaguccaugauggcu

SEQ ID NO: 31404 - RNA, 19 nt, Artificial Sequence
  Description of Artificial Sequence: Synthetic oligonucleotide
uagccgguaacaagcugga

SEQ ID NO: 31405 - RNA, 19 nt, Artificial Sequence
  Description of Artificial Sequence: Synthetic oligonucleotide
uucugcgguaaggugguug

SEQ ID NO: 31406 - RNA, 19 nt, Artificial Sequence
  Description of Artificial Sequence: Synthetic oligonucleotide
agacacucgcacuguccgg

SEQ ID NO: 31407 - RNA, 19 nt, Artificial Sequence
  Description of Artificial Sequence: Synthetic oligonucleotide
ucgucacuagggcuucuca

SEQ ID NO: 31408 - RNA, 19 nt, Artificial Sequence
  Description of Artificial Sequence: Synthetic oligonucleotide
gacucuggcugagcgauug

SEQ ID NO: 31409 - RNA, 19 nt, Artificial Sequence
  Description of Artificial Sequence: Synthetic oligonucleotide
uuagacgguccagauccgc

SEQ ID NO: 31410 - RNA, 19 nt, Artificial Sequence
  Description of Artificial Sequence: Synthetic oligonucleotide
gguauuucguccuuucuua

SEQ ID NO: 31411 - RNA, 19 nt, Artificial Sequence
  Description of Artificial Sequence: Synthetic oligonucleotide
acuuaaucagagggacuag

SEQ ID NO: 31412 - RNA, 19 nt, Artificial Sequence
  Description of Artificial Sequence: Synthetic oligonucleotide
ccgguaacaagcuggacac

SEQ ID NO: 31413 - RNA, 19 nt, Artificial Sequence
  Description of Artificial Sequence: Synthetic oligonucleotide
cuaugaugaggagccaaac

SEQ ID NO: 31414 - RNA, 19 nt, Artificial Sequence
  Description of Artificial Sequence: Synthetic oligonucleotide
acuagccgguaacaagcug

SEQ ID NO: 31415 - RNA, 19 nt, Artificial Sequence
  Description of Artificial Sequence: Synthetic oligonucleotide
aucaauugcucgguacucu

SEQ ID NO: 31416 - RNA, 19 nt, Artificial Sequence
  Description of Artificial Sequence: Synthetic oligonucleotide
cugagcgacagccguuugc

SEQ ID NO: 31417 - RNA, 19 nt, Artificial Sequence
  Description of Artificial Sequence: Synthetic oligonucleotide
cugguuugcuaugaggcuc

SEQ ID NO: 31418 - RNA, 19 nt, Artificial Sequence
  Description of Artificial Sequence: Synthetic oligonucleotide
cuucagacauucucccguc

SEQ ID NO: 31419 - RNA, 19 nt, Artificial Sequence
  Description of Artificial Sequence: Synthetic oligonucleotide
ggcacuuaaucagagggac

SEQ ID NO: 31420 - RNA, 19 nt, Artificial Sequence
  Description of Artificial Sequence: Synthetic oligonucleotide
gacgggguguugaagcagc

SEQ ID NO: 31421 - RNA, 19 nt, Artificial Sequence
  Description of Artificial Sequence: Synthetic oligonucleotide
ugcuauucacucucugguu

SEQ ID NO: 31422 - RNA, 19 nt, Artificial Sequence
  Description of Artificial Sequence: Synthetic oligonucleotide
auuuggcuaugcagacugc

SEQ ID NO: 31423 - RNA, 19 nt, Artificial Sequence
  Description of Artificial Sequence: Synthetic oligonucleotide
uuugagcuaagggccaaau

SEQ ID NO: 31424 - RNA, 19 nt, Artificial Sequence
  Description of Artificial Sequence: Synthetic oligonucleotide
uguccggucacgggguugc

SEQ ID NO: 31425 - RNA, 19 nt, Artificial Sequence
  Description of Artificial Sequence: Synthetic oligonucleotide
uggcguucugcaagccucc

SEQ ID NO: 31426 - RNA, 19 nt, Artificial Sequence
  Description of Artificial Sequence: Synthetic oligonucleotide
uacgacucuggcugagcga

SEQ ID NO: 31427 - RNA, 19 nt, Artificial Sequence
  Description of Artificial Sequence: Synthetic oligonucleotide
cuaagaccugcuggagugg

SEQ ID NO: 31428 - RNA, 19 nt, Artificial Sequence
  Description of Artificial Sequence: Synthetic oligonucleotide
aggccaagagcgauuguag

SEQ ID NO: 31429 - RNA, 19 nt, Artificial Sequence
  Description of Artificial Sequence: Synthetic oligonucleotide
gccgguaacaagcuggaca

SEQ ID NO: 31430 - RNA, 19 nt, Artificial Sequence
  Description of Artificial Sequence: Synthetic oligonucleotide
uggaggcaaucucaaucaa

SEQ ID NO: 31431 - RNA, 19 nt, Artificial Sequence
  Description of Artificial Sequence: Synthetic oligonucleotide
aggaccgggaauauuuaca

SEQ ID NO: 31432 - RNA, 19 nt, Artificial Sequence
  Description of Artificial Sequence: Synthetic oligonucleotide
uguacgacucuggcugagc

SEQ ID NO: 31433 - RNA, 19 nt, Artificial Sequence
  Description of Artificial Sequence: Synthetic oligonucleotide
cacuuaaucagagggacua

SEQ ID NO: 31434 - RNA, 19 nt, Artificial Sequence
  Description of Artificial Sequence: Synthetic oligonucleotide
gauggcggucgguuucagc

SEQ ID NO: 31435 - RNA, 19 nt, Artificial Sequence
  Description of Artificial Sequence: Synthetic oligonucleotide
cacgugaggcagacacucg

SEQ ID NO: 31436 - RNA, 19 nt, Artificial Sequence
  Description of Artificial Sequence: Synthetic oligonucleotide
agcccucucgucacuaggg

SEQ ID NO: 31437 - RNA, 19 nt, Artificial Sequence
  Description of Artificial Sequence: Synthetic oligonucleotide
cugugaagccauccccgcc

SEQ ID NO: 31438 - RNA, 19 nt, Artificial Sequence
  Description of Artificial Sequence: Synthetic oligonucleotide
cagauuauacgccucaguu

SEQ ID NO: 31439 - RNA, 19 nt, Artificial Sequence
  Description of Artificial Sequence: Synthetic oligonucleotide
gcuauauaugaaucucaga

SEQ ID NO: 31440 - RNA, 19 nt, Artificial Sequence
  Description of Artificial Sequence: Synthetic oligonucleotide
ggaacuagauggugcuggc

SEQ ID NO: 31441 - RNA, 19 nt, Artificial Sequence
  Description of Artificial Sequence: Synthetic oligonucleotide
cggauauucugcaaucggc

SEQ ID NO: 31442 - RNA, 19 nt, Artificial Sequence
  Description of Artificial Sequence: Synthetic oligonucleotide
uggcugagcgauugacaca

SEQ ID NO: 31443 - RNA, 19 nt, Artificial Sequence
  Description of Artificial Sequence: Synthetic oligonucleotide
acgacucuggcugagcgau

SEQ ID NO: 31444 - RNA, 19 nt, Artificial Sequence
  Description of Artificial Sequence: Synthetic oligonucleotide
gguaccuucuaucucauuu

SEQ ID NO: 31445 - RNA, 19 nt, Artificial Sequence
  Description of Artificial Sequence: Synthetic oligonucleotide
cuucugcgaagguucuuuc

SEQ ID NO: 31446 - RNA, 19 nt, Artificial Sequence
  Description of Artificial Sequence: Synthetic oligonucleotide
guggcgcugacccaaugga

SEQ ID NO: 31447 - RNA, 19 nt, Artificial Sequence
  Description of Artificial Sequence: Synthetic oligonucleotide
auuagacgguccagauccg

SEQ ID NO: 31448 - RNA, 19 nt, Artificial Sequence
  Description of Artificial Sequence: Synthetic oligonucleotide
gagauagauucugcgguaa

SEQ ID NO: 31449 - RNA, 19 nt, Artificial Sequence
  Description of Artificial Sequence: Synthetic oligonucleotide
aagaucccggucucuucua

SEQ ID NO: 31450 - RNA, 19 nt, Artificial Sequence
  Description of Artificial Sequence: Synthetic oligonucleotide
gaccaguuuuggaugucac

SEQ ID NO: 31451 - RNA, 19 nt, Artificial Sequence
  Description of Artificial Sequence: Synthetic oligonucleotide
acagauuacuggaacuaua

SEQ ID NO: 31452 - RNA, 19 nt, Artificial Sequence
  Description of Artificial Sequence: Synthetic oligonucleotide
uggcacucacacugaccag

SEQ ID NO: 31453 - RNA, 19 nt, Artificial Sequence
  Description of Artificial Sequence: Synthetic oligonucleotide
guuugccaccaggaucugg

SEQ ID NO: 31454 - RNA, 19 nt, Artificial Sequence
  Description of Artificial Sequence: Synthetic oligonucleotide
cagcccucucgucacuagg

SEQ ID NO: 31455 - RNA, 19 nt, Artificial Sequence
  Description of Artificial Sequence: Synthetic oligonucleotide
cuacgcaaaguacaaaauu

SEQ ID NO: 31456 - RNA, 19 nt, Artificial Sequence
  Description of Artificial Sequence: Synthetic oligonucleotide
uuacacugacauggacggc

SEQ ID NO: 31457 - RNA, 19 nt, Artificial Sequence
  Description of Artificial Sequence: Synthetic oligonucleotide
guuucacucggugcucagc

SEQ ID NO: 31458 - RNA, 19 nt, Artificial Sequence
  Description of Artificial Sequence: Synthetic oligonucleotide
uggcgcugacccaauggau

SEQ ID NO: 31459 - RNA, 19 nt, Artificial Sequence
  Description of Artificial Sequence: Synthetic oligonucleotide
ggugugaaauacugagcga

SEQ ID NO: 31460 - RNA, 19 nt, Artificial Sequence
  Description of Artificial Sequence: Synthetic oligonucleotide
uggcggucgguuucagcca

SEQ ID NO: 31461 - RNA, 19 nt, Artificial Sequence
  Description of Artificial Sequence: Synthetic oligonucleotide
aggcacuuaaucagaggga

SEQ ID NO: 31462 - RNA, 19 nt, Artificial Sequence
  Description of Artificial Sequence: Synthetic oligonucleotide
cuuagaguggguggagcca

SEQ ID NO: 31463 - RNA, 19 nt, Artificial Sequence
  Description of Artificial Sequence: Synthetic oligonucleotide
gauucugcgguaagguggu

SEQ ID NO: 31464 - RNA, 19 nt, Artificial Sequence
  Description of Artificial Sequence: Synthetic oligonucleotide
cucuggcugagcgauugac

SEQ ID NO: 31465 - RNA, 19 nt, Artificial Sequence
  Description of Artificial Sequence: Synthetic oligonucleotide
agguugugaauguccuuua

SEQ ID NO: 31466 - RNA, 19 nt, Artificial Sequence
  Description of Artificial Sequence: Synthetic oligonucleotide
uuggcagcgucagcucgag

SEQ ID NO: 31467 - RNA, 19 nt, Artificial Sequence
  Description of Artificial Sequence: Synthetic oligonucleotide
gaacuagauggugcuggca

SEQ ID NO: 31468 - RNA, 19 nt, Artificial Sequence
  Description of Artificial Sequence: Synthetic oligonucleotide
agcugccgcaacauaacgu

SEQ ID NO: 31469 - RNA, 19 nt, Artificial Sequence
  Description of Artificial Sequence: Synthetic oligonucleotide
ggaccgugcuugcucagcc

SEQ ID NO: 31470 - RNA, 19 nt, Artificial Sequence
  Description of Artificial Sequence: Synthetic oligonucleotide
ggucaauuagacgguccag

SEQ ID NO: 31471 - RNA, 19 nt, Artificial Sequence
  Description of Artificial Sequence: Synthetic oligonucleotide
agccuacuaggaaaugcca

SEQ ID NO: 31472 - RNA, 19 nt, Artificial Sequence
  Description of Artificial Sequence: Synthetic oligonucleotide
cugccgcaacauaacguuc

SEQ ID NO: 31473 - RNA, 19 nt, Artificial Sequence
  Description of Artificial Sequence: Synthetic oligonucleotide
ccauagggauugcaggcgc

SEQ ID NO: 31474 - RNA, 19 nt, Artificial Sequence
  Description of Artificial Sequence: Synthetic oligonucleotide
gcggcgaggcacuuaauca

SEQ ID NO: 31475 - RNA, 19 nt, Artificial Sequence
  Description of Artificial Sequence: Synthetic oligonucleotide
acuagcuagucagcacaga

SEQ ID NO: 31476 - RNA, 19 nt, Artificial Sequence
  Description of Artificial Sequence: Synthetic oligonucleotide
gcucgguacucuccacucg

SEQ ID NO: 31477 - RNA, 19 nt, Artificial Sequence
  Description of Artificial Sequence: Synthetic oligonucleotide
acugagcgacagccguuug

SEQ ID NO: 31478 - RNA, 19 nt, Artificial Sequence
  Description of Artificial Sequence: Synthetic oligonucleotide
uggucucacagcgcucaca

SEQ ID NO: 31479 - RNA, 19 nt, Artificial Sequence
  Description of Artificial Sequence: Synthetic oligonucleotide
gggacuagcuagucagcac

SEQ ID NO: 31480 - RNA, 19 nt, Artificial Sequence
  Description of Artificial Sequence: Synthetic oligonucleotide
gagaagugagauagauucu

SEQ ID NO: 31481 - RNA, 19 nt, Artificial Sequence
  Description of Artificial Sequence: Synthetic oligonucleotide
cgcaacauaacguucaccu

SEQ ID NO: 31482 - RNA, 19 nt, Artificial Sequence
  Description of Artificial Sequence: Synthetic oligonucleotide
ggcggcgaggcacuuaauc

SEQ ID NO: 31483 - RNA, 19 nt, Artificial Sequence
  Description of Artificial Sequence: Synthetic oligonucleotide
gguugacaugaguggaaga

SEQ ID NO: 31484 - RNA, 19 nt, Artificial Sequence
  Description of Artificial Sequence: Synthetic oligonucleotide
ggaggcuacuaacagaguu

SEQ ID NO: 31485 - RNA, 19 nt, Artificial Sequence
  Description of Artificial Sequence: Synthetic oligonucleotide
aggcgguugcaguugccaa

SEQ ID NO: 31486 - RNA, 19 nt, Artificial Sequence
  Description of Artificial Sequence: Synthetic oligonucleotide
cugugcuagcaagagggga

SEQ ID NO: 31487 - RNA, 19 nt, Artificial Sequence
  Description of Artificial Sequence: Synthetic oligonucleotide
caagaucccggucucuucu

SEQ ID NO: 31488 - RNA, 19 nt, Artificial Sequence
  Description of Artificial Sequence: Synthetic oligonucleotide
gaccgggaauauuuacaua

SEQ ID NO: 31489 - RNA, 19 nt, Artificial Sequence
  Description of Artificial Sequence: Synthetic oligonucleotide
cuuacucuauaaucaugau

SEQ ID NO: 31490 - RNA, 19 nt, Artificial Sequence
  Description of Artificial Sequence: Synthetic oligonucleotide
gccuacuaggaaaugccac

SEQ ID NO: 31491 - RNA, 19 nt, Artificial Sequence
  Description of Artificial Sequence: Synthetic oligonucleotide
ccauucuaggaggaccggg

SEQ ID NO: 31492 - RNA, 19 nt, Artificial Sequence
  Description of Artificial Sequence: Synthetic oligonucleotide
cccauagggauugcaggcg

SEQ ID NO: 31493 - RNA, 19 nt, Artificial Sequence
  Description of Artificial Sequence: Synthetic oligonucleotide
gacacucgcacuguccggu

SEQ ID NO: 31494 - RNA, 19 nt, Artificial Sequence
  Description of Artificial Sequence: Synthetic oligonucleotide
gaguggcgcugacccaaug

SEQ ID NO: 31495 - RNA, 19 nt, Artificial Sequence
  Description of Artificial Sequence: Synthetic oligonucleotide
cucagccaagaucccgguc

SEQ ID NO: 31496 - RNA, 19 nt, Artificial Sequence
  Description of Artificial Sequence: Synthetic oligonucleotide
cucgagcuaggaguugguc

SEQ ID NO: 31497 - RNA, 19 nt, Artificial Sequence
  Description of Artificial Sequence: Synthetic oligonucleotide
agccgguaacaagcuggac

SEQ ID NO: 31498 - RNA, 19 nt, Artificial Sequence
  Description of Artificial Sequence: Synthetic oligonucleotide
ggccaucucaaugcuauga

SEQ ID NO: 31499 - RNA, 19 nt, Artificial Sequence
  Description of Artificial Sequence: Synthetic oligonucleotide
ggccaagagcgauuguaga

SEQ ID NO: 31500 - RNA, 19 nt, Artificial Sequence
  Description of Artificial Sequence: Synthetic oligonucleotide
gcauuuguuaaggcggcga

SEQ ID NO: 31501 - RNA, 19 nt, Artificial Sequence
  Description of Artificial Sequence: Synthetic oligonucleotide
ggaccgggaauauuuacau

SEQ ID NO: 31502 - RNA, 19 nt, Artificial Sequence
  Description of Artificial Sequence: Synthetic oligonucleotide
cuguacgacucuggcugag

SEQ ID NO: 31503 - RNA, 19 nt, Artificial Sequence
  Description of Artificial Sequence: Synthetic oligonucleotide
uagaugcacuucagacauu

SEQ ID NO: 31504 - RNA, 19 nt, Artificial Sequence
  Description of Artificial Sequence: Synthetic oligonucleotide
gcugacccaauggaugaug

SEQ ID NO: 31505 - RNA, 19 nt, Artificial Sequence
  Description of Artificial Sequence: Synthetic oligonucleotide
cuacaggggucagcugggc

SEQ ID NO: 31506 - RNA, 19 nt, Artificial Sequence
  Description of Artificial Sequence: Synthetic oligonucleotide
aucggcuaauuuggcuaug

SEQ ID NO: 31507 - RNA, 19 nt, Artificial Sequence
  Description of Artificial Sequence: Synthetic oligonucleotide
ugauggcggucgguuucag

SEQ ID NO: 31508 - RNA, 19 nt, Artificial Sequence
  Description of Artificial Sequence: Synthetic oligonucleotide
gagcgauuguagaaauagu

SEQ ID NO: 31509 - RNA, 19 nt, Artificial Sequence
  Description of Artificial Sequence: Synthetic oligonucleotide
gcggugugaaauacugagc

SEQ ID NO: 31510 - RNA, 19 nt, Artificial Sequence
  Description of Artificial Sequence: Synthetic oligonucleotide
gaggggaaacugagcaaaa

SEQ ID NO: 31511 - RNA, 19 nt, Artificial Sequence
  Description of Artificial Sequence: Synthetic oligonucleotide
ggcuuagaguggguggagc

SEQ ID NO: 31512 - RNA, 19 nt, Artificial Sequence
  Description of Artificial Sequence: Synthetic oligonucleotide
acacgucuaucaaaaucuu

SEQ ID NO: 31513 - RNA, 19 nt, Artificial Sequence
  Description of Artificial Sequence: Synthetic oligonucleotide
guauccagcugucccaguu

SEQ ID NO: 31514 - RNA, 19 nt, Artificial Sequence
  Description of Artificial Sequence: Synthetic oligonucleotide
auggaugauggcggucggu

SEQ ID NO: 31515 - RNA, 19 nt, Artificial Sequence
  Description of Artificial Sequence: Synthetic oligonucleotide
cccguuggugcccaaagca

SEQ ID NO: 31516 - RNA, 19 nt, Artificial Sequence
  Description of Artificial Sequence: Synthetic oligonucleotide
agcuaggaguuggucugcu

SEQ ID NO: 31517 - RNA, 19 nt, Artificial Sequence
  Description of Artificial Sequence: Synthetic oligonucleotide
cagcggugugaaauacuga

SEQ ID NO: 31518 - RNA, 19 nt, Artificial Sequence
  Description of Artificial Sequence: Synthetic oligonucleotide
caauggacgggguguugaa

SEQ ID NO: 31519 - RNA, 19 nt, Artificial Sequence
  Description of Artificial Sequence: Synthetic oligonucleotide
cggcgaggcacuuaaucag

SEQ ID NO: 31520 - RNA, 19 nt, Artificial Sequence
  Description of Artificial Sequence: Synthetic oligonucleotide
auuauacgccucaguugaa

SEQ ID NO: 31521 - RNA, 19 nt, Artificial Sequence
  Description of Artificial Sequence: Synthetic oligonucleotide
gcaaucggcuaauuuggcu

SEQ ID NO: 31522 - RNA, 19 nt, Artificial Sequence
  Description of Artificial Sequence: Synthetic oligonucleotide
gcuaugaugaggagccaaa

SEQ ID NO: 31523 - RNA, 19 nt, Artificial Sequence
  Description of Artificial Sequence: Synthetic oligonucleotide
cucgucacuagggcuucuc

SEQ ID NO: 31524 - RNA, 19 nt, Artificial Sequence
  Description of Artificial Sequence: Synthetic oligonucleotide
ggacgggguguugaagcag

SEQ ID NO: 31525 - RNA, 19 nt, Artificial Sequence
  Description of Artificial Sequence: Synthetic oligonucleotide
ucacgggguugcagcugcu

SEQ ID NO: 31526 - RNA, 19 nt, Artificial Sequence
  Description of Artificial Sequence: Synthetic oligonucleotide
gcccucucgucacuagggc

SEQ ID NO: 31527 - RNA, 19 nt, Artificial Sequence
  Description of Artificial Sequence: Synthetic oligonucleotide
cgcuacgcaaaguacaaaa

SEQ ID NO: 31528 - RNA, 19 nt, Artificial Sequence
  Description of Artificial Sequence: Synthetic oligonucleotide
cauucucccgucaggcggu

SEQ ID NO: 31529 - RNA, 19 nt, Artificial Sequence
  Description of Artificial Sequence: Synthetic oligonucleotide
uaggaggaccgggaauauu

SEQ ID NO: 31530 - RNA, 19 nt, Artificial Sequence
  Description of Artificial Sequence: Synthetic oligonucleotide
ggcgggaauccuccucagc

SEQ ID NO: 31531 - RNA, 19 nt, Artificial Sequence
  Description of Artificial Sequence: Synthetic oligonucleotide
gcugccgcaacauaacguu

SEQ ID NO: 31532 - RNA, 19 nt, Artificial Sequence
  Description of Artificial Sequence: Synthetic oligonucleotide
ggcugagcgauugacacau

SEQ ID NO: 31533 - RNA, 19 nt, Artificial Sequence
  Description of Artificial Sequence: Synthetic oligonucleotide
auacugagcgacagccguu

SEQ ID NO: 31534 - RNA, 19 nt, Artificial Sequence
  Description of Artificial Sequence: Synthetic oligonucleotide
ccaagaucccggucucuuc

SEQ ID NO: 31535 - RNA, 19 nt, Artificial Sequence
  Description of Artificial Sequence: Synthetic oligonucleotide
gccgcaacauaacguucac

SEQ ID NO: 31536 - RNA, 19 nt, Artificial Sequence
  Description of Artificial Sequence: Synthetic oligonucleotide
ggcgaggcacuuaaucaga

SEQ ID NO: 31537 - RNA, 19 nt, Artificial Sequence
  Description of Artificial Sequence: Synthetic oligonucleotide
cacgucuaucaaaaucuuu

SEQ ID NO: 31538 - RNA, 19 nt, Artificial Sequence
  Description of Artificial Sequence: Synthetic oligonucleotide
cacuagccgguaacaagcu

SEQ ID NO: 31539 - RNA, 19 nt, Artificial Sequence
  Description of Artificial Sequence: Synthetic oligonucleotide
caggauguuuaacuugcuu

SEQ ID NO: 31540 - RNA, 19 nt, Artificial Sequence
  Description of Artificial Sequence: Synthetic oligonucleotide
augcuaugaugaggagcca

SEQ ID NO: 31541 - RNA, 19 nt, Artificial Sequence
  Description of Artificial Sequence: Synthetic oligonucleotide
acuguccggucacgggguu

SEQ ID NO: 31542 - RNA, 19 nt, Artificial Sequence
  Description of Artificial Sequence: Synthetic oligonucleotide
ccccgcuacgcaaaguaca

SEQ ID NO: 31543 - RNA, 19 nt, Artificial Sequence
  Description of Artificial Sequence: Synthetic oligonucleotide
uaaggcggcgaggcacuua

SEQ ID NO: 31544 - RNA, 19 nt, Artificial Sequence
  Description of Artificial Sequence: Synthetic oligonucleotide
gcgguaaggugguugacau

SEQ ID NO: 31545 - RNA, 19 nt, Artificial Sequence
  Description of Artificial Sequence: Synthetic oligonucleotide
cccaauuauacagguuaca

SEQ ID NO: 31546 - RNA, 19 nt, Artificial Sequence
  Description of Artificial Sequence: Synthetic oligonucleotide
cuggaguggcgcugaccca

SEQ ID NO: 31547 - RNA, 19 nt, Artificial Sequence
  Description of Artificial Sequence: Synthetic oligonucleotide
agccaagaucccggucucu

SEQ ID NO: 31548 - RNA, 19 nt, Artificial Sequence
  Description of Artificial Sequence: Synthetic oligonucleotide
cuguccggucacgggguug

SEQ ID NO: 31549 - RNA, 19 nt, Artificial Sequence
  Description of Artificial Sequence: Synthetic oligonucleotide
cugcgguaaggugguugac

SEQ ID NO: 31550 - RNA, 19 nt, Artificial Sequence
  Description of Artificial Sequence: Synthetic oligonucleotide
cuuuccgccucaugggcuu

SEQ ID NO: 31551 - RNA, 19 nt, Artificial Sequence
  Description of Artificial Sequence: Synthetic oligonucleotide
gguugugaauguccuuuau

SEQ ID NO: 31552 - RNA, 19 nt, Artificial Sequence
  Description of Artificial Sequence: Synthetic oligonucleotide
gccagaggauugccgaaaa

SEQ ID NO: 31553 - RNA, 19 nt, Artificial Sequence
  Description of Artificial Sequence: Synthetic oligonucleotide
auucugcaaucggcuaauu

SEQ ID NO: 31554 - RNA, 19 nt, Artificial Sequence
  Description of Artificial Sequence: Synthetic oligonucleotide
gcgauuucccacgaagccu

SEQ ID NO: 31555 - RNA, 19 nt, Artificial Sequence
  Description of Artificial Sequence: Synthetic oligonucleotide
cacuguccggucacggggu

SEQ ID NO: 31556 - RNA, 19 nt, Artificial Sequence
  Description of Artificial Sequence: Synthetic oligonucleotide
cccgcuacgcaaaguacaa

SEQ ID NO: 31557 - RNA, 19 nt, Artificial Sequence
  Description of Artificial Sequence: Synthetic oligonucleotide
ccgcaacauaacguucacc

SEQ ID NO: 31558 - RNA, 19 nt, Artificial Sequence
  Description of Artificial Sequence: Synthetic oligonucleotide
gccuaagaccugcuggagu

SEQ ID NO: 31559 - RNA, 19 nt, Artificial Sequence
  Description of Artificial Sequence: Synthetic oligonucleotide
gcuacgcaaaguacaaaau

SEQ ID NO: 31560 - RNA, 19 nt, Artificial Sequence
  Description of Artificial Sequence: Synthetic oligonucleotide
ccggucacaguagaagcca

SEQ ID NO: 31561 - RNA, 19 nt, Artificial Sequence
  Description of Artificial Sequence: Synthetic oligonucleotide
ccgugcuugcucagccaag

SEQ ID NO: 31562 - RNA, 19 nt, Artificial Sequence
  Description of Artificial Sequence: Synthetic oligonucleotide
gccauguguuuugcuugcc

SEQ ID NO: 31563 - RNA, 19 nt, Artificial Sequence
  Description of Artificial Sequence: Synthetic oligonucleotide
cacccaccagggccuaaga

SEQ ID NO: 31564 - RNA, 19 nt, Artificial Sequence
  Description of Artificial Sequence: Synthetic oligonucleotide
ccaauggaugauggcgguc

SEQ ID NO: 31565 - RNA, 19 nt, Artificial Sequence
  Description of Artificial Sequence: Synthetic oligonucleotide
ccuguacgacucuggcuga

SEQ ID NO: 31566 - RNA, 19 nt, Artificial Sequence
  Description of Artificial Sequence: Synthetic oligonucleotide
gugcuugcucagccaagau

SEQ ID NO: 31567 - RNA, 19 nt, Artificial Sequence
  Description of Artificial Sequence: Synthetic oligonucleotide
ggcuaugcagacugcuauu

SEQ ID NO: 31568 - RNA, 19 nt, Artificial Sequence
  Description of Artificial Sequence: Synthetic oligonucleotide
gguccgguugauggcggga

SEQ ID NO: 31569 - RNA, 19 nt, Artificial Sequence
  Description of Artificial Sequence: Synthetic oligonucleotide
cagcauccgccuuggugcu

SEQ ID NO: 31570 - RNA, 19 nt, Artificial Sequence
  Description of Artificial Sequence: Synthetic oligonucleotide
gcacuuaaucagagggacu

SEQ ID NO: 31571 - RNA, 19 nt, Artificial Sequence
  Description of Artificial Sequence: Synthetic oligonucleotide
cagacgguagggucuucuu

SEQ ID NO: 31572 - RNA, 19 nt, Artificial Sequence
  Description of Artificial Sequence: Synthetic oligonucleotide
gcgaagguucuuucagcau

SEQ ID NO: 31573 - RNA, 19 nt, Artificial Sequence
  Description of Artificial Sequence: Synthetic oligonucleotide
cuaggaggaccgggaauau

SEQ ID NO: 31574 - RNA, 19 nt, Artificial Sequence
  Description of Artificial Sequence: Synthetic oligonucleotide
acugcccguuggugcccaa

SEQ ID NO: 31575 - RNA, 19 nt, Artificial Sequence
  Description of Artificial Sequence: Synthetic oligonucleotide
cucccgucaggcgguugca

SEQ ID NO: 31576 - RNA, 19 nt, Artificial Sequence
  Description of Artificial Sequence: Synthetic oligonucleotide
auucucccgucaggcgguu

SEQ ID NO: 31577 - RNA, 19 nt, Artificial Sequence
  Description of Artificial Sequence: Synthetic oligonucleotide
cuauaguauuccggauauu

SEQ ID NO: 31578 - RNA, 19 nt, Artificial Sequence
  Description of Artificial Sequence: Synthetic oligonucleotide
ccuuuccgccucaugggcu

SEQ ID NO: 31579 - RNA, 19 nt, Artificial Sequence
  Description of Artificial Sequence: Synthetic oligonucleotide
ggcagcggugugaaauacu

SEQ ID NO: 31580 - RNA, 19 nt, Artificial Sequence
  Description of Artificial Sequence: Synthetic oligonucleotide
ggcggucgguuucagccau

SEQ ID NO: 31581 - RNA, 19 nt, Artificial Sequence
  Description of Artificial Sequence: Synthetic oligonucleotide
cccaauggaugauggcggu

SEQ ID NO: 31582 - RNA, 19 nt, Artificial Sequence
  Description of Artificial Sequence: Synthetic oligonucleotide
cggcuaauuuggcuaugca

SEQ ID NO: 31583 - RNA, 19 nt, Artificial Sequence
  Description of Artificial Sequence: Synthetic oligonucleotide
gcgucagcucgagcuagga

SEQ ID NO: 31584 - RNA, 19 nt, Artificial Sequence
  Description of Artificial Sequence: Synthetic oligonucleotide
ccggucucuucuauaguau

SEQ ID NO: 31585 - RNA, 19 nt, Artificial Sequence
  Description of Artificial Sequence: Synthetic oligonucleotide
gguuccccuguacgacucu

SEQ ID NO: 31586 - RNA, 19 nt, Artificial Sequence
  Description of Artificial Sequence: Synthetic oligonucleotide
cuucagcuaugguccgguu

SEQ ID NO: 31587 - RNA, 19 nt, Artificial Sequence
  Description of Artificial Sequence: Synthetic oligonucleotide
ccucaguugaagucucauu

SEQ ID NO: 31588 - RNA, 19 nt, Artificial Sequence
  Description of Artificial Sequence: Synthetic oligonucleotide
cuuugucaccugcccgcuu

SEQ ID NO: 31589 - RNA, 19 nt, Artificial Sequence
  Description of Artificial Sequence: Synthetic oligonucleotide
cugcccguuggugcccaaa

SEQ ID NO: 31590 - RNA, 19 nt, Artificial Sequence
  Description of Artificial Sequence: Synthetic oligonucleotide
cagcucaagugaggcacau

SEQ ID NO: 31591 - RNA, 19 nt, Artificial Sequence
  Description of Artificial Sequence: Synthetic oligonucleotide
guccggucacgggguugca

SEQ ID NO: 31592 - RNA, 19 nt, Artificial Sequence
  Description of Artificial Sequence: Synthetic oligonucleotide
ggucgguuucagccauuuu

SEQ ID NO: 31593 - RNA, 19 nt, Artificial Sequence
  Description of Artificial Sequence: Synthetic oligonucleotide
ccagacgguagggucuucu

SEQ ID NO: 31594 - RNA, 19 nt, Artificial Sequence
  Description of Artificial Sequence: Synthetic oligonucleotide
ggcugccuaccaacauucu

SEQ ID NO: 31595 - RNA, 19 nt, Artificial Sequence
  Description of Artificial Sequence: Synthetic oligonucleotide
aggcggcgaggcacuuaau

SEQ ID NO: 31596 - RNA, 19 nt, Artificial Sequence
  Description of Artificial Sequence: Synthetic oligonucleotide
gcucgagcuaggaguuggu

SEQ ID NO: 31597 - RNA, 19 nt, Artificial Sequence
  Description of Artificial Sequence: Synthetic oligonucleotide
ccgcuacgcaaaguacaaa

SEQ ID NO: 31598 - RNA, 19 nt, Artificial Sequence
  Description of Artificial Sequence: Synthetic oligonucleotide
gccagacgguagggucuuc

SEQ ID NO: 31599 - RNA, 19 nt, Artificial Sequence
  Description of Artificial Sequence: Synthetic oligonucleotide
ccaggccaagagcgauugu

SEQ ID NO: 31600 - RNA, 19 nt, Artificial Sequence
  Description of Artificial Sequence: Synthetic oligonucleotide
gcugagcgauugacacauu

SEQ ID NO: 31601 - RNA, 19 nt, Artificial Sequence
  Description of Artificial Sequence: Synthetic oligonucleotide
cggucgguuucagccauuu

SEQ ID NO: 31602 - RNA, 19 nt, Artificial Sequence
  Description of Artificial Sequence: Synthetic oligonucleotide
gcggucgguuucagccauu

SEQ ID NO: 31603 - RNA, 19 nt, Artificial Sequence
  Description of Artificial Sequence: Synthetic oligonucleotide
aacaacaacacacacacac

SEQ ID NO: 31604 - RNA, 19 nt, Artificial Sequence
  Description of Artificial Sequence: Synthetic oligonucleotide
aauaaagaaugcuauggac

SEQ ID NO: 31605 - RNA, 19 nt, Artificial Sequence
  Description of Artificial Sequence: Synthetic oligonucleotide
uaauuauucacccagcucc

SEQ ID NO: 31606 - RNA, 19 nt, Artificial Sequence
  Description of Artificial Sequence: Synthetic oligonucleotide
auauacuuuauucuggacc

SEQ ID NO: 31607 - RNA, 19 nt, Artificial Sequence
  Description of Artificial Sequence: Synthetic oligonucleotide
aacauacucaccuagagga

SEQ ID NO: 31608 - RNA, 19 nt, Artificial Sequence
  Description of Artificial Sequence: Synthetic oligonucleotide
uaauauuaccugaucaugg

SEQ ID NO: 31609 - RNA, 19 nt, Artificial Sequence
  Description of Artificial Sequence: Synthetic oligonucleotide
aaaacauacucaccuagag

SEQ ID NO: 31610 - RNA, 19 nt, Artificial Sequence
  Description of Artificial Sequence: Synthetic oligonucleotide
aagugaauaauauuaccug

SEQ ID NO: 31611 - RNA, 19 nt, Artificial Sequence
  Description of Artificial Sequence: Synthetic oligonucleotide
aaagucgggagagaaaacc

SEQ ID NO: 31612 - RNA, 19 nt, Artificial Sequence
  Description of Artificial Sequence: Synthetic oligonucleotide
aaaguucuuuaacauguac

SEQ ID NO: 31613 - RNA, 19 nt, Artificial Sequence
  Description of Artificial Sequence: Synthetic oligonucleotide
ugagaaauccucuaaauaa

SEQ ID NO: 31614 - RNA, 19 nt, Artificial Sequence
  Description of Artificial Sequence: Synthetic oligonucleotide
aaaggagugcuuuauaagu

SEQ ID NO: 31615 - RNA, 19 nt, Artificial Sequence
  Description of Artificial Sequence: Synthetic oligonucleotide
gacuaaaguaaauagacca

SEQ ID NO: 31616 - RNA, 19 nt, Artificial Sequence
  Description of Artificial Sequence: Synthetic oligonucleotide
ucugauucaaauuacaguu

SEQ ID NO: 31617 - RNA, 19 nt, Artificial Sequence
  Description of Artificial Sequence: Synthetic oligonucleotide
agcacuaucagcaaucacc

SEQ ID NO: 31618 - RNA, 19 nt, Artificial Sequence
  Description of Artificial Sequence: Synthetic oligonucleotide
uguugcuugaccaagugca

SEQ ID NO: 31619 - RNA, 19 nt, Artificial Sequence
  Description of Artificial Sequence: Synthetic oligonucleotide
agcucuaaauaucucaugg

SEQ ID NO: 31620 - RNA, 19 nt, Artificial Sequence
  Description of Artificial Sequence: Synthetic oligonucleotide
aaagugaauaauauuaccu

SEQ ID NO: 31621 - RNA, 19 nt, Artificial Sequence
  Description of Artificial Sequence: Synthetic oligonucleotide
aaaucuuauccccugcaag

SEQ ID NO: 31622 - RNA, 19 nt, Artificial Sequence
  Description of Artificial Sequence: Synthetic oligonucleotide
uuauauucacuggagauag

SEQ ID NO: 31623 - RNA, 19 nt, Artificial Sequence
  Description of Artificial Sequence: Synthetic oligonucleotide
ucaagugggacuauagcag

SEQ ID NO: 31624 - RNA, 19 nt, Artificial Sequence
  Description of Artificial Sequence: Synthetic oligonucleotide
uuguacacugaacaguggg

SEQ ID NO: 31625 - RNA, 19 nt, Artificial Sequence
  Description of Artificial Sequence: Synthetic oligonucleotide
aguguuauaugcuguaauc

SEQ ID NO: 31626 - RNA, 19 nt, Artificial Sequence
  Description of Artificial Sequence: Synthetic oligonucleotide
ugacuaaacagucuguaca

SEQ ID NO: 31627 - RNA, 19 nt, Artificial Sequence
  Description of Artificial Sequence: Synthetic oligonucleotide
uaagguagcaagcauuuug

SEQ ID NO: 31628 - RNA, 19 nt, Artificial Sequence
  Description of Artificial Sequence: Synthetic oligonucleotide
uuugcuauacucuaagauc

SEQ ID NO: 31629 - RNA, 19 nt, Artificial Sequence
  Description of Artificial Sequence: Synthetic oligonucleotide
uugcuauacucuaagaucu

SEQ ID NO: 31630 - RNA, 19 nt, Artificial Sequence
  Description of Artificial Sequence: Synthetic oligonucleotide
gagaagcuaauccuuaucc

SEQ ID NO: 31631 - RNA, 19 nt, Artificial Sequence
  Description of Artificial Sequence: Synthetic oligonucleotide
uuuaggcauacucaaaacu

SEQ ID NO: 31632 - RNA, 19 nt, Artificial Sequence
  Description of Artificial Sequence: Synthetic oligonucleotide
cuuugaaucagcugggaag

SEQ ID NO: 31633 - RNA, 19 nt, Artificial Sequence
  Description of Artificial Sequence: Synthetic oligonucleotide
ucuauauagaaugauggac

SEQ ID NO: 31634 - RNA, 19 nt, Artificial Sequence
  Description of Artificial Sequence: Synthetic oligonucleotide
aauauuaccugaucaugga

SEQ ID NO: 31635 - RNA, 19 nt, Artificial Sequence
  Description of Artificial Sequence: Synthetic oligonucleotide
uguuuaugaaaacagugau

SEQ ID NO: 31636 - RNA, 19 nt, Artificial Sequence
  Description of Artificial Sequence: Synthetic oligonucleotide
aacacacacacacauaaaa

SEQ ID NO: 31637 - RNA, 19 nt, Artificial Sequence
  Description of Artificial Sequence: Synthetic oligonucleotide
aaaagcacuaucagcaauc

SEQ ID NO: 31638 - RNA, 19 nt, Artificial Sequence
  Description of Artificial Sequence: Synthetic oligonucleotide
ucaagauguaaacaggaaa

SEQ ID NO: 31639 - RNA, 19 nt, Artificial Sequence
  Description of Artificial Sequence: Synthetic oligonucleotide
aacugugaacuaaagcacc

SEQ ID NO: 31640 - RNA, 19 nt, Artificial Sequence
  Description of Artificial Sequence: Synthetic oligonucleotide
ugaacuaaagcaccugucu

SEQ ID NO: 31641 - RNA, 19 nt, Artificial Sequence
  Description of Artificial Sequence: Synthetic oligonucleotide
uguacacauucauagucgg

SEQ ID NO: 31642 - RNA, 19 nt, Artificial Sequence
  Description of Artificial Sequence: Synthetic oligonucleotide
uaugcgucuggucaaacug

SEQ ID NO: 31643 - RNA, 19 nt, Artificial Sequence
  Description of Artificial Sequence: Synthetic oligonucleotide
  modified_base (16)..(16): a, c, u, g, unknown or other
gucagggauagucuunugg

SEQ ID NO: 31644 - RNA, 19 nt, Artificial Sequence
  Description of Artificial Sequence: Synthetic oligonucleotide
agugaauaauauuaccuga

SEQ ID NO: 31645 - RNA, 19 nt, Artificial Sequence
  Description of Artificial Sequence: Synthetic oligonucleotide
aacgcuauuuccgaagguc

SEQ ID NO: 31646 - RNA, 19 nt, Artificial Sequence
  Description of Artificial Sequence: Synthetic oligonucleotide
cuaaaacauacucaccuag

SEQ ID NO: 31647 - RNA, 19 nt, Artificial Sequence
  Description of Artificial Sequence: Synthetic oligonucleotide
auggcaguuauauucacug

SEQ ID NO: 31648 - RNA, 19 nt, Artificial Sequence
  Description of Artificial Sequence: Synthetic oligonucleotide
  modified_base (15)..(15): a, c, u, g, unknown or other
ucagggauagucuunuggc

SEQ ID NO: 31649 - RNA, 19 nt, Artificial Sequence
  Description of Artificial Sequence: Synthetic oligonucleotide
  modified_base (2)..(2): a, c, u, g, unknown or other
unuggcuauguacacauuc

SEQ ID NO: 31650 - RNA, 19 nt, Artificial Sequence
  Description of Artificial Sequence: Synthetic oligonucleotide
ucuaaaugaacaccauaga

SEQ ID NO: 31651 - RNA, 19 nt, Artificial Sequence
  Description of Artificial Sequence: Synthetic oligonucleotide
cuauauagaaugauggaca

SEQ ID NO: 31652 - RNA, 19 nt, Artificial Sequence
  Description of Artificial Sequence: Synthetic oligonucleotide
uacucucucauuaaaucug

SEQ ID NO: 31653 - RNA, 19 nt, Artificial Sequence
  Description of Artificial Sequence: Synthetic oligonucleotide
uauuacagguuugugacug

SEQ ID NO: 31654 - RNA, 19 nt, Artificial Sequence
  Description of Artificial Sequence: Synthetic oligonucleotide
aacauaaauggucuuuaaa

SEQ ID NO: 31655 - RNA, 19 nt, Artificial Sequence
  Description of Artificial Sequence: Synthetic oligonucleotide
guagggaagacucuuggag

SEQ ID NO: 31656 - RNA, 19 nt, Artificial Sequence
  Description of Artificial Sequence: Synthetic oligonucleotide
aaugcuauggacaccucag

SEQ ID NO: 31657 - RNA, 19 nt, Artificial Sequence
  Description of Artificial Sequence: Synthetic oligonucleotide
gauucaaucuauugauuac

SEQ ID NO: 31658 - RNA, 19 nt, Artificial Sequence
  Description of Artificial Sequence: Synthetic oligonucleotide
acaacacacacacacauaa

SEQ ID NO: 31659 - RNA, 19 nt, Artificial Sequence
  Description of Artificial Sequence: Synthetic oligonucleotide
aacagauagcuccuuaaaa

SEQ ID NO: 31660 - RNA, 19 nt, Artificial Sequence
  Description of Artificial Sequence: Synthetic oligonucleotide
agccuaauuauucacccag

SEQ ID NO: 31661 - RNA, 19 nt, Artificial Sequence
  Description of Artificial Sequence: Synthetic oligonucleotide
uaaaacauacucaccuaga

SEQ ID NO: 31662 - RNA, 19 nt, Artificial Sequence
  Description of Artificial Sequence: Synthetic oligonucleotide
uuccgaaggucuaagacac

SEQ ID NO: 31663 - RNA, 19 nt, Artificial Sequence
  Description of Artificial Sequence: Synthetic oligonucleotide
augaagaaccagcuuaaag

SEQ ID NO: 31664 - RNA, 19 nt, Artificial Sequence
  Description of Artificial Sequence: Synthetic oligonucleotide
aauagaccaaagaauuaag

SEQ ID NO: 31665 - RNA, 19 nt, Artificial Sequence
  Description of Artificial Sequence: Synthetic oligonucleotide
uggaaucuggcuaaauuac

SEQ ID NO: 31666 - RNA, 19 nt, Artificial Sequence
  Description of Artificial Sequence: Synthetic oligonucleotide
uaguagggaagacucuugg

SEQ ID NO: 31667 - RNA, 19 nt, Artificial Sequence
  Description of Artificial Sequence: Synthetic oligonucleotide
ugaauaauauuaccugauc

SEQ ID NO: 31668 - RNA, 19 nt, Artificial Sequence
  Description of Artificial Sequence: Synthetic oligonucleotide
aguaacgcuauuuccgaag

SEQ ID NO: 31669 - RNA, 19 nt, Artificial Sequence
  Description of Artificial Sequence: Synthetic oligonucleotide
  modified_base (8)..(8): a, c, u, g, unknown or other
uagucuunuggcuauguac

SEQ ID NO: 31670 - RNA, 19 nt, Artificial Sequence
  Description of Artificial Sequence: Synthetic oligonucleotide
auucuaucacaacuaagug

SEQ ID NO: 31671 - RNA, 19 nt, Artificial Sequence
  Description of Artificial Sequence: Synthetic oligonucleotide
ucuguacaaaccaccuagg

SEQ ID NO: 31672 - RNA, 19 nt, Artificial Sequence
  Description of Artificial Sequence: Synthetic oligonucleotide
ugugaacuaaagcaccugu

SEQ ID NO: 31673 - RNA, 19 nt, Artificial Sequence
  Description of Artificial Sequence: Synthetic oligonucleotide
uuugaaucagcugggaaga

SEQ ID NO: 31674 - RNA, 19 nt, Artificial Sequence
  Description of Artificial Sequence: Synthetic oligonucleotide
ucucccuaaauccucaguc

SEQ ID NO: 31675 - RNA, 19 nt, Artificial Sequence
  Description of Artificial Sequence: Synthetic oligonucleotide
aagguuuuauauauguaca

SEQ ID NO: 31676 - RNA, 19 nt, Artificial Sequence
  Description of Artificial Sequence: Synthetic oligonucleotide
ucaccuagaggauaacuca

SEQ ID NO: 31677 - RNA, 19 nt, Artificial Sequence
  Description of Artificial Sequence: Synthetic oligonucleotide
aguuuaggcauacucaaaa

SEQ ID NO: 31678 - RNA, 19 nt, Artificial Sequence
  Description of Artificial Sequence: Synthetic oligonucleotide
uguacaaaccaccuaggua

SEQ ID NO: 31679 - RNA, 19 nt, Artificial Sequence
  Description of Artificial Sequence: Synthetic oligonucleotide
caugugauucaaucuauug

SEQ ID NO: 31680 - RNA, 19 nt, Artificial Sequence
  Description of Artificial Sequence: Synthetic oligonucleotide
guaacgcuauuuccgaagg

SEQ ID NO: 31681 - RNA, 19 nt, Artificial Sequence
  Description of Artificial Sequence: Synthetic oligonucleotide
ggaacuaaagaaaggaugc

SEQ ID NO: 31682 - RNA, 19 nt, Artificial Sequence
  Description of Artificial Sequence: Synthetic oligonucleotide
acgauguugguccacggag

SEQ ID NO: 31683 - RNA, 19 nt, Artificial Sequence
  Description of Artificial Sequence: Synthetic oligonucleotide
  modified_base (7)..(7): a, c, u, g, unknown or other
agucuunuggcuauguaca

SEQ ID NO: 31684 - RNA, 19 nt, Artificial Sequence
  Description of Artificial Sequence: Synthetic oligonucleotide
acaaaugccaucccucucu

SEQ ID NO: 31685 - RNA, 19 nt, Artificial Sequence
  Description of Artificial Sequence: Synthetic oligonucleotide
ucuaagacacaaacugaac

SEQ ID NO: 31686 - RNA, 19 nt, Artificial Sequence
  Description of Artificial Sequence: Synthetic oligonucleotide
uuuaagguuacuggggaac

SEQ ID NO: 31687 - RNA, 19 nt, Artificial Sequence
  Description of Artificial Sequence: Synthetic oligonucleotide
aagucuuagcucaugugag

SEQ ID NO: 31688 - RNA, 19 nt, Artificial Sequence
  Description of Artificial Sequence: Synthetic oligonucleotide
cauuuagucaaaagaacca

SEQ ID NO: 31689 - RNA, 19 nt, Artificial Sequence
  Description of Artificial Sequence: Synthetic oligonucleotide
uucauagucgguccauggc

SEQ ID NO: 31690 - RNA, 19 nt, Artificial Sequence
  Description of Artificial Sequence: Synthetic oligonucleotide
uccuuacacaaucaucaug

SEQ ID NO: 31691 - RNA, 19 nt, Artificial Sequence
  Description of Artificial Sequence: Synthetic oligonucleotide
uuauccuuuagcugauuac

SEQ ID NO: 31692 - RNA, 19 nt, Artificial Sequence
  Description of Artificial Sequence: Synthetic oligonucleotide
cauuguagauuuccuacag

SEQ ID NO: 31693 - RNA, 19 nt, Artificial Sequence
  Description of Artificial Sequence: Synthetic oligonucleotide
ugugagaaauccucuaaau

SEQ ID NO: 31694 - RNA, 19 nt, Artificial Sequence
  Description of Artificial Sequence: Synthetic oligonucleotide
ggaagaaugccaaugacug

SEQ ID NO: 31695 - RNA, 19 nt, Artificial Sequence
  Description of Artificial Sequence: Synthetic oligonucleotide
agcagugagcucuaaauau

SEQ ID NO: 31696 - RNA, 19 nt, Artificial Sequence
  Description of Artificial Sequence: Synthetic oligonucleotide
acuauggcagcuguauuac

SEQ ID NO: 31697 - RNA, 19 nt, Artificial Sequence
  Description of Artificial Sequence: Synthetic oligonucleotide
ucauuaaaucugauuugac

SEQ ID NO: 31698 - RNA, 19 nt, Artificial Sequence
  Description of Artificial Sequence: Synthetic oligonucleotide
uacacauucauagucgguc

SEQ ID NO: 31699 - RNA, 19 nt, Artificial Sequence
  Description of Artificial Sequence: Synthetic oligonucleotide
ugauuacaugcuauuauuu

SEQ ID NO: 31700 - RNA, 19 nt, Artificial Sequence
  Description of Artificial Sequence: Synthetic oligonucleotide
cuacauagugacaauguca

SEQ ID NO: 31701 - RNA, 19 nt, Artificial Sequence
  Description of Artificial Sequence: Synthetic oligonucleotide
agcuuaaagauggacaccu

SEQ ID NO: 31702 - RNA, 19 nt, Artificial Sequence
  Description of Artificial Sequence: Synthetic oligonucleotide
agaagcuaauccuuaucca

SEQ ID NO: 31703 - RNA, 19 nt, Artificial Sequence
  Description of Artificial Sequence: Synthetic oligonucleotide
ucagucaucgcuacucaaa

SEQ ID NO: 31704 - RNA, 19 nt, Artificial Sequence
  Description of Artificial Sequence: Synthetic oligonucleotide
ccuacgcucaugaagaacc

SEQ ID NO: 31705 - RNA, 19 nt, Artificial Sequence
  Description of Artificial Sequence: Synthetic oligonucleotide
ugggagcacauuuauaaau

SEQ ID NO: 31706 - RNA, 19 nt, Artificial Sequence
  Description of Artificial Sequence: Synthetic oligonucleotide
auucaaucuauugauuacu

SEQ ID NO: 31707 - RNA, 19 nt, Artificial Sequence
  Description of Artificial Sequence: Synthetic oligonucleotide
auuauuugugaugguaugu

SEQ ID NO: 31708 - RNA, 19 nt, Artificial Sequence
  Description of Artificial Sequence: Synthetic oligonucleotide
uucaugugauucaaucuau

SEQ ID NO: 31709 - RNA, 19 nt, Artificial Sequence
  Description of Artificial Sequence: Synthetic oligonucleotide
aggauaacucaugaaaaca

SEQ ID NO: 31710 - RNA, 19 nt, Artificial Sequence
  Description of Artificial Sequence: Synthetic oligonucleotide
uacuauggcagcuguauua

SEQ ID NO: 31711 - RNA, 19 nt, Artificial Sequence
  Description of Artificial Sequence: Synthetic oligonucleotide
ugcucuggcggagacacgg

SEQ ID NO: 31712 - RNA, 19 nt, Artificial Sequence
  Description of Artificial Sequence: Synthetic oligonucleotide
uucaaucuauugauuacuu

SEQ ID NO: 31713 - RNA, 19 nt, Artificial Sequence
  Description of Artificial Sequence: Synthetic oligonucleotide
uaucacaacuaagugacua

SEQ ID NO: 31714 - RNA, 19 nt, Artificial Sequence
  Description of Artificial Sequence: Synthetic oligonucleotide
aauaaucccuucauuuuaa

SEQ ID NO: 31715 - RNA, 19 nt, Artificial Sequence
  Description of Artificial Sequence: Synthetic oligonucleotide
agagcaagacagcucuguc

SEQ ID NO: 31716 - RNA, 19 nt, Artificial Sequence
  Description of Artificial Sequence: Synthetic oligonucleotide
gacaaaucaccaugaugug

SEQ ID NO: 31717 - RNA, 19 nt, Artificial Sequence
  Description of Artificial Sequence: Synthetic oligonucleotide
aguccuacgcucaugaaga

SEQ ID NO: 31718 - RNA, 19 nt, Artificial Sequence
  Description of Artificial Sequence: Synthetic oligonucleotide
caacuggacuccaugaauc

SEQ ID NO: 31719 - RNA, 19 nt, Artificial Sequence
  Description of Artificial Sequence: Synthetic oligonucleotide
aaagcacuaucagcaauca

SEQ ID NO: 31720 - RNA, 19 nt, Artificial Sequence
  Description of Artificial Sequence: Synthetic oligonucleotide
aaccaccuagguaucaaag

SEQ ID NO: 31721 - RNA, 19 nt, Artificial Sequence
  Description of Artificial Sequence: Synthetic oligonucleotide
ucgaagcaagccuuuaaaa

SEQ ID NO: 31722 - RNA, 19 nt, Artificial Sequence
  Description of Artificial Sequence: Synthetic oligonucleotide
auuauuccacuuaccacuc

SEQ ID NO: 31723 - RNA, 19 nt, Artificial Sequence
  Description of Artificial Sequence: Synthetic oligonucleotide
agcaagacaauaucauaaa

SEQ ID NO: 31724 - RNA, 19 nt, Artificial Sequence
  Description of Artificial Sequence: Synthetic oligonucleotide
caguaccacucuuaacucg

SEQ ID NO: 31725 - RNA, 19 nt, Artificial Sequence
  Description of Artificial Sequence: Synthetic oligonucleotide
caggguuagauucagugca

SEQ ID NO: 31726 - RNA, 19 nt, Artificial Sequence
  Description of Artificial Sequence: Synthetic oligonucleotide
caguccuacgcucaugaag

SEQ ID NO: 31727 - RNA, 19 nt, Artificial Sequence
  Description of Artificial Sequence: Synthetic oligonucleotide
ggacuauagcaguaugugg

SEQ ID NO: 31728 - RNA, 19 nt, Artificial Sequence
  Description of Artificial Sequence: Synthetic oligonucleotide
gcagcuuagaucauguugc

SEQ ID NO: 31729 - RNA, 19 nt, Artificial Sequence
  Description of Artificial Sequence: Synthetic oligonucleotide
aagagcaagacagcucugu

SEQ ID NO: 31730 - RNA, 19 nt, Artificial Sequence
  Description of Artificial Sequence: Synthetic oligonucleotide
gaaugcuauggacaccuca

SEQ ID NO: 31731 - RNA, 19 nt, Artificial Sequence
  Description of Artificial Sequence: Synthetic oligonucleotide
ucccgugaucaccugacug

SEQ ID NO: 31732 - RNA, 19 nt, Artificial Sequence
  Description of Artificial Sequence: Synthetic oligonucleotide
aauuauucacccagcucca

SEQ ID NO: 31733 - RNA, 19 nt, Artificial Sequence
  Description of Artificial Sequence: Synthetic oligonucleotide
  modified_base (5)..(5): a, c, u, g, unknown or other
ucuunuggcuauguacaca

SEQ ID NO: 31734 - RNA, 19 nt, Artificial Sequence
  Description of Artificial Sequence: Synthetic oligonucleotide
uauuuccgaaggucuaaga

SEQ ID NO: 31735 - RNA, 19 nt, Artificial Sequence
  Description of Artificial Sequence: Synthetic oligonucleotide
ucauguugcuugaccaagu

SEQ ID NO: 31736 - RNA, 19 nt, Artificial Sequence
  Description of Artificial Sequence: Synthetic oligonucleotide
aaagcaccugucugugugu

SEQ ID NO: 31737 - RNA, 19 nt, Artificial Sequence
  Description of Artificial Sequence: Synthetic oligonucleotide
gacccaaaggauuugccaa

SEQ ID NO: 31738 - RNA, 19 nt, Artificial Sequence
  Description of Artificial Sequence: Synthetic oligonucleotide
caccugacugcucuggcgg

SEQ ID NO: 31739 - RNA, 19 nt, Artificial Sequence
  Description of Artificial Sequence: Synthetic oligonucleotide
uuaagguuacuggggaacu

SEQ ID NO: 31740 - RNA, 19 nt, Artificial Sequence
  Description of Artificial Sequence: Synthetic oligonucleotide
agaggauaacucaugaaaa

SEQ ID NO: 31741 - RNA, 19 nt, Artificial Sequence
  Description of Artificial Sequence: Synthetic oligonucleotide
uugaccaagugcagccuug

SEQ ID NO: 31742 - RNA, 19 nt, Artificial Sequence
  Description of Artificial Sequence: Synthetic oligonucleotide
ucuuaacucgugggaaucc

SEQ ID NO: 31743 - RNA, 19 nt, Artificial Sequence
  Description of Artificial Sequence: Synthetic oligonucleotide
gacauucuaucacaacuaa

SEQ ID NO: 31744 - RNA, 19 nt, Artificial Sequence
  Description of Artificial Sequence: Synthetic oligonucleotide
ucaaucuauugauuacuuu

SEQ ID NO: 31745 - RNA, 19 nt, Artificial Sequence
  Description of Artificial Sequence: Synthetic oligonucleotide
ugugccaguaccacucuua

SEQ ID NO: 31746 - RNA, 19 nt, Artificial Sequence
  Description of Artificial Sequence: Synthetic oligonucleotide
cuaguaacgcuauuuccga

SEQ ID NO: 31747 - RNA, 19 nt, Artificial Sequence
  Description of Artificial Sequence: Synthetic oligonucleotide
gagcucuaaauaucucaug

SEQ ID NO: 31748 - RNA, 19 nt, Artificial Sequence
  Description of Artificial Sequence: Synthetic oligonucleotide
ugugaugguaugugcucca

SEQ ID NO: 31749 - RNA, 19 nt, Artificial Sequence
  Description of Artificial Sequence: Synthetic oligonucleotide
gaucaccugacugcucugg

SEQ ID NO: 31750 - RNA, 19 nt, Artificial Sequence
  Description of Artificial Sequence: Synthetic oligonucleotide
auauucacuggagauagua

SEQ ID NO: 31751 - RNA, 19 nt, Artificial Sequence
  Description of Artificial Sequence: Synthetic oligonucleotide
cuauggacaccucagaacu

SEQ ID NO: 31752 - RNA, 19 nt, Artificial Sequence
  Description of Artificial Sequence: Synthetic oligonucleotide
ucucccgugaucaccugac

SEQ ID NO: 31753 - RNA, 19 nt, Artificial Sequence
  Description of Artificial Sequence: Synthetic oligonucleotide
ccacuuaccacuccuaaag

SEQ ID NO: 31754 - RNA, 19 nt, Artificial Sequence
  Description of Artificial Sequence: Synthetic oligonucleotide
aguagggaagacucuugga

SEQ ID NO: 31755 - RNA, 19 nt, Artificial Sequence
  Description of Artificial Sequence: Synthetic oligonucleotide
cugugaaacauggucuccc

SEQ ID NO: 31756 - RNA, 19 nt, Artificial Sequence
  Description of Artificial Sequence: Synthetic oligonucleotide
agcuaauccuuauccagaa

SEQ ID NO: 31757 - RNA, 19 nt, Artificial Sequence
  Description of Artificial Sequence: Synthetic oligonucleotide
ucgugcuguuuucacuaag

SEQ ID NO: 31758 - RNA, 19 nt, Artificial Sequence
  Description of Artificial Sequence: Synthetic oligonucleotide
gaaugccaaugacuguaug

SEQ ID NO: 31759 - RNA, 19 nt, Artificial Sequence
  Description of Artificial Sequence: Synthetic oligonucleotide
acgugcaaugcacuuacaa

SEQ ID NO: 31760 - RNA, 19 nt, Artificial Sequence
  Description of Artificial Sequence: Synthetic oligonucleotide
acauucuaucacaacuaag

SEQ ID NO: 31761 - RNA, 19 nt, Artificial Sequence
  Description of Artificial Sequence: Synthetic oligonucleotide
  modified_base (4)..(4): a, c, u, g, unknown or other
cuunuggcuauguacacau

SEQ ID NO: 31762 - RNA, 19 nt, Artificial Sequence
  Description of Artificial Sequence: Synthetic oligonucleotide
ucaugugauucaaucuauu

SEQ ID NO: 31763 - RNA, 19 nt, Artificial Sequence
  Description of Artificial Sequence: Synthetic oligonucleotide
gguagcaagcauuuugcca

SEQ ID NO: 31764 - RNA, 19 nt, Artificial Sequence
  Description of Artificial Sequence: Synthetic oligonucleotide
uccucagucaucgcuacuc

SEQ ID NO: 31765 - RNA, 19 nt, Artificial Sequence
  Description of Artificial Sequence: Synthetic oligonucleotide
guaugugggucagggauag

SEQ ID NO: 31766 - RNA, 19 nt, Artificial Sequence
  Description of Artificial Sequence: Synthetic oligonucleotide
ucccaugacuaaacagucu

SEQ ID NO: 31767 - RNA, 19 nt, Artificial Sequence
  Description of Artificial Sequence: Synthetic oligonucleotide
ugcgucuggucaaacuggu

SEQ ID NO: 31768 - RNA, 19 nt, Artificial Sequence
  Description of Artificial Sequence: Synthetic oligonucleotide
cacggugcagugucugugg

SEQ ID NO: 31769 - RNA, 19 nt, Artificial Sequence
  Description of Artificial Sequence: Synthetic oligonucleotide
gaucauguugcuugaccaa

SEQ ID NO: 31770 - RNA, 19 nt, Artificial Sequence
  Description of Artificial Sequence: Synthetic oligonucleotide
cuuagaucauguugcuuga

SEQ ID NO: 31771 - RNA, 19 nt, Artificial Sequence
  Description of Artificial Sequence: Synthetic oligonucleotide
cuucuguauuuaaggauga

SEQ ID NO: 31772 - RNA, 19 nt, Artificial Sequence
  Description of Artificial Sequence: Synthetic oligonucleotide
  modified_base (6)..(6): a, c, u, g, unknown or other
gucuunuggcuauguacac

SEQ ID NO: 31773 - RNA, 19 nt, Artificial Sequence
  Description of Artificial Sequence: Synthetic oligonucleotide
cuggagauaguaagaguga

SEQ ID NO: 31774 - RNA, 19 nt, Artificial Sequence
  Description of Artificial Sequence: Synthetic oligonucleotide
uuccaacuaguaacgcuau

SEQ ID NO: 31775 - RNA, 19 nt, Artificial Sequence
  Description of Artificial Sequence: Synthetic oligonucleotide
  modified_base (9)..(9): a, c, u, g, unknown or other
auagucuunuggcuaugua

SEQ ID NO: 31776 - RNA, 19 nt, Artificial Sequence
  Description of Artificial Sequence: Synthetic oligonucleotide
aucaaagguuuuauauaug

SEQ ID NO: 31777 - RNA, 19 nt, Artificial Sequence
  Description of Artificial Sequence: Synthetic oligonucleotide
caaagucgggagagaaaac

SEQ ID NO: 31778 - RNA, 19 nt, Artificial Sequence
  Description of Artificial Sequence: Synthetic oligonucleotide
uucccguaugcaaugccua

SEQ ID NO: 31779 - RNA, 19 nt, Artificial Sequence
  Description of Artificial Sequence: Synthetic oligonucleotide
acugugaacuaaagcaccu

SEQ ID NO: 31780 - RNA, 19 nt, Artificial Sequence
  Description of Artificial Sequence: Synthetic oligonucleotide
acaacaacacacacacaca

SEQ ID NO: 31781 - RNA, 19 nt, Artificial Sequence
  Description of Artificial Sequence: Synthetic oligonucleotide
agacauucuaucacaacua

SEQ ID NO: 31782 - RNA, 19 nt, Artificial Sequence
  Description of Artificial Sequence: Synthetic oligonucleotide
cugagaugguuuuccuaug

SEQ ID NO: 31783 - RNA, 19 nt, Artificial Sequence
  Description of Artificial Sequence: Synthetic oligonucleotide
  modified_base (10)..(10): a, c, u, g, unknown or other
gauagucuunuggcuaugu

SEQ ID NO: 31784 - RNA, 19 nt, Artificial Sequence
  Description of Artificial Sequence: Synthetic oligonucleotide
auaagaaccccaagacaga

SEQ ID NO: 31785 - RNA, 19 nt, Artificial Sequence
  Description of Artificial Sequence: Synthetic oligonucleotide
caacugcuuuguugggagg

SEQ ID NO: 31786 - RNA, 19 nt, Artificial Sequence
  Description of Artificial Sequence: Synthetic oligonucleotide
cacaguccuacgcucauga

SEQ ID NO: 31787 - RNA, 19 nt, Artificial Sequence
  Description of Artificial Sequence: Synthetic oligonucleotide
uaguaacgcuauuuccgaa

SEQ ID NO: 31788 - RNA, 19 nt, Artificial Sequence
  Description of Artificial Sequence: Synthetic oligonucleotide
ugcuauacucuaagaucua

SEQ ID NO: 31789 - RNA, 19 nt, Artificial Sequence
  Description of Artificial Sequence: Synthetic oligonucleotide
guguuauaugcuguaaucu

SEQ ID NO: 31790 - RNA, 19 nt, Artificial Sequence
  Description of Artificial Sequence: Synthetic oligonucleotide
accuagguaucaaagguuu

SEQ ID NO: 31791 - RNA, 19 nt, Artificial Sequence
  Description of Artificial Sequence: Synthetic oligonucleotide
cagcauuguggcacgucag

SEQ ID NO: 31792 - RNA, 19 nt, Artificial Sequence
  Description of Artificial Sequence: Synthetic oligonucleotide
gugggacuauagcaguaug

SEQ ID NO: 31793 - RNA, 19 nt, Artificial Sequence
  Description of Artificial Sequence: Synthetic oligonucleotide
ugaucaccugacugcucug

SEQ ID NO: 31794 - RNA, 19 nt, Artificial Sequence
  Description of Artificial Sequence: Synthetic oligonucleotide
aacaacacacacacacaua

SEQ ID NO: 31795 - RNA, 19 nt, Artificial Sequence
  Description of Artificial Sequence: Synthetic oligonucleotide
cucgaagcaagccuuuaaa

SEQ ID NO: 31796 - RNA, 19 nt, Artificial Sequence
  Description of Artificial Sequence: Synthetic oligonucleotide
cccgugaucaccugacugc

SEQ ID NO: 31797 - RNA, 19 nt, Artificial Sequence
  Description of Artificial Sequence: Synthetic oligonucleotide
cucuuaacucgugggaauc

SEQ ID NO: 31798 - RNA, 19 nt, Artificial Sequence
  Description of Artificial Sequence: Synthetic oligonucleotide
cacccagugguaagguaug

SEQ ID NO: 31799 - RNA, 19 nt, Artificial Sequence
  Description of Artificial Sequence: Synthetic oligonucleotide
ucccguaugcaaugccuaa

SEQ ID NO: 31800 - RNA, 19 nt, Artificial Sequence
  Description of Artificial Sequence: Synthetic oligonucleotide
acgcuauuuccgaaggucu

SEQ ID NO: 31801 - RNA, 19 nt, Artificial Sequence
  Description of Artificial Sequence: Synthetic oligonucleotide
gugaucaccugacugcucu

SEQ ID NO: 31802 - RNA, 19 nt, Artificial Sequence
  Description of Artificial Sequence: Synthetic oligonucleotide
gccuugacgccacagacuc

SEQ ID NO: 31803 - RNA, 19 nt, Artificial Sequence
  Description of Artificial Sequence: Synthetic oligonucleotide
gccaacauaauaucaaaau

SEQ ID NO: 31804 - RNA, 19 nt, Artificial Sequence
  Description of Artificial Sequence: Synthetic oligonucleotide
agugggacuauagcaguau

SEQ ID NO: 31805 - RNA, 19 nt, Artificial Sequence
  Description of Artificial Sequence: Synthetic oligonucleotide
guaggcuggcugcuagccc

SEQ ID NO: 31806 - RNA, 19 nt, Artificial Sequence
  Description of Artificial Sequence: Synthetic oligonucleotide
ccaacauaauaucaaaaua

SEQ ID NO: 31807 - RNA, 19 nt, Artificial Sequence
  Description of Artificial Sequence: Synthetic oligonucleotide
uccuacgcucaugaagaac

SEQ ID NO: 31808 - RNA, 19 nt, Artificial Sequence
  Description of Artificial Sequence: Synthetic oligonucleotide
agccaacauaauaucaaaa

SEQ ID NO: 31809 - RNA, 19 nt, Artificial Sequence
  Description of Artificial Sequence: Synthetic oligonucleotide
aucuuauccccugcaagaa

SEQ ID NO: 31810 - RNA, 19 nt, Artificial Sequence
  Description of Artificial Sequence: Synthetic oligonucleotide
gggagauaaaagcaaucaa

SEQ ID NO: 31811 - RNA, 19 nt, Artificial Sequence
  Description of Artificial Sequence: Synthetic oligonucleotide
cuuagcucaugugagaaau

SEQ ID NO: 31812 - RNA, 19 nt, Artificial Sequence
  Description of Artificial Sequence: Synthetic oligonucleotide
cagaguaagcucucagaaa

SEQ ID NO: 31813 - RNA, 19 nt, Artificial Sequence
  Description of Artificial Sequence: Synthetic oligonucleotide
cagcaaucaccucugacua

SEQ ID NO: 31814 - RNA, 19 nt, Artificial Sequence
  Description of Artificial Sequence: Synthetic oligonucleotide
ccguaugcaaugccuaagc

SEQ ID NO: 31815 - RNA, 19 nt, Artificial Sequence
  Description of Artificial Sequence: Synthetic oligonucleotide
caacaacacacacacacau

SEQ ID NO: 31816 - RNA, 19 nt, Artificial Sequence
  Description of Artificial Sequence: Synthetic oligonucleotide
cuuugagaagcuaauccuu

SEQ ID NO: 31817 - RNA, 19 nt, Artificial Sequence
  Description of Artificial Sequence: Synthetic oligonucleotide
ugccaguaccacucuuaac

SEQ ID NO: 31818 - RNA, 19 nt, Artificial Sequence
  Description of Artificial Sequence: Synthetic oligonucleotide
cagucaucgcuacucaaaa

SEQ ID NO: 31819 - RNA, 19 nt, Artificial Sequence
  Description of Artificial Sequence: Synthetic oligonucleotide
gugaauaauauuaccugau

SEQ ID NO: 31820 - RNA, 19 nt, Artificial Sequence
  Description of Artificial Sequence: Synthetic oligonucleotide
agcugauuacaugcuauua

SEQ ID NO: 31821 - RNA, 19 nt, Artificial Sequence
  Description of Artificial Sequence: Synthetic oligonucleotide
gguaagguaugcucacaga

SEQ ID NO: 31822 - RNA, 19 nt, Artificial Sequence
  Description of Artificial Sequence: Synthetic oligonucleotide
caggcuacggugacaguga

SEQ ID NO: 31823 - RNA, 19 nt, Artificial Sequence
  Description of Artificial Sequence: Synthetic oligonucleotide
  modified_base (3)..(3): a, c, u, g, unknown or other
uunuggcuauguacacauu

SEQ ID NO: 31824 - RNA, 19 nt, Artificial Sequence
  Description of Artificial Sequence: Synthetic oligonucleotide
uccaacuaguaacgcuauu

SEQ ID NO: 31825 - RNA, 19 nt, Artificial Sequence
  Description of Artificial Sequence: Synthetic oligonucleotide
acacggugcagugucugug

SEQ ID NO: 31826 - RNA, 19 nt, Artificial Sequence
  Description of Artificial Sequence: Synthetic oligonucleotide
ggagcacauuuauaaauua

SEQ ID NO: 31827 - RNA, 19 nt, Artificial Sequence
  Description of Artificial Sequence: Synthetic oligonucleotide
agcaaucaccucugacuau

SEQ ID NO: 31828 - RNA, 19 nt, Artificial Sequence
  Description of Artificial Sequence: Synthetic oligonucleotide
ggccccguagcacaacugc

SEQ ID NO: 31829 - RNA, 19 nt, Artificial Sequence
  Description of Artificial Sequence: Synthetic oligonucleotide
cacuuaccacuccuaaaga

SEQ ID NO: 31830 - RNA, 19 nt, Artificial Sequence
  Description of Artificial Sequence: Synthetic oligonucleotide
aaauaacaggagagauuuu

SEQ ID NO: 31831 - RNA, 19 nt, Artificial Sequence
  Description of Artificial Sequence: Synthetic oligonucleotide
uccuucccguaugcaaugc

SEQ ID NO: 31832 - RNA, 19 nt, Artificial Sequence
  Description of Artificial Sequence: Synthetic oligonucleotide
accauucgugcuguuuuca

SEQ ID NO: 31833 - RNA, 19 nt, Artificial Sequence
  Description of Artificial Sequence: Synthetic oligonucleotide
gagcacauuuauaaauuau

SEQ ID NO: 31834 - RNA, 19 nt, Artificial Sequence
  Description of Artificial Sequence: Synthetic oligonucleotide
uggccccguagcacaacug

SEQ ID NO: 31835 - RNA, 19 nt, Artificial Sequence
  Description of Artificial Sequence: Synthetic oligonucleotide
cuacgcucaugaagaacca

SEQ ID NO: 31836 - RNA, 19 nt, Artificial Sequence
  Description of Artificial Sequence: Synthetic oligonucleotide
ggauuugccaaacccaaau

SEQ ID NO: 31837 - RNA, 19 nt, Artificial Sequence
  Description of Artificial Sequence: Synthetic oligonucleotide
gcaaucaccucugacuauc

SEQ ID NO: 31838 - RNA, 19 nt, Artificial Sequence
  Description of Artificial Sequence: Synthetic oligonucleotide
ugucuauuccugggagcac

SEQ ID NO: 31839 - RNA, 19 nt, Artificial Sequence
  Description of Artificial Sequence: Synthetic oligonucleotide
cuucccguaugcaaugccu

SEQ ID NO: 31840 - RNA, 19 nt, Artificial Sequence
  Description of Artificial Sequence: Synthetic oligonucleotide
gcugauuacaugcuauuau

SEQ ID NO: 31841 - RNA, 19 nt, Artificial Sequence
  Description of Artificial Sequence: Synthetic oligonucleotide
aagugggacuauagcagua

SEQ ID NO: 31842 - RNA, 19 nt, Artificial Sequence
  Description of Artificial Sequence: Synthetic oligonucleotide
gaaagggucaaagggucau

SEQ ID NO: 31843 - RNA, 19 nt, Artificial Sequence
  Description of Artificial Sequence: Synthetic oligonucleotide
agaaugcuauggacaccuc

SEQ ID NO: 31844 - RNA, 19 nt, Artificial Sequence
  Description of Artificial Sequence: Synthetic oligonucleotide
cauggcaguuauauucacu

SEQ ID NO: 31845 - RNA, 19 nt, Artificial Sequence
  Description of Artificial Sequence: Synthetic oligonucleotide
cacgauguugguccacgga

SEQ ID NO: 31846 - RNA, 19 nt, Artificial Sequence
  Description of Artificial Sequence: Synthetic oligonucleotide
cucugacuaucaggguuag

SEQ ID NO: 31847 - RNA, 19 nt, Artificial Sequence
  Description of Artificial Sequence: Synthetic oligonucleotide
uagcaguaugugggucagg

SEQ ID NO: 31848 - RNA, 19 nt, Artificial Sequence
  Description of Artificial Sequence: Synthetic oligonucleotide
gugccaguaccacucuuaa

SEQ ID NO: 31849 - RNA, 19 nt, Artificial Sequence
  Description of Artificial Sequence: Synthetic oligonucleotide
caacacacacacacauaaa

SEQ ID NO: 31850 - RNA, 19 nt, Artificial Sequence
  Description of Artificial Sequence: Synthetic oligonucleotide
gggaagaaugccaaugacu

SEQ ID NO: 31851 - RNA, 19 nt, Artificial Sequence
  Description of Artificial Sequence: Synthetic oligonucleotide
ggaagcaagacaauaucau

SEQ ID NO: 31852 - RNA, 19 nt, Artificial Sequence
  Description of Artificial Sequence: Synthetic oligonucleotide
cuggcggagacacggugca

SEQ ID NO: 31853 - RNA, 19 nt, Artificial Sequence
  Description of Artificial Sequence: Synthetic oligonucleotide
acaguccuacgcucaugaa

SEQ ID NO: 31854 - RNA, 19 nt, Artificial Sequence
  Description of Artificial Sequence: Synthetic oligonucleotide
agccuugacgccacagacu

SEQ ID NO: 31855 - RNA, 19 nt, Artificial Sequence
  Description of Artificial Sequence: Synthetic oligonucleotide
ugccugcuaguuguuuuaa

SEQ ID NO: 31856 - RNA, 19 nt, Artificial Sequence
  Description of Artificial Sequence: Synthetic oligonucleotide
cuaugcgucuggucaaacu

SEQ ID NO: 31857 - RNA, 19 nt, Artificial Sequence
  Description of Artificial Sequence: Synthetic oligonucleotide
ccauucgugcuguuuucac

SEQ ID NO: 31858 - RNA, 19 nt, Artificial Sequence
  Description of Artificial Sequence: Synthetic oligonucleotide
uccuaugcgucuggucaaa

SEQ ID NO: 31859 - RNA, 19 nt, Artificial Sequence
  Description of Artificial Sequence: Synthetic oligonucleotide
aacgugcaaugcacuuaca

SEQ ID NO: 31860 - RNA, 19 nt, Artificial Sequence
  Description of Artificial Sequence: Synthetic oligonucleotide
guaccacucuuaacucgug

SEQ ID NO: 31861 - RNA, 19 nt, Artificial Sequence
  Description of Artificial Sequence: Synthetic oligonucleotide
gucucccgugaucaccuga

SEQ ID NO: 31862 - RNA, 19 nt, Artificial Sequence
  Description of Artificial Sequence: Synthetic oligonucleotide
caacaacaacacacacaca

SEQ ID NO: 31863 - RNA, 19 nt, Artificial Sequence
  Description of Artificial Sequence: Synthetic oligonucleotide
gguuguaguagggaagacu

SEQ ID NO: 31864 - RNA, 19 nt, Artificial Sequence
  Description of Artificial Sequence: Synthetic oligonucleotide
ucgugggaauccagcuuuu

SEQ ID NO: 31865 - RNA, 19 nt, Artificial Sequence
  Description of Artificial Sequence: Synthetic oligonucleotide
aggguuagauucagugcaa

SEQ ID NO: 31866 - RNA, 19 nt, Artificial Sequence
  Description of Artificial Sequence: Synthetic oligonucleotide
ccaugaaucuucagaguaa

SEQ ID NO: 31867 - RNA, 19 nt, Artificial Sequence
  Description of Artificial Sequence: Synthetic oligonucleotide
ggcacgucagcaggcuacg

SEQ ID NO: 31868 - RNA, 19 nt, Artificial Sequence
  Description of Artificial Sequence: Synthetic oligonucleotide
ccuaauuauucacccagcu

SEQ ID NO: 31869 - RNA, 19 nt, Artificial Sequence
  Description of Artificial Sequence: Synthetic oligonucleotide
aaacugucaugggcugguu

SEQ ID NO: 31870 - RNA, 19 nt, Artificial Sequence
  Description of Artificial Sequence: Synthetic oligonucleotide
ggguuagauucagugcaac

SEQ ID NO: 31871 - RNA, 19 nt, Artificial Sequence
  Description of Artificial Sequence: Synthetic oligonucleotide
gucgggagagaaaaccacu

SEQ ID NO: 31872 - RNA, 19 nt, Artificial Sequence
  Description of Artificial Sequence: Synthetic oligonucleotide
caccuagaggauaacucau

SEQ ID NO: 31873 - RNA, 19 nt, Artificial Sequence
  Description of Artificial Sequence: Synthetic oligonucleotide
ccauggcaguuauauucac

SEQ ID NO: 31874 - RNA, 19 nt, Artificial Sequence
  Description of Artificial Sequence: Synthetic oligonucleotide
  modified_base (17)..(17): a, c, u, g, unknown or other
ggucagggauagucuunug

SEQ ID NO: 31875 - RNA, 19 nt, Artificial Sequence
  Description of Artificial Sequence: Synthetic oligonucleotide
ccaccuagguaucaaaggu

SEQ ID NO: 31876 - RNA, 19 nt, Artificial Sequence
  Description of Artificial Sequence: Synthetic oligonucleotide
gcagacaucaucacccagu

SEQ ID NO: 31877 - RNA, 19 nt, Artificial Sequence
  Description of Artificial Sequence: Synthetic oligonucleotide
caccuagguaucaaagguu

SEQ ID NO: 31878 - RNA, 19 nt, Artificial Sequence
  Description of Artificial Sequence: Synthetic oligonucleotide
gcuauuuccgaaggucuaa

SEQ ID NO: 31879 - RNA, 19 nt, Artificial Sequence
  Description of Artificial Sequence: Synthetic oligonucleotide
ggaccauucgugcuguuuu

SEQ ID NO: 31880 - RNA, 19 nt, Artificial Sequence
  Description of Artificial Sequence: Synthetic oligonucleotide
ggaaacgugcaaugcacuu

SEQ ID NO: 31881 - RNA, 19 nt, Artificial Sequence
  Description of Artificial Sequence: Synthetic oligonucleotide
cuaucacaacuaagugacu

SEQ ID NO: 31882 - RNA, 19 nt, Artificial Sequence
  Description of Artificial Sequence: Synthetic oligonucleotide
gcuaauccuuauccagaaa

SEQ ID NO: 31883 - RNA, 19 nt, Artificial Sequence
  Description of Artificial Sequence: Synthetic oligonucleotide
guacacauucauagucggu

SEQ ID NO: 31884 - RNA, 19 nt, Artificial Sequence
  Description of Artificial Sequence: Synthetic oligonucleotide
cccguaugcaaugccuaag

SEQ ID NO: 31885 - RNA, 19 nt, Artificial Sequence
  Description of Artificial Sequence: Synthetic oligonucleotide
ccucugacuaucaggguua

SEQ ID NO: 31886 - RNA, 19 nt, Artificial Sequence
  Description of Artificial Sequence: Synthetic oligonucleotide
guccuacgcucaugaagaa

SEQ ID NO: 31887 - RNA, 19 nt, Artificial Sequence
  Description of Artificial Sequence: Synthetic oligonucleotide
ggggaacuaaagaaaggau

SEQ ID NO: 31888 - RNA, 19 nt, Artificial Sequence
  Description of Artificial Sequence: Synthetic oligonucleotide
caccaugauguggaaccaa

SEQ ID NO: 31889 - RNA, 19 nt, Artificial Sequence
  Description of Artificial Sequence: Synthetic oligonucleotide
gccugcuaguuguuuuaaa

SEQ ID NO: 31890 - RNA, 19 nt, Artificial Sequence
  Description of Artificial Sequence: Synthetic oligonucleotide
gagacacggugcagugucu

SEQ ID NO: 31891 - RNA, 19 nt, Artificial Sequence
  Description of Artificial Sequence: Synthetic oligonucleotide
gcacgucagcaggcuacgg

SEQ ID NO: 31892 - RNA, 19 nt, Artificial Sequence
  Description of Artificial Sequence: Synthetic oligonucleotide
ccuaugcgucuggucaaac

SEQ ID NO: 31893 - RNA, 19 nt, Artificial Sequence
  Description of Artificial Sequence: Synthetic oligonucleotide
ccaugugauggcaguguua

SEQ ID NO: 31894 - RNA, 19 nt, Artificial Sequence
  Description of Artificial Sequence: Synthetic oligonucleotide
cuaagguagcaagcauuuu

SEQ ID NO: 31895 - RNA, 19 nt, Artificial Sequence
  Description of Artificial Sequence: Synthetic oligonucleotide
ggcuacggugacagugaga

SEQ ID NO: 31896 - RNA, 19 nt, Artificial Sequence
  Description of Artificial Sequence: Synthetic oligonucleotide
cgugaucaccugacugcuc

SEQ ID NO: 31897 - RNA, 19 nt, Artificial Sequence
  Description of Artificial Sequence: Synthetic oligonucleotide
cgaaggucuaagacacaaa

SEQ ID NO: 31898 - RNA, 19 nt, Artificial Sequence
  Description of Artificial Sequence: Synthetic oligonucleotide
cguagcacaacugcuuugu

SEQ ID NO: 31899 - RNA, 19 nt, Artificial Sequence
  Description of Artificial Sequence: Synthetic oligonucleotide
cucccgugaucaccugacu

SEQ ID NO: 31900 - RNA, 19 nt, Artificial Sequence
  Description of Artificial Sequence: Synthetic oligonucleotide
cgcuauuuccgaaggucua

SEQ ID NO: 31901 - RNA, 19 nt, Artificial Sequence
  Description of Artificial Sequence: Synthetic oligonucleotide
gccccguagcacaacugcu

SEQ ID NO: 31902 - RNA, 19 nt, Artificial Sequence
  Description of Artificial Sequence: Synthetic oligonucleotide
aucaauaauaaauuuagcc

SEQ ID NO: 31903 - RNA, 19 nt, Artificial Sequence
  Description of Artificial Sequence: Synthetic oligonucleotide
aacaguaucuuugugaccc

SEQ ID NO: 31904 - RNA, 19 nt, Artificial Sequence
  Description of Artificial Sequence: Synthetic oligonucleotide
aaauggaucgacuccagcc

SEQ ID NO: 31905 - RNA, 19 nt, Artificial Sequence
  Description of Artificial Sequence: Synthetic oligonucleotide
ugauuugagaauuaaauga

SEQ ID NO: 31906 - RNA, 19 nt, Artificial Sequence
  Description of Artificial Sequence: Synthetic oligonucleotide
aaauuaaggaagcugcauc

SEQ ID NO: 31907 - RNA, 19 nt, Artificial Sequence
  Description of Artificial Sequence: Synthetic oligonucleotide
uauaagauaaauuguaacu

SEQ ID NO: 31908 - RNA, 19 nt, Artificial Sequence
  Description of Artificial Sequence: Synthetic oligonucleotide
agagucaacaccuaaggac

SEQ ID NO: 31909 - RNA, 19 nt, Artificial Sequence
  Description of Artificial Sequence: Synthetic oligonucleotide
aauagaaccaggaugaugu

SEQ ID NO: 31910 - RNA, 19 nt, Artificial Sequence
  Description of Artificial Sequence: Synthetic oligonucleotide
ucuucaaucagucauguaa

SEQ ID NO: 31911 - RNA, 19 nt, Artificial Sequence
  Description of Artificial Sequence: Synthetic oligonucleotide
auaagaauacauccaaccg

SEQ ID NO: 31912 - RNA, 19 nt, Artificial Sequence
  Description of Artificial Sequence: Synthetic oligonucleotide
aauuuaauacuuaguaagg

SEQ ID NO: 31913 - RNA, 19 nt, Artificial Sequence
  Description of Artificial Sequence: Synthetic oligonucleotide
ucuaaugauaccaucacuc

SEQ ID NO: 31914 - RNA, 19 nt, Artificial Sequence
  Description of Artificial Sequence: Synthetic oligonucleotide
uuuacaauaugccaccucu

SEQ ID NO: 31915 - RNA, 19 nt, Artificial Sequence
  Description of Artificial Sequence: Synthetic oligonucleotide
aaaaucuaccccauuacac

SEQ ID NO: 31916 - RNA, 19 nt, Artificial Sequence
  Description of Artificial Sequence: Synthetic oligonucleotide
auuggauguauuaacaagc

SEQ ID NO: 31917 - RNA, 19 nt, Artificial Sequence
  Description of Artificial Sequence: Synthetic oligonucleotide
uguauuaacaagcagugua

SEQ ID NO: 31918 - RNA, 19 nt, Artificial Sequence
  Description of Artificial Sequence: Synthetic oligonucleotide
ucuuacauuuggaagagug

SEQ ID NO: 31919 - RNA, 19 nt, Artificial Sequence
  Description of Artificial Sequence: Synthetic oligonucleotide
uugauugugguuuuaaugu

SEQ ID NO: 31920 - RNA, 19 nt, Artificial Sequence
  Description of Artificial Sequence: Synthetic oligonucleotide
aauuaaggaagcugcauca

SEQ ID NO: 31921 - RNA, 19 nt, Artificial Sequence
  Description of Artificial Sequence: Synthetic oligonucleotide
acuaacacuccacugauag

SEQ ID NO: 31922 - RNA, 19 nt, Artificial Sequence
  Description of Artificial Sequence: Synthetic oligonucleotide
uuuaaagucugaucuaacc

SEQ ID NO: 31923 - RNA, 19 nt, Artificial Sequence
  Description of Artificial Sequence: Synthetic oligonucleotide
uauaaaaguggcaucgggc

SEQ ID NO: 31924 - RNA, 19 nt, Artificial Sequence
  Description of Artificial Sequence: Synthetic oligonucleotide
aguaauuaagguaaggaag

SEQ ID NO: 31925 - RNA, 19 nt, Artificial Sequence
  Description of Artificial Sequence: Synthetic oligonucleotide
guaauuaagguaaggaagg

SEQ ID NO: 31926 - RNA, 19 nt, Artificial Sequence
  Description of Artificial Sequence: Synthetic oligonucleotide
uaagaauacauccaaccgu

SEQ ID NO: 31927 - RNA, 19 nt, Artificial Sequence
  Description of Artificial Sequence: Synthetic oligonucleotide
auugcucgaaauuuuaaag

SEQ ID NO: 31928 - RNA, 19 nt, Artificial Sequence
  Description of Artificial Sequence: Synthetic oligonucleotide
ugaugguccaccuucauug

SEQ ID NO: 31929 - RNA, 19 nt, Artificial Sequence
  Description of Artificial Sequence: Synthetic oligonucleotide
uugcaauagaaccaggaug

SEQ ID NO: 31930 - RNA, 19 nt, Artificial Sequence
  Description of Artificial Sequence: Synthetic oligonucleotide
auuguuugggcacauucac

SEQ ID NO: 31931 - RNA, 19 nt, Artificial Sequence
  Description of Artificial Sequence: Synthetic oligonucleotide
aaacacuaauuucacacga

SEQ ID NO: 31932 - RNA, 19 nt, Artificial Sequence
  Description of Artificial Sequence: Synthetic oligonucleotide
uccuaauauuuguauaggg

SEQ ID NO: 31933 - RNA, 19 nt, Artificial Sequence
  Description of Artificial Sequence: Synthetic oligonucleotide
guaauuuauaugauggucc

SEQ ID NO: 31934 - RNA, 19 nt, Artificial Sequence
  Description of Artificial Sequence: Synthetic oligonucleotide
uuaacaagcaguguauugc

SEQ ID NO: 31935 - RNA, 19 nt, Artificial Sequence
  Description of Artificial Sequence: Synthetic oligonucleotide
ugauaagugucccaagagc

SEQ ID NO: 31936 - RNA, 19 nt, Artificial Sequence
  Description of Artificial Sequence: Synthetic oligonucleotide
uuacugacaagcauugagc

SEQ ID NO: 31937 - RNA, 19 nt, Artificial Sequence
  Description of Artificial Sequence: Synthetic oligonucleotide
accauauagacugagcugg

SEQ ID NO: 31938 - RNA, 19 nt, Artificial Sequence
  Description of Artificial Sequence: Synthetic oligonucleotide
aucuuuacugcccauacug

SEQ ID NO: 31939 - RNA, 19 nt, Artificial Sequence
  Description of Artificial Sequence: Synthetic oligonucleotide
aacccacaaucauugaagg

SEQ ID NO: 31940 - RNA, 19 nt, Artificial Sequence
  Description of Artificial Sequence: Synthetic oligonucleotide
auauaaaaguggcaucggg

SEQ ID NO: 31941 - RNA, 19 nt, Artificial Sequence
  Description of Artificial Sequence: Synthetic oligonucleotide
uacuuaguaagguauauau

SEQ ID NO: 31942 - RNA, 19 nt, Artificial Sequence
  Description of Artificial Sequence: Synthetic oligonucleotide
acgaguaacauaaaugaac

SEQ ID NO: 31943 - RNA, 19 nt, Artificial Sequence
  Description of Artificial Sequence: Synthetic oligonucleotide
gacgaaagacuacaaacag

SEQ ID NO: 31944 - RNA, 19 nt, Artificial Sequence
  Description of Artificial Sequence: Synthetic oligonucleotide
uuugcuuggucaaagguaa

SEQ ID NO: 31945 - RNA, 19 nt, Artificial Sequence
  Description of Artificial Sequence: Synthetic oligonucleotide
ugaauugauauguaauaac

SEQ ID NO: 31946 - RNA, 19 nt, Artificial Sequence
  Description of Artificial Sequence: Synthetic oligonucleotide
auuauaugguaauuuauau

SEQ ID NO: 31947 - RNA, 19 nt, Artificial Sequence
  Description of Artificial Sequence: Synthetic oligonucleotide
aauguuucuauacccuuga

SEQ ID NO: 31948 - RNA, 19 nt, Artificial Sequence
  Description of Artificial Sequence: Synthetic oligonucleotide
uccauauucucagagaucu

SEQ ID NO: 31949 - RNA, 19 nt, Artificial Sequence
  Description of Artificial Sequence: Synthetic oligonucleotide
auaaaaguggcaucgggcu

SEQ ID NO: 31950 - RNA, 19 nt, Artificial Sequence
  Description of Artificial Sequence: Synthetic oligonucleotide
ugaguaauuaagguaagga

SEQ ID NO: 31951 - RNA, 19 nt, Artificial Sequence
  Description of Artificial Sequence: Synthetic oligonucleotide
uguuugggcacauucacca

SEQ ID NO: 31952 - RNA, 19 nt, Artificial Sequence
  Description of Artificial Sequence: Synthetic oligonucleotide
ugcucgaaauuuuaaagca

SEQ ID NO: 31953 - RNA, 19 nt, Artificial Sequence
  Description of Artificial Sequence: Synthetic oligonucleotide
ucuuauugcucccugauuu

SEQ ID NO: 31954 - RNA, 19 nt, Artificial Sequence
  Description of Artificial Sequence: Synthetic oligonucleotide
acucuaaugauaccaucac

SEQ ID NO: 31955 - RNA, 19 nt, Artificial Sequence
  Description of Artificial Sequence: Synthetic oligonucleotide
cagacgaaagacuacaaac

SEQ ID NO: 31956 - RNA, 19 nt, Artificial Sequence
  Description of Artificial Sequence: Synthetic oligonucleotide
gauccaguuaacaucaagc

SEQ ID NO: 31957 - RNA, 19 nt, Artificial Sequence
  Description of Artificial Sequence: Synthetic oligonucleotide
uuuaauacuuaguaaggua

SEQ ID NO: 31958 - RNA, 19 nt, Artificial Sequence
  Description of Artificial Sequence: Synthetic oligonucleotide
ugaacuuaauccacaguug

SEQ ID NO: 31959 - RNA, 19 nt, Artificial Sequence
  Description of Artificial Sequence: Synthetic oligonucleotide
gagcguguggcuuuaaucc

SEQ ID NO: 31960 - RNA, 19 nt, Artificial Sequence
  Description of Artificial Sequence: Synthetic oligonucleotide
aauggaucgacuccagcca

SEQ ID NO: 31961 - RNA, 19 nt, Artificial Sequence
  Description of Artificial Sequence: Synthetic oligonucleotide
ucccuuaugauauuuuaca

SEQ ID NO: 31962 - RNA, 19 nt, Artificial Sequence
  Description of Artificial Sequence: Synthetic oligonucleotide
uccugccugacuaacaaag

SEQ ID NO: 31963 - RNA, 19 nt, Artificial Sequence
  Description of Artificial Sequence: Synthetic oligonucleotide
uuguauaggguuugcuugg

SEQ ID NO: 31964 - RNA, 19 nt, Artificial Sequence
  Description of Artificial Sequence: Synthetic oligonucleotide
aagauugugcuaauuacug

SEQ ID NO: 31965 - RNA, 19 nt, Artificial Sequence
  Description of Artificial Sequence: Synthetic oligonucleotide
agacauaaugaauugugca

SEQ ID NO: 31966 - RNA, 19 nt, Artificial Sequence
  Description of Artificial Sequence: Synthetic oligonucleotide
ucgaaauuuuaaagcaaag

SEQ ID NO: 31967 - RNA, 19 nt, Artificial Sequence
  Description of Artificial Sequence: Synthetic oligonucleotide
acucgcaccaaccacaaug

SEQ ID NO: 31968 - RNA, 19 nt, Artificial Sequence
  Description of Artificial Sequence: Synthetic oligonucleotide
ugacaauagauauaauguc

SEQ ID NO: 31969 - RNA, 19 nt, Artificial Sequence
  Description of Artificial Sequence: Synthetic oligonucleotide
uguaugacauuaagucagg

SEQ ID NO: 31970 - RNA, 19 nt, Artificial Sequence
  Description of Artificial Sequence: Synthetic oligonucleotide
uguaaauggaucgacucca

SEQ ID NO: 31971 - RNA, 19 nt, Artificial Sequence
  Description of Artificial Sequence: Synthetic oligonucleotide
ucaagugagauuaucuuuu

SEQ ID NO: 31972 - RNA, 19 nt, Artificial Sequence
  Description of Artificial Sequence: Synthetic oligonucleotide
ucgacuccagccauggagg

SEQ ID NO: 31973 - RNA, 19 nt, Artificial Sequence
  Description of Artificial Sequence: Synthetic oligonucleotide
aaguuguaugcagcuagcc

SEQ ID NO: 31974 - RNA, 19 nt, Artificial Sequence
  Description of Artificial Sequence: Synthetic oligonucleotide
uuggauguauuaacaagca

SEQ ID NO: 31975 - RNA, 19 nt, Artificial Sequence
  Description of Artificial Sequence: Synthetic oligonucleotide
aacaccuaaggacuuggcu

SEQ ID NO: 31976 - RNA, 19 nt, Artificial Sequence
  Description of Artificial Sequence: Synthetic oligonucleotide
uugcaugcuagauuggaug

SEQ ID NO: 31977 - RNA, 19 nt, Artificial Sequence
  Description of Artificial Sequence: Synthetic oligonucleotide
acugauaggcuucaacucu

SEQ ID NO: 31978 - RNA, 19 nt, Artificial Sequence
  Description of Artificial Sequence: Synthetic oligonucleotide
agcuguaugacccuguaau

SEQ ID NO: 31979 - RNA, 19 nt, Artificial Sequence
  Description of Artificial Sequence: Synthetic oligonucleotide
aguucuauugccugugaca

SEQ ID NO: 31980 - RNA, 19 nt, Artificial Sequence
  Description of Artificial Sequence: Synthetic oligonucleotide
uggauguauuaacaagcag

SEQ ID NO: 31981 - RNA, 19 nt, Artificial Sequence
  Description of Artificial Sequence: Synthetic oligonucleotide
cuauuuuacaaauggcuca

SEQ ID NO: 31982 - RNA, 19 nt, Artificial Sequence
  Description of Artificial Sequence: Synthetic oligonucleotide
uccauuaaguuccuucagu

SEQ ID NO: 31983 - RNA, 19 nt, Artificial Sequence
  Description of Artificial Sequence: Synthetic oligonucleotide
cccauaauuaaaauggaag

SEQ ID NO: 31984 - RNA, 19 nt, Artificial Sequence
  Description of Artificial Sequence: Synthetic oligonucleotide
gaaaaucuaccccauuaca

SEQ ID NO: 31985 - RNA, 19 nt, Artificial Sequence
  Description of Artificial Sequence: Synthetic oligonucleotide
uuccuaauauuuguauagg

SEQ ID NO: 31986 - RNA, 19 nt, Artificial Sequence
  Description of Artificial Sequence: Synthetic oligonucleotide
agucggauuguuugggcac

SEQ ID NO: 31987 - RNA, 19 nt, Artificial Sequence
  Description of Artificial Sequence: Synthetic oligonucleotide
uuuucuuuucuuuucuuuu

SEQ ID NO: 31988 - RNA, 19 nt, Artificial Sequence
  Description of Artificial Sequence: Synthetic oligonucleotide
ucuuuacugcccauacugc

SEQ ID NO: 31989 - RNA, 19 nt, Artificial Sequence
  Description of Artificial Sequence: Synthetic oligonucleotide
agaagcauaauaaccaccu

SEQ ID NO: 31990 - RNA, 19 nt, Artificial Sequence
  Description of Artificial Sequence: Synthetic oligonucleotide
ugcccauaccugcagaacc

SEQ ID NO: 31991 - RNA, 19 nt, Artificial Sequence
  Description of Artificial Sequence: Synthetic oligonucleotide
uuuaauagucuugucugcu

SEQ ID NO: 31992 - RNA, 19 nt, Artificial Sequence
  Description of Artificial Sequence: Synthetic oligonucleotide
acagacauaaugaauugug

SEQ ID NO: 31993 - RNA, 19 nt, Artificial Sequence
  Description of Artificial Sequence: Synthetic oligonucleotide
uggaagucggauuguuugg

SEQ ID NO: 31994 - RNA, 19 nt, Artificial Sequence
  Description of Artificial Sequence: Synthetic oligonucleotide
aauugcaugcuagauugga

SEQ ID NO: 31995 - RNA, 19 nt, Artificial Sequence
  Description of Artificial Sequence: Synthetic oligonucleotide
gauuagacgagucuguccu

SEQ ID NO: 31996 - RNA, 19 nt, Artificial Sequence
  Description of Artificial Sequence: Synthetic oligonucleotide
uucgaggcaguugugagcc

SEQ ID NO: 31997 - RNA, 19 nt, Artificial Sequence
  Description of Artificial Sequence: Synthetic oligonucleotide
uaacaagcaguguauugca

SEQ ID NO: 31998 - RNA, 19 nt, Artificial Sequence
  Description of Artificial Sequence: Synthetic oligonucleotide
acacuaauuucacacgaca

SEQ ID NO: 31999 - RNA, 19 nt, Artificial Sequence
  Description of Artificial Sequence: Synthetic oligonucleotide
gauaagauggcugcugaac

SEQ ID NO: 32000 - RNA, 19 nt, Artificial Sequence
  Description of Artificial Sequence: Synthetic oligonucleotide
uggcauguaacgaccagca

SEQ ID NO: 32001 - RNA, 19 nt, Artificial Sequence
  Description of Artificial Sequence: Synthetic oligonucleotide
uguuauggucuuuauggaa

SEQ ID NO: 32002 - RNA, 19 nt, Artificial Sequence
  Description of Artificial Sequence: Synthetic oligonucleotide
aagguauauauccucuauu

SEQ ID NO: 32003 - RNA, 19 nt, Artificial Sequence
  Description of Artificial Sequence: Synthetic oligonucleotide
uugauagcuagcaccacaa

SEQ ID NO: 32004 - RNA, 19 nt, Artificial Sequence
  Description of Artificial Sequence: Synthetic oligonucleotide
aaaguagccagagcaauau

SEQ ID NO: 32005 - RNA, 19 nt, Artificial Sequence
  Description of Artificial Sequence: Synthetic oligonucleotide
aucuuugugacccuuuaaa

SEQ ID NO: 32006 - RNA, 19 nt, Artificial Sequence
  Description of Artificial Sequence: Synthetic oligonucleotide
ccaguuuuggaaucgauag

SEQ ID NO: 32007 - RNA, 19 nt, Artificial Sequence
  Description of Artificial Sequence: Synthetic oligonucleotide
acugacauuauaugguaau

SEQ ID NO: 32008 - RNA, 19 nt, Artificial Sequence
  Description of Artificial Sequence: Synthetic oligonucleotide
ucacacgacagauucuuga

SEQ ID NO: 32009 - RNA, 19 nt, Artificial Sequence
  Description of Artificial Sequence: Synthetic oligonucleotide
aucugaacuuaauccacag

SEQ ID NO: 32010 - RNA, 19 nt, Artificial Sequence
  Description of Artificial Sequence: Synthetic oligonucleotide
aagucggauuguuugggca

SEQ ID NO: 32011 - RNA, 19 nt, Artificial Sequence
  Description of Artificial Sequence: Synthetic oligonucleotide
agauaagucuacagcauuc

SEQ ID NO: 32012 - RNA, 19 nt, Artificial Sequence
  Description of Artificial Sequence: Synthetic oligonucleotide
guauucccaagucccaacg

SEQ ID NO: 32013 - RNA, 19 nt, Artificial Sequence
  Description of Artificial Sequence: Synthetic oligonucleotide
ucaacaccuaaggacuugg

SEQ ID NO: 32014 - RNA, 19 nt, Artificial Sequence
  Description of Artificial Sequence: Synthetic oligonucleotide
uggauaagauggcugcuga

SEQ ID NO: 32015 - RNA, 19 nt, Artificial Sequence
  Description of Artificial Sequence: Synthetic oligonucleotide
aaccuggcauguaacgacc

SEQ ID NO: 32016 - RNA, 19 nt, Artificial Sequence
  Description of Artificial Sequence: Synthetic oligonucleotide
cuugaaaugugcuacugaa

SEQ ID NO: 32017 - RNA, 19 nt, Artificial Sequence
  Description of Artificial Sequence: Synthetic oligonucleotide
ucccauaauuaaaauggaa

SEQ ID NO: 32018 - RNA, 19 nt, Artificial Sequence
  Description of Artificial Sequence: Synthetic oligonucleotide
aguucgaggcaguugugag

SEQ ID NO: 32019 - RNA, 19 nt, Artificial Sequence
  Description of Artificial Sequence: Synthetic oligonucleotide
uguaacgaccagcaccugu

SEQ ID NO: 32020 - RNA, 19 nt, Artificial Sequence
  Description of Artificial Sequence: Synthetic oligonucleotide
uaauagaagcugauauaaa

SEQ ID NO: 32021 - RNA, 19 nt, Artificial Sequence
  Description of Artificial Sequence: Synthetic oligonucleotide
gcauguaacgaccagcacc

SEQ ID NO: 32022 - RNA, 19 nt, Artificial Sequence
  Description of Artificial Sequence: Synthetic oligonucleotide
cucgccaguaauuugccac

SEQ ID NO: 32023 - RNA, 19 nt, Artificial Sequence
  Description of Artificial Sequence: Synthetic oligonucleotide
aaauuagagacaguaucuu

SEQ ID NO: 32024 - RNA, 19 nt, Artificial Sequence
  Description of Artificial Sequence: Synthetic oligonucleotide
cuaaggacuuggcuaauug

SEQ ID NO: 32025 - RNA, 19 nt, Artificial Sequence
  Description of Artificial Sequence: Synthetic oligonucleotide
uaaggacuuggcuaauugu

SEQ ID NO: 32026 - RNA, 19 nt, Artificial Sequence
  Description of Artificial Sequence: Synthetic oligonucleotide
acuuaguaagguauauauc

SEQ ID NO: 32027 - RNA, 19 nt, Artificial Sequence
  Description of Artificial Sequence: Synthetic oligonucleotide
augauaccaucacucgcac

SEQ ID NO: 32028 - RNA, 19 nt, Artificial Sequence
  Description of Artificial Sequence: Synthetic oligonucleotide
gcugauuagcaccagauga

SEQ ID NO: 32029 - RNA, 19 nt, Artificial Sequence
  Description of Artificial Sequence: Synthetic oligonucleotide
aucuaacccacaaucauug

SEQ ID NO: 32030 - RNA, 19 nt, Artificial Sequence
  Description of Artificial Sequence: Synthetic oligonucleotide
cuugcuguccgauccugcg

SEQ ID NO: 32031 - RNA, 19 nt, Artificial Sequence
  Description of Artificial Sequence: Synthetic oligonucleotide
uuguuugggcacauucacc

SEQ ID NO: 32032 - RNA, 19 nt, Artificial Sequence
  Description of Artificial Sequence: Synthetic oligonucleotide
acaccuaaggacuuggcua

SEQ ID NO: 32033 - RNA, 19 nt, Artificial Sequence
  Description of Artificial Sequence: Synthetic oligonucleotide
uaucaagugcaggaaagac

SEQ ID NO: 32034 - RNA, 19 nt, Artificial Sequence
  Description of Artificial Sequence: Synthetic oligonucleotide
guuauccauacugucagug

SEQ ID NO: 32035 - RNA, 19 nt, Artificial Sequence
  Description of Artificial Sequence: Synthetic oligonucleotide
gaaucgauaguugccugag

SEQ ID NO: 32036 - RNA, 19 nt, Artificial Sequence
  Description of Artificial Sequence: Synthetic oligonucleotide
gcacgaguaacauaaauga

SEQ ID NO: 32037 - RNA, 19 nt, Artificial Sequence
  Description of Artificial Sequence: Synthetic oligonucleotide
uuggaaucgauaguugccu

SEQ ID NO: 32038 - RNA, 19 nt, Artificial Sequence
  Description of Artificial Sequence: Synthetic oligonucleotide
cgaguaacauaaaugaacc

SEQ ID NO: 32039 - RNA, 19 nt, Artificial Sequence
  Description of Artificial Sequence: Synthetic oligonucleotide
auguuuuauugacagccga

SEQ ID NO: 32040 - RNA, 19 nt, Artificial Sequence
  Description of Artificial Sequence: Synthetic oligonucleotide
ugauuagcaccagaugagc

SEQ ID NO: 32041 - RNA, 19 nt, Artificial Sequence
  Description of Artificial Sequence: Synthetic oligonucleotide
uugugacccuuuaaaauau

SEQ ID NO: 32042 - RNA, 19 nt, Artificial Sequence
  Description of Artificial Sequence: Synthetic oligonucleotide
agaaauuauuguaucuugu

SEQ ID NO: 32043 - RNA, 19 nt, Artificial Sequence
  Description of Artificial Sequence: Synthetic oligonucleotide
cacucuaaugauaccauca

SEQ ID NO: 32044 - RNA, 19 nt, Artificial Sequence
  Description of Artificial Sequence: Synthetic oligonucleotide
uccacugauaggcuucaac

SEQ ID NO: 32045 - RNA, 19 nt, Artificial Sequence
  Description of Artificial Sequence: Synthetic oligonucleotide
aguaagguauauauccucu

SEQ ID NO: 32046 - RNA, 19 nt, Artificial Sequence
  Description of Artificial Sequence: Synthetic oligonucleotide
ucucggauuagacgagucu

SEQ ID NO: 32047 - RNA, 19 nt, Artificial Sequence
  Description of Artificial Sequence: Synthetic oligonucleotide
uccuguaaauggaucgacu

SEQ ID NO: 32048 - RNA, 19 nt, Artificial Sequence
  Description of Artificial Sequence: Synthetic oligonucleotide
acaagcaguguauugcaau

SEQ ID NO: 32049 - RNA, 19 nt, Artificial Sequence
  Description of Artificial Sequence: Synthetic oligonucleotide
ucuuagacugcuguaugac

SEQ ID NO: 32050 - RNA, 19 nt, Artificial Sequence
  Description of Artificial Sequence: Synthetic oligonucleotide
acuaacaaagcaauugcaa

SEQ ID NO: 32051 - RNA, 19 nt, Artificial Sequence
  Description of Artificial Sequence: Synthetic oligonucleotide
agauugugcuaauuacuga

SEQ ID NO: 32052 - RNA, 19 nt, Artificial Sequence
  Description of Artificial Sequence: Synthetic oligonucleotide
uuccagacgaaagacuaca

SEQ ID NO: 32053 - RNA, 19 nt, Artificial Sequence
  Description of Artificial Sequence: Synthetic oligonucleotide
gaagucggauuguuugggc

SEQ ID NO: 32054 - RNA, 19 nt, Artificial Sequence
  Description of Artificial Sequence: Synthetic oligonucleotide
auguuauggucuuuaugga

SEQ ID NO: 32055 - RNA, 19 nt, Artificial Sequence
  Description of Artificial Sequence: Synthetic oligonucleotide
guaauugugcugcuauuga

SEQ ID NO: 32056 - RNA, 19 nt, Artificial Sequence
  Description of Artificial Sequence: Synthetic oligonucleotide
ucggauuagacgagucugu

SEQ ID NO: 32057 - RNA, 19 nt, Artificial Sequence
  Description of Artificial Sequence: Synthetic oligonucleotide
cccacaaucauugaaggcc

SEQ ID NO: 32058 - RNA, 19 nt, Artificial Sequence
  Description of Artificial Sequence: Synthetic oligonucleotide
caccauauagacugagcug

SEQ ID NO: 32059 - RNA, 19 nt, Artificial Sequence
  Description of Artificial Sequence: Synthetic oligonucleotide
ucgauaguugccugagaga

SEQ ID NO: 32060 - RNA, 19 nt, Artificial Sequence
  Description of Artificial Sequence: Synthetic oligonucleotide
gauuguuugggcacauuca

SEQ ID NO: 32061 - RNA, 19 nt, Artificial Sequence
  Description of Artificial Sequence: Synthetic oligonucleotide
auauucucagagaucuguc

SEQ ID NO: 32062 - RNA, 19 nt, Artificial Sequence
  Description of Artificial Sequence: Synthetic oligonucleotide
cauaauuaaaauggaagua

SEQ ID NO: 32063 - RNA, 19 nt, Artificial Sequence
  Description of Artificial Sequence: Synthetic oligonucleotide
cacugauaggcuucaacuc

SEQ ID NO: 32064 - RNA, 19 nt, Artificial Sequence
  Description of Artificial Sequence: Synthetic oligonucleotide
agcaccauauagacugagc

SEQ ID NO: 32065 - RNA, 19 nt, Artificial Sequence
  Description of Artificial Sequence: Synthetic oligonucleotide
agcaguguauugcaauaga

SEQ ID NO: 32066 - RNA, 19 nt, Artificial Sequence
  Description of Artificial Sequence: Synthetic oligonucleotide
ucccaagucccaacguuug

SEQ ID NO: 32067 - RNA, 19 nt, Artificial Sequence
  Description of Artificial Sequence: Synthetic oligonucleotide
ugcuguccgauccugcgac

SEQ ID NO: 32068 - RNA, 19 nt, Artificial Sequence
  Description of Artificial Sequence: Synthetic oligonucleotide
ucgccaguaauuugccacc

SEQ ID NO: 32069 - RNA, 19 nt, Artificial Sequence
  Description of Artificial Sequence: Synthetic oligonucleotide
cacacgacagauucuugac

SEQ ID NO: 32070 - RNA, 19 nt, Artificial Sequence
  Description of Artificial Sequence: Synthetic oligonucleotide
uguuccgguagaaucuuua

SEQ ID NO: 32071 - RNA, 19 nt, Artificial Sequence
  Description of Artificial Sequence: Synthetic oligonucleotide
cucggauuagacgagucug

SEQ ID NO: 32072 - RNA, 19 nt, Artificial Sequence
  Description of Artificial Sequence: Synthetic oligonucleotide
aaucgauaguugccugaga

SEQ ID NO: 32073 - RNA, 19 nt, Artificial Sequence
  Description of Artificial Sequence: Synthetic oligonucleotide
caucaugcauuugucauuc

SEQ ID NO: 32074 - RNA, 19 nt, Artificial Sequence
  Description of Artificial Sequence: Synthetic oligonucleotide
ugaucgguaggcacuacuu

SEQ ID NO: 32075 - RNA, 19 nt, Artificial Sequence
  Description of Artificial Sequence: Synthetic oligonucleotide
uucacucaaaauugccaaa

SEQ ID NO: 32076 - RNA, 19 nt, Artificial Sequence
  Description of Artificial Sequence: Synthetic oligonucleotide
guaacgaccagcaccugug

SEQ ID NO: 32077 - RNA, 19 nt, Artificial Sequence
  Description of Artificial Sequence: Synthetic oligonucleotide
aaaucccaauuuaauacuu

SEQ ID NO: 32078 - RNA, 19 nt, Artificial Sequence
  Description of Artificial Sequence: Synthetic oligonucleotide
cauguaacgaccagcaccu

SEQ ID NO: 32079 - RNA, 19 nt, Artificial Sequence
  Description of Artificial Sequence: Synthetic oligonucleotide
uaugacccuguaaugucau

SEQ ID NO: 32080 - RNA, 19 nt, Artificial Sequence
  Description of Artificial Sequence: Synthetic oligonucleotide
gacacucgccaguaauuug

SEQ ID NO: 32081 - RNA, 19 nt, Artificial Sequence
  Description of Artificial Sequence: Synthetic oligonucleotide
ucgguaggcacuacuuccu

SEQ ID NO: 32082 - RNA, 19 nt, Artificial Sequence
  Description of Artificial Sequence: Synthetic oligonucleotide
uaauuucacacgacagauu

SEQ ID NO: 32083 - RNA, 19 nt, Artificial Sequence
  Description of Artificial Sequence: Synthetic oligonucleotide
uguaugcagcuagccaggg

SEQ ID NO: 32084 - RNA, 19 nt, Artificial Sequence
  Description of Artificial Sequence: Synthetic oligonucleotide
uuauaugaugguccaccuu

SEQ ID NO: 32085 - RNA, 19 nt, Artificial Sequence
  Description of Artificial Sequence: Synthetic oligonucleotide
gucccaaauuuuccagacg

SEQ ID NO: 32086 - RNA, 19 nt, Artificial Sequence
  Description of Artificial Sequence: Synthetic oligonucleotide
uggaaucgauaguugccug

SEQ ID NO: 32087 - RNA, 19 nt, Artificial Sequence
  Description of Artificial Sequence: Synthetic oligonucleotide
cucuacaauuuggaaagac

SEQ ID NO: 32088 - RNA, 19 nt, Artificial Sequence
  Description of Artificial Sequence: Synthetic oligonucleotide
ucccaugagccacuaagua

SEQ ID NO: 32089 - RNA, 19 nt, Artificial Sequence
  Description of Artificial Sequence: Synthetic oligonucleotide
auccaguggguagaguuuc

SEQ ID NO: 32090 - RNA, 19 nt, Artificial Sequence
  Description of Artificial Sequence: Synthetic oligonucleotide
ugauacggaggcauacuuu

SEQ ID NO: 32091 - RNA, 19 nt, Artificial Sequence
  Description of Artificial Sequence: Synthetic oligonucleotide
cauugcucgaaauuuuaaa

SEQ ID NO: 32092 - RNA, 19 nt, Artificial Sequence
  Description of Artificial Sequence: Synthetic oligonucleotide
ggauuguuugggcacauuc

SEQ ID NO: 32093 - RNA, 19 nt, Artificial Sequence
  Description of Artificial Sequence: Synthetic oligonucleotide
auaucaagugcaggaaaga

SEQ ID NO: 32094 - RNA, 19 nt, Artificial Sequence
  Description of Artificial Sequence: Synthetic oligonucleotide
uggguuugauagcuagcac

SEQ ID NO: 32095 - RNA, 19 nt, Artificial Sequence
  Description of Artificial Sequence: Synthetic oligonucleotide
uucacacgacagauucuug

SEQ ID NO: 32096 - RNA, 19 nt, Artificial Sequence
  Description of Artificial Sequence: Synthetic oligonucleotide
ucuaacccacaaucauuga

SEQ ID NO: 32097 - RNA, 19 nt, Artificial Sequence
  Description of Artificial Sequence: Synthetic oligonucleotide
uccccaguaugcaccuggg

SEQ ID NO: 32098 - RNA, 19 nt, Artificial Sequence
  Description of Artificial Sequence: Synthetic oligonucleotide
gauacggaggcauacuuuu

SEQ ID NO: 32099 - RNA, 19 nt, Artificial Sequence
  Description of Artificial Sequence: Synthetic oligonucleotide
uuacaauaugccaccucuu

SEQ ID NO: 32100 - RNA, 19 nt, Artificial Sequence
  Description of Artificial Sequence: Synthetic oligonucleotide
ugcugcuauugauuguggu

SEQ ID NO: 32101 - RNA, 19 nt, Artificial Sequence
  Description of Artificial Sequence: Synthetic oligonucleotide
ccucccgucacuaacacuc

SEQ ID NO: 32102 - RNA, 19 nt, Artificial Sequence
  Description of Artificial Sequence: Synthetic oligonucleotide
cugaauugauauguaauaa

SEQ ID NO: 32103 - RNA, 19 nt, Artificial Sequence
  Description of Artificial Sequence: Synthetic oligonucleotide
acguuugaccuuuuguguu

SEQ ID NO: 32104 - RNA, 19 nt, Artificial Sequence
  Description of Artificial Sequence: Synthetic oligonucleotide
cuaacccacaaucauugaa

SEQ ID NO: 32105 - RNA, 19 nt, Artificial Sequence
  Description of Artificial Sequence: Synthetic oligonucleotide
ggauuagacgagucugucc

SEQ ID NO: 32106 - RNA, 19 nt, Artificial Sequence
  Description of Artificial Sequence: Synthetic oligonucleotide
uuagacgagucuguccuuc

SEQ ID NO: 32107 - RNA, 19 nt, Artificial Sequence
  Description of Artificial Sequence: Synthetic oligonucleotide
cauuucaagugagauuauc

SEQ ID NO: 32108 - RNA, 19 nt, Artificial Sequence
  Description of Artificial Sequence: Synthetic oligonucleotide
ccuguaaauggaucgacuc

SEQ ID NO: 32109 - RNA, 19 nt, Artificial Sequence
  Description of Artificial Sequence: Synthetic oligonucleotide
agcguguggcuuuaauccu

SEQ ID NO: 32110 - RNA, 19 nt, Artificial Sequence
  Description of Artificial Sequence: Synthetic oligonucleotide
gccgaagaauaucaagugc

SEQ ID NO: 32111 - RNA, 19 nt, Artificial Sequence
  Description of Artificial Sequence: Synthetic oligonucleotide
uuccggugcaguuccauua

SEQ ID NO: 32112 - RNA, 19 nt, Artificial Sequence
  Description of Artificial Sequence: Synthetic oligonucleotide
gcuacugaaagaauccaac

SEQ ID NO: 32113 - RNA, 19 nt, Artificial Sequence
  Description of Artificial Sequence: Synthetic oligonucleotide
caucacucgcaccaaccac

SEQ ID NO: 32114 - RNA, 19 nt, Artificial Sequence
  Description of Artificial Sequence: Synthetic oligonucleotide
acgaaagacuacaaacagu

SEQ ID NO: 32115 - RNA, 19 nt, Artificial Sequence
  Description of Artificial Sequence: Synthetic oligonucleotide
ugauagcuagcaccacaaa

SEQ ID NO: 32116 - RNA, 19 nt, Artificial Sequence
  Description of Artificial Sequence: Synthetic oligonucleotide
gguuugauagcuagcacca

SEQ ID NO: 32117 - RNA, 19 nt, Artificial Sequence
  Description of Artificial Sequence: Synthetic oligonucleotide
uaacgaccagcaccuguga

SEQ ID NO: 32118 - RNA, 19 nt, Artificial Sequence
  Description of Artificial Sequence: Synthetic oligonucleotide
ggaagucggauuguuuggg

SEQ ID NO: 32119 - RNA, 19 nt, Artificial Sequence
  Description of Artificial Sequence: Synthetic oligonucleotide
cuggguuugauagcuagca

SEQ ID NO: 32120 - RNA, 19 nt, Artificial Sequence
  Description of Artificial Sequence: Synthetic oligonucleotide
uugcuguccgauccugcga

SEQ ID NO: 32121 - RNA, 19 nt, Artificial Sequence
  Description of Artificial Sequence: Synthetic oligonucleotide
uccggugcaguuccauuaa

SEQ ID NO: 32122 - RNA, 19 nt, Artificial Sequence
  Description of Artificial Sequence: Synthetic oligonucleotide
cacuccacugauaggcuuc

SEQ ID NO: 32123 - RNA, 19 nt, Artificial Sequence
  Description of Artificial Sequence: Synthetic oligonucleotide
uggaucgacuccagccaug

SEQ ID NO: 32124 - RNA, 19 nt, Artificial Sequence
  Description of Artificial Sequence: Synthetic oligonucleotide
aagacacucgccaguaauu

SEQ ID NO: 32125 - RNA, 19 nt, Artificial Sequence
  Description of Artificial Sequence: Synthetic oligonucleotide
ucacucgcaccaaccacaa

SEQ ID NO: 32126 - RNA, 19 nt, Artificial Sequence
  Description of Artificial Sequence: Synthetic oligonucleotide
cacucgccaguaauuugcc

SEQ ID NO: 32127 - RNA, 19 nt, Artificial Sequence
  Description of Artificial Sequence: Synthetic oligonucleotide
gaaagacagauaugcuaua

SEQ ID NO: 32128 - RNA, 19 nt, Artificial Sequence
  Description of Artificial Sequence: Synthetic oligonucleotide
caacaccuaaggacuuggc

SEQ ID NO: 32129 - RNA, 19 nt, Artificial Sequence
  Description of Artificial Sequence: Synthetic oligonucleotide
auguauuaacaagcagugu

SEQ ID NO: 32130 - RNA, 19 nt, Artificial Sequence
  Description of Artificial Sequence: Synthetic oligonucleotide
uguauaggguuugcuuggu

SEQ ID NO: 32131 - RNA, 19 nt, Artificial Sequence
  Description of Artificial Sequence: Synthetic oligonucleotide
uuccucgacacuugcuguc

SEQ ID NO: 32132 - RNA, 19 nt, Artificial Sequence
  Description of Artificial Sequence: Synthetic oligonucleotide
guaagguauauauccucua

SEQ ID NO: 32133 - RNA, 19 nt, Artificial Sequence
  Description of Artificial Sequence: Synthetic oligonucleotide
caagcaguguauugcaaua

SEQ ID NO: 32134 - RNA, 19 nt, Artificial Sequence
  Description of Artificial Sequence: Synthetic oligonucleotide
cucugauacggaggcauac

SEQ ID NO: 32135 - RNA, 19 nt, Artificial Sequence
  Description of Artificial Sequence: Synthetic oligonucleotide
cagacuuuagcaguggugu

SEQ ID NO: 32136 - RNA, 19 nt, Artificial Sequence
  Description of Artificial Sequence: Synthetic oligonucleotide
cacgaguaacauaaaugaa

SEQ ID NO: 32137 - RNA, 19 nt, Artificial Sequence
  Description of Artificial Sequence: Synthetic oligonucleotide
aucucggauuagacgaguc

SEQ ID NO: 32138 - RNA, 19 nt, Artificial Sequence
  Description of Artificial Sequence: Synthetic oligonucleotide
uagacgagucuguccuucu

SEQ ID NO: 32139 - RNA, 19 nt, Artificial Sequence
  Description of Artificial Sequence: Synthetic oligonucleotide
ggaucgacuccagccaugg

SEQ ID NO: 32140 - RNA, 19 nt, Artificial Sequence
  Description of Artificial Sequence: Synthetic oligonucleotide
ugcuauugauugugguuuu

SEQ ID NO: 32141 - RNA, 19 nt, Artificial Sequence
  Description of Artificial Sequence: Synthetic oligonucleotide
ucccgucacuaacacucca

SEQ ID NO: 32142 - RNA, 19 nt, Artificial Sequence
  Description of Artificial Sequence: Synthetic oligonucleotide
auggaucgacuccagccau

SEQ ID NO: 32143 - RNA, 19 nt, Artificial Sequence
  Description of Artificial Sequence: Synthetic oligonucleotide
uucuauugccugugacauc

SEQ ID NO: 32144 - RNA, 19 nt, Artificial Sequence
  Description of Artificial Sequence: Synthetic oligonucleotide
ugacaagcauugagcuuuc

SEQ ID NO: 32145 - RNA, 19 nt, Artificial Sequence
  Description of Artificial Sequence: Synthetic oligonucleotide
gcaccauauagacugagcu

SEQ ID NO: 32146 - RNA, 19 nt, Artificial Sequence
  Description of Artificial Sequence: Synthetic oligonucleotide
ugguauucccaagucccaa

SEQ ID NO: 32147 - RNA, 19 nt, Artificial Sequence
  Description of Artificial Sequence: Synthetic oligonucleotide
gaugaacuauacaaauaau

SEQ ID NO: 32148 - RNA, 19 nt, Artificial Sequence
  Description of Artificial Sequence: Synthetic oligonucleotide
ggaaucgauaguugccuga

SEQ ID NO: 32149 - RNA, 19 nt, Artificial Sequence
  Description of Artificial Sequence: Synthetic oligonucleotide
gacgagucuguccuucucu

SEQ ID NO: 32150 - RNA, 19 nt, Artificial Sequence
  Description of Artificial Sequence: Synthetic oligonucleotide
aggacuuggcuaauuguau

SEQ ID NO: 32151 - RNA, 19 nt, Artificial Sequence
  Description of Artificial Sequence: Synthetic oligonucleotide
ggaaagacagauaugcuau

SEQ ID NO: 32152 - RNA, 19 nt, Artificial Sequence
  Description of Artificial Sequence: Synthetic oligonucleotide
agucccaacguuugaccuu

SEQ ID NO: 32153 - RNA, 19 nt, Artificial Sequence
  Description of Artificial Sequence: Synthetic oligonucleotide
agacacucgccaguaauuu

SEQ ID NO: 32154 - RNA, 19 nt, Artificial Sequence
  Description of Artificial Sequence: Synthetic oligonucleotide
ccagacuuuagcaguggug

SEQ ID NO: 32155 - RNA, 19 nt, Artificial Sequence
  Description of Artificial Sequence: Synthetic oligonucleotide
cugacaagcauugagcuuu

SEQ ID NO: 32156 - RNA, 19 nt, Artificial Sequence
  Description of Artificial Sequence: Synthetic oligonucleotide
acucgccaguaauuugcca

SEQ ID NO: 32157 - RNA, 19 nt, Artificial Sequence
  Description of Artificial Sequence: Synthetic oligonucleotide
gcuagauuggauguauuaa

SEQ ID NO: 32158 - RNA, 19 nt, Artificial Sequence
  Description of Artificial Sequence: Synthetic oligonucleotide
auuagacgagucuguccuu

SEQ ID NO: 32159 - RNA, 19 nt, Artificial Sequence
  Description of Artificial Sequence: Synthetic oligonucleotide
auaugccaccucuuacauu

SEQ ID NO: 32160 - RNA, 19 nt, Artificial Sequence
  Description of Artificial Sequence: Synthetic oligonucleotide
cucuaaugauaccaucacu

SEQ ID NO: 32161 - RNA, 19 nt, Artificial Sequence
  Description of Artificial Sequence: Synthetic oligonucleotide
acgacagauucuugacuuu

SEQ ID NO: 32162 - RNA, 19 nt, Artificial Sequence
  Description of Artificial Sequence: Synthetic oligonucleotide
ucgacacuugcuguccgau

SEQ ID NO: 32163 - RNA, 19 nt, Artificial Sequence
  Description of Artificial Sequence: Synthetic oligonucleotide
cucgcaccaaccacaaugu

SEQ ID NO: 32164 - RNA, 19 nt, Artificial Sequence
  Description of Artificial Sequence: Synthetic oligonucleotide
uggaguacucuugccuuua

SEQ ID NO: 32165 - RNA, 19 nt, Artificial Sequence
  Description of Artificial Sequence: Synthetic oligonucleotide
ucgcaccaaccacaauguc

SEQ ID NO: 32166 - RNA, 19 nt, Artificial Sequence
  Description of Artificial Sequence: Synthetic oligonucleotide
ccuggguuugauagcuagc

SEQ ID NO: 32167 - RNA, 19 nt, Artificial Sequence
  Description of Artificial Sequence: Synthetic oligonucleotide
ucccucccauuauaauuua

SEQ ID NO: 32168 - RNA, 19 nt, Artificial Sequence
  Description of Artificial Sequence: Synthetic oligonucleotide
acuccacugauaggcuuca

SEQ ID NO: 32169 - RNA, 19 nt, Artificial Sequence
  Description of Artificial Sequence: Synthetic oligonucleotide
caccucccgucacuaacac

SEQ ID NO: 32170 - RNA, 19 nt, Artificial Sequence
  Description of Artificial Sequence: Synthetic oligonucleotide
agugucccaagagccacaa

SEQ ID NO: 32171 - RNA, 19 nt, Artificial Sequence
  Description of Artificial Sequence: Synthetic oligonucleotide
cugcaagaaguuguaugca

SEQ ID NO: 32172 - RNA, 19 nt, Artificial Sequence
  Description of Artificial Sequence: Synthetic oligonucleotide
agucuacagcauucacuua

SEQ ID NO: 32173 - RNA, 19 nt, Artificial Sequence
  Description of Artificial Sequence: Synthetic oligonucleotide
caaauuaaggaagcugcau

SEQ ID NO: 32174 - RNA, 19 nt, Artificial Sequence
  Description of Artificial Sequence: Synthetic oligonucleotide
cugcuauugauugugguuu

SEQ ID NO: 32175 - RNA, 19 nt, Artificial Sequence
  Description of Artificial Sequence: Synthetic oligonucleotide
ccacugauaggcuucaacu

SEQ ID NO: 32176 - RNA, 19 nt, Artificial Sequence
  Description of Artificial Sequence: Synthetic oligonucleotide
accucccgucacuaacacu

SEQ ID NO: 32177 - RNA, 19 nt, Artificial Sequence
  Description of Artificial Sequence: Synthetic oligonucleotide
guguggcuuuaauccuagc

SEQ ID NO: 32178 - RNA, 19 nt, Artificial Sequence
  Description of Artificial Sequence: Synthetic oligonucleotide
cuauacccuugaaaaucua

SEQ ID NO: 32179 - RNA, 19 nt, Artificial Sequence
  Description of Artificial Sequence: Synthetic oligonucleotide
cccgucacuaacacuccac

SEQ ID NO: 32180 - RNA, 19 nt, Artificial Sequence
  Description of Artificial Sequence: Synthetic oligonucleotide
caguuuuggaaucgauagu

SEQ ID NO: 32181 - RNA, 19 nt, Artificial Sequence
  Description of Artificial Sequence: Synthetic oligonucleotide
ggcauguaacgaccagcac

SEQ ID NO: 32182 - RNA, 19 nt, Artificial Sequence
  Description of Artificial Sequence: Synthetic oligonucleotide
ggauaagauggcugcugaa

SEQ ID NO: 32183 - RNA, 19 nt, Artificial Sequence
  Description of Artificial Sequence: Synthetic oligonucleotide
gaucgacuccagccaugga

SEQ ID NO: 32184 - RNA, 19 nt, Artificial Sequence
  Description of Artificial Sequence: Synthetic oligonucleotide
uagcgaccaccaccuguaa

SEQ ID NO: 32185 - RNA, 19 nt, Artificial Sequence
  Description of Artificial Sequence: Synthetic oligonucleotide
ggcaucgggcuguccagug

SEQ ID NO: 32186 - RNA, 19 nt, Artificial Sequence
  Description of Artificial Sequence: Synthetic oligonucleotide
agucaacaccuaaggacuu

SEQ ID NO: 32187 - RNA, 19 nt, Artificial Sequence
  Description of Artificial Sequence: Synthetic oligonucleotide
cguguggcuuuaauccuag

SEQ ID NO: 32188 - RNA, 19 nt, Artificial Sequence
  Description of Artificial Sequence: Synthetic oligonucleotide
ucgaggcaguugugagcca

SEQ ID NO: 32189 - RNA, 19 nt, Artificial Sequence
  Description of Artificial Sequence: Synthetic oligonucleotide
ccuggcauguaacgaccag

SEQ ID NO: 32190 - RNA, 19 nt, Artificial Sequence
  Description of Artificial Sequence: Synthetic oligonucleotide
gucccucccauuauaauuu

SEQ ID NO: 32191 - RNA, 19 nt, Artificial Sequence
  Description of Artificial Sequence: Synthetic oligonucleotide
ucggauuguuugggcacau

SEQ ID NO: 32192 - RNA, 19 nt, Artificial Sequence
  Description of Artificial Sequence: Synthetic oligonucleotide
accuggcauguaacgacca

SEQ ID NO: 32193 - RNA, 19 nt, Artificial Sequence
  Description of Artificial Sequence: Synthetic oligonucleotide
gcugcuauugauugugguu

SEQ ID NO: 32194 - RNA, 19 nt, Artificial Sequence
  Description of Artificial Sequence: Synthetic oligonucleotide
cugaucgguaggcacuacu

SEQ ID NO: 32195 - RNA, 19 nt, Artificial Sequence
  Description of Artificial Sequence: Synthetic oligonucleotide
cugauacggaggcauacuu

SEQ ID NO: 32196 - RNA, 19 nt, Artificial Sequence
  Description of Artificial Sequence: Synthetic oligonucleotide
augaaccaugaaaggugau

SEQ ID NO: 32197 - RNA, 19 nt, Artificial Sequence
  Description of Artificial Sequence: Synthetic oligonucleotide
ccaucacucgcaccaacca

SEQ ID NO: 32198 - RNA, 19 nt, Artificial Sequence
  Description of Artificial Sequence: Synthetic oligonucleotide
cugacauuauaugguaauu

SEQ ID NO: 32199 - RNA, 19 nt, Artificial Sequence
  Description of Artificial Sequence: Synthetic oligonucleotide
ccaacguuugaccuuuugu

SEQ ID NO: 32200 - RNA, 19 nt, Artificial Sequence
  Description of Artificial Sequence: Synthetic oligonucleotide
ccuguaaaugggucugaaa

SEQ ID NO: 32201 - RNA, 19 nt, Artificial Sequence
  Description of Artificial Sequence: Synthetic oligonucleotide
cccaacguuugaccuuuug

SEQ ID NO: 32202 - RNA, 19 nt, Artificial Sequence
  Description of Artificial Sequence: Synthetic oligonucleotide
cugcgacucuguaaacacu

SEQ ID NO: 32203 - RNA, 19 nt, Artificial Sequence
  Description of Artificial Sequence: Synthetic oligonucleotide
ccauauagacugagcugga

SEQ ID NO: 32204 - RNA, 19 nt, Artificial Sequence
  Description of Artificial Sequence: Synthetic oligonucleotide
ccaccucccgucacuaaca

SEQ ID NO: 32205 - RNA, 19 nt, Artificial Sequence
  Description of Artificial Sequence: Synthetic oligonucleotide
gucccaacguuugaccuuu

SEQ ID NO: 32206 - RNA, 19 nt, Artificial Sequence
  Description of Artificial Sequence: Synthetic oligonucleotide
guaauccaguggguagagu

SEQ ID NO: 32207 - RNA, 19 nt, Artificial Sequence
  Description of Artificial Sequence: Synthetic oligonucleotide
caucucggauuagacgagu

SEQ ID NO: 32208 - RNA, 19 nt, Artificial Sequence
  Description of Artificial Sequence: Synthetic oligonucleotide
gguggauaagauggcugcu

SEQ ID NO: 32209 - RNA, 19 nt, Artificial Sequence
  Description of Artificial Sequence: Synthetic oligonucleotide
ucccaacguuugaccuuuu

SEQ ID NO: 32210 - RNA, 19 nt, Artificial Sequence
  Description of Artificial Sequence: Synthetic oligonucleotide
gcuauugauugugguuuua

SEQ ID NO: 32211 - RNA, 19 nt, Artificial Sequence
  Description of Artificial Sequence: Synthetic oligonucleotide
cggauuagacgagucuguc

SEQ ID NO: 32212 - RNA, 19 nt, Artificial Sequence
  Description of Artificial Sequence: Synthetic oligonucleotide
ccgucacuaacacuccacu

SEQ ID NO: 32213 - RNA, 19 nt, Artificial Sequence
  Description of Artificial Sequence: Synthetic oligonucleotide
gcgacucuguaaacacucu

SEQ ID NO: 32214 - RNA, 19 nt, Artificial Sequence
  Description of Artificial Sequence: Synthetic oligonucleotide
gcaauagaaccaggaugau

SEQ ID NO: 32215 - RNA, 19 nt, Artificial Sequence
  Description of Artificial Sequence: Synthetic oligonucleotide
ggauccucacugacauuau

SEQ ID NO: 32216 - RNA, 19 nt, Artificial Sequence
  Description of Artificial Sequence: Synthetic oligonucleotide
gcccauacugcagcuguau

SEQ ID NO: 32217 - RNA, 19 nt, Artificial Sequence
  Description of Artificial Sequence: Synthetic oligonucleotide
cccucccauuauaauuuau

SEQ ID NO: 32218 - RNA, 19 nt, Artificial Sequence
  Description of Artificial Sequence: Synthetic oligonucleotide
ccgauccugcgacucugua

SEQ ID NO: 32219 - RNA, 19 nt, Artificial Sequence
  Description of Artificial Sequence: Synthetic oligonucleotide
cacucgcaccaaccacaau

SEQ ID NO: 32220 - RNA, 19 nt, Artificial Sequence
  Description of Artificial Sequence: Synthetic oligonucleotide
cggauuguuugggcacauu

SEQ ID NO: 32221 - RNA, 19 nt, Artificial Sequence
  Description of Artificial Sequence: Synthetic oligonucleotide
uauguaaacgauuugaugg

SEQ ID NO: 32222 - RNA, 19 nt, Artificial Sequence
  Description of Artificial Sequence: Synthetic oligonucleotide
aauucauaaaauuucacgu

SEQ ID NO: 32223 - RNA, 19 nt, Artificial Sequence
  Description of Artificial Sequence: Synthetic oligonucleotide
aauagauucugaaagaacg

SEQ ID NO: 32224 - RNA, 19 nt, Artificial Sequence
  Description of Artificial Sequence: Synthetic oligonucleotide
ucuauuucaugauagaagc

SEQ ID NO: 32225 - RNA, 19 nt, Artificial Sequence
  Description of Artificial Sequence: Synthetic oligonucleotide
aacugauuuauguaggguc

SEQ ID NO: 32226 - RNA, 19 nt, Artificial Sequence
  Description of Artificial Sequence: Synthetic oligonucleotide
aaauagaccauacacacaa

SEQ ID NO: 32227 - RNA, 19 nt, Artificial Sequence
  Description of Artificial Sequence: Synthetic oligonucleotide
aauacuaugaugcaauuuu

SEQ ID NO: 32228 - RNA, 19 nt, Artificial Sequence
  Description of Artificial Sequence: Synthetic oligonucleotide
ucagcugaaugcaagaggg

SEQ ID NO: 32229 - RNA, 19 nt, Artificial Sequence
  Description of Artificial Sequence: Synthetic oligonucleotide
aaaacuaacccucaaaaua

SEQ ID NO: 32230 - RNA, 19 nt, Artificial Sequence
  Description of Artificial Sequence: Synthetic oligonucleotide
auugauaugccacaaagcu

SEQ ID NO: 32231 - RNA, 19 nt, Artificial Sequence
  Description of Artificial Sequence: Synthetic oligonucleotide
uacucggucagaaaguucg

SEQ ID NO: 32232 - RNA, 19 nt, Artificial Sequence
  Description of Artificial Sequence: Synthetic oligonucleotide
aauuaaugggcuuccaucu

SEQ ID NO: 32233 - RNA, 19 nt, Artificial Sequence
  Description of Artificial Sequence: Synthetic oligonucleotide
gagauaacggcccaaagag

SEQ ID NO: 32234 - RNA, 19 nt, Artificial Sequence
  Description of Artificial Sequence: Synthetic oligonucleotide
ucuggaaacggacauagcc

SEQ ID NO: 32235 - RNA, 19 nt, Artificial Sequence
  Description of Artificial Sequence: Synthetic oligonucleotide
aauuauuuggacaucaagu

SEQ ID NO: 32236 - RNA, 19 nt, Artificial Sequence
  Description of Artificial Sequence: Synthetic oligonucleotide
aacggaguaguuugcaucg

SEQ ID NO: 32237 - RNA, 19 nt, Artificial Sequence
  Description of Artificial Sequence: Synthetic oligonucleotide
aauacauagguuuaacuuu

SEQ ID NO: 32238 - RNA, 19 nt, Artificial Sequence
  Description of Artificial Sequence: Synthetic oligonucleotide
aauauacgaaggcuggcuc

SEQ ID NO: 32239 - RNA, 19 nt, Artificial Sequence
  Description of Artificial Sequence: Synthetic oligonucleotide
aaacuaacccucaaaauag

SEQ ID NO: 32240 - RNA, 19 nt, Artificial Sequence
  Description of Artificial Sequence: Synthetic oligonucleotide
ugagauuugcaacuuuggg

SEQ ID NO: 32241 - RNA, 19 nt, Artificial Sequence
  Description of Artificial Sequence: Synthetic oligonucleotide
agaccagacaagcuuaacc

SEQ ID NO: 32242 - RNA, 19 nt, Artificial Sequence
  Description of Artificial Sequence: Synthetic oligonucleotide
agauuugcaacuuugggcu

SEQ ID NO: 32243 - RNA, 19 nt, Artificial Sequence
  Description of Artificial Sequence: Synthetic oligonucleotide
caaguuaggagauggaacc

SEQ ID NO: 32244 - RNA, 19 nt, Artificial Sequence
  Description of Artificial Sequence: Synthetic oligonucleotide
gagauuugcaacuuugggc

SEQ ID NO: 32245 - RNA, 19 nt, Artificial Sequence
  Description of Artificial Sequence: Synthetic oligonucleotide
ucacaacugauuuauguag

SEQ ID NO: 32246 - RNA, 19 nt, Artificial Sequence
  Description of Artificial Sequence: Synthetic oligonucleotide
auaccaaucauugaaugac

SEQ ID NO: 32247 - RNA, 19 nt, Artificial Sequence
  Description of Artificial Sequence: Synthetic oligonucleotide
ucuaaagaagcguaaugcc

SEQ ID NO: 32248 - RNA, 19 nt, Artificial Sequence
  Description of Artificial Sequence: Synthetic oligonucleotide
augauuaaccucuuccaac

SEQ ID NO: 32249 - RNA, 19 nt, Artificial Sequence
  Description of Artificial Sequence: Synthetic oligonucleotide
auaucuaaugaagucacac

SEQ ID NO: 32250 - RNA, 19 nt, Artificial Sequence
  Description of Artificial Sequence: Synthetic oligonucleotide
aagccgaaagucauaaacc

SEQ ID NO: 32251 - RNA, 19 nt, Artificial Sequence
  Description of Artificial Sequence: Synthetic oligonucleotide
agaaacaccuaucaucauc

SEQ ID NO: 32252 - RNA, 19 nt, Artificial Sequence
  Description of Artificial Sequence: Synthetic oligonucleotide
uggggaacccaauuaaugg

SEQ ID NO: 32253 - RNA, 19 nt, Artificial Sequence
  Description of Artificial Sequence: Synthetic oligonucleotide
uguuuuacauacaaccgcu

SEQ ID NO: 32254 - RNA, 19 nt, Artificial Sequence
  Description of Artificial Sequence: Synthetic oligonucleotide
gaauuauagaugaaggcug

SEQ ID NO: 32255 - RNA, 19 nt, Artificial Sequence
  Description of Artificial Sequence: Synthetic oligonucleotide
aaacuggacaaguuaggag

SEQ ID NO: 32256 - RNA, 19 nt, Artificial Sequence
  Description of Artificial Sequence: Synthetic oligonucleotide
acaaggguuacauuagguc

SEQ ID NO: 32257 - RNA, 19 nt, Artificial Sequence
  Description of Artificial Sequence: Synthetic oligonucleotide
ugggcuauaaagaaaacua

SEQ ID NO: 32258 - RNA, 19 nt, Artificial Sequence
  Description of Artificial Sequence: Synthetic oligonucleotide
aaaaguccaggguaacuag

SEQ ID NO: 32259 - RNA, 19 nt, Artificial Sequence
  Description of Artificial Sequence: Synthetic oligonucleotide
aauuaacuaugugcgaagg

SEQ ID NO: 32260 - RNA, 19 nt, Artificial Sequence
  Description of Artificial Sequence: Synthetic oligonucleotide
uaaaacggcuuuaucuggg

SEQ ID NO: 32261 - RNA, 19 nt, Artificial Sequence
  Description of Artificial Sequence: Synthetic oligonucleotide
agagagagcguguacguac

SEQ ID NO: 32262 - RNA, 19 nt, Artificial Sequence
  Description of Artificial Sequence: Synthetic oligonucleotide
ugagauaacggcccaaaga

SEQ ID NO: 32263 - RNA, 19 nt, Artificial Sequence
  Description of Artificial Sequence: Synthetic oligonucleotide
acucacaugugauauaucu

SEQ ID NO: 32264 - RNA, 19 nt, Artificial Sequence
  Description of Artificial Sequence: Synthetic oligonucleotide
uuaaucauucuuaagcauu

SEQ ID NO: 32265 - RNA, 19 nt, Artificial Sequence
  Description of Artificial Sequence: Synthetic oligonucleotide
aaagcgucagguuagugau

SEQ ID NO: 32266 - RNA, 19 nt, Artificial Sequence
  Description of Artificial Sequence: Synthetic oligonucleotide
aaaacuaccuuugcuagcu

SEQ ID NO: 32267 - RNA, 19 nt, Artificial Sequence
  Description of Artificial Sequence: Synthetic oligonucleotide
aaaaccccuuauuacaccu

SEQ ID NO: 32268 - RNA, 19 nt, Artificial Sequence
  Description of Artificial Sequence: Synthetic oligonucleotide
uaaaucuggauacauuauc

SEQ ID NO: 32269 - RNA, 19 nt, Artificial Sequence
  Description of Artificial Sequence: Synthetic oligonucleotide
uauugagccaaaccaaacu

SEQ ID NO: 32270 - RNA, 19 nt, Artificial Sequence
  Description of Artificial Sequence: Synthetic oligonucleotide
augggcaauagucaaauca

SEQ ID NO: 32271 - RNA, 19 nt, Artificial Sequence
  Description of Artificial Sequence: Synthetic oligonucleotide
cuaacccucaaaauagacc

SEQ ID NO: 32272 - RNA, 19 nt, Artificial Sequence
  Description of Artificial Sequence: Synthetic oligonucleotide
uaauagauucugaaagaac

SEQ ID NO: 32273 - RNA, 19 nt, Artificial Sequence
  Description of Artificial Sequence: Synthetic oligonucleotide
aaauuaagagauucaugau

SEQ ID NO: 32274 - RNA, 19 nt, Artificial Sequence
  Description of Artificial Sequence: Synthetic oligonucleotide
gaugccuacaauucuucag

SEQ ID NO: 32275 - RNA, 19 nt, Artificial Sequence
  Description of Artificial Sequence: Synthetic oligonucleotide
acaacugauuuauguaggg

SEQ ID NO: 32276 - RNA, 19 nt, Artificial Sequence
  Description of Artificial Sequence: Synthetic oligonucleotide
ucagcguugaagucgaacu

SEQ ID NO: 32277 - RNA, 19 nt, Artificial Sequence
  Description of Artificial Sequence: Synthetic oligonucleotide
aacuaccuuugcuagcuag

SEQ ID NO: 32278 - RNA, 19 nt, Artificial Sequence
  Description of Artificial Sequence: Synthetic oligonucleotide
agacccaggacuaacacac

SEQ ID NO: 32279 - RNA, 19 nt, Artificial Sequence
  Description of Artificial Sequence: Synthetic oligonucleotide
uuaucaaagaucagccagu

SEQ ID NO: 32280 - RNA, 19 nt, Artificial Sequence
  Description of Artificial Sequence: Synthetic oligonucleotide
uuaaccugcgacuucagau

SEQ ID NO: 32281 - RNA, 19 nt, Artificial Sequence
  Description of Artificial Sequence: Synthetic oligonucleotide
uguguaguaagaccuuggc

SEQ ID NO: 32282 - RNA, 19 nt, Artificial Sequence
  Description of Artificial Sequence: Synthetic oligonucleotide
acauaucuaaugaagucac

SEQ ID NO: 32283 - RNA, 19 nt, Artificial Sequence
  Description of Artificial Sequence: Synthetic oligonucleotide
acuuacccaacacuuuuac

SEQ ID NO: 32284 - RNA, 19 nt, Artificial Sequence
  Description of Artificial Sequence: Synthetic oligonucleotide
uggguaguuguauacucgg

SEQ ID NO: 32285 - RNA, 19 nt, Artificial Sequence
  Description of Artificial Sequence: Synthetic oligonucleotide
uuaacuaugugcgaaggaa

SEQ ID NO: 32286 - RNA, 19 nt, Artificial Sequence
  Description of Artificial Sequence: Synthetic oligonucleotide
aacuagaugacaacggacu

SEQ ID NO: 32287 - RNA, 19 nt, Artificial Sequence
  Description of Artificial Sequence: Synthetic oligonucleotide
uuaauagauucugaaagaa

SEQ ID NO: 32288 - RNA, 19 nt, Artificial Sequence
  Description of Artificial Sequence: Synthetic oligonucleotide
acaaguuaggagauggaac

SEQ ID NO: 32289 - RNA, 19 nt, Artificial Sequence
  Description of Artificial Sequence: Synthetic oligonucleotide
auagaccauacacacaacu

SEQ ID NO: 32290 - RNA, 19 nt, Artificial Sequence
  Description of Artificial Sequence: Synthetic oligonucleotide
auuaucugaaugccagauc

SEQ ID NO: 32291 - RNA, 19 nt, Artificial Sequence
  Description of Artificial Sequence: Synthetic oligonucleotide
ucggucagaaaguucgccg

SEQ ID NO: 32292 - RNA, 19 nt, Artificial Sequence
  Description of Artificial Sequence: Synthetic oligonucleotide
cuggaaacggacauagccc

SEQ ID NO: 32293 - RNA, 19 nt, Artificial Sequence
  Description of Artificial Sequence: Synthetic oligonucleotide
caauuaaugggcuuccauc

SEQ ID NO: 32294 - RNA, 19 nt, Artificial Sequence
  Description of Artificial Sequence: Synthetic oligonucleotide
aaacgauuugauggggaac

SEQ ID NO: 32295 - RNA, 19 nt, Artificial Sequence
  Description of Artificial Sequence: Synthetic oligonucleotide
gacauagcccuucuguaag

SEQ ID NO: 32296 - RNA, 19 nt, Artificial Sequence
  Description of Artificial Sequence: Synthetic oligonucleotide
uucuuagcgauaauauuaa

SEQ ID NO: 32297 - RNA, 19 nt, Artificial Sequence
  Description of Artificial Sequence: Synthetic oligonucleotide
uucgccgugagauaacggc

SEQ ID NO: 32298 - RNA, 19 nt, Artificial Sequence
  Description of Artificial Sequence: Synthetic oligonucleotide
gucuauuucaugauagaag

SEQ ID NO: 32299 - RNA, 19 nt, Artificial Sequence
  Description of Artificial Sequence: Synthetic oligonucleotide
ugggcaauagucaaaucaa

SEQ ID NO: 32300 - RNA, 19 nt, Artificial Sequence
  Description of Artificial Sequence: Synthetic oligonucleotide
aguuaggagauggaacccc

SEQ ID NO: 32301 - RNA, 19 nt, Artificial Sequence
  Description of Artificial Sequence: Synthetic oligonucleotide
uaacuagaugacaacggac

SEQ ID NO: 32302 - RNA, 19 nt, Artificial Sequence
  Description of Artificial Sequence: Synthetic oligonucleotide
uuuauguagggucaacauu

SEQ ID NO: 32303 - RNA, 19 nt, Artificial Sequence
  Description of Artificial Sequence: Synthetic oligonucleotide
auugaaugacaucauguaa

SEQ ID NO: 32304 - RNA, 19 nt, Artificial Sequence
  Description of Artificial Sequence: Synthetic oligonucleotide
agcgucagguuagugaugc

SEQ ID NO: 32305 - RNA, 19 nt, Artificial Sequence
  Description of Artificial Sequence: Synthetic oligonucleotide
cugaaauuaucugaaugcc

SEQ ID NO: 32306 - RNA, 19 nt, Artificial Sequence
  Description of Artificial Sequence: Synthetic oligonucleotide
caaugcauaugguagcuug

SEQ ID NO: 32307 - RNA, 19 nt, Artificial Sequence
  Description of Artificial Sequence: Synthetic oligonucleotide
ugauaccauuacaagugag

SEQ ID NO: 32308 - RNA, 19 nt, Artificial Sequence
  Description of Artificial Sequence: Synthetic oligonucleotide
aaugcauaugguagcuugg

SEQ ID NO: 32309 - RNA, 19 nt, Artificial Sequence
  Description of Artificial Sequence: Synthetic oligonucleotide
uaugugcgaaggaaggggc

SEQ ID NO: 32310 - RNA, 19 nt, Artificial Sequence
  Description of Artificial Sequence: Synthetic oligonucleotide
aacggcuuuaucugggcca

SEQ ID NO: 32311 - RNA, 19 nt, Artificial Sequence
  Description of Artificial Sequence: Synthetic oligonucleotide
gagauugaaauuaagagau

SEQ ID NO: 32312 - RNA, 19 nt, Artificial Sequence
  Description of Artificial Sequence: Synthetic oligonucleotide
uguaaacgauuugaugggg

SEQ ID NO: 32313 - RNA, 19 nt, Artificial Sequence
  Description of Artificial Sequence: Synthetic oligonucleotide
acuaaacauaucuaaugaa

SEQ ID NO: 32314 - RNA, 19 nt, Artificial Sequence
  Description of Artificial Sequence: Synthetic oligonucleotide
aauguguaguaagaccuug

SEQ ID NO: 32315 - RNA, 19 nt, Artificial Sequence
  Description of Artificial Sequence: Synthetic oligonucleotide
gucccaaauagcuauuacc

SEQ ID NO: 32316 - RNA, 19 nt, Artificial Sequence
  Description of Artificial Sequence: Synthetic oligonucleotide
auuaaucauucuuaagcau

SEQ ID NO: 32317 - RNA, 19 nt, Artificial Sequence
  Description of Artificial Sequence: Synthetic oligonucleotide
uguccauuggcaccaaagu

SEQ ID NO: 32318 - RNA, 19 nt, Artificial Sequence
  Description of Artificial Sequence: Synthetic oligonucleotide
aacgcuuaagggguggguc

SEQ ID NO: 32319 - RNA, 19 nt, Artificial Sequence
  Description of Artificial Sequence: Synthetic oligonucleotide
uuaagcaccuacuggcuga

SEQ ID NO: 32320 - RNA, 19 nt, Artificial Sequence
  Description of Artificial Sequence: Synthetic oligonucleotide
auuuauguagggucaacau

SEQ ID NO: 32321 - RNA, 19 nt, Artificial Sequence
  Description of Artificial Sequence: Synthetic oligonucleotide
uaguuguauacucggucag

SEQ ID NO: 32322 - RNA, 19 nt, Artificial Sequence
  Description of Artificial Sequence: Synthetic oligonucleotide
caccucacuguguaaaacg

SEQ ID NO: 32323 - RNA, 19 nt, Artificial Sequence
  Description of Artificial Sequence: Synthetic oligonucleotide
agcguugaagucgaacugc

SEQ ID NO: 32324 - RNA, 19 nt, Artificial Sequence
  Description of Artificial Sequence: Synthetic oligonucleotide
uagcgauaauauuaacugc

SEQ ID NO: 32325 - RNA, 19 nt, Artificial Sequence
  Description of Artificial Sequence: Synthetic oligonucleotide
ugagugugcuucuucacga

SEQ ID NO: 32326 - RNA, 19 nt, Artificial Sequence
  Description of Artificial Sequence: Synthetic oligonucleotide
uauuaagcaccuacuggcu

SEQ ID NO: 32327 - RNA, 19 nt, Artificial Sequence
  Description of Artificial Sequence: Synthetic oligonucleotide
aaaguacucuaugcacccc

SEQ ID NO: 32328 - RNA, 19 nt, Artificial Sequence
  Description of Artificial Sequence: Synthetic oligonucleotide
auuaaugggcuuccaucuc

SEQ ID NO: 32329 - RNA, 19 nt, Artificial Sequence
  Description of Artificial Sequence: Synthetic oligonucleotide
ucaugcuuacugcacguca

SEQ ID NO: 32330 - RNA, 19 nt, Artificial Sequence
  Description of Artificial Sequence: Synthetic oligonucleotide
caauuaacuaugugcgaag

SEQ ID NO: 32331 - RNA, 19 nt, Artificial Sequence
  Description of Artificial Sequence: Synthetic oligonucleotide
uggaaacggacauagcccu

SEQ ID NO: 32332 - RNA, 19 nt, Artificial Sequence
  Description of Artificial Sequence: Synthetic oligonucleotide
agcgauaauauuaacugca

SEQ ID NO: 32333 - RNA, 19 nt, Artificial Sequence
  Description of Artificial Sequence: Synthetic oligonucleotide
aggguaacuagaugacaac

SEQ ID NO: 32334 - RNA, 19 nt, Artificial Sequence
  Description of Artificial Sequence: Synthetic oligonucleotide
uagauucugaaagaacgug

SEQ ID NO: 32335 - RNA, 19 nt, Artificial Sequence
  Description of Artificial Sequence: Synthetic oligonucleotide
uaaacgauuugauggggaa

SEQ ID NO: 32336 - RNA, 19 nt, Artificial Sequence
  Description of Artificial Sequence: Synthetic oligonucleotide
uaauauacgaaggcuggcu

SEQ ID NO: 32337 - RNA, 19 nt, Artificial Sequence
  Description of Artificial Sequence: Synthetic oligonucleotide
aacugaaucucaguuccug

SEQ ID NO: 32338 - RNA, 19 nt, Artificial Sequence
  Description of Artificial Sequence: Synthetic oligonucleotide
guaguuguauacucgguca

SEQ ID NO: 32339 - RNA, 19 nt, Artificial Sequence
  Description of Artificial Sequence: Synthetic oligonucleotide
cuacaauucuucagcguag

SEQ ID NO: 32340 - RNA, 19 nt, Artificial Sequence
  Description of Artificial Sequence: Synthetic oligonucleotide
aaaguucgccgugagauaa

SEQ ID NO: 32341 - RNA, 19 nt, Artificial Sequence
  Description of Artificial Sequence: Synthetic oligonucleotide
cagaggacugauaacauga

SEQ ID NO: 32342 - RNA, 19 nt, Artificial Sequence
  Description of Artificial Sequence: Synthetic oligonucleotide
ucuuaaguuuaccuaucau

SEQ ID NO: 32343 - RNA, 19 nt, Artificial Sequence
  Description of Artificial Sequence: Synthetic oligonucleotide
ugugguuaccuugagcaga

SEQ ID NO: 32344 - RNA, 19 nt, Artificial Sequence
  Description of Artificial Sequence: Synthetic oligonucleotide
acuaacccucaaaauagac

SEQ ID NO: 32345 - RNA, 19 nt, Artificial Sequence
  Description of Artificial Sequence: Synthetic oligonucleotide
aagagucggguaaagcguc

SEQ ID NO: 32346 - RNA, 19 nt, Artificial Sequence
  Description of Artificial Sequence: Synthetic oligonucleotide
gguaacuagaugacaacgg

SEQ ID NO: 32347 - RNA, 19 nt, Artificial Sequence
  Description of Artificial Sequence: Synthetic oligonucleotide
aaccugcgacuucagaucu

SEQ ID NO: 32348 - RNA, 19 nt, Artificial Sequence
  Description of Artificial Sequence: Synthetic oligonucleotide
guaacuagaugacaacgga

SEQ ID NO: 32349 - RNA, 19 nt, Artificial Sequence
  Description of Artificial Sequence: Synthetic oligonucleotide
uagaccauacacacaacua

SEQ ID NO: 32350 - RNA, 19 nt, Artificial Sequence
  Description of Artificial Sequence: Synthetic oligonucleotide
caggguauguucauaaaca

SEQ ID NO: 32351 - RNA, 19 nt, Artificial Sequence
  Description of Artificial Sequence: Synthetic oligonucleotide
acaauuaacuaugugcgaa

SEQ ID NO: 32352 - RNA, 19 nt, Artificial Sequence
  Description of Artificial Sequence: Synthetic oligonucleotide
ucauaaaauuucacgucua

SEQ ID NO: 32353 - RNA, 19 nt, Artificial Sequence
  Description of Artificial Sequence: Synthetic oligonucleotide
acuaccuuugcuagcuagc

SEQ ID NO: 32354 - RNA, 19 nt, Artificial Sequence
  Description of Artificial Sequence: Synthetic oligonucleotide
aggccaacggaguaguuug

SEQ ID NO: 32355 - RNA, 19 nt, Artificial Sequence
  Description of Artificial Sequence: Synthetic oligonucleotide
auugaaauuaagagauuca

SEQ ID NO: 32356 - RNA, 19 nt, Artificial Sequence
  Description of Artificial Sequence: Synthetic oligonucleotide
aguguguggugcuucacca

SEQ ID NO: 32357 - RNA, 19 nt, Artificial Sequence
  Description of Artificial Sequence: Synthetic oligonucleotide
caugcuuacugcacgucag

SEQ ID NO: 32358 - RNA, 19 nt, Artificial Sequence
  Description of Artificial Sequence: Synthetic oligonucleotide
uuugauggggaacccaauu

SEQ ID NO: 32359 - RNA, 19 nt, Artificial Sequence
  Description of Artificial Sequence: Synthetic oligonucleotide
ccaacugaaucucaguucc

SEQ ID NO: 32360 - RNA, 19 nt, Artificial Sequence
  Description of Artificial Sequence: Synthetic oligonucleotide
acugguaaguuuaaaucug

SEQ ID NO: 32361 - RNA, 19 nt, Artificial Sequence
  Description of Artificial Sequence: Synthetic oligonucleotide
auauacgaaggcuggcuca

SEQ ID NO: 32362 - RNA, 19 nt, Artificial Sequence
  Description of Artificial Sequence: Synthetic oligonucleotide
ugacuuacccaacacuuuu

SEQ ID NO: 32363 - RNA, 19 nt, Artificial Sequence
  Description of Artificial Sequence: Synthetic oligonucleotide
uaaccugcgacuucagauc

SEQ ID NO: 32364 - RNA, 19 nt, Artificial Sequence
  Description of Artificial Sequence: Synthetic oligonucleotide
caagccuguacagucaagc

SEQ ID NO: 32365 - RNA, 19 nt, Artificial Sequence
  Description of Artificial Sequence: Synthetic oligonucleotide
uuucgcugcauacuuuauc

SEQ ID NO: 32366 - RNA, 19 nt, Artificial Sequence
  Description of Artificial Sequence: Synthetic oligonucleotide
caaagcgucagguuaguga

SEQ ID NO: 32367 - RNA, 19 nt, Artificial Sequence
  Description of Artificial Sequence: Synthetic oligonucleotide
aagugaccccuguaaguug

SEQ ID NO: 32368 - RNA, 19 nt, Artificial Sequence
  Description of Artificial Sequence: Synthetic oligonucleotide
agguagaauuuucugucca

SEQ ID NO: 32369 - RNA, 19 nt, Artificial Sequence
  Description of Artificial Sequence: Synthetic oligonucleotide
cagacaagcuuaaccugcg

SEQ ID NO: 32370 - RNA, 19 nt, Artificial Sequence
  Description of Artificial Sequence: Synthetic oligonucleotide
ccaaauagcuauuaccaug

SEQ ID NO: 32371 - RNA, 19 nt, Artificial Sequence
  Description of Artificial Sequence: Synthetic oligonucleotide
caaacaagcuuuaguacga

SEQ ID NO: 32372 - RNA, 19 nt, Artificial Sequence
  Description of Artificial Sequence: Synthetic oligonucleotide
gacacucuuaaguuuaccu

SEQ ID NO: 32373 - RNA, 19 nt, Artificial Sequence
  Description of Artificial Sequence: Synthetic oligonucleotide
gauuaaccucuuccaacug

SEQ ID NO: 32374 - RNA, 19 nt, Artificial Sequence
  Description of Artificial Sequence: Synthetic oligonucleotide
ucacgucucuucuugggga

SEQ ID NO: 32375 - RNA, 19 nt, Artificial Sequence
  Description of Artificial Sequence: Synthetic oligonucleotide
cuaaaaguguauugagcca

SEQ ID NO: 32376 - RNA, 19 nt, Artificial Sequence
  Description of Artificial Sequence: Synthetic oligonucleotide
ugcaaucauacaaggguua

SEQ ID NO: 32377 - RNA, 19 nt, Artificial Sequence
  Description of Artificial Sequence: Synthetic oligonucleotide
uacaaccgcucuccuaugc

SEQ ID NO: 32378 - RNA, 19 nt, Artificial Sequence
  Description of Artificial Sequence: Synthetic oligonucleotide
gucagguuagugaugcuag

SEQ ID NO: 32379 - RNA, 19 nt, Artificial Sequence
  Description of Artificial Sequence: Synthetic oligonucleotide
gaugcuaguucccucccca

SEQ ID NO: 32380 - RNA, 19 nt, Artificial Sequence
  Description of Artificial Sequence: Synthetic oligonucleotide
gugagauuugcaacuuugg

SEQ ID NO: 32381 - RNA, 19 nt, Artificial Sequence
  Description of Artificial Sequence: Synthetic oligonucleotide
guccuuagaauaugcaaca

SEQ ID NO: 32382 - RNA, 19 nt, Artificial Sequence
  Description of Artificial Sequence: Synthetic oligonucleotide
ucgccgugagauaacggcc

SEQ ID NO: 32383 - RNA, 19 nt, Artificial Sequence
  Description of Artificial Sequence: Synthetic oligonucleotide
caacggaguaguuugcauc

SEQ ID NO: 32384 - RNA, 19 nt, Artificial Sequence
  Description of Artificial Sequence: Synthetic oligonucleotide
uggccaaagcgucagguua

SEQ ID NO: 32385 - RNA, 19 nt, Artificial Sequence
  Description of Artificial Sequence: Synthetic oligonucleotide
ugauucugagacccaggac

SEQ ID NO: 32386 - RNA, 19 nt, Artificial Sequence
  Description of Artificial Sequence: Synthetic oligonucleotide
guaagguuaggguucugca

SEQ ID NO: 32387 - RNA, 19 nt, Artificial Sequence
  Description of Artificial Sequence: Synthetic oligonucleotide
agcguguacguacacuuga

SEQ ID NO: 32388 - RNA, 19 nt, Artificial Sequence
  Description of Artificial Sequence: Synthetic oligonucleotide
uucacgucuauuucaugau

SEQ ID NO: 32389 - RNA, 19 nt, Artificial Sequence
  Description of Artificial Sequence: Synthetic oligonucleotide
cuggaacaagcaaacccag

SEQ ID NO: 32390 - RNA, 19 nt, Artificial Sequence
  Description of Artificial Sequence: Synthetic oligonucleotide
ggguaacuagaugacaacg

SEQ ID NO: 32391 - RNA, 19 nt, Artificial Sequence
  Description of Artificial Sequence: Synthetic oligonucleotide
cuaaagaagcguaaugccu

SEQ ID NO: 32392 - RNA, 19 nt, Artificial Sequence
  Description of Artificial Sequence: Synthetic oligonucleotide
ucuuagcgauaauauuaac

SEQ ID NO: 32393 - RNA, 19 nt, Artificial Sequence
  Description of Artificial Sequence: Synthetic oligonucleotide
aagucgaacugcucucuau

SEQ ID NO: 32394 - RNA, 19 nt, Artificial Sequence
  Description of Artificial Sequence: Synthetic oligonucleotide
ccuuauuacaccuuggaaa

SEQ ID NO: 32395 - RNA, 19 nt, Artificial Sequence
  Description of Artificial Sequence: Synthetic oligonucleotide
aaggguuacauuaggucaa

SEQ ID NO: 32396 - RNA, 19 nt, Artificial Sequence
  Description of Artificial Sequence: Synthetic oligonucleotide
uuaaggggugggucaaacu

SEQ ID NO: 32397 - RNA, 19 nt, Artificial Sequence
  Description of Artificial Sequence: Synthetic oligonucleotide
gguaguuguauacucgguc

SEQ ID NO: 32398 - RNA, 19 nt, Artificial Sequence
  Description of Artificial Sequence: Synthetic oligonucleotide
cuagcuagccccuuuccca

SEQ ID NO: 32399 - RNA, 19 nt, Artificial Sequence
  Description of Artificial Sequence: Synthetic oligonucleotide
gaaagaacguggcaauaua

SEQ ID NO: 32400 - RNA, 19 nt, Artificial Sequence
  Description of Artificial Sequence: Synthetic oligonucleotide
aguucgccgugagauaacg

SEQ ID NO: 32401 - RNA, 19 nt, Artificial Sequence
  Description of Artificial Sequence: Synthetic oligonucleotide
uccaagguuuguuccuuca

SEQ ID NO: 32402 - RNA, 19 nt, Artificial Sequence
  Description of Artificial Sequence: Synthetic oligonucleotide
ugcauaugguagcuuggaa

SEQ ID NO: 32403 - RNA, 19 nt, Artificial Sequence
  Description of Artificial Sequence: Synthetic oligonucleotide
guagcuuggaauuuugaau

SEQ ID NO: 32404 - RNA, 19 nt, Artificial Sequence
  Description of Artificial Sequence: Synthetic oligonucleotide
uugcaagcacuugaaacgu

SEQ ID NO: 32405 - RNA, 19 nt, Artificial Sequence
  Description of Artificial Sequence: Synthetic oligonucleotide
ugaugcuaguucccucccc

SEQ ID NO: 32406 - RNA, 19 nt, Artificial Sequence
  Description of Artificial Sequence: Synthetic oligonucleotide
gacucaaguugugccaucc

SEQ ID NO: 32407 - RNA, 19 nt, Artificial Sequence
  Description of Artificial Sequence: Synthetic oligonucleotide
uuaagagauucaugaucaa

SEQ ID NO: 32408 - RNA, 19 nt, Artificial Sequence
  Description of Artificial Sequence: Synthetic oligonucleotide
ggugggucaaacugguaag

SEQ ID NO: 32409 - RNA, 19 nt, Artificial Sequence
  Description of Artificial Sequence: Synthetic oligonucleotide
ccgggcaucagagagagcg

SEQ ID NO: 32410 - RNA, 19 nt, Artificial Sequence
  Description of Artificial Sequence: Synthetic oligonucleotide
agucggguaaagcgucuuc

SEQ ID NO: 32411 - RNA, 19 nt, Artificial Sequence
  Description of Artificial Sequence: Synthetic oligonucleotide
guuagugaugcuaguuccc

SEQ ID NO: 32412 - RNA, 19 nt, Artificial Sequence
  Description of Artificial Sequence: Synthetic oligonucleotide
ggaaaagugaccccuguaa

SEQ ID NO: 32413 - RNA, 19 nt, Artificial Sequence
  Description of Artificial Sequence: Synthetic oligonucleotide
acucuuaaguuuaccuauc

SEQ ID NO: 32414 - RNA, 19 nt, Artificial Sequence
  Description of Artificial Sequence: Synthetic oligonucleotide
uaccuaucauucacaugug

SEQ ID NO: 32415 - RNA, 19 nt, Artificial Sequence
  Description of Artificial Sequence: Synthetic oligonucleotide
auggggaacccaauuaaug

SEQ ID NO: 32416 - RNA, 19 nt, Artificial Sequence
  Description of Artificial Sequence: Synthetic oligonucleotide
ggcuauaaagaaaacuaac

SEQ ID NO: 32417 - RNA, 19 nt, Artificial Sequence
  Description of Artificial Sequence: Synthetic oligonucleotide
aacaggccaacggaguagu

SEQ ID NO: 32418 - RNA, 19 nt, Artificial Sequence
  Description of Artificial Sequence: Synthetic oligonucleotide
ugcuagcuagccccuuucc

SEQ ID NO: 32419 - RNA, 19 nt, Artificial Sequence
  Description of Artificial Sequence: Synthetic oligonucleotide
uuccugucaggguauguuc

SEQ ID NO: 32420 - RNA, 19 nt, Artificial Sequence
  Description of Artificial Sequence: Synthetic oligonucleotide
gacaucaacuuuacaugac

SEQ ID NO: 32421 - RNA, 19 nt, Artificial Sequence
  Description of Artificial Sequence: Synthetic oligonucleotide
agagagcguguacguacac

SEQ ID NO: 32422 - RNA, 19 nt, Artificial Sequence
  Description of Artificial Sequence: Synthetic oligonucleotide
agaugccuacaauucuuca

SEQ ID NO: 32423 - RNA, 19 nt, Artificial Sequence
  Description of Artificial Sequence: Synthetic oligonucleotide
uaacuccaauuauuuggac

SEQ ID NO: 32424 - RNA, 19 nt, Artificial Sequence
  Description of Artificial Sequence: Synthetic oligonucleotide
caaccgcucuccuaugcag

SEQ ID NO: 32425 - RNA, 19 nt, Artificial Sequence
  Description of Artificial Sequence: Synthetic oligonucleotide
gaagcguaaugccugcuua

SEQ ID NO: 32426 - RNA, 19 nt, Artificial Sequence
  Description of Artificial Sequence: Synthetic oligonucleotide
augauuccuugcaauuuuc

SEQ ID NO: 32427 - RNA, 19 nt, Artificial Sequence
  Description of Artificial Sequence: Synthetic oligonucleotide
gucgaacugcucucuauac

SEQ ID NO: 32428 - RNA, 19 nt, Artificial Sequence
  Description of Artificial Sequence: Synthetic oligonucleotide
auacauagguuuaacuuua

SEQ ID NO: 32429 - RNA, 19 nt, Artificial Sequence
  Description of Artificial Sequence: Synthetic oligonucleotide
gcgacuucagaucuaaaga

SEQ ID NO: 32430 - RNA, 19 nt, Artificial Sequence
  Description of Artificial Sequence: Synthetic oligonucleotide
acaugucaugauauuuauc

SEQ ID NO: 32431 - RNA, 19 nt, Artificial Sequence
  Description of Artificial Sequence: Synthetic oligonucleotide
ugccaaacuucaugcuacc

SEQ ID NO: 32432 - RNA, 19 nt, Artificial Sequence
  Description of Artificial Sequence: Synthetic oligonucleotide
agcucaucgcaggauggac

SEQ ID NO: 32433 - RNA, 19 nt, Artificial Sequence
  Description of Artificial Sequence: Synthetic oligonucleotide
gaaacggacauagcccuuc

SEQ ID NO: 32434 - RNA, 19 nt, Artificial Sequence
  Description of Artificial Sequence: Synthetic oligonucleotide
uuugcuagcuagccccuuu

SEQ ID NO: 32435 - RNA, 19 nt, Artificial Sequence
  Description of Artificial Sequence: Synthetic oligonucleotide
agucgaacugcucucuaua

SEQ ID NO: 32436 - RNA, 19 nt, Artificial Sequence
  Description of Artificial Sequence: Synthetic oligonucleotide
agcuuggaauuuugaauaa

SEQ ID NO: 32437 - RNA, 19 nt, Artificial Sequence
  Description of Artificial Sequence: Synthetic oligonucleotide
acggcuuuaucugggccac

SEQ ID NO: 32438 - RNA, 19 nt, Artificial Sequence
  Description of Artificial Sequence: Synthetic oligonucleotide
aacaagagacgggccacca

SEQ ID NO: 32439 - RNA, 19 nt, Artificial Sequence
  Description of Artificial Sequence: Synthetic oligonucleotide
acaaccgcucuccuaugca

SEQ ID NO: 32440 - RNA, 19 nt, Artificial Sequence
  Description of Artificial Sequence: Synthetic oligonucleotide
gccguauuccacaaagccg

SEQ ID NO: 32441 - RNA, 19 nt, Artificial Sequence
  Description of Artificial Sequence: Synthetic oligonucleotide
aguaaacauccagcagagg

SEQ ID NO: 32442 - RNA, 19 nt, Artificial Sequence
  Description of Artificial Sequence: Synthetic oligonucleotide
cucagaaaguuuacucgca

SEQ ID NO: 32443 - RNA, 19 nt, Artificial Sequence
  Description of Artificial Sequence: Synthetic oligonucleotide
uacguacacuugauccucu

SEQ ID NO: 32444 - RNA, 19 nt, Artificial Sequence
  Description of Artificial Sequence: Synthetic oligonucleotide
cucacuguguaaaacggcu

SEQ ID NO: 32445 - RNA, 19 nt, Artificial Sequence
  Description of Artificial Sequence: Synthetic oligonucleotide
gguuacauuaggucaaaua

SEQ ID NO: 32446 - RNA, 19 nt, Artificial Sequence
  Description of Artificial Sequence: Synthetic oligonucleotide
cuuaaggggugggucaaac

SEQ ID NO: 32447 - RNA, 19 nt, Artificial Sequence
  Description of Artificial Sequence: Synthetic oligonucleotide
agcguaaugccugcuuaag

SEQ ID NO: 32448 - RNA, 19 nt, Artificial Sequence
  Description of Artificial Sequence: Synthetic oligonucleotide
aggucaaauacaacaaaua

SEQ ID NO: 32449 - RNA, 19 nt, Artificial Sequence
  Description of Artificial Sequence: Synthetic oligonucleotide
guaaacgauuugaugggga

SEQ ID NO: 32450 - RNA, 19 nt, Artificial Sequence
  Description of Artificial Sequence: Synthetic oligonucleotide
aggcugauuuugucugguc

SEQ ID NO: 32451 - RNA, 19 nt, Artificial Sequence
  Description of Artificial Sequence: Synthetic oligonucleotide
ugcuuacugcacgucagcu

SEQ ID NO: 32452 - RNA, 19 nt, Artificial Sequence
  Description of Artificial Sequence: Synthetic oligonucleotide
cuccgacaccagcugagcg

SEQ ID NO: 32453 - RNA, 19 nt, Artificial Sequence
  Description of Artificial Sequence: Synthetic oligonucleotide
aaacgcuuaaggggugggu

SEQ ID NO: 32454 - RNA, 19 nt, Artificial Sequence
  Description of Artificial Sequence: Synthetic oligonucleotide
aaguucgccgugagauaac

SEQ ID NO: 32455 - RNA, 19 nt, Artificial Sequence
  Description of Artificial Sequence: Synthetic oligonucleotide
cagcguugaagucgaacug

SEQ ID NO: 32456 - RNA, 19 nt, Artificial Sequence
  Description of Artificial Sequence: Synthetic oligonucleotide
uucaugcuaccaucuucac

SEQ ID NO: 32457 - RNA, 19 nt, Artificial Sequence
  Description of Artificial Sequence: Synthetic oligonucleotide
ucggguaaagcgucuucuc

SEQ ID NO: 32458 - RNA, 19 nt, Artificial Sequence
  Description of Artificial Sequence: Synthetic oligonucleotide
ugcuaguucccuccccauc

SEQ ID NO: 32459 - RNA, 19 nt, Artificial Sequence
  Description of Artificial Sequence: Synthetic oligonucleotide
gggaacccaauuaaugggc

SEQ ID NO: 32460 - RNA, 19 nt, Artificial Sequence
  Description of Artificial Sequence: Synthetic oligonucleotide
auccaacaggccaacggag

SEQ ID NO: 32461 - RNA, 19 nt, Artificial Sequence
  Description of Artificial Sequence: Synthetic oligonucleotide
uugcuagcuagccccuuuc

SEQ ID NO: 32462 - RNA, 19 nt, Artificial Sequence
  Description of Artificial Sequence: Synthetic oligonucleotide
uccuuagaauaugcaacaa

SEQ ID NO: 32463 - RNA, 19 nt, Artificial Sequence
  Description of Artificial Sequence: Synthetic oligonucleotide
agaauuuuacaaggcugaa

SEQ ID NO: 32464 - RNA, 19 nt, Artificial Sequence
  Description of Artificial Sequence: Synthetic oligonucleotide
guaaugccugcuuaagccu

SEQ ID NO: 32465 - RNA, 19 nt, Artificial Sequence
  Description of Artificial Sequence: Synthetic oligonucleotide
gucaguguuuaguguuuac

SEQ ID NO: 32466 - RNA, 19 nt, Artificial Sequence
  Description of Artificial Sequence: Synthetic oligonucleotide
augcauaugguagcuugga

SEQ ID NO: 32467 - RNA, 19 nt, Artificial Sequence
  Description of Artificial Sequence: Synthetic oligonucleotide
auacgaaggcuggcucacc

SEQ ID NO: 32468 - RNA, 19 nt, Artificial Sequence
  Description of Artificial Sequence: Synthetic oligonucleotide
ugugcgaaggaaggggcau

SEQ ID NO: 32469 - RNA, 19 nt, Artificial Sequence
  Description of Artificial Sequence: Synthetic oligonucleotide
accaaucauugaaugacau

SEQ ID NO: 32470 - RNA, 19 nt, Artificial Sequence
  Description of Artificial Sequence: Synthetic oligonucleotide
gaaaguucgccgugagaua

SEQ ID NO: 32471 - RNA, 19 nt, Artificial Sequence
  Description of Artificial Sequence: Synthetic oligonucleotide
aggauggaccccaaaggcu

SEQ ID NO: 32472 - RNA, 19 nt, Artificial Sequence
  Description of Artificial Sequence: Synthetic oligonucleotide
uuuaucugagacgcuuguu

SEQ ID NO: 32473 - RNA, 19 nt, Artificial Sequence
  Description of Artificial Sequence: Synthetic oligonucleotide
aacaacuuucuuagcgaua

SEQ ID NO: 32474 - RNA, 19 nt, Artificial Sequence
  Description of Artificial Sequence: Synthetic oligonucleotide
guaaacgcagaagacacau

SEQ ID NO: 32475 - RNA, 19 nt, Artificial Sequence
  Description of Artificial Sequence: Synthetic oligonucleotide
cucagcguugaagucgaac

SEQ ID NO: 32476 - RNA, 19 nt, Artificial Sequence
  Description of Artificial Sequence: Synthetic oligonucleotide
caccgggcaucagagagag

SEQ ID NO: 32477 - RNA, 19 nt, Artificial Sequence
  Description of Artificial Sequence: Synthetic oligonucleotide
gggagaaacgcgcggcucc

SEQ ID NO: 32478 - RNA, 19 nt, Artificial Sequence
  Description of Artificial Sequence: Synthetic oligonucleotide
uaaccucuuccaacugaau

SEQ ID NO: 32479 - RNA, 19 nt, Artificial Sequence
  Description of Artificial Sequence: Synthetic oligonucleotide
cuucuguaagguuaggguu

SEQ ID NO: 32480 - RNA, 19 nt, Artificial Sequence
  Description of Artificial Sequence: Synthetic oligonucleotide
aagaagcguaaugccugcu

SEQ ID NO: 32481 - RNA, 19 nt, Artificial Sequence
  Description of Artificial Sequence: Synthetic oligonucleotide
agacaagcuuaaccugcga

SEQ ID NO: 32482 - RNA, 19 nt, Artificial Sequence
  Description of Artificial Sequence: Synthetic oligonucleotide
guuuuacauacaaccgcuc

SEQ ID NO: 32483 - RNA, 19 nt, Artificial Sequence
  Description of Artificial Sequence: Synthetic oligonucleotide
agauaacggcccaaagagu

SEQ ID NO: 32484 - RNA, 19 nt, Artificial Sequence
  Description of Artificial Sequence: Synthetic oligonucleotide
aaacuaccuuugcuagcua

SEQ ID NO: 32485 - RNA, 19 nt, Artificial Sequence
  Description of Artificial Sequence: Synthetic oligonucleotide
auuauagaugaaggcugau

SEQ ID NO: 32486 - RNA, 19 nt, Artificial Sequence
  Description of Artificial Sequence: Synthetic oligonucleotide
gggugggucaaacugguaa

SEQ ID NO: 32487 - RNA, 19 nt, Artificial Sequence
  Description of Artificial Sequence: Synthetic oligonucleotide
cauaguuaucaauaacauu

SEQ ID NO: 32488 - RNA, 19 nt, Artificial Sequence
  Description of Artificial Sequence: Synthetic oligonucleotide
ccaacaacuuucuuagcga

SEQ ID NO: 32489 - RNA, 19 nt, Artificial Sequence
  Description of Artificial Sequence: Synthetic oligonucleotide
gcguaaugccugcuuaagc

SEQ ID NO: 32490 - RNA, 19 nt, Artificial Sequence
  Description of Artificial Sequence: Synthetic oligonucleotide
gaaacgcgcggcuccgaca

SEQ ID NO: 32491 - RNA, 19 nt, Artificial Sequence
  Description of Artificial Sequence: Synthetic oligonucleotide
uccacucacaugugauaua

SEQ ID NO: 32492 - RNA, 19 nt, Artificial Sequence
  Description of Artificial Sequence: Synthetic oligonucleotide
uccugcacuagagccauuu

SEQ ID NO: 32493 - RNA, 19 nt, Artificial Sequence
  Description of Artificial Sequence: Synthetic oligonucleotide
ugacaacggacugggguuc

SEQ ID NO: 32494 - RNA, 19 nt, Artificial Sequence
  Description of Artificial Sequence: Synthetic oligonucleotide
gguggcucagcguugaagu

SEQ ID NO: 32495 - RNA, 19 nt, Artificial Sequence
  Description of Artificial Sequence: Synthetic oligonucleotide
gcccucacaauuaacuaug

SEQ ID NO: 32496 - RNA, 19 nt, Artificial Sequence
  Description of Artificial Sequence: Synthetic oligonucleotide
ggucagaaaguucgccgug

SEQ ID NO: 32497 - RNA, 19 nt, Artificial Sequence
  Description of Artificial Sequence: Synthetic oligonucleotide
ccucacuguguaaaacggc

SEQ ID NO: 32498 - RNA, 19 nt, Artificial Sequence
  Description of Artificial Sequence: Synthetic oligonucleotide
gagagagcguguacguaca

SEQ ID NO: 32499 - RNA, 19 nt, Artificial Sequence
  Description of Artificial Sequence: Synthetic oligonucleotide
ccuacaauucuucagcgua

SEQ ID NO: 32500 - RNA, 19 nt, Artificial Sequence
  Description of Artificial Sequence: Synthetic oligonucleotide
gcaucgggagucuggaaac

SEQ ID NO: 32501 - RNA, 19 nt, Artificial Sequence
  Description of Artificial Sequence: Synthetic oligonucleotide
aacggcccaaagagucggg

SEQ ID NO: 32502 - RNA, 19 nt, Artificial Sequence
  Description of Artificial Sequence: Synthetic oligonucleotide
accccuuauuacaccuugg

SEQ ID NO: 32503 - RNA, 19 nt, Artificial Sequence
  Description of Artificial Sequence: Synthetic oligonucleotide
guucgccgugagauaacgg

SEQ ID NO: 32504 - RNA, 19 nt, Artificial Sequence
  Description of Artificial Sequence: Synthetic oligonucleotide
gagcguguacguacacuug

SEQ ID NO: 32505 - RNA, 19 nt, Artificial Sequence
  Description of Artificial Sequence: Synthetic oligonucleotide
uagaccagacaagcuuaac

SEQ ID NO: 32506 - RNA, 19 nt, Artificial Sequence
  Description of Artificial Sequence: Synthetic oligonucleotide
ggccggacgggagaaacgg

SEQ ID NO: 32507 - RNA, 19 nt, Artificial Sequence
  Description of Artificial Sequence: Synthetic oligonucleotide
acccucaaaauagaccaua

SEQ ID NO: 32508 - RNA, 19 nt, Artificial Sequence
  Description of Artificial Sequence: Synthetic oligonucleotide
acaagagacgggccaccaa

SEQ ID NO: 32509 - RNA, 19 nt, Artificial Sequence
  Description of Artificial Sequence: Synthetic oligonucleotide
gucagaaaguucgccguga

SEQ ID NO: 32510 - RNA, 19 nt, Artificial Sequence
  Description of Artificial Sequence: Synthetic oligonucleotide
cugcaaguguaaacgcaga

SEQ ID NO: 32511 - RNA, 19 nt, Artificial Sequence
  Description of Artificial Sequence: Synthetic oligonucleotide
accgcucuccuaugcagau

SEQ ID NO: 32512 - RNA, 19 nt, Artificial Sequence
  Description of Artificial Sequence: Synthetic oligonucleotide
cucuccuaugcagauggca

SEQ ID NO: 32513 - RNA, 19 nt, Artificial Sequence
  Description of Artificial Sequence: Synthetic oligonucleotide
cccaacuuucgcugcauac

SEQ ID NO: 32514 - RNA, 19 nt, Artificial Sequence
  Description of Artificial Sequence: Synthetic oligonucleotide
gaagucgaacugcucucua

SEQ ID NO: 32515 - RNA, 19 nt, Artificial Sequence
  Description of Artificial Sequence: Synthetic oligonucleotide
aagcgucagguuagugaug

SEQ ID NO: 32516 - RNA, 19 nt, Artificial Sequence
  Description of Artificial Sequence: Synthetic oligonucleotide
ccaaagugaagucacgucu

SEQ ID NO: 32517 - RNA, 19 nt, Artificial Sequence
  Description of Artificial Sequence: Synthetic oligonucleotide
agaggacugauaacaugau

SEQ ID NO: 32518 - RNA, 19 nt, Artificial Sequence
  Description of Artificial Sequence: Synthetic oligonucleotide
cucaagccuguacagucaa

SEQ ID NO: 32519 - RNA, 19 nt, Artificial Sequence
  Description of Artificial Sequence: Synthetic oligonucleotide
cuauuaccaugaauuuugu

SEQ ID NO: 32520 - RNA, 19 nt, Artificial Sequence
  Description of Artificial Sequence: Synthetic oligonucleotide
aaaccccuuauuacaccuu

SEQ ID NO: 32521 - RNA, 19 nt, Artificial Sequence
  Description of Artificial Sequence: Synthetic oligonucleotide
gacuagguucaaaccaaua

SEQ ID NO: 32522 - RNA, 19 nt, Artificial Sequence
  Description of Artificial Sequence: Synthetic oligonucleotide
ggagaaacgcgcggcuccg

SEQ ID NO: 32523 - RNA, 19 nt, Artificial Sequence
  Description of Artificial Sequence: Synthetic oligonucleotide
gguuaccuugagcagaaau

SEQ ID NO: 32524 - RNA, 19 nt, Artificial Sequence
  Description of Artificial Sequence: Synthetic oligonucleotide
gacuuacccaacacuuuua

SEQ ID NO: 32525 - RNA, 19 nt, Artificial Sequence
  Description of Artificial Sequence: Synthetic oligonucleotide
gauggggaacccaauuaau

SEQ ID NO: 32526 - RNA, 19 nt, Artificial Sequence
  Description of Artificial Sequence: Synthetic oligonucleotide
cagaaaguucgccgugaga

SEQ ID NO: 32527 - RNA, 19 nt, Artificial Sequence
  Description of Artificial Sequence: Synthetic oligonucleotide
gccuguacagucaagccaa

SEQ ID NO: 32528 - RNA, 19 nt, Artificial Sequence
  Description of Artificial Sequence: Synthetic oligonucleotide
cuccaauuauuuggacauc

SEQ ID NO: 32529 - RNA, 19 nt, Artificial Sequence
  Description of Artificial Sequence: Synthetic oligonucleotide
caucaugcuuacugcacgu

SEQ ID NO: 32530 - RNA, 19 nt, Artificial Sequence
  Description of Artificial Sequence: Synthetic oligonucleotide
caacggacugggguucuug

SEQ ID NO: 32531 - RNA, 19 nt, Artificial Sequence
  Description of Artificial Sequence: Synthetic oligonucleotide
caucgcaggauggacccca

SEQ ID NO: 32532 - RNA, 19 nt, Artificial Sequence
  Description of Artificial Sequence: Synthetic oligonucleotide
cuaaaggacuagguucaaa

SEQ ID NO: 32533 - RNA, 19 nt, Artificial Sequence
  Description of Artificial Sequence: Synthetic oligonucleotide
augugcgaaggaaggggca

SEQ ID NO: 32534 - RNA, 19 nt, Artificial Sequence
  Description of Artificial Sequence: Synthetic oligonucleotide
ggcugcggggacgacgugg

SEQ ID NO: 32535 - RNA, 19 nt, Artificial Sequence
  Description of Artificial Sequence: Synthetic oligonucleotide
gaacccaauuaaugggcuu

SEQ ID NO: 32536 - RNA, 19 nt, Artificial Sequence
  Description of Artificial Sequence: Synthetic oligonucleotide
cuaugcagauggcaaaauu

SEQ ID NO: 32537 - RNA, 19 nt, Artificial Sequence
  Description of Artificial Sequence: Synthetic oligonucleotide
guagaccagacaagcuuaa

SEQ ID NO: 32538 - RNA, 19 nt, Artificial Sequence
  Description of Artificial Sequence: Synthetic oligonucleotide
gcugcggggacgacguggg

SEQ ID NO: 32539 - RNA, 19 nt, Artificial Sequence
  Description of Artificial Sequence: Synthetic oligonucleotide
cagaggaaaacugaucauu

SEQ ID NO: 32540 - RNA, 19 nt, Artificial Sequence
  Description of Artificial Sequence: Synthetic oligonucleotide
agagucggguaaagcgucu

SEQ ID NO: 32541 - RNA, 19 nt, Artificial Sequence
  Description of Artificial Sequence: Synthetic oligonucleotide
gucggguaaagcgucuucu

SEQ ID NO: 32542 - RNA, 19 nt, Artificial Sequence
  Description of Artificial Sequence: Synthetic oligonucleotide
gagagcguguacguacacu

SEQ ID NO: 32543 - RNA, 19 nt, Artificial Sequence
  Description of Artificial Sequence: Synthetic oligonucleotide
gcgauaauauuaacugcaa

SEQ ID NO: 32544 - RNA, 19 nt, Artificial Sequence
  Description of Artificial Sequence: Synthetic oligonucleotide
caagcuuaaccugcgacuu

SEQ ID NO: 32545 - RNA, 19 nt, Artificial Sequence
  Description of Artificial Sequence: Synthetic oligonucleotide
caccaaagugaagucacgu

SEQ ID NO: 32546 - RNA, 19 nt, Artificial Sequence
  Description of Artificial Sequence: Synthetic oligonucleotide
acggaguaguuugcaucgu

SEQ ID NO: 32547 - RNA, 19 nt, Artificial Sequence
  Description of Artificial Sequence: Synthetic oligonucleotide
agcuagccccuuucccaaa

SEQ ID NO: 32548 - RNA, 19 nt, Artificial Sequence
  Description of Artificial Sequence: Synthetic oligonucleotide
ccccuuauuacaccuugga

SEQ ID NO: 32549 - RNA, 19 nt, Artificial Sequence
  Description of Artificial Sequence: Synthetic oligonucleotide
gcaccucacuguguaaaac

SEQ ID NO: 32550 - RNA, 19 nt, Artificial Sequence
  Description of Artificial Sequence: Synthetic oligonucleotide
ccuguacagucaagccaag

SEQ ID NO: 32551 - RNA, 19 nt, Artificial Sequence
  Description of Artificial Sequence: Synthetic oligonucleotide
cguguacguacacuugauc

SEQ ID NO: 32552 - RNA, 19 nt, Artificial Sequence
  Description of Artificial Sequence: Synthetic oligonucleotide
ggacgacguggggagaaac

SEQ ID NO: 32553 - RNA, 19 nt, Artificial Sequence
  Description of Artificial Sequence: Synthetic oligonucleotide
gcuuaaccugcgacuucag

SEQ ID NO: 32554 - RNA, 19 nt, Artificial Sequence
  Description of Artificial Sequence: Synthetic oligonucleotide
cugcggggacgacgugggg

SEQ ID NO: 32555 - RNA, 19 nt, Artificial Sequence
  Description of Artificial Sequence: Synthetic oligonucleotide
cgucuauuucaugauagaa

SEQ ID NO: 32556 - RNA, 19 nt, Artificial Sequence
  Description of Artificial Sequence: Synthetic oligonucleotide
gagaaacgcgcggcuccga

SEQ ID NO: 32557 - RNA, 19 nt, Artificial Sequence
  Description of Artificial Sequence: Synthetic oligonucleotide
gccaaacuucaugcuacca

SEQ ID NO: 32558 - RNA, 19 nt, Artificial Sequence
  Description of Artificial Sequence: Synthetic oligonucleotide
gccaacggaguaguuugca

SEQ ID NO: 32559 - RNA, 19 nt, Artificial Sequence
  Description of Artificial Sequence: Synthetic oligonucleotide
gggaugggauucaaguccu

SEQ ID NO: 32560 - RNA, 19 nt, Artificial Sequence
  Description of Artificial Sequence: Synthetic oligonucleotide
ugguuaccuugagcagaaa

SEQ ID NO: 32561 - RNA, 19 nt, Artificial Sequence
  Description of Artificial Sequence: Synthetic oligonucleotide
ggccaacggaguaguuugc

SEQ ID NO: 32562 - RNA, 19 nt, Artificial Sequence
  Description of Artificial Sequence: Synthetic oligonucleotide
accuacuggcugagauuga

SEQ ID NO: 32563 - RNA, 19 nt, Artificial Sequence
  Description of Artificial Sequence: Synthetic oligonucleotide
cagguuagugaugcuaguu

SEQ ID NO: 32564 - RNA, 19 nt, Artificial Sequence
  Description of Artificial Sequence: Synthetic oligonucleotide
gccggacgggagaaacggg

SEQ ID NO: 32565 - RNA, 19 nt, Artificial Sequence
  Description of Artificial Sequence: Synthetic oligonucleotide
ccaauuaaugggcuuccau

SEQ ID NO: 32566 - RNA, 19 nt, Artificial Sequence
  Description of Artificial Sequence: Synthetic oligonucleotide
ccaggguaacuagaugaca

SEQ ID NO: 32567 - RNA, 19 nt, Artificial Sequence
  Description of Artificial Sequence: Synthetic oligonucleotide
cggaguaguuugcaucguc

SEQ ID NO: 32568 - RNA, 19 nt, Artificial Sequence
  Description of Artificial Sequence: Synthetic oligonucleotide
ggggagaaacgcgcggcuc

SEQ ID NO: 32569 - RNA, 19 nt, Artificial Sequence
  Description of Artificial Sequence: Synthetic oligonucleotide
ccaaagcgucagguuagug

SEQ ID NO: 32570 - RNA, 19 nt, Artificial Sequence
  Description of Artificial Sequence: Synthetic oligonucleotide
cccaaauagcuauuaccau

SEQ ID NO: 32571 - RNA, 19 nt, Artificial Sequence
  Description of Artificial Sequence: Synthetic oligonucleotide
ccugcgacuucagaucuaa

SEQ ID NO: 32572 - RNA, 19 nt, Artificial Sequence
  Description of Artificial Sequence: Synthetic oligonucleotide
cugcgacuucagaucuaaa

SEQ ID NO: 32573 - RNA, 19 nt, Artificial Sequence
  Description of Artificial Sequence: Synthetic oligonucleotide
ggguaguuguauacucggu

SEQ ID NO: 32574 - RNA, 19 nt, Artificial Sequence
  Description of Artificial Sequence: Synthetic oligonucleotide
gagucggguaaagcgucuu

SEQ ID NO: 32575 - RNA, 19 nt, Artificial Sequence
  Description of Artificial Sequence: Synthetic oligonucleotide
cggccggacgggagaaacg

SEQ ID NO: 32576 - RNA, 19 nt, Artificial Sequence
  Description of Artificial Sequence: Synthetic oligonucleotide
gcucuccuaugcagauggc

SEQ ID NO: 32577 - RNA, 19 nt, Artificial Sequence
  Description of Artificial Sequence: Synthetic oligonucleotide
cgugagauaacggcccaaa

SEQ ID NO: 32578 - RNA, 19 nt, Artificial Sequence
  Description of Artificial Sequence: Synthetic oligonucleotide
ccaacggaguaguuugcau

SEQ ID NO: 32579 - RNA, 19 nt, Artificial Sequence
  Description of Artificial Sequence: Synthetic oligonucleotide
cccucacaauuaacuaugu

SEQ ID NO: 32580 - RNA, 19 nt, Artificial Sequence
  Description of Artificial Sequence: Synthetic oligonucleotide
cggguaaagcgucuucucu

SEQ ID NO: 32581 - RNA, 19 nt, Artificial Sequence
  Description of Artificial Sequence: Synthetic oligonucleotide
gcuuaaggggugggucaaa

SEQ ID NO: 32582 - RNA, 19 nt, Artificial Sequence
  Description of Artificial Sequence: Synthetic oligonucleotide
cuuugcuagcuagccccuu

SEQ ID NO: 32583 - RNA, 19 nt, Artificial Sequence
  Description of Artificial Sequence: Synthetic oligonucleotide
gcguguacguacacuugau

SEQ ID NO: 32584 - RNA, 19 nt, Artificial Sequence
  Description of Artificial Sequence: Synthetic oligonucleotide
ggguuacauuaggucaaau

SEQ ID NO: 32585 - RNA, 19 nt, Artificial Sequence
  Description of Artificial Sequence: Synthetic oligonucleotide
ggaaacggacauagcccuu

SEQ ID NO: 32586 - RNA, 19 nt, Artificial Sequence
  Description of Artificial Sequence: Synthetic oligonucleotide
ccuacucaucagcuagguu

SEQ ID NO: 32587 - RNA, 19 nt, Artificial Sequence
  Description of Artificial Sequence: Synthetic oligonucleotide
cgcuuaaggggugggucaa

SEQ ID NO: 32588 - RNA, 19 nt, Artificial Sequence
  Description of Artificial Sequence: Synthetic oligonucleotide
cuaggccuucuggguaguu

SEQ ID NO: 32589 - RNA, 19 nt, Artificial Sequence
  Description of Artificial Sequence: Synthetic oligonucleotide
cggcuuuaucugggccacc

SEQ ID NO: 32590 - RNA, 19 nt, Artificial Sequence
  Description of Artificial Sequence: Synthetic oligonucleotide
ggcggccggacgggagaaa

SEQ ID NO: 32591 - RNA, 19 nt, Artificial Sequence
  Description of Artificial Sequence: Synthetic oligonucleotide
cggcggccggacgggagaa

SEQ ID NO: 32592 - RNA, 19 nt, Artificial Sequence
  Description of Artificial Sequence: Synthetic oligonucleotide
aaaauaauaauccccuaac

SEQ ID NO: 32593 - RNA, 19 nt, Artificial Sequence
  Description of Artificial Sequence: Synthetic oligonucleotide
gauuuuauaaucugggagg

SEQ ID NO: 32594 - RNA, 19 nt, Artificial Sequence
  Description of Artificial Sequence: Synthetic oligonucleotide
aguagaaauacccaguuag

SEQ ID NO: 32595 - RNA, 19 nt, Artificial Sequence
  Description of Artificial Sequence: Synthetic oligonucleotide
aacuauaccaguuagcaau

SEQ ID NO: 32596 - RNA, 19 nt, Artificial Sequence
  Description of Artificial Sequence: Synthetic oligonucleotide
agcgaaaggauacuggagc

SEQ ID NO: 32597 - RNA, 19 nt, Artificial Sequence
  Description of Artificial Sequence: Synthetic oligonucleotide
agaagauucacaugacccc

SEQ ID NO: 32598 - RNA, 19 nt, Artificial Sequence
  Description of Artificial Sequence: Synthetic oligonucleotide
gauguugcggccgagaugg

SEQ ID NO: 32599 - RNA, 19 nt, Artificial Sequence
  Description of Artificial Sequence: Synthetic oligonucleotide
uguaguacaaauucuuccc

SEQ ID NO: 32600 - RNA, 19 nt, Artificial Sequence
  Description of Artificial Sequence: Synthetic oligonucleotide
ucaucaauaucguagcaag

SEQ ID NO: 32601 - RNA, 19 nt, Artificial Sequence
  Description of Artificial Sequence: Synthetic oligonucleotide
auauagaugcacugggccc

SEQ ID NO: 32602 - RNA, 19 nt, Artificial Sequence
  Description of Artificial Sequence: Synthetic oligonucleotide
uuaaguaaagacucccucc

SEQ ID NO: 32603 - RNA, 19 nt, Artificial Sequence
  Description of Artificial Sequence: Synthetic oligonucleotide
uuaaacaugggugugugag

SEQ ID NO: 32604 - RNA, 19 nt, Artificial Sequence
  Description of Artificial Sequence: Synthetic oligonucleotide
aaaggucaggccauuaggc

SEQ ID NO: 32605 - RNA, 19 nt, Artificial Sequence
  Description of Artificial Sequence: Synthetic oligonucleotide
ugaacuauaccaguuagca

SEQ ID NO: 32606 - RNA, 19 nt, Artificial Sequence
  Description of Artificial Sequence: Synthetic oligonucleotide
accauuaauaagcaccuuc

SEQ ID NO: 32607 - RNA, 19 nt, Artificial Sequence
  Description of Artificial Sequence: Synthetic oligonucleotide
cagaagauucacaugaccc

SEQ ID NO: 32608 - RNA, 19 nt, Artificial Sequence
  Description of Artificial Sequence: Synthetic oligonucleotide
gaaggaaccuaguaaaaug

SEQ ID NO: 32609 - RNA, 19 nt, Artificial Sequence
  Description of Artificial Sequence: Synthetic oligonucleotide
aauaucguagcaagucugc

SEQ ID NO: 32610 - RNA, 19 nt, Artificial Sequence
  Description of Artificial Sequence: Synthetic oligonucleotide
aguagcauagucucugcac

SEQ ID NO: 32611 - RNA, 19 nt, Artificial Sequence
  Description of Artificial Sequence: Synthetic oligonucleotide
auacaauugggcuuugauc

SEQ ID NO: 32612 - RNA, 19 nt, Artificial Sequence
  Description of Artificial Sequence: Synthetic oligonucleotide
accaguuagcaauuaaggg

SEQ ID NO: 32613 - RNA, 19 nt, Artificial Sequence
  Description of Artificial Sequence: Synthetic oligonucleotide
ucgucaauaccacugaagu

SEQ ID NO: 32614 - RNA, 19 nt, Artificial Sequence
  Description of Artificial Sequence: Synthetic oligonucleotide
uagccaauaagaauacuug

SEQ ID NO: 32615 - RNA, 19 nt, Artificial Sequence
  Description of Artificial Sequence: Synthetic oligonucleotide
cuaaacccauucuugaacc

SEQ ID NO: 32616 - RNA, 19 nt, Artificial Sequence
  Description of Artificial Sequence: Synthetic oligonucleotide
cauauagaugcacugggcc

SEQ ID NO: 32617 - RNA, 19 nt, Artificial Sequence
  Description of Artificial Sequence: Synthetic oligonucleotide
aucaauaucguagcaaguc

SEQ ID NO: 32618 - RNA, 19 nt, Artificial Sequence
  Description of Artificial Sequence: Synthetic oligonucleotide
uccguguucgucaauacca

SEQ ID NO: 32619 - RNA, 19 nt, Artificial Sequence
  Description of Artificial Sequence: Synthetic oligonucleotide
caaagaguaagugaguccc

SEQ ID NO: 32620 - RNA, 19 nt, Artificial Sequence
  Description of Artificial Sequence: Synthetic oligonucleotide
aaagacucacaugccaucg

SEQ ID NO: 32621 - RNA, 19 nt, Artificial Sequence
  Description of Artificial Sequence: Synthetic oligonucleotide
uucuauccgaucuagcuga

SEQ ID NO: 32622 - RNA, 19 nt, Artificial Sequence
  Description of Artificial Sequence: Synthetic oligonucleotide
caucauuuccguucaaugc

SEQ ID NO: 32623 - RNA, 19 nt, Artificial Sequence
  Description of Artificial Sequence: Synthetic oligonucleotide
gagccacccauauagaugc

SEQ ID NO: 32624 - RNA, 19 nt, Artificial Sequence
  Description of Artificial Sequence: Synthetic oligonucleotide
ucaauaucguagcaagucu

SEQ ID NO: 32625 - RNA, 19 nt, Artificial Sequence
  Description of Artificial Sequence: Synthetic oligonucleotide
uauagcgagguccauggca

SEQ ID NO: 32626 - RNA, 19 nt, Artificial Sequence
  Description of Artificial Sequence: Synthetic oligonucleotide
aauuccuaggauacaauug

SEQ ID NO: 32627 - RNA, 19 nt, Artificial Sequence
  Description of Artificial Sequence: Synthetic oligonucleotide
agaauccuccgguuggugc

SEQ ID NO: 32628 - RNA, 19 nt, Artificial Sequence
  Description of Artificial Sequence: Synthetic oligonucleotide
ucugauuguuuaaguaaag

SEQ ID NO: 32629 - RNA, 19 nt, Artificial Sequence
  Description of Artificial Sequence: Synthetic oligonucleotide
ugucgaaugauggugguug

SEQ ID NO: 32630 - RNA, 19 nt, Artificial Sequence
  Description of Artificial Sequence: Synthetic oligonucleotide
caucccuugaacuauacca

SEQ ID NO: 32631 - RNA, 19 nt, Artificial Sequence
  Description of Artificial Sequence: Synthetic oligonucleotide
gaguaagugagucccuggg

SEQ ID NO: 32632 - RNA, 19 nt, Artificial Sequence
  Description of Artificial Sequence: Synthetic oligonucleotide
aaauaccgugaauuccuag

SEQ ID NO: 32633 - RNA, 19 nt, Artificial Sequence
  Description of Artificial Sequence: Synthetic oligonucleotide
caguuguaaacucaaggag

SEQ ID NO: 32634 - RNA, 19 nt, Artificial Sequence
  Description of Artificial Sequence: Synthetic oligonucleotide
uaacucgucacagcgaaag

SEQ ID NO: 32635 - RNA, 19 nt, Artificial Sequence
  Description of Artificial Sequence: Synthetic oligonucleotide
gggcuaaagacucacaugc

SEQ ID NO: 32636 - RNA, 19 nt, Artificial Sequence
  Description of Artificial Sequence: Synthetic oligonucleotide
aguaagugagucccugggg

SEQ ID NO: 32637 - RNA, 19 nt, Artificial Sequence
  Description of Artificial Sequence: Synthetic oligonucleotide
aaagguucccuccuacgga

SEQ ID NO: 32638 - RNA, 19 nt, Artificial Sequence
  Description of Artificial Sequence: Synthetic oligonucleotide
guugagauggagguaagag

SEQ ID NO: 32639 - RNA, 19 nt, Artificial Sequence
  Description of Artificial Sequence: Synthetic oligonucleotide
ucuugcaacuucuauccga

SEQ ID NO: 32640 - RNA, 19 nt, Artificial Sequence
  Description of Artificial Sequence: Synthetic oligonucleotide
gaauucgucuuccaaucug

SEQ ID NO: 32641 - RNA, 19 nt, Artificial Sequence
  Description of Artificial Sequence: Synthetic oligonucleotide
ugacuauaaauggccaccg

SEQ ID NO: 32642 - RNA, 19 nt, Artificial Sequence
  Description of Artificial Sequence: Synthetic oligonucleotide
caaaggucaggccauuagg

SEQ ID NO: 32643 - RNA, 19 nt, Artificial Sequence
  Description of Artificial Sequence: Synthetic oligonucleotide
ugugcgagaauccuccggu

SEQ ID NO: 32644 - RNA, 19 nt, Artificial Sequence
  Description of Artificial Sequence: Synthetic oligonucleotide
uccugugcgagaauccucc

SEQ ID NO: 32645 - RNA, 19 nt, Artificial Sequence
  Description of Artificial Sequence: Synthetic oligonucleotide
uuagaugacuagccaauaa

SEQ ID NO: 32646 - RNA, 19 nt, Artificial Sequence
  Description of Artificial Sequence: Synthetic oligonucleotide
acacauuggaagccauccc

SEQ ID NO: 32647 - RNA, 19 nt, Artificial Sequence
  Description of Artificial Sequence: Synthetic oligonucleotide
ugcuuauuaccauccacca

SEQ ID NO: 32648 - RNA, 19 nt, Artificial Sequence
  Description of Artificial Sequence: Synthetic oligonucleotide
cacuacuuugcucaagccc

SEQ ID NO: 32649 - RNA, 19 nt, Artificial Sequence
  Description of Artificial Sequence: Synthetic oligonucleotide
uguucuccguccauauucc

SEQ ID NO: 32650 - RNA, 19 nt, Artificial Sequence
  Description of Artificial Sequence: Synthetic oligonucleotide
aaccacuaguagaaauacc

SEQ ID NO: 32651 - RNA, 19 nt, Artificial Sequence
  Description of Artificial Sequence: Synthetic oligonucleotide
caauaucguagcaagucug

SEQ ID NO: 32652 - RNA, 19 nt, Artificial Sequence
  Description of Artificial Sequence: Synthetic oligonucleotide
aaacccgugucaaacagca

SEQ ID NO: 32653 - RNA, 19 nt, Artificial Sequence
  Description of Artificial Sequence: Synthetic oligonucleotide
ugaugcuaaacccauucuu

SEQ ID NO: 32654 - RNA, 19 nt, Artificial Sequence
  Description of Artificial Sequence: Synthetic oligonucleotide
augacuagccaauaagaau

SEQ ID NO: 32655 - RNA, 19 nt, Artificial Sequence
  Description of Artificial Sequence: Synthetic oligonucleotide
aucguagcaagucugccca

SEQ ID NO: 32656 - RNA, 19 nt, Artificial Sequence
  Description of Artificial Sequence: Synthetic oligonucleotide
aacucgucacagcgaaagg

SEQ ID NO: 32657 - RNA, 19 nt, Artificial Sequence
  Description of Artificial Sequence: Synthetic oligonucleotide
ggguaauuguugcagauug

SEQ ID NO: 32658 - RNA, 19 nt, Artificial Sequence
  Description of Artificial Sequence: Synthetic oligonucleotide
auuaagggacuaugauggg

SEQ ID NO: 32659 - RNA, 19 nt, Artificial Sequence
  Description of Artificial Sequence: Synthetic oligonucleotide
gaauccuccgguuggugcc

SEQ ID NO: 32660 - RNA, 19 nt, Artificial Sequence
  Description of Artificial Sequence: Synthetic oligonucleotide
auggauucugaagagcauc

SEQ ID NO: 32661 - RNA, 19 nt, Artificial Sequence
  Description of Artificial Sequence: Synthetic oligonucleotide
agacuagauguaaauacag

SEQ ID NO: 32662 - RNA, 19 nt, Artificial Sequence
  Description of Artificial Sequence: Synthetic oligonucleotide
auuuuauaaucugggagga

SEQ ID NO: 32663 - RNA, 19 nt, Artificial Sequence
  Description of Artificial Sequence: Synthetic oligonucleotide
ucuauuguuggcacacguc

SEQ ID NO: 32664 - RNA, 19 nt, Artificial Sequence
  Description of Artificial Sequence: Synthetic oligonucleotide
agcgcaagauccuuuccuc

SEQ ID NO: 32665 - RNA, 19 nt, Artificial Sequence
  Description of Artificial Sequence: Synthetic oligonucleotide
ugguuguacaggacaaaca

SEQ ID NO: 32666 - RNA, 19 nt, Artificial Sequence
  Description of Artificial Sequence: Synthetic oligonucleotide
aauucgucuuccaaucugu

SEQ ID NO: 32667 - RNA, 19 nt, Artificial Sequence
  Description of Artificial Sequence: Synthetic oligonucleotide
cuguucuccguccauauuc

SEQ ID NO: 32668 - RNA, 19 nt, Artificial Sequence
  Description of Artificial Sequence: Synthetic oligonucleotide
uaauccccuaaccucacuc

SEQ ID NO: 32669 - RNA, 19 nt, Artificial Sequence
  Description of Artificial Sequence: Synthetic oligonucleotide
uccgaucuagcugagaguc

SEQ ID NO: 32670 - RNA, 19 nt, Artificial Sequence
  Description of Artificial Sequence: Synthetic oligonucleotide
uguaguuggccacgcaccu

SEQ ID NO: 32671 - RNA, 19 nt, Artificial Sequence
  Description of Artificial Sequence: Synthetic oligonucleotide
uguuguagcugaauacaau

SEQ ID NO: 32672 - RNA, 19 nt, Artificial Sequence
  Description of Artificial Sequence: Synthetic oligonucleotide
auaccgugaauuccuagga

SEQ ID NO: 32673 - RNA, 19 nt, Artificial Sequence
  Description of Artificial Sequence: Synthetic oligonucleotide
ucugcaugcacggagcacu

SEQ ID NO: 32674 - RNA, 19 nt, Artificial Sequence
  Description of Artificial Sequence: Synthetic oligonucleotide
ucuuuggauauagcgaggu

SEQ ID NO: 32675 - RNA, 19 nt, Artificial Sequence
  Description of Artificial Sequence: Synthetic oligonucleotide
ugcgagaauccuccgguug

SEQ ID NO: 32676 - RNA, 19 nt, Artificial Sequence
  Description of Artificial Sequence: Synthetic oligonucleotide
uuagcaauuaagggucuga

SEQ ID NO: 32677 - RNA, 19 nt, Artificial Sequence
  Description of Artificial Sequence: Synthetic oligonucleotide
uggggcuaaagacucacau

SEQ ID NO: 32678 - RNA, 19 nt, Artificial Sequence
  Description of Artificial Sequence: Synthetic oligonucleotide
uuucuccgaaguuauuuaa

SEQ ID NO: 32679 - RNA, 19 nt, Artificial Sequence
  Description of Artificial Sequence: Synthetic oligonucleotide
uucgagaaccuugcgacug

SEQ ID NO: 32680 - RNA, 19 nt, Artificial Sequence
  Description of Artificial Sequence: Synthetic oligonucleotide
agaugacuagccaauaaga

SEQ ID NO: 32681 - RNA, 19 nt, Artificial Sequence
  Description of Artificial Sequence: Synthetic oligonucleotide
uaaagacucacaugccauc

SEQ ID NO: 32682 - RNA, 19 nt, Artificial Sequence
  Description of Artificial Sequence: Synthetic oligonucleotide
auauagcgagguccauggc

SEQ ID NO: 32683 - RNA, 19 nt, Artificial Sequence
  Description of Artificial Sequence: Synthetic oligonucleotide
gaugacuagccaauaagaa

SEQ ID NO: 32684 - RNA, 19 nt, Artificial Sequence
  Description of Artificial Sequence: Synthetic oligonucleotide
ucaagcccuacccuagccu

SEQ ID NO: 32685 - RNA, 19 nt, Artificial Sequence
  Description of Artificial Sequence: Synthetic oligonucleotide
acuaguagaaauacccagu

SEQ ID NO: 32686 - RNA, 19 nt, Artificial Sequence
  Description of Artificial Sequence: Synthetic oligonucleotide
ucguagacuagauguaaau

SEQ ID NO: 32687 - RNA, 19 nt, Artificial Sequence
  Description of Artificial Sequence: Synthetic oligonucleotide
acccauauagaugcacugg

SEQ ID NO: 32688 - RNA, 19 nt, Artificial Sequence
  Description of Artificial Sequence: Synthetic oligonucleotide
agcaacaucccuugaacua

SEQ ID NO: 32689 - RNA, 19 nt, Artificial Sequence
  Description of Artificial Sequence: Synthetic oligonucleotide
ugcuacacacugccugccg

SEQ ID NO: 32690 - RNA, 19 nt, Artificial Sequence
  Description of Artificial Sequence: Synthetic oligonucleotide
agucugggcaaagaguaag

SEQ ID NO: 32691 - RNA, 19 nt, Artificial Sequence
  Description of Artificial Sequence: Synthetic oligonucleotide
ucucccaauggaaggcuca

SEQ ID NO: 32692 - RNA, 19 nt, Artificial Sequence
  Description of Artificial Sequence: Synthetic oligonucleotide
gacuauaaauggccaccgc

SEQ ID NO: 32693 - RNA, 19 nt, Artificial Sequence
  Description of Artificial Sequence: Synthetic oligonucleotide
cauagcgcaagauccuuuc

SEQ ID NO: 32694 - RNA, 19 nt, Artificial Sequence
  Description of Artificial Sequence: Synthetic oligonucleotide
caauacuuguguacaucug

SEQ ID NO: 32695 - RNA, 19 nt, Artificial Sequence
  Description of Artificial Sequence: Synthetic oligonucleotide
aagcuagaaggaaaagaga

SEQ ID NO: 32696 - RNA, 19 nt, Artificial Sequence
  Description of Artificial Sequence: Synthetic oligonucleotide
aucccuugaacuauaccag

SEQ ID NO: 32697 - RNA, 19 nt, Artificial Sequence
  Description of Artificial Sequence: Synthetic oligonucleotide
uggaguagugauacagcuc

SEQ ID NO: 32698 - RNA, 19 nt, Artificial Sequence
  Description of Artificial Sequence: Synthetic oligonucleotide
gagacgagaaugcaucaaa

SEQ ID NO: 32699 - RNA, 19 nt, Artificial Sequence
  Description of Artificial Sequence: Synthetic oligonucleotide
acgaagauccuucccuuca

SEQ ID NO: 32700 - RNA, 19 nt, Artificial Sequence
  Description of Artificial Sequence: Synthetic oligonucleotide
uggugaaaccucucugcug

SEQ ID NO: 32701 - RNA, 19 nt, Artificial Sequence
  Description of Artificial Sequence: Synthetic oligonucleotide
ugggguucaccaaacccgu

SEQ ID NO: 32702 - RNA, 19 nt, Artificial Sequence
  Description of Artificial Sequence: Synthetic oligonucleotide
gaaccuaguaaaaugaauu

SEQ ID NO: 32703 - RNA, 19 nt, Artificial Sequence
  Description of Artificial Sequence: Synthetic oligonucleotide
gucaccucggcuugucggg

SEQ ID NO: 32704 - RNA, 19 nt, Artificial Sequence
  Description of Artificial Sequence: Synthetic oligonucleotide
uaguagaaauacccaguua

SEQ ID NO: 32705 - RNA, 19 nt, Artificial Sequence
  Description of Artificial Sequence: Synthetic oligonucleotide
cauaacucgucacagcgaa

SEQ ID NO: 32706 - RNA, 19 nt, Artificial Sequence
  Description of Artificial Sequence: Synthetic oligonucleotide
guguugucaggacaucggc

SEQ ID NO: 32707 - RNA, 19 nt, Artificial Sequence
  Description of Artificial Sequence: Synthetic oligonucleotide
ugacaucgcguuuucccca

SEQ ID NO: 32708 - RNA, 19 nt, Artificial Sequence
  Description of Artificial Sequence: Synthetic oligonucleotide
caagcccuacccuagccug

SEQ ID NO: 32709 - RNA, 19 nt, Artificial Sequence
  Description of Artificial Sequence: Synthetic oligonucleotide
cuuaugaggcugcacagaa

SEQ ID NO: 32710 - RNA, 19 nt, Artificial Sequence
  Description of Artificial Sequence: Synthetic oligonucleotide
gucgaaugauggugguugg

SEQ ID NO: 32711 - RNA, 19 nt, Artificial Sequence
  Description of Artificial Sequence: Synthetic oligonucleotide
ugcccacuugacuauaaau

SEQ ID NO: 32712 - RNA, 19 nt, Artificial Sequence
  Description of Artificial Sequence: Synthetic oligonucleotide
ccaguaaaccaccuugucc

SEQ ID NO: 32713 - RNA, 19 nt, Artificial Sequence
  Description of Artificial Sequence: Synthetic oligonucleotide
agcccuucgagaaccuugc

SEQ ID NO: 32714 - RNA, 19 nt, Artificial Sequence
  Description of Artificial Sequence: Synthetic oligonucleotide
gacucacaugccaucguag

SEQ ID NO: 32715 - RNA, 19 nt, Artificial Sequence
  Description of Artificial Sequence: Synthetic oligonucleotide
ccaggaacacauuggaagc

SEQ ID NO: 32716 - RNA, 19 nt, Artificial Sequence
  Description of Artificial Sequence: Synthetic oligonucleotide
ugccauauagccgggucug

SEQ ID NO: 32717 - RNA, 19 nt, Artificial Sequence
  Description of Artificial Sequence: Synthetic oligonucleotide
cucacaugccaucguagac

SEQ ID NO: 32718 - RNA, 19 nt, Artificial Sequence
  Description of Artificial Sequence: Synthetic oligonucleotide
cacccauauagaugcacug

SEQ ID NO: 32719 - RNA, 19 nt, Artificial Sequence
  Description of Artificial Sequence: Synthetic oligonucleotide
aagggacuaugaugggcca

SEQ ID NO: 32720 - RNA, 19 nt, Artificial Sequence
  Description of Artificial Sequence: Synthetic oligonucleotide
aguuucaggaauggugcug

SEQ ID NO: 32721 - RNA, 19 nt, Artificial Sequence
  Description of Artificial Sequence: Synthetic oligonucleotide
agcauucgcaggugaacug

SEQ ID NO: 32722 - RNA, 19 nt, Artificial Sequence
  Description of Artificial Sequence: Synthetic oligonucleotide
agauguugcggccgagaug

SEQ ID NO: 32723 - RNA, 19 nt, Artificial Sequence
  Description of Artificial Sequence: Synthetic oligonucleotide
cagagggaggcguucaauc

SEQ ID NO: 32724 - RNA, 19 nt, Artificial Sequence
  Description of Artificial Sequence: Synthetic oligonucleotide
acucgucacagcgaaagga

SEQ ID NO: 32725 - RNA, 19 nt, Artificial Sequence
  Description of Artificial Sequence: Synthetic oligonucleotide
guuugcauuggcaugugaa

SEQ ID NO: 32726 - RNA, 19 nt, Artificial Sequence
  Description of Artificial Sequence: Synthetic oligonucleotide
ggucaccucggcuugucgg

SEQ ID NO: 32727 - RNA, 19 nt, Artificial Sequence
  Description of Artificial Sequence: Synthetic oligonucleotide
guagcauagucucugcacu

SEQ ID NO: 32728 - RNA, 19 nt, Artificial Sequence
  Description of Artificial Sequence: Synthetic oligonucleotide
guagaaauacccaguuaga

SEQ ID NO: 32729 - RNA, 19 nt, Artificial Sequence
  Description of Artificial Sequence: Synthetic oligonucleotide
uagcaauuaagggucugaa

SEQ ID NO: 32730 - RNA, 19 nt, Artificial Sequence
  Description of Artificial Sequence: Synthetic oligonucleotide
ccuccacgcacucacagcg

SEQ ID NO: 32731 - RNA, 19 nt, Artificial Sequence
  Description of Artificial Sequence: Synthetic oligonucleotide
gcgagaauccuccgguugg

SEQ ID NO: 32732 - RNA, 19 nt, Artificial Sequence
  Description of Artificial Sequence: Synthetic oligonucleotide
gaugggauuggaggcugag

SEQ ID NO: 32733 - RNA, 19 nt, Artificial Sequence
  Description of Artificial Sequence: Synthetic oligonucleotide
gcguccaugguucaucacc

SEQ ID NO: 32734 - RNA, 19 nt, Artificial Sequence
  Description of Artificial Sequence: Synthetic oligonucleotide
auccauccaaugaugccuc

SEQ ID NO: 32735 - RNA, 19 nt, Artificial Sequence
  Description of Artificial Sequence: Synthetic oligonucleotide
uuccauuccuguucuccgu

SEQ ID NO: 32736 - RNA, 19 nt, Artificial Sequence
  Description of Artificial Sequence: Synthetic oligonucleotide
aggagccacccauauagau

SEQ ID NO: 32737 - RNA, 19 nt, Artificial Sequence
  Description of Artificial Sequence: Synthetic oligonucleotide
caccaaacccgugucaaac

SEQ ID NO: 32738 - RNA, 19 nt, Artificial Sequence
  Description of Artificial Sequence: Synthetic oligonucleotide
ucgcaggugaacuguguuc

SEQ ID NO: 32739 - RNA, 19 nt, Artificial Sequence
  Description of Artificial Sequence: Synthetic oligonucleotide
uauuaccauccaccaaaua

SEQ ID NO: 32740 - RNA, 19 nt, Artificial Sequence
  Description of Artificial Sequence: Synthetic oligonucleotide
guucucucaguggggaucc

SEQ ID NO: 32741 - RNA, 19 nt, Artificial Sequence
  Description of Artificial Sequence: Synthetic oligonucleotide
gacggcuguagguacuaca

SEQ ID NO: 32742 - RNA, 19 nt, Artificial Sequence
  Description of Artificial Sequence: Synthetic oligonucleotide
cuagaucaagucauuucaa

SEQ ID NO: 32743 - RNA, 19 nt, Artificial Sequence
  Description of Artificial Sequence: Synthetic oligonucleotide
ccacuugacuauaaauggc

SEQ ID NO: 32744 - RNA, 19 nt, Artificial Sequence
  Description of Artificial Sequence: Synthetic oligonucleotide
gcccaaguuguccugugcg

SEQ ID NO: 32745 - RNA, 19 nt, Artificial Sequence
  Description of Artificial Sequence: Synthetic oligonucleotide
gcgaaaggauacuggagcc

SEQ ID NO: 32746 - RNA, 19 nt, Artificial Sequence
  Description of Artificial Sequence: Synthetic oligonucleotide
ggucagguguccguguucg

SEQ ID NO: 32747 - RNA, 19 nt, Artificial Sequence
  Description of Artificial Sequence: Synthetic oligonucleotide
cauucgcaggugaacugug

SEQ ID NO: 32748 - RNA, 19 nt, Artificial Sequence
  Description of Artificial Sequence: Synthetic oligonucleotide
augaccccuaaaucuugug

SEQ ID NO: 32749 - RNA, 19 nt, Artificial Sequence
  Description of Artificial Sequence: Synthetic oligonucleotide
aaguuauuuaaggguuuua

SEQ ID NO: 32750 - RNA, 19 nt, Artificial Sequence
  Description of Artificial Sequence: Synthetic oligonucleotide
ucggccgucuaguucugug

SEQ ID NO: 32751 - RNA, 19 nt, Artificial Sequence
  Description of Artificial Sequence: Synthetic oligonucleotide
guacccuccaguucccgac

SEQ ID NO: 32752 - RNA, 19 nt, Artificial Sequence
  Description of Artificial Sequence: Synthetic oligonucleotide
auagcgagguccauggcaa

SEQ ID NO: 32753 - RNA, 19 nt, Artificial Sequence
  Description of Artificial Sequence: Synthetic oligonucleotide
gaccccuaaaucuugugau

SEQ ID NO: 32754 - RNA, 19 nt, Artificial Sequence
  Description of Artificial Sequence: Synthetic oligonucleotide
gacaucgcguuuuccccac

SEQ ID NO: 32755 - RNA, 19 nt, Artificial Sequence
  Description of Artificial Sequence: Synthetic oligonucleotide
ugggcccuuagaugacuag

SEQ ID NO: 32756 - RNA, 19 nt, Artificial Sequence
  Description of Artificial Sequence: Synthetic oligonucleotide
ugacgccacugguuaaaca

SEQ ID NO: 32757 - RNA, 19 nt, Artificial Sequence
  Description of Artificial Sequence: Synthetic oligonucleotide
auccgaucuagcugagagu

SEQ ID NO: 32758 - RNA, 19 nt, Artificial Sequence
  Description of Artificial Sequence: Synthetic oligonucleotide
guacuacaggucucugaug

SEQ ID NO: 32759 - RNA, 19 nt, Artificial Sequence
  Description of Artificial Sequence: Synthetic oligonucleotide
ggggcuaaagacucacaug

SEQ ID NO: 32760 - RNA, 19 nt, Artificial Sequence
  Description of Artificial Sequence: Synthetic oligonucleotide
auggagcauucgcagguga

SEQ ID NO: 32761 - RNA, 19 nt, Artificial Sequence
  Description of Artificial Sequence: Synthetic oligonucleotide
uaagagcguccaugguuca

SEQ ID NO: 32762 - RNA, 19 nt, Artificial Sequence
  Description of Artificial Sequence: Synthetic oligonucleotide
agcgguaggcuccugggua

SEQ ID NO: 32763 - RNA, 19 nt, Artificial Sequence
  Description of Artificial Sequence: Synthetic oligonucleotide
aagcccuacccuagccugg

SEQ ID NO: 32764 - RNA, 19 nt, Artificial Sequence
  Description of Artificial Sequence: Synthetic oligonucleotide
guugcggccgagaugguca

SEQ ID NO: 32765 - RNA, 19 nt, Artificial Sequence
  Description of Artificial Sequence: Synthetic oligonucleotide
ggcaaagaguaagugaguc

SEQ ID NO: 32766 - RNA, 19 nt, Artificial Sequence
  Description of Artificial Sequence: Synthetic oligonucleotide
uggucugacgccacugguu

SEQ ID NO: 32767 - RNA, 19 nt, Artificial Sequence
  Description of Artificial Sequence: Synthetic oligonucleotide
ccaguuagcaauuaagggu

SEQ ID NO: 32768 - RNA, 19 nt, Artificial Sequence
  Description of Artificial Sequence: Synthetic oligonucleotide
uauagccgggucugcuugu

SEQ ID NO: 32769 - RNA, 19 nt, Artificial Sequence
  Description of Artificial Sequence: Synthetic oligonucleotide
acaucgcguuuuccccacc

SEQ ID NO: 32770 - RNA, 19 nt, Artificial Sequence
  Description of Artificial Sequence: Synthetic oligonucleotide
cccgggugccccaagaagg

SEQ ID NO: 32771 - RNA, 19 nt, Artificial Sequence
  Description of Artificial Sequence: Synthetic oligonucleotide
agggacuaugaugggccac

SEQ ID NO: 32772 - RNA, 19 nt, Artificial Sequence
  Description of Artificial Sequence: Synthetic oligonucleotide
ggaaccuauguuguagcug

SEQ ID NO: 32773 - RNA, 19 nt, Artificial Sequence
  Description of Artificial Sequence: Synthetic oligonucleotide
gucuucaaggacuagcauu

SEQ ID NO: 32774 - RNA, 19 nt, Artificial Sequence
  Description of Artificial Sequence: Synthetic oligonucleotide
uugcccacuugacuauaaa

SEQ ID NO: 32775 - RNA, 19 nt, Artificial Sequence
  Description of Artificial Sequence: Synthetic oligonucleotide
auuaagggucugaaccacu

SEQ ID NO: 32776 - RNA, 19 nt, Artificial Sequence
  Description of Artificial Sequence: Synthetic oligonucleotide
ucacaaugccucugggguu

SEQ ID NO: 32777 - RNA, 19 nt, Artificial Sequence
  Description of Artificial Sequence: Synthetic oligonucleotide
uggccacgcaccugcagca

SEQ ID NO: 32778 - RNA, 19 nt, Artificial Sequence
  Description of Artificial Sequence: Synthetic oligonucleotide
uccaguugacaucgcguuu

SEQ ID NO: 32779 - RNA, 19 nt, Artificial Sequence
  Description of Artificial Sequence: Synthetic oligonucleotide
agcguccaugguucaucac

SEQ ID NO: 32780 - RNA, 19 nt, Artificial Sequence
  Description of Artificial Sequence: Synthetic oligonucleotide
ucggcuugucgggugaacu

SEQ ID NO: 32781 - RNA, 19 nt, Artificial Sequence
  Description of Artificial Sequence: Synthetic oligonucleotide
ggcccgauggaauugcuga

SEQ ID NO: 32782 - RNA, 19 nt, Artificial Sequence
  Description of Artificial Sequence: Synthetic oligonucleotide
gccggauucaggcauucug

SEQ ID NO: 32783 - RNA, 19 nt, Artificial Sequence
  Description of Artificial Sequence: Synthetic oligonucleotide
ccaaacccgugucaaacag

SEQ ID NO: 32784 - RNA, 19 nt, Artificial Sequence
  Description of Artificial Sequence: Synthetic oligonucleotide
ggauauagcgagguccaug

SEQ ID NO: 32785 - RNA, 19 nt, Artificial Sequence
  Description of Artificial Sequence: Synthetic oligonucleotide
uccccacgaagauccuucc

SEQ ID NO: 32786 - RNA, 19 nt, Artificial Sequence
  Description of Artificial Sequence: Synthetic oligonucleotide
gccgagauggucaagggca

SEQ ID NO: 32787 - RNA, 19 nt, Artificial Sequence
  Description of Artificial Sequence: Synthetic oligonucleotide
cacgaagauccuucccuuc

SEQ ID NO: 32788 - RNA, 19 nt, Artificial Sequence
  Description of Artificial Sequence: Synthetic oligonucleotide
cccaagaaggucaccucgg

SEQ ID NO: 32789 - RNA, 19 nt, Artificial Sequence
  Description of Artificial Sequence: Synthetic oligonucleotide
uggucuagaucaagucauu

SEQ ID NO: 32790 - RNA, 19 nt, Artificial Sequence
  Description of Artificial Sequence: Synthetic oligonucleotide
cuaggauacaauugggcuu

SEQ ID NO: 32791 - RNA, 19 nt, Artificial Sequence
  Description of Artificial Sequence: Synthetic oligonucleotide
cagguguccguguucguca

SEQ ID NO: 32792 - RNA, 19 nt, Artificial Sequence
  Description of Artificial Sequence: Synthetic oligonucleotide
cucugggguucaccaaacc

SEQ ID NO: 32793 - RNA, 19 nt, Artificial Sequence
  Description of Artificial Sequence: Synthetic oligonucleotide
gguacuacaggucucugau

SEQ ID NO: 32794 - RNA, 19 nt, Artificial Sequence
  Description of Artificial Sequence: Synthetic oligonucleotide
uagcaagucugcccaucuc

SEQ ID NO: 32795 - RNA, 19 nt, Artificial Sequence
  Description of Artificial Sequence: Synthetic oligonucleotide
cuccacgcacucacagcgg

SEQ ID NO: 32796 - RNA, 19 nt, Artificial Sequence
  Description of Artificial Sequence: Synthetic oligonucleotide
accccuaaaucuugugaua

SEQ ID NO: 32797 - RNA, 19 nt, Artificial Sequence
  Description of Artificial Sequence: Synthetic oligonucleotide
gccaguagcauagucucug

SEQ ID NO: 32798 - RNA, 19 nt, Artificial Sequence
  Description of Artificial Sequence: Synthetic oligonucleotide
ccccagugaugcuaaaccc

SEQ ID NO: 32799 - RNA, 19 nt, Artificial Sequence
  Description of Artificial Sequence: Synthetic oligonucleotide
ugcccguguaguuggccac

SEQ ID NO: 32800 - RNA, 19 nt, Artificial Sequence
  Description of Artificial Sequence: Synthetic oligonucleotide
uggcaauuggaagguccug

SEQ ID NO: 32801 - RNA, 19 nt, Artificial Sequence
  Description of Artificial Sequence: Synthetic oligonucleotide
acuauaccaguuagcaauu

SEQ ID NO: 32802 - RNA, 19 nt, Artificial Sequence
  Description of Artificial Sequence: Synthetic oligonucleotide
gucuauuguuggcacacgu

SEQ ID NO: 32803 - RNA, 19 nt, Artificial Sequence
  Description of Artificial Sequence: Synthetic oligonucleotide
ccgugagugccaauguagc

SEQ ID NO: 32804 - RNA, 19 nt, Artificial Sequence
  Description of Artificial Sequence: Synthetic oligonucleotide
cacucggccgucuaguucu

SEQ ID NO: 32805 - RNA, 19 nt, Artificial Sequence
  Description of Artificial Sequence: Synthetic oligonucleotide
cucucccaauggaaggcuc

SEQ ID NO: 32806 - RNA, 19 nt, Artificial Sequence
  Description of Artificial Sequence: Synthetic oligonucleotide
ccuacccuagccugggccc

SEQ ID NO: 32807 - RNA, 19 nt, Artificial Sequence
  Description of Artificial Sequence: Synthetic oligonucleotide
aucguagacuagauguaaa

SEQ ID NO: 32808 - RNA, 19 nt, Artificial Sequence
  Description of Artificial Sequence: Synthetic oligonucleotide
caucguagacuagauguaa

SEQ ID NO: 32809 - RNA, 19 nt, Artificial Sequence
  Description of Artificial Sequence: Synthetic oligonucleotide
cgucacagcgaaaggauac

SEQ ID NO: 32810 - RNA, 19 nt, Artificial Sequence
  Description of Artificial Sequence: Synthetic oligonucleotide
ccgucugaaaagugguagc

SEQ ID NO: 32811 - RNA, 19 nt, Artificial Sequence
  Description of Artificial Sequence: Synthetic oligonucleotide
ccuaaaucuugugauauaa

SEQ ID NO: 32812 - RNA, 19 nt, Artificial Sequence
  Description of Artificial Sequence: Synthetic oligonucleotide
ccaaauaccgugaauuccu

SEQ ID NO: 32813 - RNA, 19 nt, Artificial Sequence
  Description of Artificial Sequence: Synthetic oligonucleotide
ccuaggauacaauugggcu

SEQ ID NO: 32814 - RNA, 19 nt, Artificial Sequence
  Description of Artificial Sequence: Synthetic oligonucleotide
cauugacccgcugugggga

SEQ ID NO: 32815 - RNA, 19 nt, Artificial Sequence
  Description of Artificial Sequence: Synthetic oligonucleotide
uguugcggccgagaugguc

SEQ ID NO: 32816 - RNA, 19 nt, Artificial Sequence
  Description of Artificial Sequence: Synthetic oligonucleotide
agcccuacccuagccuggg

SEQ ID NO: 32817 - RNA, 19 nt, Artificial Sequence
  Description of Artificial Sequence: Synthetic oligonucleotide
ugagccggauucaggcauu

SEQ ID NO: 32818 - RNA, 19 nt, Artificial Sequence
  Description of Artificial Sequence: Synthetic oligonucleotide
uacuuugcucaagcccuac

SEQ ID NO: 32819 - RNA, 19 nt, Artificial Sequence
  Description of Artificial Sequence: Synthetic oligonucleotide
caggacaucggcagguucu

SEQ ID NO: 32820 - RNA, 19 nt, Artificial Sequence
  Description of Artificial Sequence: Synthetic oligonucleotide
ggccgagauggucaagggc

SEQ ID NO: 32821 - RNA, 19 nt, Artificial Sequence
  Description of Artificial Sequence: Synthetic oligonucleotide
guaaaccaccuuguccaca

SEQ ID NO: 32822 - RNA, 19 nt, Artificial Sequence
  Description of Artificial Sequence: Synthetic oligonucleotide
caucaauaucguagcaagu

SEQ ID NO: 32823 - RNA, 19 nt, Artificial Sequence
  Description of Artificial Sequence: Synthetic oligonucleotide
ccauuauucacugagcagu

SEQ ID NO: 32824 - RNA, 19 nt, Artificial Sequence
  Description of Artificial Sequence: Synthetic oligonucleotide
gugaugcuaaacccauucu

SEQ ID NO: 32825 - RNA, 19 nt, Artificial Sequence
  Description of Artificial Sequence: Synthetic oligonucleotide
cagucaaaggccaguccaa

SEQ ID NO: 32826 - RNA, 19 nt, Artificial Sequence
  Description of Artificial Sequence: Synthetic oligonucleotide
gcgcaagauccuuuccucc

SEQ ID NO: 32827 - RNA, 19 nt, Artificial Sequence
  Description of Artificial Sequence: Synthetic oligonucleotide
gcggccgagauggucaagg

SEQ ID NO: 32828 - RNA, 19 nt, Artificial Sequence
  Description of Artificial Sequence: Synthetic oligonucleotide
accuauguuguagcugaau

SEQ ID NO: 32829 - RNA, 19 nt, Artificial Sequence
  Description of Artificial Sequence: Synthetic oligonucleotide
caauugggcuuugaucaca

SEQ ID NO: 32830 - RNA, 19 nt, Artificial Sequence
  Description of Artificial Sequence: Synthetic oligonucleotide
uggcacucggccgucuagu

SEQ ID NO: 32831 - RNA, 19 nt, Artificial Sequence
  Description of Artificial Sequence: Synthetic oligonucleotide
ggcuaaagacucacaugcc

SEQ ID NO: 32832 - RNA, 19 nt, Artificial Sequence
  Description of Artificial Sequence: Synthetic oligonucleotide
caaauaccgugaauuccua

SEQ ID NO: 32833 - RNA, 19 nt, Artificial Sequence
  Description of Artificial Sequence: Synthetic oligonucleotide
cucccaauggaaggcucac

SEQ ID NO: 32834 - RNA, 19 nt, Artificial Sequence
  Description of Artificial Sequence: Synthetic oligonucleotide
cucgucacagcgaaaggau

SEQ ID NO: 32835 - RNA, 19 nt, Artificial Sequence
  Description of Artificial Sequence: Synthetic oligonucleotide
ccaauacuuguguacaucu

SEQ ID NO: 32836 - RNA, 19 nt, Artificial Sequence
  Description of Artificial Sequence: Synthetic oligonucleotide
uggguacggguacccucca

SEQ ID NO: 32837 - RNA, 19 nt, Artificial Sequence
  Description of Artificial Sequence: Synthetic oligonucleotide
ugacaucggcugagcuggc

SEQ ID NO: 32838 - RNA, 19 nt, Artificial Sequence
  Description of Artificial Sequence: Synthetic oligonucleotide
ggagcauucgcaggugaac

SEQ ID NO: 32839 - RNA, 19 nt, Artificial Sequence
  Description of Artificial Sequence: Synthetic oligonucleotide
gggguacauacauccccag

SEQ ID NO: 32840 - RNA, 19 nt, Artificial Sequence
  Description of Artificial Sequence: Synthetic oligonucleotide
ggucugacgccacugguua

SEQ ID NO: 32841 - RNA, 19 nt, Artificial Sequence
  Description of Artificial Sequence: Synthetic oligonucleotide
auugacccgcuguggggaa

SEQ ID NO: 32842 - RNA, 19 nt, Artificial Sequence
  Description of Artificial Sequence: Synthetic oligonucleotide
guagggcucaaugugcacu

SEQ ID NO: 32843 - RNA, 19 nt, Artificial Sequence
  Description of Artificial Sequence: Synthetic oligonucleotide
cuuagaugacuagccaaua

SEQ ID NO: 32844 - RNA, 19 nt, Artificial Sequence
  Description of Artificial Sequence: Synthetic oligonucleotide
auucgcaggugaacugugu

SEQ ID NO: 32845 - RNA, 19 nt, Artificial Sequence
  Description of Artificial Sequence: Synthetic oligonucleotide
gggcccuuagaugacuagc

SEQ ID NO: 32846 - RNA, 19 nt, Artificial Sequence
  Description of Artificial Sequence: Synthetic oligonucleotide
cuugcccacuugacuauaa

SEQ ID NO: 32847 - RNA, 19 nt, Artificial Sequence
  Description of Artificial Sequence: Synthetic oligonucleotide
gcguuuuccccaccucucc

SEQ ID NO: 32848 - RNA, 19 nt, Artificial Sequence
  Description of Artificial Sequence: Synthetic oligonucleotide
acccgugagugccaaugua

SEQ ID NO: 32849 - RNA, 19 nt, Artificial Sequence
  Description of Artificial Sequence: Synthetic oligonucleotide
cugacgccacugguuaaac

SEQ ID NO: 32850 - RNA, 19 nt, Artificial Sequence
  Description of Artificial Sequence: Synthetic oligonucleotide
caguccaauguaagcaggu

SEQ ID NO: 32851 - RNA, 19 nt, Artificial Sequence
  Description of Artificial Sequence: Synthetic oligonucleotide
cagcaacaucccuugaacu

SEQ ID NO: 32852 - RNA, 19 nt, Artificial Sequence
  Description of Artificial Sequence: Synthetic oligonucleotide
accuugcgacugcugggcu

SEQ ID NO: 32853 - RNA, 19 nt, Artificial Sequence
  Description of Artificial Sequence: Synthetic oligonucleotide
cagguucccaguccaaugu

SEQ ID NO: 32854 - RNA, 19 nt, Artificial Sequence
  Description of Artificial Sequence: Synthetic oligonucleotide
gagcacuggugucuauugu

SEQ ID NO: 32855 - RNA, 19 nt, Artificial Sequence
  Description of Artificial Sequence: Synthetic oligonucleotide
ucaccucggcuugucgggu

SEQ ID NO: 32856 - RNA, 19 nt, Artificial Sequence
  Description of Artificial Sequence: Synthetic oligonucleotide
cccuacccuagccugggcc

SEQ ID NO: 32857 - RNA, 19 nt, Artificial Sequence
  Description of Artificial Sequence: Synthetic oligonucleotide
cuugucgaaugaugguggu

SEQ ID NO: 32858 - RNA, 19 nt, Artificial Sequence
  Description of Artificial Sequence: Synthetic oligonucleotide
agguguccguguucgucaa

SEQ ID NO: 32859 - RNA, 19 nt, Artificial Sequence
  Description of Artificial Sequence: Synthetic oligonucleotide
ugccguugcccguguaguu

SEQ ID NO: 32860 - RNA, 19 nt, Artificial Sequence
  Description of Artificial Sequence: Synthetic oligonucleotide
ccccugauauccagguuug

SEQ ID NO: 32861 - RNA, 19 nt, Artificial Sequence
  Description of Artificial Sequence: Synthetic oligonucleotide
guguccguguucgucaaua

SEQ ID NO: 32862 - RNA, 19 nt, Artificial Sequence
  Description of Artificial Sequence: Synthetic oligonucleotide
gagggaggcguucaaucuu

SEQ ID NO: 32863 - RNA, 19 nt, Artificial Sequence
  Description of Artificial Sequence: Synthetic oligonucleotide
guaagcagguugagaugga

SEQ ID NO: 32864 - RNA, 19 nt, Artificial Sequence
  Description of Artificial Sequence: Synthetic oligonucleotide
ccugccguugcccguguag

SEQ ID NO: 32865 - RNA, 19 nt, Artificial Sequence
  Description of Artificial Sequence: Synthetic oligonucleotide
ucguagcaagucugcccau

SEQ ID NO: 32866 - RNA, 19 nt, Artificial Sequence
  Description of Artificial Sequence: Synthetic oligonucleotide
cgaucuagcugagagucug

SEQ ID NO: 32867 - RNA, 19 nt, Artificial Sequence
  Description of Artificial Sequence: Synthetic oligonucleotide
caacaucccuugaacuaua

SEQ ID NO: 32868 - RNA, 19 nt, Artificial Sequence
  Description of Artificial Sequence: Synthetic oligonucleotide
cccuuagaugacuagccaa

SEQ ID NO: 32869 - RNA, 19 nt, Artificial Sequence
  Description of Artificial Sequence: Synthetic oligonucleotide
aggcccgauggaauugcug

SEQ ID NO: 32870 - RNA, 19 nt, Artificial Sequence
  Description of Artificial Sequence: Synthetic oligonucleotide
gcccuuagaugacuagcca

SEQ ID NO: 32871 - RNA, 19 nt, Artificial Sequence
  Description of Artificial Sequence: Synthetic oligonucleotide
ucacacccgugagugccaa

SEQ ID NO: 32872 - RNA, 19 nt, Artificial Sequence
  Description of Artificial Sequence: Synthetic oligonucleotide
auaacucgucacagcgaaa

SEQ ID NO: 32873 - RNA, 19 nt, Artificial Sequence
  Description of Artificial Sequence: Synthetic oligonucleotide
gcaauuggaagguccuggu

SEQ ID NO: 32874 - RNA, 19 nt, Artificial Sequence
  Description of Artificial Sequence: Synthetic oligonucleotide
uugacccgcuguggggaac

SEQ ID NO: 32875 - RNA, 19 nt, Artificial Sequence
  Description of Artificial Sequence: Synthetic oligonucleotide
uucucucaguggggauccc

SEQ ID NO: 32876 - RNA, 19 nt, Artificial Sequence
  Description of Artificial Sequence: Synthetic oligonucleotide
cuaugggugccugcaucca

SEQ ID NO: 32877 - RNA, 19 nt, Artificial Sequence
  Description of Artificial Sequence: Synthetic oligonucleotide
cauauagccgggucugcuu

SEQ ID NO: 32878 - RNA, 19 nt, Artificial Sequence
  Description of Artificial Sequence: Synthetic oligonucleotide
gggaugacggcuguaggua

SEQ ID NO: 32879 - RNA, 19 nt, Artificial Sequence
  Description of Artificial Sequence: Synthetic oligonucleotide
aggauacaauugggcuuug

SEQ ID NO: 32880 - RNA, 19 nt, Artificial Sequence
  Description of Artificial Sequence: Synthetic oligonucleotide
ccgaaguuauuuaaggguu

SEQ ID NO: 32881 - RNA, 19 nt, Artificial Sequence
  Description of Artificial Sequence: Synthetic oligonucleotide
ucgcuccaguugacaucgc

SEQ ID NO: 32882 - RNA, 19 nt, Artificial Sequence
  Description of Artificial Sequence: Synthetic oligonucleotide
ccuuagaugacuagccaau

SEQ ID NO: 32883 - RNA, 19 nt, Artificial Sequence
  Description of Artificial Sequence: Synthetic oligonucleotide
ccuugcgacugcugggcug

SEQ ID NO: 32884 - RNA, 19 nt, Artificial Sequence
  Description of Artificial Sequence: Synthetic oligonucleotide
cguccaugguucaucacca

SEQ ID NO: 32885 - RNA, 19 nt, Artificial Sequence
  Description of Artificial Sequence: Synthetic oligonucleotide
gagccggauucaggcauuc

SEQ ID NO: 32886 - RNA, 19 nt, Artificial Sequence
  Description of Artificial Sequence: Synthetic oligonucleotide
gcugagccggauucaggca

SEQ ID NO: 32887 - RNA, 19 nt, Artificial Sequence
  Description of Artificial Sequence: Synthetic oligonucleotide
guacggguacccuccaguu

SEQ ID NO: 32888 - RNA, 19 nt, Artificial Sequence
  Description of Artificial Sequence: Synthetic oligonucleotide
guguaagagcguccauggu

SEQ ID NO: 32889 - RNA, 19 nt, Artificial Sequence
  Description of Artificial Sequence: Synthetic oligonucleotide
cacggagagcugcugggua

SEQ ID NO: 32890 - RNA, 19 nt, Artificial Sequence
  Description of Artificial Sequence: Synthetic oligonucleotide
cucggcuugucgggugaac

SEQ ID NO: 32891 - RNA, 19 nt, Artificial Sequence
  Description of Artificial Sequence: Synthetic oligonucleotide
ggugccccaagaaggucac

SEQ ID NO: 32892 - RNA, 19 nt, Artificial Sequence
  Description of Artificial Sequence: Synthetic oligonucleotide
gcccuucgagaaccuugcg

SEQ ID NO: 32893 - RNA, 19 nt, Artificial Sequence
  Description of Artificial Sequence: Synthetic oligonucleotide
caucgcguuuuccccaccu

SEQ ID NO: 32894 - RNA, 19 nt, Artificial Sequence
  Description of Artificial Sequence: Synthetic oligonucleotide
ccaucguagacuagaugua

SEQ ID NO: 32895 - RNA, 19 nt, Artificial Sequence
  Description of Artificial Sequence: Synthetic oligonucleotide
guggggcuaaagacucaca

SEQ ID NO: 32896 - RNA, 19 nt, Artificial Sequence
  Description of Artificial Sequence: Synthetic oligonucleotide
agccggauucaggcauucu

SEQ ID NO: 32897 - RNA, 19 nt, Artificial Sequence
  Description of Artificial Sequence: Synthetic oligonucleotide
ugccugccguugcccgugu

SEQ ID NO: 32898 - RNA, 19 nt, Artificial Sequence
  Description of Artificial Sequence: Synthetic oligonucleotide
gccauauagccgggucugc

SEQ ID NO: 32899 - RNA, 19 nt, Artificial Sequence
  Description of Artificial Sequence: Synthetic oligonucleotide
ccacccauauagaugcacu

SEQ ID NO: 32900 - RNA, 19 nt, Artificial Sequence
  Description of Artificial Sequence: Synthetic oligonucleotide
uugcgacugcugggcugag

SEQ ID NO: 32901 - RNA, 19 nt, Artificial Sequence
  Description of Artificial Sequence: Synthetic oligonucleotide
gcauucgcaggugaacugu

SEQ ID NO: 32902 - RNA, 19 nt, Artificial Sequence
  Description of Artificial Sequence: Synthetic oligonucleotide
ggacaucggcagguucugc

SEQ ID NO: 32903 - RNA, 19 nt, Artificial Sequence
  Description of Artificial Sequence: Synthetic oligonucleotide
cgaccaucucuguccacac

SEQ ID NO: 32904 - RNA, 19 nt, Artificial Sequence
  Description of Artificial Sequence: Synthetic oligonucleotide
cagugccguccggaucagg

SEQ ID NO: 32905 - RNA, 19 nt, Artificial Sequence
  Description of Artificial Sequence: Synthetic oligonucleotide
gcuccaguugacaucgcgu

SEQ ID NO: 32906 - RNA, 19 nt, Artificial Sequence
  Description of Artificial Sequence: Synthetic oligonucleotide
acggagcacuggugucuau

SEQ ID NO: 32907 - RNA, 19 nt, Artificial Sequence
  Description of Artificial Sequence: Synthetic oligonucleotide
cuucaaggacuagcauucu

SEQ ID NO: 32908 - RNA, 19 nt, Artificial Sequence
  Description of Artificial Sequence: Synthetic oligonucleotide
cacccgugagugccaaugu

SEQ ID NO: 32909 - RNA, 19 nt, Artificial Sequence
  Description of Artificial Sequence: Synthetic oligonucleotide
cccuaaaucuugugauaua

SEQ ID NO: 32910 - RNA, 19 nt, Artificial Sequence
  Description of Artificial Sequence: Synthetic oligonucleotide
caguaguugaugggccgcu

SEQ ID NO: 32911 - RNA, 19 nt, Artificial Sequence
  Description of Artificial Sequence: Synthetic oligonucleotide
cugccguugcccguguagu

SEQ ID NO: 32912 - RNA, 19 nt, Artificial Sequence
  Description of Artificial Sequence: Synthetic oligonucleotide
cguagcaagucugcccauc

SEQ ID NO: 32913 - RNA, 19 nt, Artificial Sequence
  Description of Artificial Sequence: Synthetic oligonucleotide
caucggcugagcuggcauu

SEQ ID NO: 32914 - RNA, 19 nt, Artificial Sequence
  Description of Artificial Sequence: Synthetic oligonucleotide
uacccuagccugggcccuu

SEQ ID NO: 32915 - RNA, 19 nt, Artificial Sequence
  Description of Artificial Sequence: Synthetic oligonucleotide
ggcguucaaucuucccagu

SEQ ID NO: 32916 - RNA, 19 nt, Artificial Sequence
  Description of Artificial Sequence: Synthetic oligonucleotide
ccgagauggucaagggcaa

SEQ ID NO: 32917 - RNA, 19 nt, Artificial Sequence
  Description of Artificial Sequence: Synthetic oligonucleotide
cacggagcacuggugucua

SEQ ID NO: 32918 - RNA, 19 nt, Artificial Sequence
  Description of Artificial Sequence: Synthetic oligonucleotide
gugcgagaauccuccgguu

SEQ ID NO: 32919 - RNA, 19 nt, Artificial Sequence
  Description of Artificial Sequence: Synthetic oligonucleotide
gcagguugagauggaggua

SEQ ID NO: 32920 - RNA, 19 nt, Artificial Sequence
  Description of Artificial Sequence: Synthetic oligonucleotide
cagcgguaggcuccugggu

SEQ ID NO: 32921 - RNA, 19 nt, Artificial Sequence
  Description of Artificial Sequence: Synthetic oligonucleotide
ggccgucuaguucuguguu

SEQ ID NO: 32922 - RNA, 19 nt, Artificial Sequence
  Description of Artificial Sequence: Synthetic oligonucleotide
ccccuaaaucuugugauau

SEQ ID NO: 32923 - RNA, 19 nt, Artificial Sequence
  Description of Artificial Sequence: Synthetic oligonucleotide
cgugaauuccuaggauaca

SEQ ID NO: 32924 - RNA, 19 nt, Artificial Sequence
  Description of Artificial Sequence: Synthetic oligonucleotide
cuacccuagccugggcccu

SEQ ID NO: 32925 - RNA, 19 nt, Artificial Sequence
  Description of Artificial Sequence: Synthetic oligonucleotide
cgaaguuauuuaaggguuu

SEQ ID NO: 32926 - RNA, 19 nt, Artificial Sequence
  Description of Artificial Sequence: Synthetic oligonucleotide
ggacuaugaugggccacua

SEQ ID NO: 32927 - RNA, 19 nt, Artificial Sequence
  Description of Artificial Sequence: Synthetic oligonucleotide
gccguccggaucaggcuca

SEQ ID NO: 32928 - RNA, 19 nt, Artificial Sequence
  Description of Artificial Sequence: Synthetic oligonucleotide
gcccuacccuagccugggc

SEQ ID NO: 32929 - RNA, 19 nt, Artificial Sequence
  Description of Artificial Sequence: Synthetic oligonucleotide
ccauggcaaucacugaauu

SEQ ID NO: 32930 - RNA, 19 nt, Artificial Sequence
  Description of Artificial Sequence: Synthetic oligonucleotide
auguugcggccgagauggu

SEQ ID NO: 32931 - RNA, 19 nt, Artificial Sequence
  Description of Artificial Sequence: Synthetic oligonucleotide
ccauauagccgggucugcu

SEQ ID NO: 32932 - RNA, 19 nt, Artificial Sequence
  Description of Artificial Sequence: Synthetic oligonucleotide
uaccagcaguggggcuaaa

SEQ ID NO: 32933 - RNA, 19 nt, Artificial Sequence
  Description of Artificial Sequence: Synthetic oligonucleotide
ccgaucuagcugagagucu

SEQ ID NO: 32934 - RNA, 19 nt, Artificial Sequence
  Description of Artificial Sequence: Synthetic oligonucleotide
ccgggugccccaagaaggu

SEQ ID NO: 32935 - RNA, 19 nt, Artificial Sequence
  Description of Artificial Sequence: Synthetic oligonucleotide
ccguguacucccgggugga

SEQ ID NO: 32936 - RNA, 19 nt, Artificial Sequence
  Description of Artificial Sequence: Synthetic oligonucleotide
cacgucagccacgcauauu

SEQ ID NO: 32937 - RNA, 19 nt, Artificial Sequence
  Description of Artificial Sequence: Synthetic oligonucleotide
ccguccggaucaggcucag

SEQ ID NO: 32938 - RNA, 19 nt, Artificial Sequence
  Description of Artificial Sequence: Synthetic oligonucleotide
cggccgucuaguucugugu

SEQ ID NO: 32939 - RNA, 19 nt, Artificial Sequence
  Description of Artificial Sequence: Synthetic oligonucleotide
cucggccgucuaguucugu

SEQ ID NO: 32940 - RNA, 19 nt, Artificial Sequence
  Description of Artificial Sequence: Synthetic oligonucleotide
ccagagggaggcguucaau

SEQ ID NO: 32941 - RNA, 19 nt, Artificial Sequence
  Description of Artificial Sequence: Synthetic oligonucleotide
ccacgucagccacgcauau

SEQ ID NO: 32942 - RNA, 19 nt, Artificial Sequence
  Description of Artificial Sequence: Synthetic oligonucleotide
gccugccguugcccgugua

SEQ ID NO: 32943 - RNA, 19 nt, Artificial Sequence
  Description of Artificial Sequence: Synthetic oligonucleotide
cguccggaucaggcucagu

SEQ ID NO: 32944 - RNA, 19 nt, Artificial Sequence
  Description of Artificial Sequence: Synthetic oligonucleotide
uauauauuuauauauauag

SEQ ID NO: 32945 - RNA, 19 nt, Artificial Sequence
  Description of Artificial Sequence: Synthetic oligonucleotide
aaaauagcggcccagaaug

SEQ ID NO: 32946 - RNA, 19 nt, Artificial Sequence
  Description of Artificial Sequence: Synthetic oligonucleotide
aagggcucggaauagaugc

SEQ ID NO: 32947 - RNA, 19 nt, Artificial Sequence
  Description of Artificial Sequence: Synthetic oligonucleotide
aguuguuuggaguagaaac

SEQ ID NO: 32948 - RNA, 19 nt, Artificial Sequence
  Description of Artificial Sequence: Synthetic oligonucleotide
uaaguauugaaacaugggc

SEQ ID NO: 32949 - RNA, 19 nt, Artificial Sequence
  Description of Artificial Sequence: Synthetic oligonucleotide
aagagcuuagguuuuaguc

SEQ ID NO: 32950 - RNA, 19 nt, Artificial Sequence
  Description of Artificial Sequence: Synthetic oligonucleotide
agagcuuagguuuuagucc

SEQ ID NO: 32951 - RNA, 19 nt, Artificial Sequence
  Description of Artificial Sequence: Synthetic oligonucleotide
uuuacgacaacagagaaga

SEQ ID NO: 32952 - RNA, 19 nt, Artificial Sequence
  Description of Artificial Sequence: Synthetic oligonucleotide
uauuuuaguagcuaugcgc

SEQ ID NO: 32953 - RNA, 19 nt, Artificial Sequence
  Description of Artificial Sequence: Synthetic oligonucleotide
ugaaccgauacaaaaugcg

SEQ ID NO: 32954 - RNA, 19 nt, Artificial Sequence
  Description of Artificial Sequence: Synthetic oligonucleotide
gucaacaaaacacugcucg

SEQ ID NO: 32955 - RNA, 19 nt, Artificial Sequence
  Description of Artificial Sequence: Synthetic oligonucleotide
ucacauguuaacucaagcg

SEQ ID NO: 32956 - RNA, 19 nt, Artificial Sequence
  Description of Artificial Sequence: Synthetic oligonucleotide
aacaagacguuguugugac

SEQ ID NO: 32957 - RNA, 19 nt, Artificial Sequence
  Description of Artificial Sequence: Synthetic oligonucleotide
uuuauauauuuauauauau

SEQ ID NO: 32958 - RNA, 19 nt, Artificial Sequence
  Description of Artificial Sequence: Synthetic oligonucleotide
aaguauguaccuuuauguc

SEQ ID NO: 32959 - RNA, 19 nt, Artificial Sequence
  Description of Artificial Sequence: Synthetic oligonucleotide
uuacauaccaguccguucc

SEQ ID NO: 32960 - RNA, 19 nt, Artificial Sequence
  Description of Artificial Sequence: Synthetic oligonucleotide
uagguuuuaguccuucugg

SEQ ID NO: 32961 - RNA, 19 nt, Artificial Sequence
  Description of Artificial Sequence: Synthetic oligonucleotide
uucaguaguugaaucacgg

SEQ ID NO: 32962 - RNA, 19 nt, Artificial Sequence
  Description of Artificial Sequence: Synthetic oligonucleotide
gauucaaucucauugcgac

SEQ ID NO: 32963 - RNA, 19 nt, Artificial Sequence
  Description of Artificial Sequence: Synthetic oligonucleotide
acucuuauugacuuggcag

SEQ ID NO: 32964 - RNA, 19 nt, Artificial Sequence
  Description of Artificial Sequence: Synthetic oligonucleotide
gaaucguauacauacagca

SEQ ID NO: 32965 - RNA, 19 nt, Artificial Sequence
  Description of Artificial Sequence: Synthetic oligonucleotide
agaaguaucucccuucauc

SEQ ID NO: 32966 - RNA, 19 nt, Artificial Sequence
  Description of Artificial Sequence: Synthetic oligonucleotide
uggauaucgaucaucaagu

SEQ ID NO: 32967 - RNA, 19 nt, Artificial Sequence
  Description of Artificial Sequence: Synthetic oligonucleotide
aaggcuaguguaugaaagg

SEQ ID NO: 32968 - RNA, 19 nt, Artificial Sequence
  Description of Artificial Sequence: Synthetic oligonucleotide
uacgcuuucaaauaacaga

SEQ ID NO: 32969 - RNA, 19 nt, Artificial Sequence
  Description of Artificial Sequence: Synthetic oligonucleotide
ucgggaaucguauacauac

SEQ ID NO: 32970 - RNA, 19 nt, Artificial Sequence
  Description of Artificial Sequence: Synthetic oligonucleotide
cuuucgagaacaauacagg

SEQ ID NO: 32971 - RNA, 19 nt, Artificial Sequence
  Description of Artificial Sequence: Synthetic oligonucleotide
uuaguaaacagauucuguc

SEQ ID NO: 32972 - RNA, 19 nt, Artificial Sequence
  Description of Artificial Sequence: Synthetic oligonucleotide
aaugcaacugaauuuggaa

SEQ ID NO: 32973 - RNA, 19 nt, Artificial Sequence
  Description of Artificial Sequence: Synthetic oligonucleotide
uugauuauagcugugucug

SEQ ID NO: 32974 - RNA, 19 nt, Artificial Sequence
  Description of Artificial Sequence: Synthetic oligonucleotide
aaaucagcguaaguuuucc

SEQ ID NO: 32975 - RNA, 19 nt, Artificial Sequence
  Description of Artificial Sequence: Synthetic oligonucleotide
acaaaaugcgaaugggaac

SEQ ID NO: 32976 - RNA, 19 nt, Artificial Sequence
  Description of Artificial Sequence: Synthetic oligonucleotide
aaacacacgagcgucucgc

SEQ ID NO: 32977 - RNA, 19 nt, Artificial Sequence
  Description of Artificial Sequence: Synthetic oligonucleotide
uucaacgacaugcuaacug

SEQ ID NO: 32978 - RNA, 19 nt, Artificial Sequence
  Description of Artificial Sequence: Synthetic oligonucleotide
cacauguuaacucaagcgc

SEQ ID NO: 32979 - RNA, 19 nt, Artificial Sequence
  Description of Artificial Sequence: Synthetic oligonucleotide
aucagcguaaguuuuccac

SEQ ID NO: 32980 - RNA, 19 nt, Artificial Sequence
  Description of Artificial Sequence: Synthetic oligonucleotide
ugcaaucuaccugagacgg

SEQ ID NO: 32981 - RNA, 19 nt, Artificial Sequence
  Description of Artificial Sequence: Synthetic oligonucleotide
uuauauauuuauauauaua

SEQ ID NO: 32982 - RNA, 19 nt, Artificial Sequence
  Description of Artificial Sequence: Synthetic oligonucleotide
ugugacuaaagaacaagcu

SEQ ID NO: 32983 - RNA, 19 nt, Artificial Sequence
  Description of Artificial Sequence: Synthetic oligonucleotide
uucgagaacaauacaggcc

SEQ ID NO: 32984 - RNA, 19 nt, Artificial Sequence
  Description of Artificial Sequence: Synthetic oligonucleotide
aguuacaucagaacacugc

SEQ ID NO: 32985 - RNA, 19 nt, Artificial Sequence
  Description of Artificial Sequence: Synthetic oligonucleotide
aguauguaccuuuaugucu

SEQ ID NO: 32986 - RNA, 19 nt, Artificial Sequence
  Description of Artificial Sequence: Synthetic oligonucleotide
uuucgagaacaauacaggc

SEQ ID NO: 32987 - RNA, 19 nt, Artificial Sequence
  Description of Artificial Sequence: Synthetic oligonucleotide
cuucauccgaaauugagac

SEQ ID NO: 32988 - RNA, 19 nt, Artificial Sequence
  Description of Artificial Sequence: Synthetic oligonucleotide
ucaagguaacuuauuuuag

SEQ ID NO: 32989 - RNA, 19 nt, Artificial Sequence
  Description of Artificial Sequence: Synthetic oligonucleotide
ugacauaaaauggacagac

SEQ ID NO: 32990 - RNA, 19 nt, Artificial Sequence
  Description of Artificial Sequence: Synthetic oligonucleotide
aguaauacucaacaauaca

SEQ ID NO: 32991 - RNA, 19 nt, Artificial Sequence
  Description of Artificial Sequence: Synthetic oligonucleotide
uuaugucuggcaaaauagc

SEQ ID NO: 32992 - RNA, 19 nt, Artificial Sequence
  Description of Artificial Sequence: Synthetic oligonucleotide
caaaucuuuacgacaacag

SEQ ID NO: 32993 - RNA, 19 nt, Artificial Sequence
  Description of Artificial Sequence: Synthetic oligonucleotide
uuucacccaaaucuuuacg

SEQ ID NO: 32994 - RNA, 19 nt, Artificial Sequence
  Description of Artificial Sequence: Synthetic oligonucleotide
aguaaacagauucugucca

SEQ ID NO: 32995 - RNA, 19 nt, Artificial Sequence
  Description of Artificial Sequence: Synthetic oligonucleotide
guuguugugacuaaagaac

SEQ ID NO: 32996 - RNA, 19 nt, Artificial Sequence
  Description of Artificial Sequence: Synthetic oligonucleotide
aaaauccguaauuuccugu

SEQ ID NO: 32997 - RNA, 19 nt, Artificial Sequence
  Description of Artificial Sequence: Synthetic oligonucleotide
accaauauacaacuaaaau

SEQ ID NO: 32998 - RNA, 19 nt, Artificial Sequence
  Description of Artificial Sequence: Synthetic oligonucleotide
aaguaaauggucugccugu

SEQ ID NO: 32999 - RNA, 19 nt, Artificial Sequence
  Description of Artificial Sequence: Synthetic oligonucleotide
uccccuuaaauaaaucagc

SEQ ID NO: 33000 - RNA, 19 nt, Artificial Sequence
  Description of Artificial Sequence: Synthetic oligonucleotide
aagguaacuuauuuuagua

SEQ ID NO: 33001 - RNA, 19 nt, Artificial Sequence
  Description of Artificial Sequence: Synthetic oligonucleotide
cucacaacgguaaguaccg

SEQ ID NO: 33002 - RNA, 19 nt, Artificial Sequence
  Description of Artificial Sequence: Synthetic oligonucleotide
ucauccgaaauugagacgu

SEQ ID NO: 33003 - RNA, 19 nt, Artificial Sequence
  Description of Artificial Sequence: Synthetic oligonucleotide
gauuauagcugugucugcg

SEQ ID NO: 33004 - RNA, 19 nt, Artificial Sequence
  Description of Artificial Sequence: Synthetic oligonucleotide
ucgauaaugaauuuuccuu

SEQ ID NO: 33005 - RNA, 19 nt, Artificial Sequence
  Description of Artificial Sequence: Synthetic oligonucleotide
aguagcuaugcgcuauggc

SEQ ID NO: 33006 - RNA, 19 nt, Artificial Sequence
  Description of Artificial Sequence: Synthetic oligonucleotide
uuaggauuggaguuggaaa

SEQ ID NO: 33007 - RNA, 19 nt, Artificial Sequence
  Description of Artificial Sequence: Synthetic oligonucleotide
aaugagagcugcuuaggau

SEQ ID NO: 33008 - RNA, 19 nt, Artificial Sequence
  Description of Artificial Sequence: Synthetic oligonucleotide
gauaguacggcguguugag

SEQ ID NO: 33009 - RNA, 19 nt, Artificial Sequence
  Description of Artificial Sequence: Synthetic oligonucleotide
uuugaguucacugcuagaa

SEQ ID NO: 33010 - RNA, 19 nt, Artificial Sequence
  Description of Artificial Sequence: Synthetic oligonucleotide
ugaccuuucgagaacaaua

SEQ ID NO: 33011 - RNA, 19 nt, Artificial Sequence
  Description of Artificial Sequence: Synthetic oligonucleotide
uuauugacuuggcagcuga

SEQ ID NO: 33012 - RNA, 19 nt, Artificial Sequence
  Description of Artificial Sequence: Synthetic oligonucleotide
acgacaugcuaacugguuc

SEQ ID NO: 33013 - RNA, 19 nt, Artificial Sequence
  Description of Artificial Sequence: Synthetic oligonucleotide
auuuuaguagcuaugcgcu

SEQ ID NO: 33014 - RNA, 19 nt, Artificial Sequence
  Description of Artificial Sequence: Synthetic oligonucleotide
acgcuuucaaauaacagag

SEQ ID NO: 33015 - RNA, 19 nt, Artificial Sequence
  Description of Artificial Sequence: Synthetic oligonucleotide
acgaccacagcuacgacgc

SEQ ID NO: 33016 - RNA, 19 nt, Artificial Sequence
  Description of Artificial Sequence: Synthetic oligonucleotide
aaccucauucacacaacgc

SEQ ID NO: 33017 - RNA, 19 nt, Artificial Sequence
  Description of Artificial Sequence: Synthetic oligonucleotide
uaaucuauacugagccgcc

SEQ ID NO: 33018 - RNA, 19 nt, Artificial Sequence
  Description of Artificial Sequence: Synthetic oligonucleotide
aaucacggagucgucacuc

SEQ ID NO: 33019 - RNA, 19 nt, Artificial Sequence
  Description of Artificial Sequence: Synthetic oligonucleotide
aauugagacguuugucagu

SEQ ID NO: 33020 - RNA, 19 nt, Artificial Sequence
  Description of Artificial Sequence: Synthetic oligonucleotide
aacgguaaguaccguuauc

SEQ ID NO: 33021 - RNA, 19 nt, Artificial Sequence
  Description of Artificial Sequence: Synthetic oligonucleotide
uccgaaauugagacguuug

SEQ ID NO: 33022 - RNA, 19 nt, Artificial Sequence
  Description of Artificial Sequence: Synthetic oligonucleotide
acgacaacagagaagaaug

SEQ ID NO: 33023 - RNA, 19 nt, Artificial Sequence
  Description of Artificial Sequence: Synthetic oligonucleotide
uguggcaacucaaauucgu

SEQ ID NO: 33024 - RNA, 19 nt, Artificial Sequence
  Description of Artificial Sequence: Synthetic oligonucleotide
aguaccguuaucuguuuug

SEQ ID NO: 33025 - RNA, 19 nt, Artificial Sequence
  Description of Artificial Sequence: Synthetic oligonucleotide
uauacugcacuucuagaua

SEQ ID NO: 33026 - RNA, 19 nt, Artificial Sequence
  Description of Artificial Sequence: Synthetic oligonucleotide
aauggacagaccucaccug

SEQ ID NO: 33027 - RNA, 19 nt, Artificial Sequence
  Description of Artificial Sequence: Synthetic oligonucleotide
cuuuacgacaacagagaag

SEQ ID NO: 33028 - RNA, 19 nt, Artificial Sequence
  Description of Artificial Sequence: Synthetic oligonucleotide
ucuuuacgacaacagagaa

SEQ ID NO: 33029 - RNA, 19 nt, Artificial Sequence
  Description of Artificial Sequence: Synthetic oligonucleotide
uaguacggcguguugaggc

SEQ ID NO: 33030 - RNA, 19 nt, Artificial Sequence
  Description of Artificial Sequence: Synthetic oligonucleotide
uguccgaccacucuuccac

SEQ ID NO: 33031 - RNA, 19 nt, Artificial Sequence
  Description of Artificial Sequence: Synthetic oligonucleotide
aguccgaaugagcuuuccc

SEQ ID NO: 33032 - RNA, 19 nt, Artificial Sequence
  Description of Artificial Sequence: Synthetic oligonucleotide
augaaccgauacaaaaugc

SEQ ID NO: 33033 - RNA, 19 nt, Artificial Sequence
  Description of Artificial Sequence: Synthetic oligonucleotide
uagcuaugcgcuauggcug

SEQ ID NO: 33034 - RNA, 19 nt, Artificial Sequence
  Description of Artificial Sequence: Synthetic oligonucleotide
ugggguaaucuauacugag

SEQ ID NO: 33035 - RNA, 19 nt, Artificial Sequence
  Description of Artificial Sequence: Synthetic oligonucleotide
ucagcguaaguuuuccaca

SEQ ID NO: 33036 - RNA, 19 nt, Artificial Sequence
  Description of Artificial Sequence: Synthetic oligonucleotide
auauauuuauauauauaga

SEQ ID NO: 33037 - RNA, 19 nt, Artificial Sequence
  Description of Artificial Sequence: Synthetic oligonucleotide
auugagacguuugucagug

SEQ ID NO: 33038 - RNA, 19 nt, Artificial Sequence
  Description of Artificial Sequence: Synthetic oligonucleotide
aguaaggccaauugggaaa

SEQ ID NO: 33039 - RNA, 19 nt, Artificial Sequence
  Description of Artificial Sequence: Synthetic oligonucleotide
agcuaugcgcuauggcugc

SEQ ID NO: 33040 - RNA, 19 nt, Artificial Sequence
  Description of Artificial Sequence: Synthetic oligonucleotide
uucuagauaccgcuggguc

SEQ ID NO: 33041 - RNA, 19 nt, Artificial Sequence
  Description of Artificial Sequence: Synthetic oligonucleotide
uucauccgaaauugagacg

SEQ ID NO: 33042 - RNA, 19 nt, Artificial Sequence
  Description of Artificial Sequence: Synthetic oligonucleotide
aguccguucccaaaaggcc

SEQ ID NO: 33043 - RNA, 19 nt, Artificial Sequence
  Description of Artificial Sequence: Synthetic oligonucleotide
ucuagauaccgcugggucu

SEQ ID NO: 33044 - RNA, 19 nt, Artificial Sequence
  Description of Artificial Sequence: Synthetic oligonucleotide
aaaaugcgaaugggaacac

SEQ ID NO: 33045 - RNA, 19 nt, Artificial Sequence
  Description of Artificial Sequence: Synthetic oligonucleotide
guauguaccuuuaugucug

SEQ ID NO: 33046 - RNA, 19 nt, Artificial Sequence
  Description of Artificial Sequence: Synthetic oligonucleotide
ucuugguuaagugccuagg

SEQ ID NO: 33047 - RNA, 19 nt, Artificial Sequence
  Description of Artificial Sequence: Synthetic oligonucleotide
uaaaucagcguaaguuuuc

SEQ ID NO: 33048 - RNA, 19 nt, Artificial Sequence
  Description of Artificial Sequence: Synthetic oligonucleotide
ccuuucgagaacaauacag

SEQ ID NO: 33049 - RNA, 19 nt, Artificial Sequence
  Description of Artificial Sequence: Synthetic oligonucleotide
ucguauacauacagcauau

SEQ ID NO: 33050 - RNA, 19 nt, Artificial Sequence
  Description of Artificial Sequence: Synthetic oligonucleotide
ucacgucuuuaguaaacag

SEQ ID NO: 33051 - RNA, 19 nt, Artificial Sequence
  Description of Artificial Sequence: Synthetic oligonucleotide
guuuggcccggauaguacg

SEQ ID NO: 33052 - RNA, 19 nt, Artificial Sequence
  Description of Artificial Sequence: Synthetic oligonucleotide
cacuucuagauaccgcugg

SEQ ID NO: 33053 - RNA, 19 nt, Artificial Sequence
  Description of Artificial Sequence: Synthetic oligonucleotide
aggaaccugagacauguca

SEQ ID NO: 33054 - RNA, 19 nt, Artificial Sequence
  Description of Artificial Sequence: Synthetic oligonucleotide
caguccguucccaaaaggc

SEQ ID NO: 33055 - RNA, 19 nt, Artificial Sequence
  Description of Artificial Sequence: Synthetic oligonucleotide
ugaaucacggagucgucac

SEQ ID NO: 33056 - RNA, 19 nt, Artificial Sequence
  Description of Artificial Sequence: Synthetic oligonucleotide
uuuacauaccaguccguuc

SEQ ID NO: 33057 - RNA, 19 nt, Artificial Sequence
  Description of Artificial Sequence: Synthetic oligonucleotide
uaacccuguacaguaauga

SEQ ID NO: 33058 - RNA, 19 nt, Artificial Sequence
  Description of Artificial Sequence: Synthetic oligonucleotide
cacgaccacagcuacgacg

SEQ ID NO: 33059 - RNA, 19 nt, Artificial Sequence
  Description of Artificial Sequence: Synthetic oligonucleotide
ucuauacugagccgccuac

SEQ ID NO: 33060 - RNA, 19 nt, Artificial Sequence
  Description of Artificial Sequence: Synthetic oligonucleotide
ugcacuugcggcuuauacu

SEQ ID NO: 33061 - RNA, 19 nt, Artificial Sequence
  Description of Artificial Sequence: Synthetic oligonucleotide
cauauaguccgaaugagcu

SEQ ID NO: 33062 - RNA, 19 nt, Artificial Sequence
  Description of Artificial Sequence: Synthetic oligonucleotide
uccgaaugagcuuucccca

SEQ ID NO: 33063 - RNA, 19 nt, Artificial Sequence
  Description of Artificial Sequence: Synthetic oligonucleotide
cgaucaucaaguuacgugg

SEQ ID NO: 33064 - RNA, 19 nt, Artificial Sequence
  Description of Artificial Sequence: Synthetic oligonucleotide
aguuggacaccucauugga

SEQ ID NO: 33065 - RNA, 19 nt, Artificial Sequence
  Description of Artificial Sequence: Synthetic oligonucleotide
acacuagugagcaguaagg

SEQ ID NO: 33066 - RNA, 19 nt, Artificial Sequence
  Description of Artificial Sequence: Synthetic oligonucleotide
uguagaggguaagucaucu

SEQ ID NO: 33067 - RNA, 19 nt, Artificial Sequence
  Description of Artificial Sequence: Synthetic oligonucleotide
ugggcggucccgaaaauga

SEQ ID NO: 33068 - RNA, 19 nt, Artificial Sequence
  Description of Artificial Sequence: Synthetic oligonucleotide
ucacccaaaucuuuacgac

SEQ ID NO: 33069 - RNA, 19 nt, Artificial Sequence
  Description of Artificial Sequence: Synthetic oligonucleotide
uguugugacuaaagaacaa

SEQ ID NO: 33070 - RNA, 19 nt, Artificial Sequence
  Description of Artificial Sequence: Synthetic oligonucleotide
caguuggacaccucauugg

SEQ ID NO: 33071 - RNA, 19 nt, Artificial Sequence
  Description of Artificial Sequence: Synthetic oligonucleotide
aguaguugaaucacggagu

SEQ ID NO: 33072 - RNA, 19 nt, Artificial Sequence
  Description of Artificial Sequence: Synthetic oligonucleotide
acuauguuagaagccucac

SEQ ID NO: 33073 - RNA, 19 nt, Artificial Sequence
  Description of Artificial Sequence: Synthetic oligonucleotide
aaaugguaacuugacuccu

SEQ ID NO: 33074 - RNA, 19 nt, Artificial Sequence
  Description of Artificial Sequence: Synthetic oligonucleotide
caaguuacguggagggacc

SEQ ID NO: 33075 - RNA, 19 nt, Artificial Sequence
  Description of Artificial Sequence: Synthetic oligonucleotide
ggucccgaaaaugagaugc

SEQ ID NO: 33076 - RNA, 19 nt, Artificial Sequence
  Description of Artificial Sequence: Synthetic oligonucleotide
acgguaaguaccguuaucu

SEQ ID NO: 33077 - RNA, 19 nt, Artificial Sequence
  Description of Artificial Sequence: Synthetic oligonucleotide
ucucgcaaguuccaguauc

SEQ ID NO: 33078 - RNA, 19 nt, Artificial Sequence
  Description of Artificial Sequence: Synthetic oligonucleotide
cuuacacuguaacaugguc

SEQ ID NO: 33079 - RNA, 19 nt, Artificial Sequence
  Description of Artificial Sequence: Synthetic oligonucleotide
cucuaaguauugaaacaug

SEQ ID NO: 33080 - RNA, 19 nt, Artificial Sequence
  Description of Artificial Sequence: Synthetic oligonucleotide
gggaaucguauacauacag

SEQ ID NO: 33081 - RNA, 19 nt, Artificial Sequence
  Description of Artificial Sequence: Synthetic oligonucleotide
caccugacagaucacuggg

SEQ ID NO: 33082 - RNA, 19 nt, Artificial Sequence
  Description of Artificial Sequence: Synthetic oligonucleotide
uuaguagcuaugcgcuaug

SEQ ID NO: 33083 - RNA, 19 nt, Artificial Sequence
  Description of Artificial Sequence: Synthetic oligonucleotide
gaccuuucgagaacaauac

SEQ ID NO: 33084 - RNA, 19 nt, Artificial Sequence
  Description of Artificial Sequence: Synthetic oligonucleotide
uaacucaagcgcaucuccu

SEQ ID NO: 33085 - RNA, 19 nt, Artificial Sequence
  Description of Artificial Sequence: Synthetic oligonucleotide
uagucuucgcugcucuaag

SEQ ID NO: 33086 - RNA, 19 nt, Artificial Sequence
  Description of Artificial Sequence: Synthetic oligonucleotide
agaaagaugggcggucccg

SEQ ID NO: 33087 - RNA, 19 nt, Artificial Sequence
  Description of Artificial Sequence: Synthetic oligonucleotide
acgagcgucucgcaaguuc

SEQ ID NO: 33088 - RNA, 19 nt, Artificial Sequence
  Description of Artificial Sequence: Synthetic oligonucleotide
auacaacuaaaauccguaa

SEQ ID NO: 33089 - RNA, 19 nt, Artificial Sequence
  Description of Artificial Sequence: Synthetic oligonucleotide
uauguaccuuuaugucugg

SEQ ID NO: 33090 - RNA, 19 nt, Artificial Sequence
  Description of Artificial Sequence: Synthetic oligonucleotide
uuuaguagcuaugcgcuau

SEQ ID NO: 33091 - RNA, 19 nt, Artificial Sequence
  Description of Artificial Sequence: Synthetic oligonucleotide
accgauacaaaaugcgaau

SEQ ID NO: 33092 - RNA, 19 nt, Artificial Sequence
  Description of Artificial Sequence: Synthetic oligonucleotide
guaguugaaucacggaguc

SEQ ID NO: 33093 - RNA, 19 nt, Artificial Sequence
  Description of Artificial Sequence: Synthetic oligonucleotide
aaccgauacaaaaugcgaa

SEQ ID NO: 33094 - RNA, 19 nt, Artificial Sequence
  Description of Artificial Sequence: Synthetic oligonucleotide
ggccaauugggaaaggugg

SEQ ID NO: 33095 - RNA, 19 nt, Artificial Sequence
  Description of Artificial Sequence: Synthetic oligonucleotide
acgucuuuaguaaacagau

SEQ ID NO: 33096 - RNA, 19 nt, Artificial Sequence
  Description of Artificial Sequence: Synthetic oligonucleotide
gacguuguugugacuaaag

SEQ ID NO: 33097 - RNA, 19 nt, Artificial Sequence
  Description of Artificial Sequence: Synthetic oligonucleotide
guuacguggagggaccagg

SEQ ID NO: 33098 - RNA, 19 nt, Artificial Sequence
  Description of Artificial Sequence: Synthetic oligonucleotide
uccuuuaaugcaacugaau

SEQ ID NO: 33099 - RNA, 19 nt, Artificial Sequence
  Description of Artificial Sequence: Synthetic oligonucleotide
aaucagcguaaguuuucca

SEQ ID NO: 33100 - RNA, 19 nt, Artificial Sequence
  Description of Artificial Sequence: Synthetic oligonucleotide
ucacacaacgcacggacuu

SEQ ID NO: 33101 - RNA, 19 nt, Artificial Sequence
  Description of Artificial Sequence: Synthetic oligonucleotide
acguuguugugacuaaaga

SEQ ID NO: 33102 - RNA, 19 nt, Artificial Sequence
  Description of Artificial Sequence: Synthetic oligonucleotide
acauguuaacucaagcgca

SEQ ID NO: 33103 - RNA, 19 nt, Artificial Sequence
  Description of Artificial Sequence: Synthetic oligonucleotide
gcacuugcggcuuauacug

SEQ ID NO: 33104 - RNA, 19 nt, Artificial Sequence
  Description of Artificial Sequence: Synthetic oligonucleotide
acaacgcacggacuugcuc

SEQ ID NO: 33105 - RNA, 19 nt, Artificial Sequence
  Description of Artificial Sequence: Synthetic oligonucleotide
aaucguauacauacagcau

SEQ ID NO: 33106 - RNA, 19 nt, Artificial Sequence
  Description of Artificial Sequence: Synthetic oligonucleotide
auuguaagccauaaaguua

SEQ ID NO: 33107 - RNA, 19 nt, Artificial Sequence
  Description of Artificial Sequence: Synthetic oligonucleotide
uucccgauggcuucacaug

SEQ ID NO: 33108 - RNA, 19 nt, Artificial Sequence
  Description of Artificial Sequence: Synthetic oligonucleotide
ucuuauugacuuggcagcu

SEQ ID NO: 33109 - RNA, 19 nt, Artificial Sequence
  Description of Artificial Sequence: Synthetic oligonucleotide
gaacacugcacuacuguac

SEQ ID NO: 33110 - RNA, 19 nt, Artificial Sequence
  Description of Artificial Sequence: Synthetic oligonucleotide
ugcgacuucucccucgauc

SEQ ID NO: 33111 - RNA, 19 nt, Artificial Sequence
  Description of Artificial Sequence: Synthetic oligonucleotide
cuagauaccgcugggucug

SEQ ID NO: 33112 - RNA, 19 nt, Artificial Sequence
  Description of Artificial Sequence: Synthetic oligonucleotide
cacacgagcgucucgcaag

SEQ ID NO: 33113 - RNA, 19 nt, Artificial Sequence
  Description of Artificial Sequence: Synthetic oligonucleotide
cacgucuuuaguaaacaga

SEQ ID NO: 33114 - RNA, 19 nt, Artificial Sequence
  Description of Artificial Sequence: Synthetic oligonucleotide
guuaagugccuagggacag

SEQ ID NO: 33115 - RNA, 19 nt, Artificial Sequence
  Description of Artificial Sequence: Synthetic oligonucleotide
auagauagaucuauauuuu

SEQ ID NO: 33116 - RNA, 19 nt, Artificial Sequence
  Description of Artificial Sequence: Synthetic oligonucleotide
cugacagaucacugggacc

SEQ ID NO: 33117 - RNA, 19 nt, Artificial Sequence
  Description of Artificial Sequence: Synthetic oligonucleotide
acacaacgcacggacuugc

SEQ ID NO: 33118 - RNA, 19 nt, Artificial Sequence
  Description of Artificial Sequence: Synthetic oligonucleotide
ucaugcgagaugaggaauu

SEQ ID NO: 33119 - RNA, 19 nt, Artificial Sequence
  Description of Artificial Sequence: Synthetic oligonucleotide
cuuugauauggucacacua

SEQ ID NO: 33120 - RNA, 19 nt, Artificial Sequence
  Description of Artificial Sequence: Synthetic oligonucleotide
uccguucccaaaaggcccc

SEQ ID NO: 33121 - RNA, 19 nt, Artificial Sequence
  Description of Artificial Sequence: Synthetic oligonucleotide
aauccguaauuuccuguuu

SEQ ID NO: 33122 - RNA, 19 nt, Artificial Sequence
  Description of Artificial Sequence: Synthetic oligonucleotide
ugugaacaaugguaguuuu

SEQ ID NO: 33123 - RNA, 19 nt, Artificial Sequence
  Description of Artificial Sequence: Synthetic oligonucleotide
acagcuacgacgccgccaa

SEQ ID NO: 33124 - RNA, 19 nt, Artificial Sequence
  Description of Artificial Sequence: Synthetic oligonucleotide
caauguguggggccuacac

SEQ ID NO: 33125 - RNA, 19 nt, Artificial Sequence
  Description of Artificial Sequence: Synthetic oligonucleotide
aagacguuguugugacuaa

SEQ ID NO: 33126 - RNA, 19 nt, Artificial Sequence
  Description of Artificial Sequence: Synthetic oligonucleotide
cgugggguaaucuauacug

SEQ ID NO: 33127 - RNA, 19 nt, Artificial Sequence
  Description of Artificial Sequence: Synthetic oligonucleotide
uaguugaaucacggagucg

SEQ ID NO: 33128 - RNA, 19 nt, Artificial Sequence
  Description of Artificial Sequence: Synthetic oligonucleotide
uacauaccaguccguuccc

SEQ ID NO: 33129 - RNA, 19 nt, Artificial Sequence
  Description of Artificial Sequence: Synthetic oligonucleotide
gcuuauuuggcaucaauua

SEQ ID NO: 33130 - RNA, 19 nt, Artificial Sequence
  Description of Artificial Sequence: Synthetic oligonucleotide
uaagugccuagggacagga

SEQ ID NO: 33131 - RNA, 19 nt, Artificial Sequence
  Description of Artificial Sequence: Synthetic oligonucleotide
uuaagugccuagggacagg

SEQ ID NO: 33132 - RNA, 19 nt, Artificial Sequence
  Description of Artificial Sequence: Synthetic oligonucleotide
ccuaccaacacauagggua

SEQ ID NO: 33133 - RNA, 19 nt, Artificial Sequence
  Description of Artificial Sequence: Synthetic oligonucleotide
ggaguuggaaaucccagca

SEQ ID NO: 33134 - RNA, 19 nt, Artificial Sequence
  Description of Artificial Sequence: Synthetic oligonucleotide
agauauguucaagguaacu

SEQ ID NO: 33135 - RNA, 19 nt, Artificial Sequence
  Description of Artificial Sequence: Synthetic oligonucleotide
uacagcauauaguccgaau

SEQ ID NO: 33136 - RNA, 19 nt, Artificial Sequence
  Description of Artificial Sequence: Synthetic oligonucleotide
aaucuauacugagccgccu

SEQ ID NO: 33137 - RNA, 19 nt, Artificial Sequence
  Description of Artificial Sequence: Synthetic oligonucleotide
agaugggcggucccgaaaa

SEQ ID NO: 33138 - RNA, 19 nt, Artificial Sequence
  Description of Artificial Sequence: Synthetic oligonucleotide
ugggauucaguaguugaau

SEQ ID NO: 33139 - RNA, 19 nt, Artificial Sequence
  Description of Artificial Sequence: Synthetic oligonucleotide
accaguccguucccaaaag

SEQ ID NO: 33140 - RNA, 19 nt, Artificial Sequence
  Description of Artificial Sequence: Synthetic oligonucleotide
guccguucccaaaaggccc

SEQ ID NO: 33141 - RNA, 19 nt, Artificial Sequence
  Description of Artificial Sequence: Synthetic oligonucleotide
aacacacgagcgucucgca

SEQ ID NO: 33142 - RNA, 19 nt, Artificial Sequence
  Description of Artificial Sequence: Synthetic oligonucleotide
uuguagaggguaagucauc

SEQ ID NO: 33143 - RNA, 19 nt, Artificial Sequence
  Description of Artificial Sequence: Synthetic oligonucleotide
ggaaucguauacauacagc

SEQ ID NO: 33144 - RNA, 19 nt, Artificial Sequence
  Description of Artificial Sequence: Synthetic oligonucleotide
aguacggcguguugaggca

SEQ ID NO: 33145 - RNA, 19 nt, Artificial Sequence
  Description of Artificial Sequence: Synthetic oligonucleotide
ccccauauugcaaugguuc

SEQ ID NO: 33146 - RNA, 19 nt, Artificial Sequence
  Description of Artificial Sequence: Synthetic oligonucleotide
cacuauguuagaagccuca

SEQ ID NO: 33147 - RNA, 19 nt, Artificial Sequence
  Description of Artificial Sequence: Synthetic oligonucleotide
accuuucgagaacaauaca

SEQ ID NO: 33148 - RNA, 19 nt, Artificial Sequence
  Description of Artificial Sequence: Synthetic oligonucleotide
aagaugggcggucccgaaa

SEQ ID NO: 33149 - RNA, 19 nt, Artificial Sequence
  Description of Artificial Sequence: Synthetic oligonucleotide
uggcccggauaguacggcg

SEQ ID NO: 33150 - RNA, 19 nt, Artificial Sequence
  Description of Artificial Sequence: Synthetic oligonucleotide
aaagaugggcggucccgaa

SEQ ID NO: 33151 - RNA, 19 nt, Artificial Sequence
  Description of Artificial Sequence: Synthetic oligonucleotide
cucgauaaugaauuuuccu

SEQ ID NO: 33152 - RNA, 19 nt, Artificial Sequence
  Description of Artificial Sequence: Synthetic oligonucleotide
aggguaagucaucuggaua

SEQ ID NO: 33153 - RNA, 19 nt, Artificial Sequence
  Description of Artificial Sequence: Synthetic oligonucleotide
cuuguagaggguaagucau

SEQ ID NO: 33154 - RNA, 19 nt, Artificial Sequence
  Description of Artificial Sequence: Synthetic oligonucleotide
augcgaaugggaacacacg

SEQ ID NO: 33155 - RNA, 19 nt, Artificial Sequence
  Description of Artificial Sequence: Synthetic oligonucleotide
ucccgaaaaugagaugcca

SEQ ID NO: 33156 - RNA, 19 nt, Artificial Sequence
  Description of Artificial Sequence: Synthetic oligonucleotide
agcuacgacgccgccaauc

SEQ ID NO: 33157 - RNA, 19 nt, Artificial Sequence
  Description of Artificial Sequence: Synthetic oligonucleotide
caagguaacuuauuuuagu

SEQ ID NO: 33158 - RNA, 19 nt, Artificial Sequence
  Description of Artificial Sequence: Synthetic oligonucleotide
guacacuugucaaaacaga

SEQ ID NO: 33159 - RNA, 19 nt, Artificial Sequence
  Description of Artificial Sequence: Synthetic oligonucleotide
guagaggguaagucaucug

SEQ ID NO: 33160 - RNA, 19 nt, Artificial Sequence
  Description of Artificial Sequence: Synthetic oligonucleotide
auaguacggcguguugagg

SEQ ID NO: 33161 - RNA, 19 nt, Artificial Sequence
  Description of Artificial Sequence: Synthetic oligonucleotide
cuuagccccucccugcuuc

SEQ ID NO: 33162 - RNA, 19 nt, Artificial Sequence
  Description of Artificial Sequence: Synthetic oligonucleotide
aaguaccguuaucuguuuu

SEQ ID NO: 33163 - RNA, 19 nt, Artificial Sequence
  Description of Artificial Sequence: Synthetic oligonucleotide
aagccucacaacgguaagu

SEQ ID NO: 33164 - RNA, 19 nt, Artificial Sequence
  Description of Artificial Sequence: Synthetic oligonucleotide
cuaccaacacauaggguaa

SEQ ID NO: 33165 - RNA, 19 nt, Artificial Sequence
  Description of Artificial Sequence: Synthetic oligonucleotide
cucacccuuugauaugguc

SEQ ID NO: 33166 - RNA, 19 nt, Artificial Sequence
  Description of Artificial Sequence: Synthetic oligonucleotide
gaugguucuuaaggcugag

SEQ ID NO: 33167 - RNA, 19 nt, Artificial Sequence
  Description of Artificial Sequence: Synthetic oligonucleotide
aaauagcggcccagaauga

SEQ ID NO: 33168 - RNA, 19 nt, Artificial Sequence
  Description of Artificial Sequence: Synthetic oligonucleotide
uccugccuuugucaagcca

SEQ ID NO: 33169 - RNA, 19 nt, Artificial Sequence
  Description of Artificial Sequence: Synthetic oligonucleotide
agaagccucacaacgguaa

SEQ ID NO: 33170 - RNA, 19 nt, Artificial Sequence
  Description of Artificial Sequence: Synthetic oligonucleotide
ugcucgggaaucguauaca

SEQ ID NO: 33171 - RNA, 19 nt, Artificial Sequence
  Description of Artificial Sequence: Synthetic oligonucleotide
cuugcggcuuauacugcac

SEQ ID NO: 33172 - RNA, 19 nt, Artificial Sequence
  Description of Artificial Sequence: Synthetic oligonucleotide
cugcucgggaaucguauac

SEQ ID NO: 33173 - RNA, 19 nt, Artificial Sequence
  Description of Artificial Sequence: Synthetic oligonucleotide
aucuauacugagccgccua

SEQ ID NO: 33174 - RNA, 19 nt, Artificial Sequence
  Description of Artificial Sequence: Synthetic oligonucleotide
acaacgguaaguaccguua

SEQ ID NO: 33175 - RNA, 19 nt, Artificial Sequence
  Description of Artificial Sequence: Synthetic oligonucleotide
uugggucuguuuagggcaa

SEQ ID NO: 33176 - RNA, 19 nt, Artificial Sequence
  Description of Artificial Sequence: Synthetic oligonucleotide
cauguccgaccacucuucc

SEQ ID NO: 33177 - RNA, 19 nt, Artificial Sequence
  Description of Artificial Sequence: Synthetic oligonucleotide
gguugcgacuucucccucg

SEQ ID NO: 33178 - RNA, 19 nt, Artificial Sequence
  Description of Artificial Sequence: Synthetic oligonucleotide
cuuaggauuggaguuggaa

SEQ ID NO: 33179 - RNA, 19 nt, Artificial Sequence
  Description of Artificial Sequence: Synthetic oligonucleotide
gcugaucuagaugaaguac

SEQ ID NO: 33180 - RNA, 19 nt, Artificial Sequence
  Description of Artificial Sequence: Synthetic oligonucleotide
gguaaguaccguuaucugu

SEQ ID NO: 33181 - RNA, 19 nt, Artificial Sequence
  Description of Artificial Sequence: Synthetic oligonucleotide
uacguggagggaccaggac

SEQ ID NO: 33182 - RNA, 19 nt, Artificial Sequence
  Description of Artificial Sequence: Synthetic oligonucleotide
uggcaaaauagcggcccag

SEQ ID NO: 33183 - RNA, 19 nt, Artificial Sequence
  Description of Artificial Sequence: Synthetic oligonucleotide
caagacguuguugugacua

SEQ ID NO: 33184 - RNA, 19 nt, Artificial Sequence
  Description of Artificial Sequence: Synthetic oligonucleotide
ugagugaaguauguaccuu

SEQ ID NO: 33185 - RNA, 19 nt, Artificial Sequence
  Description of Artificial Sequence: Synthetic oligonucleotide
cugcuuaggauuggaguug

SEQ ID NO: 33186 - RNA, 19 nt, Artificial Sequence
  Description of Artificial Sequence: Synthetic oligonucleotide
gcauauaguccgaaugagc

SEQ ID NO: 33187 - RNA, 19 nt, Artificial Sequence
  Description of Artificial Sequence: Synthetic oligonucleotide
uuuccccacuauguuagaa

SEQ ID NO: 33188 - RNA, 19 nt, Artificial Sequence
  Description of Artificial Sequence: Synthetic oligonucleotide
uuucaacgacaugcuaacu

SEQ ID NO: 33189 - RNA, 19 nt, Artificial Sequence
  Description of Artificial Sequence: Synthetic oligonucleotide
gaaagaugggcggucccga

SEQ ID NO: 33190 - RNA, 19 nt, Artificial Sequence
  Description of Artificial Sequence: Synthetic oligonucleotide
uaaguaccguuaucuguuu

SEQ ID NO: 33191 - RNA, 19 nt, Artificial Sequence
  Description of Artificial Sequence: Synthetic oligonucleotide
ggguaagucaucuggauau

SEQ ID NO: 33192 - RNA, 19 nt, Artificial Sequence
  Description of Artificial Sequence: Synthetic oligonucleotide
caaucuaccugagacggaa

SEQ ID NO: 33193 - RNA, 19 nt, Artificial Sequence
  Description of Artificial Sequence: Synthetic oligonucleotide
gucacgucuuuaguaaaca

SEQ ID NO: 33194 - RNA, 19 nt, Artificial Sequence
  Description of Artificial Sequence: Synthetic oligonucleotide
gcgacuucucccucgauca

SEQ ID NO: 33195 - RNA, 19 nt, Artificial Sequence
  Description of Artificial Sequence: Synthetic oligonucleotide
gccgccaaucacugcaugg

SEQ ID NO: 33196 - RNA, 19 nt, Artificial Sequence
  Description of Artificial Sequence: Synthetic oligonucleotide
cacucuuauugacuuggca

SEQ ID NO: 33197 - RNA, 19 nt, Artificial Sequence
  Description of Artificial Sequence: Synthetic oligonucleotide
gaaugagcuuuccccacua

SEQ ID NO: 33198 - RNA, 19 nt, Artificial Sequence
  Description of Artificial Sequence: Synthetic oligonucleotide
acugcucgauaaugaauuu

SEQ ID NO: 33199 - RNA, 19 nt, Artificial Sequence
  Description of Artificial Sequence: Synthetic oligonucleotide
guaaguaccguuaucuguu

SEQ ID NO: 33200 - RNA, 19 nt, Artificial Sequence
  Description of Artificial Sequence: Synthetic oligonucleotide
aacgaggaaggaggagacu

SEQ ID NO: 33201 - RNA, 19 nt, Artificial Sequence
  Description of Artificial Sequence: Synthetic oligonucleotide
caguaaggccaauugggaa

SEQ ID NO: 33202 - RNA, 19 nt, Artificial Sequence
  Description of Artificial Sequence: Synthetic oligonucleotide
cccacuuagcuuuaaagaa

SEQ ID NO: 33203 - RNA, 19 nt, Artificial Sequence
  Description of Artificial Sequence: Synthetic oligonucleotide
ccuuguagaggguaaguca

SEQ ID NO: 33204 - RNA, 19 nt, Artificial Sequence
  Description of Artificial Sequence: Synthetic oligonucleotide
uuacgacaacagagaagaa

SEQ ID NO: 33205 - RNA, 19 nt, Artificial Sequence
  Description of Artificial Sequence: Synthetic oligonucleotide
ccuuucaacgacaugcuaa

SEQ ID NO: 33206 - RNA, 19 nt, Artificial Sequence
  Description of Artificial Sequence: Synthetic oligonucleotide
aaguuacguggagggacca

SEQ ID NO: 33207 - RNA, 19 nt, Artificial Sequence
  Description of Artificial Sequence: Synthetic oligonucleotide
cacuugcggcuuauacugc

SEQ ID NO: 33208 - RNA, 19 nt, Artificial Sequence
  Description of Artificial Sequence: Synthetic oligonucleotide
gcguaaguuuuccacauaa

SEQ ID NO: 33209 - RNA, 19 nt, Artificial Sequence
  Description of Artificial Sequence: Synthetic oligonucleotide
gguucucacccuuugauau

SEQ ID NO: 33210 - RNA, 19 nt, Artificial Sequence
  Description of Artificial Sequence: Synthetic oligonucleotide
gguaacuugacuccucuau

SEQ ID NO: 33211 - RNA, 19 nt, Artificial Sequence
  Description of Artificial Sequence: Synthetic oligonucleotide
caacgcacggacuugcucu

SEQ ID NO: 33212 - RNA, 19 nt, Artificial Sequence
  Description of Artificial Sequence: Synthetic oligonucleotide
aucaugcgagaugaggaau

SEQ ID NO: 33213 - RNA, 19 nt, Artificial Sequence
  Description of Artificial Sequence: Synthetic oligonucleotide
gacuaaagaacaagcuuau

SEQ ID NO: 33214 - RNA, 19 nt, Artificial Sequence
  Description of Artificial Sequence: Synthetic oligonucleotide
ggauaguacggcguguuga

SEQ ID NO: 33215 - RNA, 19 nt, Artificial Sequence
  Description of Artificial Sequence: Synthetic oligonucleotide
aguuacguggagggaccag

SEQ ID NO: 33216 - RNA, 19 nt, Artificial Sequence
  Description of Artificial Sequence: Synthetic oligonucleotide
gaguuguuuggaguagaaa

SEQ ID NO: 33217 - RNA, 19 nt, Artificial Sequence
  Description of Artificial Sequence: Synthetic oligonucleotide
auguccgaccacucuucca

SEQ ID NO: 33218 - RNA, 19 nt, Artificial Sequence
  Description of Artificial Sequence: Synthetic oligonucleotide
gugcuaagggcucggaaua

SEQ ID NO: 33219 - RNA, 19 nt, Artificial Sequence
  Description of Artificial Sequence: Synthetic oligonucleotide
gguuaagugccuagggaca

SEQ ID NO: 33220 - RNA, 19 nt, Artificial Sequence
  Description of Artificial Sequence: Synthetic oligonucleotide
auaguccgaaugagcuuuc

SEQ ID NO: 33221 - RNA, 19 nt, Artificial Sequence
  Description of Artificial Sequence: Synthetic oligonucleotide
uugagacguuugucaguga

SEQ ID NO: 33222 - RNA, 19 nt, Artificial Sequence
  Description of Artificial Sequence: Synthetic oligonucleotide
augggcggucccgaaaaug

SEQ ID NO: 33223 - RNA, 19 nt, Artificial Sequence
  Description of Artificial Sequence: Synthetic oligonucleotide
gucccgaaaaugagaugcc

SEQ ID NO: 33224 - RNA, 19 nt, Artificial Sequence
  Description of Artificial Sequence: Synthetic oligonucleotide
gaggguaagucaucuggau

SEQ ID NO: 33225 - RNA, 19 nt, Artificial Sequence
  Description of Artificial Sequence: Synthetic oligonucleotide
uggggccuacacuuugcaa

SEQ ID NO: 33226 - RNA, 19 nt, Artificial Sequence
  Description of Artificial Sequence: Synthetic oligonucleotide
ucuagucuucgcugcucua

SEQ ID NO: 33227 - RNA, 19 nt, Artificial Sequence
  Description of Artificial Sequence: Synthetic oligonucleotide
uaccguuaucuguuuuguu

SEQ ID NO: 33228 - RNA, 19 nt, Artificial Sequence
  Description of Artificial Sequence: Synthetic oligonucleotide
gcuacgacgccgccaauca

SEQ ID NO: 33229 - RNA, 19 nt, Artificial Sequence
  Description of Artificial Sequence: Synthetic oligonucleotide
ucgcaaguuccaguaucac

SEQ ID NO: 33230 - RNA, 19 nt, Artificial Sequence
  Description of Artificial Sequence: Synthetic oligonucleotide
cauauugcaaugguucuau

SEQ ID NO: 33231 - RNA, 19 nt, Artificial Sequence
  Description of Artificial Sequence: Synthetic oligonucleotide
agcgucucgcaaguuccag

SEQ ID NO: 33232 - RNA, 19 nt, Artificial Sequence
  Description of Artificial Sequence: Synthetic oligonucleotide
aggcuccagucuaagauau

SEQ ID NO: 33233 - RNA, 19 nt, Artificial Sequence
  Description of Artificial Sequence: Synthetic oligonucleotide
ugccgccgcacacugggau

SEQ ID NO: 33234 - RNA, 19 nt, Artificial Sequence
  Description of Artificial Sequence: Synthetic oligonucleotide
cauguuaacucaagcgcau

SEQ ID NO: 33235 - RNA, 19 nt, Artificial Sequence
  Description of Artificial Sequence: Synthetic oligonucleotide
cgagcgucucgcaaguucc

SEQ ID NO: 33236 - RNA, 19 nt, Artificial Sequence
  Description of Artificial Sequence: Synthetic oligonucleotide
ccaguccguucccaaaagg

SEQ ID NO: 33237 - RNA, 19 nt, Artificial Sequence
  Description of Artificial Sequence: Synthetic oligonucleotide
cuagucuucgcugcucuaa

SEQ ID NO: 33238 - RNA, 19 nt, Artificial Sequence
  Description of Artificial Sequence: Synthetic oligonucleotide
ugcugcgucaucggcuccu

SEQ ID NO: 33239 - RNA, 19 nt, Artificial Sequence
  Description of Artificial Sequence: Synthetic oligonucleotide
gggccuacacuuugcaauc

SEQ ID NO: 33240 - RNA, 19 nt, Artificial Sequence
  Description of Artificial Sequence: Synthetic oligonucleotide
uuagggcaacgaggaagga

SEQ ID NO: 33241 - RNA, 19 nt, Artificial Sequence
  Description of Artificial Sequence: Synthetic oligonucleotide
guccgaccacucuuccacc

SEQ ID NO: 33242 - RNA, 19 nt, Artificial Sequence
  Description of Artificial Sequence: Synthetic oligonucleotide
ccccacuauguuagaagcc

SEQ ID NO: 33243 - RNA, 19 nt, Artificial Sequence
  Description of Artificial Sequence: Synthetic oligonucleotide
caggcuccagucuaagaua

SEQ ID NO: 33244 - RNA, 19 nt, Artificial Sequence
  Description of Artificial Sequence: Synthetic oligonucleotide
ccuccgauuugccuuugag

SEQ ID NO: 33245 - RNA, 19 nt, Artificial Sequence
  Description of Artificial Sequence: Synthetic oligonucleotide
gauaugcacuugcggcuua

SEQ ID NO: 33246 - RNA, 19 nt, Artificial Sequence
  Description of Artificial Sequence: Synthetic oligonucleotide
acgacgccgccaaucacug

SEQ ID NO: 33247 - RNA, 19 nt, Artificial Sequence
  Description of Artificial Sequence: Synthetic oligonucleotide
cuacgacgccgccaaucac

SEQ ID NO: 33248 - RNA, 19 nt, Artificial Sequence
  Description of Artificial Sequence: Synthetic oligonucleotide
gaaucacggagucgucacu

SEQ ID NO: 33249 - RNA, 19 nt, Artificial Sequence
  Description of Artificial Sequence: Synthetic oligonucleotide
ccuacagauacagaauuaa

SEQ ID NO: 33250 - RNA, 19 nt, Artificial Sequence
  Description of Artificial Sequence: Synthetic oligonucleotide
cccuuugauauggucacac

SEQ ID NO: 33251 - RNA, 19 nt, Artificial Sequence
  Description of Artificial Sequence: Synthetic oligonucleotide
acauaccaguccguuccca

SEQ ID NO: 33252 - RNA, 19 nt, Artificial Sequence
  Description of Artificial Sequence: Synthetic oligonucleotide
agacguuguugugacuaaa

SEQ ID NO: 33253 - RNA, 19 nt, Artificial Sequence
  Description of Artificial Sequence: Synthetic oligonucleotide
ggggccuacacuuugcaau

SEQ ID NO: 33254 - RNA, 19 nt, Artificial Sequence
  Description of Artificial Sequence: Synthetic oligonucleotide
cucggcucugaccuuucga

SEQ ID NO: 33255 - RNA, 19 nt, Artificial Sequence
  Description of Artificial Sequence: Synthetic oligonucleotide
cggguuaggccuuguagag

SEQ ID NO: 33256 - RNA, 19 nt, Artificial Sequence
  Description of Artificial Sequence: Synthetic oligonucleotide
guaccguuaucuguuuugu

SEQ ID NO: 33257 - RNA, 19 nt, Artificial Sequence
  Description of Artificial Sequence: Synthetic oligonucleotide
ucacaacgguaaguaccgu

SEQ ID NO: 33258 - RNA, 19 nt, Artificial Sequence
  Description of Artificial Sequence: Synthetic oligonucleotide
accugcucgggaaucguau

SEQ ID NO: 33259 - RNA, 19 nt, Artificial Sequence
  Description of Artificial Sequence: Synthetic oligonucleotide
ccggguuaggccuuguaga

SEQ ID NO: 33260 - RNA, 19 nt, Artificial Sequence
  Description of Artificial Sequence: Synthetic oligonucleotide
uacggcguguugaggcauu

SEQ ID NO: 33261 - RNA, 19 nt, Artificial Sequence
  Description of Artificial Sequence: Synthetic oligonucleotide
cauugcgacacaccucacu

SEQ ID NO: 33262 - RNA, 19 nt, Artificial Sequence
  Description of Artificial Sequence: Synthetic oligonucleotide
cgaaauugagacguuuguc

SEQ ID NO: 33263 - RNA, 19 nt, Artificial Sequence
  Description of Artificial Sequence: Synthetic oligonucleotide
cucgggaaucguauacaua

SEQ ID NO: 33264 - RNA, 19 nt, Artificial Sequence
  Description of Artificial Sequence: Synthetic oligonucleotide
ccgauuugccuuugaguuc

SEQ ID NO: 33265 - RNA, 19 nt, Artificial Sequence
  Description of Artificial Sequence: Synthetic oligonucleotide
ugucugcgucugcugcguc

SEQ ID NO: 33266 - RNA, 19 nt, Artificial Sequence
  Description of Artificial Sequence: Synthetic oligonucleotide
ccgaaugagcuuuccccac

SEQ ID NO: 33267 - RNA, 19 nt, Artificial Sequence
  Description of Artificial Sequence: Synthetic oligonucleotide
ccacuauguuagaagccuc

SEQ ID NO: 33268 - RNA, 19 nt, Artificial Sequence
  Description of Artificial Sequence: Synthetic oligonucleotide
gguuuggcccggauaguac

SEQ ID NO: 33269 - RNA, 19 nt, Artificial Sequence
  Description of Artificial Sequence: Synthetic oligonucleotide
uaugcacuugcggcuuaua

SEQ ID NO: 33270 - RNA, 19 nt, Artificial Sequence
  Description of Artificial Sequence: Synthetic oligonucleotide
uagauaccgcugggucugc

SEQ ID NO: 33271 - RNA, 19 nt, Artificial Sequence
  Description of Artificial Sequence: Synthetic oligonucleotide
accuccgauuugccuuuga

SEQ ID NO: 33272 - RNA, 19 nt, Artificial Sequence
  Description of Artificial Sequence: Synthetic oligonucleotide
caacgacaugcuaacuggu

SEQ ID NO: 33273 - RNA, 19 nt, Artificial Sequence
  Description of Artificial Sequence: Synthetic oligonucleotide
cagcguaaguuuuccacau

SEQ ID NO: 33274 - RNA, 19 nt, Artificial Sequence
  Description of Artificial Sequence: Synthetic oligonucleotide
gcauugauuauagcugugu

SEQ ID NO: 33275 - RNA, 19 nt, Artificial Sequence
  Description of Artificial Sequence: Synthetic oligonucleotide
ucccggguuaggccuugua

SEQ ID NO: 33276 - RNA, 19 nt, Artificial Sequence
  Description of Artificial Sequence: Synthetic oligonucleotide
cacaacgguaaguaccguu

SEQ ID NO: 33277 - RNA, 19 nt, Artificial Sequence
  Description of Artificial Sequence: Synthetic oligonucleotide
gucacacuauguucaggau

SEQ ID NO: 33278 - RNA, 19 nt, Artificial Sequence
  Description of Artificial Sequence: Synthetic oligonucleotide
ugggucuguuuagggcaac

SEQ ID NO: 33279 - RNA, 19 nt, Artificial Sequence
  Description of Artificial Sequence: Synthetic oligonucleotide
gacguuugucagugacacu

SEQ ID NO: 33280 - RNA, 19 nt, Artificial Sequence
  Description of Artificial Sequence: Synthetic oligonucleotide
cgguaaguaccguuaucug

SEQ ID NO: 33281 - RNA, 19 nt, Artificial Sequence
  Description of Artificial Sequence: Synthetic oligonucleotide
gcgaaugggaacacacgga

SEQ ID NO: 33282 - RNA, 19 nt, Artificial Sequence
  Description of Artificial Sequence: Synthetic oligonucleotide
gcccggauaguacggcgug

SEQ ID NO: 33283 - RNA, 19 nt, Artificial Sequence
  Description of Artificial Sequence: Synthetic oligonucleotide
cuucuagauaccgcugggu

SEQ ID NO: 33284 - RNA, 19 nt, Artificial Sequence
  Description of Artificial Sequence: Synthetic oligonucleotide
gcccuccuaaguaagcaca

SEQ ID NO: 33285 - RNA, 19 nt, Artificial Sequence
  Description of Artificial Sequence: Synthetic oligonucleotide
uugcgacuucucccucgau

SEQ ID NO: 33286 - RNA, 19 nt, Artificial Sequence
  Description of Artificial Sequence: Synthetic oligonucleotide
cacagcuacgacgccgcca

SEQ ID NO: 33287 - RNA, 19 nt, Artificial Sequence
  Description of Artificial Sequence: Synthetic oligonucleotide
gagcgucucgcaaguucca

SEQ ID NO: 33288 - RNA, 19 nt, Artificial Sequence
  Description of Artificial Sequence: Synthetic oligonucleotide
cccuuaaauaaaucagcgu

SEQ ID NO: 33289 - RNA, 19 nt, Artificial Sequence
  Description of Artificial Sequence: Synthetic oligonucleotide
cugugauggugguguaacu

SEQ ID NO: 33290 - RNA, 19 nt, Artificial Sequence
  Description of Artificial Sequence: Synthetic oligonucleotide
caacgguaaguaccguuau

SEQ ID NO: 33291 - RNA, 19 nt, Artificial Sequence
  Description of Artificial Sequence: Synthetic oligonucleotide
gaaagaggccaaggcuagu

SEQ ID NO: 33292 - RNA, 19 nt, Artificial Sequence
  Description of Artificial Sequence: Synthetic oligonucleotide
gcagccgagaggagcaaca

SEQ ID NO: 33293 - RNA, 19 nt, Artificial Sequence
  Description of Artificial Sequence: Synthetic oligonucleotide
cccauauugcaaugguucu

SEQ ID NO: 33294 - RNA, 19 nt, Artificial Sequence
  Description of Artificial Sequence: Synthetic oligonucleotide
ccgaaaaugagaugccaau

SEQ ID NO: 33295 - RNA, 19 nt, Artificial Sequence
  Description of Artificial Sequence: Synthetic oligonucleotide
cccacuauguuagaagccu

SEQ ID NO: 33296 - RNA, 19 nt, Artificial Sequence
  Description of Artificial Sequence: Synthetic oligonucleotide
ccgaaauugagacguuugu

SEQ ID NO: 33297 - RNA, 19 nt, Artificial Sequence
  Description of Artificial Sequence: Synthetic oligonucleotide
gaugggcggucccgaaaau

SEQ ID NO: 33298 - RNA, 19 nt, Artificial Sequence
  Description of Artificial Sequence: Synthetic oligonucleotide
gcucgggaaucguauacau

SEQ ID NO: 33299 - RNA, 19 nt, Artificial Sequence
  Description of Artificial Sequence: Synthetic oligonucleotide
cuguaacaugguccuugua

SEQ ID NO: 33300 - RNA, 19 nt, Artificial Sequence
  Description of Artificial Sequence: Synthetic oligonucleotide
gugagcaguaaggccaauu

SEQ ID NO: 33301 - RNA, 19 nt, Artificial Sequence
  Description of Artificial Sequence: Synthetic oligonucleotide
ggauguuccuuguggcuuu

SEQ ID NO: 33302 - RNA, 19 nt, Artificial Sequence
  Description of Artificial Sequence: Synthetic oligonucleotide
gucucgcaaguuccaguau

SEQ ID NO: 33303 - RNA, 19 nt, Artificial Sequence
  Description of Artificial Sequence: Synthetic oligonucleotide
cugcucgauaaugaauuuu

SEQ ID NO: 33304 - RNA, 19 nt, Artificial Sequence
  Description of Artificial Sequence: Synthetic oligonucleotide
acgcacggacuugcucucu

SEQ ID NO: 33305 - RNA, 19 nt, Artificial Sequence
  Description of Artificial Sequence: Synthetic oligonucleotide
gcaaucuaccugagacgga

SEQ ID NO: 33306 - RNA, 19 nt, Artificial Sequence
  Description of Artificial Sequence: Synthetic oligonucleotide
cacaacgcacggacuugcu

SEQ ID NO: 33307 - RNA, 19 nt, Artificial Sequence
  Description of Artificial Sequence: Synthetic oligonucleotide
auucguccacugacauaaa

SEQ ID NO: 33308 - RNA, 19 nt, Artificial Sequence
  Description of Artificial Sequence: Synthetic oligonucleotide
cgacaugcuaacugguucu

SEQ ID NO: 33309 - RNA, 19 nt, Artificial Sequence
  Description of Artificial Sequence: Synthetic oligonucleotide
ccauauugcaaugguucua

SEQ ID NO: 33310 - RNA, 19 nt, Artificial Sequence
  Description of Artificial Sequence: Synthetic oligonucleotide
gcgugggguaaucuauacu

SEQ ID NO: 33311 - RNA, 19 nt, Artificial Sequence
  Description of Artificial Sequence: Synthetic oligonucleotide
gccgccgcacacugggauc

SEQ ID NO: 33312 - RNA, 19 nt, Artificial Sequence
  Description of Artificial Sequence: Synthetic oligonucleotide
gcggucccgaaaaugagau

SEQ ID NO: 33313 - RNA, 19 nt, Artificial Sequence
  Description of Artificial Sequence: Synthetic oligonucleotide
gcuaugcgcuauggcugcc

SEQ ID NO: 33314 - RNA, 19 nt, Artificial Sequence
  Description of Artificial Sequence: Synthetic oligonucleotide
agccgccuacagauacaga

SEQ ID NO: 33315 - RNA, 19 nt, Artificial Sequence
  Description of Artificial Sequence: Synthetic oligonucleotide
cgggaaucguauacauaca

SEQ ID NO: 33316 - RNA, 19 nt, Artificial Sequence
  Description of Artificial Sequence: Synthetic oligonucleotide
ggauaugcacuugcggcuu

SEQ ID NO: 33317 - RNA, 19 nt, Artificial Sequence
  Description of Artificial Sequence: Synthetic oligonucleotide
acgccgccaaucacugcau

SEQ ID NO: 33318 - RNA, 19 nt, Artificial Sequence
  Description of Artificial Sequence: Synthetic oligonucleotide
gcgucucgcaaguuccagu

SEQ ID NO: 33319 - RNA, 19 nt, Artificial Sequence
  Description of Artificial Sequence: Synthetic oligonucleotide
ccugcucgggaaucguaua

SEQ ID NO: 33320 - RNA, 19 nt, Artificial Sequence
  Description of Artificial Sequence: Synthetic oligonucleotide
guacggcguguugaggcau

SEQ ID NO: 33321 - RNA, 19 nt, Artificial Sequence
  Description of Artificial Sequence: Synthetic oligonucleotide
gcuuaggauuggaguugga

SEQ ID NO: 33322 - RNA, 19 nt, Artificial Sequence
  Description of Artificial Sequence: Synthetic oligonucleotide
ccgccuacagauacagaau

SEQ ID NO: 33323 - RNA, 19 nt, Artificial Sequence
  Description of Artificial Sequence: Synthetic oligonucleotide
gcguguugaggcauuucau

SEQ ID NO: 33324 - RNA, 19 nt, Artificial Sequence
  Description of Artificial Sequence: Synthetic oligonucleotide
cggcucugaccuuucgaga

SEQ ID NO: 33325 - RNA, 19 nt, Artificial Sequence
  Description of Artificial Sequence: Synthetic oligonucleotide
ggcccggauaguacggcgu

SEQ ID NO: 33326 - RNA, 19 nt, Artificial Sequence
  Description of Artificial Sequence: Synthetic oligonucleotide
cgcuuucaaauaacagagu

SEQ ID NO: 33327 - RNA, 19 nt, Artificial Sequence
  Description of Artificial Sequence: Synthetic oligonucleotide
cacggauguggaguuucuu

SEQ ID NO: 33328 - RNA, 19 nt, Artificial Sequence
  Description of Artificial Sequence: Synthetic oligonucleotide
cgucuuuaguaaacagauu

SEQ ID NO: 33329 - RNA, 19 nt, Artificial Sequence
  Description of Artificial Sequence: Synthetic oligonucleotide
ccggauaguacggcguguu

SEQ ID NO: 33330 - RNA, 19 nt, Artificial Sequence
  Description of Artificial Sequence: Synthetic oligonucleotide
cgccgcacacugggauccg

SEQ ID NO: 33331 - RNA, 19 nt, Artificial Sequence
  Description of Artificial Sequence: Synthetic oligonucleotide
cccggauaguacggcgugu

SEQ ID NO: 33332 - RNA, 19 nt, Artificial Sequence
  Description of Artificial Sequence: Synthetic oligonucleotide
cagcuacgacgccgccaau

SEQ ID NO: 33333 - RNA, 19 nt, Artificial Sequence
  Description of Artificial Sequence: Synthetic oligonucleotide
aauguuacuauauuaaauc

SEQ ID NO: 33334 - RNA, 19 nt, Artificial Sequence
  Description of Artificial Sequence: Synthetic oligonucleotide
aguagaauuaacuacauuc

SEQ ID NO: 33335 - RNA, 19 nt, Artificial Sequence
  Description of Artificial Sequence: Synthetic oligonucleotide
aaauaaaccugacugcugc

SEQ ID NO: 33336 - RNA, 19 nt, Artificial Sequence
  Description of Artificial Sequence: Synthetic oligonucleotide
gaauuuuagucuuugagcc

SEQ ID NO: 33337 - RNA, 19 nt, Artificial Sequence
  Description of Artificial Sequence: Synthetic oligonucleotide
uuagaaaagggacauaccc

SEQ ID NO: 33338 - RNA, 19 nt, Artificial Sequence
  Description of Artificial Sequence: Synthetic oligonucleotide
gauucgaucggauauaugc

SEQ ID NO: 33339 - RNA, 19 nt, Artificial Sequence
  Description of Artificial Sequence: Synthetic oligonucleotide
uacacauccuuccaaaucg

SEQ ID NO: 33340 - RNA, 19 nt, Artificial Sequence
  Description of Artificial Sequence: Synthetic oligonucleotide
ugaauaaguagaauuaacu

SEQ ID NO: 33341 - RNA, 19 nt, Artificial Sequence
  Description of Artificial Sequence: Synthetic oligonucleotide
aauuuuagucuuugagccc

SEQ ID NO: 33342 - RNA, 19 nt, Artificial Sequence
  Description of Artificial Sequence: Synthetic oligonucleotide
agagcuuugacugagcacc

SEQ ID NO: 33343 - RNA, 19 nt, Artificial Sequence
  Description of Artificial Sequence: Synthetic oligonucleotide
uacguguuuacauaaaccc

SEQ ID NO: 33344 - RNA, 19 nt, Artificial Sequence
  Description of Artificial Sequence: Synthetic oligonucleotide
uucaauauuacaccuaaaa

SEQ ID NO: 33345 - RNA, 19 nt, Artificial Sequence
  Description of Artificial Sequence: Synthetic oligonucleotide
ucaauauuacaccuaaaac

SEQ ID NO: 33346 - RNA, 19 nt, Artificial Sequence
  Description of Artificial Sequence: Synthetic oligonucleotide
agcggauugagucugacgg

SEQ ID NO: 33347 - RNA, 19 nt, Artificial Sequence
  Description of Artificial Sequence: Synthetic oligonucleotide
uuggggagaauaaugauug

SEQ ID NO: 33348 - RNA, 19 nt, Artificial Sequence
  Description of Artificial Sequence: Synthetic oligonucleotide
uuucaaggcgcugagaugg

SEQ ID NO: 33349 - RNA, 19 nt, Artificial Sequence
  Description of Artificial Sequence: Synthetic oligonucleotide
aagcaaauuauuacaagac

SEQ ID NO: 33350 - RNA, 19 nt, Artificial Sequence
  Description of Artificial Sequence: Synthetic oligonucleotide
uguuacuauauuaaaucug

SEQ ID NO: 33351 - RNA, 19 nt, Artificial Sequence
  Description of Artificial Sequence: Synthetic oligonucleotide
uguugguagauaaauguca

SEQ ID NO: 33352 - RNA, 19 nt, Artificial Sequence
  Description of Artificial Sequence: Synthetic oligonucleotide
auaaaugucauagacugag

SEQ ID NO: 33353 - RNA, 19 nt, Artificial Sequence
  Description of Artificial Sequence: Synthetic oligonucleotide
uuaugaaggguguucaaag

SEQ ID NO: 33354 - RNA, 19 nt, Artificial Sequence
  Description of Artificial Sequence: Synthetic oligonucleotide
aauaaaccugacugcugcc

SEQ ID NO: 33355 - RNA, 19 nt, Artificial Sequence
  Description of Artificial Sequence: Synthetic oligonucleotide
uaaaucaccucucaaugca

SEQ ID NO: 33356 - RNA, 19 nt, Artificial Sequence
  Description of Artificial Sequence: Synthetic oligonucleotide
ucuauaugauccuucagcu

SEQ ID NO: 33357 - RNA, 19 nt, Artificial Sequence
  Description of Artificial Sequence: Synthetic oligonucleotide
ugugacuacucaaaugugc

SEQ ID NO: 33358 - RNA, 19 nt, Artificial Sequence
  Description of Artificial Sequence: Synthetic oligonucleotide
aacgagauguuguucucac

SEQ ID NO: 33359 - RNA, 19 nt, Artificial Sequence
  Description of Artificial Sequence: Synthetic oligonucleotide
caauuuaggcaaaacuugg

SEQ ID NO: 33360 - RNA, 19 nt, Artificial Sequence
  Description of Artificial Sequence: Synthetic oligonucleotide
ucuagaccaagccuuuugg

SEQ ID NO: 33361 - RNA, 19 nt, Artificial Sequence
  Description of Artificial Sequence: Synthetic oligonucleotide
uaguccgucacuuugugag

SEQ ID NO: 33362 - RNA, 19 nt, Artificial Sequence
  Description of Artificial Sequence: Synthetic oligonucleotide
auuucguucacauaagaau

SEQ ID NO: 33363 - RNA, 19 nt, Artificial Sequence
  Description of Artificial Sequence: Synthetic oligonucleotide
accugauuagacuugugac

SEQ ID NO: 33364 - RNA, 19 nt, Artificial Sequence
  Description of Artificial Sequence: Synthetic oligonucleotide
uuuaggcaaaacuugguac

SEQ ID NO: 33365 - RNA, 19 nt, Artificial Sequence
  Description of Artificial Sequence: Synthetic oligonucleotide
auaaauacgccauccaagu

SEQ ID NO: 33366 - RNA, 19 nt, Artificial Sequence
  Description of Artificial Sequence: Synthetic oligonucleotide
cuaauugugaaccugguga

SEQ ID NO: 33367 - RNA, 19 nt, Artificial Sequence
  Description of Artificial Sequence: Synthetic oligonucleotide
acaaccacuaauugugaac

SEQ ID NO: 33368 - RNA, 19 nt, Artificial Sequence
  Description of Artificial Sequence: Synthetic oligonucleotide
agaucguauuucuaucgcc

SEQ ID NO: 33369 - RNA, 19 nt, Artificial Sequence
  Description of Artificial Sequence: Synthetic oligonucleotide
uauuuugcuguccacugcc

SEQ ID NO: 33370 - RNA, 19 nt, Artificial Sequence
  Description of Artificial Sequence: Synthetic oligonucleotide
aacaaucauaguuuucaca

SEQ ID NO: 33371 - RNA, 19 nt, Artificial Sequence
  Description of Artificial Sequence: Synthetic oligonucleotide
acagaucguauuucuaucg

SEQ ID NO: 33372 - RNA, 19 nt, Artificial Sequence
  Description of Artificial Sequence: Synthetic oligonucleotide
uuaggcaaaacuugguaca

SEQ ID NO: 33373 - RNA, 19 nt, Artificial Sequence
  Description of Artificial Sequence: Synthetic oligonucleotide
ucggauauaugcuacagau

SEQ ID NO: 33374 - RNA, 19 nt, Artificial Sequence
  Description of Artificial Sequence: Synthetic oligonucleotide
aauucacuccccacaaggc

SEQ ID NO: 33375 - RNA, 19 nt, Artificial Sequence
  Description of Artificial Sequence: Synthetic oligonucleotide
aacccuuggaggcaccucg

SEQ ID NO: 33376 - RNA, 19 nt, Artificial Sequence
  Description of Artificial Sequence: Synthetic oligonucleotide
uuucguucacauaagaauu

SEQ ID NO: 33377 - RNA, 19 nt, Artificial Sequence
  Description of Artificial Sequence: Synthetic oligonucleotide
gauuagacuugugacaaag

SEQ ID NO: 33378 - RNA, 19 nt, Artificial Sequence
  Description of Artificial Sequence: Synthetic oligonucleotide
uauuuacgaaucucagggg

SEQ ID NO: 33379 - RNA, 19 nt, Artificial Sequence
  Description of Artificial Sequence: Synthetic oligonucleotide
auuuucaaggcgcugagau

SEQ ID NO: 33380 - RNA, 19 nt, Artificial Sequence
  Description of Artificial Sequence: Synthetic oligonucleotide
aauacgccauccaagugac

SEQ ID NO: 33381 - RNA, 19 nt, Artificial Sequence
  Description of Artificial Sequence: Synthetic oligonucleotide
auacguguuuacauaaacc

SEQ ID NO: 33382 - RNA, 19 nt, Artificial Sequence
  Description of Artificial Sequence: Synthetic oligonucleotide
gacgggauaagacagguga

SEQ ID NO: 33383 - RNA, 19 nt, Artificial Sequence
  Description of Artificial Sequence: Synthetic oligonucleotide
auuuacgaaucucaggggu

SEQ ID NO: 33384 - RNA, 19 nt, Artificial Sequence
  Description of Artificial Sequence: Synthetic oligonucleotide
auguuacuauauuaaaucu

SEQ ID NO: 33385 - RNA, 19 nt, Artificial Sequence
  Description of Artificial Sequence: Synthetic oligonucleotide
caucacaaccuucagacac

SEQ ID NO: 33386 - RNA, 19 nt, Artificial Sequence
  Description of Artificial Sequence: Synthetic oligonucleotide
uugacugagcaccucacug

SEQ ID NO: 33387 - RNA, 19 nt, Artificial Sequence
  Description of Artificial Sequence: Synthetic oligonucleotide
agauuuguguuucuggagu

SEQ ID NO: 33388 - RNA, 19 nt, Artificial Sequence
  Description of Artificial Sequence: Synthetic oligonucleotide
uccgaguuaaaccucuucu

SEQ ID NO: 33389 - RNA, 19 nt, Artificial Sequence
  Description of Artificial Sequence: Synthetic oligonucleotide
uccaaaucgcccacagugg

SEQ ID NO: 33390 - RNA, 19 nt, Artificial Sequence
  Description of Artificial Sequence: Synthetic oligonucleotide
ucuuguaccugauuagacu

SEQ ID NO: 33391 - RNA, 19 nt, Artificial Sequence
  Description of Artificial Sequence: Synthetic oligonucleotide
uguuccacuagauggagaa

SEQ ID NO: 33392 - RNA, 19 nt, Artificial Sequence
  Description of Artificial Sequence: Synthetic oligonucleotide
uaugaaggguguucaaagc

SEQ ID NO: 33393 - RNA, 19 nt, Artificial Sequence
  Description of Artificial Sequence: Synthetic oligonucleotide
uuauguaccaguucuccaa

SEQ ID NO: 33394 - RNA, 19 nt, Artificial Sequence
  Description of Artificial Sequence: Synthetic oligonucleotide
agucaaguccacuucacca

SEQ ID NO: 33395 - RNA, 19 nt, Artificial Sequence
  Description of Artificial Sequence: Synthetic oligonucleotide
aauccguuucugccucucc

SEQ ID NO: 33396 - RNA, 19 nt, Artificial Sequence
  Description of Artificial Sequence: Synthetic oligonucleotide
uaaccaggauaaauaguag

SEQ ID NO: 33397 - RNA, 19 nt, Artificial Sequence
  Description of Artificial Sequence: Synthetic oligonucleotide
auuuaagcccucgagaaca

SEQ ID NO: 33398 - RNA, 19 nt, Artificial Sequence
  Description of Artificial Sequence: Synthetic oligonucleotide
uaaccuggggucuauaaaa

SEQ ID NO: 33399 - RNA, 19 nt, Artificial Sequence
  Description of Artificial Sequence: Synthetic oligonucleotide
ugagauccaccaguaaugg

SEQ ID NO: 33400 - RNA, 19 nt, Artificial Sequence
  Description of Artificial Sequence: Synthetic oligonucleotide
uauccuaguaacugugucu

SEQ ID NO: 33401 - RNA, 19 nt, Artificial Sequence
  Description of Artificial Sequence: Synthetic oligonucleotide
auaguagacacguaacuua

SEQ ID NO: 33402 - RNA, 19 nt, Artificial Sequence
  Description of Artificial Sequence: Synthetic oligonucleotide
uuuccgaguaggaucuugc

SEQ ID NO: 33403 - RNA, 19 nt, Artificial Sequence
  Description of Artificial Sequence: Synthetic oligonucleotide
ugaagcguucaccggagcc

SEQ ID NO: 33404 - RNA, 19 nt, Artificial Sequence
  Description of Artificial Sequence: Synthetic oligonucleotide
cuaccaaaucccaauugag

SEQ ID NO: 33405 - RNA, 19 nt, Artificial Sequence
  Description of Artificial Sequence: Synthetic oligonucleotide
ugacggacgaucagggugc

SEQ ID NO: 33406 - RNA, 19 nt, Artificial Sequence
  Description of Artificial Sequence: Synthetic oligonucleotide
agggacauacccucacccc

SEQ ID NO: 33407 - RNA, 19 nt, Artificial Sequence
  Description of Artificial Sequence: Synthetic oligonucleotide
acguguuuacauaaacccc

SEQ ID NO: 33408 - RNA, 19 nt, Artificial Sequence
  Description of Artificial Sequence: Synthetic oligonucleotide
cauacguguuuacauaaac

SEQ ID NO: 33409 - RNA, 19 nt, Artificial Sequence
  Description of Artificial Sequence: Synthetic oligonucleotide
aaucccgucgcagaguuga

SEQ ID NO: 33410 - RNA, 19 nt, Artificial Sequence
  Description of Artificial Sequence: Synthetic oligonucleotide
uggugauccuuccauacgu

SEQ ID NO: 33411 - RNA, 19 nt, Artificial Sequence
  Description of Artificial Sequence: Synthetic oligonucleotide
ugcauaaauacgccaucca

SEQ ID NO: 33412 - RNA, 19 nt, Artificial Sequence
  Description of Artificial Sequence: Synthetic oligonucleotide
gucuuaggaaaucccgucg

SEQ ID NO: 33413 - RNA, 19 nt, Artificial Sequence
  Description of Artificial Sequence: Synthetic oligonucleotide
gcuacuagcggauugaguc

SEQ ID NO: 33414 - RNA, 19 nt, Artificial Sequence
  Description of Artificial Sequence: Synthetic oligonucleotide
uauuuugaguaaggaaaag

SEQ ID NO: 33415 - RNA, 19 nt, Artificial Sequence
  Description of Artificial Sequence: Synthetic oligonucleotide
aacaaaaugggaccccaua

SEQ ID NO: 33416 - RNA, 19 nt, Artificial Sequence
  Description of Artificial Sequence: Synthetic oligonucleotide
uaaauacgccauccaagug

SEQ ID NO: 33417 - RNA, 19 nt, Artificial Sequence
  Description of Artificial Sequence: Synthetic oligonucleotide
uguacucauacucgguuuc

SEQ ID NO: 33418 - RNA, 19 nt, Artificial Sequence
  Description of Artificial Sequence: Synthetic oligonucleotide
uuucuaucgccuucucucc

SEQ ID NO: 33419 - RNA, 19 nt, Artificial Sequence
  Description of Artificial Sequence: Synthetic oligonucleotide
acuaauugugaaccuggug

SEQ ID NO: 33420 - RNA, 19 nt, Artificial Sequence
  Description of Artificial Sequence: Synthetic oligonucleotide
acaaaaugggaccccauau

SEQ ID NO: 33421 - RNA, 19 nt, Artificial Sequence
  Description of Artificial Sequence: Synthetic oligonucleotide
caguaauggcuuauguacc

SEQ ID NO: 33422 - RNA, 19 nt, Artificial Sequence
  Description of Artificial Sequence: Synthetic oligonucleotide
ugugccgacuagcaaauuc

SEQ ID NO: 33423 - RNA, 19 nt, Artificial Sequence
  Description of Artificial Sequence: Synthetic oligonucleotide
agguaaaucaccucucaau

SEQ ID NO: 33424 - RNA, 19 nt, Artificial Sequence
  Description of Artificial Sequence: Synthetic oligonucleotide
uacgccauccaagugacca

SEQ ID NO: 33425 - RNA, 19 nt, Artificial Sequence
  Description of Artificial Sequence: Synthetic oligonucleotide
gauauugucaccaggacau

SEQ ID NO: 33426 - RNA, 19 nt, Artificial Sequence
  Description of Artificial Sequence: Synthetic oligonucleotide
ugcuaccaaaucccaauug

SEQ ID NO: 33427 - RNA, 19 nt, Artificial Sequence
  Description of Artificial Sequence: Synthetic oligonucleotide
acuacucaaaugugcccac

SEQ ID NO: 33428 - RNA, 19 nt, Artificial Sequence
  Description of Artificial Sequence: Synthetic oligonucleotide
cagacuuagaagaugaucu

SEQ ID NO: 33429 - RNA, 19 nt, Artificial Sequence
  Description of Artificial Sequence: Synthetic oligonucleotide
ugggguuugaugcuacacu

SEQ ID NO: 33430 - RNA, 19 nt, Artificial Sequence
  Description of Artificial Sequence: Synthetic oligonucleotide
caaggcagcgcauaguauc

SEQ ID NO: 33431 - RNA, 19 nt, Artificial Sequence
  Description of Artificial Sequence: Synthetic oligonucleotide
aacaaccacuaauugugaa

SEQ ID NO: 33432 - RNA, 19 nt, Artificial Sequence
  Description of Artificial Sequence: Synthetic oligonucleotide
uucugguccgaucuauaug

SEQ ID NO: 33433 - RNA, 19 nt, Artificial Sequence
  Description of Artificial Sequence: Synthetic oligonucleotide
agacacguaacuuauccuu

SEQ ID NO: 33434 - RNA, 19 nt, Artificial Sequence
  Description of Artificial Sequence: Synthetic oligonucleotide
uaguagacacguaacuuau

SEQ ID NO: 33435 - RNA, 19 nt, Artificial Sequence
  Description of Artificial Sequence: Synthetic oligonucleotide
uuuucaaggcgcugagaug

SEQ ID NO: 33436 - RNA, 19 nt, Artificial Sequence
  Description of Artificial Sequence: Synthetic oligonucleotide
aggauaaauaguagacacg

SEQ ID NO: 33437 - RNA, 19 nt, Artificial Sequence
  Description of Artificial Sequence: Synthetic oligonucleotide
accacugagccuuuccgag

SEQ ID NO: 33438 - RNA, 19 nt, Artificial Sequence
  Description of Artificial Sequence: Synthetic oligonucleotide
aagcguucaccggagccgc

SEQ ID NO: 33439 - RNA, 19 nt, Artificial Sequence
  Description of Artificial Sequence: Synthetic oligonucleotide
ugugcauaaauacgccauc

SEQ ID NO: 33440 - RNA, 19 nt, Artificial Sequence
  Description of Artificial Sequence: Synthetic oligonucleotide
guuacuauauuaaaucugu

SEQ ID NO: 33441 - RNA, 19 nt, Artificial Sequence
  Description of Artificial Sequence: Synthetic oligonucleotide
uuuacgaaucucaggggua

SEQ ID NO: 33442 - RNA, 19 nt, Artificial Sequence
  Description of Artificial Sequence: Synthetic oligonucleotide
ucgaucggauauaugcuac

SEQ ID NO: 33443 - RNA, 19 nt, Artificial Sequence
  Description of Artificial Sequence: Synthetic oligonucleotide
cugacggacgaucagggug

SEQ ID NO: 33444 - RNA, 19 nt, Artificial Sequence
  Description of Artificial Sequence: Synthetic oligonucleotide
gaucggauauaugcuacag

SEQ ID NO: 33445 - RNA, 19 nt, Artificial Sequence
  Description of Artificial Sequence: Synthetic oligonucleotide
uccgaguaggaucuugccu

SEQ ID NO: 33446 - RNA, 19 nt, Artificial Sequence
  Description of Artificial Sequence: Synthetic oligonucleotide
ugacuacucaaaugugccc

SEQ ID NO: 33447 - RNA, 19 nt, Artificial Sequence
  Description of Artificial Sequence: Synthetic oligonucleotide
ugugaaccuggugaaaaca

SEQ ID NO: 33448 - RNA, 19 nt, Artificial Sequence
  Description of Artificial Sequence: Synthetic oligonucleotide
uaaaccugacugcugccac

SEQ ID NO: 33449 - RNA, 19 nt, Artificial Sequence
  Description of Artificial Sequence: Synthetic oligonucleotide
gugacuacucaaaugugcc

SEQ ID NO: 33450 - RNA, 19 nt, Artificial Sequence
  Description of Artificial Sequence: Synthetic oligonucleotide
guucaaagcugcuccguag

SEQ ID NO: 33451 - RNA, 19 nt, Artificial Sequence
  Description of Artificial Sequence: Synthetic oligonucleotide
ucgaaccugccuuucauuc

SEQ ID NO: 33452 - RNA, 19 nt, Artificial Sequence
  Description of Artificial Sequence: Synthetic oligonucleotide
caauugagaacaaugacau

SEQ ID NO: 33453 - RNA, 19 nt, Artificial Sequence
  Description of Artificial Sequence: Synthetic oligonucleotide
guaucuccgaguuaaaccu

SEQ ID NO: 33454 - RNA, 19 nt, Artificial Sequence
  Description of Artificial Sequence: Synthetic oligonucleotide
ugcgaauuugggaggagaa

SEQ ID NO: 33455 - RNA, 19 nt, Artificial Sequence
  Description of Artificial Sequence: Synthetic oligonucleotide
ucucauuccgucacaggaa

SEQ ID NO: 33456 - RNA, 19 nt, Artificial Sequence
  Description of Artificial Sequence: Synthetic oligonucleotide
agucugacggacgaucagg

SEQ ID NO: 33457 - RNA, 19 nt, Artificial Sequence
  Description of Artificial Sequence: Synthetic oligonucleotide
ggauccauagaucacuuuc

SEQ ID NO: 33458 - RNA, 19 nt, Artificial Sequence
  Description of Artificial Sequence: Synthetic oligonucleotide
gagaggucgaaauacuucu

SEQ ID NO: 33459 - RNA, 19 nt, Artificial Sequence
  Description of Artificial Sequence: Synthetic oligonucleotide
uaauggcuuauguaccagu

SEQ ID NO: 33460 - RNA, 19 nt, Artificial Sequence
  Description of Artificial Sequence: Synthetic oligonucleotide
uucgaucggauauaugcua

SEQ ID NO: 33461 - RNA, 19 nt, Artificial Sequence
  Description of Artificial Sequence: Synthetic oligonucleotide
aaguagaauuaacuacauu

SEQ ID NO: 33462 - RNA, 19 nt, Artificial Sequence
  Description of Artificial Sequence: Synthetic oligonucleotide
ucuaucgccuucucucccc

SEQ ID NO: 33463 - RNA, 19 nt, Artificial Sequence
  Description of Artificial Sequence: Synthetic oligonucleotide
cagaucguauuucuaucgc

SEQ ID NO: 33464 - RNA, 19 nt, Artificial Sequence
  Description of Artificial Sequence: Synthetic oligonucleotide
ugggaucucgagacagggg

SEQ ID NO: 33465 - RNA, 19 nt, Artificial Sequence
  Description of Artificial Sequence: Synthetic oligonucleotide
uagacacguaacuuauccu

SEQ ID NO: 33466 - RNA, 19 nt, Artificial Sequence
  Description of Artificial Sequence: Synthetic oligonucleotide
cauccuaagccccacccac

SEQ ID NO: 33467 - RNA, 19 nt, Artificial Sequence
  Description of Artificial Sequence: Synthetic oligonucleotide
ugugcuacuagcggauuga

SEQ ID NO: 33468 - RNA, 19 nt, Artificial Sequence
  Description of Artificial Sequence: Synthetic oligonucleotide
ccgacuagcaaauucacuc

SEQ ID NO: 33469 - RNA, 19 nt, Artificial Sequence
  Description of Artificial Sequence: Synthetic oligonucleotide
auuccgucacaggaaaauc

SEQ ID NO: 33470 - RNA, 19 nt, Artificial Sequence
  Description of Artificial Sequence: Synthetic oligonucleotide
agaguugacucuccaggca

SEQ ID NO: 33471 - RNA, 19 nt, Artificial Sequence
  Description of Artificial Sequence: Synthetic oligonucleotide
uggagcaugauagcuuggc

SEQ ID NO: 33472 - RNA, 19 nt, Artificial Sequence
  Description of Artificial Sequence: Synthetic oligonucleotide
agcccuuuugugcauaaau

SEQ ID NO: 33473 - RNA, 19 nt, Artificial Sequence
  Description of Artificial Sequence: Synthetic oligonucleotide
gggauaagacaggugaacg

SEQ ID NO: 33474 - RNA, 19 nt, Artificial Sequence
  Description of Artificial Sequence: Synthetic oligonucleotide
uguuggggagaauaaugau

SEQ ID NO: 33475 - RNA, 19 nt, Artificial Sequence
  Description of Artificial Sequence: Synthetic oligonucleotide
uucuaucgccuucucuccc

SEQ ID NO: 33476 - RNA, 19 nt, Artificial Sequence
  Description of Artificial Sequence: Synthetic oligonucleotide
gugaaccuggugaaaacag

SEQ ID NO: 33477 - RNA, 19 nt, Artificial Sequence
  Description of Artificial Sequence: Synthetic oligonucleotide
ugagccuuuccgaguagga

SEQ ID NO: 33478 - RNA, 19 nt, Artificial Sequence
  Description of Artificial Sequence: Synthetic oligonucleotide
uguucaaagcugcuccgua

SEQ ID NO: 33479 - RNA, 19 nt, Artificial Sequence
  Description of Artificial Sequence: Synthetic oligonucleotide
ucguauuucuaucgccuuc

SEQ ID NO: 33480 - RNA, 19 nt, Artificial Sequence
  Description of Artificial Sequence: Synthetic oligonucleotide
cacagaucguauuucuauc

SEQ ID NO: 33481 - RNA, 19 nt, Artificial Sequence
  Description of Artificial Sequence: Synthetic oligonucleotide
uccacuagauggagaaauc

SEQ ID NO: 33482 - RNA, 19 nt, Artificial Sequence
  Description of Artificial Sequence: Synthetic oligonucleotide
uugugaaccuggugaaaac

SEQ ID NO: 33483 - RNA, 19 nt, Artificial Sequence
  Description of Artificial Sequence: Synthetic oligonucleotide
aguaaccuggggucuauaa

SEQ ID NO: 33484 - RNA, 19 nt, Artificial Sequence
  Description of Artificial Sequence: Synthetic oligonucleotide
ucgguugaucagaggauac

SEQ ID NO: 33485 - RNA, 19 nt, Artificial Sequence
  Description of Artificial Sequence: Synthetic oligonucleotide
ugcuacacugaaugugugu

SEQ ID NO: 33486 - RNA, 19 nt, Artificial Sequence
  Description of Artificial Sequence: Synthetic oligonucleotide
cauuuaagcccucgagaac

SEQ ID NO: 33487 - RNA, 19 nt, Artificial Sequence
  Description of Artificial Sequence: Synthetic oligonucleotide
ucagggguaucgcucugug

SEQ ID NO: 33488 - RNA, 19 nt, Artificial Sequence
  Description of Artificial Sequence: Synthetic oligonucleotide
uggccguacaucuuccacu

SEQ ID NO: 33489 - RNA, 19 nt, Artificial Sequence
  Description of Artificial Sequence: Synthetic oligonucleotide
uugccuuauggcuucuggu

SEQ ID NO: 33490 - RNA, 19 nt, Artificial Sequence
  Description of Artificial Sequence: Synthetic oligonucleotide
ugauccuuccauacguguu

SEQ ID NO: 33491 - RNA, 19 nt, Artificial Sequence
  Description of Artificial Sequence: Synthetic oligonucleotide
cauuucguucacauaagaa

SEQ ID NO: 33492 - RNA, 19 nt, Artificial Sequence
  Description of Artificial Sequence: Synthetic oligonucleotide
aaggagagaaugggaauaa

SEQ ID NO: 33493 - RNA, 19 nt, Artificial Sequence
  Description of Artificial Sequence: Synthetic oligonucleotide
ucugagacccaggauggga

SEQ ID NO: 33494 - RNA, 19 nt, Artificial Sequence
  Description of Artificial Sequence: Synthetic oligonucleotide
ggaguaguccgucacuuug

SEQ ID NO: 33495 - RNA, 19 nt, Artificial Sequence
  Description of Artificial Sequence: Synthetic oligonucleotide
ugauucgaucggauauaug

SEQ ID NO: 33496 - RNA, 19 nt, Artificial Sequence
  Description of Artificial Sequence: Synthetic oligonucleotide
gugcauaaauacgccaucc

SEQ ID NO: 33497 - RNA, 19 nt, Artificial Sequence
  Description of Artificial Sequence: Synthetic oligonucleotide
gggguuugaugcuacacug

SEQ ID NO: 33498 - RNA, 19 nt, Artificial Sequence
  Description of Artificial Sequence: Synthetic oligonucleotide
uuccgaguaggaucuugcc

SEQ ID NO: 33499 - RNA, 19 nt, Artificial Sequence
  Description of Artificial Sequence: Synthetic oligonucleotide
accacuaauugugaaccug

SEQ ID NO: 33500 - RNA, 19 nt, Artificial Sequence
  Description of Artificial Sequence: Synthetic oligonucleotide
uacuagcggauugagucug

SEQ ID NO: 33501 - RNA, 19 nt, Artificial Sequence
  Description of Artificial Sequence: Synthetic oligonucleotide
cuaagccccacccacaaaa

SEQ ID NO: 33502 - RNA, 19 nt, Artificial Sequence
  Description of Artificial Sequence: Synthetic oligonucleotide
cugccucuuauacuccucc

SEQ ID NO: 33503 - RNA, 19 nt, Artificial Sequence
  Description of Artificial Sequence: Synthetic oligonucleotide
aggacauuuaagcccucga

SEQ ID NO: 33504 - RNA, 19 nt, Artificial Sequence
  Description of Artificial Sequence: Synthetic oligonucleotide
gagccaacguuccuuguuc

SEQ ID NO: 33505 - RNA, 19 nt, Artificial Sequence
  Description of Artificial Sequence: Synthetic oligonucleotide
ucacaaccuucagacaccc

SEQ ID NO: 33506 - RNA, 19 nt, Artificial Sequence
  Description of Artificial Sequence: Synthetic oligonucleotide
cugauuagacuugugacaa

SEQ ID NO: 33507 - RNA, 19 nt, Artificial Sequence
  Description of Artificial Sequence: Synthetic oligonucleotide
gaccacuguaccucccgag

SEQ ID NO: 33508 - RNA, 19 nt, Artificial Sequence
  Description of Artificial Sequence: Synthetic oligonucleotide
uccguguuggggagaauaa

SEQ ID NO: 33509 - RNA, 19 nt, Artificial Sequence
  Description of Artificial Sequence: Synthetic oligonucleotide
gugaacgagauguuguucu

SEQ ID NO: 33510 - RNA, 19 nt, Artificial Sequence
  Description of Artificial Sequence: Synthetic oligonucleotide
auucgaaccugccuuucau

SEQ ID NO: 33511 - RNA, 19 nt, Artificial Sequence
  Description of Artificial Sequence: Synthetic oligonucleotide
aaggcagcgcauaguaucu

SEQ ID NO: 33512 - RNA, 19 nt, Artificial Sequence
  Description of Artificial Sequence: Synthetic oligonucleotide
auucgaucggauauaugcu

SEQ ID NO: 33513 - RNA, 19 nt, Artificial Sequence
  Description of Artificial Sequence: Synthetic oligonucleotide
uuacgaaucucagggguau

SEQ ID NO: 33514 - RNA, 19 nt, Artificial Sequence
  Description of Artificial Sequence: Synthetic oligonucleotide
gucugacggacgaucaggg

SEQ ID NO: 33515 - RNA, 19 nt, Artificial Sequence
  Description of Artificial Sequence: Synthetic oligonucleotide
gaccccauaucccacccca

SEQ ID NO: 33516 - RNA, 19 nt, Artificial Sequence
  Description of Artificial Sequence: Synthetic oligonucleotide
ugccgacuagcaaauucac

SEQ ID NO: 33517 - RNA, 19 nt, Artificial Sequence
  Description of Artificial Sequence: Synthetic oligonucleotide
ugcuacuagcggauugagu

SEQ ID NO: 33518 - RNA, 19 nt, Artificial Sequence
  Description of Artificial Sequence: Synthetic oligonucleotide
uuuaagcccucgagaacau

SEQ ID NO: 33519 - RNA, 19 nt, Artificial Sequence
  Description of Artificial Sequence: Synthetic oligonucleotide
ggucaugaaauaaaccuga

SEQ ID NO: 33520 - RNA, 19 nt, Artificial Sequence
  Description of Artificial Sequence: Synthetic oligonucleotide
gauucgaaccugccuuuca

SEQ ID NO: 33521 - RNA, 19 nt, Artificial Sequence
  Description of Artificial Sequence: Synthetic oligonucleotide
gagucugacggacgaucag

SEQ ID NO: 33522 - RNA, 19 nt, Artificial Sequence
  Description of Artificial Sequence: Synthetic oligonucleotide
uaucuccgaguuaaaccuc

SEQ ID NO: 33523 - RNA, 19 nt, Artificial Sequence
  Description of Artificial Sequence: Synthetic oligonucleotide
ggugugcgaauuugggagg

SEQ ID NO: 33524 - RNA, 19 nt, Artificial Sequence
  Description of Artificial Sequence: Synthetic oligonucleotide
ugucugauucgaucggaua

SEQ ID NO: 33525 - RNA, 19 nt, Artificial Sequence
  Description of Artificial Sequence: Synthetic oligonucleotide
aaccugacugcugccacca

SEQ ID NO: 33526 - RNA, 19 nt, Artificial Sequence
  Description of Artificial Sequence: Synthetic oligonucleotide
cgagauguuguucucacag

SEQ ID NO: 33527 - RNA, 19 nt, Artificial Sequence
  Description of Artificial Sequence: Synthetic oligonucleotide
gggaucucgagacagggga

SEQ ID NO: 33528 - RNA, 19 nt, Artificial Sequence
  Description of Artificial Sequence: Synthetic oligonucleotide
gaucguauuucuaucgccu

SEQ ID NO: 33529 - RNA, 19 nt, Artificial Sequence
  Description of Artificial Sequence: Synthetic oligonucleotide
aggucgaaauacuucuuuu

SEQ ID NO: 33530 - RNA, 19 nt, Artificial Sequence
  Description of Artificial Sequence: Synthetic oligonucleotide
ucugauucgaucggauaua

SEQ ID NO: 33531 - RNA, 19 nt, Artificial Sequence
  Description of Artificial Sequence: Synthetic oligonucleotide
uggggagaauaaugauugc

SEQ ID NO: 33532 - RNA, 19 nt, Artificial Sequence
  Description of Artificial Sequence: Synthetic oligonucleotide
aucucgagacaggggaaac

SEQ ID NO: 33533 - RNA, 19 nt, Artificial Sequence
  Description of Artificial Sequence: Synthetic oligonucleotide
agaggcgcaagaggccugc

SEQ ID NO: 33534 - RNA, 19 nt, Artificial Sequence
  Description of Artificial Sequence: Synthetic oligonucleotide
ggauaagacaggugaacga

SEQ ID NO: 33535 - RNA, 19 nt, Artificial Sequence
  Description of Artificial Sequence: Synthetic oligonucleotide
auaagacaggugaacgaga

SEQ ID NO: 33536 - RNA, 19 nt, Artificial Sequence
  Description of Artificial Sequence: Synthetic oligonucleotide
accgaacggaggcaaagaa

SEQ ID NO: 33537 - RNA, 19 nt, Artificial Sequence
  Description of Artificial Sequence: Synthetic oligonucleotide
ugguccgaucuauaugauc

SEQ ID NO: 33538 - RNA, 19 nt, Artificial Sequence
  Description of Artificial Sequence: Synthetic oligonucleotide
aucaguggucccagacucc

SEQ ID NO: 33539 - RNA, 19 nt, Artificial Sequence
  Description of Artificial Sequence: Synthetic oligonucleotide
guaaccuggggucuauaaa

SEQ ID NO: 33540 - RNA, 19 nt, Artificial Sequence
  Description of Artificial Sequence: Synthetic oligonucleotide
auaggaugcuuuugguauu

SEQ ID NO: 33541 - RNA, 19 nt, Artificial Sequence
  Description of Artificial Sequence: Synthetic oligonucleotide
ggucgugacgacuccgggg

SEQ ID NO: 33542 - RNA, 19 nt, Artificial Sequence
  Description of Artificial Sequence: Synthetic oligonucleotide
gucccgacgggauaagaca

SEQ ID NO: 33543 - RNA, 19 nt, Artificial Sequence
  Description of Artificial Sequence: Synthetic oligonucleotide
ucaccggagccgcucugag

SEQ ID NO: 33544 - RNA, 19 nt, Artificial Sequence
  Description of Artificial Sequence: Synthetic oligonucleotide
agaccgaacggaggcaaag

SEQ ID NO: 33545 - RNA, 19 nt, Artificial Sequence
  Description of Artificial Sequence: Synthetic oligonucleotide
ugauuagacuugugacaaa

SEQ ID NO: 33546 - RNA, 19 nt, Artificial Sequence
  Description of Artificial Sequence: Synthetic oligonucleotide
aucguauuucuaucgccuu

SEQ ID NO: 33547 - RNA, 19 nt, Artificial Sequence
  Description of Artificial Sequence: Synthetic oligonucleotide
ugcuacagaugucggcauc

SEQ ID NO: 33548 - RNA, 19 nt, Artificial Sequence
  Description of Artificial Sequence: Synthetic oligonucleotide
gucugauucgaucggauau

SEQ ID NO: 33549 - RNA, 19 nt, Artificial Sequence
  Description of Artificial Sequence: Synthetic oligonucleotide
caggacauuuaagcccucg

SEQ ID NO: 33550 - RNA, 19 nt, Artificial Sequence
  Description of Artificial Sequence: Synthetic oligonucleotide
gaacgagauguuguucuca

SEQ ID NO: 33551 - RNA, 19 nt, Artificial Sequence
  Description of Artificial Sequence: Synthetic oligonucleotide
ucugacggacgaucagggu

SEQ ID NO: 33552 - RNA, 19 nt, Artificial Sequence
  Description of Artificial Sequence: Synthetic oligonucleotide
ccugauuagacuugugaca

SEQ ID NO: 33553 - RNA, 19 nt, Artificial Sequence
  Description of Artificial Sequence: Synthetic oligonucleotide
ugccugcuaccaaauccca

SEQ ID NO: 33554 - RNA, 19 nt, Artificial Sequence
  Description of Artificial Sequence: Synthetic oligonucleotide
caaaucgcccacagugguc

SEQ ID NO: 33555 - RNA, 19 nt, Artificial Sequence
  Description of Artificial Sequence: Synthetic oligonucleotide
ccacuguacucauacucgg

SEQ ID NO: 33556 - RNA, 19 nt, Artificial Sequence
  Description of Artificial Sequence: Synthetic oligonucleotide
aggugaacgagauguuguu

SEQ ID NO: 33557 - RNA, 19 nt, Artificial Sequence
  Description of Artificial Sequence: Synthetic oligonucleotide
guuuuagugcauugcauuu

SEQ ID NO: 33558 - RNA, 19 nt, Artificial Sequence
  Description of Artificial Sequence: Synthetic oligonucleotide
cuuuccgaguaggaucuug

SEQ ID NO: 33559 - RNA, 19 nt, Artificial Sequence
  Description of Artificial Sequence: Synthetic oligonucleotide
uggccuaguguuggugggg

SEQ ID NO: 33560 - RNA, 19 nt, Artificial Sequence
  Description of Artificial Sequence: Synthetic oligonucleotide
aaacaaaaugggaccccau

SEQ ID NO: 33561 - RNA, 19 nt, Artificial Sequence
  Description of Artificial Sequence: Synthetic oligonucleotide
gucaugaaauaaaccugac

SEQ ID NO: 33562 - RNA, 19 nt, Artificial Sequence
  Description of Artificial Sequence: Synthetic oligonucleotide
ucgcucuguggccuagugu

SEQ ID NO: 33563 - RNA, 19 nt, Artificial Sequence
  Description of Artificial Sequence: Synthetic oligonucleotide
guucaauccguuucugccu

SEQ ID NO: 33564 - RNA, 19 nt, Artificial Sequence
  Description of Artificial Sequence: Synthetic oligonucleotide
ugcccacgcauagacuucc

SEQ ID NO: 33565 - RNA, 19 nt, Artificial Sequence
  Description of Artificial Sequence: Synthetic oligonucleotide
gauaaauaguagacacgua

SEQ ID NO: 33566 - RNA, 19 nt, Artificial Sequence
  Description of Artificial Sequence: Synthetic oligonucleotide
aucgcucuguggccuagug

SEQ ID NO: 33567 - RNA, 19 nt, Artificial Sequence
  Description of Artificial Sequence: Synthetic oligonucleotide
ugugcgaauuugggaggag

SEQ ID NO: 33568 - RNA, 19 nt, Artificial Sequence
  Description of Artificial Sequence: Synthetic oligonucleotide
ucguucacauaagaauuuu

SEQ ID NO: 33569 - RNA, 19 nt, Artificial Sequence
  Description of Artificial Sequence: Synthetic oligonucleotide
gugccgacuagcaaauuca

SEQ ID NO: 33570 - RNA, 19 nt, Artificial Sequence
  Description of Artificial Sequence: Synthetic oligonucleotide
uguaguaaccuggggucua

SEQ ID NO: 33571 - RNA, 19 nt, Artificial Sequence
  Description of Artificial Sequence: Synthetic oligonucleotide
ggucagugaucccagcuca

SEQ ID NO: 33572 - RNA, 19 nt, Artificial Sequence
  Description of Artificial Sequence: Synthetic oligonucleotide
agccaacguuccuuguucu

SEQ ID NO: 33573 - RNA, 19 nt, Artificial Sequence
  Description of Artificial Sequence: Synthetic oligonucleotide
uggauucgaaccugccuuu

SEQ ID NO: 33574 - RNA, 19 nt, Artificial Sequence
  Description of Artificial Sequence: Synthetic oligonucleotide
aucuccgaguuaaaccucu

SEQ ID NO: 33575 - RNA, 19 nt, Artificial Sequence
  Description of Artificial Sequence: Synthetic oligonucleotide
gaaaucccgucgcagaguu

SEQ ID NO: 33576 - RNA, 19 nt, Artificial Sequence
  Description of Artificial Sequence: Synthetic oligonucleotide
caacaaccacuaauuguga

SEQ ID NO: 33577 - RNA, 19 nt, Artificial Sequence
  Description of Artificial Sequence: Synthetic oligonucleotide
caccggugcagcucugagc

SEQ ID NO: 33578 - RNA, 19 nt, Artificial Sequence
  Description of Artificial Sequence: Synthetic oligonucleotide
aaacaguguucugcuuccu

SEQ ID NO: 33579 - RNA, 19 nt, Artificial Sequence
  Description of Artificial Sequence: Synthetic oligonucleotide
ggcagcgcauaguaucucc

SEQ ID NO: 33580 - RNA, 19 nt, Artificial Sequence
  Description of Artificial Sequence: Synthetic oligonucleotide
cuccgaguuaaaccucuuc

SEQ ID NO: 33581 - RNA, 19 nt, Artificial Sequence
  Description of Artificial Sequence: Synthetic oligonucleotide
gugugacuacucaaaugug

SEQ ID NO: 33582 - RNA, 19 nt, Artificial Sequence
  Description of Artificial Sequence: Synthetic oligonucleotide
cucacugcgggaaggugga

SEQ ID NO: 33583 - RNA, 19 nt, Artificial Sequence
  Description of Artificial Sequence: Synthetic oligonucleotide
gaucauuauguagaauuuu

SEQ ID NO: 33584 - RNA, 19 nt, Artificial Sequence
  Description of Artificial Sequence: Synthetic oligonucleotide
ggggagaauaaugauugca

SEQ ID NO: 33585 - RNA, 19 nt, Artificial Sequence
  Description of Artificial Sequence: Synthetic oligonucleotide
uguaccucccgagcucugu

SEQ ID NO: 33586 - RNA, 19 nt, Artificial Sequence
  Description of Artificial Sequence: Synthetic oligonucleotide
ggagucuaaacagcaccag

SEQ ID NO: 33587 - RNA, 19 nt, Artificial Sequence
  Description of Artificial Sequence: Synthetic oligonucleotide
agggucgugacgacuccgg

SEQ ID NO: 33588 - RNA, 19 nt, Artificial Sequence
  Description of Artificial Sequence: Synthetic oligonucleotide
acgcauagacuuccacaga

SEQ ID NO: 33589 - RNA, 19 nt, Artificial Sequence
  Description of Artificial Sequence: Synthetic oligonucleotide
cgacuagcaaauucacucc

SEQ ID NO: 33590 - RNA, 19 nt, Artificial Sequence
  Description of Artificial Sequence: Synthetic oligonucleotide
uccuuccauacguguuuac

SEQ ID NO: 33591 - RNA, 19 nt, Artificial Sequence
  Description of Artificial Sequence: Synthetic oligonucleotide
uucaccggagccgcucuga

SEQ ID NO: 33592 - RNA, 19 nt, Artificial Sequence
  Description of Artificial Sequence: Synthetic oligonucleotide
ggauugagucugacggacg

SEQ ID NO: 33593 - RNA, 19 nt, Artificial Sequence
  Description of Artificial Sequence: Synthetic oligonucleotide
acuccccacaaggcagcgc

SEQ ID NO: 33594 - RNA, 19 nt, Artificial Sequence
  Description of Artificial Sequence: Synthetic oligonucleotide
acgaucagggugcccuccu

SEQ ID NO: 33595 - RNA, 19 nt, Artificial Sequence
  Description of Artificial Sequence: Synthetic oligonucleotide
guuggggagaauaaugauu

SEQ ID NO: 33596 - RNA, 19 nt, Artificial Sequence
  Description of Artificial Sequence: Synthetic oligonucleotide
cagucuuaggaaaucccgu

SEQ ID NO: 33597 - RNA, 19 nt, Artificial Sequence
  Description of Artificial Sequence: Synthetic oligonucleotide
ccgaucuauaugauccuuc

SEQ ID NO: 33598 - RNA, 19 nt, Artificial Sequence
  Description of Artificial Sequence: Synthetic oligonucleotide
ccgaacggaggcaaagaac

SEQ ID NO: 33599 - RNA, 19 nt, Artificial Sequence
  Description of Artificial Sequence: Synthetic oligonucleotide
uucucaacuucuggaucau

SEQ ID NO: 33600 - RNA, 19 nt, Artificial Sequence
  Description of Artificial Sequence: Synthetic oligonucleotide
gcagcgcauaguaucuccg

SEQ ID NO: 33601 - RNA, 19 nt, Artificial Sequence
  Description of Artificial Sequence: Synthetic oligonucleotide
guugaucagaggauacacu

SEQ ID NO: 33602 - RNA, 19 nt, Artificial Sequence
  Description of Artificial Sequence: Synthetic oligonucleotide
cuacuagcggauugagucu

SEQ ID NO: 33603 - RNA, 19 nt, Artificial Sequence
  Description of Artificial Sequence: Synthetic oligonucleotide
uccugccuaaggucaugaa

SEQ ID NO: 33604 - RNA, 19 nt, Artificial Sequence
  Description of Artificial Sequence: Synthetic oligonucleotide
augcuacacugaaugugug

SEQ ID NO: 33605 - RNA, 19 nt, Artificial Sequence
  Description of Artificial Sequence: Synthetic oligonucleotide
auaucccaccccacccauc

SEQ ID NO: 33606 - RNA, 19 nt, Artificial Sequence
  Description of Artificial Sequence: Synthetic oligonucleotide
ggugauccuuccauacgug

SEQ ID NO: 33607 - RNA, 19 nt, Artificial Sequence
  Description of Artificial Sequence: Synthetic oligonucleotide
cagcgcauaguaucuccga

SEQ ID NO: 33608 - RNA, 19 nt, Artificial Sequence
  Description of Artificial Sequence: Synthetic oligonucleotide
cccgucgcagaguugacuc

SEQ ID NO: 33609 - RNA, 19 nt, Artificial Sequence
  Description of Artificial Sequence: Synthetic oligonucleotide
ggugaacgagauguuguuc

SEQ ID NO: 33610 - RNA, 19 nt, Artificial Sequence
  Description of Artificial Sequence: Synthetic oligonucleotide
gaaccgucuucgguugauc

SEQ ID NO: 33611 - RNA, 19 nt, Artificial Sequence
  Description of Artificial Sequence: Synthetic oligonucleotide
gggucgugacgacuccggg

SEQ ID NO: 33612 - RNA, 19 nt, Artificial Sequence
  Description of Artificial Sequence: Synthetic oligonucleotide
cacuuugugagguggccgu

SEQ ID NO: 33613 - RNA, 19 nt, Artificial Sequence
  Description of Artificial Sequence: Synthetic oligonucleotide
ucccgucgcagaguugacu

SEQ ID NO: 33614 - RNA, 19 nt, Artificial Sequence
  Description of Artificial Sequence: Synthetic oligonucleotide
ccacgcauagacuuccaca

SEQ ID NO: 33615 - RNA, 19 nt, Artificial Sequence
  Description of Artificial Sequence: Synthetic oligonucleotide
cccgagcucugucagcagg

SEQ ID NO: 33616 - RNA, 19 nt, Artificial Sequence
  Description of Artificial Sequence: Synthetic oligonucleotide
gccaccagaccgaacggag

SEQ ID NO: 33617 - RNA, 19 nt, Artificial Sequence
  Description of Artificial Sequence: Synthetic oligonucleotide
cacucucucccacaggagu

SEQ ID NO: 33618 - RNA, 19 nt, Artificial Sequence
  Description of Artificial Sequence: Synthetic oligonucleotide
ugcaccggugcagcucuga

SEQ ID NO: 33619 - RNA, 19 nt, Artificial Sequence
  Description of Artificial Sequence: Synthetic oligonucleotide
cgaucuauaugauccuuca

SEQ ID NO: 33620 - RNA, 19 nt, Artificial Sequence
  Description of Artificial Sequence: Synthetic oligonucleotide
ggggucagguaccucugac

SEQ ID NO: 33621 - RNA, 19 nt, Artificial Sequence
  Description of Artificial Sequence: Synthetic oligonucleotide
ggugcccacgcauagacuu

SEQ ID NO: 33622 - RNA, 19 nt, Artificial Sequence
  Description of Artificial Sequence: Synthetic oligonucleotide
cacuuucaaccucuggccu

SEQ ID NO: 33623 - RNA, 19 nt, Artificial Sequence
  Description of Artificial Sequence: Synthetic oligonucleotide
ccccauaucccaccccacc

SEQ ID NO: 33624 - RNA, 19 nt, Artificial Sequence
  Description of Artificial Sequence: Synthetic oligonucleotide
acggacgaucagggugccc

SEQ ID NO: 33625 - RNA, 19 nt, Artificial Sequence
  Description of Artificial Sequence: Synthetic oligonucleotide
cuaucgccuucucucccca

SEQ ID NO: 33626 - RNA, 19 nt, Artificial Sequence
  Description of Artificial Sequence: Synthetic oligonucleotide
caccaguaauggcuuaugu

SEQ ID NO: 33627 - RNA, 19 nt, Artificial Sequence
  Description of Artificial Sequence: Synthetic oligonucleotide
ggucgaagugaggcuuggg

SEQ ID NO: 33628 - RNA, 19 nt, Artificial Sequence
  Description of Artificial Sequence: Synthetic oligonucleotide
gacggacgaucagggugcc

SEQ ID NO: 33629 - RNA, 19 nt, Artificial Sequence
  Description of Artificial Sequence: Synthetic oligonucleotide
cucgagacaggggaaacau

SEQ ID NO: 33630 - RNA, 19 nt, Artificial Sequence
  Description of Artificial Sequence: Synthetic oligonucleotide
gcucaauacugguggugga

SEQ ID NO: 33631 - RNA, 19 nt, Artificial Sequence
  Description of Artificial Sequence: Synthetic oligonucleotide
acuagcggauugagucuga

SEQ ID NO: 33632 - RNA, 19 nt, Artificial Sequence
  Description of Artificial Sequence: Synthetic oligonucleotide
gcggauugagucugacgga

SEQ ID NO: 33633 - RNA, 19 nt, Artificial Sequence
  Description of Artificial Sequence: Synthetic oligonucleotide
ggaccccauaucccacccc

SEQ ID NO: 33634 - RNA, 19 nt, Artificial Sequence
  Description of Artificial Sequence: Synthetic oligonucleotide
guuccacuagauggagaaa

SEQ ID NO: 33635 - RNA, 19 nt, Artificial Sequence
  Description of Artificial Sequence: Synthetic oligonucleotide
cugauucgaucggauauau

SEQ ID NO: 33636 - RNA, 19 nt, Artificial Sequence
  Description of Artificial Sequence: Synthetic oligonucleotide
caugauagcuuggcuugcu

SEQ ID NO: 33637 - RNA, 19 nt, Artificial Sequence
  Description of Artificial Sequence: Synthetic oligonucleotide
gaccgcucucugugccgac

SEQ ID NO: 33638 - RNA, 19 nt, Artificial Sequence
  Description of Artificial Sequence: Synthetic oligonucleotide
cacccauccuaagccccac

SEQ ID NO: 33639 - RNA, 19 nt, Artificial Sequence
  Description of Artificial Sequence: Synthetic oligonucleotide
gugcccacgcauagacuuc

SEQ ID NO: 33640 - RNA, 19 nt, Artificial Sequence
  Description of Artificial Sequence: Synthetic oligonucleotide
ggagaggcgcaagaggccu

SEQ ID NO: 33641 - RNA, 19 nt, Artificial Sequence
  Description of Artificial Sequence: Synthetic oligonucleotide
caccggagccgcucugaga

SEQ ID NO: 33642 - RNA, 19 nt, Artificial Sequence
  Description of Artificial Sequence: Synthetic oligonucleotide
ccuuaugaaggguguucaa

SEQ ID NO: 33643 - RNA, 19 nt, Artificial Sequence
  Description of Artificial Sequence: Synthetic oligonucleotide
ccauccuaagccccaccca

SEQ ID NO: 33644 - RNA, 19 nt, Artificial Sequence
  Description of Artificial Sequence: Synthetic oligonucleotide
gagcccuuuugugcauaaa

SEQ ID NO: 33645 - RNA, 19 nt, Artificial Sequence
  Description of Artificial Sequence: Synthetic oligonucleotide
cugcuaccaaaucccaauu

SEQ ID NO: 33646 - RNA, 19 nt, Artificial Sequence
  Description of Artificial Sequence: Synthetic oligonucleotide
ccaaaucgcccacaguggu

SEQ ID NO: 33647 - RNA, 19 nt, Artificial Sequence
  Description of Artificial Sequence: Synthetic oligonucleotide
caccucgucacugucugau

SEQ ID NO: 33648 - RNA, 19 nt, Artificial Sequence
  Description of Artificial Sequence: Synthetic oligonucleotide
ggaaaucccgucgcagagu

SEQ ID NO: 33649 - RNA, 19 nt, Artificial Sequence
  Description of Artificial Sequence: Synthetic oligonucleotide
gcgcaagaggccugcauau

SEQ ID NO: 33650 - RNA, 19 nt, Artificial Sequence
  Description of Artificial Sequence: Synthetic oligonucleotide
cgacgggauaagacaggug

SEQ ID NO: 33651 - RNA, 19 nt, Artificial Sequence
  Description of Artificial Sequence: Synthetic oligonucleotide
cugguccgaucuauaugau

SEQ ID NO: 33652 - RNA, 19 nt, Artificial Sequence
  Description of Artificial Sequence: Synthetic oligonucleotide
cagggucgaagugaggcuu

SEQ ID NO: 33653 - RNA, 19 nt, Artificial Sequence
  Description of Artificial Sequence: Synthetic oligonucleotide
gcuucggugcccacgcaua

SEQ ID NO: 33654 - RNA, 19 nt, Artificial Sequence
  Description of Artificial Sequence: Synthetic oligonucleotide
gccgacuagcaaauucacu

SEQ ID NO: 33655 - RNA, 19 nt, Artificial Sequence
  Description of Artificial Sequence: Synthetic oligonucleotide
agcguucaccggagccgcu

SEQ ID NO: 33656 - RNA, 19 nt, Artificial Sequence
  Description of Artificial Sequence: Synthetic oligonucleotide
ccggagccgcucugagacc

SEQ ID NO: 33657 - RNA, 19 nt, Artificial Sequence
  Description of Artificial Sequence: Synthetic oligonucleotide
gcguucaccggagccgcuc

SEQ ID NO: 33658 - RNA, 19 nt, Artificial Sequence
  Description of Artificial Sequence: Synthetic oligonucleotide
cugcuccguagagggccuc

SEQ ID NO: 33659 - RNA, 19 nt, Artificial Sequence
  Description of Artificial Sequence: Synthetic oligonucleotide
cgguugaucagaggauaca

SEQ ID NO: 33660 - RNA, 19 nt, Artificial Sequence
  Description of Artificial Sequence: Synthetic oligonucleotide
cgaguaggaucuugccuua

SEQ ID NO: 33661 - RNA, 19 nt, Artificial Sequence
  Description of Artificial Sequence: Synthetic oligonucleotide
cggacgaucagggugcccu

SEQ ID NO: 33662 - RNA, 19 nt, Artificial Sequence
  Description of Artificial Sequence: Synthetic oligonucleotide
ccgacgggauaagacaggu

SEQ ID NO: 33663 - RNA, 19 nt, Artificial Sequence
  Description of Artificial Sequence: Synthetic oligonucleotide
ccgucgcagaguugacucu

SEQ ID NO: 33664 - RNA, 19 nt, Artificial Sequence
  Description of Artificial Sequence: Synthetic oligonucleotide
ccguguuggggagaauaau

SEQ ID NO: 33665 - RNA, 19 nt, Artificial Sequence
  Description of Artificial Sequence: Synthetic oligonucleotide
gccuaguguuggugggguu

SEQ ID NO: 33666 - RNA, 19 nt, Artificial Sequence
  Description of Artificial Sequence: Synthetic oligonucleotide
cugugccgacuagcaaauu

SEQ ID NO: 33667 - RNA, 19 nt, Artificial Sequence
  Description of Artificial Sequence: Synthetic oligonucleotide
ccgcucugagacccaggau

SEQ ID NO: 33668 - RNA, 19 nt, Artificial Sequence
  Description of Artificial Sequence: Synthetic oligonucleotide
ccuuuccgaguaggaucuu

SEQ ID NO: 33669 - RNA, 19 nt, Artificial Sequence
  Description of Artificial Sequence: Synthetic oligonucleotide
auaacugagaccuauagcc

SEQ ID NO: 33670 - RNA, 19 nt, Artificial Sequence
  Description of Artificial Sequence: Synthetic oligonucleotide
aaucauaauggauggacac

SEQ ID NO: 33671 - RNA, 19 nt, Artificial Sequence
  Description of Artificial Sequence: Synthetic oligonucleotide
aguucuuauguacagcucc

SEQ ID NO: 33672 - RNA, 19 nt, Artificial Sequence
  Description of Artificial Sequence: Synthetic oligonucleotide
agucuaguaaaauuguucg

SEQ ID NO: 33673 - RNA, 19 nt, Artificial Sequence
  Description of Artificial Sequence: Synthetic oligonucleotide
aaaguuaggaauuuccccu

SEQ ID NO: 33674 - RNA, 19 nt, Artificial Sequence
  Description of Artificial Sequence: Synthetic oligonucleotide
gaaccauucauccaggaag

SEQ ID NO: 33675 - RNA, 19 nt, Artificial Sequence
  Description of Artificial Sequence: Synthetic oligonucleotide
uauacaaagggucaagaga

SEQ ID NO: 33676 - RNA, 19 nt, Artificial Sequence
  Description of Artificial Sequence: Synthetic oligonucleotide
ugcacaaaauuuuaugagg

SEQ ID NO: 33677 - RNA, 19 nt, Artificial Sequence
  Description of Artificial Sequence: Synthetic oligonucleotide
gagaccuauagccacaugg

SEQ ID NO: 33678 - RNA, 19 nt, Artificial Sequence
  Description of Artificial Sequence: Synthetic oligonucleotide
uuucccugaaagauaaugg

SEQ ID NO: 33679 - RNA, 19 nt, Artificial Sequence
  Description of Artificial Sequence: Synthetic oligonucleotide
auaauggauggacacaugg

SEQ ID NO: 33680 - RNA, 19 nt, Artificial Sequence
  Description of Artificial Sequence: Synthetic oligonucleotide
uuaaguccgccuaagagcc

SEQ ID NO: 33681 - RNA, 19 nt, Artificial Sequence
  Description of Artificial Sequence: Synthetic oligonucleotide
ugaagcaauaauauaccag

SEQ ID NO: 33682 - RNA, 19 nt, Artificial Sequence
  Description of Artificial Sequence: Synthetic oligonucleotide
ucccauuaaaccaagguga

SEQ ID NO: 33683 - RNA, 19 nt, Artificial Sequence
  Description of Artificial Sequence: Synthetic oligonucleotide
ucuuaaguccgccuaagag

SEQ ID NO: 33684 - RNA, 19 nt, Artificial Sequence
  Description of Artificial Sequence: Synthetic oligonucleotide
cuuaaguccgccuaagagc

SEQ ID NO: 33685 - RNA, 19 nt, Artificial Sequence
  Description of Artificial Sequence: Synthetic oligonucleotide
auagauauaccaguuuccc

SEQ ID NO: 33686 - RNA, 19 nt, Artificial Sequence
  Description of Artificial Sequence: Synthetic oligonucleotide
guuugauccggacaaaccg

SEQ ID NO: 33687 - RNA, 19 nt, Artificial Sequence
  Description of Artificial Sequence: Synthetic oligonucleotide
ucuaccagaucacaugucc

SEQ ID NO: 33688 - RNA, 19 nt, Artificial Sequence
  Description of Artificial Sequence: Synthetic oligonucleotide
uuaacaauccgaaacgcuc

SEQ ID NO: 33689 - RNA, 19 nt, Artificial Sequence
  Description of Artificial Sequence: Synthetic oligonucleotide
aaucccauuaaaccaaggu

SEQ ID NO: 33690 - RNA, 19 nt, Artificial Sequence
  Description of Artificial Sequence: Synthetic oligonucleotide
caaaccgaguuauuaaugg

SEQ ID NO: 33691 - RNA, 19 nt, Artificial Sequence
  Description of Artificial Sequence: Synthetic oligonucleotide
ugaaugaugacaccccuca

SEQ ID NO: 33692 - RNA, 19 nt, Artificial Sequence
  Description of Artificial Sequence: Synthetic oligonucleotide
acuauaggcgaucuugaac

SEQ ID NO: 33693 - RNA, 19 nt, Artificial Sequence
  Description of Artificial Sequence: Synthetic oligonucleotide
auauaacugagaccuauag

SEQ ID NO: 33694 - RNA, 19 nt, Artificial Sequence
  Description of Artificial Sequence: Synthetic oligonucleotide
caguguaccgacaugagag

SEQ ID NO: 33695 - RNA, 19 nt, Artificial Sequence
  Description of Artificial Sequence: Synthetic oligonucleotide
gacaugugauaccagaagc

SEQ ID NO: 33696 - RNA, 19 nt, Artificial Sequence
  Description of Artificial Sequence: Synthetic oligonucleotide
ugauaccagaagcugauug

SEQ ID NO: 33697 - RNA, 19 nt, Artificial Sequence
  Description of Artificial Sequence: Synthetic oligonucleotide
aucgaucuaaucauaaugg

SEQ ID NO: 33698 - RNA, 19 nt, Artificial Sequence
  Description of Artificial Sequence: Synthetic oligonucleotide
aguaaaauuguucgccauc

SEQ ID NO: 33699 - RNA, 19 nt, Artificial Sequence
  Description of Artificial Sequence: Synthetic oligonucleotide
uacagaaauucuuauagau

SEQ ID NO: 33700 - RNA, 19 nt, Artificial Sequence
  Description of Artificial Sequence: Synthetic oligonucleotide
aauuguucgccaucgccag

SEQ ID NO: 33701 - RNA, 19 nt, Artificial Sequence
  Description of Artificial Sequence: Synthetic oligonucleotide
uucgguacaacacuguaaa

SEQ ID NO: 33702 - RNA, 19 nt, Artificial Sequence
  Description of Artificial Sequence: Synthetic oligonucleotide
ugucauuuagcuccgauuu

SEQ ID NO: 33703 - RNA, 19 nt, Artificial Sequence
  Description of Artificial Sequence: Synthetic oligonucleotide
guuacuauaggcgaucuug

SEQ ID NO: 33704 - RNA, 19 nt, Artificial Sequence
  Description of Artificial Sequence: Synthetic oligonucleotide
cuacagaccaguugguucg

SEQ ID NO: 33705 - RNA, 19 nt, Artificial Sequence
  Description of Artificial Sequence: Synthetic oligonucleotide
uuuagcuccgauuuccucu

SEQ ID NO: 33706 - RNA, 19 nt, Artificial Sequence
  Description of Artificial Sequence: Synthetic oligonucleotide
gaagcaaugcccgaauccg

SEQ ID NO: 33707 - RNA, 19 nt, Artificial Sequence
  Description of Artificial Sequence: Synthetic oligonucleotide
cauagauauaccaguuucc

SEQ ID NO: 33708 - RNA, 19 nt, Artificial Sequence
  Description of Artificial Sequence: Synthetic oligonucleotide
uaaucauaauggauggaca

SEQ ID NO: 33709 - RNA, 19 nt, Artificial Sequence
  Description of Artificial Sequence: Synthetic oligonucleotide
gacguaauauuucuucuug

SEQ ID NO: 33710 - RNA, 19 nt, Artificial Sequence
  Description of Artificial Sequence: Synthetic oligonucleotide
guaaacagagcugacacgc

SEQ ID NO: 33711 - RNA, 19 nt, Artificial Sequence
  Description of Artificial Sequence: Synthetic oligonucleotide
caucgaucuaaucauaaug

SEQ ID NO: 33712 - RNA, 19 nt, Artificial Sequence
  Description of Artificial Sequence: Synthetic oligonucleotide
gugccgaagacuuuugugg

SEQ ID NO: 33713 - RNA, 19 nt, Artificial Sequence
  Description of Artificial Sequence: Synthetic oligonucleotide
ugucccaacagcagugacg

SEQ ID NO: 33714 - RNA, 19 nt, Artificial Sequence
  Description of Artificial Sequence: Synthetic oligonucleotide
uauauggguacugaggcca

SEQ ID NO: 33715 - RNA, 19 nt, Artificial Sequence
  Description of Artificial Sequence: Synthetic oligonucleotide
agugacgaaucgcaggagg

SEQ ID NO: 33716 - RNA, 19 nt, Artificial Sequence
  Description of Artificial Sequence: Synthetic oligonucleotide
uuauguaccuuuucugcug

SEQ ID NO: 33717 - RNA, 19 nt, Artificial Sequence
  Description of Artificial Sequence: Synthetic oligonucleotide
ggagauguaagguaccccg

SEQ ID NO: 33718 - RNA, 19 nt, Artificial Sequence
  Description of Artificial Sequence: Synthetic oligonucleotide
cuguuagacgaaaacauuc

SEQ ID NO: 33719 - RNA, 19 nt, Artificial Sequence
  Description of Artificial Sequence: Synthetic oligonucleotide
ucauuuagcuccgauuucc

SEQ ID NO: 33720 - RNA, 19 nt, Artificial Sequence
  Description of Artificial Sequence: Synthetic oligonucleotide
ugcuucgauucuaaagagg

SEQ ID NO: 33721 - RNA, 19 nt, Artificial Sequence
  Description of Artificial Sequence: Synthetic oligonucleotide
gaggacgaagacuagccag

SEQ ID NO: 33722 - RNA, 19 nt, Artificial Sequence
  Description of Artificial Sequence: Synthetic oligonucleotide
guaaccgggagauguaagg

SEQ ID NO: 33723 - RNA, 19 nt, Artificial Sequence
  Description of Artificial Sequence: Synthetic oligonucleotide
uuugauccggacaaaccga

SEQ ID NO: 33724 - RNA, 19 nt, Artificial Sequence
  Description of Artificial Sequence: Synthetic oligonucleotide
aagacacguccuucuuucc

SEQ ID NO: 33725 - RNA, 19 nt, Artificial Sequence
  Description of Artificial Sequence: Synthetic oligonucleotide
agaggaugaaccaugaagu

SEQ ID NO: 33726 - RNA, 19 nt, Artificial Sequence
  Description of Artificial Sequence: Synthetic oligonucleotide
aaacacgagauucgguaca

SEQ ID NO: 33727 - RNA, 19 nt, Artificial Sequence
  Description of Artificial Sequence: Synthetic oligonucleotide
accggaaucuuaacaaucc

SEQ ID NO: 33728 - RNA, 19 nt, Artificial Sequence
  Description of Artificial Sequence: Synthetic oligonucleotide
agauguaagguaccccggg

SEQ ID NO: 33729 - RNA, 19 nt, Artificial Sequence
  Description of Artificial Sequence: Synthetic oligonucleotide
agagcgacuggucaccagg

SEQ ID NO: 33730 - RNA, 19 nt, Artificial Sequence
  Description of Artificial Sequence: Synthetic oligonucleotide
uucgauucuaaagaggaaa

SEQ ID NO: 33731 - RNA, 19 nt, Artificial Sequence
  Description of Artificial Sequence: Synthetic oligonucleotide
cacggguuaagucuguugc

SEQ ID NO: 33732 - RNA, 19 nt, Artificial Sequence
  Description of Artificial Sequence: Synthetic oligonucleotide
gauaucuacucuguaaguc

SEQ ID NO: 33733 - RNA, 19 nt, Artificial Sequence
  Description of Artificial Sequence: Synthetic oligonucleotide
ucuacagaccaguugguuc

SEQ ID NO: 33734 - RNA, 19 nt, Artificial Sequence
  Description of Artificial Sequence: Synthetic oligonucleotide
ucuuauguacagcuccgca

SEQ ID NO: 33735 - RNA, 19 nt, Artificial Sequence
  Description of Artificial Sequence: Synthetic oligonucleotide
gguaugguauucugaaugg

SEQ ID NO: 33736 - RNA, 19 nt, Artificial Sequence
  Description of Artificial Sequence: Synthetic oligonucleotide
gaggguuacgccuuaccag

SEQ ID NO: 33737 - RNA, 19 nt, Artificial Sequence
  Description of Artificial Sequence: Synthetic oligonucleotide
uccgaaacgcucuuaaguc

SEQ ID NO: 33738 - RNA, 19 nt, Artificial Sequence
  Description of Artificial Sequence: Synthetic oligonucleotide
uugacguaauauuucuucu

SEQ ID NO: 33739 - RNA, 19 nt, Artificial Sequence
  Description of Artificial Sequence: Synthetic oligonucleotide
ugugauaccagaagcugau

SEQ ID NO: 33740 - RNA, 19 nt, Artificial Sequence
  Description of Artificial Sequence: Synthetic oligonucleotide
aucaagaaaaucugucggu

SEQ ID NO: 33741 - RNA, 19 nt, Artificial Sequence
  Description of Artificial Sequence: Synthetic oligonucleotide
ucuuaacaauccgaaacgc

SEQ ID NO: 33742 - RNA, 19 nt, Artificial Sequence
  Description of Artificial Sequence: Synthetic oligonucleotide
ucaagagacaugacacuga

SEQ ID NO: 33743 - RNA, 19 nt, Artificial Sequence
  Description of Artificial Sequence: Synthetic oligonucleotide
uugauccggacaaaccgag

SEQ ID NO: 33744 - RNA, 19 nt, Artificial Sequence
  Description of Artificial Sequence: Synthetic oligonucleotide
aaagaacaaugagagagaa

SEQ ID NO: 33745 - RNA, 19 nt, Artificial Sequence
  Description of Artificial Sequence: Synthetic oligonucleotide
gaaauggcaccuugugucc

SEQ ID NO: 33746 - RNA, 19 nt, Artificial Sequence
  Description of Artificial Sequence: Synthetic oligonucleotide
ucgaucuaaucauaaugga

SEQ ID NO: 33747 - RNA, 19 nt, Artificial Sequence
  Description of Artificial Sequence: Synthetic oligonucleotide
auuguuacuauaggcgauc

SEQ ID NO: 33748 - RNA, 19 nt, Artificial Sequence
  Description of Artificial Sequence: Synthetic oligonucleotide
uuuaucuaggucuguuggu

SEQ ID NO: 33749 - RNA, 19 nt, Artificial Sequence
  Description of Artificial Sequence: Synthetic oligonucleotide
ucgaagugcggguugaagu

SEQ ID NO: 33750 - RNA, 19 nt, Artificial Sequence
  Description of Artificial Sequence: Synthetic oligonucleotide
uuuucacguccuuuuagac

SEQ ID NO: 33751 - RNA, 19 nt, Artificial Sequence
  Description of Artificial Sequence: Synthetic oligonucleotide
acggguuaagucuguugcc

SEQ ID NO: 33752 - RNA, 19 nt, Artificial Sequence
  Description of Artificial Sequence: Synthetic oligonucleotide
aaaccggaaucuuaacaau

SEQ ID NO: 33753 - RNA, 19 nt, Artificial Sequence
  Description of Artificial Sequence: Synthetic oligonucleotide
gauuuugcaguuuccgaga

SEQ ID NO: 33754 - RNA, 19 nt, Artificial Sequence
  Description of Artificial Sequence: Synthetic oligonucleotide
gguaguuuaggcgggagcg

SEQ ID NO: 33755 - RNA, 19 nt, Artificial Sequence
  Description of Artificial Sequence: Synthetic oligonucleotide
acgagauucgguacaacac

SEQ ID NO: 33756 - RNA, 19 nt, Artificial Sequence
  Description of Artificial Sequence: Synthetic oligonucleotide
auuuagcuccgauuuccuc

SEQ ID NO: 33757 - RNA, 19 nt, Artificial Sequence
  Description of Artificial Sequence: Synthetic oligonucleotide
ucuuucuaccagaucacau

SEQ ID NO: 33758 - RNA, 19 nt, Artificial Sequence
  Description of Artificial Sequence: Synthetic oligonucleotide
ugauaucuacucuguaagu

SEQ ID NO: 33759 - RNA, 19 nt, Artificial Sequence
  Description of Artificial Sequence: Synthetic oligonucleotide
uuucgcugcggaaagcgcu

SEQ ID NO: 33760 - RNA, 19 nt, Artificial Sequence
  Description of Artificial Sequence: Synthetic oligonucleotide
ucucauagauauaccaguu

SEQ ID NO: 33761 - RNA, 19 nt, Artificial Sequence
  Description of Artificial Sequence: Synthetic oligonucleotide
gagaggacgaagacuagcc

SEQ ID NO: 33762 - RNA, 19 nt, Artificial Sequence
  Description of Artificial Sequence: Synthetic oligonucleotide
aaacgcucuuaaguccgcc

SEQ ID NO: 33763 - RNA, 19 nt, Artificial Sequence
  Description of Artificial Sequence: Synthetic oligonucleotide
acacuucucacuuggguga

SEQ ID NO: 33764 - RNA, 19 nt, Artificial Sequence
  Description of Artificial Sequence: Synthetic oligonucleotide
ugaaccauucauccaggaa

SEQ ID NO: 33765 - RNA, 19 nt, Artificial Sequence
  Description of Artificial Sequence: Synthetic oligonucleotide
acacuccuaagacaacauc

SEQ ID NO: 33766 - RNA, 19 nt, Artificial Sequence
  Description of Artificial Sequence: Synthetic oligonucleotide
aacgaaguuugacccucag

SEQ ID NO: 33767 - RNA, 19 nt, Artificial Sequence
  Description of Artificial Sequence: Synthetic oligonucleotide
augcuucgauucuaaagag

SEQ ID NO: 33768 - RNA, 19 nt, Artificial Sequence
  Description of Artificial Sequence: Synthetic oligonucleotide
caucuuaugacuucuguua

SEQ ID NO: 33769 - RNA, 19 nt, Artificial Sequence
  Description of Artificial Sequence: Synthetic oligonucleotide
agaccuauagccacauggg

SEQ ID NO: 33770 - RNA, 19 nt, Artificial Sequence
  Description of Artificial Sequence: Synthetic oligonucleotide
agucuugacguaauauuuc

SEQ ID NO: 33771 - RNA, 19 nt, Artificial Sequence
  Description of Artificial Sequence: Synthetic oligonucleotide
gaagcugauuggauggugc

SEQ ID NO: 33772 - RNA, 19 nt, Artificial Sequence
  Description of Artificial Sequence: Synthetic oligonucleotide
aagcaaugcccgaauccgc

SEQ ID NO: 33773 - RNA, 19 nt, Artificial Sequence
  Description of Artificial Sequence: Synthetic oligonucleotide
ccauaaaauccucagcggg

SEQ ID NO: 33774 - RNA, 19 nt, Artificial Sequence
  Description of Artificial Sequence: Synthetic oligonucleotide
cuagcggcgaagcaaugcc

SEQ ID NO: 33775 - RNA, 19 nt, Artificial Sequence
  Description of Artificial Sequence: Synthetic oligonucleotide
gauaggaguccuguccggg

SEQ ID NO: 33776 - RNA, 19 nt, Artificial Sequence
  Description of Artificial Sequence: Synthetic oligonucleotide
ugaaagauaauggcuuuau

SEQ ID NO: 33777 - RNA, 19 nt, Artificial Sequence
  Description of Artificial Sequence: Synthetic oligonucleotide
caaacacgagauucgguac

SEQ ID NO: 33778 - RNA, 19 nt, Artificial Sequence
  Description of Artificial Sequence: Synthetic oligonucleotide
ucgggaguucuuauguaca

SEQ ID NO: 33779 - RNA, 19 nt, Artificial Sequence
  Description of Artificial Sequence: Synthetic oligonucleotide
ugcaugguaugguauucug

SEQ ID NO: 33780 - RNA, 19 nt, Artificial Sequence
  Description of Artificial Sequence: Synthetic oligonucleotide
gggagaacacgauugcgcg

SEQ ID NO: 33781 - RNA, 19 nt, Artificial Sequence
  Description of Artificial Sequence: Synthetic oligonucleotide
uccaaaucgaagugcgggu

SEQ ID NO: 33782 - RNA, 19 nt, Artificial Sequence
  Description of Artificial Sequence: Synthetic oligonucleotide
ugauuguaacaagugaaua

SEQ ID NO: 33783 - RNA, 19 nt, Artificial Sequence
  Description of Artificial Sequence: Synthetic oligonucleotide
ugacacgcuauauggguac

SEQ ID NO: 33784 - RNA, 19 nt, Artificial Sequence
  Description of Artificial Sequence: Synthetic oligonucleotide
uuuucgcugcggaaagcgc

SEQ ID NO: 33785 - RNA, 19 nt, Artificial Sequence
  Description of Artificial Sequence: Synthetic oligonucleotide
uguaagguaccccggguuu

SEQ ID NO: 33786 - RNA, 19 nt, Artificial Sequence
  Description of Artificial Sequence: Synthetic oligonucleotide
uuugcacaauccuccugag

SEQ ID NO: 33787 - RNA, 19 nt, Artificial Sequence
  Description of Artificial Sequence: Synthetic oligonucleotide
auugcgcggacgaaagccc

SEQ ID NO: 33788 - RNA, 19 nt, Artificial Sequence
  Description of Artificial Sequence: Synthetic oligonucleotide
agagaauacaaaugucauu

SEQ ID NO: 33789 - RNA, 19 nt, Artificial Sequence
  Description of Artificial Sequence: Synthetic oligonucleotide
aacaucgaucuaaucauaa

SEQ ID NO: 33790 - RNA, 19 nt, Artificial Sequence
  Description of Artificial Sequence: Synthetic oligonucleotide
aacgcucuuaaguccgccu

SEQ ID NO: 33791 - RNA, 19 nt, Artificial Sequence
  Description of Artificial Sequence: Synthetic oligonucleotide
gguaaacagagcugacacg

SEQ ID NO: 33792 - RNA, 19 nt, Artificial Sequence
  Description of Artificial Sequence: Synthetic oligonucleotide
aaguuaggaauuuccccuu

SEQ ID NO: 33793 - RNA, 19 nt, Artificial Sequence
  Description of Artificial Sequence: Synthetic oligonucleotide
ugguucgaucaccuccacg

SEQ ID NO: 33794 - RNA, 19 nt, Artificial Sequence
  Description of Artificial Sequence: Synthetic oligonucleotide
uuugacccucaguguaccg

SEQ ID NO: 33795 - RNA, 19 nt, Artificial Sequence
  Description of Artificial Sequence: Synthetic oligonucleotide
ugauuggauggugcugucg

SEQ ID NO: 33796 - RNA, 19 nt, Artificial Sequence
  Description of Artificial Sequence: Synthetic oligonucleotide
ggagccauuguuacuauag

SEQ ID NO: 33797 - RNA, 19 nt, Artificial Sequence
  Description of Artificial Sequence: Synthetic oligonucleotide
uucagagauuuguguagca

SEQ ID NO: 33798 - RNA, 19 nt, Artificial Sequence
  Description of Artificial Sequence: Synthetic oligonucleotide
aguuugacccucaguguac

SEQ ID NO: 33799 - RNA, 19 nt, Artificial Sequence
  Description of Artificial Sequence: Synthetic oligonucleotide
gagauguaagguaccccgg

SEQ ID NO: 33800 - RNA, 19 nt, Artificial Sequence
  Description of Artificial Sequence: Synthetic oligonucleotide
ugacguaauauuucuucuu

SEQ ID NO: 33801 - RNA, 19 nt, Artificial Sequence
  Description of Artificial Sequence: Synthetic oligonucleotide
auuguucgccaucgccagc

SEQ ID NO: 33802 - RNA, 19 nt, Artificial Sequence
  Description of Artificial Sequence: Synthetic oligonucleotide
acaaaccgaguuauuaaug

SEQ ID NO: 33803 - RNA, 19 nt, Artificial Sequence
  Description of Artificial Sequence: Synthetic oligonucleotide
uaaacagagcugacacgcu

SEQ ID NO: 33804 - RNA, 19 nt, Artificial Sequence
  Description of Artificial Sequence: Synthetic oligonucleotide
accgacaugagagccggac

SEQ ID NO: 33805 - RNA, 19 nt, Artificial Sequence
  Description of Artificial Sequence: Synthetic oligonucleotide
aaaucgaagugcggguuga

SEQ ID NO: 33806 - RNA, 19 nt, Artificial Sequence
  Description of Artificial Sequence: Synthetic oligonucleotide
ugucgguauugcuugguaa

SEQ ID NO: 33807 - RNA, 19 nt, Artificial Sequence
  Description of Artificial Sequence: Synthetic oligonucleotide
gccauaaaauccucagcgg

SEQ ID NO: 33808 - RNA, 19 nt, Artificial Sequence
  Description of Artificial Sequence: Synthetic oligonucleotide
uuagcuccgauuuccucuc

SEQ ID NO: 33809 - RNA, 19 nt, Artificial Sequence
  Description of Artificial Sequence: Synthetic oligonucleotide
cuuauguacagcuccgcaa

SEQ ID NO: 33810 - RNA, 19 nt, Artificial Sequence
  Description of Artificial Sequence: Synthetic oligonucleotide
ugccgaagacuuuuguggu

SEQ ID NO: 33811 - RNA, 19 nt, Artificial Sequence
  Description of Artificial Sequence: Synthetic oligonucleotide
uuagucagugggccaccag

SEQ ID NO: 33812 - RNA, 19 nt, Artificial Sequence
  Description of Artificial Sequence: Synthetic oligonucleotide
gacgaaucgcaggaggccc

SEQ ID NO: 33813 - RNA, 19 nt, Artificial Sequence
  Description of Artificial Sequence: Synthetic oligonucleotide
uaagagccauaaaauccuc

SEQ ID NO: 33814 - RNA, 19 nt, Artificial Sequence
  Description of Artificial Sequence: Synthetic oligonucleotide
ugauauaguuucagagauu

SEQ ID NO: 33815 - RNA, 19 nt, Artificial Sequence
  Description of Artificial Sequence: Synthetic oligonucleotide
agcagggguaaucuguuau

SEQ ID NO: 33816 - RNA, 19 nt, Artificial Sequence
  Description of Artificial Sequence: Synthetic oligonucleotide
cacgagauucgguacaaca

SEQ ID NO: 33817 - RNA, 19 nt, Artificial Sequence
  Description of Artificial Sequence: Synthetic oligonucleotide
caaucccauuaaaccaagg

SEQ ID NO: 33818 - RNA, 19 nt, Artificial Sequence
  Description of Artificial Sequence: Synthetic oligonucleotide
uugugguggucaucagcgg

SEQ ID NO: 33819 - RNA, 19 nt, Artificial Sequence
  Description of Artificial Sequence: Synthetic oligonucleotide
uccuucgucgagccagucc

SEQ ID NO: 33820 - RNA, 19 nt, Artificial Sequence
  Description of Artificial Sequence: Synthetic oligonucleotide
guaccgacaugagagccgg

SEQ ID NO: 33821 - RNA, 19 nt, Artificial Sequence
  Description of Artificial Sequence: Synthetic oligonucleotide
gagaacacgauugcgcgga

SEQ ID NO: 33822 - RNA, 19 nt, Artificial Sequence
  Description of Artificial Sequence: Synthetic oligonucleotide
caaaucgaagugcggguug

SEQ ID NO: 33823 - RNA, 19 nt, Artificial Sequence
  Description of Artificial Sequence: Synthetic oligonucleotide
ugacgaaucgcaggaggcc

SEQ ID NO: 33824 - RNA, 19 nt, Artificial Sequence
  Description of Artificial Sequence: Synthetic oligonucleotide
uugagaggacgaagacuag

SEQ ID NO: 33825 - RNA, 19 nt, Artificial Sequence
  Description of Artificial Sequence: Synthetic oligonucleotide
uucgcugcggaaagcgcug

SEQ ID NO: 33826 - RNA, 19 nt, Artificial Sequence
  Description of Artificial Sequence: Synthetic oligonucleotide
acaucgaucuaaucauaau

SEQ ID NO: 33827 - RNA, 19 nt, Artificial Sequence
  Description of Artificial Sequence: Synthetic oligonucleotide
ugagagccggacaugugau

SEQ ID NO: 33828 - RNA, 19 nt, Artificial Sequence
  Description of Artificial Sequence: Synthetic oligonucleotide
acgcuauauggguacugag

SEQ ID NO: 33829 - RNA, 19 nt, Artificial Sequence
  Description of Artificial Sequence: Synthetic oligonucleotide
auccucagcgggucuuggc

SEQ ID NO: 33830 - RNA, 19 nt, Artificial Sequence
  Description of Artificial Sequence: Synthetic oligonucleotide
auaccagaagcugauugga

SEQ ID NO: 33831 - RNA, 19 nt, Artificial Sequence
  Description of Artificial Sequence: Synthetic oligonucleotide
gacgaagacuagccagugc

SEQ ID NO: 33832 - RNA, 19 nt, Artificial Sequence
  Description of Artificial Sequence: Synthetic oligonucleotide
uucaaaucucauagauaua

SEQ ID NO: 33833 - RNA, 19 nt, Artificial Sequence
  Description of Artificial Sequence: Synthetic oligonucleotide
aagacuagccagugccgaa

SEQ ID NO: 33834 - RNA, 19 nt, Artificial Sequence
  Description of Artificial Sequence: Synthetic oligonucleotide
uccacagcgaucccaccaa

SEQ ID NO: 33835 - RNA, 19 nt, Artificial Sequence
  Description of Artificial Sequence: Synthetic oligonucleotide
cagucggagccauuguuac

SEQ ID NO: 33836 - RNA, 19 nt, Artificial Sequence
  Description of Artificial Sequence: Synthetic oligonucleotide
cacuccuaagacaacaucu

SEQ ID NO: 33837 - RNA, 19 nt, Artificial Sequence
  Description of Artificial Sequence: Synthetic oligonucleotide
aguuaaggcuucgcuguuc

SEQ ID NO: 33838 - RNA, 19 nt, Artificial Sequence
  Description of Artificial Sequence: Synthetic oligonucleotide
uucuuauguacagcuccgc

SEQ ID NO: 33839 - RNA, 19 nt, Artificial Sequence
  Description of Artificial Sequence: Synthetic oligonucleotide
cauaauggauggacacaug

SEQ ID NO: 33840 - RNA, 19 nt, Artificial Sequence
  Description of Artificial Sequence: Synthetic oligonucleotide
gggucaagagacaugacac

SEQ ID NO: 33841 - RNA, 19 nt, Artificial Sequence
  Description of Artificial Sequence: Synthetic oligonucleotide
guaacgaaguuugacccuc

SEQ ID NO: 33842 - RNA, 19 nt, Artificial Sequence
  Description of Artificial Sequence: Synthetic oligonucleotide
ccuucgucgagccaguccc

SEQ ID NO: 33843 - RNA, 19 nt, Artificial Sequence
  Description of Artificial Sequence: Synthetic oligonucleotide
gcuucgauucuaaagagga

SEQ ID NO: 33844 - RNA, 19 nt, Artificial Sequence
  Description of Artificial Sequence: Synthetic oligonucleotide
ugaucaugauucucuggua

SEQ ID NO: 33845 - RNA, 19 nt, Artificial Sequence
  Description of Artificial Sequence: Synthetic oligonucleotide
aagucgccugcauccuguc

SEQ ID NO: 33846 - RNA, 19 nt, Artificial Sequence
  Description of Artificial Sequence: Synthetic oligonucleotide
ugucgauaaugguuggcuu

SEQ ID NO: 33847 - RNA, 19 nt, Artificial Sequence
  Description of Artificial Sequence: Synthetic oligonucleotide
uuugugucucaagucgccu

SEQ ID NO: 33848 - RNA, 19 nt, Artificial Sequence
  Description of Artificial Sequence: Synthetic oligonucleotide
gguucgaucaccuccacgu

SEQ ID NO: 33849 - RNA, 19 nt, Artificial Sequence
  Description of Artificial Sequence: Synthetic oligonucleotide
gaagugcggguugaaguug

SEQ ID NO: 33850 - RNA, 19 nt, Artificial Sequence
  Description of Artificial Sequence: Synthetic oligonucleotide
uagcggcgaagcaaugccc

SEQ ID NO: 33851 - RNA, 19 nt, Artificial Sequence
  Description of Artificial Sequence: Synthetic oligonucleotide
cauaaaauccucagcgggu

SEQ ID NO: 33852 - RNA, 19 nt, Artificial Sequence
  Description of Artificial Sequence: Synthetic oligonucleotide
gaaguuugacccucagugu

SEQ ID NO: 33853 - RNA, 19 nt, Artificial Sequence
  Description of Artificial Sequence: Synthetic oligonucleotide
agcgacuggucaccaggcg

SEQ ID NO: 33854 - RNA, 19 nt, Artificial Sequence
  Description of Artificial Sequence: Synthetic oligonucleotide
uaguuuaggcgggagcgcu

SEQ ID NO: 33855 - RNA, 19 nt, Artificial Sequence
  Description of Artificial Sequence: Synthetic oligonucleotide
cuuaacaauccgaaacgcu

SEQ ID NO: 33856 - RNA, 19 nt, Artificial Sequence
  Description of Artificial Sequence: Synthetic oligonucleotide
uucuaccagaucacauguc

SEQ ID NO: 33857 - RNA, 19 nt, Artificial Sequence
  Description of Artificial Sequence: Synthetic oligonucleotide
ggaaucuuaacaauccgaa

SEQ ID NO: 33858 - RNA, 19 nt, Artificial Sequence
  Description of Artificial Sequence: Synthetic oligonucleotide
cagugguaccuccugugag

SEQ ID NO: 33859 - RNA, 19 nt, Artificial Sequence
  Description of Artificial Sequence: Synthetic oligonucleotide
uuguuacuauaggcgaucu

SEQ ID NO: 33860 - RNA, 19 nt, Artificial Sequence
  Description of Artificial Sequence: Synthetic oligonucleotide
aacacgagauucgguacaa

SEQ ID NO: 33861 - RNA, 19 nt, Artificial Sequence
  Description of Artificial Sequence: Synthetic oligonucleotide
agcggcgaagcaaugcccg

SEQ ID NO: 33862 - RNA, 19 nt, Artificial Sequence
  Description of Artificial Sequence: Synthetic oligonucleotide
ucagcgggacacccgggug

SEQ ID NO: 33863 - RNA, 19 nt, Artificial Sequence
  Description of Artificial Sequence: Synthetic oligonucleotide
cauucacacuucucacuug

SEQ ID NO: 33864 - RNA, 19 nt, Artificial Sequence
  Description of Artificial Sequence: Synthetic oligonucleotide
agaggugaaaagguccgga

SEQ ID NO: 33865 - RNA, 19 nt, Artificial Sequence
  Description of Artificial Sequence: Synthetic oligonucleotide
ucggcguagcacacuaaaa

SEQ ID NO: 33866 - RNA, 19 nt, Artificial Sequence
  Description of Artificial Sequence: Synthetic oligonucleotide
auguaagguaccccggguu

SEQ ID NO: 33867 - RNA, 19 nt, Artificial Sequence
  Description of Artificial Sequence: Synthetic oligonucleotide
aaacaaacucucacuuaau

SEQ ID NO: 33868 - RNA, 19 nt, Artificial Sequence
  Description of Artificial Sequence: Synthetic oligonucleotide
cgaaacgcucuuaaguccg

SEQ ID NO: 33869 - RNA, 19 nt, Artificial Sequence
  Description of Artificial Sequence: Synthetic oligonucleotide
agcgaucccaccaagguuu

SEQ ID NO: 33870 - RNA, 19 nt, Artificial Sequence
  Description of Artificial Sequence: Synthetic oligonucleotide
ggagaacacgauugcgcgg

SEQ ID NO: 33871 - RNA, 19 nt, Artificial Sequence
  Description of Artificial Sequence: Synthetic oligonucleotide
agaacacgauugcgcggac

SEQ ID NO: 33872 - RNA, 19 nt, Artificial Sequence
  Description of Artificial Sequence: Synthetic oligonucleotide
caaugcccgaauccgcgag

SEQ ID NO: 33873 - RNA, 19 nt, Artificial Sequence
  Description of Artificial Sequence: Synthetic oligonucleotide
aagggucaagagacaugac

SEQ ID NO: 33874 - RNA, 19 nt, Artificial Sequence
  Description of Artificial Sequence: Synthetic oligonucleotide
cucagcgggucuuggcggg

SEQ ID NO: 33875 - RNA, 19 nt, Artificial Sequence
  Description of Artificial Sequence: Synthetic oligonucleotide
aggaagguuuucagggguc

SEQ ID NO: 33876 - RNA, 19 nt, Artificial Sequence
  Description of Artificial Sequence: Synthetic oligonucleotide
uguuacuauaggcgaucuu

SEQ ID NO: 33877 - RNA, 19 nt, Artificial Sequence
  Description of Artificial Sequence: Synthetic oligonucleotide
cgcuauauggguacugagg

SEQ ID NO: 33878 - RNA, 19 nt, Artificial Sequence
  Description of Artificial Sequence: Synthetic oligonucleotide
gguuugauccggacaaacc

SEQ ID NO: 33879 - RNA, 19 nt, Artificial Sequence
  Description of Artificial Sequence: Synthetic oligonucleotide
aucgaagugcggguugaag

SEQ ID NO: 33880 - RNA, 19 nt, Artificial Sequence
  Description of Artificial Sequence: Synthetic oligonucleotide
ugugucccaacagcaguga

SEQ ID NO: 33881 - RNA, 19 nt, Artificial Sequence
  Description of Artificial Sequence: Synthetic oligonucleotide
caucaaaagggcccacuga

SEQ ID NO: 33882 - RNA, 19 nt, Artificial Sequence
  Description of Artificial Sequence: Synthetic oligonucleotide
auuccauaggaaagaacaa

SEQ ID NO: 33883 - RNA, 19 nt, Artificial Sequence
  Description of Artificial Sequence: Synthetic oligonucleotide
gcgacuggucaccaggcgg

SEQ ID NO: 33884 - RNA, 19 nt, Artificial Sequence
  Description of Artificial Sequence: Synthetic oligonucleotide
ggaggucacaaacacgaga

SEQ ID NO: 33885 - RNA, 19 nt, Artificial Sequence
  Description of Artificial Sequence: Synthetic oligonucleotide
aucagcgggacacccgggu

SEQ ID NO: 33886 - RNA, 19 nt, Artificial Sequence
  Description of Artificial Sequence: Synthetic oligonucleotide
aagugcggguugaaguuga

SEQ ID NO: 33887 - RNA, 19 nt, Artificial Sequence
  Description of Artificial Sequence: Synthetic oligonucleotide
auauggguacugaggccac

SEQ ID NO: 33888 - RNA, 19 nt, Artificial Sequence
  Description of Artificial Sequence: Synthetic oligonucleotide
uugcgcggacgaaagccca

SEQ ID NO: 33889 - RNA, 19 nt, Artificial Sequence
  Description of Artificial Sequence: Synthetic oligonucleotide
ugcgcggacgaaagcccag

SEQ ID NO: 33890 - RNA, 19 nt, Artificial Sequence
  Description of Artificial Sequence: Synthetic oligonucleotide
aggacacggguuaagucug

SEQ ID NO: 33891 - RNA, 19 nt, Artificial Sequence
  Description of Artificial Sequence: Synthetic oligonucleotide
uauaggcgaucuugaacuu

SEQ ID NO: 33892 - RNA, 19 nt, Artificial Sequence
  Description of Artificial Sequence: Synthetic oligonucleotide
uaggcgggagcgcucuaca

SEQ ID NO: 33893 - RNA, 19 nt, Artificial Sequence
  Description of Artificial Sequence: Synthetic oligonucleotide
gggguaaucuguuaucuua

SEQ ID NO: 33894 - RNA, 19 nt, Artificial Sequence
  Description of Artificial Sequence: Synthetic oligonucleotide
ccgaaacgcucuuaagucc

SEQ ID NO: 33895 - RNA, 19 nt, Artificial Sequence
  Description of Artificial Sequence: Synthetic oligonucleotide
ccgauaggaguccuguccg

SEQ ID NO: 33896 - RNA, 19 nt, Artificial Sequence
  Description of Artificial Sequence: Synthetic oligonucleotide
aguuaggaauuuccccuua

SEQ ID NO: 33897 - RNA, 19 nt, Artificial Sequence
  Description of Artificial Sequence: Synthetic oligonucleotide
ggacaaaccgaguuauuaa

SEQ ID NO: 33898 - RNA, 19 nt, Artificial Sequence
  Description of Artificial Sequence: Synthetic oligonucleotide
aggacgaagacuagccagu

SEQ ID NO: 33899 - RNA, 19 nt, Artificial Sequence
  Description of Artificial Sequence: Synthetic oligonucleotide
gauccggacaaaccgaguu

SEQ ID NO: 33900 - RNA, 19 nt, Artificial Sequence
  Description of Artificial Sequence: Synthetic oligonucleotide
ucgucacacucguccacug

SEQ ID NO: 33901 - RNA, 19 nt, Artificial Sequence
  Description of Artificial Sequence: Synthetic oligonucleotide
gaaacgcucuuaaguccgc

SEQ ID NO: 33902 - RNA, 19 nt, Artificial Sequence
  Description of Artificial Sequence: Synthetic oligonucleotide
uccagcgguaggugcuucc

SEQ ID NO: 33903 - RNA, 19 nt, Artificial Sequence
  Description of Artificial Sequence: Synthetic oligonucleotide
ccgaagacuuuuguggugg

SEQ ID NO: 33904 - RNA, 19 nt, Artificial Sequence
  Description of Artificial Sequence: Synthetic oligonucleotide
agcgggacacccgggugcc

SEQ ID NO: 33905 - RNA, 19 nt, Artificial Sequence
  Description of Artificial Sequence: Synthetic oligonucleotide
ucgguacaacacuguaaaa

SEQ ID NO: 33906 - RNA, 19 nt, Artificial Sequence
  Description of Artificial Sequence: Synthetic oligonucleotide
cuucgaaagucuuagccuu

SEQ ID NO: 33907 - RNA, 19 nt, Artificial Sequence
  Description of Artificial Sequence: Synthetic oligonucleotide
agagaggaugaaccaugaa

SEQ ID NO: 33908 - RNA, 19 nt, Artificial Sequence
  Description of Artificial Sequence: Synthetic oligonucleotide
gaguucuuauguacagcuc

SEQ ID NO: 33909 - RNA, 19 nt, Artificial Sequence
  Description of Artificial Sequence: Synthetic oligonucleotide
gaaggcuagcggcgaagca

SEQ ID NO: 33910 - RNA, 19 nt, Artificial Sequence
  Description of Artificial Sequence: Synthetic oligonucleotide
guaugguauucugaaugga

SEQ ID NO: 33911 - RNA, 19 nt, Artificial Sequence
  Description of Artificial Sequence: Synthetic oligonucleotide
cagcgggacacccgggugc

SEQ ID NO: 33912 - RNA, 19 nt, Artificial Sequence
  Description of Artificial Sequence: Synthetic oligonucleotide
uccgcaagacagacuccac

SEQ ID NO: 33913 - RNA, 19 nt, Artificial Sequence
  Description of Artificial Sequence: Synthetic oligonucleotide
aaccguguggagagaggug

SEQ ID NO: 33914 - RNA, 19 nt, Artificial Sequence
  Description of Artificial Sequence: Synthetic oligonucleotide
cccgaauccgcgagaagcg

SEQ ID NO: 33915 - RNA, 19 nt, Artificial Sequence
  Description of Artificial Sequence: Synthetic oligonucleotide
auccggacaaaccgaguua

SEQ ID NO: 33916 - RNA, 19 nt, Artificial Sequence
  Description of Artificial Sequence: Synthetic oligonucleotide
gcagcugcgggagaacacg

SEQ ID NO: 33917 - RNA, 19 nt, Artificial Sequence
  Description of Artificial Sequence: Synthetic oligonucleotide
ucgucgagccagucccaag

SEQ ID NO: 33918 - RNA, 19 nt, Artificial Sequence
  Description of Artificial Sequence: Synthetic oligonucleotide
ccggaaucuuaacaauccg

SEQ ID NO: 33919 - RNA, 19 nt, Artificial Sequence
  Description of Artificial Sequence: Synthetic oligonucleotide
agucauacuugcagucucu

SEQ ID NO: 33920 - RNA, 19 nt, Artificial Sequence
  Description of Artificial Sequence: Synthetic oligonucleotide
uaaguccgccuaagagcca

SEQ ID NO: 33921 - RNA, 19 nt, Artificial Sequence
  Description of Artificial Sequence: Synthetic oligonucleotide
gcccgaauccgcgagaagc

SEQ ID NO: 33922 - RNA, 19 nt, Artificial Sequence
  Description of Artificial Sequence: Synthetic oligonucleotide
gagcgacuggucaccaggc

SEQ ID NO: 33923 - RNA, 19 nt, Artificial Sequence
  Description of Artificial Sequence: Synthetic oligonucleotide
acacgagauucgguacaac

SEQ ID NO: 33924 - RNA, 19 nt, Artificial Sequence
  Description of Artificial Sequence: Synthetic oligonucleotide
agggguaaucuguuaucuu

SEQ ID NO: 33925 - RNA, 19 nt, Artificial Sequence
  Description of Artificial Sequence: Synthetic oligonucleotide
ggguaguuuaggcgggagc

SEQ ID NO: 33926 - RNA, 19 nt, Artificial Sequence
  Description of Artificial Sequence: Synthetic oligonucleotide
gucggcguagcacacuaaa

SEQ ID NO: 33927 - RNA, 19 nt, Artificial Sequence
  Description of Artificial Sequence: Synthetic oligonucleotide
acgcucuuaaguccgccua

SEQ ID NO: 33928 - RNA, 19 nt, Artificial Sequence
  Description of Artificial Sequence: Synthetic oligonucleotide
ggcguagcacacuaaaaua

SEQ ID NO: 33929 - RNA, 19 nt, Artificial Sequence
  Description of Artificial Sequence: Synthetic oligonucleotide
gguuacgccuuaccagccc

SEQ ID NO: 33930 - RNA, 19 nt, Artificial Sequence
  Description of Artificial Sequence: Synthetic oligonucleotide
aguuuaggcgggagcgcuc

SEQ ID NO: 33931 - RNA, 19 nt, Artificial Sequence
  Description of Artificial Sequence: Synthetic oligonucleotide
uccgccuaagagccauaaa

SEQ ID NO: 33932 - RNA, 19 nt, Artificial Sequence
  Description of Artificial Sequence: Synthetic oligonucleotide
agucgggaguucuuaugua

SEQ ID NO: 33933 - RNA, 19 nt, Artificial Sequence
  Description of Artificial Sequence: Synthetic oligonucleotide
ccuauagccacauggggaa

SEQ ID NO: 33934 - RNA, 19 nt, Artificial Sequence
  Description of Artificial Sequence: Synthetic oligonucleotide
gggagcgcucuacagacca

SEQ ID NO: 33935 - RNA, 19 nt, Artificial Sequence
  Description of Artificial Sequence: Synthetic oligonucleotide
cagucacacaauuuuaauu

SEQ ID NO: 33936 - RNA, 19 nt, Artificial Sequence
  Description of Artificial Sequence: Synthetic oligonucleotide
caagaaaaucugucgguau

SEQ ID NO: 33937 - RNA, 19 nt, Artificial Sequence
  Description of Artificial Sequence: Synthetic oligonucleotide
caucagcgggacacccggg

SEQ ID NO: 33938 - RNA, 19 nt, Artificial Sequence
  Description of Artificial Sequence: Synthetic oligonucleotide
cucuuaaguccgccuaaga

SEQ ID NO: 33939 - RNA, 19 nt, Artificial Sequence
  Description of Artificial Sequence: Synthetic oligonucleotide
agcuuggaucaaccauuca

SEQ ID NO: 33940 - RNA, 19 nt, Artificial Sequence
  Description of Artificial Sequence: Synthetic oligonucleotide
aggguaguuuaggcgggag

SEQ ID NO: 33941 - RNA, 19 nt, Artificial Sequence
  Description of Artificial Sequence: Synthetic oligonucleotide
uuaaggcuucgcuguucau

SEQ ID NO: 33942 - RNA, 19 nt, Artificial Sequence
  Description of Artificial Sequence: Synthetic oligonucleotide
uuacgccuuaccagcccua

SEQ ID NO: 33943 - RNA, 19 nt, Artificial Sequence
  Description of Artificial Sequence: Synthetic oligonucleotide
aaucgaagugcggguugaa

SEQ ID NO: 33944 - RNA, 19 nt, Artificial Sequence
  Description of Artificial Sequence: Synthetic oligonucleotide
cccaauagcaaaacaggaa

SEQ ID NO: 33945 - RNA, 19 nt, Artificial Sequence
  Description of Artificial Sequence: Synthetic oligonucleotide
acgccuuaccagcccuaag

SEQ ID NO: 33946 - RNA, 19 nt, Artificial Sequence
  Description of Artificial Sequence: Synthetic oligonucleotide
gcugacacgcuauaugggu

SEQ ID NO: 33947 - RNA, 19 nt, Artificial Sequence
  Description of Artificial Sequence: Synthetic oligonucleotide
cugacacgcuauaugggua

SEQ ID NO: 33948 - RNA, 19 nt, Artificial Sequence
  Description of Artificial Sequence: Synthetic oligonucleotide
ccgccuaagagccauaaaa

SEQ ID NO: 33949 - RNA, 19 nt, Artificial Sequence
  Description of Artificial Sequence: Synthetic oligonucleotide
cauuguuacuauaggcgau

SEQ ID NO: 33950 - RNA, 19 nt, Artificial Sequence
  Description of Artificial Sequence: Synthetic oligonucleotide
cugauuggauggugcuguc

SEQ ID NO: 33951 - RNA, 19 nt, Artificial Sequence
  Description of Artificial Sequence: Synthetic oligonucleotide
guuacgccuuaccagcccu

SEQ ID NO: 33952 - RNA, 19 nt, Artificial Sequence
  Description of Artificial Sequence: Synthetic oligonucleotide
auccgcgagaagcgcgucu

SEQ ID NO: 33953 - RNA, 19 nt, Artificial Sequence
  Description of Artificial Sequence: Synthetic oligonucleotide
ccacgggacacaaggaauc

SEQ ID NO: 33954 - RNA, 19 nt, Artificial Sequence
  Description of Artificial Sequence: Synthetic oligonucleotide
gaagauccugacgaaccgu

SEQ ID NO: 33955 - RNA, 19 nt, Artificial Sequence
  Description of Artificial Sequence: Synthetic oligonucleotide
cgaauccgcgagaagcgcg

SEQ ID NO: 33956 - RNA, 19 nt, Artificial Sequence
  Description of Artificial Sequence: Synthetic oligonucleotide
ggaaggcuagcggcgaagc

SEQ ID NO: 33957 - RNA, 19 nt, Artificial Sequence
  Description of Artificial Sequence: Synthetic oligonucleotide
ugacaccccucacuaucuu

SEQ ID NO: 33958 - RNA, 19 nt, Artificial Sequence
  Description of Artificial Sequence: Synthetic oligonucleotide
cugucgauaaugguuggcu

SEQ ID NO: 33959 - RNA, 19 nt, Artificial Sequence
  Description of Artificial Sequence: Synthetic oligonucleotide
ccgcaagacagacuccacc

SEQ ID NO: 33960 - RNA, 19 nt, Artificial Sequence
  Description of Artificial Sequence: Synthetic oligonucleotide
gcuagcggcgaagcaaugc

SEQ ID NO: 33961 - RNA, 19 nt, Artificial Sequence
  Description of Artificial Sequence: Synthetic oligonucleotide
ccucagcgggucuuggcgg

SEQ ID NO: 33962 - RNA, 19 nt, Artificial Sequence
  Description of Artificial Sequence: Synthetic oligonucleotide
ccuccaaaucgaagugcgg

SEQ ID NO: 33963 - RNA, 19 nt, Artificial Sequence
  Description of Artificial Sequence: Synthetic oligonucleotide
cagagcgacuggucaccag

SEQ ID NO: 33964 - RNA, 19 nt, Artificial Sequence
  Description of Artificial Sequence: Synthetic oligonucleotide
guuugguggcugcauggua

SEQ ID NO: 33965 - RNA, 19 nt, Artificial Sequence
  Description of Artificial Sequence: Synthetic oligonucleotide
gccgaagacuuuuguggug

SEQ ID NO: 33966 - RNA, 19 nt, Artificial Sequence
  Description of Artificial Sequence: Synthetic oligonucleotide
uucgucgagccagucccaa

SEQ ID NO: 33967 - RNA, 19 nt, Artificial Sequence
  Description of Artificial Sequence: Synthetic oligonucleotide
ucggagccauuguuacuau

SEQ ID NO: 33968 - RNA, 19 nt, Artificial Sequence
  Description of Artificial Sequence: Synthetic oligonucleotide
agauccugacgaaccgugu

SEQ ID NO: 33969 - RNA, 19 nt, Artificial Sequence
  Description of Artificial Sequence: Synthetic oligonucleotide
cauuuagcuccgauuuccu

SEQ ID NO: 33970 - RNA, 19 nt, Artificial Sequence
  Description of Artificial Sequence: Synthetic oligonucleotide
gguaacgaaguuugacccu

SEQ ID NO: 33971 - RNA, 19 nt, Artificial Sequence
  Description of Artificial Sequence: Synthetic oligonucleotide
gcucuuaaguccgccuaag

SEQ ID NO: 33972 - RNA, 19 nt, Artificial Sequence
  Description of Artificial Sequence: Synthetic oligonucleotide
gccacucguugacguaugg

SEQ ID NO: 33973 - RNA, 19 nt, Artificial Sequence
  Description of Artificial Sequence: Synthetic oligonucleotide
cugaaagauaauggcuuua

SEQ ID NO: 33974 - RNA, 19 nt, Artificial Sequence
  Description of Artificial Sequence: Synthetic oligonucleotide
cugggucuuaaaauaguuu

SEQ ID NO: 33975 - RNA, 19 nt, Artificial Sequence
  Description of Artificial Sequence: Synthetic oligonucleotide
cagugacgaaucgcaggag

SEQ ID NO: 33976 - RNA, 19 nt, Artificial Sequence
  Description of Artificial Sequence: Synthetic oligonucleotide
ggucaagagacaugacacu

SEQ ID NO: 33977 - RNA, 19 nt, Artificial Sequence
  Description of Artificial Sequence: Synthetic oligonucleotide
cugucauuuagcuccgauu

SEQ ID NO: 33978 - RNA, 19 nt, Artificial Sequence
  Description of Artificial Sequence: Synthetic oligonucleotide
agaauccaucacaggguaa

SEQ ID NO: 33979 - RNA, 19 nt, Artificial Sequence
  Description of Artificial Sequence: Synthetic oligonucleotide
gguaggccuuuucucuuca

SEQ ID NO: 33980 - RNA, 19 nt, Artificial Sequence
  Description of Artificial Sequence: Synthetic oligonucleotide
aggcuagcggcgaagcaau

SEQ ID NO: 33981 - RNA, 19 nt, Artificial Sequence
  Description of Artificial Sequence: Synthetic oligonucleotide
caagucgccugcauccugu

SEQ ID NO: 33982 - RNA, 19 nt, Artificial Sequence
  Description of Artificial Sequence: Synthetic oligonucleotide
gaauccgcgagaagcgcgu

SEQ ID NO: 33983 - RNA, 19 nt, Artificial Sequence
  Description of Artificial Sequence: Synthetic oligonucleotide
cuuggcggggaaggcuagc

SEQ ID NO: 33984 - RNA, 19 nt, Artificial Sequence
  Description of Artificial Sequence: Synthetic oligonucleotide
ccggacaugugauaccaga

SEQ ID NO: 33985 - RNA, 19 nt, Artificial Sequence
  Description of Artificial Sequence: Synthetic oligonucleotide
uuuaggcgggagcgcucua

SEQ ID NO: 33986 - RNA, 19 nt, Artificial Sequence
  Description of Artificial Sequence: Synthetic oligonucleotide
guucgaucaccuccacgua

SEQ ID NO: 33987 - RNA, 19 nt, Artificial Sequence
  Description of Artificial Sequence: Synthetic oligonucleotide
augcccgaauccgcgagaa

SEQ ID NO: 33988 - RNA, 19 nt, Artificial Sequence
  Description of Artificial Sequence: Synthetic oligonucleotide
cuuagucagugggccacca

SEQ ID NO: 33989 - RNA, 19 nt, Artificial Sequence
  Description of Artificial Sequence: Synthetic oligonucleotide
acgaaucgcaggaggccca

SEQ ID NO: 33990 - RNA, 19 nt, Artificial Sequence
  Description of Artificial Sequence: Synthetic oligonucleotide
gcggggaaggcuagcggcg

SEQ ID NO: 33991 - RNA, 19 nt, Artificial Sequence
  Description of Artificial Sequence: Synthetic oligonucleotide
gacggagggaagagagaaa

SEQ ID NO: 33992 - RNA, 19 nt, Artificial Sequence
  Description of Artificial Sequence: Synthetic oligonucleotide
cagacgugaucuccaggaa

SEQ ID NO: 33993 - RNA, 19 nt, Artificial Sequence
  Description of Artificial Sequence: Synthetic oligonucleotide
uaccgacaugagagccgga

SEQ ID NO: 33994 - RNA, 19 nt, Artificial Sequence
  Description of Artificial Sequence: Synthetic oligonucleotide
ccagagcagggguaaucug

SEQ ID NO: 33995 - RNA, 19 nt, Artificial Sequence
  Description of Artificial Sequence: Synthetic oligonucleotide
cugucgguauugcuuggua

SEQ ID NO: 33996 - RNA, 19 nt, Artificial Sequence
  Description of Artificial Sequence: Synthetic oligonucleotide
guuuaggcgggagcgcucu

SEQ ID NO: 33997 - RNA, 19 nt, Artificial Sequence
  Description of Artificial Sequence: Synthetic oligonucleotide
cagcugcgggagaacacga

SEQ ID NO: 33998 - RNA, 19 nt, Artificial Sequence
  Description of Artificial Sequence: Synthetic oligonucleotide
cuucgucgagccaguccca

SEQ ID NO: 33999 - RNA, 19 nt, Artificial Sequence
  Description of Artificial Sequence: Synthetic oligonucleotide
gcguagcacacuaaaauau

SEQ ID NO: 34000 - RNA, 19 nt, Artificial Sequence
  Description of Artificial Sequence: Synthetic oligonucleotide
gcgaagcaaugcccgaauc

SEQ ID NO: 34001 - RNA, 19 nt, Artificial Sequence
  Description of Artificial Sequence: Synthetic oligonucleotide
guaccccggguuuucaauu

SEQ ID NO: 34002 - RNA, 19 nt, Artificial Sequence
  Description of Artificial Sequence: Synthetic oligonucleotide
gcaaugcccgaauccgcga

SEQ ID NO: 34003 - RNA, 19 nt, Artificial Sequence
  Description of Artificial Sequence: Synthetic oligonucleotide
cggacgaaagcccagcaaa

SEQ ID NO: 34004 - RNA, 19 nt, Artificial Sequence
  Description of Artificial Sequence: Synthetic oligonucleotide
ccagugccgaagacuuuug

SEQ ID NO: 34005 - RNA, 19 nt, Artificial Sequence
  Description of Artificial Sequence: Synthetic oligonucleotide
acgugaucuccaggaaaua

SEQ ID NO: 34006 - RNA, 19 nt, Artificial Sequence
  Description of Artificial Sequence: Synthetic oligonucleotide
ucccggggucggcguagca

SEQ ID NO: 34007 - RNA, 19 nt, Artificial Sequence
  Description of Artificial Sequence: Synthetic oligonucleotide
uucccggggucggcguagc

SEQ ID NO: 34008 - RNA, 19 nt, Artificial Sequence
  Description of Artificial Sequence: Synthetic oligonucleotide
cagaacaauuaagccacau

SEQ ID NO: 34009 - RNA, 19 nt, Artificial Sequence
  Description of Artificial Sequence: Synthetic oligonucleotide
guccgccuaagagccauaa

SEQ ID NO: 34010 - RNA, 19 nt, Artificial Sequence
  Description of Artificial Sequence: Synthetic oligonucleotide
ccgaauccgcgagaagcgc

SEQ ID NO: 34011 - RNA, 19 nt, Artificial Sequence
  Description of Artificial Sequence: Synthetic oligonucleotide
cgagauucgguacaacacu

SEQ ID NO: 34012 - RNA, 19 nt, Artificial Sequence
  Description of Artificial Sequence: Synthetic oligonucleotide
gggucggcguagcacacua

SEQ ID NO: 34013 - RNA, 19 nt, Artificial Sequence
  Description of Artificial Sequence: Synthetic oligonucleotide
gcggacgaaagcccagcaa

SEQ ID NO: 34014 - RNA, 19 nt, Artificial Sequence
  Description of Artificial Sequence: Synthetic oligonucleotide
ccuuaccagcccuaaggua

SEQ ID NO: 34015 - RNA, 19 nt, Artificial Sequence
  Description of Artificial Sequence: Synthetic oligonucleotide
ccgacaugagagccggaca

SEQ ID NO: 34016 - RNA, 19 nt, Artificial Sequence
  Description of Artificial Sequence: Synthetic oligonucleotide
cagugccgaagacuuuugu

SEQ ID NO: 34017 - RNA, 19 nt, Artificial Sequence
  Description of Artificial Sequence: Synthetic oligonucleotide
ucgccaucgccagcagguu

SEQ ID NO: 34018 - RNA, 19 nt, Artificial Sequence
  Description of Artificial Sequence: Synthetic oligonucleotide
cgacuggucaccaggcgga

SEQ ID NO: 34019 - RNA, 19 nt, Artificial Sequence
  Description of Artificial Sequence: Synthetic oligonucleotide
gggcgagcgcagcgcacag

SEQ ID NO: 34020 - RNA, 19 nt, Artificial Sequence
  Description of Artificial Sequence: Synthetic oligonucleotide
guaggccuuuucucuucau

SEQ ID NO: 34021 - RNA, 19 nt, Artificial Sequence
  Description of Artificial Sequence: Synthetic oligonucleotide
ggguuaagucuguugccuu

SEQ ID NO: 34022 - RNA, 19 nt, Artificial Sequence
  Description of Artificial Sequence: Synthetic oligonucleotide
guccuguccgggaguccac

SEQ ID NO: 34023 - RNA, 19 nt, Artificial Sequence
  Description of Artificial Sequence: Synthetic oligonucleotide
gccggacaugugauaccag

SEQ ID NO: 34024 - RNA, 19 nt, Artificial Sequence
  Description of Artificial Sequence: Synthetic oligonucleotide
cagcgaucccaccaagguu

SEQ ID NO: 34025 - RNA, 19 nt, Artificial Sequence
  Description of Artificial Sequence: Synthetic oligonucleotide
cugagaccuauagccacau

SEQ ID NO: 34026 - RNA, 19 nt, Artificial Sequence
  Description of Artificial Sequence: Synthetic oligonucleotide
gcgcggacgaaagcccagc

SEQ ID NO: 34027 - RNA, 19 nt, Artificial Sequence
  Description of Artificial Sequence: Synthetic oligonucleotide
gacacggguuaagucuguu

SEQ ID NO: 34028 - RNA, 19 nt, Artificial Sequence
  Description of Artificial Sequence: Synthetic oligonucleotide
guccagcgguaggugcuuc

SEQ ID NO: 34029 - RNA, 19 nt, Artificial Sequence
  Description of Artificial Sequence: Synthetic oligonucleotide
caguggcaaaugcuucgau

SEQ ID NO: 34030 - RNA, 19 nt, Artificial Sequence
  Description of Artificial Sequence: Synthetic oligonucleotide
cggcguagcacacuaaaau

SEQ ID NO: 34031 - RNA, 19 nt, Artificial Sequence
  Description of Artificial Sequence: Synthetic oligonucleotide
cgacaugagagccggacau

SEQ ID NO: 34032 - RNA, 19 nt, Artificial Sequence
  Description of Artificial Sequence: Synthetic oligonucleotide
gcgaucccaccaagguuuc

SEQ ID NO: 34033 - RNA, 19 nt, Artificial Sequence
  Description of Artificial Sequence: Synthetic oligonucleotide
cgcucuuaaguccgccuaa

SEQ ID NO: 34034 - RNA, 19 nt, Artificial Sequence
  Description of Artificial Sequence: Synthetic oligonucleotide
cacucccgauaggaguccu

SEQ ID NO: 34035 - RNA, 19 nt, Artificial Sequence
  Description of Artificial Sequence: Synthetic oligonucleotide
ccaaaucgaagugcggguu

SEQ ID NO: 34036 - RNA, 19 nt, Artificial Sequence
  Description of Artificial Sequence: Synthetic oligonucleotide
ccagagcgacuggucacca

SEQ ID NO: 34037 - RNA, 19 nt, Artificial Sequence
  Description of Artificial Sequence: Synthetic oligonucleotide
ggucggcguagcacacuaa

SEQ ID NO: 34038 - RNA, 19 nt, Artificial Sequence
  Description of Artificial Sequence: Synthetic oligonucleotide
cgcggacgaaagcccagca

SEQ ID NO: 34039 - RNA, 19 nt, Artificial Sequence
  Description of Artificial Sequence: Synthetic oligonucleotide
cggagccauuguuacuaua

SEQ ID NO: 34040 - RNA, 19 nt, Artificial Sequence
  Description of Artificial Sequence: Synthetic oligonucleotide
cgccaucgccagcagguua

SEQ ID NO: 34041 - RNA, 19 nt, Artificial Sequence
  Description of Artificial Sequence: Synthetic oligonucleotide
guccgggaguccacccauu

SEQ ID NO: 34042 - RNA, 19 nt, Artificial Sequence
  Description of Artificial Sequence: Synthetic oligonucleotide
ccgggaguccacccauuuu

SEQ ID NO: 34043 - RNA, 19 nt, Artificial Sequence
  Description of Artificial Sequence: Synthetic oligonucleotide
ccgcgagaagcgcgucucu

SEQ ID NO: 34044 - RNA, 19 nt, Artificial Sequence
  Description of Artificial Sequence: Synthetic oligonucleotide
ccacuauggguggcucuuu

SEQ ID NO: 34045 - RNA, 19 nt, Artificial Sequence
  Description of Artificial Sequence: Synthetic oligonucleotide
cgcgagaagcgcgucucuu

SEQ ID NO: 34046 - RNA, 19 nt, Artificial Sequence
  Description of Artificial Sequence: Synthetic oligonucleotide
uuagucucaaccaagaagc

SEQ ID NO: 34047 - RNA, 19 nt, Artificial Sequence
  Description of Artificial Sequence: Synthetic oligonucleotide
aaguuauaguaugagaggc

SEQ ID NO: 34048 - RNA, 19 nt, Artificial Sequence
  Description of Artificial Sequence: Synthetic oligonucleotide
aaauauaguccuugaacac

SEQ ID NO: 34049 - RNA, 19 nt, Artificial Sequence
  Description of Artificial Sequence: Synthetic oligonucleotide
aauaggaucaccaagggca

SEQ ID NO: 34050 - RNA, 19 nt, Artificial Sequence
  Description of Artificial Sequence: Synthetic oligonucleotide
aguggcauagcuuugauug

SEQ ID NO: 34051 - RNA, 19 nt, Artificial Sequence
  Description of Artificial Sequence: Synthetic oligonucleotide
uuuaugagaugguugaucc

SEQ ID NO: 34052 - RNA, 19 nt, Artificial Sequence
  Description of Artificial Sequence: Synthetic oligonucleotide
agaaguguuugugagaacc

SEQ ID NO: 34053 - RNA, 19 nt, Artificial Sequence
  Description of Artificial Sequence: Synthetic oligonucleotide
uuggcuaggguucagaaga

SEQ ID NO: 34054 - RNA, 19 nt, Artificial Sequence
  Description of Artificial Sequence: Synthetic oligonucleotide
gaaacgaaguuauaguaug

SEQ ID NO: 34055 - RNA, 19 nt, Artificial Sequence
  Description of Artificial Sequence: Synthetic oligonucleotide
uuuguuaaaccacauugcu

SEQ ID NO: 34056 - RNA, 19 nt, Artificial Sequence
  Description of Artificial Sequence: Synthetic oligonucleotide
uggacaaacagccucuucc

SEQ ID NO: 34057 - RNA, 19 nt, Artificial Sequence
  Description of Artificial Sequence: Synthetic oligonucleotide
uuuaaugcucuacacaaaa

SEQ ID NO: 34058 - RNA, 19 nt, Artificial Sequence
  Description of Artificial Sequence: Synthetic oligonucleotide
guuauugacgccucggcgg

SEQ ID NO: 34059 - RNA, 19 nt, Artificial Sequence
  Description of Artificial Sequence: Synthetic oligonucleotide
uguuauugacgccucggcg

SEQ ID NO: 34060 - RNA, 19 nt, Artificial Sequence
  Description of Artificial Sequence: Synthetic oligonucleotide
agaauuguuccacagguca

SEQ ID NO: 34061 - RNA, 19 nt, Artificial Sequence
  Description of Artificial Sequence: Synthetic oligonucleotide
gaagcaaguguguagguug

SEQ ID NO: 34062 - RNA, 19 nt, Artificial Sequence
  Description of Artificial Sequence: Synthetic oligonucleotide
acucaauauaguuggcagc

SEQ ID NO: 34063 - RNA, 19 nt, Artificial Sequence
  Description of Artificial Sequence: Synthetic oligonucleotide
auagaaacgaaguuauagu

SEQ ID NO: 34064 - RNA, 19 nt, Artificial Sequence
  Description of Artificial Sequence: Synthetic oligonucleotide
uguagggcgacuaucucag

SEQ ID NO: 34065 - RNA, 19 nt, Artificial Sequence
  Description of Artificial Sequence: Synthetic oligonucleotide
uucccgaucugucugauug

SEQ ID NO: 34066 - RNA, 19 nt, Artificial Sequence
  Description of Artificial Sequence: Synthetic oligonucleotide
cagguaacggaccagaaag

SEQ ID NO: 34067 - RNA, 19 nt, Artificial Sequence
  Description of Artificial Sequence: Synthetic oligonucleotide
uugucaauguccccuauug

SEQ ID NO: 34068 - RNA, 19 nt, Artificial Sequence
  Description of Artificial Sequence: Synthetic oligonucleotide
agcucacggaauuagcagc

SEQ ID NO: 34069 - RNA, 19 nt, Artificial Sequence
  Description of Artificial Sequence: Synthetic oligonucleotide
guugauccuacugugaggg

SEQ ID NO: 34070 - RNA, 19 nt, Artificial Sequence
  Description of Artificial Sequence: Synthetic oligonucleotide
ugacaaagcuuuuagcugu

SEQ ID NO: 34071 - RNA, 19 nt, Artificial Sequence
  Description of Artificial Sequence: Synthetic oligonucleotide
ugcucuacacaaaagggcu

SEQ ID NO: 34072 - RNA, 19 nt, Artificial Sequence
  Description of Artificial Sequence: Synthetic oligonucleotide
auauccguaagcuucauuu

SEQ ID NO: 34073 - RNA, 19 nt, Artificial Sequence
  Description of Artificial Sequence: Synthetic oligonucleotide
gaugggaacauacuuccug

SEQ ID NO: 34074 - RNA, 19 nt, Artificial Sequence
  Description of Artificial Sequence: Synthetic oligonucleotide
ugauagaauuguuccacag

SEQ ID NO: 34075 - RNA, 19 nt, Artificial Sequence
  Description of Artificial Sequence: Synthetic oligonucleotide
ucccauaaggggaaaacug

SEQ ID NO: 34076 - RNA, 19 nt, Artificial Sequence
  Description of Artificial Sequence: Synthetic oligonucleotide
auguuauugacgccucggc

SEQ ID NO: 34077 - RNA, 19 nt, Artificial Sequence
  Description of Artificial Sequence: Synthetic oligonucleotide
cuaaugaagcugaagccag

SEQ ID NO: 34078 - RNA, 19 nt, Artificial Sequence
  Description of Artificial Sequence: Synthetic oligonucleotide
ugagccagagcuccaaaag

SEQ ID NO: 34079 - RNA, 19 nt, Artificial Sequence
  Description of Artificial Sequence: Synthetic oligonucleotide
uuuuguuuguuuuguuuug

SEQ ID NO: 34080 - RNA, 19 nt, Artificial Sequence
  Description of Artificial Sequence: Synthetic oligonucleotide
gaggcuauagccauguaug

SEQ ID NO: 34081 - RNA, 19 nt, Artificial Sequence
  Description of Artificial Sequence: Synthetic oligonucleotide
ucuaccaacuuccuccgca

SEQ ID NO: 34082 - RNA, 19 nt, Artificial Sequence
  Description of Artificial Sequence: Synthetic oligonucleotide
uagaaacgaaguuauagua

SEQ ID NO: 34083 - RNA, 19 nt, Artificial Sequence
  Description of Artificial Sequence: Synthetic oligonucleotide
cuuccuucuaaguuggaac

SEQ ID NO: 34084 - RNA, 19 nt, Artificial Sequence
  Description of Artificial Sequence: Synthetic oligonucleotide
guaucugcaagacugggac

SEQ ID NO: 34085 - RNA, 19 nt, Artificial Sequence
  Description of Artificial Sequence: Synthetic oligonucleotide
aauagaggacccugccauc

SEQ ID NO: 34086 - RNA, 19 nt, Artificial Sequence
  Description of Artificial Sequence: Synthetic oligonucleotide
gucaaguaggucuugccag

SEQ ID NO: 34087 - RNA, 19 nt, Artificial Sequence
  Description of Artificial Sequence: Synthetic oligonucleotide
aagguguggaggugauacc

SEQ ID NO: 34088 - RNA, 19 nt, Artificial Sequence
  Description of Artificial Sequence: Synthetic oligonucleotide
ucuuauagguugauuuacu

SEQ ID NO: 34089 - RNA, 19 nt, Artificial Sequence
  Description of Artificial Sequence: Synthetic oligonucleotide
augcucuacacaaaagggc

SEQ ID NO: 34090 - RNA, 19 nt, Artificial Sequence
  Description of Artificial Sequence: Synthetic oligonucleotide
uagauagggaaugauagaa

SEQ ID NO: 34091 - RNA, 19 nt, Artificial Sequence
  Description of Artificial Sequence: Synthetic oligonucleotide
aguaggccuauccagucuc

SEQ ID NO: 34092 - RNA, 19 nt, Artificial Sequence
  Description of Artificial Sequence: Synthetic oligonucleotide
uaaaauucacgaugguuuc

SEQ ID NO: 34093 - RNA, 19 nt, Artificial Sequence
  Description of Artificial Sequence: Synthetic oligonucleotide
ucacuagaugggaacauac

SEQ ID NO: 34094 - RNA, 19 nt, Artificial Sequence
  Description of Artificial Sequence: Synthetic oligonucleotide
aaguuagucccugagcuca

SEQ ID NO: 34095 - RNA, 19 nt, Artificial Sequence
  Description of Artificial Sequence: Synthetic oligonucleotide
gucucaaccaagaagcaag

SEQ ID NO: 34096 - RNA, 19 nt, Artificial Sequence
  Description of Artificial Sequence: Synthetic oligonucleotide
uccaaguuagucccugagc

SEQ ID NO: 34097 - RNA, 19 nt, Artificial Sequence
  Description of Artificial Sequence: Synthetic oligonucleotide
uagucucucggucugguga

SEQ ID NO: 34098 - RNA, 19 nt, Artificial Sequence
  Description of Artificial Sequence: Synthetic oligonucleotide
uuuggcuaggguucagaag

SEQ ID NO: 34099 - RNA, 19 nt, Artificial Sequence
  Description of Artificial Sequence: Synthetic oligonucleotide
acucguuucacauggcuga

SEQ ID NO: 34100 - RNA, 19 nt, Artificial Sequence
  Description of Artificial Sequence: Synthetic oligonucleotide
auggacucggugcuuaguc

SEQ ID NO: 34101 - RNA, 19 nt, Artificial Sequence
  Description of Artificial Sequence: Synthetic oligonucleotide
uuauugacgccucggcggc

SEQ ID NO: 34102 - RNA, 19 nt, Artificial Sequence
  Description of Artificial Sequence: Synthetic oligonucleotide
uucuuauagguugauuuac

SEQ ID NO: 34103 - RNA, 19 nt, Artificial Sequence
  Description of Artificial Sequence: Synthetic oligonucleotide
ugauccuacugugaggggc

SEQ ID NO: 34104 - RNA, 19 nt, Artificial Sequence
  Description of Artificial Sequence: Synthetic oligonucleotide
uccuucggaccacaggugc

SEQ ID NO: 34105 - RNA, 19 nt, Artificial Sequence
  Description of Artificial Sequence: Synthetic oligonucleotide
accaaauacucggccagcc

SEQ ID NO: 34106 - RNA, 19 nt, Artificial Sequence
  Description of Artificial Sequence: Synthetic oligonucleotide
ccgaggugaauauagaagc

SEQ ID NO: 34107 - RNA, 19 nt, Artificial Sequence
  Description of Artificial Sequence: Synthetic oligonucleotide
ucuuagauugcaagucauc

SEQ ID NO: 34108 - RNA, 19 nt, Artificial Sequence
  Description of Artificial Sequence: Synthetic oligonucleotide
agucucucggucuggugac

SEQ ID NO: 34109 - RNA, 19 nt, Artificial Sequence
  Description of Artificial Sequence: Synthetic oligonucleotide
aaccggauauccguaagcu

SEQ ID NO: 34110 - RNA, 19 nt, Artificial Sequence
  Description of Artificial Sequence: Synthetic oligonucleotide
ggcuauaacagcuaguuua

SEQ ID NO: 34111 - RNA, 19 nt, Artificial Sequence
  Description of Artificial Sequence: Synthetic oligonucleotide
ugcagauccuugcaagacu

SEQ ID NO: 34112 - RNA, 19 nt, Artificial Sequence
  Description of Artificial Sequence: Synthetic oligonucleotide
acaggagccggagugguac

SEQ ID NO: 34113 - RNA, 19 nt, Artificial Sequence
  Description of Artificial Sequence: Synthetic oligonucleotide
uggaacagucuaguguggg

SEQ ID NO: 34114 - RNA, 19 nt, Artificial Sequence
  Description of Artificial Sequence: Synthetic oligonucleotide
ucccgugggaccuaccgag

SEQ ID NO: 34115 - RNA, 19 nt, Artificial Sequence
  Description of Artificial Sequence: Synthetic oligonucleotide
agccgauuggucaaguagg

SEQ ID NO: 34116 - RNA, 19 nt, Artificial Sequence
  Description of Artificial Sequence: Synthetic oligonucleotide
aagcaaguguguagguugg

SEQ ID NO: 34117 - RNA, 19 nt, Artificial Sequence
  Description of Artificial Sequence: Synthetic oligonucleotide
gagcacuucacuagauggg

SEQ ID NO: 34118 - RNA, 19 nt, Artificial Sequence
  Description of Artificial Sequence: Synthetic oligonucleotide
ugcaagacugggacugaag

SEQ ID NO: 34119 - RNA, 19 nt, Artificial Sequence
  Description of Artificial Sequence: Synthetic oligonucleotide
cuuauguagugcugcauca

SEQ ID NO: 34120 - RNA, 19 nt, Artificial Sequence
  Description of Artificial Sequence: Synthetic oligonucleotide
agggcgacuaucucagaag

SEQ ID NO: 34121 - RNA, 19 nt, Artificial Sequence
  Description of Artificial Sequence: Synthetic oligonucleotide
gauagggaaugauagaauu

SEQ ID NO: 34122 - RNA, 19 nt, Artificial Sequence
  Description of Artificial Sequence: Synthetic oligonucleotide
caucagagggucugagucc

SEQ ID NO: 34123 - RNA, 19 nt, Artificial Sequence
  Description of Artificial Sequence: Synthetic oligonucleotide
ugauacgacaggagcuggc

SEQ ID NO: 34124 - RNA, 19 nt, Artificial Sequence
  Description of Artificial Sequence: Synthetic oligonucleotide
uuagauugcaagucaucuu

SEQ ID NO: 34125 - RNA, 19 nt, Artificial Sequence
  Description of Artificial Sequence: Synthetic oligonucleotide
cagaauagaggacccugcc

SEQ ID NO: 34126 - RNA, 19 nt, Artificial Sequence
  Description of Artificial Sequence: Synthetic oligonucleotide
ccuaccgaggugaauauag

SEQ ID NO: 34127 - RNA, 19 nt, Artificial Sequence
  Description of Artificial Sequence: Synthetic oligonucleotide
ucccggucuaucugguugg

SEQ ID NO: 34128 - RNA, 19 nt, Artificial Sequence
  Description of Artificial Sequence: Synthetic oligonucleotide
ggaauguagaggcuucaag

SEQ ID NO: 34129 - RNA, 19 nt, Artificial Sequence
  Description of Artificial Sequence: Synthetic oligonucleotide
gaauagaggacccugccau

SEQ ID NO: 34130 - RNA, 19 nt, Artificial Sequence
  Description of Artificial Sequence: Synthetic oligonucleotide
agaaacgaaguuauaguau

SEQ ID NO: 34131 - RNA, 19 nt, Artificial Sequence
  Description of Artificial Sequence: Synthetic oligonucleotide
uagaauuguuccacagguc

SEQ ID NO: 34132 - RNA, 19 nt, Artificial Sequence
  Description of Artificial Sequence: Synthetic oligonucleotide
uaccgaggugaauauagaa

SEQ ID NO: 34133 - RNA, 19 nt, Artificial Sequence
  Description of Artificial Sequence: Synthetic oligonucleotide
uuuccugccuccccuagau

SEQ ID NO: 34134 - RNA, 19 nt, Artificial Sequence
  Description of Artificial Sequence: Synthetic oligonucleotide
ucggccagccgauugguca

SEQ ID NO: 34135 - RNA, 19 nt, Artificial Sequence
  Description of Artificial Sequence: Synthetic oligonucleotide
cuuagucccaggguggaag

SEQ ID NO: 34136 - RNA, 19 nt, Artificial Sequence
  Description of Artificial Sequence: Synthetic oligonucleotide
ggaagagugucccggaccc

SEQ ID NO: 34137 - RNA, 19 nt, Artificial Sequence
  Description of Artificial Sequence: Synthetic oligonucleotide
ucacggaauuagcagcaac

SEQ ID NO: 34138 - RNA, 19 nt, Artificial Sequence
  Description of Artificial Sequence: Synthetic oligonucleotide
ugauagaauuaggaagggu

SEQ ID NO: 34139 - RNA, 19 nt, Artificial Sequence
  Description of Artificial Sequence: Synthetic oligonucleotide
uagggcgacuaucucagaa

SEQ ID NO: 34140 - RNA, 19 nt, Artificial Sequence
  Description of Artificial Sequence: Synthetic oligonucleotide
cacggaauuagcagcaaca

SEQ ID NO: 34141 - RNA, 19 nt, Artificial Sequence
  Description of Artificial Sequence: Synthetic oligonucleotide
cacucguuucacauggcug

SEQ ID NO: 34142 - RNA, 19 nt, Artificial Sequence
  Description of Artificial Sequence: Synthetic oligonucleotide
agguaacggaccagaaagc

SEQ ID NO: 34143 - RNA, 19 nt, Artificial Sequence
  Description of Artificial Sequence: Synthetic oligonucleotide
uuaugagaugguugauccu

SEQ ID NO: 34144 - RNA, 19 nt, Artificial Sequence
  Description of Artificial Sequence: Synthetic oligonucleotide
guuuguuuuguuuuguuuu

SEQ ID NO: 34145 - RNA, 19 nt, Artificial Sequence
  Description of Artificial Sequence: Synthetic oligonucleotide
guggugauagaauuaggaa

SEQ ID NO: 34146 - RNA, 19 nt, Artificial Sequence
  Description of Artificial Sequence: Synthetic oligonucleotide
gguacgaccacuggcaacc

SEQ ID NO: 34147 - RNA, 19 nt, Artificial Sequence
  Description of Artificial Sequence: Synthetic oligonucleotide
gucugauugacaggagccg

SEQ ID NO: 34148 - RNA, 19 nt, Artificial Sequence
  Description of Artificial Sequence: Synthetic oligonucleotide
gauccuacugugaggggcc

SEQ ID NO: 34149 - RNA, 19 nt, Artificial Sequence
  Description of Artificial Sequence: Synthetic oligonucleotide
cuaccaacuuccuccgcag

SEQ ID NO: 34150 - RNA, 19 nt, Artificial Sequence
  Description of Artificial Sequence: Synthetic oligonucleotide
ucgccuuuugacuucuuau

SEQ ID NO: 34151 - RNA, 19 nt, Artificial Sequence
  Description of Artificial Sequence: Synthetic oligonucleotide
acguuguuagagaagguca

SEQ ID NO: 34152 - RNA, 19 nt, Artificial Sequence
  Description of Artificial Sequence: Synthetic oligonucleotide
caaccggauauccguaagc

SEQ ID NO: 34153 - RNA, 19 nt, Artificial Sequence
  Description of Artificial Sequence: Synthetic oligonucleotide
agggccuccaaccggauau

SEQ ID NO: 34154 - RNA, 19 nt, Artificial Sequence
  Description of Artificial Sequence: Synthetic oligonucleotide
caaggcggcaucucuggag

SEQ ID NO: 34155 - RNA, 19 nt, Artificial Sequence
  Description of Artificial Sequence: Synthetic oligonucleotide
cuuauagguugauuuacua

SEQ ID NO: 34156 - RNA, 19 nt, Artificial Sequence
  Description of Artificial Sequence: Synthetic oligonucleotide
agggcuauaacagcuaguu

SEQ ID NO: 34157 - RNA, 19 nt, Artificial Sequence
  Description of Artificial Sequence: Synthetic oligonucleotide
uguguagguuggaaagaau

SEQ ID NO: 34158 - RNA, 19 nt, Artificial Sequence
  Description of Artificial Sequence: Synthetic oligonucleotide
aggagacuaaugaagcuga

SEQ ID NO: 34159 - RNA, 19 nt, Artificial Sequence
  Description of Artificial Sequence: Synthetic oligonucleotide
uccauguaccuugauccca

SEQ ID NO: 34160 - RNA, 19 nt, Artificial Sequence
  Description of Artificial Sequence: Synthetic oligonucleotide
gguaacggaccagaaagcc

SEQ ID NO: 34161 - RNA, 19 nt, Artificial Sequence
  Description of Artificial Sequence: Synthetic oligonucleotide
ggucaaugaaccagguccg

SEQ ID NO: 34162 - RNA, 19 nt, Artificial Sequence
  Description of Artificial Sequence: Synthetic oligonucleotide
uuauggguuuggaaauaua

SEQ ID NO: 34163 - RNA, 19 nt, Artificial Sequence
  Description of Artificial Sequence: Synthetic oligonucleotide
acuucacuagaugggaaca

SEQ ID NO: 34164 - RNA, 19 nt, Artificial Sequence
  Description of Artificial Sequence: Synthetic oligonucleotide
uugauccuacugugagggg

SEQ ID NO: 34165 - RNA, 19 nt, Artificial Sequence
  Description of Artificial Sequence: Synthetic oligonucleotide
uguugaaagugcugacgau

SEQ ID NO: 34166 - RNA, 19 nt, Artificial Sequence
  Description of Artificial Sequence: Synthetic oligonucleotide
cuaguuuauggguuuggaa

SEQ ID NO: 34167 - RNA, 19 nt, Artificial Sequence
  Description of Artificial Sequence: Synthetic oligonucleotide
ugguggauuccaggaauag

SEQ ID NO: 34168 - RNA, 19 nt, Artificial Sequence
  Description of Artificial Sequence: Synthetic oligonucleotide
cuuagauugcaagucaucu

SEQ ID NO: 34169 - RNA, 19 nt, Artificial Sequence
  Description of Artificial Sequence: Synthetic oligonucleotide
ggauccagggaccugcccc

SEQ ID NO: 34170 - RNA, 19 nt, Artificial Sequence
  Description of Artificial Sequence: Synthetic oligonucleotide
ccggauauccguaagcuuc

SEQ ID NO: 34171 - RNA, 19 nt, Artificial Sequence
  Description of Artificial Sequence: Synthetic oligonucleotide
gaacuaaaugcagcaguca

SEQ ID NO: 34172 - RNA, 19 nt, Artificial Sequence
  Description of Artificial Sequence: Synthetic oligonucleotide
gcaguggugauagaauuag

SEQ ID NO: 34173 - RNA, 19 nt, Artificial Sequence
  Description of Artificial Sequence: Synthetic oligonucleotide
cugagauguuauugacgcc

SEQ ID NO: 34174 - RNA, 19 nt, Artificial Sequence
  Description of Artificial Sequence: Synthetic oligonucleotide
ugaccuugcugcaucccaa

SEQ ID NO: 34175 - RNA, 19 nt, Artificial Sequence
  Description of Artificial Sequence: Synthetic oligonucleotide
augauacgacaggagcugg

SEQ ID NO: 34176 - RNA, 19 nt, Artificial Sequence
  Description of Artificial Sequence: Synthetic oligonucleotide
ggaccgaaugagcagggcc

SEQ ID NO: 34177 - RNA, 19 nt, Artificial Sequence
  Description of Artificial Sequence: Synthetic oligonucleotide
gaaugcuguggguuugcuc

SEQ ID NO: 34178 - RNA, 19 nt, Artificial Sequence
  Description of Artificial Sequence: Synthetic oligonucleotide
agguguggaggugauacca

SEQ ID NO: 34179 - RNA, 19 nt, Artificial Sequence
  Description of Artificial Sequence: Synthetic oligonucleotide
gaaagaaugcuguggguuu

SEQ ID NO: 34180 - RNA, 19 nt, Artificial Sequence
  Description of Artificial Sequence: Synthetic oligonucleotide
aguugguuagggaucuuca

SEQ ID NO: 34181 - RNA, 19 nt, Artificial Sequence
  Description of Artificial Sequence: Synthetic oligonucleotide
uucccacgcagcuuucugu

SEQ ID NO: 34182 - RNA, 19 nt, Artificial Sequence
  Description of Artificial Sequence: Synthetic oligonucleotide
cuguagggcgacuaucuca

SEQ ID NO: 34183 - RNA, 19 nt, Artificial Sequence
  Description of Artificial Sequence: Synthetic oligonucleotide
acuucuaaacagccucaau

SEQ ID NO: 34184 - RNA, 19 nt, Artificial Sequence
  Description of Artificial Sequence: Synthetic oligonucleotide
ucguuucacauggcugagg

SEQ ID NO: 34185 - RNA, 19 nt, Artificial Sequence
  Description of Artificial Sequence: Synthetic oligonucleotide
ucuacacaaaagggcuccc

SEQ ID NO: 34186 - RNA, 19 nt, Artificial Sequence
  Description of Artificial Sequence: Synthetic oligonucleotide
ggacucggugcuuaguccc

SEQ ID NO: 34187 - RNA, 19 nt, Artificial Sequence
  Description of Artificial Sequence: Synthetic oligonucleotide
ccaucagagggucugaguc

SEQ ID NO: 34188 - RNA, 19 nt, Artificial Sequence
  Description of Artificial Sequence: Synthetic oligonucleotide
gggaaugauagaauuguuc

SEQ ID NO: 34189 - RNA, 19 nt, Artificial Sequence
  Description of Artificial Sequence: Synthetic oligonucleotide
aaauacucggccagccgau

SEQ ID NO: 34190 - RNA, 19 nt, Artificial Sequence
  Description of Artificial Sequence: Synthetic oligonucleotide
ugucugacucuaccaacuu

SEQ ID NO: 34191 - RNA, 19 nt, Artificial Sequence
  Description of Artificial Sequence: Synthetic oligonucleotide
uccaaccggauauccguaa

SEQ ID NO: 34192 - RNA, 19 nt, Artificial Sequence
  Description of Artificial Sequence: Synthetic oligonucleotide
gaggugauaccacagcuuu

SEQ ID NO: 34193 - RNA, 19 nt, Artificial Sequence
  Description of Artificial Sequence: Synthetic oligonucleotide
gugcugacgaugccaucgg

SEQ ID NO: 34194 - RNA, 19 nt, Artificial Sequence
  Description of Artificial Sequence: Synthetic oligonucleotide
guugggcugacggccaggg

SEQ ID NO: 34195 - RNA, 19 nt, Artificial Sequence
  Description of Artificial Sequence: Synthetic oligonucleotide
auagucucucggucuggug

SEQ ID NO: 34196 - RNA, 19 nt, Artificial Sequence
  Description of Artificial Sequence: Synthetic oligonucleotide
gaauuagcagcaacagcaa

SEQ ID NO: 34197 - RNA, 19 nt, Artificial Sequence
  Description of Artificial Sequence: Synthetic oligonucleotide
gugcuuagucccagggugg

SEQ ID NO: 34198 - RNA, 19 nt, Artificial Sequence
  Description of Artificial Sequence: Synthetic oligonucleotide
ggguguaaggccucccugc

SEQ ID NO: 34199 - RNA, 19 nt, Artificial Sequence
  Description of Artificial Sequence: Synthetic oligonucleotide
cagggaacgucgaggggag

SEQ ID NO: 34200 - RNA, 19 nt, Artificial Sequence
  Description of Artificial Sequence: Synthetic oligonucleotide
agauagggaaugauagaau

SEQ ID NO: 34201 - RNA, 19 nt, Artificial Sequence
  Description of Artificial Sequence: Synthetic oligonucleotide
auggcagucgucagacuag

SEQ ID NO: 34202 - RNA, 19 nt, Artificial Sequence
  Description of Artificial Sequence: Synthetic oligonucleotide
guaacggaccagaaagcca

SEQ ID NO: 34203 - RNA, 19 nt, Artificial Sequence
  Description of Artificial Sequence: Synthetic oligonucleotide
gggaagagugucccggacc

SEQ ID NO: 34204 - RNA, 19 nt, Artificial Sequence
  Description of Artificial Sequence: Synthetic oligonucleotide
cuuuggcuaggguucagaa

SEQ ID NO: 34205 - RNA, 19 nt, Artificial Sequence
  Description of Artificial Sequence: Synthetic oligonucleotide
guaaggccucccugcuugg

SEQ ID NO: 34206 - RNA, 19 nt, Artificial Sequence
  Description of Artificial Sequence: Synthetic oligonucleotide
cuuccuccgcagguaacgg

SEQ ID NO: 34207 - RNA, 19 nt, Artificial Sequence
  Description of Artificial Sequence: Synthetic oligonucleotide
cacugaccuugcugcaucc

SEQ ID NO: 34208 - RNA, 19 nt, Artificial Sequence
  Description of Artificial Sequence: Synthetic oligonucleotide
gaaccagcuagcaacugcu

SEQ ID NO: 34209 - RNA, 19 nt, Artificial Sequence
  Description of Artificial Sequence: Synthetic oligonucleotide
agauugcaagucaucuugu

SEQ ID NO: 34210 - RNA, 19 nt, Artificial Sequence
  Description of Artificial Sequence: Synthetic oligonucleotide
aucgccuuuugacuucuua

SEQ ID NO: 34211 - RNA, 19 nt, Artificial Sequence
  Description of Artificial Sequence: Synthetic oligonucleotide
ucccgaucugucugauuga

SEQ ID NO: 34212 - RNA, 19 nt, Artificial Sequence
  Description of Artificial Sequence: Synthetic oligonucleotide
accgaaugagcagggccuc

SEQ ID NO: 34213 - RNA, 19 nt, Artificial Sequence
  Description of Artificial Sequence: Synthetic oligonucleotide
gaugagcgucucgaacacc

SEQ ID NO: 34214 - RNA, 19 nt, Artificial Sequence
  Description of Artificial Sequence: Synthetic oligonucleotide
ugcuuagucccagggugga

SEQ ID NO: 34215 - RNA, 19 nt, Artificial Sequence
  Description of Artificial Sequence: Synthetic oligonucleotide
cuccgauaccuccuucuuc

SEQ ID NO: 34216 - RNA, 19 nt, Artificial Sequence
  Description of Artificial Sequence: Synthetic oligonucleotide
uauggacucggugcuuagu

SEQ ID NO: 34217 - RNA, 19 nt, Artificial Sequence
  Description of Artificial Sequence: Synthetic oligonucleotide
ccaaauacucggccagccg

SEQ ID NO: 34218 - RNA, 19 nt, Artificial Sequence
  Description of Artificial Sequence: Synthetic oligonucleotide
cuaccgaggugaauauaga

SEQ ID NO: 34219 - RNA, 19 nt, Artificial Sequence
  Description of Artificial Sequence: Synthetic oligonucleotide
gaucuguaucugcaagacu

SEQ ID NO: 34220 - RNA, 19 nt, Artificial Sequence
  Description of Artificial Sequence: Synthetic oligonucleotide
gauacgacaggagcuggcu

SEQ ID NO: 34221 - RNA, 19 nt, Artificial Sequence
  Description of Artificial Sequence: Synthetic oligonucleotide
uuucccuguagggcgacua

SEQ ID NO: 34222 - RNA, 19 nt, Artificial Sequence
  Description of Artificial Sequence: Synthetic oligonucleotide
accggauauccguaagcuu

SEQ ID NO: 34223 - RNA, 19 nt, Artificial Sequence
  Description of Artificial Sequence: Synthetic oligonucleotide
auauaguuggcagccucuu

SEQ ID NO: 34224 - RNA, 19 nt, Artificial Sequence
  Description of Artificial Sequence: Synthetic oligonucleotide
uccuuccaaguuagucccu

SEQ ID NO: 34225 - RNA, 19 nt, Artificial Sequence
  Description of Artificial Sequence: Synthetic oligonucleotide
uucccuguagggcgacuau

SEQ ID NO: 34226 - RNA, 19 nt, Artificial Sequence
  Description of Artificial Sequence: Synthetic oligonucleotide
aucccgugggaccuaccga

SEQ ID NO: 34227 - RNA, 19 nt, Artificial Sequence
  Description of Artificial Sequence: Synthetic oligonucleotide
gaccgaaugagcagggccu

SEQ ID NO: 34228 - RNA, 19 nt, Artificial Sequence
  Description of Artificial Sequence: Synthetic oligonucleotide
caucggugaccucccggcc

SEQ ID NO: 34229 - RNA, 19 nt, Artificial Sequence
  Description of Artificial Sequence: Synthetic oligonucleotide
ccagggaagagugucccgg

SEQ ID NO: 34230 - RNA, 19 nt, Artificial Sequence
  Description of Artificial Sequence: Synthetic oligonucleotide
cugucugacucuaccaacu

SEQ ID NO: 34231 - RNA, 19 nt, Artificial Sequence
  Description of Artificial Sequence: Synthetic oligonucleotide
cucguuucacauggcugag

SEQ ID NO: 34232 - RNA, 19 nt, Artificial Sequence
  Description of Artificial Sequence: Synthetic oligonucleotide
gaggcgccggugcuugagc

SEQ ID NO: 34233 - RNA, 19 nt, Artificial Sequence
  Description of Artificial Sequence: Synthetic oligonucleotide
caggagccggagugguacg

SEQ ID NO: 34234 - RNA, 19 nt, Artificial Sequence
  Description of Artificial Sequence: Synthetic oligonucleotide
uggcuugacaaagcuuuua

SEQ ID NO: 34235 - RNA, 19 nt, Artificial Sequence
  Description of Artificial Sequence: Synthetic oligonucleotide
gaggugaauauagaagcuu

SEQ ID NO: 34236 - RNA, 19 nt, Artificial Sequence
  Description of Artificial Sequence: Synthetic oligonucleotide
aauacucggccagccgauu

SEQ ID NO: 34237 - RNA, 19 nt, Artificial Sequence
  Description of Artificial Sequence: Synthetic oligonucleotide
ccagggcuauaacagcuag

SEQ ID NO: 34238 - RNA, 19 nt, Artificial Sequence
  Description of Artificial Sequence: Synthetic oligonucleotide
aguuagucccugagcucag

SEQ ID NO: 34239 - RNA, 19 nt, Artificial Sequence
  Description of Artificial Sequence: Synthetic oligonucleotide
acgaugccaucggugaccu

SEQ ID NO: 34240 - RNA, 19 nt, Artificial Sequence
  Description of Artificial Sequence: Synthetic oligonucleotide
cauuggaggccugaacuaa

SEQ ID NO: 34241 - RNA, 19 nt, Artificial Sequence
  Description of Artificial Sequence: Synthetic oligonucleotide
gcugaguugguuagggauc

SEQ ID NO: 34242 - RNA, 19 nt, Artificial Sequence
  Description of Artificial Sequence: Synthetic oligonucleotide
gaacgucgaggggaggaca

SEQ ID NO: 34243 - RNA, 19 nt, Artificial Sequence
  Description of Artificial Sequence: Synthetic oligonucleotide
cucuaccaacuuccuccgc

SEQ ID NO: 34244 - RNA, 19 nt, Artificial Sequence
  Description of Artificial Sequence: Synthetic oligonucleotide
cacuagaugggaacauacu

SEQ ID NO: 34245 - RNA, 19 nt, Artificial Sequence
  Description of Artificial Sequence: Synthetic oligonucleotide
uguccaaaguaggccuauc

SEQ ID NO: 34246 - RNA, 19 nt, Artificial Sequence
  Description of Artificial Sequence: Synthetic oligonucleotide
ucccuguagggcgacuauc

SEQ ID NO: 34247 - RNA, 19 nt, Artificial Sequence
  Description of Artificial Sequence: Synthetic oligonucleotide
gugucccggacccacucca

SEQ ID NO: 34248 - RNA, 19 nt, Artificial Sequence
  Description of Artificial Sequence: Synthetic oligonucleotide
ggaccuaccgaggugaaua

SEQ ID NO: 34249 - RNA, 19 nt, Artificial Sequence
  Description of Artificial Sequence: Synthetic oligonucleotide
guaggccuauccagucucc

SEQ ID NO: 34250 - RNA, 19 nt, Artificial Sequence
  Description of Artificial Sequence: Synthetic oligonucleotide
agaugggaacauacuuccu

SEQ ID NO: 34251 - RNA, 19 nt, Artificial Sequence
  Description of Artificial Sequence: Synthetic oligonucleotide
gauuucccuguagggcgac

SEQ ID NO: 34252 - RNA, 19 nt, Artificial Sequence
  Description of Artificial Sequence: Synthetic oligonucleotide
gaggcucaaccuuccgcaa

SEQ ID NO: 34253 - RNA, 19 nt, Artificial Sequence
  Description of Artificial Sequence: Synthetic oligonucleotide
agucggucauucuccgcuu

SEQ ID NO: 34254 - RNA, 19 nt, Artificial Sequence
  Description of Artificial Sequence: Synthetic oligonucleotide
gauagucucucggucuggu

SEQ ID NO: 34255 - RNA, 19 nt, Artificial Sequence
  Description of Artificial Sequence: Synthetic oligonucleotide
agccggagugguacgacca

SEQ ID NO: 34256 - RNA, 19 nt, Artificial Sequence
  Description of Artificial Sequence: Synthetic oligonucleotide
gcgacuaucucagaagugu

SEQ ID NO: 34257 - RNA, 19 nt, Artificial Sequence
  Description of Artificial Sequence: Synthetic oligonucleotide
ggcuccacguuguuagaga

SEQ ID NO: 34258 - RNA, 19 nt, Artificial Sequence
  Description of Artificial Sequence: Synthetic oligonucleotide
gcuaguuuauggguuugga

SEQ ID NO: 34259 - RNA, 19 nt, Artificial Sequence
  Description of Artificial Sequence: Synthetic oligonucleotide
ggauagucucucggucugg

SEQ ID NO: 34260 - RNA, 19 nt, Artificial Sequence
  Description of Artificial Sequence: Synthetic oligonucleotide
gcucccauaaggggaaaac

SEQ ID NO: 34261 - RNA, 19 nt, Artificial Sequence
  Description of Artificial Sequence: Synthetic oligonucleotide
ccaaccggauauccguaag

SEQ ID NO: 34262 - RNA, 19 nt, Artificial Sequence
  Description of Artificial Sequence: Synthetic oligonucleotide
gauauccguaagcuucauu

SEQ ID NO: 34263 - RNA, 19 nt, Artificial Sequence
  Description of Artificial Sequence: Synthetic oligonucleotide
cgagcgcuccaccaaauac

SEQ ID NO: 34264 - RNA, 19 nt, Artificial Sequence
  Description of Artificial Sequence: Synthetic oligonucleotide
auugacgccucggcggcaa

SEQ ID NO: 34265 - RNA, 19 nt, Artificial Sequence
  Description of Artificial Sequence: Synthetic oligonucleotide
gcuccacguuguuagagaa

SEQ ID NO: 34266 - RNA, 19 nt, Artificial Sequence
  Description of Artificial Sequence: Synthetic oligonucleotide
cuggggcggcauucgcacc

SEQ ID NO: 34267 - RNA, 19 nt, Artificial Sequence
  Description of Artificial Sequence: Synthetic oligonucleotide
gguguggaggugauaccac

SEQ ID NO: 34268 - RNA, 19 nt, Artificial Sequence
  Description of Artificial Sequence: Synthetic oligonucleotide
ggcgacuaucucagaagug

SEQ ID NO: 34269 - RNA, 19 nt, Artificial Sequence
  Description of Artificial Sequence: Synthetic oligonucleotide
cugaguugguuagggaucu

SEQ ID NO: 34270 - RNA, 19 nt, Artificial Sequence
  Description of Artificial Sequence: Synthetic oligonucleotide
cucccauaaggggaaaacu

SEQ ID NO: 34271 - RNA, 19 nt, Artificial Sequence
  Description of Artificial Sequence: Synthetic oligonucleotide
gggcgacuaucucagaagu

SEQ ID NO: 34272 - RNA, 19 nt, Artificial Sequence
  Description of Artificial Sequence: Synthetic oligonucleotide
gcggcauucgcaccaccac

SEQ ID NO: 34273 - RNA, 19 nt, Artificial Sequence
  Description of Artificial Sequence: Synthetic oligonucleotide
ggggaccgaaugagcaggg

SEQ ID NO: 34274 - RNA, 19 nt, Artificial Sequence
  Description of Artificial Sequence: Synthetic oligonucleotide
aggagccggagugguacga

SEQ ID NO: 34275 - RNA, 19 nt, Artificial Sequence
  Description of Artificial Sequence: Synthetic oligonucleotide
ggguccauuuuagaaauau

SEQ ID NO: 34276 - RNA, 19 nt, Artificial Sequence
  Description of Artificial Sequence: Synthetic oligonucleotide
ggcaaguggcauagcuuug

SEQ ID NO: 34277 - RNA, 19 nt, Artificial Sequence
  Description of Artificial Sequence: Synthetic oligonucleotide
cuccaaccggauauccgua

SEQ ID NO: 34278 - RNA, 19 nt, Artificial Sequence
  Description of Artificial Sequence: Synthetic oligonucleotide
gguguaaggccucccugcu

SEQ ID NO: 34279 - RNA, 19 nt, Artificial Sequence
  Description of Artificial Sequence: Synthetic oligonucleotide
aacggaccagaaagccauu

SEQ ID NO: 34280 - RNA, 19 nt, Artificial Sequence
  Description of Artificial Sequence: Synthetic oligonucleotide
gcucuacacaaaagggcuc

SEQ ID NO: 34281 - RNA, 19 nt, Artificial Sequence
  Description of Artificial Sequence: Synthetic oligonucleotide
cggcauucgcaccaccacc

SEQ ID NO: 34282 - RNA, 19 nt, Artificial Sequence
  Description of Artificial Sequence: Synthetic oligonucleotide
gcauauuuugcagcugagu

SEQ ID NO: 34283 - RNA, 19 nt, Artificial Sequence
  Description of Artificial Sequence: Synthetic oligonucleotide
cccgaucugucugauugac

SEQ ID NO: 34284 - RNA, 19 nt, Artificial Sequence
  Description of Artificial Sequence: Synthetic oligonucleotide
guagggcgacuaucucaga

SEQ ID NO: 34285 - RNA, 19 nt, Artificial Sequence
  Description of Artificial Sequence: Synthetic oligonucleotide
ccuccaaccggauauccgu

SEQ ID NO: 34286 - RNA, 19 nt, Artificial Sequence
  Description of Artificial Sequence: Synthetic oligonucleotide
ccuguagggcgacuaucuc

SEQ ID NO: 34287 - RNA, 19 nt, Artificial Sequence
  Description of Artificial Sequence: Synthetic oligonucleotide
cuucacuagaugggaacau

SEQ ID NO: 34288 - RNA, 19 nt, Artificial Sequence
  Description of Artificial Sequence: Synthetic oligonucleotide
cccgugggaccuaccgagg

SEQ ID NO: 34289 - RNA, 19 nt, Artificial Sequence
  Description of Artificial Sequence: Synthetic oligonucleotide
ggaccugccccggagugga

SEQ ID NO: 34290 - RNA, 19 nt, Artificial Sequence
  Description of Artificial Sequence: Synthetic oligonucleotide
accuaccgaggugaauaua

SEQ ID NO: 34291 - RNA, 19 nt, Artificial Sequence
  Description of Artificial Sequence: Synthetic oligonucleotide
ccauuggaggccugaacua

SEQ ID NO: 34292 - RNA, 19 nt, Artificial Sequence
  Description of Artificial Sequence: Synthetic oligonucleotide
gggaccgaaugagcagggc

SEQ ID NO: 34293 - RNA, 19 nt, Artificial Sequence
  Description of Artificial Sequence: Synthetic oligonucleotide
gccggagugguacgaccac

SEQ ID NO: 34294 - RNA, 19 nt, Artificial Sequence
  Description of Artificial Sequence: Synthetic oligonucleotide
caagauccagcagcucucu

SEQ ID NO: 34295 - RNA, 19 nt, Artificial Sequence
  Description of Artificial Sequence: Synthetic oligonucleotide
ggagccggagugguacgac

SEQ ID NO: 34296 - RNA, 19 nt, Artificial Sequence
  Description of Artificial Sequence: Synthetic oligonucleotide
cggauauccguaagcuuca

SEQ ID NO: 34297 - RNA, 19 nt, Artificial Sequence
  Description of Artificial Sequence: Synthetic oligonucleotide
gacuaggagguggccgacu

SEQ ID NO: 34298 - RNA, 19 nt, Artificial Sequence
  Description of Artificial Sequence: Synthetic oligonucleotide
cccuguagggcgacuaucu

SEQ ID NO: 34299 - RNA, 19 nt, Artificial Sequence
  Description of Artificial Sequence: Synthetic oligonucleotide
ccgaucugucugauugaca

SEQ ID NO: 34300 - RNA, 19 nt, Artificial Sequence
  Description of Artificial Sequence: Synthetic oligonucleotide
ccgauuggucaaguagguc

SEQ ID NO: 34301 - RNA, 19 nt, Artificial Sequence
  Description of Artificial Sequence: Synthetic oligonucleotide
ccccuauugucacccagaa

SEQ ID NO: 34302 - RNA, 19 nt, Artificial Sequence
  Description of Artificial Sequence: Synthetic oligonucleotide
gcggcaucucuggaggcuc

SEQ ID NO: 34303 - RNA, 19 nt, Artificial Sequence
  Description of Artificial Sequence: Synthetic oligonucleotide
cgaggugaauauagaagcu

SEQ ID NO: 34304 - RNA, 19 nt, Artificial Sequence
  Description of Artificial Sequence: Synthetic oligonucleotide
acgaggcgccggugcuuga

SEQ ID NO: 34305 - RNA, 19 nt, Artificial Sequence
  Description of Artificial Sequence: Synthetic oligonucleotide
gccgauuggucaaguaggu

SEQ ID NO: 34306 - RNA, 19 nt, Artificial Sequence
  Description of Artificial Sequence: Synthetic oligonucleotide
guguaaggccucccugcuu

SEQ ID NO: 34307 - RNA, 19 nt, Artificial Sequence
  Description of Artificial Sequence: Synthetic oligonucleotide
gccaauggggcaggacaga

SEQ ID NO: 34308 - RNA, 19 nt, Artificial Sequence
  Description of Artificial Sequence: Synthetic oligonucleotide
ggccagccgauuggucaag

SEQ ID NO: 34309 - RNA, 19 nt, Artificial Sequence
  Description of Artificial Sequence: Synthetic oligonucleotide
ccgacuggguggcuugaca

SEQ ID NO: 34310 - RNA, 19 nt, Artificial Sequence
  Description of Artificial Sequence: Synthetic oligonucleotide
ggcuuauguagugcugcau

SEQ ID NO: 34311 - RNA, 19 nt, Artificial Sequence
  Description of Artificial Sequence: Synthetic oligonucleotide
guacgaccacuggcaaccu

SEQ ID NO: 34312 - RNA, 19 nt, Artificial Sequence
  Description of Artificial Sequence: Synthetic oligonucleotide
gcgaggcccagggaacguc

SEQ ID NO: 34313 - RNA, 19 nt, Artificial Sequence
  Description of Artificial Sequence: Synthetic oligonucleotide
gggcaaccuucagucgguc

SEQ ID NO: 34314 - RNA, 19 nt, Artificial Sequence
  Description of Artificial Sequence: Synthetic oligonucleotide
gggccuccaaccggauauc

SEQ ID NO: 34315 - RNA, 19 nt, Artificial Sequence
  Description of Artificial Sequence: Synthetic oligonucleotide
cgaggcgccggugcuugag

SEQ ID NO: 34316 - RNA, 19 nt, Artificial Sequence
  Description of Artificial Sequence: Synthetic oligonucleotide
ccacguuguuagagaaggu

SEQ ID NO: 34317 - RNA, 19 nt, Artificial Sequence
  Description of Artificial Sequence: Synthetic oligonucleotide
guggccgacuggguggcuu

SEQ ID NO: 34318 - RNA, 19 nt, Artificial Sequence
  Description of Artificial Sequence: Synthetic oligonucleotide
ccgagcgcuccaccaaaua

SEQ ID NO: 34319 - RNA, 19 nt, Artificial Sequence
  Description of Artificial Sequence: Synthetic oligonucleotide
ccgugggaccuaccgaggu

SEQ ID NO: 34320 - RNA, 19 nt, Artificial Sequence
  Description of Artificial Sequence: Synthetic oligonucleotide
ggccgacuggguggcuuga

SEQ ID NO: 34321 - RNA, 19 nt, Artificial Sequence
  Description of Artificial Sequence: Synthetic oligonucleotide
gggcucccauaaggggaaa

SEQ ID NO: 34322 - RNA, 19 nt, Artificial Sequence
  Description of Artificial Sequence: Synthetic oligonucleotide
cccgagcgcuccaccaaau

SEQ ID NO: 34323 - RNA, 19 nt, Artificial Sequence
  Description of Artificial Sequence: Synthetic oligonucleotide
cuaaguauaaacaugcccc

SEQ ID NO: 34324 - RNA, 19 nt, Artificial Sequence
  Description of Artificial Sequence: Synthetic oligonucleotide
gaaauugaaaggccgacgg

SEQ ID NO: 34325 - RNA, 19 nt, Artificial Sequence
  Description of Artificial Sequence: Synthetic oligonucleotide
uuaugguuagccaacauac

SEQ ID NO: 34326 - RNA, 19 nt, Artificial Sequence
  Description of Artificial Sequence: Synthetic oligonucleotide
aacuauuaguacuuuguag

SEQ ID NO: 34327 - RNA, 19 nt, Artificial Sequence
  Description of Artificial Sequence: Synthetic oligonucleotide
aaacuaaguguuuggguac

SEQ ID NO: 34328 - RNA, 19 nt, Artificial Sequence
  Description of Artificial Sequence: Synthetic oligonucleotide
aaucuuaugaggauguauc

SEQ ID NO: 34329 - RNA, 19 nt, Artificial Sequence
  Description of Artificial Sequence: Synthetic oligonucleotide
acuauuaguacuuuguagu

SEQ ID NO: 34330 - RNA, 19 nt, Artificial Sequence
  Description of Artificial Sequence: Synthetic oligonucleotide
uuauacuaaugccagagcu

SEQ ID NO: 34331 - RNA, 19 nt, Artificial Sequence
  Description of Artificial Sequence: Synthetic oligonucleotide
ucaacuauuaguacuuugu

SEQ ID NO: 34332 - RNA, 19 nt, Artificial Sequence
  Description of Artificial Sequence: Synthetic oligonucleotide
cuuacggaugauauaaugc

SEQ ID NO: 34333 - RNA, 19 nt, Artificial Sequence
  Description of Artificial Sequence: Synthetic oligonucleotide
aaaacggguaaauccgccg

SEQ ID NO: 34334 - RNA, 19 nt, Artificial Sequence
  Description of Artificial Sequence: Synthetic oligonucleotide
uaaaaucuuaugaggaugu

SEQ ID NO: 34335 - RNA, 19 nt, Artificial Sequence
  Description of Artificial Sequence: Synthetic oligonucleotide
auaacuuuaaggcuagcca

SEQ ID NO: 34336 - RNA, 19 nt, Artificial Sequence
  Description of Artificial Sequence: Synthetic oligonucleotide
uuacggaugauauaaugca

SEQ ID NO: 34337 - RNA, 19 nt, Artificial Sequence
  Description of Artificial Sequence: Synthetic oligonucleotide
gaagcuaugacauacggua

SEQ ID NO: 34338 - RNA, 19 nt, Artificial Sequence
  Description of Artificial Sequence: Synthetic oligonucleotide
aguaagagcacggagauca

SEQ ID NO: 34339 - RNA, 19 nt, Artificial Sequence
  Description of Artificial Sequence: Synthetic oligonucleotide
ucgugauuacaaaaugagg

SEQ ID NO: 34340 - RNA, 19 nt, Artificial Sequence
  Description of Artificial Sequence: Synthetic oligonucleotide
uuaaccaacggccagcaaa

SEQ ID NO: 34341 - RNA, 19 nt, Artificial Sequence
  Description of Artificial Sequence: Synthetic oligonucleotide
acaaucgucguuauuagac

SEQ ID NO: 34342 - RNA, 19 nt, Artificial Sequence
  Description of Artificial Sequence: Synthetic oligonucleotide
uuuacggcaauagaaaacu

SEQ ID NO: 34343 - RNA, 19 nt, Artificial Sequence
  Description of Artificial Sequence: Synthetic oligonucleotide
aaaucaauccguaauuugu

SEQ ID NO: 34344 - RNA, 19 nt, Artificial Sequence
  Description of Artificial Sequence: Synthetic oligonucleotide
agaaucuccagagugagag

SEQ ID NO: 34345 - RNA, 19 nt, Artificial Sequence
  Description of Artificial Sequence: Synthetic oligonucleotide
acacgaauuuuacauuggc

SEQ ID NO: 34346 - RNA, 19 nt, Artificial Sequence
  Description of Artificial Sequence: Synthetic oligonucleotide
uugacagcaugucuagugg

SEQ ID NO: 34347 - RNA, 19 nt, Artificial Sequence
  Description of Artificial Sequence: Synthetic oligonucleotide
acuaucugcucucguaacc

SEQ ID NO: 34348 - RNA, 19 nt, Artificial Sequence
  Description of Artificial Sequence: Synthetic oligonucleotide
uguauagguguuuacggca

SEQ ID NO: 34349 - RNA, 19 nt, Artificial Sequence
  Description of Artificial Sequence: Synthetic oligonucleotide
uugaaagaagcccuuacuc

SEQ ID NO: 34350 - RNA, 19 nt, Artificial Sequence
  Description of Artificial Sequence: Synthetic oligonucleotide
aggaauauuaaauuaucaa

SEQ ID NO: 34351 - RNA, 19 nt, Artificial Sequence
  Description of Artificial Sequence: Synthetic oligonucleotide
ucaauccguaauuuguuag

SEQ ID NO: 34352 - RNA, 19 nt, Artificial Sequence
  Description of Artificial Sequence: Synthetic oligonucleotide
accgucaccgcccuuaugg

SEQ ID NO: 34353 - RNA, 19 nt, Artificial Sequence
  Description of Artificial Sequence: Synthetic oligonucleotide
aaggcgcuuaaacuggcgg

SEQ ID NO: 34354 - RNA, 19 nt, Artificial Sequence
  Description of Artificial Sequence: Synthetic oligonucleotide
aacuccuauuuacacaugu

SEQ ID NO: 34355 - RNA, 19 nt, Artificial Sequence
  Description of Artificial Sequence: Synthetic oligonucleotide
auauauccaacaaucgucg

SEQ ID NO: 34356 - RNA, 19 nt, Artificial Sequence
  Description of Artificial Sequence: Synthetic oligonucleotide
uuuauacuaaugccagagc

SEQ ID NO: 34357 - RNA, 19 nt, Artificial Sequence
  Description of Artificial Sequence: Synthetic oligonucleotide
ugucgugauuacaaaauga

SEQ ID NO: 34358 - RNA, 19 nt, Artificial Sequence
  Description of Artificial Sequence: Synthetic oligonucleotide
aaucgucguuauuagaccu

SEQ ID NO: 34359 - RNA, 19 nt, Artificial Sequence
  Description of Artificial Sequence: Synthetic oligonucleotide
uacaacaaccaucaguaaa

SEQ ID NO: 34360 - RNA, 19 nt, Artificial Sequence
  Description of Artificial Sequence: Synthetic oligonucleotide
cuaacugagagccacagga

SEQ ID NO: 34361 - RNA, 19 nt, Artificial Sequence
  Description of Artificial Sequence: Synthetic oligonucleotide
uaguguaucuuucuaagua

SEQ ID NO: 34362 - RNA, 19 nt, Artificial Sequence
  Description of Artificial Sequence: Synthetic oligonucleotide
uguacuggauuaaauuacu

SEQ ID NO: 34363 - RNA, 19 nt, Artificial Sequence
  Description of Artificial Sequence: Synthetic oligonucleotide
uuugcauaaaccuguucga

SEQ ID NO: 34364 - RNA, 19 nt, Artificial Sequence
  Description of Artificial Sequence: Synthetic oligonucleotide
uacacgaauuuuacauugg

SEQ ID NO: 34365 - RNA, 19 nt, Artificial Sequence
  Description of Artificial Sequence: Synthetic oligonucleotide
cuugggacgacuguggagg

SEQ ID NO: 34366 - RNA, 19 nt, Artificial Sequence
  Description of Artificial Sequence: Synthetic oligonucleotide
uacggcaauagaaaacuga

SEQ ID NO: 34367 - RNA, 19 nt, Artificial Sequence
  Description of Artificial Sequence: Synthetic oligonucleotide
auuuuggcgguccccgucc

SEQ ID NO: 34368 - RNA, 19 nt, Artificial Sequence
  Description of Artificial Sequence: Synthetic oligonucleotide
uacggaugauauaaugcag

SEQ ID NO: 34369 - RNA, 19 nt, Artificial Sequence
  Description of Artificial Sequence: Synthetic oligonucleotide
aagauuugacacagcagcg

SEQ ID NO: 34370 - RNA, 19 nt, Artificial Sequence
  Description of Artificial Sequence: Synthetic oligonucleotide
uuaguaauguuaugcacau

SEQ ID NO: 34371 - RNA, 19 nt, Artificial Sequence
  Description of Artificial Sequence: Synthetic oligonucleotide
ugugauugcuaaaaguaua

SEQ ID NO: 34372 - RNA, 19 nt, Artificial Sequence
  Description of Artificial Sequence: Synthetic oligonucleotide
uuuggcaugcagcacuccc

SEQ ID NO: 34373 - RNA, 19 nt, Artificial Sequence
  Description of Artificial Sequence: Synthetic oligonucleotide
cuguacuggauuaaauuac

SEQ ID NO: 34374 - RNA, 19 nt, Artificial Sequence
  Description of Artificial Sequence: Synthetic oligonucleotide
agacuuuagucguucaucu

SEQ ID NO: 34375 - RNA, 19 nt, Artificial Sequence
  Description of Artificial Sequence: Synthetic oligonucleotide
cauaacuuuaaggcuagcc

SEQ ID NO: 34376 - RNA, 19 nt, Artificial Sequence
  Description of Artificial Sequence: Synthetic oligonucleotide
caagcgucgagaccuaugg

SEQ ID NO: 34377 - RNA, 19 nt, Artificial Sequence
  Description of Artificial Sequence: Synthetic oligonucleotide
uuggagaguauuugaaaga

SEQ ID NO: 34378 - RNA, 19 nt, Artificial Sequence
  Description of Artificial Sequence: Synthetic oligonucleotide
uauacuaaugccagagcua

SEQ ID NO: 34379 - RNA, 19 nt, Artificial Sequence
  Description of Artificial Sequence: Synthetic oligonucleotide
ugccauuugcauaaaccug

SEQ ID NO: 34380 - RNA, 19 nt, Artificial Sequence
  Description of Artificial Sequence: Synthetic oligonucleotide
uaugaggauguaucuaacu

SEQ ID NO: 34381 - RNA, 19 nt, Artificial Sequence
  Description of Artificial Sequence: Synthetic oligonucleotide
uccguaauuuguuaguaau

SEQ ID NO: 34382 - RNA, 19 nt, Artificial Sequence
  Description of Artificial Sequence: Synthetic oligonucleotide
cuugcauaagggcaccagg

SEQ ID NO: 34383 - RNA, 19 nt, Artificial Sequence
  Description of Artificial Sequence: Synthetic oligonucleotide
aauugaaaggccgacggua

SEQ ID NO: 34384 - RNA, 19 nt, Artificial Sequence
  Description of Artificial Sequence: Synthetic oligonucleotide
uguuuacggcaauagaaaa

SEQ ID NO: 34385 - RNA, 19 nt, Artificial Sequence
  Description of Artificial Sequence: Synthetic oligonucleotide
agcgcaacauacuauacaa

SEQ ID NO: 34386 - RNA, 19 nt, Artificial Sequence
  Description of Artificial Sequence: Synthetic oligonucleotide
aaauugaaaggccgacggu

SEQ ID NO: 34387 - RNA, 19 nt, Artificial Sequence
  Description of Artificial Sequence: Synthetic oligonucleotide
auacgguacacacagggaa

SEQ ID NO: 34388 - RNA, 19 nt, Artificial Sequence
  Description of Artificial Sequence: Synthetic oligonucleotide
aaaucuuaugaggauguau

SEQ ID NO: 34389 - RNA, 19 nt, Artificial Sequence
  Description of Artificial Sequence: Synthetic oligonucleotide
agagcuuagaaacccuuca

SEQ ID NO: 34390 - RNA, 19 nt, Artificial Sequence
  Description of Artificial Sequence: Synthetic oligonucleotide
aaucgggcaguagaaaaug

SEQ ID NO: 34391 - RNA, 19 nt, Artificial Sequence
  Description of Artificial Sequence: Synthetic oligonucleotide
caaucgucguuauuagacc

SEQ ID NO: 34392 - RNA, 19 nt, Artificial Sequence
  Description of Artificial Sequence: Synthetic oligonucleotide
auacgcugaaaacaaacau

SEQ ID NO: 34393 - RNA, 19 nt, Artificial Sequence
  Description of Artificial Sequence: Synthetic oligonucleotide
cuuaugaggauguaucuaa

SEQ ID NO: 34394 - RNA, 19 nt, Artificial Sequence
  Description of Artificial Sequence: Synthetic oligonucleotide
aacaaucgucguuauuaga

SEQ ID NO: 34395 - RNA, 19 nt, Artificial Sequence
  Description of Artificial Sequence: Synthetic oligonucleotide
augguuagccaacauacau

SEQ ID NO: 34396 - RNA, 19 nt, Artificial Sequence
  Description of Artificial Sequence: Synthetic oligonucleotide
uacuuaguagcaccgugac

SEQ ID NO: 34397 - RNA, 19 nt, Artificial Sequence
  Description of Artificial Sequence: Synthetic oligonucleotide
ucguuauuagaccuucaaa

SEQ ID NO: 34398 - RNA, 19 nt, Artificial Sequence
  Description of Artificial Sequence: Synthetic oligonucleotide
ugagcgucaucacauguaa

SEQ ID NO: 34399 - RNA, 19 nt, Artificial Sequence
  Description of Artificial Sequence: Synthetic oligonucleotide
uccccguccaaaaugacau

SEQ ID NO: 34400 - RNA, 19 nt, Artificial Sequence
  Description of Artificial Sequence: Synthetic oligonucleotide
uaugguuagccaacauaca

SEQ ID NO: 34401 - RNA, 19 nt, Artificial Sequence
  Description of Artificial Sequence: Synthetic oligonucleotide
ugucuaguggcagugucag

SEQ ID NO: 34402 - RNA, 19 nt, Artificial Sequence
  Description of Artificial Sequence: Synthetic oligonucleotide
gucaaguacauuuaacuua

SEQ ID NO: 34403 - RNA, 19 nt, Artificial Sequence
  Description of Artificial Sequence: Synthetic oligonucleotide
ugggaaauugaaaggccga

SEQ ID NO: 34404 - RNA, 19 nt, Artificial Sequence
  Description of Artificial Sequence: Synthetic oligonucleotide
ucugcucucguaaccacac

SEQ ID NO: 34405 - RNA, 19 nt, Artificial Sequence
  Description of Artificial Sequence: Synthetic oligonucleotide
gauguuauccccuaagauu

SEQ ID NO: 34406 - RNA, 19 nt, Artificial Sequence
  Description of Artificial Sequence: Synthetic oligonucleotide
aaacgcaguuccugaacug

SEQ ID NO: 34407 - RNA, 19 nt, Artificial Sequence
  Description of Artificial Sequence: Synthetic oligonucleotide
gaagcccuuacucaugaca

SEQ ID NO: 34408 - RNA, 19 nt, Artificial Sequence
  Description of Artificial Sequence: Synthetic oligonucleotide
gaggaacuccuauuuacac

SEQ ID NO: 34409 - RNA, 19 nt, Artificial Sequence
  Description of Artificial Sequence: Synthetic oligonucleotide
aucuuaugaggauguaucu

SEQ ID NO: 34410 - RNA, 19 nt, Artificial Sequence
  Description of Artificial Sequence: Synthetic oligonucleotide
uccguugacagcaugucua

SEQ ID NO: 34411 - RNA, 19 nt, Artificial Sequence
  Description of Artificial Sequence: Synthetic oligonucleotide
uucagugguacucugcguu

SEQ ID NO: 34412 - RNA, 19 nt, Artificial Sequence
  Description of Artificial Sequence: Synthetic oligonucleotide
uccccuaagauuucucaca

SEQ ID NO: 34413 - RNA, 19 nt, Artificial Sequence
  Description of Artificial Sequence: Synthetic oligonucleotide
auaaugcaggucgauguuc

SEQ ID NO: 34414 - RNA, 19 nt, Artificial Sequence
  Description of Artificial Sequence: Synthetic oligonucleotide
aagcuaugacauacgguac

SEQ ID NO: 34415 - RNA, 19 nt, Artificial Sequence
  Description of Artificial Sequence: Synthetic oligonucleotide
uuaaaugggcaaguggauc

SEQ ID NO: 34416 - RNA, 19 nt, Artificial Sequence
  Description of Artificial Sequence: Synthetic oligonucleotide
acaaucgggcaguagaaaa

SEQ ID NO: 34417 - RNA, 19 nt, Artificial Sequence
  Description of Artificial Sequence: Synthetic oligonucleotide
agaugcggcaugcuguaag

SEQ ID NO: 34418 - RNA, 19 nt, Artificial Sequence
  Description of Artificial Sequence: Synthetic oligonucleotide
caacaaucgucguuauuag

SEQ ID NO: 34419 - RNA, 19 nt, Artificial Sequence
  Description of Artificial Sequence: Synthetic oligonucleotide
aaaucgaggcaucgaagua

SEQ ID NO: 34420 - RNA, 19 nt, Artificial Sequence
  Description of Artificial Sequence: Synthetic oligonucleotide
auauuggugccccuccaug

SEQ ID NO: 34421 - RNA, 19 nt, Artificial Sequence
  Description of Artificial Sequence: Synthetic oligonucleotide
ggauuaaauuacuggauca

SEQ ID NO: 34422 - RNA, 19 nt, Artificial Sequence
  Description of Artificial Sequence: Synthetic oligonucleotide
uaaaggcgcuuaaacuggc

SEQ ID NO: 34423 - RNA, 19 nt, Artificial Sequence
  Description of Artificial Sequence: Synthetic oligonucleotide
uguggacgggccuugcuug

SEQ ID NO: 34424 - RNA, 19 nt, Artificial Sequence
  Description of Artificial Sequence: Synthetic oligonucleotide
aguuaggaugcuaggauug

SEQ ID NO: 34425 - RNA, 19 nt, Artificial Sequence
  Description of Artificial Sequence: Synthetic oligonucleotide
gauucugaccacuaggaau

SEQ ID NO: 34426 - RNA, 19 nt, Artificial Sequence
  Description of Artificial Sequence: Synthetic oligonucleotide
uuacggcaauagaaaacug

SEQ ID NO: 34427 - RNA, 19 nt, Artificial Sequence
  Description of Artificial Sequence: Synthetic oligonucleotide
ucguaaccacaccaggcug

SEQ ID NO: 34428 - RNA, 19 nt, Artificial Sequence
  Description of Artificial Sequence: Synthetic oligonucleotide
aaccuguucgaugacaguu

SEQ ID NO: 34429 - RNA, 19 nt, Artificial Sequence
  Description of Artificial Sequence: Synthetic oligonucleotide
agcgucgagaccuauggaa

SEQ ID NO: 34430 - RNA, 19 nt, Artificial Sequence
  Description of Artificial Sequence: Synthetic oligonucleotide
ucagaguuauggcugcgau

SEQ ID NO: 34431 - RNA, 19 nt, Artificial Sequence
  Description of Artificial Sequence: Synthetic oligonucleotide
guaagaacgggaagcaaac

SEQ ID NO: 34432 - RNA, 19 nt, Artificial Sequence
  Description of Artificial Sequence: Synthetic oligonucleotide
aauccguaauuuguuagua

SEQ ID NO: 34433 - RNA, 19 nt, Artificial Sequence
  Description of Artificial Sequence: Synthetic oligonucleotide
aaucaauccguaauuuguu

SEQ ID NO: 34434 - RNA, 19 nt, Artificial Sequence
  Description of Artificial Sequence: Synthetic oligonucleotide
guuuacggcaauagaaaac

SEQ ID NO: 34435 - RNA, 19 nt, Artificial Sequence
  Description of Artificial Sequence: Synthetic oligonucleotide
cugucgugauuacaaaaug

SEQ ID NO: 34436 - RNA, 19 nt, Artificial Sequence
  Description of Artificial Sequence: Synthetic oligonucleotide
gcucgagccauauuggugc

SEQ ID NO: 34437 - RNA, 19 nt, Artificial Sequence
  Description of Artificial Sequence: Synthetic oligonucleotide
uuccgaaugccauuugcau

SEQ ID NO: 34438 - RNA, 19 nt, Artificial Sequence
  Description of Artificial Sequence: Synthetic oligonucleotide
aacggguaaauccgccggu

SEQ ID NO: 34439 - RNA, 19 nt, Artificial Sequence
  Description of Artificial Sequence: Synthetic oligonucleotide
aaguaacuagcuggaaagu

SEQ ID NO: 34440 - RNA, 19 nt, Artificial Sequence
  Description of Artificial Sequence: Synthetic oligonucleotide
aacuagcuggaaagucccc

SEQ ID NO: 34441 - RNA, 19 nt, Artificial Sequence
  Description of Artificial Sequence: Synthetic oligonucleotide
acacaaacgcaguuccuga

SEQ ID NO: 34442 - RNA, 19 nt, Artificial Sequence
  Description of Artificial Sequence: Synthetic oligonucleotide
agcuuaagcaaagagcuua

SEQ ID NO: 34443 - RNA, 19 nt, Artificial Sequence
  Description of Artificial Sequence: Synthetic oligonucleotide
uauuaguacuuuguaguuu

SEQ ID NO: 34444 - RNA, 19 nt, Artificial Sequence
  Description of Artificial Sequence: Synthetic oligonucleotide
gccagauuugcgcucauag

SEQ ID NO: 34445 - RNA, 19 nt, Artificial Sequence
  Description of Artificial Sequence: Synthetic oligonucleotide
agaguugccaaggcaugac

SEQ ID NO: 34446 - RNA, 19 nt, Artificial Sequence
  Description of Artificial Sequence: Synthetic oligonucleotide
gagcuacuuaguagcaccg

SEQ ID NO: 34447 - RNA, 19 nt, Artificial Sequence
  Description of Artificial Sequence: Synthetic oligonucleotide
ucuuaugaggauguaucua

SEQ ID NO: 34448 - RNA, 19 nt, Artificial Sequence
  Description of Artificial Sequence: Synthetic oligonucleotide
cacgaauuuuacauuggca

SEQ ID NO: 34449 - RNA, 19 nt, Artificial Sequence
  Description of Artificial Sequence: Synthetic oligonucleotide
agggcaaacuaaguguuug

SEQ ID NO: 34450 - RNA, 19 nt, Artificial Sequence
  Description of Artificial Sequence: Synthetic oligonucleotide
caccuaauaaaggaaccac

SEQ ID NO: 34451 - RNA, 19 nt, Artificial Sequence
  Description of Artificial Sequence: Synthetic oligonucleotide
gcaaagagcuuagaaaccc

SEQ ID NO: 34452 - RNA, 19 nt, Artificial Sequence
  Description of Artificial Sequence: Synthetic oligonucleotide
gcuuacggaugauauaaug

SEQ ID NO: 34453 - RNA, 19 nt, Artificial Sequence
  Description of Artificial Sequence: Synthetic oligonucleotide
cuacuuaguagcaccguga

SEQ ID NO: 34454 - RNA, 19 nt, Artificial Sequence
  Description of Artificial Sequence: Synthetic oligonucleotide
acugucgugauuacaaaau

SEQ ID NO: 34455 - RNA, 19 nt, Artificial Sequence
  Description of Artificial Sequence: Synthetic oligonucleotide
aaguaagagcacggagauc

SEQ ID NO: 34456 - RNA, 19 nt, Artificial Sequence
  Description of Artificial Sequence: Synthetic oligonucleotide
gacuaucugcucucguaac

SEQ ID NO: 34457 - RNA, 19 nt, Artificial Sequence
  Description of Artificial Sequence: Synthetic oligonucleotide
cuagcgcaacauacuauac

SEQ ID NO: 34458 - RNA, 19 nt, Artificial Sequence
  Description of Artificial Sequence: Synthetic oligonucleotide
augaacuacuacacauuuc

SEQ ID NO: 34459 - RNA, 19 nt, Artificial Sequence
  Description of Artificial Sequence: Synthetic oligonucleotide
agauuugacacagcagcga

SEQ ID NO: 34460 - RNA, 19 nt, Artificial Sequence
  Description of Artificial Sequence: Synthetic oligonucleotide
aucaauccguaauuuguua

SEQ ID NO: 34461 - RNA, 19 nt, Artificial Sequence
  Description of Artificial Sequence: Synthetic oligonucleotide
gacugucgugauuacaaaa

SEQ ID NO: 34462 - RNA, 19 nt, Artificial Sequence
  Description of Artificial Sequence: Synthetic oligonucleotide
ugcgcugcccucugaacgc

SEQ ID NO: 34463 - RNA, 19 nt, Artificial Sequence
  Description of Artificial Sequence: Synthetic oligonucleotide
aacccuguaugccacccua

SEQ ID NO: 34464 - RNA, 19 nt, Artificial Sequence
  Description of Artificial Sequence: Synthetic oligonucleotide
aaauccgccggugaaccaa

SEQ ID NO: 34465 - RNA, 19 nt, Artificial Sequence
  Description of Artificial Sequence: Synthetic oligonucleotide
aggagcuacuuaguagcac

SEQ ID NO: 34466 - RNA, 19 nt, Artificial Sequence
  Description of Artificial Sequence: Synthetic oligonucleotide
cagacuuuagucguucauc

SEQ ID NO: 34467 - RNA, 19 nt, Artificial Sequence
  Description of Artificial Sequence: Synthetic oligonucleotide
ucaugagggaccacucuuu

SEQ ID NO: 34468 - RNA, 19 nt, Artificial Sequence
  Description of Artificial Sequence: Synthetic oligonucleotide
auuuuccguugacagcaug

SEQ ID NO: 34469 - RNA, 19 nt, Artificial Sequence
  Description of Artificial Sequence: Synthetic oligonucleotide
uacucugcguucaucuuuu

SEQ ID NO: 34470 - RNA, 19 nt, Artificial Sequence
  Description of Artificial Sequence: Synthetic oligonucleotide
caugucuaguggcaguguc

SEQ ID NO: 34471 - RNA, 19 nt, Artificial Sequence
  Description of Artificial Sequence: Synthetic oligonucleotide
aggcuagccauacacgaau

SEQ ID NO: 34472 - RNA, 19 nt, Artificial Sequence
  Description of Artificial Sequence: Synthetic oligonucleotide
aaaggccgacgguaaggcu

SEQ ID NO: 34473 - RNA, 19 nt, Artificial Sequence
  Description of Artificial Sequence: Synthetic oligonucleotide
ucaaacgggcucccauugu

SEQ ID NO: 34474 - RNA, 19 nt, Artificial Sequence
  Description of Artificial Sequence: Synthetic oligonucleotide
cacccuagcaacuguuaug

SEQ ID NO: 34475 - RNA, 19 nt, Artificial Sequence
  Description of Artificial Sequence: Synthetic oligonucleotide
acuaaguguuuggguacac

SEQ ID NO: 34476 - RNA, 19 nt, Artificial Sequence
  Description of Artificial Sequence: Synthetic oligonucleotide
caacucccgauucugacca

SEQ ID NO: 34477 - RNA, 19 nt, Artificial Sequence
  Description of Artificial Sequence: Synthetic oligonucleotide
gauuuuggcgguccccguc

SEQ ID NO: 34478 - RNA, 19 nt, Artificial Sequence
  Description of Artificial Sequence: Synthetic oligonucleotide
auccguaauuuguuaguaa

SEQ ID NO: 34479 - RNA, 19 nt, Artificial Sequence
  Description of Artificial Sequence: Synthetic oligonucleotide
uggucaagagggacccuca

SEQ ID NO: 34480 - RNA, 19 nt, Artificial Sequence
  Description of Artificial Sequence: Synthetic oligonucleotide
acggcaauagaaaacugau

SEQ ID NO: 34481 - RNA, 19 nt, Artificial Sequence
  Description of Artificial Sequence: Synthetic oligonucleotide
agcgauacgcugaaaacaa

SEQ ID NO: 34482 - RNA, 19 nt, Artificial Sequence
  Description of Artificial Sequence: Synthetic oligonucleotide
gcuacuuaguagcaccgug

SEQ ID NO: 34483 - RNA, 19 nt, Artificial Sequence
  Description of Artificial Sequence: Synthetic oligonucleotide
auuggugccccuccaugga

SEQ ID NO: 34484 - RNA, 19 nt, Artificial Sequence
  Description of Artificial Sequence: Synthetic oligonucleotide
aaacgggcucccauuguug

SEQ ID NO: 34485 - RNA, 19 nt, Artificial Sequence
  Description of Artificial Sequence: Synthetic oligonucleotide
ccgacgguaaggcugaaag

SEQ ID NO: 34486 - RNA, 19 nt, Artificial Sequence
  Description of Artificial Sequence: Synthetic oligonucleotide
gucguuauuagaccuucaa

SEQ ID NO: 34487 - RNA, 19 nt, Artificial Sequence
  Description of Artificial Sequence: Synthetic oligonucleotide
uguuauccccuaagauuuc

SEQ ID NO: 34488 - RNA, 19 nt, Artificial Sequence
  Description of Artificial Sequence: Synthetic oligonucleotide
uuuccguugacagcauguc

SEQ ID NO: 34489 - RNA, 19 nt, Artificial Sequence
  Description of Artificial Sequence: Synthetic oligonucleotide
gacuuuagucguucaucuc

SEQ ID NO: 34490 - RNA, 19 nt, Artificial Sequence
  Description of Artificial Sequence: Synthetic oligonucleotide
aaaaucuuaugaggaugua

SEQ ID NO: 34491 - RNA, 19 nt, Artificial Sequence
  Description of Artificial Sequence: Synthetic oligonucleotide
ugucugauaacuggucaua

SEQ ID NO: 34492 - RNA, 19 nt, Artificial Sequence
  Description of Artificial Sequence: Synthetic oligonucleotide
guguuuacggcaauagaaa

SEQ ID NO: 34493 - RNA, 19 nt, Artificial Sequence
  Description of Artificial Sequence: Synthetic oligonucleotide
uuacuggaucauucaaauu

SEQ ID NO: 34494 - RNA, 19 nt, Artificial Sequence
  Description of Artificial Sequence: Synthetic oligonucleotide
ugaugucggcagaugcagu

SEQ ID NO: 34495 - RNA, 19 nt, Artificial Sequence
  Description of Artificial Sequence: Synthetic oligonucleotide
aagcgucgagaccuaugga

SEQ ID NO: 34496 - RNA, 19 nt, Artificial Sequence
  Description of Artificial Sequence: Synthetic oligonucleotide
gcaagaacgaccugcagua

SEQ ID NO: 34497 - RNA, 19 nt, Artificial Sequence
  Description of Artificial Sequence: Synthetic oligonucleotide
uuucggcaguaacaccuaa

SEQ ID NO: 34498 - RNA, 19 nt, Artificial Sequence
  Description of Artificial Sequence: Synthetic oligonucleotide
caugccccuagcaagcaga

SEQ ID NO: 34499 - RNA, 19 nt, Artificial Sequence
  Description of Artificial Sequence: Synthetic oligonucleotide
auugaaaggccgacgguaa

SEQ ID NO: 34500 - RNA, 19 nt, Artificial Sequence
  Description of Artificial Sequence: Synthetic oligonucleotide
ugccaaggcaugacaaauu

SEQ ID NO: 34501 - RNA, 19 nt, Artificial Sequence
  Description of Artificial Sequence: Synthetic oligonucleotide
ucgucguuauuagaccuuc

SEQ ID NO: 34502 - RNA, 19 nt, Artificial Sequence
  Description of Artificial Sequence: Synthetic oligonucleotide
aauccgccggugaaccaag

SEQ ID NO: 34503 - RNA, 19 nt, Artificial Sequence
  Description of Artificial Sequence: Synthetic oligonucleotide
gagcuauuguuggagagua

SEQ ID NO: 34504 - RNA, 19 nt, Artificial Sequence
  Description of Artificial Sequence: Synthetic oligonucleotide
guuccgaaugccauuugca

SEQ ID NO: 34505 - RNA, 19 nt, Artificial Sequence
  Description of Artificial Sequence: Synthetic oligonucleotide
cuaucugcucucguaacca

SEQ ID NO: 34506 - RNA, 19 nt, Artificial Sequence
  Description of Artificial Sequence: Synthetic oligonucleotide
aaaugggcaaguggaucau

SEQ ID NO: 34507 - RNA, 19 nt, Artificial Sequence
  Description of Artificial Sequence: Synthetic oligonucleotide
ccguaauuuguuaguaaug

SEQ ID NO: 34508 - RNA, 19 nt, Artificial Sequence
  Description of Artificial Sequence: Synthetic oligonucleotide
cagcgauacgcugaaaaca

SEQ ID NO: 34509 - RNA, 19 nt, Artificial Sequence
  Description of Artificial Sequence: Synthetic oligonucleotide
cgauacgcugaaaacaaac

SEQ ID NO: 34510 - RNA, 19 nt, Artificial Sequence
  Description of Artificial Sequence: Synthetic oligonucleotide
gcagcgauacgcugaaaac

SEQ ID NO: 34511 - RNA, 19 nt, Artificial Sequence
  Description of Artificial Sequence: Synthetic oligonucleotide
cucgagccauauuggugcc

SEQ ID NO: 34512 - RNA, 19 nt, Artificial Sequence
  Description of Artificial Sequence: Synthetic oligonucleotide
uuuuggcgguccccgucca

SEQ ID NO: 34513 - RNA, 19 nt, Artificial Sequence
  Description of Artificial Sequence: Synthetic oligonucleotide
ucaccgcccuuaugguuag

SEQ ID NO: 34514 - RNA, 19 nt, Artificial Sequence
  Description of Artificial Sequence: Synthetic oligonucleotide
gccccuagcaagcagaaaa

SEQ ID NO: 34515 - RNA, 19 nt, Artificial Sequence
  Description of Artificial Sequence: Synthetic oligonucleotide
gaacgaccugcaguaggag

SEQ ID NO: 34516 - RNA, 19 nt, Artificial Sequence
  Description of Artificial Sequence: Synthetic oligonucleotide
aaggcuagccauacacgaa

SEQ ID NO: 34517 - RNA, 19 nt, Artificial Sequence
  Description of Artificial Sequence: Synthetic oligonucleotide
caucuagcgcaacauacua

SEQ ID NO: 34518 - RNA, 19 nt, Artificial Sequence
  Description of Artificial Sequence: Synthetic oligonucleotide
gguguuacauggaauaacu

SEQ ID NO: 34519 - RNA, 19 nt, Artificial Sequence
  Description of Artificial Sequence: Synthetic oligonucleotide
cauaagggcaccagguccu

SEQ ID NO: 34520 - RNA, 19 nt, Artificial Sequence
  Description of Artificial Sequence: Synthetic oligonucleotide
cccuagauaaugacugaac

SEQ ID NO: 34521 - RNA, 19 nt, Artificial Sequence
  Description of Artificial Sequence: Synthetic oligonucleotide
gacgggccuugcuugccag

SEQ ID NO: 34522 - RNA, 19 nt, Artificial Sequence
  Description of Artificial Sequence: Synthetic oligonucleotide
cuguauggaaagggaggag

SEQ ID NO: 34523 - RNA, 19 nt, Artificial Sequence
  Description of Artificial Sequence: Synthetic oligonucleotide
cacgcacaagcccuucaac

SEQ ID NO: 34524 - RNA, 19 nt, Artificial Sequence
  Description of Artificial Sequence: Synthetic oligonucleotide
caauccguaauuuguuagu

SEQ ID NO: 34525 - RNA, 19 nt, Artificial Sequence
  Description of Artificial Sequence: Synthetic oligonucleotide
cuaguguaucuuucuaagu

SEQ ID NO: 34526 - RNA, 19 nt, Artificial Sequence
  Description of Artificial Sequence: Synthetic oligonucleotide
agacaaucgggcaguagaa

SEQ ID NO: 34527 - RNA, 19 nt, Artificial Sequence
  Description of Artificial Sequence: Synthetic oligonucleotide
caaacgcaguuccugaacu

SEQ ID NO: 34528 - RNA, 19 nt, Artificial Sequence
  Description of Artificial Sequence: Synthetic oligonucleotide
cugcgaugauuuuggcaug

SEQ ID NO: 34529 - RNA, 19 nt, Artificial Sequence
  Description of Artificial Sequence: Synthetic oligonucleotide
gccauauuggugccccucc

SEQ ID NO: 34530 - RNA, 19 nt, Artificial Sequence
  Description of Artificial Sequence: Synthetic oligonucleotide
gcacggagaucacuggagc

SEQ ID NO: 34531 - RNA, 19 nt, Artificial Sequence
  Description of Artificial Sequence: Synthetic oligonucleotide
ggacuaucugcucucguaa

SEQ ID NO: 34532 - RNA, 19 nt, Artificial Sequence
  Description of Artificial Sequence: Synthetic oligonucleotide
guaacaguccacgcacgca

SEQ ID NO: 34533 - RNA, 19 nt, Artificial Sequence
  Description of Artificial Sequence: Synthetic oligonucleotide
aacaagcgcuggagaaucu

SEQ ID NO: 34534 - RNA, 19 nt, Artificial Sequence
  Description of Artificial Sequence: Synthetic oligonucleotide
acgguaaggcugaaagcca

SEQ ID NO: 34535 - RNA, 19 nt, Artificial Sequence
  Description of Artificial Sequence: Synthetic oligonucleotide
ucgaaguaacuagcuggaa

SEQ ID NO: 34536 - RNA, 19 nt, Artificial Sequence
  Description of Artificial Sequence: Synthetic oligonucleotide
gacaaucgggcaguagaaa

SEQ ID NO: 34537 - RNA, 19 nt, Artificial Sequence
  Description of Artificial Sequence: Synthetic oligonucleotide
gggaaauugaaaggccgac

SEQ ID NO: 34538 - RNA, 19 nt, Artificial Sequence
  Description of Artificial Sequence: Synthetic oligonucleotide
aggaauggaaacacacaua

SEQ ID NO: 34539 - RNA, 19 nt, Artificial Sequence
  Description of Artificial Sequence: Synthetic oligonucleotide
aaugggcaaguggaucauu

SEQ ID NO: 34540 - RNA, 19 nt, Artificial Sequence
  Description of Artificial Sequence: Synthetic oligonucleotide
cagcuuaaaugggcaagug

SEQ ID NO: 34541 - RNA, 19 nt, Artificial Sequence
  Description of Artificial Sequence: Synthetic oligonucleotide
ccauaagacaccaggucga

SEQ ID NO: 34542 - RNA, 19 nt, Artificial Sequence
  Description of Artificial Sequence: Synthetic oligonucleotide
agcuacuuaguagcaccgu

SEQ ID NO: 34543 - RNA, 19 nt, Artificial Sequence
  Description of Artificial Sequence: Synthetic oligonucleotide
agugguacucugcguucau

SEQ ID NO: 34544 - RNA, 19 nt, Artificial Sequence
  Description of Artificial Sequence: Synthetic oligonucleotide
ugguuauuguuggccugcu

SEQ ID NO: 34545 - RNA, 19 nt, Artificial Sequence
  Description of Artificial Sequence: Synthetic oligonucleotide
aucuagcgcaacauacuau

SEQ ID NO: 34546 - RNA, 19 nt, Artificial Sequence
  Description of Artificial Sequence: Synthetic oligonucleotide
uacuaaugccagagcuauu

SEQ ID NO: 34547 - RNA, 19 nt, Artificial Sequence
  Description of Artificial Sequence: Synthetic oligonucleotide
augggcaaguggaucauuu

SEQ ID NO: 34548 - RNA, 19 nt, Artificial Sequence
  Description of Artificial Sequence: Synthetic oligonucleotide
aucuccaccuaagguacaa

SEQ ID NO: 34549 - RNA, 19 nt, Artificial Sequence
  Description of Artificial Sequence: Synthetic oligonucleotide
cugcucucguaaccacacc

SEQ ID NO: 34550 - RNA, 19 nt, Artificial Sequence
  Description of Artificial Sequence: Synthetic oligonucleotide
gccauacacgaauuuuaca

SEQ ID NO: 34551 - RNA, 19 nt, Artificial Sequence
  Description of Artificial Sequence: Synthetic oligonucleotide
ucgagaccuauggaacuua

SEQ ID NO: 34552 - RNA, 19 nt, Artificial Sequence
  Description of Artificial Sequence: Synthetic oligonucleotide
cacaaacgcaguuccugaa

SEQ ID NO: 34553 - RNA, 19 nt, Artificial Sequence
  Description of Artificial Sequence: Synthetic oligonucleotide
caagguuuuagggcaucga

SEQ ID NO: 34554 - RNA, 19 nt, Artificial Sequence
  Description of Artificial Sequence: Synthetic oligonucleotide
caaucgggcaguagaaaau

SEQ ID NO: 34555 - RNA, 19 nt, Artificial Sequence
  Description of Artificial Sequence: Synthetic oligonucleotide
uuuggcgguccccguccaa

SEQ ID NO: 34556 - RNA, 19 nt, Artificial Sequence
  Description of Artificial Sequence: Synthetic oligonucleotide
cuggaaaaucacucugcgu

SEQ ID NO: 34557 - RNA, 19 nt, Artificial Sequence
  Description of Artificial Sequence: Synthetic oligonucleotide
accuguucgaugacaguuu

SEQ ID NO: 34558 - RNA, 19 nt, Artificial Sequence
  Description of Artificial Sequence: Synthetic oligonucleotide
gacgacuguggagguggug

SEQ ID NO: 34559 - RNA, 19 nt, Artificial Sequence
  Description of Artificial Sequence: Synthetic oligonucleotide
uucugaccacuaggaauau

SEQ ID NO: 34560 - RNA, 19 nt, Artificial Sequence
  Description of Artificial Sequence: Synthetic oligonucleotide
acccuguaugccacccuag

SEQ ID NO: 34561 - RNA, 19 nt, Artificial Sequence
  Description of Artificial Sequence: Synthetic oligonucleotide
cuggagccgacugaaagcu

SEQ ID NO: 34562 - RNA, 19 nt, Artificial Sequence
  Description of Artificial Sequence: Synthetic oligonucleotide
cauaagacaccaggucgaa

SEQ ID NO: 34563 - RNA, 19 nt, Artificial Sequence
  Description of Artificial Sequence: Synthetic oligonucleotide
guaagagcacggagaucac

SEQ ID NO: 34564 - RNA, 19 nt, Artificial Sequence
  Description of Artificial Sequence: Synthetic oligonucleotide
gcgucgagaccuauggaac

SEQ ID NO: 34565 - RNA, 19 nt, Artificial Sequence
  Description of Artificial Sequence: Synthetic oligonucleotide
gguggagcagcaugcucga

SEQ ID NO: 34566 - RNA, 19 nt, Artificial Sequence
  Description of Artificial Sequence: Synthetic oligonucleotide
aucgucguuauuagaccuu

SEQ ID NO: 34567 - RNA, 19 nt, Artificial Sequence
  Description of Artificial Sequence: Synthetic oligonucleotide
cauuaucaugagggaccac

SEQ ID NO: 34568 - RNA, 19 nt, Artificial Sequence
  Description of Artificial Sequence: Synthetic oligonucleotide
agcuuacggaugauauaau

SEQ ID NO: 34569 - RNA, 19 nt, Artificial Sequence
  Description of Artificial Sequence: Synthetic oligonucleotide
ggacugucgugauuacaaa

SEQ ID NO: 34570 - RNA, 19 nt, Artificial Sequence
  Description of Artificial Sequence: Synthetic oligonucleotide
cagugguacucugcguuca

SEQ ID NO: 34571 - RNA, 19 nt, Artificial Sequence
  Description of Artificial Sequence: Synthetic oligonucleotide
uagaugcggcaugcuguaa

SEQ ID NO: 34572 - RNA, 19 nt, Artificial Sequence
  Description of Artificial Sequence: Synthetic oligonucleotide
gcaagcgucgagaccuaug

SEQ ID NO: 34573 - RNA, 19 nt, Artificial Sequence
  Description of Artificial Sequence: Synthetic oligonucleotide
gagcgucaucacauguaaa

SEQ ID NO: 34574 - RNA, 19 nt, Artificial Sequence
  Description of Artificial Sequence: Synthetic oligonucleotide
cucccgauucugaccacua

SEQ ID NO: 34575 - RNA, 19 nt, Artificial Sequence
  Description of Artificial Sequence: Synthetic oligonucleotide
ugccagauuugcgcucaua

SEQ ID NO: 34576 - RNA, 19 nt, Artificial Sequence
  Description of Artificial Sequence: Synthetic oligonucleotide
caaacgggcucccauuguu

SEQ ID NO: 34577 - RNA, 19 nt, Artificial Sequence
  Description of Artificial Sequence: Synthetic oligonucleotide
auccaagguuuuagggcau

SEQ ID NO: 34578 - RNA, 19 nt, Artificial Sequence
  Description of Artificial Sequence: Synthetic oligonucleotide
gggacaaccccggccagca

SEQ ID NO: 34579 - RNA, 19 nt, Artificial Sequence
  Description of Artificial Sequence: Synthetic oligonucleotide
guguggacgggccuugcuu

SEQ ID NO: 34580 - RNA, 19 nt, Artificial Sequence
  Description of Artificial Sequence: Synthetic oligonucleotide
ugccccuagcaagcagaaa

SEQ ID NO: 34581 - RNA, 19 nt, Artificial Sequence
  Description of Artificial Sequence: Synthetic oligonucleotide
augccccuagcaagcagaa

SEQ ID NO: 34582 - RNA, 19 nt, Artificial Sequence
  Description of Artificial Sequence: Synthetic oligonucleotide
gcgcuuaaacuggcggacc

SEQ ID NO: 34583 - RNA, 19 nt, Artificial Sequence
  Description of Artificial Sequence: Synthetic oligonucleotide
ccgccaacaaauuuuccgu

SEQ ID NO: 34584 - RNA, 19 nt, Artificial Sequence
  Description of Artificial Sequence: Synthetic oligonucleotide
agcaagcgucgagaccuau

SEQ ID NO: 34585 - RNA, 19 nt, Artificial Sequence
  Description of Artificial Sequence: Synthetic oligonucleotide
gcaauccgccaacaaauuu

SEQ ID NO: 34586 - RNA, 19 nt, Artificial Sequence
  Description of Artificial Sequence: Synthetic oligonucleotide
cugcgucccuggggcaucc

SEQ ID NO: 34587 - RNA, 19 nt, Artificial Sequence
  Description of Artificial Sequence: Synthetic oligonucleotide
gcaucgaggaacuccuauu

SEQ ID NO: 34588 - RNA, 19 nt, Artificial Sequence
  Description of Artificial Sequence: Synthetic oligonucleotide
ggacaaccccggccagcag

SEQ ID NO: 34589 - RNA, 19 nt, Artificial Sequence
  Description of Artificial Sequence: Synthetic oligonucleotide
ggaaagggaggagacuaau

SEQ ID NO: 34590 - RNA, 19 nt, Artificial Sequence
  Description of Artificial Sequence: Synthetic oligonucleotide
cucgugugccccuguucua

SEQ ID NO: 34591 - RNA, 19 nt, Artificial Sequence
  Description of Artificial Sequence: Synthetic oligonucleotide
gaguuauggcugcgaugau

SEQ ID NO: 34592 - RNA, 19 nt, Artificial Sequence
  Description of Artificial Sequence: Synthetic oligonucleotide
ggacacaagucaaguacau

SEQ ID NO: 34593 - RNA, 19 nt, Artificial Sequence
  Description of Artificial Sequence: Synthetic oligonucleotide
gcuagccauacacgaauuu

SEQ ID NO: 34594 - RNA, 19 nt, Artificial Sequence
  Description of Artificial Sequence: Synthetic oligonucleotide
cgcccuuaugguuagccaa

SEQ ID NO: 34595 - RNA, 19 nt, Artificial Sequence
  Description of Artificial Sequence: Synthetic oligonucleotide
cccguccaaaaugacauua

SEQ ID NO: 34596 - RNA, 19 nt, Artificial Sequence
  Description of Artificial Sequence: Synthetic oligonucleotide
ccacgcacgcacaagcccu

SEQ ID NO: 34597 - RNA, 19 nt, Artificial Sequence
  Description of Artificial Sequence: Synthetic oligonucleotide
gcgaugauuuuggcaugca

SEQ ID NO: 34598 - RNA, 19 nt, Artificial Sequence
  Description of Artificial Sequence: Synthetic oligonucleotide
cacugcguucucacccgcu

SEQ ID NO: 34599 - RNA, 19 nt, Artificial Sequence
  Description of Artificial Sequence: Synthetic oligonucleotide
ccgcccuuaugguuagcca

SEQ ID NO: 34600 - RNA, 19 nt, Artificial Sequence
  Description of Artificial Sequence: Synthetic oligonucleotide
auccgccggugaaccaagu

SEQ ID NO: 34601 - RNA, 19 nt, Artificial Sequence
  Description of Artificial Sequence: Synthetic oligonucleotide
cagcguuuucugcaccauu

SEQ ID NO: 34602 - RNA, 19 nt, Artificial Sequence
  Description of Artificial Sequence: Synthetic oligonucleotide
cagcaagcgucgagaccua

SEQ ID NO: 34603 - RNA, 19 nt, Artificial Sequence
  Description of Artificial Sequence: Synthetic oligonucleotide
cgucgagaccuauggaacu

SEQ ID NO: 34604 - RNA, 19 nt, Artificial Sequence
  Description of Artificial Sequence: Synthetic oligonucleotide
caccgcccuuaugguuagc

SEQ ID NO: 34605 - RNA, 19 nt, Artificial Sequence
  Description of Artificial Sequence: Synthetic oligonucleotide
gcgcaacauacuauacaau

SEQ ID NO: 34606 - RNA, 19 nt, Artificial Sequence
  Description of Artificial Sequence: Synthetic oligonucleotide
cacgcacgcacaagcccuu

SEQ ID NO: 34607 - RNA, 19 nt, Artificial Sequence
  Description of Artificial Sequence: Synthetic oligonucleotide
ggcuagccauacacgaauu

SEQ ID NO: 34608 - RNA, 19 nt, Artificial Sequence
  Description of Artificial Sequence: Synthetic oligonucleotide
gcaggucgauguuccgaau

SEQ ID NO: 34609 - RNA, 19 nt, Artificial Sequence
  Description of Artificial Sequence: Synthetic oligonucleotide
ccgucaccgcccuuauggu

SEQ ID NO: 34610 - RNA, 19 nt, Artificial Sequence
  Description of Artificial Sequence: Synthetic oligonucleotide
cugccucgugugccccugu

SEQ ID NO: 34611 - RNA, 19 nt, Artificial Sequence
  Description of Artificial Sequence: Synthetic oligonucleotide
ggugcaauaauuuagggag

SEQ ID NO: 34612 - RNA, 19 nt, Artificial Sequence
  Description of Artificial Sequence: Synthetic oligonucleotide
ugaauugaagucacuaucc

SEQ ID NO: 34613 - RNA, 19 nt, Artificial Sequence
  Description of Artificial Sequence: Synthetic oligonucleotide
augaauugaagucacuauc

SEQ ID NO: 34614 - RNA, 19 nt, Artificial Sequence
  Description of Artificial Sequence: Synthetic oligonucleotide
uacgaguucgggaagggcg

SEQ ID NO: 34615 - RNA, 19 nt, Artificial Sequence
  Description of Artificial Sequence: Synthetic oligonucleotide
gaugccacgaccccgaggc

SEQ ID NO: 34616 - RNA, 19 nt, Artificial Sequence
  Description of Artificial Sequence: Synthetic oligonucleotide
auauuaacggggucugccc

SEQ ID NO: 34617 - RNA, 19 nt, Artificial Sequence
  Description of Artificial Sequence: Synthetic oligonucleotide
aagugugcgcaccuuggcc

SEQ ID NO: 34618 - RNA, 19 nt, Artificial Sequence
  Description of Artificial Sequence: Synthetic oligonucleotide
acgaucuguagguagcugc

SEQ ID NO: 34619 - RNA, 19 nt, Artificial Sequence
  Description of Artificial Sequence: Synthetic oligonucleotide
acagugaaauacucgccgc

SEQ ID NO: 34620 - RNA, 19 nt, Artificial Sequence
  Description of Artificial Sequence: Synthetic oligonucleotide
caugagucgauucugcagc

SEQ ID NO: 34621 - RNA, 19 nt, Artificial Sequence
  Description of Artificial Sequence: Synthetic oligonucleotide
ggaaccaacgaacuguugg

SEQ ID NO: 34622 - RNA, 19 nt, Artificial Sequence
  Description of Artificial Sequence: Synthetic oligonucleotide
cacagugaaauacucgccg

SEQ ID NO: 34623 - RNA, 19 nt, Artificial Sequence
  Description of Artificial Sequence: Synthetic oligonucleotide
acauggucgauggacaggc

SEQ ID NO: 34624 - RNA, 19 nt, Artificial Sequence
  Description of Artificial Sequence: Synthetic oligonucleotide
uucggauaacucccgaugc

SEQ ID NO: 34625 - RNA, 19 nt, Artificial Sequence
  Description of Artificial Sequence: Synthetic oligonucleotide
ugauucuggacccugcggu

SEQ ID NO: 34626 - RNA, 19 nt, Artificial Sequence
  Description of Artificial Sequence: Synthetic oligonucleotide
auuauagaccugcucgaag

SEQ ID NO: 34627 - RNA, 19 nt, Artificial Sequence
  Description of Artificial Sequence: Synthetic oligonucleotide
acgcuaaucuuguagaaga

SEQ ID NO: 34628 - RNA, 19 nt, Artificial Sequence
  Description of Artificial Sequence: Synthetic oligonucleotide
uaggauaugaggcccggug

SEQ ID NO: 34629 - RNA, 19 nt, Artificial Sequence
  Description of Artificial Sequence: Synthetic oligonucleotide
acucgucaaacacaaucac

SEQ ID NO: 34630 - RNA, 19 nt, Artificial Sequence
  Description of Artificial Sequence: Synthetic oligonucleotide
gaucgugcuaaggacacgg

SEQ ID NO: 34631 - RNA, 19 nt, Artificial Sequence
  Description of Artificial Sequence: Synthetic oligonucleotide
aaagucgcugcuccuuuag

SEQ ID NO: 34632 - RNA, 19 nt, Artificial Sequence
  Description of Artificial Sequence: Synthetic oligonucleotide
aguggaugacgcuuugccg

SEQ ID NO: 34633 - RNA, 19 nt, Artificial Sequence
  Description of Artificial Sequence: Synthetic oligonucleotide
ugaggaagacauacucggg

SEQ ID NO: 34634 - RNA, 19 nt, Artificial Sequence
  Description of Artificial Sequence: Synthetic oligonucleotide
uauuaacggggucugcccc

SEQ ID NO: 34635 - RNA, 19 nt, Artificial Sequence
  Description of Artificial Sequence: Synthetic oligonucleotide
acgggugccguacuuauuc

SEQ ID NO: 34636 - RNA, 19 nt, Artificial Sequence
  Description of Artificial Sequence: Synthetic oligonucleotide
aaaguaucggagaaauacu

SEQ ID NO: 34637 - RNA, 19 nt, Artificial Sequence
  Description of Artificial Sequence: Synthetic oligonucleotide
ccgauuauagaccugcucg

SEQ ID NO: 34638 - RNA, 19 nt, Artificial Sequence
  Description of Artificial Sequence: Synthetic oligonucleotide
ucaugcgaagggaaguccc

SEQ ID NO: 34639 - RNA, 19 nt, Artificial Sequence
  Description of Artificial Sequence: Synthetic oligonucleotide
gaagggugugcccucaccc

SEQ ID NO: 34640 - RNA, 19 nt, Artificial Sequence
  Description of Artificial Sequence: Synthetic oligonucleotide
ucggcuuguacacagugaa

SEQ ID NO: 34641 - RNA, 19 nt, Artificial Sequence
  Description of Artificial Sequence: Synthetic oligonucleotide
ugcaauaauuuagggagca

SEQ ID NO: 34642 - RNA, 19 nt, Artificial Sequence
  Description of Artificial Sequence: Synthetic oligonucleotide
ugaaagcugagcuggcgug

SEQ ID NO: 34643 - RNA, 19 nt, Artificial Sequence
  Description of Artificial Sequence: Synthetic oligonucleotide
auuaacggggucugccccg

SEQ ID NO: 34644 - RNA, 19 nt, Artificial Sequence
  Description of Artificial Sequence: Synthetic oligonucleotide
ucggguggcggcuaucugg

SEQ ID NO: 34645 - RNA, 19 nt, Artificial Sequence
  Description of Artificial Sequence: Synthetic oligonucleotide
gauaacucccgaugccucc

SEQ ID NO: 34646 - RNA, 19 nt, Artificial Sequence
  Description of Artificial Sequence: Synthetic oligonucleotide
accugauuuccugaguuac

SEQ ID NO: 34647 - RNA, 19 nt, Artificial Sequence
  Description of Artificial Sequence: Synthetic oligonucleotide
aguaucggagaaauacugg

SEQ ID NO: 34648 - RNA, 19 nt, Artificial Sequence
  Description of Artificial Sequence: Synthetic oligonucleotide
uacaccagaguucauuaua

SEQ ID NO: 34649 - RNA, 19 nt, Artificial Sequence
  Description of Artificial Sequence: Synthetic oligonucleotide
agugaaauacucgccgcgg

SEQ ID NO: 34650 - RNA, 19 nt, Artificial Sequence
  Description of Artificial Sequence: Synthetic oligonucleotide
guaucggagaaauacugga

SEQ ID NO: 34651 - RNA, 19 nt, Artificial Sequence
  Description of Artificial Sequence: Synthetic oligonucleotide
ugaaauacucgccgcggcu

SEQ ID NO: 34652 - RNA, 19 nt, Artificial Sequence
  Description of Artificial Sequence: Synthetic oligonucleotide
gggauugcauauauuaacg

SEQ ID NO: 34653 - RNA, 19 nt, Artificial Sequence
  Description of Artificial Sequence: Synthetic oligonucleotide
guacaccucuucucaaugg

SEQ ID NO: 34654 - RNA, 19 nt, Artificial Sequence
  Description of Artificial Sequence: Synthetic oligonucleotide
guuacccacggauuccggg

SEQ ID NO: 34655 - RNA, 19 nt, Artificial Sequence
  Description of Artificial Sequence: Synthetic oligonucleotide
uccaguaccucgcgggugc

SEQ ID NO: 34656 - RNA, 19 nt, Artificial Sequence
  Description of Artificial Sequence: Synthetic oligonucleotide
ucggauaacucccgaugcc

SEQ ID NO: 34657 - RNA, 19 nt, Artificial Sequence
  Description of Artificial Sequence: Synthetic oligonucleotide
gaucucguugaugccaggg

SEQ ID NO: 34658 - RNA, 19 nt, Artificial Sequence
  Description of Artificial Sequence: Synthetic oligonucleotide
aaauacucgccgcggcucu

SEQ ID NO: 34659 - RNA, 19 nt, Artificial Sequence
  Description of Artificial Sequence: Synthetic oligonucleotide
aacggggucugccccgugg

SEQ ID NO: 34660 - RNA, 19 nt, Artificial Sequence
  Description of Artificial Sequence: Synthetic oligonucleotide
uuggucuugaggcgcacga

SEQ ID NO: 34661 - RNA, 19 nt, Artificial Sequence
  Description of Artificial Sequence: Synthetic oligonucleotide
cagugaaauacucgccgcg

SEQ ID NO: 34662 - RNA, 19 nt, Artificial Sequence
  Description of Artificial Sequence: Synthetic oligonucleotide
acacagugaaauacucgcc

SEQ ID NO: 34663 - RNA, 19 nt, Artificial Sequence
  Description of Artificial Sequence: Synthetic oligonucleotide
ggacuuucgagacuccagg

SEQ ID NO: 34664 - RNA, 19 nt, Artificial Sequence
  Description of Artificial Sequence: Synthetic oligonucleotide
acuguggcugccuacgagu

SEQ ID NO: 34665 - RNA, 19 nt, Artificial Sequence
  Description of Artificial Sequence: Synthetic oligonucleotide
ucauguguacccggcgucg

SEQ ID NO: 34666 - RNA, 19 nt, Artificial Sequence
  Description of Artificial Sequence: Synthetic oligonucleotide
gaggcgcacgaucuguagg

SEQ ID NO: 34667 - RNA, 19 nt, Artificial Sequence
  Description of Artificial Sequence: Synthetic oligonucleotide
ugcaguacgcggugaacgc

SEQ ID NO: 34668 - RNA, 19 nt, Artificial Sequence
  Description of Artificial Sequence: Synthetic oligonucleotide
uuuguggcacucgucaaac

SEQ ID NO: 34669 - RNA, 19 nt, Artificial Sequence
  Description of Artificial Sequence: Synthetic oligonucleotide
uguggcgcuggcauacacc

SEQ ID NO: 34670 - RNA, 19 nt, Artificial Sequence
  Description of Artificial Sequence: Synthetic oligonucleotide
cugauucggauaacucccg

SEQ ID NO: 34671 - RNA, 19 nt, Artificial Sequence
  Description of Artificial Sequence: Synthetic oligonucleotide
ggggauugcauauauuaac

SEQ ID NO: 34672 - RNA, 19 nt, Artificial Sequence
  Description of Artificial Sequence: Synthetic oligonucleotide
auaucccggaagaaggcgg

SEQ ID NO: 34673 - RNA, 19 nt, Artificial Sequence
  Description of Artificial Sequence: Synthetic oligonucleotide
guggcugccuacgaguucg

SEQ ID NO: 34674 - RNA, 19 nt, Artificial Sequence
  Description of Artificial Sequence: Synthetic oligonucleotide
gaugaauugaagucacuau

SEQ ID NO: 34675 - RNA, 19 nt, Artificial Sequence
  Description of Artificial Sequence: Synthetic oligonucleotide
ucgugcuaaggacacggcu

SEQ ID NO: 34676 - RNA, 19 nt, Artificial Sequence
  Description of Artificial Sequence: Synthetic oligonucleotide
cugccucguaccuuguagg

SEQ ID NO: 34677 - RNA, 19 nt, Artificial Sequence
  Description of Artificial Sequence: Synthetic oligonucleotide
aggauaugaggcccgguga

SEQ ID NO: 34678 - RNA, 19 nt, Artificial Sequence
  Description of Artificial Sequence: Synthetic oligonucleotide
ucgucuugcugccucguac

SEQ ID NO: 34679 - RNA, 19 nt, Artificial Sequence
  Description of Artificial Sequence: Synthetic oligonucleotide
gaaugggguggaaccaacg

SEQ ID NO: 34680 - RNA, 19 nt, Artificial Sequence
  Description of Artificial Sequence: Synthetic oligonucleotide
cucggaggcaccuguggcg

SEQ ID NO: 34681 - RNA, 19 nt, Artificial Sequence
  Description of Artificial Sequence: Synthetic oligonucleotide
ugcaugagucgauucugca

SEQ ID NO: 34682 - RNA, 19 nt, Artificial Sequence
  Description of Artificial Sequence: Synthetic oligonucleotide
caucuagcagcgacucugg

SEQ ID NO: 34683 - RNA, 19 nt, Artificial Sequence
  Description of Artificial Sequence: Synthetic oligonucleotide
ugauucggauaacucccga

SEQ ID NO: 34684 - RNA, 19 nt, Artificial Sequence
  Description of Artificial Sequence: Synthetic oligonucleotide
caguuguaauccagggacc

SEQ ID NO: 34685 - RNA, 19 nt, Artificial Sequence
  Description of Artificial Sequence: Synthetic oligonucleotide
guggucgaaaguaucggag

SEQ ID NO: 34686 - RNA, 19 nt, Artificial Sequence
  Description of Artificial Sequence: Synthetic oligonucleotide
ggcuacaagcuucucgccg

SEQ ID NO: 34687 - RNA, 19 nt, Artificial Sequence
  Description of Artificial Sequence: Synthetic oligonucleotide
ucgucaucuagcagcgacu

SEQ ID NO: 34688 - RNA, 19 nt, Artificial Sequence
  Description of Artificial Sequence: Synthetic oligonucleotide
cucgaaggcggggacagcg

SEQ ID NO: 34689 - RNA, 19 nt, Artificial Sequence
  Description of Artificial Sequence: Synthetic oligonucleotide
auacucgggcgcugagacc

SEQ ID NO: 34690 - RNA, 19 nt, Artificial Sequence
  Description of Artificial Sequence: Synthetic oligonucleotide
uucaaugagguggucgaaa

SEQ ID NO: 34691 - RNA, 19 nt, Artificial Sequence
  Description of Artificial Sequence: Synthetic oligonucleotide
gugaaauacucgccgcggc

SEQ ID NO: 34692 - RNA, 19 nt, Artificial Sequence
  Description of Artificial Sequence: Synthetic oligonucleotide
agggaagcgcgaucgcgcg

SEQ ID NO: 34693 - RNA, 19 nt, Artificial Sequence
  Description of Artificial Sequence: Synthetic oligonucleotide
ugagcuggcgugcaaugua

SEQ ID NO: 34694 - RNA, 19 nt, Artificial Sequence
  Description of Artificial Sequence: Synthetic oligonucleotide
gguaguguugucaccauac

SEQ ID NO: 34695 - RNA, 19 nt, Artificial Sequence
  Description of Artificial Sequence: Synthetic oligonucleotide
gcugccgucacugauucgg

SEQ ID NO: 34696 - RNA, 19 nt, Artificial Sequence
  Description of Artificial Sequence: Synthetic oligonucleotide
aacagggcguucugcuugu

SEQ ID NO: 34697 - RNA, 19 nt, Artificial Sequence
  Description of Artificial Sequence: Synthetic oligonucleotide
gaccucggucaucuguggg

SEQ ID NO: 34698 - RNA, 19 nt, Artificial Sequence
  Description of Artificial Sequence: Synthetic oligonucleotide
aguaccucgcgggugcgcg

SEQ ID NO: 34699 - RNA, 19 nt, Artificial Sequence
  Description of Artificial Sequence: Synthetic oligonucleotide
uucauaccacgguccacgc

SEQ ID NO: 34700 - RNA, 19 nt, Artificial Sequence
  Description of Artificial Sequence: Synthetic oligonucleotide
cacgcuaaucuuguagaag

SEQ ID NO: 34701 - RNA, 19 nt, Artificial Sequence
  Description of Artificial Sequence: Synthetic oligonucleotide
caguacgcggugaacgcag

SEQ ID NO: 34702 - RNA, 19 nt, Artificial Sequence
  Description of Artificial Sequence: Synthetic oligonucleotide
gaaccaacgaacuguuggu

SEQ ID NO: 34703 - RNA, 19 nt, Artificial Sequence
  Description of Artificial Sequence: Synthetic oligonucleotide
gcuacaagcuucucgccgc

SEQ ID NO: 34704 - RNA, 19 nt, Artificial Sequence
  Description of Artificial Sequence: Synthetic oligonucleotide
gauucuggacccugcgguc

SEQ ID NO: 34705 - RNA, 19 nt, Artificial Sequence
  Description of Artificial Sequence: Synthetic oligonucleotide
ugccucguaccuuguagga

SEQ ID NO: 34706 - RNA, 19 nt, Artificial Sequence
  Description of Artificial Sequence: Synthetic oligonucleotide
acauccgccaugacggcgg

SEQ ID NO: 34707 - RNA, 19 nt, Artificial Sequence
  Description of Artificial Sequence: Synthetic oligonucleotide
accaacgaacuguugguuu

SEQ ID NO: 34708 - RNA, 19 nt, Artificial Sequence
  Description of Artificial Sequence: Synthetic oligonucleotide
uacccggcgucgcugauuc

SEQ ID NO: 34709 - RNA, 19 nt, Artificial Sequence
  Description of Artificial Sequence: Synthetic oligonucleotide
ugacccgguggaacuugcg

SEQ ID NO: 34710 - RNA, 19 nt, Artificial Sequence
  Description of Artificial Sequence: Synthetic oligonucleotide
cauuucauaccacggucca

SEQ ID NO: 34711 - RNA, 19 nt, Artificial Sequence
  Description of Artificial Sequence: Synthetic oligonucleotide
gacauccgccaugacggcg

SEQ ID NO: 34712 - RNA, 19 nt, Artificial Sequence
  Description of Artificial Sequence: Synthetic oligonucleotide
gggugcaauaauuuaggga

SEQ ID NO: 34713 - RNA, 19 nt, Artificial Sequence
  Description of Artificial Sequence: Synthetic oligonucleotide
cucguaccuuguaggagag

SEQ ID NO: 34714 - RNA, 19 nt, Artificial Sequence
  Description of Artificial Sequence: Synthetic oligonucleotide
cugggagcggcagcgaagg

SEQ ID NO: 34715 - RNA, 19 nt, Artificial Sequence
  Description of Artificial Sequence: Synthetic oligonucleotide
uggaugacgcuuugccgcu

SEQ ID NO: 34716 - RNA, 19 nt, Artificial Sequence
  Description of Artificial Sequence: Synthetic oligonucleotide
uuagggagcaggggauugc

SEQ ID NO: 34717 - RNA, 19 nt, Artificial Sequence
  Description of Artificial Sequence: Synthetic oligonucleotide
acccuguuguccgucuggc

SEQ ID NO: 34718 - RNA, 19 nt, Artificial Sequence
  Description of Artificial Sequence: Synthetic oligonucleotide
acgaguucgggaagggcgg

SEQ ID NO: 34719 - RNA, 19 nt, Artificial Sequence
  Description of Artificial Sequence: Synthetic oligonucleotide
ucgcgcguggagugggugg

SEQ ID NO: 34720 - RNA, 19 nt, Artificial Sequence
  Description of Artificial Sequence: Synthetic oligonucleotide
uagacagcggggccucagc

SEQ ID NO: 34721 - RNA, 19 nt, Artificial Sequence
  Description of Artificial Sequence: Synthetic oligonucleotide
uggaaccaacgaacuguug

SEQ ID NO: 34722 - RNA, 19 nt, Artificial Sequence
  Description of Artificial Sequence: Synthetic oligonucleotide
ggcgcuggcauacaccacc

SEQ ID NO: 34723 - RNA, 19 nt, Artificial Sequence
  Description of Artificial Sequence: Synthetic oligonucleotide
gacagcagacccuguuuca

SEQ ID NO: 34724 - RNA, 19 nt, Artificial Sequence
  Description of Artificial Sequence: Synthetic oligonucleotide
ggugcggccaaacugcuga

SEQ ID NO: 34725 - RNA, 19 nt, Artificial Sequence
  Description of Artificial Sequence: Synthetic oligonucleotide
cugccuacgaguucgggaa

SEQ ID NO: 34726 - RNA, 19 nt, Artificial Sequence
  Description of Artificial Sequence: Synthetic oligonucleotide
ggcgggugcaauaauuuag

SEQ ID NO: 34727 - RNA, 19 nt, Artificial Sequence
  Description of Artificial Sequence: Synthetic oligonucleotide
guagaucauguugcggggc

SEQ ID NO: 34728 - RNA, 19 nt, Artificial Sequence
  Description of Artificial Sequence: Synthetic oligonucleotide
agcucgucuugcugccucg

SEQ ID NO: 34729 - RNA, 19 nt, Artificial Sequence
  Description of Artificial Sequence: Synthetic oligonucleotide
gacccgguugcggagcccg

SEQ ID NO: 34730 - RNA, 19 nt, Artificial Sequence
  Description of Artificial Sequence: Synthetic oligonucleotide
gugcaauaauuuagggagc

SEQ ID NO: 34731 - RNA, 19 nt, Artificial Sequence
  Description of Artificial Sequence: Synthetic oligonucleotide
aagcgcuggugugcugacc

SEQ ID NO: 34732 - RNA, 19 nt, Artificial Sequence
  Description of Artificial Sequence: Synthetic oligonucleotide
aagcccucgccgcaccacu

SEQ ID NO: 34733 - RNA, 19 nt, Artificial Sequence
  Description of Artificial Sequence: Synthetic oligonucleotide
auaugaggcccggugaaaa

SEQ ID NO: 34734 - RNA, 19 nt, Artificial Sequence
  Description of Artificial Sequence: Synthetic oligonucleotide
uguguacccggcgucgcug

SEQ ID NO: 34735 - RNA, 19 nt, Artificial Sequence
  Description of Artificial Sequence: Synthetic oligonucleotide
gucgcugcuccuuuagaga

SEQ ID NO: 34736 - RNA, 19 nt, Artificial Sequence
  Description of Artificial Sequence: Synthetic oligonucleotide
ugccuacgaguucgggaag

SEQ ID NO: 34737 - RNA, 19 nt, Artificial Sequence
  Description of Artificial Sequence: Synthetic oligonucleotide
gggcuaccaaaccccaugg

SEQ ID NO: 34738 - RNA, 19 nt, Artificial Sequence
  Description of Artificial Sequence: Synthetic oligonucleotide
cacccuguuguccgucugg

SEQ ID NO: 34739 - RNA, 19 nt, Artificial Sequence
  Description of Artificial Sequence: Synthetic oligonucleotide
gccgccaaugcccacagac

SEQ ID NO: 34740 - RNA, 19 nt, Artificial Sequence
  Description of Artificial Sequence: Synthetic oligonucleotide
uggcuacaagcuucucgcc

SEQ ID NO: 34741 - RNA, 19 nt, Artificial Sequence
  Description of Artificial Sequence: Synthetic oligonucleotide
gaucugacggaggcgugug

SEQ ID NO: 34742 - RNA, 19 nt, Artificial Sequence
  Description of Artificial Sequence: Synthetic oligonucleotide
aucgugcuaaggacacggc

SEQ ID NO: 34743 - RNA, 19 nt, Artificial Sequence
  Description of Artificial Sequence: Synthetic oligonucleotide
gcgggugcaauaauuuagg

SEQ ID NO: 34744 - RNA, 19 nt, Artificial Sequence
  Description of Artificial Sequence: Synthetic oligonucleotide
agacagcggggccucagca

SEQ ID NO: 34745 - RNA, 19 nt, Artificial Sequence
  Description of Artificial Sequence: Synthetic oligonucleotide
gucauguguacccggcguc

SEQ ID NO: 34746 - RNA, 19 nt, Artificial Sequence
  Description of Artificial Sequence: Synthetic oligonucleotide
cgauucugcagcuggacgc

SEQ ID NO: 34747 - RNA, 19 nt, Artificial Sequence
  Description of Artificial Sequence: Synthetic oligonucleotide
aaccaacgaacuguugguu

SEQ ID NO: 34748 - RNA, 19 nt, Artificial Sequence
  Description of Artificial Sequence: Synthetic oligonucleotide
agaagccgucauagggacc

SEQ ID NO: 34749 - RNA, 19 nt, Artificial Sequence
  Description of Artificial Sequence: Synthetic oligonucleotide
ggggcuaccaaaccccaug

SEQ ID NO: 34750 - RNA, 19 nt, Artificial Sequence
  Description of Artificial Sequence: Synthetic oligonucleotide
guucccggccaagugugcg

SEQ ID NO: 34751 - RNA, 19 nt, Artificial Sequence
  Description of Artificial Sequence: Synthetic oligonucleotide
aguacgcggugaacgcagc

SEQ ID NO: 34752 - RNA, 19 nt, Artificial Sequence
  Description of Artificial Sequence: Synthetic oligonucleotide
cucguccaguaccucgcgg

SEQ ID NO: 34753 - RNA, 19 nt, Artificial Sequence
  Description of Artificial Sequence: Synthetic oligonucleotide
gcgucgcugauucuggacc

SEQ ID NO: 34754 - RNA, 19 nt, Artificial Sequence
  Description of Artificial Sequence: Synthetic oligonucleotide
cucagacccgguugcggag

SEQ ID NO: 34755 - RNA, 19 nt, Artificial Sequence
  Description of Artificial Sequence: Synthetic oligonucleotide
ggugcgcuagcuccgcggg

SEQ ID NO: 34756 - RNA, 19 nt, Artificial Sequence
  Description of Artificial Sequence: Synthetic oligonucleotide
gagagcacgggugccguac

SEQ ID NO: 34757 - RNA, 19 nt, Artificial Sequence
  Description of Artificial Sequence: Synthetic oligonucleotide
ucagacccgguugcggagc

SEQ ID NO: 34758 - RNA, 19 nt, Artificial Sequence
  Description of Artificial Sequence: Synthetic oligonucleotide
uuguggcacucgucaaaca

SEQ ID NO: 34759 - RNA, 19 nt, Artificial Sequence
  Description of Artificial Sequence: Synthetic oligonucleotide
ugacauccgccaugacggc

SEQ ID NO: 34760 - RNA, 19 nt, Artificial Sequence
  Description of Artificial Sequence: Synthetic oligonucleotide
gcgggaucuccucaaugcg

SEQ ID NO: 34761 - RNA, 19 nt, Artificial Sequence
  Description of Artificial Sequence: Synthetic oligonucleotide
gcggccaaacugcugaaug

SEQ ID NO: 34762 - RNA, 19 nt, Artificial Sequence
  Description of Artificial Sequence: Synthetic oligonucleotide
aacucccgaugccuccagu

SEQ ID NO: 34763 - RNA, 19 nt, Artificial Sequence
  Description of Artificial Sequence: Synthetic oligonucleotide
ugagucgauucugcagcug

SEQ ID NO: 34764 - RNA, 19 nt, Artificial Sequence
  Description of Artificial Sequence: Synthetic oligonucleotide
uugaugccacgaccccgag

SEQ ID NO: 34765 - RNA, 19 nt, Artificial Sequence
  Description of Artificial Sequence: Synthetic oligonucleotide
ggaugaauugaagucacua

SEQ ID NO: 34766 - RNA, 19 nt, Artificial Sequence
  Description of Artificial Sequence: Synthetic oligonucleotide
cgugcuaaggacacggcug

SEQ ID NO: 34767 - RNA, 19 nt, Artificial Sequence
  Description of Artificial Sequence: Synthetic oligonucleotide
auaacucccgaugccucca

SEQ ID NO: 34768 - RNA, 19 nt, Artificial Sequence
  Description of Artificial Sequence: Synthetic oligonucleotide
cuacgaguucgggaagggc

SEQ ID NO: 34769 - RNA, 19 nt, Artificial Sequence
  Description of Artificial Sequence: Synthetic oligonucleotide
gauucggauaacucccgau

SEQ ID NO: 34770 - RNA, 19 nt, Artificial Sequence
  Description of Artificial Sequence: Synthetic oligonucleotide
aggggauugcauauauuaa

SEQ ID NO: 34771 - RNA, 19 nt, Artificial Sequence
  Description of Artificial Sequence: Synthetic oligonucleotide
gaacaagcucagggcuucg

SEQ ID NO: 34772 - RNA, 19 nt, Artificial Sequence
  Description of Artificial Sequence: Synthetic oligonucleotide
ggucgaaaguaucggagaa

SEQ ID NO: 34773 - RNA, 19 nt, Artificial Sequence
  Description of Artificial Sequence: Synthetic oligonucleotide
uggaagcgaaccugcgcuc

SEQ ID NO: 34774 - RNA, 19 nt, Artificial Sequence
  Description of Artificial Sequence: Synthetic oligonucleotide
aauacucgccgcggcucug

SEQ ID NO: 34775 - RNA, 19 nt, Artificial Sequence
  Description of Artificial Sequence: Synthetic oligonucleotide
guacuugcucaggucucgg

SEQ ID NO: 34776 - RNA, 19 nt, Artificial Sequence
  Description of Artificial Sequence: Synthetic oligonucleotide
ggcuaccaaaccccauggg

SEQ ID NO: 34777 - RNA, 19 nt, Artificial Sequence
  Description of Artificial Sequence: Synthetic oligonucleotide
guacgcggugaacgcagcc

SEQ ID NO: 34778 - RNA, 19 nt, Artificial Sequence
  Description of Artificial Sequence: Synthetic oligonucleotide
cauggucgauggacaggcc

SEQ ID NO: 34779 - RNA, 19 nt, Artificial Sequence
  Description of Artificial Sequence: Synthetic oligonucleotide
gggucugccccguggaacc

SEQ ID NO: 34780 - RNA, 19 nt, Artificial Sequence
  Description of Artificial Sequence: Synthetic oligonucleotide
cgauguucggcuuguacac

SEQ ID NO: 34781 - RNA, 19 nt, Artificial Sequence
  Description of Artificial Sequence: Synthetic oligonucleotide
cauguguacccggcgucgc

SEQ ID NO: 34782 - RNA, 19 nt, Artificial Sequence
  Description of Artificial Sequence: Synthetic oligonucleotide
gcuaccaaaccccaugggu

SEQ ID NO: 34783 - RNA, 19 nt, Artificial Sequence
  Description of Artificial Sequence: Synthetic oligonucleotide
acucgccgcggcucuguuc

SEQ ID NO: 34784 - RNA, 19 nt, Artificial Sequence
  Description of Artificial Sequence: Synthetic oligonucleotide
ugacggaggcgugugcggu

SEQ ID NO: 34785 - RNA, 19 nt, Artificial Sequence
  Description of Artificial Sequence: Synthetic oligonucleotide
gggacuuucgagacuccag

SEQ ID NO: 34786 - RNA, 19 nt, Artificial Sequence
  Description of Artificial Sequence: Synthetic oligonucleotide
cucgggacucgguggcccg

SEQ ID NO: 34787 - RNA, 19 nt, Artificial Sequence
  Description of Artificial Sequence: Synthetic oligonucleotide
cugguugucggggaaggca

SEQ ID NO: 34788 - RNA, 19 nt, Artificial Sequence
  Description of Artificial Sequence: Synthetic oligonucleotide
cacggauuccggggcaggg

SEQ ID NO: 34789 - RNA, 19 nt, Artificial Sequence
  Description of Artificial Sequence: Synthetic oligonucleotide
uuaacggggucugccccgu

SEQ ID NO: 34790 - RNA, 19 nt, Artificial Sequence
  Description of Artificial Sequence: Synthetic oligonucleotide
uugucggggaaggcacugc

SEQ ID NO: 34791 - RNA, 19 nt, Artificial Sequence
  Description of Artificial Sequence: Synthetic oligonucleotide
ugacgcuuugccgcucugu

SEQ ID NO: 34792 - RNA, 19 nt, Artificial Sequence
  Description of Artificial Sequence: Synthetic oligonucleotide
ggggaugaauugaagucac

SEQ ID NO: 34793 - RNA, 19 nt, Artificial Sequence
  Description of Artificial Sequence: Synthetic oligonucleotide
agguaguguugucaccaua

SEQ ID NO: 34794 - RNA, 19 nt, Artificial Sequence
  Description of Artificial Sequence: Synthetic oligonucleotide
ggauaugaggcccggugaa

SEQ ID NO: 34795 - RNA, 19 nt, Artificial Sequence
  Description of Artificial Sequence: Synthetic oligonucleotide
aaggggcgggugcaauaau

SEQ ID NO: 34796 - RNA, 19 nt, Artificial Sequence
  Description of Artificial Sequence: Synthetic oligonucleotide
auguguacccggcgucgcu

SEQ ID NO: 34797 - RNA, 19 nt, Artificial Sequence
  Description of Artificial Sequence: Synthetic oligonucleotide
gaaagucgcugcuccuuua

SEQ ID NO: 34798 - RNA, 19 nt, Artificial Sequence
  Description of Artificial Sequence: Synthetic oligonucleotide
uggcugccuacgaguucgg

SEQ ID NO: 34799 - RNA, 19 nt, Artificial Sequence
  Description of Artificial Sequence: Synthetic oligonucleotide
ugcgcgccuccccugugga

SEQ ID NO: 34800 - RNA, 19 nt, Artificial Sequence
  Description of Artificial Sequence: Synthetic oligonucleotide
ccucguaccuuguaggaga

SEQ ID NO: 34801 - RNA, 19 nt, Artificial Sequence
  Description of Artificial Sequence: Synthetic oligonucleotide
ugcugccgucacugauucg

SEQ ID NO: 34802 - RNA, 19 nt, Artificial Sequence
  Description of Artificial Sequence: Synthetic oligonucleotide
uguuguccgucuggcccag

SEQ ID NO: 34803 - RNA, 19 nt, Artificial Sequence
  Description of Artificial Sequence: Synthetic oligonucleotide
gcugccuacgaguucggga

SEQ ID NO: 34804 - RNA, 19 nt, Artificial Sequence
  Description of Artificial Sequence: Synthetic oligonucleotide
cagccagugcgagacuccc

SEQ ID NO: 34805 - RNA, 19 nt, Artificial Sequence
  Description of Artificial Sequence: Synthetic oligonucleotide
caucaaagcccucgccgca

SEQ ID NO: 34806 - RNA, 19 nt, Artificial Sequence
  Description of Artificial Sequence: Synthetic oligonucleotide
cagugcgugcacugcgaug

SEQ ID NO: 34807 - RNA, 19 nt, Artificial Sequence
  Description of Artificial Sequence: Synthetic oligonucleotide
gcgcacgaucuguagguag

SEQ ID NO: 34808 - RNA, 19 nt, Artificial Sequence
  Description of Artificial Sequence: Synthetic oligonucleotide
gggccgcccgauuauagac

SEQ ID NO: 34809 - RNA, 19 nt, Artificial Sequence
  Description of Artificial Sequence: Synthetic oligonucleotide
gugcgcgccuccccugugg

SEQ ID NO: 34810 - RNA, 19 nt, Artificial Sequence
  Description of Artificial Sequence: Synthetic oligonucleotide
ggaagcgcgaucgcgcgug

SEQ ID NO: 34811 - RNA, 19 nt, Artificial Sequence
  Description of Artificial Sequence: Synthetic oligonucleotide
cacgaucuguagguagcug

SEQ ID NO: 34812 - RNA, 19 nt, Artificial Sequence
  Description of Artificial Sequence: Synthetic oligonucleotide
ggcuacaaugcuccagcga

SEQ ID NO: 34813 - RNA, 19 nt, Artificial Sequence
  Description of Artificial Sequence: Synthetic oligonucleotide
uccggaagggugugcccuc

SEQ ID NO: 34814 - RNA, 19 nt, Artificial Sequence
  Description of Artificial Sequence: Synthetic oligonucleotide
cagacccgguugcggagcc

SEQ ID NO: 34815 - RNA, 19 nt, Artificial Sequence
  Description of Artificial Sequence: Synthetic oligonucleotide
ccuugaugccacgaccccg

SEQ ID NO: 34816 - RNA, 19 nt, Artificial Sequence
  Description of Artificial Sequence: Synthetic oligonucleotide
uaccucgcgggugcgcgcc

SEQ ID NO: 34817 - RNA, 19 nt, Artificial Sequence
  Description of Artificial Sequence: Synthetic oligonucleotide
gccuacgaguucgggaagg

SEQ ID NO: 34818 - RNA, 19 nt, Artificial Sequence
  Description of Artificial Sequence: Synthetic oligonucleotide
gaguucgggaagggcgggc

SEQ ID NO: 34819 - RNA, 19 nt, Artificial Sequence
  Description of Artificial Sequence: Synthetic oligonucleotide
cgggugcaauaauuuaggg

SEQ ID NO: 34820 - RNA, 19 nt, Artificial Sequence
  Description of Artificial Sequence: Synthetic oligonucleotide
gugcgcuagcuccgcgggg

SEQ ID NO: 34821 - RNA, 19 nt, Artificial Sequence
  Description of Artificial Sequence: Synthetic oligonucleotide
gugggccccgcgcguaggg

SEQ ID NO: 34822 - RNA, 19 nt, Artificial Sequence
  Description of Artificial Sequence: Synthetic oligonucleotide
gcguagggagcgcagcaug

SEQ ID NO: 34823 - RNA, 19 nt, Artificial Sequence
  Description of Artificial Sequence: Synthetic oligonucleotide
augacgcuuugccgcucug

SEQ ID NO: 34824 - RNA, 19 nt, Artificial Sequence
  Description of Artificial Sequence: Synthetic oligonucleotide
ggucugcgcuccaaggcag

SEQ ID NO: 34825 - RNA, 19 nt, Artificial Sequence
  Description of Artificial Sequence: Synthetic oligonucleotide
cucgccgcggcucuguucu

SEQ ID NO: 34826 - RNA, 19 nt, Artificial Sequence
  Description of Artificial Sequence: Synthetic oligonucleotide
guagggagcgcagcauguc

SEQ ID NO: 34827 - RNA, 19 nt, Artificial Sequence
  Description of Artificial Sequence: Synthetic oligonucleotide
ggauaacucccgaugccuc

SEQ ID NO: 34828 - RNA, 19 nt, Artificial Sequence
  Description of Artificial Sequence: Synthetic oligonucleotide
cccgauuauagaccugcuc

SEQ ID NO: 34829 - RNA, 19 nt, Artificial Sequence
  Description of Artificial Sequence: Synthetic oligonucleotide
agacccgguugcggagccc

SEQ ID NO: 34830 - RNA, 19 nt, Artificial Sequence
  Description of Artificial Sequence: Synthetic oligonucleotide
gucacgccucuuccuggug

SEQ ID NO: 34831 - RNA, 19 nt, Artificial Sequence
  Description of Artificial Sequence: Synthetic oligonucleotide
gguuacccacggauuccgg

SEQ ID NO: 34832 - RNA, 19 nt, Artificial Sequence
  Description of Artificial Sequence: Synthetic oligonucleotide
ggcgucgcugauucuggac

SEQ ID NO: 34833 - RNA, 19 nt, Artificial Sequence
  Description of Artificial Sequence: Synthetic oligonucleotide
ggaucgugcuaaggacacg

SEQ ID NO: 34834 - RNA, 19 nt, Artificial Sequence
  Description of Artificial Sequence: Synthetic oligonucleotide
acggauuccggggcaggga

SEQ ID NO: 34835 - RNA, 19 nt, Artificial Sequence
  Description of Artificial Sequence: Synthetic oligonucleotide
gccucguaccuuguaggag

SEQ ID NO: 34836 - RNA, 19 nt, Artificial Sequence
  Description of Artificial Sequence: Synthetic oligonucleotide
uaacggggucugccccgug

SEQ ID NO: 34837 - RNA, 19 nt, Artificial Sequence
  Description of Artificial Sequence: Synthetic oligonucleotide
cgauggaagcgaaccugcg

SEQ ID NO: 34838 - RNA, 19 nt, Artificial Sequence
  Description of Artificial Sequence: Synthetic oligonucleotide
cgucgcugauucuggaccc

SEQ ID NO: 34839 - RNA, 19 nt, Artificial Sequence
  Description of Artificial Sequence: Synthetic oligonucleotide
agugggccccgcgcguagg

SEQ ID NO: 34840 - RNA, 19 nt, Artificial Sequence
  Description of Artificial Sequence: Synthetic oligonucleotide
guaccucgcgggugcgcgc

SEQ ID NO: 34841 - RNA, 19 nt, Artificial Sequence
  Description of Artificial Sequence: Synthetic oligonucleotide
ccgggcaguuguaauccag

SEQ ID NO: 34842 - RNA, 19 nt, Artificial Sequence
  Description of Artificial Sequence: Synthetic oligonucleotide
gcuaaggacacggcugaga

SEQ ID NO: 34843 - RNA, 19 nt, Artificial Sequence
  Description of Artificial Sequence: Synthetic oligonucleotide
aucgcgcguggagugggug

SEQ ID NO: 34844 - RNA, 19 nt, Artificial Sequence
  Description of Artificial Sequence: Synthetic oligonucleotide
cgcccgauuauagaccugc

SEQ ID NO: 34845 - RNA, 19 nt, Artificial Sequence
  Description of Artificial Sequence: Synthetic oligonucleotide
cucggguggcggcuaucug

SEQ ID NO: 34846 - RNA, 19 nt, Artificial Sequence
  Description of Artificial Sequence: Synthetic oligonucleotide
cucgggcgcugagaccugg

SEQ ID NO: 34847 - RNA, 19 nt, Artificial Sequence
  Description of Artificial Sequence: Synthetic oligonucleotide
auacucgccgcggcucugu

SEQ ID NO: 34848 - RNA, 19 nt, Artificial Sequence
  Description of Artificial Sequence: Synthetic oligonucleotide
aggggcgggugcaauaauu

SEQ ID NO: 34849 - RNA, 19 nt, Artificial Sequence
  Description of Artificial Sequence: Synthetic oligonucleotide
gacucgguggcccggcgau

SEQ ID NO: 34850 - RNA, 19 nt, Artificial Sequence
  Description of Artificial Sequence: Synthetic oligonucleotide
agcacgggugccguacuua

SEQ ID NO: 34851 - RNA, 19 nt, Artificial Sequence
  Description of Artificial Sequence: Synthetic oligonucleotide
ccgucacugauucggauaa

SEQ ID NO: 34852 - RNA, 19 nt, Artificial Sequence
  Description of Artificial Sequence: Synthetic oligonucleotide
ggccgcccgauuauagacc

SEQ ID NO: 34853 - RNA, 19 nt, Artificial Sequence
  Description of Artificial Sequence: Synthetic oligonucleotide
caacguguucacaggcagu

SEQ ID NO: 34854 - RNA, 19 nt, Artificial Sequence
  Description of Artificial Sequence: Synthetic oligonucleotide
cucgcgggugcgcgccucc

SEQ ID NO: 34855 - RNA, 19 nt, Artificial Sequence
  Description of Artificial Sequence: Synthetic oligonucleotide
ggacagcgggaucuccuca

SEQ ID NO: 34856 - RNA, 19 nt, Artificial Sequence
  Description of Artificial Sequence: Synthetic oligonucleotide
gcucuggcggccgauguuc

SEQ ID NO: 34857 - RNA, 19 nt, Artificial Sequence
  Description of Artificial Sequence: Synthetic oligonucleotide
cauccgcagugacccggug

SEQ ID NO: 34858 - RNA, 19 nt, Artificial Sequence
  Description of Artificial Sequence: Synthetic oligonucleotide
cccuggugcgcuagcuccg

SEQ ID NO: 34859 - RNA, 19 nt, Artificial Sequence
  Description of Artificial Sequence: Synthetic oligonucleotide
uaccacgguccacgcuaau

SEQ ID NO: 34860 - RNA, 19 nt, Artificial Sequence
  Description of Artificial Sequence: Synthetic oligonucleotide
uucagccguuccacccguu

SEQ ID NO: 34861 - RNA, 19 nt, Artificial Sequence
  Description of Artificial Sequence: Synthetic oligonucleotide
gcuuugccgcucugugccc

SEQ ID NO: 34862 - RNA, 19 nt, Artificial Sequence
  Description of Artificial Sequence: Synthetic oligonucleotide
cagggcccgccgguuaccc

SEQ ID NO: 34863 - RNA, 19 nt, Artificial Sequence
  Description of Artificial Sequence: Synthetic oligonucleotide
caguaccucgcgggugcgc

SEQ ID NO: 34864 - RNA, 19 nt, Artificial Sequence
  Description of Artificial Sequence: Synthetic oligonucleotide
gcgugugcggugcugccca

SEQ ID NO: 34865 - RNA, 19 nt, Artificial Sequence
  Description of Artificial Sequence: Synthetic oligonucleotide
gcggccgauguucggcuug

SEQ ID NO: 34866 - RNA, 19 nt, Artificial Sequence
  Description of Artificial Sequence: Synthetic oligonucleotide
ggggaccucucugauggca

SEQ ID NO: 34867 - RNA, 19 nt, Artificial Sequence
  Description of Artificial Sequence: Synthetic oligonucleotide
uacucgccgcggcucuguu

SEQ ID NO: 34868 - RNA, 19 nt, Artificial Sequence
  Description of Artificial Sequence: Synthetic oligonucleotide
acccgguugcggagcccgc

SEQ ID NO: 34869 - RNA, 19 nt, Artificial Sequence
  Description of Artificial Sequence: Synthetic oligonucleotide
cgcggucugcgcuccaagg

SEQ ID NO: 34870 - RNA, 19 nt, Artificial Sequence
  Description of Artificial Sequence: Synthetic oligonucleotide
acagucgggccgcccgauu

SEQ ID NO: 34871 - RNA, 19 nt, Artificial Sequence
  Description of Artificial Sequence: Synthetic oligonucleotide
cagucgggccgcccgauua

SEQ ID NO: 34872 - RNA, 19 nt, Artificial Sequence
  Description of Artificial Sequence: Synthetic oligonucleotide
ugcccaccgggcaguugua

SEQ ID NO: 34873 - RNA, 19 nt, Artificial Sequence
  Description of Artificial Sequence: Synthetic oligonucleotide
ccacgguccacgcuaaucu

SEQ ID NO: 34874 - RNA, 19 nt, Artificial Sequence
  Description of Artificial Sequence: Synthetic oligonucleotide
ggcugccuacgaguucggg

SEQ ID NO: 34875 - RNA, 19 nt, Artificial Sequence
  Description of Artificial Sequence: Synthetic oligonucleotide
ugggccccgcgcguaggga

SEQ ID NO: 34876 - RNA, 19 nt, Artificial Sequence
  Description of Artificial Sequence: Synthetic oligonucleotide
ccgcacagcauauagugau

SEQ ID NO: 34877 - RNA, 19 nt, Artificial Sequence
  Description of Artificial Sequence: Synthetic oligonucleotide
gcacccuguuguccgucug

SEQ ID NO: 34878 - RNA, 19 nt, Artificial Sequence
  Description of Artificial Sequence: Synthetic oligonucleotide
ggauaccacacggccuuuc

SEQ ID NO: 34879 - RNA, 19 nt, Artificial Sequence
  Description of Artificial Sequence: Synthetic oligonucleotide
gccgcccgauuauagaccu

SEQ ID NO: 34880 - RNA, 19 nt, Artificial Sequence
  Description of Artificial Sequence: Synthetic oligonucleotide
cuacaagcuucucgccgcu

SEQ ID NO: 34881 - RNA, 19 nt, Artificial Sequence
  Description of Artificial Sequence: Synthetic oligonucleotide
gcgaucgcgcguggagugg

SEQ ID NO: 34882 - RNA, 19 nt, Artificial Sequence
  Description of Artificial Sequence: Synthetic oligonucleotide
gcaguacgcggugaacgca

SEQ ID NO: 34883 - RNA, 19 nt, Artificial Sequence
  Description of Artificial Sequence: Synthetic oligonucleotide
guuguccgucuggcccagg

SEQ ID NO: 34884 - RNA, 19 nt, Artificial Sequence
  Description of Artificial Sequence: Synthetic oligonucleotide
agccgucauagggaccuuu

SEQ ID NO: 34885 - RNA, 19 nt, Artificial Sequence
  Description of Artificial Sequence: Synthetic oligonucleotide
cgccccgcacagcauauag

SEQ ID NO: 34886 - RNA, 19 nt, Artificial Sequence
  Description of Artificial Sequence: Synthetic oligonucleotide
ccucgccgcaccacugcag

SEQ ID NO: 34887 - RNA, 19 nt, Artificial Sequence
  Description of Artificial Sequence: Synthetic oligonucleotide
gccgucauagggaccuuuc

SEQ ID NO: 34888 - RNA, 19 nt, Artificial Sequence
  Description of Artificial Sequence: Synthetic oligonucleotide
ggcgugugcggugcugccc

SEQ ID NO: 34889 - RNA, 19 nt, Artificial Sequence
  Description of Artificial Sequence: Synthetic oligonucleotide
agcccucgccgcaccacug

SEQ ID NO: 34890 - RNA, 19 nt, Artificial Sequence
  Description of Artificial Sequence: Synthetic oligonucleotide
gcgacccucggguggcggc

SEQ ID NO: 34891 - RNA, 19 nt, Artificial Sequence
  Description of Artificial Sequence: Synthetic oligonucleotide
gagacucccggccgccaau

SEQ ID NO: 34892 - RNA, 19 nt, Artificial Sequence
  Description of Artificial Sequence: Synthetic oligonucleotide
cuguggcugccuacgaguu

SEQ ID NO: 34893 - RNA, 19 nt, Artificial Sequence
  Description of Artificial Sequence: Synthetic oligonucleotide
guaggauaugaggcccggu

SEQ ID NO: 34894 - RNA, 19 nt, Artificial Sequence
  Description of Artificial Sequence: Synthetic oligonucleotide
ccauagacagcggggccuc

SEQ ID NO: 34895 - RNA, 19 nt, Artificial Sequence
  Description of Artificial Sequence: Synthetic oligonucleotide
ggcgaagcguggaggcggc

SEQ ID NO: 34896 - RNA, 19 nt, Artificial Sequence
  Description of Artificial Sequence: Synthetic oligonucleotide
ggucggcuuggagggagac

SEQ ID NO: 34897 - RNA, 19 nt, Artificial Sequence
  Description of Artificial Sequence: Synthetic oligonucleotide
gcgcguagggagcgcagca

SEQ ID NO: 34898 - RNA, 19 nt, Artificial Sequence
  Description of Artificial Sequence: Synthetic oligonucleotide
ggaggcgugugcggugcug

SEQ ID NO: 34899 - RNA, 19 nt, Artificial Sequence
  Description of Artificial Sequence: Synthetic oligonucleotide
gugcggccaaacugcugaa

SEQ ID NO: 34900 - RNA, 19 nt, Artificial Sequence
  Description of Artificial Sequence: Synthetic oligonucleotide
cgcgaucgcgcguggagug

SEQ ID NO: 34901 - RNA, 19 nt, Artificial Sequence
  Description of Artificial Sequence: Synthetic oligonucleotide
ucgccgcggcucuguucug

SEQ ID NO: 34902 - RNA, 19 nt, Artificial Sequence
  Description of Artificial Sequence: Synthetic oligonucleotide
gcuccgcgacccucgggug

SEQ ID NO: 34903 - RNA, 19 nt, Artificial Sequence
  Description of Artificial Sequence: Synthetic oligonucleotide
cccugaaauugaugucaca

SEQ ID NO: 34904 - RNA, 19 nt, Artificial Sequence
  Description of Artificial Sequence: Synthetic oligonucleotide
agcgccccgcacagcauau

SEQ ID NO: 34905 - RNA, 19 nt, Artificial Sequence
  Description of Artificial Sequence: Synthetic oligonucleotide
ggaucugacggaggcgugu

SEQ ID NO: 34906 - RNA, 19 nt, Artificial Sequence
  Description of Artificial Sequence: Synthetic oligonucleotide
ccucggucaucugugggga

SEQ ID NO: 34907 - RNA, 19 nt, Artificial Sequence
  Description of Artificial Sequence: Synthetic oligonucleotide
cucgguggcccggcgaucu

SEQ ID NO: 34908 - RNA, 19 nt, Artificial Sequence
  Description of Artificial Sequence: Synthetic oligonucleotide
cugugccagucggcagcgc

SEQ ID NO: 34909 - RNA, 19 nt, Artificial Sequence
  Description of Artificial Sequence: Synthetic oligonucleotide
ggugcgcgccuccccugug

SEQ ID NO: 34910 - RNA, 19 nt, Artificial Sequence
  Description of Artificial Sequence: Synthetic oligonucleotide
accucgcgggugcgcgccu

SEQ ID NO: 34911 - RNA, 19 nt, Artificial Sequence
  Description of Artificial Sequence: Synthetic oligonucleotide
cgaucgcgcguggaguggg

SEQ ID NO: 34912 - RNA, 19 nt, Artificial Sequence
  Description of Artificial Sequence: Synthetic oligonucleotide
ccacggauuccggggcagg

SEQ ID NO: 34913 - RNA, 19 nt, Artificial Sequence
  Description of Artificial Sequence: Synthetic oligonucleotide
cugagagcacgggugccgu

SEQ ID NO: 34914 - RNA, 19 nt, Artificial Sequence
  Description of Artificial Sequence: Synthetic oligonucleotide
ccaggaccgcagggaagcg

SEQ ID NO: 34915 - RNA, 19 nt, Artificial Sequence
  Description of Artificial Sequence: Synthetic oligonucleotide
acucgggcgcugagaccug

SEQ ID NO: 34916 - RNA, 19 nt, Artificial Sequence
  Description of Artificial Sequence: Synthetic oligonucleotide
gguggcccggcgaucucca

SEQ ID NO: 34917 - RNA, 19 nt, Artificial Sequence
  Description of Artificial Sequence: Synthetic oligonucleotide
ccaguaccucgcgggugcg

SEQ ID NO: 34918 - RNA, 19 nt, Artificial Sequence
  Description of Artificial Sequence: Synthetic oligonucleotide
cccacggauuccggggcag

SEQ ID NO: 34919 - RNA, 19 nt, Artificial Sequence
  Description of Artificial Sequence: Synthetic oligonucleotide
gagcacgggugccguacuu

SEQ ID NO: 34920 - RNA, 19 nt, Artificial Sequence
  Description of Artificial Sequence: Synthetic oligonucleotide
gcacgggugccguacuuau

SEQ ID NO: 34921 - RNA, 19 nt, Artificial Sequence
  Description of Artificial Sequence: Synthetic oligonucleotide
cgaguucgggaagggcggg

SEQ ID NO: 34922 - RNA, 19 nt, Artificial Sequence
  Description of Artificial Sequence: Synthetic oligonucleotide
gggugcggccaaacugcug

SEQ ID NO: 34923 - RNA, 19 nt, Artificial Sequence
  Description of Artificial Sequence: Synthetic oligonucleotide
gcgggcugaaguggaugac

SEQ ID NO: 34924 - RNA, 19 nt, Artificial Sequence
  Description of Artificial Sequence: Synthetic oligonucleotide
augcggccccacacgcgca

SEQ ID NO: 34925 - RNA, 19 nt, Artificial Sequence
  Description of Artificial Sequence: Synthetic oligonucleotide
ggaugacgcuuugccgcuc

SEQ ID NO: 34926 - RNA, 19 nt, Artificial Sequence
  Description of Artificial Sequence: Synthetic oligonucleotide
ggggcgggugcaauaauuu

SEQ ID NO: 34927 - RNA, 19 nt, Artificial Sequence
  Description of Artificial Sequence: Synthetic oligonucleotide
gaucgcgcguggagugggu

SEQ ID NO: 34928 - RNA, 19 nt, Artificial Sequence
  Description of Artificial Sequence: Synthetic oligonucleotide
gcgaagcguggaggcggcg

SEQ ID NO: 34929 - RNA, 19 nt, Artificial Sequence
  Description of Artificial Sequence: Synthetic oligonucleotide
ccacgauggaagcgaaccu

SEQ ID NO: 34930 - RNA, 19 nt, Artificial Sequence
  Description of Artificial Sequence: Synthetic oligonucleotide
cccugcggucggcuuggag

SEQ ID NO: 34931 - RNA, 19 nt, Artificial Sequence
  Description of Artificial Sequence: Synthetic oligonucleotide
ccacccguucaaggacacc

SEQ ID NO: 34932 - RNA, 19 nt, Artificial Sequence
  Description of Artificial Sequence: Synthetic oligonucleotide
cccauagacagcggggccu

SEQ ID NO: 34933 - RNA, 19 nt, Artificial Sequence
  Description of Artificial Sequence: Synthetic oligonucleotide
gucgggccgcccgauuaua

SEQ ID NO: 34934 - RNA, 19 nt, Artificial Sequence
  Description of Artificial Sequence: Synthetic oligonucleotide
ccgcgcguagggagcgcag

SEQ ID NO: 34935 - RNA, 19 nt, Artificial Sequence
  Description of Artificial Sequence: Synthetic oligonucleotide
gguugucggggaaggcacu

SEQ ID NO: 34936 - RNA, 19 nt, Artificial Sequence
  Description of Artificial Sequence: Synthetic oligonucleotide
gcucgaaggcggggacagc

SEQ ID NO: 34937 - RNA, 19 nt, Artificial Sequence
  Description of Artificial Sequence: Synthetic oligonucleotide
cguagggagcgcagcaugu

SEQ ID NO: 34938 - RNA, 19 nt, Artificial Sequence
  Description of Artificial Sequence: Synthetic oligonucleotide
ccgcccgauuauagaccug

SEQ ID NO: 34939 - RNA, 19 nt, Artificial Sequence
  Description of Artificial Sequence: Synthetic oligonucleotide
cgcgcguagggagcgcagc

SEQ ID NO: 34940 - RNA, 19 nt, Artificial Sequence
  Description of Artificial Sequence: Synthetic oligonucleotide
cggauaacucccgaugccu

SEQ ID NO: 34941 - RNA, 19 nt, Artificial Sequence
  Description of Artificial Sequence: Synthetic oligonucleotide
ggcgcacgaucuguaggua

SEQ ID NO: 34942 - RNA, 19 nt, Artificial Sequence
  Description of Artificial Sequence: Synthetic oligonucleotide
cacgggugccguacuuauu

SEQ ID NO: 34943 - RNA, 19 nt, Artificial Sequence
  Description of Artificial Sequence: Synthetic oligonucleotide
gggaagcgcgaucgcgcgu

SEQ ID NO: 34944 - RNA, 19 nt, Artificial Sequence
  Description of Artificial Sequence: Synthetic oligonucleotide
cgucacugauucggauaac

SEQ ID NO: 34945 - RNA, 19 nt, Artificial Sequence
  Description of Artificial Sequence: Synthetic oligonucleotide
cccggccaagugugcgcac

SEQ ID NO: 34946 - RNA, 19 nt, Artificial Sequence
  Description of Artificial Sequence: Synthetic oligonucleotide
cgggccgcccgauuauaga

SEQ ID NO: 34947 - RNA, 19 nt, Artificial Sequence
  Description of Artificial Sequence: Synthetic oligonucleotide
guacccggcgucgcugauu

SEQ ID NO: 34948 - RNA, 19 nt, Artificial Sequence
  Description of Artificial Sequence: Synthetic oligonucleotide
gggugcgcgccuccccugu

SEQ ID NO: 34949 - RNA, 19 nt, Artificial Sequence
  Description of Artificial Sequence: Synthetic oligonucleotide
cgcgggugcgcgccucccc

SEQ ID NO: 34950 - RNA, 19 nt, Artificial Sequence
  Description of Artificial Sequence: Synthetic oligonucleotide
ggcucuggcggccgauguu

SEQ ID NO: 34951 - RNA, 19 nt, Artificial Sequence
  Description of Artificial Sequence: Synthetic oligonucleotide
gccccgcacagcauauagu

SEQ ID NO: 34952 - RNA, 19 nt, Artificial Sequence
  Description of Artificial Sequence: Synthetic oligonucleotide
gcgcgaucgcgcguggagu

SEQ ID NO: 34953 - RNA, 19 nt, Artificial Sequence
  Description of Artificial Sequence: Synthetic oligonucleotide
gcccgauuauagaccugcu

SEQ ID NO: 34954 - RNA, 19 nt, Artificial Sequence
  Description of Artificial Sequence: Synthetic oligonucleotide
ggcggcgaugcggccccac

SEQ ID NO: 34955 - RNA, 19 nt, Artificial Sequence
  Description of Artificial Sequence: Synthetic oligonucleotide
ccucggguggcggcuaucu

SEQ ID NO: 34956 - RNA, 19 nt, Artificial Sequence
  Description of Artificial Sequence: Synthetic oligonucleotide
gccgcucaugaagcgcugu

SEQ ID NO: 34957 - RNA, 19 nt, Artificial Sequence
  Description of Artificial Sequence: Synthetic oligonucleotide
cacagucgggccgcccgau

SEQ ID NO: 34958 - RNA, 19 nt, Artificial Sequence
  Description of Artificial Sequence: Synthetic oligonucleotide
cguccaguaccucgcgggu

SEQ ID NO: 34959 - RNA, 19 nt, Artificial Sequence
  Description of Artificial Sequence: Synthetic oligonucleotide
cgagacucccggccgccaa

SEQ ID NO: 34960 - RNA, 19 nt, Artificial Sequence
  Description of Artificial Sequence: Synthetic oligonucleotide
cgggugcgcgccuccccug

SEQ ID NO: 34961 - RNA, 19 nt, Artificial Sequence
  Description of Artificial Sequence: Synthetic oligonucleotide
cccagauacccaggcggcu

SEQ ID NO: 34962 - RNA, 19 nt, Artificial Sequence
  Description of Artificial Sequence: Synthetic oligonucleotide
ggcacucgucaaacacaau

SEQ ID NO: 34963 - RNA, 19 nt, Artificial Sequence
  Description of Artificial Sequence: Synthetic oligonucleotide
cgggugccguacuuauucu

SEQ ID NO: 34964 - RNA, 19 nt, Artificial Sequence
  Description of Artificial Sequence: Synthetic oligonucleotide
cgcgccuccccuguggacu

SEQ ID NO: 34965 - RNA, 19 nt, Artificial Sequence
  Description of Artificial Sequence: Synthetic oligonucleotide
ggcggccgauguucggcuu

SEQ ID NO: 34966 - RNA, 19 nt, Artificial Sequence
  Description of Artificial Sequence: Synthetic oligonucleotide
ccgcucaugaagcgcuguu

SEQ ID NO: 34967 - RNA, 19 nt, Artificial Sequence
  Description of Artificial Sequence: Synthetic oligonucleotide
cccucggguggcggcuauc

SEQ ID NO: 34968 - RNA, 19 nt, Artificial Sequence
  Description of Artificial Sequence: Synthetic oligonucleotide
cggccaagugugcgcaccu

SEQ ID NO: 34969 - RNA, 19 nt, Artificial Sequence
  Description of Artificial Sequence: Synthetic oligonucleotide
gcgccccgcacagcauaua

SEQ ID NO: 34970 - RNA, 19 nt, Artificial Sequence
  Description of Artificial Sequence: Synthetic oligonucleotide
ccgcagugacccgguggaa

SEQ ID NO: 34971 - RNA, 19 nt, Artificial Sequence
  Description of Artificial Sequence: Synthetic oligonucleotide
ccgucuggcccaggaucgu

SEQ ID NO: 34972 - RNA, 19 nt, Artificial Sequence
  Description of Artificial Sequence: Synthetic oligonucleotide
cgaccccgaggcccgccuu

SEQ ID NO: 34973 - RNA, 19 nt, Artificial Sequence
  Description of Artificial Sequence: Synthetic oligonucleotide
caucaaaugaguuucaugc

SEQ ID NO: 34974 - RNA, 19 nt, Artificial Sequence
  Description of Artificial Sequence: Synthetic oligonucleotide
ucagauaccauuuugcugc

SEQ ID NO: 34975 - RNA, 19 nt, Artificial Sequence
  Description of Artificial Sequence: Synthetic oligonucleotide
  modified_base (14)..(14): a, c, u, g, unknown or other
aaaagcuugccgunuuccc

SEQ ID NO: 34976 - RNA, 19 nt, Artificial Sequence
  Description of Artificial Sequence: Synthetic oligonucleotide
uauaauacagauuccagug

SEQ ID NO: 34977 - RNA, 19 nt, Artificial Sequence
  Description of Artificial Sequence: Synthetic oligonucleotide
ucaaguagaucucagauac

SEQ ID NO: 34978 - RNA, 19 nt, Artificial Sequence
  Description of Artificial Sequence: Synthetic oligonucleotide
  modified_base (4)..(4): a, c, u, g, unknown or other
  modified_base (11)..(11): a, c, u, g, unknown or other
ucanaggggancuugauga

SEQ ID NO: 34979 - RNA, 19 nt, Artificial Sequence
  Description of Artificial Sequence: Synthetic oligonucleotide
  modified_base (2)..(2): a, c, u, g, unknown or other
anaaaaccccgcuuuauug

SEQ ID NO: 34980 - RNA, 19 nt, Artificial Sequence
  Description of Artificial Sequence: Synthetic oligonucleotide
auuguauugaggccugucc

SEQ ID NO: 34981 - RNA, 19 nt, Artificial Sequence
  Description of Artificial Sequence: Synthetic oligonucleotide
agcauauugaacucugugg

SEQ ID NO: 34982 - RNA, 19 nt, Artificial Sequence
  Description of Artificial Sequence: Synthetic oligonucleotide
ugucaaagugaugacaugg

SEQ ID NO: 34983 - RNA, 19 nt, Artificial Sequence
  Description of Artificial Sequence: Synthetic oligonucleotide
  modified_base (8)..(8): a, c, u, g, unknown or other
uuagauanaaaaccccgcu

SEQ ID NO: 34984 - RNA, 19 nt, Artificial Sequence
  Description of Artificial Sequence: Synthetic oligonucleotide
uaucagacaaucagcauug

SEQ ID NO: 34985 - RNA, 19 nt, Artificial Sequence
  Description of Artificial Sequence: Synthetic oligonucleotide
caguuuagaacuuucacug

SEQ ID NO: 34986 - RNA, 19 nt, Artificial Sequence
  Description of Artificial Sequence: Synthetic oligonucleotide
acuuauuggaaggugaguc

SEQ ID NO: 34987 - RNA, 19 nt, Artificial Sequence
  Description of Artificial Sequence: Synthetic oligonucleotide
gagggauuugaguaggagg

SEQ ID NO: 34988 - RNA, 19 nt, Artificial Sequence
  Description of Artificial Sequence: Synthetic oligonucleotide
gagaccaagaaugucaaag

SEQ ID NO: 34989 - RNA, 19 nt, Artificial Sequence
  Description of Artificial Sequence: Synthetic oligonucleotide
  modified_base (9)..(9): a, c, u, g, unknown or other
auuagauanaaaaccccgc

SEQ ID NO: 34990 - RNA, 19 nt, Artificial Sequence
  Description of Artificial Sequence: Synthetic oligonucleotide
  modified_base (13)..(13): a, c, u, g, unknown or other
aaagcuugccgunuucccc

SEQ ID NO: 34991 - RNA, 19 nt, Artificial Sequence
  Description of Artificial Sequence: Synthetic oligonucleotide
aaguagaucucagauacca

SEQ ID NO: 34992 - RNA, 19 nt, Artificial Sequence
  Description of Artificial Sequence: Synthetic oligonucleotide
uugauugcacaguacagca

SEQ ID NO: 34993 - RNA, 19 nt, Artificial Sequence
  Description of Artificial Sequence: Synthetic oligonucleotide
uuuugagacaccaguguga

SEQ ID NO: 34994 - RNA, 19 nt, Artificial Sequence
  Description of Artificial Sequence: Synthetic oligonucleotide
aaugucaaagugaugacau

SEQ ID NO: 34995 - RNA, 19 nt, Artificial Sequence
  Description of Artificial Sequence: Synthetic oligonucleotide
auaguaucuuucuacccag

SEQ ID NO: 34996 - RNA, 19 nt, Artificial Sequence
  Description of Artificial Sequence: Synthetic oligonucleotide
gauuugaguaggaggaggg

SEQ ID NO: 34997 - RNA, 19 nt, Artificial Sequence
  Description of Artificial Sequence: Synthetic oligonucleotide
  modified_base (2)..(2): a, c, u, g, unknown or other
  modified_base (9)..(9): a, c, u, g, unknown or other
anaggggancuugaugagg

SEQ ID NO: 34998 - RNA, 19 nt, Artificial Sequence
  Description of Artificial Sequence: Synthetic oligonucleotide
auaucagacaaucagcauu

SEQ ID NO: 34999 - RNA, 19 nt, Artificial Sequence
  Description of Artificial Sequence: Synthetic oligonucleotide
ugaaggccggucaugauga

SEQ ID NO: 35000 - RNA, 19 nt, Artificial Sequence
  Description of Artificial Sequence: Synthetic oligonucleotide
  modified_base (6)..(6): a, c, u, g, unknown or other
agauanaaaaccccgcuuu

SEQ ID NO: 35001 - RNA, 19 nt, Artificial Sequence
  Description of Artificial Sequence: Synthetic oligonucleotide
guacuugauggcuaagggg

SEQ ID NO: 35002 - RNA, 19 nt, Artificial Sequence
  Description of Artificial Sequence: Synthetic oligonucleotide
uuguugauaagcugggcga

SEQ ID NO: 35003 - RNA, 19 nt, Artificial Sequence
  Description of Artificial Sequence: Synthetic oligonucleotide
agugccaacagaauuuaac

SEQ ID NO: 35004 - RNA, 19 nt, Artificial Sequence
  Description of Artificial Sequence: Synthetic oligonucleotide
ugauuuggggcguuggagc

SEQ ID NO: 35005 - RNA, 19 nt, Artificial Sequence
  Description of Artificial Sequence: Synthetic oligonucleotide
ugacacugcacacuggaac

SEQ ID NO: 35006 - RNA, 19 nt, Artificial Sequence
  Description of Artificial Sequence: Synthetic oligonucleotide
uggcaauccggccuugucg

SEQ ID NO: 35007 - RNA, 19 nt, Artificial Sequence
  Description of Artificial Sequence: Synthetic oligonucleotide
acacucauagccccgcugg

SEQ ID NO: 35008 - RNA, 19 nt, Artificial Sequence
  Description of Artificial Sequence: Synthetic oligonucleotide
ucccaauauacaucaaaug

SEQ ID NO: 35009 - RNA, 19 nt, Artificial Sequence
  Description of Artificial Sequence: Synthetic oligonucleotide
ggaacguucuuauacacug

SEQ ID NO: 35010 - RNA, 19 nt, Artificial Sequence
  Description of Artificial Sequence: Synthetic oligonucleotide
auauauaacaacaguacaa

SEQ ID NO: 35011 - RNA, 19 nt, Artificial Sequence
  Description of Artificial Sequence: Synthetic oligonucleotide
  modified_base (7)..(7): a, c, u, g, unknown or other
  modified_base (14)..(14): a, c, u, g, unknown or other
uggucanaggggancuuga

SEQ ID NO: 35012 - RNA, 19 nt, Artificial Sequence
  Description of Artificial Sequence: Synthetic oligonucleotide
uccuuuugagacaccagug

SEQ ID NO: 35013 - RNA, 19 nt, Artificial Sequence
  Description of Artificial Sequence: Synthetic oligonucleotide
auugccacgaucccgcaug

SEQ ID NO: 35014 - RNA, 19 nt, Artificial Sequence
  Description of Artificial Sequence: Synthetic oligonucleotide
acuuccuuaugccuggaug

SEQ ID NO: 35015 - RNA, 19 nt, Artificial Sequence
  Description of Artificial Sequence: Synthetic oligonucleotide
acugguacgagcuguuuug

SEQ ID NO: 35016 - RNA, 19 nt, Artificial Sequence
  Description of Artificial Sequence: Synthetic oligonucleotide
aaaaccccgcuuuauuggu

SEQ ID NO: 35017 - RNA, 19 nt, Artificial Sequence
  Description of Artificial Sequence: Synthetic oligonucleotide
  modified_base (7)..(7): a, c, u, g, unknown or other
uagauanaaaaccccgcuu

SEQ ID NO: 35018 - RNA, 19 nt, Artificial Sequence
  Description of Artificial Sequence: Synthetic oligonucleotide
uuaagcacacacucauagc

SEQ ID NO: 35019 - RNA, 19 nt, Artificial Sequence
  Description of Artificial Sequence: Synthetic oligonucleotide
ugacgaaacacgcuggcau

SEQ ID NO: 35020 - RNA, 19 nt, Artificial Sequence
  Description of Artificial Sequence: Synthetic oligonucleotide
agggaacguucuuauacac

SEQ ID NO: 35021 - RNA, 19 nt, Artificial Sequence
  Description of Artificial Sequence: Synthetic oligonucleotide
uagaagccgggucaaguag

SEQ ID NO: 35022 - RNA, 19 nt, Artificial Sequence
  Description of Artificial Sequence: Synthetic oligonucleotide
  modified_base (3)..(3): a, c, u, g, unknown or other
uanaaaaccccgcuuuauu

SEQ ID NO: 35023 - RNA, 19 nt, Artificial Sequence
  Description of Artificial Sequence: Synthetic oligonucleotide
uuucagcucucaauggaca

SEQ ID NO: 35024 - RNA, 19 nt, Artificial Sequence
  Description of Artificial Sequence: Synthetic oligonucleotide
acagacguuaggcgguccc

SEQ ID NO: 35025 - RNA, 19 nt, Artificial Sequence
  Description of Artificial Sequence: Synthetic oligonucleotide
cacucuuaguccacaaacc

SEQ ID NO: 35026 - RNA, 19 nt, Artificial Sequence
  Description of Artificial Sequence: Synthetic oligonucleotide
ugaugaaguugccauucca

SEQ ID NO: 35027 - RNA, 19 nt, Artificial Sequence
  Description of Artificial Sequence: Synthetic oligonucleotide
cauaguaucuuucuaccca

SEQ ID NO: 35028 - RNA, 19 nt, Artificial Sequence
  Description of Artificial Sequence: Synthetic oligonucleotide
uguauagugucaguuggcu

SEQ ID NO: 35029 - RNA, 19 nt, Artificial Sequence
  Description of Artificial Sequence: Synthetic oligonucleotide
agguuucgguacuugcacc

SEQ ID NO: 35030 - RNA, 19 nt, Artificial Sequence
  Description of Artificial Sequence: Synthetic oligonucleotide
ugugacgaaacacgcuggc

SEQ ID NO: 35031 - RNA, 19 nt, Artificial Sequence
  Description of Artificial Sequence: Synthetic oligonucleotide
ugugucguggauacugugu

SEQ ID NO: 35032 - RNA, 19 nt, Artificial Sequence
  Description of Artificial Sequence: Synthetic oligonucleotide
ugcuuauuguauugaggcc

SEQ ID NO: 35033 - RNA, 19 nt, Artificial Sequence
  Description of Artificial Sequence: Synthetic oligonucleotide
ucccgcauggagaagcugc

SEQ ID NO: 35034 - RNA, 19 nt, Artificial Sequence
  Description of Artificial Sequence: Synthetic oligonucleotide
uucgguacuugcaccaaug

SEQ ID NO: 35035 - RNA, 19 nt, Artificial Sequence
  Description of Artificial Sequence: Synthetic oligonucleotide
ugcacacuuguagagaugu

SEQ ID NO: 35036 - RNA, 19 nt, Artificial Sequence
  Description of Artificial Sequence: Synthetic oligonucleotide
guugacgcaguucaggauc

SEQ ID NO: 35037 - RNA, 19 nt, Artificial Sequence
  Description of Artificial Sequence: Synthetic oligonucleotide
uuauuggaaggugaguccu

SEQ ID NO: 35038 - RNA, 19 nt, Artificial Sequence
  Description of Artificial Sequence: Synthetic oligonucleotide
agggucuuguacucgaucu

SEQ ID NO: 35039 - RNA, 19 nt, Artificial Sequence
  Description of Artificial Sequence: Synthetic oligonucleotide
auuguacacauaggaggcc

SEQ ID NO: 35040 - RNA, 19 nt, Artificial Sequence
  Description of Artificial Sequence: Synthetic oligonucleotide
ugguaaugcaucagugugu

SEQ ID NO: 35041 - RNA, 19 nt, Artificial Sequence
  Description of Artificial Sequence: Synthetic oligonucleotide
  modified_base (3)..(3): a, c, u, g, unknown or other
  modified_base (10)..(10): a, c, u, g, unknown or other
canaggggancuugaugag

SEQ ID NO: 35042 - RNA, 19 nt, Artificial Sequence
  Description of Artificial Sequence: Synthetic oligonucleotide
  modified_base (5)..(5): a, c, u, g, unknown or other
  modified_base (12)..(12): a, c, u, g, unknown or other
gucanaggggancuugaug

SEQ ID NO: 35043 - RNA, 19 nt, Artificial Sequence
  Description of Artificial Sequence: Synthetic oligonucleotide
ugggaauagggaacguucu

SEQ ID NO: 35044 - RNA, 19 nt, Artificial Sequence
  Description of Artificial Sequence: Synthetic oligonucleotide
ggauguuaagcacacacuc

SEQ ID NO: 35045 - RNA, 19 nt, Artificial Sequence
  Description of Artificial Sequence: Synthetic oligonucleotide
cugaacaaggucucaaaca

SEQ ID NO: 35046 - RNA, 19 nt, Artificial Sequence
  Description of Artificial Sequence: Synthetic oligonucleotide
auauguagaagaugucaaa

SEQ ID NO: 35047 - RNA, 19 nt, Artificial Sequence
  Description of Artificial Sequence: Synthetic oligonucleotide
agcaugaagagagguuccc

SEQ ID NO: 35048 - RNA, 19 nt, Artificial Sequence
  Description of Artificial Sequence: Synthetic oligonucleotide
caagucguccacaaauuuc

SEQ ID NO: 35049 - RNA, 19 nt, Artificial Sequence
  Description of Artificial Sequence: Synthetic oligonucleotide
cucagcauauugaacucug

SEQ ID NO: 35050 - RNA, 19 nt, Artificial Sequence
  Description of Artificial Sequence: Synthetic oligonucleotide
ugauacccuucucucgucc

SEQ ID NO: 35051 - RNA, 19 nt, Artificial Sequence
  Description of Artificial Sequence: Synthetic oligonucleotide
uccacgugcugucucagac

SEQ ID NO: 35052 - RNA, 19 nt, Artificial Sequence
  Description of Artificial Sequence: Synthetic oligonucleotide
uuauuccuaguaaucuuua

SEQ ID NO: 35053 - RNA, 19 nt, Artificial Sequence
  Description of Artificial Sequence: Synthetic oligonucleotide
  modified_base (5)..(5): a, c, u, g, unknown or other
gauanaaaaccccgcuuua

SEQ ID NO: 35054 - RNA, 19 nt, Artificial Sequence
  Description of Artificial Sequence: Synthetic oligonucleotide
gagagcgcuaccccggugc

SEQ ID NO: 35055 - RNA, 19 nt, Artificial Sequence
  Description of Artificial Sequence: Synthetic oligonucleotide
auaccauuuugcugccccg

SEQ ID NO: 35056 - RNA, 19 nt, Artificial Sequence
  Description of Artificial Sequence: Synthetic oligonucleotide
aucccaucauacugguacg

SEQ ID NO: 35057 - RNA, 19 nt, Artificial Sequence
  Description of Artificial Sequence: Synthetic oligonucleotide
acaacaguacaaauugugu

SEQ ID NO: 35058 - RNA, 19 nt, Artificial Sequence
  Description of Artificial Sequence: Synthetic oligonucleotide
uugacgcaguucaggauca

SEQ ID NO: 35059 - RNA, 19 nt, Artificial Sequence
  Description of Artificial Sequence: Synthetic oligonucleotide
gauguuaagcacacacuca

SEQ ID NO: 35060 - RNA, 19 nt, Artificial Sequence
  Description of Artificial Sequence: Synthetic oligonucleotide
cagcauauugaacucugug

SEQ ID NO: 35061 - RNA, 19 nt, Artificial Sequence
  Description of Artificial Sequence: Synthetic oligonucleotide
uguccgacaggccuugauc

SEQ ID NO: 35062 - RNA, 19 nt, Artificial Sequence
  Description of Artificial Sequence: Synthetic oligonucleotide
gcugugacgaaacacgcug

SEQ ID NO: 35063 - RNA, 19 nt, Artificial Sequence
  Description of Artificial Sequence: Synthetic oligonucleotide
ucuuucuacccaguucuug

SEQ ID NO: 35064 - RNA, 19 nt, Artificial Sequence
  Description of Artificial Sequence: Synthetic oligonucleotide
gaaagcaaaccaguugguc

SEQ ID NO: 35065 - RNA, 19 nt, Artificial Sequence
  Description of Artificial Sequence: Synthetic oligonucleotide
guaugggucccucuuccag

SEQ ID NO: 35066 - RNA, 19 nt, Artificial Sequence
  Description of Artificial Sequence: Synthetic oligonucleotide
  modified_base (11)..(11): a, c, u, g, unknown or other
  modified_base (18)..(18): a, c, u, g, unknown or other
aggguggucanagggganc

SEQ ID NO: 35067 - RNA, 19 nt, Artificial Sequence
  Description of Artificial Sequence: Synthetic oligonucleotide
ugcggagaagaaguuuggg

SEQ ID NO: 35068 - RNA, 19 nt, Artificial Sequence
  Description of Artificial Sequence: Synthetic oligonucleotide
aguccugcggagaagaagu

SEQ ID NO: 35069 - RNA, 19 nt, Artificial Sequence
  Description of Artificial Sequence: Synthetic oligonucleotide
uuaguccacaaaccacacu

SEQ ID NO: 35070 - RNA, 19 nt, Artificial Sequence
  Description of Artificial Sequence: Synthetic oligonucleotide
uaauggauguccgggagau

SEQ ID NO: 35071 - RNA, 19 nt, Artificial Sequence
  Description of Artificial Sequence: Synthetic oligonucleotide
gaguuuguccucacucagg

SEQ ID NO: 35072 - RNA, 19 nt, Artificial Sequence
  Description of Artificial Sequence: Synthetic oligonucleotide
  modified_base (4)..(4): a, c, u, g, unknown or other
auanaaaaccccgcuuuau

SEQ ID NO: 35073 - RNA, 19 nt, Artificial Sequence
  Description of Artificial Sequence: Synthetic oligonucleotide
cugugacgaaacacgcugg

SEQ ID NO: 35074 - RNA, 19 nt, Artificial Sequence
  Description of Artificial Sequence: Synthetic oligonucleotide
uauuccuaguaaucuuuau

SEQ ID NO: 35075 - RNA, 19 nt, Artificial Sequence
  Description of Artificial Sequence: Synthetic oligonucleotide
ggcauucauaucuugguca

SEQ ID NO: 35076 - RNA, 19 nt, Artificial Sequence
  Description of Artificial Sequence: Synthetic oligonucleotide
aaccccgcuuuauugguaa

SEQ ID NO: 35077 - RNA, 19 nt, Artificial Sequence
  Description of Artificial Sequence: Synthetic oligonucleotide
ugaacgucagcaggaacac

SEQ ID NO: 35078 - RNA, 19 nt, Artificial Sequence
  Description of Artificial Sequence: Synthetic oligonucleotide
cuugcaaauaggaguuuca

SEQ ID NO: 35079 - RNA, 19 nt, Artificial Sequence
  Description of Artificial Sequence: Synthetic oligonucleotide
gaggguacaucugugcuca

SEQ ID NO: 35080 - RNA, 19 nt, Artificial Sequence
  Description of Artificial Sequence: Synthetic oligonucleotide
uguacucgaucugcugccg

SEQ ID NO: 35081 - RNA, 19 nt, Artificial Sequence
  Description of Artificial Sequence: Synthetic oligonucleotide
agcgaaaggcgcugucuuc

SEQ ID NO: 35082 - RNA, 19 nt, Artificial Sequence
  Description of Artificial Sequence: Synthetic oligonucleotide
gaugacauucacccagaaa

SEQ ID NO: 35083 - RNA, 19 nt, Artificial Sequence
  Description of Artificial Sequence: Synthetic oligonucleotide
ggcccuauggugcaggcag

SEQ ID NO: 35084 - RNA, 19 nt, Artificial Sequence
  Description of Artificial Sequence: Synthetic oligonucleotide
gcucagucuggagagaugg

SEQ ID NO: 35085 - RNA, 19 nt, Artificial Sequence
  Description of Artificial Sequence: Synthetic oligonucleotide
aggguugacgcaguucagg

SEQ ID NO: 35086 - RNA, 19 nt, Artificial Sequence
  Description of Artificial Sequence: Synthetic oligonucleotide
augucaaagugaugacaug

SEQ ID NO: 35087 - RNA, 19 nt, Artificial Sequence
  Description of Artificial Sequence: Synthetic oligonucleotide
caucauacugguacgagcu

SEQ ID NO: 35088 - RNA, 19 nt, Artificial Sequence
  Description of Artificial Sequence: Synthetic oligonucleotide
  modified_base (5)..(5): a, c, u, g, unknown or other
gggancuugaugagggagg

SEQ ID NO: 35089 - RNA, 19 nt, Artificial Sequence
  Description of Artificial Sequence: Synthetic oligonucleotide
acaagucguccacaaauuu

SEQ ID NO: 35090 - RNA, 19 nt, Artificial Sequence
  Description of Artificial Sequence: Synthetic oligonucleotide
acgccauacauggugcccg

SEQ ID NO: 35091 - RNA, 19 nt, Artificial Sequence
  Description of Artificial Sequence: Synthetic oligonucleotide
uacugguacgagcuguuuu

SEQ ID NO: 35092 - RNA, 19 nt, Artificial Sequence
  Description of Artificial Sequence: Synthetic oligonucleotide
aguagcgggccucaccagu

SEQ ID NO: 35093 - RNA, 19 nt, Artificial Sequence
  Description of Artificial Sequence: Synthetic oligonucleotide
cucguugagggcacucagc

SEQ ID NO: 35094 - RNA, 19 nt, Artificial Sequence
  Description of Artificial Sequence: Synthetic oligonucleotide
ugauugcacaguacagcau

SEQ ID NO: 35095 - RNA, 19 nt, Artificial Sequence
  Description of Artificial Sequence: Synthetic oligonucleotide
cauaggaggccacagacgu

SEQ ID NO: 35096 - RNA, 19 nt, Artificial Sequence
  Description of Artificial Sequence: Synthetic oligonucleotide
ugugcggaugaacgucagc

SEQ ID NO: 35097 - RNA, 19 nt, Artificial Sequence
  Description of Artificial Sequence: Synthetic oligonucleotide
gaacguucuuauacacugc

SEQ ID NO: 35098 - RNA, 19 nt, Artificial Sequence
  Description of Artificial Sequence: Synthetic oligonucleotide
gcauaguaucuuucuaccc

SEQ ID NO: 35099 - RNA, 19 nt, Artificial Sequence
  Description of Artificial Sequence: Synthetic oligonucleotide
uuccuuaugccuggaugcc

SEQ ID NO: 35100 - RNA, 19 nt, Artificial Sequence
  Description of Artificial Sequence: Synthetic oligonucleotide
uauuguauugaggccuguc

SEQ ID NO: 35101 - RNA, 19 nt, Artificial Sequence
  Description of Artificial Sequence: Synthetic oligonucleotide
uguaugggucccucuucca

SEQ ID NO: 35102 - RNA, 19 nt, Artificial Sequence
  Description of Artificial Sequence: Synthetic oligonucleotide
aucugcuaauggauguccg

SEQ ID NO: 35103 - RNA, 19 nt, Artificial Sequence
  Description of Artificial Sequence: Synthetic oligonucleotide
gacguuaggcggucccugc

SEQ ID NO: 35104 - RNA, 19 nt, Artificial Sequence
  Description of Artificial Sequence: Synthetic oligonucleotide
uuucgguacuugcaccaau

SEQ ID NO: 35105 - RNA, 19 nt, Artificial Sequence
  Description of Artificial Sequence: Synthetic oligonucleotide
ugugucacggggagggauu

SEQ ID NO: 35106 - RNA, 19 nt, Artificial Sequence
  Description of Artificial Sequence: Synthetic oligonucleotide
  modified_base (8)..(8): a, c, u, g, unknown or other
  modified_base (15)..(15): a, c, u, g, unknown or other
guggucanaggggancuug

SEQ ID NO: 35107 - RNA, 19 nt, Artificial Sequence
  Description of Artificial Sequence: Synthetic oligonucleotide
cacacucgaacuugugguc

SEQ ID NO: 35108 - RNA, 19 nt, Artificial Sequence
  Description of Artificial Sequence: Synthetic oligonucleotide
ccaucauacugguacgagc

SEQ ID NO: 35109 - RNA, 19 nt, Artificial Sequence
  Description of Artificial Sequence: Synthetic oligonucleotide
cuuucuacccaguucuugu

SEQ ID NO: 35110 - RNA, 19 nt, Artificial Sequence
  Description of Artificial Sequence: Synthetic oligonucleotide
agccgcaggagcuugcaaa

SEQ ID NO: 35111 - RNA, 19 nt, Artificial Sequence
  Description of Artificial Sequence: Synthetic oligonucleotide
gguagggaaguaauccugc

SEQ ID NO: 35112 - RNA, 19 nt, Artificial Sequence
  Description of Artificial Sequence: Synthetic oligonucleotide
aagugagagaccagggcua

SEQ ID NO: 35113 - RNA, 19 nt, Artificial Sequence
  Description of Artificial Sequence: Synthetic oligonucleotide
cucuagugccccgaugagc

SEQ ID NO: 35114 - RNA, 19 nt, Artificial Sequence
  Description of Artificial Sequence: Synthetic oligonucleotide
cacucgaacuuguggucag

SEQ ID NO: 35115 - RNA, 19 nt, Artificial Sequence
  Description of Artificial Sequence: Synthetic oligonucleotide
gugauagcuuguauggguc

SEQ ID NO: 35116 - RNA, 19 nt, Artificial Sequence
  Description of Artificial Sequence: Synthetic oligonucleotide
cccagaaacgcagagggag

SEQ ID NO: 35117 - RNA, 19 nt, Artificial Sequence
  Description of Artificial Sequence: Synthetic oligonucleotide
acacucgaacuugugguca

SEQ ID NO: 35118 - RNA, 19 nt, Artificial Sequence
  Description of Artificial Sequence: Synthetic oligonucleotide
cuaauggauguccgggaga

SEQ ID NO: 35119 - RNA, 19 nt, Artificial Sequence
  Description of Artificial Sequence: Synthetic oligonucleotide
gguuucgguacuugcacca

SEQ ID NO: 35120 - RNA, 19 nt, Artificial Sequence
  Description of Artificial Sequence: Synthetic oligonucleotide
  modified_base (3)..(3): a, c, u, g, unknown or other
gancuugaugagggaggag

SEQ ID NO: 35121 - RNA, 19 nt, Artificial Sequence
  Description of Artificial Sequence: Synthetic oligonucleotide
augaugagagaagccacau

SEQ ID NO: 35122 - RNA, 19 nt, Artificial Sequence
  Description of Artificial Sequence: Synthetic oligonucleotide
ugccacaccuuaacaccac

SEQ ID NO: 35123 - RNA, 19 nt, Artificial Sequence
  Description of Artificial Sequence: Synthetic oligonucleotide
ggcgaagaguuucagagcu

SEQ ID NO: 35124 - RNA, 19 nt, Artificial Sequence
  Description of Artificial Sequence: Synthetic oligonucleotide
ggcgggacugcucugcgag

SEQ ID NO: 35125 - RNA, 19 nt, Artificial Sequence
  Description of Artificial Sequence: Synthetic oligonucleotide
gccugauacccuucucucg

SEQ ID NO: 35126 - RNA, 19 nt, Artificial Sequence
  Description of Artificial Sequence: Synthetic oligonucleotide
cuggaacuguugaagcgca

SEQ ID NO: 35127 - RNA, 19 nt, Artificial Sequence
  Description of Artificial Sequence: Synthetic oligonucleotide
cuagaagaagcuucucacu

SEQ ID NO: 35128 - RNA, 19 nt, Artificial Sequence
  Description of Artificial Sequence: Synthetic oligonucleotide
agugugcggaugaacguca

SEQ ID NO: 35129 - RNA, 19 nt, Artificial Sequence
  Description of Artificial Sequence: Synthetic oligonucleotide
ugucaguuggcuggacagu

SEQ ID NO: 35130 - RNA, 19 nt, Artificial Sequence
  Description of Artificial Sequence: Synthetic oligonucleotide
ucguggauacugugucugu

SEQ ID NO: 35131 - RNA, 19 nt, Artificial Sequence
  Description of Artificial Sequence: Synthetic oligonucleotide
ucccaucauacugguacga

SEQ ID NO: 35132 - RNA, 19 nt, Artificial Sequence
  Description of Artificial Sequence: Synthetic oligonucleotide
cugugucguggauacugug

SEQ ID NO: 35133 - RNA, 19 nt, Artificial Sequence
  Description of Artificial Sequence: Synthetic oligonucleotide
cuagaagccgggucaagua

SEQ ID NO: 35134 - RNA, 19 nt, Artificial Sequence
  Description of Artificial Sequence: Synthetic oligonucleotide
caggggcuagaagugcugg

SEQ ID NO: 35135 - RNA, 19 nt, Artificial Sequence
  Description of Artificial Sequence: Synthetic oligonucleotide
caguccugcggagaagaag

SEQ ID NO: 35136 - RNA, 19 nt, Artificial Sequence
  Description of Artificial Sequence: Synthetic oligonucleotide
uaacaccacucuccagguc

SEQ ID NO: 35137 - RNA, 19 nt, Artificial Sequence
  Description of Artificial Sequence: Synthetic oligonucleotide
cacucauagccccgcuggc

SEQ ID NO: 35138 - RNA, 19 nt, Artificial Sequence
  Description of Artificial Sequence: Synthetic oligonucleotide
uacgagcuguuuugacacu

SEQ ID NO: 35139 - RNA, 19 nt, Artificial Sequence
  Description of Artificial Sequence: Synthetic oligonucleotide
cccgucuugagguuucagc

SEQ ID NO: 35140 - RNA, 19 nt, Artificial Sequence
  Description of Artificial Sequence: Synthetic oligonucleotide
accccgcuuuauugguaac

SEQ ID NO: 35141 - RNA, 19 nt, Artificial Sequence
  Description of Artificial Sequence: Synthetic oligonucleotide
auagugucaguuggcugga

SEQ ID NO: 35142 - RNA, 19 nt, Artificial Sequence
  Description of Artificial Sequence: Synthetic oligonucleotide
agacguuaggcggucccug

SEQ ID NO: 35143 - RNA, 19 nt, Artificial Sequence
  Description of Artificial Sequence: Synthetic oligonucleotide
ugccgcacaucugugucgu

SEQ ID NO: 35144 - RNA, 19 nt, Artificial Sequence
  Description of Artificial Sequence: Synthetic oligonucleotide
cacgaucccgcauggagaa

SEQ ID NO: 35145 - RNA, 19 nt, Artificial Sequence
  Description of Artificial Sequence: Synthetic oligonucleotide
cagugugcggaugaacguc

SEQ ID NO: 35146 - RNA, 19 nt, Artificial Sequence
  Description of Artificial Sequence: Synthetic oligonucleotide
  modified_base (4)..(4): a, c, u, g, unknown or other
ggancuugaugagggagga

SEQ ID NO: 35147 - RNA, 19 nt, Artificial Sequence
  Description of Artificial Sequence: Synthetic oligonucleotide
uggggugaucauggggacc

SEQ ID NO: 35148 - RNA, 19 nt, Artificial Sequence
  Description of Artificial Sequence: Synthetic oligonucleotide
ucuuguaacuggggauauc

SEQ ID NO: 35149 - RNA, 19 nt, Artificial Sequence
  Description of Artificial Sequence: Synthetic oligonucleotide
cuggugguguauaguguca

SEQ ID NO: 35150 - RNA, 19 nt, Artificial Sequence
  Description of Artificial Sequence: Synthetic oligonucleotide
ucugcgagguaggcauuca

SEQ ID NO: 35151 - RNA, 19 nt, Artificial Sequence
  Description of Artificial Sequence: Synthetic oligonucleotide
ggguugacgcaguucagga

SEQ ID NO: 35152 - RNA, 19 nt, Artificial Sequence
  Description of Artificial Sequence: Synthetic oligonucleotide
ugucgccacuccaggucca

SEQ ID NO: 35153 - RNA, 19 nt, Artificial Sequence
  Description of Artificial Sequence: Synthetic oligonucleotide
agcuugcggcuggacaagg

SEQ ID NO: 35154 - RNA, 19 nt, Artificial Sequence
  Description of Artificial Sequence: Synthetic oligonucleotide
cuggaccggaggcugucug

SEQ ID NO: 35155 - RNA, 19 nt, Artificial Sequence
  Description of Artificial Sequence: Synthetic oligonucleotide
gaucucguugagggcacuc

SEQ ID NO: 35156 - RNA, 19 nt, Artificial Sequence
  Description of Artificial Sequence: Synthetic oligonucleotide
auagccccgcuggccagac

SEQ ID NO: 35157 - RNA, 19 nt, Artificial Sequence
  Description of Artificial Sequence: Synthetic oligonucleotide
gacuggcugugacgaaaca

SEQ ID NO: 35158 - RNA, 19 nt, Artificial Sequence
  Description of Artificial Sequence: Synthetic oligonucleotide
uccugcggagaagaaguuu

SEQ ID NO: 35159 - RNA, 19 nt, Artificial Sequence
  Description of Artificial Sequence: Synthetic oligonucleotide
guaaugcaucaguguguuc

SEQ ID NO: 35160 - RNA, 19 nt, Artificial Sequence
  Description of Artificial Sequence: Synthetic oligonucleotide
uggggaccacacuuccuua

SEQ ID NO: 35161 - RNA, 19 nt, Artificial Sequence
  Description of Artificial Sequence: Synthetic oligonucleotide
  modified_base (16)..(16): a, c, u, g, unknown or other
gggcuaggguggucanagg

SEQ ID NO: 35162 - RNA, 19 nt, Artificial Sequence
  Description of Artificial Sequence: Synthetic oligonucleotide
gggucccucuuccaggaac

SEQ ID NO: 35163 - RNA, 19 nt, Artificial Sequence
  Description of Artificial Sequence: Synthetic oligonucleotide
gacgaaacacgcuggcauu

SEQ ID NO: 35164 - RNA, 19 nt, Artificial Sequence
  Description of Artificial Sequence: Synthetic oligonucleotide
gugacgaaacacgcuggca

SEQ ID NO: 35165 - RNA, 19 nt, Artificial Sequence
  Description of Artificial Sequence: Synthetic oligonucleotide
gagggugauugguuuuacu

SEQ ID NO: 35166 - RNA, 19 nt, Artificial Sequence
  Description of Artificial Sequence: Synthetic oligonucleotide
cccgcauggagaagcugcg

SEQ ID NO: 35167 - RNA, 19 nt, Artificial Sequence
  Description of Artificial Sequence: Synthetic oligonucleotide
gggaguagcgggccucacc

SEQ ID NO: 35168 - RNA, 19 nt, Artificial Sequence
  Description of Artificial Sequence: Synthetic oligonucleotide
gcuaaggggagagcgcuac

SEQ ID NO: 35169 - RNA, 19 nt, Artificial Sequence
  Description of Artificial Sequence: Synthetic oligonucleotide
aaaccccgcuuuauuggua

SEQ ID NO: 35170 - RNA, 19 nt, Artificial Sequence
  Description of Artificial Sequence: Synthetic oligonucleotide
ggggagagcgcuaccccgg

SEQ ID NO: 35171 - RNA, 19 nt, Artificial Sequence
  Description of Artificial Sequence: Synthetic oligonucleotide
agucaagccaggggcuaga

SEQ ID NO: 35172 - RNA, 19 nt, Artificial Sequence
  Description of Artificial Sequence: Synthetic oligonucleotide
cggucaugaugagagaagc

SEQ ID NO: 35173 - RNA, 19 nt, Artificial Sequence
  Description of Artificial Sequence: Synthetic oligonucleotide
ccgcacaucugugucgugg

SEQ ID NO: 35174 - RNA, 19 nt, Artificial Sequence
  Description of Artificial Sequence: Synthetic oligonucleotide
ugucacggggagggauuug

SEQ ID NO: 35175 - RNA, 19 nt, Artificial Sequence
  Description of Artificial Sequence: Synthetic oligonucleotide
cauaggaguagaucucguu

SEQ ID NO: 35176 - RNA, 19 nt, Artificial Sequence
  Description of Artificial Sequence: Synthetic oligonucleotide
guacccuugguggcuagaa

SEQ ID NO: 35177 - RNA, 19 nt, Artificial Sequence
  Description of Artificial Sequence: Synthetic oligonucleotide
guucagccgcuuccaguca

SEQ ID NO: 35178 - RNA, 19 nt, Artificial Sequence
  Description of Artificial Sequence: Synthetic oligonucleotide
cacaucugugucguggaua

SEQ ID NO: 35179 - RNA, 19 nt, Artificial Sequence
  Description of Artificial Sequence: Synthetic oligonucleotide
gugugcggaugaacgucag

SEQ ID NO: 35180 - RNA, 19 nt, Artificial Sequence
  Description of Artificial Sequence: Synthetic oligonucleotide
auuuggggcguuggagcau

SEQ ID NO: 35181 - RNA, 19 nt, Artificial Sequence
  Description of Artificial Sequence: Synthetic oligonucleotide
cccaucauacugguacgag

SEQ ID NO: 35182 - RNA, 19 nt, Artificial Sequence
  Description of Artificial Sequence: Synthetic oligonucleotide
cgaucccgcauggagaagc

SEQ ID NO: 35183 - RNA, 19 nt, Artificial Sequence
  Description of Artificial Sequence: Synthetic oligonucleotide
ccccucagagcgcacaauc

SEQ ID NO: 35184 - RNA, 19 nt, Artificial Sequence
  Description of Artificial Sequence: Synthetic oligonucleotide
auacugguacgagcuguuu

SEQ ID NO: 35185 - RNA, 19 nt, Artificial Sequence
  Description of Artificial Sequence: Synthetic oligonucleotide
gguaaugcaucaguguguu

SEQ ID NO: 35186 - RNA, 19 nt, Artificial Sequence
  Description of Artificial Sequence: Synthetic oligonucleotide
cacagacguuaggcggucc

SEQ ID NO: 35187 - RNA, 19 nt, Artificial Sequence
  Description of Artificial Sequence: Synthetic oligonucleotide
cuugcaccaauggcagcga

SEQ ID NO: 35188 - RNA, 19 nt, Artificial Sequence
  Description of Artificial Sequence: Synthetic oligonucleotide
aucccgcauggagaagcug

SEQ ID NO: 35189 - RNA, 19 nt, Artificial Sequence
  Description of Artificial Sequence: Synthetic oligonucleotide
gacaccagugugauagcuu

SEQ ID NO: 35190 - RNA, 19 nt, Artificial Sequence
  Description of Artificial Sequence: Synthetic oligonucleotide
gagcgcacaaucacgccau

SEQ ID NO: 35191 - RNA, 19 nt, Artificial Sequence
  Description of Artificial Sequence: Synthetic oligonucleotide
ccacgaucccgcauggaga

SEQ ID NO: 35192 - RNA, 19 nt, Artificial Sequence
  Description of Artificial Sequence: Synthetic oligonucleotide
cgcacaaucacgccauaca

SEQ ID NO: 35193 - RNA, 19 nt, Artificial Sequence
  Description of Artificial Sequence: Synthetic oligonucleotide
acccagaaacgcagaggga

SEQ ID NO: 35194 - RNA, 19 nt, Artificial Sequence
  Description of Artificial Sequence: Synthetic oligonucleotide
cucgggguagcuugcggcu

SEQ ID NO: 35195 - RNA, 19 nt, Artificial Sequence
  Description of Artificial Sequence: Synthetic oligonucleotide
gaagccgggucaaguagau

SEQ ID NO: 35196 - RNA, 19 nt, Artificial Sequence
  Description of Artificial Sequence: Synthetic oligonucleotide
acgaucccgcauggagaag

SEQ ID NO: 35197 - RNA, 19 nt, Artificial Sequence
  Description of Artificial Sequence: Synthetic oligonucleotide
gccggucaugaugagagaa

SEQ ID NO: 35198 - RNA, 19 nt, Artificial Sequence
  Description of Artificial Sequence: Synthetic oligonucleotide
cauacauggugcccgucuu

SEQ ID NO: 35199 - RNA, 19 nt, Artificial Sequence
  Description of Artificial Sequence: Synthetic oligonucleotide
ugccacgaucccgcaugga

SEQ ID NO: 35200 - RNA, 19 nt, Artificial Sequence
  Description of Artificial Sequence: Synthetic oligonucleotide
ggagagcgcuaccccggug

SEQ ID NO: 35201 - RNA, 19 nt, Artificial Sequence
  Description of Artificial Sequence: Synthetic oligonucleotide
gggaacguucuuauacacu

SEQ ID NO: 35202 - RNA, 19 nt, Artificial Sequence
  Description of Artificial Sequence: Synthetic oligonucleotide
agcgcacaaucacgccaua

SEQ ID NO: 35203 - RNA, 19 nt, Artificial Sequence
  Description of Artificial Sequence: Synthetic oligonucleotide
ggcagcgaaaggcgcuguc

SEQ ID NO: 35204 - RNA, 19 nt, Artificial Sequence
  Description of Artificial Sequence: Synthetic oligonucleotide
gguugacgcaguucaggau

SEQ ID NO: 35205 - RNA, 19 nt, Artificial Sequence
  Description of Artificial Sequence: Synthetic oligonucleotide
gucaagccaggggcuagaa

SEQ ID NO: 35206 - RNA, 19 nt, Artificial Sequence
  Description of Artificial Sequence: Synthetic oligonucleotide
cccucuaucuugguaguaa

SEQ ID NO: 35207 - RNA, 19 nt, Artificial Sequence
  Description of Artificial Sequence: Synthetic oligonucleotide
aggguacaucugugcucau

SEQ ID NO: 35208 - RNA, 19 nt, Artificial Sequence
  Description of Artificial Sequence: Synthetic oligonucleotide
gcgaaaggcgcugucuucu

SEQ ID NO: 35209 - RNA, 19 nt, Artificial Sequence
  Description of Artificial Sequence: Synthetic oligonucleotide
gggaauagggaacguucuu

SEQ ID NO: 35210 - RNA, 19 nt, Artificial Sequence
  Description of Artificial Sequence: Synthetic oligonucleotide
cauagccccgcuggccaga

SEQ ID NO: 35211 - RNA, 19 nt, Artificial Sequence
  Description of Artificial Sequence: Synthetic oligonucleotide
  modified_base (6)..(6): a, c, u, g, unknown or other
  modified_base (13)..(13): a, c, u, g, unknown or other
ggucanaggggancuugau

SEQ ID NO: 35212 - RNA, 19 nt, Artificial Sequence
  Description of Artificial Sequence: Synthetic oligonucleotide
agguuucagcgggcagcca

SEQ ID NO: 35213 - RNA, 19 nt, Artificial Sequence
  Description of Artificial Sequence: Synthetic oligonucleotide
cccugaaggccggucauga

SEQ ID NO: 35214 - RNA, 19 nt, Artificial Sequence
  Description of Artificial Sequence: Synthetic oligonucleotide
cagacguuaggcggucccu

SEQ ID NO: 35215 - RNA, 19 nt, Artificial Sequence
  Description of Artificial Sequence: Synthetic oligonucleotide
ccagugugcggaugaacgu

SEQ ID NO: 35216 - RNA, 19 nt, Artificial Sequence
  Description of Artificial Sequence: Synthetic oligonucleotide
cugcgagguaggcauucau

SEQ ID NO: 35217 - RNA, 19 nt, Artificial Sequence
  Description of Artificial Sequence: Synthetic oligonucleotide
ggcugugacgaaacacgcu

SEQ ID NO: 35218 - RNA, 19 nt, Artificial Sequence
  Description of Artificial Sequence: Synthetic oligonucleotide
gcgcuaccccggugcacag

SEQ ID NO: 35219 - RNA, 19 nt, Artificial Sequence
  Description of Artificial Sequence: Synthetic oligonucleotide
cuccaacggggaucagaau

SEQ ID NO: 35220 - RNA, 19 nt, Artificial Sequence
  Description of Artificial Sequence: Synthetic oligonucleotide
  modified_base (9)..(9): a, c, u, g, unknown or other
  modified_base (16)..(16): a, c, u, g, unknown or other
gguggucanaggggancuu

SEQ ID NO: 35221 - RNA, 19 nt, Artificial Sequence
  Description of Artificial Sequence: Synthetic oligonucleotide
ccggugcacagugcugaac

SEQ ID NO: 35222 - RNA, 19 nt, Artificial Sequence
  Description of Artificial Sequence: Synthetic oligonucleotide
ccuuggccgcugggaauag

SEQ ID NO: 35223 - RNA, 19 nt, Artificial Sequence
  Description of Artificial Sequence: Synthetic oligonucleotide
ccuugucgccacuccaggu

SEQ ID NO: 35224 - RNA, 19 nt, Artificial Sequence
  Description of Artificial Sequence: Synthetic oligonucleotide
gugucacggggagggauuu

SEQ ID NO: 35225 - RNA, 19 nt, Artificial Sequence
  Description of Artificial Sequence: Synthetic oligonucleotide
cccgcuuuauugguaacau

SEQ ID NO: 35226 - RNA, 19 nt, Artificial Sequence
  Description of Artificial Sequence: Synthetic oligonucleotide
gggagagcgcuaccccggu

SEQ ID NO: 35227 - RNA, 19 nt, Artificial Sequence
  Description of Artificial Sequence: Synthetic oligonucleotide
gggcccuauggugcaggca

SEQ ID NO: 35228 - RNA, 19 nt, Artificial Sequence
  Description of Artificial Sequence: Synthetic oligonucleotide
gccauacauggugcccguc

SEQ ID NO: 35229 - RNA, 19 nt, Artificial Sequence
  Description of Artificial Sequence: Synthetic oligonucleotide
cuguggcauguaggcggga

SEQ ID NO: 35230 - RNA, 19 nt, Artificial Sequence
  Description of Artificial Sequence: Synthetic oligonucleotide
ggcuaaggggagagcgcua

SEQ ID NO: 35231 - RNA, 19 nt, Artificial Sequence
  Description of Artificial Sequence: Synthetic oligonucleotide
gccuugagggugauugguu

SEQ ID NO: 35232 - RNA, 19 nt, Artificial Sequence
  Description of Artificial Sequence: Synthetic oligonucleotide
guccugcggagaagaaguu

SEQ ID NO: 35233 - RNA, 19 nt, Artificial Sequence
  Description of Artificial Sequence: Synthetic oligonucleotide
gcuugcggcuggacaaggu

SEQ ID NO: 35234 - RNA, 19 nt, Artificial Sequence
  Description of Artificial Sequence: Synthetic oligonucleotide
ccaucccaucauacuggua

SEQ ID NO: 35235 - RNA, 19 nt, Artificial Sequence
  Description of Artificial Sequence: Synthetic oligonucleotide
gcggcccugaaggccgguc

SEQ ID NO: 35236 - RNA, 19 nt, Artificial Sequence
  Description of Artificial Sequence: Synthetic oligonucleotide
ggcuugcaaauaggaguuu

SEQ ID NO: 35237 - RNA, 19 nt, Artificial Sequence
  Description of Artificial Sequence: Synthetic oligonucleotide
ccgcuuccagucacccucu

SEQ ID NO: 35238 - RNA, 19 nt, Artificial Sequence
  Description of Artificial Sequence: Synthetic oligonucleotide
ccuguccgacaggccuuga

SEQ ID NO: 35239 - RNA, 19 nt, Artificial Sequence
  Description of Artificial Sequence: Synthetic oligonucleotide
ccucucccgucuugagguu

SEQ ID NO: 35240 - RNA, 19 nt, Artificial Sequence
  Description of Artificial Sequence: Synthetic oligonucleotide
ccgggccuugagggugauu

SEQ ID NO: 35241 - RNA, 19 nt, Artificial Sequence
  Description of Artificial Sequence: Synthetic oligonucleotide
  modified_base (1)..(1): a, c, u, g, unknown or other
  modified_base (8)..(8): a, c, u, g, unknown or other
naggggancuugaugaggg

SEQ ID NO: 35242 - RNA, 19 nt, Artificial Sequence
  Description of Artificial Sequence: Synthetic oligonucleotide
aauauauauauauauauac

SEQ ID NO: 35243 - RNA, 19 nt, Artificial Sequence
  Description of Artificial Sequence: Synthetic oligonucleotide
aaaauauauauauauauau

SEQ ID NO: 35244 - RNA, 19 nt, Artificial Sequence
  Description of Artificial Sequence: Synthetic oligonucleotide
ugauauaucauaauaaacu

SEQ ID NO: 35245 - RNA, 19 nt, Artificial Sequence
  Description of Artificial Sequence: Synthetic oligonucleotide
aaugauaucugauuaaugu

SEQ ID NO: 35246 - RNA, 19 nt, Artificial Sequence
  Description of Artificial Sequence: Synthetic oligonucleotide
uucaguaucauauugaacu

SEQ ID NO: 35247 - RNA, 19 nt, Artificial Sequence
  Description of Artificial Sequence: Synthetic oligonucleotide
uuuaauguggcaccgacgg

SEQ ID NO: 35248 - RNA, 19 nt, Artificial Sequence
  Description of Artificial Sequence: Synthetic oligonucleotide
uuuaccaauguacagagcc

SEQ ID NO: 35249 - RNA, 19 nt, Artificial Sequence
  Description of Artificial Sequence: Synthetic oligonucleotide
uuaguuucaauauaauccg

SEQ ID NO: 35250 - RNA, 19 nt, Artificial Sequence
  Description of Artificial Sequence: Synthetic oligonucleotide
uauacuacuauacagcugu

SEQ ID NO: 35251 - RNA, 19 nt, Artificial Sequence
  Description of Artificial Sequence: Synthetic oligonucleotide
aaaguguagggauaaacuc

SEQ ID NO: 35252 - RNA, 19 nt, Artificial Sequence
  Description of Artificial Sequence: Synthetic oligonucleotide
aauuagauuauacaucugu

SEQ ID NO: 35253 - RNA, 19 nt, Artificial Sequence
  Description of Artificial Sequence: Synthetic oligonucleotide
aaguaagcgcuucugaggc

SEQ ID NO: 35254 - RNA, 19 nt, Artificial Sequence
  Description of Artificial Sequence: Synthetic oligonucleotide
uauauauauauauauacuc

SEQ ID NO: 35255 - RNA, 19 nt, Artificial Sequence
  Description of Artificial Sequence: Synthetic oligonucleotide
aacauuauggcuuuauaca

SEQ ID NO: 35256 - RNA, 19 nt, Artificial Sequence
  Description of Artificial Sequence: Synthetic oligonucleotide
auaauuagauuauacaucu

SEQ ID NO: 35257 - RNA, 19 nt, Artificial Sequence
  Description of Artificial Sequence: Synthetic oligonucleotide
aaacaugugccacaauggc

SEQ ID NO: 35258 - RNA, 19 nt, Artificial Sequence
  Description of Artificial Sequence: Synthetic oligonucleotide
uauaauuagauuauacauc

SEQ ID NO: 35259 - RNA, 19 nt, Artificial Sequence
  Description of Artificial Sequence: Synthetic oligonucleotide
gauuuaguauaccaguagg

SEQ ID NO: 35260 - RNA, 19 nt, Artificial Sequence
  Description of Artificial Sequence: Synthetic oligonucleotide
aaaguaagcgcuucugagg

SEQ ID NO: 35261 - RNA, 19 nt, Artificial Sequence
  Description of Artificial Sequence: Synthetic oligonucleotide
aaaccauaugugaagaagc

SEQ ID NO: 35262 - RNA, 19 nt, Artificial Sequence
  Description of Artificial Sequence: Synthetic oligonucleotide
uaaacaugugccacaaugg

SEQ ID NO: 35263 - RNA, 19 nt, Artificial Sequence
  Description of Artificial Sequence: Synthetic oligonucleotide
uauauauauauacucucca

SEQ ID NO: 35264 - RNA, 19 nt, Artificial Sequence
  Description of Artificial Sequence: Synthetic oligonucleotide
ucguauuucagucuugcag

SEQ ID NO: 35265 - RNA, 19 nt, Artificial Sequence
  Description of Artificial Sequence: Synthetic oligonucleotide
uauauauauauauacucuc

SEQ ID NO: 35266 - RNA, 19 nt, Artificial Sequence
  Description of Artificial Sequence: Synthetic oligonucleotide
uguagugagauccacucgc

SEQ ID NO: 35267 - RNA, 19 nt, Artificial Sequence
  Description of Artificial Sequence: Synthetic oligonucleotide
auauauauauauacucucc

SEQ ID NO: 35268 - RNA, 19 nt, Artificial Sequence
  Description of Artificial Sequence: Synthetic oligonucleotide
aucuagucuuaacagaugg

SEQ ID NO: 35269 - RNA, 19 nt, Artificial Sequence
  Description of Artificial Sequence: Synthetic oligonucleotide
uagguaaauccuauaaaag

SEQ ID NO: 35270 - RNA, 19 nt, Artificial Sequence
  Description of Artificial Sequence: Synthetic oligonucleotide
uauauacucuccaauucag

SEQ ID NO: 35271 - RNA, 19 nt, Artificial Sequence
  Description of Artificial Sequence: Synthetic oligonucleotide
cugauauacuacuauacag

SEQ ID NO: 35272 - RNA, 19 nt, Artificial Sequence
  Description of Artificial Sequence: Synthetic oligonucleotide
uauauauacucuccaauuc

SEQ ID NO: 35273 - RNA, 19 nt, Artificial Sequence
  Description of Artificial Sequence: Synthetic oligonucleotide
uuauccaagagcauguuau

SEQ ID NO: 35274 - RNA, 19 nt, Artificial Sequence
  Description of Artificial Sequence: Synthetic oligonucleotide
uuuaguauaccaguaggcc

SEQ ID NO: 35275 - RNA, 19 nt, Artificial Sequence
  Description of Artificial Sequence: Synthetic oligonucleotide
uguagggauaaacucaugu

SEQ ID NO: 35276 - RNA, 19 nt, Artificial Sequence
  Description of Artificial Sequence: Synthetic oligonucleotide
uuuuacgugggguucagcc

SEQ ID NO: 35277 - RNA, 19 nt, Artificial Sequence
  Description of Artificial Sequence: Synthetic oligonucleotide
ugauauguaaucaggaguu

SEQ ID NO: 35278 - RNA, 19 nt, Artificial Sequence
  Description of Artificial Sequence: Synthetic oligonucleotide
auauaugaggcucaacuca

SEQ ID NO: 35279 - RNA, 19 nt, Artificial Sequence
  Description of Artificial Sequence: Synthetic oligonucleotide
cauaccaauaugcaaggcc

SEQ ID NO: 35280 - RNA, 19 nt, Artificial Sequence
  Description of Artificial Sequence: Synthetic oligonucleotide
aauaaacuuugcagggugc

SEQ ID NO: 35281 - RNA, 19 nt, Artificial Sequence
  Description of Artificial Sequence: Synthetic oligonucleotide
auaaaguguagggauaaac

SEQ ID NO: 35282 - RNA, 19 nt, Artificial Sequence
  Description of Artificial Sequence: Synthetic oligonucleotide
uuuuaauguggcaccgacg

SEQ ID NO: 35283 - RNA, 19 nt, Artificial Sequence
  Description of Artificial Sequence: Synthetic oligonucleotide
aaguagguaaauccuauaa

SEQ ID NO: 35284 - RNA, 19 nt, Artificial Sequence
  Description of Artificial Sequence: Synthetic oligonucleotide
aacucuaaugaauggaaau

SEQ ID NO: 35285 - RNA, 19 nt, Artificial Sequence
  Description of Artificial Sequence: Synthetic oligonucleotide
aauaggauagaaccuccca

SEQ ID NO: 35286 - RNA, 19 nt, Artificial Sequence
  Description of Artificial Sequence: Synthetic oligonucleotide
uguagguuccuacaaguga

SEQ ID NO: 35287 - RNA, 19 nt, Artificial Sequence
  Description of Artificial Sequence: Synthetic oligonucleotide
uguguauuaaacccaugga

SEQ ID NO: 35288 - RNA, 19 nt, Artificial Sequence
  Description of Artificial Sequence: Synthetic oligonucleotide
accuuaauaaaguuuauua

SEQ ID NO: 35289 - RNA, 19 nt, Artificial Sequence
  Description of Artificial Sequence: Synthetic oligonucleotide
auacaugccucacaguuag

SEQ ID NO: 35290 - RNA, 19 nt, Artificial Sequence
  Description of Artificial Sequence: Synthetic oligonucleotide
uccgcuauugcuucuauga

SEQ ID NO: 35291 - RNA, 19 nt, Artificial Sequence
  Description of Artificial Sequence: Synthetic oligonucleotide
ugucuaaaugucuaggcaa

SEQ ID NO: 35292 - RNA, 19 nt, Artificial Sequence
  Description of Artificial Sequence: Synthetic oligonucleotide
ugucuaggcaaauauuuca

SEQ ID NO: 35293 - RNA, 19 nt, Artificial Sequence
  Description of Artificial Sequence: Synthetic oligonucleotide
uuaguguuguuucgcacag

SEQ ID NO: 35294 - RNA, 19 nt, Artificial Sequence
  Description of Artificial Sequence: Synthetic oligonucleotide
uguugaauuugcuaauaac

SEQ ID NO: 35295 - RNA, 19 nt, Artificial Sequence
  Description of Artificial Sequence: Synthetic oligonucleotide
ucaaagcugauauacuacu

SEQ ID NO: 35296 - RNA, 19 nt, Artificial Sequence
  Description of Artificial Sequence: Synthetic oligonucleotide
uguaucgcaaugcaccaug

SEQ ID NO: 35297 - RNA, 19 nt, Artificial Sequence
  Description of Artificial Sequence: Synthetic oligonucleotide
auauauauauauauacucu

SEQ ID NO: 35298 - RNA, 19 nt, Artificial Sequence
  Description of Artificial Sequence: Synthetic oligonucleotide
uuuacgugggguucagccg

SEQ ID NO: 35299 - RNA, 19 nt, Artificial Sequence
  Description of Artificial Sequence: Synthetic oligonucleotide
caggcaacgacaaccaucc

SEQ ID NO: 35300 - RNA, 19 nt, Artificial Sequence
  Description of Artificial Sequence: Synthetic oligonucleotide
guugggaagugauaaagug

SEQ ID NO: 35301 - RNA, 19 nt, Artificial Sequence
  Description of Artificial Sequence: Synthetic oligonucleotide
guuccuacaagugaauccg

SEQ ID NO: 35302 - RNA, 19 nt, Artificial Sequence
  Description of Artificial Sequence: Synthetic oligonucleotide
uuauacaucugucugcgua

SEQ ID NO: 35303 - RNA, 19 nt, Artificial Sequence
  Description of Artificial Sequence: Synthetic oligonucleotide
aacugcuguaucgcaaugc

SEQ ID NO: 35304 - RNA, 19 nt, Artificial Sequence
  Description of Artificial Sequence: Synthetic oligonucleotide
aaauauauauauauauaua

SEQ ID NO: 35305 - RNA, 19 nt, Artificial Sequence
  Description of Artificial Sequence: Synthetic oligonucleotide
cauguaaggauuagacugc

SEQ ID NO: 35306 - RNA, 19 nt, Artificial Sequence
  Description of Artificial Sequence: Synthetic oligonucleotide
ucuaaugaauggaaauagu

SEQ ID NO: 35307 - RNA, 19 nt, Artificial Sequence
  Description of Artificial Sequence: Synthetic oligonucleotide
auuagauuauacaucuguc

SEQ ID NO: 35308 - RNA, 19 nt, Artificial Sequence
  Description of Artificial Sequence: Synthetic oligonucleotide
auauauauauauauauacu

SEQ ID NO: 35309 - RNA, 19 nt, Artificial Sequence
  Description of Artificial Sequence: Synthetic oligonucleotide
aggcucaacucauauguac

SEQ ID NO: 35310 - RNA, 19 nt, Artificial Sequence
  Description of Artificial Sequence: Synthetic oligonucleotide
aauuguguggugugugugu

SEQ ID NO: 35311 - RNA, 19 nt, Artificial Sequence
  Description of Artificial Sequence: Synthetic oligonucleotide
aagugcuuuaagcuggcgu

SEQ ID NO: 35312 - RNA, 19 nt, Artificial Sequence
  Description of Artificial Sequence: Synthetic oligonucleotide
gagacaucguauuucaguc

SEQ ID NO: 35313 - RNA, 19 nt, Artificial Sequence
  Description of Artificial Sequence: Synthetic oligonucleotide
acuucuuaguguuguuucg

SEQ ID NO: 35314 - RNA, 19 nt, Artificial Sequence
  Description of Artificial Sequence: Synthetic oligonucleotide
ucaauauaauccgcuauug

SEQ ID NO: 35315 - RNA, 19 nt, Artificial Sequence
  Description of Artificial Sequence: Synthetic oligonucleotide
ugaucuuuaugacauuuua

SEQ ID NO: 35316 - RNA, 19 nt, Artificial Sequence
  Description of Artificial Sequence: Synthetic oligonucleotide
cucuaaugaauggaaauag

SEQ ID NO: 35317 - RNA, 19 nt, Artificial Sequence
  Description of Artificial Sequence: Synthetic oligonucleotide
aauugggaaggucucuaca

SEQ ID NO: 35318 - RNA, 19 nt, Artificial Sequence
  Description of Artificial Sequence: Synthetic oligonucleotide
aaugaccuaauaaaucccu

SEQ ID NO: 35319 - RNA, 19 nt, Artificial Sequence
  Description of Artificial Sequence: Synthetic oligonucleotide
uuuaauuguguggugugug

SEQ ID NO: 35320 - RNA, 19 nt, Artificial Sequence
  Description of Artificial Sequence: Synthetic oligonucleotide
agcugauauacuacuauac

SEQ ID NO: 35321 - RNA, 19 nt, Artificial Sequence
  Description of Artificial Sequence: Synthetic oligonucleotide
cuaguuaguguucuauuug

SEQ ID NO: 35322 - RNA, 19 nt, Artificial Sequence
  Description of Artificial Sequence: Synthetic oligonucleotide
acaauagauucuuugccgu

SEQ ID NO: 35323 - RNA, 19 nt, Artificial Sequence
  Description of Artificial Sequence: Synthetic oligonucleotide
cuggaguucaauucuaauc

SEQ ID NO: 35324 - RNA, 19 nt, Artificial Sequence
  Description of Artificial Sequence: Synthetic oligonucleotide
uauaauccgcuauugcuuc

SEQ ID NO: 35325 - RNA, 19 nt, Artificial Sequence
  Description of Artificial Sequence: Synthetic oligonucleotide
ugaucgggcaaaagggucc

SEQ ID NO: 35326 - RNA, 19 nt, Artificial Sequence
  Description of Artificial Sequence: Synthetic oligonucleotide
aaucaaaguaagcgcuucu

SEQ ID NO: 35327 - RNA, 19 nt, Artificial Sequence
  Description of Artificial Sequence: Synthetic oligonucleotide
guaaccaucgccaccuugg

SEQ ID NO: 35328 - RNA, 19 nt, Artificial Sequence
  Description of Artificial Sequence: Synthetic oligonucleotide
gauuagacugcucuuuauc

SEQ ID NO: 35329 - RNA, 19 nt, Artificial Sequence
  Description of Artificial Sequence: Synthetic oligonucleotide
uuacaacaucucuacacug

SEQ ID NO: 35330 - RNA, 19 nt, Artificial Sequence
  Description of Artificial Sequence: Synthetic oligonucleotide
aaccugcuaacccauuucu

SEQ ID NO: 35331 - RNA, 19 nt, Artificial Sequence
  Description of Artificial Sequence: Synthetic oligonucleotide
acucgcaaaaguuuugaga

SEQ ID NO: 35332 - RNA, 19 nt, Artificial Sequence
  Description of Artificial Sequence: Synthetic oligonucleotide
ugagagcgaacucggaagc

SEQ ID NO: 35333 - RNA, 19 nt, Artificial Sequence
  Description of Artificial Sequence: Synthetic oligonucleotide
uuaagcuccauauguaauu

SEQ ID NO: 35334 - RNA, 19 nt, Artificial Sequence
  Description of Artificial Sequence: Synthetic oligonucleotide
uaauguggcaccgacggca

SEQ ID NO: 35335 - RNA, 19 nt, Artificial Sequence
  Description of Artificial Sequence: Synthetic oligonucleotide
ucuccgaacaucuguguca

SEQ ID NO: 35336 - RNA, 19 nt, Artificial Sequence
  Description of Artificial Sequence: Synthetic oligonucleotide
augucuaaaugucuaggca

SEQ ID NO: 35337 - RNA, 19 nt, Artificial Sequence
  Description of Artificial Sequence: Synthetic oligonucleotide
ggugauauguaaucaggag

SEQ ID NO: 35338 - RNA, 19 nt, Artificial Sequence
  Description of Artificial Sequence: Synthetic oligonucleotide
agcuauuugagccugcauu

SEQ ID NO: 35339 - RNA, 19 nt, Artificial Sequence
  Description of Artificial Sequence: Synthetic oligonucleotide
uuaauuguguggugugugu

SEQ ID NO: 35340 - RNA, 19 nt, Artificial Sequence
  Description of Artificial Sequence: Synthetic oligonucleotide
ugugccaaaaucugcuagu

SEQ ID NO: 35341 - RNA, 19 nt, Artificial Sequence
  Description of Artificial Sequence: Synthetic oligonucleotide
aagugaauccgcauaaaau

SEQ ID NO: 35342 - RNA, 19 nt, Artificial Sequence
  Description of Artificial Sequence: Synthetic oligonucleotide
ggucacuucuuaaagaugc

SEQ ID NO: 35343 - RNA, 19 nt, Artificial Sequence
  Description of Artificial Sequence: Synthetic oligonucleotide
auaccaauaugcaaggccu

SEQ ID NO: 35344 - RNA, 19 nt, Artificial Sequence
  Description of Artificial Sequence: Synthetic oligonucleotide
uaauuagauuauacaucug

SEQ ID NO: 35345 - RNA, 19 nt, Artificial Sequence
  Description of Artificial Sequence: Synthetic oligonucleotide
uuuaaaucaugccguuuau

SEQ ID NO: 35346 - RNA, 19 nt, Artificial Sequence
  Description of Artificial Sequence: Synthetic oligonucleotide
auaggauagaaccucccau

SEQ ID NO: 35347 - RNA, 19 nt, Artificial Sequence
  Description of Artificial Sequence: Synthetic oligonucleotide
uuaccaauguacagagccu

SEQ ID NO: 35348 - RNA, 19 nt, Artificial Sequence
  Description of Artificial Sequence: Synthetic oligonucleotide
agucguaccucccugucug

SEQ ID NO: 35349 - RNA, 19 nt, Artificial Sequence
  Description of Artificial Sequence: Synthetic oligonucleotide
auugccuuuacuauaaaua

SEQ ID NO: 35350 - RNA, 19 nt, Artificial Sequence
  Description of Artificial Sequence: Synthetic oligonucleotide
caucucuacacugaccccg

SEQ ID NO: 35351 - RNA, 19 nt, Artificial Sequence
  Description of Artificial Sequence: Synthetic oligonucleotide
uuugccguugauauaucau

SEQ ID NO: 35352 - RNA, 19 nt, Artificial Sequence
  Description of Artificial Sequence: Synthetic oligonucleotide
accuccacgagccagggga

SEQ ID NO: 35353 - RNA, 19 nt, Artificial Sequence
  Description of Artificial Sequence: Synthetic oligonucleotide
acuuaagcuccauauguaa

SEQ ID NO: 35354 - RNA, 19 nt, Artificial Sequence
  Description of Artificial Sequence: Synthetic oligonucleotide
agaugcaauuguggcaucc

SEQ ID NO: 35355 - RNA, 19 nt, Artificial Sequence
  Description of Artificial Sequence: Synthetic oligonucleotide
uucgauucaugaucucugc

SEQ ID NO: 35356 - RNA, 19 nt, Artificial Sequence
  Description of Artificial Sequence: Synthetic oligonucleotide
uucgcaacaucacuaguua

SEQ ID NO: 35357 - RNA, 19 nt, Artificial Sequence
  Description of Artificial Sequence: Synthetic oligonucleotide
guaaggauuagacugcucu

SEQ ID NO: 35358 - RNA, 19 nt, Artificial Sequence
  Description of Artificial Sequence: Synthetic oligonucleotide
uuuaagcuggcguggcacc

SEQ ID NO: 35359 - RNA, 19 nt, Artificial Sequence
  Description of Artificial Sequence: Synthetic oligonucleotide
uuuauccaagagcauguua

SEQ ID NO: 35360 - RNA, 19 nt, Artificial Sequence
  Description of Artificial Sequence: Synthetic oligonucleotide
ugccguuuauaacuuauua

SEQ ID NO: 35361 - RNA, 19 nt, Artificial Sequence
  Description of Artificial Sequence: Synthetic oligonucleotide
ugauaaaguguagggauaa

SEQ ID NO: 35362 - RNA, 19 nt, Artificial Sequence
  Description of Artificial Sequence: Synthetic oligonucleotide
ucguuugcaagauucgcaa

SEQ ID NO: 35363 - RNA, 19 nt, Artificial Sequence
  Description of Artificial Sequence: Synthetic oligonucleotide
guagggauaaacucauguc

SEQ ID NO: 35364 - RNA, 19 nt, Artificial Sequence
  Description of Artificial Sequence: Synthetic oligonucleotide
acuaccacgcuugacaggu

SEQ ID NO: 35365 - RNA, 19 nt, Artificial Sequence
  Description of Artificial Sequence: Synthetic oligonucleotide
ugcguaacaggucggacau

SEQ ID NO: 35366 - RNA, 19 nt, Artificial Sequence
  Description of Artificial Sequence: Synthetic oligonucleotide
gaaugcaaucaccugaaua

SEQ ID NO: 35367 - RNA, 19 nt, Artificial Sequence
  Description of Artificial Sequence: Synthetic oligonucleotide
accgacggcauuccagagc

SEQ ID NO: 35368 - RNA, 19 nt, Artificial Sequence
  Description of Artificial Sequence: Synthetic oligonucleotide
uucuuaguguuguuucgca

SEQ ID NO: 35369 - RNA, 19 nt, Artificial Sequence
  Description of Artificial Sequence: Synthetic oligonucleotide
uuaaaccauaugugaagaa

SEQ ID NO: 35370 - RNA, 19 nt, Artificial Sequence
  Description of Artificial Sequence: Synthetic oligonucleotide
ugguaaguuaaaauaccuu

SEQ ID NO: 35371 - RNA, 19 nt, Artificial Sequence
  Description of Artificial Sequence: Synthetic oligonucleotide
guauuugaucaucuguuga

SEQ ID NO: 35372 - RNA, 19 nt, Artificial Sequence
  Description of Artificial Sequence: Synthetic oligonucleotide
cagaguauuguuccucagc

SEQ ID NO: 35373 - RNA, 19 nt, Artificial Sequence
  Description of Artificial Sequence: Synthetic oligonucleotide
ugccguugauauaucauaa

SEQ ID NO: 35374 - RNA, 19 nt, Artificial Sequence
  Description of Artificial Sequence: Synthetic oligonucleotide
ggaacgaacaaauucucuc

SEQ ID NO: 35375 - RNA, 19 nt, Artificial Sequence
  Description of Artificial Sequence: Synthetic oligonucleotide
cacguucagacuuaagcuc

SEQ ID NO: 35376 - RNA, 19 nt, Artificial Sequence
  Description of Artificial Sequence: Synthetic oligonucleotide
ucucucuaaaguagguaaa

SEQ ID NO: 35377 - RNA, 19 nt, Artificial Sequence
  Description of Artificial Sequence: Synthetic oligonucleotide
auccgcauaaaauggagua

SEQ ID NO: 35378 - RNA, 19 nt, Artificial Sequence
  Description of Artificial Sequence: Synthetic oligonucleotide
ucggaagcuuuguuuuacg

SEQ ID NO: 35379 - RNA, 19 nt, Artificial Sequence
  Description of Artificial Sequence: Synthetic oligonucleotide
ggcaaggagagucaguagc

SEQ ID NO: 35380 - RNA, 19 nt, Artificial Sequence
  Description of Artificial Sequence: Synthetic oligonucleotide
ucuuaguguuguuucgcac

SEQ ID NO: 35381 - RNA, 19 nt, Artificial Sequence
  Description of Artificial Sequence: Synthetic oligonucleotide
gcuucuaugaccaaauaca

SEQ ID NO: 35382 - RNA, 19 nt, Artificial Sequence
  Description of Artificial Sequence: Synthetic oligonucleotide
uaucgcaaugcaccaugcc

SEQ ID NO: 35383 - RNA, 19 nt, Artificial Sequence
  Description of Artificial Sequence: Synthetic oligonucleotide
agcaauggaacgaacaaau

SEQ ID NO: 35384 - RNA, 19 nt, Artificial Sequence
  Description of Artificial Sequence: Synthetic oligonucleotide
uugccguugauauaucaua

SEQ ID NO: 35385 - RNA, 19 nt, Artificial Sequence
  Description of Artificial Sequence: Synthetic oligonucleotide
ugaucuaggaugacucuuu

SEQ ID NO: 35386 - RNA, 19 nt, Artificial Sequence
  Description of Artificial Sequence: Synthetic oligonucleotide
cauucucgcccauaguaac

SEQ ID NO: 35387 - RNA, 19 nt, Artificial Sequence
  Description of Artificial Sequence: Synthetic oligonucleotide
uaauuguguggugugugug

SEQ ID NO: 35388 - RNA, 19 nt, Artificial Sequence
  Description of Artificial Sequence: Synthetic oligonucleotide
acaccuacagaccaccaau

SEQ ID NO: 35389 - RNA, 19 nt, Artificial Sequence
  Description of Artificial Sequence: Synthetic oligonucleotide
cguauuucagucuugcagc

SEQ ID NO: 35390 - RNA, 19 nt, Artificial Sequence
  Description of Artificial Sequence: Synthetic oligonucleotide
ucagaguauuguuccucag

SEQ ID NO: 35391 - RNA, 19 nt, Artificial Sequence
  Description of Artificial Sequence: Synthetic oligonucleotide
ggaagcuuuguuuuacgug

SEQ ID NO: 35392 - RNA, 19 nt, Artificial Sequence
  Description of Artificial Sequence: Synthetic oligonucleotide
ucucguuugcaagauucgc

SEQ ID NO: 35393 - RNA, 19 nt, Artificial Sequence
  Description of Artificial Sequence: Synthetic oligonucleotide
gaacgaacaaauucucucu

SEQ ID NO: 35394 - RNA, 19 nt, Artificial Sequence
  Description of Artificial Sequence: Synthetic oligonucleotide
ucgcaacaucacuaguuag

SEQ ID NO: 35395 - RNA, 19 nt, Artificial Sequence
  Description of Artificial Sequence: Synthetic oligonucleotide
ugucuuuacuguccagggu

SEQ ID NO: 35396 - RNA, 19 nt, Artificial Sequence
  Description of Artificial Sequence: Synthetic oligonucleotide
augcaaucaccugaauaac

SEQ ID NO: 35397 - RNA, 19 nt, Artificial Sequence
  Description of Artificial Sequence: Synthetic oligonucleotide
uaccaauaugcaaggccug

SEQ ID NO: 35398 - RNA, 19 nt, Artificial Sequence
  Description of Artificial Sequence: Synthetic oligonucleotide
gaaccucccauaauguaac

SEQ ID NO: 35399 - RNA, 19 nt, Artificial Sequence
  Description of Artificial Sequence: Synthetic oligonucleotide
guuuggagcaagcugucga

SEQ ID NO: 35400 - RNA, 19 nt, Artificial Sequence
  Description of Artificial Sequence: Synthetic oligonucleotide
gaauaggauagaaccuccc

SEQ ID NO: 35401 - RNA, 19 nt, Artificial Sequence
  Description of Artificial Sequence: Synthetic oligonucleotide
aagucguaccucccugucu

SEQ ID NO: 35402 - RNA, 19 nt, Artificial Sequence
  Description of Artificial Sequence: Synthetic oligonucleotide
uacaagugcauaguugcaa

SEQ ID NO: 35403 - RNA, 19 nt, Artificial Sequence
  Description of Artificial Sequence: Synthetic oligonucleotide
aggcccuaggagaugaucg

SEQ ID NO: 35404 - RNA, 19 nt, Artificial Sequence
  Description of Artificial Sequence: Synthetic oligonucleotide
caugccucacaguuaguug

SEQ ID NO: 35405 - RNA, 19 nt, Artificial Sequence
  Description of Artificial Sequence: Synthetic oligonucleotide
aagcuuuguuuuacguggg

SEQ ID NO: 35406 - RNA, 19 nt, Artificial Sequence
  Description of Artificial Sequence: Synthetic oligonucleotide
aucaaaguaagcgcuucug

SEQ ID NO: 35407 - RNA, 19 nt, Artificial Sequence
  Description of Artificial Sequence: Synthetic oligonucleotide
ugguuuguuuggagcaagc

SEQ ID NO: 35408 - RNA, 19 nt, Artificial Sequence
  Description of Artificial Sequence: Synthetic oligonucleotide
uccacucgcaaaaguuuug

SEQ ID NO: 35409 - RNA, 19 nt, Artificial Sequence
  Description of Artificial Sequence: Synthetic oligonucleotide
ccugcuaacccauuucugc

SEQ ID NO: 35410 - RNA, 19 nt, Artificial Sequence
  Description of Artificial Sequence: Synthetic oligonucleotide
gcuagaagaaugcaaucac

SEQ ID NO: 35411 - RNA, 19 nt, Artificial Sequence
  Description of Artificial Sequence: Synthetic oligonucleotide
auauaauccgcuauugcuu

SEQ ID NO: 35412 - RNA, 19 nt, Artificial Sequence
  Description of Artificial Sequence: Synthetic oligonucleotide
uucgcacaggcaacgacaa

SEQ ID NO: 35413 - RNA, 19 nt, Artificial Sequence
  Description of Artificial Sequence: Synthetic oligonucleotide
aaagugcuuuaagcuggcg

SEQ ID NO: 35414 - RNA, 19 nt, Artificial Sequence
  Description of Artificial Sequence: Synthetic oligonucleotide
uuucacguucagacuuaag

SEQ ID NO: 35415 - RNA, 19 nt, Artificial Sequence
  Description of Artificial Sequence: Synthetic oligonucleotide
aguaaccaucgccaccuug

SEQ ID NO: 35416 - RNA, 19 nt, Artificial Sequence
  Description of Artificial Sequence: Synthetic oligonucleotide
aaucccuauguuaaaccau

SEQ ID NO: 35417 - RNA, 19 nt, Artificial Sequence
  Description of Artificial Sequence: Synthetic oligonucleotide
ucugcuaguuuuaguuguc

SEQ ID NO: 35418 - RNA, 19 nt, Artificial Sequence
  Description of Artificial Sequence: Synthetic oligonucleotide
uuugcaagauucgcaacau

SEQ ID NO: 35419 - RNA, 19 nt, Artificial Sequence
  Description of Artificial Sequence: Synthetic oligonucleotide
cuguagguuccuacaagug

SEQ ID NO: 35420 - RNA, 19 nt, Artificial Sequence
  Description of Artificial Sequence: Synthetic oligonucleotide
ugucugcguaacaggucgg

SEQ ID NO: 35421 - RNA, 19 nt, Artificial Sequence
  Description of Artificial Sequence: Synthetic oligonucleotide
ugcugucuaugucacugcu

SEQ ID NO: 35422 - RNA, 19 nt, Artificial Sequence
  Description of Artificial Sequence: Synthetic oligonucleotide
caucuagucuuaacagaug

SEQ ID NO: 35423 - RNA, 19 nt, Artificial Sequence
  Description of Artificial Sequence: Synthetic oligonucleotide
uaaggauuagacugcucuu

SEQ ID NO: 35424 - RNA, 19 nt, Artificial Sequence
  Description of Artificial Sequence: Synthetic oligonucleotide
uuccuacaagugaauccgc

SEQ ID NO: 35425 - RNA, 19 nt, Artificial Sequence
  Description of Artificial Sequence: Synthetic oligonucleotide
uacacgcacagcauccaaa

SEQ ID NO: 35426 - RNA, 19 nt, Artificial Sequence
  Description of Artificial Sequence: Synthetic oligonucleotide
gcugauauacuacuauaca

SEQ ID NO: 35427 - RNA, 19 nt, Artificial Sequence
  Description of Artificial Sequence: Synthetic oligonucleotide
auguuaaaccauaugugaa

SEQ ID NO: 35428 - RNA, 19 nt, Artificial Sequence
  Description of Artificial Sequence: Synthetic oligonucleotide
ccuauguuaaaccauaugu

SEQ ID NO: 35429 - RNA, 19 nt, Artificial Sequence
  Description of Artificial Sequence: Synthetic oligonucleotide
uuccaagucguaccucccu

SEQ ID NO: 35430 - RNA, 19 nt, Artificial Sequence
  Description of Artificial Sequence: Synthetic oligonucleotide
cucguuugcaagauucgca

SEQ ID NO: 35431 - RNA, 19 nt, Artificial Sequence
  Description of Artificial Sequence: Synthetic oligonucleotide
auauacuacuauacagcug

SEQ ID NO: 35432 - RNA, 19 nt, Artificial Sequence
  Description of Artificial Sequence: Synthetic oligonucleotide
agguuccuacaagugaauc

SEQ ID NO: 35433 - RNA, 19 nt, Artificial Sequence
  Description of Artificial Sequence: Synthetic oligonucleotide
acgaacaaauucucucuaa

SEQ ID NO: 35434 - RNA, 19 nt, Artificial Sequence
  Description of Artificial Sequence: Synthetic oligonucleotide
aacgacaaccauccuucua

SEQ ID NO: 35435 - RNA, 19 nt, Artificial Sequence
  Description of Artificial Sequence: Synthetic oligonucleotide
ucaccuuaauaaaguuuau

SEQ ID NO: 35436 - RNA, 19 nt, Artificial Sequence
  Description of Artificial Sequence: Synthetic oligonucleotide
uaccacgcuugacagguuc

SEQ ID NO: 35437 - RNA, 19 nt, Artificial Sequence
  Description of Artificial Sequence: Synthetic oligonucleotide
aggugauauguaaucagga

SEQ ID NO: 35438 - RNA, 19 nt, Artificial Sequence
  Description of Artificial Sequence: Synthetic oligonucleotide
uguaaggauuagacugcuc

SEQ ID NO: 35439 - RNA, 19 nt, Artificial Sequence
  Description of Artificial Sequence: Synthetic oligonucleotide
auauuaauucagucuccuu

SEQ ID NO: 35440 - RNA, 19 nt, Artificial Sequence
  Description of Artificial Sequence: Synthetic oligonucleotide
auaacuuauuauaguucca

SEQ ID NO: 35441 - RNA, 19 nt, Artificial Sequence
  Description of Artificial Sequence: Synthetic oligonucleotide
guagguuccuacaagugaa

SEQ ID NO: 35442 - RNA, 19 nt, Artificial Sequence
  Description of Artificial Sequence: Synthetic oligonucleotide
aguugggaagugauaaagu

SEQ ID NO: 35443 - RNA, 19 nt, Artificial Sequence
  Description of Artificial Sequence: Synthetic oligonucleotide
cuuccaagucguaccuccc

SEQ ID NO: 35444 - RNA, 19 nt, Artificial Sequence
  Description of Artificial Sequence: Synthetic oligonucleotide
uuuccucgagagaugcaau

SEQ ID NO: 35445 - RNA, 19 nt, Artificial Sequence
  Description of Artificial Sequence: Synthetic oligonucleotide
gagggaagcaaugacaaau

SEQ ID NO: 35446 - RNA, 19 nt, Artificial Sequence
  Description of Artificial Sequence: Synthetic oligonucleotide
gagcaucccuaugagguug

SEQ ID NO: 35447 - RNA, 19 nt, Artificial Sequence
  Description of Artificial Sequence: Synthetic oligonucleotide
guugguuagugucugaguu

SEQ ID NO: 35448 - RNA, 19 nt, Artificial Sequence
  Description of Artificial Sequence: Synthetic oligonucleotide
caagugaauccgcauaaaa

SEQ ID NO: 35449 - RNA, 19 nt, Artificial Sequence
  Description of Artificial Sequence: Synthetic oligonucleotide
uguuuuacgugggguucag

SEQ ID NO: 35450 - RNA, 19 nt, Artificial Sequence
  Description of Artificial Sequence: Synthetic oligonucleotide
auucgcaacaucacuaguu

SEQ ID NO: 35451 - RNA, 19 nt, Artificial Sequence
  Description of Artificial Sequence: Synthetic oligonucleotide
aauccgcuauugcuucuau

SEQ ID NO: 35452 - RNA, 19 nt, Artificial Sequence
  Description of Artificial Sequence: Synthetic oligonucleotide
uguggcaccgacggcauuc

SEQ ID NO: 35453 - RNA, 19 nt, Artificial Sequence
  Description of Artificial Sequence: Synthetic oligonucleotide
ucuaaaugucuaggcaaau

SEQ ID NO: 35454 - RNA, 19 nt, Artificial Sequence
  Description of Artificial Sequence: Synthetic oligonucleotide
aggauuagacugcucuuua

SEQ ID NO: 35455 - RNA, 19 nt, Artificial Sequence
  Description of Artificial Sequence: Synthetic oligonucleotide
auauauacacgcacagcau

SEQ ID NO: 35456 - RNA, 19 nt, Artificial Sequence
  Description of Artificial Sequence: Synthetic oligonucleotide
cuuugccguugauauauca

SEQ ID NO: 35457 - RNA, 19 nt, Artificial Sequence
  Description of Artificial Sequence: Synthetic oligonucleotide
gcaacgacaaccauccuuc

SEQ ID NO: 35458 - RNA, 19 nt, Artificial Sequence
  Description of Artificial Sequence: Synthetic oligonucleotide
ugcuuuaagcuggcguggc

SEQ ID NO: 35459 - RNA, 19 nt, Artificial Sequence
  Description of Artificial Sequence: Synthetic oligonucleotide
auaauccgcuauugcuucu

SEQ ID NO: 35460 - RNA, 19 nt, Artificial Sequence
  Description of Artificial Sequence: Synthetic oligonucleotide
caaccugcuaacccauuuc

SEQ ID NO: 35461 - RNA, 19 nt, Artificial Sequence
  Description of Artificial Sequence: Synthetic oligonucleotide
ugugugguguguguguaua

SEQ ID NO: 35462 - RNA, 19 nt, Artificial Sequence
  Description of Artificial Sequence: Synthetic oligonucleotide
ucccuauguuaaaccauau

SEQ ID NO: 35463 - RNA, 19 nt, Artificial Sequence
  Description of Artificial Sequence: Synthetic oligonucleotide
cucggaagcuuuguuuuac

SEQ ID NO: 35464 - RNA, 19 nt, Artificial Sequence
  Description of Artificial Sequence: Synthetic oligonucleotide
aucuaggaugacucuuuaa

SEQ ID NO: 35465 - RNA, 19 nt, Artificial Sequence
  Description of Artificial Sequence: Synthetic oligonucleotide
caacucuaaugaauggaaa

SEQ ID NO: 35466 - RNA, 19 nt, Artificial Sequence
  Description of Artificial Sequence: Synthetic oligonucleotide
uuccucgagagaugcaauu

SEQ ID NO: 35467 - RNA, 19 nt, Artificial Sequence
  Description of Artificial Sequence: Synthetic oligonucleotide
uuaagcuggcguggcaccu

SEQ ID NO: 35468 - RNA, 19 nt, Artificial Sequence
  Description of Artificial Sequence: Synthetic oligonucleotide
agauucuuugccguugaua

SEQ ID NO: 35469 - RNA, 19 nt, Artificial Sequence
  Description of Artificial Sequence: Synthetic oligonucleotide
gcuaauaacaauagauucu

SEQ ID NO: 35470 - RNA, 19 nt, Artificial Sequence
  Description of Artificial Sequence: Synthetic oligonucleotide
ugucuauauccagaaccau

SEQ ID NO: 35471 - RNA, 19 nt, Artificial Sequence
  Description of Artificial Sequence: Synthetic oligonucleotide
acaugccucacaguuaguu

SEQ ID NO: 35472 - RNA, 19 nt, Artificial Sequence
  Description of Artificial Sequence: Synthetic oligonucleotide
auguaaggauuagacugcu

SEQ ID NO: 35473 - RNA, 19 nt, Artificial Sequence
  Description of Artificial Sequence: Synthetic oligonucleotide
cuuugucguccucaauguc

SEQ ID NO: 35474 - RNA, 19 nt, Artificial Sequence
  Description of Artificial Sequence: Synthetic oligonucleotide
auccgcuauugcuucuaug

SEQ ID NO: 35475 - RNA, 19 nt, Artificial Sequence
  Description of Artificial Sequence: Synthetic oligonucleotide
uaaacuuugcagggugcua

SEQ ID NO: 35476 - RNA, 19 nt, Artificial Sequence
  Description of Artificial Sequence: Synthetic oligonucleotide
cuauuugagccugcauuuc

SEQ ID NO: 35477 - RNA, 19 nt, Artificial Sequence
  Description of Artificial Sequence: Synthetic oligonucleotide
gucuaaaugucuaggcaaa

SEQ ID NO: 35478 - RNA, 19 nt, Artificial Sequence
  Description of Artificial Sequence: Synthetic oligonucleotide
ggcccuaggagaugaucgg

SEQ ID NO: 35479 - RNA, 19 nt, Artificial Sequence
  Description of Artificial Sequence: Synthetic oligonucleotide
uugcuucuaugaccaaaua

SEQ ID NO: 35480 - RNA, 19 nt, Artificial Sequence
  Description of Artificial Sequence: Synthetic oligonucleotide
caagauucgcaacaucacu

SEQ ID NO: 35481 - RNA, 19 nt, Artificial Sequence
  Description of Artificial Sequence: Synthetic oligonucleotide
ucuuugccguugauauauc

SEQ ID NO: 35482 - RNA, 19 nt, Artificial Sequence
  Description of Artificial Sequence: Synthetic oligonucleotide
guaucgcaaugcaccaugc

SEQ ID NO: 35483 - RNA, 19 nt, Artificial Sequence
  Description of Artificial Sequence: Synthetic oligonucleotide
caaagcugauauacuacua

SEQ ID NO: 35484 - RNA, 19 nt, Artificial Sequence
  Description of Artificial Sequence: Synthetic oligonucleotide
acauucucgcccauaguaa

SEQ ID NO: 35485 - RNA, 19 nt, Artificial Sequence
  Description of Artificial Sequence: Synthetic oligonucleotide
ucgggcaaaaggguccgga

SEQ ID NO: 35486 - RNA, 19 nt, Artificial Sequence
  Description of Artificial Sequence: Synthetic oligonucleotide
cauacaugccucacaguua

SEQ ID NO: 35487 - RNA, 19 nt, Artificial Sequence
  Description of Artificial Sequence: Synthetic oligonucleotide
gaacucggaagcuuuguuu

SEQ ID NO: 35488 - RNA, 19 nt, Artificial Sequence
  Description of Artificial Sequence: Synthetic oligonucleotide
gaucuaggaugacucuuua

SEQ ID NO: 35489 - RNA, 19 nt, Artificial Sequence
  Description of Artificial Sequence: Synthetic oligonucleotide
ugugccacaauggcuucau

SEQ ID NO: 35490 - RNA, 19 nt, Artificial Sequence
  Description of Artificial Sequence: Synthetic oligonucleotide
aucccuauguuaaaccaua

SEQ ID NO: 35491 - RNA, 19 nt, Artificial Sequence
  Description of Artificial Sequence: Synthetic oligonucleotide
cacccugggaauccuaaca

SEQ ID NO: 35492 - RNA, 19 nt, Artificial Sequence
  Description of Artificial Sequence: Synthetic oligonucleotide
auacacgcacagcauccaa

SEQ ID NO: 35493 - RNA, 19 nt, Artificial Sequence
  Description of Artificial Sequence: Synthetic oligonucleotide
cgcauaaaauggaguaucc

SEQ ID NO: 35494 - RNA, 19 nt, Artificial Sequence
  Description of Artificial Sequence: Synthetic oligonucleotide
aauguggcaccgacggcau

SEQ ID NO: 35495 - RNA, 19 nt, Artificial Sequence
  Description of Artificial Sequence: Synthetic oligonucleotide
agcaucccuaugagguugg

SEQ ID NO: 35496 - RNA, 19 nt, Artificial Sequence
  Description of Artificial Sequence: Synthetic oligonucleotide
cccuaggagaugaucgggc

SEQ ID NO: 35497 - RNA, 19 nt, Artificial Sequence
  Description of Artificial Sequence: Synthetic oligonucleotide
auuguguggugugugugua

SEQ ID NO: 35498 - RNA, 19 nt, Artificial Sequence
  Description of Artificial Sequence: Synthetic oligonucleotide
uauuucagucuugcagcua

SEQ ID NO: 35499 - RNA, 19 nt, Artificial Sequence
  Description of Artificial Sequence: Synthetic oligonucleotide
gcaagauucgcaacaucac

SEQ ID NO: 35500 - RNA, 19 nt, Artificial Sequence
  Description of Artificial Sequence: Synthetic oligonucleotide
gugauaaaguguagggaua

SEQ ID NO: 35501 - RNA, 19 nt, Artificial Sequence
  Description of Artificial Sequence: Synthetic oligonucleotide
uugugugguguguguguau

SEQ ID NO: 35502 - RNA, 19 nt, Artificial Sequence
  Description of Artificial Sequence: Synthetic oligonucleotide
cuuguuuaugucuggccau

SEQ ID NO: 35503 - RNA, 19 nt, Artificial Sequence
  Description of Artificial Sequence: Synthetic oligonucleotide
guaccucccugucuguuaa

SEQ ID NO: 35504 - RNA, 19 nt, Artificial Sequence
  Description of Artificial Sequence: Synthetic oligonucleotide
agagcgaacucggaagcuu

SEQ ID NO: 35505 - RNA, 19 nt, Artificial Sequence
  Description of Artificial Sequence: Synthetic oligonucleotide
acucggaagcuuuguuuua

SEQ ID NO: 35506 - RNA, 19 nt, Artificial Sequence
  Description of Artificial Sequence: Synthetic oligonucleotide
gcaggauaggucccgccug

SEQ ID NO: 35507 - RNA, 19 nt, Artificial Sequence
  Description of Artificial Sequence: Synthetic oligonucleotide
accucccauaauguaacaa

SEQ ID NO: 35508 - RNA, 19 nt, Artificial Sequence
  Description of Artificial Sequence: Synthetic oligonucleotide
ccaugugaucuuuaugaca

SEQ ID NO: 35509 - RNA, 19 nt, Artificial Sequence
  Description of Artificial Sequence: Synthetic oligonucleotide
cccuauguuaaaccauaug

SEQ ID NO: 35510 - RNA, 19 nt, Artificial Sequence
  Description of Artificial Sequence: Synthetic oligonucleotide
auccacucgcaaaaguuuu

SEQ ID NO: 35511 - RNA, 19 nt, Artificial Sequence
  Description of Artificial Sequence: Synthetic oligonucleotide
gauccacucgcaaaaguuu

SEQ ID NO: 35512 - RNA, 19 nt, Artificial Sequence
  Description of Artificial Sequence: Synthetic oligonucleotide
ccucccauaauguaacaaa

SEQ ID NO: 35513 - RNA, 19 nt, Artificial Sequence
  Description of Artificial Sequence: Synthetic oligonucleotide
ccauccuucuaaucuugac

SEQ ID NO: 35514 - RNA, 19 nt, Artificial Sequence
  Description of Artificial Sequence: Synthetic oligonucleotide
augaccuaauaaaucccua

SEQ ID NO: 35515 - RNA, 19 nt, Artificial Sequence
  Description of Artificial Sequence: Synthetic oligonucleotide
aucgccaccuugggauuuc

SEQ ID NO: 35516 - RNA, 19 nt, Artificial Sequence
  Description of Artificial Sequence: Synthetic oligonucleotide
gccguuuauaacuuauuau

SEQ ID NO: 35517 - RNA, 19 nt, Artificial Sequence
  Description of Artificial Sequence: Synthetic oligonucleotide
ggccugagagcgaacucgg

SEQ ID NO: 35518 - RNA, 19 nt, Artificial Sequence
  Description of Artificial Sequence: Synthetic oligonucleotide
caccgacggcauuccagag

SEQ ID NO: 35519 - RNA, 19 nt, Artificial Sequence
  Description of Artificial Sequence: Synthetic oligonucleotide
ccguugauauaucauaaua

SEQ ID NO: 35520 - RNA, 19 nt, Artificial Sequence
  Description of Artificial Sequence: Synthetic oligonucleotide
gcuaguuuuaguuguccau

SEQ ID NO: 35521 - RNA, 19 nt, Artificial Sequence
  Description of Artificial Sequence: Synthetic oligonucleotide
ggcucaacauccccugguc

SEQ ID NO: 35522 - RNA, 19 nt, Artificial Sequence
  Description of Artificial Sequence: Synthetic oligonucleotide
gcaccgacggcauuccaga

SEQ ID NO: 35523 - RNA, 19 nt, Artificial Sequence
  Description of Artificial Sequence: Synthetic oligonucleotide
ccgacggcauuccagagca

SEQ ID NO: 35524 - RNA, 19 nt, Artificial Sequence
  Description of Artificial Sequence: Synthetic oligonucleotide
gggauuuaguauaccagua

SEQ ID NO: 35525 - RNA, 19 nt, Artificial Sequence
  Description of Artificial Sequence: Synthetic oligonucleotide
gcccuaggagaugaucggg

SEQ ID NO: 35526 - RNA, 19 nt, Artificial Sequence
  Description of Artificial Sequence: Synthetic oligonucleotide
cacuguagugagauccacu

SEQ ID NO: 35527 - RNA, 19 nt, Artificial Sequence
  Description of Artificial Sequence: Synthetic oligonucleotide
ccgcuauugcuucuaugac

SEQ ID NO: 35528 - RNA, 19 nt, Artificial Sequence
  Description of Artificial Sequence: Synthetic oligonucleotide
ggugaucuaggaugacucu

SEQ ID NO: 35529 - RNA, 19 nt, Artificial Sequence
  Description of Artificial Sequence: Synthetic oligonucleotide
guggcaccgacggcauucc

SEQ ID NO: 35530 - RNA, 19 nt, Artificial Sequence
  Description of Artificial Sequence: Synthetic oligonucleotide
gguugguuagugucugagu

SEQ ID NO: 35531 - RNA, 19 nt, Artificial Sequence
  Description of Artificial Sequence: Synthetic oligonucleotide
gaggcucaacucauaugua

SEQ ID NO: 35532 - RNA, 19 nt, Artificial Sequence
  Description of Artificial Sequence: Synthetic oligonucleotide
ccugagagcgaacucggaa

SEQ ID NO: 35533 - RNA, 19 nt, Artificial Sequence
  Description of Artificial Sequence: Synthetic oligonucleotide
gucccgccuguucucuaac

SEQ ID NO: 35534 - RNA, 19 nt, Artificial Sequence
  Description of Artificial Sequence: Synthetic oligonucleotide
caggugaucuaggaugacu

SEQ ID NO: 35535 - RNA, 19 nt, Artificial Sequence
  Description of Artificial Sequence: Synthetic oligonucleotide
gugaucuaggaugacucuu

SEQ ID NO: 35536 - RNA, 19 nt, Artificial Sequence
  Description of Artificial Sequence: Synthetic oligonucleotide
gggaaggucucuacaucuc

SEQ ID NO: 35537 - RNA, 19 nt, Artificial Sequence
  Description of Artificial Sequence: Synthetic oligonucleotide
gagagcgaacucggaagcu

SEQ ID NO: 35538 - RNA, 19 nt, Artificial Sequence
  Description of Artificial Sequence: Synthetic oligonucleotide
cugccuauacuggaacugu

SEQ ID NO: 35539 - RNA, 19 nt, Artificial Sequence
  Description of Artificial Sequence: Synthetic oligonucleotide
aggcaacgacaaccauccu

SEQ ID NO: 35540 - RNA, 19 nt, Artificial Sequence
  Description of Artificial Sequence: Synthetic oligonucleotide
ucgccaccuugggauuuca

SEQ ID NO: 35541 - RNA, 19 nt, Artificial Sequence
  Description of Artificial Sequence: Synthetic oligonucleotide
caggauaggucccgccugu

SEQ ID NO: 35542 - RNA, 19 nt, Artificial Sequence
  Description of Artificial Sequence: Synthetic oligonucleotide
cgcaacaucacuaguuagu

SEQ ID NO: 35543 - RNA, 19 nt, Artificial Sequence
  Description of Artificial Sequence: Synthetic oligonucleotide
gugugguguguguguauau

SEQ ID NO: 35544 - RNA, 19 nt, Artificial Sequence
  Description of Artificial Sequence: Synthetic oligonucleotide
ccacucgcaaaaguuuuga

SEQ ID NO: 35545 - RNA, 19 nt, Artificial Sequence
  Description of Artificial Sequence: Synthetic oligonucleotide
cagggugcuaugaucucuu

SEQ ID NO: 35546 - RNA, 19 nt, Artificial Sequence
  Description of Artificial Sequence: Synthetic oligonucleotide
gccguugauauaucauaau

SEQ ID NO: 35547 - RNA, 19 nt, Artificial Sequence
  Description of Artificial Sequence: Synthetic oligonucleotide
caacgacaaccauccuucu

SEQ ID NO: 35548 - RNA, 19 nt, Artificial Sequence
  Description of Artificial Sequence: Synthetic oligonucleotide
auguggcaccgacggcauu

SEQ ID NO: 35549 - RNA, 19 nt, Artificial Sequence
  Description of Artificial Sequence: Synthetic oligonucleotide
gucguaccucccugucugu

SEQ ID NO: 35550 - RNA, 19 nt, Artificial Sequence
  Description of Artificial Sequence: Synthetic oligonucleotide
cagcuauuugagccugcau

SEQ ID NO: 35551 - RNA, 19 nt, Artificial Sequence
  Description of Artificial Sequence: Synthetic oligonucleotide
ggcaguuagcuugguuugu

SEQ ID NO: 35552 - RNA, 19 nt, Artificial Sequence
  Description of Artificial Sequence: Synthetic oligonucleotide
gcaauggaacgaacaaauu

SEQ ID NO: 35553 - RNA, 19 nt, Artificial Sequence
  Description of Artificial Sequence: Synthetic oligonucleotide
cuguaucgcaaugcaccau

SEQ ID NO: 35554 - RNA, 19 nt, Artificial Sequence
  Description of Artificial Sequence: Synthetic oligonucleotide
gcgaacucggaagcuuugu

SEQ ID NO: 35555 - RNA, 19 nt, Artificial Sequence
  Description of Artificial Sequence: Synthetic oligonucleotide
gccaacuuauucacagcuu

SEQ ID NO: 35556 - RNA, 19 nt, Artificial Sequence
  Description of Artificial Sequence: Synthetic oligonucleotide
gucgacugggccgccggau

SEQ ID NO: 35557 - RNA, 19 nt, Artificial Sequence
  Description of Artificial Sequence: Synthetic oligonucleotide
cacgcuugacagguucuuu

SEQ ID NO: 35558 - RNA, 19 nt, Artificial Sequence
  Description of Artificial Sequence: Synthetic oligonucleotide
gccugagagcgaacucgga

SEQ ID NO: 35559 - RNA, 19 nt, Artificial Sequence
  Description of Artificial Sequence: Synthetic oligonucleotide
caucgccaccuugggauuu

SEQ ID NO: 35560 - RNA, 19 nt, Artificial Sequence
  Description of Artificial Sequence: Synthetic oligonucleotide
cuaccacgcuugacagguu

SEQ ID NO: 35561 - RNA, 19 nt, Artificial Sequence
  Description of Artificial Sequence: Synthetic oligonucleotide
ccggauggacugguucugu

SEQ ID NO: 35562 - RNA, 19 nt, Artificial Sequence
  Description of Artificial Sequence: Synthetic oligonucleotide
ggccgccggauggacuggu

SEQ ID NO: 35563 - RNA, 19 nt, Artificial Sequence
  Description of Artificial Sequence: Synthetic oligonucleotide
ccacgcuugacagguucuu

SEQ ID NO: 35564 - RNA, 19 nt, Artificial Sequence
  Description of Artificial Sequence: Synthetic oligonucleotide
aauccagaaaaccaguugc

SEQ ID NO: 35565 - RNA, 19 nt, Artificial Sequence
  Description of Artificial Sequence: Synthetic oligonucleotide
aaaucaagcugaugaaucc

SEQ ID NO: 35566 - RNA, 19 nt, Artificial Sequence
  Description of Artificial Sequence: Synthetic oligonucleotide
auuccauugauccaggagg

SEQ ID NO: 35567 - RNA, 19 nt, Artificial Sequence
  Description of Artificial Sequence: Synthetic oligonucleotide
  modified_base (8)..(8): a, c, u, g, unknown or other
uuuuaaancuuacacaagu

SEQ ID NO: 35568 - RNA, 19 nt, Artificial Sequence
  Description of Artificial Sequence: Synthetic oligonucleotide
aguaguauaagauggcauc

SEQ ID NO: 35569 - RNA, 19 nt, Artificial Sequence
  Description of Artificial Sequence: Synthetic oligonucleotide
uuuaugugaauagucaggg

SEQ ID NO: 35570 - RNA, 19 nt, Artificial Sequence
  Description of Artificial Sequence: Synthetic oligonucleotide
auagcauucacacacacga

SEQ ID NO: 35571 - RNA, 19 nt, Artificial Sequence
  Description of Artificial Sequence: Synthetic oligonucleotide
  modified_base (7)..(7): a, c, u, g, unknown or other
uuuaaancuuacacaagug

SEQ ID NO: 35572 - RNA, 19 nt, Artificial Sequence
  Description of Artificial Sequence: Synthetic oligonucleotide
  modified_base (6)..(6): a, c, u, g, unknown or other
uuaaancuuacacaagugu

SEQ ID NO: 35573 - RNA, 19 nt, Artificial Sequence
  Description of Artificial Sequence: Synthetic oligonucleotide
uaugugaauagucagggac

SEQ ID NO: 35574 - RNA, 19 nt, Artificial Sequence
  Description of Artificial Sequence: Synthetic oligonucleotide
gauuuauaaagagaaggcg

SEQ ID NO: 35575 - RNA, 19 nt, Artificial Sequence
  Description of Artificial Sequence: Synthetic oligonucleotide
uguaauuuauuguuacucc

SEQ ID NO: 35576 - RNA, 19 nt, Artificial Sequence
  Description of Artificial Sequence: Synthetic oligonucleotide
cuuaguucuaacuauauga

SEQ ID NO: 35577 - RNA, 19 nt, Artificial Sequence
  Description of Artificial Sequence: Synthetic oligonucleotide
augaaugucacuuaaucca

SEQ ID NO: 35578 - RNA, 19 nt, Artificial Sequence
  Description of Artificial Sequence: Synthetic oligonucleotide
ugcaaauucaucuuuccgc

SEQ ID NO: 35579 - RNA, 19 nt, Artificial Sequence
  Description of Artificial Sequence: Synthetic oligonucleotide
aaucguuucauugucuuuc

SEQ ID NO: 35580 - RNA, 19 nt, Artificial Sequence
  Description of Artificial Sequence: Synthetic oligonucleotide
acuaaaaccaaaugaaggu

SEQ ID NO: 35581 - RNA, 19 nt, Artificial Sequence
  Description of Artificial Sequence: Synthetic oligonucleotide
augguaugaaaauuauggc

SEQ ID NO: 35582 - RNA, 19 nt, Artificial Sequence
  Description of Artificial Sequence: Synthetic oligonucleotide
acuuaauccaauaagagcu

SEQ ID NO: 35583 - RNA, 19 nt, Artificial Sequence
  Description of Artificial Sequence: Synthetic oligonucleotide
aacaacaacaacaacaaaa

SEQ ID NO: 35584 - RNA, 19 nt, Artificial Sequence
  Description of Artificial Sequence: Synthetic oligonucleotide
aaaugucguauuuguacac

SEQ ID NO: 35585 - RNA, 19 nt, Artificial Sequence
  Description of Artificial Sequence: Synthetic oligonucleotide
ucuaaaucaucacaacgug

SEQ ID NO: 35586 - RNA, 19 nt, Artificial Sequence
  Description of Artificial Sequence: Synthetic oligonucleotide
uuuauaaagagaaggcguc

SEQ ID NO: 35587 - RNA, 19 nt, Artificial Sequence
  Description of Artificial Sequence: Synthetic oligonucleotide
acaaacaacaacaacaaca

SEQ ID NO: 35588 - RNA, 19 nt, Artificial Sequence
  Description of Artificial Sequence: Synthetic oligonucleotide
cuuuaugugaauagucagg

SEQ ID NO: 35589 - RNA, 19 nt, Artificial Sequence
  Description of Artificial Sequence: Synthetic oligonucleotide
aguugaaguuaucacacuc

SEQ ID NO: 35590 - RNA, 19 nt, Artificial Sequence
  Description of Artificial Sequence: Synthetic oligonucleotide
uggaaauacaguuuuacau

SEQ ID NO: 35591 - RNA, 19 nt, Artificial Sequence
  Description of Artificial Sequence: Synthetic oligonucleotide
aaauuauggccuuuaugug

SEQ ID NO: 35592 - RNA, 19 nt, Artificial Sequence
  Description of Artificial Sequence: Synthetic oligonucleotide
aacaaacaacaacaacaac

SEQ ID NO: 35593 - RNA, 19 nt, Artificial Sequence
  Description of Artificial Sequence: Synthetic oligonucleotide
ucugaauuuucccaauggc

SEQ ID NO: 35594 - RNA, 19 nt, Artificial Sequence
  Description of Artificial Sequence: Synthetic oligonucleotide
uucguuauaguuugggagc

SEQ ID NO: 35595 - RNA, 19 nt, Artificial Sequence
  Description of Artificial Sequence: Synthetic oligonucleotide
aauggcucauuguguauac

SEQ ID NO: 35596 - RNA, 19 nt, Artificial Sequence
  Description of Artificial Sequence: Synthetic oligonucleotide
uggauuauaacauuauuuu

SEQ ID NO: 35597 - RNA, 19 nt, Artificial Sequence
  Description of Artificial Sequence: Synthetic oligonucleotide
uucacuuaguuucuggaca

SEQ ID NO: 35598 - RNA, 19 nt, Artificial Sequence
  Description of Artificial Sequence: Synthetic oligonucleotide
uacauauuguacauuuccc

SEQ ID NO: 35599 - RNA, 19 nt, Artificial Sequence
  Description of Artificial Sequence: Synthetic oligonucleotide
ucaguugacaaggauaaag

SEQ ID NO: 35600 - RNA, 19 nt, Artificial Sequence
  Description of Artificial Sequence: Synthetic oligonucleotide
cuucguuauaguuugggag

SEQ ID NO: 35601 - RNA, 19 nt, Artificial Sequence
  Description of Artificial Sequence: Synthetic oligonucleotide
uugccauucacugaguagg

SEQ ID NO: 35602 - RNA, 19 nt, Artificial Sequence
  Description of Artificial Sequence: Synthetic oligonucleotide
guugaaucgcugcugaggg

SEQ ID NO: 35603 - RNA, 19 nt, Artificial Sequence
  Description of Artificial Sequence: Synthetic oligonucleotide
uguaauugggauagcauuc

SEQ ID NO: 35604 - RNA, 19 nt, Artificial Sequence
  Description of Artificial Sequence: Synthetic oligonucleotide
aguucuaacuauaugaaca

SEQ ID NO: 35605 - RNA, 19 nt, Artificial Sequence
  Description of Artificial Sequence: Synthetic oligonucleotide
uacgugacuaagacgaugc

SEQ ID NO: 35606 - RNA, 19 nt, Artificial Sequence
  Description of Artificial Sequence: Synthetic oligonucleotide
uuguacaccacccacaauu

SEQ ID NO: 35607 - RNA, 19 nt, Artificial Sequence
  Description of Artificial Sequence: Synthetic oligonucleotide
uuugcaguuaugcuuauuu

SEQ ID NO: 35608 - RNA, 19 nt, Artificial Sequence
  Description of Artificial Sequence: Synthetic oligonucleotide
uugucaaaauuaaaaggac

SEQ ID NO: 35609 - RNA, 19 nt, Artificial Sequence
  Description of Artificial Sequence: Synthetic oligonucleotide
ugucccauuucccucgugg

SEQ ID NO: 35610 - RNA, 19 nt, Artificial Sequence
  Description of Artificial Sequence: Synthetic oligonucleotide
cacauuaaaaggucagagg

SEQ ID NO: 35611 - RNA, 19 nt, Artificial Sequence
  Description of Artificial Sequence: Synthetic oligonucleotide
aaggcgucaagaguuacgg

SEQ ID NO: 35612 - RNA, 19 nt, Artificial Sequence
  Description of Artificial Sequence: Synthetic oligonucleotide
uacgggaucaaguaacuca

SEQ ID NO: 35613 - RNA, 19 nt, Artificial Sequence
  Description of Artificial Sequence: Synthetic oligonucleotide
caaggugggcaauugaggg

SEQ ID NO: 35614 - RNA, 19 nt, Artificial Sequence
  Description of Artificial Sequence: Synthetic oligonucleotide
uuauucuucguuauaguuu

SEQ ID NO: 35615 - RNA, 19 nt, Artificial Sequence
  Description of Artificial Sequence: Synthetic oligonucleotide
aaaauugucugaauguuau

SEQ ID NO: 35616 - RNA, 19 nt, Artificial Sequence
  Description of Artificial Sequence: Synthetic oligonucleotide
uggauuugaguuauguccu

SEQ ID NO: 35617 - RNA, 19 nt, Artificial Sequence
  Description of Artificial Sequence: Synthetic oligonucleotide
cuaaaucaucacaacgugc

SEQ ID NO: 35618 - RNA, 19 nt, Artificial Sequence
  Description of Artificial Sequence: Synthetic oligonucleotide
aagagcuugauuccauuga

SEQ ID NO: 35619 - RNA, 19 nt, Artificial Sequence
  Description of Artificial Sequence: Synthetic oligonucleotide
aguuacgggaucaaguaac

SEQ ID NO: 35620 - RNA, 19 nt, Artificial Sequence
  Description of Artificial Sequence: Synthetic oligonucleotide
uuuauugaaggcucugcac

SEQ ID NO: 35621 - RNA, 19 nt, Artificial Sequence
  Description of Artificial Sequence: Synthetic oligonucleotide
accagcuacaauuggaaug

SEQ ID NO: 35622 - RNA, 19 nt, Artificial Sequence
  Description of Artificial Sequence: Synthetic oligonucleotide
ugcacuuacaggcaccaca

SEQ ID NO: 35623 - RNA, 19 nt, Artificial Sequence
  Description of Artificial Sequence: Synthetic oligonucleotide
ugcgaugccauauguuugg

SEQ ID NO: 35624 - RNA, 19 nt, Artificial Sequence
  Description of Artificial Sequence: Synthetic oligonucleotide
ugaagagugaccucuacuu

SEQ ID NO: 35625 - RNA, 19 nt, Artificial Sequence
  Description of Artificial Sequence: Synthetic oligonucleotide
ucgcauuuacagaugaacu

SEQ ID NO: 35626 - RNA, 19 nt, Artificial Sequence
  Description of Artificial Sequence: Synthetic oligonucleotide
uguaacucggagaaucagu

SEQ ID NO: 35627 - RNA, 19 nt, Artificial Sequence
  Description of Artificial Sequence: Synthetic oligonucleotide
agauuaagccauuggaccu

SEQ ID NO: 35628 - RNA, 19 nt, Artificial Sequence
  Description of Artificial Sequence: Synthetic oligonucleotide
auccgugcuacauucacag

SEQ ID NO: 35629 - RNA, 19 nt, Artificial Sequence
  Description of Artificial Sequence: Synthetic oligonucleotide
aguuaugcuuauuucaaau

SEQ ID NO: 35630 - RNA, 19 nt, Artificial Sequence
  Description of Artificial Sequence: Synthetic oligonucleotide
uuggacauuuauuugcagu

SEQ ID NO: 35631 - RNA, 19 nt, Artificial Sequence
  Description of Artificial Sequence: Synthetic oligonucleotide
caaacaacaacaacaacaa

SEQ ID NO: 35632 - RNA, 19 nt, Artificial Sequence
  Description of Artificial Sequence: Synthetic oligonucleotide
ugaccaacaaguucauuga

SEQ ID NO: 35633 - RNA, 19 nt, Artificial Sequence
  Description of Artificial Sequence: Synthetic oligonucleotide
aaauaucaaccccucuccu

SEQ ID NO: 35634 - RNA, 19 nt, Artificial Sequence
  Description of Artificial Sequence: Synthetic oligonucleotide
aacaagauugugacuagug

SEQ ID NO: 35635 - RNA, 19 nt, Artificial Sequence
  Description of Artificial Sequence: Synthetic oligonucleotide
uuuguagcuaaagggacug

SEQ ID NO: 35636 - RNA, 19 nt, Artificial Sequence
  Description of Artificial Sequence: Synthetic oligonucleotide
aaagcuacccuacgugacu

SEQ ID NO: 35637 - RNA, 19 nt, Artificial Sequence
  Description of Artificial Sequence: Synthetic oligonucleotide
ucacccgugucccacuugg

SEQ ID NO: 35638 - RNA, 19 nt, Artificial Sequence
  Description of Artificial Sequence: Synthetic oligonucleotide
acuaauguauggcaucaca

SEQ ID NO: 35639 - RNA, 19 nt, Artificial Sequence
  Description of Artificial Sequence: Synthetic oligonucleotide
acaacgugcagaaguaggc

SEQ ID NO: 35640 - RNA, 19 nt, Artificial Sequence
  Description of Artificial Sequence: Synthetic oligonucleotide
accggaucgaccugcaccg

SEQ ID NO: 35641 - RNA, 19 nt, Artificial Sequence
  Description of Artificial Sequence: Synthetic oligonucleotide
ugaucgcaacuucagaagu

SEQ ID NO: 35642 - RNA, 19 nt, Artificial Sequence
  Description of Artificial Sequence: Synthetic oligonucleotide
acugcaacuugcaugauug

SEQ ID NO: 35643 - RNA, 19 nt, Artificial Sequence
  Description of Artificial Sequence: Synthetic oligonucleotide
uucuucguuauaguuuggg

SEQ ID NO: 35644 - RNA, 19 nt, Artificial Sequence
  Description of Artificial Sequence: Synthetic oligonucleotide
guauacaaucuccacaaga

SEQ ID NO: 35645 - RNA, 19 nt, Artificial Sequence
  Description of Artificial Sequence: Synthetic oligonucleotide
ucguguuacauuccuccag

SEQ ID NO: 35646 - RNA, 19 nt, Artificial Sequence
  Description of Artificial Sequence: Synthetic oligonucleotide
agcauucacacacacgaca

SEQ ID NO: 35647 - RNA, 19 nt, Artificial Sequence
  Description of Artificial Sequence: Synthetic oligonucleotide
ucuucguuauaguuuggga

SEQ ID NO: 35648 - RNA, 19 nt, Artificial Sequence
  Description of Artificial Sequence: Synthetic oligonucleotide
aauucggaagucugaagua

SEQ ID NO: 35649 - RNA, 19 nt, Artificial Sequence
  Description of Artificial Sequence: Synthetic oligonucleotide
aagaguuacgggaucaagu

SEQ ID NO: 35650 - RNA, 19 nt, Artificial Sequence
  Description of Artificial Sequence: Synthetic oligonucleotide
aauaucaaccccucuccua

SEQ ID NO: 35651 - RNA, 19 nt, Artificial Sequence
  Description of Artificial Sequence: Synthetic oligonucleotide
gacaaggugggcaauugag

SEQ ID NO: 35652 - RNA, 19 nt, Artificial Sequence
  Description of Artificial Sequence: Synthetic oligonucleotide
uacccuacgugacuaagac

SEQ ID NO: 35653 - RNA, 19 nt, Artificial Sequence
  Description of Artificial Sequence: Synthetic oligonucleotide
aucaaguaacucacaaugg

SEQ ID NO: 35654 - RNA, 19 nt, Artificial Sequence
  Description of Artificial Sequence: Synthetic oligonucleotide
acuucaguuaauagcauug

SEQ ID NO: 35655 - RNA, 19 nt, Artificial Sequence
  Description of Artificial Sequence: Synthetic oligonucleotide
ggaauuguaggcaucaaug

SEQ ID NO: 35656 - RNA, 19 nt, Artificial Sequence
  Description of Artificial Sequence: Synthetic oligonucleotide
uaguaguauaagauggcau

SEQ ID NO: 35657 - RNA, 19 nt, Artificial Sequence
  Description of Artificial Sequence: Synthetic oligonucleotide
aacuucaguuaauagcauu

SEQ ID NO: 35658 - RNA, 19 nt, Artificial Sequence
  Description of Artificial Sequence: Synthetic oligonucleotide
uaacucggagaaucagugg

SEQ ID NO: 35659 - RNA, 19 nt, Artificial Sequence
  Description of Artificial Sequence: Synthetic oligonucleotide
guauuuguacaccacccac

SEQ ID NO: 35660 - RNA, 19 nt, Artificial Sequence
  Description of Artificial Sequence: Synthetic oligonucleotide
uuggaccuaucacaguuga

SEQ ID NO: 35661 - RNA, 19 nt, Artificial Sequence
  Description of Artificial Sequence: Synthetic oligonucleotide
uuauuuucuaggugacacu

SEQ ID NO: 35662 - RNA, 19 nt, Artificial Sequence
  Description of Artificial Sequence: Synthetic oligonucleotide
gaaucaguggcaaugcaga

SEQ ID NO: 35663 - RNA, 19 nt, Artificial Sequence
  Description of Artificial Sequence: Synthetic oligonucleotide
uuauaaagagaaggcguca

SEQ ID NO: 35664 - RNA, 19 nt, Artificial Sequence
  Description of Artificial Sequence: Synthetic oligonucleotide
guaacucggagaaucagug

SEQ ID NO: 35665 - RNA, 19 nt, Artificial Sequence
  Description of Artificial Sequence: Synthetic oligonucleotide
agcacgguagggaaggcgc

SEQ ID NO: 35666 - RNA, 19 nt, Artificial Sequence
  Description of Artificial Sequence: Synthetic oligonucleotide
agaguuacgggaucaagua

SEQ ID NO: 35667 - RNA, 19 nt, Artificial Sequence
  Description of Artificial Sequence: Synthetic oligonucleotide
agaaucaguggcaaugcag

SEQ ID NO: 35668 - RNA, 19 nt, Artificial Sequence
  Description of Artificial Sequence: Synthetic oligonucleotide
acauuacuagaguuuccag

SEQ ID NO: 35669 - RNA, 19 nt, Artificial Sequence
  Description of Artificial Sequence: Synthetic oligonucleotide
aaaagcaaauguacagcca

SEQ ID NO: 35670 - RNA, 19 nt, Artificial Sequence
  Description of Artificial Sequence: Synthetic oligonucleotide
ugaaaauuauggccuuuau

SEQ ID NO: 35671 - RNA, 19 nt, Artificial Sequence
  Description of Artificial Sequence: Synthetic oligonucleotide
uuggaaugaugucgggacc

SEQ ID NO: 35672 - RNA, 19 nt, Artificial Sequence
  Description of Artificial Sequence: Synthetic oligonucleotide
cucgcauuuacagaugaac

SEQ ID NO: 35673 - RNA, 19 nt, Artificial Sequence
  Description of Artificial Sequence: Synthetic oligonucleotide
uaggcauuccuucuugcaa

SEQ ID NO: 35674 - RNA, 19 nt, Artificial Sequence
  Description of Artificial Sequence: Synthetic oligonucleotide
cacgacaccugcaaacacc

SEQ ID NO: 35675 - RNA, 19 nt, Artificial Sequence
  Description of Artificial Sequence: Synthetic oligonucleotide
acgggaucaaguaacucac

SEQ ID NO: 35676 - RNA, 19 nt, Artificial Sequence
  Description of Artificial Sequence: Synthetic oligonucleotide
ugcauucacucuaaugaau

SEQ ID NO: 35677 - RNA, 19 nt, Artificial Sequence
  Description of Artificial Sequence: Synthetic oligonucleotide
ugggucaccggaucgaccu

SEQ ID NO: 35678 - RNA, 19 nt, Artificial Sequence
  Description of Artificial Sequence: Synthetic oligonucleotide
cuucggagggucucgggcg

SEQ ID NO: 35679 - RNA, 19 nt, Artificial Sequence
  Description of Artificial Sequence: Synthetic oligonucleotide
ggaccuaucacaguugaag

SEQ ID NO: 35680 - RNA, 19 nt, Artificial Sequence
  Description of Artificial Sequence: Synthetic oligonucleotide
ggauuauaacauuauuuuc

SEQ ID NO: 35681 - RNA, 19 nt, Artificial Sequence
  Description of Artificial Sequence: Synthetic oligonucleotide
aucgcaacuucagaaguag

SEQ ID NO: 35682 - RNA, 19 nt, Artificial Sequence
  Description of Artificial Sequence: Synthetic oligonucleotide
uuaugugaauagucaggga

SEQ ID NO: 35683 - RNA, 19 nt, Artificial Sequence
  Description of Artificial Sequence: Synthetic oligonucleotide
uguagcuaaagggacuggu

SEQ ID NO: 35684 - RNA, 19 nt, Artificial Sequence
  Description of Artificial Sequence: Synthetic oligonucleotide
uccuaaauauuagcucucc

SEQ ID NO: 35685 - RNA, 19 nt, Artificial Sequence
  Description of Artificial Sequence: Synthetic oligonucleotide
ugaccauuugaugcuauac

SEQ ID NO: 35686 - RNA, 19 nt, Artificial Sequence
  Description of Artificial Sequence: Synthetic oligonucleotide
aaacaacaacaacaacaaa

SEQ ID NO: 35687 - RNA, 19 nt, Artificial Sequence
  Description of Artificial Sequence: Synthetic oligonucleotide
acaaggugggcaauugagg

SEQ ID NO: 35688 - RNA, 19 nt, Artificial Sequence
  Description of Artificial Sequence: Synthetic oligonucleotide
uuauaguuugggagccucu

SEQ ID NO: 35689 - RNA, 19 nt, Artificial Sequence
  Description of Artificial Sequence: Synthetic oligonucleotide
uggcucauuguguauacau

SEQ ID NO: 35690 - RNA, 19 nt, Artificial Sequence
  Description of Artificial Sequence: Synthetic oligonucleotide
cuuuauugaaggcucugca

SEQ ID NO: 35691 - RNA, 19 nt, Artificial Sequence
  Description of Artificial Sequence: Synthetic oligonucleotide
caguugacaaggauaaaga

SEQ ID NO: 35692 - RNA, 19 nt, Artificial Sequence
  Description of Artificial Sequence: Synthetic oligonucleotide
ucguuauaguuugggagcc

SEQ ID NO: 35693 - RNA, 19 nt, Artificial Sequence
  Description of Artificial Sequence: Synthetic oligonucleotide
gacaauagagcaccaggaa

SEQ ID NO: 35694 - RNA, 19 nt, Artificial Sequence
  Description of Artificial Sequence: Synthetic oligonucleotide
agcuaaagggacuggugca

SEQ ID NO: 35695 - RNA, 19 nt, Artificial Sequence
  Description of Artificial Sequence: Synthetic oligonucleotide
uaauugggauagcauucac

SEQ ID NO: 35696 - RNA, 19 nt, Artificial Sequence
  Description of Artificial Sequence: Synthetic oligonucleotide
acacgacaccugcaaacac

SEQ ID NO: 35697 - RNA, 19 nt, Artificial Sequence
  Description of Artificial Sequence: Synthetic oligonucleotide
aacugcaacuugcaugauu

SEQ ID NO: 35698 - RNA, 19 nt, Artificial Sequence
  Description of Artificial Sequence: Synthetic oligonucleotide
ugugaauagucagggacuc

SEQ ID NO: 35699 - RNA, 19 nt, Artificial Sequence
  Description of Artificial Sequence: Synthetic oligonucleotide
gcaaaaucggccugaguag

SEQ ID NO: 35700 - RNA, 19 nt, Artificial Sequence
  Description of Artificial Sequence: Synthetic oligonucleotide
augucacuuaauccaauaa

SEQ ID NO: 35701 - RNA, 19 nt, Artificial Sequence
  Description of Artificial Sequence: Synthetic oligonucleotide
ugguauccaagcuuggauu

SEQ ID NO: 35702 - RNA, 19 nt, Artificial Sequence
  Description of Artificial Sequence: Synthetic oligonucleotide
aaccucaucuccaauggaa

SEQ ID NO: 35703 - RNA, 19 nt, Artificial Sequence
  Description of Artificial Sequence: Synthetic oligonucleotide
gucgggaccaguaggacag

SEQ ID NO: 35704 - RNA, 19 nt, Artificial Sequence
  Description of Artificial Sequence: Synthetic oligonucleotide
ggauaaagauccuuucuca

SEQ ID NO: 35705 - RNA, 19 nt, Artificial Sequence
  Description of Artificial Sequence: Synthetic oligonucleotide
ccuuuaugugaauagucag

SEQ ID NO: 35706 - RNA, 19 nt, Artificial Sequence
  Description of Artificial Sequence: Synthetic oligonucleotide
ccacuuaaguauuuaggcc

SEQ ID NO: 35707 - RNA, 19 nt, Artificial Sequence
  Description of Artificial Sequence: Synthetic oligonucleotide
aaggcgaggccaaugagaa

SEQ ID NO: 35708 - RNA, 19 nt, Artificial Sequence
  Description of Artificial Sequence: Synthetic oligonucleotide
acaauuuggcccugcuugu

SEQ ID NO: 35709 - RNA, 19 nt, Artificial Sequence
  Description of Artificial Sequence: Synthetic oligonucleotide
caccggaucgaccugcacc

SEQ ID NO: 35710 - RNA, 19 nt, Artificial Sequence
  Description of Artificial Sequence: Synthetic oligonucleotide
cagcagucguguuacauuc

SEQ ID NO: 35711 - RNA, 19 nt, Artificial Sequence
  Description of Artificial Sequence: Synthetic oligonucleotide
uguugcaaaaucggccuga

SEQ ID NO: 35712 - RNA, 19 nt, Artificial Sequence
  Description of Artificial Sequence: Synthetic oligonucleotide
uguacaccacccacaauuu

SEQ ID NO: 35713 - RNA, 19 nt, Artificial Sequence
  Description of Artificial Sequence: Synthetic oligonucleotide
ucggcuucucggauggucu

SEQ ID NO: 35714 - RNA, 19 nt, Artificial Sequence
  Description of Artificial Sequence: Synthetic oligonucleotide
uucggaagucugaaguaau

SEQ ID NO: 35715 - RNA, 19 nt, Artificial Sequence
  Description of Artificial Sequence: Synthetic oligonucleotide
acacgcccuucauugcacc

SEQ ID NO: 35716 - RNA, 19 nt, Artificial Sequence
  Description of Artificial Sequence: Synthetic oligonucleotide
guaguaguauaagauggca

SEQ ID NO: 35717 - RNA, 19 nt, Artificial Sequence
  Description of Artificial Sequence: Synthetic oligonucleotide
acacucgcagaauuugcca

SEQ ID NO: 35718 - RNA, 19 nt, Artificial Sequence
  Description of Artificial Sequence: Synthetic oligonucleotide
auacaaucuccacaagauu

SEQ ID NO: 35719 - RNA, 19 nt, Artificial Sequence
  Description of Artificial Sequence: Synthetic oligonucleotide
acccuacgugacuaagacg

SEQ ID NO: 35720 - RNA, 19 nt, Artificial Sequence
  Description of Artificial Sequence: Synthetic oligonucleotide
augugaauagucagggacu

SEQ ID NO: 35721 - RNA, 19 nt, Artificial Sequence
  Description of Artificial Sequence: Synthetic oligonucleotide
cccuacgugacuaagacga

SEQ ID NO: 35722 - RNA, 19 nt, Artificial Sequence
  Description of Artificial Sequence: Synthetic oligonucleotide
ugcaguaagcguccauguc

SEQ ID NO: 35723 - RNA, 19 nt, Artificial Sequence
  Description of Artificial Sequence: Synthetic oligonucleotide
caaaccugcaugugaauaa

SEQ ID NO: 35724 - RNA, 19 nt, Artificial Sequence
  Description of Artificial Sequence: Synthetic oligonucleotide
ggcgucaagaguuacggga

SEQ ID NO: 35725 - RNA, 19 nt, Artificial Sequence
  Description of Artificial Sequence: Synthetic oligonucleotide
cuccuuguaacucggagaa

SEQ ID NO: 35726 - RNA, 19 nt, Artificial Sequence
  Description of Artificial Sequence: Synthetic oligonucleotide
guacuuuggauugaccaca

SEQ ID NO: 35727 - RNA, 19 nt, Artificial Sequence
  Description of Artificial Sequence: Synthetic oligonucleotide
cuuguaacucggagaauca

SEQ ID NO: 35728 - RNA, 19 nt, Artificial Sequence
  Description of Artificial Sequence: Synthetic oligonucleotide
aaaucggccugaguaggga

SEQ ID NO: 35729 - RNA, 19 nt, Artificial Sequence
  Description of Artificial Sequence: Synthetic oligonucleotide
  modified_base (2)..(2): a, c, u, g, unknown or other
ancuuacacaaguguuuua

SEQ ID NO: 35730 - RNA, 19 nt, Artificial Sequence
  Description of Artificial Sequence: Synthetic oligonucleotide
gacucuguaagcagcccug

SEQ ID NO: 35731 - RNA, 19 nt, Artificial Sequence
  Description of Artificial Sequence: Synthetic oligonucleotide
guacuaauguauggcauca

SEQ ID NO: 35732 - RNA, 19 nt, Artificial Sequence
  Description of Artificial Sequence: Synthetic oligonucleotide
ggaccaguaggacagucug

SEQ ID NO: 35733 - RNA, 19 nt, Artificial Sequence
  Description of Artificial Sequence: Synthetic oligonucleotide
caucacaacgugcagaagu

SEQ ID NO: 35734 - RNA, 19 nt, Artificial Sequence
  Description of Artificial Sequence: Synthetic oligonucleotide
cauccguggaaaacaccag

SEQ ID NO: 35735 - RNA, 19 nt, Artificial Sequence
  Description of Artificial Sequence: Synthetic oligonucleotide
aguguaauugggauagcau

SEQ ID NO: 35736 - RNA, 19 nt, Artificial Sequence
  Description of Artificial Sequence: Synthetic oligonucleotide
guaauugggauagcauuca

SEQ ID NO: 35737 - RNA, 19 nt, Artificial Sequence
  Description of Artificial Sequence: Synthetic oligonucleotide
uagcauucacacacacgac

SEQ ID NO: 35738 - RNA, 19 nt, Artificial Sequence
  Description of Artificial Sequence: Synthetic oligonucleotide
agaaggcgucaagaguuac

SEQ ID NO: 35739 - RNA, 19 nt, Artificial Sequence
  Description of Artificial Sequence: Synthetic oligonucleotide
guuauaguuugggagccuc

SEQ ID NO: 35740 - RNA, 19 nt, Artificial Sequence
  Description of Artificial Sequence: Synthetic oligonucleotide
uucuaacuauaugaacaaa

SEQ ID NO: 35741 - RNA, 19 nt, Artificial Sequence
  Description of Artificial Sequence: Synthetic oligonucleotide
ggauugaccacaguuguca

SEQ ID NO: 35742 - RNA, 19 nt, Artificial Sequence
  Description of Artificial Sequence: Synthetic oligonucleotide
uucccucguacuuuggauu

SEQ ID NO: 35743 - RNA, 19 nt, Artificial Sequence
  Description of Artificial Sequence: Synthetic oligonucleotide
uaaucguuucauugucuuu

SEQ ID NO: 35744 - RNA, 19 nt, Artificial Sequence
  Description of Artificial Sequence: Synthetic oligonucleotide
guaggcauuccuucuugca

SEQ ID NO: 35745 - RNA, 19 nt, Artificial Sequence
  Description of Artificial Sequence: Synthetic oligonucleotide
ucuaugucacuuggcuggc

SEQ ID NO: 35746 - RNA, 19 nt, Artificial Sequence
  Description of Artificial Sequence: Synthetic oligonucleotide
uugcugcgaugccauaugu

SEQ ID NO: 35747 - RNA, 19 nt, Artificial Sequence
  Description of Artificial Sequence: Synthetic oligonucleotide
uuuccgcagcguccgcccg

SEQ ID NO: 35748 - RNA, 19 nt, Artificial Sequence
  Description of Artificial Sequence: Synthetic oligonucleotide
agugggucaccggaucgac

SEQ ID NO: 35749 - RNA, 19 nt, Artificial Sequence
  Description of Artificial Sequence: Synthetic oligonucleotide
cacuuuagugagguugaag

SEQ ID NO: 35750 - RNA, 19 nt, Artificial Sequence
  Description of Artificial Sequence: Synthetic oligonucleotide
ccucauuucauucaucaga

SEQ ID NO: 35751 - RNA, 19 nt, Artificial Sequence
  Description of Artificial Sequence: Synthetic oligonucleotide
uuaaguauuuaggccuuuu

SEQ ID NO: 35752 - RNA, 19 nt, Artificial Sequence
  Description of Artificial Sequence: Synthetic oligonucleotide
gcaagcacgguagggaagg

SEQ ID NO: 35753 - RNA, 19 nt, Artificial Sequence
  Description of Artificial Sequence: Synthetic oligonucleotide
ugacuaagacgaugcugcu

SEQ ID NO: 35754 - RNA, 19 nt, Artificial Sequence
  Description of Artificial Sequence: Synthetic oligonucleotide
cauaguaauggcucauugu

SEQ ID NO: 35755 - RNA, 19 nt, Artificial Sequence
  Description of Artificial Sequence: Synthetic oligonucleotide
gaguuacgggaucaaguaa

SEQ ID NO: 35756 - RNA, 19 nt, Artificial Sequence
  Description of Artificial Sequence: Synthetic oligonucleotide
ccgugcuacauucacagug

SEQ ID NO: 35757 - RNA, 19 nt, Artificial Sequence
  Description of Artificial Sequence: Synthetic oligonucleotide
ggcgaggccaaugagaaca

SEQ ID NO: 35758 - RNA, 19 nt, Artificial Sequence
  Description of Artificial Sequence: Synthetic oligonucleotide
cagaucugucccgagacuc

SEQ ID NO: 35759 - RNA, 19 nt, Artificial Sequence
  Description of Artificial Sequence: Synthetic oligonucleotide
guguaauugggauagcauu

SEQ ID NO: 35760 - RNA, 19 nt, Artificial Sequence
  Description of Artificial Sequence: Synthetic oligonucleotide
caugucucacagguuggcc

SEQ ID NO: 35761 - RNA, 19 nt, Artificial Sequence
  Description of Artificial Sequence: Synthetic oligonucleotide
agcagucguguuacauucc

SEQ ID NO: 35762 - RNA, 19 nt, Artificial Sequence
  Description of Artificial Sequence: Synthetic oligonucleotide
aggcgucaagaguuacggg

SEQ ID NO: 35763 - RNA, 19 nt, Artificial Sequence
  Description of Artificial Sequence: Synthetic oligonucleotide
agccggacucuguaagcag

SEQ ID NO: 35764 - RNA, 19 nt, Artificial Sequence
  Description of Artificial Sequence: Synthetic oligonucleotide
uggcaaugcagaagcucgu

SEQ ID NO: 35765 - RNA, 19 nt, Artificial Sequence
  Description of Artificial Sequence: Synthetic oligonucleotide
agccccaaagcuacccuac

SEQ ID NO: 35766 - RNA, 19 nt, Artificial Sequence
  Description of Artificial Sequence: Synthetic oligonucleotide
guaagcguccaugucuuca

SEQ ID NO: 35767 - RNA, 19 nt, Artificial Sequence
  Description of Artificial Sequence: Synthetic oligonucleotide
cccauuuaccccauucuug

SEQ ID NO: 35768 - RNA, 19 nt, Artificial Sequence
  Description of Artificial Sequence: Synthetic oligonucleotide
uuccgcagcguccgcccgg

SEQ ID NO: 35769 - RNA, 19 nt, Artificial Sequence
  Description of Artificial Sequence: Synthetic oligonucleotide
aaucagcgauccacaaacu

SEQ ID NO: 35770 - RNA, 19 nt, Artificial Sequence
  Description of Artificial Sequence: Synthetic oligonucleotide
acgacaccugcaaacacca

SEQ ID NO: 35771 - RNA, 19 nt, Artificial Sequence
  Description of Artificial Sequence: Synthetic oligonucleotide
aucaaccccucuccuaaau

SEQ ID NO: 35772 - RNA, 19 nt, Artificial Sequence
  Description of Artificial Sequence: Synthetic oligonucleotide
cugcaacuugcaugauugc

SEQ ID NO: 35773 - RNA, 19 nt, Artificial Sequence
  Description of Artificial Sequence: Synthetic oligonucleotide
cagguuuuaaagcuaaguu

SEQ ID NO: 35774 - RNA, 19 nt, Artificial Sequence
  Description of Artificial Sequence: Synthetic oligonucleotide
ucgaccugcaccggcugag

SEQ ID NO: 35775 - RNA, 19 nt, Artificial Sequence
  Description of Artificial Sequence: Synthetic oligonucleotide
gccuuuguaaaucaacugu

SEQ ID NO: 35776 - RNA, 19 nt, Artificial Sequence
  Description of Artificial Sequence: Synthetic oligonucleotide
agaauuugccagaguaaau

SEQ ID NO: 35777 - RNA, 19 nt, Artificial Sequence
  Description of Artificial Sequence: Synthetic oligonucleotide
guuuggcacucgcauuuac

SEQ ID NO: 35778 - RNA, 19 nt, Artificial Sequence
  Description of Artificial Sequence: Synthetic oligonucleotide
gaccugcaccggcugaggc

SEQ ID NO: 35779 - RNA, 19 nt, Artificial Sequence
  Description of Artificial Sequence: Synthetic oligonucleotide
cacucgcauuuacagauga

SEQ ID NO: 35780 - RNA, 19 nt, Artificial Sequence
  Description of Artificial Sequence: Synthetic oligonucleotide
guguugcaaaaucggccug

SEQ ID NO: 35781 - RNA, 19 nt, Artificial Sequence
  Description of Artificial Sequence: Synthetic oligonucleotide
uuacgggaucaaguaacuc

SEQ ID NO: 35782 - RNA, 19 nt, Artificial Sequence
  Description of Artificial Sequence: Synthetic oligonucleotide
ucuaggugacacuguccau

SEQ ID NO: 35783 - RNA, 19 nt, Artificial Sequence
  Description of Artificial Sequence: Synthetic oligonucleotide
gcuaaagggacuggugcag

SEQ ID NO: 35784 - RNA, 19 nt, Artificial Sequence
  Description of Artificial Sequence: Synthetic oligonucleotide
ccucaguugacaaggauaa

SEQ ID NO: 35785 - RNA, 19 nt, Artificial Sequence
  Description of Artificial Sequence: Synthetic oligonucleotide
uucacccgugucccacuug

SEQ ID NO: 35786 - RNA, 19 nt, Artificial Sequence
  Description of Artificial Sequence: Synthetic oligonucleotide
cccucuccuaaauauuagc

SEQ ID NO: 35787 - RNA, 19 nt, Artificial Sequence
  Description of Artificial Sequence: Synthetic oligonucleotide
caguguaauugggauagca

SEQ ID NO: 35788 - RNA, 19 nt, Artificial Sequence
  Description of Artificial Sequence: Synthetic oligonucleotide
gauuugaguuauguccucu

SEQ ID NO: 35789 - RNA, 19 nt, Artificial Sequence
  Description of Artificial Sequence: Synthetic oligonucleotide
accugcaccggcugaggca

SEQ ID NO: 35790 - RNA, 19 nt, Artificial Sequence
  Description of Artificial Sequence: Synthetic oligonucleotide
cauuggaccuaucacaguu

SEQ ID NO: 35791 - RNA, 19 nt, Artificial Sequence
  Description of Artificial Sequence: Synthetic oligonucleotide
ccauauguuuggcacucgc

SEQ ID NO: 35792 - RNA, 19 nt, Artificial Sequence
  Description of Artificial Sequence: Synthetic oligonucleotide
gguuccgccgcguuccgcc

SEQ ID NO: 35793 - RNA, 19 nt, Artificial Sequence
  Description of Artificial Sequence: Synthetic oligonucleotide
gaaucgcugcugaggggag

SEQ ID NO: 35794 - RNA, 19 nt, Artificial Sequence
  Description of Artificial Sequence: Synthetic oligonucleotide
caacacgcccuucauugca

SEQ ID NO: 35795 - RNA, 19 nt, Artificial Sequence
  Description of Artificial Sequence: Synthetic oligonucleotide
acuuuggauugaccacagu

SEQ ID NO: 35796 - RNA, 19 nt, Artificial Sequence
  Description of Artificial Sequence: Synthetic oligonucleotide
cuaagacgaugcugcugug

SEQ ID NO: 35797 - RNA, 19 nt, Artificial Sequence
  Description of Artificial Sequence: Synthetic oligonucleotide
cauccgugcuacauucaca

SEQ ID NO: 35798 - RNA, 19 nt, Artificial Sequence
  Description of Artificial Sequence: Synthetic oligonucleotide
acucggagaaucaguggca

SEQ ID NO: 35799 - RNA, 19 nt, Artificial Sequence
  Description of Artificial Sequence: Synthetic oligonucleotide
ccugaucgcaacuucagaa

SEQ ID NO: 35800 - RNA, 19 nt, Artificial Sequence
  Description of Artificial Sequence: Synthetic oligonucleotide
agaucugucccgagacucu

SEQ ID NO: 35801 - RNA, 19 nt, Artificial Sequence
  Description of Artificial Sequence: Synthetic oligonucleotide
ggccuuuaugugaauaguc

SEQ ID NO: 35802 - RNA, 19 nt, Artificial Sequence
  Description of Artificial Sequence: Synthetic oligonucleotide
gcgauccacaaacugcaac

SEQ ID NO: 35803 - RNA, 19 nt, Artificial Sequence
  Description of Artificial Sequence: Synthetic oligonucleotide
ggcagcuuagguguuugug

SEQ ID NO: 35804 - RNA, 19 nt, Artificial Sequence
  Description of Artificial Sequence: Synthetic oligonucleotide
cacacuguccgcagacaca

SEQ ID NO: 35805 - RNA, 19 nt, Artificial Sequence
  Description of Artificial Sequence: Synthetic oligonucleotide
cauggauuauaacauuauu

SEQ ID NO: 35806 - RNA, 19 nt, Artificial Sequence
  Description of Artificial Sequence: Synthetic oligonucleotide
ucggagaaucaguggcaau

SEQ ID NO: 35807 - RNA, 19 nt, Artificial Sequence
  Description of Artificial Sequence: Synthetic oligonucleotide
ucacggcacucuuguaaau

SEQ ID NO: 35808 - RNA, 19 nt, Artificial Sequence
  Description of Artificial Sequence: Synthetic oligonucleotide
auaaaccccuggccacaga

SEQ ID NO: 35809 - RNA, 19 nt, Artificial Sequence
  Description of Artificial Sequence: Synthetic oligonucleotide
gcaauugagggauaaucau

SEQ ID NO: 35810 - RNA, 19 nt, Artificial Sequence
  Description of Artificial Sequence: Synthetic oligonucleotide
agccaauucggaagucuga

SEQ ID NO: 35811 - RNA, 19 nt, Artificial Sequence
  Description of Artificial Sequence: Synthetic oligonucleotide
caaccccucuccuaaauau

SEQ ID NO: 35812 - RNA, 19 nt, Artificial Sequence
  Description of Artificial Sequence: Synthetic oligonucleotide
cucggcuucucggaugguc

SEQ ID NO: 35813 - RNA, 19 nt, Artificial Sequence
  Description of Artificial Sequence: Synthetic oligonucleotide
ucggccugaguagggacuc

SEQ ID NO: 35814 - RNA, 19 nt, Artificial Sequence
  Description of Artificial Sequence: Synthetic oligonucleotide
agguuggcccuugaaacuu

SEQ ID NO: 35815 - RNA, 19 nt, Artificial Sequence
  Description of Artificial Sequence: Synthetic oligonucleotide
ggcacucuuguaaauggga

SEQ ID NO: 35816 - RNA, 19 nt, Artificial Sequence
  Description of Artificial Sequence: Synthetic oligonucleotide
ucaccggaucgaccugcac

SEQ ID NO: 35817 - RNA, 19 nt, Artificial Sequence
  Description of Artificial Sequence: Synthetic oligonucleotide
accggcugaggcaacuugu

SEQ ID NO: 35818 - RNA, 19 nt, Artificial Sequence
  Description of Artificial Sequence: Synthetic oligonucleotide
ccggacucuguaagcagcc

SEQ ID NO: 35819 - RNA, 19 nt, Artificial Sequence
  Description of Artificial Sequence: Synthetic oligonucleotide
cagugccucccaacacgcc

SEQ ID NO: 35820 - RNA, 19 nt, Artificial Sequence
  Description of Artificial Sequence: Synthetic oligonucleotide
gaaaugcgcuguugaccaa

SEQ ID NO: 35821 - RNA, 19 nt, Artificial Sequence
  Description of Artificial Sequence: Synthetic oligonucleotide
guuacgggaucaaguaacu

SEQ ID NO: 35822 - RNA, 19 nt, Artificial Sequence
  Description of Artificial Sequence: Synthetic oligonucleotide
cggagaaucaguggcaaug

SEQ ID NO: 35823 - RNA, 19 nt, Artificial Sequence
  Description of Artificial Sequence: Synthetic oligonucleotide
gguauccaagcuuggauuu

SEQ ID NO: 35824 - RNA, 19 nt, Artificial Sequence
  Description of Artificial Sequence: Synthetic oligonucleotide
ugggcaauugagggauaau

SEQ ID NO: 35825 - RNA, 19 nt, Artificial Sequence
  Description of Artificial Sequence: Synthetic oligonucleotide
ggacaaggugggcaauuga

SEQ ID NO: 35826 - RNA, 19 nt, Artificial Sequence
  Description of Artificial Sequence: Synthetic oligonucleotide
auggcucauuguguauaca

SEQ ID NO: 35827 - RNA, 19 nt, Artificial Sequence
  Description of Artificial Sequence: Synthetic oligonucleotide
cugaccauuugaugcuaua

SEQ ID NO: 35828 - RNA, 19 nt, Artificial Sequence
  Description of Artificial Sequence: Synthetic oligonucleotide
agcuacccuacgugacuaa

SEQ ID NO: 35829 - RNA, 19 nt, Artificial Sequence
  Description of Artificial Sequence: Synthetic oligonucleotide
cugaguagggacucauuuu

SEQ ID NO: 35830 - RNA, 19 nt, Artificial Sequence
  Description of Artificial Sequence: Synthetic oligonucleotide
gucccgagacucuucacau

SEQ ID NO: 35831 - RNA, 19 nt, Artificial Sequence
  Description of Artificial Sequence: Synthetic oligonucleotide
cucggagaaucaguggcaa

SEQ ID NO: 35832 - RNA, 19 nt, Artificial Sequence
  Description of Artificial Sequence: Synthetic oligonucleotide
gagaaggcgucaagaguua

SEQ ID NO: 35833 - RNA, 19 nt, Artificial Sequence
  Description of Artificial Sequence: Synthetic oligonucleotide
augucccauuucccucgug

SEQ ID NO: 35834 - RNA, 19 nt, Artificial Sequence
  Description of Artificial Sequence: Synthetic oligonucleotide
caagcacgguagggaaggc

SEQ ID NO: 35835 - RNA, 19 nt, Artificial Sequence
  Description of Artificial Sequence: Synthetic oligonucleotide
uccuuguaacucggagaau

SEQ ID NO: 35836 - RNA, 19 nt, Artificial Sequence
  Description of Artificial Sequence: Synthetic oligonucleotide
gccggacucuguaagcagc

SEQ ID NO: 35837 - RNA, 19 nt, Artificial Sequence
  Description of Artificial Sequence: Synthetic oligonucleotide
cagccggacucuguaagca

SEQ ID NO: 35838 - RNA, 19 nt, Artificial Sequence
  Description of Artificial Sequence: Synthetic oligonucleotide
gugggcaauugagggauaa

SEQ ID NO: 35839 - RNA, 19 nt, Artificial Sequence
  Description of Artificial Sequence: Synthetic oligonucleotide
gugggucaccggaucgacc

SEQ ID NO: 35840 - RNA, 19 nt, Artificial Sequence
  Description of Artificial Sequence: Synthetic oligonucleotide
gcagucguguuacauuccu

SEQ ID NO: 35841 - RNA, 19 nt, Artificial Sequence
  Description of Artificial Sequence: Synthetic oligonucleotide
gcggcugucgguggccucg

SEQ ID NO: 35842 - RNA, 19 nt, Artificial Sequence
  Description of Artificial Sequence: Synthetic oligonucleotide
gccauauguuuggcacucg

SEQ ID NO: 35843 - RNA, 19 nt, Artificial Sequence
  Description of Artificial Sequence: Synthetic oligonucleotide
cuaaagggacuggugcagu

SEQ ID NO: 35844 - RNA, 19 nt, Artificial Sequence
  Description of Artificial Sequence: Synthetic oligonucleotide
ccaacccaaguucuuuuaa

SEQ ID NO: 35845 - RNA, 19 nt, Artificial Sequence
  Description of Artificial Sequence: Synthetic oligonucleotide
ccaaaccugcaugugaaua

SEQ ID NO: 35846 - RNA, 19 nt, Artificial Sequence
  Description of Artificial Sequence: Synthetic oligonucleotide
ggucucgggcgggugucgg

SEQ ID NO: 35847 - RNA, 19 nt, Artificial Sequence
  Description of Artificial Sequence: Synthetic oligonucleotide
gccaacccaaguucuuuua

SEQ ID NO: 35848 - RNA, 19 nt, Artificial Sequence
  Description of Artificial Sequence: Synthetic oligonucleotide
cuaugucacuuggcuggca

SEQ ID NO: 35849 - RNA, 19 nt, Artificial Sequence
  Description of Artificial Sequence: Synthetic oligonucleotide
caauuuggcccugcuugua

SEQ ID NO: 35850 - RNA, 19 nt, Artificial Sequence
  Description of Artificial Sequence: Synthetic oligonucleotide
ucgggaccaguaggacagu

SEQ ID NO: 35851 - RNA, 19 nt, Artificial Sequence
  Description of Artificial Sequence: Synthetic oligonucleotide
gcugcgguuggugacauuu

SEQ ID NO: 35852 - RNA, 19 nt, Artificial Sequence
  Description of Artificial Sequence: Synthetic oligonucleotide
gugcacuuacaggcaccac

SEQ ID NO: 35853 - RNA, 19 nt, Artificial Sequence
  Description of Artificial Sequence: Synthetic oligonucleotide
guccgcccggcacgcgugc

SEQ ID NO: 35854 - RNA, 19 nt, Artificial Sequence
  Description of Artificial Sequence: Synthetic oligonucleotide
gucaccggaucgaccugca

SEQ ID NO: 35855 - RNA, 19 nt, Artificial Sequence
  Description of Artificial Sequence: Synthetic oligonucleotide
ccggccauugcagaucuga

SEQ ID NO: 35856 - RNA, 19 nt, Artificial Sequence
  Description of Artificial Sequence: Synthetic oligonucleotide
gggucaccggaucgaccug

SEQ ID NO: 35857 - RNA, 19 nt, Artificial Sequence
  Description of Artificial Sequence: Synthetic oligonucleotide
cgucaagaguuacgggauc

SEQ ID NO: 35858 - RNA, 19 nt, Artificial Sequence
  Description of Artificial Sequence: Synthetic oligonucleotide
gcgggugucggccggccuc

SEQ ID NO: 35859 - RNA, 19 nt, Artificial Sequence
  Description of Artificial Sequence: Synthetic oligonucleotide
cacgcccuucauugcaccu

SEQ ID NO: 35860 - RNA, 19 nt, Artificial Sequence
  Description of Artificial Sequence: Synthetic oligonucleotide
cuuaaguauuuaggccuuu

SEQ ID NO: 35861 - RNA, 19 nt, Artificial Sequence
  Description of Artificial Sequence: Synthetic oligonucleotide
cagcguccgcccggcacgc

SEQ ID NO: 35862 - RNA, 19 nt, Artificial Sequence
  Description of Artificial Sequence: Synthetic oligonucleotide
cgaugccauauguuuggca

SEQ ID NO: 35863 - RNA, 19 nt, Artificial Sequence
  Description of Artificial Sequence: Synthetic oligonucleotide
gggcuuaauuuuaaucguu

SEQ ID NO: 35864 - RNA, 19 nt, Artificial Sequence
  Description of Artificial Sequence: Synthetic oligonucleotide
cugcaccggcugaggcaac

SEQ ID NO: 35865 - RNA, 19 nt, Artificial Sequence
  Description of Artificial Sequence: Synthetic oligonucleotide
gggucucgggcgggugucg

SEQ ID NO: 35866 - RNA, 19 nt, Artificial Sequence
  Description of Artificial Sequence: Synthetic oligonucleotide
gcgucaagaguuacgggau

SEQ ID NO: 35867 - RNA, 19 nt, Artificial Sequence
  Description of Artificial Sequence: Synthetic oligonucleotide
agcguccgcccggcacgcg

SEQ ID NO: 35868 - RNA, 19 nt, Artificial Sequence
  Description of Artificial Sequence: Synthetic oligonucleotide
ccagcagucguguuacauu

SEQ ID NO: 35869 - RNA, 19 nt, Artificial Sequence
  Description of Artificial Sequence: Synthetic oligonucleotide
guuccgccgcguuccgccu

SEQ ID NO: 35870 - RNA, 19 nt, Artificial Sequence
  Description of Artificial Sequence: Synthetic oligonucleotide
cccggcacgcgugcggccc

SEQ ID NO: 35871 - RNA, 19 nt, Artificial Sequence
  Description of Artificial Sequence: Synthetic oligonucleotide
cugcgguuggugacauuuu

SEQ ID NO: 35872 - RNA, 19 nt, Artificial Sequence
  Description of Artificial Sequence: Synthetic oligonucleotide
cccgugucccacuuggcau

SEQ ID NO: 35873 - RNA, 19 nt, Artificial Sequence
  Description of Artificial Sequence: Synthetic oligonucleotide
ccccaaagcuacccuacgu

SEQ ID NO: 35874 - RNA, 19 nt, Artificial Sequence
  Description of Artificial Sequence: Synthetic oligonucleotide
ccgcccggcacgcgugcgg

SEQ ID NO: 35875 - RNA, 19 nt, Artificial Sequence
  Description of Artificial Sequence: Synthetic oligonucleotide
gcgaggccaaugagaacaa

SEQ ID NO: 35876 - RNA, 19 nt, Artificial Sequence
  Description of Artificial Sequence: Synthetic oligonucleotide
ccggaucgaccugcaccgg

SEQ ID NO: 35877 - RNA, 19 nt, Artificial Sequence
  Description of Artificial Sequence: Synthetic oligonucleotide
cacgcgugcggcccggguu

SEQ ID NO: 35878 - RNA, 19 nt, Artificial Sequence
  Description of Artificial Sequence: Synthetic oligonucleotide
ggguuccgccgcguuccgc

SEQ ID NO: 35879 - RNA, 19 nt, Artificial Sequence
  Description of Artificial Sequence: Synthetic oligonucleotide
ggcacgcgugcggcccggg

SEQ ID NO: 35880 - RNA, 19 nt, Artificial Sequence
  Description of Artificial Sequence: Synthetic oligonucleotide
cguccgcccggcacgcgug

SEQ ID NO: 35881 - RNA, 19 nt, Artificial Sequence
  Description of Artificial Sequence: Synthetic oligonucleotide
ccuacgugacuaagacgau

SEQ ID NO: 35882 - RNA, 19 nt, Artificial Sequence
  Description of Artificial Sequence: Synthetic oligonucleotide
caguaagacugagcacauu

SEQ ID NO: 35883 - RNA, 19 nt, Artificial Sequence
  Description of Artificial Sequence: Synthetic oligonucleotide
cagcuacaauuggaaugau

SEQ ID NO: 35884 - RNA, 19 nt, Artificial Sequence
  Description of Artificial Sequence: Synthetic oligonucleotide
gcguccgcccggcacgcgu

SEQ ID NO: 35885 - RNA, 19 nt, Artificial Sequence
  Description of Artificial Sequence: Synthetic oligonucleotide
gcgugcggcccggguuccg

SEQ ID NO: 35886 - RNA, 19 nt, Artificial Sequence
  Description of Artificial Sequence: Synthetic oligonucleotide
cccggccauugcagaucug

SEQ ID NO: 35887 - RNA, 19 nt, Artificial Sequence
  Description of Artificial Sequence: Synthetic oligonucleotide
cguuauaguuugggagccu

SEQ ID NO: 35888 - RNA, 19 nt, Artificial Sequence
  Description of Artificial Sequence: Synthetic oligonucleotide
gcacgcgugcggcccgggu

SEQ ID NO: 35889 - RNA, 19 nt, Artificial Sequence
  Description of Artificial Sequence: Synthetic oligonucleotide
cgggcgggugucggccggc

SEQ ID NO: 35890 - RNA, 19 nt, Artificial Sequence
  Description of Artificial Sequence: Synthetic oligonucleotide
cggcacgcgugcggcccgg

SEQ ID NO: 35891 - RNA, 19 nt, Artificial Sequence
  Description of Artificial Sequence: Synthetic oligonucleotide
cggccucggcuucucggau

SEQ ID NO: 35892 - RNA, 19 nt, Artificial Sequence
  Description of Artificial Sequence: Synthetic oligonucleotide
agaucuaugaccuuggucu

SEQ ID NO: 35893 - RNA, 19 nt, Artificial Sequence
  Description of Artificial Sequence: Synthetic oligonucleotide
uauaaauccagcuugugug

SEQ ID NO: 35894 - RNA, 19 nt, Artificial Sequence
  Description of Artificial Sequence: Synthetic oligonucleotide
auuuacggaaaccagcugc

SEQ ID NO: 35895 - RNA, 19 nt, Artificial Sequence
  Description of Artificial Sequence: Synthetic oligonucleotide
acagcuuacauuccuaugc

SEQ ID NO: 35896 - RNA, 19 nt, Artificial Sequence
  Description of Artificial Sequence: Synthetic oligonucleotide
aacuuuacuuacuauauga

SEQ ID NO: 35897 - RNA, 19 nt, Artificial Sequence
  Description of Artificial Sequence: Synthetic oligonucleotide
agacuuaucauauuugguc

SEQ ID NO: 35898 - RNA, 19 nt, Artificial Sequence
  Description of Artificial Sequence: Synthetic oligonucleotide
accuuuauuguuuaagugg

SEQ ID NO: 35899 - RNA, 19 nt, Artificial Sequence
  Description of Artificial Sequence: Synthetic oligonucleotide
ucuaugauccgcuaaaaga

SEQ ID NO: 35900 - RNA, 19 nt, Artificial Sequence
  Description of Artificial Sequence: Synthetic oligonucleotide
aaaacccacaagugcagcc

SEQ ID NO: 35901 - RNA, 19 nt, Artificial Sequence
  Description of Artificial Sequence: Synthetic oligonucleotide
guuaucuagucccugaggg

SEQ ID NO: 35902 - RNA, 19 nt, Artificial Sequence
  Description of Artificial Sequence: Synthetic oligonucleotide
aagcacgccacacacauuc

SEQ ID NO: 35903 - RNA, 19 nt, Artificial Sequence
  Description of Artificial Sequence: Synthetic oligonucleotide
ugaugucucaccuuuauug

SEQ ID NO: 35904 - RNA, 19 nt, Artificial Sequence
  Description of Artificial Sequence: Synthetic oligonucleotide
ugagcggugauccugagug

SEQ ID NO: 35905 - RNA, 19 nt, Artificial Sequence
  Description of Artificial Sequence: Synthetic oligonucleotide
aacgucaacacgcaucauc

SEQ ID NO: 35906 - RNA, 19 nt, Artificial Sequence
  Description of Artificial Sequence: Synthetic oligonucleotide
uuuaauucgcuugagcucc

SEQ ID NO: 35907 - RNA, 19 nt, Artificial Sequence
  Description of Artificial Sequence: Synthetic oligonucleotide
ugaguuauauaaauccagc

SEQ ID NO: 35908 - RNA, 19 nt, Artificial Sequence
  Description of Artificial Sequence: Synthetic oligonucleotide
cuaccaggaaaauacaggg

SEQ ID NO: 35909 - RNA, 19 nt, Artificial Sequence
  Description of Artificial Sequence: Synthetic oligonucleotide
ucuaaagcaaggcacgccc

SEQ ID NO: 35910 - RNA, 19 nt, Artificial Sequence
  Description of Artificial Sequence: Synthetic oligonucleotide
aauaacgguucagagagag

SEQ ID NO: 35911 - RNA, 19 nt, Artificial Sequence
  Description of Artificial Sequence: Synthetic oligonucleotide
aacguguaccgucugcacc

SEQ ID NO: 35912 - RNA, 19 nt, Artificial Sequence
  Description of Artificial Sequence: Synthetic oligonucleotide
uguuguacuauggucaccg

SEQ ID NO: 35913 - RNA, 19 nt, Artificial Sequence
  Description of Artificial Sequence: Synthetic oligonucleotide
agcucuuaaguccagaaug

SEQ ID NO: 35914 - RNA, 19 nt, Artificial Sequence
  Description of Artificial Sequence: Synthetic oligonucleotide
auuguggcgaauugaauuc

SEQ ID NO: 35915 - RNA, 19 nt, Artificial Sequence
  Description of Artificial Sequence: Synthetic oligonucleotide
cucacaaugaggcuaacgc

SEQ ID NO: 35916 - RNA, 19 nt, Artificial Sequence
  Description of Artificial Sequence: Synthetic oligonucleotide
ugaaauaacgguucagaga

SEQ ID NO: 35917 - RNA, 19 nt, Artificial Sequence
  Description of Artificial Sequence: Synthetic oligonucleotide
acagaaaugggcaaguagg

SEQ ID NO: 35918 - RNA, 19 nt, Artificial Sequence
  Description of Artificial Sequence: Synthetic oligonucleotide
aagaaaccccugcagacuc

SEQ ID NO: 35919 - RNA, 19 nt, Artificial Sequence
  Description of Artificial Sequence: Synthetic oligonucleotide
ugauggacaacguguaccg

SEQ ID NO: 35920 - RNA, 19 nt, Artificial Sequence
  Description of Artificial Sequence: Synthetic oligonucleotide
aagacuagagcaaaccauc

SEQ ID NO: 35921 - RNA, 19 nt, Artificial Sequence
  Description of Artificial Sequence: Synthetic oligonucleotide
aaacuuuacuuacuauaug

SEQ ID NO: 35922 - RNA, 19 nt, Artificial Sequence
  Description of Artificial Sequence: Synthetic oligonucleotide
uggacaacaaaauacuguc

SEQ ID NO: 35923 - RNA, 19 nt, Artificial Sequence
  Description of Artificial Sequence: Synthetic oligonucleotide
acucaugugaugucucacc

SEQ ID NO: 35924 - RNA, 19 nt, Artificial Sequence
  Description of Artificial Sequence: Synthetic oligonucleotide
uauauguccccacaugaga

SEQ ID NO: 35925 - RNA, 19 nt, Artificial Sequence
  Description of Artificial Sequence: Synthetic oligonucleotide
uccuuaagcauucaacacu

SEQ ID NO: 35926 - RNA, 19 nt, Artificial Sequence
  Description of Artificial Sequence: Synthetic oligonucleotide
uuuauuguuuaaguggcug

SEQ ID NO: 35927 - RNA, 19 nt, Artificial Sequence
  Description of Artificial Sequence: Synthetic oligonucleotide
uuauugaauuucaggaacu

SEQ ID NO: 35928 - RNA, 19 nt, Artificial Sequence
  Description of Artificial Sequence: Synthetic oligonucleotide
aaguggcugaguuauauaa

SEQ ID NO: 35929 - RNA, 19 nt, Artificial Sequence
  Description of Artificial Sequence: Synthetic oligonucleotide
auaacgucaacacgcauca

SEQ ID NO: 35930 - RNA, 19 nt, Artificial Sequence
  Description of Artificial Sequence: Synthetic oligonucleotide
auauaaauccagcuugugu

SEQ ID NO: 35931 - RNA, 19 nt, Artificial Sequence
  Description of Artificial Sequence: Synthetic oligonucleotide
uccgcuaaaagaaaccccu

SEQ ID NO: 35932 - RNA, 19 nt, Artificial Sequence
  Description of Artificial Sequence: Synthetic oligonucleotide
uacgccaaggacaaaguca

SEQ ID NO: 35933 - RNA, 19 nt, Artificial Sequence
  Description of Artificial Sequence: Synthetic oligonucleotide
acuccuuaagcauucaaca

SEQ ID NO: 35934 - RNA, 19 nt, Artificial Sequence
  Description of Artificial Sequence: Synthetic oligonucleotide
uuagggugggguauuuacg

SEQ ID NO: 35935 - RNA, 19 nt, Artificial Sequence
  Description of Artificial Sequence: Synthetic oligonucleotide
aacguuguucaccuggcug

SEQ ID NO: 35936 - RNA, 19 nt, Artificial Sequence
  Description of Artificial Sequence: Synthetic oligonucleotide
uuaggaggagccagcaccg

SEQ ID NO: 35937 - RNA, 19 nt, Artificial Sequence
  Description of Artificial Sequence: Synthetic oligonucleotide
aguuauauaaauccagcuu

SEQ ID NO: 35938 - RNA, 19 nt, Artificial Sequence
  Description of Artificial Sequence: Synthetic oligonucleotide
cauugugacagcuccauac

SEQ ID NO: 35939 - RNA, 19 nt, Artificial Sequence
  Description of Artificial Sequence: Synthetic oligonucleotide
auggagaggacucgcaacg

SEQ ID NO: 35940 - RNA, 19 nt, Artificial Sequence
  Description of Artificial Sequence: Synthetic oligonucleotide
guagaaauggagugaaaug

SEQ ID NO: 35941 - RNA, 19 nt, Artificial Sequence
  Description of Artificial Sequence: Synthetic oligonucleotide
aaccgcagggcccuuuacc

SEQ ID NO: 35942 - RNA, 19 nt, Artificial Sequence
  Description of Artificial Sequence: Synthetic oligonucleotide
aaaacucacaaugaggcua

SEQ ID NO: 35943 - RNA, 19 nt, Artificial Sequence
  Description of Artificial Sequence: Synthetic oligonucleotide
agcaaaccaucccaugggc

SEQ ID NO: 35944 - RNA, 19 nt, Artificial Sequence
  Description of Artificial Sequence: Synthetic oligonucleotide
uuauuguuuaaguggcuga

SEQ ID NO: 35945 - RNA, 19 nt, Artificial Sequence
  Description of Artificial Sequence: Synthetic oligonucleotide
uaauauggguaguucuuag

SEQ ID NO: 35946 - RNA, 19 nt, Artificial Sequence
  Description of Artificial Sequence: Synthetic oligonucleotide
uaucuagucccugagggag

SEQ ID NO: 35947 - RNA, 19 nt, Artificial Sequence
  Description of Artificial Sequence: Synthetic oligonucleotide
uacugaaguuaucuagucc

SEQ ID NO: 35948 - RNA, 19 nt, Artificial Sequence
  Description of Artificial Sequence: Synthetic oligonucleotide
aaggcacgccccuaggccg

SEQ ID NO: 35949 - RNA, 19 nt, Artificial Sequence
  Description of Artificial Sequence: Synthetic oligonucleotide
ucacaaugaggcuaacgcc

SEQ ID NO: 35950 - RNA, 19 nt, Artificial Sequence
  Description of Artificial Sequence: Synthetic oligonucleotide
augacggcaaguuugggcu

SEQ ID NO: 35951 - RNA, 19 nt, Artificial Sequence
  Description of Artificial Sequence: Synthetic oligonucleotide
cauaacgucaacacgcauc

SEQ ID NO: 35952 - RNA, 19 nt, Artificial Sequence
  Description of Artificial Sequence: Synthetic oligonucleotide
aguuaucuagucccugagg

SEQ ID NO: 35953 - RNA, 19 nt, Artificial Sequence
  Description of Artificial Sequence: Synthetic oligonucleotide
guaggugacaggcuuaaug

SEQ ID NO: 35954 - RNA, 19 nt, Artificial Sequence
  Description of Artificial Sequence: Synthetic oligonucleotide
gaccccauuauuuaguuaa

SEQ ID NO: 35955 - RNA, 19 nt, Artificial Sequence
  Description of Artificial Sequence: Synthetic oligonucleotide
auggacaacguguaccguc

SEQ ID NO: 35956 - RNA, 19 nt, Artificial Sequence
  Description of Artificial Sequence: Synthetic oligonucleotide
cuuuaauucgcuugagcuc

SEQ ID NO: 35957 - RNA, 19 nt, Artificial Sequence
  Description of Artificial Sequence: Synthetic oligonucleotide
ucaacacgcaucaucugca

SEQ ID NO: 35958 - RNA, 19 nt, Artificial Sequence
  Description of Artificial Sequence: Synthetic oligonucleotide
uggguugccaacauaugga

SEQ ID NO: 35959 - RNA, 19 nt, Artificial Sequence
  Description of Artificial Sequence: Synthetic oligonucleotide
cuaugauccgcuaaaagaa

SEQ ID NO: 35960 - RNA, 19 nt, Artificial Sequence
  Description of Artificial Sequence: Synthetic oligonucleotide
aguacucuaauuccacaug

SEQ ID NO: 35961 - RNA, 19 nt, Artificial Sequence
  Description of Artificial Sequence: Synthetic oligonucleotide
uaacgguucagagagagau

SEQ ID NO: 35962 - RNA, 19 nt, Artificial Sequence
  Description of Artificial Sequence: Synthetic oligonucleotide
auauguccccacaugagac

SEQ ID NO: 35963 - RNA, 19 nt, Artificial Sequence
  Description of Artificial Sequence: Synthetic oligonucleotide
aguuuuaaggccaccuggg

SEQ ID NO: 35964 - RNA, 19 nt, Artificial Sequence
  Description of Artificial Sequence: Synthetic oligonucleotide
cuggauagggcugugaaug

SEQ ID NO: 35965 - RNA, 19 nt, Artificial Sequence
  Description of Artificial Sequence: Synthetic oligonucleotide
ucacucacuugaaacugag

SEQ ID NO: 35966 - RNA, 19 nt, Artificial Sequence
  Description of Artificial Sequence: Synthetic oligonucleotide
cugcucugaacagaaaugg

SEQ ID NO: 35967 - RNA, 19 nt, Artificial Sequence
  Description of Artificial Sequence: Synthetic oligonucleotide
gauuaagacgggcugacua

SEQ ID NO: 35968 - RNA, 19 nt, Artificial Sequence
  Description of Artificial Sequence: Synthetic oligonucleotide
ggaaauuacgccaaggaca

SEQ ID NO: 35969 - RNA, 19 nt, Artificial Sequence
  Description of Artificial Sequence: Synthetic oligonucleotide
ucccucuuaaacuuuacuu

SEQ ID NO: 35970 - RNA, 19 nt, Artificial Sequence
  Description of Artificial Sequence: Synthetic oligonucleotide
agcacaugaguccagcccu

SEQ ID NO: 35971 - RNA, 19 nt, Artificial Sequence
  Description of Artificial Sequence: Synthetic oligonucleotide
acucugggcaaaccgcgcc

SEQ ID NO: 35972 - RNA, 19 nt, Artificial Sequence
  Description of Artificial Sequence: Synthetic oligonucleotide
uggcgaauugaauucugcc

SEQ ID NO: 35973 - RNA, 19 nt, Artificial Sequence
  Description of Artificial Sequence: Synthetic oligonucleotide
uucgcuugagcuccggcug

SEQ ID NO: 35974 - RNA, 19 nt, Artificial Sequence
  Description of Artificial Sequence: Synthetic oligonucleotide
uaugauccgcuaaaagaaa

SEQ ID NO: 35975 - RNA, 19 nt, Artificial Sequence
  Description of Artificial Sequence: Synthetic oligonucleotide
acauauggagaggacucgc

SEQ ID NO: 35976 - RNA, 19 nt, Artificial Sequence
  Description of Artificial Sequence: Synthetic oligonucleotide
uagguguccuaagagagug

SEQ ID NO: 35977 - RNA, 19 nt, Artificial Sequence
  Description of Artificial Sequence: Synthetic oligonucleotide
gaaauuacgccaaggacaa

SEQ ID NO: 35978 - RNA, 19 nt, Artificial Sequence
  Description of Artificial Sequence: Synthetic oligonucleotide
uacucuaauuccacaugug

SEQ ID NO: 35979 - RNA, 19 nt, Artificial Sequence
  Description of Artificial Sequence: Synthetic oligonucleotide
cauuccuaugcaccaaagc

SEQ ID NO: 35980 - RNA, 19 nt, Artificial Sequence
  Description of Artificial Sequence: Synthetic oligonucleotide
aaguccaaccgcagggccc

SEQ ID NO: 35981 - RNA, 19 nt, Artificial Sequence
  Description of Artificial Sequence: Synthetic oligonucleotide
uauuuacggaaaccagcug

SEQ ID NO: 35982 - RNA, 19 nt, Artificial Sequence
  Description of Artificial Sequence: Synthetic oligonucleotide
accccuaagacuccccagg

SEQ ID NO: 35983 - RNA, 19 nt, Artificial Sequence
  Description of Artificial Sequence: Synthetic oligonucleotide
agacuagagcaaaccaucc

SEQ ID NO: 35984 - RNA, 19 nt, Artificial Sequence
  Description of Artificial Sequence: Synthetic oligonucleotide
aguaccugagcccacccca

SEQ ID NO: 35985 - RNA, 19 nt, Artificial Sequence
  Description of Artificial Sequence: Synthetic oligonucleotide
gcgaauugaauucugccag

SEQ ID NO: 35986 - RNA, 19 nt, Artificial Sequence
  Description of Artificial Sequence: Synthetic oligonucleotide
uccauaacgucaacacgca

SEQ ID NO: 35987 - RNA, 19 nt, Artificial Sequence
  Description of Artificial Sequence: Synthetic oligonucleotide
acucgcaacguuguucacc

SEQ ID NO: 35988 - RNA, 19 nt, Artificial Sequence
  Description of Artificial Sequence: Synthetic oligonucleotide
uuaucuagucccugaggga

SEQ ID NO: 35989 - RNA, 19 nt, Artificial Sequence
  Description of Artificial Sequence: Synthetic oligonucleotide
aucucgacagcucuugcca

SEQ ID NO: 35990 - RNA, 19 nt, Artificial Sequence
  Description of Artificial Sequence: Synthetic oligonucleotide
caccuuuauuguuuaagug

SEQ ID NO: 35991 - RNA, 19 nt, Artificial Sequence
  Description of Artificial Sequence: Synthetic oligonucleotide
uucacucacauagggaaca

SEQ ID NO: 35992 - RNA, 19 nt, Artificial Sequence
  Description of Artificial Sequence: Synthetic oligonucleotide
augauccgcuaaaagaaac

SEQ ID NO: 35993 - RNA, 19 nt, Artificial Sequence
  Description of Artificial Sequence: Synthetic oligonucleotide
ugugaugucucaccuuuau

SEQ ID NO: 35994 - RNA, 19 nt, Artificial Sequence
  Description of Artificial Sequence: Synthetic oligonucleotide
uucacucacuugaaacuga

SEQ ID NO: 35995 - RNA, 19 nt, Artificial Sequence
  Description of Artificial Sequence: Synthetic oligonucleotide
gaugcuuggacuuacgauu

SEQ ID NO: 35996 - RNA, 19 nt, Artificial Sequence
  Description of Artificial Sequence: Synthetic oligonucleotide
uaggagacucauuuuacua

SEQ ID NO: 35997 - RNA, 19 nt, Artificial Sequence
  Description of Artificial Sequence: Synthetic oligonucleotide
uggacaacguguaccgucu

SEQ ID NO: 35998 - RNA, 19 nt, Artificial Sequence
  Description of Artificial Sequence: Synthetic oligonucleotide
acgguucagagagagauug

SEQ ID NO: 35999 - RNA, 19 nt, Artificial Sequence
  Description of Artificial Sequence: Synthetic oligonucleotide
ugugcgguugcacaggcuu

SEQ ID NO: 36000 - RNA, 19 nt, Artificial Sequence
  Description of Artificial Sequence: Synthetic oligonucleotide
caucccaugggcugaaaac

SEQ ID NO: 36001 - RNA, 19 nt, Artificial Sequence
  Description of Artificial Sequence: Synthetic oligonucleotide
uuaaguggcugaguuauau

SEQ ID NO: 36002 - RNA, 19 nt, Artificial Sequence
  Description of Artificial Sequence: Synthetic oligonucleotide
uaagacgggcugacuagag

SEQ ID NO: 36003 - RNA, 19 nt, Artificial Sequence
  Description of Artificial Sequence: Synthetic oligonucleotide
caagcuacuuauaguauca

SEQ ID NO: 36004 - RNA, 19 nt, Artificial Sequence
  Description of Artificial Sequence: Synthetic oligonucleotide
gagacucauuuuacuagcg

SEQ ID NO: 36005 - RNA, 19 nt, Artificial Sequence
  Description of Artificial Sequence: Synthetic oligonucleotide
gacuccuuaagcauucaac

SEQ ID NO: 36006 - RNA, 19 nt, Artificial Sequence
  Description of Artificial Sequence: Synthetic oligonucleotide
aaggaauuaggguggggua

SEQ ID NO: 36007 - RNA, 19 nt, Artificial Sequence
  Description of Artificial Sequence: Synthetic oligonucleotide
gagagauuguggcgaauug

SEQ ID NO: 36008 - RNA, 19 nt, Artificial Sequence
  Description of Artificial Sequence: Synthetic oligonucleotide
cuuacgauugucaguucuc

SEQ ID NO: 36009 - RNA, 19 nt, Artificial Sequence
  Description of Artificial Sequence: Synthetic oligonucleotide
uuaauucgcuugagcuccg

SEQ ID NO: 36010 - RNA, 19 nt, Artificial Sequence
  Description of Artificial Sequence: Synthetic oligonucleotide
cuuaacuggcgacucuggc

SEQ ID NO: 36011 - RNA, 19 nt, Artificial Sequence
  Description of Artificial Sequence: Synthetic oligonucleotide
uuguacuauggucaccguc

SEQ ID NO: 36012 - RNA, 19 nt, Artificial Sequence
  Description of Artificial Sequence: Synthetic oligonucleotide
ugaggauacgcucccugcu

SEQ ID NO: 36013 - RNA, 19 nt, Artificial Sequence
  Description of Artificial Sequence: Synthetic oligonucleotide
auccgcuaaaagaaacccc

SEQ ID NO: 36014 - RNA, 19 nt, Artificial Sequence
  Description of Artificial Sequence: Synthetic oligonucleotide
auagggaacaaguccuggu

SEQ ID NO: 36015 - RNA, 19 nt, Artificial Sequence
  Description of Artificial Sequence: Synthetic oligonucleotide
gugccaugcagauaaccag

SEQ ID NO: 36016 - RNA, 19 nt, Artificial Sequence
  Description of Artificial Sequence: Synthetic oligonucleotide
agaugcuuggacuuacgau

SEQ ID NO: 36017 - RNA, 19 nt, Artificial Sequence
  Description of Artificial Sequence: Synthetic oligonucleotide
gagaucuaugaccuugguc

SEQ ID NO: 36018 - RNA, 19 nt, Artificial Sequence
  Description of Artificial Sequence: Synthetic oligonucleotide
auucgcuugagcuccggcu

SEQ ID NO: 36019 - RNA, 19 nt, Artificial Sequence
  Description of Artificial Sequence: Synthetic oligonucleotide
ugcagacucagaaggucug

SEQ ID NO: 36020 - RNA, 19 nt, Artificial Sequence
  Description of Artificial Sequence: Synthetic oligonucleotide
gacagcuuacauuccuaug

SEQ ID NO: 36021 - RNA, 19 nt, Artificial Sequence
  Description of Artificial Sequence: Synthetic oligonucleotide
gauuguggcgaauugaauu

SEQ ID NO: 36022 - RNA, 19 nt, Artificial Sequence
  Description of Artificial Sequence: Synthetic oligonucleotide
ugauucggcuggcagcgcc

SEQ ID NO: 36023 - RNA, 19 nt, Artificial Sequence
  Description of Artificial Sequence: Synthetic oligonucleotide
aagaccccauuauuuaguu

SEQ ID NO: 36024 - RNA, 19 nt, Artificial Sequence
  Description of Artificial Sequence: Synthetic oligonucleotide
auauauguccccacaugag

SEQ ID NO: 36025 - RNA, 19 nt, Artificial Sequence
  Description of Artificial Sequence: Synthetic oligonucleotide
cuaaagcaaggcacgcccc

SEQ ID NO: 36026 - RNA, 19 nt, Artificial Sequence
  Description of Artificial Sequence: Synthetic oligonucleotide
ggagacucauuuuacuagc

SEQ ID NO: 36027 - RNA, 19 nt, Artificial Sequence
  Description of Artificial Sequence: Synthetic oligonucleotide
agacucauuuuacuagcgu

SEQ ID NO: 36028 - RNA, 19 nt, Artificial Sequence
  Description of Artificial Sequence: Synthetic oligonucleotide
gagugagcagacaacacuc

SEQ ID NO: 36029 - RNA, 19 nt, Artificial Sequence
  Description of Artificial Sequence: Synthetic oligonucleotide
aaguugacgucugaagaaa

SEQ ID NO: 36030 - RNA, 19 nt, Artificial Sequence
  Description of Artificial Sequence: Synthetic oligonucleotide
cuagaguaccacaugaacu

SEQ ID NO: 36031 - RNA, 19 nt, Artificial Sequence
  Description of Artificial Sequence: Synthetic oligonucleotide
ugaaguuaucuagucccug

SEQ ID NO: 36032 - RNA, 19 nt, Artificial Sequence
  Description of Artificial Sequence: Synthetic oligonucleotide
uuacgccaaggacaaaguc

SEQ ID NO: 36033 - RNA, 19 nt, Artificial Sequence
  Description of Artificial Sequence: Synthetic oligonucleotide
cauuuuacuagcgugggaa

SEQ ID NO: 36034 - RNA, 19 nt, Artificial Sequence
  Description of Artificial Sequence: Synthetic oligonucleotide
uucuaaagcaaggcacgcc

SEQ ID NO: 36035 - RNA, 19 nt, Artificial Sequence
  Description of Artificial Sequence: Synthetic oligonucleotide
uccugcuagaguaccacau

SEQ ID NO: 36036 - RNA, 19 nt, Artificial Sequence
  Description of Artificial Sequence: Synthetic oligonucleotide
uuacgauugucaguucucu

SEQ ID NO: 36037 - RNA, 19 nt, Artificial Sequence
  Description of Artificial Sequence: Synthetic oligonucleotide
agagacuccuuaagcauuc

SEQ ID NO: 36038 - RNA, 19 nt, Artificial Sequence
  Description of Artificial Sequence: Synthetic oligonucleotide
aaccgcgccuccuggauga

SEQ ID NO: 36039 - RNA, 19 nt, Artificial Sequence
  Description of Artificial Sequence: Synthetic oligonucleotide
guucaagccaaagcuacug

SEQ ID NO: 36040 - RNA, 19 nt, Artificial Sequence
  Description of Artificial Sequence: Synthetic oligonucleotide
gacaacguguaccgucugc

SEQ ID NO: 36041 - RNA, 19 nt, Artificial Sequence
  Description of Artificial Sequence: Synthetic oligonucleotide
ugcuagaguaccacaugaa

SEQ ID NO: 36042 - RNA, 19 nt, Artificial Sequence
  Description of Artificial Sequence: Synthetic oligonucleotide
acuggagugagcagacaac

SEQ ID NO: 36043 - RNA, 19 nt, Artificial Sequence
  Description of Artificial Sequence: Synthetic oligonucleotide
uaccagcuugcucucggag

SEQ ID NO: 36044 - RNA, 19 nt, Artificial Sequence
  Description of Artificial Sequence: Synthetic oligonucleotide
cugcaagcuacuuauagua

SEQ ID NO: 36045 - RNA, 19 nt, Artificial Sequence
  Description of Artificial Sequence: Synthetic oligonucleotide
ugccguuggacagugauua

SEQ ID NO: 36046 - RNA, 19 nt, Artificial Sequence
  Description of Artificial Sequence: Synthetic oligonucleotide
aggacucgcaacguuguuc

SEQ ID NO: 36047 - RNA, 19 nt, Artificial Sequence
  Description of Artificial Sequence: Synthetic oligonucleotide
ugacagcuuacauuccuau

SEQ ID NO: 36048 - RNA, 19 nt, Artificial Sequence
  Description of Artificial Sequence: Synthetic oligonucleotide
agagauuguggcgaauuga

SEQ ID NO: 36049 - RNA, 19 nt, Artificial Sequence
  Description of Artificial Sequence: Synthetic oligonucleotide
aggagagcggucccagggg

SEQ ID NO: 36050 - RNA, 19 nt, Artificial Sequence
  Description of Artificial Sequence: Synthetic oligonucleotide
gggaaauuacgccaaggac

SEQ ID NO: 36051 - RNA, 19 nt, Artificial Sequence
  Description of Artificial Sequence: Synthetic oligonucleotide
uuaagacgggcugacuaga

SEQ ID NO: 36052 - RNA, 19 nt, Artificial Sequence
  Description of Artificial Sequence: Synthetic oligonucleotide
agcuacucugugaccagcc

SEQ ID NO: 36053 - RNA, 19 nt, Artificial Sequence
  Description of Artificial Sequence: Synthetic oligonucleotide
auagugucuggaauguuga

SEQ ID NO: 36054 - RNA, 19 nt, Artificial Sequence
  Description of Artificial Sequence: Synthetic oligonucleotide
ugacaggcuuaauggccgg

SEQ ID NO: 36055 - RNA, 19 nt, Artificial Sequence
  Description of Artificial Sequence: Synthetic oligonucleotide
aaaccgcgccuccuggaug

SEQ ID NO: 36056 - RNA, 19 nt, Artificial Sequence
  Description of Artificial Sequence: Synthetic oligonucleotide
ccagcagguccuaugaggg

SEQ ID NO: 36057 - RNA, 19 nt, Artificial Sequence
  Description of Artificial Sequence: Synthetic oligonucleotide
gagauuguggcgaauugaa

SEQ ID NO: 36058 - RNA, 19 nt, Artificial Sequence
  Description of Artificial Sequence: Synthetic oligonucleotide
cuugugucacauggcauag

SEQ ID NO: 36059 - RNA, 19 nt, Artificial Sequence
  Description of Artificial Sequence: Synthetic oligonucleotide
aaaggugagcggugauccu

SEQ ID NO: 36060 - RNA, 19 nt, Artificial Sequence
  Description of Artificial Sequence: Synthetic oligonucleotide
gcuagaguaccacaugaac

SEQ ID NO: 36061 - RNA, 19 nt, Artificial Sequence
  Description of Artificial Sequence: Synthetic oligonucleotide
ugaggcuaacgcccucugc

SEQ ID NO: 36062 - RNA, 19 nt, Artificial Sequence
  Description of Artificial Sequence: Synthetic oligonucleotide
ucccaugggcugaaaacaa

SEQ ID NO: 36063 - RNA, 19 nt, Artificial Sequence
  Description of Artificial Sequence: Synthetic oligonucleotide
ggcgaauugaauucugcca

SEQ ID NO: 36064 - RNA, 19 nt, Artificial Sequence
  Description of Artificial Sequence: Synthetic oligonucleotide
cuguuuggagcucagaggu

SEQ ID NO: 36065 - RNA, 19 nt, Artificial Sequence
  Description of Artificial Sequence: Synthetic oligonucleotide
cauacugugggugaagcaa

SEQ ID NO: 36066 - RNA, 19 nt, Artificial Sequence
  Description of Artificial Sequence: Synthetic oligonucleotide
guauuuacggaaaccagcu

SEQ ID NO: 36067 - RNA, 19 nt, Artificial Sequence
  Description of Artificial Sequence: Synthetic oligonucleotide
acaacguguaccgucugca

SEQ ID NO: 36068 - RNA, 19 nt, Artificial Sequence
  Description of Artificial Sequence: Synthetic oligonucleotide
aggucaaauucaucaguaa

SEQ ID NO: 36069 - RNA, 19 nt, Artificial Sequence
  Description of Artificial Sequence: Synthetic oligonucleotide
guguggggaauaucuacac

SEQ ID NO: 36070 - RNA, 19 nt, Artificial Sequence
  Description of Artificial Sequence: Synthetic oligonucleotide
cacuccuagaggagagcgg

SEQ ID NO: 36071 - RNA, 19 nt, Artificial Sequence
  Description of Artificial Sequence: Synthetic oligonucleotide
guucuaaagcaaggcacgc

SEQ ID NO: 36072 - RNA, 19 nt, Artificial Sequence
  Description of Artificial Sequence: Synthetic oligonucleotide
gucagacuuagugugggac

SEQ ID NO: 36073 - RNA, 19 nt, Artificial Sequence
  Description of Artificial Sequence: Synthetic oligonucleotide
cugcuagaguaccacauga

SEQ ID NO: 36074 - RNA, 19 nt, Artificial Sequence
  Description of Artificial Sequence: Synthetic oligonucleotide
uaaguggcugaguuauaua

SEQ ID NO: 36075 - RNA, 19 nt, Artificial Sequence
  Description of Artificial Sequence: Synthetic oligonucleotide
ggguucuaaagcaaggcac

SEQ ID NO: 36076 - RNA, 19 nt, Artificial Sequence
  Description of Artificial Sequence: Synthetic oligonucleotide
uccgacaguccuguaauau

SEQ ID NO: 36077 - RNA, 19 nt, Artificial Sequence
  Description of Artificial Sequence: Synthetic oligonucleotide
uacgauugucaguucucuc

SEQ ID NO: 36078 - RNA, 19 nt, Artificial Sequence
  Description of Artificial Sequence: Synthetic oligonucleotide
uuuacccacugaggauacg

SEQ ID NO: 36079 - RNA, 19 nt, Artificial Sequence
  Description of Artificial Sequence: Synthetic oligonucleotide
agagaucuaugaccuuggu

SEQ ID NO: 36080 - RNA, 19 nt, Artificial Sequence
  Description of Artificial Sequence: Synthetic oligonucleotide
uuuaaguggcugaguuaua

SEQ ID NO: 36081 - RNA, 19 nt, Artificial Sequence
  Description of Artificial Sequence: Synthetic oligonucleotide
agcaccgcagccugaguga

SEQ ID NO: 36082 - RNA, 19 nt, Artificial Sequence
  Description of Artificial Sequence: Synthetic oligonucleotide
agagagauuguggcgaauu

SEQ ID NO: 36083 - RNA, 19 nt, Artificial Sequence
  Description of Artificial Sequence: Synthetic oligonucleotide
cauauggagaggacucgca

SEQ ID NO: 36084 - RNA, 19 nt, Artificial Sequence
  Description of Artificial Sequence: Synthetic oligonucleotide
aggaauuagggugggguau

SEQ ID NO: 36085 - RNA, 19 nt, Artificial Sequence
  Description of Artificial Sequence: Synthetic oligonucleotide
gcucuuaaguccagaaugc

SEQ ID NO: 36086 - RNA, 19 nt, Artificial Sequence
  Description of Artificial Sequence: Synthetic oligonucleotide
ccuaaaagccugcucuacc

SEQ ID NO: 36087 - RNA, 19 nt, Artificial Sequence
  Description of Artificial Sequence: Synthetic oligonucleotide
uuguggcgaauugaauucu

SEQ ID NO: 36088 - RNA, 19 nt, Artificial Sequence
  Description of Artificial Sequence: Synthetic oligonucleotide
gggcccuuuacccacugag

SEQ ID NO: 36089 - RNA, 19 nt, Artificial Sequence
  Description of Artificial Sequence: Synthetic oligonucleotide
gugauuaagacgggcugac

SEQ ID NO: 36090 - RNA, 19 nt, Artificial Sequence
  Description of Artificial Sequence: Synthetic oligonucleotide
aacguggcacuuugaugaa

SEQ ID NO: 36091 - RNA, 19 nt, Artificial Sequence
  Description of Artificial Sequence: Synthetic oligonucleotide
cuucaguaagagcgcuccc

SEQ ID NO: 36092 - RNA, 19 nt, Artificial Sequence
  Description of Artificial Sequence: Synthetic oligonucleotide
ggacucgcaacguuguuca

SEQ ID NO: 36093 - RNA, 19 nt, Artificial Sequence
  Description of Artificial Sequence: Synthetic oligonucleotide
ugcaugguugggagaggcu

SEQ ID NO: 36094 - RNA, 19 nt, Artificial Sequence
  Description of Artificial Sequence: Synthetic oligonucleotide
uaauucgcuugagcuccgg

SEQ ID NO: 36095 - RNA, 19 nt, Artificial Sequence
  Description of Artificial Sequence: Synthetic oligonucleotide
agcgagugcucuguaggag

SEQ ID NO: 36096 - RNA, 19 nt, Artificial Sequence
  Description of Artificial Sequence: Synthetic oligonucleotide
agcauugugacagcuccau

SEQ ID NO: 36097 - RNA, 19 nt, Artificial Sequence
  Description of Artificial Sequence: Synthetic oligonucleotide
ugacggcaaguuugggcug

SEQ ID NO: 36098 - RNA, 19 nt, Artificial Sequence
  Description of Artificial Sequence: Synthetic oligonucleotide
cuggagugagcagacaaca

SEQ ID NO: 36099 - RNA, 19 nt, Artificial Sequence
  Description of Artificial Sequence: Synthetic oligonucleotide
caacguguaccgucugcac

SEQ ID NO: 36100 - RNA, 19 nt, Artificial Sequence
  Description of Artificial Sequence: Synthetic oligonucleotide
guaggagacucauuuuacu

SEQ ID NO: 36101 - RNA, 19 nt, Artificial Sequence
  Description of Artificial Sequence: Synthetic oligonucleotide
aaauaacgguucagagaga

SEQ ID NO: 36102 - RNA, 19 nt, Artificial Sequence
  Description of Artificial Sequence: Synthetic oligonucleotide
cagaguagaaauggaguga

SEQ ID NO: 36103 - RNA, 19 nt, Artificial Sequence
  Description of Artificial Sequence: Synthetic oligonucleotide
ggguauuuacggaaaccag

SEQ ID NO: 36104 - RNA, 19 nt, Artificial Sequence
  Description of Artificial Sequence: Synthetic oligonucleotide
uccuguaauauggguaguu

SEQ ID NO: 36105 - RNA, 19 nt, Artificial Sequence
  Description of Artificial Sequence: Synthetic oligonucleotide
agaguaccacaugaacuga

SEQ ID NO: 36106 - RNA, 19 nt, Artificial Sequence
  Description of Artificial Sequence: Synthetic oligonucleotide
aggcuaacgcccucugccu

SEQ ID NO: 36107 - RNA, 19 nt, Artificial Sequence
  Description of Artificial Sequence: Synthetic oligonucleotide
uaggccgucucuuccuaaa

SEQ ID NO: 36108 - RNA, 19 nt, Artificial Sequence
  Description of Artificial Sequence: Synthetic oligonucleotide
uguaggcguugguaccaca

SEQ ID NO: 36109 - RNA, 19 nt, Artificial Sequence
  Description of Artificial Sequence: Synthetic oligonucleotide
augaggcuaacgcccucug

SEQ ID NO: 36110 - RNA, 19 nt, Artificial Sequence
  Description of Artificial Sequence: Synthetic oligonucleotide
ggcaggaucuauccuccag

SEQ ID NO: 36111 - RNA, 19 nt, Artificial Sequence
  Description of Artificial Sequence: Synthetic oligonucleotide
agggugggguauuuacgga

SEQ ID NO: 36112 - RNA, 19 nt, Artificial Sequence
  Description of Artificial Sequence: Synthetic oligonucleotide
cuugacagcuuacauuccu

SEQ ID NO: 36113 - RNA, 19 nt, Artificial Sequence
  Description of Artificial Sequence: Synthetic oligonucleotide
cucgcaacguuguucaccu

SEQ ID NO: 36114 - RNA, 19 nt, Artificial Sequence
  Description of Artificial Sequence: Synthetic oligonucleotide
agacuuagugugggacuuc

SEQ ID NO: 36115 - RNA, 19 nt, Artificial Sequence
  Description of Artificial Sequence: Synthetic oligonucleotide
cugcugguaucugauggac

SEQ ID NO: 36116 - RNA, 19 nt, Artificial Sequence
  Description of Artificial Sequence: Synthetic oligonucleotide
cgcaacguuguucaccugg

SEQ ID NO: 36117 - RNA, 19 nt, Artificial Sequence
  Description of Artificial Sequence: Synthetic oligonucleotide
gggcuaauugcagggacag

SEQ ID NO: 36118 - RNA, 19 nt, Artificial Sequence
  Description of Artificial Sequence: Synthetic oligonucleotide
uggaaaggugagcggugau

SEQ ID NO: 36119 - RNA, 19 nt, Artificial Sequence
  Description of Artificial Sequence: Synthetic oligonucleotide
ggguucguguuuucagugc

SEQ ID NO: 36120 - RNA, 19 nt, Artificial Sequence
  Description of Artificial Sequence: Synthetic oligonucleotide
agaggacucgcaacguugu

SEQ ID NO: 36121 - RNA, 19 nt, Artificial Sequence
  Description of Artificial Sequence: Synthetic oligonucleotide
cagaugcuuggacuuacga

SEQ ID NO: 36122 - RNA, 19 nt, Artificial Sequence
  Description of Artificial Sequence: Synthetic oligonucleotide
cagaaaugggcaaguaggu

SEQ ID NO: 36123 - RNA, 19 nt, Artificial Sequence
  Description of Artificial Sequence: Synthetic oligonucleotide
uggcaacaucucgacagcu

SEQ ID NO: 36124 - RNA, 19 nt, Artificial Sequence
  Description of Artificial Sequence: Synthetic oligonucleotide
cgcuaaaagaaaccccugc

SEQ ID NO: 36125 - RNA, 19 nt, Artificial Sequence
  Description of Artificial Sequence: Synthetic oligonucleotide
cacauguggacaacaaaau

SEQ ID NO: 36126 - RNA, 19 nt, Artificial Sequence
  Description of Artificial Sequence: Synthetic oligonucleotide
uguccccacaugagacaac

SEQ ID NO: 36127 - RNA, 19 nt, Artificial Sequence
  Description of Artificial Sequence: Synthetic oligonucleotide
acacauguucucacucaug

SEQ ID NO: 36128 - RNA, 19 nt, Artificial Sequence
  Description of Artificial Sequence: Synthetic oligonucleotide
uggagaggacucgcaacgu

SEQ ID NO: 36129 - RNA, 19 nt, Artificial Sequence
  Description of Artificial Sequence: Synthetic oligonucleotide
cacucacauagggaacaag

SEQ ID NO: 36130 - RNA, 19 nt, Artificial Sequence
  Description of Artificial Sequence: Synthetic oligonucleotide
agcccuuguccgacagucc

SEQ ID NO: 36131 - RNA, 19 nt, Artificial Sequence
  Description of Artificial Sequence: Synthetic oligonucleotide
guucccgugggagagggaa

SEQ ID NO: 36132 - RNA, 19 nt, Artificial Sequence
  Description of Artificial Sequence: Synthetic oligonucleotide
cuuagugugggacuucauu

SEQ ID NO: 36133 - RNA, 19 nt, Artificial Sequence
  Description of Artificial Sequence: Synthetic oligonucleotide
cccucaguuaacuggcaac

SEQ ID NO: 36134 - RNA, 19 nt, Artificial Sequence
  Description of Artificial Sequence: Synthetic oligonucleotide
augauucggcuggcagcgc

SEQ ID NO: 36135 - RNA, 19 nt, Artificial Sequence
  Description of Artificial Sequence: Synthetic oligonucleotide
gacuuacgauugucaguuc

SEQ ID NO: 36136 - RNA, 19 nt, Artificial Sequence
  Description of Artificial Sequence: Synthetic oligonucleotide
agauuguggcgaauugaau

SEQ ID NO: 36137 - RNA, 19 nt, Artificial Sequence
  Description of Artificial Sequence: Synthetic oligonucleotide
ggcccuuuacccacugagg

SEQ ID NO: 36138 - RNA, 19 nt, Artificial Sequence
  Description of Artificial Sequence: Synthetic oligonucleotide
aaggugccuguuguacuau

SEQ ID NO: 36139 - RNA, 19 nt, Artificial Sequence
  Description of Artificial Sequence: Synthetic oligonucleotide
agagugccacccaaacaca

SEQ ID NO: 36140 - RNA, 19 nt, Artificial Sequence
  Description of Artificial Sequence: Synthetic oligonucleotide
ggacuuacgauugucaguu

SEQ ID NO: 36141 - RNA, 19 nt, Artificial Sequence
  Description of Artificial Sequence: Synthetic oligonucleotide
ccugcuagaguaccacaug

SEQ ID NO: 36142 - RNA, 19 nt, Artificial Sequence
  Description of Artificial Sequence: Synthetic oligonucleotide
cugcagacucagaaggucu

SEQ ID NO: 36143 - RNA, 19 nt, Artificial Sequence
  Description of Artificial Sequence: Synthetic oligonucleotide
ggcguugguaccacaugag

SEQ ID NO: 36144 - RNA, 19 nt, Artificial Sequence
  Description of Artificial Sequence: Synthetic oligonucleotide
gcgacucuggcgcuucuug

SEQ ID NO: 36145 - RNA, 19 nt, Artificial Sequence
  Description of Artificial Sequence: Synthetic oligonucleotide
gcugcaagcuacuuauagu

SEQ ID NO: 36146 - RNA, 19 nt, Artificial Sequence
  Description of Artificial Sequence: Synthetic oligonucleotide
acgagucugcagacuucac

SEQ ID NO: 36147 - RNA, 19 nt, Artificial Sequence
  Description of Artificial Sequence: Synthetic oligonucleotide
cuccugcuagaguaccaca

SEQ ID NO: 36148 - RNA, 19 nt, Artificial Sequence
  Description of Artificial Sequence: Synthetic oligonucleotide
gcgagugcucuguaggaga

SEQ ID NO: 36149 - RNA, 19 nt, Artificial Sequence
  Description of Artificial Sequence: Synthetic oligonucleotide
gacucgcaacguuguucac

SEQ ID NO: 36150 - RNA, 19 nt, Artificial Sequence
  Description of Artificial Sequence: Synthetic oligonucleotide
ugggcgccacuggagugag

SEQ ID NO: 36151 - RNA, 19 nt, Artificial Sequence
  Description of Artificial Sequence: Synthetic oligonucleotide
ccguuggacagugauuaag

SEQ ID NO: 36152 - RNA, 19 nt, Artificial Sequence
  Description of Artificial Sequence: Synthetic oligonucleotide
caaugaggcuaacgcccuc

SEQ ID NO: 36153 - RNA, 19 nt, Artificial Sequence
  Description of Artificial Sequence: Synthetic oligonucleotide
ggcuaacgcccucugccug

SEQ ID NO: 36154 - RNA, 19 nt, Artificial Sequence
  Description of Artificial Sequence: Synthetic oligonucleotide
gugccuguuguacuauggu

SEQ ID NO: 36155 - RNA, 19 nt, Artificial Sequence
  Description of Artificial Sequence: Synthetic oligonucleotide
gugggcagggaugcugaug

SEQ ID NO: 36156 - RNA, 19 nt, Artificial Sequence
  Description of Artificial Sequence: Synthetic oligonucleotide
agagcgcucccugcuucag

SEQ ID NO: 36157 - RNA, 19 nt, Artificial Sequence
  Description of Artificial Sequence: Synthetic oligonucleotide
gaguuccauuuugcguuac

SEQ ID NO: 36158 - RNA, 19 nt, Artificial Sequence
  Description of Artificial Sequence: Synthetic oligonucleotide
uuauaguaucagggucaua

SEQ ID NO: 36159 - RNA, 19 nt, Artificial Sequence
  Description of Artificial Sequence: Synthetic oligonucleotide
ccccuaaggaaagccagag

SEQ ID NO: 36160 - RNA, 19 nt, Artificial Sequence
  Description of Artificial Sequence: Synthetic oligonucleotide
agaaaccccugcagacuca

SEQ ID NO: 36161 - RNA, 19 nt, Artificial Sequence
  Description of Artificial Sequence: Synthetic oligonucleotide
ggcuaauugcagggacagg

SEQ ID NO: 36162 - RNA, 19 nt, Artificial Sequence
  Description of Artificial Sequence: Synthetic oligonucleotide
cuuauaguaucagggucau

SEQ ID NO: 36163 - RNA, 19 nt, Artificial Sequence
  Description of Artificial Sequence: Synthetic oligonucleotide
aaccaucccaugggcugaa

SEQ ID NO: 36164 - RNA, 19 nt, Artificial Sequence
  Description of Artificial Sequence: Synthetic oligonucleotide
ucgcaacguuguucaccug

SEQ ID NO: 36165 - RNA, 19 nt, Artificial Sequence
  Description of Artificial Sequence: Synthetic oligonucleotide
cuguaggcguugguaccac

SEQ ID NO: 36166 - RNA, 19 nt, Artificial Sequence
  Description of Artificial Sequence: Synthetic oligonucleotide
ccgcuaaaagaaaccccug

SEQ ID NO: 36167 - RNA, 19 nt, Artificial Sequence
  Description of Artificial Sequence: Synthetic oligonucleotide
aaaccccugcagacucaga

SEQ ID NO: 36168 - RNA, 19 nt, Artificial Sequence
  Description of Artificial Sequence: Synthetic oligonucleotide
cucuuaaguccagaaugcu

SEQ ID NO: 36169 - RNA, 19 nt, Artificial Sequence
  Description of Artificial Sequence: Synthetic oligonucleotide
guagguguccuaagagagu

SEQ ID NO: 36170 - RNA, 19 nt, Artificial Sequence
  Description of Artificial Sequence: Synthetic oligonucleotide
gggcacuccuagaggagag

SEQ ID NO: 36171 - RNA, 19 nt, Artificial Sequence
  Description of Artificial Sequence: Synthetic oligonucleotide
ccgauacagcagcaaggag

SEQ ID NO: 36172 - RNA, 19 nt, Artificial Sequence
  Description of Artificial Sequence: Synthetic oligonucleotide
cugcagacuucacucacau

SEQ ID NO: 36173 - RNA, 19 nt, Artificial Sequence
  Description of Artificial Sequence: Synthetic oligonucleotide
gcagcuaguucuggauccc

SEQ ID NO: 36174 - RNA, 19 nt, Artificial Sequence
  Description of Artificial Sequence: Synthetic oligonucleotide
ggacaacguguaccgucug

SEQ ID NO: 36175 - RNA, 19 nt, Artificial Sequence
  Description of Artificial Sequence: Synthetic oligonucleotide
uggcagcgccuaguguggc

SEQ ID NO: 36176 - RNA, 19 nt, Artificial Sequence
  Description of Artificial Sequence: Synthetic oligonucleotide
guuguacuauggucaccgu

SEQ ID NO: 36177 - RNA, 19 nt, Artificial Sequence
  Description of Artificial Sequence: Synthetic oligonucleotide
guaggcguugguaccacau

SEQ ID NO: 36178 - RNA, 19 nt, Artificial Sequence
  Description of Artificial Sequence: Synthetic oligonucleotide
gacggcaaguuugggcugu

SEQ ID NO: 36179 - RNA, 19 nt, Artificial Sequence
  Description of Artificial Sequence: Synthetic oligonucleotide
cacuugaaacugagagugu

SEQ ID NO: 36180 - RNA, 19 nt, Artificial Sequence
  Description of Artificial Sequence: Synthetic oligonucleotide
ggcagaugugcgguugcac

SEQ ID NO: 36181 - RNA, 19 nt, Artificial Sequence
  Description of Artificial Sequence: Synthetic oligonucleotide
cugggcgccacuggaguga

SEQ ID NO: 36182 - RNA, 19 nt, Artificial Sequence
  Description of Artificial Sequence: Synthetic oligonucleotide
gcugccguuggacagugau

SEQ ID NO: 36183 - RNA, 19 nt, Artificial Sequence
  Description of Artificial Sequence: Synthetic oligonucleotide
ggcacuccuagaggagagc

SEQ ID NO: 36184 - RNA, 19 nt, Artificial Sequence
  Description of Artificial Sequence: Synthetic oligonucleotide
guaagagcgcucccugcuu

SEQ ID NO: 36185 - RNA, 19 nt, Artificial Sequence
  Description of Artificial Sequence: Synthetic oligonucleotide
gagcggugauccugagugu

SEQ ID NO: 36186 - RNA, 19 nt, Artificial Sequence
  Description of Artificial Sequence: Synthetic oligonucleotide
gcaaaccgcgccuccugga

SEQ ID NO: 36187 - RNA, 19 nt, Artificial Sequence
  Description of Artificial Sequence: Synthetic oligonucleotide
gcguugguaccacaugagu

SEQ ID NO: 36188 - RNA, 19 nt, Artificial Sequence
  Description of Artificial Sequence: Synthetic oligonucleotide
ccaaccccuucugaacuac

SEQ ID NO: 36189 - RNA, 19 nt, Artificial Sequence
  Description of Artificial Sequence: Synthetic oligonucleotide
cagacuuagugugggacuu

SEQ ID NO: 36190 - RNA, 19 nt, Artificial Sequence
  Description of Artificial Sequence: Synthetic oligonucleotide
gcacaugaguccagcccug

SEQ ID NO: 36191 - RNA, 19 nt, Artificial Sequence
  Description of Artificial Sequence: Synthetic oligonucleotide
gugagcggugauccugagu

SEQ ID NO: 36192 - RNA, 19 nt, Artificial Sequence
  Description of Artificial Sequence: Synthetic oligonucleotide
gguaucugauggacaacgu

SEQ ID NO: 36193 - RNA, 19 nt, Artificial Sequence
  Description of Artificial Sequence: Synthetic oligonucleotide
caacguuguucaccuggcu

SEQ ID NO: 36194 - RNA, 19 nt, Artificial Sequence
  Description of Artificial Sequence: Synthetic oligonucleotide
caaaccgcgccuccuggau

SEQ ID NO: 36195 - RNA, 19 nt, Artificial Sequence
  Description of Artificial Sequence: Synthetic oligonucleotide
cacgccccuaggccgucuc

SEQ ID NO: 36196 - RNA, 19 nt, Artificial Sequence
  Description of Artificial Sequence: Synthetic oligonucleotide
accgcgccuccuggaugac

SEQ ID NO: 36197 - RNA, 19 nt, Artificial Sequence
  Description of Artificial Sequence: Synthetic oligonucleotide
gaggacucgcaacguuguu

SEQ ID NO: 36198 - RNA, 19 nt, Artificial Sequence
  Description of Artificial Sequence: Synthetic oligonucleotide
gcauugugacagcuccaua

SEQ ID NO: 36199 - RNA, 19 nt, Artificial Sequence
  Description of Artificial Sequence: Synthetic oligonucleotide
gcgccacuggagugagcag

SEQ ID NO: 36200 - RNA, 19 nt, Artificial Sequence
  Description of Artificial Sequence: Synthetic oligonucleotide
ggcugugcggcaccaggcu

SEQ ID NO: 36201 - RNA, 19 nt, Artificial Sequence
  Description of Artificial Sequence: Synthetic oligonucleotide
guccuguaauauggguagu

SEQ ID NO: 36202 - RNA, 19 nt, Artificial Sequence
  Description of Artificial Sequence: Synthetic oligonucleotide
cuuguccgacaguccugua

SEQ ID NO: 36203 - RNA, 19 nt, Artificial Sequence
  Description of Artificial Sequence: Synthetic oligonucleotide
gcucucggaggcaggaucu

SEQ ID NO: 36204 - RNA, 19 nt, Artificial Sequence
  Description of Artificial Sequence: Synthetic oligonucleotide
gccuaguguggcugggcua

SEQ ID NO: 36205 - RNA, 19 nt, Artificial Sequence
  Description of Artificial Sequence: Synthetic oligonucleotide
gccguuggacagugauuaa

SEQ ID NO: 36206 - RNA, 19 nt, Artificial Sequence
  Description of Artificial Sequence: Synthetic oligonucleotide
gcgccuaguguggcugggc

SEQ ID NO: 36207 - RNA, 19 nt, Artificial Sequence
  Description of Artificial Sequence: Synthetic oligonucleotide
cuaacgcccucugccugcu

SEQ ID NO: 36208 - RNA, 19 nt, Artificial Sequence
  Description of Artificial Sequence: Synthetic oligonucleotide
ggccuggaugcuugauacu

SEQ ID NO: 36209 - RNA, 19 nt, Artificial Sequence
  Description of Artificial Sequence: Synthetic oligonucleotide
ccccaaccccuucugaacu

SEQ ID NO: 36210 - RNA, 19 nt, Artificial Sequence
  Description of Artificial Sequence: Synthetic oligonucleotide
ccuuguccgacaguccugu

SEQ ID NO: 36211 - RNA, 19 nt, Artificial Sequence
  Description of Artificial Sequence: Synthetic oligonucleotide
ggauccccuuuucucucau

SEQ ID NO: 36212 - RNA, 19 nt, Artificial Sequence
  Description of Artificial Sequence: Synthetic oligonucleotide
ggcagcgccuaguguggcu

SEQ ID NO: 36213 - RNA, 19 nt, Artificial Sequence
  Description of Artificial Sequence: Synthetic oligonucleotide
gcgguugcacaggcuuaac

SEQ ID NO: 36214 - RNA, 19 nt, Artificial Sequence
  Description of Artificial Sequence: Synthetic oligonucleotide
agcugccguuggacaguga

SEQ ID NO: 36215 - RNA, 19 nt, Artificial Sequence
  Description of Artificial Sequence: Synthetic oligonucleotide
gguucccgugggagaggga

SEQ ID NO: 36216 - RNA, 19 nt, Artificial Sequence
  Description of Artificial Sequence: Synthetic oligonucleotide
ccgcagccugagugaccac

SEQ ID NO: 36217 - RNA, 19 nt, Artificial Sequence
  Description of Artificial Sequence: Synthetic oligonucleotide
ggcgacucuggcgcuucuu

SEQ ID NO: 36218 - RNA, 19 nt, Artificial Sequence
  Description of Artificial Sequence: Synthetic oligonucleotide
ggucgccauucuggcgcuu

SEQ ID NO: 36219 - RNA, 19 nt, Artificial Sequence
  Description of Artificial Sequence: Synthetic oligonucleotide
agugaaacuguucauaucc

SEQ ID NO: 36220 - RNA, 19 nt, Artificial Sequence
  Description of Artificial Sequence: Synthetic oligonucleotide
cucaucauaaauaauuugg

SEQ ID NO: 36221 - RNA, 19 nt, Artificial Sequence
  Description of Artificial Sequence: Synthetic oligonucleotide
aaaaccgcagcacuaacac

SEQ ID NO: 36222 - RNA, 19 nt, Artificial Sequence
  Description of Artificial Sequence: Synthetic oligonucleotide
aaucucucgaucuacccgg

SEQ ID NO: 36223 - RNA, 19 nt, Artificial Sequence
  Description of Artificial Sequence: Synthetic oligonucleotide
uuauacuuccuggagaucg

SEQ ID NO: 36224 - RNA, 19 nt, Artificial Sequence
  Description of Artificial Sequence: Synthetic oligonucleotide
ugagguauaccucaaauaa

SEQ ID NO: 36225 - RNA, 19 nt, Artificial Sequence
  Description of Artificial Sequence: Synthetic oligonucleotide
auuaccagugugcauaaac

SEQ ID NO: 36226 - RNA, 19 nt, Artificial Sequence
  Description of Artificial Sequence: Synthetic oligonucleotide
auauugaugaacuugcccu

SEQ ID NO: 36227 - RNA, 19 nt, Artificial Sequence
  Description of Artificial Sequence: Synthetic oligonucleotide
acuacgguguuucugcucc

SEQ ID NO: 36228 - RNA, 19 nt, Artificial Sequence
  Description of Artificial Sequence: Synthetic oligonucleotide
ggaaaguugaauuuagagg

SEQ ID NO: 36229 - RNA, 19 nt, Artificial Sequence
  Description of Artificial Sequence: Synthetic oligonucleotide
aaccgcagcacuaacacgc

SEQ ID NO: 36230 - RNA, 19 nt, Artificial Sequence
  Description of Artificial Sequence: Synthetic oligonucleotide
ggaauguugaaguaggagg

SEQ ID NO: 36231 - RNA, 19 nt, Artificial Sequence
  Description of Artificial Sequence: Synthetic oligonucleotide
guagcuauggaccggauag

SEQ ID NO: 36232 - RNA, 19 nt, Artificial Sequence
  Description of Artificial Sequence: Synthetic oligonucleotide
agguauaccucaaauaagc

SEQ ID NO: 36233 - RNA, 19 nt, Artificial Sequence
  Description of Artificial Sequence: Synthetic oligonucleotide
uucaauaugagaagagcga

SEQ ID NO: 36234 - RNA, 19 nt, Artificial Sequence
  Description of Artificial Sequence: Synthetic oligonucleotide
ugaaggauaacgacuuugc

SEQ ID NO: 36235 - RNA, 19 nt, Artificial Sequence
  Description of Artificial Sequence: Synthetic oligonucleotide
ucucguacugcgcugagag

SEQ ID NO: 36236 - RNA, 19 nt, Artificial Sequence
  Description of Artificial Sequence: Synthetic oligonucleotide
gauggugaaguuuggaaug

SEQ ID NO: 36237 - RNA, 19 nt, Artificial Sequence
  Description of Artificial Sequence: Synthetic oligonucleotide
aucagauagggucucguac

SEQ ID NO: 36238 - RNA, 19 nt, Artificial Sequence
  Description of Artificial Sequence: Synthetic oligonucleotide
auaggauccuccauaagcc

SEQ ID NO: 36239 - RNA, 19 nt, Artificial Sequence
  Description of Artificial Sequence: Synthetic oligonucleotide
aaguuagcugcaguaaugg

SEQ ID NO: 36240 - RNA, 19 nt, Artificial Sequence
  Description of Artificial Sequence: Synthetic oligonucleotide
aaugugaaggauaacgacu

SEQ ID NO: 36241 - RNA, 19 nt, Artificial Sequence
  Description of Artificial Sequence: Synthetic oligonucleotide
agaauaauuaagggcaagg

SEQ ID NO: 36242 - RNA, 19 nt, Artificial Sequence
  Description of Artificial Sequence: Synthetic oligonucleotide
caagguuaaauuaccagug

SEQ ID NO: 36243 - RNA, 19 nt, Artificial Sequence
  Description of Artificial Sequence: Synthetic oligonucleotide
aacgacuuugcucugugcu

SEQ ID NO: 36244 - RNA, 19 nt, Artificial Sequence
  Description of Artificial Sequence: Synthetic oligonucleotide
cugaucauaacgcuggcag

SEQ ID NO: 36245 - RNA, 19 nt, Artificial Sequence
  Description of Artificial Sequence: Synthetic oligonucleotide
ucgaauuucuggaaacugc

SEQ ID NO: 36246 - RNA, 19 nt, Artificial Sequence
  Description of Artificial Sequence: Synthetic oligonucleotide
agaagagcgauagucaggg

SEQ ID NO: 36247 - RNA, 19 nt, Artificial Sequence
  Description of Artificial Sequence: Synthetic oligonucleotide
ucgagaaucaguccucugc

SEQ ID NO: 36248 - RNA, 19 nt, Artificial Sequence
  Description of Artificial Sequence: Synthetic oligonucleotide
aaggcaaguagcuuauacu

SEQ ID NO: 36249 - RNA, 19 nt, Artificial Sequence
  Description of Artificial Sequence: Synthetic oligonucleotide
cuaaagguaaaaccgcagc

SEQ ID NO: 36250 - RNA, 19 nt, Artificial Sequence
  Description of Artificial Sequence: Synthetic oligonucleotide
uuggacaauacuacggugu

SEQ ID NO: 36251 - RNA, 19 nt, Artificial Sequence
  Description of Artificial Sequence: Synthetic oligonucleotide
aggagauuuagacuuccgg

SEQ ID NO: 36252 - RNA, 19 nt, Artificial Sequence
  Description of Artificial Sequence: Synthetic oligonucleotide
uccuaaguagcuuugccca

SEQ ID NO: 36253 - RNA, 19 nt, Artificial Sequence
  Description of Artificial Sequence: Synthetic oligonucleotide
aaaggucgucuauuuacag

SEQ ID NO: 36254 - RNA, 19 nt, Artificial Sequence
  Description of Artificial Sequence: Synthetic oligonucleotide
ucgucuauuuacagaagag

SEQ ID NO: 36255 - RNA, 19 nt, Artificial Sequence
  Description of Artificial Sequence: Synthetic oligonucleotide
acgucuaugaaguuagcug

SEQ ID NO: 36256 - RNA, 19 nt, Artificial Sequence
  Description of Artificial Sequence: Synthetic oligonucleotide
aagauuacuggcaggauca

SEQ ID NO: 36257 - RNA, 19 nt, Artificial Sequence
  Description of Artificial Sequence: Synthetic oligonucleotide
aaacuugauuucuagcaaa

SEQ ID NO: 36258 - RNA, 19 nt, Artificial Sequence
  Description of Artificial Sequence: Synthetic oligonucleotide
aaguaggaugcaauuaguc

SEQ ID NO: 36259 - RNA, 19 nt, Artificial Sequence
  Description of Artificial Sequence: Synthetic oligonucleotide
ugacuaacuucaauaugag

SEQ ID NO: 36260 - RNA, 19 nt, Artificial Sequence
  Description of Artificial Sequence: Synthetic oligonucleotide
ucuugguuaaauaguaaua

SEQ ID NO: 36261 - RNA, 19 nt, Artificial Sequence
  Description of Artificial Sequence: Synthetic oligonucleotide
agcacuaacacgcuggaaa

SEQ ID NO: 36262 - RNA, 19 nt, Artificial Sequence
  Description of Artificial Sequence: Synthetic oligonucleotide
uuccuaaguagcuuugccc

SEQ ID NO: 36263 - RNA, 19 nt, Artificial Sequence
  Description of Artificial Sequence: Synthetic oligonucleotide
aagguuaaauuaccagugu

SEQ ID NO: 36264 - RNA, 19 nt, Artificial Sequence
  Description of Artificial Sequence: Synthetic oligonucleotide
uccauaagcccauucauau

SEQ ID NO: 36265 - RNA, 19 nt, Artificial Sequence
  Description of Artificial Sequence: Synthetic oligonucleotide
gaacuaaagguaaaaccgc

SEQ ID NO: 36266 - RNA, 19 nt, Artificial Sequence
  Description of Artificial Sequence: Synthetic oligonucleotide
uaaaaccgcagcacuaaca

SEQ ID NO: 36267 - RNA, 19 nt, Artificial Sequence
  Description of Artificial Sequence: Synthetic oligonucleotide
uaauuaagggcaagguuaa

SEQ ID NO: 36268 - RNA, 19 nt, Artificial Sequence
  Description of Artificial Sequence: Synthetic oligonucleotide
ucucacuagggcuuuauaa

SEQ ID NO: 36269 - RNA, 19 nt, Artificial Sequence
  Description of Artificial Sequence: Synthetic oligonucleotide
ucagauagggucucguacu

SEQ ID NO: 36270 - RNA, 19 nt, Artificial Sequence
  Description of Artificial Sequence: Synthetic oligonucleotide
ugguugauggccgaagggg

SEQ ID NO: 36271 - RNA, 19 nt, Artificial Sequence
  Description of Artificial Sequence: Synthetic oligonucleotide
uuguaagggaacugaguag

SEQ ID NO: 36272 - RNA, 19 nt, Artificial Sequence
  Description of Artificial Sequence: Synthetic oligonucleotide
aacauacccaugcaguaau

SEQ ID NO: 36273 - RNA, 19 nt, Artificial Sequence
  Description of Artificial Sequence: Synthetic oligonucleotide
aacuugcccuucuuuguuc

SEQ ID NO: 36274 - RNA, 19 nt, Artificial Sequence
  Description of Artificial Sequence: Synthetic oligonucleotide
aaaccgcagcacuaacacg

SEQ ID NO: 36275 - RNA, 19 nt, Artificial Sequence
  Description of Artificial Sequence: Synthetic oligonucleotide
ucucauaguauucccuugu

SEQ ID NO: 36276 - RNA, 19 nt, Artificial Sequence
  Description of Artificial Sequence: Synthetic oligonucleotide
agauacuacagcaagggga

SEQ ID NO: 36277 - RNA, 19 nt, Artificial Sequence
  Description of Artificial Sequence: Synthetic oligonucleotide
aacuucaauaugagaagag

SEQ ID NO: 36278 - RNA, 19 nt, Artificial Sequence
  Description of Artificial Sequence: Synthetic oligonucleotide
uguugaaguaggaggcugc

SEQ ID NO: 36279 - RNA, 19 nt, Artificial Sequence
  Description of Artificial Sequence: Synthetic oligonucleotide
uagcuuauacuuccuggag

SEQ ID NO: 36280 - RNA, 19 nt, Artificial Sequence
  Description of Artificial Sequence: Synthetic oligonucleotide
uuuggacaauacuacggug

SEQ ID NO: 36281 - RNA, 19 nt, Artificial Sequence
  Description of Artificial Sequence: Synthetic oligonucleotide
ggagauuuagacuuccggc

SEQ ID NO: 36282 - RNA, 19 nt, Artificial Sequence
  Description of Artificial Sequence: Synthetic oligonucleotide
uccgauucucaucauaaau

SEQ ID NO: 36283 - RNA, 19 nt, Artificial Sequence
  Description of Artificial Sequence: Synthetic oligonucleotide
uugauuuaaccaugggcga

SEQ ID NO: 36284 - RNA, 19 nt, Artificial Sequence
  Description of Artificial Sequence: Synthetic oligonucleotide
ugacaagagcaauaagcug

SEQ ID NO: 36285 - RNA, 19 nt, Artificial Sequence
  Description of Artificial Sequence: Synthetic oligonucleotide
uguuugcccagccagugga

SEQ ID NO: 36286 - RNA, 19 nt, Artificial Sequence
  Description of Artificial Sequence: Synthetic oligonucleotide
uguccgaggcaauuugccg

SEQ ID NO: 36287 - RNA, 19 nt, Artificial Sequence
  Description of Artificial Sequence: Synthetic oligonucleotide
ucacuaucagauagggucu

SEQ ID NO: 36288 - RNA, 19 nt, Artificial Sequence
  Description of Artificial Sequence: Synthetic oligonucleotide
gacacuaggcuucucuggc

SEQ ID NO: 36289 - RNA, 19 nt, Artificial Sequence
  Description of Artificial Sequence: Synthetic oligonucleotide
aaggucgucuauuuacaga

SEQ ID NO: 36290 - RNA, 19 nt, Artificial Sequence
  Description of Artificial Sequence: Synthetic oligonucleotide
agauuuagacuuccggcug

SEQ ID NO: 36291 - RNA, 19 nt, Artificial Sequence
  Description of Artificial Sequence: Synthetic oligonucleotide
uccccucugaccaacacgu

SEQ ID NO: 36292 - RNA, 19 nt, Artificial Sequence
  Description of Artificial Sequence: Synthetic oligonucleotide
accucaacccuucuggcag

SEQ ID NO: 36293 - RNA, 19 nt, Artificial Sequence
  Description of Artificial Sequence: Synthetic oligonucleotide
cuagaccaagauuacuggc

SEQ ID NO: 36294 - RNA, 19 nt, Artificial Sequence
  Description of Artificial Sequence: Synthetic oligonucleotide
ugagggacggggaaucugc

SEQ ID NO: 36295 - RNA, 19 nt, Artificial Sequence
  Description of Artificial Sequence: Synthetic oligonucleotide
augcgaucgguguuggugg

SEQ ID NO: 36296 - RNA, 19 nt, Artificial Sequence
  Description of Artificial Sequence: Synthetic oligonucleotide
cuggaaacucacaauauga

SEQ ID NO: 36297 - RNA, 19 nt, Artificial Sequence
  Description of Artificial Sequence: Synthetic oligonucleotide
ucaccuggaaaguugaauu

SEQ ID NO: 36298 - RNA, 19 nt, Artificial Sequence
  Description of Artificial Sequence: Synthetic oligonucleotide
aacuaaagguaaaaccgca

SEQ ID NO: 36299 - RNA, 19 nt, Artificial Sequence
  Description of Artificial Sequence: Synthetic oligonucleotide
uauagaguggcaguucaac

SEQ ID NO: 36300 - RNA, 19 nt, Artificial Sequence
  Description of Artificial Sequence: Synthetic oligonucleotide
aaaaggucgucuauuuaca

SEQ ID NO: 36301 - RNA, 19 nt, Artificial Sequence
  Description of Artificial Sequence: Synthetic oligonucleotide
uucgaauuucuggaaacug

SEQ ID NO: 36302 - RNA, 19 nt, Artificial Sequence
  Description of Artificial Sequence: Synthetic oligonucleotide
uaggagauuuagacuuccg

SEQ ID NO: 36303 - RNA, 19 nt, Artificial Sequence
  Description of Artificial Sequence: Synthetic oligonucleotide
gaggaguucaacuuacgaa

SEQ ID NO: 36304 - RNA, 19 nt, Artificial Sequence
  Description of Artificial Sequence: Synthetic oligonucleotide
agaggaguucaacuuacga

SEQ ID NO: 36305 - RNA, 19 nt, Artificial Sequence
  Description of Artificial Sequence: Synthetic oligonucleotide
guccgaggcaauuugccgg

SEQ ID NO: 36306 - RNA, 19 nt, Artificial Sequence
  Description of Artificial Sequence: Synthetic oligonucleotide
cuucauaccugugagaaga

SEQ ID NO: 36307 - RNA, 19 nt, Artificial Sequence
  Description of Artificial Sequence: Synthetic oligonucleotide
aaucaccuuccgaauguac

SEQ ID NO: 36308 - RNA, 19 nt, Artificial Sequence
  Description of Artificial Sequence: Synthetic oligonucleotide
cagaagagugauuuaaaga

SEQ ID NO: 36309 - RNA, 19 nt, Artificial Sequence
  Description of Artificial Sequence: Synthetic oligonucleotide
gaaggggcacaugcgaucg

SEQ ID NO: 36310 - RNA, 19 nt, Artificial Sequence
  Description of Artificial Sequence: Synthetic oligonucleotide
aagcugcugcugcugcugc

SEQ ID NO: 36311 - RNA, 19 nt, Artificial Sequence
  Description of Artificial Sequence: Synthetic oligonucleotide
accucauucaggcuuuaug

SEQ ID NO: 36312 - RNA, 19 nt, Artificial Sequence
  Description of Artificial Sequence: Synthetic oligonucleotide
aguuccuaaguagcuuugc

SEQ ID NO: 36313 - RNA, 19 nt, Artificial Sequence
  Description of Artificial Sequence: Synthetic oligonucleotide
agcgacuugauguuuuagu

SEQ ID NO: 36314 - RNA, 19 nt, Artificial Sequence
  Description of Artificial Sequence: Synthetic oligonucleotide
uuccgaauguacagaggag

SEQ ID NO: 36315 - RNA, 19 nt, Artificial Sequence
  Description of Artificial Sequence: Synthetic oligonucleotide
cugaacuacaacauaccca

SEQ ID NO: 36316 - RNA, 19 nt, Artificial Sequence
  Description of Artificial Sequence: Synthetic oligonucleotide
uuucccagccucagaauac

SEQ ID NO: 36317 - RNA, 19 nt, Artificial Sequence
  Description of Artificial Sequence: Synthetic oligonucleotide
uuacagguguagaugcuaa

SEQ ID NO: 36318 - RNA, 19 nt, Artificial Sequence
  Description of Artificial Sequence: Synthetic oligonucleotide
accuuccgaauguacagag

SEQ ID NO: 36319 - RNA, 19 nt, Artificial Sequence
  Description of Artificial Sequence: Synthetic oligonucleotide
auaacgacuuugcucugug

SEQ ID NO: 36320 - RNA, 19 nt, Artificial Sequence
  Description of Artificial Sequence: Synthetic oligonucleotide
auaaagcccgcucuggaaa

SEQ ID NO: 36321 - RNA, 19 nt, Artificial Sequence
  Description of Artificial Sequence: Synthetic oligonucleotide
agaaugugaaggauaacga

SEQ ID NO: 36322 - RNA, 19 nt, Artificial Sequence
  Description of Artificial Sequence: Synthetic oligonucleotide
uccgaggcaauuugccggg

SEQ ID NO: 36323 - RNA, 19 nt, Artificial Sequence
  Description of Artificial Sequence: Synthetic oligonucleotide
gauuuaaccaugggcgaug

SEQ ID NO: 36324 - RNA, 19 nt, Artificial Sequence
  Description of Artificial Sequence: Synthetic oligonucleotide
guuccuaaguagcuuugcc

SEQ ID NO: 36325 - RNA, 19 nt, Artificial Sequence
  Description of Artificial Sequence: Synthetic oligonucleotide
ggcaagguuaaauuaccag

SEQ ID NO: 36326 - RNA, 19 nt, Artificial Sequence
  Description of Artificial Sequence: Synthetic oligonucleotide
ggauuuauccacaagaugu

SEQ ID NO: 36327 - RNA, 19 nt, Artificial Sequence
  Description of Artificial Sequence: Synthetic oligonucleotide
agaucagucgucacuauca

SEQ ID NO: 36328 - RNA, 19 nt, Artificial Sequence
  Description of Artificial Sequence: Synthetic oligonucleotide
gaugaccucaacccuucug

SEQ ID NO: 36329 - RNA, 19 nt, Artificial Sequence
  Description of Artificial Sequence: Synthetic oligonucleotide
uacuacagcaaggggauac

SEQ ID NO: 36330 - RNA, 19 nt, Artificial Sequence
  Description of Artificial Sequence: Synthetic oligonucleotide
aggaaucaugauccacugg

SEQ ID NO: 36331 - RNA, 19 nt, Artificial Sequence
  Description of Artificial Sequence: Synthetic oligonucleotide
ugaucauaacgcuggcaga

SEQ ID NO: 36332 - RNA, 19 nt, Artificial Sequence
  Description of Artificial Sequence: Synthetic oligonucleotide
cauaccugugagaagacaa

SEQ ID NO: 36333 - RNA, 19 nt, Artificial Sequence
  Description of Artificial Sequence: Synthetic oligonucleotide
ucauaggaggacagaauuu

SEQ ID NO: 36334 - RNA, 19 nt, Artificial Sequence
  Description of Artificial Sequence: Synthetic oligonucleotide
uaggauccuccauaagccc

SEQ ID NO: 36335 - RNA, 19 nt, Artificial Sequence
  Description of Artificial Sequence: Synthetic oligonucleotide
caugguacaccuugguauc

SEQ ID NO: 36336 - RNA, 19 nt, Artificial Sequence
  Description of Artificial Sequence: Synthetic oligonucleotide
uaggaugcaauuaguccaa

SEQ ID NO: 36337 - RNA, 19 nt, Artificial Sequence
  Description of Artificial Sequence: Synthetic oligonucleotide
acuaaagguaaaaccgcag

SEQ ID NO: 36338 - RNA, 19 nt, Artificial Sequence
  Description of Artificial Sequence: Synthetic oligonucleotide
ccaaguaggaugcaauuag

SEQ ID NO: 36339 - RNA, 19 nt, Artificial Sequence
  Description of Artificial Sequence: Synthetic oligonucleotide
ucacuagggcuuuauaauu

SEQ ID NO: 36340 - RNA, 19 nt, Artificial Sequence
  Description of Artificial Sequence: Synthetic oligonucleotide
agaugugaucagcaagugu

SEQ ID NO: 36341 - RNA, 19 nt, Artificial Sequence
  Description of Artificial Sequence: Synthetic oligonucleotide
caugcgaucgguguuggug

SEQ ID NO: 36342 - RNA, 19 nt, Artificial Sequence
  Description of Artificial Sequence: Synthetic oligonucleotide
acaacauacccaugcagua

SEQ ID NO: 36343 - RNA, 19 nt, Artificial Sequence
  Description of Artificial Sequence: Synthetic oligonucleotide
cugggaccgauagugaugc

SEQ ID NO: 36344 - RNA, 19 nt, Artificial Sequence
  Description of Artificial Sequence: Synthetic oligonucleotide
gguaaucaccuuccgaaug

SEQ ID NO: 36345 - RNA, 19 nt, Artificial Sequence
  Description of Artificial Sequence: Synthetic oligonucleotide
uguagcgacuugauguuuu

SEQ ID NO: 36346 - RNA, 19 nt, Artificial Sequence
  Description of Artificial Sequence: Synthetic oligonucleotide
caaugguggcugaaagacc

SEQ ID NO: 36347 - RNA, 19 nt, Artificial Sequence
  Description of Artificial Sequence: Synthetic oligonucleotide
cuauggaccggauagucaa

SEQ ID NO: 36348 - RNA, 19 nt, Artificial Sequence
  Description of Artificial Sequence: Synthetic oligonucleotide
agcuauggaccggauaguc

SEQ ID NO: 36349 - RNA, 19 nt, Artificial Sequence
  Description of Artificial Sequence: Synthetic oligonucleotide
caacacguugaaaucuuuc

SEQ ID NO: 36350 - RNA, 19 nt, Artificial Sequence
  Description of Artificial Sequence: Synthetic oligonucleotide
cuccguuuuccauaauuuc

SEQ ID NO: 36351 - RNA, 19 nt, Artificial Sequence
  Description of Artificial Sequence: Synthetic oligonucleotide
acucacaauaugacaguuc

SEQ ID NO: 36352 - RNA, 19 nt, Artificial Sequence
  Description of Artificial Sequence: Synthetic oligonucleotide
uguagcuauggaccggaua

SEQ ID NO: 36353 - RNA, 19 nt, Artificial Sequence
  Description of Artificial Sequence: Synthetic oligonucleotide
uaaagcccgcucuggaaac

SEQ ID NO: 36354 - RNA, 19 nt, Artificial Sequence
  Description of Artificial Sequence: Synthetic oligonucleotide
ucacuaggugcuucauacc

SEQ ID NO: 36355 - RNA, 19 nt, Artificial Sequence
  Description of Artificial Sequence: Synthetic oligonucleotide
aaaugcgguucuguugaug

SEQ ID NO: 36356 - RNA, 19 nt, Artificial Sequence
  Description of Artificial Sequence: Synthetic oligonucleotide
aaaguauacugaacagaau

SEQ ID NO: 36357 - RNA, 19 nt, Artificial Sequence
  Description of Artificial Sequence: Synthetic oligonucleotide
ucuacccgguccauacucu

SEQ ID NO: 36358 - RNA, 19 nt, Artificial Sequence
  Description of Artificial Sequence: Synthetic oligonucleotide
uuuccuccggggauuauuu

SEQ ID NO: 36359 - RNA, 19 nt, Artificial Sequence
  Description of Artificial Sequence: Synthetic oligonucleotide
ugaccucaacccuucuggc

SEQ ID NO: 36360 - RNA, 19 nt, Artificial Sequence
  Description of Artificial Sequence: Synthetic oligonucleotide
gaaacuggcuccaggcgug

SEQ ID NO: 36361 - RNA, 19 nt, Artificial Sequence
  Description of Artificial Sequence: Synthetic oligonucleotide
agaucgagaaucaguccuc

SEQ ID NO: 36362 - RNA, 19 nt, Artificial Sequence
  Description of Artificial Sequence: Synthetic oligonucleotide
agaauacacuacugaggca

SEQ ID NO: 36363 - RNA, 19 nt, Artificial Sequence
  Description of Artificial Sequence: Synthetic oligonucleotide
ugaucagucgauggguccu

SEQ ID NO: 36364 - RNA, 19 nt, Artificial Sequence
  Description of Artificial Sequence: Synthetic oligonucleotide
uucauaccugugagaagac

SEQ ID NO: 36365 - RNA, 19 nt, Artificial Sequence
  Description of Artificial Sequence: Synthetic oligonucleotide
uccuccggggauuauuuuc

SEQ ID NO: 36366 - RNA, 19 nt, Artificial Sequence
  Description of Artificial Sequence: Synthetic oligonucleotide
agagcgauagucagggacu

SEQ ID NO: 36367 - RNA, 19 nt, Artificial Sequence
  Description of Artificial Sequence: Synthetic oligonucleotide
gauacuacagcaaggggau

SEQ ID NO: 36368 - RNA, 19 nt, Artificial Sequence
  Description of Artificial Sequence: Synthetic oligonucleotide
gguaaccugaacuugacau

SEQ ID NO: 36369 - RNA, 19 nt, Artificial Sequence
  Description of Artificial Sequence: Synthetic oligonucleotide
ugguagucuucccucgggu

SEQ ID NO: 36370 - RNA, 19 nt, Artificial Sequence
  Description of Artificial Sequence: Synthetic oligonucleotide
gaccgauagugaugcaaug

SEQ ID NO: 36371 - RNA, 19 nt, Artificial Sequence
  Description of Artificial Sequence: Synthetic oligonucleotide
uccaaguaggaugcaauua

SEQ ID NO: 36372 - RNA, 19 nt, Artificial Sequence
  Description of Artificial Sequence: Synthetic oligonucleotide
ugauuuaaccaugggcgau

SEQ ID NO: 36373 - RNA, 19 nt, Artificial Sequence
  Description of Artificial Sequence: Synthetic oligonucleotide
gcaguucaacuuuugggcc

SEQ ID NO: 36374 - RNA, 19 nt, Artificial Sequence
  Description of Artificial Sequence: Synthetic oligonucleotide
uucauacugccgagugggc

SEQ ID NO: 36375 - RNA, 19 nt, Artificial Sequence
  Description of Artificial Sequence: Synthetic oligonucleotide
cagaggaguucaacuuacg

SEQ ID NO: 36376 - RNA, 19 nt, Artificial Sequence
  Description of Artificial Sequence: Synthetic oligonucleotide
uuuucauggucaguccaaa

SEQ ID NO: 36377 - RNA, 19 nt, Artificial Sequence
  Description of Artificial Sequence: Synthetic oligonucleotide
ugugcacagaucagucguc

SEQ ID NO: 36378 - RNA, 19 nt, Artificial Sequence
  Description of Artificial Sequence: Synthetic oligonucleotide
aaggaaggucgucuucgaa

SEQ ID NO: 36379 - RNA, 19 nt, Artificial Sequence
  Description of Artificial Sequence: Synthetic oligonucleotide
guaaucaccuuccgaaugu

SEQ ID NO: 36380 - RNA, 19 nt, Artificial Sequence
  Description of Artificial Sequence: Synthetic oligonucleotide
ucauaccugugagaagaca

SEQ ID NO: 36381 - RNA, 19 nt, Artificial Sequence
  Description of Artificial Sequence: Synthetic oligonucleotide
agagugauuuaaagacauc

SEQ ID NO: 36382 - RNA, 19 nt, Artificial Sequence
  Description of Artificial Sequence: Synthetic oligonucleotide
ugguaaucaccuuccgaau

SEQ ID NO: 36383 - RNA, 19 nt, Artificial Sequence
  Description of Artificial Sequence: Synthetic oligonucleotide
aucgguguuggugguguac

SEQ ID NO: 36384 - RNA, 19 nt, Artificial Sequence
  Description of Artificial Sequence: Synthetic oligonucleotide
augugaaggauaacgacuu

SEQ ID NO: 36385 - RNA, 19 nt, Artificial Sequence
  Description of Artificial Sequence: Synthetic oligonucleotide
gguauaccucaaauaagcc

SEQ ID NO: 36386 - RNA, 19 nt, Artificial Sequence
  Description of Artificial Sequence: Synthetic oligonucleotide
aaggggcacaugcgaucgg
